United States Patent Application Publication US 2007/0042381 A1 - sequence listing, part 76

SEQ ID NO: 3467739 - RNA, 15 nt, Human
cauuaaaaauggaac

SEQ ID NO: 3467740 - RNA, 15 nt, Human
cauuaaaacugcuuu

SEQ ID NO: 3467741 - RNA, 12 nt, Human
cauuaaaagaaa

SEQ ID NO: 3467742 - RNA, 13 nt, Human
cauuaaaagaaaa

SEQ ID NO: 3467743 - RNA, 14 nt, Human
cauuaaaccugucu

SEQ ID NO: 3467744 - RNA, 23 nt, Human
cauuaaaccugucuccacugugc

SEQ ID NO: 3467745 - RNA, 22 nt, Human
cauuaaacgauuuuuaaaaugu

SEQ ID NO: 3467746 - RNA, 22 nt, Human
cauuaaagcagucacuuuuccu

SEQ ID NO: 3467747 - RNA, 18 nt, Human
cauuaaagcauuuacuuu

SEQ ID NO: 3467748 - RNA, 15 nt, Human
cauuaaagucagaag

SEQ ID NO: 3467749 - RNA, 11 nt, Human
cauuaaauaaa

SEQ ID NO: 3467750 - RNA, 11 nt, Human
cauuaaaugaa

SEQ ID NO: 3467751 - RNA, 14 nt, Human
cauuaaauguuuga

SEQ ID NO: 3467752 - RNA, 22 nt, Human
cauuaaauuacuauagcaaagu

SEQ ID NO: 3467753 - RNA, 18 nt, Human
cauuaaauucacaaacuu

SEQ ID NO: 3467754 - RNA, 13 nt, Human
cauuaacaaauaa

SEQ ID NO: 3467755 - RNA, 16 nt, Human
cauuaacaguuuucca

SEQ ID NO: 3467756 - RNA, 18 nt, Human
cauuaaccgaugcuuuac

SEQ ID NO: 3467757 - RNA, 22 nt, Human
cauuaaccgaugcuuuaccaaa

SEQ ID NO: 3467758 - RNA, 15 nt, Human
cauuaacucauuaga

SEQ ID NO: 3467759 - RNA, 13 nt, Human
cauuaacugcuuc

SEQ ID NO: 3467760 - RNA, 15 nt, Human
cauuaacugcuuccu

SEQ ID NO: 3467761 - RNA, 15 nt, Human
cauuaagaaaaucau

SEQ ID NO: 3467762 - RNA, 22 nt, Human
cauuaagaauguugguuuacuu

SEQ ID NO: 3467763 - RNA, 13 nt, Human
cauuaagcaucac

SEQ ID NO: 3467764 - RNA, 16 nt, Human
cauuaagcccucuucc

SEQ ID NO: 3467765 - RNA, 20 nt, Human
cauuaagcccucuuccauca

SEQ ID NO: 3467766 - RNA, 18 nt, Human
cauuaaggggaagaauga

SEQ ID NO: 3467767 - RNA, 23 nt, Human
cauuaaggggaagaaugaaagcu

SEQ ID NO: 3467768 - RNA, 15 nt, Human
cauuaauacucuuua

SEQ ID NO: 3467769 - RNA, 18 nt, Human
cauuaauagcagccuuuc

SEQ ID NO: 3467770 - RNA, 20 nt, Human
cauuaauagcagccuuucuc

SEQ ID NO: 3467771 - RNA, 17 nt, Human
cauuaauauuugcugac

SEQ ID NO: 3467772 - RNA, 17 nt, Human
cauuaauccacauguuu

SEQ ID NO: 3467773 - RNA, 19 nt, Human
cauuaauccacauguuuca

SEQ ID NO: 3467774 - RNA, 21 nt, Human
cauuaauccacauguuucaga

SEQ ID NO: 3467775 - RNA, 17 nt, Human
cauuaaugccugcuuuu

SEQ ID NO: 3467776 - RNA, 23 nt, Human
cauuaauguuaauucagcacuga

SEQ ID NO: 3467777 - RNA, 13 nt, Human
cauuaauguugau

SEQ ID NO: 3467778 - RNA, 17 nt, Human
cauuaauguugauuucu

SEQ ID NO: 3467779 - RNA, 15 nt, Human
cauuaauguuucuau

SEQ ID NO: 3467780 - RNA, 19 nt, Human
cauuaauuauuauugcugu

SEQ ID NO: 3467781 - RNA, 20 nt, Human
cauuaauuauuauugcuguu

SEQ ID NO: 3467782 - RNA, 21 nt, Human
cauuaauucaggcauauuuua

SEQ ID NO: 3467783 - RNA, 12 nt, Human
cauuaauucuau

SEQ ID NO: 3467784 - RNA, 14 nt, Human
cauuaauuuaaaug

SEQ ID NO: 3467785 - RNA, 18 nt, Human
cauuaauuuaaaugauuu

SEQ ID NO: 3467786 - RNA, 17 nt, Human
cauuacaaguauuuuua

SEQ ID NO: 3467787 - RNA, 22 nt, Human
cauuacagagaggagaaacaca

SEQ ID NO: 3467788 - RNA, 24 nt, Human
cauuacagggaaugccugagugcc

SEQ ID NO: 3467789 - RNA, 21 nt, Human
cauuacagggcacaggccaug

SEQ ID NO: 3467790 - RNA, 11 nt, Human
cauuaccaaaa

SEQ ID NO: 3467791 - RNA, 20 nt, Human
cauuaccaaaauaauaaaaa

SEQ ID NO: 3467792 - RNA, 23 nt, Human
cauuaccaaaauaauaaaaauca

SEQ ID NO: 3467793 - RNA, 12 nt, Human
cauuaccacuca

SEQ ID NO: 3467794 - RNA, 13 nt, Human
cauuaccacucag

SEQ ID NO: 3467795 - RNA, 14 nt, Human
cauuaccacucagg

SEQ ID NO: 3467796 - RNA, 15 nt, Human
cauuaccacucaggc

SEQ ID NO: 3467797 - RNA, 19 nt, Human
cauuacccuucccugcacu

SEQ ID NO: 3467798 - RNA, 17 nt, Human
cauuaccgcguuguaaa

SEQ ID NO: 3467799 - RNA, 15 nt, Human
cauuaccucuuugga

SEQ ID NO: 3467800 - RNA, 17 nt, Human
cauuaccucuuuggaaa

SEQ ID NO: 3467801 - RNA, 20 nt, Human
cauuaccuuacuguggagga

SEQ ID NO: 3467802 - RNA, 22 nt, Human
cauuaccuuuuaccagcuuuua

SEQ ID NO: 3467803 - RNA, 17 nt, Human
cauuacgugagccaggu

SEQ ID NO: 3467804 - RNA, 23 nt, Human
cauuacucaauugauaaacauuu

SEQ ID NO: 3467805 - RNA, 16 nt, Human
cauuacucuuaaggaa

SEQ ID NO: 3467806 - RNA, 18 nt, Human
cauuacucuuguaagauu

SEQ ID NO: 3467807 - RNA, 19 nt, Human
cauuacucuuguaagauuu

SEQ ID NO: 3467808 - RNA, 20 nt, Human
cauuacucuuguaagauuuu

SEQ ID NO: 3467809 - RNA, 23 nt, Human
cauuacuguacaggguuaucugc

SEQ ID NO: 3467810 - RNA, 17 nt, Human
cauuacuuguugccuau

SEQ ID NO: 3467811 - RNA, 18 nt, Human
cauuacuuguugccuaua

SEQ ID NO: 3467812 - RNA, 23 nt, Human
cauuacuuuaccacccccacacc

SEQ ID NO: 3467813 - RNA, 12 nt, Human
cauuagaacuuc

SEQ ID NO: 3467814 - RNA, 18 nt, Human
cauuagaauuaccauuug

SEQ ID NO: 3467815 - RNA, 16 nt, Human
cauuagacuggaacuu

SEQ ID NO: 3467816 - RNA, 20 nt, Human
cauuagacuggaacuugaac

SEQ ID NO: 3467817 - RNA, 23 nt, Human
cauuagagcaggcguucagcuca

SEQ ID NO: 3467818 - RNA, 19 nt, Human
cauuagagcccauuucaau

SEQ ID NO: 3467819 - RNA, 17 nt, Human
cauuagagucaacuaca

SEQ ID NO: 3467820 - RNA, 22 nt, Human
cauuagcaaaaaaaguuguaug

SEQ ID NO: 3467821 - RNA, 16 nt, Human
cauuagcacagauuuu

SEQ ID NO: 3467822 - RNA, 18 nt, Human
cauuagccagauuugucu

SEQ ID NO: 3467823 - RNA, 9 nt, Human
cauuagccu

SEQ ID NO: 3467824 - RNA, 17 nt, Human
cauuagggaugccuccu

SEQ ID NO: 3467825 - RNA, 22 nt, Human
cauuaggugugacugaauuucu

SEQ ID NO: 3467826 - RNA, 18 nt, Human
cauuucauguccauaaaa

SEQ ID NO: 3467827 - RNA, 13 nt, Human
cauuucauuccau

SEQ ID NO: 3467828 - RNA, 16 nt, Human
cauuucauuguaugau

SEQ ID NO: 3467829 - RNA, 18 nt, Human
cauuucauuguaugaugu

SEQ ID NO: 3467830 - RNA, 18 nt, Human
cauuucauuugugccaga

SEQ ID NO: 3467831 - RNA, 21 nt, Human
cauuuccaaaugaaugaccuu

SEQ ID NO: 3467832 - RNA, 20 nt, Human
cauuuccaacaccacagaca

SEQ ID NO: 3467833 - RNA, 12 nt, Human
cauuuccaagca

SEQ ID NO: 3467834 - RNA, 16 nt, Human
cauuuccauguaugca

SEQ ID NO: 3467835 - RNA, 15 nt, Human
cauuuccauugcuua

SEQ ID NO: 3467836 - RNA, 14 nt, Human
cauuucccaucugc

SEQ ID NO: 3467837 - RNA, 14 nt, Human
cauuuccccagggc

SEQ ID NO: 3467838 - RNA, 15 nt, Human
cauuuccccagggca

SEQ ID NO: 3467839 - RNA, 17 nt, Human
cauuuccccagggcacg

SEQ ID NO: 3467840 - RNA, 21 nt, Human
cauuucccccaccccauuucu

SEQ ID NO: 3467841 - RNA, 23 nt, Human
cauuuccuaucaccuauuuccau

SEQ ID NO: 3467842 - RNA, 19 nt, Human
cauuuccuauguaacugca

SEQ ID NO: 3467843 - RNA, 11 nt, Human
cauuuccugcc

SEQ ID NO: 3467844 - RNA, 12 nt, Human
cauuuccugccc

SEQ ID NO: 3467845 - RNA, 13 nt, Human
cauuuccugcccu

SEQ ID NO: 3467846 - RNA, 21 nt, Human
cauuuccuggguggcuacucu

SEQ ID NO: 3467847 - RNA, 15 nt, Human
cauuucgguggcuag

SEQ ID NO: 3467848 - RNA, 21 nt, Human
cauuucgugagccccaucuuc

SEQ ID NO: 3467849 - RNA, 22 nt, Human
cauuucgugagccccaucuuca

SEQ ID NO: 3467850 - RNA, 18 nt, Human
cauuucuaaaggccucuu

SEQ ID NO: 3467851 - RNA, 23 nt, Human
cauuucuaauuauguagcucuuu

SEQ ID NO: 3467852 - RNA, 23 nt, Human
cauuucuacucuuaaguuucuca

SEQ ID NO: 3467853 - RNA, 23 nt, Human
cauuucuauagccaaaaauagcu

SEQ ID NO: 3467854 - RNA, 18 nt, Human
cauuucuauuuauuuacu

SEQ ID NO: 3467855 - RNA, 13 nt, Human
cauuucucacuga

SEQ ID NO: 3467856 - RNA, 12 nt, Human
cauuucucaucc

SEQ ID NO: 3467857 - RNA, 16 nt, Human
cauuucucauguugaa

SEQ ID NO: 3467858 - RNA, 13 nt, Human
cauuucuccagaa

SEQ ID NO: 3467859 - RNA, 15 nt, Human
cauuucuccagaacc

SEQ ID NO: 3467860 - RNA, 20 nt, Human
cauuucuccuuugauaaaau

SEQ ID NO: 3467861 - RNA, 14 nt, Human
cauuucugaagugg

SEQ ID NO: 3467862 - RNA, 16 nt, Human
cauuucugauauagaa

SEQ ID NO: 3467863 - RNA, 23 nt, Human
cauuucuuccacaagagcccagg

SEQ ID NO: 3467864 - RNA, 23 nt, Human
cauuucuucuacaacucauacac

SEQ ID NO: 3467865 - RNA, 12 nt, Human
cauuucuugggc

SEQ ID NO: 3467866 - RNA, 14 nt, Human
cauuucuugggccc

SEQ ID NO: 3467867 - RNA, 15 nt, Human
cauuucuugggcccu

SEQ ID NO: 3467868 - RNA, 18 nt, Human
cauuucuugggcccuccu

SEQ ID NO: 3467869 - RNA, 21 nt, Human
cauuucuuuucuuuuuacaua

SEQ ID NO: 3467870 - RNA, 18 nt, Human
cauuucuuuuuaaaaaaa

SEQ ID NO: 3467871 - RNA, 20 nt, Human
cauuugaaaauuuugauguu

SEQ ID NO: 3467872 - RNA, 19 nt, Human
cauuugaaguguaccugug

SEQ ID NO: 3467873 - RNA, 23 nt, Human
cauuugaaugcauuuuguuuggu

SEQ ID NO: 3467874 - RNA, 19 nt, Human
cauuugacccuugcuguga

SEQ ID NO: 3467875 - RNA, 15 nt, Human
cauuugagaaaugca

SEQ ID NO: 3467876 - RNA, 17 nt, Human
cauuugagaaaugcaua

SEQ ID NO: 3467877 - RNA, 22 nt, Human
cauuugagaaaugcauauugua

SEQ ID NO: 3467878 - RNA, 19 nt, Human
cauuugaggucuguucuuu

SEQ ID NO: 3467879 - RNA, 19 nt, Human
cauuugauaccccugggga

SEQ ID NO: 3467880 - RNA, 15 nt, Human
cauuugauucugugu

SEQ ID NO: 3467881 - RNA, 18 nt, Human
cauuugcaauaacagcug

SEQ ID NO: 3467882 - RNA, 17 nt, Human
cauuugcacccuccgcc

SEQ ID NO: 3467883 - RNA, 13 nt, Human
cauuugcauuugu

SEQ ID NO: 3467884 - RNA, 12 nt, Human
cauuugccuauu

SEQ ID NO: 3467885 - RNA, 17 nt, Human
cauuugccuauucccac

SEQ ID NO: 3467886 - RNA, 19 nt, Human
cauuugccuugcagaacug

SEQ ID NO: 3467887 - RNA, 14 nt, Human
cauuugccuugcug

SEQ ID NO: 3467888 - RNA, 21 nt, Human
cauuugcgaaugguuccauuc

SEQ ID NO: 3467889 - RNA, 21 nt, Human
cauuugcguuccaugaugcug

SEQ ID NO: 3467890 - RNA, 18 nt, Human
cauuugcuacuguuguaa

SEQ ID NO: 3467891 - RNA, 14 nt, Human
cauuugcucaugga

SEQ ID NO: 3467892 - RNA, 15 nt, Human
cauuugcucauggaa

SEQ ID NO: 3467893 - RNA, 13 nt, Human
cauuugcugaaua

SEQ ID NO: 3467894 - RNA, 20 nt, Human
cauuugcugaauagcuacua

SEQ ID NO: 3467895 - RNA, 17 nt, Human
cauuuggaaaucuuuaa

SEQ ID NO: 3467896 - RNA, 22 nt, Human
cauuuggaaaucuuuaaaaaaa

SEQ ID NO: 3467897 - RNA, 17 nt, Human
cauuuggaauacuuuuu

SEQ ID NO: 3467898 - RNA, 23 nt, Human
cauuuggaauuuuugcuugacuu

SEQ ID NO: 3467899 - RNA, 21 nt, Human
cauuuggagacacaacuauuu

SEQ ID NO: 3467900 - RNA, 22 nt, Human
cauuuggaggaaaaaaagcaug

SEQ ID NO: 3467901 - RNA, 21 nt, Human
cauuuggauccuguguggaga

SEQ ID NO: 3467902 - RNA, 15 nt, Human
cauuuggauuggaug

SEQ ID NO: 3467903 - RNA, 18 nt, Human
cauuuggcaucccugggc

SEQ ID NO: 3467904 - RNA, 18 nt, Human
cauuugggagacauguga

SEQ ID NO: 3467905 - RNA, 17 nt, Human
cauuugggguaauacuu

SEQ ID NO: 3467906 - RNA, 15 nt, Human
cauuuggguaaauca

SEQ ID NO: 3467907 - RNA, 14 nt, Human
cauuuggguccagg

SEQ ID NO: 3467908 - RNA, 16 nt, Human
cauuuggguccaggag

SEQ ID NO: 3467909 - RNA, 18 nt, Human
cauuuggguccaggagga

SEQ ID NO: 3467910 - RNA, 20 nt, Human
cauuuggguugguuccaagu

SEQ ID NO: 3467911 - RNA, 20 nt, Human
cauuuggucaagauuuugaa

SEQ ID NO: 3467912 - RNA, 12 nt, Human
cauuuggugguu

SEQ ID NO: 3467913 - RNA, 19 nt, Human
cauuugguucuaagaaacc

SEQ ID NO: 3467914 - RNA, 20 nt, Human
cauuugguuugauuuucccu

SEQ ID NO: 3467915 - RNA, 14 nt, Human
cauuuguaauaaag

SEQ ID NO: 3467916 - RNA, 19 nt, Human
cauuuguaauuaaauuaug

SEQ ID NO: 3467917 - RNA, 12 nt, Human
cauuuguaauuu

SEQ ID NO: 3467918 - RNA, 20 nt, Human
cauuuguacagaauuuugga

SEQ ID NO: 3467919 - RNA, 22 nt, Human
cauuuguacagaauuuuggaag

SEQ ID NO: 3467920 - RNA, 14 nt, Human
cauuuguauguugu

SEQ ID NO: 3467921 - RNA, 11 nt, Human
cauuuguauuu

SEQ ID NO: 3467922 - RNA, 20 nt, Human
cauuugucauuuucauuagc

SEQ ID NO: 3467923 - RNA, 16 nt, Human
cauuugucccaagugc

SEQ ID NO: 3467924 - RNA, 18 nt, Human
cauuugucccaagugcca

SEQ ID NO: 3467925 - RNA, 18 nt, Human
cauuugucucuacuuuuc

SEQ ID NO: 3467926 - RNA, 14 nt, Human
cauuugugaaauga

SEQ ID NO: 3467927 - RNA, 18 nt, Human
cauuugugauauauguau

SEQ ID NO: 3467928 - RNA, 23 nt, Human
cauuuguggcagucccuuauaau

SEQ ID NO: 3467929 - RNA, 22 nt, Human
cauuuguggguuuuuauuuccu

SEQ ID NO: 3467930 - RNA, 19 nt, Human
cauuugugugugugcaagu

SEQ ID NO: 3467931 - RNA, 16 nt, Human
cauuuguuaauaucac

SEQ ID NO: 3467932 - RNA, 22 nt, Human
cauuuguuaauaucacucauua

SEQ ID NO: 3467933 - RNA, 22 nt, Human
cauuuguucacugaaggugauu

SEQ ID NO: 3467934 - RNA, 18 nt, Human
cauuuguucauauuaaga

SEQ ID NO: 3467935 - RNA, 16 nt, Human
cauuuguuggaaugaa

SEQ ID NO: 3467936 - RNA, 18 nt, Human
cauuuguugugaugucuu

SEQ ID NO: 3467937 - RNA, 14 nt, Human
cauuuguuguuuga

SEQ ID NO: 3467938 - RNA, 20 nt, Human
cauuuguuuacauuugaugc

SEQ ID NO: 3467939 - RNA, 18 nt, Human
cauuuguuuauguaauuu

SEQ ID NO: 3467940 - RNA, 15 nt, Human
cauuuguuucuacuu

SEQ ID NO: 3467941 - RNA, 23 nt, Human
cauuuguuucuuucucugaggac

SEQ ID NO: 3467942 - RNA, 20 nt, Human
cauuuuaaaaaaaaaggcau

SEQ ID NO: 3467943 - RNA, 13 nt, Human
cauuuuaaacaaa

SEQ ID NO: 3467944 - RNA, 13 nt, Human
cauuuuaaauaaa

SEQ ID NO: 3467945 - RNA, 18 nt, Human
cauuuuaaauaaaagaaa

SEQ ID NO: 3467946 - RNA, 15 nt, Human
cauuuuaaauggaca

SEQ ID NO: 3467947 - RNA, 12 nt, Human
cauuuuaacaag

SEQ ID NO: 3467948 - RNA, 20 nt, Human
cauuuuaacaagaagaugaa

SEQ ID NO: 3467949 - RNA, 12 nt, Human
cauuuuaaugua

SEQ ID NO: 3467950 - RNA, 14 nt, Human
cauuuuaauguaaa

SEQ ID NO: 3467951 - RNA, 22 nt, Human
cauuuuaauuuauuaauugcuu

SEQ ID NO: 3467952 - RNA, 23 nt, Human
cauuuuaauuuauuaauugcuuu

SEQ ID NO: 3467953 - RNA, 20 nt, Human
cauuuuacagagaaagaaau

SEQ ID NO: 3467954 - RNA, 19 nt, Human
cauuuuacaguuacuuuuc

SEQ ID NO: 3467955 - RNA, 11 nt, Human
cauuuuauaaa

SEQ ID NO: 3467956 - RNA, 15 nt, Human
cauuuuauaaagugc

SEQ ID NO: 3467957 - RNA, 23 nt, Human
cauuuuauaaaucgcuuuugaua

SEQ ID NO: 3467958 - RNA, 17 nt, Human
cauuuuauagacacccu

SEQ ID NO: 3467959 - RNA, 12 nt, Human
cauuuuauggug

SEQ ID NO: 3467960 - RNA, 21 nt, Human
cauuuuauuaagcuuuuugga

SEQ ID NO: 3467961 - RNA, 21 nt, Human
cauuuuauuuuauuaugcaug

SEQ ID NO: 3467962 - RNA, 19 nt, Human
cauuuucagacugcuuuaa

SEQ ID NO: 3467963 - RNA, 19 nt, Human
cauuuucagauucaggcau

SEQ ID NO: 3467964 - RNA, 21 nt, Human
cauuuucagauucaggcauuu

SEQ ID NO: 3467965 - RNA, 14 nt, Human
cauuuucauuccua

SEQ ID NO: 3467966 - RNA, 14 nt, Human
cauuuuccucugcu

SEQ ID NO: 3467967 - RNA, 15 nt, Human
cauuuuccucugcuu

SEQ ID NO: 3467968 - RNA, 13 nt, Human
cauuuucuagaua

SEQ ID NO: 3467969 - RNA, 17 nt, Human
cauuuucuagauacaau

SEQ ID NO: 3467970 - RNA, 13 nt, Human
ccagaacccauuu

SEQ ID NO: 3467971 - RNA, 15 nt, Human
ccagaaccuguccuu

SEQ ID NO: 3467972 - RNA, 19 nt, Human
ccagaacucacuggggccu

SEQ ID NO: 3467973 - RNA, 17 nt, Human
ccagaacucugccugcc

SEQ ID NO: 3467974 - RNA, 20 nt, Human
ccagaacucugccugcccuu

SEQ ID NO: 3467975 - RNA, 14 nt, Human
ccagaacucuuccu

SEQ ID NO: 3467976 - RNA, 12 nt, Human
ccagaacuggac

SEQ ID NO: 3467977 - RNA, 17 nt, Human
ccagaacuuagccuuua

SEQ ID NO: 3467978 - RNA, 19 nt, Human
ccagaagaagagaagcugc

SEQ ID NO: 3467979 - RNA, 20 nt, Human
ccagaagaagagaagcugcu

SEQ ID NO: 3467980 - RNA, 18 nt, Human
ccagaagauccccucagg

SEQ ID NO: 3467981 - RNA, 24 nt, Human
ccagaagauccccucaggacugca

SEQ ID NO: 3467982 - RNA, 18 nt, Human
ccagaagaugaacagacu

SEQ ID NO: 3467983 - RNA, 13 nt, Human
ccagaagaugacu

SEQ ID NO: 3467984 - RNA, 16 nt, Human
ccagaagaugacugag

SEQ ID NO: 3467985 - RNA, 15 nt, Human
ccagaagcuccccca

SEQ ID NO: 3467986 - RNA, 16 nt, Human
ccagaagcucccccag

SEQ ID NO: 3467987 - RNA, 20 nt, Human
ccagaagcugagcaccaggg

SEQ ID NO: 3467988 - RNA, 16 nt, Human
ccagaagcuuccauag

SEQ ID NO: 3467989 - RNA, 18 nt, Human
ccagaaggagacaggcag

SEQ ID NO: 3467990 - RNA, 22 nt, Human
ccagaaggcauaucagucucug

SEQ ID NO: 3467991 - RNA, 15 nt, Human
ccagaaguagcuuug

SEQ ID NO: 3467992 - RNA, 20 nt, Human
ccagaagucaagcccagcca

SEQ ID NO: 3467993 - RNA, 23 nt, Human
ccagaaguuguggauuucaguuu

SEQ ID NO: 3467994 - RNA, 22 nt, Human
ccagaaguuugagaucagccug

SEQ ID NO: 3467995 - RNA, 23 nt, Human
ccagaaguuugagaucagccugg

SEQ ID NO: 3467996 - RNA, 22 nt, Human
ccagaauaaguuauugcaguuu

SEQ ID NO: 3467997 - RNA, 23 nt, Human
ccagaauaaguuauugcaguuua

SEQ ID NO: 3467998 - RNA, 15 nt, Human
ccagaauacugaugg

SEQ ID NO: 3467999 - RNA, 21 nt, Human
ccagaauacugauggaauuuu

SEQ ID NO: 3468000 - RNA, 23 nt, Human
ccagaauacugauggaauuuuuu

SEQ ID NO: 3468001 - RNA, 15 nt, Human
ccagaaucccagccg

SEQ ID NO: 3468002 - RNA, 21 nt, Human
ccagaaucccucuacauggac

SEQ ID NO: 3468003 - RNA, 16 nt, Human
ccagaaucuaaagcca

SEQ ID NO: 3468004 - RNA, 16 nt, Human
ccagaaugagacaucc

SEQ ID NO: 3468005 - RNA, 16 nt, Human
ccagaaugcuuuagga

SEQ ID NO: 3468006 - RNA, 23 nt, Human
ccagaaugucagauuccuuuccc

SEQ ID NO: 3468007 - RNA, 14 nt, Human
ccagaauuauuuuu

SEQ ID NO: 3468008 - RNA, 21 nt, Human
ccagaauucccagcugucugu

SEQ ID NO: 3468009 - RNA, 16 nt, Human
ccagaauuuaaaccua

SEQ ID NO: 3468010 - RNA, 12 nt, Human
ccagaauuuccc

SEQ ID NO: 3468011 - RNA, 13 nt, Human
ccagaauuuggaa

SEQ ID NO: 3468012 - RNA, 23 nt, Human
ccagaauuuggaaauccuaguuu

SEQ ID NO: 3468013 - RNA, 22 nt, Human
ccagacaaggaaauacccuucu

SEQ ID NO: 3468014 - RNA, 18 nt, Human
ccagacacagaagaggcu

SEQ ID NO: 3468015 - RNA, 15 nt, Human
ccagacacaggcccu

SEQ ID NO: 3468016 - RNA, 20 nt, Human
ccagacacauguccaagaag

SEQ ID NO: 3468017 - RNA, 13 nt, Human
ccagacacucugc

SEQ ID NO: 3468018 - RNA, 19 nt, Human
ccagacagacaucucugca

SEQ ID NO: 3468019 - RNA, 12 nt, Human
ccagacagaggg

SEQ ID NO: 3468020 - RNA, 15 nt, Human
ccagacagaggguca

SEQ ID NO: 3468021 - RNA, 12 nt, Human
ccagacagccug

SEQ ID NO: 3468022 - RNA, 16 nt, Human
ccagacagugugcugu

SEQ ID NO: 3468023 - RNA, 14 nt, Human
ccagacaucaacag

SEQ ID NO: 3468024 - RNA, 20 nt, Human
ccagacaugccacaaggacu

SEQ ID NO: 3468025 - RNA, 23 nt, Human
ccagacauguggugggacaggga

SEQ ID NO: 3468026 - RNA, 23 nt, Human
ccagaccaacguuacucagggcu

SEQ ID NO: 3468027 - RNA, 13 nt, Human
ccagaccagagcu

SEQ ID NO: 3468028 - RNA, 15 nt, Human
ccagaccagauuaaa

SEQ ID NO: 3468029 - RNA, 14 nt, Human
ccagaccauggaca

SEQ ID NO: 3468030 - RNA, 21 nt, Human
ccagaccauugucucagagca

SEQ ID NO: 3468031 - RNA, 16 nt, Human
ccagacccccaccccu

SEQ ID NO: 3468032 - RNA, 22 nt, Human
ccagacccccaccccuucccca

SEQ ID NO: 3468033 - RNA, 14 nt, Human
ccagacccccagca

SEQ ID NO: 3468034 - RNA, 18 nt, Human
ccagacccccuggagacu

SEQ ID NO: 3468035 - RNA, 18 nt, Human
ccagaccccucuggccag

SEQ ID NO: 3468036 - RNA, 19 nt, Human
ccagaccccucuggccagg

SEQ ID NO: 3468037 - RNA, 20 nt, Human
ccagaccccucuggccagga

SEQ ID NO: 3468038 - RNA, 21 nt, Human
ccagaccccucuggccaggau

SEQ ID NO: 3468039 - RNA, 14 nt, Human
ccagaccccuggcu

SEQ ID NO: 3468040 - RNA, 24 nt, Human
ccagaccccuggcuuuucacugcu

SEQ ID NO: 3468041 - RNA, 15 nt, Human
ccagacccggcugcg

SEQ ID NO: 3468042 - RNA, 17 nt, Human
ccagacccggcugcgug

SEQ ID NO: 3468043 - RNA, 15 nt, Human
ccagaccugagcucc

SEQ ID NO: 3468044 - RNA, 13 nt, Human
ccagaccugaggc

SEQ ID NO: 3468045 - RNA, 15 nt, Human
ccagaccugauccug

SEQ ID NO: 3468046 - RNA, 16 nt, Human
ccagaccugauccugg

SEQ ID NO: 3468047 - RNA, 17 nt, Human
ccagaccugauccugga

SEQ ID NO: 3468048 - RNA, 18 nt, Human
ccagaccugauccuggag

SEQ ID NO: 3468049 - RNA, 15 nt, Human
ccagaccuucuagga

SEQ ID NO: 3468050 - RNA, 23 nt, Human
ccagacgcacgugggucuucagg

SEQ ID NO: 3468051 - RNA, 16 nt, Human
ccagacggcacccacc

SEQ ID NO: 3468052 - RNA, 17 nt, Human
ccagacguaggggaggg

SEQ ID NO: 3468053 - RNA, 17 nt, Human
ccagacuacuauuuucu

SEQ ID NO: 3468054 - RNA, 22 nt, Human
ccagacuagauguaguauuuuu

SEQ ID NO: 3468055 - RNA, 21 nt, Human
ccagacucguucuucugggaa

SEQ ID NO: 3468056 - RNA, 13 nt, Human
ccagacugcaggu

SEQ ID NO: 3468057 - RNA, 22 nt, Human
ccagacugcuuccaauuuucug

SEQ ID NO: 3468058 - RNA, 18 nt, Human
ccagacuguggagaaaua

SEQ ID NO: 3468059 - RNA, 17 nt, Human
ccagacuguguauucau

SEQ ID NO: 3468060 - RNA, 23 nt, Human
ccagacuucccacggcuccucga

SEQ ID NO: 3468061 - RNA, 14 nt, Human
ccagacuuccuuga

SEQ ID NO: 3468062 - RNA, 15 nt, Human
ccagacuuccuugag

SEQ ID NO: 3468063 - RNA, 18 nt, Human
ccagacuugggaggaugu

SEQ ID NO: 3468064 - RNA, 18 nt, Human
ccagagaaaaagggaggg

SEQ ID NO: 3468065 - RNA, 19 nt, Human
ccagagaaaggggagccca

SEQ ID NO: 3468066 - RNA, 12 nt, Human
ccagagaagcua

SEQ ID NO: 3468067 - RNA, 15 nt, Human
ccagagaagugacag

SEQ ID NO: 3468068 - RNA, 16 nt, Human
ccagagaagugacagg

SEQ ID NO: 3468069 - RNA, 14 nt, Human
ccagagacaagacu

SEQ ID NO: 3468070 - RNA, 18 nt, Human
ccagagacacaagccuuc

SEQ ID NO: 3468071 - RNA, 12 nt, Human
ccagagacagga

SEQ ID NO: 3468072 - RNA, 17 nt, Human
ccagagacauacuugaa

SEQ ID NO: 3468073 - RNA, 18 nt, Human
ccagagacauacuugaag

SEQ ID NO: 3468074 - RNA, 23 nt, Human
ccagagacauacuugaagggcca

SEQ ID NO: 3468075 - RNA, 20 nt, Human
ccagagaccaggcugugucc

SEQ ID NO: 3468076 - RNA, 15 nt, Human
ccagagacucagagg

SEQ ID NO: 3468077 - RNA, 22 nt, Human
ccagagagaagagccccacucu

SEQ ID NO: 3468078 - RNA, 19 nt, Human
ccagagagagaagugcccc

SEQ ID NO: 3468079 - RNA, 21 nt, Human
ccagagagagaagugccccug

SEQ ID NO: 3468080 - RNA, 12 nt, Human
ccagagagcccg

SEQ ID NO: 3468081 - RNA, 15 nt, Human
ccagagagcccgagg

SEQ ID NO: 3468082 - RNA, 14 nt, Human
ccagagaguccucu

SEQ ID NO: 3468083 - RNA, 14 nt, Human
ccagagaguggcuc

SEQ ID NO: 3468084 - RNA, 16 nt, Human
ccagagaguggcuccu

SEQ ID NO: 3468085 - RNA, 14 nt, Human
ccagagaugccucc

SEQ ID NO: 3468086 - RNA, 15 nt, Human
ccagagcaaccucuc

SEQ ID NO: 3468087 - RNA, 22 nt, Human
ccagagcaacgaccagggccga

SEQ ID NO: 3468088 - RNA, 19 nt, Human
ccagagcacagaucuguuu

SEQ ID NO: 3468089 - RNA, 17 nt, Human
ccagagcaccugcuguc

SEQ ID NO: 3468090 - RNA, 20 nt, Human
ccagagcaccugcugucugg

SEQ ID NO: 3468091 - RNA, 22 nt, Human
ccagagcacuggguugcagggg

SEQ ID NO: 3468092 - RNA, 15 nt, Human
ccagagcagaugcag

SEQ ID NO: 3468093 - RNA, 16 nt, Human
ccagagcagaugcaga

SEQ ID NO: 3468094 - RNA, 20 nt, Human
ccagagcagaugcagagagc

SEQ ID NO: 3468095 - RNA, 12 nt, Human
ccagagcaggag

SEQ ID NO: 3468096 - RNA, 14 nt, Human
ccagagcagggugu

SEQ ID NO: 3468097 - RNA, 18 nt, Human
ccagagcauuccagucag

SEQ ID NO: 3468098 - RNA, 20 nt, Human
ccagagcauuuccaacacca

SEQ ID NO: 3468099 - RNA, 21 nt, Human
ccagagcauuuccaacaccac

SEQ ID NO: 3468100 - RNA, 14 nt, Human
ccagagccacaguu

SEQ ID NO: 3468101 - RNA, 11 nt, Human
ccagagccagg

SEQ ID NO: 3468102 - RNA, 12 nt, Human
ccagagccaggg

SEQ ID NO: 3468103 - RNA, 22 nt, Human
ccagagccaggggggugaggag

SEQ ID NO: 3468104 - RNA, 21 nt, Human
ccagagccauggacucuacac

SEQ ID NO: 3468105 - RNA, 15 nt, Human
ccagagcccacucca

SEQ ID NO: 3468106 - RNA, 11 nt, Human
ccagagcccag

SEQ ID NO: 3468107 - RNA, 12 nt, Human
ccagagcccagc

SEQ ID NO: 3468108 - RNA, 14 nt, Human
ccagagcccagcuc

SEQ ID NO: 3468109 - RNA, 17 nt, Human
ccagagcccagcuccaa

SEQ ID NO: 3468110 - RNA, 13 nt, Human
ccagagccccaca

SEQ ID NO: 3468111 - RNA, 21 nt, Human
ccagagccccuccuccagccc

SEQ ID NO: 3468112 - RNA, 23 nt, Human
ccagagccucaaaugagaaaaug

SEQ ID NO: 3468113 - RNA, 11 nt, Human
ccagagccugg

SEQ ID NO: 3468114 - RNA, 19 nt, Human
ccagagccuggcugcccau

SEQ ID NO: 3468115 - RNA, 22 nt, Human
ccagcacugaggaagaacgggg

SEQ ID NO: 3468116 - RNA, 22 nt, Human
ccagcacugcuugaggaaaaca

SEQ ID NO: 3468117 - RNA, 17 nt, Human
ccagcacuuccauggga

SEQ ID NO: 3468118 - RNA, 15 nt, Human
ccagcacuuggagag

SEQ ID NO: 3468119 - RNA, 11 nt, Human
ccagcacuuug

SEQ ID NO: 3468120 - RNA, 14 nt, Human
ccagcacuuuggga

SEQ ID NO: 3468121 - RNA, 19 nt, Human
ccagcacuuugggaggcca

SEQ ID NO: 3468122 - RNA, 23 nt, Human
ccagcacuuugggaggccaagga

SEQ ID NO: 3468123 - RNA, 16 nt, Human
ccagcagaaaugccuu

SEQ ID NO: 3468124 - RNA, 15 nt, Human
ccagcagaagacaaa

SEQ ID NO: 3468125 - RNA, 12 nt, Human
ccagcagacaga

SEQ ID NO: 3468126 - RNA, 16 nt, Human
ccagcagacagagcca

SEQ ID NO: 3468127 - RNA, 20 nt, Human
ccagcagacagagccaggag

SEQ ID NO: 3468128 - RNA, 21 nt, Human
ccagcagacagagccaggaga

SEQ ID NO: 3468129 - RNA, 12 nt, Human
ccagcagagcac

SEQ ID NO: 3468130 - RNA, 13 nt, Human
ccagcagagcacc

SEQ ID NO: 3468131 - RNA, 16 nt, Human
ccagcagaucccagcu

SEQ ID NO: 3468132 - RNA, 17 nt, Human
ccagcagaucccagcuc

SEQ ID NO: 3468133 - RNA, 16 nt, Human
ccagcagauuauucac

SEQ ID NO: 3468134 - RNA, 20 nt, Human
ccagcagcaccugcccuacc

SEQ ID NO: 3468135 - RNA, 23 nt, Human
ccagcagcagcccaagcuucccu

SEQ ID NO: 3468136 - RNA, 12 nt, Human
ccagcagccagc

SEQ ID NO: 3468137 - RNA, 13 nt, Human
ccagcagccagcc

SEQ ID NO: 3468138 - RNA, 16 nt, Human
ccagcagccagcucuc

SEQ ID NO: 3468139 - RNA, 12 nt, Human
ccagcagccugg

SEQ ID NO: 3468140 - RNA, 12 nt, Human
ccagcagcgccu

SEQ ID NO: 3468141 - RNA, 17 nt, Human
ccagcagcgccuuuccc

SEQ ID NO: 3468142 - RNA, 24 nt, Human
ccagcagcggaaccgcccaggauc

SEQ ID NO: 3468143 - RNA, 22 nt, Human
ccagcagcuuuagaaucccagc

SEQ ID NO: 3468144 - RNA, 19 nt, Human
ccagcaggcucucaggcca

SEQ ID NO: 3468145 - RNA, 21 nt, Human
ccagcagggucuuuucaucug

SEQ ID NO: 3468146 - RNA, 15 nt, Human
ccagcaggugcugac

SEQ ID NO: 3468147 - RNA, 17 nt, Human
ccagcagucacuucggc

SEQ ID NO: 3468148 - RNA, 22 nt, Human
ccagcagucucugccuugccuu

SEQ ID NO: 3468149 - RNA, 18 nt, Human
ccagcaguucagagcugc

SEQ ID NO: 3468150 - RNA, 21 nt, Human
ccagcaguucagagcugcccu

SEQ ID NO: 3468151 - RNA, 13 nt, Human
ccagcaguucugu

SEQ ID NO: 3468152 - RNA, 14 nt, Human
ccagcaguucuguu

SEQ ID NO: 3468153 - RNA, 15 nt, Human
ccagcaguuugggag

SEQ ID NO: 3468154 - RNA, 15 nt, Human
ccagcauaaauaucu

SEQ ID NO: 3468155 - RNA, 15 nt, Human
ccagcaucaccugcc

SEQ ID NO: 3468156 - RNA, 17 nt, Human
ccagcaucaccugccug

SEQ ID NO: 3468157 - RNA, 17 nt, Human
ccagcaucacuccccaa

SEQ ID NO: 3468158 - RNA, 13 nt, Human
ccagcaucugggc

SEQ ID NO: 3468159 - RNA, 17 nt, Human
ccagcaucugggccuug

SEQ ID NO: 3468160 - RNA, 21 nt, Human
ccagcaucugggccuuggccu

SEQ ID NO: 3468161 - RNA, 20 nt, Human
ccagcaugcaccacgggccc

SEQ ID NO: 3468162 - RNA, 15 nt, Human
ccagcauggguuagu

SEQ ID NO: 3468163 - RNA, 21 nt, Human
ccagcauuccagccccucugg

SEQ ID NO: 3468164 - RNA, 22 nt, Human
ccagcauuccagccccucuggu

SEQ ID NO: 3468165 - RNA, 14 nt, Human
ccagcauucccagg

SEQ ID NO: 3468166 - RNA, 19 nt, Human
ccagcauucccagguaggc

SEQ ID NO: 3468167 - RNA, 13 nt, Human
ccagcauuccuuu

SEQ ID NO: 3468168 - RNA, 18 nt, Human
ccagcauuuagcuggcca

SEQ ID NO: 3468169 - RNA, 20 nt, Human
ccagcauuuagcuggccaca

SEQ ID NO: 3468170 - RNA, 21 nt, Human
ccagcauuucccuuccuuccu

SEQ ID NO: 3468171 - RNA, 18 nt, Human
ccagccaaacacacagaa

SEQ ID NO: 3468172 - RNA, 19 nt, Human
ccagccaaacccugucuga

SEQ ID NO: 3468173 - RNA, 19 nt, Human
ccagccaaagccuccucca

SEQ ID NO: 3468174 - RNA, 21 nt, Human
ccagccaccccgggcucucug

SEQ ID NO: 3468175 - RNA, 21 nt, Human
ccagccacggacgcuggcucc

SEQ ID NO: 3468176 - RNA, 20 nt, Human
ccagccacucgggaggcuga

SEQ ID NO: 3468177 - RNA, 21 nt, Human
ccagccacucgggaggcugag

SEQ ID NO: 3468178 - RNA, 19 nt, Human
ccagccagaguuccugcgg

SEQ ID NO: 3468179 - RNA, 19 nt, Human
ccagccagauccucuuggu

SEQ ID NO: 3468180 - RNA, 13 nt, Human
ccagccagcagcc

SEQ ID NO: 3468181 - RNA, 15 nt, Human
ccagccagcagccag

SEQ ID NO: 3468182 - RNA, 22 nt, Human
ccagccagcaguucagagcugc

SEQ ID NO: 3468183 - RNA, 14 nt, Human
ccagccagccuggc

SEQ ID NO: 3468184 - RNA, 10 nt, Human
ccagccaggc

SEQ ID NO: 3468185 - RNA, 12 nt, Human
ccagccaggcgg

SEQ ID NO: 3468186 - RNA, 21 nt, Human
ccagccaggcgggcucaagga

SEQ ID NO: 3468187 - RNA, 17 nt, Human
ccagccaggcucugugc

SEQ ID NO: 3468188 - RNA, 18 nt, Human
ccagccaggcucugugcu

SEQ ID NO: 3468189 - RNA, 20 nt, Human
ccagccaggcucugugcuga

SEQ ID NO: 3468190 - RNA, 20 nt, Human
ccagccagugaccugaggaa

SEQ ID NO: 3468191 - RNA, 21 nt, Human
ccagccauacuuaucucucug

SEQ ID NO: 3468192 - RNA, 20 nt, Human
ccagccaucugcccaggggu

SEQ ID NO: 3468193 - RNA, 14 nt, Human
ccagccaugucugc

SEQ ID NO: 3468194 - RNA, 22 nt, Human
ccagcccaaaggggacaggccu

SEQ ID NO: 3468195 - RNA, 24 nt, Human
ccagcccaaaggggacaggccuca

SEQ ID NO: 3468196 - RNA, 12 nt, Human
ccagcccaaguc

SEQ ID NO: 3468197 - RNA, 17 nt, Human
ccagcccaccccauggc

SEQ ID NO: 3468198 - RNA, 14 nt, Human
ccagcccacccccg

SEQ ID NO: 3468199 - RNA, 19 nt, Human
ccagcccacccuccugucu

SEQ ID NO: 3468200 - RNA, 13 nt, Human
ccagcccacgcug

SEQ ID NO: 3468201 - RNA, 16 nt, Human
ccagcccacuucugcc

SEQ ID NO: 3468202 - RNA, 11 nt, Human
ccagcccagag

SEQ ID NO: 3468203 - RNA, 12 nt, Human
ccagcccagaga

SEQ ID NO: 3468204 - RNA, 14 nt, Human
ccagcccagauguu

SEQ ID NO: 3468205 - RNA, 21 nt, Human
ccagcccagauuccccugugu

SEQ ID NO: 3468206 - RNA, 23 nt, Human
ccagcccagauuccccuguguca

SEQ ID NO: 3468207 - RNA, 12 nt, Human
ccagcccagccc

SEQ ID NO: 3468208 - RNA, 16 nt, Human
ccagcccagcccagcu

SEQ ID NO: 3468209 - RNA, 18 nt, Human
ccagcccaggguuccccc

SEQ ID NO: 3468210 - RNA, 21 nt, Human
ccagcccaggguucccccagc

SEQ ID NO: 3468211 - RNA, 21 nt, Human
ccagcccauccauuaggccag

SEQ ID NO: 3468212 - RNA, 23 nt, Human
ccagcccauggagauugaccugg

SEQ ID NO: 3468213 - RNA, 18 nt, Human
ccagcccauuugggcaga

SEQ ID NO: 3468214 - RNA, 16 nt, Human
ccagccccacacagcu

SEQ ID NO: 3468215 - RNA, 21 nt, Human
ccagccccacacagcuacagc

SEQ ID NO: 3468216 - RNA, 14 nt, Human
ccagccccacagcc

SEQ ID NO: 3468217 - RNA, 19 nt, Human
ccagccccacagcccacgu

SEQ ID NO: 3468218 - RNA, 21 nt, Human
ccagccccacagcccacgucc

SEQ ID NO: 3468219 - RNA, 16 nt, Human
ccagccccacugccag

SEQ ID NO: 3468220 - RNA, 21 nt, Human
ccagccccacugccagcagca

SEQ ID NO: 3468221 - RNA, 16 nt, Human
ccagccccagccaggg

SEQ ID NO: 3468222 - RNA, 15 nt, Human
ccagccccagugccc

SEQ ID NO: 3468223 - RNA, 18 nt, Human
ccagccccauccucugua

SEQ ID NO: 3468224 - RNA, 18 nt, Human
ccagcccccacagugcug

SEQ ID NO: 3468225 - RNA, 22 nt, Human
ccagcccccuaagagagcaccu

SEQ ID NO: 3468226 - RNA, 18 nt, Human
ccagcccccuccuggugc

SEQ ID NO: 3468227 - RNA, 14 nt, Human
ccagcccccugacc

SEQ ID NO: 3468228 - RNA, 19 nt, Human
ccagcccccugaccacuca

SEQ ID NO: 3468229 - RNA, 20 nt, Human
ccagcccccuuugggcccag

SEQ ID NO: 3468230 - RNA, 21 nt, Human
ccagcccccuuugggcccagg

SEQ ID NO: 3468231 - RNA, 22 nt, Human
ccagcccccuuugggcccaggg

SEQ ID NO: 3468232 - RNA, 23 nt, Human
ccagcccccuuugggcccaggga

SEQ ID NO: 3468233 - RNA, 18 nt, Human
ccagccccgguggcuggg

SEQ ID NO: 3468234 - RNA, 15 nt, Human
ccagccccuacugcu

SEQ ID NO: 3468235 - RNA, 12 nt, Human
ccagccccuaga

SEQ ID NO: 3468236 - RNA, 15 nt, Human
ccagccccuagaaac

SEQ ID NO: 3468237 - RNA, 15 nt, Human
ccagccccuagccca

SEQ ID NO: 3468238 - RNA, 20 nt, Human
ccagccccucccaccacagc

SEQ ID NO: 3468239 - RNA, 21 nt, Human
ccagccccucccaccacagca

SEQ ID NO: 3468240 - RNA, 13 nt, Human
ccagccccucugg

SEQ ID NO: 3468241 - RNA, 15 nt, Human
ccagccccucugguc

SEQ ID NO: 3468242 - RNA, 22 nt, Human
ccagccccucuggucgcuccug

SEQ ID NO: 3468243 - RNA, 22 nt, Human
ccagccccugccccagcccaag

SEQ ID NO: 3468244 - RNA, 12 nt, Human
ccagccccugga

SEQ ID NO: 3468245 - RNA, 14 nt, Human
ccagccccuggaug

SEQ ID NO: 3468246 - RNA, 12 nt, Human
ccagccccugua

SEQ ID NO: 3468247 - RNA, 19 nt, Human
ccagccccuguauggcacu

SEQ ID NO: 3468248 - RNA, 17 nt, Human
ccagccccugucccacc

SEQ ID NO: 3468249 - RNA, 18 nt, Human
ccagccccuucugaccca

SEQ ID NO: 3468250 - RNA, 14 nt, Human
ccagccccuugaga

SEQ ID NO: 3468251 - RNA, 22 nt, Human
ccagcccggccgcuccaccagc

SEQ ID NO: 3468252 - RNA, 22 nt, Human
ccagcccggccugcucccagca

SEQ ID NO: 3468253 - RNA, 17 nt, Human
ccagcccggcugguuuu

SEQ ID NO: 3468254 - RNA, 13 nt, Human
ccagcccgggagc

SEQ ID NO: 3468255 - RNA, 17 nt, Human
ccagcccgggagccuag

SEQ ID NO: 3468256 - RNA, 21 nt, Human
ccagcccgggagccuaggacc

SEQ ID NO: 3468257 - RNA, 14 nt, Human
ccagcccucauccc

SEQ ID NO: 3468258 - RNA, 19 nt, Human
ccagcccucccuguccucc

SEQ ID NO: 3468259 - RNA, 14 nt, Human
ccagcugcacugau

SEQ ID NO: 3468260 - RNA, 16 nt, Human
ccagcugcaggaauca

SEQ ID NO: 3468261 - RNA, 23 nt, Human
ccagcugcaggaaucaaaaauug

SEQ ID NO: 3468262 - RNA, 22 nt, Human
ccagcugcccccagagccacag

SEQ ID NO: 3468263 - RNA, 16 nt, Human
ccagcugcccuuccgc

SEQ ID NO: 3468264 - RNA, 20 nt, Human
ccagcugcccuuccgcagug

SEQ ID NO: 3468265 - RNA, 19 nt, Human
ccagcugccgaccagagcc

SEQ ID NO: 3468266 - RNA, 10 nt, Human
ccagcugccu

SEQ ID NO: 3468267 - RNA, 19 nt, Human
ccagcugcgcuugcuuuuc

SEQ ID NO: 3468268 - RNA, 17 nt, Human
ccagcugcuccccuccc

SEQ ID NO: 3468269 - RNA, 22 nt, Human
ccagcugcuccgaggacccagg

SEQ ID NO: 3468270 - RNA, 15 nt, Human
ccagcugcucugccc

SEQ ID NO: 3468271 - RNA, 21 nt, Human
ccagcugcucugcccagagcu

SEQ ID NO: 3468272 - RNA, 22 nt, Human
ccagcugcugagauccuggacu

SEQ ID NO: 3468273 - RNA, 23 nt, Human
ccagcugcugagauccuggacug

SEQ ID NO: 3468274 - RNA, 14 nt, Human
ccagcugcugagcc

SEQ ID NO: 3468275 - RNA, 18 nt, Human
ccagcugcugagccgcag

SEQ ID NO: 3468276 - RNA, 14 nt, Human
ccagcugcugucuu

SEQ ID NO: 3468277 - RNA, 19 nt, Human
ccagcugcugucuucugga

SEQ ID NO: 3468278 - RNA, 13 nt, Human
ccagcugcuuggg

SEQ ID NO: 3468279 - RNA, 24 nt, Human
ccagcuggagaaauaugguacuca

SEQ ID NO: 3468280 - RNA, 18 nt, Human
ccagcuggaggcaggggc

SEQ ID NO: 3468281 - RNA, 13 nt, Human
ccagcuggcagca

SEQ ID NO: 3468282 - RNA, 14 nt, Human
ccagcuggcagcag

SEQ ID NO: 3468283 - RNA, 15 nt, Human
ccagcuggcagcaga

SEQ ID NO: 3468284 - RNA, 16 nt, Human
ccagcuggcagcagag

SEQ ID NO: 3468285 - RNA, 19 nt, Human
ccagcuggcccgugacaga

SEQ ID NO: 3468286 - RNA, 12 nt, Human
ccagcuggccgg

SEQ ID NO: 3468287 - RNA, 20 nt, Human
ccagcuggccgggagccuga

SEQ ID NO: 3468288 - RNA, 17 nt, Human
ccagcuggccuggacag

SEQ ID NO: 3468289 - RNA, 12 nt, Human
ccagcuggccuu

SEQ ID NO: 3468290 - RNA, 21 nt, Human
ccagcugggaggcaagagggg

SEQ ID NO: 3468291 - RNA, 22 nt, Human
ccagcugggaggcaagaggggu

SEQ ID NO: 3468292 - RNA, 23 nt, Human
ccagcugggaucugacugcacgu

SEQ ID NO: 3468293 - RNA, 19 nt, Human
ccagcugggccgggaccca

SEQ ID NO: 3468294 - RNA, 11 nt, Human
ccagcugggcu

SEQ ID NO: 3468295 - RNA, 20 nt, Human
ccagcuggggccaggcuggg

SEQ ID NO: 3468296 - RNA, 23 nt, Human
ccagcuggggccaggcugggucg

SEQ ID NO: 3468297 - RNA, 21 nt, Human
ccagcuggggcguggggaggg

SEQ ID NO: 3468298 - RNA, 17 nt, Human
ccagcugggucaggcag

SEQ ID NO: 3468299 - RNA, 18 nt, Human
ccagcuguccccccacuc

SEQ ID NO: 3468300 - RNA, 17 nt, Human
ccagcugugagccuugg

SEQ ID NO: 3468301 - RNA, 20 nt, Human
ccagcugugagccuuggcug

SEQ ID NO: 3468302 - RNA, 21 nt, Human
ccagcugugcucuggacaggc

SEQ ID NO: 3468303 - RNA, 22 nt, Human
ccagcugugcucuggacaggca

SEQ ID NO: 3468304 - RNA, 14 nt, Human
ccagcugugcuuau

SEQ ID NO: 3468305 - RNA, 21 nt, Human
ccagcugugcuuaugguacca

SEQ ID NO: 3468306 - RNA, 23 nt, Human
ccagcuguggguacagagagguc

SEQ ID NO: 3468307 - RNA, 14 nt, Human
ccagcugugguuuu

SEQ ID NO: 3468308 - RNA, 14 nt, Human
ccagcuguguccaa

SEQ ID NO: 3468309 - RNA, 16 nt, Human
ccagcuguucagcugg

SEQ ID NO: 3468310 - RNA, 16 nt, Human
ccagcuucacuucuga

SEQ ID NO: 3468311 - RNA, 14 nt, Human
ccagcuuccagcag

SEQ ID NO: 3468312 - RNA, 15 nt, Human
ccagcuuccuucaga

SEQ ID NO: 3468313 - RNA, 20 nt, Human
ccagcuuccuucagagagca

SEQ ID NO: 3468314 - RNA, 23 nt, Human
ccagcuuccuucagagagcagug

SEQ ID NO: 3468315 - RNA, 18 nt, Human
ccagcuucuccaggcucu

SEQ ID NO: 3468316 - RNA, 22 nt, Human
ccagcuucugguacucuccuag

SEQ ID NO: 3468317 - RNA, 23 nt, Human
ccagcuucugguacucuccuaga

SEQ ID NO: 3468318 - RNA, 20 nt, Human
ccagcuugaaaccuucacuu

SEQ ID NO: 3468319 - RNA, 15 nt, Human
ccagcuugccagaug

SEQ ID NO: 3468320 - RNA, 18 nt, Human
ccagcuugccagaugcug

SEQ ID NO: 3468321 - RNA, 23 nt, Human
ccagcuugggcccagcugggcuc

SEQ ID NO: 3468322 - RNA, 16 nt, Human
ccagcuuggggccacc

SEQ ID NO: 3468323 - RNA, 19 nt, Human
ccagcuuggggccaccaaa

SEQ ID NO: 3468324 - RNA, 17 nt, Human
ccagcuuguggagcccc

SEQ ID NO: 3468325 - RNA, 19 nt, Human
ccagcuuguggagccccac

SEQ ID NO: 3468326 - RNA, 23 nt, Human
ccagcuuguggagccccacacug

SEQ ID NO: 3468327 - RNA, 23 nt, Human
ccagcuuguuuacaugcuuauuc

SEQ ID NO: 3468328 - RNA, 12 nt, Human
ccagcuuuccug

SEQ ID NO: 3468329 - RNA, 15 nt, Human
ccagcuuugcccaac

SEQ ID NO: 3468330 - RNA, 18 nt, Human
ccagcuuugcccaacacc

SEQ ID NO: 3468331 - RNA, 18 nt, Human
ccagcuuuuaaccaucug

SEQ ID NO: 3468332 - RNA, 20 nt, Human
ccaggaaagcgccuccaacc

SEQ ID NO: 3468333 - RNA, 14 nt, Human
ccaggaaaggcucc

SEQ ID NO: 3468334 - RNA, 15 nt, Human
ccaggaaaggcucca

SEQ ID NO: 3468335 - RNA, 18 nt, Human
ccaggaaaggcuccagga

SEQ ID NO: 3468336 - RNA, 19 nt, Human
ccaggaaaggcuccaggag

SEQ ID NO: 3468337 - RNA, 20 nt, Human
ccaggaaaggcuccaggagc

SEQ ID NO: 3468338 - RNA, 21 nt, Human
ccaggaaaggcuccaggagca

SEQ ID NO: 3468339 - RNA, 16 nt, Human
ccaggaaaugugcaca

SEQ ID NO: 3468340 - RNA, 19 nt, Human
ccaggaacagcaaaugcaa

SEQ ID NO: 3468341 - RNA, 13 nt, Human
ccaggaagccagc

SEQ ID NO: 3468342 - RNA, 19 nt, Human
ccaggaagccagcaggcuc

SEQ ID NO: 3468343 - RNA, 20 nt, Human
ccaggaagccagcaggcucu

SEQ ID NO: 3468344 - RNA, 16 nt, Human
ccaggaagccguccug

SEQ ID NO: 3468345 - RNA, 22 nt, Human
ccaggaagccguccuggcgccu

SEQ ID NO: 3468346 - RNA, 15 nt, Human
ccaggaaggcggggc

SEQ ID NO: 3468347 - RNA, 20 nt, Human
ccaggaauguuaaagucagu

SEQ ID NO: 3468348 - RNA, 18 nt, Human
ccaggaauuucccaggac

SEQ ID NO: 3468349 - RNA, 19 nt, Human
ccaggaauuucccaggacc

SEQ ID NO: 3468350 - RNA, 21 nt, Human
ccaggaauuucccaggacccu

SEQ ID NO: 3468351 - RNA, 22 nt, Human
ccaggaauuucccaggacccug

SEQ ID NO: 3468352 - RNA, 22 nt, Human
ccaggaauuugggacccugcuu

SEQ ID NO: 3468353 - RNA, 23 nt, Human
ccaggaauuugggacccugcuuu

SEQ ID NO: 3468354 - RNA, 20 nt, Human
ccaggacaagcaugguccca

SEQ ID NO: 3468355 - RNA, 23 nt, Human
ccaggacaagcauggucccacau

SEQ ID NO: 3468356 - RNA, 18 nt, Human
ccaggacaccacacccag

SEQ ID NO: 3468357 - RNA, 20 nt, Human
ccaggacaccacacccagcc

SEQ ID NO: 3468358 - RNA, 23 nt, Human
ccaggacaccacacccagccuca

SEQ ID NO: 3468359 - RNA, 14 nt, Human
ccaggacaggacca

SEQ ID NO: 3468360 - RNA, 13 nt, Human
ccaggacaggauc

SEQ ID NO: 3468361 - RNA, 19 nt, Human
ccaggacaggauccaggcc

SEQ ID NO: 3468362 - RNA, 20 nt, Human
ccaggacaugcaauaaaauu

SEQ ID NO: 3468363 - RNA, 23 nt, Human
ccaggacaugcaauaaaauuuaa

SEQ ID NO: 3468364 - RNA, 17 nt, Human
ccaggaccacaggcuca

SEQ ID NO: 3468365 - RNA, 13 nt, Human
ccaggaccagcuc

SEQ ID NO: 3468366 - RNA, 15 nt, Human
ccaggaccagcucag

SEQ ID NO: 3468367 - RNA, 16 nt, Human
ccaggaccagcucagg

SEQ ID NO: 3468368 - RNA, 11 nt, Human
ccaggacccca

SEQ ID NO: 3468369 - RNA, 17 nt, Human
ccaggaccuggcugcca

SEQ ID NO: 3468370 - RNA, 14 nt, Human
ccaggacgccacuc

SEQ ID NO: 3468371 - RNA, 15 nt, Human
ccaggacgccacuca

SEQ ID NO: 3468372 - RNA, 15 nt, Human
ccaggacgcuucuga

SEQ ID NO: 3468373 - RNA, 16 nt, Human
ccaggacgcuucugaa

SEQ ID NO: 3468374 - RNA, 18 nt, Human
ccaggacgcuucugaaug

SEQ ID NO: 3468375 - RNA, 19 nt, Human
ccaggacgcuucugaaugc

SEQ ID NO: 3468376 - RNA, 23 nt, Human
ccaggacgcuucugaaugcugcu

SEQ ID NO: 3468377 - RNA, 23 nt, Human
ccaggacggggccggccaggugg

SEQ ID NO: 3468378 - RNA, 22 nt, Human
ccaggacuauagcccagguccu

SEQ ID NO: 3468379 - RNA, 15 nt, Human
ccaggacuccccagg

SEQ ID NO: 3468380 - RNA, 19 nt, Human
ccaggacuccccaggccag

SEQ ID NO: 3468381 - RNA, 21 nt, Human
ccaggacuccccaggccaggc

SEQ ID NO: 3468382 - RNA, 13 nt, Human
ccaggacucugac

SEQ ID NO: 3468383 - RNA, 14 nt, Human
ccaggacucugacc

SEQ ID NO: 3468384 - RNA, 12 nt, Human
ccaggacucugc

SEQ ID NO: 3468385 - RNA, 14 nt, Human
ccaggacucugcag

SEQ ID NO: 3468386 - RNA, 16 nt, Human
ccaggacucugcagcc

SEQ ID NO: 3468387 - RNA, 14 nt, Human
ccaggacugagccc

SEQ ID NO: 3468388 - RNA, 14 nt, Human
ccaggacuguuuca

SEQ ID NO: 3468389 - RNA, 12 nt, Human
ccaggagaacug

SEQ ID NO: 3468390 - RNA, 14 nt, Human
ccaggagaagcuca

SEQ ID NO: 3468391 - RNA, 21 nt, Human
ccaggagaagcucagcugcau

SEQ ID NO: 3468392 - RNA, 22 nt, Human
ccaggagaagcucagcugcauu

SEQ ID NO: 3468393 - RNA, 13 nt, Human
ccaggagacaggu

SEQ ID NO: 3468394 - RNA, 16 nt, Human
ccaggagagagaaagc

SEQ ID NO: 3468395 - RNA, 13 nt, Human
ccaggagagccag

SEQ ID NO: 3468396 - RNA, 16 nt, Human
ccaggagagccagccc

SEQ ID NO: 3468397 - RNA, 18 nt, Human
ccaggagagccagcccuc

SEQ ID NO: 3468398 - RNA, 16 nt, Human
ccaggagagcuuaggg

SEQ ID NO: 3468399 - RNA, 12 nt, Human
ccaggagcaaau

SEQ ID NO: 3468400 - RNA, 15 nt, Human
ccaggagcaaauguu

SEQ ID NO: 3468401 - RNA, 18 nt, Human
ccaggagcacggcucugu

SEQ ID NO: 3468402 - RNA, 19 nt, Human
ccaggagcacggcucuguc

SEQ ID NO: 3468403 - RNA, 11 nt, Human
ccaggcuggga

SEQ ID NO: 3468404 - RNA, 13 nt, Human
ccaggcugggaga

SEQ ID NO: 3468405 - RNA, 17 nt, Human
ccaggcugggagagccu

SEQ ID NO: 3468406 - RNA, 22 nt, Human
ccaggcugggagagccuuccag

SEQ ID NO: 3468407 - RNA, 22 nt, Human
ccaggcugggucgcccuggacu

SEQ ID NO: 3468408 - RNA, 24 nt, Human
ccaggcuguaucccaugagccuca

SEQ ID NO: 3468409 - RNA, 23 nt, Human
ccaggcuguguuuggcuuucagg

SEQ ID NO: 3468410 - RNA, 23 nt, Human
ccaggcuuagucacugagacagc

SEQ ID NO: 3468411 - RNA, 18 nt, Human
ccaggcuucacccugaau

SEQ ID NO: 3468412 - RNA, 23 nt, Human
ccaggcuucugcuggggccuggg

SEQ ID NO: 3468413 - RNA, 12 nt, Human
ccaggcuuucua

SEQ ID NO: 3468414 - RNA, 19 nt, Human
ccaggcuuuuuuaucaugu

SEQ ID NO: 3468415 - RNA, 16 nt, Human
ccagggaagcagcagc

SEQ ID NO: 3468416 - RNA, 18 nt, Human
ccagggaagcuggccgag

SEQ ID NO: 3468417 - RNA, 12 nt, Human
ccagggaagggg

SEQ ID NO: 3468418 - RNA, 17 nt, Human
ccagggaagugcucuga

SEQ ID NO: 3468419 - RNA, 17 nt, Human
ccagggaauccaagccu

SEQ ID NO: 3468420 - RNA, 21 nt, Human
ccagggaauccaagccuccac

SEQ ID NO: 3468421 - RNA, 16 nt, Human
ccagggacacacagcc

SEQ ID NO: 3468422 - RNA, 19 nt, Human
ccagggacacacagccuag

SEQ ID NO: 3468423 - RNA, 21 nt, Human
ccagggacagaggggguggcc

SEQ ID NO: 3468424 - RNA, 22 nt, Human
ccagggacagaggggguggccu

SEQ ID NO: 3468425 - RNA, 15 nt, Human
ccagggacucugccg

SEQ ID NO: 3468426 - RNA, 13 nt, Human
ccagggagaccga

SEQ ID NO: 3468427 - RNA, 18 nt, Human
ccagggagaccuggacac

SEQ ID NO: 3468428 - RNA, 23 nt, Human
ccagggagaccuggacacaggcc

SEQ ID NO: 3468429 - RNA, 19 nt, Human
ccagggagagcccaggagc

SEQ ID NO: 3468430 - RNA, 21 nt, Human
ccagggagagcccaggagcuc

SEQ ID NO: 3468431 - RNA, 23 nt, Human
ccagggagagcccaggagcuccc

SEQ ID NO: 3468432 - RNA, 17 nt, Human
ccagggagaggccauga

SEQ ID NO: 3468433 - RNA, 15 nt, Human
ccagggagauuuuga

SEQ ID NO: 3468434 - RNA, 22 nt, Human
ccagggagcaugagaggaggca

SEQ ID NO: 3468435 - RNA, 19 nt, Human
ccagggagcauuuuccucc

SEQ ID NO: 3468436 - RNA, 12 nt, Human
ccagggagccuu

SEQ ID NO: 3468437 - RNA, 14 nt, Human
ccagggagccuuug

SEQ ID NO: 3468438 - RNA, 22 nt, Human
ccagggagccuuugguucuggc

SEQ ID NO: 3468439 - RNA, 17 nt, Human
ccagggaggcugguccu

SEQ ID NO: 3468440 - RNA, 16 nt, Human
ccagggaguccccucc

SEQ ID NO: 3468441 - RNA, 18 nt, Human
ccagggauggggccacag

SEQ ID NO: 3468442 - RNA, 17 nt, Human
ccagggcaagcuccgca

SEQ ID NO: 3468443 - RNA, 22 nt, Human
ccagggcaaggguuaaggccug

SEQ ID NO: 3468444 - RNA, 23 nt, Human
ccagggcaaggguuaaggccuga

SEQ ID NO: 3468445 - RNA, 19 nt, Human
ccagggcaccaagcccaca

SEQ ID NO: 3468446 - RNA, 22 nt, Human
ccagggcacccuguggcccugg

SEQ ID NO: 3468447 - RNA, 13 nt, Human
ccagggcagccag

SEQ ID NO: 3468448 - RNA, 14 nt, Human
ccagggcagccagg

SEQ ID NO: 3468449 - RNA, 14 nt, Human
ccagggcagggcca

SEQ ID NO: 3468450 - RNA, 13 nt, Human
ccagggcaucucu

SEQ ID NO: 3468451 - RNA, 16 nt, Human
ccagggcaucugggag

SEQ ID NO: 3468452 - RNA, 18 nt, Human
ccagggccacgcuccagc

SEQ ID NO: 3468453 - RNA, 17 nt, Human
ccagggccacgugccag

SEQ ID NO: 3468454 - RNA, 19 nt, Human
ccagggccacucugccucu

SEQ ID NO: 3468455 - RNA, 20 nt, Human
ccagggccacucugccucug

SEQ ID NO: 3468456 - RNA, 14 nt, Human
ccagggccagccuc

SEQ ID NO: 3468457 - RNA, 23 nt, Human
ccagggcccagagcccagcucca

SEQ ID NO: 3468458 - RNA, 21 nt, Human
ccagggccccucacccugccu

SEQ ID NO: 3468459 - RNA, 13 nt, Human
ccagggcccucgg

SEQ ID NO: 3468460 - RNA, 18 nt, Human
ccagggcccugagcucgg

SEQ ID NO: 3468461 - RNA, 16 nt, Human
ccagggccgaggaggu

SEQ ID NO: 3468462 - RNA, 18 nt, Human
ccagggccugagccuggc

SEQ ID NO: 3468463 - RNA, 15 nt, Human
ccagggccugucuca

SEQ ID NO: 3468464 - RNA, 21 nt, Human
ccagggccuuuucuggcaccg

SEQ ID NO: 3468465 - RNA, 19 nt, Human
ccagggcuagugacuugug

SEQ ID NO: 3468466 - RNA, 21 nt, Human
ccagggcuauagcucaggacc

SEQ ID NO: 3468467 - RNA, 19 nt, Human
ccagggcuaugggagcagc

SEQ ID NO: 3468468 - RNA, 20 nt, Human
ccagggcuaugggagcagcu

SEQ ID NO: 3468469 - RNA, 11 nt, Human
ccagggcucag

SEQ ID NO: 3468470 - RNA, 21 nt, Human
ccagggcuccagccccucuug

SEQ ID NO: 3468471 - RNA, 16 nt, Human
ccagggcucugaccag

SEQ ID NO: 3468472 - RNA, 14 nt, Human
ccagggcucugccc

SEQ ID NO: 3468473 - RNA, 17 nt, Human
ccagggcugcccugaga

SEQ ID NO: 3468474 - RNA, 18 nt, Human
ccagggcugcccugagaa

SEQ ID NO: 3468475 - RNA, 21 nt, Human
ccagggcugcccugagaagcu

SEQ ID NO: 3468476 - RNA, 21 nt, Human
ccagggcuggaaugauuucag

SEQ ID NO: 3468477 - RNA, 13 nt, Human
ccagggcuggacu

SEQ ID NO: 3468478 - RNA, 22 nt, Human
ccagggcuggacugaggccuga

SEQ ID NO: 3468479 - RNA, 21 nt, Human
ccagggcuggggcagccucug

SEQ ID NO: 3468480 - RNA, 20 nt, Human
ccagggcuguaacugccagg

SEQ ID NO: 3468481 - RNA, 20 nt, Human
ccagggcuuaccuguacacu

SEQ ID NO: 3468482 - RNA, 21 nt, Human
ccagggcuuacggcccuggcc

SEQ ID NO: 3468483 - RNA, 20 nt, Human
ccaggggaaaaucagccugc

SEQ ID NO: 3468484 - RNA, 19 nt, Human
ccaggggaacacuggggac

SEQ ID NO: 3468485 - RNA, 15 nt, Human
ccaggggaaccugcc

SEQ ID NO: 3468486 - RNA, 24 nt, Human
ccaggggaaccugccaugccagga

SEQ ID NO: 3468487 - RNA, 13 nt, Human
ccaggggaccaca

SEQ ID NO: 3468488 - RNA, 18 nt, Human
ccaggggaugaguggagg

SEQ ID NO: 3468489 - RNA, 16 nt, Human
ccaggggaugggaggu

SEQ ID NO: 3468490 - RNA, 16 nt, Human
ccaggggcagccccag

SEQ ID NO: 3468491 - RNA, 16 nt, Human
ccaggggcaggcacag

SEQ ID NO: 3468492 - RNA, 17 nt, Human
ccaggggcaggcacagc

SEQ ID NO: 3468493 - RNA, 22 nt, Human
ccaggggcccaaggcggccccu

SEQ ID NO: 3468494 - RNA, 19 nt, Human
ccaggggccggccaguggc

SEQ ID NO: 3468495 - RNA, 15 nt, Human
ccaggggcucccucc

SEQ ID NO: 3468496 - RNA, 17 nt, Human
ccagggggacuagcccc

SEQ ID NO: 3468497 - RNA, 19 nt, Human
ccagggggacuagccccug

SEQ ID NO: 3468498 - RNA, 18 nt, Human
ccagggggaugccacucc

SEQ ID NO: 3468499 - RNA, 19 nt, Human
ccaggggggugaggagcug

SEQ ID NO: 3468500 - RNA, 15 nt, Human
ccaggggucucccug

SEQ ID NO: 3468501 - RNA, 16 nt, Human
ccaggggucucccugg

SEQ ID NO: 3468502 - RNA, 17 nt, Human
ccaggggucucccugga

SEQ ID NO: 3468503 - RNA, 17 nt, Human
ccaggggucucccuggc

SEQ ID NO: 3468504 - RNA, 19 nt, Human
ccaggggugauuucagaga

SEQ ID NO: 3468505 - RNA, 21 nt, Human
ccaggggugggacacccugug

SEQ ID NO: 3468506 - RNA, 19 nt, Human
ccaggguagcccgccugcc

SEQ ID NO: 3468507 - RNA, 21 nt, Human
ccaggguagcccgccugccag

SEQ ID NO: 3468508 - RNA, 23 nt, Human
ccaggguagcccgccugccaguc

SEQ ID NO: 3468509 - RNA, 17 nt, Human
ccagggucacugaaggc

SEQ ID NO: 3468510 - RNA, 17 nt, Human
ccagggucccucugugu

SEQ ID NO: 3468511 - RNA, 18 nt, Human
ccagggucccucugugua

SEQ ID NO: 3468512 - RNA, 15 nt, Human
ccagggucuccagaa

SEQ ID NO: 3468513 - RNA, 20 nt, Human
ccagggucugugugaaugug

SEQ ID NO: 3468514 - RNA, 23 nt, Human
ccagggugagagcugcucuggaa

SEQ ID NO: 3468515 - RNA, 20 nt, Human
ccaggguggacuuagaaagc

SEQ ID NO: 3468516 - RNA, 21 nt, Human
ccaggguggacuuagaaagca

SEQ ID NO: 3468517 - RNA, 16 nt, Human
ccaggguggcagcaac

SEQ ID NO: 3468518 - RNA, 17 nt, Human
ccaggguggcagcaaca

SEQ ID NO: 3468519 - RNA, 24 nt, Human
ccaggguggccacaccucuauccc

SEQ ID NO: 3468520 - RNA, 21 nt, Human
ccaggguguggcccugccauc

SEQ ID NO: 3468521 - RNA, 20 nt, Human
ccaggguucccccagcccug

SEQ ID NO: 3468522 - RNA, 21 nt, Human
ccaggguucccccagcccugu

SEQ ID NO: 3468523 - RNA, 16 nt, Human
ccaggguugaccccag

SEQ ID NO: 3468524 - RNA, 19 nt, Human
ccaggguuggcaccuuccc

SEQ ID NO: 3468525 - RNA, 13 nt, Human
ccaggguuuuaac

SEQ ID NO: 3468526 - RNA, 23 nt, Human
ccagguaaugagggacuggaacc

SEQ ID NO: 3468527 - RNA, 17 nt, Human
ccagguaccagcugcgc

SEQ ID NO: 3468528 - RNA, 16 nt, Human
ccagguacgcacagac

SEQ ID NO: 3468529 - RNA, 18 nt, Human
ccagguacgcacagacag

SEQ ID NO: 3468530 - RNA, 19 nt, Human
ccagguacgcacagacagg

SEQ ID NO: 3468531 - RNA, 14 nt, Human
ccagguagaacaca

SEQ ID NO: 3468532 - RNA, 13 nt, Human
ccagguagcuggg

SEQ ID NO: 3468533 - RNA, 17 nt, Human
ccagguaucuccaggau

SEQ ID NO: 3468534 - RNA, 15 nt, Human
ccagguauggcucug

SEQ ID NO: 3468535 - RNA, 13 nt, Human
ccaggucaacaga

SEQ ID NO: 3468536 - RNA, 20 nt, Human
ccaggucaacagaaugaaaa

SEQ ID NO: 3468537 - RNA, 18 nt, Human
ccagguccaaugagcuuu

SEQ ID NO: 3468538 - RNA, 15 nt, Human
ccagguccagcucug

SEQ ID NO: 3468539 - RNA, 16 nt, Human
ccagguccagcucugg

SEQ ID NO: 3468540 - RNA, 18 nt, Human
ccagguccagcucuggag

SEQ ID NO: 3468541 - RNA, 17 nt, Human
ccaggucccccugcagc

SEQ ID NO: 3468542 - RNA, 15 nt, Human
ccaggucccucucau

SEQ ID NO: 3468543 - RNA, 23 nt, Human
ccaggucccucucauuuagccug

SEQ ID NO: 3468544 - RNA, 13 nt, Human
ccagguccucuga

SEQ ID NO: 3468545 - RNA, 22 nt, Human
ccagguccucugauacccagag

SEQ ID NO: 3468546 - RNA, 14 nt, Human
cccaggaagcccag

SEQ ID NO: 3468547 - RNA, 15 nt, Human
cccaggaagcccagg

SEQ ID NO: 3468548 - RNA, 12 nt, Human
cccaggaagccg

SEQ ID NO: 3468549 - RNA, 23 nt, Human
cccaggaaucaguuuaaaagcac

SEQ ID NO: 3468550 - RNA, 19 nt, Human
cccaggaauggagccugca

SEQ ID NO: 3468551 - RNA, 23 nt, Human
cccaggaauuugggacccugcuu

SEQ ID NO: 3468552 - RNA, 21 nt, Human
cccaggacaccacacccagcc

SEQ ID NO: 3468553 - RNA, 17 nt, Human
cccaggacaggauccag

SEQ ID NO: 3468554 - RNA, 23 nt, Human
cccaggaccacaggcucaggcag

SEQ ID NO: 3468555 - RNA, 22 nt, Human
cccaggaccagaagcuccccca

SEQ ID NO: 3468556 - RNA, 16 nt, Human
cccaggaccagcucag

SEQ ID NO: 3468557 - RNA, 21 nt, Human
cccaggaccagcucaggacag

SEQ ID NO: 3468558 - RNA, 20 nt, Human
cccaggaccaucuucccgag

SEQ ID NO: 3468559 - RNA, 19 nt, Human
cccaggacccuggacccag

SEQ ID NO: 3468560 - RNA, 20 nt, Human
cccaggacccuggacccagc

SEQ ID NO: 3468561 - RNA, 18 nt, Human
cccaggaccuggcugcca

SEQ ID NO: 3468562 - RNA, 22 nt, Human
cccaggacgccacucauuucau

SEQ ID NO: 3468563 - RNA, 15 nt, Human
cccaggacgcuucug

SEQ ID NO: 3468564 - RNA, 19 nt, Human
cccaggacggggccggcca

SEQ ID NO: 3468565 - RNA, 19 nt, Human
cccaggacucugaccccag

SEQ ID NO: 3468566 - RNA, 23 nt, Human
cccaggacucugaccccagcauu

SEQ ID NO: 3468567 - RNA, 12 nt, Human
cccaggacuggg

SEQ ID NO: 3468568 - RNA, 14 nt, Human
cccaggagagagaa

SEQ ID NO: 3468569 - RNA, 18 nt, Human
cccaggagagccagcccu

SEQ ID NO: 3468570 - RNA, 12 nt, Human
cccaggagccca

SEQ ID NO: 3468571 - RNA, 13 nt, Human
cccaggagcccau

SEQ ID NO: 3468572 - RNA, 17 nt, Human
cccaggagccugcccag

SEQ ID NO: 3468573 - RNA, 17 nt, Human
cccaggaggcagggagg

SEQ ID NO: 3468574 - RNA, 14 nt, Human
cccaggaggccagc

SEQ ID NO: 3468575 - RNA, 15 nt, Human
cccaggaggccagcc

SEQ ID NO: 3468576 - RNA, 18 nt, Human
cccaggaggccagccuug

SEQ ID NO: 3468577 - RNA, 22 nt, Human
cccaggaggccagccuugacca

SEQ ID NO: 3468578 - RNA, 18 nt, Human
cccaggagggcauccaua

SEQ ID NO: 3468579 - RNA, 15 nt, Human
cccaggaguucugcu

SEQ ID NO: 3468580 - RNA, 21 nt, Human
cccaggaguucugcucauucu

SEQ ID NO: 3468581 - RNA, 22 nt, Human
cccaggaguuugaggcugcagc

SEQ ID NO: 3468582 - RNA, 18 nt, Human
cccaggaguuuggccaga

SEQ ID NO: 3468583 - RNA, 17 nt, Human
cccaggauacuggcaca

SEQ ID NO: 3468584 - RNA, 19 nt, Human
cccaggauacuggcacaga

SEQ ID NO: 3468585 - RNA, 16 nt, Human
cccaggcaaauaaaau

SEQ ID NO: 3468586 - RNA, 22 nt, Human
cccaggcaaauaaaauucccua

SEQ ID NO: 3468587 - RNA, 20 nt, Human
cccaggcaaaucaguuacua

SEQ ID NO: 3468588 - RNA, 18 nt, Human
cccaggcaaggcugugga

SEQ ID NO: 3468589 - RNA, 19 nt, Human
cccaggcaaggcuguggac

SEQ ID NO: 3468590 - RNA, 13 nt, Human
cccaggcacugca

SEQ ID NO: 3468591 - RNA, 17 nt, Human
cccaggcacugggcucc

SEQ ID NO: 3468592 - RNA, 17 nt, Human
cccaggcaggucuugaa

SEQ ID NO: 3468593 - RNA, 17 nt, Human
cccaggcauuccccagg

SEQ ID NO: 3468594 - RNA, 18 nt, Human
cccaggcauuccccagga

SEQ ID NO: 3468595 - RNA, 22 nt, Human
cccaggcauuccccaggaggcc

SEQ ID NO: 3468596 - RNA, 14 nt, Human
cccaggcauugcca

SEQ ID NO: 3468597 - RNA, 21 nt, Human
cccaggcauugccaagggcuu

SEQ ID NO: 3468598 - RNA, 14 nt, Human
cccaggccaggacu

SEQ ID NO: 3468599 - RNA, 15 nt, Human
cccaggccaggacuc

SEQ ID NO: 3468600 - RNA, 21 nt, Human
cccaggccaggacucugcagc

SEQ ID NO: 3468601 - RNA, 22 nt, Human
cccaggccaggacucugcagcc

SEQ ID NO: 3468602 - RNA, 21 nt, Human
cccaggccaucuuccaggugg

SEQ ID NO: 3468603 - RNA, 11 nt, Human
cccaggcccac

SEQ ID NO: 3468604 - RNA, 15 nt, Human
cccaggcccacucag

SEQ ID NO: 3468605 - RNA, 16 nt, Human
cccaggcccacucagg

SEQ ID NO: 3468606 - RNA, 22 nt, Human
cccaggcccacugugccucaga

SEQ ID NO: 3468607 - RNA, 13 nt, Human
cccaggccccagg

SEQ ID NO: 3468608 - RNA, 17 nt, Human
cccaggccccaggaagc

SEQ ID NO: 3468609 - RNA, 18 nt, Human
cccaggccccugccaccc

SEQ ID NO: 3468610 - RNA, 18 nt, Human
cccaggccccuggaggcu

SEQ ID NO: 3468611 - RNA, 17 nt, Human
cccaggccgcagcucuu

SEQ ID NO: 3468612 - RNA, 18 nt, Human
cccaggccgcagcucuug

SEQ ID NO: 3468613 - RNA, 21 nt, Human
cccaggccgcagcucuugccc

SEQ ID NO: 3468614 - RNA, 12 nt, Human
cccaggccggcc

SEQ ID NO: 3468615 - RNA, 21 nt, Human
cccaggccgggguggagcaug

SEQ ID NO: 3468616 - RNA, 16 nt, Human
cccaggccuccagcuc

SEQ ID NO: 3468617 - RNA, 13 nt, Human
cccaggccucugu

SEQ ID NO: 3468618 - RNA, 22 nt, Human
cccaggcgggagcgguggcccu

SEQ ID NO: 3468619 - RNA, 14 nt, Human
cccaggcuccgccc

SEQ ID NO: 3468620 - RNA, 18 nt, Human
cccaggcuccgcccuuag

SEQ ID NO: 3468621 - RNA, 21 nt, Human
cccaggcuccgcccuuagucc

SEQ ID NO: 3468622 - RNA, 15 nt, Human
cccaggcugagccuc

SEQ ID NO: 3468623 - RNA, 16 nt, Human
cccaggcugagccuca

SEQ ID NO: 3468624 - RNA, 17 nt, Human
cccaggcugagccucag

SEQ ID NO: 3468625 - RNA, 14 nt, Human
cccaggcugccguc

SEQ ID NO: 3468626 - RNA, 18 nt, Human
cccaggcugccugagcac

SEQ ID NO: 3468627 - RNA, 22 nt, Human
cccaggcuggacaugcugacug

SEQ ID NO: 3468628 - RNA, 20 nt, Human
cccaggcuggagugcaaugg

SEQ ID NO: 3468629 - RNA, 16 nt, Human
cccaggcuggccagcc

SEQ ID NO: 3468630 - RNA, 19 nt, Human
cccaggcuggccagcccca

SEQ ID NO: 3468631 - RNA, 21 nt, Human
cccaggcugggaacucaucug

SEQ ID NO: 3468632 - RNA, 19 nt, Human
cccaggcugggcaaggagg

SEQ ID NO: 3468633 - RNA, 16 nt, Human
cccaggcuggucucaa

SEQ ID NO: 3468634 - RNA, 23 nt, Human
cccaggcuggucuugaaguccug

SEQ ID NO: 3468635 - RNA, 15 nt, Human
cccaggcuuagucac

SEQ ID NO: 3468636 - RNA, 13 nt, Human
cccagggaagugc

SEQ ID NO: 3468637 - RNA, 17 nt, Human
cccagggacaccagcca

SEQ ID NO: 3468638 - RNA, 18 nt, Human
cccagggacaccugggag

SEQ ID NO: 3468639 - RNA, 19 nt, Human
cccagggacaccugggaga

SEQ ID NO: 3468640 - RNA, 20 nt, Human
cccagggagcggaaagcagc

SEQ ID NO: 3468641 - RNA, 21 nt, Human
cccagggauuuguccuugggg

SEQ ID NO: 3468642 - RNA, 18 nt, Human
cccagggcaagcuccgca

SEQ ID NO: 3468643 - RNA, 11 nt, Human
cccagggcaca

SEQ ID NO: 3468644 - RNA, 15 nt, Human
cccagggcacaggag

SEQ ID NO: 3468645 - RNA, 17 nt, Human
cccagggcacaggagcu

SEQ ID NO: 3468646 - RNA, 22 nt, Human
cccagggcacaggagcuaccug

SEQ ID NO: 3468647 - RNA, 12 nt, Human
cccagggcaccc

SEQ ID NO: 3468648 - RNA, 14 nt, Human
cccagggcacgugg

SEQ ID NO: 3468649 - RNA, 21 nt, Human
cccagggcaucuugcuggcua

SEQ ID NO: 3468650 - RNA, 23 nt, Human
cccagggccacucugccucugcc

SEQ ID NO: 3468651 - RNA, 17 nt, Human
cccagggccagggcccu

SEQ ID NO: 3468652 - RNA, 21 nt, Human
cccagggccagggcccugcag

SEQ ID NO: 3468653 - RNA, 19 nt, Human
cccagggcccagagcccag

SEQ ID NO: 3468654 - RNA, 16 nt, Human
cccagggccugcagga

SEQ ID NO: 3468655 - RNA, 17 nt, Human
cccagggcucagccugg

SEQ ID NO: 3468656 - RNA, 18 nt, Human
cccagggcucagccuggu

SEQ ID NO: 3468657 - RNA, 19 nt, Human
cccagggcucugccccagu

SEQ ID NO: 3468658 - RNA, 13 nt, Human
cccagggcucugu

SEQ ID NO: 3468659 - RNA, 16 nt, Human
cccagggcucuguaag

SEQ ID NO: 3468660 - RNA, 21 nt, Human
cccagggcuguaacugccagg

SEQ ID NO: 3468661 - RNA, 22 nt, Human
cccagggcuuacggcccuggcc

SEQ ID NO: 3468662 - RNA, 16 nt, Human
cccaggggacaaggga

SEQ ID NO: 3468663 - RNA, 22 nt, Human
cccaggggagagggucuggaga

SEQ ID NO: 3468664 - RNA, 14 nt, Human
cccaggggagcccu

SEQ ID NO: 3468665 - RNA, 15 nt, Human
cccaggggagcccuc

SEQ ID NO: 3468666 - RNA, 19 nt, Human
cccaggggagcccuccacg

SEQ ID NO: 3468667 - RNA, 17 nt, Human
cccaggggcccacaggg

SEQ ID NO: 3468668 - RNA, 17 nt, Human
cccaggggcucccuccg

SEQ ID NO: 3468669 - RNA, 16 nt, Human
cccaggggucucccug

SEQ ID NO: 3468670 - RNA, 19 nt, Human
cccaggggucucccuggcu

SEQ ID NO: 3468671 - RNA, 19 nt, Human
cccaggggugcccccuccu

SEQ ID NO: 3468672 - RNA, 22 nt, Human
cccaggggugcccccuccucuc

SEQ ID NO: 3468673 - RNA, 23 nt, Human
cccaggggugcccccuccucucc

SEQ ID NO: 3468674 - RNA, 15 nt, Human
cccaggguccuggga

SEQ ID NO: 3468675 - RNA, 15 nt, Human
cccagggucuucccu

SEQ ID NO: 3468676 - RNA, 19 nt, Human
cccaggguggagugcagug

SEQ ID NO: 3468677 - RNA, 20 nt, Human
cccaggguggagugcagugg

SEQ ID NO: 3468678 - RNA, 18 nt, Human
cccaggguucccccagcc

SEQ ID NO: 3468679 - RNA, 14 nt, Human
cccagguaagcagg

SEQ ID NO: 3468680 - RNA, 19 nt, Human
cccagguaccagcugcgcu

SEQ ID NO: 3468681 - RNA, 17 nt, Human
cccagguaggccaaggu

SEQ ID NO: 3468682 - RNA, 17 nt, Human
cccagguaggggccccu

SEQ ID NO: 3468683 - RNA, 14 nt, Human
cccagguccagcuc

SEQ ID NO: 3468684 - RNA, 21 nt, Human
cccaggugcagccagaggcac

SEQ ID NO: 3468685 - RNA, 13 nt, Human
cccaggugccagu

SEQ ID NO: 3468686 - RNA, 23 nt, Human
cccagguggaaggcagacagcag

SEQ ID NO: 3468687 - RNA, 16 nt, Human
cccagguggcugaccc

SEQ ID NO: 3468688 - RNA, 18 nt, Human
cccagguggcugacccag

SEQ ID NO: 3468689 - RNA, 23 nt, Human
cccagguggcugacccagucccu

SEQ ID NO: 3468690 - RNA, 19 nt, Human
cccaugauuucauguacug

SEQ ID NO: 3468691 - RNA, 21 nt, Human
cccaugccaaagcuagggugg

SEQ ID NO: 3468692 - RNA, 18 nt, Human
cccaugccacguuccaca

SEQ ID NO: 3468693 - RNA, 22 nt, Human
cccaugccacguuccacaguug

SEQ ID NO: 3468694 - RNA, 15 nt, Human
cccaugcccaccugc

SEQ ID NO: 3468695 - RNA, 20 nt, Human
cccaugccuguccagccugg

SEQ ID NO: 3468696 - RNA, 17 nt, Human
cccaugccuguggcugc

SEQ ID NO: 3468697 - RNA, 15 nt, Human
cccaugcugcccugu

SEQ ID NO: 3468698 - RNA, 16 nt, Human
cccaugcugcccugug

SEQ ID NO: 3468699 - RNA, 18 nt, Human
cccaugcugcccugugag

SEQ ID NO: 3468700 - RNA, 19 nt, Human
cccaugcuggagccugugu

SEQ ID NO: 3468701 - RNA, 20 nt, Human
cccaugcuggagccugugua

SEQ ID NO: 3468702 - RNA, 23 nt, Human
cccaugcuggccuugccacacuc

SEQ ID NO: 3468703 - RNA, 21 nt, Human
cccauggacacuccagugcca

SEQ ID NO: 3468704 - RNA, 22 nt, Human
cccauggacaggcuggcuccag

SEQ ID NO: 3468705 - RNA, 23 nt, Human
cccauggagauugaccuggaugg

SEQ ID NO: 3468706 - RNA, 13 nt, Human
cccauggagccag

SEQ ID NO: 3468707 - RNA, 15 nt, Human
cccauggcauuuuau

SEQ ID NO: 3468708 - RNA, 14 nt, Human
cccauggcccugug

SEQ ID NO: 3468709 - RNA, 22 nt, Human
cccauggcccugugcuaauccc

SEQ ID NO: 3468710 - RNA, 23 nt, Human
cccauggccggcuuucaggagcu

SEQ ID NO: 3468711 - RNA, 17 nt, Human
cccauggcuuaaugcuu

SEQ ID NO: 3468712 - RNA, 13 nt, Human
cccaugggaggga

SEQ ID NO: 3468713 - RNA, 16 nt, Human
cccaugggcacugcug

SEQ ID NO: 3468714 - RNA, 16 nt, Human
cccaugggcaggagac

SEQ ID NO: 3468715 - RNA, 16 nt, Human
cccaugggcucugaca

SEQ ID NO: 3468716 - RNA, 15 nt, Human
cccauguaaauacca

SEQ ID NO: 3468717 - RNA, 22 nt, Human
cccauguagcccccuggccucu

SEQ ID NO: 3468718 - RNA, 20 nt, Human
cccauguauggccaggaagu

SEQ ID NO: 3468719 - RNA, 19 nt, Human
cccaugucgcgcucagcau

SEQ ID NO: 3468720 - RNA, 17 nt, Human
cccaugucucgacucau

SEQ ID NO: 3468721 - RNA, 16 nt, Human
cccaugugagcugcug

SEQ ID NO: 3468722 - RNA, 18 nt, Human
cccaugugagcugcugcc

SEQ ID NO: 3468723 - RNA, 22 nt, Human
cccaugugagcugcugccauga

SEQ ID NO: 3468724 - RNA, 13 nt, Human
cccaugugccaag

SEQ ID NO: 3468725 - RNA, 21 nt, Human
cccauguguccugguucccgu

SEQ ID NO: 3468726 - RNA, 14 nt, Human
cccaugugugagug

SEQ ID NO: 3468727 - RNA, 21 nt, Human
cccauuaggacaaucaguccc

SEQ ID NO: 3468728 - RNA, 18 nt, Human
cccauuauucaaaguugc

SEQ ID NO: 3468729 - RNA, 18 nt, Human
cccauucagagacugucc

SEQ ID NO: 3468730 - RNA, 18 nt, Human
cccauucauuccauucug

SEQ ID NO: 3468731 - RNA, 21 nt, Human
cccauucauuccauucuggaa

SEQ ID NO: 3468732 - RNA, 18 nt, Human
cccauuccaaagcuuuau

SEQ ID NO: 3468733 - RNA, 15 nt, Human
cccauucccgcagug

SEQ ID NO: 3468734 - RNA, 18 nt, Human
cccauucccgcaguggga

SEQ ID NO: 3468735 - RNA, 12 nt, Human
cccauucccugg

SEQ ID NO: 3468736 - RNA, 13 nt, Human
cccauucccuggg

SEQ ID NO: 3468737 - RNA, 14 nt, Human
cccauuccucaccu

SEQ ID NO: 3468738 - RNA, 14 nt, Human
cccauuccugggaa

SEQ ID NO: 3468739 - RNA, 18 nt, Human
cccauuccuucccagagg

SEQ ID NO: 3468740 - RNA, 19 nt, Human
cccauucuacacagagcag

SEQ ID NO: 3468741 - RNA, 19 nt, Human
cccauucuacuugcucugg

SEQ ID NO: 3468742 - RNA, 20 nt, Human
cccauucuacuugcucugga

SEQ ID NO: 3468743 - RNA, 23 nt, Human
cccauucuacuugcucuggaccu

SEQ ID NO: 3468744 - RNA, 15 nt, Human
cccauucucaucugc

SEQ ID NO: 3468745 - RNA, 17 nt, Human
cccauucucucuccugu

SEQ ID NO: 3468746 - RNA, 12 nt, Human
cccauucuuccu

SEQ ID NO: 3468747 - RNA, 20 nt, Human
cccauucuuugcuugaacac

SEQ ID NO: 3468748 - RNA, 14 nt, Human
cccauucuuuugua

SEQ ID NO: 3468749 - RNA, 14 nt, Human
cccauugcccuggu

SEQ ID NO: 3468750 - RNA, 17 nt, Human
cccauugccuccuccuu

SEQ ID NO: 3468751 - RNA, 14 nt, Human
cccauugucccucu

SEQ ID NO: 3468752 - RNA, 18 nt, Human
cccauugucccucugccc

SEQ ID NO: 3468753 - RNA, 19 nt, Human
cccauuguggcuccuaucu

SEQ ID NO: 3468754 - RNA, 23 nt, Human
cccauuguggucacaggaaguag

SEQ ID NO: 3468755 - RNA, 20 nt, Human
cccauuuaaaaaaaaucccu

SEQ ID NO: 3468756 - RNA, 12 nt, Human
cccauuucagcu

SEQ ID NO: 3468757 - RNA, 15 nt, Human
cccauuucccaucug

SEQ ID NO: 3468758 - RNA, 17 nt, Human
cccauuucccaucugca

SEQ ID NO: 3468759 - RNA, 21 nt, Human
cccauuucgugagccccaucu

SEQ ID NO: 3468760 - RNA, 18 nt, Human
cccauuucuaaaggccuc

SEQ ID NO: 3468761 - RNA, 20 nt, Human
cccauuucuagaacaucccu

SEQ ID NO: 3468762 - RNA, 15 nt, Human
cccauuucuauuuau

SEQ ID NO: 3468763 - RNA, 17 nt, Human
cccauuucuauuuauuu

SEQ ID NO: 3468764 - RNA, 19 nt, Human
cccauuucuauuuauuuac

SEQ ID NO: 3468765 - RNA, 15 nt, Human
cccauuugcuccuuu

SEQ ID NO: 3468766 - RNA, 16 nt, Human
cccauuugugccagag

SEQ ID NO: 3468767 - RNA, 18 nt, Human
cccauuuuagucacuuuu

SEQ ID NO: 3468768 - RNA, 15 nt, Human
cccauuuuccucuga

SEQ ID NO: 3468769 - RNA, 14 nt, Human
cccauuuucugugg

SEQ ID NO: 3468770 - RNA, 17 nt, Human
cccauuuugagugacuc

SEQ ID NO: 3468771 - RNA, 22 nt, Human
cccauuuuggaaguuuucagga

SEQ ID NO: 3468772 - RNA, 20 nt, Human
ccccaaaaaccucacccgag

SEQ ID NO: 3468773 - RNA, 23 nt, Human
ccccaaaaccacagcccugucag

SEQ ID NO: 3468774 - RNA, 14 nt, Human
ccccaaaacccggg

SEQ ID NO: 3468775 - RNA, 21 nt, Human
ccccaaaacucuccucugcug

SEQ ID NO: 3468776 - RNA, 19 nt, Human
ccccaaaagcgugagcuua

SEQ ID NO: 3468777 - RNA, 19 nt, Human
ccccaaaccugcaagggcu

SEQ ID NO: 3468778 - RNA, 22 nt, Human
ccccaaagagccuggagaagcu

SEQ ID NO: 3468779 - RNA, 21 nt, Human
ccccaaagauagacagguccu

SEQ ID NO: 3468780 - RNA, 17 nt, Human
ccccaaagcagcccuuc

SEQ ID NO: 3468781 - RNA, 18 nt, Human
ccccaaagcagcccuucc

SEQ ID NO: 3468782 - RNA, 22 nt, Human
ccccaaaggcuuugcccugcug

SEQ ID NO: 3468783 - RNA, 11 nt, Human
ccccaaagugg

SEQ ID NO: 3468784 - RNA, 17 nt, Human
ccccaaauaagaaggga

SEQ ID NO: 3468785 - RNA, 15 nt, Human
ccccaaaucaauaca

SEQ ID NO: 3468786 - RNA, 22 nt, Human
ccccaacaaaccauccagugac

SEQ ID NO: 3468787 - RNA, 21 nt, Human
ccccaacacugugcccuggug

SEQ ID NO: 3468788 - RNA, 14 nt, Human
ccccaacagcugga

SEQ ID NO: 3468789 - RNA, 23 nt, Human
ccccaacagcuggacccugacca

SEQ ID NO: 3468790 - RNA, 12 nt, Human
ccccaacagugu

SEQ ID NO: 3468791 - RNA, 13 nt, Human
ccccaaccccuga

SEQ ID NO: 3468792 - RNA, 21 nt, Human
ccccaacccuucuucauguuc

SEQ ID NO: 3468793 - RNA, 13 nt, Human
ccccaaccucagg

SEQ ID NO: 3468794 - RNA, 13 nt, Human
ccccaaccugcuc

SEQ ID NO: 3468795 - RNA, 14 nt, Human
ccccaaccugcucu

SEQ ID NO: 3468796 - RNA, 19 nt, Human
ccccaaccugcucuccucu

SEQ ID NO: 3468797 - RNA, 20 nt, Human
ccccaaccugcucuccucuu

SEQ ID NO: 3468798 - RNA, 19 nt, Human
ccccaaccuuucccucacc

SEQ ID NO: 3468799 - RNA, 21 nt, Human
ccccaaccuuucccucacccc

SEQ ID NO: 3468800 - RNA, 15 nt, Human
ccccaacuccuggaa

SEQ ID NO: 3468801 - RNA, 14 nt, Human
ccccaacucugagc

SEQ ID NO: 3468802 - RNA, 16 nt, Human
ccccaacucugagccc

SEQ ID NO: 3468803 - RNA, 18 nt, Human
ccccaacucugagcccau

SEQ ID NO: 3468804 - RNA, 19 nt, Human
ccccaacucugagcccaug

SEQ ID NO: 3468805 - RNA, 16 nt, Human
ccccaagaaagccuca

SEQ ID NO: 3468806 - RNA, 14 nt, Human
ccccaagaaggcug

SEQ ID NO: 3468807 - RNA, 23 nt, Human
ccccaagaccucuauauuugcuc

SEQ ID NO: 3468808 - RNA, 13 nt, Human
ccccaaggcugcg

SEQ ID NO: 3468809 - RNA, 20 nt, Human
ccccaagggaggcugcugcu

SEQ ID NO: 3468810 - RNA, 13 nt, Human
ccccaagguucuc

SEQ ID NO: 3468811 - RNA, 16 nt, Human
ccccaauaccccaugg

SEQ ID NO: 3468812 - RNA, 16 nt, Human
ccccaauaucuugcuu

SEQ ID NO: 3468813 - RNA, 13 nt, Human
ccccaaucccagc

SEQ ID NO: 3468814 - RNA, 14 nt, Human
ccccaauuccuugu

SEQ ID NO: 3468815 - RNA, 14 nt, Human
ccccacacacacac

SEQ ID NO: 3468816 - RNA, 12 nt, Human
ccccacacagcu

SEQ ID NO: 3468817 - RNA, 15 nt, Human
ccccacacucacucc

SEQ ID NO: 3468818 - RNA, 18 nt, Human
ccccacacuggggugccg

SEQ ID NO: 3468819 - RNA, 19 nt, Human
ccccacagcccacguccug

SEQ ID NO: 3468820 - RNA, 22 nt, Human
ccccacagcccacguccuguca

SEQ ID NO: 3468821 - RNA, 23 nt, Human
ccccacaggagguggucugggac

SEQ ID NO: 3468822 - RNA, 18 nt, Human
ccccaccacacaucccag

SEQ ID NO: 3468823 - RNA, 19 nt, Human
ccccaccacacaucccagc

SEQ ID NO: 3468824 - RNA, 15 nt, Human
ccccaccagugccuc

SEQ ID NO: 3468825 - RNA, 16 nt, Human
ccccaccagugccucu

SEQ ID NO: 3468826 - RNA, 18 nt, Human
ccccaccagugccucucc

SEQ ID NO: 3468827 - RNA, 21 nt, Human
ccccacccaccaacccucagg

SEQ ID NO: 3468828 - RNA, 22 nt, Human
ccccacccaccaacccucaggg

SEQ ID NO: 3468829 - RNA, 13 nt, Human
ccccacccacuuc

SEQ ID NO: 3468830 - RNA, 15 nt, Human
ccccaccccagggca

SEQ ID NO: 3468831 - RNA, 17 nt, Human
ccccacccccuccccag

SEQ ID NO: 3468832 - RNA, 14 nt, Human
ccccaccccuccag

SEQ ID NO: 3468833 - RNA, 23 nt, Human
ccccaccccugcccccagccccg

SEQ ID NO: 3468834 - RNA, 17 nt, Human
ccccagguggaaggcag

SEQ ID NO: 3468835 - RNA, 13 nt, Human
ccccagguggcug

SEQ ID NO: 3468836 - RNA, 20 nt, Human
ccccagguggcugacccagu

SEQ ID NO: 3468837 - RNA, 23 nt, Human
ccccagguguguuggggccuugg

SEQ ID NO: 3468838 - RNA, 14 nt, Human
ccccaguaaaauug

SEQ ID NO: 3468839 - RNA, 18 nt, Human
ccccaguaucucuucagu

SEQ ID NO: 3468840 - RNA, 15 nt, Human
ccccagucagccucu

SEQ ID NO: 3468841 - RNA, 18 nt, Human
ccccaguccccaccccug

SEQ ID NO: 3468842 - RNA, 15 nt, Human
ccccagugcccacag

SEQ ID NO: 3468843 - RNA, 20 nt, Human
ccccagugcccacaggauca

SEQ ID NO: 3468844 - RNA, 21 nt, Human
ccccaguucgccuggagcccu

SEQ ID NO: 3468845 - RNA, 14 nt, Human
ccccaguucugcuc

SEQ ID NO: 3468846 - RNA, 18 nt, Human
ccccaguucugcuccucu

SEQ ID NO: 3468847 - RNA, 14 nt, Human
ccccauagccaccc

SEQ ID NO: 3468848 - RNA, 18 nt, Human
ccccaucacaaacuuaaa

SEQ ID NO: 3468849 - RNA, 19 nt, Human
ccccaucacugcgccacug

SEQ ID NO: 3468850 - RNA, 13 nt, Human
ccccaucauucau

SEQ ID NO: 3468851 - RNA, 12 nt, Human
ccccauccucca

SEQ ID NO: 3468852 - RNA, 15 nt, Human
ccccauccuccagca

SEQ ID NO: 3468853 - RNA, 15 nt, Human
ccccauccuccagcu

SEQ ID NO: 3468854 - RNA, 13 nt, Human
ccccauccucccc

SEQ ID NO: 3468855 - RNA, 17 nt, Human
ccccauccucuguacag

SEQ ID NO: 3468856 - RNA, 19 nt, Human
ccccauccucuguacagag

SEQ ID NO: 3468857 - RNA, 21 nt, Human
ccccauccucuguacagagcc

SEQ ID NO: 3468858 - RNA, 22 nt, Human
ccccauccucuguacagagccc

SEQ ID NO: 3468859 - RNA, 19 nt, Human
ccccaucguugcccccauu

SEQ ID NO: 3468860 - RNA, 22 nt, Human
ccccaucguugcccccauuucu

SEQ ID NO: 3468861 - RNA, 13 nt, Human
ccccaucucaggc

SEQ ID NO: 3468862 - RNA, 14 nt, Human
ccccaucucaggcc

SEQ ID NO: 3468863 - RNA, 23 nt, Human
ccccaucucaugccccuggcugg

SEQ ID NO: 3468864 - RNA, 14 nt, Human
ccccaucucccugc

SEQ ID NO: 3468865 - RNA, 19 nt, Human
ccccaucucccugccuggc

SEQ ID NO: 3468866 - RNA, 22 nt, Human
ccccaucucgcucccucccagg

SEQ ID NO: 3468867 - RNA, 14 nt, Human
ccccaucucuacua

SEQ ID NO: 3468868 - RNA, 16 nt, Human
ccccaucugcauuccc

SEQ ID NO: 3468869 - RNA, 13 nt, Human
ccccaucugccca

SEQ ID NO: 3468870 - RNA, 17 nt, Human
ccccaucugcccaggac

SEQ ID NO: 3468871 - RNA, 18 nt, Human
ccccaucugcccaggacg

SEQ ID NO: 3468872 - RNA, 14 nt, Human
ccccaucugcgggg

SEQ ID NO: 3468873 - RNA, 12 nt, Human
ccccaucuguga

SEQ ID NO: 3468874 - RNA, 14 nt, Human
ccccaucugugaau

SEQ ID NO: 3468875 - RNA, 13 nt, Human
ccccaucugugca

SEQ ID NO: 3468876 - RNA, 12 nt, Human
ccccaucuugcu

SEQ ID NO: 3468877 - RNA, 20 nt, Human
ccccaugaagccacagccca

SEQ ID NO: 3468878 - RNA, 13 nt, Human
ccccaugaccucc

SEQ ID NO: 3468879 - RNA, 15 nt, Human
ccccaugaccuccag

SEQ ID NO: 3468880 - RNA, 16 nt, Human
ccccaugaccuccagc

SEQ ID NO: 3468881 - RNA, 23 nt, Human
ccccaugcacugugaaggacccu

SEQ ID NO: 3468882 - RNA, 22 nt, Human
ccccaugccaaagcuagggugg

SEQ ID NO: 3468883 - RNA, 12 nt, Human
ccccaugccugu

SEQ ID NO: 3468884 - RNA, 13 nt, Human
ccccaugccuguc

SEQ ID NO: 3468885 - RNA, 17 nt, Human
ccccaugccuguccagc

SEQ ID NO: 3468886 - RNA, 20 nt, Human
ccccaugccuguccagccug

SEQ ID NO: 3468887 - RNA, 12 nt, Human
ccccaugcugga

SEQ ID NO: 3468888 - RNA, 17 nt, Human
ccccaugcuggagccug

SEQ ID NO: 3468889 - RNA, 14 nt, Human
ccccaugcuggccu

SEQ ID NO: 3468890 - RNA, 14 nt, Human
ccccaugcuguuga

SEQ ID NO: 3468891 - RNA, 23 nt, Human
ccccaugcuuaacauacccgccu

SEQ ID NO: 3468892 - RNA, 15 nt, Human
ccccaugcuuccuug

SEQ ID NO: 3468893 - RNA, 16 nt, Human
ccccauggcccugagc

SEQ ID NO: 3468894 - RNA, 24 nt, Human
ccccauggccggcuuucaggagcu

SEQ ID NO: 3468895 - RNA, 22 nt, Human
ccccauguuguaaugcugcacu

SEQ ID NO: 3468896 - RNA, 17 nt, Human
ccccauuagcuuucaau

SEQ ID NO: 3468897 - RNA, 16 nt, Human
ccccauucccgcagug

SEQ ID NO: 3468898 - RNA, 13 nt, Human
ccccauucucauc

SEQ ID NO: 3468899 - RNA, 16 nt, Human
ccccauucucaucugc

SEQ ID NO: 3468900 - RNA, 13 nt, Human
ccccauucugccu

SEQ ID NO: 3468901 - RNA, 16 nt, Human
ccccauuucccaucug

SEQ ID NO: 3468902 - RNA, 20 nt, Human
ccccauuucccaucugcacc

SEQ ID NO: 3468903 - RNA, 17 nt, Human
ccccauuucuauuuauu

SEQ ID NO: 3468904 - RNA, 20 nt, Human
ccccauuugcuuucuuuucu

SEQ ID NO: 3468905 - RNA, 19 nt, Human
cccccaaagauagacaggu

SEQ ID NO: 3468906 - RNA, 22 nt, Human
cccccaaauggaaaugggcaga

SEQ ID NO: 3468907 - RNA, 22 nt, Human
cccccaacacugugcccuggug

SEQ ID NO: 3468908 - RNA, 14 nt, Human
cccccaaccccagc

SEQ ID NO: 3468909 - RNA, 14 nt, Human
cccccaacccccca

SEQ ID NO: 3468910 - RNA, 15 nt, Human
cccccaaccuuuccc

SEQ ID NO: 3468911 - RNA, 21 nt, Human
cccccaacuugagauguauga

SEQ ID NO: 3468912 - RNA, 13 nt, Human
cccccaagccugc

SEQ ID NO: 3468913 - RNA, 14 nt, Human
cccccacacacaca

SEQ ID NO: 3468914 - RNA, 17 nt, Human
cccccacauccugugcc

SEQ ID NO: 3468915 - RNA, 13 nt, Human
cccccacccacuu

SEQ ID NO: 3468916 - RNA, 14 nt, Human
cccccacccccagc

SEQ ID NO: 3468917 - RNA, 15 nt, Human
cccccacccccagcu

SEQ ID NO: 3468918 - RNA, 17 nt, Human
cccccaccccuucccca

SEQ ID NO: 3468919 - RNA, 18 nt, Human
cccccaccgguccagcug

SEQ ID NO: 3468920 - RNA, 20 nt, Human
cccccaccgguccagcuggc

SEQ ID NO: 3468921 - RNA, 22 nt, Human
cccccaccucucccugacccug

SEQ ID NO: 3468922 - RNA, 22 nt, Human
cccccagaaaagaaagcuacag

SEQ ID NO: 3468923 - RNA, 12 nt, Human
cccccagauauc

SEQ ID NO: 3468924 - RNA, 16 nt, Human
cccccagcaacccucc

SEQ ID NO: 3468925 - RNA, 11 nt, Human
cccccagcacu

SEQ ID NO: 3468926 - RNA, 15 nt, Human
cccccagcacugagg

SEQ ID NO: 3468927 - RNA, 17 nt, Human
cccccagcacugaggaa

SEQ ID NO: 3468928 - RNA, 18 nt, Human
cccccagcacugaggaag

SEQ ID NO: 3468929 - RNA, 12 nt, Human
cccccagcacuu

SEQ ID NO: 3468930 - RNA, 21 nt, Human
cccccagccaugccagcuggc

SEQ ID NO: 3468931 - RNA, 23 nt, Human
cccccagccccgacuccagccag

SEQ ID NO: 3468932 - RNA, 15 nt, Human
cccccagccuaugag

SEQ ID NO: 3468933 - RNA, 23 nt, Human
cccccagccuaugagcauccuga

SEQ ID NO: 3468934 - RNA, 15 nt, Human
cccccagccucuggc

SEQ ID NO: 3468935 - RNA, 11 nt, Human
cccccagccug

SEQ ID NO: 3468936 - RNA, 12 nt, Human
cccccagccugg

SEQ ID NO: 3468937 - RNA, 18 nt, Human
cccccagcuaagaaccug

SEQ ID NO: 3468938 - RNA, 21 nt, Human
cccccagcuaagaaccuggaa

SEQ ID NO: 3468939 - RNA, 14 nt, Human
cccccagcucaggg

SEQ ID NO: 3468940 - RNA, 21 nt, Human
cccccagcucaggggcagcuc

SEQ ID NO: 3468941 - RNA, 15 nt, Human
cccccagcucccacc

SEQ ID NO: 3468942 - RNA, 11 nt, Human
cccccagcugu

SEQ ID NO: 3468943 - RNA, 14 nt, Human
cccccagcuguggg

SEQ ID NO: 3468944 - RNA, 18 nt, Human
cccccagcuuccagcagg

SEQ ID NO: 3468945 - RNA, 12 nt, Human
cccccaggacug

SEQ ID NO: 3468946 - RNA, 20 nt, Human
cccccaggggaaagaugagc

SEQ ID NO: 3468947 - RNA, 22 nt, Human
cccccaguccccaccccugccc

SEQ ID NO: 3468948 - RNA, 11 nt, Human
cccccagugug

SEQ ID NO: 3468949 - RNA, 23 nt, Human
cccccauccccauccuccagcuu

SEQ ID NO: 3468950 - RNA, 16 nt, Human
cccccaucucuucugg

SEQ ID NO: 3468951 - RNA, 14 nt, Human
cccccaugcacugu

SEQ ID NO: 3468952 - RNA, 13 nt, Human
ccccccacucugu

SEQ ID NO: 3468953 - RNA, 21 nt, Human
ccccccagauaucaucuaccu

SEQ ID NO: 3468954 - RNA, 13 nt, Human
ccccccagcacug

SEQ ID NO: 3468955 - RNA, 13 nt, Human
cccccccaugcag

SEQ ID NO: 3468956 - RNA, 11 nt, Human
ccccccccucc

SEQ ID NO: 3468957 - RNA, 21 nt, Human
cccccgcgcgcgucccccugc

SEQ ID NO: 3468958 - RNA, 21 nt, Human
cccccgcugucagccauuccu

SEQ ID NO: 3468959 - RNA, 14 nt, Human
cccccggcccccug

SEQ ID NO: 3468960 - RNA, 15 nt, Human
cccccggcccccugg

SEQ ID NO: 3468961 - RNA, 15 nt, Human
cccccgggaggggcc

SEQ ID NO: 3468962 - RNA, 23 nt, Human
cccccgggccgacggagccggga

SEQ ID NO: 3468963 - RNA, 16 nt, Human
cccccuauccuuggca

SEQ ID NO: 3468964 - RNA, 19 nt, Human
cccccucaggacccucgcu

SEQ ID NO: 3468965 - RNA, 22 nt, Human
cccccucaggacccucgcuggc

SEQ ID NO: 3468966 - RNA, 18 nt, Human
cccccuccaauccugccc

SEQ ID NO: 3468967 - RNA, 12 nt, Human
cccccucccacc

SEQ ID NO: 3468968 - RNA, 14 nt, Human
cccccucccagagg

SEQ ID NO: 3468969 - RNA, 12 nt, Human
cccccucccucc

SEQ ID NO: 3468970 - RNA, 14 nt, Human
cccccucccuggcc

SEQ ID NO: 3468971 - RNA, 12 nt, Human
cccccuccuucc

SEQ ID NO: 3468972 - RNA, 18 nt, Human
cccccuccuucccagcug

SEQ ID NO: 3468973 - RNA, 21 nt, Human
cccccuccuucccagcugccc

SEQ ID NO: 3468974 - RNA, 15 nt, Human
cccccuccuugcucu

SEQ ID NO: 3468975 - RNA, 13 nt, Human
cccccucgugcca

SEQ ID NO: 3468976 - RNA, 14 nt, Human
cccccucucccugc

SEQ ID NO: 3468977 - RNA, 17 nt, Human
cccccucucccugcaug

SEQ ID NO: 3468978 - RNA, 19 nt, Human
cccccucucccugcauggc

SEQ ID NO: 3468979 - RNA, 22 nt, Human
cccccugagauccccugagccc

SEQ ID NO: 3468980 - RNA, 18 nt, Human
cccccugcaaagcccagc

SEQ ID NO: 3468981 - RNA, 17 nt, Human
ccccucgugccagucgc

SEQ ID NO: 3468982 - RNA, 17 nt, Human
ccccucucaggagccau

SEQ ID NO: 3468983 - RNA, 13 nt, Human
ccccucucccuuc

SEQ ID NO: 3468984 - RNA, 12 nt, Human
ccccucucuggg

SEQ ID NO: 3468985 - RNA, 18 nt, Human
ccccucugaccugcacug

SEQ ID NO: 3468986 - RNA, 22 nt, Human
ccccucugcccagcuugggccc

SEQ ID NO: 3468987 - RNA, 14 nt, Human
ccccucugcuggcc

SEQ ID NO: 3468988 - RNA, 20 nt, Human
ccccucuggucgcuccugcc

SEQ ID NO: 3468989 - RNA, 14 nt, Human
ccccucuguccagg

SEQ ID NO: 3468990 - RNA, 22 nt, Human
ccccucuguccaggcacugaga

SEQ ID NO: 3468991 - RNA, 12 nt, Human
ccccucugucuu

SEQ ID NO: 3468992 - RNA, 14 nt, Human
ccccucuucccugg

SEQ ID NO: 3468993 - RNA, 12 nt, Human
ccccucuuccuc

SEQ ID NO: 3468994 - RNA, 13 nt, Human
ccccucuuccucu

SEQ ID NO: 3468995 - RNA, 13 nt, Human
ccccucuugcccc

SEQ ID NO: 3468996 - RNA, 15 nt, Human
ccccucuugccccaa

SEQ ID NO: 3468997 - RNA, 22 nt, Human
ccccucuugccccaacccccag

SEQ ID NO: 3468998 - RNA, 22 nt, Human
ccccucuuggagaagucucagc

SEQ ID NO: 3468999 - RNA, 13 nt, Human
ccccucuuucucu

SEQ ID NO: 3469000 - RNA, 16 nt, Human
ccccugacagggccag

SEQ ID NO: 3469001 - RNA, 16 nt, Human
ccccugaccacucaga

SEQ ID NO: 3469002 - RNA, 22 nt, Human
ccccugaccacucagagacaug

SEQ ID NO: 3469003 - RNA, 12 nt, Human
ccccugaccuca

SEQ ID NO: 3469004 - RNA, 18 nt, Human
ccccugaccucacuguga

SEQ ID NO: 3469005 - RNA, 17 nt, Human
ccccugagauccccuga

SEQ ID NO: 3469006 - RNA, 21 nt, Human
ccccugagcaaugucugugcu

SEQ ID NO: 3469007 - RNA, 14 nt, Human
ccccugagcccacu

SEQ ID NO: 3469008 - RNA, 15 nt, Human
ccccugagcccacug

SEQ ID NO: 3469009 - RNA, 12 nt, Human
ccccugauuaca

SEQ ID NO: 3469010 - RNA, 15 nt, Human
ccccugcaaagccca

SEQ ID NO: 3469011 - RNA, 17 nt, Human
ccccugcaaagcccagc

SEQ ID NO: 3469012 - RNA, 18 nt, Human
ccccugcaaagcccagcu

SEQ ID NO: 3469013 - RNA, 16 nt, Human
ccccugcacagcaggc

SEQ ID NO: 3469014 - RNA, 22 nt, Human
ccccugcacagcaggcugccag

SEQ ID NO: 3469015 - RNA, 22 nt, Human
ccccugcacuggaguccagucu

SEQ ID NO: 3469016 - RNA, 14 nt, Human
ccccugcagcacgg

SEQ ID NO: 3469017 - RNA, 16 nt, Human
ccccugcagcacggac

SEQ ID NO: 3469018 - RNA, 22 nt, Human
ccccugcagcacggacaauaaa

SEQ ID NO: 3469019 - RNA, 14 nt, Human
ccccugcagcccug

SEQ ID NO: 3469020 - RNA, 18 nt, Human
ccccugcaggaaggagcu

SEQ ID NO: 3469021 - RNA, 22 nt, Human
ccccugcauuggaacuggaggc

SEQ ID NO: 3469022 - RNA, 20 nt, Human
ccccugccaccaggccaccu

SEQ ID NO: 3469023 - RNA, 14 nt, Human
ccccugccacccug

SEQ ID NO: 3469024 - RNA, 16 nt, Human
ccccugccacccuggg

SEQ ID NO: 3469025 - RNA, 21 nt, Human
ccccugccaccucccugaccc

SEQ ID NO: 3469026 - RNA, 15 nt, Human
ccccugccagggcag

SEQ ID NO: 3469027 - RNA, 16 nt, Human
ccccugccccagccca

SEQ ID NO: 3469028 - RNA, 11 nt, Human
ccccugccccc

SEQ ID NO: 3469029 - RNA, 18 nt, Human
ccccugcccccaggacug

SEQ ID NO: 3469030 - RNA, 15 nt, Human
ccccugcccccugca

SEQ ID NO: 3469031 - RNA, 23 nt, Human
ccccugccccuucuacacucucc

SEQ ID NO: 3469032 - RNA, 14 nt, Human
ccccugcccucgug

SEQ ID NO: 3469033 - RNA, 13 nt, Human
ccccugcccugcu

SEQ ID NO: 3469034 - RNA, 14 nt, Human
ccccugcccugcug

SEQ ID NO: 3469035 - RNA, 15 nt, Human
ccccugcccugcugc

SEQ ID NO: 3469036 - RNA, 13 nt, Human
ccccugcccuggg

SEQ ID NO: 3469037 - RNA, 13 nt, Human
ccccugcccuggu

SEQ ID NO: 3469038 - RNA, 17 nt, Human
ccccugcccugguccag

SEQ ID NO: 3469039 - RNA, 12 nt, Human
ccccugcccugu

SEQ ID NO: 3469040 - RNA, 11 nt, Human
ccccugccucc

SEQ ID NO: 3469041 - RNA, 12 nt, Human
ccccugccucca

SEQ ID NO: 3469042 - RNA, 18 nt, Human
ccccugccuccacccucu

SEQ ID NO: 3469043 - RNA, 22 nt, Human
ccccugccuccacccucugagc

SEQ ID NO: 3469044 - RNA, 10 nt, Human
ccccugccug

SEQ ID NO: 3469045 - RNA, 19 nt, Human
ccccugccugcccugucag

SEQ ID NO: 3469046 - RNA, 15 nt, Human
ccccugccuuuggga

SEQ ID NO: 3469047 - RNA, 19 nt, Human
ccccugcugcaggggcucu

SEQ ID NO: 3469048 - RNA, 14 nt, Human
ccccugcugccucc

SEQ ID NO: 3469049 - RNA, 20 nt, Human
ccccugcugccuccccaacc

SEQ ID NO: 3469050 - RNA, 14 nt, Human
ccccugcugcuguc

SEQ ID NO: 3469051 - RNA, 15 nt, Human
ccccugcugguucag

SEQ ID NO: 3469052 - RNA, 14 nt, Human
ccccugcuuugggc

SEQ ID NO: 3469053 - RNA, 22 nt, Human
ccccugcuuugggcuugggccu

SEQ ID NO: 3469054 - RNA, 17 nt, Human
ccccuggaagagcccag

SEQ ID NO: 3469055 - RNA, 22 nt, Human
ccccuggaagagcccagucugu

SEQ ID NO: 3469056 - RNA, 19 nt, Human
ccccuggaagcagugccca

SEQ ID NO: 3469057 - RNA, 23 nt, Human
ccccuggaagcagugcccaggug

SEQ ID NO: 3469058 - RNA, 14 nt, Human
ccccuggaccccag

SEQ ID NO: 3469059 - RNA, 15 nt, Human
ccccuggacugggag

SEQ ID NO: 3469060 - RNA, 22 nt, Human
ccccuggcagagaugccucccu

SEQ ID NO: 3469061 - RNA, 13 nt, Human
ccccuggcccagc

SEQ ID NO: 3469062 - RNA, 16 nt, Human
ccccuggcccagcggc

SEQ ID NO: 3469063 - RNA, 17 nt, Human
ccccuggcccagcggcc

SEQ ID NO: 3469064 - RNA, 16 nt, Human
ccccuggccgcgcucc

SEQ ID NO: 3469065 - RNA, 12 nt, Human
ccccuggccucc

SEQ ID NO: 3469066 - RNA, 14 nt, Human
ccccuggccucugu

SEQ ID NO: 3469067 - RNA, 22 nt, Human
ccccuggcugggacguggcuca

SEQ ID NO: 3469068 - RNA, 13 nt, Human
ccccugggcucug

SEQ ID NO: 3469069 - RNA, 23 nt, Human
ccccugggcucugccccagcucu

SEQ ID NO: 3469070 - RNA, 23 nt, Human
ccccugggcuuggccugcuguga

SEQ ID NO: 3469071 - RNA, 15 nt, Human
ccccuggggacccac

SEQ ID NO: 3469072 - RNA, 11 nt, Human
ccccuggggcc

SEQ ID NO: 3469073 - RNA, 19 nt, Human
ccccuggggcuucuccuga

SEQ ID NO: 3469074 - RNA, 19 nt, Human
ccccugggggcucucaugu

SEQ ID NO: 3469075 - RNA, 13 nt, Human
ccccugggguggc

SEQ ID NO: 3469076 - RNA, 20 nt, Human
ccccugggucagucuggugg

SEQ ID NO: 3469077 - RNA, 21 nt, Human
ccccuggguggguggugggga

SEQ ID NO: 3469078 - RNA, 15 nt, Human
ccccuggucucuggu

SEQ ID NO: 3469079 - RNA, 23 nt, Human
ccccuggugguucacucuuggag

SEQ ID NO: 3469080 - RNA, 15 nt, Human
ccccugguucucauc

SEQ ID NO: 3469081 - RNA, 17 nt, Human
ccccuguccccucagcu

SEQ ID NO: 3469082 - RNA, 20 nt, Human
ccccuguccccucagcucca

SEQ ID NO: 3469083 - RNA, 13 nt, Human
ccccuguccucac

SEQ ID NO: 3469084 - RNA, 16 nt, Human
ccccuguccucacugc

SEQ ID NO: 3469085 - RNA, 11 nt, Human
ccccugugcuc

SEQ ID NO: 3469086 - RNA, 19 nt, Human
ccccuguggaugcugcugc

SEQ ID NO: 3469087 - RNA, 20 nt, Human
ccccuguggaugcugcugcc

SEQ ID NO: 3469088 - RNA, 11 nt, Human
ccccuguucua

SEQ ID NO: 3469089 - RNA, 19 nt, Human
ccccuguuucaaucacugu

SEQ ID NO: 3469090 - RNA, 17 nt, Human
ccccuuauccucccugu

SEQ ID NO: 3469091 - RNA, 17 nt, Human
ccccuucacuucugacc

SEQ ID NO: 3469092 - RNA, 14 nt, Human
ccccuuccacugag

SEQ ID NO: 3469093 - RNA, 16 nt, Human
ccccuuccaucccaga

SEQ ID NO: 3469094 - RNA, 13 nt, Human
ccccuuccaugga

SEQ ID NO: 3469095 - RNA, 17 nt, Human
ccccuuccauuucugcc

SEQ ID NO: 3469096 - RNA, 18 nt, Human
ccccuucccgugaccugg

SEQ ID NO: 3469097 - RNA, 18 nt, Human
ccccuucccugcaaacau

SEQ ID NO: 3469098 - RNA, 17 nt, Human
ccccuuccuacucccag

SEQ ID NO: 3469099 - RNA, 12 nt, Human
ccccuuccuguc

SEQ ID NO: 3469100 - RNA, 19 nt, Human
ccccuuccuguguccaugu

SEQ ID NO: 3469101 - RNA, 20 nt, Human
ccccuuccuugcucugcacc

SEQ ID NO: 3469102 - RNA, 14 nt, Human
ccccuucgcuccug

SEQ ID NO: 3469103 - RNA, 19 nt, Human
ccccuucuacacucuccug

SEQ ID NO: 3469104 - RNA, 22 nt, Human
ccccuucuacacucuccugggc

SEQ ID NO: 3469105 - RNA, 21 nt, Human
ccccuucuacauuucuuagac

SEQ ID NO: 3469106 - RNA, 16 nt, Human
ccccuucucagaaucu

SEQ ID NO: 3469107 - RNA, 12 nt, Human
ccccuucuccca

SEQ ID NO: 3469108 - RNA, 16 nt, Human
ccccuucucccacacu

SEQ ID NO: 3469109 - RNA, 16 nt, Human
ccccuucucucccugc

SEQ ID NO: 3469110 - RNA, 19 nt, Human
ccccuucucuccuccccaa

SEQ ID NO: 3469111 - RNA, 14 nt, Human
ccccuucucugcuc

SEQ ID NO: 3469112 - RNA, 13 nt, Human
ccccuucucugug

SEQ ID NO: 3469113 - RNA, 15 nt, Human
ccccuucucugugac

SEQ ID NO: 3469114 - RNA, 18 nt, Human
ccccuugacaacuggcag

SEQ ID NO: 3469115 - RNA, 21 nt, Human
ccccuugauuuaaacacacag

SEQ ID NO: 3469116 - RNA, 14 nt, Human
ccccuugccacccc

SEQ ID NO: 3469117 - RNA, 12 nt, Human
ccccuugccagc

SEQ ID NO: 3469118 - RNA, 14 nt, Human
ccccuugccagcug

SEQ ID NO: 3469119 - RNA, 21 nt, Human
ccccuugccagcugcugagcc

SEQ ID NO: 3469120 - RNA, 18 nt, Human
ccccuugcccuugcccug

SEQ ID NO: 3469121 - RNA, 19 nt, Human
ccccuugcccuugcccuga

SEQ ID NO: 3469122 - RNA, 11 nt, Human
ccccuugccug

SEQ ID NO: 3469123 - RNA, 22 nt, Human
ccccuugcucuccccugcccug

SEQ ID NO: 3469124 - RNA, 17 nt, Human
ccccuuggcagguccug

SEQ ID NO: 3469125 - RNA, 16 nt, Human
ccccuugggcccacac

SEQ ID NO: 3469126 - RNA, 15 nt, Human
ccccuugggcggcug

SEQ ID NO: 3469127 - RNA, 20 nt, Human
ccccuuguuugucccuucua

SEQ ID NO: 3469128 - RNA, 15 nt, Human
ccggaugugcuuuuc

SEQ ID NO: 3469129 - RNA, 16 nt, Human
ccggauuggcuugugu

SEQ ID NO: 3469130 - RNA, 22 nt, Human
ccggauuggcuuguguguuuca

SEQ ID NO: 3469131 - RNA, 21 nt, Human
ccggcaaccccaguucugcuc

SEQ ID NO: 3469132 - RNA, 23 nt, Human
ccggcaaccccaguucugcuccu

SEQ ID NO: 3469133 - RNA, 16 nt, Human
ccggcaauaaaagccc

SEQ ID NO: 3469134 - RNA, 17 nt, Human
ccggcaauaaaagccca

SEQ ID NO: 3469135 - RNA, 18 nt, Human
ccggcaauaaaagcccag

SEQ ID NO: 3469136 - RNA, 19 nt, Human
ccggcaauaaaagcccagg

SEQ ID NO: 3469137 - RNA, 19 nt, Human
ccggcacagggucugcucu

SEQ ID NO: 3469138 - RNA, 17 nt, Human
ccggcacccccugcagc

SEQ ID NO: 3469139 - RNA, 19 nt, Human
ccggcacccccugcagcuu

SEQ ID NO: 3469140 - RNA, 21 nt, Human
ccggcacccccugcagcuugu

SEQ ID NO: 3469141 - RNA, 17 nt, Human
ccggcagccccagccug

SEQ ID NO: 3469142 - RNA, 11 nt, Human
ccggcaggccc

SEQ ID NO: 3469143 - RNA, 14 nt, Human
ccggcaggcccugc

SEQ ID NO: 3469144 - RNA, 17 nt, Human
ccggcaggcccugcagu

SEQ ID NO: 3469145 - RNA, 11 nt, Human
ccggcagggcg

SEQ ID NO: 3469146 - RNA, 17 nt, Human
ccggcaguucugggugc

SEQ ID NO: 3469147 - RNA, 22 nt, Human
ccggcaguucugggugcucccu

SEQ ID NO: 3469148 - RNA, 13 nt, Human
ccggcauggacaa

SEQ ID NO: 3469149 - RNA, 22 nt, Human
ccggcauggacaauggaccgga

SEQ ID NO: 3469150 - RNA, 18 nt, Human
ccggcauguuuccagcag

SEQ ID NO: 3469151 - RNA, 18 nt, Human
ccggccaauggaaaccuc

SEQ ID NO: 3469152 - RNA, 20 nt, Human
ccggccacccaggaggcagg

SEQ ID NO: 3469153 - RNA, 14 nt, Human
ccggccagccagcc

SEQ ID NO: 3469154 - RNA, 17 nt, Human
ccggccagccagccacu

SEQ ID NO: 3469155 - RNA, 18 nt, Human
ccggccagccagccacuc

SEQ ID NO: 3469156 - RNA, 19 nt, Human
ccggccaggugccuccuga

SEQ ID NO: 3469157 - RNA, 14 nt, Human
ccggccaguggcgg

SEQ ID NO: 3469158 - RNA, 15 nt, Human
ccggccccagccaga

SEQ ID NO: 3469159 - RNA, 14 nt, Human
ccggcccccugccc

SEQ ID NO: 3469160 - RNA, 12 nt, Human
ccggcccugggg

SEQ ID NO: 3469161 - RNA, 14 nt, Human
ccggcccugugugc

SEQ ID NO: 3469162 - RNA, 16 nt, Human
ccggccucucuggccu

SEQ ID NO: 3469163 - RNA, 16 nt, Human
ccggccugccaggagg

SEQ ID NO: 3469164 - RNA, 16 nt, Human
ccggccugcucccagc

SEQ ID NO: 3469165 - RNA, 15 nt, Human
ccggcgagcccugug

SEQ ID NO: 3469166 - RNA, 16 nt, Human
ccggcgucagccucca

SEQ ID NO: 3469167 - RNA, 16 nt, Human
ccggcuaagcaggcgc

SEQ ID NO: 3469168 - RNA, 22 nt, Human
ccggcuaugggggcacugagga

SEQ ID NO: 3469169 - RNA, 13 nt, Human
ccggcuccaggcu

SEQ ID NO: 3469170 - RNA, 14 nt, Human
ccggcuccaggcuc

SEQ ID NO: 3469171 - RNA, 15 nt, Human
ccggcuccaggcucc

SEQ ID NO: 3469172 - RNA, 21 nt, Human
ccggcuccaggcuccuuuagc

SEQ ID NO: 3469173 - RNA, 18 nt, Human
ccggcucccuucuacagc

SEQ ID NO: 3469174 - RNA, 12 nt, Human
ccggcuggaaau

SEQ ID NO: 3469175 - RNA, 17 nt, Human
ccggcuuuguggcacug

SEQ ID NO: 3469176 - RNA, 22 nt, Human
ccgggaaagaagagccggagcc

SEQ ID NO: 3469177 - RNA, 17 nt, Human
ccgggaaccaagcagga

SEQ ID NO: 3469178 - RNA, 15 nt, Human
ccgggaagccacccu

SEQ ID NO: 3469179 - RNA, 20 nt, Human
ccgggacaccuaggcuaggg

SEQ ID NO: 3469180 - RNA, 13 nt, Human
ccgggacccccag

SEQ ID NO: 3469181 - RNA, 17 nt, Human
ccgggaccccgagccug

SEQ ID NO: 3469182 - RNA, 19 nt, Human
ccgggacguggcaccuccu

SEQ ID NO: 3469183 - RNA, 13 nt, Human
ccgggacucacug

SEQ ID NO: 3469184 - RNA, 23 nt, Human
ccgggacucacuggcagccccag

SEQ ID NO: 3469185 - RNA, 17 nt, Human
ccgggagccuaggacca

SEQ ID NO: 3469186 - RNA, 18 nt, Human
ccgggagccuaggaccac

SEQ ID NO: 3469187 - RNA, 23 nt, Human
ccgggagccugaucaccugcccu

SEQ ID NO: 3469188 - RNA, 15 nt, Human
ccgggagcucaggaa

SEQ ID NO: 3469189 - RNA, 22 nt, Human
ccgggaggggcccgcuugccuc

SEQ ID NO: 3469190 - RNA, 19 nt, Human
ccgggauauauauucucuc

SEQ ID NO: 3469191 - RNA, 17 nt, Human
ccgggcaaacuggccgc

SEQ ID NO: 3469192 - RNA, 17 nt, Human
ccgggcaaaugccaggg

SEQ ID NO: 3469193 - RNA, 21 nt, Human
ccgggcaaaugccagggcccg

SEQ ID NO: 3469194 - RNA, 15 nt, Human
ccgggcacucagaag

SEQ ID NO: 3469195 - RNA, 15 nt, Human
ccgggcagggugugg

SEQ ID NO: 3469196 - RNA, 22 nt, Human
ccgggcaugguggcgcaagccu

SEQ ID NO: 3469197 - RNA, 13 nt, Human
ccgggccagggcu

SEQ ID NO: 3469198 - RNA, 21 nt, Human
ccgggccccugggcuuggccu

SEQ ID NO: 3469199 - RNA, 23 nt, Human
ccgggccccugggcuuggccugc

SEQ ID NO: 3469200 - RNA, 14 nt, Human
ccgggcccucccuu

SEQ ID NO: 3469201 - RNA, 13 nt, Human
ccgggccuggggc

SEQ ID NO: 3469202 - RNA, 19 nt, Human
ccgggcgcggccagccccg

SEQ ID NO: 3469203 - RNA, 20 nt, Human
ccgggcuacccgugagcccu

SEQ ID NO: 3469204 - RNA, 15 nt, Human
ccgggcucugccucc

SEQ ID NO: 3469205 - RNA, 16 nt, Human
ccgggcugagggccug

SEQ ID NO: 3469206 - RNA, 15 nt, Human
ccgggcugccugggc

SEQ ID NO: 3469207 - RNA, 16 nt, Human
ccgggcugccugggcu

SEQ ID NO: 3469208 - RNA, 19 nt, Human
ccgggcugggagcucugca

SEQ ID NO: 3469209 - RNA, 17 nt, Human
ccggggcagcagcagcc

SEQ ID NO: 3469210 - RNA, 18 nt, Human
ccggggcagcagcagccc

SEQ ID NO: 3469211 - RNA, 14 nt, Human
ccggggcagccccc

SEQ ID NO: 3469212 - RNA, 18 nt, Human
ccggggcagcugccagag

SEQ ID NO: 3469213 - RNA, 19 nt, Human
ccggggcagcugccagaga

SEQ ID NO: 3469214 - RNA, 16 nt, Human
ccggggccagcaccac

SEQ ID NO: 3469215 - RNA, 12 nt, Human
ccggggcccagg

SEQ ID NO: 3469216 - RNA, 13 nt, Human
ccggggcccaggg

SEQ ID NO: 3469217 - RNA, 19 nt, Human
ccggggccugggcaggagg

SEQ ID NO: 3469218 - RNA, 22 nt, Human
ccgggggcagcucuggaggggg

SEQ ID NO: 3469219 - RNA, 21 nt, Human
ccgggggcagucugagagagg

SEQ ID NO: 3469220 - RNA, 22 nt, Human
ccggggugagggggggcucccu

SEQ ID NO: 3469221 - RNA, 21 nt, Human
ccgggguggccacagcgccag

SEQ ID NO: 3469222 - RNA, 20 nt, Human
ccggggugggguggcugcag

SEQ ID NO: 3469223 - RNA, 15 nt, Human
ccggguccgcggggc

SEQ ID NO: 3469224 - RNA, 17 nt, Human
ccggguucuagucuccu

SEQ ID NO: 3469225 - RNA, 22 nt, Human
ccgguaaacacgccugcaaacg

SEQ ID NO: 3469226 - RNA, 16 nt, Human
ccgguaacuguccugu

SEQ ID NO: 3469227 - RNA, 16 nt, Human
ccgguagggaggcagc

SEQ ID NO: 3469228 - RNA, 15 nt, Human
ccggucaggcacaca

SEQ ID NO: 3469229 - RNA, 14 nt, Human
ccgguccagcuggc

SEQ ID NO: 3469230 - RNA, 17 nt, Human
ccggucugcaagucaga

SEQ ID NO: 3469231 - RNA, 19 nt, Human
ccggucugcaagucagagg

SEQ ID NO: 3469232 - RNA, 20 nt, Human
ccgguggcggccccagcacc

SEQ ID NO: 3469233 - RNA, 17 nt, Human
ccggugugggggccccg

SEQ ID NO: 3469234 - RNA, 15 nt, Human
ccgguguucuaagau

SEQ ID NO: 3469235 - RNA, 15 nt, Human
ccgguugcuucuggg

SEQ ID NO: 3469236 - RNA, 17 nt, Human
ccgguugcuucugggaa

SEQ ID NO: 3469237 - RNA, 20 nt, Human
ccguaaaaacugaaguucug

SEQ ID NO: 3469238 - RNA, 14 nt, Human
ccguaauuuaacuu

SEQ ID NO: 3469239 - RNA, 14 nt, Human
ccguaccccacccu

SEQ ID NO: 3469240 - RNA, 20 nt, Human
ccguaccccacccucagcac

SEQ ID NO: 3469241 - RNA, 24 nt, Human
ccguagacgugcacgcacacuguc

SEQ ID NO: 3469242 - RNA, 22 nt, Human
ccguaucuccggcucccagccu

SEQ ID NO: 3469243 - RNA, 17 nt, Human
ccgucaccccuguuucu

SEQ ID NO: 3469244 - RNA, 14 nt, Human
ccgucagggcccaa

SEQ ID NO: 3469245 - RNA, 16 nt, Human
ccgucagggcccaagu

SEQ ID NO: 3469246 - RNA, 15 nt, Human
ccgucauguuccuca

SEQ ID NO: 3469247 - RNA, 22 nt, Human
ccguccagccgccauugccacc

SEQ ID NO: 3469248 - RNA, 18 nt, Human
ccguccaggagccugugc

SEQ ID NO: 3469249 - RNA, 11 nt, Human
ccguccccucc

SEQ ID NO: 3469250 - RNA, 14 nt, Human
ccguccccucccag

SEQ ID NO: 3469251 - RNA, 13 nt, Human
ccguccugccugu

SEQ ID NO: 3469252 - RNA, 22 nt, Human
ccgucuacagcucccccagcuc

SEQ ID NO: 3469253 - RNA, 14 nt, Human
ccgucuaccugagg

SEQ ID NO: 3469254 - RNA, 16 nt, Human
ccgucucaugaggggc

SEQ ID NO: 3469255 - RNA, 18 nt, Human
ccgucucugguuccuccc

SEQ ID NO: 3469256 - RNA, 17 nt, Human
ccgucuggcccaccagg

SEQ ID NO: 3469257 - RNA, 20 nt, Human
ccgucugggguucagccccu

SEQ ID NO: 3469258 - RNA, 15 nt, Human
ccgucuguccaucug

SEQ ID NO: 3469259 - RNA, 16 nt, Human
ccgucuguccaucugc

SEQ ID NO: 3469260 - RNA, 23 nt, Human
ccgucugugugugaccccuccug

SEQ ID NO: 3469261 - RNA, 14 nt, Human
ccgucuucagccua

SEQ ID NO: 3469262 - RNA, 13 nt, Human
ccgucuuccucca

SEQ ID NO: 3469263 - RNA, 16 nt, Human
ccgucuuuuccuguuu

SEQ ID NO: 3469264 - RNA, 22 nt, Human
ccgugacagacuccugaggaca

SEQ ID NO: 3469265 - RNA, 14 nt, Human
ccgugacgucuggg

SEQ ID NO: 3469266 - RNA, 19 nt, Human
ccgugagcaggaaggccug

SEQ ID NO: 3469267 - RNA, 20 nt, Human
ccgugagcaggaaggccugg

SEQ ID NO: 3469268 - RNA, 15 nt, Human
ccgugagcauguuug

SEQ ID NO: 3469269 - RNA, 21 nt, Human
ccgugagcgccugugcacaca

SEQ ID NO: 3469270 - RNA, 22 nt, Human
ccgugagcgccugugcacacac

SEQ ID NO: 3469271 - RNA, 12 nt, Human
ccgugaggccag

SEQ ID NO: 3469272 - RNA, 17 nt, Human
ccgugaguucucagggc

SEQ ID NO: 3469273 - RNA, 15 nt, Human
ccuacacaggacagg

SEQ ID NO: 3469274 - RNA, 17 nt, Human
ccuacacccuuggacuu

SEQ ID NO: 3469275 - RNA, 20 nt, Human
ccuacacccuuggacuugag

SEQ ID NO: 3469276 - RNA, 18 nt, Human
ccuacacucaccugcacu

SEQ ID NO: 3469277 - RNA, 14 nt, Human
ccuacagaaaaacc

SEQ ID NO: 3469278 - RNA, 19 nt, Human
ccuacagaaaaaccuuggg

SEQ ID NO: 3469279 - RNA, 20 nt, Human
ccuacagaacuucagaaaga

SEQ ID NO: 3469280 - RNA, 15 nt, Human
ccuacagaggucucu

SEQ ID NO: 3469281 - RNA, 16 nt, Human
ccuacagauagucaaa

SEQ ID NO: 3469282 - RNA, 14 nt, Human
ccuacagccccuuu

SEQ ID NO: 3469283 - RNA, 21 nt, Human
ccuacagcuuugaucccugac

SEQ ID NO: 3469284 - RNA, 21 nt, Human
ccuacaggcagucucucucuu

SEQ ID NO: 3469285 - RNA, 15 nt, Human
ccuacaguggcuguc

SEQ ID NO: 3469286 - RNA, 21 nt, Human
ccuacaguugaaaaacagcug

SEQ ID NO: 3469287 - RNA, 22 nt, Human
ccuacaguugaaaaacagcuga

SEQ ID NO: 3469288 - RNA, 22 nt, Human
ccuacaguuggaaauccaucca

SEQ ID NO: 3469289 - RNA, 17 nt, Human
ccuacaguuuuaacugu

SEQ ID NO: 3469290 - RNA, 21 nt, Human
ccuacaguuuuaacuguggau

SEQ ID NO: 3469291 - RNA, 14 nt, Human
ccuacauguuauuc

SEQ ID NO: 3469292 - RNA, 23 nt, Human
ccuaccaauagauuccccauugc

SEQ ID NO: 3469293 - RNA, 13 nt, Human
ccuaccaaugcau

SEQ ID NO: 3469294 - RNA, 14 nt, Human
ccuaccacaugcca

SEQ ID NO: 3469295 - RNA, 13 nt, Human
ccuaccaccccuu

SEQ ID NO: 3469296 - RNA, 13 nt, Human
ccuaccaccuccc

SEQ ID NO: 3469297 - RNA, 20 nt, Human
ccuaccagcgcccgcugggc

SEQ ID NO: 3469298 - RNA, 21 nt, Human
ccuaccagcgcccgcugggcu

SEQ ID NO: 3469299 - RNA, 16 nt, Human
ccuaccaucagggaca

SEQ ID NO: 3469300 - RNA, 15 nt, Human
ccuacccaaccacuc

SEQ ID NO: 3469301 - RNA, 18 nt, Human
ccuacccacaccucugcc

SEQ ID NO: 3469302 - RNA, 18 nt, Human
ccuacccacccuccuuuc

SEQ ID NO: 3469303 - RNA, 13 nt, Human
ccuaccccacacc

SEQ ID NO: 3469304 - RNA, 18 nt, Human
ccuaccccacaccaggcc

SEQ ID NO: 3469305 - RNA, 23 nt, Human
ccuaccccacaccaggccguccu

SEQ ID NO: 3469306 - RNA, 14 nt, Human
ccuaccccaccacg

SEQ ID NO: 3469307 - RNA, 22 nt, Human
ccuaccccauggugcuaggaag

SEQ ID NO: 3469308 - RNA, 17 nt, Human
ccuacccccuccucucu

SEQ ID NO: 3469309 - RNA, 17 nt, Human
ccuaccccucccagcug

SEQ ID NO: 3469310 - RNA, 21 nt, Human
ccuaccccucccagcugacag

SEQ ID NO: 3469311 - RNA, 15 nt, Human
ccuacccuaaccaag

SEQ ID NO: 3469312 - RNA, 13 nt, Human
ccuacccucuaga

SEQ ID NO: 3469313 - RNA, 18 nt, Human
ccuaccucaaccuguaaa

SEQ ID NO: 3469314 - RNA, 14 nt, Human
ccuaccucagccua

SEQ ID NO: 3469315 - RNA, 13 nt, Human
ccuaccucagguu

SEQ ID NO: 3469316 - RNA, 13 nt, Human
ccuaccugcccca

SEQ ID NO: 3469317 - RNA, 15 nt, Human
ccuaccugcccugga

SEQ ID NO: 3469318 - RNA, 13 nt, Human
ccuaccugcucuc

SEQ ID NO: 3469319 - RNA, 16 nt, Human
ccuaccugcucuccaa

SEQ ID NO: 3469320 - RNA, 12 nt, Human
ccuaccugguaa

SEQ ID NO: 3469321 - RNA, 16 nt, Human
ccuaccuucaaagcug

SEQ ID NO: 3469322 - RNA, 19 nt, Human
ccuaccuucauuucaggag

SEQ ID NO: 3469323 - RNA, 16 nt, Human
ccuacgcgccuugucu

SEQ ID NO: 3469324 - RNA, 20 nt, Human
ccuacuacaucgcccuccac

SEQ ID NO: 3469325 - RNA, 17 nt, Human
ccuacuagggaccuggg

SEQ ID NO: 3469326 - RNA, 23 nt, Human
ccuacucaagcggguggcucugg

SEQ ID NO: 3469327 - RNA, 15 nt, Human
ccuacucacacaggc

SEQ ID NO: 3469328 - RNA, 16 nt, Human
ccuacucacacaggca

SEQ ID NO: 3469329 - RNA, 22 nt, Human
ccuacucacacaggcauuuccu

SEQ ID NO: 3469330 - RNA, 17 nt, Human
ccuacucauugggguuc

SEQ ID NO: 3469331 - RNA, 13 nt, Human
ccuacucccugca

SEQ ID NO: 3469332 - RNA, 20 nt, Human
ccuacuccugucuucugcuu

SEQ ID NO: 3469333 - RNA, 19 nt, Human
ccuacucuucucucugcuc

SEQ ID NO: 3469334 - RNA, 20 nt, Human
ccuacugcccaggcacugca

SEQ ID NO: 3469335 - RNA, 11 nt, Human
ccuacugcugu

SEQ ID NO: 3469336 - RNA, 12 nt, Human
ccuacugcugug

SEQ ID NO: 3469337 - RNA, 19 nt, Human
ccuacuguucuaaagcucu

SEQ ID NO: 3469338 - RNA, 16 nt, Human
ccuacuuccccuuccu

SEQ ID NO: 3469339 - RNA, 14 nt, Human
ccuacuucuccagc

SEQ ID NO: 3469340 - RNA, 23 nt, Human
ccuacuucuuugcuuugcccagc

SEQ ID NO: 3469341 - RNA, 16 nt, Human
ccuacuucuuuugcuc

SEQ ID NO: 3469342 - RNA, 13 nt, Human
ccuacuuucuuca

SEQ ID NO: 3469343 - RNA, 21 nt, Human
ccuacuuugacuuuuugcauu

SEQ ID NO: 3469344 - RNA, 18 nt, Human
ccuagaaacaacacugua

SEQ ID NO: 3469345 - RNA, 19 nt, Human
ccuagaaacaacacuguag

SEQ ID NO: 3469346 - RNA, 18 nt, Human
ccuagaaacccaagcucc

SEQ ID NO: 3469347 - RNA, 23 nt, Human
ccuagaaacccaagcuccuccuc

SEQ ID NO: 3469348 - RNA, 22 nt, Human
ccuagaaacguuuggaacaauc

SEQ ID NO: 3469349 - RNA, 23 nt, Human
ccuagaaguuacugaaugcacca

SEQ ID NO: 3469350 - RNA, 19 nt, Human
ccuagaauguuucauuugc

SEQ ID NO: 3469351 - RNA, 16 nt, Human
ccuagacccuccuccu

SEQ ID NO: 3469352 - RNA, 23 nt, Human
ccuagacucggggugcuuccuug

SEQ ID NO: 3469353 - RNA, 19 nt, Human
ccuagacuguaaaccucuc

SEQ ID NO: 3469354 - RNA, 19 nt, Human
ccuagagaacgcagcccua

SEQ ID NO: 3469355 - RNA, 20 nt, Human
ccuagagaacgcagcccuag

SEQ ID NO: 3469356 - RNA, 17 nt, Human
ccuagagaagacaggcu

SEQ ID NO: 3469357 - RNA, 19 nt, Human
ccuagagaagacaggcugg

SEQ ID NO: 3469358 - RNA, 22 nt, Human
ccuagagaagacaggcuggaag

SEQ ID NO: 3469359 - RNA, 15 nt, Human
ccuagagcacacugu

SEQ ID NO: 3469360 - RNA, 12 nt, Human
ccuagagccaga

SEQ ID NO: 3469361 - RNA, 13 nt, Human
ccuagagccagac

SEQ ID NO: 3469362 - RNA, 13 nt, Human
ccuagagccugcc

SEQ ID NO: 3469363 - RNA, 13 nt, Human
ccuagagggaggg

SEQ ID NO: 3469364 - RNA, 21 nt, Human
ccuagagucccagguuggcuc

SEQ ID NO: 3469365 - RNA, 18 nt, Human
ccuagcaagcuggccucu

SEQ ID NO: 3469366 - RNA, 15 nt, Human
ccuagcacagauggc

SEQ ID NO: 3469367 - RNA, 18 nt, Human
ccuagcacucacaugcug

SEQ ID NO: 3469368 - RNA, 23 nt, Human
ccuagcagcaccguucugugcac

SEQ ID NO: 3469369 - RNA, 22 nt, Human
ccuagcagcccacccugcugcu

SEQ ID NO: 3469370 - RNA, 23 nt, Human
ccuagcagcccacccugcugcug

SEQ ID NO: 3469371 - RNA, 21 nt, Human
ccuagcauacguacacauuuu

SEQ ID NO: 3469372 - RNA, 12 nt, Human
ccuagccaccca

SEQ ID NO: 3469373 - RNA, 16 nt, Human
ccuagccacccaccac

SEQ ID NO: 3469374 - RNA, 12 nt, Human
ccuagccagcug

SEQ ID NO: 3469375 - RNA, 20 nt, Human
ccuagcccacccugcugccu

SEQ ID NO: 3469376 - RNA, 20 nt, Human
ccuagcccagcgcucugccu

SEQ ID NO: 3469377 - RNA, 15 nt, Human
ccuagcccaggagag

SEQ ID NO: 3469378 - RNA, 20 nt, Human
ccuagcccaggagagagaaa

SEQ ID NO: 3469379 - RNA, 22 nt, Human
ccuagccccuuagcccccaccc

SEQ ID NO: 3469380 - RNA, 13 nt, Human
ccuagcccucuca

SEQ ID NO: 3469381 - RNA, 14 nt, Human
ccuagccgaccuca

SEQ ID NO: 3469382 - RNA, 17 nt, Human
ccuagccgaccucagcc

SEQ ID NO: 3469383 - RNA, 18 nt, Human
ccuagccgaccucagccu

SEQ ID NO: 3469384 - RNA, 19 nt, Human
ccuagccgaccucagccuu

SEQ ID NO: 3469385 - RNA, 21 nt, Human
ccuagccgguuccugucccug

SEQ ID NO: 3469386 - RNA, 23 nt, Human
ccuagccucacgcuccuuucuga

SEQ ID NO: 3469387 - RNA, 18 nt, Human
ccuagccuuauccucuga

SEQ ID NO: 3469388 - RNA, 17 nt, Human
ccuagcgaucucuccug

SEQ ID NO: 3469389 - RNA, 17 nt, Human
ccuagcgggauggggcu

SEQ ID NO: 3469390 - RNA, 20 nt, Human
ccuagcuccuccccuuccuc

SEQ ID NO: 3469391 - RNA, 21 nt, Human
ccuagcugaauguuuuucuaa

SEQ ID NO: 3469392 - RNA, 22 nt, Human
ccuagcugcacagggcagcugg

SEQ ID NO: 3469393 - RNA, 15 nt, Human
ccuagcugcugucac

SEQ ID NO: 3469394 - RNA, 12 nt, Human
ccuagcuggaga

SEQ ID NO: 3469395 - RNA, 20 nt, Human
ccuagcuggagaggagcccu

SEQ ID NO: 3469396 - RNA, 21 nt, Human
ccuagcuggagaggagcccug

SEQ ID NO: 3469397 - RNA, 14 nt, Human
ccuagcuggcucug

SEQ ID NO: 3469398 - RNA, 17 nt, Human
ccuagcuggcucuguga

SEQ ID NO: 3469399 - RNA, 20 nt, Human
ccuagcuguccuuuuuccuc

SEQ ID NO: 3469400 - RNA, 18 nt, Human
ccuagcuuuagacccugg

SEQ ID NO: 3469401 - RNA, 20 nt, Human
ccuagcuuuauauauggaca

SEQ ID NO: 3469402 - RNA, 13 nt, Human
ccuaggaagccuc

SEQ ID NO: 3469403 - RNA, 17 nt, Human
ccuaggaccacucagcc

SEQ ID NO: 3469404 - RNA, 23 nt, Human
ccuaggaccacucagccccuagg

SEQ ID NO: 3469405 - RNA, 18 nt, Human
ccuaggacccgucuccag

SEQ ID NO: 3469406 - RNA, 20 nt, Human
ccuaggacccgucuccagcu

SEQ ID NO: 3469407 - RNA, 19 nt, Human
ccuaggagauaucugaggg

SEQ ID NO: 3469408 - RNA, 22 nt, Human
ccuaggagauaucugagggagg

SEQ ID NO: 3469409 - RNA, 20 nt, Human
ccuaggagugccccauucuu

SEQ ID NO: 3469410 - RNA, 23 nt, Human
ccuaggauaaaaagccagggcug

SEQ ID NO: 3469411 - RNA, 18 nt, Human
ccuaggauucacacccca

SEQ ID NO: 3469412 - RNA, 19 nt, Human
ccuaggauucacaccccac

SEQ ID NO: 3469413 - RNA, 11 nt, Human
ccuaggauucu

SEQ ID NO: 3469414 - RNA, 16 nt, Human
ccuaggcauucuggac

SEQ ID NO: 3469415 - RNA, 23 nt, Human
ccuaggcauuugcugaauacaga

SEQ ID NO: 3469416 - RNA, 15 nt, Human
ccuaggccacuccuc

SEQ ID NO: 3469417 - RNA, 21 nt, Human
ccucaacucaccuaauguuua

SEQ ID NO: 3469418 - RNA, 21 nt, Human
ccucaacucuccuccagaguc

SEQ ID NO: 3469419 - RNA, 15 nt, Human
ccucaacucugcuga

SEQ ID NO: 3469420 - RNA, 20 nt, Human
ccucaacucugcugaggguc

SEQ ID NO: 3469421 - RNA, 20 nt, Human
ccucaagcuaugugagcuca

SEQ ID NO: 3469422 - RNA, 21 nt, Human
ccucaaggacaaagucuccag

SEQ ID NO: 3469423 - RNA, 23 nt, Human
ccucaaggacaaagucuccagcc

SEQ ID NO: 3469424 - RNA, 13 nt, Human
ccucaaggacuug

SEQ ID NO: 3469425 - RNA, 23 nt, Human
ccucaaggacuugaaagcaucca

SEQ ID NO: 3469426 - RNA, 21 nt, Human
ccucaaggccucccacaguga

SEQ ID NO: 3469427 - RNA, 23 nt, Human
ccucaagguuuuagguucuaaag

SEQ ID NO: 3469428 - RNA, 13 nt, Human
ccucaagucuuuc

SEQ ID NO: 3469429 - RNA, 17 nt, Human
ccucaagugauccuccc

SEQ ID NO: 3469430 - RNA, 13 nt, Human
ccucaauccagcu

SEQ ID NO: 3469431 - RNA, 18 nt, Human
ccucaaucucaauccugc

SEQ ID NO: 3469432 - RNA, 14 nt, Human
ccucaaugugacca

SEQ ID NO: 3469433 - RNA, 13 nt, Human
ccucaauguuuga

SEQ ID NO: 3469434 - RNA, 23 nt, Human
ccucacacacaaugugucugaga

SEQ ID NO: 3469435 - RNA, 13 nt, Human
ccucacacacccu

SEQ ID NO: 3469436 - RNA, 13 nt, Human
ccucacacuggga

SEQ ID NO: 3469437 - RNA, 15 nt, Human
ccucacacugggacu

SEQ ID NO: 3469438 - RNA, 16 nt, Human
ccucacagccucugac

SEQ ID NO: 3469439 - RNA, 23 nt, Human
ccucacagccucugaccccuccu

SEQ ID NO: 3469440 - RNA, 17 nt, Human
ccucacagcuggccguc

SEQ ID NO: 3469441 - RNA, 17 nt, Human
ccucacaguauugcuca

SEQ ID NO: 3469442 - RNA, 22 nt, Human
ccucacaguauugcucacccag

SEQ ID NO: 3469443 - RNA, 16 nt, Human
ccucacagucccacug

SEQ ID NO: 3469444 - RNA, 22 nt, Human
ccucacaguccuuaccagcaga

SEQ ID NO: 3469445 - RNA, 24 nt, Human
ccucacaguccuuaccagcagagc

SEQ ID NO: 3469446 - RNA, 13 nt, Human
ccucacagugacc

SEQ ID NO: 3469447 - RNA, 18 nt, Human
ccucacagugacccuucc

SEQ ID NO: 3469448 - RNA, 21 nt, Human
ccucacauagcuacccaaaag

SEQ ID NO: 3469449 - RNA, 15 nt, Human
ccucacaucuuucac

SEQ ID NO: 3469450 - RNA, 13 nt, Human
ccucaccaggggc

SEQ ID NO: 3469451 - RNA, 16 nt, Human
ccucacccaccccugc

SEQ ID NO: 3469452 - RNA, 12 nt, Human
ccucaccccacu

SEQ ID NO: 3469453 - RNA, 22 nt, Human
ccucaccccacuuaucccucuc

SEQ ID NO: 3469454 - RNA, 19 nt, Human
ccucacccccagcuuugcu

SEQ ID NO: 3469455 - RNA, 21 nt, Human
ccucacccccucccaccccca

SEQ ID NO: 3469456 - RNA, 15 nt, Human
ccucacccccucggg

SEQ ID NO: 3469457 - RNA, 17 nt, Human
ccucaccccgaggcccu

SEQ ID NO: 3469458 - RNA, 18 nt, Human
ccucaccccgaggcccug

SEQ ID NO: 3469459 - RNA, 14 nt, Human
ccucaccccugccc

SEQ ID NO: 3469460 - RNA, 17 nt, Human
ccucaccccugcccugg

SEQ ID NO: 3469461 - RNA, 22 nt, Human
ccucaccccugguucucaucuu

SEQ ID NO: 3469462 - RNA, 21 nt, Human
ccucaccccuguccucacugc

SEQ ID NO: 3469463 - RNA, 15 nt, Human
ccucacccugagccc

SEQ ID NO: 3469464 - RNA, 21 nt, Human
ccucacccugagccccuuccu

SEQ ID NO: 3469465 - RNA, 15 nt, Human
ccucacccugccuua

SEQ ID NO: 3469466 - RNA, 13 nt, Human
ccucacccuugcg

SEQ ID NO: 3469467 - RNA, 14 nt, Human
ccucaccucaugcc

SEQ ID NO: 3469468 - RNA, 22 nt, Human
ccucaccucaugcccacccccu

SEQ ID NO: 3469469 - RNA, 23 nt, Human
ccucaccucaugcccacccccug

SEQ ID NO: 3469470 - RNA, 13 nt, Human
ccucaccuccucu

SEQ ID NO: 3469471 - RNA, 14 nt, Human
ccucaccuccucua

SEQ ID NO: 3469472 - RNA, 16 nt, Human
ccucaccucuacccaa

SEQ ID NO: 3469473 - RNA, 12 nt, Human
ccucaccucugg

SEQ ID NO: 3469474 - RNA, 22 nt, Human
ccucaccucuggacuggcuaga

SEQ ID NO: 3469475 - RNA, 22 nt, Human
ccucaccugggcaccuggggag

SEQ ID NO: 3469476 - RNA, 17 nt, Human
ccucaccuugcaacaca

SEQ ID NO: 3469477 - RNA, 18 nt, Human
ccucaccuugcaacacac

SEQ ID NO: 3469478 - RNA, 15 nt, Human
ccucaccuuggcacc

SEQ ID NO: 3469479 - RNA, 16 nt, Human
ccucaccuuggcacca

SEQ ID NO: 3469480 - RNA, 21 nt, Human
ccucacggugccuuuuuucac

SEQ ID NO: 3469481 - RNA, 16 nt, Human
ccucacgugcaaagcc

SEQ ID NO: 3469482 - RNA, 22 nt, Human
ccucacuaucccggcugcccuu

SEQ ID NO: 3469483 - RNA, 21 nt, Human
ccucacucccuucuaccugcc

SEQ ID NO: 3469484 - RNA, 15 nt, Human
ccucacucugccagg

SEQ ID NO: 3469485 - RNA, 18 nt, Human
ccucacucugccagggca

SEQ ID NO: 3469486 - RNA, 18 nt, Human
ccucacugaaaacaucug

SEQ ID NO: 3469487 - RNA, 14 nt, Human
ccucacugcccgca

SEQ ID NO: 3469488 - RNA, 15 nt, Human
ccucacugcccgcac

SEQ ID NO: 3469489 - RNA, 17 nt, Human
ccucacugcucccugaa

SEQ ID NO: 3469490 - RNA, 14 nt, Human
ccucacuggaugaa

SEQ ID NO: 3469491 - RNA, 12 nt, Human
ccucacuggcca

SEQ ID NO: 3469492 - RNA, 14 nt, Human
ccucacuugaaugu

SEQ ID NO: 3469493 - RNA, 18 nt, Human
ccucacuuuuaaugaaca

SEQ ID NO: 3469494 - RNA, 22 nt, Human
ccucacuuuuaaugaacaaaug

SEQ ID NO: 3469495 - RNA, 18 nt, Human
ccucagaaacacuggggc

SEQ ID NO: 3469496 - RNA, 20 nt, Human
ccucagaaacacuggggcug

SEQ ID NO: 3469497 - RNA, 16 nt, Human
ccucagaacccuuggc

SEQ ID NO: 3469498 - RNA, 20 nt, Human
ccucagacucuaagaaagaa

SEQ ID NO: 3469499 - RNA, 18 nt, Human
ccucagacugcacccagg

SEQ ID NO: 3469500 - RNA, 19 nt, Human
ccucagacuuaccaggaag

SEQ ID NO: 3469501 - RNA, 16 nt, Human
ccucagagacaucagc

SEQ ID NO: 3469502 - RNA, 20 nt, Human
ccucagagacaucagcccuu

SEQ ID NO: 3469503 - RNA, 16 nt, Human
ccucagagaccagggc

SEQ ID NO: 3469504 - RNA, 21 nt, Human
ccucagagaccagggcuccag

SEQ ID NO: 3469505 - RNA, 13 nt, Human
ccucagaguccag

SEQ ID NO: 3469506 - RNA, 16 nt, Human
ccucagaucuucugug

SEQ ID NO: 3469507 - RNA, 21 nt, Human
ccucagauuccuucccaugga

SEQ ID NO: 3469508 - RNA, 18 nt, Human
ccucagccacuugccugu

SEQ ID NO: 3469509 - RNA, 13 nt, Human
ccucagccagccu

SEQ ID NO: 3469510 - RNA, 14 nt, Human
ccucagccccucuu

SEQ ID NO: 3469511 - RNA, 18 nt, Human
ccucagccccucuugccc

SEQ ID NO: 3469512 - RNA, 16 nt, Human
ccucagcccugacccu

SEQ ID NO: 3469513 - RNA, 17 nt, Human
ccucagcccugacccug

SEQ ID NO: 3469514 - RNA, 21 nt, Human
ccucagcccugacccugugga

SEQ ID NO: 3469515 - RNA, 14 nt, Human
ccucagccuagacc

SEQ ID NO: 3469516 - RNA, 11 nt, Human
ccucagccucc

SEQ ID NO: 3469517 - RNA, 12 nt, Human
ccucagccuccc

SEQ ID NO: 3469518 - RNA, 22 nt, Human
ccucagccucccaaguagcugg

SEQ ID NO: 3469519 - RNA, 22 nt, Human
ccucagccucccgaauagcugg

SEQ ID NO: 3469520 - RNA, 13 nt, Human
ccucagccuccug

SEQ ID NO: 3469521 - RNA, 15 nt, Human
ccucagccuccugag

SEQ ID NO: 3469522 - RNA, 12 nt, Human
ccucagccugca

SEQ ID NO: 3469523 - RNA, 14 nt, Human
ccucagccugcaca

SEQ ID NO: 3469524 - RNA, 13 nt, Human
ccucagccuggcc

SEQ ID NO: 3469525 - RNA, 14 nt, Human
ccucagccuggcca

SEQ ID NO: 3469526 - RNA, 18 nt, Human
ccucagccuggccagaca

SEQ ID NO: 3469527 - RNA, 20 nt, Human
ccucagccuggccagacaca

SEQ ID NO: 3469528 - RNA, 20 nt, Human
ccucagccugggcgcugguc

SEQ ID NO: 3469529 - RNA, 21 nt, Human
ccucagccugggcgcuggucc

SEQ ID NO: 3469530 - RNA, 17 nt, Human
ccucagccuugccagag

SEQ ID NO: 3469531 - RNA, 18 nt, Human
ccucagccuugccagaga

SEQ ID NO: 3469532 - RNA, 22 nt, Human
ccucagccuugccagagaucca

SEQ ID NO: 3469533 - RNA, 13 nt, Human
ccucagcuaccca

SEQ ID NO: 3469534 - RNA, 20 nt, Human
ccucagcuacccacuauccu

SEQ ID NO: 3469535 - RNA, 11 nt, Human
ccucagcucca

SEQ ID NO: 3469536 - RNA, 13 nt, Human
ccucagcucggcu

SEQ ID NO: 3469537 - RNA, 13 nt, Human
ccucagcucuggg

SEQ ID NO: 3469538 - RNA, 15 nt, Human
ccucagcugccucac

SEQ ID NO: 3469539 - RNA, 19 nt, Human
ccucagcugccucacuucc

SEQ ID NO: 3469540 - RNA, 14 nt, Human
ccucagcugcuucu

SEQ ID NO: 3469541 - RNA, 18 nt, Human
ccucagcuuccccaguag

SEQ ID NO: 3469542 - RNA, 21 nt, Human
ccucagcuuccccaguagcug

SEQ ID NO: 3469543 - RNA, 19 nt, Human
ccucaggaaagaauagaaa

SEQ ID NO: 3469544 - RNA, 21 nt, Human
ccucaggaaagaauagaaaga

SEQ ID NO: 3469545 - RNA, 16 nt, Human
ccucaggacccucgcu

SEQ ID NO: 3469546 - RNA, 23 nt, Human
ccucaggacccucgcuggccccc

SEQ ID NO: 3469547 - RNA, 18 nt, Human
ccucaggacugcaacagg

SEQ ID NO: 3469548 - RNA, 14 nt, Human
ccucaggacuggga

SEQ ID NO: 3469549 - RNA, 15 nt, Human
ccucaggacugggag

SEQ ID NO: 3469550 - RNA, 16 nt, Human
ccucaggacugggagc

SEQ ID NO: 3469551 - RNA, 21 nt, Human
ccucaggagccgaagcccagg

SEQ ID NO: 3469552 - RNA, 19 nt, Human
ccucaggaggcaggaccuu

SEQ ID NO: 3469553 - RNA, 17 nt, Human
ccucaggcacuagccuu

SEQ ID NO: 3469554 - RNA, 12 nt, Human
ccucaggcaggu

SEQ ID NO: 3469555 - RNA, 21 nt, Human
ccucaggccaggugcaguggc

SEQ ID NO: 3469556 - RNA, 10 nt, Human
ccucaggccu

SEQ ID NO: 3469557 - RNA, 14 nt, Human
ccucaggccucugu

SEQ ID NO: 3469558 - RNA, 19 nt, Human
ccucaggccucugugccgc

SEQ ID NO: 3469559 - RNA, 16 nt, Human
ccucaggcuuccuugg

SEQ ID NO: 3469560 - RNA, 15 nt, Human
ccucagggacucagg

SEQ ID NO: 3469561 - RNA, 19 nt, Human
ccucagggagcagggaagg

SEQ ID NO: 3469562 - RNA, 18 nt, Human
ccucccacacccaaagcu

SEQ ID NO: 3469563 - RNA, 13 nt, Human
ccucccacaguga

SEQ ID NO: 3469564 - RNA, 13 nt, Human
ccucccaccccca

SEQ ID NO: 3469565 - RNA, 13 nt, Human
ccucccacccccu

SEQ ID NO: 3469566 - RNA, 13 nt, Human
ccucccaccucca

SEQ ID NO: 3469567 - RNA, 12 nt, Human
ccucccaccucu

SEQ ID NO: 3469568 - RNA, 13 nt, Human
ccucccaccuuug

SEQ ID NO: 3469569 - RNA, 19 nt, Human
ccucccagaaagcaaaccu

SEQ ID NO: 3469570 - RNA, 17 nt, Human
ccucccagaacacacuc

SEQ ID NO: 3469571 - RNA, 21 nt, Human
ccucccagagcaccugcuguc

SEQ ID NO: 3469572 - RNA, 16 nt, Human
ccucccagagguccag

SEQ ID NO: 3469573 - RNA, 19 nt, Human
ccucccagagguccagccc

SEQ ID NO: 3469574 - RNA, 20 nt, Human
ccucccagagguccagccca

SEQ ID NO: 3469575 - RNA, 12 nt, Human
ccucccagcccu

SEQ ID NO: 3469576 - RNA, 18 nt, Human
ccucccaggaagcccagg

SEQ ID NO: 3469577 - RNA, 20 nt, Human
ccucccaggcgccccuuccc

SEQ ID NO: 3469578 - RNA, 18 nt, Human
ccucccagggagcaaggg

SEQ ID NO: 3469579 - RNA, 21 nt, Human
ccucccagggagcaagggcag

SEQ ID NO: 3469580 - RNA, 12 nt, Human
ccucccaggguu

SEQ ID NO: 3469581 - RNA, 13 nt, Human
ccucccaggguuu

SEQ ID NO: 3469582 - RNA, 18 nt, Human
ccucccaggguuuuaacu

SEQ ID NO: 3469583 - RNA, 20 nt, Human
ccucccauagauacucucuu

SEQ ID NO: 3469584 - RNA, 13 nt, Human
ccucccaucuggg

SEQ ID NO: 3469585 - RNA, 16 nt, Human
ccuccccaacccugcc

SEQ ID NO: 3469586 - RNA, 21 nt, Human
ccuccccaacccugccccugc

SEQ ID NO: 3469587 - RNA, 22 nt, Human
ccuccccacggccgcuccaggg

SEQ ID NO: 3469588 - RNA, 12 nt, Human
ccuccccagcag

SEQ ID NO: 3469589 - RNA, 20 nt, Human
ccuccccagcagguggggag

SEQ ID NO: 3469590 - RNA, 16 nt, Human
ccuccccagccccuag

SEQ ID NO: 3469591 - RNA, 13 nt, Human
ccuccccagccug

SEQ ID NO: 3469592 - RNA, 16 nt, Human
ccuccccagccugcgc

SEQ ID NO: 3469593 - RNA, 12 nt, Human
ccuccccagggg

SEQ ID NO: 3469594 - RNA, 12 nt, Human
ccuccccaugca

SEQ ID NO: 3469595 - RNA, 21 nt, Human
ccuccccauuagagucagccu

SEQ ID NO: 3469596 - RNA, 14 nt, Human
ccuccccauuuccc

SEQ ID NO: 3469597 - RNA, 19 nt, Human
ccucccccaacccccaccc

SEQ ID NO: 3469598 - RNA, 22 nt, Human
ccucccccaacccccaccccac

SEQ ID NO: 3469599 - RNA, 15 nt, Human
ccucccccagagggg

SEQ ID NO: 3469600 - RNA, 23 nt, Human
ccucccccagccaugccagcugg

SEQ ID NO: 3469601 - RNA, 16 nt, Human
ccucccccccaugcac

SEQ ID NO: 3469602 - RNA, 19 nt, Human
ccucccccccaugcacugu

SEQ ID NO: 3469603 - RNA, 18 nt, Human
ccucccccguccuggagg

SEQ ID NO: 3469604 - RNA, 17 nt, Human
ccucccccucccccuuc

SEQ ID NO: 3469605 - RNA, 15 nt, Human
ccucccccuccuucc

SEQ ID NO: 3469606 - RNA, 21 nt, Human
ccucccccuccuucccagcug

SEQ ID NO: 3469607 - RNA, 12 nt, Human
ccucccccugag

SEQ ID NO: 3469608 - RNA, 17 nt, Human
ccucccccugccagugc

SEQ ID NO: 3469609 - RNA, 19 nt, Human
ccucccccugccagugccu

SEQ ID NO: 3469610 - RNA, 14 nt, Human
ccucccccugcccc

SEQ ID NO: 3469611 - RNA, 12 nt, Human
ccucccccuucu

SEQ ID NO: 3469612 - RNA, 23 nt, Human
ccuccccggcucgagcaguccug

SEQ ID NO: 3469613 - RNA, 17 nt, Human
ccuccccuauccaccca

SEQ ID NO: 3469614 - RNA, 13 nt, Human
ccuccccucaagg

SEQ ID NO: 3469615 - RNA, 18 nt, Human
ccuccccucacagccucu

SEQ ID NO: 3469616 - RNA, 12 nt, Human
ccuccccuccag

SEQ ID NO: 3469617 - RNA, 15 nt, Human
ccuccccuccccugc

SEQ ID NO: 3469618 - RNA, 21 nt, Human
ccuccccuccggacuggugcc

SEQ ID NO: 3469619 - RNA, 15 nt, Human
ccuccccuccuccug

SEQ ID NO: 3469620 - RNA, 14 nt, Human
ccuccccuccucug

SEQ ID NO: 3469621 - RNA, 18 nt, Human
ccuccccuccucugcuug

SEQ ID NO: 3469622 - RNA, 22 nt, Human
ccuccccugaggcucagggaaa

SEQ ID NO: 3469623 - RNA, 12 nt, Human
ccuccccugcca

SEQ ID NO: 3469624 - RNA, 13 nt, Human
ccuccccugccac

SEQ ID NO: 3469625 - RNA, 16 nt, Human
ccuccccugccagggc

SEQ ID NO: 3469626 - RNA, 13 nt, Human
ccuccccugcccu

SEQ ID NO: 3469627 - RNA, 16 nt, Human
ccuccccugcccuggu

SEQ ID NO: 3469628 - RNA, 13 nt, Human
ccuccccugccuu

SEQ ID NO: 3469629 - RNA, 14 nt, Human
ccuccccugccuug

SEQ ID NO: 3469630 - RNA, 15 nt, Human
ccuccccugccuugc

SEQ ID NO: 3469631 - RNA, 12 nt, Human
ccuccccugcug

SEQ ID NO: 3469632 - RNA, 14 nt, Human
ccuccccuugccag

SEQ ID NO: 3469633 - RNA, 13 nt, Human
ccuccccuugccu

SEQ ID NO: 3469634 - RNA, 16 nt, Human
ccuccccuugggcggc

SEQ ID NO: 3469635 - RNA, 21 nt, Human
ccucccgaauagcugggacua

SEQ ID NO: 3469636 - RNA, 19 nt, Human
ccucccgagcuccucuucc

SEQ ID NO: 3469637 - RNA, 21 nt, Human
ccucccgaguagcugggacua

SEQ ID NO: 3469638 - RNA, 11 nt, Human
ccucccgcccc

SEQ ID NO: 3469639 - RNA, 19 nt, Human
ccucccggcaugggaaagc

SEQ ID NO: 3469640 - RNA, 22 nt, Human
ccucccggcccugccugcuggu

SEQ ID NO: 3469641 - RNA, 16 nt, Human
ccucccgggcccuccc

SEQ ID NO: 3469642 - RNA, 21 nt, Human
ccucccgggcccucccuugga

SEQ ID NO: 3469643 - RNA, 16 nt, Human
ccucccggugcccaag

SEQ ID NO: 3469644 - RNA, 18 nt, Human
ccucccuaccucaaccug

SEQ ID NO: 3469645 - RNA, 21 nt, Human
ccucccucaaccucauccucu

SEQ ID NO: 3469646 - RNA, 12 nt, Human
ccucccucagcc

SEQ ID NO: 3469647 - RNA, 14 nt, Human
ccucccucagcccc

SEQ ID NO: 3469648 - RNA, 12 nt, Human
ccucccuccacc

SEQ ID NO: 3469649 - RNA, 16 nt, Human
ccucccuccaccccag

SEQ ID NO: 3469650 - RNA, 17 nt, Human
ccucccuccaccucccu

SEQ ID NO: 3469651 - RNA, 18 nt, Human
ccucccuccccugcccuc

SEQ ID NO: 3469652 - RNA, 14 nt, Human
ccucccucccggca

SEQ ID NO: 3469653 - RNA, 13 nt, Human
ccucccucccucu

SEQ ID NO: 3469654 - RNA, 15 nt, Human
ccucccucccucuuu

SEQ ID NO: 3469655 - RNA, 12 nt, Human
ccucccuccuuc

SEQ ID NO: 3469656 - RNA, 14 nt, Human
ccucccuccuuccu

SEQ ID NO: 3469657 - RNA, 22 nt, Human
ccucccucucucuucugcucca

SEQ ID NO: 3469658 - RNA, 14 nt, Human
ccucccucugaccu

SEQ ID NO: 3469659 - RNA, 14 nt, Human
ccucccucugaggc

SEQ ID NO: 3469660 - RNA, 15 nt, Human
ccucccucuuguuuu

SEQ ID NO: 3469661 - RNA, 20 nt, Human
ccucccugaaccaucccuga

SEQ ID NO: 3469662 - RNA, 17 nt, Human
ccucccugacccugcag

SEQ ID NO: 3469663 - RNA, 23 nt, Human
ccucccugagcuagaacccucug

SEQ ID NO: 3469664 - RNA, 22 nt, Human
ccucccugcaucugaccagcag

SEQ ID NO: 3469665 - RNA, 13 nt, Human
ccucccugccagu

SEQ ID NO: 3469666 - RNA, 18 nt, Human
ccucccugccccucccuu

SEQ ID NO: 3469667 - RNA, 22 nt, Human
ccucccugccccucccuucaac

SEQ ID NO: 3469668 - RNA, 15 nt, Human
ccucccugccuccag

SEQ ID NO: 3469669 - RNA, 20 nt, Human
ccucccuggagccuccacug

SEQ ID NO: 3469670 - RNA, 23 nt, Human
ccucccuggaguguggcugagga

SEQ ID NO: 3469671 - RNA, 12 nt, Human
ccucccuggaug

SEQ ID NO: 3469672 - RNA, 16 nt, Human
ccucccuggcucccau

SEQ ID NO: 3469673 - RNA, 18 nt, Human
ccucccuggcucccauga

SEQ ID NO: 3469674 - RNA, 12 nt, Human
ccucccuggcug

SEQ ID NO: 3469675 - RNA, 16 nt, Human
ccucccuggcugcccu

SEQ ID NO: 3469676 - RNA, 12 nt, Human
ccucccugucaa

SEQ ID NO: 3469677 - RNA, 23 nt, Human
ccucccugucaaagcugucacuu

SEQ ID NO: 3469678 - RNA, 15 nt, Human
ccucccuguccaccc

SEQ ID NO: 3469679 - RNA, 15 nt, Human
ccucccuguccuccu

SEQ ID NO: 3469680 - RNA, 16 nt, Human
ccucccuguccuccuc

SEQ ID NO: 3469681 - RNA, 19 nt, Human
ccucccuguuccccagaga

SEQ ID NO: 3469682 - RNA, 22 nt, Human
ccucccuguugacgaagucucu

SEQ ID NO: 3469683 - RNA, 14 nt, Human
ccucccuguuugaa

SEQ ID NO: 3469684 - RNA, 16 nt, Human
ccucccuuccuuuucc

SEQ ID NO: 3469685 - RNA, 22 nt, Human
ccucccuuccuuuucccugcuu

SEQ ID NO: 3469686 - RNA, 18 nt, Human
ccucccuucucccuggau

SEQ ID NO: 3469687 - RNA, 16 nt, Human
ccucccuucucuucac

SEQ ID NO: 3469688 - RNA, 13 nt, Human
ccucccuucugcu

SEQ ID NO: 3469689 - RNA, 23 nt, Human
ccucccuuggaaaccugcccugc

SEQ ID NO: 3469690 - RNA, 15 nt, Human
ccucccuuggcgugg

SEQ ID NO: 3469691 - RNA, 20 nt, Human
ccucccuuggggccuaugca

SEQ ID NO: 3469692 - RNA, 13 nt, Human
ccucccuuucucc

SEQ ID NO: 3469693 - RNA, 16 nt, Human
ccucccuuuuuccuug

SEQ ID NO: 3469694 - RNA, 22 nt, Human
ccuccgaccacuuccaggggaa

SEQ ID NO: 3469695 - RNA, 16 nt, Human
ccuccgagggacgcgg

SEQ ID NO: 3469696 - RNA, 19 nt, Human
ccuccgauccuuccuccca

SEQ ID NO: 3469697 - RNA, 16 nt, Human
ccuccgccaggcgaga

SEQ ID NO: 3469698 - RNA, 12 nt, Human
ccuccgcccugc

SEQ ID NO: 3469699 - RNA, 14 nt, Human
ccuccgcccugcca

SEQ ID NO: 3469700 - RNA, 14 nt, Human
ccuccgccuccagg

SEQ ID NO: 3469701 - RNA, 16 nt, Human
ccuccgccuccaggaa

SEQ ID NO: 3469702 - RNA, 13 nt, Human
ccuccgccucccg

SEQ ID NO: 3469703 - RNA, 16 nt, Human
ccuccgccucccgggu

SEQ ID NO: 3469704 - RNA, 14 nt, Human
ccuccgccucuugg

SEQ ID NO: 3469705 - RNA, 20 nt, Human
ccuccgcgugaucaaagcca

SEQ ID NO: 3469706 - RNA, 19 nt, Human
ccuccggccaggugccucc

SEQ ID NO: 3469707 - RNA, 20 nt, Human
ccuccggccaggugccuccu

SEQ ID NO: 3469708 - RNA, 16 nt, Human
ccuccggccuccccuc

SEQ ID NO: 3469709 - RNA, 14 nt, Human
ccuggggagccagg

SEQ ID NO: 3469710 - RNA, 19 nt, Human
ccuggggagugggacagag

SEQ ID NO: 3469711 - RNA, 22 nt, Human
ccuggggagugggacagagucu

SEQ ID NO: 3469712 - RNA, 14 nt, Human
ccuggggcacaguc

SEQ ID NO: 3469713 - RNA, 23 nt, Human
ccuggggcagucaccugcccaga

SEQ ID NO: 3469714 - RNA, 18 nt, Human
ccuggggcauccaugggg

SEQ ID NO: 3469715 - RNA, 13 nt, Human
ccuggggccaggc

SEQ ID NO: 3469716 - RNA, 15 nt, Human
ccuggggccaggccg

SEQ ID NO: 3469717 - RNA, 22 nt, Human
ccuggggccucggagccucauc

SEQ ID NO: 3469718 - RNA, 13 nt, Human
ccuggggccugac

SEQ ID NO: 3469719 - RNA, 14 nt, Human
ccuggggccugacu

SEQ ID NO: 3469720 - RNA, 17 nt, Human
ccuggggccugacugcu

SEQ ID NO: 3469721 - RNA, 16 nt, Human
ccuggggccugagaga

SEQ ID NO: 3469722 - RNA, 16 nt, Human
ccuggggccuggaccu

SEQ ID NO: 3469723 - RNA, 13 nt, Human
ccuggggccugua

SEQ ID NO: 3469724 - RNA, 14 nt, Human
ccuggggccuguac

SEQ ID NO: 3469725 - RNA, 20 nt, Human
ccuggggccuguacugccug

SEQ ID NO: 3469726 - RNA, 21 nt, Human
ccuggggccuguacugccugc

SEQ ID NO: 3469727 - RNA, 23 nt, Human
ccuggggccuguacugccugcuu

SEQ ID NO: 3469728 - RNA, 20 nt, Human
ccuggggcuaggcuggagcc

SEQ ID NO: 3469729 - RNA, 13 nt, Human
ccuggggcucccu

SEQ ID NO: 3469730 - RNA, 21 nt, Human
ccuggggcucuaacgccugag

SEQ ID NO: 3469731 - RNA, 15 nt, Human
ccuggggcucugugc

SEQ ID NO: 3469732 - RNA, 18 nt, Human
ccuggggcugaucucagg

SEQ ID NO: 3469733 - RNA, 15 nt, Human
ccuggggcugcuggc

SEQ ID NO: 3469734 - RNA, 15 nt, Human
ccuggggcuggccuc

SEQ ID NO: 3469735 - RNA, 19 nt, Human
ccuggggcuggccucccaa

SEQ ID NO: 3469736 - RNA, 15 nt, Human
ccuggggcuggcuuu

SEQ ID NO: 3469737 - RNA, 14 nt, Human
ccuggggcugggcc

SEQ ID NO: 3469738 - RNA, 15 nt, Human
ccuggggcugggccc

SEQ ID NO: 3469739 - RNA, 17 nt, Human
ccugggggaagcccugg

SEQ ID NO: 3469740 - RNA, 19 nt, Human
ccugggggaagcccuggau

SEQ ID NO: 3469741 - RNA, 16 nt, Human
ccugggggccugaccu

SEQ ID NO: 3469742 - RNA, 17 nt, Human
ccugggggccugaccuc

SEQ ID NO: 3469743 - RNA, 23 nt, Human
ccugggggccugaccucccccuc

SEQ ID NO: 3469744 - RNA, 15 nt, Human
ccugggggccuggcu

SEQ ID NO: 3469745 - RNA, 18 nt, Human
ccugggggcugggcagag

SEQ ID NO: 3469746 - RNA, 22 nt, Human
ccugggguauaaaacuuuccuc

SEQ ID NO: 3469747 - RNA, 14 nt, Human
ccuggggucuggag

SEQ ID NO: 3469748 - RNA, 15 nt, Human
ccuggggugacccgg

SEQ ID NO: 3469749 - RNA, 15 nt, Human
ccuggggugcccucc

SEQ ID NO: 3469750 - RNA, 16 nt, Human
ccuggggugcccucca

SEQ ID NO: 3469751 - RNA, 21 nt, Human
ccugggguggggauagggagc

SEQ ID NO: 3469752 - RNA, 20 nt, Human
ccuggggugugggaggcccg

SEQ ID NO: 3469753 - RNA, 22 nt, Human
ccuggguaaaugcagcgugaag

SEQ ID NO: 3469754 - RNA, 18 nt, Human
ccuggguagcgggggagg

SEQ ID NO: 3469755 - RNA, 15 nt, Human
ccugggucagucugg

SEQ ID NO: 3469756 - RNA, 21 nt, Human
ccugggucagucuggugggag

SEQ ID NO: 3469757 - RNA, 22 nt, Human
ccugggucagucuggugggagg

SEQ ID NO: 3469758 - RNA, 19 nt, Human
ccuggguccaaugcucagg

SEQ ID NO: 3469759 - RNA, 23 nt, Human
ccuggguccaggggaggccuucc

SEQ ID NO: 3469760 - RNA, 15 nt, Human
ccugggucccaggac

SEQ ID NO: 3469761 - RNA, 15 nt, Human
ccuggguccccagcc

SEQ ID NO: 3469762 - RNA, 14 nt, Human
ccugggucuguguc

SEQ ID NO: 3469763 - RNA, 21 nt, Human
ccugggucugugucucuuuuc

SEQ ID NO: 3469764 - RNA, 23 nt, Human
ccugggugcuggcugcccagacc

SEQ ID NO: 3469765 - RNA, 22 nt, Human
ccuggguggaucggccuccucu

SEQ ID NO: 3469766 - RNA, 17 nt, Human
ccuggguggcuacucug

SEQ ID NO: 3469767 - RNA, 19 nt, Human
ccuggguggcuacucugug

SEQ ID NO: 3469768 - RNA, 22 nt, Human
ccuggguggcuacucugugcca

SEQ ID NO: 3469769 - RNA, 23 nt, Human
ccuggguggcuacucugugccag

SEQ ID NO: 3469770 - RNA, 17 nt, Human
ccuggguggggcugcuc

SEQ ID NO: 3469771 - RNA, 19 nt, Human
ccuggguggguggugggga

SEQ ID NO: 3469772 - RNA, 21 nt, Human
ccugggugggugguggggagg

SEQ ID NO: 3469773 - RNA, 23 nt, Human
ccugggugggugguggggagggg

SEQ ID NO: 3469774 - RNA, 22 nt, Human
ccuggguuagacugccagcucu

SEQ ID NO: 3469775 - RNA, 19 nt, Human
ccuggguucagaaaugcug

SEQ ID NO: 3469776 - RNA, 20 nt, Human
ccuggguuccaauccuggcu

SEQ ID NO: 3469777 - RNA, 19 nt, Human
ccuggguuugguguauggu

SEQ ID NO: 3469778 - RNA, 22 nt, Human
ccuggguuuuguauucucugag

SEQ ID NO: 3469779 - RNA, 15 nt, Human
ccugguaagaaaaag

SEQ ID NO: 3469780 - RNA, 13 nt, Human
ccugguacccagc

SEQ ID NO: 3469781 - RNA, 20 nt, Human
ccugguacccagccaucugc

SEQ ID NO: 3469782 - RNA, 22 nt, Human
ccugguacccagccaucugccc

SEQ ID NO: 3469783 - RNA, 16 nt, Human
ccugguacucaagccc

SEQ ID NO: 3469784 - RNA, 20 nt, Human
ccugguacucccucucagga

SEQ ID NO: 3469785 - RNA, 20 nt, Human
ccugguagaccacugccaua

SEQ ID NO: 3469786 - RNA, 19 nt, Human
ccugguaggagugugugau

SEQ ID NO: 3469787 - RNA, 18 nt, Human
ccugguauauccaaaagc

SEQ ID NO: 3469788 - RNA, 17 nt, Human
ccuggucaggcccuggu

SEQ ID NO: 3469789 - RNA, 20 nt, Human
ccuggucagggugagcccau

SEQ ID NO: 3469790 - RNA, 22 nt, Human
ccugguccagggaagcuggccg

SEQ ID NO: 3469791 - RNA, 16 nt, Human
ccugguccaugcaggg

SEQ ID NO: 3469792 - RNA, 20 nt, Human
ccuggucccacgagggugcc

SEQ ID NO: 3469793 - RNA, 18 nt, Human
ccugguccccuccuuccc

SEQ ID NO: 3469794 - RNA, 14 nt, Human
ccuggucccuggga

SEQ ID NO: 3469795 - RNA, 16 nt, Human
ccuggucccugggagg

SEQ ID NO: 3469796 - RNA, 23 nt, Human
ccugguccugaggguccccaccu

SEQ ID NO: 3469797 - RNA, 18 nt, Human
ccugguccuuccaggccc

SEQ ID NO: 3469798 - RNA, 19 nt, Human
ccugguccuuccaggcccc

SEQ ID NO: 3469799 - RNA, 21 nt, Human
ccuggucgccuuccaccucug

SEQ ID NO: 3469800 - RNA, 18 nt, Human
ccuggucucacccuggag

SEQ ID NO: 3469801 - RNA, 21 nt, Human
ccuggucucacccuggaggca

SEQ ID NO: 3469802 - RNA, 16 nt, Human
ccuggucuuuccucug

SEQ ID NO: 3469803 - RNA, 13 nt, Human
ccuggucuuugag

SEQ ID NO: 3469804 - RNA, 21 nt, Human
ccuggugaggaagcuccaguc

SEQ ID NO: 3469805 - RNA, 23 nt, Human
ccuggugaggaagcuccaguccu

SEQ ID NO: 3469806 - RNA, 14 nt, Human
ccuggugaucacgu

SEQ ID NO: 3469807 - RNA, 20 nt, Human
ccuggugcacuggccccacc

SEQ ID NO: 3469808 - RNA, 12 nt, Human
ccuggugccacc

SEQ ID NO: 3469809 - RNA, 13 nt, Human
ccuggugccaccu

SEQ ID NO: 3469810 - RNA, 20 nt, Human
ccuggugcccuggaugccca

SEQ ID NO: 3469811 - RNA, 21 nt, Human
ccuggugcccuggaugcccag

SEQ ID NO: 3469812 - RNA, 19 nt, Human
ccuggugcucucugccacu

SEQ ID NO: 3469813 - RNA, 13 nt, Human
ccuggugcugcug

SEQ ID NO: 3469814 - RNA, 13 nt, Human
ccuggugcuggau

SEQ ID NO: 3469815 - RNA, 14 nt, Human
ccuggugcuucucc

SEQ ID NO: 3469816 - RNA, 17 nt, Human
ccugguggacaguccug

SEQ ID NO: 3469817 - RNA, 22 nt, Human
ccugguggagaaagcacugacc

SEQ ID NO: 3469818 - RNA, 13 nt, Human
ccugguggcagcu

SEQ ID NO: 3469819 - RNA, 19 nt, Human
ccugguggcagcucaccuc

SEQ ID NO: 3469820 - RNA, 17 nt, Human
ccugguggcagcugcgg

SEQ ID NO: 3469821 - RNA, 14 nt, Human
ccugguggcagugg

SEQ ID NO: 3469822 - RNA, 18 nt, Human
ccugguggcagugggagc

SEQ ID NO: 3469823 - RNA, 21 nt, Human
ccugguggcagugggagcugc

SEQ ID NO: 3469824 - RNA, 16 nt, Human
ccugguggcccucucc

SEQ ID NO: 3469825 - RNA, 18 nt, Human
ccugguggcccucucccc

SEQ ID NO: 3469826 - RNA, 21 nt, Human
ccugguggcccucuccccugc

SEQ ID NO: 3469827 - RNA, 14 nt, Human
ccuggugggccucc

SEQ ID NO: 3469828 - RNA, 14 nt, Human
ccugguggggcagc

SEQ ID NO: 3469829 - RNA, 16 nt, Human
ccugguggggcagcuc

SEQ ID NO: 3469830 - RNA, 22 nt, Human
ccugguggguccaggggccccu

SEQ ID NO: 3469831 - RNA, 19 nt, Human
ccuggugguauuuucaaua

SEQ ID NO: 3469832 - RNA, 22 nt, Human
ccuggugguucacucuuggagc

SEQ ID NO: 3469833 - RNA, 12 nt, Human
ccuggugucacc

SEQ ID NO: 3469834 - RNA, 21 nt, Human
ccuggugucaccccagagcca

SEQ ID NO: 3469835 - RNA, 20 nt, Human
ccuggugugaagguccugcu

SEQ ID NO: 3469836 - RNA, 22 nt, Human
ccugguguuucuagcacuggcc

SEQ ID NO: 3469837 - RNA, 23 nt, Human
ccugguucaagcgauucucuugc

SEQ ID NO: 3469838 - RNA, 14 nt, Human
ccugguucucaucu

SEQ ID NO: 3469839 - RNA, 14 nt, Human
ccugguuuccugcc

SEQ ID NO: 3469840 - RNA, 19 nt, Human
ccugguuuuuggauuaaau

SEQ ID NO: 3469841 - RNA, 22 nt, Human
ccugguuuuuggauuaaauuag

SEQ ID NO: 3469842 - RNA, 19 nt, Human
ccugguuuuuguagccuuc

SEQ ID NO: 3469843 - RNA, 13 nt, Human
ccuguaaaacuuu

SEQ ID NO: 3469844 - RNA, 20 nt, Human
ccuguaaaacuuuauuuuau

SEQ ID NO: 3469845 - RNA, 13 nt, Human
ccuguaaacacuc

SEQ ID NO: 3469846 - RNA, 21 nt, Human
ccuguaaccucuucagaggcc

SEQ ID NO: 3469847 - RNA, 16 nt, Human
ccuguaagccaaagaa

SEQ ID NO: 3469848 - RNA, 18 nt, Human
ccuguaagccaaagaaau

SEQ ID NO: 3469849 - RNA, 14 nt, Human
ccuguaagccugca

SEQ ID NO: 3469850 - RNA, 14 nt, Human
ccuguaauaaauau

SEQ ID NO: 3469851 - RNA, 22 nt, Human
ccuguaauaaauaugagugcca

SEQ ID NO: 3469852 - RNA, 14 nt, Human
ccuuaaguaagcaa

SEQ ID NO: 3469853 - RNA, 22 nt, Human
ccuuaaguaauguuaauucuua

SEQ ID NO: 3469854 - RNA, 12 nt, Human
ccuuaagucaga

SEQ ID NO: 3469855 - RNA, 22 nt, Human
ccuuaagugaggaaaucaaagu

SEQ ID NO: 3469856 - RNA, 22 nt, Human
ccuuaaugcuucauaugaggag

SEQ ID NO: 3469857 - RNA, 16 nt, Human
ccuuaauuacuuaaaa

SEQ ID NO: 3469858 - RNA, 13 nt, Human
ccuuaauuuccuu

SEQ ID NO: 3469859 - RNA, 23 nt, Human
ccuuacaaaugauugcuuuuaaa

SEQ ID NO: 3469860 - RNA, 15 nt, Human
ccuuacacuuacugu

SEQ ID NO: 3469861 - RNA, 15 nt, Human
ccuuacauuuccugg

SEQ ID NO: 3469862 - RNA, 19 nt, Human
ccuuacauuugugagauuc

SEQ ID NO: 3469863 - RNA, 20 nt, Human
ccuuaccacugcucugauga

SEQ ID NO: 3469864 - RNA, 20 nt, Human
ccuuaccccuggcuguuugg

SEQ ID NO: 3469865 - RNA, 14 nt, Human
ccuuacccuuagaa

SEQ ID NO: 3469866 - RNA, 14 nt, Human
ccuuaccuccugcc

SEQ ID NO: 3469867 - RNA, 19 nt, Human
ccuuaccugccaggaagcc

SEQ ID NO: 3469868 - RNA, 14 nt, Human
ccuuaccuuuuuau

SEQ ID NO: 3469869 - RNA, 21 nt, Human
ccuuacgaucaggcacagguc

SEQ ID NO: 3469870 - RNA, 16 nt, Human
ccuuacgcuuugucac

SEQ ID NO: 3469871 - RNA, 15 nt, Human
ccuuacuccuguggg

SEQ ID NO: 3469872 - RNA, 17 nt, Human
ccuuacuucuugcccug

SEQ ID NO: 3469873 - RNA, 23 nt, Human
ccuuacuuuacugccugaauaaa

SEQ ID NO: 3469874 - RNA, 18 nt, Human
ccuuacuuuuuauauaua

SEQ ID NO: 3469875 - RNA, 15 nt, Human
ccuuagaaaaugugu

SEQ ID NO: 3469876 - RNA, 22 nt, Human
ccuuagaaauguaaacugccau

SEQ ID NO: 3469877 - RNA, 14 nt, Human
ccuuagaaccuuuc

SEQ ID NO: 3469878 - RNA, 16 nt, Human
ccuuagaaccuuucuu

SEQ ID NO: 3469879 - RNA, 21 nt, Human
ccuuagacagaggcccucaag

SEQ ID NO: 3469880 - RNA, 22 nt, Human
ccuuagacagaggcccucaagu

SEQ ID NO: 3469881 - RNA, 15 nt, Human
ccuuagaccaccaag

SEQ ID NO: 3469882 - RNA, 18 nt, Human
ccuuagaccaccaagccu

SEQ ID NO: 3469883 - RNA, 16 nt, Human
ccuuagacucuuuucc

SEQ ID NO: 3469884 - RNA, 16 nt, Human
ccuuagagacaucaaa

SEQ ID NO: 3469885 - RNA, 16 nt, Human
ccuuagagccaggcac

SEQ ID NO: 3469886 - RNA, 14 nt, Human
ccuuagaucuggca

SEQ ID NO: 3469887 - RNA, 18 nt, Human
ccuuagauuagcucugga

SEQ ID NO: 3469888 - RNA, 21 nt, Human
ccuuagauuagcucuggacca

SEQ ID NO: 3469889 - RNA, 20 nt, Human
ccuuagauuuaguaguguaa

SEQ ID NO: 3469890 - RNA, 17 nt, Human
ccuuagcaacagccgag

SEQ ID NO: 3469891 - RNA, 20 nt, Human
ccuuagcagggaaacagcua

SEQ ID NO: 3469892 - RNA, 18 nt, Human
ccuuagccaguuguauau

SEQ ID NO: 3469893 - RNA, 21 nt, Human
ccuuagccuaaaauccacacc

SEQ ID NO: 3469894 - RNA, 14 nt, Human
ccuuagccucccug

SEQ ID NO: 3469895 - RNA, 15 nt, Human
ccuuagccuggaccu

SEQ ID NO: 3469896 - RNA, 17 nt, Human
ccuuagccuggaccucu

SEQ ID NO: 3469897 - RNA, 19 nt, Human
ccuuagcucccucccgcac

SEQ ID NO: 3469898 - RNA, 13 nt, Human
ccuuagcugccaa

SEQ ID NO: 3469899 - RNA, 22 nt, Human
ccuuagcuggcauuacagcugg

SEQ ID NO: 3469900 - RNA, 21 nt, Human
ccuuagcuuagaccucagccu

SEQ ID NO: 3469901 - RNA, 12 nt, Human
ccuuagcuucag

SEQ ID NO: 3469902 - RNA, 16 nt, Human
ccuuaggcagggaagu

SEQ ID NO: 3469903 - RNA, 14 nt, Human
ccuuaggccucuga

SEQ ID NO: 3469904 - RNA, 16 nt, Human
ccuuaggccucugaga

SEQ ID NO: 3469905 - RNA, 15 nt, Human
ccuuaggccuuccuc

SEQ ID NO: 3469906 - RNA, 18 nt, Human
ccuuagggaagcuggccu

SEQ ID NO: 3469907 - RNA, 20 nt, Human
ccuuagggaagcuggccuga

SEQ ID NO: 3469908 - RNA, 16 nt, Human
ccuuaggguuuucucu

SEQ ID NO: 3469909 - RNA, 20 nt, Human
ccuuaggugauccacucgcc

SEQ ID NO: 3469910 - RNA, 20 nt, Human
ccuuagugcaguuauuugcu

SEQ ID NO: 3469911 - RNA, 15 nt, Human
ccuuagugggccagg

SEQ ID NO: 3469912 - RNA, 12 nt, Human
ccuuaguguuuc

SEQ ID NO: 3469913 - RNA, 14 nt, Human
ccuuaguguuucug

SEQ ID NO: 3469914 - RNA, 19 nt, Human
ccuuaguguuucugugcau

SEQ ID NO: 3469915 - RNA, 20 nt, Human
ccuuaguguuucugugcaug

SEQ ID NO: 3469916 - RNA, 17 nt, Human
ccuuauagucuaagacu

SEQ ID NO: 3469917 - RNA, 14 nt, Human
ccuuauaguuacug

SEQ ID NO: 3469918 - RNA, 21 nt, Human
ccuuauaguuacuguguaauu

SEQ ID NO: 3469919 - RNA, 22 nt, Human
ccuuauaguuugggcuucagcc

SEQ ID NO: 3469920 - RNA, 18 nt, Human
ccuuaucaaaggacacca

SEQ ID NO: 3469921 - RNA, 14 nt, Human
ccuuaucaaguguc

SEQ ID NO: 3469922 - RNA, 20 nt, Human
ccuuauccucccuguaacuu

SEQ ID NO: 3469923 - RNA, 13 nt, Human
ccuuauccucuga

SEQ ID NO: 3469924 - RNA, 16 nt, Human
ccuuauccucugaucu

SEQ ID NO: 3469925 - RNA, 13 nt, Human
ccuuaucugugcg

SEQ ID NO: 3469926 - RNA, 20 nt, Human
ccuuaucugugcgugaaaca

SEQ ID NO: 3469927 - RNA, 17 nt, Human
ccuuaucugugcucagg

SEQ ID NO: 3469928 - RNA, 13 nt, Human
ccuuaucuugcac

SEQ ID NO: 3469929 - RNA, 12 nt, Human
ccuuauggaaca

SEQ ID NO: 3469930 - RNA, 14 nt, Human
ccuuauggaacacu

SEQ ID NO: 3469931 - RNA, 19 nt, Human
ccuuauggaacacucugag

SEQ ID NO: 3469932 - RNA, 19 nt, Human
ccuuauggaugauuuaagu

SEQ ID NO: 3469933 - RNA, 14 nt, Human
ccuuauucagggaa

SEQ ID NO: 3469934 - RNA, 19 nt, Human
ccuucaaagcaaaugucuu

SEQ ID NO: 3469935 - RNA, 14 nt, Human
ccuucaaccauucc

SEQ ID NO: 3469936 - RNA, 21 nt, Human
ccuucaacguuucuucacuuu

SEQ ID NO: 3469937 - RNA, 13 nt, Human
ccuucaagaccuu

SEQ ID NO: 3469938 - RNA, 13 nt, Human
ccuucaagcucug

SEQ ID NO: 3469939 - RNA, 14 nt, Human
ccuucaauaaagua

SEQ ID NO: 3469940 - RNA, 15 nt, Human
ccuucaauuccuggg

SEQ ID NO: 3469941 - RNA, 18 nt, Human
ccuucacaaagcccaagg

SEQ ID NO: 3469942 - RNA, 18 nt, Human
ccuucacaccauaacuag

SEQ ID NO: 3469943 - RNA, 17 nt, Human
ccuucaccccaguggcc

SEQ ID NO: 3469944 - RNA, 19 nt, Human
ccuucaccuuuguccccac

SEQ ID NO: 3469945 - RNA, 14 nt, Human
ccuucacuccggug

SEQ ID NO: 3469946 - RNA, 23 nt, Human
ccuucacuccggugugccugcag

SEQ ID NO: 3469947 - RNA, 20 nt, Human
ccuucacuucugaccacacu

SEQ ID NO: 3469948 - RNA, 15 nt, Human
ccuucagagagcagu

SEQ ID NO: 3469949 - RNA, 16 nt, Human
ccuucagauccuaccc

SEQ ID NO: 3469950 - RNA, 22 nt, Human
ccuucagauguucucucccagg

SEQ ID NO: 3469951 - RNA, 23 nt, Human
ccuucagauguucucucccaggg

SEQ ID NO: 3469952 - RNA, 20 nt, Human
ccuucagcacuuuagaauau

SEQ ID NO: 3469953 - RNA, 19 nt, Human
ccuucagcccccagccccu

SEQ ID NO: 3469954 - RNA, 18 nt, Human
ccuucagcucacgcuuca

SEQ ID NO: 3469955 - RNA, 12 nt, Human
ccuucaggguga

SEQ ID NO: 3469956 - RNA, 19 nt, Human
ccuucagggugaugccagg

SEQ ID NO: 3469957 - RNA, 17 nt, Human
ccuucaguacccucuca

SEQ ID NO: 3469958 - RNA, 20 nt, Human
ccuucaguacccucucagcu

SEQ ID NO: 3469959 - RNA, 20 nt, Human
ccuucagucuugaauuucua

SEQ ID NO: 3469960 - RNA, 14 nt, Human
ccuucagugcccac

SEQ ID NO: 3469961 - RNA, 13 nt, Human
ccuucagugccuu

SEQ ID NO: 3469962 - RNA, 15 nt, Human
ccuucagugccuuau

SEQ ID NO: 3469963 - RNA, 19 nt, Human
ccuucagugccuuauggaa

SEQ ID NO: 3469964 - RNA, 15 nt, Human
ccuucaucuccaggg

SEQ ID NO: 3469965 - RNA, 15 nt, Human
ccuucaucuuccugu

SEQ ID NO: 3469966 - RNA, 16 nt, Human
ccuucaucuuccugug

SEQ ID NO: 3469967 - RNA, 18 nt, Human
ccuucaucuuccuguguc

SEQ ID NO: 3469968 - RNA, 22 nt, Human
ccuucaucuuccuguguccuga

SEQ ID NO: 3469969 - RNA, 13 nt, Human
ccuucaucuuuua

SEQ ID NO: 3469970 - RNA, 17 nt, Human
ccuucaugacagccucc

SEQ ID NO: 3469971 - RNA, 21 nt, Human
ccuucaugcauggaaauuccc

SEQ ID NO: 3469972 - RNA, 16 nt, Human
ccuucauggccccagc

SEQ ID NO: 3469973 - RNA, 19 nt, Human
ccuucauuucaggagggau

SEQ ID NO: 3469974 - RNA, 19 nt, Human
ccuucauuucugauauaga

SEQ ID NO: 3469975 - RNA, 16 nt, Human
ccuuccaacaggagcu

SEQ ID NO: 3469976 - RNA, 19 nt, Human
ccuuccaacaggagcuggg

SEQ ID NO: 3469977 - RNA, 16 nt, Human
ccuuccaacugcugcc

SEQ ID NO: 3469978 - RNA, 15 nt, Human
ccuuccaagagccug

SEQ ID NO: 3469979 - RNA, 18 nt, Human
ccuuccaaugucuggaga

SEQ ID NO: 3469980 - RNA, 19 nt, Human
ccuuccaaugucuggagac

SEQ ID NO: 3469981 - RNA, 15 nt, Human
ccuuccacaccccca

SEQ ID NO: 3469982 - RNA, 18 nt, Human
ccuuccacacccccaccc

SEQ ID NO: 3469983 - RNA, 16 nt, Human
ccuuccaccucuggga

SEQ ID NO: 3469984 - RNA, 15 nt, Human
ccuuccaccugcucu

SEQ ID NO: 3469985 - RNA, 18 nt, Human
ccuuccaccugcucugcu

SEQ ID NO: 3469986 - RNA, 18 nt, Human
ccuuccacgcugucucca

SEQ ID NO: 3469987 - RNA, 16 nt, Human
ccuuccacggacucaa

SEQ ID NO: 3469988 - RNA, 15 nt, Human
ccuuccacugagggc

SEQ ID NO: 3469989 - RNA, 16 nt, Human
ccuuccacugccucug

SEQ ID NO: 3469990 - RNA, 18 nt, Human
ccuuccacugccucugcc

SEQ ID NO: 3469991 - RNA, 20 nt, Human
ccuuccacugccucugccuu

SEQ ID NO: 3469992 - RNA, 21 nt, Human
ccuuccacugccucugccuua

SEQ ID NO: 3469993 - RNA, 14 nt, Human
ccuuccagacauac

SEQ ID NO: 3469994 - RNA, 10 nt, Human
ccuuccagau

SEQ ID NO: 3469995 - RNA, 14 nt, Human
ccuuccagcccaga

SEQ ID NO: 3469996 - RNA, 15 nt, Human
ccuuccagcuccugu

SEQ ID NO: 3469997 - RNA, 21 nt, Human
aucgccagcugaugacucaag

SEQ ID NO: 3469998 - RNA, 18 nt, Human
aucgcccuggcaggcagg

SEQ ID NO: 3469999 - RNA, 15 nt, Human
aucgccuuccccacc

SEQ ID NO: 3470000 - RNA, 12 nt, Human
aucgccuuuccc

SEQ ID NO: 3470001 - RNA, 22 nt, Human
aucgcggcggagcuggccccgc

SEQ ID NO: 3470002 - RNA, 17 nt, Human
aucgcuccaccuugcag

SEQ ID NO: 3470003 - RNA, 21 nt, Human
aucgcuccaccuugcagcucu

SEQ ID NO: 3470004 - RNA, 16 nt, Human
aucgcugugaugcugg

SEQ ID NO: 3470005 - RNA, 18 nt, Human
aucggaagcagugccuuc

SEQ ID NO: 3470006 - RNA, 20 nt, Human
aucggagaacaugaaucaaa

SEQ ID NO: 3470007 - RNA, 13 nt, Human
aucggagacagug

SEQ ID NO: 3470008 - RNA, 18 nt, Human
aucggagucagccaggag

SEQ ID NO: 3470009 - RNA, 15 nt, Human
aucggcauuuguuuc

SEQ ID NO: 3470010 - RNA, 23 nt, Human
aucggcccacagcucccacccca

SEQ ID NO: 3470011 - RNA, 14 nt, Human
aucggccuccucuu

SEQ ID NO: 3470012 - RNA, 15 nt, Human
aucgggaacaguguu

SEQ ID NO: 3470013 - RNA, 16 nt, Human
aucgggaacaguguuu

SEQ ID NO: 3470014 - RNA, 21 nt, Human
aucggggagguuuucuccccc

SEQ ID NO: 3470015 - RNA, 18 nt, Human
aucggugaaacuaacaga

SEQ ID NO: 3470016 - RNA, 16 nt, Human
aucgguuaacaaauaa

SEQ ID NO: 3470017 - RNA, 12 nt, Human
aucguaaaauua

SEQ ID NO: 3470018 - RNA, 14 nt, Human
aucguaaaauuaag

SEQ ID NO: 3470019 - RNA, 15 nt, Human
aucguaaccagccag

SEQ ID NO: 3470020 - RNA, 16 nt, Human
aucguaaccagccaga

SEQ ID NO: 3470021 - RNA, 15 nt, Human
aucguauagcuguau

SEQ ID NO: 3470022 - RNA, 23 nt, Human
aucguauagcuguauugaaucau

SEQ ID NO: 3470023 - RNA, 14 nt, Human
aucgucacugcuua

SEQ ID NO: 3470024 - RNA, 12 nt, Human
aucguccaggga

SEQ ID NO: 3470025 - RNA, 12 nt, Human
aucgugaaaccc

SEQ ID NO: 3470026 - RNA, 20 nt, Human
aucgugaaacccugucucua

SEQ ID NO: 3470027 - RNA, 23 nt, Human
aucgugaagaagccuguaacacu

SEQ ID NO: 3470028 - RNA, 14 nt, Human
aucgugacaacacu

SEQ ID NO: 3470029 - RNA, 17 nt, Human
aucgugacgcugaauaa

SEQ ID NO: 3470030 - RNA, 18 nt, Human
aucgugacgcugaauaaa

SEQ ID NO: 3470031 - RNA, 18 nt, Human
aucgugccguuacucucc

SEQ ID NO: 3470032 - RNA, 15 nt, Human
aucgugcuaaauuuu

SEQ ID NO: 3470033 - RNA, 16 nt, Human
aucgugcuaaauuuuc

SEQ ID NO: 3470034 - RNA, 16 nt, Human
aucguuauguguguau

SEQ ID NO: 3470035 - RNA, 18 nt, Human
aucguuauguguguauau

SEQ ID NO: 3470036 - RNA, 14 nt, Human
aucguugcccccau

SEQ ID NO: 3470037 - RNA, 14 nt, Human
aucguuuuuguauu

SEQ ID NO: 3470038 - RNA, 20 nt, Human
aucuaaaaauaacuguaauu

SEQ ID NO: 3470039 - RNA, 19 nt, Human
aucuaaaaauagacuuaaa

SEQ ID NO: 3470040 - RNA, 14 nt, Human
aucuaaaaauauac

SEQ ID NO: 3470041 - RNA, 18 nt, Human
aucuaaaaauauacaugu

SEQ ID NO: 3470042 - RNA, 20 nt, Human
aucuaaaauauuauuuuauu

SEQ ID NO: 3470043 - RNA, 22 nt, Human
aucuaaacuggauucacagcuc

SEQ ID NO: 3470044 - RNA, 16 nt, Human
aucuaaacuuuaauau

SEQ ID NO: 3470045 - RNA, 21 nt, Human
aucuaaacuuuaauauguauu

SEQ ID NO: 3470046 - RNA, 22 nt, Human
aucuaaacuuuaauauguauuu

SEQ ID NO: 3470047 - RNA, 12 nt, Human
aucuaaaguuau

SEQ ID NO: 3470048 - RNA, 15 nt, Human
aucuaaaguuauauu

SEQ ID NO: 3470049 - RNA, 22 nt, Human
aucuaaauauugauuucugccu

SEQ ID NO: 3470050 - RNA, 22 nt, Human
aucuaaaucuauuuauuaauau

SEQ ID NO: 3470051 - RNA, 17 nt, Human
aucuaaauggaaccacu

SEQ ID NO: 3470052 - RNA, 15 nt, Human
aucuaaauguugaaa

SEQ ID NO: 3470053 - RNA, 21 nt, Human
aucuaaauugaauaaugguac

SEQ ID NO: 3470054 - RNA, 16 nt, Human
aucuaagaauaauaaa

SEQ ID NO: 3470055 - RNA, 17 nt, Human
aucuaagaauaauaaaa

SEQ ID NO: 3470056 - RNA, 21 nt, Human
aucuaagcagcauuucugaag

SEQ ID NO: 3470057 - RNA, 13 nt, Human
aucuaagccugaa

SEQ ID NO: 3470058 - RNA, 16 nt, Human
aucuaagccuuuccau

SEQ ID NO: 3470059 - RNA, 15 nt, Human
aucuaagcugcagcu

SEQ ID NO: 3470060 - RNA, 14 nt, Human
aucuaagugauaua

SEQ ID NO: 3470061 - RNA, 16 nt, Human
aucuaaguuaauuuaa

SEQ ID NO: 3470062 - RNA, 17 nt, Human
aucuaaguuaauuuaaa

SEQ ID NO: 3470063 - RNA, 17 nt, Human
aucuaauaccucugugu

SEQ ID NO: 3470064 - RNA, 22 nt, Human
aucuaauaccucugugugcucc

SEQ ID NO: 3470065 - RNA, 19 nt, Human
aucuaauauauaugaauaa

SEQ ID NO: 3470066 - RNA, 22 nt, Human
aucuaauauauaugaauaaagu

SEQ ID NO: 3470067 - RNA, 22 nt, Human
aucuaauaucccagaaaaagua

SEQ ID NO: 3470068 - RNA, 13 nt, Human
aucuaauucugau

SEQ ID NO: 3470069 - RNA, 17 nt, Human
aucuaauucuuuaauga

SEQ ID NO: 3470070 - RNA, 14 nt, Human
aucuacacacggug

SEQ ID NO: 3470071 - RNA, 18 nt, Human
aucuacacuccagugaga

SEQ ID NO: 3470072 - RNA, 19 nt, Human
aucuacacuccagugagac

SEQ ID NO: 3470073 - RNA, 22 nt, Human
aucuacagauagagaguuguug

SEQ ID NO: 3470074 - RNA, 20 nt, Human
aucuaccccagacuagaugu

SEQ ID NO: 3470075 - RNA, 17 nt, Human
aucuaccccuuacuuau

SEQ ID NO: 3470076 - RNA, 21 nt, Human
aucuaccuagauuuaauauaa

SEQ ID NO: 3470077 - RNA, 17 nt, Human
aucuaccuucuguaguu

SEQ ID NO: 3470078 - RNA, 21 nt, Human
aucuaccuucuguaguuuuau

SEQ ID NO: 3470079 - RNA, 15 nt, Human
aucuacucaaagcau

SEQ ID NO: 3470080 - RNA, 18 nt, Human
aucuacucccaaguaugg

SEQ ID NO: 3470081 - RNA, 14 nt, Human
aucuacugcauuua

SEQ ID NO: 3470082 - RNA, 13 nt, Human
aucuacuuccaaa

SEQ ID NO: 3470083 - RNA, 15 nt, Human
aucuacuuccaaacu

SEQ ID NO: 3470084 - RNA, 19 nt, Human
aucuacuuccaaacuaauu

SEQ ID NO: 3470085 - RNA, 23 nt, Human
aucuacuucuguaauugugugga

SEQ ID NO: 3470086 - RNA, 12 nt, Human
aucuagaagaaa

SEQ ID NO: 3470087 - RNA, 14 nt, Human
aucuagaagaaaug

SEQ ID NO: 3470088 - RNA, 15 nt, Human
aucuagaagaaauga

SEQ ID NO: 3470089 - RNA, 17 nt, Human
aucuagaagaaaugaaa

SEQ ID NO: 3470090 - RNA, 21 nt, Human
aucuagaagaaaugaaauuuu

SEQ ID NO: 3470091 - RNA, 20 nt, Human
aucuagaagagucuauuguc

SEQ ID NO: 3470092 - RNA, 19 nt, Human
aucuagacccaucuucuuu

SEQ ID NO: 3470093 - RNA, 21 nt, Human
aucuagacucaagguucccag

SEQ ID NO: 3470094 - RNA, 18 nt, Human
aucuagagcuugaugcca

SEQ ID NO: 3470095 - RNA, 17 nt, Human
aucuagaggcuuccuuc

SEQ ID NO: 3470096 - RNA, 23 nt, Human
aucuagaggcuuccuucauuucc

SEQ ID NO: 3470097 - RNA, 19 nt, Human
aucuagauacuguaucaug

SEQ ID NO: 3470098 - RNA, 17 nt, Human
aucuagauguaaauuuu

SEQ ID NO: 3470099 - RNA, 19 nt, Human
aucuagccagugaacauaa

SEQ ID NO: 3470100 - RNA, 16 nt, Human
aucuaggagaggagaa

SEQ ID NO: 3470101 - RNA, 11 nt, Human
aucuaggauuu

SEQ ID NO: 3470102 - RNA, 19 nt, Human
aucuaggggagccuugauu

SEQ ID NO: 3470103 - RNA, 20 nt, Human
aucuaggggagccuugauuc

SEQ ID NO: 3470104 - RNA, 20 nt, Human
aucuaggugaggauugauua

SEQ ID NO: 3470105 - RNA, 22 nt, Human
aucuagguggaguugaaagagu

SEQ ID NO: 3470106 - RNA, 12 nt, Human
aucuagguuuaa

SEQ ID NO: 3470107 - RNA, 13 nt, Human
aucuagguuuaac

SEQ ID NO: 3470108 - RNA, 17 nt, Human
aucuagguuuaacucag

SEQ ID NO: 3470109 - RNA, 14 nt, Human
aucuagguuuauga

SEQ ID NO: 3470110 - RNA, 18 nt, Human
aucuagguuuaugacagu

SEQ ID NO: 3470111 - RNA, 14 nt, Human
aucuaguaugaaau

SEQ ID NO: 3470112 - RNA, 17 nt, Human
aucuagugcagcugauu

SEQ ID NO: 3470113 - RNA, 18 nt, Human
aucuagugcagcugauuu

SEQ ID NO: 3470114 - RNA, 11 nt, Human
aucuaguguug

SEQ ID NO: 3470115 - RNA, 22 nt, Human
aucuaguuauuuacaggaacuu

SEQ ID NO: 3470116 - RNA, 20 nt, Human
aucuaguuccccuguuuauu

SEQ ID NO: 3470117 - RNA, 17 nt, Human
aucuaguuuacagaaaa

SEQ ID NO: 3470118 - RNA, 18 nt, Human
aucuaguuuacagaaaaa

SEQ ID NO: 3470119 - RNA, 20 nt, Human
aucuaguuuacagaaaaauc

SEQ ID NO: 3470120 - RNA, 20 nt, Human
aucuauaaaauagauauaaa

SEQ ID NO: 3470121 - RNA, 16 nt, Human
aucuauaaagaagaac

SEQ ID NO: 3470122 - RNA, 12 nt, Human
aucuauaaagcg

SEQ ID NO: 3470123 - RNA, 17 nt, Human
aucuauaacuacauauu

SEQ ID NO: 3470124 - RNA, 19 nt, Human
aucuauaacuacauauuga

SEQ ID NO: 3470125 - RNA, 11 nt, Human
aucuauaauau

SEQ ID NO: 3470126 - RNA, 13 nt, Human
aucuauaauuuac

SEQ ID NO: 3470127 - RNA, 23 nt, Human
aucuauaauuuaccuaagauuac

SEQ ID NO: 3470128 - RNA, 14 nt, Human
aucuauagaaagug

SEQ ID NO: 3470129 - RNA, 17 nt, Human
aucuauauaaaauaacu

SEQ ID NO: 3470130 - RNA, 20 nt, Human
aucuauauaguaccuuugcu

SEQ ID NO: 3470131 - RNA, 21 nt, Human
aucuauauaguaccuuugcuc

SEQ ID NO: 3470132 - RNA, 14 nt, Human
aucuauauauauaa

SEQ ID NO: 3470133 - RNA, 20 nt, Human
aucuauauauguauaaauau

SEQ ID NO: 3470134 - RNA, 17 nt, Human
aucuauauauguguaug

SEQ ID NO: 3470135 - RNA, 21 nt, Human
aucuauauguacuugucaaag

SEQ ID NO: 3470136 - RNA, 23 nt, Human
aucuauauguacuugucaaagaa

SEQ ID NO: 3470137 - RNA, 12 nt, Human
aucuauauuaga

SEQ ID NO: 3470138 - RNA, 13 nt, Human
aucuauauuuugg

SEQ ID NO: 3470139 - RNA, 15 nt, Human
aucuaucaauaguca

SEQ ID NO: 3470140 - RNA, 20 nt, Human
aucuaucaauagucaagaaa

SEQ ID NO: 3470141 - RNA, 14 nt, Human
aucuaucuauuuga

SEQ ID NO: 3470142 - RNA, 16 nt, Human
aucuaucuauuugagg

SEQ ID NO: 3470143 - RNA, 20 nt, Human
aucuaucugcuuaugcaguu

SEQ ID NO: 3470144 - RNA, 21 nt, Human
aucuaucuggugauuucuagc

SEQ ID NO: 3470145 - RNA, 18 nt, Human
aucuaucuuauauaguuu

SEQ ID NO: 3470146 - RNA, 13 nt, Human
aucuaugauauaa

SEQ ID NO: 3470147 - RNA, 17 nt, Human
aucuaugccaaagauca

SEQ ID NO: 3470148 - RNA, 15 nt, Human
aucuauuaaaaccac

SEQ ID NO: 3470149 - RNA, 18 nt, Human
aucuauuaauauauguau

SEQ ID NO: 3470150 - RNA, 16 nt, Human
aucuauuauacuguau

SEQ ID NO: 3470151 - RNA, 22 nt, Human
aucuauucagacaagcaacagg

SEQ ID NO: 3470152 - RNA, 19 nt, Human
aucuauuccugguagaaua

SEQ ID NO: 3470153 - RNA, 22 nt, Human
aucuauucugagaaaacaagca

SEQ ID NO: 3470154 - RNA, 15 nt, Human
aucuauugggauuuu

SEQ ID NO: 3470155 - RNA, 19 nt, Human
aucuauuguaagauaaaaa

SEQ ID NO: 3470156 - RNA, 13 nt, Human
aucuauuuaagua

SEQ ID NO: 3470157 - RNA, 13 nt, Human
aucuauuuauugg

SEQ ID NO: 3470158 - RNA, 19 nt, Human
aucuauuucauguuuuuga

SEQ ID NO: 3470159 - RNA, 15 nt, Human
aucuauuucuaugag

SEQ ID NO: 3470160 - RNA, 14 nt, Human
aucuauuucugaga

SEQ ID NO: 3470161 - RNA, 14 nt, Human
aucuauuuucuaug

SEQ ID NO: 3470162 - RNA, 15 nt, Human
aucuauuuucuaugu

SEQ ID NO: 3470163 - RNA, 17 nt, Human
aucuauuuugaugcagc

SEQ ID NO: 3470164 - RNA, 21 nt, Human
aucuauuuugaugcagcauuu

SEQ ID NO: 3470165 - RNA, 13 nt, Human
aucuauuuuugga

SEQ ID NO: 3470166 - RNA, 14 nt, Human
aucucaaaaaauaa

SEQ ID NO: 3470167 - RNA, 19 nt, Human
aucucaaaacugcacuguc

SEQ ID NO: 3470168 - RNA, 16 nt, Human
aucucaaauuucuaaa

SEQ ID NO: 3470169 - RNA, 17 nt, Human
aucucaaauuucuaaau

SEQ ID NO: 3470170 - RNA, 19 nt, Human
aucucaauaaagugcuuua

SEQ ID NO: 3470171 - RNA, 22 nt, Human
aucucaauaaagugcuuuaaaa

SEQ ID NO: 3470172 - RNA, 23 nt, Human
aucucaaugaaccauaaauucaa

SEQ ID NO: 3470173 - RNA, 16 nt, Human
aucucaauucuucccu

SEQ ID NO: 3470174 - RNA, 14 nt, Human
aucucaauuugagu

SEQ ID NO: 3470175 - RNA, 16 nt, Human
aucucacauauacaag

SEQ ID NO: 3470176 - RNA, 22 nt, Human
aucucaccccaucccacacccu

SEQ ID NO: 3470177 - RNA, 15 nt, Human
aucucaccuccugcu

SEQ ID NO: 3470178 - RNA, 17 nt, Human
aucucaccuccugcugg

SEQ ID NO: 3470179 - RNA, 20 nt, Human
aucucaccuccugcugggca

SEQ ID NO: 3470180 - RNA, 15 nt, Human
aucucagaaagugcc

SEQ ID NO: 3470181 - RNA, 19 nt, Human
aucucagaaagugccugac

SEQ ID NO: 3470182 - RNA, 20 nt, Human
aucucagaaagugccugaca

SEQ ID NO: 3470183 - RNA, 20 nt, Human
aucucagaauuccuuuucua

SEQ ID NO: 3470184 - RNA, 20 nt, Human
aucucagauguuaaaauaaa

SEQ ID NO: 3470185 - RNA, 16 nt, Human
aucucagcucaucuuc

SEQ ID NO: 3470186 - RNA, 19 nt, Human
aucucaggacacuuccgua

SEQ ID NO: 3470187 - RNA, 14 nt, Human
aucucaggccaccu

SEQ ID NO: 3470188 - RNA, 15 nt, Human
aucucaggccaccug

SEQ ID NO: 3470189 - RNA, 18 nt, Human
aucucaggccagagccaa

SEQ ID NO: 3470190 - RNA, 16 nt, Human
aucucagggaagccca

SEQ ID NO: 3470191 - RNA, 17 nt, Human
aucucagggaagcccag

SEQ ID NO: 3470192 - RNA, 20 nt, Human
aucucagggaagcccagcuc

SEQ ID NO: 3470193 - RNA, 17 nt, Human
aucucaggggcuguuug

SEQ ID NO: 3470194 - RNA, 21 nt, Human
aucucaggggcuguuugagga

SEQ ID NO: 3470195 - RNA, 16 nt, Human
aucucagucaugcaua

SEQ ID NO: 3470196 - RNA, 22 nt, Human
aucucagucaugcauaaauaug

SEQ ID NO: 3470197 - RNA, 19 nt, Human
aucucaguugauuuucugg

SEQ ID NO: 3470198 - RNA, 15 nt, Human
aucucauaauuuaua

SEQ ID NO: 3470199 - RNA, 18 nt, Human
aucucauaccucugacca

SEQ ID NO: 3470200 - RNA, 19 nt, Human
aucucaucucagugaagaa

SEQ ID NO: 3470201 - RNA, 20 nt, Human
aucucaucucagugaagaau

SEQ ID NO: 3470202 - RNA, 16 nt, Human
aucucauucaguauua

SEQ ID NO: 3470203 - RNA, 14 nt, Human
aucucauuggaccc

SEQ ID NO: 3470204 - RNA, 20 nt, Human
aucucauuguucaauuccca

SEQ ID NO: 3470205 - RNA, 13 nt, Human
aucucauuuaagg

SEQ ID NO: 3470206 - RNA, 18 nt, Human
aucucauuuaagggaaaa

SEQ ID NO: 3470207 - RNA, 23 nt, Human
aucucauuuaagggaaaaauaua

SEQ ID NO: 3470208 - RNA, 23 nt, Human
aucucauuuccaagcaaguauua

SEQ ID NO: 3470209 - RNA, 21 nt, Human
aucuccaaaauaaaacuuuuu

SEQ ID NO: 3470210 - RNA, 17 nt, Human
aucuccaagaaugcuga

SEQ ID NO: 3470211 - RNA, 18 nt, Human
aucuccaagaaugcugaa

SEQ ID NO: 3470212 - RNA, 20 nt, Human
aucuccaagaaugcugaaac

SEQ ID NO: 3470213 - RNA, 18 nt, Human
aucuccacaaccucuucc

SEQ ID NO: 3470214 - RNA, 17 nt, Human
aucuccaccagucauuu

SEQ ID NO: 3470215 - RNA, 21 nt, Human
aucuccacccccagcugcuug

SEQ ID NO: 3470216 - RNA, 15 nt, Human
aucuccaccugcucc

SEQ ID NO: 3470217 - RNA, 15 nt, Human
aucuccacuccagau

SEQ ID NO: 3470218 - RNA, 20 nt, Human
aucuccagggaguccccucc

SEQ ID NO: 3470219 - RNA, 14 nt, Human
aucuccauggcuuc

SEQ ID NO: 3470220 - RNA, 18 nt, Human
aucuccauggcuuccucc

SEQ ID NO: 3470221 - RNA, 22 nt, Human
aucuccauggcuuccuccuccc

SEQ ID NO: 3470222 - RNA, 22 nt, Human
aucuccauugugccuaagucca

SEQ ID NO: 3470223 - RNA, 20 nt, Human
aucucccaagcuaucuaaag

SEQ ID NO: 3470224 - RNA, 19 nt, Human
aucucccaccuagcagcac

SEQ ID NO: 3470225 - RNA, 16 nt, Human
aucuccccaucauugg

SEQ ID NO: 3470226 - RNA, 12 nt, Human
aucucccccagc

SEQ ID NO: 3470227 - RNA, 15 nt, Human
aucucccccagcccc

SEQ ID NO: 3470228 - RNA, 21 nt, Human
aucucccccagccccauccuc

SEQ ID NO: 3470229 - RNA, 14 nt, Human
aucuccccucagcu

SEQ ID NO: 3470230 - RNA, 15 nt, Human
aucuccccucagcuc

SEQ ID NO: 3470231 - RNA, 16 nt, Human
aucuccccucagcucg

SEQ ID NO: 3470232 - RNA, 18 nt, Human
aucucccugccuggcccc

SEQ ID NO: 3470233 - RNA, 10 nt, Human
aucucccugg

SEQ ID NO: 3470234 - RNA, 18 nt, Human
aucucccuucacaaguuu

SEQ ID NO: 3470235 - RNA, 14 nt, Human
aucuccggcuccca

SEQ ID NO: 3470236 - RNA, 18 nt, Human
aucuccuauaaucuguca

SEQ ID NO: 3470237 - RNA, 19 nt, Human
aucuccuauaaucugucaa

SEQ ID NO: 3470238 - RNA, 13 nt, Human
aucuccuauuuuu

SEQ ID NO: 3470239 - RNA, 22 nt, Human
aucuccuauuuuuuuaaaauca

SEQ ID NO: 3470240 - RNA, 13 nt, Human
aucuccucacuga

SEQ ID NO: 3470241 - RNA, 21 nt, Human
aucuccugaggaucagaaagu

SEQ ID NO: 3470242 - RNA, 14 nt, Human
aucuccugugcaug

SEQ ID NO: 3470243 - RNA, 15 nt, Human
aucuccugugcaugg

SEQ ID NO: 3470244 - RNA, 19 nt, Human
aucucguauagaagucuuc

SEQ ID NO: 3470245 - RNA, 14 nt, Human
aucucgugggagag

SEQ ID NO: 3470246 - RNA, 20 nt, Human
aucucuaacagcucaggauc

SEQ ID NO: 3470247 - RNA, 19 nt, Human
aucucuaccuucuccccag

SEQ ID NO: 3470248 - RNA, 18 nt, Human
aucucuagaauuuuaagu

SEQ ID NO: 3470249 - RNA, 13 nt, Human
aucucuauuuaau

SEQ ID NO: 3470250 - RNA, 15 nt, Human
aucucuauuuaauau

SEQ ID NO: 3470251 - RNA, 17 nt, Human
aucucuauuuaauauuu

SEQ ID NO: 3470252 - RNA, 17 nt, Human
aucucucaggagcacag

SEQ ID NO: 3470253 - RNA, 18 nt, Human
aucucucaggagcacagg

SEQ ID NO: 3470254 - RNA, 22 nt, Human
aucucucaggagcacaggcagc

SEQ ID NO: 3470255 - RNA, 16 nt, Human
aucucucauccuccag

SEQ ID NO: 3470256 - RNA, 15 nt, Human
aucucucccuccccu

SEQ ID NO: 3470257 - RNA, 23 nt, Human
aucucucccuccccugccauuuu

SEQ ID NO: 3470258 - RNA, 19 nt, Human
aucucucgguuccacgucc

SEQ ID NO: 3470259 - RNA, 17 nt, Human
aucucucucuguugugu

SEQ ID NO: 3470260 - RNA, 18 nt, Human
aucucucugcagcugccg

SEQ ID NO: 3470261 - RNA, 18 nt, Human
aucucucugugcugugga

SEQ ID NO: 3470262 - RNA, 23 nt, Human
aucucucugugcuguggaagcaa

SEQ ID NO: 3470263 - RNA, 11 nt, Human
aucucugaaag

SEQ ID NO: 3470264 - RNA, 20 nt, Human
aucucugcacccuggggccu

SEQ ID NO: 3470265 - RNA, 22 nt, Human
aucucugcaggaaauggcugug

SEQ ID NO: 3470266 - RNA, 16 nt, Human
aucucugcuuuggaaa

SEQ ID NO: 3470267 - RNA, 17 nt, Human
aucucuguaaagcuaaa

SEQ ID NO: 3470268 - RNA, 18 nt, Human
aucucuguacuuugcuug

SEQ ID NO: 3470269 - RNA, 19 nt, Human
aucucugucccauucccug

SEQ ID NO: 3470270 - RNA, 19 nt, Human
aucucugucuaccaucucc

SEQ ID NO: 3470271 - RNA, 13 nt, Human
aucucugugccuu

SEQ ID NO: 3470272 - RNA, 15 nt, Human
aucucugugccuucg

SEQ ID NO: 3470273 - RNA, 17 nt, Human
aucucugugugcacaaa

SEQ ID NO: 3470274 - RNA, 16 nt, Human
aucucuguuauguacu

SEQ ID NO: 3470275 - RNA, 15 nt, Human
aucucuuaaauuggg

SEQ ID NO: 3470276 - RNA, 22 nt, Human
aucucuuaagacagcauguguu

SEQ ID NO: 3470277 - RNA, 18 nt, Human
aucucuuagcauuuuaau

SEQ ID NO: 3470278 - RNA, 13 nt, Human
aucucuuagcucc

SEQ ID NO: 3470279 - RNA, 12 nt, Human
aucucuucaguc

SEQ ID NO: 3470280 - RNA, 11 nt, Human
aucucuuccug

SEQ ID NO: 3470281 - RNA, 13 nt, Human
aucucuucuuaau

SEQ ID NO: 3470282 - RNA, 14 nt, Human
aucucuucuuuuaa

SEQ ID NO: 3470283 - RNA, 15 nt, Human
aucucuuucuaaaga

SEQ ID NO: 3470284 - RNA, 15 nt, Human
aucucuuugaauuuu

SEQ ID NO: 3470285 - RNA, 13 nt, Human
aucugaaaacugg

SEQ ID NO: 3470286 - RNA, 22 nt, Human
aucugaaaauguauguguaagu

SEQ ID NO: 3470287 - RNA, 16 nt, Human
augaaacuuuuggaag

SEQ ID NO: 3470288 - RNA, 12 nt, Human
augaaagaaaau

SEQ ID NO: 3470289 - RNA, 13 nt, Human
augaaagacugua

SEQ ID NO: 3470290 - RNA, 13 nt, Human
augaaagauuaaa

SEQ ID NO: 3470291 - RNA, 19 nt, Human
augaaagauuaaacagaug

SEQ ID NO: 3470292 - RNA, 21 nt, Human
augaaagcaacaaagaaaucc

SEQ ID NO: 3470293 - RNA, 15 nt, Human
augaaagcagggacu

SEQ ID NO: 3470294 - RNA, 19 nt, Human
augaaagcauggcuaauag

SEQ ID NO: 3470295 - RNA, 22 nt, Human
augaaagcuccucgagggcagg

SEQ ID NO: 3470296 - RNA, 16 nt, Human
augaaaggcuuuuaaa

SEQ ID NO: 3470297 - RNA, 13 nt, Human
augaaaggugcca

SEQ ID NO: 3470298 - RNA, 22 nt, Human
augaaaggugccauggaagagg

SEQ ID NO: 3470299 - RNA, 22 nt, Human
augaaauaaagacccaggggga

SEQ ID NO: 3470300 - RNA, 19 nt, Human
augaaauaaaucauguuaa

SEQ ID NO: 3470301 - RNA, 22 nt, Human
augaaauaggagggaaaccuuu

SEQ ID NO: 3470302 - RNA, 15 nt, Human
augaaauauauguga

SEQ ID NO: 3470303 - RNA, 17 nt, Human
augaaauauaugugaaa

SEQ ID NO: 3470304 - RNA, 13 nt, Human
augaaauaucaga

SEQ ID NO: 3470305 - RNA, 19 nt, Human
augaaauaucagacuagug

SEQ ID NO: 3470306 - RNA, 15 nt, Human
augaaauaucuguau

SEQ ID NO: 3470307 - RNA, 14 nt, Human
augaaaugaacaca

SEQ ID NO: 3470308 - RNA, 14 nt, Human
augaaaugagguca

SEQ ID NO: 3470309 - RNA, 14 nt, Human
augaaaugcuaugu

SEQ ID NO: 3470310 - RNA, 21 nt, Human
augaaauggagucauuugagu

SEQ ID NO: 3470311 - RNA, 21 nt, Human
augaaaugugcacuuuauccu

SEQ ID NO: 3470312 - RNA, 22 nt, Human
augaaauugucuagcagagcag

SEQ ID NO: 3470313 - RNA, 18 nt, Human
augaaauuuuaccaaguu

SEQ ID NO: 3470314 - RNA, 22 nt, Human
augaaauuuucuagacuuucug

SEQ ID NO: 3470315 - RNA, 16 nt, Human
augaaauuuuuguaaa

SEQ ID NO: 3470316 - RNA, 19 nt, Human
augaacaaaauuauuugua

SEQ ID NO: 3470317 - RNA, 18 nt, Human
augaacaaauugaacucu

SEQ ID NO: 3470318 - RNA, 14 nt, Human
augaacaagagaag

SEQ ID NO: 3470319 - RNA, 16 nt, Human
augaacacaaauuaug

SEQ ID NO: 3470320 - RNA, 13 nt, Human
augaacacacugu

SEQ ID NO: 3470321 - RNA, 18 nt, Human
augaacacaucagcuagc

SEQ ID NO: 3470322 - RNA, 14 nt, Human
augaacacucccca

SEQ ID NO: 3470323 - RNA, 18 nt, Human
augaacacuuaaauuaug

SEQ ID NO: 3470324 - RNA, 16 nt, Human
augaacacuuaauaaa

SEQ ID NO: 3470325 - RNA, 16 nt, Human
augaacagaacauaga

SEQ ID NO: 3470326 - RNA, 12 nt, Human
augaacagacuu

SEQ ID NO: 3470327 - RNA, 14 nt, Human
augaacaucccuuu

SEQ ID NO: 3470328 - RNA, 15 nt, Human
augaacauguuccug

SEQ ID NO: 3470329 - RNA, 15 nt, Human
augaacauguuuuag

SEQ ID NO: 3470330 - RNA, 12 nt, Human
augaacauucca

SEQ ID NO: 3470331 - RNA, 23 nt, Human
augaaccacaucuugcucugcug

SEQ ID NO: 3470332 - RNA, 17 nt, Human
augaaccuggagggcua

SEQ ID NO: 3470333 - RNA, 21 nt, Human
augaaccuucuggccucccac

SEQ ID NO: 3470334 - RNA, 16 nt, Human
augaacucuuaaucaa

SEQ ID NO: 3470335 - RNA, 20 nt, Human
augaacucuuagaaaugaag

SEQ ID NO: 3470336 - RNA, 17 nt, Human
augaacugaaguuucac

SEQ ID NO: 3470337 - RNA, 19 nt, Human
augaacugaaguuucacau

SEQ ID NO: 3470338 - RNA, 20 nt, Human
augaacugaaguuucacaug

SEQ ID NO: 3470339 - RNA, 18 nt, Human
augaacugcauguauaaa

SEQ ID NO: 3470340 - RNA, 12 nt, Human
augaacuggagg

SEQ ID NO: 3470341 - RNA, 13 nt, Human
augaacuuaacau

SEQ ID NO: 3470342 - RNA, 20 nt, Human
augaacuuaacaugcugugu

SEQ ID NO: 3470343 - RNA, 13 nt, Human
augaacuucgcau

SEQ ID NO: 3470344 - RNA, 17 nt, Human
augaacuucgcaucaaa

SEQ ID NO: 3470345 - RNA, 16 nt, Human
augaacuugaggacac

SEQ ID NO: 3470346 - RNA, 21 nt, Human
augaacuugaggacacauguc

SEQ ID NO: 3470347 - RNA, 22 nt, Human
augaacuugaggacacaugucc

SEQ ID NO: 3470348 - RNA, 22 nt, Human
augaagaaaaaauacauuuuau

SEQ ID NO: 3470349 - RNA, 15 nt, Human
augaagaaaauacuu

SEQ ID NO: 3470350 - RNA, 19 nt, Human
augaagaaaauacuuaaau

SEQ ID NO: 3470351 - RNA, 14 nt, Human
augaagaaagugga

SEQ ID NO: 3470352 - RNA, 16 nt, Human
augaagaauuuaaaga

SEQ ID NO: 3470353 - RNA, 19 nt, Human
augaagaccuuuuucugca

SEQ ID NO: 3470354 - RNA, 21 nt, Human
augaagaccuuuuucugcacu

SEQ ID NO: 3470355 - RNA, 20 nt, Human
augaagagauuuuucaugau

SEQ ID NO: 3470356 - RNA, 18 nt, Human
augaagagcuagagaaau

SEQ ID NO: 3470357 - RNA, 16 nt, Human
augaagagcuguugau

SEQ ID NO: 3470358 - RNA, 18 nt, Human
augaagagcuugcuuuga

SEQ ID NO: 3470359 - RNA, 18 nt, Human
augaagauaccaucagca

SEQ ID NO: 3470360 - RNA, 15 nt, Human
augaagauacugaaa

SEQ ID NO: 3470361 - RNA, 22 nt, Human
augaagaucuaaauaaaaugcu

SEQ ID NO: 3470362 - RNA, 15 nt, Human
augaagaugaugcua

SEQ ID NO: 3470363 - RNA, 14 nt, Human
augaagcaaacaca

SEQ ID NO: 3470364 - RNA, 16 nt, Human
augaagcaaggaagau

SEQ ID NO: 3470365 - RNA, 23 nt, Human
augaagcauuuacuuuguguuca

SEQ ID NO: 3470366 - RNA, 23 nt, Human
augaagccacagcccaggccucc

SEQ ID NO: 3470367 - RNA, 17 nt, Human
augaagcccaagugaaa

SEQ ID NO: 3470368 - RNA, 19 nt, Human
augaagccgaccuuagauu

SEQ ID NO: 3470369 - RNA, 16 nt, Human
augaagccuuagccag

SEQ ID NO: 3470370 - RNA, 16 nt, Human
augaagccuuuugaaa

SEQ ID NO: 3470371 - RNA, 13 nt, Human
augaagcuugugu

SEQ ID NO: 3470372 - RNA, 23 nt, Human
augaagcuuuauacguguagcua

SEQ ID NO: 3470373 - RNA, 18 nt, Human
augaagcuuuuaugugaa

SEQ ID NO: 3470374 - RNA, 20 nt, Human
augaagcuuuuaugugaaac

SEQ ID NO: 3470375 - RNA, 16 nt, Human
augaaggcaaaaaaau

SEQ ID NO: 3470376 - RNA, 17 nt, Human
augaagggaaaggauau

SEQ ID NO: 3470377 - RNA, 19 nt, Human
augaagguuucugaaaauu

SEQ ID NO: 3470378 - RNA, 18 nt, Human
augaagguuuuuguaaag

SEQ ID NO: 3470379 - RNA, 13 nt, Human
augaaguaaagaa

SEQ ID NO: 3470380 - RNA, 21 nt, Human
augaaguaacuugucuuaaau

SEQ ID NO: 3470381 - RNA, 21 nt, Human
augaaguaauaugcacacauu

SEQ ID NO: 3470382 - RNA, 17 nt, Human
augaaguauauaauggu

SEQ ID NO: 3470383 - RNA, 23 nt, Human
augaagucuuaaggacaaagugc

SEQ ID NO: 3470384 - RNA, 16 nt, Human
augaagugcgugaaug

SEQ ID NO: 3470385 - RNA, 18 nt, Human
augaagugcgugaaugua

SEQ ID NO: 3470386 - RNA, 15 nt, Human
augaaguguuagaua

SEQ ID NO: 3470387 - RNA, 15 nt, Human
augaaguuuaaaaca

SEQ ID NO: 3470388 - RNA, 17 nt, Human
augaaguuuauacagua

SEQ ID NO: 3470389 - RNA, 18 nt, Human
augaaguuugaauguuaa

SEQ ID NO: 3470390 - RNA, 23 nt, Human
augaaguuuuuuuuauacaggau

SEQ ID NO: 3470391 - RNA, 13 nt, Human
augaauacaaauu

SEQ ID NO: 3470392 - RNA, 21 nt, Human
augaauacuuuauaaaggauu

SEQ ID NO: 3470393 - RNA, 20 nt, Human
augaauauauggcauuugca

SEQ ID NO: 3470394 - RNA, 22 nt, Human
augaauauauggcauuugcaga

SEQ ID NO: 3470395 - RNA, 21 nt, Human
augaauaucuauuaauauaug

SEQ ID NO: 3470396 - RNA, 17 nt, Human
augaauauugaaguuuc

SEQ ID NO: 3470397 - RNA, 12 nt, Human
augaauauuuau

SEQ ID NO: 3470398 - RNA, 18 nt, Human
augaauauuuauaacagc

SEQ ID NO: 3470399 - RNA, 15 nt, Human
augaauauuuugaua

SEQ ID NO: 3470400 - RNA, 20 nt, Human
augaauauuuugauaauaau

SEQ ID NO: 3470401 - RNA, 18 nt, Human
augaaucacuguuuuuag

SEQ ID NO: 3470402 - RNA, 21 nt, Human
augaaucccacccacauguga

SEQ ID NO: 3470403 - RNA, 20 nt, Human
augaaucgcuucucuuuuga

SEQ ID NO: 3470404 - RNA, 16 nt, Human
augaaucuaagcagca

SEQ ID NO: 3470405 - RNA, 15 nt, Human
augaaucugauuuuu

SEQ ID NO: 3470406 - RNA, 22 nt, Human
augaaucugauuuuuaugauga

SEQ ID NO: 3470407 - RNA, 18 nt, Human
augaaucugcacaucugu

SEQ ID NO: 3470408 - RNA, 14 nt, Human
augaaucugcucac

SEQ ID NO: 3470409 - RNA, 13 nt, Human
augaaugaauggc

SEQ ID NO: 3470410 - RNA, 19 nt, Human
augaaugaggucccaggca

SEQ ID NO: 3470411 - RNA, 20 nt, Human
augaaugaggucccaggcag

SEQ ID NO: 3470412 - RNA, 15 nt, Human
augaaugaggucugg

SEQ ID NO: 3470413 - RNA, 19 nt, Human
augaaugaggucugggcua

SEQ ID NO: 3470414 - RNA, 18 nt, Human
augaaugcccccagcugg

SEQ ID NO: 3470415 - RNA, 12 nt, Human
augaaugcuuaa

SEQ ID NO: 3470416 - RNA, 20 nt, Human
augaaugcuuaaagaauuca

SEQ ID NO: 3470417 - RNA, 23 nt, Human
augaauggacucaaacugccuug

SEQ ID NO: 3470418 - RNA, 23 nt, Human
augaauggcucacuauggugcca

SEQ ID NO: 3470419 - RNA, 12 nt, Human
augaauguaaau

SEQ ID NO: 3470420 - RNA, 13 nt, Human
augaauguaaauu

SEQ ID NO: 3470421 - RNA, 16 nt, Human
augaauguaaauuugu

SEQ ID NO: 3470422 - RNA, 15 nt, Human
augaauguaucagga

SEQ ID NO: 3470423 - RNA, 19 nt, Human
augaauguaugugcacugu

SEQ ID NO: 3470424 - RNA, 21 nt, Human
augaaugucacuucuggauau

SEQ ID NO: 3470425 - RNA, 22 nt, Human
augaaugucuuuuuucaaacuu

SEQ ID NO: 3470426 - RNA, 15 nt, Human
augaaugugaagccu

SEQ ID NO: 3470427 - RNA, 17 nt, Human
augaaugugaagccuuc

SEQ ID NO: 3470428 - RNA, 18 nt, Human
augaaugugaagccuucc

SEQ ID NO: 3470429 - RNA, 12 nt, Human
augaauguguaa

SEQ ID NO: 3470430 - RNA, 14 nt, Human
augaauuaaauaaa

SEQ ID NO: 3470431 - RNA, 15 nt, Human
augucaugcugccuu

SEQ ID NO: 3470432 - RNA, 16 nt, Human
augucaugcugccuua

SEQ ID NO: 3470433 - RNA, 13 nt, Human
augucauguguuc

SEQ ID NO: 3470434 - RNA, 17 nt, Human
augucauuaaaauaaau

SEQ ID NO: 3470435 - RNA, 20 nt, Human
augucauuaaaauaaauaaa

SEQ ID NO: 3470436 - RNA, 17 nt, Human
augucauuaauguguug

SEQ ID NO: 3470437 - RNA, 17 nt, Human
augucauuucagaaguu

SEQ ID NO: 3470438 - RNA, 14 nt, Human
augucauuucaugu

SEQ ID NO: 3470439 - RNA, 15 nt, Human
augucauuucauuuc

SEQ ID NO: 3470440 - RNA, 16 nt, Human
auguccaacccgucug

SEQ ID NO: 3470441 - RNA, 16 nt, Human
auguccaagaagccca

SEQ ID NO: 3470442 - RNA, 19 nt, Human
auguccaagaagcccagga

SEQ ID NO: 3470443 - RNA, 14 nt, Human
auguccacugugua

SEQ ID NO: 3470444 - RNA, 17 nt, Human
auguccacuguguauag

SEQ ID NO: 3470445 - RNA, 21 nt, Human
auguccagaagaauauucagg

SEQ ID NO: 3470446 - RNA, 20 nt, Human
auguccaguaagaucacugu

SEQ ID NO: 3470447 - RNA, 19 nt, Human
auguccauuuauaucauuu

SEQ ID NO: 3470448 - RNA, 20 nt, Human
augucccaacuuguaaaaau

SEQ ID NO: 3470449 - RNA, 17 nt, Human
augucccauuuucagac

SEQ ID NO: 3470450 - RNA, 14 nt, Human
auguccccucccag

SEQ ID NO: 3470451 - RNA, 19 nt, Human
augucccuagaaaacaaug

SEQ ID NO: 3470452 - RNA, 16 nt, Human
augucccugggccagg

SEQ ID NO: 3470453 - RNA, 14 nt, Human
augucccuucucau

SEQ ID NO: 3470454 - RNA, 19 nt, Human
augucccuugaugcacaga

SEQ ID NO: 3470455 - RNA, 21 nt, Human
augucccuugaugcacagaga

SEQ ID NO: 3470456 - RNA, 23 nt, Human
augucccuugaugcacagagaag

SEQ ID NO: 3470457 - RNA, 16 nt, Human
augucccuuucuuggc

SEQ ID NO: 3470458 - RNA, 13 nt, Human
auguccuaugugu

SEQ ID NO: 3470459 - RNA, 15 nt, Human
auguccuauguguga

SEQ ID NO: 3470460 - RNA, 15 nt, Human
auguccucaccacau

SEQ ID NO: 3470461 - RNA, 18 nt, Human
auguccuccagaagccuc

SEQ ID NO: 3470462 - RNA, 17 nt, Human
auguccuccuuguucua

SEQ ID NO: 3470463 - RNA, 13 nt, Human
auguccuguaaac

SEQ ID NO: 3470464 - RNA, 23 nt, Human
auguccuguaaacacucagcugu

SEQ ID NO: 3470465 - RNA, 23 nt, Human
auguccuugugaugugcacguaa

SEQ ID NO: 3470466 - RNA, 22 nt, Human
augucguaguuacucucaggca

SEQ ID NO: 3470467 - RNA, 19 nt, Human
augucgugaccaacuagac

SEQ ID NO: 3470468 - RNA, 20 nt, Human
augucgugaccaacuagaca

SEQ ID NO: 3470469 - RNA, 21 nt, Human
augucgugaccaacuagacau

SEQ ID NO: 3470470 - RNA, 22 nt, Human
augucgugaccaacuagacauu

SEQ ID NO: 3470471 - RNA, 11 nt, Human
augucuaaaga

SEQ ID NO: 3470472 - RNA, 19 nt, Human
augucuaaaugcugaaaaa

SEQ ID NO: 3470473 - RNA, 21 nt, Human
augucuaauguauuuuauugu

SEQ ID NO: 3470474 - RNA, 23 nt, Human
augucuagaccaggaccucccuc

SEQ ID NO: 3470475 - RNA, 10 nt, Human
augucuauaa

SEQ ID NO: 3470476 - RNA, 22 nt, Human
augucuauaaaccgaacugaug

SEQ ID NO: 3470477 - RNA, 22 nt, Human
augucuauaaucccagcacuuu

SEQ ID NO: 3470478 - RNA, 20 nt, Human
augucuaucaacuuuaauca

SEQ ID NO: 3470479 - RNA, 13 nt, Human
augucuauugucc

SEQ ID NO: 3470480 - RNA, 17 nt, Human
augucucaggucccugc

SEQ ID NO: 3470481 - RNA, 20 nt, Human
augucuccuaagcaccugua

SEQ ID NO: 3470482 - RNA, 13 nt, Human
augucuccucccc

SEQ ID NO: 3470483 - RNA, 16 nt, Human
augucucgcuagugau

SEQ ID NO: 3470484 - RNA, 14 nt, Human
augucucuaaagca

SEQ ID NO: 3470485 - RNA, 16 nt, Human
augucucucagaauuc

SEQ ID NO: 3470486 - RNA, 22 nt, Human
augucucucaugaccaaaugcu

SEQ ID NO: 3470487 - RNA, 23 nt, Human
augucucugugagacucgagaac

SEQ ID NO: 3470488 - RNA, 23 nt, Human
augucucuuuaaugucacaggca

SEQ ID NO: 3470489 - RNA, 19 nt, Human
augucugcagcccugagaa

SEQ ID NO: 3470490 - RNA, 22 nt, Human
augucuggagaauaauucuuug

SEQ ID NO: 3470491 - RNA, 13 nt, Human
augucugguucuc

SEQ ID NO: 3470492 - RNA, 23 nt, Human
augucugguucucaauuccaaca

SEQ ID NO: 3470493 - RNA, 19 nt, Human
augucuguagcuccucaac

SEQ ID NO: 3470494 - RNA, 12 nt, Human
augucugugcua

SEQ ID NO: 3470495 - RNA, 14 nt, Human
augucuguggauuu

SEQ ID NO: 3470496 - RNA, 21 nt, Human
augucuguggccuuguucucu

SEQ ID NO: 3470497 - RNA, 20 nt, Human
augucuguuaccaugucacu

SEQ ID NO: 3470498 - RNA, 17 nt, Human
augucuguuuaagaaaa

SEQ ID NO: 3470499 - RNA, 19 nt, Human
augucuguuuaagaaaagu

SEQ ID NO: 3470500 - RNA, 15 nt, Human
augucuguuugcuga

SEQ ID NO: 3470501 - RNA, 16 nt, Human
augucuuaaugaaguu

SEQ ID NO: 3470502 - RNA, 19 nt, Human
augucuuaaugaaguuuga

SEQ ID NO: 3470503 - RNA, 23 nt, Human
augucuuaaugaaguuugaaugu

SEQ ID NO: 3470504 - RNA, 17 nt, Human
augucuucauuucauug

SEQ ID NO: 3470505 - RNA, 19 nt, Human
augucuucauuucauugua

SEQ ID NO: 3470506 - RNA, 20 nt, Human
augucuucauuucauuguau

SEQ ID NO: 3470507 - RNA, 14 nt, Human
augucuucucacaa

SEQ ID NO: 3470508 - RNA, 14 nt, Human
augucuucugccug

SEQ ID NO: 3470509 - RNA, 17 nt, Human
augucuucugccuguua

SEQ ID NO: 3470510 - RNA, 15 nt, Human
augucuugagcucua

SEQ ID NO: 3470511 - RNA, 21 nt, Human
augucuugagcucuauuauga

SEQ ID NO: 3470512 - RNA, 23 nt, Human
augucuugaugcaugcacuguuc

SEQ ID NO: 3470513 - RNA, 22 nt, Human
augucuugcuguugacauauuu

SEQ ID NO: 3470514 - RNA, 16 nt, Human
augucuuggacacugu

SEQ ID NO: 3470515 - RNA, 17 nt, Human
augucuuguacaugugu

SEQ ID NO: 3470516 - RNA, 10 nt, Human
augucuugug

SEQ ID NO: 3470517 - RNA, 20 nt, Human
augucuuguuaauauucuuu

SEQ ID NO: 3470518 - RNA, 16 nt, Human
augucuuuaaugcaau

SEQ ID NO: 3470519 - RNA, 18 nt, Human
augucuuuccaaauuauu

SEQ ID NO: 3470520 - RNA, 21 nt, Human
augucuuuccaaauuauuucu

SEQ ID NO: 3470521 - RNA, 21 nt, Human
augucuuugguccucuugcca

SEQ ID NO: 3470522 - RNA, 21 nt, Human
augucuuuguaagucaguguu

SEQ ID NO: 3470523 - RNA, 21 nt, Human
augucuuuuauaguggaaaaa

SEQ ID NO: 3470524 - RNA, 17 nt, Human
augucuuuuauauuugu

SEQ ID NO: 3470525 - RNA, 17 nt, Human
augucuuuucccauuua

SEQ ID NO: 3470526 - RNA, 21 nt, Human
augucuuuucccauuuaucua

SEQ ID NO: 3470527 - RNA, 15 nt, Human
augucuuuugaauau

SEQ ID NO: 3470528 - RNA, 16 nt, Human
augucuuuugaauauu

SEQ ID NO: 3470529 - RNA, 22 nt, Human
augucuuuuuauuaaaauauuu

SEQ ID NO: 3470530 - RNA, 19 nt, Human
augucuuuuuuucuguuaa

SEQ ID NO: 3470531 - RNA, 13 nt, Human
augugaaaaaucu

SEQ ID NO: 3470532 - RNA, 14 nt, Human
augugaaaaaucug

SEQ ID NO: 3470533 - RNA, 19 nt, Human
augugaaaaaucugcuguu

SEQ ID NO: 3470534 - RNA, 15 nt, Human
augugaaacauguuu

SEQ ID NO: 3470535 - RNA, 14 nt, Human
augugaaaggauau

SEQ ID NO: 3470536 - RNA, 20 nt, Human
augugaaauuuacaucauuu

SEQ ID NO: 3470537 - RNA, 11 nt, Human
augugaacagu

SEQ ID NO: 3470538 - RNA, 21 nt, Human
augugaacaguuguguuugaa

SEQ ID NO: 3470539 - RNA, 13 nt, Human
augugaacccggg

SEQ ID NO: 3470540 - RNA, 16 nt, Human
augugaacuuguagcu

SEQ ID NO: 3470541 - RNA, 18 nt, Human
augugaacuuguagcugu

SEQ ID NO: 3470542 - RNA, 15 nt, Human
augugaacuuuauua

SEQ ID NO: 3470543 - RNA, 22 nt, Human
augugaagccaauucagacagg

SEQ ID NO: 3470544 - RNA, 14 nt, Human
augugaagccuucc

SEQ ID NO: 3470545 - RNA, 19 nt, Human
augugaaguguuaauacua

SEQ ID NO: 3470546 - RNA, 20 nt, Human
augugaaugaucucucugaa

SEQ ID NO: 3470547 - RNA, 16 nt, Human
augugaaugggaaaag

SEQ ID NO: 3470548 - RNA, 18 nt, Human
augugaauuauugacacu

SEQ ID NO: 3470549 - RNA, 19 nt, Human
augugaauuauugacacug

SEQ ID NO: 3470550 - RNA, 11 nt, Human
augugaauugu

SEQ ID NO: 3470551 - RNA, 12 nt, Human
augugaauuuuu

SEQ ID NO: 3470552 - RNA, 17 nt, Human
augugaauuuuuaagcu

SEQ ID NO: 3470553 - RNA, 21 nt, Human
augugacaauuuuguacaaau

SEQ ID NO: 3470554 - RNA, 16 nt, Human
augugacagguaaacu

SEQ ID NO: 3470555 - RNA, 18 nt, Human
augugacauuugucauuu

SEQ ID NO: 3470556 - RNA, 23 nt, Human
augugacauuugucauuuucauu

SEQ ID NO: 3470557 - RNA, 18 nt, Human
augugacucugaagcuga

SEQ ID NO: 3470558 - RNA, 12 nt, Human
augugacucuuu

SEQ ID NO: 3470559 - RNA, 13 nt, Human
augugacuuugaa

SEQ ID NO: 3470560 - RNA, 14 nt, Human
augugagaagccag

SEQ ID NO: 3470561 - RNA, 15 nt, Human
augugagagaaagug

SEQ ID NO: 3470562 - RNA, 21 nt, Human
augugaggaagaacuacagcu

SEQ ID NO: 3470563 - RNA, 23 nt, Human
augugagugccuuuugcagaaga

SEQ ID NO: 3470564 - RNA, 17 nt, Human
augugaguuuggucugg

SEQ ID NO: 3470565 - RNA, 23 nt, Human
augugaguuuggucuggacugac

SEQ ID NO: 3470566 - RNA, 17 nt, Human
augugauaaggaaauca

SEQ ID NO: 3470567 - RNA, 15 nt, Human
augugauacauuuuu

SEQ ID NO: 3470568 - RNA, 15 nt, Human
augugauauauaagu

SEQ ID NO: 3470569 - RNA, 14 nt, Human
augugauauucuaa

SEQ ID NO: 3470570 - RNA, 16 nt, Human
augugauauucuaaga

SEQ ID NO: 3470571 - RNA, 18 nt, Human
augugaucacgccuggcu

SEQ ID NO: 3470572 - RNA, 17 nt, Human
augugauccuuuuaugu

SEQ ID NO: 3470573 - RNA, 21 nt, Human
augugauccuuuuauguuauu

SEQ ID NO: 3470574 - RNA, 23 nt, Human
augugauccuuuuauguuauuua

SEQ ID NO: 3470575 - RNA, 21 nt, Human
auuagaucaaauaguugcaua

SEQ ID NO: 3470576 - RNA, 18 nt, Human
auuagauccauuaauuua

SEQ ID NO: 3470577 - RNA, 18 nt, Human
auuagaucuucaaacaga

SEQ ID NO: 3470578 - RNA, 19 nt, Human
auuagaucuucaaacagaa

SEQ ID NO: 3470579 - RNA, 13 nt, Human
auuagaugcaugu

SEQ ID NO: 3470580 - RNA, 21 nt, Human
auuagaugcauguugaccaug

SEQ ID NO: 3470581 - RNA, 13 nt, Human
auuagaugugauu

SEQ ID NO: 3470582 - RNA, 21 nt, Human
auuagaugugauuuaauagug

SEQ ID NO: 3470583 - RNA, 19 nt, Human
auuagauguucucuaucau

SEQ ID NO: 3470584 - RNA, 21 nt, Human
auuagauuauauugagacaaa

SEQ ID NO: 3470585 - RNA, 16 nt, Human
auuagauuuuauuuua

SEQ ID NO: 3470586 - RNA, 20 nt, Human
auuagauuuuauuuuacuau

SEQ ID NO: 3470587 - RNA, 21 nt, Human
auuagcaaggucauuucuuca

SEQ ID NO: 3470588 - RNA, 15 nt, Human
auuagcacagauuuu

SEQ ID NO: 3470589 - RNA, 18 nt, Human
auuagcacagauuuuaau

SEQ ID NO: 3470590 - RNA, 23 nt, Human
auuagcacagauuuuaauuguca

SEQ ID NO: 3470591 - RNA, 17 nt, Human
auuagcaguuugcuuug

SEQ ID NO: 3470592 - RNA, 19 nt, Human
auuagcauuugucaacaaa

SEQ ID NO: 3470593 - RNA, 13 nt, Human
auuagccaggauc

SEQ ID NO: 3470594 - RNA, 15 nt, Human
auuagccaggaucau

SEQ ID NO: 3470595 - RNA, 21 nt, Human
auuagccaggaucauggugua

SEQ ID NO: 3470596 - RNA, 23 nt, Human
auuagccaguaauccuguaggaa

SEQ ID NO: 3470597 - RNA, 17 nt, Human
auuagccagugaaaaac

SEQ ID NO: 3470598 - RNA, 13 nt, Human
auuagcucuggac

SEQ ID NO: 3470599 - RNA, 21 nt, Human
auuagcuuauguuaacugaca

SEQ ID NO: 3470600 - RNA, 22 nt, Human
auuagcuuauguuaacugacaa

SEQ ID NO: 3470601 - RNA, 15 nt, Human
auuagcuuuacuguu

SEQ ID NO: 3470602 - RNA, 14 nt, Human
auuagcuuuguguu

SEQ ID NO: 3470603 - RNA, 16 nt, Human
auuagcuuuuucaucc

SEQ ID NO: 3470604 - RNA, 20 nt, Human
auuaggaaguguaacagcug

SEQ ID NO: 3470605 - RNA, 21 nt, Human
auuaggaggcucaacaauaaa

SEQ ID NO: 3470606 - RNA, 21 nt, Human
auuaggcaaggcuaugugauu

SEQ ID NO: 3470607 - RNA, 18 nt, Human
auuaggccagcaacgcuu

SEQ ID NO: 3470608 - RNA, 17 nt, Human
auuagggagaaaauuca

SEQ ID NO: 3470609 - RNA, 18 nt, Human
auuagggagaaaauucaa

SEQ ID NO: 3470610 - RNA, 15 nt, Human
auuagggaugccucc

SEQ ID NO: 3470611 - RNA, 23 nt, Human
auuagggcaauuggaacaaagug

SEQ ID NO: 3470612 - RNA, 18 nt, Human
auuagggcccugugucug

SEQ ID NO: 3470613 - RNA, 16 nt, Human
auuaggguacauuuau

SEQ ID NO: 3470614 - RNA, 15 nt, Human
auuagguauaucucc

SEQ ID NO: 3470615 - RNA, 21 nt, Human
auuaggugugacugaauuucu

SEQ ID NO: 3470616 - RNA, 13 nt, Human
auuagguuaacua

SEQ ID NO: 3470617 - RNA, 19 nt, Human
auuagguuaacuauguaca

SEQ ID NO: 3470618 - RNA, 20 nt, Human
auuagguuaacuauguacaa

SEQ ID NO: 3470619 - RNA, 19 nt, Human
auuagguugaaacauaucu

SEQ ID NO: 3470620 - RNA, 14 nt, Human
auuagguugugaau

SEQ ID NO: 3470621 - RNA, 21 nt, Human
auuagguuuuguacaauugaa

SEQ ID NO: 3470622 - RNA, 14 nt, Human
auuaguaaaugucu

SEQ ID NO: 3470623 - RNA, 21 nt, Human
auuaguaaaugucuuuguaag

SEQ ID NO: 3470624 - RNA, 16 nt, Human
auuaguaacauguguu

SEQ ID NO: 3470625 - RNA, 17 nt, Human
auuaguaacauguguua

SEQ ID NO: 3470626 - RNA, 21 nt, Human
auuaguaacauucauguucua

SEQ ID NO: 3470627 - RNA, 19 nt, Human
auuaguacugcucuuguuu

SEQ ID NO: 3470628 - RNA, 17 nt, Human
auuaguacuggauuauu

SEQ ID NO: 3470629 - RNA, 13 nt, Human
auuaguacuuuau

SEQ ID NO: 3470630 - RNA, 15 nt, Human
auuaguacuuuauag

SEQ ID NO: 3470631 - RNA, 17 nt, Human
auuaguauuguuguccu

SEQ ID NO: 3470632 - RNA, 23 nt, Human
auuaguauuguuguccuuuucau

SEQ ID NO: 3470633 - RNA, 23 nt, Human
auuaguauuuauuuaauguuaug

SEQ ID NO: 3470634 - RNA, 15 nt, Human
auuagucauguuuau

SEQ ID NO: 3470635 - RNA, 23 nt, Human
auuagucauucaauaaauuguaa

SEQ ID NO: 3470636 - RNA, 13 nt, Human
auuagugauauuu

SEQ ID NO: 3470637 - RNA, 16 nt, Human
auuagugauauuucuc

SEQ ID NO: 3470638 - RNA, 21 nt, Human
auuagugccagaauuuuagga

SEQ ID NO: 3470639 - RNA, 13 nt, Human
auuagugcuaagu

SEQ ID NO: 3470640 - RNA, 22 nt, Human
auuaguguaugcuuugaaugua

SEQ ID NO: 3470641 - RNA, 16 nt, Human
auuaguguuauaugaa

SEQ ID NO: 3470642 - RNA, 17 nt, Human
auuaguguuauaugaac

SEQ ID NO: 3470643 - RNA, 20 nt, Human
auuaguuguguacucuggcc

SEQ ID NO: 3470644 - RNA, 15 nt, Human
auuaguuuagaacag

SEQ ID NO: 3470645 - RNA, 21 nt, Human
auuaguuuagaacagguuuuu

SEQ ID NO: 3470646 - RNA, 20 nt, Human
auuaguuuccuuuuuaauau

SEQ ID NO: 3470647 - RNA, 16 nt, Human
auuaguuuucuuguug

SEQ ID NO: 3470648 - RNA, 21 nt, Human
auuaguuuugaagauucuaug

SEQ ID NO: 3470649 - RNA, 18 nt, Human
auuaguuuugcauaauuu

SEQ ID NO: 3470650 - RNA, 14 nt, Human
auuauaaaaauauu

SEQ ID NO: 3470651 - RNA, 22 nt, Human
auuauaaaaauauuaagacaau

SEQ ID NO: 3470652 - RNA, 18 nt, Human
auuauaaaauuaaucaca

SEQ ID NO: 3470653 - RNA, 22 nt, Human
auuauaaacaagaaugaagguu

SEQ ID NO: 3470654 - RNA, 14 nt, Human
auuauaaacgcuua

SEQ ID NO: 3470655 - RNA, 13 nt, Human
auuauaaaguuuu

SEQ ID NO: 3470656 - RNA, 16 nt, Human
auuauaacucauuugu

SEQ ID NO: 3470657 - RNA, 15 nt, Human
auuauaacuuaaaau

SEQ ID NO: 3470658 - RNA, 14 nt, Human
auuauaaggacugc

SEQ ID NO: 3470659 - RNA, 17 nt, Human
auuauaaggacugcaug

SEQ ID NO: 3470660 - RNA, 18 nt, Human
auuauaagggcaaauugg

SEQ ID NO: 3470661 - RNA, 15 nt, Human
auuauaagucuuaca

SEQ ID NO: 3470662 - RNA, 22 nt, Human
auuauaauauacuauauuuaug

SEQ ID NO: 3470663 - RNA, 13 nt, Human
auuauaaugaauu

SEQ ID NO: 3470664 - RNA, 22 nt, Human
auuauaauguauucauauuugu

SEQ ID NO: 3470665 - RNA, 15 nt, Human
auuauaauuguauca

SEQ ID NO: 3470666 - RNA, 23 nt, Human
auuauaauuguaucagaggccua

SEQ ID NO: 3470667 - RNA, 13 nt, Human
auuauaauuguug

SEQ ID NO: 3470668 - RNA, 16 nt, Human
auuauaauuguugcau

SEQ ID NO: 3470669 - RNA, 23 nt, Human
auuauaauuuuuuucaauauuua

SEQ ID NO: 3470670 - RNA, 19 nt, Human
auuauacaaauuaaaaaga

SEQ ID NO: 3470671 - RNA, 22 nt, Human
auuauacagaccgaacuguugu

SEQ ID NO: 3470672 - RNA, 17 nt, Human
auuauacaugaaauuca

SEQ ID NO: 3470673 - RNA, 15 nt, Human
auuauaccuguugcu

SEQ ID NO: 3470674 - RNA, 17 nt, Human
auuauacuaacuuauuu

SEQ ID NO: 3470675 - RNA, 19 nt, Human
auuauacuaagaaaagaua

SEQ ID NO: 3470676 - RNA, 16 nt, Human
auuauacuuguaauua

SEQ ID NO: 3470677 - RNA, 17 nt, Human
auuauacuuguaauuau

SEQ ID NO: 3470678 - RNA, 19 nt, Human
auuauagagcagaaauucu

SEQ ID NO: 3470679 - RNA, 21 nt, Human
auuauagagcagaaauucugu

SEQ ID NO: 3470680 - RNA, 23 nt, Human
auuauagagcagaaauucuguuu

SEQ ID NO: 3470681 - RNA, 15 nt, Human
auuauagauucuaaa

SEQ ID NO: 3470682 - RNA, 16 nt, Human
auuauagauucuaaag

SEQ ID NO: 3470683 - RNA, 18 nt, Human
auuauagauucuaaagau

SEQ ID NO: 3470684 - RNA, 12 nt, Human
auuauagcucua

SEQ ID NO: 3470685 - RNA, 17 nt, Human
auuauagcucuaauguu

SEQ ID NO: 3470686 - RNA, 18 nt, Human
auuauagcucuaauguuu

SEQ ID NO: 3470687 - RNA, 19 nt, Human
auuauagcucuaauguuug

SEQ ID NO: 3470688 - RNA, 22 nt, Human
auuauagcucuaauguuugcau

SEQ ID NO: 3470689 - RNA, 19 nt, Human
auuauaggaauaucaauau

SEQ ID NO: 3470690 - RNA, 19 nt, Human
auuauaggagccuuaauuu

SEQ ID NO: 3470691 - RNA, 19 nt, Human
auuauagguaaucaaugaa

SEQ ID NO: 3470692 - RNA, 21 nt, Human
auuauagguaaucaaugaaua

SEQ ID NO: 3470693 - RNA, 16 nt, Human
auuauaguguagaaaa

SEQ ID NO: 3470694 - RNA, 15 nt, Human
auuauaguuucaagc

SEQ ID NO: 3470695 - RNA, 15 nt, Human
auuauauaacuguau

SEQ ID NO: 3470696 - RNA, 17 nt, Human
auuauauaaguauucua

SEQ ID NO: 3470697 - RNA, 20 nt, Human
auuauauaaguauucuaaau

SEQ ID NO: 3470698 - RNA, 20 nt, Human
auuauauacuuguuguuuaa

SEQ ID NO: 3470699 - RNA, 14 nt, Human
auuauauauauaau

SEQ ID NO: 3470700 - RNA, 13 nt, Human
auuauauauauau

SEQ ID NO: 3470701 - RNA, 19 nt, Human
auuauaucaauuuccucau

SEQ ID NO: 3470702 - RNA, 16 nt, Human
auuauaucuaauuauu

SEQ ID NO: 3470703 - RNA, 21 nt, Human
auuauaucugaggaauucugu

SEQ ID NO: 3470704 - RNA, 18 nt, Human
auuauaucuguggucuuc

SEQ ID NO: 3470705 - RNA, 16 nt, Human
auuauaugcuauuucu

SEQ ID NO: 3470706 - RNA, 17 nt, Human
auuauaugcuauuucua

SEQ ID NO: 3470707 - RNA, 18 nt, Human
auuauaugcuauuucuau

SEQ ID NO: 3470708 - RNA, 17 nt, Human
auuauauggaaauauau

SEQ ID NO: 3470709 - RNA, 18 nt, Human
auuauauguucagauuau

SEQ ID NO: 3470710 - RNA, 13 nt, Human
auuauauuaaaau

SEQ ID NO: 3470711 - RNA, 14 nt, Human
auuauauuaaaaua

SEQ ID NO: 3470712 - RNA, 17 nt, Human
auuauauugagacaaaa

SEQ ID NO: 3470713 - RNA, 18 nt, Human
auuauauuguuaaucaau

SEQ ID NO: 3470714 - RNA, 15 nt, Human
auuauauuuacaaau

SEQ ID NO: 3470715 - RNA, 16 nt, Human
auuauauuuacaaaug

SEQ ID NO: 3470716 - RNA, 15 nt, Human
auuauauuuauuacu

SEQ ID NO: 3470717 - RNA, 22 nt, Human
auuauauuucuauuuuauuaug

SEQ ID NO: 3470718 - RNA, 23 nt, Human
auuauauuucuauuuuauuauga

SEQ ID NO: 3470719 - RNA, 15 nt, Human
auuuauuuccucccu

SEQ ID NO: 3470720 - RNA, 13 nt, Human
auuuauuugaaug

SEQ ID NO: 3470721 - RNA, 15 nt, Human
auuuauuugcuucuu

SEQ ID NO: 3470722 - RNA, 14 nt, Human
auuuauuuuaauaa

SEQ ID NO: 3470723 - RNA, 19 nt, Human
auuuauuuuaauaauguuu

SEQ ID NO: 3470724 - RNA, 15 nt, Human
auuuauuuuauaaga

SEQ ID NO: 3470725 - RNA, 16 nt, Human
auuuauuuuauaagaa

SEQ ID NO: 3470726 - RNA, 20 nt, Human
auuuauuuuauaagaaaaac

SEQ ID NO: 3470727 - RNA, 20 nt, Human
auuuauuuuaugagaaaugu

SEQ ID NO: 3470728 - RNA, 13 nt, Human
auuuauuuuccuc

SEQ ID NO: 3470729 - RNA, 23 nt, Human
auuuauuuucuuuugaauuguuu

SEQ ID NO: 3470730 - RNA, 19 nt, Human
auuuauuuuguaauuauga

SEQ ID NO: 3470731 - RNA, 15 nt, Human
auuuauuuuguauga

SEQ ID NO: 3470732 - RNA, 16 nt, Human
auuuauuuuguaugaa

SEQ ID NO: 3470733 - RNA, 20 nt, Human
auuuauuuuguaugaaauau

SEQ ID NO: 3470734 - RNA, 18 nt, Human
auuuauuuuuaagaaaga

SEQ ID NO: 3470735 - RNA, 14 nt, Human
auuuauuuuuacaa

SEQ ID NO: 3470736 - RNA, 16 nt, Human
auuuauuuuucaguuc

SEQ ID NO: 3470737 - RNA, 23 nt, Human
auuuauuuuucaguuccaagaaa

SEQ ID NO: 3470738 - RNA, 17 nt, Human
auuuauuuuuucuuuuc

SEQ ID NO: 3470739 - RNA, 17 nt, Human
auuuauuuuuuuuaaag

SEQ ID NO: 3470740 - RNA, 15 nt, Human
auuucaaaaauauaa

SEQ ID NO: 3470741 - RNA, 14 nt, Human
auuucaaaaauuug

SEQ ID NO: 3470742 - RNA, 19 nt, Human
auuucaaaaauuuggaauu

SEQ ID NO: 3470743 - RNA, 13 nt, Human
auuucaaaagaca

SEQ ID NO: 3470744 - RNA, 14 nt, Human
auuucaaaaugcuu

SEQ ID NO: 3470745 - RNA, 12 nt, Human
auuucaagaagu

SEQ ID NO: 3470746 - RNA, 21 nt, Human
auuucaagacauuaaaucuau

SEQ ID NO: 3470747 - RNA, 20 nt, Human
auuucaagagauuuaauuaa

SEQ ID NO: 3470748 - RNA, 14 nt, Human
auuucaagcuuauu

SEQ ID NO: 3470749 - RNA, 13 nt, Human
auuucaagguucu

SEQ ID NO: 3470750 - RNA, 17 nt, Human
auuucaagguucuaacc

SEQ ID NO: 3470751 - RNA, 16 nt, Human
auuucaaguuccaagu

SEQ ID NO: 3470752 - RNA, 16 nt, Human
auuucaauguaauuaa

SEQ ID NO: 3470753 - RNA, 14 nt, Human
auuucaauguguau

SEQ ID NO: 3470754 - RNA, 14 nt, Human
auuucacaaauaau

SEQ ID NO: 3470755 - RNA, 20 nt, Human
auuucacaaauauuaaaaag

SEQ ID NO: 3470756 - RNA, 15 nt, Human
auuucacaacagauc

SEQ ID NO: 3470757 - RNA, 10 nt, Human
auuucacaag

SEQ ID NO: 3470758 - RNA, 15 nt, Human
auuucacaagcuauu

SEQ ID NO: 3470759 - RNA, 18 nt, Human
auuucacauuaauggucu

SEQ ID NO: 3470760 - RNA, 15 nt, Human
auuucacauuauucu

SEQ ID NO: 3470761 - RNA, 21 nt, Human
auuucaccacucaaaggccag

SEQ ID NO: 3470762 - RNA, 15 nt, Human
auuucaccccucccu

SEQ ID NO: 3470763 - RNA, 14 nt, Human
auuucaccuguaaa

SEQ ID NO: 3470764 - RNA, 20 nt, Human
auuucacgucgucuucugua

SEQ ID NO: 3470765 - RNA, 14 nt, Human
auuucacuauuuuu

SEQ ID NO: 3470766 - RNA, 14 nt, Human
auuucacuggagca

SEQ ID NO: 3470767 - RNA, 19 nt, Human
auuucacuguagcucuaaa

SEQ ID NO: 3470768 - RNA, 24 nt, Human
auuucacuguagcucuaaaaucug

SEQ ID NO: 3470769 - RNA, 14 nt, Human
auuucacugucugu

SEQ ID NO: 3470770 - RNA, 12 nt, Human
auuucacuuaau

SEQ ID NO: 3470771 - RNA, 17 nt, Human
auuucacuuaauaaugu

SEQ ID NO: 3470772 - RNA, 16 nt, Human
auuucacuuauuuaga

SEQ ID NO: 3470773 - RNA, 19 nt, Human
auuucagaaaaugaaaaau

SEQ ID NO: 3470774 - RNA, 21 nt, Human
auuucagaaagccuuucauuu

SEQ ID NO: 3470775 - RNA, 19 nt, Human
auuucagaaguuaguuugu

SEQ ID NO: 3470776 - RNA, 21 nt, Human
auuucagaaguuaguuuguau

SEQ ID NO: 3470777 - RNA, 13 nt, Human
auuucagaaguuu

SEQ ID NO: 3470778 - RNA, 19 nt, Human
auuucagaaguuuaaauau

SEQ ID NO: 3470779 - RNA, 23 nt, Human
auuucagacucccauuccugaag

SEQ ID NO: 3470780 - RNA, 14 nt, Human
auuucagaugcuuu

SEQ ID NO: 3470781 - RNA, 16 nt, Human
auuucagauuuugaua

SEQ ID NO: 3470782 - RNA, 18 nt, Human
auuucagauuuugauaac

SEQ ID NO: 3470783 - RNA, 19 nt, Human
auuucaggaggaauacuga

SEQ ID NO: 3470784 - RNA, 22 nt, Human
auuucaggauacucugucagau

SEQ ID NO: 3470785 - RNA, 14 nt, Human
auuucaggauucuc

SEQ ID NO: 3470786 - RNA, 19 nt, Human
auuucaggggucgucacca

SEQ ID NO: 3470787 - RNA, 14 nt, Human
auuucaguacuuca

SEQ ID NO: 3470788 - RNA, 19 nt, Human
auuucaguacuucagcaag

SEQ ID NO: 3470789 - RNA, 14 nt, Human
auuucagucuuuuc

SEQ ID NO: 3470790 - RNA, 19 nt, Human
auuucagucuuuuccuguu

SEQ ID NO: 3470791 - RNA, 17 nt, Human
auuucaguguaaagugu

SEQ ID NO: 3470792 - RNA, 21 nt, Human
auuucaguguuaccugugugc

SEQ ID NO: 3470793 - RNA, 18 nt, Human
auuucaguucuaggaaaa

SEQ ID NO: 3470794 - RNA, 19 nt, Human
auuucaguucuaggaaaau

SEQ ID NO: 3470795 - RNA, 23 nt, Human
auuucauacuguaacauucagga

SEQ ID NO: 3470796 - RNA, 18 nt, Human
auuucauaucuacagaua

SEQ ID NO: 3470797 - RNA, 15 nt, Human
auuucauauucuuuc

SEQ ID NO: 3470798 - RNA, 19 nt, Human
auuucaucagaacagcugu

SEQ ID NO: 3470799 - RNA, 20 nt, Human
auuucaucauauuauacaga

SEQ ID NO: 3470800 - RNA, 17 nt, Human
auuucaucauuguuucu

SEQ ID NO: 3470801 - RNA, 16 nt, Human
auuucaucuauuucug

SEQ ID NO: 3470802 - RNA, 20 nt, Human
auuucaucuauuucugagaa

SEQ ID NO: 3470803 - RNA, 14 nt, Human
auuucaucucauuu

SEQ ID NO: 3470804 - RNA, 21 nt, Human
auuucaucucauuuaagggaa

SEQ ID NO: 3470805 - RNA, 11 nt, Human
auuucaucugc

SEQ ID NO: 3470806 - RNA, 17 nt, Human
auuucaucugcucuccu

SEQ ID NO: 3470807 - RNA, 21 nt, Human
auuucaucugcucuccuuccu

SEQ ID NO: 3470808 - RNA, 14 nt, Human
auuucaugaaaauu

SEQ ID NO: 3470809 - RNA, 15 nt, Human
auuucaugauuucau

SEQ ID NO: 3470810 - RNA, 20 nt, Human
auuucauguacugcauuauu

SEQ ID NO: 3470811 - RNA, 21 nt, Human
auuucauguacugcauuauuu

SEQ ID NO: 3470812 - RNA, 13 nt, Human
auuucauguccau

SEQ ID NO: 3470813 - RNA, 11 nt, Human
auuucauucca

SEQ ID NO: 3470814 - RNA, 17 nt, Human
auuucauuccauugccu

SEQ ID NO: 3470815 - RNA, 17 nt, Human
auuucauugccugugua

SEQ ID NO: 3470816 - RNA, 14 nt, Human
auuucauugguuaa

SEQ ID NO: 3470817 - RNA, 14 nt, Human
auuucauuguauga

SEQ ID NO: 3470818 - RNA, 15 nt, Human
auuucauuguaugau

SEQ ID NO: 3470819 - RNA, 20 nt, Human
auuucauuguaugauguguu

SEQ ID NO: 3470820 - RNA, 23 nt, Human
auuucauuuuguaacaaaugaac

SEQ ID NO: 3470821 - RNA, 17 nt, Human
auuuccaaauaaaauga

SEQ ID NO: 3470822 - RNA, 13 nt, Human
auuuccaaaugaa

SEQ ID NO: 3470823 - RNA, 16 nt, Human
auuuccaagagcugag

SEQ ID NO: 3470824 - RNA, 14 nt, Human
auuuccaauguuuc

SEQ ID NO: 3470825 - RNA, 21 nt, Human
auuuccacuaaaaauauuguu

SEQ ID NO: 3470826 - RNA, 16 nt, Human
auuuccacucaggucu

SEQ ID NO: 3470827 - RNA, 17 nt, Human
auuuccagccagggcug

SEQ ID NO: 3470828 - RNA, 22 nt, Human
auuuccauauaaauauuagaaa

SEQ ID NO: 3470829 - RNA, 17 nt, Human
auuuccauauggauuuu

SEQ ID NO: 3470830 - RNA, 15 nt, Human
auuuccauguaugca

SEQ ID NO: 3470831 - RNA, 15 nt, Human
auuuccauuauuuau

SEQ ID NO: 3470832 - RNA, 17 nt, Human
auuuccauuccagaaua

SEQ ID NO: 3470833 - RNA, 18 nt, Human
auuuccauuuacuuaaga

SEQ ID NO: 3470834 - RNA, 24 nt, Human
auuuccauuuggggauauugucau

SEQ ID NO: 3470835 - RNA, 17 nt, Human
auuucccaauuaggaag

SEQ ID NO: 3470836 - RNA, 13 nt, Human
auuucccaucugc

SEQ ID NO: 3470837 - RNA, 22 nt, Human
auuucccauuugugccagagga

SEQ ID NO: 3470838 - RNA, 17 nt, Human
auuuccccaccccagcu

SEQ ID NO: 3470839 - RNA, 23 nt, Human
auuuccccagaccugagcucccc

SEQ ID NO: 3470840 - RNA, 20 nt, Human
auuucccccauuuuucccag

SEQ ID NO: 3470841 - RNA, 18 nt, Human
auuuccccccuccgccuc

SEQ ID NO: 3470842 - RNA, 19 nt, Human
auuucccccuuucuuccuc

SEQ ID NO: 3470843 - RNA, 15 nt, Human
auuuccccuccuucc

SEQ ID NO: 3470844 - RNA, 15 nt, Human
auuucccuacauuaa

SEQ ID NO: 3470845 - RNA, 14 nt, Human
auuucccucucuca

SEQ ID NO: 3470846 - RNA, 17 nt, Human
auuucccugaaggaacc

SEQ ID NO: 3470847 - RNA, 15 nt, Human
auuucccuucuucug

SEQ ID NO: 3470848 - RNA, 16 nt, Human
auuucccuuuagcugu

SEQ ID NO: 3470849 - RNA, 22 nt, Human
auuucccuuuagcuguguuauu

SEQ ID NO: 3470850 - RNA, 15 nt, Human
auuuccguuaaaaua

SEQ ID NO: 3470851 - RNA, 21 nt, Human
auuuccuaaauauauuuuaag

SEQ ID NO: 3470852 - RNA, 21 nt, Human
auuuccuaauacugucauccu

SEQ ID NO: 3470853 - RNA, 15 nt, Human
auuuccuaucauuuu

SEQ ID NO: 3470854 - RNA, 14 nt, Human
auuuccuaugaugu

SEQ ID NO: 3470855 - RNA, 16 nt, Human
auuuccuaugauguau

SEQ ID NO: 3470856 - RNA, 20 nt, Human
auuuccuauguaacugcauu

SEQ ID NO: 3470857 - RNA, 20 nt, Human
auuuccuccgucaccucaga

SEQ ID NO: 3470858 - RNA, 19 nt, Human
auuuccucgcagccucuca

SEQ ID NO: 3470859 - RNA, 22 nt, Human
auuuccucuauugauguacagu

SEQ ID NO: 3470860 - RNA, 16 nt, Human
auuuccucuugaacca

SEQ ID NO: 3470861 - RNA, 23 nt, Human
auuuccugggagcuuuuguagaa

SEQ ID NO: 3470862 - RNA, 21 nt, Human
auuuccuggugugaagguccu

SEQ ID NO: 3470863 - RNA, 14 nt, Human
auuuccuugaaugu

SEQ ID NO: 3470864 - RNA, 16 nt, Human
auuuuaguuucuguuc

SEQ ID NO: 3470865 - RNA, 21 nt, Human
auuuuaguuucuguucugugg

SEQ ID NO: 3470866 - RNA, 23 nt, Human
auuuuaguuucuguucuguggaa

SEQ ID NO: 3470867 - RNA, 14 nt, Human
auuuuaguuuuauu

SEQ ID NO: 3470868 - RNA, 20 nt, Human
auuuuaguuuuauuuucuaa

SEQ ID NO: 3470869 - RNA, 21 nt, Human
auuuuaguuuuauuuucuaaa

SEQ ID NO: 3470870 - RNA, 22 nt, Human
auuuuaguuuuauuuucuaaag

SEQ ID NO: 3470871 - RNA, 20 nt, Human
auuuuaguuuuucauuaaau

SEQ ID NO: 3470872 - RNA, 23 nt, Human
auuuuaguuuuucauuaaauaaa

SEQ ID NO: 3470873 - RNA, 17 nt, Human
auuuuauaaaauuaaag

SEQ ID NO: 3470874 - RNA, 19 nt, Human
auuuuauaaaauuaaagaa

SEQ ID NO: 3470875 - RNA, 21 nt, Human
auuuuauaaaauuaaagaaaa

SEQ ID NO: 3470876 - RNA, 16 nt, Human
auuuuauaaaucgcuu

SEQ ID NO: 3470877 - RNA, 13 nt, Human
auuuuauaagaaa

SEQ ID NO: 3470878 - RNA, 16 nt, Human
auuuuauaagaaaaac

SEQ ID NO: 3470879 - RNA, 17 nt, Human
auuuuauaagaaaaacu

SEQ ID NO: 3470880 - RNA, 20 nt, Human
auuuuauaaggacuuccuga

SEQ ID NO: 3470881 - RNA, 12 nt, Human
auuuuauaauuu

SEQ ID NO: 3470882 - RNA, 17 nt, Human
auuuuauagcuacuaau

SEQ ID NO: 3470883 - RNA, 16 nt, Human
auuuuauauaaaguau

SEQ ID NO: 3470884 - RNA, 21 nt, Human
auuuuauauaaaguauucuuu

SEQ ID NO: 3470885 - RNA, 14 nt, Human
auuuuauauaauaa

SEQ ID NO: 3470886 - RNA, 17 nt, Human
auuuuauauaauaaagu

SEQ ID NO: 3470887 - RNA, 21 nt, Human
auuuuauaucaauuuaaaaaa

SEQ ID NO: 3470888 - RNA, 16 nt, Human
auuuuauaugcuuacu

SEQ ID NO: 3470889 - RNA, 18 nt, Human
auuuuauaugcuuacuga

SEQ ID NO: 3470890 - RNA, 16 nt, Human
auuuuauaugucaaag

SEQ ID NO: 3470891 - RNA, 15 nt, Human
auuuuauauuacacu

SEQ ID NO: 3470892 - RNA, 18 nt, Human
auuuuauauuacacuaca

SEQ ID NO: 3470893 - RNA, 19 nt, Human
auuuuauauuagaaguguu

SEQ ID NO: 3470894 - RNA, 15 nt, Human
auuuuauauugaaaa

SEQ ID NO: 3470895 - RNA, 16 nt, Human
auuuuauauugaaaaa

SEQ ID NO: 3470896 - RNA, 22 nt, Human
auuuuaucugccucucuuguaa

SEQ ID NO: 3470897 - RNA, 13 nt, Human
auuuuaucuguga

SEQ ID NO: 3470898 - RNA, 15 nt, Human
auuuuaucugugaau

SEQ ID NO: 3470899 - RNA, 15 nt, Human
auuuuaucuuugauu

SEQ ID NO: 3470900 - RNA, 21 nt, Human
auuuuaugaaagguuuacauu

SEQ ID NO: 3470901 - RNA, 16 nt, Human
auuuuaugaaugucuu

SEQ ID NO: 3470902 - RNA, 15 nt, Human
auuuuaugagaaaug

SEQ ID NO: 3470903 - RNA, 16 nt, Human
auuuuaugagaaaugu

SEQ ID NO: 3470904 - RNA, 17 nt, Human
auuuuaugagaaaugua

SEQ ID NO: 3470905 - RNA, 12 nt, Human
auuuuaugcuuu

SEQ ID NO: 3470906 - RNA, 18 nt, Human
auuuuaugcuuuaaacau

SEQ ID NO: 3470907 - RNA, 19 nt, Human
auuuuauggcucacuauga

SEQ ID NO: 3470908 - RNA, 12 nt, Human
auuuuauguaug

SEQ ID NO: 3470909 - RNA, 12 nt, Human
auuuuauguuau

SEQ ID NO: 3470910 - RNA, 17 nt, Human
auuuuauguuauauaua

SEQ ID NO: 3470911 - RNA, 13 nt, Human
auuuuauguugac

SEQ ID NO: 3470912 - RNA, 19 nt, Human
auuuuauguugacauuugu

SEQ ID NO: 3470913 - RNA, 20 nt, Human
auuuuauguugacauuuguu

SEQ ID NO: 3470914 - RNA, 18 nt, Human
auuuuauguugcauagaa

SEQ ID NO: 3470915 - RNA, 12 nt, Human
auuuuauuacug

SEQ ID NO: 3470916 - RNA, 14 nt, Human
auuuuauuaugaag

SEQ ID NO: 3470917 - RNA, 23 nt, Human
auuuuauuaugaagaaggugaau

SEQ ID NO: 3470918 - RNA, 15 nt, Human
auuuuauuauguaaa

SEQ ID NO: 3470919 - RNA, 19 nt, Human
auuuuauuauguaaauccc

SEQ ID NO: 3470920 - RNA, 12 nt, Human
auuuuauucaag

SEQ ID NO: 3470921 - RNA, 12 nt, Human
auuuuauucuug

SEQ ID NO: 3470922 - RNA, 21 nt, Human
auuuuauuguaacagacauug

SEQ ID NO: 3470923 - RNA, 22 nt, Human
auuuuauuuagacaagagaugg

SEQ ID NO: 3470924 - RNA, 14 nt, Human
auuuuauuucaaug

SEQ ID NO: 3470925 - RNA, 16 nt, Human
auuuuauuucaaugua

SEQ ID NO: 3470926 - RNA, 17 nt, Human
auuuuauuucaauguaa

SEQ ID NO: 3470927 - RNA, 13 nt, Human
auuuuauuuccau

SEQ ID NO: 3470928 - RNA, 16 nt, Human
auuuuauuuccaucau

SEQ ID NO: 3470929 - RNA, 14 nt, Human
auuuuauuugacaa

SEQ ID NO: 3470930 - RNA, 19 nt, Human
auuuuauuuuaaaauuuca

SEQ ID NO: 3470931 - RNA, 22 nt, Human
auuuuauuuugaaauggaaauu

SEQ ID NO: 3470932 - RNA, 22 nt, Human
auuuuauuuugugcucauuuaa

SEQ ID NO: 3470933 - RNA, 15 nt, Human
auuuuauuuuuagaa

SEQ ID NO: 3470934 - RNA, 16 nt, Human
auuuucaaaaccaggu

SEQ ID NO: 3470935 - RNA, 17 nt, Human
auuuucaaagacuuaag

SEQ ID NO: 3470936 - RNA, 17 nt, Human
auuuucaaaguacauaa

SEQ ID NO: 3470937 - RNA, 18 nt, Human
auuuucaaauuguaucua

SEQ ID NO: 3470938 - RNA, 18 nt, Human
auuuucaacgcagcccug

SEQ ID NO: 3470939 - RNA, 17 nt, Human
auuuucaagaaacugag

SEQ ID NO: 3470940 - RNA, 22 nt, Human
auuuucaagaaacugaggaauu

SEQ ID NO: 3470941 - RNA, 16 nt, Human
auuuucaaguaauugu

SEQ ID NO: 3470942 - RNA, 15 nt, Human
auuuucaaguagcug

SEQ ID NO: 3470943 - RNA, 20 nt, Human
auuuucaauagccacuaacc

SEQ ID NO: 3470944 - RNA, 15 nt, Human
auuuucacaauguca

SEQ ID NO: 3470945 - RNA, 17 nt, Human
auuuucacaugaacaua

SEQ ID NO: 3470946 - RNA, 22 nt, Human
auuuucaccccacccuuccccu

SEQ ID NO: 3470947 - RNA, 16 nt, Human
auuuucacccucugua

SEQ ID NO: 3470948 - RNA, 18 nt, Human
auuuucacccucuguacc

SEQ ID NO: 3470949 - RNA, 22 nt, Human
auuuucacuuuuggcaaugacu

SEQ ID NO: 3470950 - RNA, 14 nt, Human
auuuucagaaucug

SEQ ID NO: 3470951 - RNA, 15 nt, Human
auuuucagaaucuga

SEQ ID NO: 3470952 - RNA, 14 nt, Human
auuuucagauuugc

SEQ ID NO: 3470953 - RNA, 18 nt, Human
auuuucagauuugcacaa

SEQ ID NO: 3470954 - RNA, 19 nt, Human
auuuucagauuugcacaaa

SEQ ID NO: 3470955 - RNA, 17 nt, Human
auuuucagcaaacucuu

SEQ ID NO: 3470956 - RNA, 18 nt, Human
auuuucagcaaacucuuu

SEQ ID NO: 3470957 - RNA, 18 nt, Human
auuuucagcaugaaaaug

SEQ ID NO: 3470958 - RNA, 12 nt, Human
auuuucagcauu

SEQ ID NO: 3470959 - RNA, 23 nt, Human
auuuucagcccauauuucaucgu

SEQ ID NO: 3470960 - RNA, 20 nt, Human
auuuucagguaguacuaaga

SEQ ID NO: 3470961 - RNA, 22 nt, Human
auuuucaguagggcuacaaaac

SEQ ID NO: 3470962 - RNA, 20 nt, Human
auuuucagucaaaacuuuaa

SEQ ID NO: 3470963 - RNA, 12 nt, Human
auuuucagugau

SEQ ID NO: 3470964 - RNA, 14 nt, Human
auuuucauaacuua

SEQ ID NO: 3470965 - RNA, 21 nt, Human
auuuucauaaguauuucaaau

SEQ ID NO: 3470966 - RNA, 22 nt, Human
auuuucauacagcauuacaaau

SEQ ID NO: 3470967 - RNA, 18 nt, Human
auuuucauguauaugugu

SEQ ID NO: 3470968 - RNA, 15 nt, Human
auuuucauuaaaagc

SEQ ID NO: 3470969 - RNA, 16 nt, Human
auuuucauuacaaugg

SEQ ID NO: 3470970 - RNA, 15 nt, Human
auuuucauuuucugc

SEQ ID NO: 3470971 - RNA, 14 nt, Human
auuuuccaaaugua

SEQ ID NO: 3470972 - RNA, 17 nt, Human
auuuuccaaauguaaua

SEQ ID NO: 3470973 - RNA, 15 nt, Human
auuuuccaggcuucu

SEQ ID NO: 3470974 - RNA, 15 nt, Human
auuuuccaucuaaaa

SEQ ID NO: 3470975 - RNA, 19 nt, Human
auuuuccaucuaaaaauau

SEQ ID NO: 3470976 - RNA, 20 nt, Human
auuuucccaauagcacuuuc

SEQ ID NO: 3470977 - RNA, 17 nt, Human
auuuucccacugcaccc

SEQ ID NO: 3470978 - RNA, 14 nt, Human
auuuuccccccacu

SEQ ID NO: 3470979 - RNA, 19 nt, Human
auuuucccccuuggcucuc

SEQ ID NO: 3470980 - RNA, 22 nt, Human
auuuucccucagaaaaugagua

SEQ ID NO: 3470981 - RNA, 13 nt, Human
auuuucccugcua

SEQ ID NO: 3470982 - RNA, 21 nt, Human
auuuuccuaauaaaguucugu

SEQ ID NO: 3470983 - RNA, 12 nt, Human
auuuuccucccc

SEQ ID NO: 3470984 - RNA, 14 nt, Human
auuuuccuccccag

SEQ ID NO: 3470985 - RNA, 15 nt, Human
auuuuccuccccagc

SEQ ID NO: 3470986 - RNA, 13 nt, Human
auuuuccuccuuu

SEQ ID NO: 3470987 - RNA, 19 nt, Human
auuuuccucugcuuugaaa

SEQ ID NO: 3470988 - RNA, 14 nt, Human
auuuuccucuugug

SEQ ID NO: 3470989 - RNA, 23 nt, Human
auuuuccuguccucuuucagcuc

SEQ ID NO: 3470990 - RNA, 12 nt, Human
auuuuccuugaa

SEQ ID NO: 3470991 - RNA, 14 nt, Human
auuuuccuugaagc

SEQ ID NO: 3470992 - RNA, 17 nt, Human
auuuuccuuuuuuauac

SEQ ID NO: 3470993 - RNA, 22 nt, Human
auuuuccuuuuuuauacacaua

SEQ ID NO: 3470994 - RNA, 16 nt, Human
auuuucguucauuacu

SEQ ID NO: 3470995 - RNA, 15 nt, Human
auuuucuaaagacuu

SEQ ID NO: 3470996 - RNA, 15 nt, Human
auuuucuaaaguacu

SEQ ID NO: 3470997 - RNA, 17 nt, Human
auuuucuaagaaacauu

SEQ ID NO: 3470998 - RNA, 18 nt, Human
auuuucuaagcaauuucu

SEQ ID NO: 3470999 - RNA, 19 nt, Human
auuuucuacaaauaauuuu

SEQ ID NO: 3471000 - RNA, 21 nt, Human
auuuucuaccuggucucuccu

SEQ ID NO: 3471001 - RNA, 19 nt, Human
auuuucuagacuuucuguu

SEQ ID NO: 3471002 - RNA, 18 nt, Human
auuuucuagauacaauaa

SEQ ID NO: 3471003 - RNA, 17 nt, Human
auuuucuauaacagaua

SEQ ID NO: 3471004 - RNA, 17 nt, Human
auuuucuauaauuuaaa

SEQ ID NO: 3471005 - RNA, 19 nt, Human
auuuucucaaaagcauuua

SEQ ID NO: 3471006 - RNA, 20 nt, Human
auuuucucaaaagcauuuau

SEQ ID NO: 3471007 - RNA, 22 nt, Human
auuuucucaaaagcauuuauca

SEQ ID NO: 3471008 - RNA, 23 nt, Human
auuuucucccaggaagcuuugau

SEQ ID NO: 3471009 - RNA, 15 nt, Human
caagcggguggcucu

SEQ ID NO: 3471010 - RNA, 15 nt, Human
caagcggugucucuc

SEQ ID NO: 3471011 - RNA, 16 nt, Human
caagcgugagccacug

SEQ ID NO: 3471012 - RNA, 17 nt, Human
caagcgugagccacugc

SEQ ID NO: 3471013 - RNA, 13 nt, Human
caagcuaaccuua

SEQ ID NO: 3471014 - RNA, 22 nt, Human
caagcuaaccuuauccugcauu

SEQ ID NO: 3471015 - RNA, 16 nt, Human
caagcuaagcacugcc

SEQ ID NO: 3471016 - RNA, 23 nt, Human
caagcuaauaaaauaucauucag

SEQ ID NO: 3471017 - RNA, 21 nt, Human
caagcuaauugggaguccagg

SEQ ID NO: 3471018 - RNA, 23 nt, Human
caagcuaauugggaguccaggca

SEQ ID NO: 3471019 - RNA, 16 nt, Human
caagcuagaaccugga

SEQ ID NO: 3471020 - RNA, 17 nt, Human
caagcuagaaccuggag

SEQ ID NO: 3471021 - RNA, 18 nt, Human
caagcuagaaccuggagg

SEQ ID NO: 3471022 - RNA, 16 nt, Human
caagcuauccuggcuc

SEQ ID NO: 3471023 - RNA, 16 nt, Human
caagcuaucuaaaguu

SEQ ID NO: 3471024 - RNA, 17 nt, Human
caagcuauuccuuuccc

SEQ ID NO: 3471025 - RNA, 21 nt, Human
caagcuauuccuuucccuucc

SEQ ID NO: 3471026 - RNA, 16 nt, Human
caagcucacaguuccu

SEQ ID NO: 3471027 - RNA, 20 nt, Human
caagcucacaguuccucgcc

SEQ ID NO: 3471028 - RNA, 14 nt, Human
caagcucacuugcu

SEQ ID NO: 3471029 - RNA, 21 nt, Human
caagcucagaggcgcacugug

SEQ ID NO: 3471030 - RNA, 19 nt, Human
caagcuccaagccccaucu

SEQ ID NO: 3471031 - RNA, 18 nt, Human
caagcuccaagcucccag

SEQ ID NO: 3471032 - RNA, 12 nt, Human
caagcucccagg

SEQ ID NO: 3471033 - RNA, 14 nt, Human
caagcucccaggca

SEQ ID NO: 3471034 - RNA, 16 nt, Human
caagcucccugcccca

SEQ ID NO: 3471035 - RNA, 12 nt, Human
caagcuccuccu

SEQ ID NO: 3471036 - RNA, 14 nt, Human
caagcuccuccucc

SEQ ID NO: 3471037 - RNA, 19 nt, Human
caagcuccuccucggaacc

SEQ ID NO: 3471038 - RNA, 22 nt, Human
caagcuccuugggaggccccac

SEQ ID NO: 3471039 - RNA, 19 nt, Human
caagcucuaucaccaagga

SEQ ID NO: 3471040 - RNA, 17 nt, Human
caagcucugagggaaag

SEQ ID NO: 3471041 - RNA, 13 nt, Human
caagcucugcucc

SEQ ID NO: 3471042 - RNA, 17 nt, Human
caagcucugcuccucuc

SEQ ID NO: 3471043 - RNA, 21 nt, Human
caagcugaaauuuuagaaaua

SEQ ID NO: 3471044 - RNA, 15 nt, Human
caagcugaggugccc

SEQ ID NO: 3471045 - RNA, 17 nt, Human
caagcugaggugcccag

SEQ ID NO: 3471046 - RNA, 15 nt, Human
caagcugauuaaaug

SEQ ID NO: 3471047 - RNA, 13 nt, Human
caagcugcacccu

SEQ ID NO: 3471048 - RNA, 14 nt, Human
caagcugcaucuag

SEQ ID NO: 3471049 - RNA, 15 nt, Human
caagcugccucccug

SEQ ID NO: 3471050 - RNA, 18 nt, Human
caagcugcucugagccac

SEQ ID NO: 3471051 - RNA, 21 nt, Human
caagcugcucugagccacagu

SEQ ID NO: 3471052 - RNA, 22 nt, Human
caagcugcucugagccacagug

SEQ ID NO: 3471053 - RNA, 18 nt, Human
caagcuggaagcacaugu

SEQ ID NO: 3471054 - RNA, 17 nt, Human
caagcuggcuuacacug

SEQ ID NO: 3471055 - RNA, 16 nt, Human
caagcugggccccagc

SEQ ID NO: 3471056 - RNA, 19 nt, Human
caagcugggccccagccca

SEQ ID NO: 3471057 - RNA, 14 nt, Human
caagcugugccacc

SEQ ID NO: 3471058 - RNA, 19 nt, Human
caagcuguugaccaggcac

SEQ ID NO: 3471059 - RNA, 12 nt, Human
caagcuucccuc

SEQ ID NO: 3471060 - RNA, 23 nt, Human
caagcuuuuuuauuuuuuauaca

SEQ ID NO: 3471061 - RNA, 16 nt, Human
caaggaaaaagaaaau

SEQ ID NO: 3471062 - RNA, 17 nt, Human
caaggaaaccacagcug

SEQ ID NO: 3471063 - RNA, 18 nt, Human
caaggaaaccacagcugc

SEQ ID NO: 3471064 - RNA, 20 nt, Human
caaggaaaccacagcugcug

SEQ ID NO: 3471065 - RNA, 21 nt, Human
caaggaaaccacagcugcugg

SEQ ID NO: 3471066 - RNA, 22 nt, Human
caaggaaaccacagcugcugga

SEQ ID NO: 3471067 - RNA, 20 nt, Human
caaggaaacgcuaccucucu

SEQ ID NO: 3471068 - RNA, 23 nt, Human
caaggaaagggggucccaguggg

SEQ ID NO: 3471069 - RNA, 22 nt, Human
caaggaacuaauuucuucuccu

SEQ ID NO: 3471070 - RNA, 13 nt, Human
caaggaagaaauu

SEQ ID NO: 3471071 - RNA, 11 nt, Human
caaggaagagc

SEQ ID NO: 3471072 - RNA, 23 nt, Human
caaggaagguucauguagagaaa

SEQ ID NO: 3471073 - RNA, 16 nt, Human
caaggaaguagaaaca

SEQ ID NO: 3471074 - RNA, 18 nt, Human
caaggacaaagucuccag

SEQ ID NO: 3471075 - RNA, 22 nt, Human
caaggacaaagucuccagccca

SEQ ID NO: 3471076 - RNA, 18 nt, Human
caaggacagaaggcuccu

SEQ ID NO: 3471077 - RNA, 16 nt, Human
caaggacauucuugua

SEQ ID NO: 3471078 - RNA, 13 nt, Human
caaggaccaggac

SEQ ID NO: 3471079 - RNA, 14 nt, Human
caaggaccaggacu

SEQ ID NO: 3471080 - RNA, 18 nt, Human
caaggaccaggacucccu

SEQ ID NO: 3471081 - RNA, 13 nt, Human
caaggaccccuca

SEQ ID NO: 3471082 - RNA, 17 nt, Human
caaggaccccucaccuu

SEQ ID NO: 3471083 - RNA, 20 nt, Human
caaggaccuccucuuccccc

SEQ ID NO: 3471084 - RNA, 20 nt, Human
caaggacgcuucacaggaca

SEQ ID NO: 3471085 - RNA, 16 nt, Human
caaggacuaggguccu

SEQ ID NO: 3471086 - RNA, 12 nt, Human
caaggacugagc

SEQ ID NO: 3471087 - RNA, 14 nt, Human
caaggacugccgac

SEQ ID NO: 3471088 - RNA, 14 nt, Human
caaggacuuccugu

SEQ ID NO: 3471089 - RNA, 20 nt, Human
caaggacuugaaagcaucca

SEQ ID NO: 3471090 - RNA, 19 nt, Human
caaggagaaacagagacag

SEQ ID NO: 3471091 - RNA, 14 nt, Human
caaggagaacaaau

SEQ ID NO: 3471092 - RNA, 15 nt, Human
caaggagaacaaaua

SEQ ID NO: 3471093 - RNA, 18 nt, Human
caaggagaacaaauauuc

SEQ ID NO: 3471094 - RNA, 20 nt, Human
caaggagacacaacaacucc

SEQ ID NO: 3471095 - RNA, 13 nt, Human
caaggagaugaag

SEQ ID NO: 3471096 - RNA, 15 nt, Human
caaggagcacaagcc

SEQ ID NO: 3471097 - RNA, 16 nt, Human
caaggagcacaggucc

SEQ ID NO: 3471098 - RNA, 22 nt, Human
caaggagcugcuauagccuggg

SEQ ID NO: 3471099 - RNA, 14 nt, Human
caaggaggaaaaac

SEQ ID NO: 3471100 - RNA, 22 nt, Human
caaggaggcuggcuggggccua

SEQ ID NO: 3471101 - RNA, 12 nt, Human
caaggagggaga

SEQ ID NO: 3471102 - RNA, 20 nt, Human
caaggagggugagugcaagg

SEQ ID NO: 3471103 - RNA, 19 nt, Human
caaggaguuccaugaagac

SEQ ID NO: 3471104 - RNA, 18 nt, Human
caaggauaccuucuuauu

SEQ ID NO: 3471105 - RNA, 17 nt, Human
caaggauagaaguauac

SEQ ID NO: 3471106 - RNA, 17 nt, Human
caaggauagaugcuggc

SEQ ID NO: 3471107 - RNA, 21 nt, Human
caaggauagaugcuggcccag

SEQ ID NO: 3471108 - RNA, 17 nt, Human
caaggauccugagccag

SEQ ID NO: 3471109 - RNA, 20 nt, Human
caaggauccugagccagauu

SEQ ID NO: 3471110 - RNA, 22 nt, Human
caaggauccugagccagauuuc

SEQ ID NO: 3471111 - RNA, 14 nt, Human
caaggauugaaaau

SEQ ID NO: 3471112 - RNA, 15 nt, Human
caaggauugcuacug

SEQ ID NO: 3471113 - RNA, 20 nt, Human
caaggauugcuacuguccua

SEQ ID NO: 3471114 - RNA, 15 nt, Human
caaggcaaaaacaaa

SEQ ID NO: 3471115 - RNA, 14 nt, Human
caaggcaaggcagg

SEQ ID NO: 3471116 - RNA, 15 nt, Human
caaggcaccugcagg

SEQ ID NO: 3471117 - RNA, 19 nt, Human
caaggcacucuagauucca

SEQ ID NO: 3471118 - RNA, 18 nt, Human
caaggcacugccugaugg

SEQ ID NO: 3471119 - RNA, 16 nt, Human
caaggcacuguacuag

SEQ ID NO: 3471120 - RNA, 18 nt, Human
caaggcacuugaggggga

SEQ ID NO: 3471121 - RNA, 14 nt, Human
caaggcagaggccu

SEQ ID NO: 3471122 - RNA, 16 nt, Human
caaggcagaggccugg

SEQ ID NO: 3471123 - RNA, 19 nt, Human
caaggcagaggccugggcu

SEQ ID NO: 3471124 - RNA, 17 nt, Human
caaggcagcaaggcccg

SEQ ID NO: 3471125 - RNA, 13 nt, Human
caaggcagccgug

SEQ ID NO: 3471126 - RNA, 20 nt, Human
caaggcaggugccuccaggu

SEQ ID NO: 3471127 - RNA, 23 nt, Human
caaggcaggugccuccaggugug

SEQ ID NO: 3471128 - RNA, 18 nt, Human
caaggccaaaggaagcac

SEQ ID NO: 3471129 - RNA, 21 nt, Human
caaggccaaaggaagcacaug

SEQ ID NO: 3471130 - RNA, 13 nt, Human
caaggccaccucu

SEQ ID NO: 3471131 - RNA, 21 nt, Human
caaggccagaguggccuggcc

SEQ ID NO: 3471132 - RNA, 22 nt, Human
caaggccagaguggccuggcca

SEQ ID NO: 3471133 - RNA, 22 nt, Human
caaggccagcaagguggagugg

SEQ ID NO: 3471134 - RNA, 15 nt, Human
caaggccauccuucc

SEQ ID NO: 3471135 - RNA, 23 nt, Human
caaggccauccuucccugucugc

SEQ ID NO: 3471136 - RNA, 16 nt, Human
caaggcccagaugugg

SEQ ID NO: 3471137 - RNA, 12 nt, Human
caaggccccaga

SEQ ID NO: 3471138 - RNA, 16 nt, Human
caaggccccagagacu

SEQ ID NO: 3471139 - RNA, 14 nt, Human
caaggcccgagcag

SEQ ID NO: 3471140 - RNA, 17 nt, Human
caaggcccgagcagcug

SEQ ID NO: 3471141 - RNA, 18 nt, Human
caaggcccgagcagcuga

SEQ ID NO: 3471142 - RNA, 19 nt, Human
caaggcccgagcagcugag

SEQ ID NO: 3471143 - RNA, 20 nt, Human
caaggcccgagcagcugagc

SEQ ID NO: 3471144 - RNA, 21 nt, Human
caaggcccgagcagcugagca

SEQ ID NO: 3471145 - RNA, 20 nt, Human
caaggccgaagcucuggcug

SEQ ID NO: 3471146 - RNA, 22 nt, Human
caaggccgcuguucacccacag

SEQ ID NO: 3471147 - RNA, 15 nt, Human
caaggccucccacag

SEQ ID NO: 3471148 - RNA, 22 nt, Human
caaggccugguguuucuugaua

SEQ ID NO: 3471149 - RNA, 17 nt, Human
caaggccugucccuggc

SEQ ID NO: 3471150 - RNA, 18 nt, Human
caaggccugucccuggcc

SEQ ID NO: 3471151 - RNA, 21 nt, Human
caaggccuuccccuggcacug

SEQ ID NO: 3471152 - RNA, 15 nt, Human
caaggcucugagcaa

SEQ ID NO: 3471153 - RNA, 13 nt, Human
cugugaccugugg

SEQ ID NO: 3471154 - RNA, 14 nt, Human
cugugaccuguggg

SEQ ID NO: 3471155 - RNA, 15 nt, Human
cugugaccugugggg

SEQ ID NO: 3471156 - RNA, 17 nt, Human
cugugacuucagcucug

SEQ ID NO: 3471157 - RNA, 13 nt, Human
cugugagaaaacg

SEQ ID NO: 3471158 - RNA, 20 nt, Human
cugugagaagguuuauuguu

SEQ ID NO: 3471159 - RNA, 19 nt, Human
cugugagacagugggaaau

SEQ ID NO: 3471160 - RNA, 14 nt, Human
cugugagaccccca

SEQ ID NO: 3471161 - RNA, 15 nt, Human
cugugagacccccac

SEQ ID NO: 3471162 - RNA, 20 nt, Human
cugugagacccccacaccuc

SEQ ID NO: 3471163 - RNA, 21 nt, Human
cugugagaugcuagaacuccc

SEQ ID NO: 3471164 - RNA, 23 nt, Human
cugugagaugcuagaacucccuu

SEQ ID NO: 3471165 - RNA, 21 nt, Human
cugugagauuuugcuuuucca

SEQ ID NO: 3471166 - RNA, 19 nt, Human
cugugagcaucacaguuuu

SEQ ID NO: 3471167 - RNA, 13 nt, Human
cugugagccccug

SEQ ID NO: 3471168 - RNA, 15 nt, Human
cugugagccccuggu

SEQ ID NO: 3471169 - RNA, 15 nt, Human
cugugagccuuggcu

SEQ ID NO: 3471170 - RNA, 20 nt, Human
cugugagcucccaggugcag

SEQ ID NO: 3471171 - RNA, 17 nt, Human
cugugaggaaagcacac

SEQ ID NO: 3471172 - RNA, 19 nt, Human
cugugaggagccccaucug

SEQ ID NO: 3471173 - RNA, 13 nt, Human
cugugaggcaggg

SEQ ID NO: 3471174 - RNA, 15 nt, Human
cugugaggccccugg

SEQ ID NO: 3471175 - RNA, 15 nt, Human
cugugagggagggga

SEQ ID NO: 3471176 - RNA, 23 nt, Human
cugugaggugcagagugcccaga

SEQ ID NO: 3471177 - RNA, 20 nt, Human
cugugaguacuacaguccuc

SEQ ID NO: 3471178 - RNA, 23 nt, Human
cugugagucuuugguucuaagga

SEQ ID NO: 3471179 - RNA, 18 nt, Human
cugugaguucucccugua

SEQ ID NO: 3471180 - RNA, 22 nt, Human
cugugaguucucccuguacagu

SEQ ID NO: 3471181 - RNA, 19 nt, Human
cugugauaguucacccccu

SEQ ID NO: 3471182 - RNA, 14 nt, Human
cugugaucaagcaa

SEQ ID NO: 3471183 - RNA, 23 nt, Human
cugugaucaauauuuuuauauca

SEQ ID NO: 3471184 - RNA, 22 nt, Human
cugugaucccaguagaaaauau

SEQ ID NO: 3471185 - RNA, 17 nt, Human
cugugaucuuuuaaagu

SEQ ID NO: 3471186 - RNA, 13 nt, Human
cugugaugagcug

SEQ ID NO: 3471187 - RNA, 16 nt, Human
cugugaugagcugauc

SEQ ID NO: 3471188 - RNA, 22 nt, Human
cugugaugagcugaucugcgga

SEQ ID NO: 3471189 - RNA, 22 nt, Human
cugugaugaggggaggggggca

SEQ ID NO: 3471190 - RNA, 17 nt, Human
cugugaugauccucaua

SEQ ID NO: 3471191 - RNA, 14 nt, Human
cugugaugcugggc

SEQ ID NO: 3471192 - RNA, 18 nt, Human
cugugauggggcccugcc

SEQ ID NO: 3471193 - RNA, 19 nt, Human
cugugauggggcccugccu

SEQ ID NO: 3471194 - RNA, 23 nt, Human
cugugauggggcccugccuccuu

SEQ ID NO: 3471195 - RNA, 23 nt, Human
cugugauguuuguguauguggga

SEQ ID NO: 3471196 - RNA, 13 nt, Human
cugugauucagaa

SEQ ID NO: 3471197 - RNA, 15 nt, Human
cugugcaaaaaaauu

SEQ ID NO: 3471198 - RNA, 21 nt, Human
cugugcaacgccgugggcugc

SEQ ID NO: 3471199 - RNA, 20 nt, Human
cugugcaagguauuacacuc

SEQ ID NO: 3471200 - RNA, 18 nt, Human
cugugcacaaaguggcau

SEQ ID NO: 3471201 - RNA, 15 nt, Human
cugugcacacacaca

SEQ ID NO: 3471202 - RNA, 12 nt, Human
cugugcacagcc

SEQ ID NO: 3471203 - RNA, 18 nt, Human
cugugcacaucugugucu

SEQ ID NO: 3471204 - RNA, 12 nt, Human
cugugcacgcag

SEQ ID NO: 3471205 - RNA, 17 nt, Human
cugugcacgcaguggcc

SEQ ID NO: 3471206 - RNA, 21 nt, Human
cugugcacggccagcugcauc

SEQ ID NO: 3471207 - RNA, 16 nt, Human
cugugcagguucccac

SEQ ID NO: 3471208 - RNA, 17 nt, Human
cugugcagguucccacu

SEQ ID NO: 3471209 - RNA, 16 nt, Human
cugugcagucacugga

SEQ ID NO: 3471210 - RNA, 16 nt, Human
cugugcauagugcugg

SEQ ID NO: 3471211 - RNA, 20 nt, Human
cugugcaugggugaagggag

SEQ ID NO: 3471212 - RNA, 22 nt, Human
cugugcaugggugaagggagag

SEQ ID NO: 3471213 - RNA, 17 nt, Human
cugugcauguaugucuu

SEQ ID NO: 3471214 - RNA, 14 nt, Human
cugugcauucuccu

SEQ ID NO: 3471215 - RNA, 15 nt, Human
cugugcauucuccug

SEQ ID NO: 3471216 - RNA, 20 nt, Human
cugugcauucuccuggaugc

SEQ ID NO: 3471217 - RNA, 13 nt, Human
cugugccacaggc

SEQ ID NO: 3471218 - RNA, 18 nt, Human
cugugccacccaccaggg

SEQ ID NO: 3471219 - RNA, 23 nt, Human
cugugccacccugggcucugugg

SEQ ID NO: 3471220 - RNA, 21 nt, Human
cugugccacucaccgaagcca

SEQ ID NO: 3471221 - RNA, 15 nt, Human
cugugccagagccug

SEQ ID NO: 3471222 - RNA, 16 nt, Human
cugugccagagccugg

SEQ ID NO: 3471223 - RNA, 19 nt, Human
cugugccagagccuggggc

SEQ ID NO: 3471224 - RNA, 21 nt, Human
cugugccagagccuggggcuc

SEQ ID NO: 3471225 - RNA, 22 nt, Human
cugugccagagccuggggcucu

SEQ ID NO: 3471226 - RNA, 19 nt, Human
cugugccaggugaggucag

SEQ ID NO: 3471227 - RNA, 14 nt, Human
cugugccaugugcc

SEQ ID NO: 3471228 - RNA, 15 nt, Human
cugugccaugugcca

SEQ ID NO: 3471229 - RNA, 22 nt, Human
cugugccauuuuguauuuuacu

SEQ ID NO: 3471230 - RNA, 14 nt, Human
cugugcccaaguug

SEQ ID NO: 3471231 - RNA, 17 nt, Human
cugugcccacccuccac

SEQ ID NO: 3471232 - RNA, 16 nt, Human
cugugcccagcucagu

SEQ ID NO: 3471233 - RNA, 13 nt, Human
cugugcccauggg

SEQ ID NO: 3471234 - RNA, 20 nt, Human
cugugcccaugggcacugcu

SEQ ID NO: 3471235 - RNA, 21 nt, Human
cugugcccaugggcacugcug

SEQ ID NO: 3471236 - RNA, 21 nt, Human
cugugccccaugccuguccag

SEQ ID NO: 3471237 - RNA, 15 nt, Human
cugugccccuggccu

SEQ ID NO: 3471238 - RNA, 22 nt, Human
cugugccccuggccuugggauc

SEQ ID NO: 3471239 - RNA, 17 nt, Human
cugugccccuuccgcca

SEQ ID NO: 3471240 - RNA, 15 nt, Human
cugugcccucuugau

SEQ ID NO: 3471241 - RNA, 11 nt, Human
cugugcccugg

SEQ ID NO: 3471242 - RNA, 15 nt, Human
cugugcccuggugga

SEQ ID NO: 3471243 - RNA, 16 nt, Human
cugugcccugguggag

SEQ ID NO: 3471244 - RNA, 17 nt, Human
cugugcccugguggaga

SEQ ID NO: 3471245 - RNA, 18 nt, Human
cugugccuaacaccagcg

SEQ ID NO: 3471246 - RNA, 15 nt, Human
cugugccucagagac

SEQ ID NO: 3471247 - RNA, 18 nt, Human
cugugccucagagaccag

SEQ ID NO: 3471248 - RNA, 15 nt, Human
cugugccuccaucag

SEQ ID NO: 3471249 - RNA, 18 nt, Human
cugugccucccuccccag

SEQ ID NO: 3471250 - RNA, 19 nt, Human
cugugccucccuccccagu

SEQ ID NO: 3471251 - RNA, 23 nt, Human
cugugccucccuccccagugcaa

SEQ ID NO: 3471252 - RNA, 16 nt, Human
cugugccuccucccuc

SEQ ID NO: 3471253 - RNA, 17 nt, Human
cugugccucgcucccca

SEQ ID NO: 3471254 - RNA, 23 nt, Human
cugugccucggcuuuucucagcu

SEQ ID NO: 3471255 - RNA, 14 nt, Human
cugugccucugccu

SEQ ID NO: 3471256 - RNA, 15 nt, Human
cugugccucugccug

SEQ ID NO: 3471257 - RNA, 14 nt, Human
cugugccucuggga

SEQ ID NO: 3471258 - RNA, 15 nt, Human
cugugccugaauauu

SEQ ID NO: 3471259 - RNA, 18 nt, Human
cugugccugccugggagu

SEQ ID NO: 3471260 - RNA, 14 nt, Human
cugugccuggagcu

SEQ ID NO: 3471261 - RNA, 17 nt, Human
cugugccuggagcuccu

SEQ ID NO: 3471262 - RNA, 19 nt, Human
cugugccuggagcuccugg

SEQ ID NO: 3471263 - RNA, 15 nt, Human
cugugcguggggcuc

SEQ ID NO: 3471264 - RNA, 17 nt, Human
cugugcguuacuaauug

SEQ ID NO: 3471265 - RNA, 16 nt, Human
cugugcuacuuugccu

SEQ ID NO: 3471266 - RNA, 21 nt, Human
cugugcuagggaaacuucccg

SEQ ID NO: 3471267 - RNA, 13 nt, Human
cugugcucagaag

SEQ ID NO: 3471268 - RNA, 15 nt, Human
cugugcucagcccug

SEQ ID NO: 3471269 - RNA, 12 nt, Human
cugugcucagga

SEQ ID NO: 3471270 - RNA, 10 nt, Human
cugugcuccg

SEQ ID NO: 3471271 - RNA, 18 nt, Human
cugugcuccgugccucca

SEQ ID NO: 3471272 - RNA, 21 nt, Human
cugugcuccgugccuccacca

SEQ ID NO: 3471273 - RNA, 21 nt, Human
cugugcucggaggccaucucg

SEQ ID NO: 3471274 - RNA, 17 nt, Human
cugugcucuggacaggc

SEQ ID NO: 3471275 - RNA, 17 nt, Human
cugugcugacccuccug

SEQ ID NO: 3471276 - RNA, 12 nt, Human
cugugcugaggc

SEQ ID NO: 3471277 - RNA, 14 nt, Human
cugugcugagucug

SEQ ID NO: 3471278 - RNA, 20 nt, Human
cugugcugagucugaaggcu

SEQ ID NO: 3471279 - RNA, 11 nt, Human
cugugcugccc

SEQ ID NO: 3471280 - RNA, 20 nt, Human
cugugcugcccgucuucagc

SEQ ID NO: 3471281 - RNA, 14 nt, Human
cugugcugcccugc

SEQ ID NO: 3471282 - RNA, 15 nt, Human
cugugcugcccugcc

SEQ ID NO: 3471283 - RNA, 17 nt, Human
cugugcugcccugccca

SEQ ID NO: 3471284 - RNA, 19 nt, Human
cugugcugcuguuacuguu

SEQ ID NO: 3471285 - RNA, 14 nt, Human
cugugcuggagcca

SEQ ID NO: 3471286 - RNA, 16 nt, Human
cugugcuggagccacu

SEQ ID NO: 3471287 - RNA, 18 nt, Human
cugugcugguguccugac

SEQ ID NO: 3471288 - RNA, 20 nt, Human
cugugcugguguccugacca

SEQ ID NO: 3471289 - RNA, 21 nt, Human
cugugcugguguccugaccac

SEQ ID NO: 3471290 - RNA, 12 nt, Human
cugugcugugga

SEQ ID NO: 3471291 - RNA, 15 nt, Human
cugugcuguggaagc

SEQ ID NO: 3471292 - RNA, 11 nt, Human
cugugcugugu

SEQ ID NO: 3471293 - RNA, 13 nt, Human
cugugcugugugu

SEQ ID NO: 3471294 - RNA, 17 nt, Human
cugugcuuccuccugcc

SEQ ID NO: 3471295 - RNA, 21 nt, Human
cugugcuucgguaggcgacca

SEQ ID NO: 3471296 - RNA, 15 nt, Human
cugugcuugaaggcc

SEQ ID NO: 3471297 - RNA, 16 nt, Human
cugugcuuuccagcuc

SEQ ID NO: 3471298 - RNA, 20 nt, Human
cugugcuuuccagcucaccc

SEQ ID NO: 3471299 - RNA, 21 nt, Human
cugugcuuuccagcucacccc

SEQ ID NO: 3471300 - RNA, 12 nt, Human
cugugcuuucua

SEQ ID NO: 3471301 - RNA, 13 nt, Human
cugugcuuucuau

SEQ ID NO: 3471302 - RNA, 15 nt, Human
cugugcuuucuauug

SEQ ID NO: 3471303 - RNA, 16 nt, Human
cugugcuuugacucac

SEQ ID NO: 3471304 - RNA, 18 nt, Human
cuguggaaaaauauuuaa

SEQ ID NO: 3471305 - RNA, 14 nt, Human
cuguggaaagugua

SEQ ID NO: 3471306 - RNA, 15 nt, Human
cuguggaaaguguaa

SEQ ID NO: 3471307 - RNA, 21 nt, Human
cuguggaaaguguaaagcauu

SEQ ID NO: 3471308 - RNA, 22 nt, Human
cuguggaacuaauaaauacaua

SEQ ID NO: 3471309 - RNA, 13 nt, Human
cuguggaagggac

SEQ ID NO: 3471310 - RNA, 23 nt, Human
cuguggaccauggaguggcagcc

SEQ ID NO: 3471311 - RNA, 13 nt, Human
cuguggagaaaua

SEQ ID NO: 3471312 - RNA, 21 nt, Human
cuguggagacugcuccugagc

SEQ ID NO: 3471313 - RNA, 15 nt, Human
cuguggagcucagcc

SEQ ID NO: 3471314 - RNA, 20 nt, Human
cuguggaggaaggauuguaa

SEQ ID NO: 3471315 - RNA, 21 nt, Human
cuguggaggaaggauuguaaa

SEQ ID NO: 3471316 - RNA, 15 nt, Human
cuguggaucagagau

SEQ ID NO: 3471317 - RNA, 15 nt, Human
cuguggaugagcccu

SEQ ID NO: 3471318 - RNA, 19 nt, Human
cuguggaugagcccucaga

SEQ ID NO: 3471319 - RNA, 17 nt, Human
cuguggaugauaaaaca

SEQ ID NO: 3471320 - RNA, 18 nt, Human
cuguggaugcugcugccc

SEQ ID NO: 3471321 - RNA, 23 nt, Human
cuguggauuuuuuccuucaaagu

SEQ ID NO: 3471322 - RNA, 19 nt, Human
cuguggcacuugccugggu

SEQ ID NO: 3471323 - RNA, 19 nt, Human
cuguggcagaguuacaguu

SEQ ID NO: 3471324 - RNA, 14 nt, Human
cuguggcaggcagc

SEQ ID NO: 3471325 - RNA, 17 nt, Human
cuguggcaggcagcgcc

SEQ ID NO: 3471326 - RNA, 23 nt, Human
cuguggcaggcagcgccaagcaa

SEQ ID NO: 3471327 - RNA, 18 nt, Human
cuguggcaggccagcugu

SEQ ID NO: 3471328 - RNA, 23 nt, Human
cuguggcaguaaagagaaacuuu

SEQ ID NO: 3471329 - RNA, 14 nt, Human
cuguggcauaaauu

SEQ ID NO: 3471330 - RNA, 15 nt, Human
cuguggcauaaauug

SEQ ID NO: 3471331 - RNA, 18 nt, Human
cuguggcauaaauugcau

SEQ ID NO: 3471332 - RNA, 16 nt, Human
cuguggccaaguucuu

SEQ ID NO: 3471333 - RNA, 22 nt, Human
cuguggccacauuuucagccaa

SEQ ID NO: 3471334 - RNA, 14 nt, Human
cuguggccaggagg

SEQ ID NO: 3471335 - RNA, 20 nt, Human
cuguggccccacccugggcc

SEQ ID NO: 3471336 - RNA, 21 nt, Human
cuguggccccacccugggccc

SEQ ID NO: 3471337 - RNA, 13 nt, Human
cuguggcccuggc

SEQ ID NO: 3471338 - RNA, 15 nt, Human
cuguggcccuguccu

SEQ ID NO: 3471339 - RNA, 19 nt, Human
cuguggccucccugcucua

SEQ ID NO: 3471340 - RNA, 14 nt, Human
cuguggccugccag

SEQ ID NO: 3471341 - RNA, 23 nt, Human
cuguggccugugucccaugaccc

SEQ ID NO: 3471342 - RNA, 15 nt, Human
cuguggccuuggucu

SEQ ID NO: 3471343 - RNA, 14 nt, Human
cuguggcggugccu

SEQ ID NO: 3471344 - RNA, 15 nt, Human
cuguggcuagugaca

SEQ ID NO: 3471345 - RNA, 15 nt, Human
cuguggcuccaggcc

SEQ ID NO: 3471346 - RNA, 15 nt, Human
cuguggcuggugagc

SEQ ID NO: 3471347 - RNA, 14 nt, Human
cuguggcugucugg

SEQ ID NO: 3471348 - RNA, 11 nt, Human
cugugggaaau

SEQ ID NO: 3471349 - RNA, 16 nt, Human
cugugggaccccaggc

SEQ ID NO: 3471350 - RNA, 21 nt, Human
cugugggagccucgcaacccg

SEQ ID NO: 3471351 - RNA, 20 nt, Human
cugugggagggacuuugcug

SEQ ID NO: 3471352 - RNA, 22 nt, Human
cugugggaucccucugggcacu

SEQ ID NO: 3471353 - RNA, 18 nt, Human
cugugggcaauuuagaaa

SEQ ID NO: 3471354 - RNA, 17 nt, Human
cugugggcacaggucag

SEQ ID NO: 3471355 - RNA, 19 nt, Human
cugugggccucaaggacuu

SEQ ID NO: 3471356 - RNA, 19 nt, Human
cugugggcgggcccagcac

SEQ ID NO: 3471357 - RNA, 21 nt, Human
cugugggcgugagaccugccc

SEQ ID NO: 3471358 - RNA, 23 nt, Human
cugugggcgugagaccugccccu

SEQ ID NO: 3471359 - RNA, 15 nt, Human
cugugggcucccuuc

SEQ ID NO: 3471360 - RNA, 20 nt, Human
cugugggcugcacucugugc

SEQ ID NO: 3471361 - RNA, 21 nt, Human
cugugggcugcacucugugcc

SEQ ID NO: 3471362 - RNA, 15 nt, Human
cugugggcuggcagu

SEQ ID NO: 3471363 - RNA, 21 nt, Human
cuguggggaaccaauugcuuu

SEQ ID NO: 3471364 - RNA, 23 nt, Human
cuguggggacuccggcugugcug

SEQ ID NO: 3471365 - RNA, 20 nt, Human
cuguggggaucucaggggcu

SEQ ID NO: 3471366 - RNA, 17 nt, Human
cuguggggauuucuccc

SEQ ID NO: 3471367 - RNA, 20 nt, Human
cuguggggauuucucccagc

SEQ ID NO: 3471368 - RNA, 21 nt, Human
cuguggggauuucucccagcu

SEQ ID NO: 3471369 - RNA, 22 nt, Human
cuguggggcugguagcucaggu

SEQ ID NO: 3471370 - RNA, 19 nt, Human
cugugggggaagagcacag

SEQ ID NO: 3471371 - RNA, 20 nt, Human
cugugggggaagagcacagc

SEQ ID NO: 3471372 - RNA, 21 nt, Human
cugugggggaagagcacagcc

SEQ ID NO: 3471373 - RNA, 16 nt, Human
cugugggucugggagu

SEQ ID NO: 3471374 - RNA, 22 nt, Human
cugugggucugggagucacaca

SEQ ID NO: 3471375 - RNA, 15 nt, Human
cugugggugacccag

SEQ ID NO: 3471376 - RNA, 18 nt, Human
cugugggugauggggagg

SEQ ID NO: 3471377 - RNA, 21 nt, Human
cugugggugauggggaggggc

SEQ ID NO: 3471378 - RNA, 16 nt, Human
cugugggugugugacu

SEQ ID NO: 3471379 - RNA, 22 nt, Human
cuguggguuucuaaagcugcca

SEQ ID NO: 3471380 - RNA, 15 nt, Human
cugugguaaaugcca

SEQ ID NO: 3471381 - RNA, 16 nt, Human
cugugguaaaugccac

SEQ ID NO: 3471382 - RNA, 20 nt, Human
cuguggucaaggcuacagau

SEQ ID NO: 3471383 - RNA, 17 nt, Human
cuguggugacuuuggau

SEQ ID NO: 3471384 - RNA, 23 nt, Human
cuguggugacuuuggauaauaag

SEQ ID NO: 3471385 - RNA, 15 nt, Human
cugugguuccucugc

SEQ ID NO: 3471386 - RNA, 16 nt, Human
cugugguuccucugcu

SEQ ID NO: 3471387 - RNA, 15 nt, Human
cugugguuccugggg

SEQ ID NO: 3471388 - RNA, 21 nt, Human
cugugguuccuggggugcccu

SEQ ID NO: 3471389 - RNA, 17 nt, Human
cugugguuggcugggaa

SEQ ID NO: 3471390 - RNA, 20 nt, Human
cugugguuugggggagaaga

SEQ ID NO: 3471391 - RNA, 20 nt, Human
cugugguuuuccccucccug

SEQ ID NO: 3471392 - RNA, 14 nt, Human
cuguguaaacucau

SEQ ID NO: 3471393 - RNA, 21 nt, Human
cuguguaaacucaucugaaau

SEQ ID NO: 3471394 - RNA, 18 nt, Human
cuguguaaaguuagucua

SEQ ID NO: 3471395 - RNA, 13 nt, Human
cuguguaacagcu

SEQ ID NO: 3471396 - RNA, 17 nt, Human
cuguguaacagcuccuu

SEQ ID NO: 3471397 - RNA, 13 nt, Human
cuguguaacugcc

SEQ ID NO: 3471398 - RNA, 16 nt, Human
cuguguaacugcccaa

SEQ ID NO: 3471399 - RNA, 14 nt, Human
cuguguaagcugug

SEQ ID NO: 3471400 - RNA, 23 nt, Human
cuguguaagggccagaaauaucu

SEQ ID NO: 3471401 - RNA, 11 nt, Human
cuguguacugu

SEQ ID NO: 3471402 - RNA, 18 nt, Human
cuguguacuguauagaca

SEQ ID NO: 3471403 - RNA, 13 nt, Human
cuguguacuguuc

SEQ ID NO: 3471404 - RNA, 13 nt, Human
cuguguagcuggg

SEQ ID NO: 3471405 - RNA, 15 nt, Human
cuguguagcugugac

SEQ ID NO: 3471406 - RNA, 16 nt, Human
cuguguagcugugacc

SEQ ID NO: 3471407 - RNA, 17 nt, Human
cuguguagcugugaccu

SEQ ID NO: 3471408 - RNA, 21 nt, Human
cuguguauaugguauauauac

SEQ ID NO: 3471409 - RNA, 12 nt, Human
cuguguauauua

SEQ ID NO: 3471410 - RNA, 18 nt, Human
cuguguauauuauuuggc

SEQ ID NO: 3471411 - RNA, 20 nt, Human
cuguguauauuugauuuauu

SEQ ID NO: 3471412 - RNA, 22 nt, Human
cuguguauauuugauuuauuaa

SEQ ID NO: 3471413 - RNA, 14 nt, Human
cuguguauguacau

SEQ ID NO: 3471414 - RNA, 16 nt, Human
cuguguauucauugaa

SEQ ID NO: 3471415 - RNA, 21 nt, Human
cuguguauuuaauuguaaacu

SEQ ID NO: 3471416 - RNA, 16 nt, Human
cuguguauuugcuuuu

SEQ ID NO: 3471417 - RNA, 20 nt, Human
cugugucaauccagauggug

SEQ ID NO: 3471418 - RNA, 14 nt, Human
cugugucacuggcu

SEQ ID NO: 3471419 - RNA, 19 nt, Human
cugugucacuggcugccuc

SEQ ID NO: 3471420 - RNA, 20 nt, Human
cugugucacuggcugccucc

SEQ ID NO: 3471421 - RNA, 16 nt, Human
cugugucagccugucc

SEQ ID NO: 3471422 - RNA, 21 nt, Human
cugugucagguggggcagcuu

SEQ ID NO: 3471423 - RNA, 15 nt, Human
cugugucaguuuaug

SEQ ID NO: 3471424 - RNA, 19 nt, Human
cugugucaguuuauguuuu

SEQ ID NO: 3471425 - RNA, 23 nt, Human
cugugucauaaacagaugaauaa

SEQ ID NO: 3471426 - RNA, 22 nt, Human
cugugucauuuggcuuuccagu

SEQ ID NO: 3471427 - RNA, 17 nt, Human
cuguguccaccuguggg

SEQ ID NO: 3471428 - RNA, 19 nt, Human
cuguguccaugcgcucagg

SEQ ID NO: 3471429 - RNA, 21 nt, Human
cuguguccaugcgcucagggc

SEQ ID NO: 3471430 - RNA, 22 nt, Human
cuguguccaugcgcucagggcc

SEQ ID NO: 3471431 - RNA, 23 nt, Human
cuguguccaugcgcucagggcca

SEQ ID NO: 3471432 - RNA, 23 nt, Human
cuguguccugaaacgcuccuuug

SEQ ID NO: 3471433 - RNA, 13 nt, Human
cuguguccuggug

SEQ ID NO: 3471434 - RNA, 14 nt, Human
cuguguccuggugc

SEQ ID NO: 3471435 - RNA, 19 nt, Human
cuguguccuugcaccugca

SEQ ID NO: 3471436 - RNA, 22 nt, Human
cuguguccuugcaccugcaucc

SEQ ID NO: 3471437 - RNA, 16 nt, Human
cugugucguagccaag

SEQ ID NO: 3471438 - RNA, 16 nt, Human
cugugucuaaacugca

SEQ ID NO: 3471439 - RNA, 12 nt, Human
cugugucuaaga

SEQ ID NO: 3471440 - RNA, 18 nt, Human
cugugucuaagauucuag

SEQ ID NO: 3471441 - RNA, 17 nt, Human
cugugucucuuuucucu

SEQ ID NO: 3471442 - RNA, 18 nt, Human
cugugucugaguggcuuc

SEQ ID NO: 3471443 - RNA, 16 nt, Human
cugugucuguguuuua

SEQ ID NO: 3471444 - RNA, 16 nt, Human
cugugucuugcaaugg

SEQ ID NO: 3471445 - RNA, 23 nt, Human
cugugucuugcaauggcagccuu

SEQ ID NO: 3471446 - RNA, 20 nt, Human
cugugucuuugguuugugcu

SEQ ID NO: 3471447 - RNA, 12 nt, Human
cugugugaaaua

SEQ ID NO: 3471448 - RNA, 19 nt, Human
cugugugaaauaccagugu

SEQ ID NO: 3471449 - RNA, 18 nt, Human
cugugugaauaccugcuc

SEQ ID NO: 3471450 - RNA, 14 nt, Human
cugugugauuaaaa

SEQ ID NO: 3471451 - RNA, 15 nt, Human
cugugugcagugaag

SEQ ID NO: 3471452 - RNA, 17 nt, Human
cugugugcagugaaggu

SEQ ID NO: 3471453 - RNA, 16 nt, Human
cugugugccuggggga

SEQ ID NO: 3471454 - RNA, 16 nt, Human
cugugugcucaggagc

SEQ ID NO: 3471455 - RNA, 21 nt, Human
cugugugcucaggagcccugg

SEQ ID NO: 3471456 - RNA, 18 nt, Human
cugugugcuccuccuugg

SEQ ID NO: 3471457 - RNA, 23 nt, Human
cugugugcuccuccuuggugccu

SEQ ID NO: 3471458 - RNA, 13 nt, Human
cugugugcugugg

SEQ ID NO: 3471459 - RNA, 15 nt, Human
cugugugcuuggucu

SEQ ID NO: 3471460 - RNA, 20 nt, Human
cugugugcuuuuuuugugug

SEQ ID NO: 3471461 - RNA, 12 nt, Human
cuguguggaacu

SEQ ID NO: 3471462 - RNA, 18 nt, Human
cuguguggacugugaugc

SEQ ID NO: 3471463 - RNA, 12 nt, Human
cuguguggagag

SEQ ID NO: 3471464 - RNA, 22 nt, Human
cuguguggagagggaaugugaa

SEQ ID NO: 3471465 - RNA, 22 nt, Human
cugugugggacuguacacacuu

SEQ ID NO: 3471466 - RNA, 11 nt, Human
cugugugguug

SEQ ID NO: 3471467 - RNA, 23 nt, Human
cugugugguuuaguguaaaaaug

SEQ ID NO: 3471468 - RNA, 21 nt, Human
cugugugguuugguguguucc

SEQ ID NO: 3471469 - RNA, 17 nt, Human
cugugugucaguuuuca

SEQ ID NO: 3471470 - RNA, 18 nt, Human
cugugugucaguuuucau

SEQ ID NO: 3471471 - RNA, 15 nt, Human
cuguguguccaaaac

SEQ ID NO: 3471472 - RNA, 19 nt, Human
cuguguguccaaaacugcc

SEQ ID NO: 3471473 - RNA, 22 nt, Human
cuguguguccaaaacugccuca

SEQ ID NO: 3471474 - RNA, 19 nt, Human
cugugugucccaggcaggg

SEQ ID NO: 3471475 - RNA, 22 nt, Human
cugugugucccaggcagggaga

SEQ ID NO: 3471476 - RNA, 18 nt, Human
cugugugugaccccuccu

SEQ ID NO: 3471477 - RNA, 20 nt, Human
cugugugugaccccuccugg

SEQ ID NO: 3471478 - RNA, 21 nt, Human
cugugugugugaaugaacacu

SEQ ID NO: 3471479 - RNA, 23 nt, Human
cugugugugugaaugaacacucu

SEQ ID NO: 3471480 - RNA, 14 nt, Human
cuguguguguguau

SEQ ID NO: 3471481 - RNA, 15 nt, Human
cuguguguguguaug

SEQ ID NO: 3471482 - RNA, 18 nt, Human
cuguguguguguaugugg

SEQ ID NO: 3471483 - RNA, 18 nt, Human
cuguguguuaagcucugc

SEQ ID NO: 3471484 - RNA, 18 nt, Human
cuguguguuaguucccaa

SEQ ID NO: 3471485 - RNA, 15 nt, Human
cuguguguuccuggc

SEQ ID NO: 3471486 - RNA, 16 nt, Human
cuguguguugccuggg

SEQ ID NO: 3471487 - RNA, 17 nt, Human
cuguguguuuaugugug

SEQ ID NO: 3471488 - RNA, 20 nt, Human
cuguguguuuaugugugugu

SEQ ID NO: 3471489 - RNA, 19 nt, Human
cuguguguuuucauaauaa

SEQ ID NO: 3471490 - RNA, 16 nt, Human
cuguguuaauuuaagu

SEQ ID NO: 3471491 - RNA, 22 nt, Human
cuguguuacuaaaaaaaagaug

SEQ ID NO: 3471492 - RNA, 23 nt, Human
cuguguuacuaaaaaaaagauga

SEQ ID NO: 3471493 - RNA, 17 nt, Human
cuguguuaugcaaaagc

SEQ ID NO: 3471494 - RNA, 19 nt, Human
cuguguuaugcaaaagcaa

SEQ ID NO: 3471495 - RNA, 23 nt, Human
cuguguuauuauagagcagaaau

SEQ ID NO: 3471496 - RNA, 12 nt, Human
cuguguuccugg

SEQ ID NO: 3471497 - RNA, 13 nt, Human
cuguguuccuucc

SEQ ID NO: 3471498 - RNA, 18 nt, Human
cuguguucgacucagccu

SEQ ID NO: 3471499 - RNA, 21 nt, Human
cuguguucgacucagccucag

SEQ ID NO: 3471500 - RNA, 20 nt, Human
cuguguucuggugaggccuu

SEQ ID NO: 3471501 - RNA, 13 nt, Human
cuguguuguauua

SEQ ID NO: 3471502 - RNA, 23 nt, Human
cuguguuguugcuucuugugaag

SEQ ID NO: 3471503 - RNA, 17 nt, Human
cuguguuuacagagaug

SEQ ID NO: 3471504 - RNA, 19 nt, Human
cuguguuuauaaaauauaa

SEQ ID NO: 3471505 - RNA, 15 nt, Human
cuguguuuccaucuc

SEQ ID NO: 3471506 - RNA, 13 nt, Human
cuguguuucuugc

SEQ ID NO: 3471507 - RNA, 19 nt, Human
cuguguuucuuuugguucc

SEQ ID NO: 3471508 - RNA, 19 nt, Human
cuguguuugaacugaaguc

SEQ ID NO: 3471509 - RNA, 15 nt, Human
cuguguuugcagccu

SEQ ID NO: 3471510 - RNA, 22 nt, Human
cuguguuuggcuuucagggagg

SEQ ID NO: 3471511 - RNA, 16 nt, Human
cuguguuuugaaagaa

SEQ ID NO: 3471512 - RNA, 23 nt, Human
cuguguuuuugcuaucacacagu

SEQ ID NO: 3471513 - RNA, 16 nt, Human
cuguuaaaagaugaaa

SEQ ID NO: 3471514 - RNA, 19 nt, Human
cuguuaaaagaugaaaaua

SEQ ID NO: 3471515 - RNA, 23 nt, Human
cuguuaaaagaugaaaauauuug

SEQ ID NO: 3471516 - RNA, 12 nt, Human
cuguuaaaaucu

SEQ ID NO: 3471517 - RNA, 13 nt, Human
cuguuaaaaugca

SEQ ID NO: 3471518 - RNA, 23 nt, Human
cuguuaaaaugcaugauugcaga

SEQ ID NO: 3471519 - RNA, 15 nt, Human
cuguuaaacuguuag

SEQ ID NO: 3471520 - RNA, 19 nt, Human
cuguuaaauacaggaaaca

SEQ ID NO: 3471521 - RNA, 22 nt, Human
cuguuaaauugcuguguaucug

SEQ ID NO: 3471522 - RNA, 19 nt, Human
cuguuaagaaaucuguuuu

SEQ ID NO: 3471523 - RNA, 21 nt, Human
cuguuaaggcauccacuucac

SEQ ID NO: 3471524 - RNA, 16 nt, Human
cuguuaagugguuuca

SEQ ID NO: 3471525 - RNA, 19 nt, Human
cuguuaauagaucuuaggg

SEQ ID NO: 3471526 - RNA, 18 nt, Human
cuguuaauguauuuguuc

SEQ ID NO: 3471527 - RNA, 11 nt, Human
cuguuacaaaa

SEQ ID NO: 3471528 - RNA, 15 nt, Human
cuguuacaaaaugua

SEQ ID NO: 3471529 - RNA, 13 nt, Human
cuguuacacugga

SEQ ID NO: 3471530 - RNA, 16 nt, Human
cuguuacacuggagga

SEQ ID NO: 3471531 - RNA, 20 nt, Human
cuguuacaguaaugucauaa

SEQ ID NO: 3471532 - RNA, 15 nt, Human
cuguuaccaugucac

SEQ ID NO: 3471533 - RNA, 16 nt, Human
cuguuaccaugucacu

SEQ ID NO: 3471534 - RNA, 16 nt, Human
cuguuaccauuggaaa

SEQ ID NO: 3471535 - RNA, 21 nt, Human
cuguuaccauuggaaauuuca

SEQ ID NO: 3471536 - RNA, 21 nt, Human
cuguuaccucaacaagaagaa

SEQ ID NO: 3471537 - RNA, 22 nt, Human
cuguuaccucaacaagaagaau

SEQ ID NO: 3471538 - RNA, 20 nt, Human
cuguuacucaaugugugccg

SEQ ID NO: 3471539 - RNA, 20 nt, Human
cuguuacugggcccugaguc

SEQ ID NO: 3471540 - RNA, 18 nt, Human
cuguuacuguuaaccauu

SEQ ID NO: 3471541 - RNA, 18 nt, Human
cuguuacuugaaauacca

SEQ ID NO: 3471542 - RNA, 13 nt, Human
cuguuagaacacu

SEQ ID NO: 3471543 - RNA, 17 nt, Human
cuguuagaacacuauuu

SEQ ID NO: 3471544 - RNA, 22 nt, Human
cuguuagaacacuauuuucaga

SEQ ID NO: 3471545 - RNA, 20 nt, Human
cuguuagaugcuacuaagaa

SEQ ID NO: 3471546 - RNA, 14 nt, Human
cuguuagcacuguu

SEQ ID NO: 3471547 - RNA, 15 nt, Human
cuguuagcacuguug

SEQ ID NO: 3471548 - RNA, 13 nt, Human
cuguuagcagaca

SEQ ID NO: 3471549 - RNA, 19 nt, Human
cuguuagcuuuuuaaaaca

SEQ ID NO: 3471550 - RNA, 18 nt, Human
cuguuagucauuugcuga

SEQ ID NO: 3471551 - RNA, 22 nt, Human
cuguuauauaaaugguuaaaag

SEQ ID NO: 3471552 - RNA, 14 nt, Human
cuguuauauuucau

SEQ ID NO: 3471553 - RNA, 17 nt, Human
cuguuauauuucaucau

SEQ ID NO: 3471554 - RNA, 19 nt, Human
cuguuaucccugccugguc

SEQ ID NO: 3471555 - RNA, 13 nt, Human
cuguuauguacug

SEQ ID NO: 3471556 - RNA, 15 nt, Human
cuguuauguacugua

SEQ ID NO: 3471557 - RNA, 16 nt, Human
cuguuauguacuguac

SEQ ID NO: 3471558 - RNA, 12 nt, Human
cuguuaugucug

SEQ ID NO: 3471559 - RNA, 14 nt, Human
cuguuauuuagacu

SEQ ID NO: 3471560 - RNA, 16 nt, Human
cuguuauuuagacuca

SEQ ID NO: 3471561 - RNA, 19 nt, Human
cuguucaacaucacugaaa

SEQ ID NO: 3471562 - RNA, 21 nt, Human
cuguucaagagcacacuuggc

SEQ ID NO: 3471563 - RNA, 17 nt, Human
cuguucaaggccccuga

SEQ ID NO: 3471564 - RNA, 17 nt, Human
cuguucaauguuuaaug

SEQ ID NO: 3471565 - RNA, 19 nt, Human
cuguucacagccagacugg

SEQ ID NO: 3471566 - RNA, 18 nt, Human
cuguucacccacagggcu

SEQ ID NO: 3471567 - RNA, 17 nt, Human
cuguucacuuuuccucc

SEQ ID NO: 3471568 - RNA, 12 nt, Human
cuguucagcauu

SEQ ID NO: 3471569 - RNA, 13 nt, Human
cuguucagcauuc

SEQ ID NO: 3471570 - RNA, 17 nt, Human
cuguucagcguuuugca

SEQ ID NO: 3471571 - RNA, 16 nt, Human
cuguucagcuccagcu

SEQ ID NO: 3471572 - RNA, 12 nt, Human
cuguucagcugg

SEQ ID NO: 3471573 - RNA, 16 nt, Human
cuguucaguaacaggg

SEQ ID NO: 3471574 - RNA, 20 nt, Human
cuguucagugucccgggccc

SEQ ID NO: 3471575 - RNA, 19 nt, Human
cuguucaguuacagaaagu

SEQ ID NO: 3471576 - RNA, 15 nt, Human
cuguucaguugcacu

SEQ ID NO: 3471577 - RNA, 17 nt, Human
cuguucauacacuaacc

SEQ ID NO: 3471578 - RNA, 18 nt, Human
cuguucaugaaagauuca

SEQ ID NO: 3471579 - RNA, 23 nt, Human
cuguucaugaaagauucaaugcc

SEQ ID NO: 3471580 - RNA, 12 nt, Human
cuguucauugua

SEQ ID NO: 3471581 - RNA, 13 nt, Human
cuguucauuguaa

SEQ ID NO: 3471582 - RNA, 14 nt, Human
cuguuccaaauuca

SEQ ID NO: 3471583 - RNA, 21 nt, Human
cuguuccaaauucaguuucau

SEQ ID NO: 3471584 - RNA, 14 nt, Human
cuguuccagccugc

SEQ ID NO: 3471585 - RNA, 17 nt, Human
cuguucccaccugcugg

SEQ ID NO: 3471586 - RNA, 20 nt, Human
cuguucccauguagcccccu

SEQ ID NO: 3471587 - RNA, 14 nt, Human
cuguuccccagaga

SEQ ID NO: 3471588 - RNA, 16 nt, Human
cuguuccccagagaaa

SEQ ID NO: 3471589 - RNA, 12 nt, Human
cuguucccccug

SEQ ID NO: 3471590 - RNA, 14 nt, Human
cuguucccccuuca

SEQ ID NO: 3471591 - RNA, 16 nt, Human
cuguucccccuucaca

SEQ ID NO: 3471592 - RNA, 23 nt, Human
cuguuccccuaguaagugccuuc

SEQ ID NO: 3471593 - RNA, 17 nt, Human
cuguuccccucacugga

SEQ ID NO: 3471594 - RNA, 14 nt, Human
cuguuccccucucc

SEQ ID NO: 3471595 - RNA, 20 nt, Human
cuguuccccucucccuuccc

SEQ ID NO: 3471596 - RNA, 14 nt, Human
cuguucccucugcu

SEQ ID NO: 3471597 - RNA, 19 nt, Human
cuguucccucugcuccugg

SEQ ID NO: 3471598 - RNA, 21 nt, Human
cuguuccucucuuuuccuguu

SEQ ID NO: 3471599 - RNA, 15 nt, Human
cuguuccugcugcug

SEQ ID NO: 3471600 - RNA, 16 nt, Human
cuguuccugcugcugu

SEQ ID NO: 3471601 - RNA, 15 nt, Human
cuguuccuuagaccu

SEQ ID NO: 3471602 - RNA, 12 nt, Human
cuguuccuuuua

SEQ ID NO: 3471603 - RNA, 17 nt, Human
cuguucuaaagcucuga

SEQ ID NO: 3471604 - RNA, 15 nt, Human
cuguucuaacaugua

SEQ ID NO: 3471605 - RNA, 22 nt, Human
cuguucuaagggggaggggaag

SEQ ID NO: 3471606 - RNA, 20 nt, Human
cuguucuacauagaugcuua

SEQ ID NO: 3471607 - RNA, 19 nt, Human
cuguucuacccguuccaaa

SEQ ID NO: 3471608 - RNA, 22 nt, Human
cuguucuagcacuucaucuggc

SEQ ID NO: 3471609 - RNA, 14 nt, Human
cuguucuaguuuuu

SEQ ID NO: 3471610 - RNA, 19 nt, Human
cuguucuaguuuuuuacuu

SEQ ID NO: 3471611 - RNA, 14 nt, Human
cuguucucugcccu

SEQ ID NO: 3471612 - RNA, 20 nt, Human
cuguucucugcccuccaaga

SEQ ID NO: 3471613 - RNA, 11 nt, Human
cuguucuggaa

SEQ ID NO: 3471614 - RNA, 13 nt, Human
cuguucuggagga

SEQ ID NO: 3471615 - RNA, 23 nt, Human
cuguucuggaggaaagggaggag

SEQ ID NO: 3471616 - RNA, 16 nt, Human
cuguucuggcagaguu

SEQ ID NO: 3471617 - RNA, 20 nt, Human
cuguucugggugcagcugag

SEQ ID NO: 3471618 - RNA, 19 nt, Human
cuguucugucccuuggagc

SEQ ID NO: 3471619 - RNA, 15 nt, Human
cuguucuguggaaag

SEQ ID NO: 3471620 - RNA, 20 nt, Human
cuguucuguggaaaguguaa

SEQ ID NO: 3471621 - RNA, 11 nt, Human
cuguucugugu

SEQ ID NO: 3471622 - RNA, 13 nt, Human
cuguucugugucu

SEQ ID NO: 3471623 - RNA, 14 nt, Human
cuguucuguuucaa

SEQ ID NO: 3471624 - RNA, 21 nt, Human
cuguucuguuucaaggcacuc

SEQ ID NO: 3471625 - RNA, 17 nt, Human
cuguucuuagcucaaug

SEQ ID NO: 3471626 - RNA, 12 nt, Human
cuguucuuccuc

SEQ ID NO: 3471627 - RNA, 17 nt, Human
cuguucuuccucagcca

SEQ ID NO: 3471628 - RNA, 20 nt, Human
cuguucuuccucagccagcc

SEQ ID NO: 3471629 - RNA, 22 nt, Human
cuguucuuccucagccagccuc

SEQ ID NO: 3471630 - RNA, 13 nt, Human
cuguucuuccucc

SEQ ID NO: 3471631 - RNA, 14 nt, Human
cuguucuuccucca

SEQ ID NO: 3471632 - RNA, 23 nt, Human
cuguucuuccuccagcugcacca

SEQ ID NO: 3471633 - RNA, 12 nt, Human
cuguucuugaag

SEQ ID NO: 3471634 - RNA, 11 nt, Human
cuguucuugcu

SEQ ID NO: 3471635 - RNA, 15 nt, Human
cuguucuugcugcua

SEQ ID NO: 3471636 - RNA, 19 nt, Human
cuguucuugcugcuagaac

SEQ ID NO: 3471637 - RNA, 21 nt, Human
cuguucuugcugcuagaacuu

SEQ ID NO: 3471638 - RNA, 13 nt, Human
cuguucuuggggc

SEQ ID NO: 3471639 - RNA, 23 nt, Human
cuguucuuucuggcuaugcauuu

SEQ ID NO: 3471640 - RNA, 22 nt, Human
cuguugaaaagccauguuuaag

SEQ ID NO: 3471641 - RNA, 12 nt, Human
cuguugaaaauu

SEQ ID NO: 3471642 - RNA, 12 nt, Human
cuguugaaagca

SEQ ID NO: 3471643 - RNA, 19 nt, Human
cuguugaaagcaaaaaugc

SEQ ID NO: 3471644 - RNA, 17 nt, Human
cuguugaauuucccaca

SEQ ID NO: 3471645 - RNA, 17 nt, Human
cuguugacacaggucuu

SEQ ID NO: 3471646 - RNA, 16 nt, Human
cuguugacauauuuaa

SEQ ID NO: 3471647 - RNA, 17 nt, Human
cuguugaccaggcaccu

SEQ ID NO: 3471648 - RNA, 11 nt, Human
cuguugacucu

SEQ ID NO: 3471649 - RNA, 20 nt, Human
cuguugagcuguuuucccug

SEQ ID NO: 3471650 - RNA, 15 nt, Human
cuguugauaaaaacu

SEQ ID NO: 3471651 - RNA, 15 nt, Human
cuguugauaaaucca

SEQ ID NO: 3471652 - RNA, 20 nt, Human
cuguugaugaggccucuugg

SEQ ID NO: 3471653 - RNA, 17 nt, Human
cuguugaugggaugauu

SEQ ID NO: 3471654 - RNA, 13 nt, Human
cuguugauuaauu

SEQ ID NO: 3471655 - RNA, 19 nt, Human
cuguugauuaauuucugcc

SEQ ID NO: 3471656 - RNA, 15 nt, Human
cuguugauugcuaaa

SEQ ID NO: 3471657 - RNA, 17 nt, Human
cuguugauugcuaaaug

SEQ ID NO: 3471658 - RNA, 19 nt, Human
cuguugauugcuaaaugua

SEQ ID NO: 3471659 - RNA, 23 nt, Human
cuguugauugcuaaauguaacag

SEQ ID NO: 3471660 - RNA, 20 nt, Human
cuguugcacccagcccuggu

SEQ ID NO: 3471661 - RNA, 20 nt, Human
cuguugcacguguguuuuuc

SEQ ID NO: 3471662 - RNA, 15 nt, Human
cuguugcccacguuu

SEQ ID NO: 3471663 - RNA, 13 nt, Human
cuguugcccaggc

SEQ ID NO: 3471664 - RNA, 17 nt, Human
cuguugcccaggcuggc

SEQ ID NO: 3471665 - RNA, 14 nt, Human
cuguugccucaucu

SEQ ID NO: 3471666 - RNA, 18 nt, Human
cuguugcguaacuggcug

SEQ ID NO: 3471667 - RNA, 23 nt, Human
cuguugcuauagagccuaccugu

SEQ ID NO: 3471668 - RNA, 15 nt, Human
cuguugcugauuuua

SEQ ID NO: 3471669 - RNA, 17 nt, Human
cuguugcugccucaugc

SEQ ID NO: 3471670 - RNA, 21 nt, Human
cuguugcuguguuuaauuuga

SEQ ID NO: 3471671 - RNA, 15 nt, Human
cuguugcuuacaauu

SEQ ID NO: 3471672 - RNA, 11 nt, Human
cuguuggaagc

SEQ ID NO: 3471673 - RNA, 18 nt, Human
cuguuggacccgcucugg

SEQ ID NO: 3471674 - RNA, 18 nt, Human
cuguuggauuccaugcua

SEQ ID NO: 3471675 - RNA, 22 nt, Human
cuguuggauuuguuuaaaagga

SEQ ID NO: 3471676 - RNA, 18 nt, Human
cuguuggcacucacagac

SEQ ID NO: 3471677 - RNA, 22 nt, Human
cuguuggcacucacagaccugg

SEQ ID NO: 3471678 - RNA, 23 nt, Human
cuguuggcacucacagaccugga

SEQ ID NO: 3471679 - RNA, 16 nt, Human
cuguuggcaggcuggc

SEQ ID NO: 3471680 - RNA, 22 nt, Human
cuguuggcagugagugagccug

SEQ ID NO: 3471681 - RNA, 14 nt, Human
cuguuggcuggggg

SEQ ID NO: 3471682 - RNA, 22 nt, Human
cuguuggcugggggccucagug

SEQ ID NO: 3471683 - RNA, 20 nt, Human
cuguugggccaggagccucc

SEQ ID NO: 3471684 - RNA, 23 nt, Human
cuguugggguggguauaaaagau

SEQ ID NO: 3471685 - RNA, 11 nt, Human
cuguuguaacu

SEQ ID NO: 3471686 - RNA, 22 nt, Human
cuguuguaacuaggcucagaga

SEQ ID NO: 3471687 - RNA, 12 nt, Human
cuguuguaacuu

SEQ ID NO: 3471688 - RNA, 17 nt, Human
cuguuguaagaauucug

SEQ ID NO: 3471689 - RNA, 12 nt, Human
cuguuguacauu

SEQ ID NO: 3471690 - RNA, 13 nt, Human
cuguuguacauuu

SEQ ID NO: 3471691 - RNA, 19 nt, Human
cuguuguacauuuaugauu

SEQ ID NO: 3471692 - RNA, 15 nt, Human
cuguuguacuaugga

SEQ ID NO: 3471693 - RNA, 22 nt, Human
cuguuguauaaauuuauuuacu

SEQ ID NO: 3471694 - RNA, 18 nt, Human
cuguugucaccuucaccu

SEQ ID NO: 3471695 - RNA, 23 nt, Human
cuguugucaccuucaccuccuuu

SEQ ID NO: 3471696 - RNA, 14 nt, Human
cuguugucauugcu

SEQ ID NO: 3471697 - RNA, 16 nt, Human
cuguugucauugcuuu

SEQ ID NO: 3471698 - RNA, 16 nt, Human
cuguuguccuauggga

SEQ ID NO: 3471699 - RNA, 15 nt, Human
cuguugucucuucuc

SEQ ID NO: 3471700 - RNA, 13 nt, Human
cuguugugccaca

SEQ ID NO: 3471701 - RNA, 15 nt, Human
cuguugugccacaga

SEQ ID NO: 3471702 - RNA, 13 nt, Human
cuguuguuaucug

SEQ ID NO: 3471703 - RNA, 14 nt, Human
cuguuguuaugaug

SEQ ID NO: 3471704 - RNA, 15 nt, Human
cuguuguuaugaugu

SEQ ID NO: 3471705 - RNA, 17 nt, Human
cuguuguuauggaaacu

SEQ ID NO: 3471706 - RNA, 22 nt, Human
cuguuguuguuaaugaaaaugu

SEQ ID NO: 3471707 - RNA, 9 nt, Human
cuguuguuu

SEQ ID NO: 3471708 - RNA, 20 nt, Human
cuguuuaaauguuuuucuau

SEQ ID NO: 3471709 - RNA, 11 nt, Human
cuguuuaaauu

SEQ ID NO: 3471710 - RNA, 14 nt, Human
cuguuuaaauugcu

SEQ ID NO: 3471711 - RNA, 16 nt, Human
cuguuuaauauuuaaa

SEQ ID NO: 3471712 - RNA, 18 nt, Human
cuguuuaauauuuaaaca

SEQ ID NO: 3471713 - RNA, 20 nt, Human
cuguuuaauauuuaaacagc

SEQ ID NO: 3471714 - RNA, 18 nt, Human
cuguuuacaagaaaaaau

SEQ ID NO: 3471715 - RNA, 15 nt, Human
cuguuuacaguguuc

SEQ ID NO: 3471716 - RNA, 22 nt, Human
cuguuuagauuugccauagagu

SEQ ID NO: 3471717 - RNA, 17 nt, Human
cuguuuagcagcagccu

SEQ ID NO: 3471718 - RNA, 19 nt, Human
cuguuuaucccuuaagaau

SEQ ID NO: 3471719 - RNA, 13 nt, Human
cuguuuauggccu

SEQ ID NO: 3471720 - RNA, 22 nt, Human
cuguuuauuaaaguacaaccau

SEQ ID NO: 3471721 - RNA, 18 nt, Human
cuguuuauuaaucuuagu

SEQ ID NO: 3471722 - RNA, 19 nt, Human
cuguuuauuacuuccauga

SEQ ID NO: 3471723 - RNA, 21 nt, Human
cuguuuauucauaugcauauu

SEQ ID NO: 3471724 - RNA, 16 nt, Human
cuguuuauuucuguuu

SEQ ID NO: 3471725 - RNA, 14 nt, Human
cuguuucaaaguuc

SEQ ID NO: 3471726 - RNA, 16 nt, Human
cuguuucaaucacugu

SEQ ID NO: 3471727 - RNA, 16 nt, Human
cuguuucagaggcuca

SEQ ID NO: 3471728 - RNA, 12 nt, Human
cuguuucccagc

SEQ ID NO: 3471729 - RNA, 19 nt, Human
cuguuucccuucccuucca

SEQ ID NO: 3471730 - RNA, 17 nt, Human
cuguuucucagucucac

SEQ ID NO: 3471731 - RNA, 14 nt, Human
cuguuucucugcug

SEQ ID NO: 3471732 - RNA, 15 nt, Human
cuguuucucuugagc

SEQ ID NO: 3471733 - RNA, 20 nt, Human
cuguuucucuuuccuuggcu

SEQ ID NO: 3471734 - RNA, 15 nt, Human
cuguuucugaaaaga

SEQ ID NO: 3471735 - RNA, 17 nt, Human
cuguuucugaaaagaaa

SEQ ID NO: 3471736 - RNA, 17 nt, Human
cuguuucugcuugcucu

SEQ ID NO: 3471737 - RNA, 14 nt, Human
cuguuucuugcuug

SEQ ID NO: 3471738 - RNA, 21 nt, Human
cuguuugauauaccaaauuaa

SEQ ID NO: 3471739 - RNA, 23 nt, Human
cuguuugauauaccaaauuaaaa

SEQ ID NO: 3471740 - RNA, 12 nt, Human
cuguuugauucu

SEQ ID NO: 3471741 - RNA, 22 nt, Human
cuguuugcauuugauacauuuu

SEQ ID NO: 3471742 - RNA, 16 nt, Human
cuguuugcugaugguc

SEQ ID NO: 3471743 - RNA, 15 nt, Human
cuguuugcuguugcu

SEQ ID NO: 3471744 - RNA, 22 nt, Human
cuguuugcuguugcugauuuua

SEQ ID NO: 3471745 - RNA, 23 nt, Human
cuguuuggauuuuuaauuaaaaa

SEQ ID NO: 3471746 - RNA, 14 nt, Human
cuguuuggccucuc

SEQ ID NO: 3471747 - RNA, 17 nt, Human
cuguuugguuuuaaaau

SEQ ID NO: 3471748 - RNA, 21 nt, Human
cuguuugguuuuaaaauacug

SEQ ID NO: 3471749 - RNA, 16 nt, Human
cuguuugucuucuccc

SEQ ID NO: 3471750 - RNA, 12 nt, Human
cuguuuguuaug

SEQ ID NO: 3471751 - RNA, 13 nt, Human
cuguuuguuauug

SEQ ID NO: 3471752 - RNA, 15 nt, Human
cuguuuguuucaaga

SEQ ID NO: 3471753 - RNA, 21 nt, Human
cuguuuguuucugaaagggac

SEQ ID NO: 3471754 - RNA, 16 nt, Human
cuguuuuaaaaaccug

SEQ ID NO: 3471755 - RNA, 12 nt, Human
cuguuuuaaauu

SEQ ID NO: 3471756 - RNA, 14 nt, Human
cuguuuuaaguucu

SEQ ID NO: 3471757 - RNA, 22 nt, Human
cuguuuuacaaaaaagaaaaga

SEQ ID NO: 3471758 - RNA, 17 nt, Human
cuguuuuacaaguugga

SEQ ID NO: 3471759 - RNA, 17 nt, Human
cuguuuuacugcuuuua

SEQ ID NO: 3471760 - RNA, 14 nt, Human
cuguuuuauacugu

SEQ ID NO: 3471761 - RNA, 15 nt, Human
cuguuuuaugacuuc

SEQ ID NO: 3471762 - RNA, 16 nt, Human
cuguuuuaugacuuca

SEQ ID NO: 3471763 - RNA, 12 nt, Human
cuguuuuccccc

SEQ ID NO: 3471764 - RNA, 12 nt, Human
cuguuuuccucc

SEQ ID NO: 3471765 - RNA, 17 nt, Human
cuguuuuccucccuucu

SEQ ID NO: 3471766 - RNA, 19 nt, Human
cuguuuuccucccuucugc

SEQ ID NO: 3471767 - RNA, 20 nt, Human
cuguuuucuaguguaucaaa

SEQ ID NO: 3471768 - RNA, 13 nt, Human
cuguuuucucuug

SEQ ID NO: 3471769 - RNA, 17 nt, Human
cuguuuucugagcccgg

SEQ ID NO: 3471770 - RNA, 12 nt, Human
cuguuuucuucu

SEQ ID NO: 3471771 - RNA, 18 nt, Human
cuguuuugaaucucauaa

SEQ ID NO: 3471772 - RNA, 12 nt, Human
cuguuuugaauu

SEQ ID NO: 3471773 - RNA, 17 nt, Human
cuguuuuggguagcugc

SEQ ID NO: 3471774 - RNA, 21 nt, Human
cuguuuuguaaaguccccaga

SEQ ID NO: 3471775 - RNA, 19 nt, Human
cuguuuugugguuuggaau

SEQ ID NO: 3471776 - RNA, 20 nt, Human
cuguuuugugguuuggaaua

SEQ ID NO: 3471777 - RNA, 13 nt, Human
cuguuuuguuaua

SEQ ID NO: 3471778 - RNA, 19 nt, Human
cuguuuuguuauauaauuu

SEQ ID NO: 3471779 - RNA, 20 nt, Human
cuguuuuguuauauaauuua

SEQ ID NO: 3471780 - RNA, 22 nt, Human
cuguuuuguugacauucugaau

SEQ ID NO: 3471781 - RNA, 23 nt, Human
cuguuuuguuucgcucuuugaga

SEQ ID NO: 3471782 - RNA, 22 nt, Human
cuguuuuguuuuguuuuuuaaa

SEQ ID NO: 3471783 - RNA, 15 nt, Human
cuguuuuuaagcugu

SEQ ID NO: 3471784 - RNA, 19 nt, Human
cuguuuuuaagcuguuucc

SEQ ID NO: 3471785 - RNA, 23 nt, Human
cuguuuuuaagcuguuuccauag

SEQ ID NO: 3471786 - RNA, 15 nt, Human
cuguuuuuacccaua

SEQ ID NO: 3471787 - RNA, 20 nt, Human
cuguuuuuacccauaucccc

SEQ ID NO: 3471788 - RNA, 21 nt, Human
cuguuuuucagggagguggcu

SEQ ID NO: 3471789 - RNA, 18 nt, Human
cuguuuuuccauaguuuu

SEQ ID NO: 3471790 - RNA, 20 nt, Human
cuguuuuucggacaguuuau

SEQ ID NO: 3471791 - RNA, 22 nt, Human
cuguuuuucggacaguuuauuu

SEQ ID NO: 3471792 - RNA, 20 nt, Human
cuguuuuucuaggccugggg

SEQ ID NO: 3471793 - RNA, 19 nt, Human
cuguuuuuuaaacuaggaa

SEQ ID NO: 3471794 - RNA, 20 nt, Human
cuuaaaaaaaaaaaaaagcu

SEQ ID NO: 3471795 - RNA, 23 nt, Human
cuuaaaaaaaaaaaaaagcuuua

SEQ ID NO: 3471796 - RNA, 12 nt, Human
cuuaaaaaacuu

SEQ ID NO: 3471797 - RNA, 14 nt, Human
cuuaaaaaaugucc

SEQ ID NO: 3471798 - RNA, 12 nt, Human
cuuaaaaacaac

SEQ ID NO: 3471799 - RNA, 21 nt, Human
cuuaaaaaucacacuguaaau

SEQ ID NO: 3471800 - RNA, 15 nt, Human
cuuaaaaauguaaau

SEQ ID NO: 3471801 - RNA, 23 nt, Human
cuuaaaaauguuuuuucaugugu

SEQ ID NO: 3471802 - RNA, 21 nt, Human
cuuaaaaauuaaauuggaaag

SEQ ID NO: 3471803 - RNA, 15 nt, Human
cuuaaaaauuuauua

SEQ ID NO: 3471804 - RNA, 13 nt, Human
cuuaaaacaucau

SEQ ID NO: 3471805 - RNA, 18 nt, Human
cuuaaaacaucauuccuu

SEQ ID NO: 3471806 - RNA, 19 nt, Human
cuuaaaacaucauuccuuu

SEQ ID NO: 3471807 - RNA, 13 nt, Human
cuuaaaaccaaag

SEQ ID NO: 3471808 - RNA, 12 nt, Human
cuuaaaacuccu

SEQ ID NO: 3471809 - RNA, 13 nt, Human
cuuaaaagccauc

SEQ ID NO: 3471810 - RNA, 22 nt, Human
cuuaaaagcuaucuucauguaa

SEQ ID NO: 3471811 - RNA, 20 nt, Human
cuuaaaauaaacaguuguga

SEQ ID NO: 3471812 - RNA, 13 nt, Human
cuuaaaauaacuu

SEQ ID NO: 3471813 - RNA, 19 nt, Human
cuuaaaauaacuuauauca

SEQ ID NO: 3471814 - RNA, 15 nt, Human
cuuaaaauaagcagg

SEQ ID NO: 3471815 - RNA, 13 nt, Human
cuuaaaauacaag

SEQ ID NO: 3471816 - RNA, 13 nt, Human
cuuaaaauagaaa

SEQ ID NO: 3471817 - RNA, 22 nt, Human
cuuaaaauaggggauauuuaag

SEQ ID NO: 3471818 - RNA, 20 nt, Human
cuuaaaauauuccugcauuu

SEQ ID NO: 3471819 - RNA, 13 nt, Human
cuuaaaaugcaau

SEQ ID NO: 3471820 - RNA, 24 nt, Human
cuuaaaauguucacuuuugacaaa

SEQ ID NO: 3471821 - RNA, 16 nt, Human
cuuaaaauuugaaaca

SEQ ID NO: 3471822 - RNA, 23 nt, Human
cuuaaaauuugaaacauugcuuu

SEQ ID NO: 3471823 - RNA, 20 nt, Human
cuuaaacaguugcacagcau

SEQ ID NO: 3471824 - RNA, 14 nt, Human
cuuaaacugugugg

SEQ ID NO: 3471825 - RNA, 15 nt, Human
cuuaaacugugugga

SEQ ID NO: 3471826 - RNA, 13 nt, Human
cuuaaagaaacag

SEQ ID NO: 3471827 - RNA, 21 nt, Human
cuuaaagaaagucgaauuaau

SEQ ID NO: 3471828 - RNA, 15 nt, Human
cuuaaagaauucaaa

SEQ ID NO: 3471829 - RNA, 23 nt, Human
cuuaaagaauucaaauuuuaucu

SEQ ID NO: 3471830 - RNA, 15 nt, Human
cuuaaagaguguggc

SEQ ID NO: 3471831 - RNA, 21 nt, Human
cuuaaagaguguggcaaaaua

SEQ ID NO: 3471832 - RNA, 16 nt, Human
cuuaaagauuuaucaa

SEQ ID NO: 3471833 - RNA, 15 nt, Human
cuuaaagcuuucaga

SEQ ID NO: 3471834 - RNA, 16 nt, Human
cuuaaaggugucuucc

SEQ ID NO: 3471835 - RNA, 22 nt, Human
cuuaaagugccaguauuuuaaa

SEQ ID NO: 3471836 - RNA, 14 nt, Human
cuuaaaguugaauu

SEQ ID NO: 3471837 - RNA, 15 nt, Human
cuuaaaguugaauuu

SEQ ID NO: 3471838 - RNA, 22 nt, Human
cuuaaaguugaauuuauuggcu

SEQ ID NO: 3471839 - RNA, 22 nt, Human
cuuaaauaauaaagaucaugua

SEQ ID NO: 3471840 - RNA, 19 nt, Human
cuuaaauaaugcuucagau

SEQ ID NO: 3471841 - RNA, 15 nt, Human
cuuaaauauagcagu

SEQ ID NO: 3471842 - RNA, 13 nt, Human
cuuaaauauaguu

SEQ ID NO: 3471843 - RNA, 15 nt, Human
cuuaaauaucuuuua

SEQ ID NO: 3471844 - RNA, 11 nt, Human
cuuaaauuaaa

SEQ ID NO: 3471845 - RNA, 20 nt, Human
cuuaaauuaaacaauuuauu

SEQ ID NO: 3471846 - RNA, 20 nt, Human
cuuaaauuccucaacagugu

SEQ ID NO: 3471847 - RNA, 20 nt, Human
cuuaaauuucuuaugugaca

SEQ ID NO: 3471848 - RNA, 16 nt, Human
cuuaaauuuuaacuaa

SEQ ID NO: 3471849 - RNA, 18 nt, Human
cuuaaauuuuaacuaaau

SEQ ID NO: 3471850 - RNA, 16 nt, Human
cuuaaauuuuaauuua

SEQ ID NO: 3471851 - RNA, 17 nt, Human
cuuaacaaccuggccgc

SEQ ID NO: 3471852 - RNA, 16 nt, Human
cuuaacaguuguauuu

SEQ ID NO: 3471853 - RNA, 15 nt, Human
cuuaacaugcugugu

SEQ ID NO: 3471854 - RNA, 21 nt, Human
cuuaacaugcuguguaagcug

SEQ ID NO: 3471855 - RNA, 13 nt, Human
cuuaacaugggcu

SEQ ID NO: 3471856 - RNA, 14 nt, Human
cuuaacauucugua

SEQ ID NO: 3471857 - RNA, 17 nt, Human
cuuaaccagaucauugu

SEQ ID NO: 3471858 - RNA, 18 nt, Human
cuuaaccaguuguggugu

SEQ ID NO: 3471859 - RNA, 17 nt, Human
cuuaacggaccaaagca

SEQ ID NO: 3471860 - RNA, 20 nt, Human
cuuaacggaccaaagcaaga

SEQ ID NO: 3471861 - RNA, 16 nt, Human
cuuaacggcuccagga

SEQ ID NO: 3471862 - RNA, 17 nt, Human
cuuaacuccuuccagug

SEQ ID NO: 3471863 - RNA, 16 nt, Human
cuuaacuggucuccuu

SEQ ID NO: 3471864 - RNA, 22 nt, Human
cuuaacuuaaauuuuaauuuau

SEQ ID NO: 3471865 - RNA, 14 nt, Human
cuuaacuucacaua

SEQ ID NO: 3471866 - RNA, 17 nt, Human
cuuaacuucacauauug

SEQ ID NO: 3471867 - RNA, 22 nt, Human
cuuaacuucacauauugauuuc

SEQ ID NO: 3471868 - RNA, 15 nt, Human
cuuaacuucuugcuu

SEQ ID NO: 3471869 - RNA, 18 nt, Human
cuuaacuucuugcuucuu

SEQ ID NO: 3471870 - RNA, 21 nt, Human
cuuaacuucuugcuucuuucu

SEQ ID NO: 3471871 - RNA, 17 nt, Human
cuuaagaacacaaagcg

SEQ ID NO: 3471872 - RNA, 16 nt, Human
cuuaagaacugcuuuc

SEQ ID NO: 3471873 - RNA, 23 nt, Human
cuuaagaagacugcauuauauuu

SEQ ID NO: 3471874 - RNA, 19 nt, Human
cuuaagaaugaguuucuua

SEQ ID NO: 3471875 - RNA, 21 nt, Human
cuuaagaccaccucaaauuua

SEQ ID NO: 3471876 - RNA, 21 nt, Human
cuuaccuucaauaaaguaucu

SEQ ID NO: 3471877 - RNA, 17 nt, Human
cuuacgaauauuuucag

SEQ ID NO: 3471878 - RNA, 14 nt, Human
cuuacgcuuuguca

SEQ ID NO: 3471879 - RNA, 15 nt, Human
cuuacggcccuggcc

SEQ ID NO: 3471880 - RNA, 16 nt, Human
cuuacggcccuggccu

SEQ ID NO: 3471881 - RNA, 15 nt, Human
cuuacgugaguccug

SEQ ID NO: 3471882 - RNA, 13 nt, Human
cuuacuaaaaagu

SEQ ID NO: 3471883 - RNA, 21 nt, Human
cuuacuaagcuuugccagcug

SEQ ID NO: 3471884 - RNA, 18 nt, Human
cuuacuaauguaaaauga

SEQ ID NO: 3471885 - RNA, 15 nt, Human
cuuacuacagaaaug

SEQ ID NO: 3471886 - RNA, 22 nt, Human
cuuacuauuuugacaguuauuu

SEQ ID NO: 3471887 - RNA, 14 nt, Human
cuuacuccaggaga

SEQ ID NO: 3471888 - RNA, 15 nt, Human
cuuacuccuccucuu

SEQ ID NO: 3471889 - RNA, 16 nt, Human
cuuacuccuccucuuu

SEQ ID NO: 3471890 - RNA, 22 nt, Human
cuuacuccuccucuuucucucc

SEQ ID NO: 3471891 - RNA, 12 nt, Human
cuuacucuaaga

SEQ ID NO: 3471892 - RNA, 23 nt, Human
cuuacucuuuccuauuucagugu

SEQ ID NO: 3471893 - RNA, 15 nt, Human
cuuacugauauauuu

SEQ ID NO: 3471894 - RNA, 12 nt, Human
cuuacugcaaau

SEQ ID NO: 3471895 - RNA, 17 nt, Human
cuuacuguaagacauua

SEQ ID NO: 3471896 - RNA, 13 nt, Human
cuuacuguacaug

SEQ ID NO: 3471897 - RNA, 17 nt, Human
cuuacuguggaggaagg

SEQ ID NO: 3471898 - RNA, 19 nt, Human
cuuacuguggaggaaggau

SEQ ID NO: 3471899 - RNA, 15 nt, Human
cuuacuguuucuguc

SEQ ID NO: 3471900 - RNA, 19 nt, Human
cuuacuguuucugucagga

SEQ ID NO: 3471901 - RNA, 24 nt, Human
cuuacuugcauaccaaguugauac

SEQ ID NO: 3471902 - RNA, 14 nt, Human
cuuacuuggaacug

SEQ ID NO: 3471903 - RNA, 11 nt, Human
cuuacuuugua

SEQ ID NO: 3471904 - RNA, 15 nt, Human
cuuacuuuguaaauu

SEQ ID NO: 3471905 - RNA, 19 nt, Human
cuuacuuuguaaauucuga

SEQ ID NO: 3471906 - RNA, 17 nt, Human
cuuacuuuuuauauaua

SEQ ID NO: 3471907 - RNA, 20 nt, Human
cuuagaaaaaccaccaccau

SEQ ID NO: 3471908 - RNA, 18 nt, Human
cuuagaaagcaggggcua

SEQ ID NO: 3471909 - RNA, 22 nt, Human
cuuagaaauguaaacugccaua

SEQ ID NO: 3471910 - RNA, 14 nt, Human
cuuagaaauuuauu

SEQ ID NO: 3471911 - RNA, 16 nt, Human
cuuagaacauuuuaau

SEQ ID NO: 3471912 - RNA, 19 nt, Human
cuuagaacauuuuaauuca

SEQ ID NO: 3471913 - RNA, 16 nt, Human
cuuagaagaauauugu

SEQ ID NO: 3471914 - RNA, 21 nt, Human
cuuagaagaauauuguauugu

SEQ ID NO: 3471915 - RNA, 21 nt, Human
cuuagaagguauuaagauuau

SEQ ID NO: 3471916 - RNA, 18 nt, Human
cuuagaaguuuguuguga

SEQ ID NO: 3471917 - RNA, 16 nt, Human
cuuagaauacaguuuu

SEQ ID NO: 3471918 - RNA, 19 nt, Human
cuuagaauuaguggcacuu

SEQ ID NO: 3471919 - RNA, 18 nt, Human
cuuagaauuauuugcacu

SEQ ID NO: 3471920 - RNA, 16 nt, Human
cuuagacagucccugc

SEQ ID NO: 3471921 - RNA, 17 nt, Human
cuuagaccaccaagccu

SEQ ID NO: 3471922 - RNA, 14 nt, Human
cuuagacccucaug

SEQ ID NO: 3471923 - RNA, 19 nt, Human
cuuagacccucaugcugcc

SEQ ID NO: 3471924 - RNA, 13 nt, Human
cuuagaccucagc

SEQ ID NO: 3471925 - RNA, 20 nt, Human
cuuagaccucagccugugcu

SEQ ID NO: 3471926 - RNA, 19 nt, Human
cuuagacuucgacucagga

SEQ ID NO: 3471927 - RNA, 16 nt, Human
cuuagacuugaaauac

SEQ ID NO: 3471928 - RNA, 21 nt, Human
cuuagacuuuuccaauaugug

SEQ ID NO: 3471929 - RNA, 12 nt, Human
cuuagagccagg

SEQ ID NO: 3471930 - RNA, 15 nt, Human
cuuagagccaggcac

SEQ ID NO: 3471931 - RNA, 16 nt, Human
cuuagagccaggcaca

SEQ ID NO: 3471932 - RNA, 17 nt, Human
cuuagagccaggcacac

SEQ ID NO: 3471933 - RNA, 23 nt, Human
cuuagagccaggcacacacugug

SEQ ID NO: 3471934 - RNA, 16 nt, Human
cuuagagccucccuca

SEQ ID NO: 3471935 - RNA, 14 nt, Human
cuuagagcuuuuuu

SEQ ID NO: 3471936 - RNA, 18 nt, Human
cuuagaucauaguuuuau

SEQ ID NO: 3471937 - RNA, 19 nt, Human
cuuagaugcaguucugaag

SEQ ID NO: 3471938 - RNA, 22 nt, Human
cuuagaugcaguucugaagaag

SEQ ID NO: 3471939 - RNA, 16 nt, Human
cuuagauggauucucc

SEQ ID NO: 3471940 - RNA, 20 nt, Human
cuuagauguuccaguaaucu

SEQ ID NO: 3471941 - RNA, 14 nt, Human
cuuagauguucuaa

SEQ ID NO: 3471942 - RNA, 16 nt, Human
cuuagauuagcucugg

SEQ ID NO: 3471943 - RNA, 21 nt, Human
cuuagauuagcucuggaccag

SEQ ID NO: 3471944 - RNA, 14 nt, Human
cuuagauuucauag

SEQ ID NO: 3471945 - RNA, 13 nt, Human
cuuagauuuuaca

SEQ ID NO: 3471946 - RNA, 14 nt, Human
cuuagcagaugcug

SEQ ID NO: 3471947 - RNA, 22 nt, Human
cuuagcagcuaucucucaguga

SEQ ID NO: 3471948 - RNA, 23 nt, Human
cuuagcagcuaucucucagugaa

SEQ ID NO: 3471949 - RNA, 15 nt, Human
cuuagcagcuuccag

SEQ ID NO: 3471950 - RNA, 17 nt, Human
cuuagcagcuuccagau

SEQ ID NO: 3471951 - RNA, 14 nt, Human
cuuagcaggagagg

SEQ ID NO: 3471952 - RNA, 18 nt, Human
cuuagcagggaaacagcu

SEQ ID NO: 3471953 - RNA, 21 nt, Human
cuuagcagggaaacagcuaau

SEQ ID NO: 3471954 - RNA, 18 nt, Human
cuuagcaguccccuuccc

SEQ ID NO: 3471955 - RNA, 18 nt, Human
cuuagcauguguugaaaa

SEQ ID NO: 3471956 - RNA, 17 nt, Human
cuuagcauguuugcuga

SEQ ID NO: 3471957 - RNA, 19 nt, Human
cuuagccuggaccucugac

SEQ ID NO: 3471958 - RNA, 17 nt, Human
cuuagccuggagcaccu

SEQ ID NO: 3471959 - RNA, 19 nt, Human
cuuagcuaguuuuauucuu

SEQ ID NO: 3471960 - RNA, 18 nt, Human
cuuagcucaaugagcaug

SEQ ID NO: 3471961 - RNA, 19 nt, Human
cuuagcucaaugagcaugu

SEQ ID NO: 3471962 - RNA, 17 nt, Human
cuuagcuccccuccaac

SEQ ID NO: 3471963 - RNA, 17 nt, Human
cuuagcucuuaauuguu

SEQ ID NO: 3471964 - RNA, 15 nt, Human
cuuagcugccaagcc

SEQ ID NO: 3471965 - RNA, 14 nt, Human
cuuagcuuagaccu

SEQ ID NO: 3471966 - RNA, 16 nt, Human
cuuagcuuagaccuca

SEQ ID NO: 3471967 - RNA, 19 nt, Human
cuuagcuuagaccucagcc

SEQ ID NO: 3471968 - RNA, 20 nt, Human
cuuagcuuagaccucagccu

SEQ ID NO: 3471969 - RNA, 22 nt, Human
cuuagcuuagaccucagccugu

SEQ ID NO: 3471970 - RNA, 23 nt, Human
cuuagcuuagaccucagccugug

SEQ ID NO: 3471971 - RNA, 14 nt, Human
cuuagcuuaucaau

SEQ ID NO: 3471972 - RNA, 16 nt, Human
cuuagcuucaggaacc

SEQ ID NO: 3471973 - RNA, 18 nt, Human
cuuagcuucaggaaccuc

SEQ ID NO: 3471974 - RNA, 16 nt, Human
cuuagcuuuagaaaca

SEQ ID NO: 3471975 - RNA, 14 nt, Human
cuuagcuuuuuaau

SEQ ID NO: 3471976 - RNA, 16 nt, Human
cuuagcuuuuuaauug

SEQ ID NO: 3471977 - RNA, 17 nt, Human
cuuaggaagagaaacca

SEQ ID NO: 3471978 - RNA, 16 nt, Human
cuuaggaagagccuuc

SEQ ID NO: 3471979 - RNA, 18 nt, Human
cuuaggaugugugcaugu

SEQ ID NO: 3471980 - RNA, 23 nt, Human
cuuaggcaauggugaacugucau

SEQ ID NO: 3471981 - RNA, 15 nt, Human
cuuaggcagggaagu

SEQ ID NO: 3471982 - RNA, 15 nt, Human
cuuaggccagcacca

SEQ ID NO: 3471983 - RNA, 13 nt, Human
cuuaggccuuccu

SEQ ID NO: 3471984 - RNA, 23 nt, Human
cuuaggccuuccucucuccagau

SEQ ID NO: 3471985 - RNA, 16 nt, Human
cuuaggcugcugggau

SEQ ID NO: 3471986 - RNA, 13 nt, Human
cuuaggcuuugua

SEQ ID NO: 3471987 - RNA, 21 nt, Human
cuuagggaaggauacaaaagc

SEQ ID NO: 3471988 - RNA, 13 nt, Human
cuuagggcacugg

SEQ ID NO: 3471989 - RNA, 17 nt, Human
cuuagggcccuggaggc

SEQ ID NO: 3471990 - RNA, 16 nt, Human
cuuaggggcugcugac

SEQ ID NO: 3471991 - RNA, 17 nt, Human
cuuaggguuuucucucu

SEQ ID NO: 3471992 - RNA, 23 nt, Human
cuuaguaagcggcucaagcccag

SEQ ID NO: 3471993 - RNA, 19 nt, Human
cuuaguacaaaguuucaau

SEQ ID NO: 3471994 - RNA, 14 nt, Human
cuuaguacugaguu

SEQ ID NO: 3471995 - RNA, 17 nt, Human
cuuaguaucucaucaac

SEQ ID NO: 3471996 - RNA, 13 nt, Human
cuuagucacugcc

SEQ ID NO: 3471997 - RNA, 14 nt, Human
cuuagucacugccu

SEQ ID NO: 3471998 - RNA, 17 nt, Human
cuuagucccccaacucu

SEQ ID NO: 3471999 - RNA, 19 nt, Human
cuuagucucaguuugugug

SEQ ID NO: 3472000 - RNA, 23 nt, Human
cuuagucucaguuugugugucuu

SEQ ID NO: 3472001 - RNA, 21 nt, Human
cuuagucuucucauagcauua

SEQ ID NO: 3472002 - RNA, 16 nt, Human
cuuagugauguaauua

SEQ ID NO: 3472003 - RNA, 13 nt, Human
cuuaguggcuuuu

SEQ ID NO: 3472004 - RNA, 22 nt, Human
cuuaguggcuuuuuuccuccug

SEQ ID NO: 3472005 - RNA, 17 nt, Human
cuuagugggccagggcu

SEQ ID NO: 3472006 - RNA, 16 nt, Human
cuuaguguuucugugc

SEQ ID NO: 3472007 - RNA, 21 nt, Human
cuuaguguuuuaaaacaccuc

SEQ ID NO: 3472008 - RNA, 15 nt, Human
cuuaguucucacugu

SEQ ID NO: 3472009 - RNA, 19 nt, Human
cuuaguuuggauucuuaug

SEQ ID NO: 3472010 - RNA, 22 nt, Human
cuuaguuuguguguugucucuu

SEQ ID NO: 3472011 - RNA, 23 nt, Human
cuuaguuuguguguugucucuug

SEQ ID NO: 3472012 - RNA, 12 nt, Human
cuuauaaaacag

SEQ ID NO: 3472013 - RNA, 14 nt, Human
cuuauaaaacagag

SEQ ID NO: 3472014 - RNA, 20 nt, Human
cuuauaaaacagaguaaucu

SEQ ID NO: 3472015 - RNA, 19 nt, Human
cuuauaaaauccugugcaa

SEQ ID NO: 3472016 - RNA, 12 nt, Human
cuuauaaauaug

SEQ ID NO: 3472017 - RNA, 21 nt, Human
cuuauaaccuaguuaaagaaa

SEQ ID NO: 3472018 - RNA, 22 nt, Human
cuuauaaccuaguuaaagaaag

SEQ ID NO: 3472019 - RNA, 19 nt, Human
cuuauaagugaagugauac

SEQ ID NO: 3472020 - RNA, 20 nt, Human
cuuauaauaaaggacuguaa

SEQ ID NO: 3472021 - RNA, 20 nt, Human
cuugcuaaucagugucucac

SEQ ID NO: 3472022 - RNA, 23 nt, Human
cuugcuaaucagugucucacacu

SEQ ID NO: 3472023 - RNA, 13 nt, Human
cuugcuaccagua

SEQ ID NO: 3472024 - RNA, 18 nt, Human
cuugcuaccaguauuuag

SEQ ID NO: 3472025 - RNA, 14 nt, Human
cuugcuaccucagu

SEQ ID NO: 3472026 - RNA, 16 nt, Human
cuugcucauuaauuuu

SEQ ID NO: 3472027 - RNA, 17 nt, Human
cuugcucccugacuggg

SEQ ID NO: 3472028 - RNA, 20 nt, Human
cuugcucccuguguccaccu

SEQ ID NO: 3472029 - RNA, 19 nt, Human
cuugcucccuucagccccc

SEQ ID NO: 3472030 - RNA, 23 nt, Human
cuugcucccuucagcccccagcc

SEQ ID NO: 3472031 - RNA, 20 nt, Human
cuugcucgcuguaaaaucuu

SEQ ID NO: 3472032 - RNA, 14 nt, Human
cuugcucuaucuca

SEQ ID NO: 3472033 - RNA, 23 nt, Human
cuugcucuaucucacagcacacu

SEQ ID NO: 3472034 - RNA, 19 nt, Human
cuugcucuccccugcccug

SEQ ID NO: 3472035 - RNA, 14 nt, Human
cuugcucucccucu

SEQ ID NO: 3472036 - RNA, 14 nt, Human
cuugcucugcaccc

SEQ ID NO: 3472037 - RNA, 14 nt, Human
cuugcucugcaggc

SEQ ID NO: 3472038 - RNA, 14 nt, Human
cuugcucuguaauc

SEQ ID NO: 3472039 - RNA, 19 nt, Human
cuugcucuucagugggaga

SEQ ID NO: 3472040 - RNA, 19 nt, Human
cuugcucuugaugccuggc

SEQ ID NO: 3472041 - RNA, 22 nt, Human
cuugcugaaacgcaucuaguuc

SEQ ID NO: 3472042 - RNA, 17 nt, Human
cuugcugcacucuugca

SEQ ID NO: 3472043 - RNA, 23 nt, Human
cuugcugcacucuugcacaugga

SEQ ID NO: 3472044 - RNA, 21 nt, Human
cuugcugcaguaugaaaauaa

SEQ ID NO: 3472045 - RNA, 16 nt, Human
cuugcugcccuaggcu

SEQ ID NO: 3472046 - RNA, 23 nt, Human
cuugcugcccuaggcuccgucag

SEQ ID NO: 3472047 - RNA, 20 nt, Human
cuugcugcccugugcuccuc

SEQ ID NO: 3472048 - RNA, 13 nt, Human
cuugcugcuagaa

SEQ ID NO: 3472049 - RNA, 15 nt, Human
cuugcugcuagaacu

SEQ ID NO: 3472050 - RNA, 14 nt, Human
cuugcugcuauuuu

SEQ ID NO: 3472051 - RNA, 12 nt, Human
cuugcugcuguc

SEQ ID NO: 3472052 - RNA, 13 nt, Human
cuugcugcugucu

SEQ ID NO: 3472053 - RNA, 13 nt, Human
cuugcuggaagac

SEQ ID NO: 3472054 - RNA, 14 nt, Human
cuugcuggccccag

SEQ ID NO: 3472055 - RNA, 18 nt, Human
cuugcuggccccagcccu

SEQ ID NO: 3472056 - RNA, 20 nt, Human
cuugcuggccccagcccugc

SEQ ID NO: 3472057 - RNA, 17 nt, Human
cuugcugguuuucugga

SEQ ID NO: 3472058 - RNA, 14 nt, Human
cuugcuguccuagg

SEQ ID NO: 3472059 - RNA, 15 nt, Human
cuugcuguccuaggc

SEQ ID NO: 3472060 - RNA, 16 nt, Human
cuugcuguccuaggcc

SEQ ID NO: 3472061 - RNA, 20 nt, Human
cuugcuguccuaggccacac

SEQ ID NO: 3472062 - RNA, 18 nt, Human
cuugcuguccugaucugu

SEQ ID NO: 3472063 - RNA, 12 nt, Human
cuugcugucucu

SEQ ID NO: 3472064 - RNA, 17 nt, Human
cuugcugucucugcucg

SEQ ID NO: 3472065 - RNA, 15 nt, Human
cuugcugugaauuaa

SEQ ID NO: 3472066 - RNA, 15 nt, Human
cuugcugugacuuau

SEQ ID NO: 3472067 - RNA, 13 nt, Human
cuugcuguggucu

SEQ ID NO: 3472068 - RNA, 18 nt, Human
cuugcuguggucucuuug

SEQ ID NO: 3472069 - RNA, 20 nt, Human
cuugcuguugacauauuuaa

SEQ ID NO: 3472070 - RNA, 20 nt, Human
cuugcuguuggucauguggg

SEQ ID NO: 3472071 - RNA, 14 nt, Human
cuugcuuaaaugug

SEQ ID NO: 3472072 - RNA, 15 nt, Human
cuugcuuaaauguga

SEQ ID NO: 3472073 - RNA, 16 nt, Human
cuugcuuaaaugugaa

SEQ ID NO: 3472074 - RNA, 15 nt, Human
cuugcuuaccucuca

SEQ ID NO: 3472075 - RNA, 15 nt, Human
cuugcuucuuacuga

SEQ ID NO: 3472076 - RNA, 15 nt, Human
cuugcuucuuucuag

SEQ ID NO: 3472077 - RNA, 19 nt, Human
cuugcuucuuucuagaaag

SEQ ID NO: 3472078 - RNA, 19 nt, Human
cuugcuugccugcagggcc

SEQ ID NO: 3472079 - RNA, 18 nt, Human
cuugcuuggcugcuuggc

SEQ ID NO: 3472080 - RNA, 18 nt, Human
cuugcuuggggaacuugu

SEQ ID NO: 3472081 - RNA, 12 nt, Human
cuugcuuguacc

SEQ ID NO: 3472082 - RNA, 21 nt, Human
cuugcuuguugggauuccuga

SEQ ID NO: 3472083 - RNA, 19 nt, Human
cuugcuuuaccuuuucagg

SEQ ID NO: 3472084 - RNA, 11 nt, Human
cuugcuuucua

SEQ ID NO: 3472085 - RNA, 21 nt, Human
cuugcuuucuuuguuuggcug

SEQ ID NO: 3472086 - RNA, 18 nt, Human
cuugcuuuucaugcaaac

SEQ ID NO: 3472087 - RNA, 19 nt, Human
cuugcuuuucaugcaaacu

SEQ ID NO: 3472088 - RNA, 17 nt, Human
cuugcuuuucuguauuu

SEQ ID NO: 3472089 - RNA, 16 nt, Human
cuuggaaaaagugaug

SEQ ID NO: 3472090 - RNA, 20 nt, Human
cuuggaaaaauccagaaaga

SEQ ID NO: 3472091 - RNA, 23 nt, Human
cuuggaaaaguggcaagaccaaa

SEQ ID NO: 3472092 - RNA, 14 nt, Human
cuuggaaaccugcc

SEQ ID NO: 3472093 - RNA, 21 nt, Human
cuuggaaagcaucaccucagg

SEQ ID NO: 3472094 - RNA, 22 nt, Human
cuuggaaagcaucaccucaggc

SEQ ID NO: 3472095 - RNA, 18 nt, Human
cuuggaaauauuaaaaga

SEQ ID NO: 3472096 - RNA, 16 nt, Human
cuuggaaauuccugua

SEQ ID NO: 3472097 - RNA, 11 nt, Human
cuuggaacugc

SEQ ID NO: 3472098 - RNA, 15 nt, Human
cuuggaacuugccug

SEQ ID NO: 3472099 - RNA, 19 nt, Human
cuuggaacuugccugccuu

SEQ ID NO: 3472100 - RNA, 15 nt, Human
cuuggaagagccugc

SEQ ID NO: 3472101 - RNA, 13 nt, Human
cuuggaagcuccg

SEQ ID NO: 3472102 - RNA, 20 nt, Human
cuuggaagcuguuuggaaaa

SEQ ID NO: 3472103 - RNA, 19 nt, Human
cuuggaauaucugcuguau

SEQ ID NO: 3472104 - RNA, 22 nt, Human
cuuggaauuuguaaccucagcu

SEQ ID NO: 3472105 - RNA, 13 nt, Human
cuuggacacugua

SEQ ID NO: 3472106 - RNA, 21 nt, Human
cuuggacacuuaauucuguuc

SEQ ID NO: 3472107 - RNA, 15 nt, Human
cuuggacauccuccu

SEQ ID NO: 3472108 - RNA, 16 nt, Human
cuuggacauccuccuc

SEQ ID NO: 3472109 - RNA, 20 nt, Human
cuuggacauccuccucccac

SEQ ID NO: 3472110 - RNA, 16 nt, Human
cuuggacauuuuaugu

SEQ ID NO: 3472111 - RNA, 17 nt, Human
cuuggacauuuuauguc

SEQ ID NO: 3472112 - RNA, 19 nt, Human
cuuggacauuuuaugucuu

SEQ ID NO: 3472113 - RNA, 18 nt, Human
cuuggaccucgugcuuua

SEQ ID NO: 3472114 - RNA, 22 nt, Human
cuuggacuauuauaauuuaaug

SEQ ID NO: 3472115 - RNA, 11 nt, Human
cuuggacucau

SEQ ID NO: 3472116 - RNA, 16 nt, Human
cuuggacucauuuuaa

SEQ ID NO: 3472117 - RNA, 18 nt, Human
cuuggacucuugcucuuu

SEQ ID NO: 3472118 - RNA, 22 nt, Human
cuuggacuucuucucccccgcg

SEQ ID NO: 3472119 - RNA, 13 nt, Human
cuuggacuugagg

SEQ ID NO: 3472120 - RNA, 17 nt, Human
cuuggagaagucucagc

SEQ ID NO: 3472121 - RNA, 23 nt, Human
cuuggagaaugugagaagccagc

SEQ ID NO: 3472122 - RNA, 18 nt, Human
cuuggagccugcagagcu

SEQ ID NO: 3472123 - RNA, 19 nt, Human
cuuggagccugcagagcug

SEQ ID NO: 3472124 - RNA, 20 nt, Human
cuuggagcuauuuuccaggc

SEQ ID NO: 3472125 - RNA, 13 nt, Human
cuuggagcugagc

SEQ ID NO: 3472126 - RNA, 15 nt, Human
cuuggagcugagccu

SEQ ID NO: 3472127 - RNA, 21 nt, Human
cuuggagcugagccucucacc

SEQ ID NO: 3472128 - RNA, 14 nt, Human
cuuggagcugugag

SEQ ID NO: 3472129 - RNA, 21 nt, Human
cuuggagcuuacauaguuuua

SEQ ID NO: 3472130 - RNA, 22 nt, Human
cuuggaggaaggaaacccagcu

SEQ ID NO: 3472131 - RNA, 14 nt, Human
cuuggagggaccaa

SEQ ID NO: 3472132 - RNA, 15 nt, Human
cuuggagggucccaa

SEQ ID NO: 3472133 - RNA, 19 nt, Human
cuuggaggguugguccucu

SEQ ID NO: 3472134 - RNA, 18 nt, Human
cuuggaguauuggggucu

SEQ ID NO: 3472135 - RNA, 18 nt, Human
cuuggauaaugcuguugc

SEQ ID NO: 3472136 - RNA, 16 nt, Human
cuuggauacuuggauu

SEQ ID NO: 3472137 - RNA, 21 nt, Human
cuuggauagcuaauaaugagc

SEQ ID NO: 3472138 - RNA, 21 nt, Human
cuuggauuauuuuaaaucauu

SEQ ID NO: 3472139 - RNA, 14 nt, Human
cuuggauucucuaa

SEQ ID NO: 3472140 - RNA, 18 nt, Human
cuuggauucuuuccauuu

SEQ ID NO: 3472141 - RNA, 21 nt, Human
cuuggauucuuuccauuugca

SEQ ID NO: 3472142 - RNA, 14 nt, Human
cuuggauugucccc

SEQ ID NO: 3472143 - RNA, 20 nt, Human
cuuggauuguccccgacccu

SEQ ID NO: 3472144 - RNA, 22 nt, Human
cuuggauuguccccgacccuug

SEQ ID NO: 3472145 - RNA, 24 nt, Human
cuuggauuguccccgacccuugcc

SEQ ID NO: 3472146 - RNA, 15 nt, Human
cuuggcaaaagccuu

SEQ ID NO: 3472147 - RNA, 17 nt, Human
cuuggcaaaagccuugu

SEQ ID NO: 3472148 - RNA, 18 nt, Human
cuuggcaaaagccuugug

SEQ ID NO: 3472149 - RNA, 23 nt, Human
cuuggcaaaagccuuguguauau

SEQ ID NO: 3472150 - RNA, 13 nt, Human
cuuggcaacagaa

SEQ ID NO: 3472151 - RNA, 20 nt, Human
cuuggcaacagaagcaguug

SEQ ID NO: 3472152 - RNA, 21 nt, Human
cuuggcaauaaauuuugaaaa

SEQ ID NO: 3472153 - RNA, 13 nt, Human
cuuggcaccaaag

SEQ ID NO: 3472154 - RNA, 21 nt, Human
cuuggcaccagacacccagga

SEQ ID NO: 3472155 - RNA, 20 nt, Human
cuuggcacuuauugaauaua

SEQ ID NO: 3472156 - RNA, 18 nt, Human
cuuggcagcaccugucuc

SEQ ID NO: 3472157 - RNA, 19 nt, Human
cuuggcagcaccugucucc

SEQ ID NO: 3472158 - RNA, 18 nt, Human
cuuggcagccgagcucgu

SEQ ID NO: 3472159 - RNA, 17 nt, Human
cuuggccaagcagggag

SEQ ID NO: 3472160 - RNA, 16 nt, Human
cuuggccacagccagg

SEQ ID NO: 3472161 - RNA, 17 nt, Human
cuuggccagaagggggc

SEQ ID NO: 3472162 - RNA, 21 nt, Human
cuuggccagcaaguuagagaa

SEQ ID NO: 3472163 - RNA, 16 nt, Human
cuuggcccaggaguuu

SEQ ID NO: 3472164 - RNA, 21 nt, Human
cuuggcccagggggcuuccug

SEQ ID NO: 3472165 - RNA, 12 nt, Human
cuuguacaaaau

SEQ ID NO: 3472166 - RNA, 13 nt, Human
cuuguacaaaaua

SEQ ID NO: 3472167 - RNA, 15 nt, Human
cuuguacauaaugcg

SEQ ID NO: 3472168 - RNA, 21 nt, Human
cuuguacauaaugcgugcaua

SEQ ID NO: 3472169 - RNA, 19 nt, Human
cuuguacauguguagccug

SEQ ID NO: 3472170 - RNA, 17 nt, Human
cuuguagaacucacucu

SEQ ID NO: 3472171 - RNA, 17 nt, Human
cuuguagauuugauuuu

SEQ ID NO: 3472172 - RNA, 13 nt, Human
cuuguagccagcc

SEQ ID NO: 3472173 - RNA, 16 nt, Human
cuuguagccagccggg

SEQ ID NO: 3472174 - RNA, 14 nt, Human
cuuguagccuuuug

SEQ ID NO: 3472175 - RNA, 16 nt, Human
cuuguagccuuuugac

SEQ ID NO: 3472176 - RNA, 17 nt, Human
cuuguagccuuuugacu

SEQ ID NO: 3472177 - RNA, 17 nt, Human
cuuguagcgacuaaacu

SEQ ID NO: 3472178 - RNA, 18 nt, Human
cuuguagcuccuccccug

SEQ ID NO: 3472179 - RNA, 19 nt, Human
cuuguagcuccuccccugg

SEQ ID NO: 3472180 - RNA, 21 nt, Human
cuuguagcuccuccccuggag

SEQ ID NO: 3472181 - RNA, 14 nt, Human
cuuguagcuguaaa

SEQ ID NO: 3472182 - RNA, 15 nt, Human
cuuguagcuguaaaa

SEQ ID NO: 3472183 - RNA, 15 nt, Human
cuuguaguucuuuaa

SEQ ID NO: 3472184 - RNA, 21 nt, Human
cuuguaguuuaccucuuuaaa

SEQ ID NO: 3472185 - RNA, 21 nt, Human
cuuguauaaauguauauacac

SEQ ID NO: 3472186 - RNA, 12 nt, Human
cuuguauaauau

SEQ ID NO: 3472187 - RNA, 17 nt, Human
cuuguauaucuuguuuu

SEQ ID NO: 3472188 - RNA, 17 nt, Human
cuuguauauuuuaagaa

SEQ ID NO: 3472189 - RNA, 18 nt, Human
cuuguauccucugguucu

SEQ ID NO: 3472190 - RNA, 23 nt, Human
cuuguauuaaacucuucacaaaa

SEQ ID NO: 3472191 - RNA, 14 nt, Human
cuuguauuaagaau

SEQ ID NO: 3472192 - RNA, 17 nt, Human
cuuguauuaaguuguua

SEQ ID NO: 3472193 - RNA, 14 nt, Human
cuugucaaagaagg

SEQ ID NO: 3472194 - RNA, 23 nt, Human
cuugucaagccugugcaaaaaaa

SEQ ID NO: 3472195 - RNA, 23 nt, Human
cuugucaauaaaauccauacauu

SEQ ID NO: 3472196 - RNA, 19 nt, Human
cuugucaauauuuaaacau

SEQ ID NO: 3472197 - RNA, 14 nt, Human
cuugucacaauaaa

SEQ ID NO: 3472198 - RNA, 15 nt, Human
cuugucacaauaaau

SEQ ID NO: 3472199 - RNA, 17 nt, Human
cuugucacaauaaaugu

SEQ ID NO: 3472200 - RNA, 13 nt, Human
cuugucacgccag

SEQ ID NO: 3472201 - RNA, 18 nt, Human
cuugucacgccagacuuc

SEQ ID NO: 3472202 - RNA, 21 nt, Human
cuugucacugacacaaaggaa

SEQ ID NO: 3472203 - RNA, 16 nt, Human
cuugucacuugcaugu

SEQ ID NO: 3472204 - RNA, 16 nt, Human
cuugucagacauaaag

SEQ ID NO: 3472205 - RNA, 18 nt, Human
cuugucagacauaaagcc

SEQ ID NO: 3472206 - RNA, 21 nt, Human
cuugucagagcugggaggggu

SEQ ID NO: 3472207 - RNA, 21 nt, Human
cuugucaggagugugugugag

SEQ ID NO: 3472208 - RNA, 14 nt, Human
cuugucaugugaca

SEQ ID NO: 3472209 - RNA, 15 nt, Human
cuugucauguguaua

SEQ ID NO: 3472210 - RNA, 22 nt, Human
cuugucccacgugucuuccacu

SEQ ID NO: 3472211 - RNA, 18 nt, Human
cuugucccacuaucuggg

SEQ ID NO: 3472212 - RNA, 18 nt, Human
cuuguccccacacuccua

SEQ ID NO: 3472213 - RNA, 21 nt, Human
cuuguccccuccucacucccu

SEQ ID NO: 3472214 - RNA, 16 nt, Human
cuugucccugcccaga

SEQ ID NO: 3472215 - RNA, 18 nt, Human
cuuguccuagcuugggag

SEQ ID NO: 3472216 - RNA, 18 nt, Human
cuuguccuuagccuggac

SEQ ID NO: 3472217 - RNA, 20 nt, Human
cuuguccuuagccuggaccu

SEQ ID NO: 3472218 - RNA, 15 nt, Human
cuuguccuuucccuu

SEQ ID NO: 3472219 - RNA, 22 nt, Human
cuugucggccccaccagugccu

SEQ ID NO: 3472220 - RNA, 23 nt, Human
cuugucggccccaccagugccuc

SEQ ID NO: 3472221 - RNA, 14 nt, Human
cuugucggcuccag

SEQ ID NO: 3472222 - RNA, 16 nt, Human
cuugucucaaugcuca

SEQ ID NO: 3472223 - RNA, 18 nt, Human
cuugucucauuuuaaugu

SEQ ID NO: 3472224 - RNA, 19 nt, Human
cuugucucauuuuaaugua

SEQ ID NO: 3472225 - RNA, 23 nt, Human
cuugucucauuuuaauguaaaga

SEQ ID NO: 3472226 - RNA, 13 nt, Human
cuugucucugggc

SEQ ID NO: 3472227 - RNA, 14 nt, Human
cuugucucugggcu

SEQ ID NO: 3472228 - RNA, 20 nt, Human
cuugucuggcaaaagaaaaa

SEQ ID NO: 3472229 - RNA, 19 nt, Human
cuugucuuccuauuucaga

SEQ ID NO: 3472230 - RNA, 15 nt, Human
cuugucuuuggaccc

SEQ ID NO: 3472231 - RNA, 18 nt, Human
cuugucuuuucaaaauau

SEQ ID NO: 3472232 - RNA, 16 nt, Human
cuugugaaaauaauug

SEQ ID NO: 3472233 - RNA, 21 nt, Human
cuugugaaaauaauugacagg

SEQ ID NO: 3472234 - RNA, 20 nt, Human
cuugugaaggccaugauauu

SEQ ID NO: 3472235 - RNA, 19 nt, Human
cuugugaaucaagggucag

SEQ ID NO: 3472236 - RNA, 15 nt, Human
cuugugaaugcuucu

SEQ ID NO: 3472237 - RNA, 17 nt, Human
cuugugaaugcuucuca

SEQ ID NO: 3472238 - RNA, 19 nt, Human
cuugugacagauuauacag

SEQ ID NO: 3472239 - RNA, 12 nt, Human
cuugugacauau

SEQ ID NO: 3472240 - RNA, 17 nt, Human
cuugugacuagugcuga

SEQ ID NO: 3472241 - RNA, 19 nt, Human
cuugugacuagugcugaag

SEQ ID NO: 3472242 - RNA, 16 nt, Human
cuugugacuuuugcuu

SEQ ID NO: 3472243 - RNA, 13 nt, Human
cuugugaggaaag

SEQ ID NO: 3472244 - RNA, 23 nt, Human
cuugugauccacucgccucagcc

SEQ ID NO: 3472245 - RNA, 15 nt, Human
cuugugaucugggaa

SEQ ID NO: 3472246 - RNA, 16 nt, Human
cuugugaucugggaac

SEQ ID NO: 3472247 - RNA, 21 nt, Human
cuugugaugucauacagagaa

SEQ ID NO: 3472248 - RNA, 16 nt, Human
cuugugauuucuuuaa

SEQ ID NO: 3472249 - RNA, 23 nt, Human
cuugugauuucuuuaaaagaaug

SEQ ID NO: 3472250 - RNA, 16 nt, Human
cuugugcagaaaacau

SEQ ID NO: 3472251 - RNA, 21 nt, Human
cuugugcagaaaacauuguuc

SEQ ID NO: 3472252 - RNA, 18 nt, Human
cuugugccaacacucaag

SEQ ID NO: 3472253 - RNA, 15 nt, Human
cuugugccuggcuca

SEQ ID NO: 3472254 - RNA, 14 nt, Human
cuugugccuggggu

SEQ ID NO: 3472255 - RNA, 20 nt, Human
cuugugcugaucgugcuaaa

SEQ ID NO: 3472256 - RNA, 14 nt, Human
cuugugcuuugcuc

SEQ ID NO: 3472257 - RNA, 21 nt, Human
cuuguggaagcaaaaaucuga

SEQ ID NO: 3472258 - RNA, 13 nt, Human
cuuguggacacag

SEQ ID NO: 3472259 - RNA, 17 nt, Human
cuuguggacacagcucu

SEQ ID NO: 3472260 - RNA, 19 nt, Human
cuuguggacuaaaagauau

SEQ ID NO: 3472261 - RNA, 15 nt, Human
cuuguggauguuuua

SEQ ID NO: 3472262 - RNA, 17 nt, Human
cuuguggcagaggaugu

SEQ ID NO: 3472263 - RNA, 22 nt, Human
cuuguggcccucucccuuaccc

SEQ ID NO: 3472264 - RNA, 14 nt, Human
cuugugggccuggg

SEQ ID NO: 3472265 - RNA, 17 nt, Human
cuugugggccugggcuc

SEQ ID NO: 3472266 - RNA, 21 nt, Human
cuuguggggacccaggcuccg

SEQ ID NO: 3472267 - RNA, 14 nt, Human
cuuguggggccugg

SEQ ID NO: 3472268 - RNA, 21 nt, Human
cuugugggugugagcagcacc

SEQ ID NO: 3472269 - RNA, 14 nt, Human
cuugugguccaaau

SEQ ID NO: 3472270 - RNA, 19 nt, Human
cuuguggucccaccccaca

SEQ ID NO: 3472271 - RNA, 14 nt, Human
cuugugguuuaugu

SEQ ID NO: 3472272 - RNA, 14 nt, Human
cuuguguaaauaca

SEQ ID NO: 3472273 - RNA, 21 nt, Human
cuuguguaaauacaauuuugu

SEQ ID NO: 3472274 - RNA, 20 nt, Human
cuuguguaauuuaugugaaa

SEQ ID NO: 3472275 - RNA, 16 nt, Human
cuugugucaaacagua

SEQ ID NO: 3472276 - RNA, 10 nt, Human
cuugugucug

SEQ ID NO: 3472277 - RNA, 17 nt, Human
cuugugugguuuggccc

SEQ ID NO: 3472278 - RNA, 21 nt, Human
cuuguguguuccaaguuucca

SEQ ID NO: 3472279 - RNA, 13 nt, Human
cuuguguuggcug

SEQ ID NO: 3472280 - RNA, 17 nt, Human
cuuguguuggcuguggc

SEQ ID NO: 3472281 - RNA, 21 nt, Human
cuuguguuucuuuaguuuuug

SEQ ID NO: 3472282 - RNA, 14 nt, Human
cuuguuaauauucu

SEQ ID NO: 3472283 - RNA, 18 nt, Human
cuuguuaugguagaaaaa

SEQ ID NO: 3472284 - RNA, 15 nt, Human
cuuguuauugugaau

SEQ ID NO: 3472285 - RNA, 18 nt, Human
cuuguuauugugaaugau

SEQ ID NO: 3472286 - RNA, 16 nt, Human
cuuguucacacucuca

SEQ ID NO: 3472287 - RNA, 19 nt, Human
cuuguucaggaaaagguug

SEQ ID NO: 3472288 - RNA, 22 nt, Human
cuuguucaucauccagaugugg

SEQ ID NO: 3472289 - RNA, 14 nt, Human
cuuguucccucucc

SEQ ID NO: 3472290 - RNA, 13 nt, Human
cuuguucuacuca

SEQ ID NO: 3472291 - RNA, 22 nt, Human
cuuguucuacucauauauaucu

SEQ ID NO: 3472292 - RNA, 14 nt, Human
cuuguucuguuuug

SEQ ID NO: 3472293 - RNA, 13 nt, Human
cuuguucuuccaa

SEQ ID NO: 3472294 - RNA, 18 nt, Human
cuuguucuuccaaagcag

SEQ ID NO: 3472295 - RNA, 20 nt, Human
cuuguucuuccaaagcagag

SEQ ID NO: 3472296 - RNA, 12 nt, Human
cuuguugacaga

SEQ ID NO: 3472297 - RNA, 16 nt, Human
cuuguugaggguaugu

SEQ ID NO: 3472298 - RNA, 20 nt, Human
cuuguugaggguauguuuua

SEQ ID NO: 3472299 - RNA, 14 nt, Human
cuuguugcuuuguu

SEQ ID NO: 3472300 - RNA, 16 nt, Human
cuuguugcuuuguugc

SEQ ID NO: 3472301 - RNA, 21 nt, Human
cuuguuggauuuuugucuugu

SEQ ID NO: 3472302 - RNA, 13 nt, Human
cuuguuguuguua

SEQ ID NO: 3472303 - RNA, 15 nt, Human
cuuguuguuucuugc

SEQ ID NO: 3472304 - RNA, 19 nt, Human
cuuguuguuuuacuaaaga

SEQ ID NO: 3472305 - RNA, 21 nt, Human
cuuguuguuuuacuaaagaaa

SEQ ID NO: 3472306 - RNA, 16 nt, Human
cuuguuuaaugguagu

SEQ ID NO: 3472307 - RNA, 14 nt, Human
cuuguuuacaugcu

SEQ ID NO: 3472308 - RNA, 18 nt, Human
cuuguuuacaugcuuauu

SEQ ID NO: 3472309 - RNA, 22 nt, Human
cuuguuuacaugcuuauuccau

SEQ ID NO: 3472310 - RNA, 15 nt, Human
cuuuauagaucagcc

SEQ ID NO: 3472311 - RNA, 16 nt, Human
cuuuauauacaauaau

SEQ ID NO: 3472312 - RNA, 22 nt, Human
cuuuauauacaauaauggaaaa

SEQ ID NO: 3472313 - RNA, 19 nt, Human
cuuuauaugaacauagacu

SEQ ID NO: 3472314 - RNA, 12 nt, Human
cuuuauauuuag

SEQ ID NO: 3472315 - RNA, 20 nt, Human
cuuuaucaaugugucuuucu

SEQ ID NO: 3472316 - RNA, 17 nt, Human
cuuuaucacuuuuugaa

SEQ ID NO: 3472317 - RNA, 21 nt, Human
cuuuaucaugaaugcuuuuag

SEQ ID NO: 3472318 - RNA, 22 nt, Human
cuuuaucuaccaacuuucaaga

SEQ ID NO: 3472319 - RNA, 13 nt, Human
cuuuaucuguucu

SEQ ID NO: 3472320 - RNA, 14 nt, Human
cuuuaucuugacau

SEQ ID NO: 3472321 - RNA, 23 nt, Human
cuuuaugacuguuuuuguagugg

SEQ ID NO: 3472322 - RNA, 15 nt, Human
cuuuaugcacaaaau

SEQ ID NO: 3472323 - RNA, 18 nt, Human
cuuuaugcagcuuccuuu

SEQ ID NO: 3472324 - RNA, 22 nt, Human
cuuuaugccggaugugcuuuuc

SEQ ID NO: 3472325 - RNA, 15 nt, Human
cuuuaugcugaaaca

SEQ ID NO: 3472326 - RNA, 20 nt, Human
cuuuaugguccuaaaagcaa

SEQ ID NO: 3472327 - RNA, 13 nt, Human
cuuuaugguuucu

SEQ ID NO: 3472328 - RNA, 16 nt, Human
cuuuauguaauaaugu

SEQ ID NO: 3472329 - RNA, 14 nt, Human
cuuuaugugaauuu

SEQ ID NO: 3472330 - RNA, 23 nt, Human
cuuuauguggaaaacagaacauc

SEQ ID NO: 3472331 - RNA, 12 nt, Human
cuuuauguguaa

SEQ ID NO: 3472332 - RNA, 14 nt, Human
cuuuauuaaaaacu

SEQ ID NO: 3472333 - RNA, 17 nt, Human
cuuuauuaaaaacugag

SEQ ID NO: 3472334 - RNA, 14 nt, Human
cuuuauuaauguuu

SEQ ID NO: 3472335 - RNA, 15 nt, Human
cuuuauuaauguuuu

SEQ ID NO: 3472336 - RNA, 20 nt, Human
cuuuauuacccccuccuuca

SEQ ID NO: 3472337 - RNA, 14 nt, Human
cuuuauuauuuauu

SEQ ID NO: 3472338 - RNA, 21 nt, Human
cuuuauucaauaaaaaaaaga

SEQ ID NO: 3472339 - RNA, 13 nt, Human
cuuuauucuuuuc

SEQ ID NO: 3472340 - RNA, 13 nt, Human
cuuuauugagaaa

SEQ ID NO: 3472341 - RNA, 15 nt, Human
cuuuauugagaaaga

SEQ ID NO: 3472342 - RNA, 16 nt, Human
cuuuauugagaaagag

SEQ ID NO: 3472343 - RNA, 22 nt, Human
cuuuauugccaaaacccagcug

SEQ ID NO: 3472344 - RNA, 15 nt, Human
cuuuauugucuguaa

SEQ ID NO: 3472345 - RNA, 18 nt, Human
cuuuauugucuguaaauc

SEQ ID NO: 3472346 - RNA, 14 nt, Human
cuuuauugugaucu

SEQ ID NO: 3472347 - RNA, 16 nt, Human
cuuuauuguguuuguc

SEQ ID NO: 3472348 - RNA, 18 nt, Human
cuuuauuguguuugucau

SEQ ID NO: 3472349 - RNA, 19 nt, Human
cuuuauuguguuugucauu

SEQ ID NO: 3472350 - RNA, 20 nt, Human
cuuuauuguguuugucauua

SEQ ID NO: 3472351 - RNA, 14 nt, Human
cuuuauuucuguca

SEQ ID NO: 3472352 - RNA, 20 nt, Human
cuuuauuugaacaaugaagu

SEQ ID NO: 3472353 - RNA, 15 nt, Human
cuuuauuuguaaauu

SEQ ID NO: 3472354 - RNA, 17 nt, Human
cuuuauuuguaaauuua

SEQ ID NO: 3472355 - RNA, 20 nt, Human
cuuuauuuguacuuuuuccu

SEQ ID NO: 3472356 - RNA, 13 nt, Human
cuuuauuuguuuu

SEQ ID NO: 3472357 - RNA, 22 nt, Human
cuuuauuuuaaccuuugauaga

SEQ ID NO: 3472358 - RNA, 16 nt, Human
cuuuauuuuauauaau

SEQ ID NO: 3472359 - RNA, 18 nt, Human
cuuuauuuucugguagau

SEQ ID NO: 3472360 - RNA, 13 nt, Human
cuuuauuuugaga

SEQ ID NO: 3472361 - RNA, 22 nt, Human
cuuuauuuugagauguaaaaag

SEQ ID NO: 3472362 - RNA, 17 nt, Human
cuuuauuuuguguaaaa

SEQ ID NO: 3472363 - RNA, 22 nt, Human
cuuuauuuuuuaaguauuuaua

SEQ ID NO: 3472364 - RNA, 18 nt, Human
cuuucaaagaaggaauuc

SEQ ID NO: 3472365 - RNA, 15 nt, Human
cuuucaaagccauuu

SEQ ID NO: 3472366 - RNA, 12 nt, Human
cuuucaaagcuu

SEQ ID NO: 3472367 - RNA, 15 nt, Human
cuuucaaaggaacau

SEQ ID NO: 3472368 - RNA, 15 nt, Human
cuuucaagaacuugu

SEQ ID NO: 3472369 - RNA, 17 nt, Human
cuuucaagaacuuguuu

SEQ ID NO: 3472370 - RNA, 13 nt, Human
cuuucaagaauga

SEQ ID NO: 3472371 - RNA, 20 nt, Human
cuuucaagcagucgugccug

SEQ ID NO: 3472372 - RNA, 18 nt, Human
cuuucaauaaacuaaaga

SEQ ID NO: 3472373 - RNA, 15 nt, Human
cuuucaauaggaaaa

SEQ ID NO: 3472374 - RNA, 17 nt, Human
cuuucaauaggaaaaac

SEQ ID NO: 3472375 - RNA, 18 nt, Human
cuuucaauaggaaaaacu

SEQ ID NO: 3472376 - RNA, 21 nt, Human
cuuucaauaggaaaaacugau

SEQ ID NO: 3472377 - RNA, 21 nt, Human
cuuucaaugguuugcaaggaa

SEQ ID NO: 3472378 - RNA, 22 nt, Human
cuuucaaugguuugcaaggaag

SEQ ID NO: 3472379 - RNA, 21 nt, Human
cuuucaauuccguagccagcu

SEQ ID NO: 3472380 - RNA, 19 nt, Human
cuuucaauugucacuuuuu

SEQ ID NO: 3472381 - RNA, 21 nt, Human
cuuucacacuuccaccagccu

SEQ ID NO: 3472382 - RNA, 23 nt, Human
cuuucacacuuccaccagccugc

SEQ ID NO: 3472383 - RNA, 13 nt, Human
cuuucacagcucc

SEQ ID NO: 3472384 - RNA, 14 nt, Human
cuuucacagcuccu

SEQ ID NO: 3472385 - RNA, 18 nt, Human
cuuucacagcuccuccca

SEQ ID NO: 3472386 - RNA, 16 nt, Human
cuuucacauagauguc

SEQ ID NO: 3472387 - RNA, 18 nt, Human
cuuucacccacagaaaga

SEQ ID NO: 3472388 - RNA, 22 nt, Human
cuuucaccccagggccugagcc

SEQ ID NO: 3472389 - RNA, 23 nt, Human
cuuucaccccagggccugagccu

SEQ ID NO: 3472390 - RNA, 15 nt, Human
cuuucacccuuuucu

SEQ ID NO: 3472391 - RNA, 15 nt, Human
cuuucacuauuuccu

SEQ ID NO: 3472392 - RNA, 22 nt, Human
cuuucacuauuuccuuuauaau

SEQ ID NO: 3472393 - RNA, 13 nt, Human
cuuucacuucuuu

SEQ ID NO: 3472394 - RNA, 15 nt, Human
cuuucacuucuuucc

SEQ ID NO: 3472395 - RNA, 11 nt, Human
cuuucagaaag

SEQ ID NO: 3472396 - RNA, 15 nt, Human
cuuucagaaauauaa

SEQ ID NO: 3472397 - RNA, 22 nt, Human
cuuucagaaauauaacacauuu

SEQ ID NO: 3472398 - RNA, 14 nt, Human
cuuucagagacagc

SEQ ID NO: 3472399 - RNA, 11 nt, Human
cuuucagagcc

SEQ ID NO: 3472400 - RNA, 14 nt, Human
cuuucagagccucc

SEQ ID NO: 3472401 - RNA, 20 nt, Human
cuuucagauaacuguuauuu

SEQ ID NO: 3472402 - RNA, 13 nt, Human
cuuucagauacug

SEQ ID NO: 3472403 - RNA, 22 nt, Human
cuuucagauacuggauuguacu

SEQ ID NO: 3472404 - RNA, 20 nt, Human
cuuucagaugucuucugccu

SEQ ID NO: 3472405 - RNA, 21 nt, Human
cuuucagaugucuucugccug

SEQ ID NO: 3472406 - RNA, 14 nt, Human
cuuucagcaggcag

SEQ ID NO: 3472407 - RNA, 17 nt, Human
cuuucagcuccugacca

SEQ ID NO: 3472408 - RNA, 19 nt, Human
cuuucagcuccugaccagu

SEQ ID NO: 3472409 - RNA, 17 nt, Human
cuuucagcugucuuuug

SEQ ID NO: 3472410 - RNA, 13 nt, Human
cuuucagcuguga

SEQ ID NO: 3472411 - RNA, 17 nt, Human
cuuucaggaucuauuuu

SEQ ID NO: 3472412 - RNA, 13 nt, Human
cuuucagggccuc

SEQ ID NO: 3472413 - RNA, 15 nt, Human
cuuucaguacuuuuu

SEQ ID NO: 3472414 - RNA, 17 nt, Human
cuuucagugaaagcauc

SEQ ID NO: 3472415 - RNA, 23 nt, Human
cuuucauauaguuagcuaauaaa

SEQ ID NO: 3472416 - RNA, 14 nt, Human
cuuucauauuuuag

SEQ ID NO: 3472417 - RNA, 18 nt, Human
cuuucaucaaucauugua

SEQ ID NO: 3472418 - RNA, 18 nt, Human
cuuucaucacacugggug

SEQ ID NO: 3472419 - RNA, 16 nt, Human
cuuucauccccaccuu

SEQ ID NO: 3472420 - RNA, 17 nt, Human
cuuucauccccaccuug

SEQ ID NO: 3472421 - RNA, 17 nt, Human
cuuucauccugacucug

SEQ ID NO: 3472422 - RNA, 22 nt, Human
cuuucauccugacucugccccc

SEQ ID NO: 3472423 - RNA, 20 nt, Human
cuuucauguaaacugugcac

SEQ ID NO: 3472424 - RNA, 21 nt, Human
cuuucauuaaaggcuucucuc

SEQ ID NO: 3472425 - RNA, 18 nt, Human
cuuucauuccuucagauu

SEQ ID NO: 3472426 - RNA, 16 nt, Human
cuuucauuuacugugg

SEQ ID NO: 3472427 - RNA, 17 nt, Human
cuuucauuuacuguggc

SEQ ID NO: 3472428 - RNA, 14 nt, Human
cuuucauuugcuau

SEQ ID NO: 3472429 - RNA, 17 nt, Human
cuuucauuuucucucag

SEQ ID NO: 3472430 - RNA, 18 nt, Human
cuuucauuuucucucagg

SEQ ID NO: 3472431 - RNA, 13 nt, Human
cuuucauuuucug

SEQ ID NO: 3472432 - RNA, 17 nt, Human
cuuucauuuucuguuug

SEQ ID NO: 3472433 - RNA, 21 nt, Human
cuuucauuuugcuuuaauuuu

SEQ ID NO: 3472434 - RNA, 23 nt, Human
cuuuccaaagccaaugugaacag

SEQ ID NO: 3472435 - RNA, 22 nt, Human
cuuuccaaaugcccagcuuaaa

SEQ ID NO: 3472436 - RNA, 13 nt, Human
cuuuccaaauuau

SEQ ID NO: 3472437 - RNA, 15 nt, Human
cuuuccaaauuauuu

SEQ ID NO: 3472438 - RNA, 15 nt, Human
cuuuccaauucuccu

SEQ ID NO: 3472439 - RNA, 18 nt, Human
cuuuccaauucuccuuua

SEQ ID NO: 3472440 - RNA, 21 nt, Human
cuuuccacaccuggcacugcu

SEQ ID NO: 3472441 - RNA, 15 nt, Human
cuuuccaccacagcc

SEQ ID NO: 3472442 - RNA, 23 nt, Human
cuuuccaccacagccagcaccug

SEQ ID NO: 3472443 - RNA, 15 nt, Human
cuuuccacccccucc

SEQ ID NO: 3472444 - RNA, 21 nt, Human
cuuuccacccccucccuggcc

SEQ ID NO: 3472445 - RNA, 12 nt, Human
cuuuccacucug

SEQ ID NO: 3472446 - RNA, 14 nt, Human
cuuuccacucugga

SEQ ID NO: 3472447 - RNA, 17 nt, Human
cuuuccacuucuuccuu

SEQ ID NO: 3472448 - RNA, 9 nt, Human
cuuuccaga

SEQ ID NO: 3472449 - RNA, 21 nt, Human
cuuuccagcucaccccccaca

SEQ ID NO: 3472450 - RNA, 22 nt, Human
cuuuccaggcuauguauaaaau

SEQ ID NO: 3472451 - RNA, 23 nt, Human
cuuuccaggcuauguauaaaaua

SEQ ID NO: 3472452 - RNA, 15 nt, Human
cuuuccaucuacccu

SEQ ID NO: 3472453 - RNA, 12 nt, Human
cuuuccauuaca

SEQ ID NO: 3472454 - RNA, 12 nt, Human
cuuuccauuuug

SEQ ID NO: 3472455 - RNA, 21 nt, Human
cuuucuuuggugccuuuccug

SEQ ID NO: 3472456 - RNA, 18 nt, Human
cuuucuuuguuuggcugg

SEQ ID NO: 3472457 - RNA, 18 nt, Human
cuuucuuuugauucuucc

SEQ ID NO: 3472458 - RNA, 15 nt, Human
cuuucuuuuucuucu

SEQ ID NO: 3472459 - RNA, 15 nt, Human
cuuucuuuuuugaua

SEQ ID NO: 3472460 - RNA, 18 nt, Human
cuuucuuuuuuucccccc

SEQ ID NO: 3472461 - RNA, 19 nt, Human
cuuucuuuuuuuuuuuuga

SEQ ID NO: 3472462 - RNA, 19 nt, Human
cuuugaaaccugcucugua

SEQ ID NO: 3472463 - RNA, 19 nt, Human
cuuugaaagccccagaaau

SEQ ID NO: 3472464 - RNA, 13 nt, Human
cuuugaaauaccu

SEQ ID NO: 3472465 - RNA, 22 nt, Human
cuuugaaauaccucauguuuau

SEQ ID NO: 3472466 - RNA, 23 nt, Human
cuuugaaauugaaccuuugugcc

SEQ ID NO: 3472467 - RNA, 15 nt, Human
cuuugaaauuguuua

SEQ ID NO: 3472468 - RNA, 22 nt, Human
cuuugaacuaaugauaaaguaa

SEQ ID NO: 3472469 - RNA, 13 nt, Human
cuuugaagaggaa

SEQ ID NO: 3472470 - RNA, 20 nt, Human
cuuugaagaggaaaaugaau

SEQ ID NO: 3472471 - RNA, 23 nt, Human
cuuugaagcugaaaauauaaaac

SEQ ID NO: 3472472 - RNA, 13 nt, Human
cuuugaaguagcu

SEQ ID NO: 3472473 - RNA, 16 nt, Human
cuuugaagucauacca

SEQ ID NO: 3472474 - RNA, 21 nt, Human
cuuugaauaaagaauacuuga

SEQ ID NO: 3472475 - RNA, 16 nt, Human
cuuugaauaaaugugu

SEQ ID NO: 3472476 - RNA, 20 nt, Human
cuuugaauuuucauuuuaca

SEQ ID NO: 3472477 - RNA, 23 nt, Human
cuuugacaauugggagcugccaa

SEQ ID NO: 3472478 - RNA, 22 nt, Human
cuuugacacuuuucauaucauu

SEQ ID NO: 3472479 - RNA, 17 nt, Human
cuuugaccucaaccugu

SEQ ID NO: 3472480 - RNA, 21 nt, Human
cuuugaccucaaccugugaug

SEQ ID NO: 3472481 - RNA, 13 nt, Human
cuuugaccucugc

SEQ ID NO: 3472482 - RNA, 20 nt, Human
cuuugaccucugcagcaaua

SEQ ID NO: 3472483 - RNA, 15 nt, Human
cuuugaccugccucc

SEQ ID NO: 3472484 - RNA, 20 nt, Human
cuuugacgagucaccuucca

SEQ ID NO: 3472485 - RNA, 21 nt, Human
cuuugacgagucaccuuccag

SEQ ID NO: 3472486 - RNA, 13 nt, Human
cuuugacucagga

SEQ ID NO: 3472487 - RNA, 23 nt, Human
cuuugacucaggagccugugaca

SEQ ID NO: 3472488 - RNA, 14 nt, Human
cuuugacuuuuugc

SEQ ID NO: 3472489 - RNA, 19 nt, Human
cuuugagaagccuucagcu

SEQ ID NO: 3472490 - RNA, 17 nt, Human
cuuugagacaguuucuu

SEQ ID NO: 3472491 - RNA, 17 nt, Human
cuuugagacugggucuc

SEQ ID NO: 3472492 - RNA, 12 nt, Human
cuuugagagaga

SEQ ID NO: 3472493 - RNA, 19 nt, Human
cuuugagauagaagaacug

SEQ ID NO: 3472494 - RNA, 20 nt, Human
cuuugagauagaagaacugc

SEQ ID NO: 3472495 - RNA, 17 nt, Human
cuuugagaucuaaaaau

SEQ ID NO: 3472496 - RNA, 23 nt, Human
cuuugagcucccacuucugccag

SEQ ID NO: 3472497 - RNA, 13 nt, Human
cuuugagggacug

SEQ ID NO: 3472498 - RNA, 18 nt, Human
cuuugagggacugccucu

SEQ ID NO: 3472499 - RNA, 16 nt, Human
cuuugagguggaagag

SEQ ID NO: 3472500 - RNA, 17 nt, Human
cuuugagguggaagagg

SEQ ID NO: 3472501 - RNA, 15 nt, Human
cuuugagguugcuuu

SEQ ID NO: 3472502 - RNA, 21 nt, Human
cuuugaguagauccauuucca

SEQ ID NO: 3472503 - RNA, 13 nt, Human
cuuugagugaucc

SEQ ID NO: 3472504 - RNA, 21 nt, Human
cuuugagugucuuaauuaaaa

SEQ ID NO: 3472505 - RNA, 19 nt, Human
cuuugaguuuccucaggcu

SEQ ID NO: 3472506 - RNA, 20 nt, Human
cuuugaucaugaauaacuga

SEQ ID NO: 3472507 - RNA, 16 nt, Human
cuuugaugucaugugu

SEQ ID NO: 3472508 - RNA, 18 nt, Human
cuuugauguuaacacauu

SEQ ID NO: 3472509 - RNA, 23 nt, Human
cuuugauguuaacacauuuugua

SEQ ID NO: 3472510 - RNA, 17 nt, Human
cuuugauuaauccagaa

SEQ ID NO: 3472511 - RNA, 23 nt, Human
cuuugauuaguuuucuuguugcu

SEQ ID NO: 3472512 - RNA, 15 nt, Human
cuuugauuauuugca

SEQ ID NO: 3472513 - RNA, 24 nt, Human
cuuugauuauuugcauguuauguu

SEQ ID NO: 3472514 - RNA, 19 nt, Human
cuuugauucauaguaacuu

SEQ ID NO: 3472515 - RNA, 14 nt, Human
cuuugauucuccuu

SEQ ID NO: 3472516 - RNA, 20 nt, Human
cuuugauucuccuucagccc

SEQ ID NO: 3472517 - RNA, 15 nt, Human
cuuugcaaaggagcu

SEQ ID NO: 3472518 - RNA, 20 nt, Human
cuuugcacaggaugcuggcc

SEQ ID NO: 3472519 - RNA, 14 nt, Human
cuuugcacauuuug

SEQ ID NO: 3472520 - RNA, 23 nt, Human
cuuugcacgacgcccucucccca

SEQ ID NO: 3472521 - RNA, 14 nt, Human
cuuugcacugaggg

SEQ ID NO: 3472522 - RNA, 15 nt, Human
cuuugcacugagggc

SEQ ID NO: 3472523 - RNA, 16 nt, Human
cuuugcacugagggcc

SEQ ID NO: 3472524 - RNA, 22 nt, Human
cuuugcacugagggccacacua

SEQ ID NO: 3472525 - RNA, 23 nt, Human
cuuugcagaaacagauuugguga

SEQ ID NO: 3472526 - RNA, 13 nt, Human
cuuugcagggcag

SEQ ID NO: 3472527 - RNA, 17 nt, Human
cuuugcagguugcuuug

SEQ ID NO: 3472528 - RNA, 13 nt, Human
cuuugcauauuau

SEQ ID NO: 3472529 - RNA, 20 nt, Human
cuuugcauguuccacuaacc

SEQ ID NO: 3472530 - RNA, 16 nt, Human
cuuugcauuuggaauu

SEQ ID NO: 3472531 - RNA, 19 nt, Human
cuuugcauuuuaaaaauga

SEQ ID NO: 3472532 - RNA, 14 nt, Human
cuuugcauuuugga

SEQ ID NO: 3472533 - RNA, 20 nt, Human
cuuugccaagaccuuucaaa

SEQ ID NO: 3472534 - RNA, 17 nt, Human
cuuugccagcugcugcu

SEQ ID NO: 3472535 - RNA, 13 nt, Human
cuuugccagguga

SEQ ID NO: 3472536 - RNA, 15 nt, Human
cuuugcccaaccuca

SEQ ID NO: 3472537 - RNA, 17 nt, Human
cuuugcccaaccucagc

SEQ ID NO: 3472538 - RNA, 21 nt, Human
cuuugcccaaccucagcaacc

SEQ ID NO: 3472539 - RNA, 18 nt, Human
cuuugcccaguuggagac

SEQ ID NO: 3472540 - RNA, 21 nt, Human
cuuugcccuuuacuugucuuu

SEQ ID NO: 3472541 - RNA, 13 nt, Human
cuuugccuccccg

SEQ ID NO: 3472542 - RNA, 22 nt, Human
cuuugccuccuguguacugugu

SEQ ID NO: 3472543 - RNA, 22 nt, Human
cuuugccuguucaguuacagaa

SEQ ID NO: 3472544 - RNA, 15 nt, Human
cuuugccuucuuuug

SEQ ID NO: 3472545 - RNA, 18 nt, Human
cuuugccuugggcugcuc

SEQ ID NO: 3472546 - RNA, 22 nt, Human
cuuugccuugggcugcuccuca

SEQ ID NO: 3472547 - RNA, 17 nt, Human
cuuugcgcuccuggccc

SEQ ID NO: 3472548 - RNA, 15 nt, Human
cuuugcggacgggcu

SEQ ID NO: 3472549 - RNA, 14 nt, Human
cuuugcugacccuc

SEQ ID NO: 3472550 - RNA, 18 nt, Human
cuuugcugacccucccca

SEQ ID NO: 3472551 - RNA, 19 nt, Human
cuuugcugauuuccccucu

SEQ ID NO: 3472552 - RNA, 15 nt, Human
cuuugcugcagagaa

SEQ ID NO: 3472553 - RNA, 11 nt, Human
cuuugcugcca

SEQ ID NO: 3472554 - RNA, 22 nt, Human
cuuugcugucccauagucccug

SEQ ID NO: 3472555 - RNA, 21 nt, Human
cuuugcugugaggcuguccug

SEQ ID NO: 3472556 - RNA, 22 nt, Human
cuuugcugugaggcuguccugu

SEQ ID NO: 3472557 - RNA, 23 nt, Human
cuuugcuuaugaauauuuauaac

SEQ ID NO: 3472558 - RNA, 16 nt, Human
cuuugcuugaacacag

SEQ ID NO: 3472559 - RNA, 20 nt, Human
cuuugcuugaacacaguauu

SEQ ID NO: 3472560 - RNA, 13 nt, Human
cuuugcuugcuuu

SEQ ID NO: 3472561 - RNA, 19 nt, Human
cuuugcuugcuuugaagua

SEQ ID NO: 3472562 - RNA, 16 nt, Human
cuuugcuuuaauauaa

SEQ ID NO: 3472563 - RNA, 19 nt, Human
cuuugcuuuaauauaaaug

SEQ ID NO: 3472564 - RNA, 21 nt, Human
cuuugcuuuaauauaaaugca

SEQ ID NO: 3472565 - RNA, 15 nt, Human
cuuugcuuucugcuc

SEQ ID NO: 3472566 - RNA, 21 nt, Human
cuuugcuuucugcucagcuuc

SEQ ID NO: 3472567 - RNA, 19 nt, Human
cuuuggaaaaugcauugua

SEQ ID NO: 3472568 - RNA, 17 nt, Human
cuuuggaaacaggacca

SEQ ID NO: 3472569 - RNA, 19 nt, Human
cuuuggaaagaguaggaag

SEQ ID NO: 3472570 - RNA, 23 nt, Human
cuuuggaaagaguaggaagacuu

SEQ ID NO: 3472571 - RNA, 23 nt, Human
cuuuggaaaguacacucugcugu

SEQ ID NO: 3472572 - RNA, 19 nt, Human
cuuuggaaaguagaaaagc

SEQ ID NO: 3472573 - RNA, 16 nt, Human
cuuuggaacaagaugg

SEQ ID NO: 3472574 - RNA, 21 nt, Human
cuuuggaaccagacucuugcc

SEQ ID NO: 3472575 - RNA, 23 nt, Human
cuuuggaaccagacucuugccug

SEQ ID NO: 3472576 - RNA, 15 nt, Human
cuuuggaagaaaaaa

SEQ ID NO: 3472577 - RNA, 18 nt, Human
cuuuggacacacacagcu

SEQ ID NO: 3472578 - RNA, 19 nt, Human
cuuuggacacacacagcuu

SEQ ID NO: 3472579 - RNA, 21 nt, Human
cuuuggacacacacagcuucu

SEQ ID NO: 3472580 - RNA, 20 nt, Human
cuuuggacagaagcagcucu

SEQ ID NO: 3472581 - RNA, 20 nt, Human
cuuuggacccaaggaaaacu

SEQ ID NO: 3472582 - RNA, 15 nt, Human
cuuuggacccugagg

SEQ ID NO: 3472583 - RNA, 19 nt, Human
cuuuggacccugaggccca

SEQ ID NO: 3472584 - RNA, 20 nt, Human
cuuuggaccuaaauggccuc

SEQ ID NO: 3472585 - RNA, 18 nt, Human
cuuuggacgcacacagcu

SEQ ID NO: 3472586 - RNA, 19 nt, Human
cuuuggacgcacacagcuu

SEQ ID NO: 3472587 - RNA, 18 nt, Human
cuuuggagaugcugaggg

SEQ ID NO: 3472588 - RNA, 13 nt, Human
cuuuggagcuuuu

SEQ ID NO: 3472589 - RNA, 18 nt, Human
cuuuggaguccccucacc

SEQ ID NO: 3472590 - RNA, 22 nt, Human
cuuuggaguccccucaccuccu

SEQ ID NO: 3472591 - RNA, 14 nt, Human
cuuuggaguuaaaa

SEQ ID NO: 3472592 - RNA, 14 nt, Human
cuuuggauaauaag

SEQ ID NO: 3472593 - RNA, 13 nt, Human
cuuuggauagcau

SEQ ID NO: 3472594 - RNA, 21 nt, Human
cuuuggauucuaaauacaugc

SEQ ID NO: 3472595 - RNA, 14 nt, Human
cuuuggcagaguuc

SEQ ID NO: 3472596 - RNA, 13 nt, Human
cuuuggcaggugc

SEQ ID NO: 3472597 - RNA, 13 nt, Human
cuuuggcaguguu

SEQ ID NO: 3472598 - RNA, 15 nt, Human
gaacacuuuuaauaa

SEQ ID NO: 3472599 - RNA, 20 nt, Human
gaacagaaaacaacaaaaaa

SEQ ID NO: 3472600 - RNA, 15 nt, Human
gaacagaauguuuua

SEQ ID NO: 3472601 - RNA, 15 nt, Human
gaacagacaggagaa

SEQ ID NO: 3472602 - RNA, 18 nt, Human
gaacagacaggagaaaug

SEQ ID NO: 3472603 - RNA, 19 nt, Human
gaacagaccggagaggaca

SEQ ID NO: 3472604 - RNA, 22 nt, Human
gaacagacuggaagcacagcuu

SEQ ID NO: 3472605 - RNA, 18 nt, Human
gaacagauaaucagugug

SEQ ID NO: 3472606 - RNA, 19 nt, Human
gaacagaucuccaaagcuu

SEQ ID NO: 3472607 - RNA, 22 nt, Human
gaacagaugaccccugcccaga

SEQ ID NO: 3472608 - RNA, 21 nt, Human
gaacagauucacacugucugg

SEQ ID NO: 3472609 - RNA, 20 nt, Human
gaacagcaggcccaccuacc

SEQ ID NO: 3472610 - RNA, 19 nt, Human
gaacagcauggcacucccu

SEQ ID NO: 3472611 - RNA, 18 nt, Human
gaacagccgcuccugucu

SEQ ID NO: 3472612 - RNA, 21 nt, Human
gaacagcuaugggagccccag

SEQ ID NO: 3472613 - RNA, 13 nt, Human
gaacagcuggugu

SEQ ID NO: 3472614 - RNA, 19 nt, Human
gaacagcugguguagcuac

SEQ ID NO: 3472615 - RNA, 16 nt, Human
gaacagcuucagguua

SEQ ID NO: 3472616 - RNA, 11 nt, Human
gaacaggacua

SEQ ID NO: 3472617 - RNA, 17 nt, Human
gaacaggauauucucac

SEQ ID NO: 3472618 - RNA, 20 nt, Human
gaacagggaaaauaggcagg

SEQ ID NO: 3472619 - RNA, 16 nt, Human
gaacaggugguuuuua

SEQ ID NO: 3472620 - RNA, 18 nt, Human
gaacagugcuugccacag

SEQ ID NO: 3472621 - RNA, 22 nt, Human
gaacagugugcaaggcagccgu

SEQ ID NO: 3472622 - RNA, 17 nt, Human
gaacaguguuucccaua

SEQ ID NO: 3472623 - RNA, 21 nt, Human
gaacaguguuucccauaauuu

SEQ ID NO: 3472624 - RNA, 16 nt, Human
gaacaguuaagcagcc

SEQ ID NO: 3472625 - RNA, 20 nt, Human
gaacaguuaagcagccgcca

SEQ ID NO: 3472626 - RNA, 24 nt, Human
gaacaguuaccucugccucagaaa

SEQ ID NO: 3472627 - RNA, 14 nt, Human
gaacauaaaaagga

SEQ ID NO: 3472628 - RNA, 16 nt, Human
gaacauaauucuuauu

SEQ ID NO: 3472629 - RNA, 17 nt, Human
gaacauacaaaugcauc

SEQ ID NO: 3472630 - RNA, 22 nt, Human
gaacauacaaaugcaucuuuga

SEQ ID NO: 3472631 - RNA, 23 nt, Human
gaacauacaaaugcaucuuugau

SEQ ID NO: 3472632 - RNA, 22 nt, Human
gaacauaccccuuacaaaugaa

SEQ ID NO: 3472633 - RNA, 18 nt, Human
gaacauacuggcugguga

SEQ ID NO: 3472634 - RNA, 16 nt, Human
gaacauagacagaaga

SEQ ID NO: 3472635 - RNA, 19 nt, Human
gaacauagacuagagaaac

SEQ ID NO: 3472636 - RNA, 14 nt, Human
gaacaucacagcuu

SEQ ID NO: 3472637 - RNA, 22 nt, Human
gaacaucaucaaggcacugccu

SEQ ID NO: 3472638 - RNA, 15 nt, Human
gaacaucauuagaac

SEQ ID NO: 3472639 - RNA, 18 nt, Human
gaacauccaaccuuccca

SEQ ID NO: 3472640 - RNA, 14 nt, Human
gaacaucccuccug

SEQ ID NO: 3472641 - RNA, 14 nt, Human
gaacaucccugcca

SEQ ID NO: 3472642 - RNA, 19 nt, Human
gaacauccuuccuucccac

SEQ ID NO: 3472643 - RNA, 20 nt, Human
gaacauccuuugcagggcag

SEQ ID NO: 3472644 - RNA, 21 nt, Human
gaacauccuuugcagggcagc

SEQ ID NO: 3472645 - RNA, 19 nt, Human
gaacaucuaacccacuaga

SEQ ID NO: 3472646 - RNA, 18 nt, Human
gaacaucugaguccugga

SEQ ID NO: 3472647 - RNA, 17 nt, Human
gaacaucuguccuguga

SEQ ID NO: 3472648 - RNA, 21 nt, Human
gaacaucuuugacacucugca

SEQ ID NO: 3472649 - RNA, 16 nt, Human
gaacaugcaguuugaa

SEQ ID NO: 3472650 - RNA, 19 nt, Human
gaacauggacuuguauauu

SEQ ID NO: 3472651 - RNA, 15 nt, Human
gaacauggagagcua

SEQ ID NO: 3472652 - RNA, 18 nt, Human
gaacaugguuugacucau

SEQ ID NO: 3472653 - RNA, 22 nt, Human
gaacauguccuaauucuucugu

SEQ ID NO: 3472654 - RNA, 24 nt, Human
gaacauguccuaauucuucugucc

SEQ ID NO: 3472655 - RNA, 20 nt, Human
gaacauuccaaggaguugga

SEQ ID NO: 3472656 - RNA, 15 nt, Human
gaacauugcaauaga

SEQ ID NO: 3472657 - RNA, 17 nt, Human
gaacauuuauuuuauga

SEQ ID NO: 3472658 - RNA, 22 nt, Human
gaacauuuauuuuaugagaaau

SEQ ID NO: 3472659 - RNA, 21 nt, Human
gaacauuuggguuacuauuuc

SEQ ID NO: 3472660 - RNA, 15 nt, Human
gaacauuugugauau

SEQ ID NO: 3472661 - RNA, 20 nt, Human
gaaccaaagagacuggagca

SEQ ID NO: 3472662 - RNA, 11 nt, Human
gaaccaaagcg

SEQ ID NO: 3472663 - RNA, 13 nt, Human
gaaccaaagcuca

SEQ ID NO: 3472664 - RNA, 16 nt, Human
gaaccaaaucuggaag

SEQ ID NO: 3472665 - RNA, 13 nt, Human
gaaccaauauuug

SEQ ID NO: 3472666 - RNA, 14 nt, Human
gaaccacaagacug

SEQ ID NO: 3472667 - RNA, 21 nt, Human
gaaccacaucuugcucugcug

SEQ ID NO: 3472668 - RNA, 19 nt, Human
gaaccacauugaagaaugu

SEQ ID NO: 3472669 - RNA, 17 nt, Human
gaaccaccacacccagc

SEQ ID NO: 3472670 - RNA, 18 nt, Human
gaaccaccacacccagcc

SEQ ID NO: 3472671 - RNA, 21 nt, Human
gaaccaccacacccagcccac

SEQ ID NO: 3472672 - RNA, 22 nt, Human
gaaccaccacacccagcccacu

SEQ ID NO: 3472673 - RNA, 13 nt, Human
gaaccaccuaccc

SEQ ID NO: 3472674 - RNA, 14 nt, Human
gaaccaccuacccc

SEQ ID NO: 3472675 - RNA, 14 nt, Human
gaaccacuucccuc

SEQ ID NO: 3472676 - RNA, 18 nt, Human
gaaccacuuguagauuug

SEQ ID NO: 3472677 - RNA, 20 nt, Human
gaaccacuuguagauuugau

SEQ ID NO: 3472678 - RNA, 23 nt, Human
gaaccagaugaguaaaggaguaa

SEQ ID NO: 3472679 - RNA, 18 nt, Human
gaaccagccggggccuua

SEQ ID NO: 3472680 - RNA, 18 nt, Human
gaaccauaaaauguccag

SEQ ID NO: 3472681 - RNA, 19 nt, Human
gaaccauaaaauguccagu

SEQ ID NO: 3472682 - RNA, 15 nt, Human
gaaccauaaauucaa

SEQ ID NO: 3472683 - RNA, 20 nt, Human
gaaccauccacuuacauaua

SEQ ID NO: 3472684 - RNA, 16 nt, Human
gaaccaugaagacagg

SEQ ID NO: 3472685 - RNA, 17 nt, Human
gaaccaugaagacagga

SEQ ID NO: 3472686 - RNA, 21 nt, Human
gaaccauguugguugcacuuu

SEQ ID NO: 3472687 - RNA, 17 nt, Human
gaacccaaguccaagca

SEQ ID NO: 3472688 - RNA, 14 nt, Human
gaacccacacugca

SEQ ID NO: 3472689 - RNA, 13 nt, Human
gaacccaccugcu

SEQ ID NO: 3472690 - RNA, 18 nt, Human
gaacccagcaguucuguu

SEQ ID NO: 3472691 - RNA, 16 nt, Human
gaacccagcccacccc

SEQ ID NO: 3472692 - RNA, 18 nt, Human
gaacccagcccacccccg

SEQ ID NO: 3472693 - RNA, 19 nt, Human
gaacccaggacaagcaugg

SEQ ID NO: 3472694 - RNA, 17 nt, Human
gaacccaggacgcuucu

SEQ ID NO: 3472695 - RNA, 20 nt, Human
gaacccauggaaaaaugcca

SEQ ID NO: 3472696 - RNA, 21 nt, Human
gaaccccccucccacccaccg

SEQ ID NO: 3472697 - RNA, 20 nt, Human
gaaccccggggugcccacag

SEQ ID NO: 3472698 - RNA, 22 nt, Human
gaaccccuggcuccaggccagg

SEQ ID NO: 3472699 - RNA, 20 nt, Human
gaacccgggagcggagguug

SEQ ID NO: 3472700 - RNA, 17 nt, Human
gaacccgggaggcagag

SEQ ID NO: 3472701 - RNA, 16 nt, Human
gaacccugccauggaa

SEQ ID NO: 3472702 - RNA, 16 nt, Human
gaacccugcccacucc

SEQ ID NO: 3472703 - RNA, 18 nt, Human
gaacccugcguggggaca

SEQ ID NO: 3472704 - RNA, 19 nt, Human
gaacccugcguggggacag

SEQ ID NO: 3472705 - RNA, 21 nt, Human
gaacccuggggccugacugcu

SEQ ID NO: 3472706 - RNA, 22 nt, Human
gaacccuggugaggaagcucca

SEQ ID NO: 3472707 - RNA, 16 nt, Human
gaacccuuggcuugcc

SEQ ID NO: 3472708 - RNA, 17 nt, Human
gaacccuuggcuugccc

SEQ ID NO: 3472709 - RNA, 17 nt, Human
gaacccuuuuggccccc

SEQ ID NO: 3472710 - RNA, 19 nt, Human
gaacccuuuuggcccccga

SEQ ID NO: 3472711 - RNA, 14 nt, Human
gaaccgaaaggcca

SEQ ID NO: 3472712 - RNA, 17 nt, Human
gaaccgagcaaagauca

SEQ ID NO: 3472713 - RNA, 19 nt, Human
gaaccgagcaaagaucaaa

SEQ ID NO: 3472714 - RNA, 12 nt, Human
gaaccgaggcag

SEQ ID NO: 3472715 - RNA, 22 nt, Human
gaaccgagggggcugcucccac

SEQ ID NO: 3472716 - RNA, 21 nt, Human
gaaccgcacagcucaggaggc

SEQ ID NO: 3472717 - RNA, 14 nt, Human
gaaccgcaggaagc

SEQ ID NO: 3472718 - RNA, 15 nt, Human
gaaccgcaggaagcu

SEQ ID NO: 3472719 - RNA, 17 nt, Human
gaaccgcucaccuagag

SEQ ID NO: 3472720 - RNA, 18 nt, Human
gaaccgcucaccuagagc

SEQ ID NO: 3472721 - RNA, 20 nt, Human
gaaccuaacuccccacccca

SEQ ID NO: 3472722 - RNA, 14 nt, Human
gaaccuaacuguau

SEQ ID NO: 3472723 - RNA, 23 nt, Human
gaaccuacaguuuuaacugugga

SEQ ID NO: 3472724 - RNA, 18 nt, Human
gaaccuauuucucuuucu

SEQ ID NO: 3472725 - RNA, 16 nt, Human
gaaccucacgcaccuc

SEQ ID NO: 3472726 - RNA, 18 nt, Human
gaaccucacgcaccuccc

SEQ ID NO: 3472727 - RNA, 21 nt, Human
gaaccucacgcaccucccauc

SEQ ID NO: 3472728 - RNA, 18 nt, Human
gaaccucagccuggccag

SEQ ID NO: 3472729 - RNA, 19 nt, Human
gaaccucagccuggccaga

SEQ ID NO: 3472730 - RNA, 21 nt, Human
gaaccucagccuggccagaca

SEQ ID NO: 3472731 - RNA, 11 nt, Human
gaaccucaggc

SEQ ID NO: 3472732 - RNA, 18 nt, Human
gaaccucaggcuuccuug

SEQ ID NO: 3472733 - RNA, 12 nt, Human
gaaccucccaga

SEQ ID NO: 3472734 - RNA, 13 nt, Human
gaaccucccagag

SEQ ID NO: 3472735 - RNA, 18 nt, Human
gaaccucccagaggucca

SEQ ID NO: 3472736 - RNA, 19 nt, Human
gaaccucccagagguccag

SEQ ID NO: 3472737 - RNA, 16 nt, Human
gaaccuccccagccug

SEQ ID NO: 3472738 - RNA, 14 nt, Human
gaaccuccucugug

SEQ ID NO: 3472739 - RNA, 16 nt, Human
gaaccucgaguacugu

SEQ ID NO: 3472740 - RNA, 17 nt, Human
gaaccucgaguacugug

SEQ ID NO: 3472741 - RNA, 15 nt, Human
gaacuugcugcuguc

SEQ ID NO: 3472742 - RNA, 19 nt, Human
gaacuuggaaagaaaugcc

SEQ ID NO: 3472743 - RNA, 17 nt, Human
gaacuuggggaacaagg

SEQ ID NO: 3472744 - RNA, 19 nt, Human
gaacuuggugccuaauguu

SEQ ID NO: 3472745 - RNA, 22 nt, Human
gaacuuguaaaggaauuuaaaa

SEQ ID NO: 3472746 - RNA, 14 nt, Human
gaacuuguagcugu

SEQ ID NO: 3472747 - RNA, 14 nt, Human
gaacuuguuuaaua

SEQ ID NO: 3472748 - RNA, 23 nt, Human
gaacuuucauuuuuuuccaggcu

SEQ ID NO: 3472749 - RNA, 17 nt, Human
gaacuuuccaggaaggc

SEQ ID NO: 3472750 - RNA, 21 nt, Human
gaacuuucucuucauacuuuu

SEQ ID NO: 3472751 - RNA, 15 nt, Human
gaacuuugaagaccc

SEQ ID NO: 3472752 - RNA, 14 nt, Human
gaacuuugaaggac

SEQ ID NO: 3472753 - RNA, 22 nt, Human
gaacuuugaccucugcagcaau

SEQ ID NO: 3472754 - RNA, 12 nt, Human
gaacuuuguaua

SEQ ID NO: 3472755 - RNA, 15 nt, Human
gaacuuuguauaguu

SEQ ID NO: 3472756 - RNA, 16 nt, Human
gaacuuuuuauugauu

SEQ ID NO: 3472757 - RNA, 17 nt, Human
gaacuuuuuuaaauaaa

SEQ ID NO: 3472758 - RNA, 18 nt, Human
gaacuuuuuuaaauaaac

SEQ ID NO: 3472759 - RNA, 21 nt, Human
gaacuuuuuuaaauaaacuuu

SEQ ID NO: 3472760 - RNA, 22 nt, Human
gaacuuuuuuaaauaaacuuuu

SEQ ID NO: 3472761 - RNA, 11 nt, Human
gaagaaaaaaa

SEQ ID NO: 3472762 - RNA, 17 nt, Human
gaagaaaaaaaauaaca

SEQ ID NO: 3472763 - RNA, 13 nt, Human
gaagaaaaaauac

SEQ ID NO: 3472764 - RNA, 13 nt, Human
gaagaaaaagaag

SEQ ID NO: 3472765 - RNA, 19 nt, Human
gaagaaaacacuguuauca

SEQ ID NO: 3472766 - RNA, 9 nt, Human
gaagaaaag

SEQ ID NO: 3472767 - RNA, 12 nt, Human
gaagaaaauacu

SEQ ID NO: 3472768 - RNA, 19 nt, Human
gaagaaaauacuuaaaugu

SEQ ID NO: 3472769 - RNA, 20 nt, Human
gaagaaacaagguuuucagu

SEQ ID NO: 3472770 - RNA, 16 nt, Human
gaagaaagaacggaag

SEQ ID NO: 3472771 - RNA, 18 nt, Human
gaagaaaucacagaauca

SEQ ID NO: 3472772 - RNA, 22 nt, Human
gaagaaaucacagaaucauaug

SEQ ID NO: 3472773 - RNA, 21 nt, Human
gaagaaauguaguuuacauuu

SEQ ID NO: 3472774 - RNA, 18 nt, Human
gaagaaauuccuguagca

SEQ ID NO: 3472775 - RNA, 19 nt, Human
gaagaacaggccucuccau

SEQ ID NO: 3472776 - RNA, 13 nt, Human
gaagaaccagucc

SEQ ID NO: 3472777 - RNA, 19 nt, Human
gaagaaccaguccccccac

SEQ ID NO: 3472778 - RNA, 22 nt, Human
gaagaaccaguccccccacccu

SEQ ID NO: 3472779 - RNA, 13 nt, Human
gaagaacggggcu

SEQ ID NO: 3472780 - RNA, 20 nt, Human
gaagaacggggcucuucuca

SEQ ID NO: 3472781 - RNA, 22 nt, Human
gaagaacggggcucuucucauu

SEQ ID NO: 3472782 - RNA, 23 nt, Human
gaagaacggggcucuucucauuu

SEQ ID NO: 3472783 - RNA, 22 nt, Human
gaagaacuguguuucaaguuca

SEQ ID NO: 3472784 - RNA, 16 nt, Human
gaagaagaaaaaaacg

SEQ ID NO: 3472785 - RNA, 12 nt, Human
gaagaagaaaag

SEQ ID NO: 3472786 - RNA, 13 nt, Human
gaagaagaagaaa

SEQ ID NO: 3472787 - RNA, 15 nt, Human
gaagaagagccacag

SEQ ID NO: 3472788 - RNA, 14 nt, Human
gaagaagcagagag

SEQ ID NO: 3472789 - RNA, 17 nt, Human
gaagaagcuuaggcagg

SEQ ID NO: 3472790 - RNA, 21 nt, Human
gaagaaggaaaugaauuucuc

SEQ ID NO: 3472791 - RNA, 16 nt, Human
gaagaagggcacccua

SEQ ID NO: 3472792 - RNA, 21 nt, Human
gaagaagguggaccuuuuaaa

SEQ ID NO: 3472793 - RNA, 23 nt, Human
gaagaagguggaccuuuuaaagu

SEQ ID NO: 3472794 - RNA, 19 nt, Human
gaagaaguuucaucauuuu

SEQ ID NO: 3472795 - RNA, 18 nt, Human
gaagaauacaaacauauu

SEQ ID NO: 3472796 - RNA, 23 nt, Human
gaagaauagggcccaugggaggg

SEQ ID NO: 3472797 - RNA, 19 nt, Human
gaagaauauucaggacuua

SEQ ID NO: 3472798 - RNA, 19 nt, Human
gaagaauccuuuuguagaa

SEQ ID NO: 3472799 - RNA, 20 nt, Human
gaagaaucuguuucccagca

SEQ ID NO: 3472800 - RNA, 23 nt, Human
gaagaaugcacaagaauggauca

SEQ ID NO: 3472801 - RNA, 18 nt, Human
gaagaauguguuucaaac

SEQ ID NO: 3472802 - RNA, 19 nt, Human
gaagaauguuagaguaaug

SEQ ID NO: 3472803 - RNA, 16 nt, Human
gaagaauuaagauaca

SEQ ID NO: 3472804 - RNA, 23 nt, Human
gaagaauuuacuuuggaaaguag

SEQ ID NO: 3472805 - RNA, 13 nt, Human
gaagaauuuguua

SEQ ID NO: 3472806 - RNA, 13 nt, Human
gaagaauuuuaaa

SEQ ID NO: 3472807 - RNA, 23 nt, Human
gaagaauuuuaaaaaugaauccu

SEQ ID NO: 3472808 - RNA, 16 nt, Human
gaagacaaugacuuac

SEQ ID NO: 3472809 - RNA, 18 nt, Human
gaagacaauugacaacag

SEQ ID NO: 3472810 - RNA, 18 nt, Human
gaagacaauuugauacau

SEQ ID NO: 3472811 - RNA, 12 nt, Human
gaagacacagac

SEQ ID NO: 3472812 - RNA, 18 nt, Human
gaagacaccagagcagau

SEQ ID NO: 3472813 - RNA, 22 nt, Human
gaagacaccagagcagaugcag

SEQ ID NO: 3472814 - RNA, 13 nt, Human
gaagacagagcua

SEQ ID NO: 3472815 - RNA, 12 nt, Human
gaagacaggaaa

SEQ ID NO: 3472816 - RNA, 12 nt, Human
gaagacaguggc

SEQ ID NO: 3472817 - RNA, 20 nt, Human
gaagacauggagacuccugc

SEQ ID NO: 3472818 - RNA, 12 nt, Human
gaagacauguuu

SEQ ID NO: 3472819 - RNA, 14 nt, Human
gaagacauugcacc

SEQ ID NO: 3472820 - RNA, 15 nt, Human
gaagacauuucuuuu

SEQ ID NO: 3472821 - RNA, 23 nt, Human
gaagaccaaucucuugaauccca

SEQ ID NO: 3472822 - RNA, 22 nt, Human
gaagaccacauccacacacgca

SEQ ID NO: 3472823 - RNA, 19 nt, Human
gaagacccaacacauggga

SEQ ID NO: 3472824 - RNA, 22 nt, Human
gaagacccauuccuucccagag

SEQ ID NO: 3472825 - RNA, 14 nt, Human
gaagacccuccccg

SEQ ID NO: 3472826 - RNA, 17 nt, Human
gaagacccucuugccca

SEQ ID NO: 3472827 - RNA, 20 nt, Human
gaagaccuaaccagggccag

SEQ ID NO: 3472828 - RNA, 19 nt, Human
gaagaccucaccuagaaau

SEQ ID NO: 3472829 - RNA, 22 nt, Human
gaagaccuggcaaggacacaga

SEQ ID NO: 3472830 - RNA, 17 nt, Human
gaagaccuuuuucugca

SEQ ID NO: 3472831 - RNA, 22 nt, Human
gaagacgaggcccucgggccca

SEQ ID NO: 3472832 - RNA, 23 nt, Human
gaagacgaggcccucgggcccag

SEQ ID NO: 3472833 - RNA, 21 nt, Human
gaagacgccgucuccauggca

SEQ ID NO: 3472834 - RNA, 15 nt, Human
gaagacgccugagcu

SEQ ID NO: 3472835 - RNA, 18 nt, Human
gaagacucauucuucugu

SEQ ID NO: 3472836 - RNA, 15 nt, Human
gaagacuccagaaau

SEQ ID NO: 3472837 - RNA, 15 nt, Human
gaagacucuaccaga

SEQ ID NO: 3472838 - RNA, 23 nt, Human
gaagacucuaccagacuguguau

SEQ ID NO: 3472839 - RNA, 16 nt, Human
gaagacuggaagcuaa

SEQ ID NO: 3472840 - RNA, 17 nt, Human
gaagacuggaagcuaau

SEQ ID NO: 3472841 - RNA, 11 nt, Human
gaagacugugg

SEQ ID NO: 3472842 - RNA, 12 nt, Human
gaagagaaacag

SEQ ID NO: 3472843 - RNA, 15 nt, Human
gaagagaaccagcca

SEQ ID NO: 3472844 - RNA, 14 nt, Human
gaagagaagcugcu

SEQ ID NO: 3472845 - RNA, 15 nt, Human
gaagagaagcugcug

SEQ ID NO: 3472846 - RNA, 16 nt, Human
gaagagaagcugcuga

SEQ ID NO: 3472847 - RNA, 12 nt, Human
gaagagaaggag

SEQ ID NO: 3472848 - RNA, 14 nt, Human
gaagagaaggagca

SEQ ID NO: 3472849 - RNA, 17 nt, Human
gaagagaagggcagggc

SEQ ID NO: 3472850 - RNA, 19 nt, Human
gaagagaaugcacaaacag

SEQ ID NO: 3472851 - RNA, 23 nt, Human
gaagagacguuuaaaagccauca

SEQ ID NO: 3472852 - RNA, 19 nt, Human
gaagagagauauaucugaa

SEQ ID NO: 3472853 - RNA, 23 nt, Human
gaagagagauauaucugaaaacu

SEQ ID NO: 3472854 - RNA, 16 nt, Human
gaagagagaucaaaug

SEQ ID NO: 3472855 - RNA, 19 nt, Human
gaagagagaucaaauggaa

SEQ ID NO: 3472856 - RNA, 19 nt, Human
gaagagaggaguucaauga

SEQ ID NO: 3472857 - RNA, 21 nt, Human
gaagagaggaguucaaugauc

SEQ ID NO: 3472858 - RNA, 15 nt, Human
gaagagauccaaaga

SEQ ID NO: 3472859 - RNA, 16 nt, Human
gaagagcaaaaauauc

SEQ ID NO: 3472860 - RNA, 15 nt, Human
gaagagcacagcccu

SEQ ID NO: 3472861 - RNA, 12 nt, Human
gaagagcagccc

SEQ ID NO: 3472862 - RNA, 18 nt, Human
gaagagcaggacuccagg

SEQ ID NO: 3472863 - RNA, 23 nt, Human
gaagagcaggacuccaggcccaa

SEQ ID NO: 3472864 - RNA, 19 nt, Human
gaagagccccacucucaga

SEQ ID NO: 3472865 - RNA, 20 nt, Human
gaagagccccacucucagag

SEQ ID NO: 3472866 - RNA, 17 nt, Human
gaagagccuuccaccca

SEQ ID NO: 3472867 - RNA, 22 nt, Human
gaagagcgagagaucaaagaug

SEQ ID NO: 3472868 - RNA, 15 nt, Human
gaagagcucaaggga

SEQ ID NO: 3472869 - RNA, 23 nt, Human
gaagagcucaagggacaaggaca

SEQ ID NO: 3472870 - RNA, 22 nt, Human
gaagagcuccccuacggaccag

SEQ ID NO: 3472871 - RNA, 23 nt, Human
gaagagcuguucacagccagacu

SEQ ID NO: 3472872 - RNA, 17 nt, Human
gaagagcuuagaaacug

SEQ ID NO: 3472873 - RNA, 14 nt, Human
gaagagcuugcuuu

SEQ ID NO: 3472874 - RNA, 20 nt, Human
gaagagcuugcuuugauuua

SEQ ID NO: 3472875 - RNA, 17 nt, Human
gaagaggaaaaggcugg

SEQ ID NO: 3472876 - RNA, 15 nt, Human
gaagaggaaaaugaa

SEQ ID NO: 3472877 - RNA, 16 nt, Human
gaagaggcagauucaa

SEQ ID NO: 3472878 - RNA, 19 nt, Human
gaagaggcgggccagccag

SEQ ID NO: 3472879 - RNA, 11 nt, Human
gaagaggcuuc

SEQ ID NO: 3472880 - RNA, 20 nt, Human
gaagagggagaagcaugaaa

SEQ ID NO: 3472881 - RNA, 20 nt, Human
gaagagggccugugggagcc

SEQ ID NO: 3472882 - RNA, 12 nt, Human
gaagagggcugc

SEQ ID NO: 3472883 - RNA, 18 nt, Human
gaagaggggcagcccuug

SEQ ID NO: 3472884 - RNA, 23 nt, Human
gaagaguaagucaaccugccuga

SEQ ID NO: 3472885 - RNA, 20 nt, Human
gaagcggcccuaagggagug

SEQ ID NO: 3472886 - RNA, 14 nt, Human
gaagcggcuggcag

SEQ ID NO: 3472887 - RNA, 14 nt, Human
gaagcguauguuuu

SEQ ID NO: 3472888 - RNA, 13 nt, Human
gaagcguuguccu

SEQ ID NO: 3472889 - RNA, 14 nt, Human
gaagcuaacaggga

SEQ ID NO: 3472890 - RNA, 20 nt, Human
gaagcuaacagggaaggcag

SEQ ID NO: 3472891 - RNA, 21 nt, Human
gaagcuaacagggaaggcagg

SEQ ID NO: 3472892 - RNA, 14 nt, Human
gaagcuacagguua

SEQ ID NO: 3472893 - RNA, 19 nt, Human
gaagcuacagguuacaaca

SEQ ID NO: 3472894 - RNA, 22 nt, Human
gaagcuacagguuacaacagau

SEQ ID NO: 3472895 - RNA, 15 nt, Human
gaagcuacugugugu

SEQ ID NO: 3472896 - RNA, 20 nt, Human
gaagcuacugugugugugaa

SEQ ID NO: 3472897 - RNA, 15 nt, Human
gaagcuacuucucca

SEQ ID NO: 3472898 - RNA, 19 nt, Human
gaagcuacuuuguuuuuaa

SEQ ID NO: 3472899 - RNA, 14 nt, Human
gaagcuagcucccc

SEQ ID NO: 3472900 - RNA, 17 nt, Human
gaagcuagcuccccucc

SEQ ID NO: 3472901 - RNA, 22 nt, Human
gaagcuagcuccccuccucucc

SEQ ID NO: 3472902 - RNA, 13 nt, Human
gaagcucagccca

SEQ ID NO: 3472903 - RNA, 14 nt, Human
gaagcucagcccac

SEQ ID NO: 3472904 - RNA, 18 nt, Human
gaagcucagcccaccccc

SEQ ID NO: 3472905 - RNA, 22 nt, Human
gaagcucagcccaccccccuca

SEQ ID NO: 3472906 - RNA, 23 nt, Human
gaagcucagggccuggcucaggu

SEQ ID NO: 3472907 - RNA, 18 nt, Human
gaagcuccacugucaccc

SEQ ID NO: 3472908 - RNA, 19 nt, Human
gaagcuccacugucacccu

SEQ ID NO: 3472909 - RNA, 23 nt, Human
gaagcuccacugucacccuccac

SEQ ID NO: 3472910 - RNA, 19 nt, Human
gaagcuccaguccugcucu

SEQ ID NO: 3472911 - RNA, 12 nt, Human
gaagcuccccca

SEQ ID NO: 3472912 - RNA, 19 nt, Human
gaagcuccucuccccagcc

SEQ ID NO: 3472913 - RNA, 21 nt, Human
gaagcuccucuccccagccca

SEQ ID NO: 3472914 - RNA, 13 nt, Human
gaagcuccuggua

SEQ ID NO: 3472915 - RNA, 13 nt, Human
gaagcucugaagu

SEQ ID NO: 3472916 - RNA, 15 nt, Human
gaagcucugaaguca

SEQ ID NO: 3472917 - RNA, 20 nt, Human
gaagcucugaagucacauca

SEQ ID NO: 3472918 - RNA, 19 nt, Human
gaagcucuggcugaacccu

SEQ ID NO: 3472919 - RNA, 18 nt, Human
gaagcucuugaagacacu

SEQ ID NO: 3472920 - RNA, 22 nt, Human
gaagcugaaaaccuaaguccuu

SEQ ID NO: 3472921 - RNA, 14 nt, Human
gaagcugaaaauau

SEQ ID NO: 3472922 - RNA, 15 nt, Human
gaagcugaaaauaua

SEQ ID NO: 3472923 - RNA, 18 nt, Human
gaagcugacgaacuucca

SEQ ID NO: 3472924 - RNA, 12 nt, Human
gaagcugcagcu

SEQ ID NO: 3472925 - RNA, 13 nt, Human
gaagcugcaucca

SEQ ID NO: 3472926 - RNA, 18 nt, Human
gaagcugcauccagaggc

SEQ ID NO: 3472927 - RNA, 21 nt, Human
gaagcugccaggugagaaacu

SEQ ID NO: 3472928 - RNA, 16 nt, Human
gaagcugcccugccca

SEQ ID NO: 3472929 - RNA, 14 nt, Human
gaagcugcucaacu

SEQ ID NO: 3472930 - RNA, 13 nt, Human
gaagcugcuccag

SEQ ID NO: 3472931 - RNA, 17 nt, Human
gaagcuggccgaggguc

SEQ ID NO: 3472932 - RNA, 19 nt, Human
gaagcuggccugagagggg

SEQ ID NO: 3472933 - RNA, 21 nt, Human
gaagcuguuguacauuuauga

SEQ ID NO: 3472934 - RNA, 15 nt, Human
gaagcuguuuggaaa

SEQ ID NO: 3472935 - RNA, 18 nt, Human
gaagcuguuuggaaaaga

SEQ ID NO: 3472936 - RNA, 17 nt, Human
gaagcuuauuaaugcua

SEQ ID NO: 3472937 - RNA, 15 nt, Human
gaagcuucagaaguu

SEQ ID NO: 3472938 - RNA, 13 nt, Human
gaagcuuccaguc

SEQ ID NO: 3472939 - RNA, 23 nt, Human
gaagcuucugucuccagcuuccc

SEQ ID NO: 3472940 - RNA, 23 nt, Human
gaagcuucuuaaaugagaaggaa

SEQ ID NO: 3472941 - RNA, 15 nt, Human
gaagcuugacuccca

SEQ ID NO: 3472942 - RNA, 22 nt, Human
gaagcuuguguauccauuauca

SEQ ID NO: 3472943 - RNA, 12 nt, Human
gaagcuuuacca

SEQ ID NO: 3472944 - RNA, 18 nt, Human
gaagcuuuaccagcugaa

SEQ ID NO: 3472945 - RNA, 14 nt, Human
gaagcuuucaguau

SEQ ID NO: 3472946 - RNA, 20 nt, Human
gaagcuuuggugagaaccug

SEQ ID NO: 3472947 - RNA, 11 nt, Human
gaaggaaaaau

SEQ ID NO: 3472948 - RNA, 14 nt, Human
gaaggaaacccagc

SEQ ID NO: 3472949 - RNA, 21 nt, Human
gaaggaaacccagcucugguc

SEQ ID NO: 3472950 - RNA, 17 nt, Human
gaaggaaauaaaaaagu

SEQ ID NO: 3472951 - RNA, 22 nt, Human
gaaggaacucuggcuuccaggu

SEQ ID NO: 3472952 - RNA, 19 nt, Human
gaaggaagacuucaucccu

SEQ ID NO: 3472953 - RNA, 13 nt, Human
gaaggaagacuuu

SEQ ID NO: 3472954 - RNA, 20 nt, Human
gaaggaagccggggaagaga

SEQ ID NO: 3472955 - RNA, 19 nt, Human
gaaggaauauauggcagag

SEQ ID NO: 3472956 - RNA, 15 nt, Human
gaaggaauugacuuc

SEQ ID NO: 3472957 - RNA, 15 nt, Human
gaaggacacuuccug

SEQ ID NO: 3472958 - RNA, 18 nt, Human
gaaggacacuuccugccu

SEQ ID NO: 3472959 - RNA, 15 nt, Human
gaaggacagaaagga

SEQ ID NO: 3472960 - RNA, 21 nt, Human
gaaggacauugcggacagcca

SEQ ID NO: 3472961 - RNA, 20 nt, Human
gaaggaccacauuuuauauu

SEQ ID NO: 3472962 - RNA, 22 nt, Human
gaaggaccacauuuuauauuua

SEQ ID NO: 3472963 - RNA, 15 nt, Human
gaaggaccagcccuu

SEQ ID NO: 3472964 - RNA, 22 nt, Human
gaaggacccggaggggccuggc

SEQ ID NO: 3472965 - RNA, 23 nt, Human
gaaggacccggaggggccuggca

SEQ ID NO: 3472966 - RNA, 17 nt, Human
gaaggaccuauguuugc

SEQ ID NO: 3472967 - RNA, 16 nt, Human
gaaggaccuucacucu

SEQ ID NO: 3472968 - RNA, 20 nt, Human
gaaggacggguuggggccgg

SEQ ID NO: 3472969 - RNA, 21 nt, Human
gaaggacugugacaggcagca

SEQ ID NO: 3472970 - RNA, 16 nt, Human
gaaggagaaggaagga

SEQ ID NO: 3472971 - RNA, 18 nt, Human
gaaggagaaucaucagga

SEQ ID NO: 3472972 - RNA, 22 nt, Human
gaaggagaaucaucaggacccu

SEQ ID NO: 3472973 - RNA, 13 nt, Human
gaaggagacacag

SEQ ID NO: 3472974 - RNA, 14 nt, Human
gaaggagacacaga

SEQ ID NO: 3472975 - RNA, 17 nt, Human
gaaggagacacagaugu

SEQ ID NO: 3472976 - RNA, 15 nt, Human
gaaggagacaggcag

SEQ ID NO: 3472977 - RNA, 22 nt, Human
gaaggagacucaccucugccuc

SEQ ID NO: 3472978 - RNA, 12 nt, Human
gaaggagagaaa

SEQ ID NO: 3472979 - RNA, 17 nt, Human
gaaggagauagggaaaa

SEQ ID NO: 3472980 - RNA, 20 nt, Human
gaaggagccccauuccuggg

SEQ ID NO: 3472981 - RNA, 16 nt, Human
gaaggagcugccugga

SEQ ID NO: 3472982 - RNA, 17 nt, Human
gaaggagcugccuggac

SEQ ID NO: 3472983 - RNA, 16 nt, Human
gaaggaggagccuguc

SEQ ID NO: 3472984 - RNA, 12 nt, Human
gaaggaggccac

SEQ ID NO: 3472985 - RNA, 17 nt, Human
gaaggaggccaccuccu

SEQ ID NO: 3472986 - RNA, 21 nt, Human
gaaggaggcuaugcucagggg

SEQ ID NO: 3472987 - RNA, 18 nt, Human
gaaggaggcuccaggcag

SEQ ID NO: 3472988 - RNA, 19 nt, Human
gaaggaggcuccaggcagc

SEQ ID NO: 3472989 - RNA, 16 nt, Human
gaaggaggggaagcug

SEQ ID NO: 3472990 - RNA, 20 nt, Human
gaaggaggguacagcugggc

SEQ ID NO: 3472991 - RNA, 13 nt, Human
gaaggaguuuuau

SEQ ID NO: 3472992 - RNA, 19 nt, Human
gaaggaucccaugagcucc

SEQ ID NO: 3472993 - RNA, 21 nt, Human
gaaggaugaugucuuuuuauu

SEQ ID NO: 3472994 - RNA, 16 nt, Human
gaaggcaaaugacuuu

SEQ ID NO: 3472995 - RNA, 17 nt, Human
gaaggcaagagggggug

SEQ ID NO: 3472996 - RNA, 23 nt, Human
gaaggcaagaggggguggagggg

SEQ ID NO: 3472997 - RNA, 14 nt, Human
gaaggcaagccagg

SEQ ID NO: 3472998 - RNA, 18 nt, Human
gaaggcagaaagcaaaau

SEQ ID NO: 3472999 - RNA, 14 nt, Human
gaaggcagacagca

SEQ ID NO: 3473000 - RNA, 19 nt, Human
gaaggcagacagcaggcag

SEQ ID NO: 3473001 - RNA, 20 nt, Human
gaaggcagacagcaggcagc

SEQ ID NO: 3473002 - RNA, 21 nt, Human
gaaggcagacagcaggcagcg

SEQ ID NO: 3473003 - RNA, 13 nt, Human
gaaggcagagaaa

SEQ ID NO: 3473004 - RNA, 14 nt, Human
gaaggcagagaaau

SEQ ID NO: 3473005 - RNA, 13 nt, Human
gaaggcaggcagg

SEQ ID NO: 3473006 - RNA, 14 nt, Human
gaaggcaggcaggg

SEQ ID NO: 3473007 - RNA, 16 nt, Human
gaaggcaggcagggcu

SEQ ID NO: 3473008 - RNA, 13 nt, Human
gaaggcagggaaa

SEQ ID NO: 3473009 - RNA, 17 nt, Human
gaaggcagggaggaggc

SEQ ID NO: 3473010 - RNA, 18 nt, Human
gaaggcagggaggaggca

SEQ ID NO: 3473011 - RNA, 18 nt, Human
gaaggcagggagggccug

SEQ ID NO: 3473012 - RNA, 20 nt, Human
gaaggcagggagggccuggg

SEQ ID NO: 3473013 - RNA, 22 nt, Human
gaaggcagggggaagguggggu

SEQ ID NO: 3473014 - RNA, 13 nt, Human
gaaggcauggcgg

SEQ ID NO: 3473015 - RNA, 16 nt, Human
gaaggccaccugcagg

SEQ ID NO: 3473016 - RNA, 22 nt, Human
gaaggccagcugccccagccag

SEQ ID NO: 3473017 - RNA, 22 nt, Human
gaaggcccagcaccacccuccu

SEQ ID NO: 3473018 - RNA, 15 nt, Human
gaaggccccgcccag

SEQ ID NO: 3473019 - RNA, 18 nt, Human
gaaggccccgcccaggcu

SEQ ID NO: 3473020 - RNA, 19 nt, Human
gaaggccccgcccaggcuu

SEQ ID NO: 3473021 - RNA, 16 nt, Human
gaaggcccugcugagu

SEQ ID NO: 3473022 - RNA, 18 nt, Human
gaaggcccugcugaguca

SEQ ID NO: 3473023 - RNA, 15 nt, Human
gaaggccucgcagga

SEQ ID NO: 3473024 - RNA, 12 nt, Human
gaaggccucuug

SEQ ID NO: 3473025 - RNA, 13 nt, Human
gaaggccugacuu

SEQ ID NO: 3473026 - RNA, 14 nt, Human
gaaggcuaaaaagc

SEQ ID NO: 3473027 - RNA, 22 nt, Human
gaaggcuacuucggggcuggga

SEQ ID NO: 3473028 - RNA, 18 nt, Human
gaaggcuggcaugaucca

SEQ ID NO: 3473029 - RNA, 17 nt, Human
gaaggcuguccuuaccc

SEQ ID NO: 3473030 - RNA, 17 nt, Human
gaagugugggucugugu

SEQ ID NO: 3473031 - RNA, 19 nt, Human
gaagugugggucugugugu

SEQ ID NO: 3473032 - RNA, 13 nt, Human
gaaguguugcaug

SEQ ID NO: 3473033 - RNA, 15 nt, Human
gaaguguugcaugga

SEQ ID NO: 3473034 - RNA, 18 nt, Human
gaaguguugcauggaugu

SEQ ID NO: 3473035 - RNA, 16 nt, Human
gaaguguuuauguugu

SEQ ID NO: 3473036 - RNA, 21 nt, Human
gaaguguuucacgagagcccg

SEQ ID NO: 3473037 - RNA, 15 nt, Human
gaaguuaaagggaag

SEQ ID NO: 3473038 - RNA, 15 nt, Human
gaaguuaacagagac

SEQ ID NO: 3473039 - RNA, 22 nt, Human
gaaguuacacagaaaugcugcu

SEQ ID NO: 3473040 - RNA, 21 nt, Human
gaaguuacuguuacuugauaa

SEQ ID NO: 3473041 - RNA, 21 nt, Human
gaaguuagccuuuaucuacca

SEQ ID NO: 3473042 - RNA, 22 nt, Human
gaaguuagccuuuaucuaccaa

SEQ ID NO: 3473043 - RNA, 17 nt, Human
gaaguuaguuuguauau

SEQ ID NO: 3473044 - RNA, 15 nt, Human
gaaguucaagaucaa

SEQ ID NO: 3473045 - RNA, 15 nt, Human
gaaguucauaccuaa

SEQ ID NO: 3473046 - RNA, 22 nt, Human
gaaguucauaccuaaguacugu

SEQ ID NO: 3473047 - RNA, 17 nt, Human
gaaguucugccucugau

SEQ ID NO: 3473048 - RNA, 17 nt, Human
gaaguugaaguuuagga

SEQ ID NO: 3473049 - RNA, 18 nt, Human
gaaguugauauagaacag

SEQ ID NO: 3473050 - RNA, 21 nt, Human
gaaguugauauagaacagugc

SEQ ID NO: 3473051 - RNA, 20 nt, Human
gaaguugcauuccuuugucu

SEQ ID NO: 3473052 - RNA, 21 nt, Human
gaaguugcugcuucucccagg

SEQ ID NO: 3473053 - RNA, 22 nt, Human
gaaguuggagugaguguggcuc

SEQ ID NO: 3473054 - RNA, 18 nt, Human
gaaguugggcaauauaac

SEQ ID NO: 3473055 - RNA, 20 nt, Human
gaaguugugccuuuuauagc

SEQ ID NO: 3473056 - RNA, 20 nt, Human
gaaguuguggauuucaguuu

SEQ ID NO: 3473057 - RNA, 14 nt, Human
gaaguuguuuguca

SEQ ID NO: 3473058 - RNA, 13 nt, Human
gaaguuuaaaaca

SEQ ID NO: 3473059 - RNA, 20 nt, Human
gaaguuucugccgcagcccu

SEQ ID NO: 3473060 - RNA, 14 nt, Human
gaaguuugaauguu

SEQ ID NO: 3473061 - RNA, 19 nt, Human
gaaguuugaauguuaaaua

SEQ ID NO: 3473062 - RNA, 20 nt, Human
gaaguuugaauguuaaauaa

SEQ ID NO: 3473063 - RNA, 19 nt, Human
gaaguuugauauuaaagga

SEQ ID NO: 3473064 - RNA, 21 nt, Human
gaaguuuguguucuguuuguu

SEQ ID NO: 3473065 - RNA, 23 nt, Human
gaaguuuucaaugaugggcgagc

SEQ ID NO: 3473066 - RNA, 17 nt, Human
gaaguuuugcauuuaug

SEQ ID NO: 3473067 - RNA, 18 nt, Human
gaaguuuuuguacuguaa

SEQ ID NO: 3473068 - RNA, 19 nt, Human
gaaguuuuuguacuguaaa

SEQ ID NO: 3473069 - RNA, 17 nt, Human
gaauaaaauguugaaaa

SEQ ID NO: 3473070 - RNA, 21 nt, Human
gaauaaaauuauuuuggauuu

SEQ ID NO: 3473071 - RNA, 13 nt, Human
gaauaaaauugua

SEQ ID NO: 3473072 - RNA, 12 nt, Human
gaauaaaauuuu

SEQ ID NO: 3473073 - RNA, 15 nt, Human
gaauaaacauuuguu

SEQ ID NO: 3473074 - RNA, 15 nt, Human
gaauaaacuucagca

SEQ ID NO: 3473075 - RNA, 17 nt, Human
gaauaaacuucagcacc

SEQ ID NO: 3473076 - RNA, 18 nt, Human
gaauaaacuucagcacca

SEQ ID NO: 3473077 - RNA, 11 nt, Human
gaauaaagaau

SEQ ID NO: 3473078 - RNA, 17 nt, Human
gaauaaagaaugaaugg

SEQ ID NO: 3473079 - RNA, 11 nt, Human
gaauaaagcaa

SEQ ID NO: 3473080 - RNA, 14 nt, Human
gaauaaagcaauuu

SEQ ID NO: 3473081 - RNA, 14 nt, Human
gaauaaaguucuga

SEQ ID NO: 3473082 - RNA, 20 nt, Human
gaauaaaguucugaguguuu

SEQ ID NO: 3473083 - RNA, 23 nt, Human
gaauaaaugucacuuuuugaggc

SEQ ID NO: 3473084 - RNA, 12 nt, Human
gaauaaaugugu

SEQ ID NO: 3473085 - RNA, 16 nt, Human
gaauaaauguguuggg

SEQ ID NO: 3473086 - RNA, 19 nt, Human
gaauaaauuguacagccgg

SEQ ID NO: 3473087 - RNA, 14 nt, Human
gaauaacauguaau

SEQ ID NO: 3473088 - RNA, 12 nt, Human
gaauaagagacc

SEQ ID NO: 3473089 - RNA, 20 nt, Human
gaauaagagaccuguuuuaa

SEQ ID NO: 3473090 - RNA, 21 nt, Human
gaauaagccauucugacucau

SEQ ID NO: 3473091 - RNA, 22 nt, Human
gaauaagccauucugacucaua

SEQ ID NO: 3473092 - RNA, 12 nt, Human
gaauaaggccuu

SEQ ID NO: 3473093 - RNA, 19 nt, Human
gaauaagguacaagaagca

SEQ ID NO: 3473094 - RNA, 16 nt, Human
gaauaaguuauugcag

SEQ ID NO: 3473095 - RNA, 11 nt, Human
gaauaauaaau

SEQ ID NO: 3473096 - RNA, 14 nt, Human
gaauaauaagcagg

SEQ ID NO: 3473097 - RNA, 16 nt, Human
gaauaauaagcaggau

SEQ ID NO: 3473098 - RNA, 23 nt, Human
gaauaauaagcaggauguuggcc

SEQ ID NO: 3473099 - RNA, 20 nt, Human
gaauaaucacgcuuuccuga

SEQ ID NO: 3473100 - RNA, 16 nt, Human
gaauaaugccuuugua

SEQ ID NO: 3473101 - RNA, 22 nt, Human
gaauaauuuauaguaaugaguu

SEQ ID NO: 3473102 - RNA, 14 nt, Human
gaauaauuucuuac

SEQ ID NO: 3473103 - RNA, 17 nt, Human
gaauacaaacaccugga

SEQ ID NO: 3473104 - RNA, 22 nt, Human
gaauacaauauauagcuggcaa

SEQ ID NO: 3473105 - RNA, 18 nt, Human
gaauacagcagcaagaaa

SEQ ID NO: 3473106 - RNA, 23 nt, Human
gaauacagggcaugcauuuugca

SEQ ID NO: 3473107 - RNA, 21 nt, Human
gaauacaguaagcugcucuau

SEQ ID NO: 3473108 - RNA, 16 nt, Human
gaauaccacaucaaau

SEQ ID NO: 3473109 - RNA, 19 nt, Human
gaauaccacaucaaauaag

SEQ ID NO: 3473110 - RNA, 15 nt, Human
gaauaccacucugua

SEQ ID NO: 3473111 - RNA, 17 nt, Human
gaauaccacucuguaau

SEQ ID NO: 3473112 - RNA, 19 nt, Human
gaauaccacucuguaauug

SEQ ID NO: 3473113 - RNA, 13 nt, Human
gaauaccugcuca

SEQ ID NO: 3473114 - RNA, 13 nt, Human
gaauaccuguggu

SEQ ID NO: 3473115 - RNA, 15 nt, Human
gaauacugauggaau

SEQ ID NO: 3473116 - RNA, 13 nt, Human
gaauacugcuuga

SEQ ID NO: 3473117 - RNA, 14 nt, Human
gaauacuugaacca

SEQ ID NO: 3473118 - RNA, 22 nt, Human
gaauacuugaaccauaaaaugu

SEQ ID NO: 3473119 - RNA, 14 nt, Human
gaauacuugaacuu

SEQ ID NO: 3473120 - RNA, 16 nt, Human
gaauacuugaacuugu

SEQ ID NO: 3473121 - RNA, 15 nt, Human
gaauacuuuuuaaaa

SEQ ID NO: 3473122 - RNA, 14 nt, Human
gaauacuuuuuaca

SEQ ID NO: 3473123 - RNA, 20 nt, Human
gaauacuuuuuacaauuaaa

SEQ ID NO: 3473124 - RNA, 13 nt, Human
gaauagaaagaaa

SEQ ID NO: 3473125 - RNA, 16 nt, Human
gaauagaagcaaauua

SEQ ID NO: 3473126 - RNA, 12 nt, Human
gaauagaaggaa

SEQ ID NO: 3473127 - RNA, 13 nt, Human
gaauagaaggaaa

SEQ ID NO: 3473128 - RNA, 14 nt, Human
gaauagaaggaaac

SEQ ID NO: 3473129 - RNA, 16 nt, Human
gaauagacaucaaacu

SEQ ID NO: 3473130 - RNA, 19 nt, Human
gaauagacaucaaacucaa

SEQ ID NO: 3473131 - RNA, 19 nt, Human
gaauagauaugaaagcuga

SEQ ID NO: 3473132 - RNA, 15 nt, Human
gaauagaugcugacu

SEQ ID NO: 3473133 - RNA, 16 nt, Human
gaauagcaucuguaca

SEQ ID NO: 3473134 - RNA, 18 nt, Human
gaauagcauguuguagau

SEQ ID NO: 3473135 - RNA, 18 nt, Human
gaauagccauauuuguaa

SEQ ID NO: 3473136 - RNA, 23 nt, Human
gaauagccauauuuguaaaauga

SEQ ID NO: 3473137 - RNA, 22 nt, Human
gaauagccuagauaugaauaua

SEQ ID NO: 3473138 - RNA, 15 nt, Human
gaauagccuguggcc

SEQ ID NO: 3473139 - RNA, 14 nt, Human
gaauagcugaugug

SEQ ID NO: 3473140 - RNA, 14 nt, Human
gaauagcugggacu

SEQ ID NO: 3473141 - RNA, 15 nt, Human
gaauagcugggacua

SEQ ID NO: 3473142 - RNA, 22 nt, Human
gaauagcugggacuacaggugu

SEQ ID NO: 3473143 - RNA, 23 nt, Human
gaauagcugggacuacaggugug

SEQ ID NO: 3473144 - RNA, 19 nt, Human
gaauaggacuuguuuuugu

SEQ ID NO: 3473145 - RNA, 19 nt, Human
gaauagggcccaugggagg

SEQ ID NO: 3473146 - RNA, 16 nt, Human
gaauaguauccuccag

SEQ ID NO: 3473147 - RNA, 17 nt, Human
gaauauaaaugugugua

SEQ ID NO: 3473148 - RNA, 15 nt, Human
gaauauaacaugaaa

SEQ ID NO: 3473149 - RNA, 20 nt, Human
gaauauaacaugaaaugaua

SEQ ID NO: 3473150 - RNA, 19 nt, Human
gaauauaauauauuugugu

SEQ ID NO: 3473151 - RNA, 13 nt, Human
gaauauaauuauc

SEQ ID NO: 3473152 - RNA, 22 nt, Human
gaauauacagcaggugcucaau

SEQ ID NO: 3473153 - RNA, 21 nt, Human
gaauauaccccuuaguguuug

SEQ ID NO: 3473154 - RNA, 17 nt, Human
gaauauagauuaaauca

SEQ ID NO: 3473155 - RNA, 23 nt, Human
gaauauauggcauuugcagauuu

SEQ ID NO: 3473156 - RNA, 13 nt, Human
gaauauauuuauu

SEQ ID NO: 3473157 - RNA, 13 nt, Human
gaauaucaauaua

SEQ ID NO: 3473158 - RNA, 15 nt, Human
gaauaucaauauaau

SEQ ID NO: 3473159 - RNA, 20 nt, Human
gaauaucaauauaauguuuu

SEQ ID NO: 3473160 - RNA, 16 nt, Human
gaauauccaugaccua

SEQ ID NO: 3473161 - RNA, 22 nt, Human
gaauaucuccgucaacucauau

SEQ ID NO: 3473162 - RNA, 17 nt, Human
gaauaucuguaauggua

SEQ ID NO: 3473163 - RNA, 14 nt, Human
gaauaucuuucgau

SEQ ID NO: 3473164 - RNA, 17 nt, Human
gaauaugacggaagaac

SEQ ID NO: 3473165 - RNA, 19 nt, Human
gaauaugagcuuuauguaa

SEQ ID NO: 3473166 - RNA, 16 nt, Human
gaauaugcaacauugu

SEQ ID NO: 3473167 - RNA, 23 nt, Human
gaauauguaguaucuauaugacu

SEQ ID NO: 3473168 - RNA, 15 nt, Human
gaauauguuucaaac

SEQ ID NO: 3473169 - RNA, 15 nt, Human
gaauauguuuccuug

SEQ ID NO: 3473170 - RNA, 14 nt, Human
gaauauuaaaaaac

SEQ ID NO: 3473171 - RNA, 12 nt, Human
gaauauuagcuu

SEQ ID NO: 3473172 - RNA, 16 nt, Human
gaauauuauauuugga

SEQ ID NO: 3473173 - RNA, 20 nt, Human
gaauauucagagaauaucaa

SEQ ID NO: 3473174 - RNA, 11 nt, Human
gaauauucagg

SEQ ID NO: 3473175 - RNA, 22 nt, Human
gacggcacggucuucccucuuc

SEQ ID NO: 3473176 - RNA, 16 nt, Human
gacggcaggcucacug

SEQ ID NO: 3473177 - RNA, 11 nt, Human
gacggcccugc

SEQ ID NO: 3473178 - RNA, 12 nt, Human
gacggcccugca

SEQ ID NO: 3473179 - RNA, 13 nt, Human
gacggcccugcaa

SEQ ID NO: 3473180 - RNA, 22 nt, Human
gacggccugaugcucccucccc

SEQ ID NO: 3473181 - RNA, 18 nt, Human
gacggcugggcacacgcc

SEQ ID NO: 3473182 - RNA, 17 nt, Human
gacgggguuucaccaug

SEQ ID NO: 3473183 - RNA, 23 nt, Human
gacgggugggcggcuggagacca

SEQ ID NO: 3473184 - RNA, 16 nt, Human
gacggugcagucuggg

SEQ ID NO: 3473185 - RNA, 16 nt, Human
gacggugcccaagcca

SEQ ID NO: 3473186 - RNA, 18 nt, Human
gacggugcccaagccaga

SEQ ID NO: 3473187 - RNA, 21 nt, Human
gacggugggcauuugugaggc

SEQ ID NO: 3473188 - RNA, 17 nt, Human
gacgguucaccagccuc

SEQ ID NO: 3473189 - RNA, 15 nt, Human
gacgguuuccaggga

SEQ ID NO: 3473190 - RNA, 21 nt, Human
gacgucagauguuuaaaacac

SEQ ID NO: 3473191 - RNA, 12 nt, Human
gacgucccucca

SEQ ID NO: 3473192 - RNA, 15 nt, Human
gacgucccugcccau

SEQ ID NO: 3473193 - RNA, 18 nt, Human
gacguccugccaccuggg

SEQ ID NO: 3473194 - RNA, 16 nt, Human
gacgugauuuugcugu

SEQ ID NO: 3473195 - RNA, 17 nt, Human
gacgugauuuugcugua

SEQ ID NO: 3473196 - RNA, 11 nt, Human
gacgugcuggg

SEQ ID NO: 3473197 - RNA, 22 nt, Human
gacguggaaccucugucucauc

SEQ ID NO: 3473198 - RNA, 16 nt, Human
gacguggcucagccag

SEQ ID NO: 3473199 - RNA, 13 nt, Human
gacgugggcuggg

SEQ ID NO: 3473200 - RNA, 19 nt, Human
gacguguguuucuagagcc

SEQ ID NO: 3473201 - RNA, 14 nt, Human
gacguguuaugacu

SEQ ID NO: 3473202 - RNA, 12 nt, Human
gacguuccagcc

SEQ ID NO: 3473203 - RNA, 13 nt, Human
gacguuccagccg

SEQ ID NO: 3473204 - RNA, 15 nt, Human
gacguuccagccggc

SEQ ID NO: 3473205 - RNA, 21 nt, Human
gacguucggggcaugcugggg

SEQ ID NO: 3473206 - RNA, 19 nt, Human
gacguuuauaaacagaaau

SEQ ID NO: 3473207 - RNA, 13 nt, Human
gacuaaaagauau

SEQ ID NO: 3473208 - RNA, 23 nt, Human
gacuaaaagauauaagugcugua

SEQ ID NO: 3473209 - RNA, 18 nt, Human
gacuaaaccauugugcau

SEQ ID NO: 3473210 - RNA, 19 nt, Human
gacuaaaccauugugcauu

SEQ ID NO: 3473211 - RNA, 10 nt, Human
gacuaaagag

SEQ ID NO: 3473212 - RNA, 13 nt, Human
gacuaaagagaga

SEQ ID NO: 3473213 - RNA, 16 nt, Human
gacuaacacucagaag

SEQ ID NO: 3473214 - RNA, 19 nt, Human
gacuaacacucagaagccu

SEQ ID NO: 3473215 - RNA, 23 nt, Human
gacuaaccauguguuauguuuuc

SEQ ID NO: 3473216 - RNA, 18 nt, Human
gacuaacuaucaaauaga

SEQ ID NO: 3473217 - RNA, 23 nt, Human
gacuaacuugucuuuggacccug

SEQ ID NO: 3473218 - RNA, 16 nt, Human
gacuaagagaaguugu

SEQ ID NO: 3473219 - RNA, 22 nt, Human
gacuaagaucgguuaacaaaua

SEQ ID NO: 3473220 - RNA, 18 nt, Human
gacuaagccagcaccgga

SEQ ID NO: 3473221 - RNA, 14 nt, Human
gacuaagcccuguc

SEQ ID NO: 3473222 - RNA, 22 nt, Human
gacuaagcccugucgagacacu

SEQ ID NO: 3473223 - RNA, 23 nt, Human
gacuaagcccugucgagacacuu

SEQ ID NO: 3473224 - RNA, 21 nt, Human
gacuaagccuaccugcucucc

SEQ ID NO: 3473225 - RNA, 22 nt, Human
gacuaaucuuauucauuuucuc

SEQ ID NO: 3473226 - RNA, 16 nt, Human
gacuaauggcaugaga

SEQ ID NO: 3473227 - RNA, 21 nt, Human
gacuaauuccugcccugccca

SEQ ID NO: 3473228 - RNA, 18 nt, Human
gacuaauuuaaaaaauaa

SEQ ID NO: 3473229 - RNA, 23 nt, Human
gacuaauuuuacauguuuauaaa

SEQ ID NO: 3473230 - RNA, 15 nt, Human
gacuacaaaaaugaa

SEQ ID NO: 3473231 - RNA, 22 nt, Human
gacuacagcuggggugcaggga

SEQ ID NO: 3473232 - RNA, 15 nt, Human
gacuacaggcaccca

SEQ ID NO: 3473233 - RNA, 12 nt, Human
gacuacagggcc

SEQ ID NO: 3473234 - RNA, 21 nt, Human
gacuacaggugugagucacca

SEQ ID NO: 3473235 - RNA, 14 nt, Human
gacuacauuuagag

SEQ ID NO: 3473236 - RNA, 22 nt, Human
gacuacccacguucucacaccc

SEQ ID NO: 3473237 - RNA, 14 nt, Human
gacuacuauuuucu

SEQ ID NO: 3473238 - RNA, 14 nt, Human
gacuacuuagcauc

SEQ ID NO: 3473239 - RNA, 20 nt, Human
gacuagaaaauuuaaaacau

SEQ ID NO: 3473240 - RNA, 16 nt, Human
gacuagaaccuggagg

SEQ ID NO: 3473241 - RNA, 15 nt, Human
gacuagaagggccag

SEQ ID NO: 3473242 - RNA, 18 nt, Human
gacuagaauucuagugcu

SEQ ID NO: 3473243 - RNA, 21 nt, Human
gacuagaauucuagugcugcu

SEQ ID NO: 3473244 - RNA, 22 nt, Human
gacuagaauucuagugcugcug

SEQ ID NO: 3473245 - RNA, 19 nt, Human
gacuagacacacaaagcag

SEQ ID NO: 3473246 - RNA, 16 nt, Human
gacuagacguucauuu

SEQ ID NO: 3473247 - RNA, 16 nt, Human
gacuagaggcagggag

SEQ ID NO: 3473248 - RNA, 23 nt, Human
gacuagagggaccucucccaggg

SEQ ID NO: 3473249 - RNA, 14 nt, Human
gacuagaugaugga

SEQ ID NO: 3473250 - RNA, 18 nt, Human
gacuagauguaguauuuu

SEQ ID NO: 3473251 - RNA, 21 nt, Human
gacuagccccuguggagacug

SEQ ID NO: 3473252 - RNA, 17 nt, Human
gacuagccuggcuuggg

SEQ ID NO: 3473253 - RNA, 14 nt, Human
gacuaggagcacug

SEQ ID NO: 3473254 - RNA, 16 nt, Human
gacuagggagccaugu

SEQ ID NO: 3473255 - RNA, 19 nt, Human
gacuagggauucaggcugc

SEQ ID NO: 3473256 - RNA, 20 nt, Human
gacuagggauucaggcugcu

SEQ ID NO: 3473257 - RNA, 21 nt, Human
gacuagggauucaggcugcuu

SEQ ID NO: 3473258 - RNA, 18 nt, Human
gacuagugaggaaagauu

SEQ ID NO: 3473259 - RNA, 17 nt, Human
gacuauagcccaggucc

SEQ ID NO: 3473260 - RNA, 16 nt, Human
gacuauauaauuuauu

SEQ ID NO: 3473261 - RNA, 16 nt, Human
gacuauauacaugugu

SEQ ID NO: 3473262 - RNA, 22 nt, Human
gacuauauacauguguguauau

SEQ ID NO: 3473263 - RNA, 21 nt, Human
gacuauauuugggccugcucc

SEQ ID NO: 3473264 - RNA, 22 nt, Human
gacuaucuaaauguugaaagau

SEQ ID NO: 3473265 - RNA, 15 nt, Human
gacuauuauguuguu

SEQ ID NO: 3473266 - RNA, 21 nt, Human
gacuauuauguuguuagagaa

SEQ ID NO: 3473267 - RNA, 19 nt, Human
gacuauucuguaucuuuca

SEQ ID NO: 3473268 - RNA, 21 nt, Human
gacuauuuaaacuuauaaauc

SEQ ID NO: 3473269 - RNA, 13 nt, Human
gacuauuuuuguu

SEQ ID NO: 3473270 - RNA, 22 nt, Human
gacuauuuuuguuuuuauuaaa

SEQ ID NO: 3473271 - RNA, 18 nt, Human
gacucaaaguuucagaga

SEQ ID NO: 3473272 - RNA, 23 nt, Human
gacucaaauguucuaaguuucua

SEQ ID NO: 3473273 - RNA, 18 nt, Human
gacucaagaagugaagaa

SEQ ID NO: 3473274 - RNA, 19 nt, Human
gacucaagaagugaagaau

SEQ ID NO: 3473275 - RNA, 15 nt, Human
gacucaauaaaauca

SEQ ID NO: 3473276 - RNA, 15 nt, Human
gacucaaucccuagg

SEQ ID NO: 3473277 - RNA, 16 nt, Human
gacucaauuucucccc

SEQ ID NO: 3473278 - RNA, 19 nt, Human
gacucacaccacuagccuc

SEQ ID NO: 3473279 - RNA, 19 nt, Human
gacucacagguuggaagag

SEQ ID NO: 3473280 - RNA, 15 nt, Human
gacucaccucugccu

SEQ ID NO: 3473281 - RNA, 17 nt, Human
gacucaccucugccuca

SEQ ID NO: 3473282 - RNA, 15 nt, Human
gacucagaaacucca

SEQ ID NO: 3473283 - RNA, 15 nt, Human
gacucagaagccucu

SEQ ID NO: 3473284 - RNA, 17 nt, Human
gacucagaagccucugg

SEQ ID NO: 3473285 - RNA, 23 nt, Human
gacucagacaggaaagggaaggc

SEQ ID NO: 3473286 - RNA, 18 nt, Human
gacucagccugcaguuaa

SEQ ID NO: 3473287 - RNA, 15 nt, Human
gacucagccuucaga

SEQ ID NO: 3473288 - RNA, 19 nt, Human
gacucagccuucagacaga

SEQ ID NO: 3473289 - RNA, 23 nt, Human
gacucagcucugacauucugauu

SEQ ID NO: 3473290 - RNA, 17 nt, Human
gacucaggaugcccagg

SEQ ID NO: 3473291 - RNA, 22 nt, Human
gacucaggauuuaaaaacugga

SEQ ID NO: 3473292 - RNA, 18 nt, Human
gacucagggaggcuaaau

SEQ ID NO: 3473293 - RNA, 17 nt, Human
gacucagggcagcgcca

SEQ ID NO: 3473294 - RNA, 18 nt, Human
gacucagggcagcgccag

SEQ ID NO: 3473295 - RNA, 14 nt, Human
gacucagggcccca

SEQ ID NO: 3473296 - RNA, 13 nt, Human
gacucagggcucc

SEQ ID NO: 3473297 - RNA, 12 nt, Human
gacucaguguuc

SEQ ID NO: 3473298 - RNA, 15 nt, Human
gacucaguuugucag

SEQ ID NO: 3473299 - RNA, 21 nt, Human
gacucauauccccuauuuaac

SEQ ID NO: 3473300 - RNA, 20 nt, Human
gacucauccugaacagcaug

SEQ ID NO: 3473301 - RNA, 18 nt, Human
gacucaugguguguuaca

SEQ ID NO: 3473302 - RNA, 20 nt, Human
gacucauucccuagaucuuu

SEQ ID NO: 3473303 - RNA, 13 nt, Human
gacucauucugaa

SEQ ID NO: 3473304 - RNA, 17 nt, Human
gacucauucugaaggag

SEQ ID NO: 3473305 - RNA, 15 nt, Human
gacucauucuucugu

SEQ ID NO: 3473306 - RNA, 15 nt, Human
gacuccaaagaaaug

SEQ ID NO: 3473307 - RNA, 17 nt, Human
gacuccaagaacaauug

SEQ ID NO: 3473308 - RNA, 16 nt, Human
gacuccacccauccua

SEQ ID NO: 3473309 - RNA, 22 nt, Human
gacuccagaaaugucccuuucu

SEQ ID NO: 3473310 - RNA, 15 nt, Human
gacuccagaucugca

SEQ ID NO: 3473311 - RNA, 9 nt, Human
gacuccagc

SEQ ID NO: 3473312 - RNA, 10 nt, Human
gacuccagcc

SEQ ID NO: 3473313 - RNA, 12 nt, Human
gacuccagccag

SEQ ID NO: 3473314 - RNA, 19 nt, Human
gacuccagccagcgccucc

SEQ ID NO: 3473315 - RNA, 22 nt, Human
gacuccagcuggguuggaaaac

SEQ ID NO: 3473316 - RNA, 12 nt, Human
gacuccaggaga

SEQ ID NO: 3473317 - RNA, 17 nt, Human
gacuccaggcagcagac

SEQ ID NO: 3473318 - RNA, 14 nt, Human
gacuccaggcccaa

SEQ ID NO: 3473319 - RNA, 20 nt, Human
gacuggggaugugggaggga

SEQ ID NO: 3473320 - RNA, 19 nt, Human
gacuggggccacuacauuu

SEQ ID NO: 3473321 - RNA, 16 nt, Human
gacugggggcagacau

SEQ ID NO: 3473322 - RNA, 23 nt, Human
gacugggggcagacauggugggg

SEQ ID NO: 3473323 - RNA, 17 nt, Human
gacuggguaggaaagag

SEQ ID NO: 3473324 - RNA, 23 nt, Human
gacugggucucgcuuuguugccc

SEQ ID NO: 3473325 - RNA, 23 nt, Human
gacuggguuuggaccccagcugg

SEQ ID NO: 3473326 - RNA, 15 nt, Human
gacuggugacugauu

SEQ ID NO: 3473327 - RNA, 16 nt, Human
gacuggugcccuccuc

SEQ ID NO: 3473328 - RNA, 19 nt, Human
gacuggugcuauaggcugg

SEQ ID NO: 3473329 - RNA, 19 nt, Human
gacugguggcaggggcuuc

SEQ ID NO: 3473330 - RNA, 17 nt, Human
gacuguaaguugggcuu

SEQ ID NO: 3473331 - RNA, 17 nt, Human
gacuguacuccucccag

SEQ ID NO: 3473332 - RNA, 23 nt, Human
gacuguacuccucccaggcgccc

SEQ ID NO: 3473333 - RNA, 11 nt, Human
gacuguagaaa

SEQ ID NO: 3473334 - RNA, 22 nt, Human
gacuguagauugcuucuguagu

SEQ ID NO: 3473335 - RNA, 19 nt, Human
gacuguauauaaaggaaaa

SEQ ID NO: 3473336 - RNA, 15 nt, Human
gacuguaucugugua

SEQ ID NO: 3473337 - RNA, 17 nt, Human
gacuguaucuguguaga

SEQ ID NO: 3473338 - RNA, 18 nt, Human
gacuguauuauacauggg

SEQ ID NO: 3473339 - RNA, 15 nt, Human
gacuguauuugugac

SEQ ID NO: 3473340 - RNA, 21 nt, Human
gacugucucaagagggcacug

SEQ ID NO: 3473341 - RNA, 23 nt, Human
gacugucucaagagggcacuggu

SEQ ID NO: 3473342 - RNA, 14 nt, Human
gacugucuggggag

SEQ ID NO: 3473343 - RNA, 13 nt, Human
gacugucuuucag

SEQ ID NO: 3473344 - RNA, 18 nt, Human
gacugugacaggcagcag

SEQ ID NO: 3473345 - RNA, 19 nt, Human
gacugugauuugaauccag

SEQ ID NO: 3473346 - RNA, 18 nt, Human
gacuguggagacugcucc

SEQ ID NO: 3473347 - RNA, 21 nt, Human
gacuguggguuugugggggga

SEQ ID NO: 3473348 - RNA, 17 nt, Human
gacuguggugacuuugg

SEQ ID NO: 3473349 - RNA, 17 nt, Human
gacugugugcucaggag

SEQ ID NO: 3473350 - RNA, 21 nt, Human
gacuguguguugccacaggac

SEQ ID NO: 3473351 - RNA, 22 nt, Human
gacuguuagaaaauggacacug

SEQ ID NO: 3473352 - RNA, 15 nt, Human
gacuguugauguacu

SEQ ID NO: 3473353 - RNA, 14 nt, Human
gacuguugucccug

SEQ ID NO: 3473354 - RNA, 19 nt, Human
gacuguuguuaucuguuug

SEQ ID NO: 3473355 - RNA, 19 nt, Human
gacuguuuucucucggcuc

SEQ ID NO: 3473356 - RNA, 18 nt, Human
gacuguuuucucuugaga

SEQ ID NO: 3473357 - RNA, 17 nt, Human
gacuguuuuuacccaua

SEQ ID NO: 3473358 - RNA, 18 nt, Human
gacuguuuuuacccauau

SEQ ID NO: 3473359 - RNA, 18 nt, Human
gacuguuuuucggacagu

SEQ ID NO: 3473360 - RNA, 19 nt, Human
gacuguuuuucggacaguu

SEQ ID NO: 3473361 - RNA, 14 nt, Human
gacuguuuuuuccu

SEQ ID NO: 3473362 - RNA, 19 nt, Human
gacuguuuuuuccugagcu

SEQ ID NO: 3473363 - RNA, 19 nt, Human
gacuuaaaauauuccugca

SEQ ID NO: 3473364 - RNA, 17 nt, Human
gacuuaacauagccaaa

SEQ ID NO: 3473365 - RNA, 23 nt, Human
gacuuaacauagccaaaauguga

SEQ ID NO: 3473366 - RNA, 16 nt, Human
gacuuaacggcuccag

SEQ ID NO: 3473367 - RNA, 19 nt, Human
gacuuaacggcuccaggau

SEQ ID NO: 3473368 - RNA, 20 nt, Human
gacuuaagcaucuggcucua

SEQ ID NO: 3473369 - RNA, 21 nt, Human
gacuuaagcccagugcacuga

SEQ ID NO: 3473370 - RNA, 16 nt, Human
gacuuacaugauucau

SEQ ID NO: 3473371 - RNA, 19 nt, Human
gacuuacaugauucauuuu

SEQ ID NO: 3473372 - RNA, 14 nt, Human
gacuuaccaggaag

SEQ ID NO: 3473373 - RNA, 18 nt, Human
gacuuacuguacaugaaa

SEQ ID NO: 3473374 - RNA, 14 nt, Human
gacuuagaaagcag

SEQ ID NO: 3473375 - RNA, 17 nt, Human
gacuuagggcaccaggg

SEQ ID NO: 3473376 - RNA, 19 nt, Human
gacuuaguggacaggggag

SEQ ID NO: 3473377 - RNA, 20 nt, Human
gacuuauuguggauaacaaa

SEQ ID NO: 3473378 - RNA, 22 nt, Human
gacuuauuguggauaacaaaga

SEQ ID NO: 3473379 - RNA, 18 nt, Human
gacuuauuucuucaaauc

SEQ ID NO: 3473380 - RNA, 21 nt, Human
gacuucaagcauggcuauuuu

SEQ ID NO: 3473381 - RNA, 22 nt, Human
gacuucacacugcaagagccuu

SEQ ID NO: 3473382 - RNA, 18 nt, Human
gacuucagggcagggcuc

SEQ ID NO: 3473383 - RNA, 23 nt, Human
gacuucaggggcugcccgcuccc

SEQ ID NO: 3473384 - RNA, 21 nt, Human
gacuucaucaaacauggguuu

SEQ ID NO: 3473385 - RNA, 12 nt, Human
gacuucauccca

SEQ ID NO: 3473386 - RNA, 20 nt, Human
gacuucaucccaaaggacag

SEQ ID NO: 3473387 - RNA, 15 nt, Human
gacuucauuaauaau

SEQ ID NO: 3473388 - RNA, 12 nt, Human
gacuuccaaaga

SEQ ID NO: 3473389 - RNA, 22 nt, Human
gacuuccccgcauuccaggcuc

SEQ ID NO: 3473390 - RNA, 23 nt, Human
gacuuccccgcauuccaggcucc

SEQ ID NO: 3473391 - RNA, 18 nt, Human
gacuuccccggagggcug

SEQ ID NO: 3473392 - RNA, 23 nt, Human
gacuuccccggagggcugcggcg

SEQ ID NO: 3473393 - RNA, 13 nt, Human
gacuucccugugu

SEQ ID NO: 3473394 - RNA, 18 nt, Human
gacuuccucgccucuccc

SEQ ID NO: 3473395 - RNA, 18 nt, Human
gacuuccuguccagcucc

SEQ ID NO: 3473396 - RNA, 20 nt, Human
gacuuccuguccagcuccaa

SEQ ID NO: 3473397 - RNA, 22 nt, Human
gacuuccuguccagcuccaacc

SEQ ID NO: 3473398 - RNA, 16 nt, Human
gacuuccuugcucucc

SEQ ID NO: 3473399 - RNA, 15 nt, Human
gacuucgacucagga

SEQ ID NO: 3473400 - RNA, 18 nt, Human
gacuucuaaguaaaacca

SEQ ID NO: 3473401 - RNA, 23 nt, Human
gacuucuaaguaaaaccacagca

SEQ ID NO: 3473402 - RNA, 14 nt, Human
gacuucuccagguc

SEQ ID NO: 3473403 - RNA, 16 nt, Human
gacuucugccagcaua

SEQ ID NO: 3473404 - RNA, 13 nt, Human
gacuucuggggua

SEQ ID NO: 3473405 - RNA, 23 nt, Human
gacuucugucuucacaacagauu

SEQ ID NO: 3473406 - RNA, 19 nt, Human
gacuucuuuaauuuuggaa

SEQ ID NO: 3473407 - RNA, 21 nt, Human
gacuucuuucaaauugagaga

SEQ ID NO: 3473408 - RNA, 18 nt, Human
gacuucuuuucacauucu

SEQ ID NO: 3473409 - RNA, 19 nt, Human
gacuucuuuucacauucuu

SEQ ID NO: 3473410 - RNA, 22 nt, Human
gacuucuuuucacauucuuaua

SEQ ID NO: 3473411 - RNA, 11 nt, Human
gacuugaaaag

SEQ ID NO: 3473412 - RNA, 17 nt, Human
gacuugaaaagagacag

SEQ ID NO: 3473413 - RNA, 13 nt, Human
gacuugaaagcau

SEQ ID NO: 3473414 - RNA, 16 nt, Human
gacuugaaagcaucca

SEQ ID NO: 3473415 - RNA, 19 nt, Human
gacuugaaagcauccaugu

SEQ ID NO: 3473416 - RNA, 16 nt, Human
gacuugaagacuuaca

SEQ ID NO: 3473417 - RNA, 15 nt, Human
gacuugaaguuguua

SEQ ID NO: 3473418 - RNA, 20 nt, Human
gacuugaauuuucccacugc

SEQ ID NO: 3473419 - RNA, 16 nt, Human
gacuugacaguggaac

SEQ ID NO: 3473420 - RNA, 19 nt, Human
gacuugagaaacaaauaau

SEQ ID NO: 3473421 - RNA, 16 nt, Human
gacuugcacagggauu

SEQ ID NO: 3473422 - RNA, 18 nt, Human
gacuugcacagggauucu

SEQ ID NO: 3473423 - RNA, 19 nt, Human
gacuugcauaccugcuuuu

SEQ ID NO: 3473424 - RNA, 15 nt, Human
gacuugcaucgugga

SEQ ID NO: 3473425 - RNA, 15 nt, Human
gacuugcauuuuugc

SEQ ID NO: 3473426 - RNA, 22 nt, Human
gacuugccaacaccacagaaau

SEQ ID NO: 3473427 - RNA, 21 nt, Human
gacuugccagagccgggcaca

SEQ ID NO: 3473428 - RNA, 22 nt, Human
gacuugcuguuuuguucugugg

SEQ ID NO: 3473429 - RNA, 13 nt, Human
gacuuggaagcuc

SEQ ID NO: 3473430 - RNA, 14 nt, Human
gacuuggaagcucc

SEQ ID NO: 3473431 - RNA, 15 nt, Human
gacuuggaagcuccg

SEQ ID NO: 3473432 - RNA, 14 nt, Human
gacuuggcuggugu

SEQ ID NO: 3473433 - RNA, 19 nt, Human
gacuugggcacccccagcc

SEQ ID NO: 3473434 - RNA, 22 nt, Human
gacuugggcacccccagccugg

SEQ ID NO: 3473435 - RNA, 22 nt, Human
gacuugggggaacgaugugucu

SEQ ID NO: 3473436 - RNA, 14 nt, Human
gacuuggucugauu

SEQ ID NO: 3473437 - RNA, 15 nt, Human
gacuugguugguagg

SEQ ID NO: 3473438 - RNA, 22 nt, Human
gacuuguauagcaugaaauaaa

SEQ ID NO: 3473439 - RNA, 16 nt, Human
gacuuguauauuugua

SEQ ID NO: 3473440 - RNA, 19 nt, Human
gacuuguauauuuuaagaa

SEQ ID NO: 3473441 - RNA, 19 nt, Human
gacuugugacgguguaccu

SEQ ID NO: 3473442 - RNA, 13 nt, Human
gacuuguguccca

SEQ ID NO: 3473443 - RNA, 12 nt, Human
gacuuguuagau

SEQ ID NO: 3473444 - RNA, 16 nt, Human
gacuuguucuugauag

SEQ ID NO: 3473445 - RNA, 18 nt, Human
gacuuguuuuaugcucag

SEQ ID NO: 3473446 - RNA, 15 nt, Human
gacuuguuuuugcac

SEQ ID NO: 3473447 - RNA, 14 nt, Human
gacuuguuuuuguu

SEQ ID NO: 3473448 - RNA, 12 nt, Human
gacuuuaauuua

SEQ ID NO: 3473449 - RNA, 13 nt, Human
gacuuuagggacu

SEQ ID NO: 3473450 - RNA, 13 nt, Human
gacuuuauuauuu

SEQ ID NO: 3473451 - RNA, 19 nt, Human
gacuuuauuuucugguaga

SEQ ID NO: 3473452 - RNA, 12 nt, Human
gacuuucaggua

SEQ ID NO: 3473453 - RNA, 16 nt, Human
gacuuuccacccccuc

SEQ ID NO: 3473454 - RNA, 17 nt, Human
gacuuuccacccccucc

SEQ ID NO: 3473455 - RNA, 11 nt, Human
gacuuucccca

SEQ ID NO: 3473456 - RNA, 21 nt, Human
gacuuuccccaccagaugcug

SEQ ID NO: 3473457 - RNA, 11 nt, Human
gacuuuccucu

SEQ ID NO: 3473458 - RNA, 21 nt, Human
gacuuucucuaauaauaaaua

SEQ ID NO: 3473459 - RNA, 11 nt, Human
gacuuucuguu

SEQ ID NO: 3473460 - RNA, 19 nt, Human
gacuuucuuuuuguagcug

SEQ ID NO: 3473461 - RNA, 21 nt, Human
gacuuucuuuuuugauauaga

SEQ ID NO: 3473462 - RNA, 18 nt, Human
gacuuugaaaauauauac

SEQ ID NO: 3473463 - RNA, 16 nt, Human
gagaauucuuacaugu

SEQ ID NO: 3473464 - RNA, 17 nt, Human
gagaauugggauuacau

SEQ ID NO: 3473465 - RNA, 14 nt, Human
gagaauugggggcu

SEQ ID NO: 3473466 - RNA, 15 nt, Human
gagaauuguaucauu

SEQ ID NO: 3473467 - RNA, 15 nt, Human
gagaauuuuaaauua

SEQ ID NO: 3473468 - RNA, 11 nt, Human
gagacaaaaau

SEQ ID NO: 3473469 - RNA, 17 nt, Human
gagacaacgugcucuuu

SEQ ID NO: 3473470 - RNA, 18 nt, Human
gagacaaggagggcacag

SEQ ID NO: 3473471 - RNA, 22 nt, Human
gagacaaguuccaugggauaca

SEQ ID NO: 3473472 - RNA, 16 nt, Human
gagacaaugcagaugc

SEQ ID NO: 3473473 - RNA, 17 nt, Human
gagacaaugcagaugcc

SEQ ID NO: 3473474 - RNA, 18 nt, Human
gagacaaugcagaugcca

SEQ ID NO: 3473475 - RNA, 23 nt, Human
gagacaaugcagaugccagagca

SEQ ID NO: 3473476 - RNA, 14 nt, Human
gagacaaugucugc

SEQ ID NO: 3473477 - RNA, 15 nt, Human
gagacacaagccuuc

SEQ ID NO: 3473478 - RNA, 11 nt, Human
gagacacagga

SEQ ID NO: 3473479 - RNA, 17 nt, Human
gagacacaggaugaagc

SEQ ID NO: 3473480 - RNA, 16 nt, Human
gagacaccucagagcc

SEQ ID NO: 3473481 - RNA, 19 nt, Human
gagacaccucagagccccg

SEQ ID NO: 3473482 - RNA, 18 nt, Human
gagacaccugcaccuccc

SEQ ID NO: 3473483 - RNA, 19 nt, Human
gagacacguguggcgggca

SEQ ID NO: 3473484 - RNA, 20 nt, Human
gagacacuaacgacuucagg

SEQ ID NO: 3473485 - RNA, 21 nt, Human
gagacacucagaccagagaag

SEQ ID NO: 3473486 - RNA, 12 nt, Human
gagacagaagca

SEQ ID NO: 3473487 - RNA, 14 nt, Human
gagacagaauguau

SEQ ID NO: 3473488 - RNA, 15 nt, Human
gagacagacuagaag

SEQ ID NO: 3473489 - RNA, 17 nt, Human
gagacagacuagaaguu

SEQ ID NO: 3473490 - RNA, 9 nt, Human
gagacagag

SEQ ID NO: 3473491 - RNA, 22 nt, Human
gagacagagaggacgugggcgg

SEQ ID NO: 3473492 - RNA, 19 nt, Human
gagacagagcaaccccugg

SEQ ID NO: 3473493 - RNA, 15 nt, Human
gagacagauaccucc

SEQ ID NO: 3473494 - RNA, 16 nt, Human
gagacagauaccucca

SEQ ID NO: 3473495 - RNA, 13 nt, Human
gagacagccccag

SEQ ID NO: 3473496 - RNA, 14 nt, Human
gagacagcccgggc

SEQ ID NO: 3473497 - RNA, 24 nt, Human
gagacagcccgggcucugccuccc

SEQ ID NO: 3473498 - RNA, 13 nt, Human
gagacagcucugc

SEQ ID NO: 3473499 - RNA, 20 nt, Human
gagacagcucugcauacuca

SEQ ID NO: 3473500 - RNA, 19 nt, Human
gagacaggguuucaccaug

SEQ ID NO: 3473501 - RNA, 22 nt, Human
gagacaggguuuggcugugucu

SEQ ID NO: 3473502 - RNA, 16 nt, Human
gagacagucaccccag

SEQ ID NO: 3473503 - RNA, 18 nt, Human
gagacaguuauuuauagu

SEQ ID NO: 3473504 - RNA, 19 nt, Human
gagacauaaccacugcuuc

SEQ ID NO: 3473505 - RNA, 13 nt, Human
gagacaugugaca

SEQ ID NO: 3473506 - RNA, 19 nt, Human
gagacauuccugggcacag

SEQ ID NO: 3473507 - RNA, 22 nt, Human
gagaccaagauggcccauccug

SEQ ID NO: 3473508 - RNA, 18 nt, Human
gagaccacccauaucaug

SEQ ID NO: 3473509 - RNA, 14 nt, Human
gagaccagccuggc

SEQ ID NO: 3473510 - RNA, 14 nt, Human
gagaccaggcaaag

SEQ ID NO: 3473511 - RNA, 16 nt, Human
gagaccagggagccuu

SEQ ID NO: 3473512 - RNA, 23 nt, Human
gagaccaguugggagcacuggag

SEQ ID NO: 3473513 - RNA, 18 nt, Human
gagaccaucccugaaggc

SEQ ID NO: 3473514 - RNA, 15 nt, Human
gagaccauccuggcu

SEQ ID NO: 3473515 - RNA, 15 nt, Human
gagacccaagggcag

SEQ ID NO: 3473516 - RNA, 19 nt, Human
gagacccaccccaccugca

SEQ ID NO: 3473517 - RNA, 20 nt, Human
gagacccaccccaccugcag

SEQ ID NO: 3473518 - RNA, 11 nt, Human
gagacccagcg

SEQ ID NO: 3473519 - RNA, 12 nt, Human
gagacccccaca

SEQ ID NO: 3473520 - RNA, 14 nt, Human
gagacccccacacc

SEQ ID NO: 3473521 - RNA, 16 nt, Human
gagaccccuggccucc

SEQ ID NO: 3473522 - RNA, 23 nt, Human
gagacccucgcccaacuccacca

SEQ ID NO: 3473523 - RNA, 22 nt, Human
gagacccugcaaacagaacagg

SEQ ID NO: 3473524 - RNA, 15 nt, Human
gagaccgagugaacc

SEQ ID NO: 3473525 - RNA, 20 nt, Human
gagaccgggguauccugggg

SEQ ID NO: 3473526 - RNA, 22 nt, Human
gagaccguccucaccccugucc

SEQ ID NO: 3473527 - RNA, 20 nt, Human
gagaccgugaagauacuuug

SEQ ID NO: 3473528 - RNA, 15 nt, Human
gagaccuacaggcug

SEQ ID NO: 3473529 - RNA, 14 nt, Human
gagaccuaccucag

SEQ ID NO: 3473530 - RNA, 17 nt, Human
gagaccuaccucagguu

SEQ ID NO: 3473531 - RNA, 18 nt, Human
gagaccuaccucagguug

SEQ ID NO: 3473532 - RNA, 23 nt, Human
gagaccuaccucagguugcuggu

SEQ ID NO: 3473533 - RNA, 13 nt, Human
gagaccucagaag

SEQ ID NO: 3473534 - RNA, 13 nt, Human
gagaccucagcca

SEQ ID NO: 3473535 - RNA, 19 nt, Human
gagaccucaucaggaugaa

SEQ ID NO: 3473536 - RNA, 19 nt, Human
gagaccuggacacaggccu

SEQ ID NO: 3473537 - RNA, 12 nt, Human
gagaccuuaccc

SEQ ID NO: 3473538 - RNA, 15 nt, Human
gagacgacaggcgag

SEQ ID NO: 3473539 - RNA, 14 nt, Human
gagacggaguccca

SEQ ID NO: 3473540 - RNA, 23 nt, Human
gagacgggacugcggaggaagga

SEQ ID NO: 3473541 - RNA, 19 nt, Human
gagacggugucuuguucug

SEQ ID NO: 3473542 - RNA, 17 nt, Human
gagacgguuuccaggga

SEQ ID NO: 3473543 - RNA, 19 nt, Human
gagacgguuuccagggagg

SEQ ID NO: 3473544 - RNA, 14 nt, Human
gagacuaagcccug

SEQ ID NO: 3473545 - RNA, 15 nt, Human
gagacuaagcccugu

SEQ ID NO: 3473546 - RNA, 15 nt, Human
gagacuacuaagagg

SEQ ID NO: 3473547 - RNA, 16 nt, Human
gagacuagauugccuu

SEQ ID NO: 3473548 - RNA, 21 nt, Human
gagacuagauuuaugaauaca

SEQ ID NO: 3473549 - RNA, 20 nt, Human
gagacuaugcguuuuuauaa

SEQ ID NO: 3473550 - RNA, 14 nt, Human
gagacuauggagcc

SEQ ID NO: 3473551 - RNA, 22 nt, Human
gagacuauggagccuggcacag

SEQ ID NO: 3473552 - RNA, 15 nt, Human
gagacucaccucugc

SEQ ID NO: 3473553 - RNA, 17 nt, Human
gagacucaccucugccu

SEQ ID NO: 3473554 - RNA, 19 nt, Human
gagacucaccucugccuca

SEQ ID NO: 3473555 - RNA, 17 nt, Human
gagacucagggccccag

SEQ ID NO: 3473556 - RNA, 19 nt, Human
gagacuccagaccugaggc

SEQ ID NO: 3473557 - RNA, 18 nt, Human
gagacucccaugaagccu

SEQ ID NO: 3473558 - RNA, 19 nt, Human
gagacucccaugaagccuu

SEQ ID NO: 3473559 - RNA, 18 nt, Human
gagacuccgucucaagga

SEQ ID NO: 3473560 - RNA, 16 nt, Human
gagacuccuaggcagg

SEQ ID NO: 3473561 - RNA, 14 nt, Human
gagacuccugcagg

SEQ ID NO: 3473562 - RNA, 17 nt, Human
gagacuccugcaggcag

SEQ ID NO: 3473563 - RNA, 16 nt, Human
gagacucgacucugug

SEQ ID NO: 3473564 - RNA, 17 nt, Human
gagacucgacucugugc

SEQ ID NO: 3473565 - RNA, 15 nt, Human
gagacucgagaacuu

SEQ ID NO: 3473566 - RNA, 16 nt, Human
gagacucgagaacuuu

SEQ ID NO: 3473567 - RNA, 16 nt, Human
gagacucgcgacaaug

SEQ ID NO: 3473568 - RNA, 16 nt, Human
gagacucuagggucca

SEQ ID NO: 3473569 - RNA, 20 nt, Human
gagacucuaggguccagugg

SEQ ID NO: 3473570 - RNA, 16 nt, Human
gagacugcguucugca

SEQ ID NO: 3473571 - RNA, 17 nt, Human
gagacugcguucugcaa

SEQ ID NO: 3473572 - RNA, 19 nt, Human
gagacugcuccugagcccc

SEQ ID NO: 3473573 - RNA, 16 nt, Human
gagacuggagcaucug

SEQ ID NO: 3473574 - RNA, 19 nt, Human
gagacuggcgugaacccag

SEQ ID NO: 3473575 - RNA, 13 nt, Human
gagacugggaaga

SEQ ID NO: 3473576 - RNA, 17 nt, Human
gagacugggaaggcuug

SEQ ID NO: 3473577 - RNA, 16 nt, Human
gagacugguccugugu

SEQ ID NO: 3473578 - RNA, 13 nt, Human
gagacugucccug

SEQ ID NO: 3473579 - RNA, 12 nt, Human
gagacugugcug

SEQ ID NO: 3473580 - RNA, 22 nt, Human
gagacugugugugcccucuggg

SEQ ID NO: 3473581 - RNA, 17 nt, Human
gagacuguuuugaauuu

SEQ ID NO: 3473582 - RNA, 18 nt, Human
gagacuuagggcaccagg

SEQ ID NO: 3473583 - RNA, 13 nt, Human
gagacuuguauga

SEQ ID NO: 3473584 - RNA, 21 nt, Human
gagacuuuccauuacaaguau

SEQ ID NO: 3473585 - RNA, 20 nt, Human
gagacuuugacucuccagaa

SEQ ID NO: 3473586 - RNA, 14 nt, Human
gagacuuugauguc

SEQ ID NO: 3473587 - RNA, 21 nt, Human
gagacuuuuugguggauguaa

SEQ ID NO: 3473588 - RNA, 23 nt, Human
gagagaaaacagaccuaaugcuc

SEQ ID NO: 3473589 - RNA, 13 nt, Human
gagagaaaacuua

SEQ ID NO: 3473590 - RNA, 20 nt, Human
gagagaaaauaaaaaguuaa

SEQ ID NO: 3473591 - RNA, 11 nt, Human
gagagaaagaa

SEQ ID NO: 3473592 - RNA, 21 nt, Human
gagagaaagccaggcagguag

SEQ ID NO: 3473593 - RNA, 14 nt, Human
gagagaaaggacuc

SEQ ID NO: 3473594 - RNA, 15 nt, Human
gagagaaagugggug

SEQ ID NO: 3473595 - RNA, 18 nt, Human
gagagaaagugggugaga

SEQ ID NO: 3473596 - RNA, 22 nt, Human
gagagaaagugggugagaugcu

SEQ ID NO: 3473597 - RNA, 11 nt, Human
gagagaaauau

SEQ ID NO: 3473598 - RNA, 23 nt, Human
gagagaaauucuguuaaaaucua

SEQ ID NO: 3473599 - RNA, 20 nt, Human
gagagaaccuaacuguaucu

SEQ ID NO: 3473600 - RNA, 14 nt, Human
gagagaagagcccc

SEQ ID NO: 3473601 - RNA, 17 nt, Human
gagagaaggggaggagg

SEQ ID NO: 3473602 - RNA, 18 nt, Human
gagagaagugccccugcu

SEQ ID NO: 3473603 - RNA, 21 nt, Human
gagagaagugccccugcugcc

SEQ ID NO: 3473604 - RNA, 15 nt, Human
gagagacccaaggag

SEQ ID NO: 3473605 - RNA, 19 nt, Human
gagagaccgaggagggaga

SEQ ID NO: 3473606 - RNA, 17 nt, Human
gagagaccucaucagga

SEQ ID NO: 3473607 - RNA, 19 nt, Human
gagagacucccaugaagcc

SEQ ID NO: 3473608 - RNA, 15 nt, Human
gagaugaggccagac

SEQ ID NO: 3473609 - RNA, 21 nt, Human
gagaugcaccaccaagccaag

SEQ ID NO: 3473610 - RNA, 16 nt, Human
gagaugcagagguaaa

SEQ ID NO: 3473611 - RNA, 15 nt, Human
gagaugccuccaccg

SEQ ID NO: 3473612 - RNA, 19 nt, Human
gagaugccuccaccgcugc

SEQ ID NO: 3473613 - RNA, 23 nt, Human
gagaugccuccaccgcugccuaa

SEQ ID NO: 3473614 - RNA, 20 nt, Human
gagaugcuggagaagagagg

SEQ ID NO: 3473615 - RNA, 21 nt, Human
gagaugcuggagaagagagga

SEQ ID NO: 3473616 - RNA, 14 nt, Human
gagaugcugugccc

SEQ ID NO: 3473617 - RNA, 15 nt, Human
gagaugcugugcccc

SEQ ID NO: 3473618 - RNA, 12 nt, Human
gagauggaggag

SEQ ID NO: 3473619 - RNA, 13 nt, Human
gagauggaggagg

SEQ ID NO: 3473620 - RNA, 17 nt, Human
gagauggagucuugcua

SEQ ID NO: 3473621 - RNA, 20 nt, Human
gagaugggaaugagguggga

SEQ ID NO: 3473622 - RNA, 14 nt, Human
gagaugggagcucc

SEQ ID NO: 3473623 - RNA, 15 nt, Human
gagaugggagcuccu

SEQ ID NO: 3473624 - RNA, 23 nt, Human
gagaugggagcuccucuccugga

SEQ ID NO: 3473625 - RNA, 17 nt, Human
gagaugggcuucccaag

SEQ ID NO: 3473626 - RNA, 18 nt, Human
gagaugggcuuguuuucu

SEQ ID NO: 3473627 - RNA, 20 nt, Human
gagauggggaaagaauuccu

SEQ ID NO: 3473628 - RNA, 18 nt, Human
gagauggggauaaaauga

SEQ ID NO: 3473629 - RNA, 14 nt, Human
gagauggggugggg

SEQ ID NO: 3473630 - RNA, 21 nt, Human
gagaugguaugcacaauucca

SEQ ID NO: 3473631 - RNA, 21 nt, Human
gagaugucaucagagcuccuc

SEQ ID NO: 3473632 - RNA, 12 nt, Human
gagaugucuucg

SEQ ID NO: 3473633 - RNA, 22 nt, Human
gagaugucuucguacaguucuu

SEQ ID NO: 3473634 - RNA, 17 nt, Human
gagauguguaauuuuuc

SEQ ID NO: 3473635 - RNA, 17 nt, Human
gagauguguaucagugu

SEQ ID NO: 3473636 - RNA, 23 nt, Human
gagauguguguugauacuguugc

SEQ ID NO: 3473637 - RNA, 14 nt, Human
gagauguuuuuaaa

SEQ ID NO: 3473638 - RNA, 17 nt, Human
gagauguuuuuaaaagu

SEQ ID NO: 3473639 - RNA, 19 nt, Human
gagauguuuuuaaaaguuu

SEQ ID NO: 3473640 - RNA, 14 nt, Human
gagauuacaggcau

SEQ ID NO: 3473641 - RNA, 14 nt, Human
gagauucaauauug

SEQ ID NO: 3473642 - RNA, 23 nt, Human
gagauucccgcggguuccgcagg

SEQ ID NO: 3473643 - RNA, 23 nt, Human
gagauucucauaacuugagaccu

SEQ ID NO: 3473644 - RNA, 22 nt, Human
gagauugaauuucacugucuuu

SEQ ID NO: 3473645 - RNA, 18 nt, Human
gagauugagaaggagaga

SEQ ID NO: 3473646 - RNA, 12 nt, Human
gagauugcuaau

SEQ ID NO: 3473647 - RNA, 17 nt, Human
gagauuggacggccuga

SEQ ID NO: 3473648 - RNA, 13 nt, Human
gagauuuacaacu

SEQ ID NO: 3473649 - RNA, 16 nt, Human
gagauuuauuaaagaa

SEQ ID NO: 3473650 - RNA, 17 nt, Human
gagauuuauuaaagaaa

SEQ ID NO: 3473651 - RNA, 12 nt, Human
gagauuuuccuu

SEQ ID NO: 3473652 - RNA, 17 nt, Human
gagauuuuuuauugcua

SEQ ID NO: 3473653 - RNA, 20 nt, Human
gagcaaaaugcauguaauca

SEQ ID NO: 3473654 - RNA, 13 nt, Human
gagcaaaccugcc

SEQ ID NO: 3473655 - RNA, 14 nt, Human
gagcaaaccugccc

SEQ ID NO: 3473656 - RNA, 14 nt, Human
gagcaaagaucaaa

SEQ ID NO: 3473657 - RNA, 18 nt, Human
gagcaaagaucaaaauaa

SEQ ID NO: 3473658 - RNA, 22 nt, Human
gagcaaagaucaaaauaaaaag

SEQ ID NO: 3473659 - RNA, 12 nt, Human
gagcaaagccug

SEQ ID NO: 3473660 - RNA, 22 nt, Human
gagcaaaggggucccauagagg

SEQ ID NO: 3473661 - RNA, 20 nt, Human
gagcaaagugaagacacugg

SEQ ID NO: 3473662 - RNA, 15 nt, Human
gagcaaauguuucug

SEQ ID NO: 3473663 - RNA, 16 nt, Human
gagcaaauguuucugc

SEQ ID NO: 3473664 - RNA, 21 nt, Human
gagcaaccguggcccuuccug

SEQ ID NO: 3473665 - RNA, 23 nt, Human
gagcaaccguggcccuuccugga

SEQ ID NO: 3473666 - RNA, 20 nt, Human
gagcaaccucucacucccca

SEQ ID NO: 3473667 - RNA, 14 nt, Human
gagcaagagagcag

SEQ ID NO: 3473668 - RNA, 11 nt, Human
gagcaagagga

SEQ ID NO: 3473669 - RNA, 20 nt, Human
gagcaaggguucccucaaga

SEQ ID NO: 3473670 - RNA, 13 nt, Human
gagcaagucugca

SEQ ID NO: 3473671 - RNA, 16 nt, Human
gagcaagucugcaggu

SEQ ID NO: 3473672 - RNA, 16 nt, Human
gagcaauauuuaugga

SEQ ID NO: 3473673 - RNA, 17 nt, Human
gagcaaugucugugcua

SEQ ID NO: 3473674 - RNA, 21 nt, Human
gagcacaaaauucaaagcaug

SEQ ID NO: 3473675 - RNA, 14 nt, Human
gagcacaaacauuu

SEQ ID NO: 3473676 - RNA, 20 nt, Human
gagcacaaagacccuggcuu

SEQ ID NO: 3473677 - RNA, 18 nt, Human
gagcacaacccccagcuc

SEQ ID NO: 3473678 - RNA, 15 nt, Human
gagcacacuggcuca

SEQ ID NO: 3473679 - RNA, 15 nt, Human
gagcacacuguagca

SEQ ID NO: 3473680 - RNA, 20 nt, Human
gagcacacuuuaguggccga

SEQ ID NO: 3473681 - RNA, 13 nt, Human
gagcacagcccuc

SEQ ID NO: 3473682 - RNA, 20 nt, Human
gagcacagcccucccgcccc

SEQ ID NO: 3473683 - RNA, 14 nt, Human
gagcacagguccca

SEQ ID NO: 3473684 - RNA, 13 nt, Human
gagcaccaggcac

SEQ ID NO: 3473685 - RNA, 23 nt, Human
gagcaccaggcacgaacccaccu

SEQ ID NO: 3473686 - RNA, 13 nt, Human
gagcaccagggga

SEQ ID NO: 3473687 - RNA, 16 nt, Human
gagcaccccucucugc

SEQ ID NO: 3473688 - RNA, 14 nt, Human
gagcacccugaggg

SEQ ID NO: 3473689 - RNA, 15 nt, Human
gagcacccugagggc

SEQ ID NO: 3473690 - RNA, 15 nt, Human
gagcaccugcugucu

SEQ ID NO: 3473691 - RNA, 19 nt, Human
gagcaccuuccucacuucc

SEQ ID NO: 3473692 - RNA, 20 nt, Human
gagcacggccaacaaagcug

SEQ ID NO: 3473693 - RNA, 13 nt, Human
gagcacggcucug

SEQ ID NO: 3473694 - RNA, 20 nt, Human
gagcacucccaagucuacag

SEQ ID NO: 3473695 - RNA, 12 nt, Human
gagcacugccag

SEQ ID NO: 3473696 - RNA, 16 nt, Human
gagcacugccaggagg

SEQ ID NO: 3473697 - RNA, 19 nt, Human
gagcacuuaagagaauauu

SEQ ID NO: 3473698 - RNA, 18 nt, Human
gagcagaaggggagaugg

SEQ ID NO: 3473699 - RNA, 15 nt, Human
gagcagacaggagga

SEQ ID NO: 3473700 - RNA, 22 nt, Human
gagcagaccaccccgccugccc

SEQ ID NO: 3473701 - RNA, 14 nt, Human
gagcagacuacagc

SEQ ID NO: 3473702 - RNA, 15 nt, Human
gagcagagaauauaa

SEQ ID NO: 3473703 - RNA, 17 nt, Human
gagcagagaccaucccu

SEQ ID NO: 3473704 - RNA, 19 nt, Human
gagcagagaccaucccuga

SEQ ID NO: 3473705 - RNA, 12 nt, Human
gagcagagagcu

SEQ ID NO: 3473706 - RNA, 18 nt, Human
gagcagagcaagucugca

SEQ ID NO: 3473707 - RNA, 14 nt, Human
gagcagaggucucc

SEQ ID NO: 3473708 - RNA, 11 nt, Human
gagcagagucu

SEQ ID NO: 3473709 - RNA, 21 nt, Human
gagcagcaaggucuugcucuc

SEQ ID NO: 3473710 - RNA, 17 nt, Human
gagcagcacccauccac

SEQ ID NO: 3473711 - RNA, 14 nt, Human
gagcagcaccuccu

SEQ ID NO: 3473712 - RNA, 21 nt, Human
gagcagcaccuccucagccug

SEQ ID NO: 3473713 - RNA, 22 nt, Human
gagcagcaccuccucagccuga

SEQ ID NO: 3473714 - RNA, 18 nt, Human
gagcagcaggagggggga

SEQ ID NO: 3473715 - RNA, 22 nt, Human
gagcagcaggaggggggaggga

SEQ ID NO: 3473716 - RNA, 17 nt, Human
gagcagcagugaaaaca

SEQ ID NO: 3473717 - RNA, 14 nt, Human
gagcagccaggaga

SEQ ID NO: 3473718 - RNA, 17 nt, Human
gagcagccucagaacaa

SEQ ID NO: 3473719 - RNA, 22 nt, Human
gagcagccuggagcccuggaga

SEQ ID NO: 3473720 - RNA, 13 nt, Human
gagcagccugugg

SEQ ID NO: 3473721 - RNA, 15 nt, Human
gagcagcgagccugc

SEQ ID NO: 3473722 - RNA, 13 nt, Human
gagcagcugagca

SEQ ID NO: 3473723 - RNA, 14 nt, Human
gagcagcugagcag

SEQ ID NO: 3473724 - RNA, 14 nt, Human
gagcaggaaggccu

SEQ ID NO: 3473725 - RNA, 15 nt, Human
gagcaggaaggccug

SEQ ID NO: 3473726 - RNA, 20 nt, Human
gagcaggacuccaggcccaa

SEQ ID NO: 3473727 - RNA, 20 nt, Human
gagcaggaggccuaggaggg

SEQ ID NO: 3473728 - RNA, 21 nt, Human
gagcaggaggccuaggagggu

SEQ ID NO: 3473729 - RNA, 21 nt, Human
gagcaggcacggguggucccc

SEQ ID NO: 3473730 - RNA, 18 nt, Human
gagcaggcuggcagcucu

SEQ ID NO: 3473731 - RNA, 20 nt, Human
gagcaggcuggcagcucucc

SEQ ID NO: 3473732 - RNA, 22 nt, Human
gagcaggcuggcagcucuccag

SEQ ID NO: 3473733 - RNA, 16 nt, Human
gagcagggaaggccug

SEQ ID NO: 3473734 - RNA, 16 nt, Human
gagcagggugcugugg

SEQ ID NO: 3473735 - RNA, 17 nt, Human
gagcaguaucaugaagc

SEQ ID NO: 3473736 - RNA, 16 nt, Human
gagcaguccaugcaug

SEQ ID NO: 3473737 - RNA, 13 nt, Human
gagcaguccuugg

SEQ ID NO: 3473738 - RNA, 22 nt, Human
gagcaguccuuggccugcuaag

SEQ ID NO: 3473739 - RNA, 17 nt, Human
gagcagugcaggcacag

SEQ ID NO: 3473740 - RNA, 15 nt, Human
gagcagugcuuuugg

SEQ ID NO: 3473741 - RNA, 14 nt, Human
gagcaguggcuggu

SEQ ID NO: 3473742 - RNA, 11 nt, Human
gagcagugucu

SEQ ID NO: 3473743 - RNA, 17 nt, Human
gagcagugucuuccaua

SEQ ID NO: 3473744 - RNA, 16 nt, Human
gagcagugugucuccu

SEQ ID NO: 3473745 - RNA, 19 nt, Human
gagcagugugucuccugca

SEQ ID NO: 3473746 - RNA, 17 nt, Human
gagcaguuucuguccug

SEQ ID NO: 3473747 - RNA, 21 nt, Human
gagcauacaucuuaaaucuuu

SEQ ID NO: 3473748 - RNA, 14 nt, Human
gagcauagaaggca

SEQ ID NO: 3473749 - RNA, 16 nt, Human
gagcauagaaggcagg

SEQ ID NO: 3473750 - RNA, 14 nt, Human
gagcaucacagaau

SEQ ID NO: 3473751 - RNA, 14 nt, Human
gagcaucaugccuc

SEQ ID NO: 3473752 - RNA, 17 nt, Human
gagcaucaugccucuga

SEQ ID NO: 3473753 - RNA, 20 nt, Human
gagcaucaugccucugaggc

SEQ ID NO: 3473754 - RNA, 17 nt, Human
ggagagggucuggagaa

SEQ ID NO: 3473755 - RNA, 23 nt, Human
ggagagggucuggagaagcagug

SEQ ID NO: 3473756 - RNA, 14 nt, Human
ggagaggugccagc

SEQ ID NO: 3473757 - RNA, 13 nt, Human
ggagagguggagc

SEQ ID NO: 3473758 - RNA, 21 nt, Human
ggagagguuauaggucacucc

SEQ ID NO: 3473759 - RNA, 17 nt, Human
ggagagucccagagcag

SEQ ID NO: 3473760 - RNA, 21 nt, Human
ggagagucccagagcaggagg

SEQ ID NO: 3473761 - RNA, 22 nt, Human
ggagagucccagagcaggaggc

SEQ ID NO: 3473762 - RNA, 17 nt, Human
ggagagucuugcaguga

SEQ ID NO: 3473763 - RNA, 13 nt, Human
ggagagugggggu

SEQ ID NO: 3473764 - RNA, 21 nt, Human
ggagagugucaaccagacaga

SEQ ID NO: 3473765 - RNA, 21 nt, Human
ggagauaacaaucuguauaua

SEQ ID NO: 3473766 - RNA, 18 nt, Human
ggagauacugguggaagu

SEQ ID NO: 3473767 - RNA, 23 nt, Human
ggagauacuuggucacagccagg

SEQ ID NO: 3473768 - RNA, 20 nt, Human
ggagauagccccacaggagg

SEQ ID NO: 3473769 - RNA, 15 nt, Human
ggagauccuccugca

SEQ ID NO: 3473770 - RNA, 19 nt, Human
ggagaugaagcaaacacau

SEQ ID NO: 3473771 - RNA, 14 nt, Human
ggagaugaggccag

SEQ ID NO: 3473772 - RNA, 21 nt, Human
ggagaugccaugagccgccca

SEQ ID NO: 3473773 - RNA, 14 nt, Human
ggagaugcugugcc

SEQ ID NO: 3473774 - RNA, 24 nt, Human
ggagaugcugugccccuggccuug

SEQ ID NO: 3473775 - RNA, 13 nt, Human
ggagauggggaga

SEQ ID NO: 3473776 - RNA, 14 nt, Human
ggagaugucuucgu

SEQ ID NO: 3473777 - RNA, 15 nt, Human
ggagauugaccugga

SEQ ID NO: 3473778 - RNA, 16 nt, Human
ggagauugagaaggag

SEQ ID NO: 3473779 - RNA, 17 nt, Human
ggagauuggacggccug

SEQ ID NO: 3473780 - RNA, 19 nt, Human
ggagauuuuagguguugau

SEQ ID NO: 3473781 - RNA, 21 nt, Human
ggagauuuugagguaaagaua

SEQ ID NO: 3473782 - RNA, 22 nt, Human
ggagauuuuuuugagucaaaga

SEQ ID NO: 3473783 - RNA, 21 nt, Human
ggagcaaacugcaugcccaga

SEQ ID NO: 3473784 - RNA, 14 nt, Human
ggagcaaagccugu

SEQ ID NO: 3473785 - RNA, 24 nt, Human
ggagcaaagccuguucauggcaga

SEQ ID NO: 3473786 - RNA, 15 nt, Human
ggagcaaauguuucu

SEQ ID NO: 3473787 - RNA, 20 nt, Human
ggagcaaauguuucugcagu

SEQ ID NO: 3473788 - RNA, 13 nt, Human
ggagcaagaggag

SEQ ID NO: 3473789 - RNA, 17 nt, Human
ggagcacaaagacccug

SEQ ID NO: 3473790 - RNA, 15 nt, Human
ggagcacacccagcc

SEQ ID NO: 3473791 - RNA, 17 nt, Human
ggagcacacccagcccc

SEQ ID NO: 3473792 - RNA, 16 nt, Human
ggagcacacuggcuca

SEQ ID NO: 3473793 - RNA, 14 nt, Human
ggagcacagguccc

SEQ ID NO: 3473794 - RNA, 17 nt, Human
ggagcaccaggcacgaa

SEQ ID NO: 3473795 - RNA, 15 nt, Human
ggagcacugggcucc

SEQ ID NO: 3473796 - RNA, 19 nt, Human
ggagcagagcaagucugca

SEQ ID NO: 3473797 - RNA, 23 nt, Human
ggagcagagcugauggagaagga

SEQ ID NO: 3473798 - RNA, 21 nt, Human
ggagcagccacauuccugaug

SEQ ID NO: 3473799 - RNA, 13 nt, Human
ggagcagccucag

SEQ ID NO: 3473800 - RNA, 13 nt, Human
ggagcaggaacaa

SEQ ID NO: 3473801 - RNA, 15 nt, Human
ggagcaggagauuga

SEQ ID NO: 3473802 - RNA, 16 nt, Human
ggagcaggagauugag

SEQ ID NO: 3473803 - RNA, 22 nt, Human
ggagcaggagauugagaaggag

SEQ ID NO: 3473804 - RNA, 16 nt, Human
ggagcaggcagccagc

SEQ ID NO: 3473805 - RNA, 23 nt, Human
ggagcaggcgguggggagagaug

SEQ ID NO: 3473806 - RNA, 16 nt, Human
ggagcagggaaggccu

SEQ ID NO: 3473807 - RNA, 19 nt, Human
ggagcagggaaggccugac

SEQ ID NO: 3473808 - RNA, 21 nt, Human
ggagcagggaaggccugacuu

SEQ ID NO: 3473809 - RNA, 18 nt, Human
ggagcagggacagaucau

SEQ ID NO: 3473810 - RNA, 15 nt, Human
ggagcaggggcgugg

SEQ ID NO: 3473811 - RNA, 18 nt, Human
ggagcaguaucaugaagc

SEQ ID NO: 3473812 - RNA, 16 nt, Human
ggagcaguccaugcau

SEQ ID NO: 3473813 - RNA, 18 nt, Human
ggagcagugcaggcacag

SEQ ID NO: 3473814 - RNA, 13 nt, Human
ggagcagugucuu

SEQ ID NO: 3473815 - RNA, 17 nt, Human
ggagcagugucuuccau

SEQ ID NO: 3473816 - RNA, 15 nt, Human
ggagcaucaagccac

SEQ ID NO: 3473817 - RNA, 18 nt, Human
ggagcauccaccuccuuc

SEQ ID NO: 3473818 - RNA, 21 nt, Human
ggagcaucccggaggaaaucu

SEQ ID NO: 3473819 - RNA, 16 nt, Human
ggagcaucucuugagg

SEQ ID NO: 3473820 - RNA, 20 nt, Human
ggagcaucucuugaggccag

SEQ ID NO: 3473821 - RNA, 17 nt, Human
ggagcauggcugugagg

SEQ ID NO: 3473822 - RNA, 19 nt, Human
ggagcauguuuuguauaca

SEQ ID NO: 3473823 - RNA, 19 nt, Human
ggagcauuggcugagagac

SEQ ID NO: 3473824 - RNA, 15 nt, Human
ggagcauugggaccu

SEQ ID NO: 3473825 - RNA, 19 nt, Human
ggagcauuuggagagaagg

SEQ ID NO: 3473826 - RNA, 16 nt, Human
ggagccaagggaugga

SEQ ID NO: 3473827 - RNA, 18 nt, Human
ggagccaagggauggaca

SEQ ID NO: 3473828 - RNA, 17 nt, Human
ggagccaaguccagauu

SEQ ID NO: 3473829 - RNA, 14 nt, Human
ggagccaccaguuc

SEQ ID NO: 3473830 - RNA, 13 nt, Human
ggagccaccuguc

SEQ ID NO: 3473831 - RNA, 13 nt, Human
ggagccagacaga

SEQ ID NO: 3473832 - RNA, 14 nt, Human
ggagccagccgagc

SEQ ID NO: 3473833 - RNA, 15 nt, Human
ggagccagccucccu

SEQ ID NO: 3473834 - RNA, 21 nt, Human
ggagccagcucccucuauuua

SEQ ID NO: 3473835 - RNA, 11 nt, Human
ggagccaggcg

SEQ ID NO: 3473836 - RNA, 17 nt, Human
ggagcccacgacacugc

SEQ ID NO: 3473837 - RNA, 12 nt, Human
ggagcccacugu

SEQ ID NO: 3473838 - RNA, 22 nt, Human
ggagcccacuguacuugcucuu

SEQ ID NO: 3473839 - RNA, 16 nt, Human
ggagcccagcccuccc

SEQ ID NO: 3473840 - RNA, 19 nt, Human
ggagcccagcccuccccau

SEQ ID NO: 3473841 - RNA, 16 nt, Human
ggagcccagcucugaa

SEQ ID NO: 3473842 - RNA, 15 nt, Human
ggagcccaggccagg

SEQ ID NO: 3473843 - RNA, 16 nt, Human
ggagcccaggccagga

SEQ ID NO: 3473844 - RNA, 24 nt, Human
ggagcccaggccaggacucugcag

SEQ ID NO: 3473845 - RNA, 15 nt, Human
ggagcccagggcauc

SEQ ID NO: 3473846 - RNA, 13 nt, Human
ggagccccagccc

SEQ ID NO: 3473847 - RNA, 20 nt, Human
ggagccccagcccccuuugg

SEQ ID NO: 3473848 - RNA, 14 nt, Human
ggagccccaggguc

SEQ ID NO: 3473849 - RNA, 14 nt, Human
ggagccccagugcc

SEQ ID NO: 3473850 - RNA, 16 nt, Human
ggagccccauuccugg

SEQ ID NO: 3473851 - RNA, 13 nt, Human
ggagcccccagcc

SEQ ID NO: 3473852 - RNA, 18 nt, Human
ggagcccccagccuguca

SEQ ID NO: 3473853 - RNA, 14 nt, Human
ggagccccugggug

SEQ ID NO: 3473854 - RNA, 16 nt, Human
ggagccccuggguggg

SEQ ID NO: 3473855 - RNA, 21 nt, Human
ggagccccuggguggguggug

SEQ ID NO: 3473856 - RNA, 22 nt, Human
ggagccccuggguggguggugg

SEQ ID NO: 3473857 - RNA, 19 nt, Human
ggagccccuucugcucagc

SEQ ID NO: 3473858 - RNA, 21 nt, Human
ggagcccgaggcaccaguguc

SEQ ID NO: 3473859 - RNA, 16 nt, Human
ggagcccgucucagug

SEQ ID NO: 3473860 - RNA, 18 nt, Human
ggagcccuccgccuucac

SEQ ID NO: 3473861 - RNA, 14 nt, Human
ggagcccugccucu

SEQ ID NO: 3473862 - RNA, 19 nt, Human
ggagcccugccucuccgcc

SEQ ID NO: 3473863 - RNA, 12 nt, Human
ggagcccuggga

SEQ ID NO: 3473864 - RNA, 13 nt, Human
ggagcccugggag

SEQ ID NO: 3473865 - RNA, 16 nt, Human
ggagcccugggaggcu

SEQ ID NO: 3473866 - RNA, 20 nt, Human
ggagcccuuaucugugcuca

SEQ ID NO: 3473867 - RNA, 22 nt, Human
ggagcccuuaucugugcucagg

SEQ ID NO: 3473868 - RNA, 13 nt, Human
ggagcccuugggu

SEQ ID NO: 3473869 - RNA, 19 nt, Human
ggagccgaagcccaggggc

SEQ ID NO: 3473870 - RNA, 14 nt, Human
ggagccgcuggcag

SEQ ID NO: 3473871 - RNA, 16 nt, Human
ggagccgggagccuga

SEQ ID NO: 3473872 - RNA, 17 nt, Human
ggagccgggucugccuc

SEQ ID NO: 3473873 - RNA, 22 nt, Human
ggagccucccugccucaggccu

SEQ ID NO: 3473874 - RNA, 13 nt, Human
ggagccuccugcc

SEQ ID NO: 3473875 - RNA, 15 nt, Human
ggagccuccugcccu

SEQ ID NO: 3473876 - RNA, 23 nt, Human
ggagccugagucagggcccagag

SEQ ID NO: 3473877 - RNA, 22 nt, Human
ggagccugcaaacucacugcuc

SEQ ID NO: 3473878 - RNA, 11 nt, Human
ggagccugcag

SEQ ID NO: 3473879 - RNA, 17 nt, Human
ggagccugcagagcugc

SEQ ID NO: 3473880 - RNA, 13 nt, Human
ggagccugcaggg

SEQ ID NO: 3473881 - RNA, 16 nt, Human
ggagccugcagggugg

SEQ ID NO: 3473882 - RNA, 13 nt, Human
ggagccugcuggu

SEQ ID NO: 3473883 - RNA, 13 nt, Human
ggagccuggcaca

SEQ ID NO: 3473884 - RNA, 14 nt, Human
ggagccuggcacag

SEQ ID NO: 3473885 - RNA, 19 nt, Human
ggagccuggcacaggacug

SEQ ID NO: 3473886 - RNA, 16 nt, Human
ggagccuguccugccu

SEQ ID NO: 3473887 - RNA, 20 nt, Human
ggagccuguccugccugugg

SEQ ID NO: 3473888 - RNA, 14 nt, Human
ggagccugugaacc

SEQ ID NO: 3473889 - RNA, 22 nt, Human
ggagccugugaacccaggacaa

SEQ ID NO: 3473890 - RNA, 16 nt, Human
ggagccuguguaacag

SEQ ID NO: 3473891 - RNA, 17 nt, Human
ggagccuguguaacagc

SEQ ID NO: 3473892 - RNA, 21 nt, Human
ggagccuucccaaguugugcu

SEQ ID NO: 3473893 - RNA, 23 nt, Human
ggagcgaacuggcgccuccgagg

SEQ ID NO: 3473894 - RNA, 15 nt, Human
ggagcgcaccugccc

SEQ ID NO: 3473895 - RNA, 19 nt, Human
ggagcgcaccugcccccug

SEQ ID NO: 3473896 - RNA, 21 nt, Human
ggagcgcaccugcccccuggu

SEQ ID NO: 3473897 - RNA, 23 nt, Human
ggagcgcaccugcccccuggugg

SEQ ID NO: 3473898 - RNA, 15 nt, Human
ggagcggcagauggg

SEQ ID NO: 3473899 - RNA, 19 nt, Human
ggagggccacaugggaggc

SEQ ID NO: 3473900 - RNA, 23 nt, Human
ggagggccacaugggaggcucac

SEQ ID NO: 3473901 - RNA, 16 nt, Human
ggagggcccuaccuga

SEQ ID NO: 3473902 - RNA, 23 nt, Human
ggagggccugggccuggcucccu

SEQ ID NO: 3473903 - RNA, 16 nt, Human
ggagggcuagaaccua

SEQ ID NO: 3473904 - RNA, 20 nt, Human
ggagggcuagaaccuggcag

SEQ ID NO: 3473905 - RNA, 23 nt, Human
ggagggcuagaaccuggcagguu

SEQ ID NO: 3473906 - RNA, 18 nt, Human
ggaggggaaaaaaauguu

SEQ ID NO: 3473907 - RNA, 16 nt, Human
ggaggggaagaggccu

SEQ ID NO: 3473908 - RNA, 14 nt, Human
ggaggggaagcugc

SEQ ID NO: 3473909 - RNA, 17 nt, Human
ggaggggaagcugcagc

SEQ ID NO: 3473910 - RNA, 12 nt, Human
ggaggggagcuc

SEQ ID NO: 3473911 - RNA, 13 nt, Human
ggaggggcaggcu

SEQ ID NO: 3473912 - RNA, 20 nt, Human
ggaggggcauggccagcagc

SEQ ID NO: 3473913 - RNA, 21 nt, Human
ggaggggccccugcuucucca

SEQ ID NO: 3473914 - RNA, 18 nt, Human
ggaggggcccgcuugccu

SEQ ID NO: 3473915 - RNA, 21 nt, Human
ggaggggccuaggccucagcc

SEQ ID NO: 3473916 - RNA, 13 nt, Human
ggaggggccuggc

SEQ ID NO: 3473917 - RNA, 14 nt, Human
ggaggggccuggca

SEQ ID NO: 3473918 - RNA, 12 nt, Human
ggaggggcgcug

SEQ ID NO: 3473919 - RNA, 19 nt, Human
ggaggggcgcuggcccagc

SEQ ID NO: 3473920 - RNA, 23 nt, Human
ggagggggagaaaaggaaaagaa

SEQ ID NO: 3473921 - RNA, 14 nt, Human
ggagggggauccga

SEQ ID NO: 3473922 - RNA, 13 nt, Human
ggagggggcaaag

SEQ ID NO: 3473923 - RNA, 16 nt, Human
ggagggggcuugaagc

SEQ ID NO: 3473924 - RNA, 12 nt, Human
ggaggggggagc

SEQ ID NO: 3473925 - RNA, 15 nt, Human
ggaggggggagccau

SEQ ID NO: 3473926 - RNA, 15 nt, Human
ggaggggggagggaa

SEQ ID NO: 3473927 - RNA, 16 nt, Human
ggaggggggagggaag

SEQ ID NO: 3473928 - RNA, 14 nt, Human
ggaggggggaggug

SEQ ID NO: 3473929 - RNA, 22 nt, Human
ggagggggucguggagagcuag

SEQ ID NO: 3473930 - RNA, 22 nt, Human
ggaggggguuugcuggggaacu

SEQ ID NO: 3473931 - RNA, 23 nt, Human
ggaggggguuugcuggggaacug

SEQ ID NO: 3473932 - RNA, 15 nt, Human
ggagggguguggcuc

SEQ ID NO: 3473933 - RNA, 17 nt, Human
ggagggguugccacagg

SEQ ID NO: 3473934 - RNA, 19 nt, Human
ggagggguugccacaggcc

SEQ ID NO: 3473935 - RNA, 21 nt, Human
ggagggguugccacaggccuc

SEQ ID NO: 3473936 - RNA, 20 nt, Human
ggaggguaaauaaaccacug

SEQ ID NO: 3473937 - RNA, 23 nt, Human
ggaggguaaaugauguggugccu

SEQ ID NO: 3473938 - RNA, 16 nt, Human
ggaggguacagcuggg

SEQ ID NO: 3473939 - RNA, 18 nt, Human
ggaggguagagcggagaa

SEQ ID NO: 3473940 - RNA, 15 nt, Human
ggaggguaggcagga

SEQ ID NO: 3473941 - RNA, 16 nt, Human
ggagggucaggaagga

SEQ ID NO: 3473942 - RNA, 21 nt, Human
ggagggugacgggggugaacu

SEQ ID NO: 3473943 - RNA, 13 nt, Human
ggagggugggaag

SEQ ID NO: 3473944 - RNA, 19 nt, Human
ggagggugggagagcccag

SEQ ID NO: 3473945 - RNA, 20 nt, Human
ggaggguuucauugucugug

SEQ ID NO: 3473946 - RNA, 14 nt, Human
ggagguaaugacca

SEQ ID NO: 3473947 - RNA, 20 nt, Human
ggaggucacauucaggaaga

SEQ ID NO: 3473948 - RNA, 23 nt, Human
ggaggucacauucaggaagauga

SEQ ID NO: 3473949 - RNA, 13 nt, Human
ggaggucacugga

SEQ ID NO: 3473950 - RNA, 15 nt, Human
ggaggucaggcccug

SEQ ID NO: 3473951 - RNA, 18 nt, Human
ggaggucgguagguucag

SEQ ID NO: 3473952 - RNA, 18 nt, Human
ggaggucugccaggcugu

SEQ ID NO: 3473953 - RNA, 17 nt, Human
ggaggugagaccaccuc

SEQ ID NO: 3473954 - RNA, 18 nt, Human
ggaggugauagcauugcu

SEQ ID NO: 3473955 - RNA, 14 nt, Human
ggaggugccagcaa

SEQ ID NO: 3473956 - RNA, 19 nt, Human
ggaggugccagcaaagccc

SEQ ID NO: 3473957 - RNA, 17 nt, Human
ggagguggaagaaggga

SEQ ID NO: 3473958 - RNA, 19 nt, Human
ggagguggagguugcagug

SEQ ID NO: 3473959 - RNA, 20 nt, Human
ggagguggauuccgaguggu

SEQ ID NO: 3473960 - RNA, 17 nt, Human
ggagguggcagcccugu

SEQ ID NO: 3473961 - RNA, 22 nt, Human
ggaggugggauccuccaggugc

SEQ ID NO: 3473962 - RNA, 19 nt, Human
ggaggugggccguggcccu

SEQ ID NO: 3473963 - RNA, 17 nt, Human
ggagguggggaugagaa

SEQ ID NO: 3473964 - RNA, 22 nt, Human
ggaggugucacauggugccccu

SEQ ID NO: 3473965 - RNA, 15 nt, Human
ggaggugucaggcug

SEQ ID NO: 3473966 - RNA, 19 nt, Human
ggaggugucaggcugcugg

SEQ ID NO: 3473967 - RNA, 16 nt, Human
ggaggugucucaggcu

SEQ ID NO: 3473968 - RNA, 17 nt, Human
ggaggugucucaggcug

SEQ ID NO: 3473969 - RNA, 15 nt, Human
ggaggugugaggcag

SEQ ID NO: 3473970 - RNA, 17 nt, Human
ggagguuaaggcugagg

SEQ ID NO: 3473971 - RNA, 16 nt, Human
ggagguucucucggag

SEQ ID NO: 3473972 - RNA, 20 nt, Human
ggagguugcagugagcugag

SEQ ID NO: 3473973 - RNA, 17 nt, Human
ggagguugcauugagcu

SEQ ID NO: 3473974 - RNA, 15 nt, Human
ggagguugggugggc

SEQ ID NO: 3473975 - RNA, 12 nt, Human
ggaguacaaggc

SEQ ID NO: 3473976 - RNA, 17 nt, Human
ggaguacaggugaagca

SEQ ID NO: 3473977 - RNA, 14 nt, Human
ggaguaucugggaa

SEQ ID NO: 3473978 - RNA, 13 nt, Human
ggaguauugaaug

SEQ ID NO: 3473979 - RNA, 18 nt, Human
ggagucauuugagucucu

SEQ ID NO: 3473980 - RNA, 15 nt, Human
ggaguccacucccag

SEQ ID NO: 3473981 - RNA, 19 nt, Human
ggaguccacucccagugcu

SEQ ID NO: 3473982 - RNA, 15 nt, Human
ggaguccaggcacag

SEQ ID NO: 3473983 - RNA, 16 nt, Human
ggaguccaggcacagg

SEQ ID NO: 3473984 - RNA, 21 nt, Human
ggaguccaggccauggaggca

SEQ ID NO: 3473985 - RNA, 16 nt, Human
ggagucccaaggaaag

SEQ ID NO: 3473986 - RNA, 22 nt, Human
ggagucccaccuuggcugcagg

SEQ ID NO: 3473987 - RNA, 13 nt, Human
ggaguccccucac

SEQ ID NO: 3473988 - RNA, 15 nt, Human
ggaguccccucaccu

SEQ ID NO: 3473989 - RNA, 22 nt, Human
ggagucguggggugugcuggga

SEQ ID NO: 3473990 - RNA, 14 nt, Human
ggagucugaagcag

SEQ ID NO: 3473991 - RNA, 16 nt, Human
ggagucugagguccug

SEQ ID NO: 3473992 - RNA, 18 nt, Human
ggagucugagguccugag

SEQ ID NO: 3473993 - RNA, 19 nt, Human
ggagucugagguccugagc

SEQ ID NO: 3473994 - RNA, 21 nt, Human
ggagucugagguccugagcac

SEQ ID NO: 3473995 - RNA, 23 nt, Human
ggagucugagguccugagcacug

SEQ ID NO: 3473996 - RNA, 20 nt, Human
ggagucugccacccaggauc

SEQ ID NO: 3473997 - RNA, 14 nt, Human
ggagucugccaggg

SEQ ID NO: 3473998 - RNA, 15 nt, Human
ggagucugccagggc

SEQ ID NO: 3473999 - RNA, 22 nt, Human
ggagucugccagggccccucuc

SEQ ID NO: 3474000 - RNA, 18 nt, Human
ggagucuggagugggcag

SEQ ID NO: 3474001 - RNA, 12 nt, Human
ggagucuugcuc

SEQ ID NO: 3474002 - RNA, 15 nt, Human
ggagugaagaggggc

SEQ ID NO: 3474003 - RNA, 20 nt, Human
ggagugaagaggggcagccc

SEQ ID NO: 3474004 - RNA, 22 nt, Human
ggagugaagaggggcagcccuu

SEQ ID NO: 3474005 - RNA, 11 nt, Human
ggagugacaga

SEQ ID NO: 3474006 - RNA, 16 nt, Human
ggagugacagaggcag

SEQ ID NO: 3474007 - RNA, 21 nt, Human
ggagugacagaggcagcccca

SEQ ID NO: 3474008 - RNA, 23 nt, Human
ggagugaggaauaguugagcccc

SEQ ID NO: 3474009 - RNA, 18 nt, Human
ggagugaggcaggugaca

SEQ ID NO: 3474010 - RNA, 18 nt, Human
ggagugcagggaggagag

SEQ ID NO: 3474011 - RNA, 22 nt, Human
ggagugcaguggcgaaaucccu

SEQ ID NO: 3474012 - RNA, 22 nt, Human
ggagugcggaccacccucacug

SEQ ID NO: 3474013 - RNA, 19 nt, Human
ggaguggcagcccagccag

SEQ ID NO: 3474014 - RNA, 20 nt, Human
ggaguggcagcccagccagc

SEQ ID NO: 3474015 - RNA, 14 nt, Human
ggagugggcagagc

SEQ ID NO: 3474016 - RNA, 16 nt, Human
ggagugugcguggugg

SEQ ID NO: 3474017 - RNA, 16 nt, Human
ggaguguguauuguuc

SEQ ID NO: 3474018 - RNA, 14 nt, Human
ggaguguuauguau

SEQ ID NO: 3474019 - RNA, 16 nt, Human
ggaguguuauguauuu

SEQ ID NO: 3474020 - RNA, 15 nt, Human
ggaguuaagaccugg

SEQ ID NO: 3474021 - RNA, 15 nt, Human
ggaguuagaggccag

SEQ ID NO: 3474022 - RNA, 16 nt, Human
ggaguuagaggccagc

SEQ ID NO: 3474023 - RNA, 19 nt, Human
ggaguuagggacugaccag

SEQ ID NO: 3474024 - RNA, 22 nt, Human
ggaguuagggacugaccagcag

SEQ ID NO: 3474025 - RNA, 16 nt, Human
ggaguucaaugaucua

SEQ ID NO: 3474026 - RNA, 18 nt, Human
ggaguucgagaccagccu

SEQ ID NO: 3474027 - RNA, 15 nt, Human
ggaguucgaggcugc

SEQ ID NO: 3474028 - RNA, 16 nt, Human
ggaguucuaugcucuc

SEQ ID NO: 3474029 - RNA, 20 nt, Human
ggaguugaucgccuuuccca

SEQ ID NO: 3474030 - RNA, 23 nt, Human
ggaguugaucgccuuucccaggu

SEQ ID NO: 3474031 - RNA, 14 nt, Human
ggaguugaucugga

SEQ ID NO: 3474032 - RNA, 18 nt, Human
ggaguuggaguagaaugu

SEQ ID NO: 3474033 - RNA, 13 nt, Human
ggaguugugggua

SEQ ID NO: 3474034 - RNA, 20 nt, Human
ggaguuuagggaacaauuug

SEQ ID NO: 3474035 - RNA, 13 nt, Human
ggaguuugaggcu

SEQ ID NO: 3474036 - RNA, 19 nt, Human
ggaguuugaggcugcagcg

SEQ ID NO: 3474037 - RNA, 15 nt, Human
ggaguuuggccagaa

SEQ ID NO: 3474038 - RNA, 18 nt, Human
ggauaaaaugacuacuua

SEQ ID NO: 3474039 - RNA, 15 nt, Human
ggauaaaaugagguu

SEQ ID NO: 3474040 - RNA, 19 nt, Human
ggauaaacuuuuagaaacu

SEQ ID NO: 3474041 - RNA, 13 nt, Human
ggauaaagcagcu

SEQ ID NO: 3474042 - RNA, 14 nt, Human
ggauaacaaagaua

SEQ ID NO: 3474043 - RNA, 16 nt, Human
ggauaacaaagauauc

SEQ ID NO: 3474044 - RNA, 16 nt, Human
ggauguguccugacac

SEQ ID NO: 3474045 - RNA, 13 nt, Human
ggaugugugcaug

SEQ ID NO: 3474046 - RNA, 18 nt, Human
ggauguuacuccaaaacu

SEQ ID NO: 3474047 - RNA, 15 nt, Human
ggauguucuggcccu

SEQ ID NO: 3474048 - RNA, 12 nt, Human
ggauuaaacuua

SEQ ID NO: 3474049 - RNA, 16 nt, Human
ggauuaaacuuaugaa

SEQ ID NO: 3474050 - RNA, 20 nt, Human
ggauuaaacuuaugaauguu

SEQ ID NO: 3474051 - RNA, 23 nt, Human
ggauuaaacuuaugaauguuucc

SEQ ID NO: 3474052 - RNA, 20 nt, Human
ggauuaacccacuagcucuu

SEQ ID NO: 3474053 - RNA, 15 nt, Human
ggauuaaccucugca

SEQ ID NO: 3474054 - RNA, 19 nt, Human
ggauuacaagcgugagcca

SEQ ID NO: 3474055 - RNA, 19 nt, Human
ggauuacaggcaugugcca

SEQ ID NO: 3474056 - RNA, 21 nt, Human
ggauuacaggcaugugccacc

SEQ ID NO: 3474057 - RNA, 19 nt, Human
ggauuacaggcgugagcca

SEQ ID NO: 3474058 - RNA, 17 nt, Human
ggauuagggagagaaga

SEQ ID NO: 3474059 - RNA, 18 nt, Human
ggauuaguuuagaacagg

SEQ ID NO: 3474060 - RNA, 15 nt, Human
ggauuauucauuuaa

SEQ ID NO: 3474061 - RNA, 21 nt, Human
ggauuauucauuuaaaaugau

SEQ ID NO: 3474062 - RNA, 22 nt, Human
ggauuauuuaauaacauuaccu

SEQ ID NO: 3474063 - RNA, 13 nt, Human
ggauuauuuuuuc

SEQ ID NO: 3474064 - RNA, 14 nt, Human
ggauuauuuuuuca

SEQ ID NO: 3474065 - RNA, 19 nt, Human
ggauucacaccccaccugc

SEQ ID NO: 3474066 - RNA, 21 nt, Human
ggauucaggaaaaggccuggg

SEQ ID NO: 3474067 - RNA, 15 nt, Human
ggauucaggcugcuu

SEQ ID NO: 3474068 - RNA, 16 nt, Human
ggauucauuacagcuu

SEQ ID NO: 3474069 - RNA, 22 nt, Human
ggauucauucucauaauuccua

SEQ ID NO: 3474070 - RNA, 13 nt, Human
ggauucauuuccu

SEQ ID NO: 3474071 - RNA, 16 nt, Human
ggauucauuuccugcc

SEQ ID NO: 3474072 - RNA, 17 nt, Human
ggauucauuuccugccc

SEQ ID NO: 3474073 - RNA, 18 nt, Human
ggauucauuuccugcccu

SEQ ID NO: 3474074 - RNA, 22 nt, Human
ggauuccacucguguguuucua

SEQ ID NO: 3474075 - RNA, 13 nt, Human
ggauuccaugcua

SEQ ID NO: 3474076 - RNA, 23 nt, Human
ggauuccuaaucacucagagcag

SEQ ID NO: 3474077 - RNA, 18 nt, Human
ggauuccucuuuucucug

SEQ ID NO: 3474078 - RNA, 14 nt, Human
ggauucuaaauaca

SEQ ID NO: 3474079 - RNA, 15 nt, Human
ggauucuaaauacau

SEQ ID NO: 3474080 - RNA, 23 nt, Human
ggauucuacuuuaagcacuacau

SEQ ID NO: 3474081 - RNA, 16 nt, Human
ggauucucaccagcug

SEQ ID NO: 3474082 - RNA, 19 nt, Human
ggauucugguuccaggguc

SEQ ID NO: 3474083 - RNA, 13 nt, Human
ggauucuuaaagu

SEQ ID NO: 3474084 - RNA, 16 nt, Human
ggauucuuaaaguuga

SEQ ID NO: 3474085 - RNA, 19 nt, Human
ggauucuuaaaguugaauu

SEQ ID NO: 3474086 - RNA, 20 nt, Human
ggauucuuaaaguugaauuu

SEQ ID NO: 3474087 - RNA, 16 nt, Human
ggauucuuccucccuc

SEQ ID NO: 3474088 - RNA, 19 nt, Human
ggauugaaaauguccagga

SEQ ID NO: 3474089 - RNA, 19 nt, Human
ggauugaaggaugcugucu

SEQ ID NO: 3474090 - RNA, 17 nt, Human
ggauugauuuuaaaaug

SEQ ID NO: 3474091 - RNA, 16 nt, Human
ggauugcgagagaugu

SEQ ID NO: 3474092 - RNA, 17 nt, Human
ggauugcuacuguccua

SEQ ID NO: 3474093 - RNA, 15 nt, Human
ggauuggcacuguuu

SEQ ID NO: 3474094 - RNA, 20 nt, Human
ggauuggcuuguguguuuca

SEQ ID NO: 3474095 - RNA, 17 nt, Human
ggauugggccccugcca

SEQ ID NO: 3474096 - RNA, 12 nt, Human
ggauuggggaag

SEQ ID NO: 3474097 - RNA, 15 nt, Human
ggauuguaaaauggu

SEQ ID NO: 3474098 - RNA, 20 nt, Human
ggauuguccccgacccuugc

SEQ ID NO: 3474099 - RNA, 17 nt, Human
ggauuuaaaaacuggaa

SEQ ID NO: 3474100 - RNA, 16 nt, Human
ggauuuaaaagccugc

SEQ ID NO: 3474101 - RNA, 17 nt, Human
ggauuuaaaagccugcu

SEQ ID NO: 3474102 - RNA, 19 nt, Human
ggauuuaaaagccugcuca

SEQ ID NO: 3474103 - RNA, 16 nt, Human
ggauuuaacagaaaug

SEQ ID NO: 3474104 - RNA, 22 nt, Human
ggauuuaacagaaauguacagc

SEQ ID NO: 3474105 - RNA, 14 nt, Human
ggauuuauuuaaaa

SEQ ID NO: 3474106 - RNA, 14 nt, Human
ggauuuauuuuucc

SEQ ID NO: 3474107 - RNA, 19 nt, Human
ggauuuccagccagggcug

SEQ ID NO: 3474108 - RNA, 23 nt, Human
ggauuuccugcuuugggaagccg

SEQ ID NO: 3474109 - RNA, 22 nt, Human
ggauuugcacagaagcacaugc

SEQ ID NO: 3474110 - RNA, 14 nt, Human
ggauuugccccuuc

SEQ ID NO: 3474111 - RNA, 22 nt, Human
ggauuugccccuucccaucucu

SEQ ID NO: 3474112 - RNA, 17 nt, Human
ggauuuggagagaaaua

SEQ ID NO: 3474113 - RNA, 22 nt, Human
ggauuuucuauuguuacucugg

SEQ ID NO: 3474114 - RNA, 12 nt, Human
ggauuuugagua

SEQ ID NO: 3474115 - RNA, 21 nt, Human
ggauuuugauccaagcugguc

SEQ ID NO: 3474116 - RNA, 11 nt, Human
ggcaaaaacaa

SEQ ID NO: 3474117 - RNA, 15 nt, Human
ggcaaaagccuugug

SEQ ID NO: 3474118 - RNA, 10 nt, Human
ggcaaaauaa

SEQ ID NO: 3474119 - RNA, 17 nt, Human
ggcaaacauuugaagga

SEQ ID NO: 3474120 - RNA, 13 nt, Human
ggcaaacccauca

SEQ ID NO: 3474121 - RNA, 14 nt, Human
ggcaaacuggccgc

SEQ ID NO: 3474122 - RNA, 16 nt, Human
ggcaaagacagaagcc

SEQ ID NO: 3474123 - RNA, 20 nt, Human
ggcaaagagacccagucaau

SEQ ID NO: 3474124 - RNA, 22 nt, Human
ggcaaagcacgaaauguuauuu

SEQ ID NO: 3474125 - RNA, 14 nt, Human
ggcaaagccagguc

SEQ ID NO: 3474126 - RNA, 13 nt, Human
ggcaaagcuguuc

SEQ ID NO: 3474127 - RNA, 20 nt, Human
ggcaaagggagcagaacuga

SEQ ID NO: 3474128 - RNA, 16 nt, Human
ggcaaagggggaggag

SEQ ID NO: 3474129 - RNA, 12 nt, Human
ggcaaauaaaag

SEQ ID NO: 3474130 - RNA, 17 nt, Human
ggcaaauccgaaaucag

SEQ ID NO: 3474131 - RNA, 18 nt, Human
ggcaaaugccagggcccg

SEQ ID NO: 3474132 - RNA, 16 nt, Human
ggcaaauuaacuugag

SEQ ID NO: 3474133 - RNA, 18 nt, Human
ggcaaauuuuuauuuuuu

SEQ ID NO: 3474134 - RNA, 16 nt, Human
ggcaacaaacugcaca

SEQ ID NO: 3474135 - RNA, 18 nt, Human
ggcaacaaacugcacaug

SEQ ID NO: 3474136 - RNA, 17 nt, Human
ggcaacagagcaagacu

SEQ ID NO: 3474137 - RNA, 14 nt, Human
ggcaacaucuuuau

SEQ ID NO: 3474138 - RNA, 18 nt, Human
ggcaacauuccaagaaua

SEQ ID NO: 3474139 - RNA, 16 nt, Human
ggcaaccccaguucug

SEQ ID NO: 3474140 - RNA, 23 nt, Human
ggcaaccccaguucugcuccucu

SEQ ID NO: 3474141 - RNA, 18 nt, Human
ggcaacccccagccugcu

SEQ ID NO: 3474142 - RNA, 18 nt, Human
ggcaaccugauuguaaac

SEQ ID NO: 3474143 - RNA, 20 nt, Human
ggcaacgaagaaaaaaaaua

SEQ ID NO: 3474144 - RNA, 16 nt, Human
ggcaacugaacaaaaa

SEQ ID NO: 3474145 - RNA, 14 nt, Human
ggcaacugaggcag

SEQ ID NO: 3474146 - RNA, 23 nt, Human
ggcaacuucaguccugggagacc

SEQ ID NO: 3474147 - RNA, 18 nt, Human
ggcaacuugggaacuaga

SEQ ID NO: 3474148 - RNA, 22 nt, Human
ggcaagagcccccuugacaccg

SEQ ID NO: 3474149 - RNA, 12 nt, Human
ggcaagaggggu

SEQ ID NO: 3474150 - RNA, 18 nt, Human
ggcaagcaccuccugccu

SEQ ID NO: 3474151 - RNA, 21 nt, Human
ggcaagcaggcgcugugcuau

SEQ ID NO: 3474152 - RNA, 20 nt, Human
ggcaagcuagaaccuggagg

SEQ ID NO: 3474153 - RNA, 23 nt, Human
ggcaagcugugacuucuccaggu

SEQ ID NO: 3474154 - RNA, 10 nt, Human
ggcaaggaaa

SEQ ID NO: 3474155 - RNA, 19 nt, Human
ggcaaggaaaaagaaaaua

SEQ ID NO: 3474156 - RNA, 22 nt, Human
ggcaaggaaaggggagaaggga

SEQ ID NO: 3474157 - RNA, 16 nt, Human
ggcaaggacacagaug

SEQ ID NO: 3474158 - RNA, 18 nt, Human
ggcaaggacuuuguacau

SEQ ID NO: 3474159 - RNA, 13 nt, Human
ggcaaggcaggug

SEQ ID NO: 3474160 - RNA, 14 nt, Human
ggcaaggcaggugc

SEQ ID NO: 3474161 - RNA, 16 nt, Human
ggcaaggcuguggacc

SEQ ID NO: 3474162 - RNA, 19 nt, Human
ggcaagggccaugcugaag

SEQ ID NO: 3474163 - RNA, 21 nt, Human
ggcaagggccaugcugaaggg

SEQ ID NO: 3474164 - RNA, 17 nt, Human
ggcaaggguuaaggccu

SEQ ID NO: 3474165 - RNA, 20 nt, Human
ggcaaguuuuccauauuuuu

SEQ ID NO: 3474166 - RNA, 16 nt, Human
ggcaauaaaagcccag

SEQ ID NO: 3474167 - RNA, 20 nt, Human
ggcaaucaauaaacagcagg

SEQ ID NO: 3474168 - RNA, 19 nt, Human
ggcaaucauggugcucaga

SEQ ID NO: 3474169 - RNA, 23 nt, Human
ggcaaugcuggcuguuggcuggg

SEQ ID NO: 3474170 - RNA, 17 nt, Human
ggcaaugguaguuucug

SEQ ID NO: 3474171 - RNA, 16 nt, Human
ggcaauguuuugcuuu

SEQ ID NO: 3474172 - RNA, 17 nt, Human
ggcaauuaauuccuuca

SEQ ID NO: 3474173 - RNA, 20 nt, Human
ggcaauuaauuccuucagca

SEQ ID NO: 3474174 - RNA, 12 nt, Human
ggcaauuggaac

SEQ ID NO: 3474175 - RNA, 13 nt, Human
ggcaauuggaaca

SEQ ID NO: 3474176 - RNA, 13 nt, Human
ggcaauugucuau

SEQ ID NO: 3474177 - RNA, 16 nt, Human
ggcaauuuagaaaaag

SEQ ID NO: 3474178 - RNA, 22 nt, Human
ggcacaagcaaaagggugucug

SEQ ID NO: 3474179 - RNA, 23 nt, Human
ggcacaaguccuggauguugugu

SEQ ID NO: 3474180 - RNA, 14 nt, Human
ggcacacagcuacu

SEQ ID NO: 3474181 - RNA, 18 nt, Human
ggcacaccgggcacucag

SEQ ID NO: 3474182 - RNA, 16 nt, Human
ggcacaccuccuccca

SEQ ID NO: 3474183 - RNA, 21 nt, Human
ggcacaccuccucccacugcc

SEQ ID NO: 3474184 - RNA, 17 nt, Human
ggcacacgccucccacu

SEQ ID NO: 3474185 - RNA, 18 nt, Human
ggcacacgccucccacug

SEQ ID NO: 3474186 - RNA, 22 nt, Human
ggcacacgcugcucugccccag

SEQ ID NO: 3474187 - RNA, 23 nt, Human
ggcacagaaaauggaagacagcu

SEQ ID NO: 3474188 - RNA, 12 nt, Human
ggcagcagccag

SEQ ID NO: 3474189 - RNA, 13 nt, Human
ggcagcagccagc

SEQ ID NO: 3474190 - RNA, 15 nt, Human
ggcagcagccagccc

SEQ ID NO: 3474191 - RNA, 22 nt, Human
ggcagcagccagcccugccugg

SEQ ID NO: 3474192 - RNA, 12 nt, Human
ggcagcagcccc

SEQ ID NO: 3474193 - RNA, 14 nt, Human
ggcagcagccccca

SEQ ID NO: 3474194 - RNA, 23 nt, Human
ggcagcagcccccagcucccacc

SEQ ID NO: 3474195 - RNA, 21 nt, Human
ggcagcaggccuguugcuuuu

SEQ ID NO: 3474196 - RNA, 18 nt, Human
ggcagcagggcuacccug

SEQ ID NO: 3474197 - RNA, 13 nt, Human
ggcagcaguguga

SEQ ID NO: 3474198 - RNA, 20 nt, Human
ggcagcagugugaggccagg

SEQ ID NO: 3474199 - RNA, 22 nt, Human
ggcagcagugugaggccagggc

SEQ ID NO: 3474200 - RNA, 20 nt, Human
ggcagccacacuucucagga

SEQ ID NO: 3474201 - RNA, 21 nt, Human
ggcagccacacuucucaggac

SEQ ID NO: 3474202 - RNA, 11 nt, Human
ggcagccagac

SEQ ID NO: 3474203 - RNA, 15 nt, Human
ggcagccagaccagc

SEQ ID NO: 3474204 - RNA, 16 nt, Human
ggcagccagcaucugg

SEQ ID NO: 3474205 - RNA, 15 nt, Human
ggcagccaggccaca

SEQ ID NO: 3474206 - RNA, 17 nt, Human
ggcagccaggccacaag

SEQ ID NO: 3474207 - RNA, 19 nt, Human
ggcagccaggcugccaagg

SEQ ID NO: 3474208 - RNA, 17 nt, Human
ggcagccagggagagcc

SEQ ID NO: 3474209 - RNA, 19 nt, Human
ggcagccagggagagccca

SEQ ID NO: 3474210 - RNA, 22 nt, Human
ggcagccagugagaugagggau

SEQ ID NO: 3474211 - RNA, 22 nt, Human
ggcagccagugcccugagccag

SEQ ID NO: 3474212 - RNA, 23 nt, Human
ggcagccagugcccugagccagg

SEQ ID NO: 3474213 - RNA, 11 nt, Human
ggcagcccagc

SEQ ID NO: 3474214 - RNA, 12 nt, Human
ggcagcccagcc

SEQ ID NO: 3474215 - RNA, 16 nt, Human
ggcagcccagccagcg

SEQ ID NO: 3474216 - RNA, 14 nt, Human
ggcagccccagcac

SEQ ID NO: 3474217 - RNA, 14 nt, Human
ggcagccccagccu

SEQ ID NO: 3474218 - RNA, 14 nt, Human
ggcagccccaggcc

SEQ ID NO: 3474219 - RNA, 17 nt, Human
ggcagcccgcaucagcu

SEQ ID NO: 3474220 - RNA, 13 nt, Human
ggcagcccuguag

SEQ ID NO: 3474221 - RNA, 15 nt, Human
ggcagcccuguaggg

SEQ ID NO: 3474222 - RNA, 11 nt, Human
ggcagcccuug

SEQ ID NO: 3474223 - RNA, 22 nt, Human
ggcagccgugccuucagcucua

SEQ ID NO: 3474224 - RNA, 21 nt, Human
ggcagccuacuagggaccugg

SEQ ID NO: 3474225 - RNA, 16 nt, Human
ggcagccuccagccug

SEQ ID NO: 3474226 - RNA, 14 nt, Human
ggcagccucccauc

SEQ ID NO: 3474227 - RNA, 12 nt, Human
ggcagccucugg

SEQ ID NO: 3474228 - RNA, 23 nt, Human
ggcagccucugggcccacauccg

SEQ ID NO: 3474229 - RNA, 20 nt, Human
ggcagccucugggggguggc

SEQ ID NO: 3474230 - RNA, 16 nt, Human
ggcagccucuucaaaa

SEQ ID NO: 3474231 - RNA, 13 nt, Human
ggcagccugagag

SEQ ID NO: 3474232 - RNA, 20 nt, Human
ggcagccuggacauagagag

SEQ ID NO: 3474233 - RNA, 18 nt, Human
ggcagccuggcucccagg

SEQ ID NO: 3474234 - RNA, 23 nt, Human
ggcagcgccaagcaaccuggguc

SEQ ID NO: 3474235 - RNA, 18 nt, Human
ggcagcgccaagugcgug

SEQ ID NO: 3474236 - RNA, 22 nt, Human
ggcagcgccaagugcgugccgu

SEQ ID NO: 3474237 - RNA, 21 nt, Human
ggcagcgcccuuccucuccac

SEQ ID NO: 3474238 - RNA, 18 nt, Human
ggcagcgcggggagcccg

SEQ ID NO: 3474239 - RNA, 21 nt, Human
ggcagcguacucaucaucaac

SEQ ID NO: 3474240 - RNA, 18 nt, Human
ggcagcucaccucucccu

SEQ ID NO: 3474241 - RNA, 12 nt, Human
ggcagcucagcu

SEQ ID NO: 3474242 - RNA, 23 nt, Human
ggcagcucauagaguccccccuc

SEQ ID NO: 3474243 - RNA, 13 nt, Human
ggcagcuccucug

SEQ ID NO: 3474244 - RNA, 16 nt, Human
ggcagcuccucugucu

SEQ ID NO: 3474245 - RNA, 18 nt, Human
ggcagcuccucugucucg

SEQ ID NO: 3474246 - RNA, 14 nt, Human
ggcagcucuccagu

SEQ ID NO: 3474247 - RNA, 17 nt, Human
ggcagcugaccauggaa

SEQ ID NO: 3474248 - RNA, 12 nt, Human
ggcagcugccac

SEQ ID NO: 3474249 - RNA, 14 nt, Human
ggcagcugccagag

SEQ ID NO: 3474250 - RNA, 16 nt, Human
ggcagcugccagagaa

SEQ ID NO: 3474251 - RNA, 17 nt, Human
ggcagcugccagagaag

SEQ ID NO: 3474252 - RNA, 21 nt, Human
ggcagcugcgguccacccagg

SEQ ID NO: 3474253 - RNA, 23 nt, Human
ggcagcugcgguccacccaggag

SEQ ID NO: 3474254 - RNA, 24 nt, Human
ggcagcugcgguccacccaggagc

SEQ ID NO: 3474255 - RNA, 11 nt, Human
ggcagcugcua

SEQ ID NO: 3474256 - RNA, 22 nt, Human
ggcagcugcuuuugucuauggg

SEQ ID NO: 3474257 - RNA, 16 nt, Human
ggcagcuggaugagac

SEQ ID NO: 3474258 - RNA, 14 nt, Human
ggcagcugggccca

SEQ ID NO: 3474259 - RNA, 18 nt, Human
ggcagcugggcccaaccc

SEQ ID NO: 3474260 - RNA, 16 nt, Human
ggcagcuguugucucu

SEQ ID NO: 3474261 - RNA, 16 nt, Human
ggcagcuuagggcccu

SEQ ID NO: 3474262 - RNA, 21 nt, Human
ggcagcuuagggcccuggagg

SEQ ID NO: 3474263 - RNA, 22 nt, Human
ggcagcuuagggcccuggaggc

SEQ ID NO: 3474264 - RNA, 20 nt, Human
ggcagcuucuauuagccagu

SEQ ID NO: 3474265 - RNA, 13 nt, Human
ggcagcuucuuug

SEQ ID NO: 3474266 - RNA, 15 nt, Human
ggcagcuugccccgg

SEQ ID NO: 3474267 - RNA, 21 nt, Human
ggcagcuuuaaccauuaaaac

SEQ ID NO: 3474268 - RNA, 13 nt, Human
ggcagcuuuuaaa

SEQ ID NO: 3474269 - RNA, 14 nt, Human
ggcaggaaggcuga

SEQ ID NO: 3474270 - RNA, 19 nt, Human
ggcaggacaacgaggaagc

SEQ ID NO: 3474271 - RNA, 19 nt, Human
ggcaggacacugcagaaca

SEQ ID NO: 3474272 - RNA, 23 nt, Human
ggcaggacaugcugaagccaaag

SEQ ID NO: 3474273 - RNA, 17 nt, Human
ggcaggaccagcccacg

SEQ ID NO: 3474274 - RNA, 18 nt, Human
ggcaggaccagcccacgc

SEQ ID NO: 3474275 - RNA, 14 nt, Human
ggcaggaccaggac

SEQ ID NO: 3474276 - RNA, 15 nt, Human
ggcaggaccaggacu

SEQ ID NO: 3474277 - RNA, 21 nt, Human
ggcaggaccucagaguccagg

SEQ ID NO: 3474278 - RNA, 21 nt, Human
ggcaggaccuucgggcugugc

SEQ ID NO: 3474279 - RNA, 21 nt, Human
ggcaggacucagcuccccaga

SEQ ID NO: 3474280 - RNA, 23 nt, Human
ggcaggagacuguggagacugcu

SEQ ID NO: 3474281 - RNA, 18 nt, Human
ggcaggaggaucacuuga

SEQ ID NO: 3474282 - RNA, 14 nt, Human
ggcaggagggaggu

SEQ ID NO: 3474283 - RNA, 19 nt, Human
ggcaggauggccuggccag

SEQ ID NO: 3474284 - RNA, 22 nt, Human
ggcaggauuggggaagagagcc

SEQ ID NO: 3474285 - RNA, 18 nt, Human
ggcaggcacagcacaggg

SEQ ID NO: 3474286 - RNA, 14 nt, Human
ggcaggcagcgcca

SEQ ID NO: 3474287 - RNA, 10 nt, Human
ggcaggcagg

SEQ ID NO: 3474288 - RNA, 18 nt, Human
ggcaggcaggcucccagg

SEQ ID NO: 3474289 - RNA, 23 nt, Human
ggcaggcagggcucuccuggcuu

SEQ ID NO: 3474290 - RNA, 10 nt, Human
ggcaggcagu

SEQ ID NO: 3474291 - RNA, 17 nt, Human
ggcaggcauggcccugg

SEQ ID NO: 3474292 - RNA, 13 nt, Human
ggcaggcauugag

SEQ ID NO: 3474293 - RNA, 10 nt, Human
ggcaggcccu

SEQ ID NO: 3474294 - RNA, 11 nt, Human
ggcaggcccug

SEQ ID NO: 3474295 - RNA, 16 nt, Human
ggcaggcccugcacug

SEQ ID NO: 3474296 - RNA, 22 nt, Human
ggcaggcccugcacuguccugc

SEQ ID NO: 3474297 - RNA, 17 nt, Human
ggcaggcuaaggcgugg

SEQ ID NO: 3474298 - RNA, 10 nt, Human
ggcaggcugg

SEQ ID NO: 3474299 - RNA, 20 nt, Human
ggcaggcuggccaguccagg

SEQ ID NO: 3474300 - RNA, 16 nt, Human
ggcaggcuggcuggcc

SEQ ID NO: 3474301 - RNA, 14 nt, Human
ggcaggcugggcca

SEQ ID NO: 3474302 - RNA, 23 nt, Human
ggcagggaaggggaggcagccgg

SEQ ID NO: 3474303 - RNA, 15 nt, Human
ggcagggaggcagcc

SEQ ID NO: 3474304 - RNA, 15 nt, Human
ggcagggaggucagg

SEQ ID NO: 3474305 - RNA, 14 nt, Human
ggcagggcacaggg

SEQ ID NO: 3474306 - RNA, 18 nt, Human
ggcagggcacagggccug

SEQ ID NO: 3474307 - RNA, 23 nt, Human
ggcagggcacagggccuggccca

SEQ ID NO: 3474308 - RNA, 15 nt, Human
ggcagggcaggacca

SEQ ID NO: 3474309 - RNA, 18 nt, Human
ggcagggccaacccuucu

SEQ ID NO: 3474310 - RNA, 16 nt, Human
ggcagggccccaggca

SEQ ID NO: 3474311 - RNA, 22 nt, Human
ggcagggccgcccgggcccaga

SEQ ID NO: 3474312 - RNA, 19 nt, Human
ggcagggccuagcugcuac

SEQ ID NO: 3474313 - RNA, 16 nt, Human
ggcagggccuugccca

SEQ ID NO: 3474314 - RNA, 19 nt, Human
ggcagggcgggcagagggc

SEQ ID NO: 3474315 - RNA, 21 nt, Human
ggcagggcgggcagagggcug

SEQ ID NO: 3474316 - RNA, 17 nt, Human
ggcagggcucccacaga

SEQ ID NO: 3474317 - RNA, 12 nt, Human
ggcagggcucuc

SEQ ID NO: 3474318 - RNA, 20 nt, Human
ggcagggcucuccuggcuuc

SEQ ID NO: 3474319 - RNA, 15 nt, Human
ggcagggcugacucu

SEQ ID NO: 3474320 - RNA, 11 nt, Human
ggcagggcugu

SEQ ID NO: 3474321 - RNA, 16 nt, Human
ggcaggggaggccauc

SEQ ID NO: 3474322 - RNA, 20 nt, Human
ggcaggggaggccaucugga

SEQ ID NO: 3474323 - RNA, 20 nt, Human
ggcaggggagggucagccag

SEQ ID NO: 3474324 - RNA, 12 nt, Human
ggcaggggccgg

SEQ ID NO: 3474325 - RNA, 14 nt, Human
ggcaggggcuuccu

SEQ ID NO: 3474326 - RNA, 15 nt, Human
ggcagggggcugcug

SEQ ID NO: 3474327 - RNA, 16 nt, Human
ggcagggggcugcugc

SEQ ID NO: 3474328 - RNA, 14 nt, Human
ggcagggguggggg

SEQ ID NO: 3474329 - RNA, 14 nt, Human
ggcagggugauaaa

SEQ ID NO: 3474330 - RNA, 14 nt, Human
ggcagguagccagg

SEQ ID NO: 3474331 - RNA, 15 nt, Human
ggcagguagccaggg

SEQ ID NO: 3474332 - RNA, 13 nt, Human
ggcagguccaggg

SEQ ID NO: 3474333 - RNA, 19 nt, Human
ggcagguccccagacucca

SEQ ID NO: 3474334 - RNA, 22 nt, Human
ggcuuucauuauuaguacugcu

SEQ ID NO: 3474335 - RNA, 19 nt, Human
ggcuuucauuuucucucag

SEQ ID NO: 3474336 - RNA, 22 nt, Human
ggcuuucccacuucccacccug

SEQ ID NO: 3474337 - RNA, 16 nt, Human
ggcuuucccuuaucaa

SEQ ID NO: 3474338 - RNA, 21 nt, Human
ggcuuucguccacagcuuccu

SEQ ID NO: 3474339 - RNA, 12 nt, Human
ggcuuucuggag

SEQ ID NO: 3474340 - RNA, 15 nt, Human
ggcuuugcaaccauu

SEQ ID NO: 3474341 - RNA, 17 nt, Human
ggcuuugccauugugaa

SEQ ID NO: 3474342 - RNA, 13 nt, Human
ggcuuuggcuucu

SEQ ID NO: 3474343 - RNA, 15 nt, Human
ggcuuuguauagaac

SEQ ID NO: 3474344 - RNA, 18 nt, Human
ggcuuugucccacagcuu

SEQ ID NO: 3474345 - RNA, 11 nt, Human
ggcuuuguguu

SEQ ID NO: 3474346 - RNA, 18 nt, Human
ggcuuuuacugaagccuu

SEQ ID NO: 3474347 - RNA, 14 nt, Human
ggcuuuucacugcu

SEQ ID NO: 3474348 - RNA, 15 nt, Human
ggcuuuucacugcug

SEQ ID NO: 3474349 - RNA, 17 nt, Human
ggcuuuucacugcuggc

SEQ ID NO: 3474350 - RNA, 19 nt, Human
ggcuuuucacugcuggcug

SEQ ID NO: 3474351 - RNA, 16 nt, Human
ggcuuuuuuuuucucu

SEQ ID NO: 3474352 - RNA, 17 nt, Human
ggcuuuuuuuuucucuu

SEQ ID NO: 3474353 - RNA, 16 nt, Human
gggaaaaaaaucaucu

SEQ ID NO: 3474354 - RNA, 20 nt, Human
gggaaaaaguugaugucaau

SEQ ID NO: 3474355 - RNA, 23 nt, Human
gggaaaagcauuuuucaauauau

SEQ ID NO: 3474356 - RNA, 22 nt, Human
gggaaacagcaucuccaagcag

SEQ ID NO: 3474357 - RNA, 20 nt, Human
gggaaaccuagagaagauaa

SEQ ID NO: 3474358 - RNA, 18 nt, Human
gggaaacuaagauucuuu

SEQ ID NO: 3474359 - RNA, 14 nt, Human
gggaaacuuggcuc

SEQ ID NO: 3474360 - RNA, 17 nt, Human
gggaaagacacugccug

SEQ ID NO: 3474361 - RNA, 20 nt, Human
gggaaagcaaagcacagaga

SEQ ID NO: 3474362 - RNA, 15 nt, Human
gggaaagccaccucu

SEQ ID NO: 3474363 - RNA, 21 nt, Human
gggaaaguauucucuuuucaa

SEQ ID NO: 3474364 - RNA, 14 nt, Human
gggaacaauuuggc

SEQ ID NO: 3474365 - RNA, 19 nt, Human
gggaacagacaacagaagu

SEQ ID NO: 3474366 - RNA, 14 nt, Human
gggaacagacugga

SEQ ID NO: 3474367 - RNA, 22 nt, Human
gggaacagacuggaagcacagc

SEQ ID NO: 3474368 - RNA, 20 nt, Human
gggaacagugugcaaggcag

SEQ ID NO: 3474369 - RNA, 14 nt, Human
gggaacaugccccc

SEQ ID NO: 3474370 - RNA, 12 nt, Human
gggaacaugggg

SEQ ID NO: 3474371 - RNA, 14 nt, Human
gggaacauggggag

SEQ ID NO: 3474372 - RNA, 19 nt, Human
gggaacauuucuguaaaua

SEQ ID NO: 3474373 - RNA, 18 nt, Human
gggaaccaugaagacagg

SEQ ID NO: 3474374 - RNA, 23 nt, Human
gggaacccugcccacucccagga

SEQ ID NO: 3474375 - RNA, 12 nt, Human
gggaaccucacu

SEQ ID NO: 3474376 - RNA, 17 nt, Human
gggaaccucccagaggu

SEQ ID NO: 3474377 - RNA, 16 nt, Human
gggaacgcccacuucc

SEQ ID NO: 3474378 - RNA, 16 nt, Human
gggaacucagauccag

SEQ ID NO: 3474379 - RNA, 19 nt, Human
gggaacucugacaagggcu

SEQ ID NO: 3474380 - RNA, 15 nt, Human
gggaacuggccaagc

SEQ ID NO: 3474381 - RNA, 20 nt, Human
gggaacuggccaagcugagg

SEQ ID NO: 3474382 - RNA, 19 nt, Human
gggaagaaaagagcuuucu

SEQ ID NO: 3474383 - RNA, 16 nt, Human
gggaagaaagagaagg

SEQ ID NO: 3474384 - RNA, 16 nt, Human
gggaagaagcagagag

SEQ ID NO: 3474385 - RNA, 22 nt, Human
gggaagacccauuccuucccag

SEQ ID NO: 3474386 - RNA, 15 nt, Human
gggaagacgaggccc

SEQ ID NO: 3474387 - RNA, 12 nt, Human
gggaagagaaac

SEQ ID NO: 3474388 - RNA, 22 nt, Human
gggaagagagccugcaggaucu

SEQ ID NO: 3474389 - RNA, 17 nt, Human
gggaagagaggaguuca

SEQ ID NO: 3474390 - RNA, 21 nt, Human
gggaagagaggaguucaauga

SEQ ID NO: 3474391 - RNA, 22 nt, Human
gggaagagaggaguucaaugau

SEQ ID NO: 3474392 - RNA, 23 nt, Human
gggaagagaggaguucaaugauc

SEQ ID NO: 3474393 - RNA, 17 nt, Human
gggaagagauccaaaga

SEQ ID NO: 3474394 - RNA, 19 nt, Human
gggaagagauccaaagacu

SEQ ID NO: 3474395 - RNA, 16 nt, Human
gggaagagcacagccc

SEQ ID NO: 3474396 - RNA, 17 nt, Human
gggaagaguguacuggg

SEQ ID NO: 3474397 - RNA, 22 nt, Human
gggaagauaggcucugcacaga

SEQ ID NO: 3474398 - RNA, 12 nt, Human
gggaagccagac

SEQ ID NO: 3474399 - RNA, 18 nt, Human
gggaagcccauccugacc

SEQ ID NO: 3474400 - RNA, 15 nt, Human
gggaagcuagucuuu

SEQ ID NO: 3474401 - RNA, 21 nt, Human
gggaagcugaggcgggagaau

SEQ ID NO: 3474402 - RNA, 13 nt, Human
gggaagcugcagc

SEQ ID NO: 3474403 - RNA, 16 nt, Human
gggaagcugcagcuug

SEQ ID NO: 3474404 - RNA, 22 nt, Human
gggaagcugcagcuugggagag

SEQ ID NO: 3474405 - RNA, 16 nt, Human
gggaagcuggccugag

SEQ ID NO: 3474406 - RNA, 19 nt, Human
gggaaggacagaaaggaga

SEQ ID NO: 3474407 - RNA, 13 nt, Human
gggaaggauacaa

SEQ ID NO: 3474408 - RNA, 23 nt, Human
gggaaggauacaaaagcauguga

SEQ ID NO: 3474409 - RNA, 21 nt, Human
gggaaggcaggcagggcucuc

SEQ ID NO: 3474410 - RNA, 22 nt, Human
gggaaggcagggagggccuggg

SEQ ID NO: 3474411 - RNA, 15 nt, Human
gggaaggccaccugc

SEQ ID NO: 3474412 - RNA, 12 nt, Human
gggaaggccagc

SEQ ID NO: 3474413 - RNA, 11 nt, Human
gggaaggccuc

SEQ ID NO: 3474414 - RNA, 22 nt, Human
gggaagggagccaagggaugga

SEQ ID NO: 3474415 - RNA, 16 nt, Human
gggaagggccagucug

SEQ ID NO: 3474416 - RNA, 16 nt, Human
gggaagggccugccca

SEQ ID NO: 3474417 - RNA, 16 nt, Human
gggaagggggcuggga

SEQ ID NO: 3474418 - RNA, 17 nt, Human
gggaagggggcugggac

SEQ ID NO: 3474419 - RNA, 20 nt, Human
gggaaguaguuaucauguua

SEQ ID NO: 3474420 - RNA, 14 nt, Human
gggaaguccccagg

SEQ ID NO: 3474421 - RNA, 23 nt, Human
gggaaguccccgaguuuccccag

SEQ ID NO: 3474422 - RNA, 17 nt, Human
gggaagugaggaagcca

SEQ ID NO: 3474423 - RNA, 16 nt, Human
gggaauauuguuucuu

SEQ ID NO: 3474424 - RNA, 13 nt, Human
gggaauauuugaa

SEQ ID NO: 3474425 - RNA, 12 nt, Human
gggaauauuuua

SEQ ID NO: 3474426 - RNA, 18 nt, Human
gggaauccaagccuccac

SEQ ID NO: 3474427 - RNA, 19 nt, Human
gggaauccccgaaggugcu

SEQ ID NO: 3474428 - RNA, 14 nt, Human
gggaaugaagcuug

SEQ ID NO: 3474429 - RNA, 15 nt, Human
gggaaugagcccaga

SEQ ID NO: 3474430 - RNA, 11 nt, Human
gggaaugaggg

SEQ ID NO: 3474431 - RNA, 16 nt, Human
gggaauggcacagccc

SEQ ID NO: 3474432 - RNA, 22 nt, Human
gggaauggcacagcccaaagaa

SEQ ID NO: 3474433 - RNA, 14 nt, Human
gggaauggcagcag

SEQ ID NO: 3474434 - RNA, 21 nt, Human
gggaauguaacugcugaaaac

SEQ ID NO: 3474435 - RNA, 20 nt, Human
gggaauguauuauucugcag

SEQ ID NO: 3474436 - RNA, 19 nt, Human
gggaauguuugccucugcc

SEQ ID NO: 3474437 - RNA, 23 nt, Human
gggaauguuugggcagaagggag

SEQ ID NO: 3474438 - RNA, 20 nt, Human
gggaauucucagugccaacu

SEQ ID NO: 3474439 - RNA, 14 nt, Human
gggaauucucuugg

SEQ ID NO: 3474440 - RNA, 22 nt, Human
gggaauugaggucugcucggcc

SEQ ID NO: 3474441 - RNA, 17 nt, Human
gggaauuucuucaacuc

SEQ ID NO: 3474442 - RNA, 15 nt, Human
gggacaaagaggccu

SEQ ID NO: 3474443 - RNA, 17 nt, Human
gggacaaaggagccugu

SEQ ID NO: 3474444 - RNA, 18 nt, Human
gggacaaauuuaaaacaa

SEQ ID NO: 3474445 - RNA, 15 nt, Human
gggacaaccuuggcu

SEQ ID NO: 3474446 - RNA, 18 nt, Human
gggacaaguggacucagg

SEQ ID NO: 3474447 - RNA, 19 nt, Human
gggacaaguggacucaggg

SEQ ID NO: 3474448 - RNA, 19 nt, Human
gggacacacuuagcuggag

SEQ ID NO: 3474449 - RNA, 17 nt, Human
gggacaccagggaagaa

SEQ ID NO: 3474450 - RNA, 22 nt, Human
gggacaccuaggcuaggguggg

SEQ ID NO: 3474451 - RNA, 14 nt, Human
gggacaccugcccu

SEQ ID NO: 3474452 - RNA, 17 nt, Human
gggacagagacaccugc

SEQ ID NO: 3474453 - RNA, 18 nt, Human
gggacagagacaccugca

SEQ ID NO: 3474454 - RNA, 18 nt, Human
gggacagaggccugcccg

SEQ ID NO: 3474455 - RNA, 14 nt, Human
gggacagauucagu

SEQ ID NO: 3474456 - RNA, 22 nt, Human
gggacagauucagucuugccuu

SEQ ID NO: 3474457 - RNA, 15 nt, Human
gggacaggaccccag

SEQ ID NO: 3474458 - RNA, 17 nt, Human
gggacaggaccccagcu

SEQ ID NO: 3474459 - RNA, 19 nt, Human
gggacaggaccccagcucu

SEQ ID NO: 3474460 - RNA, 12 nt, Human
gggacaggccuc

SEQ ID NO: 3474461 - RNA, 17 nt, Human
gggacaggccucaccuc

SEQ ID NO: 3474462 - RNA, 14 nt, Human
gggacagggcucgc

SEQ ID NO: 3474463 - RNA, 17 nt, Human
gggacagggcuggccca

SEQ ID NO: 3474464 - RNA, 18 nt, Human
gggacagggcuggcccag

SEQ ID NO: 3474465 - RNA, 19 nt, Human
gggacagggcuggcccagc

SEQ ID NO: 3474466 - RNA, 21 nt, Human
gggacagggcuggcccagccc

SEQ ID NO: 3474467 - RNA, 17 nt, Human
gggacaggggcaggagg

SEQ ID NO: 3474468 - RNA, 22 nt, Human
gggacagucaccucauggaauu

SEQ ID NO: 3474469 - RNA, 15 nt, Human
gggacagucucacca

SEQ ID NO: 3474470 - RNA, 17 nt, Human
gggacaucacagggugg

SEQ ID NO: 3474471 - RNA, 20 nt, Human
gggacauuccaaagaacagc

SEQ ID NO: 3474472 - RNA, 21 nt, Human
gggacauuugcucauggaauu

SEQ ID NO: 3474473 - RNA, 12 nt, Human
gggaccaaggca

SEQ ID NO: 3474474 - RNA, 17 nt, Human
gggaccaaggcaaggca

SEQ ID NO: 3474475 - RNA, 19 nt, Human
gggaccaaggcaaggcagg

SEQ ID NO: 3474476 - RNA, 21 nt, Human
gggaccacaggugcccgccac

SEQ ID NO: 3474477 - RNA, 19 nt, Human
gggaccacccugagccggc

SEQ ID NO: 3474478 - RNA, 20 nt, Human
gggccucaccgagugggggc

SEQ ID NO: 3474479 - RNA, 14 nt, Human
gggccucagugcca

SEQ ID NO: 3474480 - RNA, 22 nt, Human
gggccuccauuccuggagcccg

SEQ ID NO: 3474481 - RNA, 21 nt, Human
gggccuccucuguccagggcc

SEQ ID NO: 3474482 - RNA, 23 nt, Human
gggccucggaccccacuccggcc

SEQ ID NO: 3474483 - RNA, 14 nt, Human
gggccucgggaccu

SEQ ID NO: 3474484 - RNA, 20 nt, Human
gggccucuuaugggcugggu

SEQ ID NO: 3474485 - RNA, 14 nt, Human
gggccugagagaau

SEQ ID NO: 3474486 - RNA, 21 nt, Human
gggccugagcaguccuuggcc

SEQ ID NO: 3474487 - RNA, 17 nt, Human
gggccugagccaagcua

SEQ ID NO: 3474488 - RNA, 16 nt, Human
gggccugagccuggcc

SEQ ID NO: 3474489 - RNA, 16 nt, Human
gggccugauggggagg

SEQ ID NO: 3474490 - RNA, 21 nt, Human
gggccugcaggaccugccugu

SEQ ID NO: 3474491 - RNA, 24 nt, Human
gggccugcaggaccugccuguagc

SEQ ID NO: 3474492 - RNA, 14 nt, Human
gggccugccgggcu

SEQ ID NO: 3474493 - RNA, 21 nt, Human
gggccugccgggcugagggcc

SEQ ID NO: 3474494 - RNA, 12 nt, Human
gggccugccuca

SEQ ID NO: 3474495 - RNA, 14 nt, Human
gggccugccucacc

SEQ ID NO: 3474496 - RNA, 15 nt, Human
gggccugccucacca

SEQ ID NO: 3474497 - RNA, 14 nt, Human
gggccugccuggcc

SEQ ID NO: 3474498 - RNA, 13 nt, Human
gggccugcugcug

SEQ ID NO: 3474499 - RNA, 16 nt, Human
gggccugcugcugaga

SEQ ID NO: 3474500 - RNA, 22 nt, Human
gggccugcugcugagaaccugg

SEQ ID NO: 3474501 - RNA, 22 nt, Human
gggccuggcagccgugccuuca

SEQ ID NO: 3474502 - RNA, 15 nt, Human
gggccuggcucaggu

SEQ ID NO: 3474503 - RNA, 16 nt, Human
gggccuggcucaggug

SEQ ID NO: 3474504 - RNA, 13 nt, Human
gggccuggcuccc

SEQ ID NO: 3474505 - RNA, 15 nt, Human
gggccuggcuggcug

SEQ ID NO: 3474506 - RNA, 21 nt, Human
gggccugggacuuccaugccu

SEQ ID NO: 3474507 - RNA, 12 nt, Human
gggccugggagg

SEQ ID NO: 3474508 - RNA, 12 nt, Human
gggccugggcuc

SEQ ID NO: 3474509 - RNA, 13 nt, Human
gggccuggggccu

SEQ ID NO: 3474510 - RNA, 17 nt, Human
gggccuggggccugaga

SEQ ID NO: 3474511 - RNA, 18 nt, Human
gggccuggggccugagag

SEQ ID NO: 3474512 - RNA, 19 nt, Human
gggccuggggccugagaga

SEQ ID NO: 3474513 - RNA, 23 nt, Human
gggccuggucucacccuggaggc

SEQ ID NO: 3474514 - RNA, 15 nt, Human
gggccuguacagucu

SEQ ID NO: 3474515 - RNA, 17 nt, Human
gggccuguacagucugu

SEQ ID NO: 3474516 - RNA, 17 nt, Human
gggccuguacugccugc

SEQ ID NO: 3474517 - RNA, 16 nt, Human
gggccuguccacaggc

SEQ ID NO: 3474518 - RNA, 20 nt, Human
gggccuuaggaagagccuuc

SEQ ID NO: 3474519 - RNA, 18 nt, Human
gggccuuggccuggagca

SEQ ID NO: 3474520 - RNA, 13 nt, Human
gggccuugggcuc

SEQ ID NO: 3474521 - RNA, 21 nt, Human
gggccuuuucuggcaccgcag

SEQ ID NO: 3474522 - RNA, 12 nt, Human
gggcgaggcaga

SEQ ID NO: 3474523 - RNA, 13 nt, Human
gggcgaggcagag

SEQ ID NO: 3474524 - RNA, 21 nt, Human
gggcgcccaccuccccacgcc

SEQ ID NO: 3474525 - RNA, 13 nt, Human
gggcgccuguggu

SEQ ID NO: 3474526 - RNA, 23 nt, Human
gggcgcggccagccccggcccug

SEQ ID NO: 3474527 - RNA, 14 nt, Human
gggcgcggcuggga

SEQ ID NO: 3474528 - RNA, 20 nt, Human
gggcgcgugaggcccguggg

SEQ ID NO: 3474529 - RNA, 12 nt, Human
gggcgcuggccc

SEQ ID NO: 3474530 - RNA, 14 nt, Human
gggcgcuggcccag

SEQ ID NO: 3474531 - RNA, 14 nt, Human
gggcggcacagccu

SEQ ID NO: 3474532 - RNA, 13 nt, Human
gggcggcugagag

SEQ ID NO: 3474533 - RNA, 20 nt, Human
gggcgggcagcacagcaagg

SEQ ID NO: 3474534 - RNA, 15 nt, Human
gggcgggccccucau

SEQ ID NO: 3474535 - RNA, 14 nt, Human
gggcggggccuugc

SEQ ID NO: 3474536 - RNA, 14 nt, Human
gggcggggguggcg

SEQ ID NO: 3474537 - RNA, 19 nt, Human
gggcgugagaccugccccu

SEQ ID NO: 3474538 - RNA, 13 nt, Human
gggcguggaggga

SEQ ID NO: 3474539 - RNA, 15 nt, Human
gggcgugguggcagg

SEQ ID NO: 3474540 - RNA, 15 nt, Human
gggcgugguggugag

SEQ ID NO: 3474541 - RNA, 13 nt, Human
gggcuacaagagg

SEQ ID NO: 3474542 - RNA, 23 nt, Human
gggcuacaccuuagccugcccuc

SEQ ID NO: 3474543 - RNA, 12 nt, Human
gggcuaccagga

SEQ ID NO: 3474544 - RNA, 13 nt, Human
gggcuacccugag

SEQ ID NO: 3474545 - RNA, 20 nt, Human
gggcuacugcagcuuuacau

SEQ ID NO: 3474546 - RNA, 17 nt, Human
gggcuagaaccuggagg

SEQ ID NO: 3474547 - RNA, 17 nt, Human
gggcuagguagaaaaag

SEQ ID NO: 3474548 - RNA, 16 nt, Human
gggcuauggacacagg

SEQ ID NO: 3474549 - RNA, 17 nt, Human
gggcuauggacacaggg

SEQ ID NO: 3474550 - RNA, 17 nt, Human
gggcuaugguguggacu

SEQ ID NO: 3474551 - RNA, 18 nt, Human
gggcucaaucucuggggg

SEQ ID NO: 3474552 - RNA, 18 nt, Human
gggcucagagugggguag

SEQ ID NO: 3474553 - RNA, 10 nt, Human
gggcucagca

SEQ ID NO: 3474554 - RNA, 13 nt, Human
gggcucagcaagg

SEQ ID NO: 3474555 - RNA, 15 nt, Human
gggcucagcaaggcc

SEQ ID NO: 3474556 - RNA, 21 nt, Human
gggcucagcaaggccaccucu

SEQ ID NO: 3474557 - RNA, 11 nt, Human
gggcucagccu

SEQ ID NO: 3474558 - RNA, 12 nt, Human
gggcucagccug

SEQ ID NO: 3474559 - RNA, 13 nt, Human
gggcucagccugg

SEQ ID NO: 3474560 - RNA, 17 nt, Human
gggcucagcggggacag

SEQ ID NO: 3474561 - RNA, 14 nt, Human
gggcucagcucugg

SEQ ID NO: 3474562 - RNA, 17 nt, Human
gggcucagggaccacag

SEQ ID NO: 3474563 - RNA, 13 nt, Human
gggcuccagacac

SEQ ID NO: 3474564 - RNA, 13 nt, Human
gggcuccagccau

SEQ ID NO: 3474565 - RNA, 18 nt, Human
gggcuccccuuucgccca

SEQ ID NO: 3474566 - RNA, 15 nt, Human
gggcucccgggcccc

SEQ ID NO: 3474567 - RNA, 20 nt, Human
gggcucccggguccuuggcc

SEQ ID NO: 3474568 - RNA, 18 nt, Human
gggcucccugacugggag

SEQ ID NO: 3474569 - RNA, 17 nt, Human
gggcucccuucccaccu

SEQ ID NO: 3474570 - RNA, 18 nt, Human
gggcucccuucccaccuc

SEQ ID NO: 3474571 - RNA, 13 nt, Human
gggcucccuuccu

SEQ ID NO: 3474572 - RNA, 22 nt, Human
gggcuccuccaggguggcagca

SEQ ID NO: 3474573 - RNA, 21 nt, Human
gggcuccugccuucuguccug

SEQ ID NO: 3474574 - RNA, 12 nt, Human
gggcuccuggaa

SEQ ID NO: 3474575 - RNA, 20 nt, Human
gggcuccuggaaaggcucag

SEQ ID NO: 3474576 - RNA, 23 nt, Human
gggcuccuggaaaggcucagucu

SEQ ID NO: 3474577 - RNA, 18 nt, Human
gggcuccuggcagaaggg

SEQ ID NO: 3474578 - RNA, 14 nt, Human
gggcuccugugccc

SEQ ID NO: 3474579 - RNA, 15 nt, Human
gggcuccugugcccu

SEQ ID NO: 3474580 - RNA, 14 nt, Human
gggcucggaggcug

SEQ ID NO: 3474581 - RNA, 21 nt, Human
gggcucuaacgccugagccca

SEQ ID NO: 3474582 - RNA, 17 nt, Human
gggcucuccaccucagc

SEQ ID NO: 3474583 - RNA, 18 nt, Human
gggcucuccaccucagcc

SEQ ID NO: 3474584 - RNA, 21 nt, Human
gggcucuccaccucagccuug

SEQ ID NO: 3474585 - RNA, 13 nt, Human
gggcucugcccca

SEQ ID NO: 3474586 - RNA, 20 nt, Human
gggcucugccucccaucacc

SEQ ID NO: 3474587 - RNA, 14 nt, Human
gggcucuggagaga

SEQ ID NO: 3474588 - RNA, 15 nt, Human
gggcucuggagagaa

SEQ ID NO: 3474589 - RNA, 16 nt, Human
gggcucuggagagaaa

SEQ ID NO: 3474590 - RNA, 11 nt, Human
gggcucugugg

SEQ ID NO: 3474591 - RNA, 12 nt, Human
gggcucuucuca

SEQ ID NO: 3474592 - RNA, 15 nt, Human
gggcucuucucauuu

SEQ ID NO: 3474593 - RNA, 17 nt, Human
gggcugaagguugaaga

SEQ ID NO: 3474594 - RNA, 19 nt, Human
gggcugaagguugaagagg

SEQ ID NO: 3474595 - RNA, 20 nt, Human
gggcugaccuuccucgcaga

SEQ ID NO: 3474596 - RNA, 16 nt, Human
gggcugacugggccag

SEQ ID NO: 3474597 - RNA, 10 nt, Human
gggcugagac

SEQ ID NO: 3474598 - RNA, 18 nt, Human
gggcugagagaaccucac

SEQ ID NO: 3474599 - RNA, 14 nt, Human
gggcugagccccua

SEQ ID NO: 3474600 - RNA, 15 nt, Human
gggcugagccccuac

SEQ ID NO: 3474601 - RNA, 23 nt, Human
gggcugagccccuaccccacacc

SEQ ID NO: 3474602 - RNA, 17 nt, Human
gggcugagcccuggcag

SEQ ID NO: 3474603 - RNA, 18 nt, Human
gggcugagcccuggcagg

SEQ ID NO: 3474604 - RNA, 18 nt, Human
gggcugaggggcaacgaa

SEQ ID NO: 3474605 - RNA, 20 nt, Human
gggcugcaccggcuggccug

SEQ ID NO: 3474606 - RNA, 19 nt, Human
gggcugcacucugugccca

SEQ ID NO: 3474607 - RNA, 20 nt, Human
gggcugcacucugugcccau

SEQ ID NO: 3474608 - RNA, 11 nt, Human
gggcugcauga

SEQ ID NO: 3474609 - RNA, 18 nt, Human
gggcugcaugcgggcuuc

SEQ ID NO: 3474610 - RNA, 20 nt, Human
gggcugccccuaaucucugu

SEQ ID NO: 3474611 - RNA, 19 nt, Human
gggcugcccgcucccagug

SEQ ID NO: 3474612 - RNA, 12 nt, Human
gggcugcccugc

SEQ ID NO: 3474613 - RNA, 14 nt, Human
gggcugcccuggug

SEQ ID NO: 3474614 - RNA, 21 nt, Human
gggcugcccuggugcugccac

SEQ ID NO: 3474615 - RNA, 13 nt, Human
gggcugccugggc

SEQ ID NO: 3474616 - RNA, 13 nt, Human
gggcugcucccac

SEQ ID NO: 3474617 - RNA, 21 nt, Human
gggcugcucccaccuggcucu

SEQ ID NO: 3474618 - RNA, 22 nt, Human
gggcugcucccaccuggcucug

SEQ ID NO: 3474619 - RNA, 11 nt, Human
gggcugcuccu

SEQ ID NO: 3474620 - RNA, 18 nt, Human
gggcugcuccuccagggc

SEQ ID NO: 3474621 - RNA, 17 nt, Human
gggcugcuuccuccugg

SEQ ID NO: 3474622 - RNA, 19 nt, Human
gggcugcuuccuccuggaa

SEQ ID NO: 3474623 - RNA, 23 nt, Human
gggcuggaacagauucacacugu

SEQ ID NO: 3474624 - RNA, 15 nt, Human
gggcuggacugaggc

SEQ ID NO: 3474625 - RNA, 19 nt, Human
guaacacuaauauauuuaa

SEQ ID NO: 3474626 - RNA, 22 nt, Human
guaacacuaauauauuuaaaaa

SEQ ID NO: 3474627 - RNA, 13 nt, Human
guaacagacauug

SEQ ID NO: 3474628 - RNA, 14 nt, Human
guaacagacauugu

SEQ ID NO: 3474629 - RNA, 16 nt, Human
guaacagcuccuuggg

SEQ ID NO: 3474630 - RNA, 18 nt, Human
guaacagcuccuugggag

SEQ ID NO: 3474631 - RNA, 21 nt, Human
guaacagcuccuugggaggaa

SEQ ID NO: 3474632 - RNA, 16 nt, Human
guaacagcugaggucu

SEQ ID NO: 3474633 - RNA, 20 nt, Human
guaacaggaaaauuuuaaaa

SEQ ID NO: 3474634 - RNA, 14 nt, Human
guaacaggucuccu

SEQ ID NO: 3474635 - RNA, 18 nt, Human
guaacagucugaucguga

SEQ ID NO: 3474636 - RNA, 15 nt, Human
guaacaucaaagauu

SEQ ID NO: 3474637 - RNA, 19 nt, Human
guaacaucacuauccaugc

SEQ ID NO: 3474638 - RNA, 17 nt, Human
guaacauccuuucuauu

SEQ ID NO: 3474639 - RNA, 23 nt, Human
guaacauguguuaaguauuuuca

SEQ ID NO: 3474640 - RNA, 23 nt, Human
guaacauuggguccugggucuuu

SEQ ID NO: 3474641 - RNA, 19 nt, Human
guaacauuugcuguuuuaa

SEQ ID NO: 3474642 - RNA, 12 nt, Human
guaaccucagcu

SEQ ID NO: 3474643 - RNA, 18 nt, Human
guaaccucagcucuggga

SEQ ID NO: 3474644 - RNA, 18 nt, Human
guaaccugagauggcccu

SEQ ID NO: 3474645 - RNA, 18 nt, Human
guaacgugugcuguguuu

SEQ ID NO: 3474646 - RNA, 15 nt, Human
guaacguugcugugg

SEQ ID NO: 3474647 - RNA, 13 nt, Human
guaacucaucugu

SEQ ID NO: 3474648 - RNA, 17 nt, Human
guaacuccaccaaccca

SEQ ID NO: 3474649 - RNA, 13 nt, Human
guaacugacauga

SEQ ID NO: 3474650 - RNA, 18 nt, Human
guaacugcauugagaacu

SEQ ID NO: 3474651 - RNA, 12 nt, Human
guaacugccagg

SEQ ID NO: 3474652 - RNA, 14 nt, Human
guaacugccuagaa

SEQ ID NO: 3474653 - RNA, 17 nt, Human
guaacugccuagaaaca

SEQ ID NO: 3474654 - RNA, 19 nt, Human
guaacugcuuucuguucca

SEQ ID NO: 3474655 - RNA, 22 nt, Human
guaacugcuuucuguuccaaau

SEQ ID NO: 3474656 - RNA, 12 nt, Human
guaacugucagg

SEQ ID NO: 3474657 - RNA, 13 nt, Human
guaacuguccugu

SEQ ID NO: 3474658 - RNA, 16 nt, Human
guaacuguccuguccu

SEQ ID NO: 3474659 - RNA, 14 nt, Human
guaacugugucaug

SEQ ID NO: 3474660 - RNA, 12 nt, Human
guaacuguuacc

SEQ ID NO: 3474661 - RNA, 13 nt, Human
guaacuguucuug

SEQ ID NO: 3474662 - RNA, 15 nt, Human
guaacuuauauugaa

SEQ ID NO: 3474663 - RNA, 19 nt, Human
guaacuuauauugaagaca

SEQ ID NO: 3474664 - RNA, 15 nt, Human
guaacuuauguagau

SEQ ID NO: 3474665 - RNA, 20 nt, Human
guaacuucacauuaaaaaau

SEQ ID NO: 3474666 - RNA, 18 nt, Human
guaacuuccaaauaaaua

SEQ ID NO: 3474667 - RNA, 20 nt, Human
guaacuucuuauggaauuga

SEQ ID NO: 3474668 - RNA, 21 nt, Human
guaacuugauccauuucuaau

SEQ ID NO: 3474669 - RNA, 17 nt, Human
guaacuugguuauacau

SEQ ID NO: 3474670 - RNA, 18 nt, Human
guaacuugguuauacaug

SEQ ID NO: 3474671 - RNA, 23 nt, Human
guaacuugguuauacaugacacu

SEQ ID NO: 3474672 - RNA, 15 nt, Human
guaacuuuaugugua

SEQ ID NO: 3474673 - RNA, 18 nt, Human
guaacuuuauucuugaaa

SEQ ID NO: 3474674 - RNA, 14 nt, Human
guaacuuuuguaag

SEQ ID NO: 3474675 - RNA, 17 nt, Human
guaacuuuuguaagaca

SEQ ID NO: 3474676 - RNA, 22 nt, Human
guaagaaaauauuuugucuaaa

SEQ ID NO: 3474677 - RNA, 22 nt, Human
guaagaaaucucccaugugcau

SEQ ID NO: 3474678 - RNA, 15 nt, Human
guaagaagacaugaa

SEQ ID NO: 3474679 - RNA, 22 nt, Human
guaagaaguuucuuaaacauug

SEQ ID NO: 3474680 - RNA, 17 nt, Human
guaagaauucagaagac

SEQ ID NO: 3474681 - RNA, 10 nt, Human
guaagagacu

SEQ ID NO: 3474682 - RNA, 15 nt, Human
guaagagcaaaagaa

SEQ ID NO: 3474683 - RNA, 14 nt, Human
guaagaguguuuau

SEQ ID NO: 3474684 - RNA, 11 nt, Human
guaagaugcug

SEQ ID NO: 3474685 - RNA, 14 nt, Human
guaagauuuugaaa

SEQ ID NO: 3474686 - RNA, 16 nt, Human
guaagauuuugaaaac

SEQ ID NO: 3474687 - RNA, 15 nt, Human
guaagcaucuacuuc

SEQ ID NO: 3474688 - RNA, 21 nt, Human
guaagcggcucaagcccagga

SEQ ID NO: 3474689 - RNA, 12 nt, Human
guaagcuguuua

SEQ ID NO: 3474690 - RNA, 18 nt, Human
guaagcuguuugguuuua

SEQ ID NO: 3474691 - RNA, 14 nt, Human
guaaggaaugcuug

SEQ ID NO: 3474692 - RNA, 14 nt, Human
guaaggcaugaagg

SEQ ID NO: 3474693 - RNA, 13 nt, Human
guaaggcucuaga

SEQ ID NO: 3474694 - RNA, 15 nt, Human
guaagggauuucuua

SEQ ID NO: 3474695 - RNA, 14 nt, Human
guaaggugagggaa

SEQ ID NO: 3474696 - RNA, 17 nt, Human
guaaggugcuuggaguu

SEQ ID NO: 3474697 - RNA, 18 nt, Human
guaaguaauuaugcacua

SEQ ID NO: 3474698 - RNA, 13 nt, Human
guaaguacagaga

SEQ ID NO: 3474699 - RNA, 14 nt, Human
guaaguacagagaa

SEQ ID NO: 3474700 - RNA, 17 nt, Human
guaaguacagagaagcc

SEQ ID NO: 3474701 - RNA, 18 nt, Human
guaaguacagagaagcca

SEQ ID NO: 3474702 - RNA, 12 nt, Human
guaagugccuuc

SEQ ID NO: 3474703 - RNA, 14 nt, Human
guaagugccuucca

SEQ ID NO: 3474704 - RNA, 16 nt, Human
guaagugggcccaccc

SEQ ID NO: 3474705 - RNA, 17 nt, Human
guaagugggcccacccg

SEQ ID NO: 3474706 - RNA, 18 nt, Human
guaaguuaauguauauaa

SEQ ID NO: 3474707 - RNA, 19 nt, Human
guaaguugggcuugcuauu

SEQ ID NO: 3474708 - RNA, 13 nt, Human
guaaguuucaggu

SEQ ID NO: 3474709 - RNA, 13 nt, Human
guaaguuuuuuga

SEQ ID NO: 3474710 - RNA, 12 nt, Human
guaauaaaguau

SEQ ID NO: 3474711 - RNA, 12 nt, Human
guaauaaagugu

SEQ ID NO: 3474712 - RNA, 13 nt, Human
guaauaaauauga

SEQ ID NO: 3474713 - RNA, 14 nt, Human
guaauaaauaugag

SEQ ID NO: 3474714 - RNA, 16 nt, Human
guaauaaauaugagug

SEQ ID NO: 3474715 - RNA, 21 nt, Human
guaauaagcacuguaaacuuc

SEQ ID NO: 3474716 - RNA, 13 nt, Human
guaauaauaccuc

SEQ ID NO: 3474717 - RNA, 21 nt, Human
guaauaauaccucaauguuug

SEQ ID NO: 3474718 - RNA, 16 nt, Human
guaauaauagacugua

SEQ ID NO: 3474719 - RNA, 19 nt, Human
guaauaaugcuaaagaaaa

SEQ ID NO: 3474720 - RNA, 17 nt, Human
guaauaaugugaaucau

SEQ ID NO: 3474721 - RNA, 21 nt, Human
guaauaccucuaauaguauaa

SEQ ID NO: 3474722 - RNA, 22 nt, Human
guaauaccucuaauaguauaaa

SEQ ID NO: 3474723 - RNA, 23 nt, Human
guaauacuucuuguguguaugca

SEQ ID NO: 3474724 - RNA, 15 nt, Human
guaauagaaaacuga

SEQ ID NO: 3474725 - RNA, 12 nt, Human
guaauauaaaag

SEQ ID NO: 3474726 - RNA, 19 nt, Human
guaauauaauggaagagaa

SEQ ID NO: 3474727 - RNA, 18 nt, Human
guaauauauugcugcugg

SEQ ID NO: 3474728 - RNA, 12 nt, Human
guaauauauuua

SEQ ID NO: 3474729 - RNA, 18 nt, Human
guaauaugcacacauuuu

SEQ ID NO: 3474730 - RNA, 19 nt, Human
guaauauugacuuguauau

SEQ ID NO: 3474731 - RNA, 20 nt, Human
guaauauugacuuguauauu

SEQ ID NO: 3474732 - RNA, 12 nt, Human
guaauauuuaca

SEQ ID NO: 3474733 - RNA, 18 nt, Human
guaauauuuacaauguau

SEQ ID NO: 3474734 - RNA, 19 nt, Human
guaauauuuacaauguauu

SEQ ID NO: 3474735 - RNA, 18 nt, Human
guaauauuuauauauuua

SEQ ID NO: 3474736 - RNA, 13 nt, Human
guaauauuuauua

SEQ ID NO: 3474737 - RNA, 14 nt, Human
guaauauuuauuaa

SEQ ID NO: 3474738 - RNA, 18 nt, Human
guaauauuuuuauauaca

SEQ ID NO: 3474739 - RNA, 18 nt, Human
guaaucaauaaacgauuu

SEQ ID NO: 3474740 - RNA, 19 nt, Human
guaaucaauaaagaaaacu

SEQ ID NO: 3474741 - RNA, 12 nt, Human
guaaucauauua

SEQ ID NO: 3474742 - RNA, 16 nt, Human
guaaucaucuaaguca

SEQ ID NO: 3474743 - RNA, 21 nt, Human
guaauccaagcaaaugugaau

SEQ ID NO: 3474744 - RNA, 12 nt, Human
guaaucccagca

SEQ ID NO: 3474745 - RNA, 16 nt, Human
guaaucccagcacacu

SEQ ID NO: 3474746 - RNA, 16 nt, Human
guaaucccagcacuuu

SEQ ID NO: 3474747 - RNA, 20 nt, Human
guaaucccagcuacuuggga

SEQ ID NO: 3474748 - RNA, 19 nt, Human
guaaucccccaggagaaca

SEQ ID NO: 3474749 - RNA, 17 nt, Human
guaauccccuaaaauaa

SEQ ID NO: 3474750 - RNA, 17 nt, Human
guaaucugagaaacaau

SEQ ID NO: 3474751 - RNA, 17 nt, Human
guaaucugaucguucuu

SEQ ID NO: 3474752 - RNA, 16 nt, Human
guaaucuguauaauac

SEQ ID NO: 3474753 - RNA, 12 nt, Human
guaaucugugua

SEQ ID NO: 3474754 - RNA, 17 nt, Human
guaaucuuguugguuca

SEQ ID NO: 3474755 - RNA, 19 nt, Human
guaaucuuuaccuguauac

SEQ ID NO: 3474756 - RNA, 19 nt, Human
guaaugaaccgcugaauau

SEQ ID NO: 3474757 - RNA, 21 nt, Human
guaaugaauuuuuaugauauu

SEQ ID NO: 3474758 - RNA, 21 nt, Human
guaaugauauagccagaaaaa

SEQ ID NO: 3474759 - RNA, 15 nt, Human
guaaugcgauuuuau

SEQ ID NO: 3474760 - RNA, 16 nt, Human
guaaugcgauuuuauu

SEQ ID NO: 3474761 - RNA, 14 nt, Human
guaaugcugcacuu

SEQ ID NO: 3474762 - RNA, 21 nt, Human
guaaugcuuaagggaguuuaa

SEQ ID NO: 3474763 - RNA, 16 nt, Human
guaauggcaguuauau

SEQ ID NO: 3474764 - RNA, 14 nt, Human
guaaugguguagaa

SEQ ID NO: 3474765 - RNA, 20 nt, Human
guaaugucaccaccuuccca

SEQ ID NO: 3474766 - RNA, 22 nt, Human
guaaugucaccaccuucccagc

SEQ ID NO: 3474767 - RNA, 18 nt, Human
guaauguuaauauugauu

SEQ ID NO: 3474768 - RNA, 21 nt, Human
guaauguuacugaucaugcau

SEQ ID NO: 3474769 - RNA, 14 nt, Human
guaauguugugaau

SEQ ID NO: 3474770 - RNA, 18 nt, Human
guaauguugugaauaauu

SEQ ID NO: 3474771 - RNA, 13 nt, Human
guaauuaaacugu

SEQ ID NO: 3474772 - RNA, 17 nt, Human
guaguucucuugguguu

SEQ ID NO: 3474773 - RNA, 20 nt, Human
guaguucugcuccagacagg

SEQ ID NO: 3474774 - RNA, 19 nt, Human
guaguugaggaaagcacag

SEQ ID NO: 3474775 - RNA, 18 nt, Human
guaguugcaauagaacag

SEQ ID NO: 3474776 - RNA, 17 nt, Human
guaguugccuuaaaaua

SEQ ID NO: 3474777 - RNA, 12 nt, Human
guaguugucuuu

SEQ ID NO: 3474778 - RNA, 16 nt, Human
guaguugucuuuccug

SEQ ID NO: 3474779 - RNA, 13 nt, Human
guaguuuuuucaa

SEQ ID NO: 3474780 - RNA, 15 nt, Human
guauaaaaaaaauag

SEQ ID NO: 3474781 - RNA, 23 nt, Human
guauaaaaauaaaaaagauccca

SEQ ID NO: 3474782 - RNA, 18 nt, Human
guauaaaacuuuccucgc

SEQ ID NO: 3474783 - RNA, 19 nt, Human
guauaaaacuuuccucgcc

SEQ ID NO: 3474784 - RNA, 21 nt, Human
guauaaaacuuuccucgccug

SEQ ID NO: 3474785 - RNA, 12 nt, Human
guauaaaagaug

SEQ ID NO: 3474786 - RNA, 17 nt, Human
guauaaaagccuguuua

SEQ ID NO: 3474787 - RNA, 12 nt, Human
guauaaaauaca

SEQ ID NO: 3474788 - RNA, 15 nt, Human
guauaaaaucagcca

SEQ ID NO: 3474789 - RNA, 14 nt, Human
guauaaacaaaguu

SEQ ID NO: 3474790 - RNA, 15 nt, Human
guauaaacaagaaaa

SEQ ID NO: 3474791 - RNA, 23 nt, Human
guauaaacaagaaaaauaaagaa

SEQ ID NO: 3474792 - RNA, 12 nt, Human
guauaaacuuuu

SEQ ID NO: 3474793 - RNA, 13 nt, Human
guauaaauaggag

SEQ ID NO: 3474794 - RNA, 23 nt, Human
guauaaaugaaguuuauacagua

SEQ ID NO: 3474795 - RNA, 14 nt, Human
guauaaauguauau

SEQ ID NO: 3474796 - RNA, 18 nt, Human
guauaaaugucuuuaaug

SEQ ID NO: 3474797 - RNA, 12 nt, Human
guauaaauuuau

SEQ ID NO: 3474798 - RNA, 14 nt, Human
guauaaauuuauuu

SEQ ID NO: 3474799 - RNA, 15 nt, Human
guauaacagguuauu

SEQ ID NO: 3474800 - RNA, 20 nt, Human
guauaacagguuauuuuagu

SEQ ID NO: 3474801 - RNA, 22 nt, Human
guauaacagguuauuuuaguuu

SEQ ID NO: 3474802 - RNA, 20 nt, Human
guauaacuucuuaaaaguug

SEQ ID NO: 3474803 - RNA, 18 nt, Human
guauaacuuuaacuucug

SEQ ID NO: 3474804 - RNA, 17 nt, Human
guauaagaaaugcauau

SEQ ID NO: 3474805 - RNA, 14 nt, Human
guauaagauccuag

SEQ ID NO: 3474806 - RNA, 16 nt, Human
guauaaguaagaaaau

SEQ ID NO: 3474807 - RNA, 21 nt, Human
guauaaguggaggcacuuuag

SEQ ID NO: 3474808 - RNA, 13 nt, Human
guauaauauugaa

SEQ ID NO: 3474809 - RNA, 15 nt, Human
guauaauguuuauua

SEQ ID NO: 3474810 - RNA, 13 nt, Human
guauaauuaacau

SEQ ID NO: 3474811 - RNA, 22 nt, Human
guauaauuaacauguuaaacca

SEQ ID NO: 3474812 - RNA, 12 nt, Human
guauaauugugu

SEQ ID NO: 3474813 - RNA, 21 nt, Human
guauaauugugugauauuuca

SEQ ID NO: 3474814 - RNA, 19 nt, Human
guauacaaauauauuguua

SEQ ID NO: 3474815 - RNA, 18 nt, Human
guauacaagauaagcuuc

SEQ ID NO: 3474816 - RNA, 14 nt, Human
guauacaaguacug

SEQ ID NO: 3474817 - RNA, 14 nt, Human
guauacaauauaua

SEQ ID NO: 3474818 - RNA, 18 nt, Human
guauacaauauauaaaaa

SEQ ID NO: 3474819 - RNA, 19 nt, Human
guauacaauauauaaaaau

SEQ ID NO: 3474820 - RNA, 21 nt, Human
guauacaauauauaaaaauau

SEQ ID NO: 3474821 - RNA, 22 nt, Human
guauacaauauauaaaaauaua

SEQ ID NO: 3474822 - RNA, 18 nt, Human
guauacauccuggguaau

SEQ ID NO: 3474823 - RNA, 19 nt, Human
guauaccggaauuacuuuu

SEQ ID NO: 3474824 - RNA, 15 nt, Human
guauacuguaggcac

SEQ ID NO: 3474825 - RNA, 21 nt, Human
guauacuuccuuacuuuuaag

SEQ ID NO: 3474826 - RNA, 12 nt, Human
guauacuuuaaa

SEQ ID NO: 3474827 - RNA, 23 nt, Human
guauacuuuaaauaauuuaacua

SEQ ID NO: 3474828 - RNA, 13 nt, Human
guauacuuuagua

SEQ ID NO: 3474829 - RNA, 22 nt, Human
guauagaaaugcugguuuuuca

SEQ ID NO: 3474830 - RNA, 18 nt, Human
guauagaagucuucauga

SEQ ID NO: 3474831 - RNA, 22 nt, Human
guauagacaguuuguaaauguu

SEQ ID NO: 3474832 - RNA, 23 nt, Human
guauagacaguuuguaaauguua

SEQ ID NO: 3474833 - RNA, 16 nt, Human
guauagaugcaagaua

SEQ ID NO: 3474834 - RNA, 23 nt, Human
guauagccuauggcagaaaaaau

SEQ ID NO: 3474835 - RNA, 13 nt, Human
guauaguauuuga

SEQ ID NO: 3474836 - RNA, 14 nt, Human
guauaguauuugaa

SEQ ID NO: 3474837 - RNA, 16 nt, Human
guauaguguaaaauaa

SEQ ID NO: 3474838 - RNA, 14 nt, Human
guauaguuaacaca

SEQ ID NO: 3474839 - RNA, 22 nt, Human
guauauaaaggaaaaaagagaa

SEQ ID NO: 3474840 - RNA, 20 nt, Human
guauauaaaugggaacauuu

SEQ ID NO: 3474841 - RNA, 21 nt, Human
guauauaaaugggaacauuua

SEQ ID NO: 3474842 - RNA, 21 nt, Human
guauauaauuuuuuuauguuu

SEQ ID NO: 3474843 - RNA, 12 nt, Human
guauauacuuug

SEQ ID NO: 3474844 - RNA, 17 nt, Human
guauauauaagaaagac

SEQ ID NO: 3474845 - RNA, 13 nt, Human
guauauauacaua

SEQ ID NO: 3474846 - RNA, 14 nt, Human
guauauauacauaa

SEQ ID NO: 3474847 - RNA, 18 nt, Human
guauauauauauauaugu

SEQ ID NO: 3474848 - RNA, 23 nt, Human
guauauauauauauauguacagu

SEQ ID NO: 3474849 - RNA, 20 nt, Human
guauauauaugccaugaugg

SEQ ID NO: 3474850 - RNA, 21 nt, Human
guauauauaugccaugaugga

SEQ ID NO: 3474851 - RNA, 22 nt, Human
guauauaucugcuucaguggag

SEQ ID NO: 3474852 - RNA, 13 nt, Human
guauauaugugug

SEQ ID NO: 3474853 - RNA, 20 nt, Human
guauauauguguguuuaaau

SEQ ID NO: 3474854 - RNA, 14 nt, Human
guauauauucccaa

SEQ ID NO: 3474855 - RNA, 19 nt, Human
guauaucagaaaagggaag

SEQ ID NO: 3474856 - RNA, 12 nt, Human
guauaucaugua

SEQ ID NO: 3474857 - RNA, 24 nt, Human
guauaucauguaaagaaaugucuu

SEQ ID NO: 3474858 - RNA, 17 nt, Human
guauaucauucuaaaga

SEQ ID NO: 3474859 - RNA, 19 nt, Human
guauaugguauauauacau

SEQ ID NO: 3474860 - RNA, 16 nt, Human
guauaugguauuuauu

SEQ ID NO: 3474861 - RNA, 15 nt, Human
guauauggugguaau

SEQ ID NO: 3474862 - RNA, 13 nt, Human
guauauuaaaaaa

SEQ ID NO: 3474863 - RNA, 11 nt, Human
guauauuaaac

SEQ ID NO: 3474864 - RNA, 14 nt, Human
guauauuacaauga

SEQ ID NO: 3474865 - RNA, 17 nt, Human
guauauuacaaugauca

SEQ ID NO: 3474866 - RNA, 18 nt, Human
guauauuacaaugaucac

SEQ ID NO: 3474867 - RNA, 17 nt, Human
guauauuacacauuugu

SEQ ID NO: 3474868 - RNA, 14 nt, Human
guauauuauaauag

SEQ ID NO: 3474869 - RNA, 21 nt, Human
guauauuauguauuuauauuu

SEQ ID NO: 3474870 - RNA, 22 nt, Human
guauauuauuucuaggaagaau

SEQ ID NO: 3474871 - RNA, 14 nt, Human
guauauuauuuggc

SEQ ID NO: 3474872 - RNA, 19 nt, Human
guauauugguuuuaugaug

SEQ ID NO: 3474873 - RNA, 19 nt, Human
guauauuguguuuguguau

SEQ ID NO: 3474874 - RNA, 20 nt, Human
guauauuguguuuguguauu

SEQ ID NO: 3474875 - RNA, 22 nt, Human
guauauuuaaacucaagacaau

SEQ ID NO: 3474876 - RNA, 12 nt, Human
guauauuugaaa

SEQ ID NO: 3474877 - RNA, 18 nt, Human
guauauuugauuuauuaa

SEQ ID NO: 3474878 - RNA, 13 nt, Human
guauauuuguaca

SEQ ID NO: 3474879 - RNA, 18 nt, Human
guauauuuguaugauauu

SEQ ID NO: 3474880 - RNA, 21 nt, Human
guauauuugugauagcacuuu

SEQ ID NO: 3474881 - RNA, 14 nt, Human
guauauuuuccuau

SEQ ID NO: 3474882 - RNA, 21 nt, Human
guauauuuugggaaucuuuuc

SEQ ID NO: 3474883 - RNA, 22 nt, Human
guauauuuuuaucuauauaaaa

SEQ ID NO: 3474884 - RNA, 22 nt, Human
guauauuuuuguuuguuuugug

SEQ ID NO: 3474885 - RNA, 13 nt, Human
guaucaaaaugcu

SEQ ID NO: 3474886 - RNA, 14 nt, Human
guaucaaauacauu

SEQ ID NO: 3474887 - RNA, 24 nt, Human
guaucaaauauuagaugugauuua

SEQ ID NO: 3474888 - RNA, 19 nt, Human
guaucaaucuuuagaaaag

SEQ ID NO: 3474889 - RNA, 19 nt, Human
guaucacgggucacuugaa

SEQ ID NO: 3474890 - RNA, 18 nt, Human
guaucacugucuuuccua

SEQ ID NO: 3474891 - RNA, 19 nt, Human
guaucagaauugaaacacu

SEQ ID NO: 3474892 - RNA, 15 nt, Human
guaucagaggccuau

SEQ ID NO: 3474893 - RNA, 17 nt, Human
guaucagaggccuauaa

SEQ ID NO: 3474894 - RNA, 21 nt, Human
guaucaggaaauauauaugug

SEQ ID NO: 3474895 - RNA, 18 nt, Human
guaucaggacccagagga

SEQ ID NO: 3474896 - RNA, 18 nt, Human
guaucaggccugccagac

SEQ ID NO: 3474897 - RNA, 22 nt, Human
guaucaggccugccagacggca

SEQ ID NO: 3474898 - RNA, 21 nt, Human
guaucaguggauuucccaucc

SEQ ID NO: 3474899 - RNA, 24 nt, Human
guaucaguguuuaugugcuauuaa

SEQ ID NO: 3474900 - RNA, 20 nt, Human
guaucaguguuuuaaauucu

SEQ ID NO: 3474901 - RNA, 19 nt, Human
guaucauaauuaccaagug

SEQ ID NO: 3474902 - RNA, 13 nt, Human
guaucaucagugu

SEQ ID NO: 3474903 - RNA, 14 nt, Human
guaucaucuggaua

SEQ ID NO: 3474904 - RNA, 24 nt, Human
guaucaucuggauaggagccugcu

SEQ ID NO: 3474905 - RNA, 18 nt, Human
guaucaugcccugugcaa

SEQ ID NO: 3474906 - RNA, 22 nt, Human
guaucauuguuguuugauuucu

SEQ ID NO: 3474907 - RNA, 18 nt, Human
guauccacuguuuauuca

SEQ ID NO: 3474908 - RNA, 19 nt, Human
guauccauuaucaugugua

SEQ ID NO: 3474909 - RNA, 14 nt, Human
guauccccccaucu

SEQ ID NO: 3474910 - RNA, 17 nt, Human
guauccccccaucuugc

SEQ ID NO: 3474911 - RNA, 20 nt, Human
guauccccccccuguauagu

SEQ ID NO: 3474912 - RNA, 13 nt, Human
guauccccugcag

SEQ ID NO: 3474913 - RNA, 18 nt, Human
guaucccgagucugggac

SEQ ID NO: 3474914 - RNA, 19 nt, Human
guaucccgagucugggaca

SEQ ID NO: 3474915 - RNA, 18 nt, Human
guaucccuucucacagca

SEQ ID NO: 3474916 - RNA, 18 nt, Human
gugaauuacuaacuucua

SEQ ID NO: 3474917 - RNA, 21 nt, Human
gugaauuaucccuuuucuuga

SEQ ID NO: 3474918 - RNA, 17 nt, Human
gugaauuauugacacug

SEQ ID NO: 3474919 - RNA, 16 nt, Human
gugaauugauaauaaa

SEQ ID NO: 3474920 - RNA, 23 nt, Human
gugaauugccugcagagagaagc

SEQ ID NO: 3474921 - RNA, 17 nt, Human
gugaauuguuugaaccu

SEQ ID NO: 3474922 - RNA, 13 nt, Human
gugaauuugaaug

SEQ ID NO: 3474923 - RNA, 18 nt, Human
gugaauuugaaugaaaaa

SEQ ID NO: 3474924 - RNA, 11 nt, Human
gugaauuuuua

SEQ ID NO: 3474925 - RNA, 15 nt, Human
gugaauuuuucucua

SEQ ID NO: 3474926 - RNA, 13 nt, Human
gugaauuuuugca

SEQ ID NO: 3474927 - RNA, 17 nt, Human
gugaauuuuugcaauaa

SEQ ID NO: 3474928 - RNA, 17 nt, Human
gugaauuuuuuuuuccu

SEQ ID NO: 3474929 - RNA, 20 nt, Human
gugacaaaauuuuauaagca

SEQ ID NO: 3474930 - RNA, 16 nt, Human
gugacaaaccauccag

SEQ ID NO: 3474931 - RNA, 14 nt, Human
gugacaagagccug

SEQ ID NO: 3474932 - RNA, 20 nt, Human
gugacaaggauugcuacugu

SEQ ID NO: 3474933 - RNA, 13 nt, Human
gugacaaggcccc

SEQ ID NO: 3474934 - RNA, 18 nt, Human
gugacacaaacacacaca

SEQ ID NO: 3474935 - RNA, 18 nt, Human
gugacacacuacaccaca

SEQ ID NO: 3474936 - RNA, 23 nt, Human
gugacacacuacaccacacacaa

SEQ ID NO: 3474937 - RNA, 23 nt, Human
gugacaccagccuuucucccagg

SEQ ID NO: 3474938 - RNA, 17 nt, Human
gugacacucuccuugca

SEQ ID NO: 3474939 - RNA, 19 nt, Human
gugacacucuccuugcagu

SEQ ID NO: 3474940 - RNA, 16 nt, Human
gugacagacuccugag

SEQ ID NO: 3474941 - RNA, 22 nt, Human
gugacagacuccugaggacagc

SEQ ID NO: 3474942 - RNA, 13 nt, Human
gugacagaggcag

SEQ ID NO: 3474943 - RNA, 14 nt, Human
gugacagaggcagc

SEQ ID NO: 3474944 - RNA, 15 nt, Human
gugacagaggcagcc

SEQ ID NO: 3474945 - RNA, 18 nt, Human
gugacagaggcagcccca

SEQ ID NO: 3474946 - RNA, 22 nt, Human
gugacagagugagacucugucu

SEQ ID NO: 3474947 - RNA, 15 nt, Human
gugacaggcagcaga

SEQ ID NO: 3474948 - RNA, 18 nt, Human
gugacagggaagcuacag

SEQ ID NO: 3474949 - RNA, 22 nt, Human
gugacagggaagcuacagguua

SEQ ID NO: 3474950 - RNA, 14 nt, Human
gugacagggccagu

SEQ ID NO: 3474951 - RNA, 21 nt, Human
gugacagucaucaucagggcc

SEQ ID NO: 3474952 - RNA, 17 nt, Human
gugacagugccugggaa

SEQ ID NO: 3474953 - RNA, 23 nt, Human
gugacagugccugggaauguauu

SEQ ID NO: 3474954 - RNA, 18 nt, Human
gugacaguggauugcauu

SEQ ID NO: 3474955 - RNA, 22 nt, Human
gugacauccacaaaugcaguuu

SEQ ID NO: 3474956 - RNA, 15 nt, Human
gugacauggugccug

SEQ ID NO: 3474957 - RNA, 19 nt, Human
gugacauggugccugagag

SEQ ID NO: 3474958 - RNA, 18 nt, Human
gugacaugugaaaccuuu

SEQ ID NO: 3474959 - RNA, 22 nt, Human
gugacaugugaaaccuuuuuua

SEQ ID NO: 3474960 - RNA, 22 nt, Human
gugacauguguuggcagccucu

SEQ ID NO: 3474961 - RNA, 22 nt, Human
gugacauuugggagacauguga

SEQ ID NO: 3474962 - RNA, 23 nt, Human
gugaccaacuagacauucugucg

SEQ ID NO: 3474963 - RNA, 22 nt, Human
gugaccaacuguguuguauuaa

SEQ ID NO: 3474964 - RNA, 16 nt, Human
gugaccaaugucuuga

SEQ ID NO: 3474965 - RNA, 14 nt, Human
gugacccacaugcc

SEQ ID NO: 3474966 - RNA, 15 nt, Human
gugacccacuucuca

SEQ ID NO: 3474967 - RNA, 23 nt, Human
gugaccccagggcacaggagcua

SEQ ID NO: 3474968 - RNA, 12 nt, Human
gugaccccaggu

SEQ ID NO: 3474969 - RNA, 18 nt, Human
gugaccccuccuggggcc

SEQ ID NO: 3474970 - RNA, 19 nt, Human
gugaccccuuuucagcuuc

SEQ ID NO: 3474971 - RNA, 23 nt, Human
gugaccccuuuucagcuucugcu

SEQ ID NO: 3474972 - RNA, 18 nt, Human
gugacccggcacccccug

SEQ ID NO: 3474973 - RNA, 23 nt, Human
gugacccggcacccccugcagcu

SEQ ID NO: 3474974 - RNA, 20 nt, Human
gugacccuccaaauggagaa

SEQ ID NO: 3474975 - RNA, 13 nt, Human
gugacccucugaa

SEQ ID NO: 3474976 - RNA, 12 nt, Human
gugaccucaggc

SEQ ID NO: 3474977 - RNA, 14 nt, Human
gugaccugaaguuc

SEQ ID NO: 3474978 - RNA, 19 nt, Human
gugaccugaaguucaccau

SEQ ID NO: 3474979 - RNA, 16 nt, Human
gugaccugaggaagcg

SEQ ID NO: 3474980 - RNA, 23 nt, Human
gugaccugccccgcccagcugca

SEQ ID NO: 3474981 - RNA, 13 nt, Human
gugaccuguuuau

SEQ ID NO: 3474982 - RNA, 15 nt, Human
gugaccuuaguguuu

SEQ ID NO: 3474983 - RNA, 19 nt, Human
gugaccuuccaagagccug

SEQ ID NO: 3474984 - RNA, 17 nt, Human
gugacgccugcccuccc

SEQ ID NO: 3474985 - RNA, 15 nt, Human
gugacgcugaauaaa

SEQ ID NO: 3474986 - RNA, 18 nt, Human
gugacgcugaauaaaugu

SEQ ID NO: 3474987 - RNA, 19 nt, Human
gugacgcugaauaaauguc

SEQ ID NO: 3474988 - RNA, 19 nt, Human
gugacuaauuguauaacag

SEQ ID NO: 3474989 - RNA, 20 nt, Human
gugacuaauuguauaacagg

SEQ ID NO: 3474990 - RNA, 13 nt, Human
gugacuagugcug

SEQ ID NO: 3474991 - RNA, 14 nt, Human
gugacuagugcuga

SEQ ID NO: 3474992 - RNA, 22 nt, Human
gugacuagugcugaagcuuauu

SEQ ID NO: 3474993 - RNA, 14 nt, Human
gugacuaugaacuu

SEQ ID NO: 3474994 - RNA, 19 nt, Human
gugacuccaggagaggagc

SEQ ID NO: 3474995 - RNA, 21 nt, Human
gugacucgggcuccugugccc

SEQ ID NO: 3474996 - RNA, 14 nt, Human
gugacucuccaggg

SEQ ID NO: 3474997 - RNA, 14 nt, Human
gugacucugaagcu

SEQ ID NO: 3474998 - RNA, 20 nt, Human
gugacucuuuuuagggccag

SEQ ID NO: 3474999 - RNA, 15 nt, Human
gugacugaauuucuu

SEQ ID NO: 3475000 - RNA, 16 nt, Human
gugacugccccaacuc

SEQ ID NO: 3475001 - RNA, 21 nt, Human
gugacugccccaacuccugga

SEQ ID NO: 3475002 - RNA, 18 nt, Human
gugacuguggcacacgcc

SEQ ID NO: 3475003 - RNA, 20 nt, Human
gugacuuuggcugcaugcga

SEQ ID NO: 3475004 - RNA, 22 nt, Human
gugagaaaaagcuccuguccuc

SEQ ID NO: 3475005 - RNA, 15 nt, Human
gugagaaaacuguga

SEQ ID NO: 3475006 - RNA, 19 nt, Human
gugagaaacaucucaauaa

SEQ ID NO: 3475007 - RNA, 20 nt, Human
gugagaaaccuguaucuuuc

SEQ ID NO: 3475008 - RNA, 15 nt, Human
gugagaaauuuaaac

SEQ ID NO: 3475009 - RNA, 11 nt, Human
gugagaagaau

SEQ ID NO: 3475010 - RNA, 14 nt, Human
gugagaagaauauu

SEQ ID NO: 3475011 - RNA, 20 nt, Human
gugagaagguuuauuguuaa

SEQ ID NO: 3475012 - RNA, 22 nt, Human
gugagaagugaaugcugggacu

SEQ ID NO: 3475013 - RNA, 19 nt, Human
gugagacaguccagccugg

SEQ ID NO: 3475014 - RNA, 16 nt, Human
gugagacagugggaaa

SEQ ID NO: 3475015 - RNA, 22 nt, Human
gugagacccugucucaaaaaaa

SEQ ID NO: 3475016 - RNA, 14 nt, Human
gugagaccugcccc

SEQ ID NO: 3475017 - RNA, 15 nt, Human
gugagaccugccccu

SEQ ID NO: 3475018 - RNA, 16 nt, Human
gugagaccugccccuc

SEQ ID NO: 3475019 - RNA, 23 nt, Human
gugagacugggaaggcuugggau

SEQ ID NO: 3475020 - RNA, 15 nt, Human
gugagagaguggcug

SEQ ID NO: 3475021 - RNA, 16 nt, Human
gugagagaguggcugg

SEQ ID NO: 3475022 - RNA, 19 nt, Human
gugagagaguggcuggggc

SEQ ID NO: 3475023 - RNA, 21 nt, Human
gugagaugagggaugggccug

SEQ ID NO: 3475024 - RNA, 15 nt, Human
gugagaugcuggaga

SEQ ID NO: 3475025 - RNA, 14 nt, Human
gugagauuuuuuau

SEQ ID NO: 3475026 - RNA, 18 nt, Human
gugagcaaaccugcccca

SEQ ID NO: 3475027 - RNA, 21 nt, Human
gugagcaagaagucaaaguaa

SEQ ID NO: 3475028 - RNA, 18 nt, Human
gugagcaggaaggccugg

SEQ ID NO: 3475029 - RNA, 19 nt, Human
gugagcaggaaggccuggg

SEQ ID NO: 3475030 - RNA, 20 nt, Human
gugagcaggaaggccugggu

SEQ ID NO: 3475031 - RNA, 16 nt, Human
gugagcagucaggaaa

SEQ ID NO: 3475032 - RNA, 12 nt, Human
gugagcagugug

SEQ ID NO: 3475033 - RNA, 13 nt, Human
gugagcauguuug

SEQ ID NO: 3475034 - RNA, 15 nt, Human
gugagccaccacgcc

SEQ ID NO: 3475035 - RNA, 22 nt, Human
gugagccaccgugccuggccac

SEQ ID NO: 3475036 - RNA, 20 nt, Human
gugagccagguaaugaggga

SEQ ID NO: 3475037 - RNA, 18 nt, Human
gugagcccauggcccucc

SEQ ID NO: 3475038 - RNA, 16 nt, Human
gugagccccaucuuca

SEQ ID NO: 3475039 - RNA, 21 nt, Human
gugagccgcaucuucuccauc

SEQ ID NO: 3475040 - RNA, 16 nt, Human
gugagccuggcucuug

SEQ ID NO: 3475041 - RNA, 23 nt, Human
gugagccuggcucuugugcugga

SEQ ID NO: 3475042 - RNA, 16 nt, Human
gugagcggagaucgca

SEQ ID NO: 3475043 - RNA, 17 nt, Human
gugagcugagcaggcca

SEQ ID NO: 3475044 - RNA, 12 nt, Human
gugagcugggca

SEQ ID NO: 3475045 - RNA, 16 nt, Human
gugagcuuugcugcua

SEQ ID NO: 3475046 - RNA, 15 nt, Human
gugaggaaagucauu

SEQ ID NO: 3475047 - RNA, 17 nt, Human
gugaggagccccaucug

SEQ ID NO: 3475048 - RNA, 14 nt, Human
gugaggagcugcug

SEQ ID NO: 3475049 - RNA, 17 nt, Human
gugaggagcugcuggcu

SEQ ID NO: 3475050 - RNA, 18 nt, Human
gugaggaugucacucaga

SEQ ID NO: 3475051 - RNA, 22 nt, Human
gugaggaugucacucagaugga

SEQ ID NO: 3475052 - RNA, 11 nt, Human
gugaggccaga

SEQ ID NO: 3475053 - RNA, 13 nt, Human
gugaggccagaga

SEQ ID NO: 3475054 - RNA, 22 nt, Human
gugaggccagagacacaagccu

SEQ ID NO: 3475055 - RNA, 15 nt, Human
gugaggccagggcag

SEQ ID NO: 3475056 - RNA, 13 nt, Human
gugaggccccugg

SEQ ID NO: 3475057 - RNA, 11 nt, Human
gugaggccugu

SEQ ID NO: 3475058 - RNA, 21 nt, Human
gugaggccugucugugaccug

SEQ ID NO: 3475059 - RNA, 13 nt, Human
gugaggccuugcu

SEQ ID NO: 3475060 - RNA, 21 nt, Human
gugcccaugggcacugcuggg

SEQ ID NO: 3475061 - RNA, 17 nt, Human
gugcccauuccucaccu

SEQ ID NO: 3475062 - RNA, 13 nt, Human
gugccccaccugc

SEQ ID NO: 3475063 - RNA, 14 nt, Human
gugccccaccugcc

SEQ ID NO: 3475064 - RNA, 15 nt, Human
gugccccaccugcca

SEQ ID NO: 3475065 - RNA, 12 nt, Human
gugccccaggac

SEQ ID NO: 3475066 - RNA, 14 nt, Human
gugcccccaggguc

SEQ ID NO: 3475067 - RNA, 16 nt, Human
gugcccccaggguccu

SEQ ID NO: 3475068 - RNA, 17 nt, Human
gugccccccauccuggc

SEQ ID NO: 3475069 - RNA, 19 nt, Human
gugccccccauccuggccc

SEQ ID NO: 3475070 - RNA, 20 nt, Human
gugccccccuugccagacau

SEQ ID NO: 3475071 - RNA, 21 nt, Human
gugcccccuucaagccugugc

SEQ ID NO: 3475072 - RNA, 12 nt, Human
gugccccugcug

SEQ ID NO: 3475073 - RNA, 19 nt, Human
gugccccugcugccucccc

SEQ ID NO: 3475074 - RNA, 21 nt, Human
gugcccggggcagcagcagcc

SEQ ID NO: 3475075 - RNA, 18 nt, Human
gugcccuccacugcccuc

SEQ ID NO: 3475076 - RNA, 18 nt, Human
gugcccucucccacccuc

SEQ ID NO: 3475077 - RNA, 20 nt, Human
gugcccucucccacccucuu

SEQ ID NO: 3475078 - RNA, 12 nt, Human
gugcccugagcc

SEQ ID NO: 3475079 - RNA, 13 nt, Human
gugcccugauccc

SEQ ID NO: 3475080 - RNA, 12 nt, Human
gugcccugcccc

SEQ ID NO: 3475081 - RNA, 18 nt, Human
gugcccuggaugcccagg

SEQ ID NO: 3475082 - RNA, 15 nt, Human
gugcccugguggaga

SEQ ID NO: 3475083 - RNA, 22 nt, Human
gugccgagaaggaagccuccca

SEQ ID NO: 3475084 - RNA, 13 nt, Human
gugccgagcccuu

SEQ ID NO: 3475085 - RNA, 23 nt, Human
gugccgccugcccgucucucucc

SEQ ID NO: 3475086 - RNA, 12 nt, Human
gugccguggcac

SEQ ID NO: 3475087 - RNA, 13 nt, Human
gugccgugugagu

SEQ ID NO: 3475088 - RNA, 18 nt, Human
gugccguuacucuccaac

SEQ ID NO: 3475089 - RNA, 15 nt, Human
gugccuaauguguuu

SEQ ID NO: 3475090 - RNA, 14 nt, Human
gugccuaguauuga

SEQ ID NO: 3475091 - RNA, 18 nt, Human
gugccuaguauugacaaa

SEQ ID NO: 3475092 - RNA, 20 nt, Human
gugccuaguauugacaaaau

SEQ ID NO: 3475093 - RNA, 18 nt, Human
gugccuauugcuagagcu

SEQ ID NO: 3475094 - RNA, 21 nt, Human
gugccuauugcuagagcuccu

SEQ ID NO: 3475095 - RNA, 19 nt, Human
gugccuauuuguguggaca

SEQ ID NO: 3475096 - RNA, 15 nt, Human
gugccucaagagaag

SEQ ID NO: 3475097 - RNA, 15 nt, Human
gugccucagagacca

SEQ ID NO: 3475098 - RNA, 19 nt, Human
gugccucagagaccagggc

SEQ ID NO: 3475099 - RNA, 15 nt, Human
gugccuccaccacca

SEQ ID NO: 3475100 - RNA, 13 nt, Human
gugccuccaggug

SEQ ID NO: 3475101 - RNA, 15 nt, Human
gugccuccaggugug

SEQ ID NO: 3475102 - RNA, 13 nt, Human
gugccuccucccu

SEQ ID NO: 3475103 - RNA, 14 nt, Human
gugccuccucccuc

SEQ ID NO: 3475104 - RNA, 22 nt, Human
gugccuccucccucccucuccg

SEQ ID NO: 3475105 - RNA, 18 nt, Human
gugccuccuuccaccucc

SEQ ID NO: 3475106 - RNA, 15 nt, Human
gugccucgcucccca

SEQ ID NO: 3475107 - RNA, 19 nt, Human
gugccucgcuccccacucu

SEQ ID NO: 3475108 - RNA, 15 nt, Human
gugccucuagcugaa

SEQ ID NO: 3475109 - RNA, 16 nt, Human
gugccucugcaguacu

SEQ ID NO: 3475110 - RNA, 12 nt, Human
gugccucuggga

SEQ ID NO: 3475111 - RNA, 16 nt, Human
gugccugacugcccag

SEQ ID NO: 3475112 - RNA, 18 nt, Human
gugccugauucggcuguc

SEQ ID NO: 3475113 - RNA, 22 nt, Human
gugccugauucggcugucucag

SEQ ID NO: 3475114 - RNA, 17 nt, Human
gugccugcaccaggaga

SEQ ID NO: 3475115 - RNA, 11 nt, Human
gugccugcagc

SEQ ID NO: 3475116 - RNA, 22 nt, Human
gugccuggacauuugccuugcu

SEQ ID NO: 3475117 - RNA, 17 nt, Human
gugccuggagcuccugg

SEQ ID NO: 3475118 - RNA, 12 nt, Human
gugccuggcuca

SEQ ID NO: 3475119 - RNA, 16 nt, Human
gugccuggcucagagc

SEQ ID NO: 3475120 - RNA, 23 nt, Human
gugccugggaaccuuccugucuu

SEQ ID NO: 3475121 - RNA, 16 nt, Human
gugccugggaauguau

SEQ ID NO: 3475122 - RNA, 17 nt, Human
gugccugggaauguauu

SEQ ID NO: 3475123 - RNA, 14 nt, Human
gugccugggggagu

SEQ ID NO: 3475124 - RNA, 11 nt, Human
gugccuggggu

SEQ ID NO: 3475125 - RNA, 21 nt, Human
gugccuggguggaugggccac

SEQ ID NO: 3475126 - RNA, 17 nt, Human
gugccuggguggggcug

SEQ ID NO: 3475127 - RNA, 22 nt, Human
gugccuggguggggcugcuccu

SEQ ID NO: 3475128 - RNA, 20 nt, Human
gugccuguaaucacagcuac

SEQ ID NO: 3475129 - RNA, 15 nt, Human
gugccugugaggcag

SEQ ID NO: 3475130 - RNA, 11 nt, Human
gugccuuaugg

SEQ ID NO: 3475131 - RNA, 14 nt, Human
gugccuuauggaac

SEQ ID NO: 3475132 - RNA, 18 nt, Human
gugccuuauguugaaaaa

SEQ ID NO: 3475133 - RNA, 22 nt, Human
gugccuucaagaaaacaggcac

SEQ ID NO: 3475134 - RNA, 12 nt, Human
gugccuuccaac

SEQ ID NO: 3475135 - RNA, 15 nt, Human
gugccuuccauaauu

SEQ ID NO: 3475136 - RNA, 17 nt, Human
gugccuuccauaauuau

SEQ ID NO: 3475137 - RNA, 20 nt, Human
gugccuuccaugucggccuc

SEQ ID NO: 3475138 - RNA, 21 nt, Human
gugccuuccaugucggccucu

SEQ ID NO: 3475139 - RNA, 23 nt, Human
gugccuuccuguuuuucacauuu

SEQ ID NO: 3475140 - RNA, 14 nt, Human
gugccuucucucuc

SEQ ID NO: 3475141 - RNA, 23 nt, Human
gugccuucuuauucucacuccac

SEQ ID NO: 3475142 - RNA, 23 nt, Human
gugccuuggagggucccaagcug

SEQ ID NO: 3475143 - RNA, 20 nt, Human
gugccuuggggaauuuccuc

SEQ ID NO: 3475144 - RNA, 21 nt, Human
gugccuuggggaauuuccucu

SEQ ID NO: 3475145 - RNA, 21 nt, Human
gugccuuggggacaagagcag

SEQ ID NO: 3475146 - RNA, 13 nt, Human
gugccuuucaaau

SEQ ID NO: 3475147 - RNA, 22 nt, Human
gugccuuuccuguucagcauuc

SEQ ID NO: 3475148 - RNA, 21 nt, Human
gugccuuugaguuuccucagg

SEQ ID NO: 3475149 - RNA, 14 nt, Human
gugccuuuuauagc

SEQ ID NO: 3475150 - RNA, 18 nt, Human
gugccuuuuauagcuauu

SEQ ID NO: 3475151 - RNA, 22 nt, Human
gugccuuuugcaccccucccau

SEQ ID NO: 3475152 - RNA, 21 nt, Human
gugccuuuugccauccccuca

SEQ ID NO: 3475153 - RNA, 22 nt, Human
gugccuuuuuucacggaaguuu

SEQ ID NO: 3475154 - RNA, 20 nt, Human
gugcgaccccaucugcccag

SEQ ID NO: 3475155 - RNA, 18 nt, Human
gugcgagggacccagcua

SEQ ID NO: 3475156 - RNA, 14 nt, Human
gugcgagugugugc

SEQ ID NO: 3475157 - RNA, 21 nt, Human
gugcgaucuggguucacugca

SEQ ID NO: 3475158 - RNA, 18 nt, Human
gugcgcaucuugccucca

SEQ ID NO: 3475159 - RNA, 24 nt, Human
gugcgcaucuugccuccaggugca

SEQ ID NO: 3475160 - RNA, 19 nt, Human
gugcggcagggacacccga

SEQ ID NO: 3475161 - RNA, 14 nt, Human
gugcggccuuuggc

SEQ ID NO: 3475162 - RNA, 19 nt, Human
gugcggcggucccagcucc

SEQ ID NO: 3475163 - RNA, 17 nt, Human
gugcgggcacaauaaau

SEQ ID NO: 3475164 - RNA, 20 nt, Human
gugcgucaguccaagggguc

SEQ ID NO: 3475165 - RNA, 13 nt, Human
gugcguccugucg

SEQ ID NO: 3475166 - RNA, 22 nt, Human
gugcuaaauggucgcccaggag

SEQ ID NO: 3475167 - RNA, 13 nt, Human
gugcuaagugcuu

SEQ ID NO: 3475168 - RNA, 17 nt, Human
gugcuaauaacagugca

SEQ ID NO: 3475169 - RNA, 13 nt, Human
gugcuacaaaaac

SEQ ID NO: 3475170 - RNA, 15 nt, Human
gugcuacaaaaacac

SEQ ID NO: 3475171 - RNA, 22 nt, Human
gugcuacaaaaacacagcaagg

SEQ ID NO: 3475172 - RNA, 16 nt, Human
gugcuacaggggccag

SEQ ID NO: 3475173 - RNA, 19 nt, Human
gugcuacaggggccagaag

SEQ ID NO: 3475174 - RNA, 16 nt, Human
gugcuacugauuguuu

SEQ ID NO: 3475175 - RNA, 18 nt, Human
gugcuacuggggaaacug

SEQ ID NO: 3475176 - RNA, 17 nt, Human
gugcuaggaacacuccu

SEQ ID NO: 3475177 - RNA, 18 nt, Human
gugcuaguaauuggaaag

SEQ ID NO: 3475178 - RNA, 23 nt, Human
gugcuauaaucuguuuuuacgua

SEQ ID NO: 3475179 - RNA, 21 nt, Human
gugcuauacugcauacuuuuu

SEQ ID NO: 3475180 - RNA, 16 nt, Human
gugcuauaggcuggag

SEQ ID NO: 3475181 - RNA, 19 nt, Human
gugcuauaggcuggagaag

SEQ ID NO: 3475182 - RNA, 21 nt, Human
gugcuauaggcuggagaagcu

SEQ ID NO: 3475183 - RNA, 15 nt, Human
gugcuaucuccccca

SEQ ID NO: 3475184 - RNA, 16 nt, Human
gugcuauggugcucug

SEQ ID NO: 3475185 - RNA, 24 nt, Human
gugcuauuacgaaguucaagauca

SEQ ID NO: 3475186 - RNA, 19 nt, Human
gugcucaccaugcuuccag

SEQ ID NO: 3475187 - RNA, 18 nt, Human
gugcucagcccugaggac

SEQ ID NO: 3475188 - RNA, 16 nt, Human
gugcucaggagcccug

SEQ ID NO: 3475189 - RNA, 18 nt, Human
gugcucaggagcccuggg

SEQ ID NO: 3475190 - RNA, 13 nt, Human
gugcucaguugua

SEQ ID NO: 3475191 - RNA, 14 nt, Human
gugcuccuccuugg

SEQ ID NO: 3475192 - RNA, 15 nt, Human
gugcucgcuguugcu

SEQ ID NO: 3475193 - RNA, 16 nt, Human
gugcucuggacaggca

SEQ ID NO: 3475194 - RNA, 17 nt, Human
gugcucuggacaggcau

SEQ ID NO: 3475195 - RNA, 18 nt, Human
gugcucuggacaggcaug

SEQ ID NO: 3475196 - RNA, 14 nt, Human
gugcugaagcuuau

SEQ ID NO: 3475197 - RNA, 15 nt, Human
gugcugacagcugcu

SEQ ID NO: 3475198 - RNA, 18 nt, Human
gugcugacccuccuguug

SEQ ID NO: 3475199 - RNA, 15 nt, Human
gugcugaccucuggu

SEQ ID NO: 3475200 - RNA, 15 nt, Human
gugcugacggaagcc

SEQ ID NO: 3475201 - RNA, 21 nt, Human
gugcugaguguacagagugga

SEQ ID NO: 3475202 - RNA, 14 nt, Human
gugcugcagcuccc

SEQ ID NO: 3475203 - RNA, 19 nt, Human
gugcugcagcucccuggcu

SEQ ID NO: 3475204 - RNA, 13 nt, Human
gugcugcaguaug

SEQ ID NO: 3475205 - RNA, 22 nt, Human
gccaagauaggaccuugggcca

SEQ ID NO: 3475206 - RNA, 18 nt, Human
gccaagaucgcgccacug

SEQ ID NO: 3475207 - RNA, 13 nt, Human
gccaagcaaccug

SEQ ID NO: 3475208 - RNA, 18 nt, Human
gccaagcaaccugggucc

SEQ ID NO: 3475209 - RNA, 19 nt, Human
gccaagcaaccugggucca

SEQ ID NO: 3475210 - RNA, 12 nt, Human
gccaagcacagu

SEQ ID NO: 3475211 - RNA, 13 nt, Human
gccaagcuagaau

SEQ ID NO: 3475212 - RNA, 23 nt, Human
gccaagcucaggaccaggcaaug

SEQ ID NO: 3475213 - RNA, 17 nt, Human
gccaagcuccuugggag

SEQ ID NO: 3475214 - RNA, 19 nt, Human
gccaagcuccuugggaggc

SEQ ID NO: 3475215 - RNA, 15 nt, Human
gccaagcugaggugc

SEQ ID NO: 3475216 - RNA, 11 nt, Human
gccaaggagcu

SEQ ID NO: 3475217 - RNA, 12 nt, Human
gccaaggagcug

SEQ ID NO: 3475218 - RNA, 20 nt, Human
gccaaggagggugagugcaa

SEQ ID NO: 3475219 - RNA, 17 nt, Human
gccaaggccaaaggaag

SEQ ID NO: 3475220 - RNA, 20 nt, Human
gccaaggccagaguggccug

SEQ ID NO: 3475221 - RNA, 18 nt, Human
gccaaggccuucuccucc

SEQ ID NO: 3475222 - RNA, 21 nt, Human
gccaaggcugggggaagaagc

SEQ ID NO: 3475223 - RNA, 12 nt, Human
gccaagggaaag

SEQ ID NO: 3475224 - RNA, 22 nt, Human
gccaagggaaaggggugcuuuu

SEQ ID NO: 3475225 - RNA, 18 nt, Human
gccaagggaaccuguguc

SEQ ID NO: 3475226 - RNA, 20 nt, Human
gccaagggaauuauagcugc

SEQ ID NO: 3475227 - RNA, 22 nt, Human
gccaagggcaacagaucaguaa

SEQ ID NO: 3475228 - RNA, 20 nt, Human
gccaagggcccaaagaaaga

SEQ ID NO: 3475229 - RNA, 21 nt, Human
gccaaggggagucaccuuccc

SEQ ID NO: 3475230 - RNA, 18 nt, Human
gccaaggggcuucagguc

SEQ ID NO: 3475231 - RNA, 22 nt, Human
gccaagguagccaucccaugaa

SEQ ID NO: 3475232 - RNA, 16 nt, Human
gccaaggugggcugag

SEQ ID NO: 3475233 - RNA, 14 nt, Human
gccaagguguccua

SEQ ID NO: 3475234 - RNA, 18 nt, Human
gccaagguguccuacaga

SEQ ID NO: 3475235 - RNA, 20 nt, Human
gccaagguguccuacagaaa

SEQ ID NO: 3475236 - RNA, 16 nt, Human
gccaaguaagaaagug

SEQ ID NO: 3475237 - RNA, 16 nt, Human
gccaaguauaauuuuu

SEQ ID NO: 3475238 - RNA, 14 nt, Human
gccaaguccagauu

SEQ ID NO: 3475239 - RNA, 21 nt, Human
gccaaguccagguccuggugg

SEQ ID NO: 3475240 - RNA, 23 nt, Human
gccaagucccaccgguugcuucu

SEQ ID NO: 3475241 - RNA, 20 nt, Human
gccaagugcaggcuggcacc

SEQ ID NO: 3475242 - RNA, 17 nt, Human
gccaagugccaaaugcu

SEQ ID NO: 3475243 - RNA, 18 nt, Human
gccaagugcgugccgugu

SEQ ID NO: 3475244 - RNA, 19 nt, Human
gccaagugcgugccgugug

SEQ ID NO: 3475245 - RNA, 23 nt, Human
gccaagugcgugccgugugagug

SEQ ID NO: 3475246 - RNA, 15 nt, Human
gccaaguuuauauac

SEQ ID NO: 3475247 - RNA, 17 nt, Human
gccaaguuuauauacaa

SEQ ID NO: 3475248 - RNA, 13 nt, Human
gccaauauccuaa

SEQ ID NO: 3475249 - RNA, 15 nt, Human
gccaauauccuaaua

SEQ ID NO: 3475250 - RNA, 16 nt, Human
gccaauauccuaauaa

SEQ ID NO: 3475251 - RNA, 23 nt, Human
gccaauauguauuguaaacaugu

SEQ ID NO: 3475252 - RNA, 18 nt, Human
gccaaucugcaauuucua

SEQ ID NO: 3475253 - RNA, 19 nt, Human
gccaauggagacugucuca

SEQ ID NO: 3475254 - RNA, 20 nt, Human
gccaauuauguuaaacuagc

SEQ ID NO: 3475255 - RNA, 13 nt, Human
gccaauuuuucug

SEQ ID NO: 3475256 - RNA, 23 nt, Human
gccacaagaaauuugauuucuau

SEQ ID NO: 3475257 - RNA, 14 nt, Human
gccacaaggacuuc

SEQ ID NO: 3475258 - RNA, 17 nt, Human
gccacaaggacuuccug

SEQ ID NO: 3475259 - RNA, 20 nt, Human
gccacaaugcaguucugagc

SEQ ID NO: 3475260 - RNA, 21 nt, Human
gccacaaugcaguucugagca

SEQ ID NO: 3475261 - RNA, 11 nt, Human
gccacacacac

SEQ ID NO: 3475262 - RNA, 13 nt, Human
gccacacacacag

SEQ ID NO: 3475263 - RNA, 17 nt, Human
gccacacacacagaaaa

SEQ ID NO: 3475264 - RNA, 19 nt, Human
gccacacacacagaaaaua

SEQ ID NO: 3475265 - RNA, 12 nt, Human
gccacacaccuu

SEQ ID NO: 3475266 - RNA, 15 nt, Human
gccacacagaccacc

SEQ ID NO: 3475267 - RNA, 18 nt, Human
gccacacaugggcaucua

SEQ ID NO: 3475268 - RNA, 17 nt, Human
gccacaccaagcugugc

SEQ ID NO: 3475269 - RNA, 22 nt, Human
gccacaccaagcugugccaccc

SEQ ID NO: 3475270 - RNA, 13 nt, Human
gccacaccaggau

SEQ ID NO: 3475271 - RNA, 12 nt, Human
gccacacccagg

SEQ ID NO: 3475272 - RNA, 19 nt, Human
gccacaccucuaucccggc

SEQ ID NO: 3475273 - RNA, 22 nt, Human
gccacacucugggcuccagagu

SEQ ID NO: 3475274 - RNA, 20 nt, Human
gccacacucuuucuccugcu

SEQ ID NO: 3475275 - RNA, 19 nt, Human
gccacacuucaaacuacuu

SEQ ID NO: 3475276 - RNA, 18 nt, Human
gccacagaagccaggagc

SEQ ID NO: 3475277 - RNA, 20 nt, Human
gccacagagaaaguacuucu

SEQ ID NO: 3475278 - RNA, 23 nt, Human
gccacagagaaaguacuucucca

SEQ ID NO: 3475279 - RNA, 23 nt, Human
gccacagaggacucacuugccca

SEQ ID NO: 3475280 - RNA, 14 nt, Human
gccacagcagcauu

SEQ ID NO: 3475281 - RNA, 16 nt, Human
gccacagcagccucug

SEQ ID NO: 3475282 - RNA, 17 nt, Human
gccacagcagccucuga

SEQ ID NO: 3475283 - RNA, 16 nt, Human
gccacagccagaaccc

SEQ ID NO: 3475284 - RNA, 14 nt, Human
gccacagccagggg

SEQ ID NO: 3475285 - RNA, 22 nt, Human
gccacagcccaggccuccagcu

SEQ ID NO: 3475286 - RNA, 14 nt, Human
gccacagcccuguc

SEQ ID NO: 3475287 - RNA, 21 nt, Human
gccacagcccugucagcauga

SEQ ID NO: 3475288 - RNA, 13 nt, Human
gccacagcccuuu

SEQ ID NO: 3475289 - RNA, 16 nt, Human
gccacagcgccagccu

SEQ ID NO: 3475290 - RNA, 11 nt, Human
gccacagcucu

SEQ ID NO: 3475291 - RNA, 18 nt, Human
gccacagcuuuugcaacu

SEQ ID NO: 3475292 - RNA, 13 nt, Human
gccacaggccuga

SEQ ID NO: 3475293 - RNA, 15 nt, Human
gccacaggccugaga

SEQ ID NO: 3475294 - RNA, 20 nt, Human
gccacaggccugagauuuca

SEQ ID NO: 3475295 - RNA, 18 nt, Human
gccacaguauggaugggu

SEQ ID NO: 3475296 - RNA, 22 nt, Human
gccacaguauggauggguggau

SEQ ID NO: 3475297 - RNA, 17 nt, Human
gccacauacuugcagcu

SEQ ID NO: 3475298 - RNA, 17 nt, Human
gccacauccccgcuggc

SEQ ID NO: 3475299 - RNA, 18 nt, Human
gccacauccccgcuggcu

SEQ ID NO: 3475300 - RNA, 20 nt, Human
gccacauccccgcuggcugg

SEQ ID NO: 3475301 - RNA, 14 nt, Human
gccacauuagaacu

SEQ ID NO: 3475302 - RNA, 16 nt, Human
gccacauuccugaugc

SEQ ID NO: 3475303 - RNA, 19 nt, Human
gccacauuuggaauacuuu

SEQ ID NO: 3475304 - RNA, 21 nt, Human
gccaccaacagccacucagaa

SEQ ID NO: 3475305 - RNA, 19 nt, Human
gccaccaacauacucccau

SEQ ID NO: 3475306 - RNA, 22 nt, Human
gccaccaacauacucccaucug

SEQ ID NO: 3475307 - RNA, 22 nt, Human
gccaccaagagggacgccuggg

SEQ ID NO: 3475308 - RNA, 13 nt, Human
gccaccacccccc

SEQ ID NO: 3475309 - RNA, 18 nt, Human
gccaccaccucuguggca

SEQ ID NO: 3475310 - RNA, 16 nt, Human
gccaccacguccagcu

SEQ ID NO: 3475311 - RNA, 21 nt, Human
gccaccagaugugacaguguu

SEQ ID NO: 3475312 - RNA, 12 nt, Human
gccaccaggaug

SEQ ID NO: 3475313 - RNA, 14 nt, Human
gccaccaggcuggc

SEQ ID NO: 3475314 - RNA, 16 nt, Human
gccaccaggucaucuc

SEQ ID NO: 3475315 - RNA, 20 nt, Human
gccaccaggugccuuucaaa

SEQ ID NO: 3475316 - RNA, 13 nt, Human
gccaccaguucuc

SEQ ID NO: 3475317 - RNA, 22 nt, Human
gccaccauauucagugcugugg

SEQ ID NO: 3475318 - RNA, 12 nt, Human
gccaccauccug

SEQ ID NO: 3475319 - RNA, 16 nt, Human
gccaccaugcccagcu

SEQ ID NO: 3475320 - RNA, 14 nt, Human
gccaccauggccag

SEQ ID NO: 3475321 - RNA, 18 nt, Human
gccaccauggccagccaa

SEQ ID NO: 3475322 - RNA, 17 nt, Human
gccacccaccucccugc

SEQ ID NO: 3475323 - RNA, 15 nt, Human
gccacccagccccag

SEQ ID NO: 3475324 - RNA, 23 nt, Human
gccacccagccccagccagggcu

SEQ ID NO: 3475325 - RNA, 18 nt, Human
gccaccccacccucccug

SEQ ID NO: 3475326 - RNA, 23 nt, Human
gccaccccagccuggccacgcag

SEQ ID NO: 3475327 - RNA, 17 nt, Human
gccaccccgagggcuga

SEQ ID NO: 3475328 - RNA, 18 nt, Human
gccaccccgggcucucug

SEQ ID NO: 3475329 - RNA, 18 nt, Human
gccaccccuaaacuccag

SEQ ID NO: 3475330 - RNA, 15 nt, Human
gccaccccuccuucc

SEQ ID NO: 3475331 - RNA, 22 nt, Human
gccacccguucugcuggccugg

SEQ ID NO: 3475332 - RNA, 23 nt, Human
gccacccguucugcuggccugga

SEQ ID NO: 3475333 - RNA, 19 nt, Human
gccacccuaccuguucagu

SEQ ID NO: 3475334 - RNA, 12 nt, Human
gccacccuagcc

SEQ ID NO: 3475335 - RNA, 15 nt, Human
gccacccucaugcug

SEQ ID NO: 3475336 - RNA, 15 nt, Human
gccacccucccagcu

SEQ ID NO: 3475337 - RNA, 13 nt, Human
gccacccugagga

SEQ ID NO: 3475338 - RNA, 16 nt, Human
gccacccugaggaguc

SEQ ID NO: 3475339 - RNA, 20 nt, Human
gccacccugaggagucugag

SEQ ID NO: 3475340 - RNA, 14 nt, Human
gccacccugggcuc

SEQ ID NO: 3475341 - RNA, 17 nt, Human
gccacccugggcucugu

SEQ ID NO: 3475342 - RNA, 19 nt, Human
gccacccugggcucugugg

SEQ ID NO: 3475343 - RNA, 19 nt, Human
gccaccgccuccuacagcc

SEQ ID NO: 3475344 - RNA, 16 nt, Human
gccaccgccuugccca

SEQ ID NO: 3475345 - RNA, 17 nt, Human
gccaccgcgccuggccg

SEQ ID NO: 3475346 - RNA, 20 nt, Human
gccaccuaucucgugggaga

SEQ ID NO: 3475347 - RNA, 11 nt, Human
gccaccucccc

SEQ ID NO: 3475348 - RNA, 18 nt, Human
gccaccuccccuugccag

SEQ ID NO: 3475349 - RNA, 22 nt, Human
gccggguacugagagucugcac

SEQ ID NO: 3475350 - RNA, 13 nt, Human
gccgggugcggug

SEQ ID NO: 3475351 - RNA, 16 nt, Human
gccgggugcucagggc

SEQ ID NO: 3475352 - RNA, 22 nt, Human
gccggucgggggggacccucca

SEQ ID NO: 3475353 - RNA, 20 nt, Human
gccggucugcaagucagagg

SEQ ID NO: 3475354 - RNA, 17 nt, Human
gccggugagaauaagag

SEQ ID NO: 3475355 - RNA, 15 nt, Human
gccgguggugcaggu

SEQ ID NO: 3475356 - RNA, 22 nt, Human
gccgguuccugucccugcgccu

SEQ ID NO: 3475357 - RNA, 13 nt, Human
gccguaauuuaac

SEQ ID NO: 3475358 - RNA, 15 nt, Human
gccguaccccacccu

SEQ ID NO: 3475359 - RNA, 21 nt, Human
gccguaucuccggcucccagc

SEQ ID NO: 3475360 - RNA, 21 nt, Human
gccguccucccgggcccuccc

SEQ ID NO: 3475361 - RNA, 13 nt, Human
gccguccuugucu

SEQ ID NO: 3475362 - RNA, 16 nt, Human
gccgucuaccugaggg

SEQ ID NO: 3475363 - RNA, 22 nt, Human
gccgucuaccugaggggccucu

SEQ ID NO: 3475364 - RNA, 23 nt, Human
gccgucuaccugaggggccucuu

SEQ ID NO: 3475365 - RNA, 22 nt, Human
gccgucuucacucgcccccggg

SEQ ID NO: 3475366 - RNA, 12 nt, Human
gccgugaacuuu

SEQ ID NO: 3475367 - RNA, 16 nt, Human
gccgugaaugggugcc

SEQ ID NO: 3475368 - RNA, 16 nt, Human
gccgugaguucucagg

SEQ ID NO: 3475369 - RNA, 18 nt, Human
gccgugaguucucagggc

SEQ ID NO: 3475370 - RNA, 23 nt, Human
gccgugaguucucagggcuccug

SEQ ID NO: 3475371 - RNA, 14 nt, Human
gccgugcccugccc

SEQ ID NO: 3475372 - RNA, 20 nt, Human
gccguggcugcugugggaaa

SEQ ID NO: 3475373 - RNA, 11 nt, Human
gccguggcuuc

SEQ ID NO: 3475374 - RNA, 18 nt, Human
gccgugggccccacccuc

SEQ ID NO: 3475375 - RNA, 18 nt, Human
gccguguccccugacagg

SEQ ID NO: 3475376 - RNA, 18 nt, Human
gccguuacucuccaaccu

SEQ ID NO: 3475377 - RNA, 20 nt, Human
gccguugccaagaacugaaa

SEQ ID NO: 3475378 - RNA, 23 nt, Human
gccguugccaagaacugaaaaca

SEQ ID NO: 3475379 - RNA, 12 nt, Human
gccguuggccac

SEQ ID NO: 3475380 - RNA, 17 nt, Human
gccuaaaaaugcaacuu

SEQ ID NO: 3475381 - RNA, 18 nt, Human
gccuaaaacuggccugac

SEQ ID NO: 3475382 - RNA, 23 nt, Human
gccuaaaagugggcuugauucug

SEQ ID NO: 3475383 - RNA, 15 nt, Human
gccuaaaccucaguu

SEQ ID NO: 3475384 - RNA, 13 nt, Human
gccuaaauccauu

SEQ ID NO: 3475385 - RNA, 22 nt, Human
gccuaaauccauuuggaaaucu

SEQ ID NO: 3475386 - RNA, 18 nt, Human
gccuaaauuuaaugcugc

SEQ ID NO: 3475387 - RNA, 13 nt, Human
gccuaagaggcug

SEQ ID NO: 3475388 - RNA, 20 nt, Human
gccuaagaggcugcccuccu

SEQ ID NO: 3475389 - RNA, 14 nt, Human
gccuaaggacuucu

SEQ ID NO: 3475390 - RNA, 15 nt, Human
gccuaaggacuucuu

SEQ ID NO: 3475391 - RNA, 14 nt, Human
gccuaaggcugaac

SEQ ID NO: 3475392 - RNA, 19 nt, Human
gccuaauacauuaaagcag

SEQ ID NO: 3475393 - RNA, 20 nt, Human
gccuaauacauuaaagcagu

SEQ ID NO: 3475394 - RNA, 21 nt, Human
gccuaauacauuaaagcaguc

SEQ ID NO: 3475395 - RNA, 20 nt, Human
gccuacagaacuucagaaag

SEQ ID NO: 3475396 - RNA, 17 nt, Human
gccuacaggagugagca

SEQ ID NO: 3475397 - RNA, 19 nt, Human
gccuacaugcuuugugaac

SEQ ID NO: 3475398 - RNA, 15 nt, Human
gccuaccaauauuua

SEQ ID NO: 3475399 - RNA, 17 nt, Human
gccuacccacccccagg

SEQ ID NO: 3475400 - RNA, 18 nt, Human
gccuacuagggaccuggg

SEQ ID NO: 3475401 - RNA, 20 nt, Human
gccuacuagggaccugggga

SEQ ID NO: 3475402 - RNA, 22 nt, Human
gccuacuagggaccuggggaag

SEQ ID NO: 3475403 - RNA, 23 nt, Human
gccuacuccugucuucugcuuug

SEQ ID NO: 3475404 - RNA, 12 nt, Human
gccuagaaacaa

SEQ ID NO: 3475405 - RNA, 20 nt, Human
gccuagaaacaacacuguag

SEQ ID NO: 3475406 - RNA, 23 nt, Human
gccuagaccagcagacagagcca

SEQ ID NO: 3475407 - RNA, 20 nt, Human
gccuagauccacacacagag

SEQ ID NO: 3475408 - RNA, 16 nt, Human
gccuagcaagcuggcc

SEQ ID NO: 3475409 - RNA, 15 nt, Human
gccuagcacagcagc

SEQ ID NO: 3475410 - RNA, 12 nt, Human
gccuagcauacg

SEQ ID NO: 3475411 - RNA, 21 nt, Human
gccuagcauacguacacauuu

SEQ ID NO: 3475412 - RNA, 23 nt, Human
gccuagcccacccugcugccuuc

SEQ ID NO: 3475413 - RNA, 16 nt, Human
gccuagccgaccucag

SEQ ID NO: 3475414 - RNA, 17 nt, Human
gccuagccgaccucagc

SEQ ID NO: 3475415 - RNA, 19 nt, Human
gccuagccgaccucagccu

SEQ ID NO: 3475416 - RNA, 20 nt, Human
gccuagcgaucucuccuggc

SEQ ID NO: 3475417 - RNA, 19 nt, Human
gccuagcugccuagcaagc

SEQ ID NO: 3475418 - RNA, 16 nt, Human
gccuagcugcuacaaa

SEQ ID NO: 3475419 - RNA, 22 nt, Human
gccuagcugcuacaaagaagac

SEQ ID NO: 3475420 - RNA, 24 nt, Human
gccuagcugcuacaaagaagacau

SEQ ID NO: 3475421 - RNA, 12 nt, Human
gccuagcugcug

SEQ ID NO: 3475422 - RNA, 15 nt, Human
gccuagcugcuguca

SEQ ID NO: 3475423 - RNA, 22 nt, Human
gccuaggaccacucagccccua

SEQ ID NO: 3475424 - RNA, 18 nt, Human
gccuaggagauaucugag

SEQ ID NO: 3475425 - RNA, 15 nt, Human
gccuaggauucuaaa

SEQ ID NO: 3475426 - RNA, 13 nt, Human
gccuaggccaggu

SEQ ID NO: 3475427 - RNA, 17 nt, Human
gccuaggccuaguccug

SEQ ID NO: 3475428 - RNA, 13 nt, Human
gccuaggccucag

SEQ ID NO: 3475429 - RNA, 16 nt, Human
gccuaggccucagcca

SEQ ID NO: 3475430 - RNA, 17 nt, Human
gccuaggggucagggac

SEQ ID NO: 3475431 - RNA, 22 nt, Human
gccuaggggucagggaccaagg

SEQ ID NO: 3475432 - RNA, 13 nt, Human
gccuaggugacag

SEQ ID NO: 3475433 - RNA, 14 nt, Human
gccuaggugacaga

SEQ ID NO: 3475434 - RNA, 18 nt, Human
gccuagucagccacaugg

SEQ ID NO: 3475435 - RNA, 21 nt, Human
gccuaguucauccaauccuca

SEQ ID NO: 3475436 - RNA, 16 nt, Human
gccuaguuuacuguuu

SEQ ID NO: 3475437 - RNA, 21 nt, Human
gccuaguuuuuaguaaucugu

SEQ ID NO: 3475438 - RNA, 16 nt, Human
gccuauaaugaagcuu

SEQ ID NO: 3475439 - RNA, 13 nt, Human
gccuauaguccca

SEQ ID NO: 3475440 - RNA, 15 nt, Human
gccuauauuuuccug

SEQ ID NO: 3475441 - RNA, 20 nt, Human
gccuaucagaguugcugcaa

SEQ ID NO: 3475442 - RNA, 14 nt, Human
gccuaucagugugc

SEQ ID NO: 3475443 - RNA, 16 nt, Human
gccuaucagugugccc

SEQ ID NO: 3475444 - RNA, 14 nt, Human
gccuauccuggcca

SEQ ID NO: 3475445 - RNA, 17 nt, Human
gccuaugacuugggcac

SEQ ID NO: 3475446 - RNA, 16 nt, Human
gccuaugagcauccug

SEQ ID NO: 3475447 - RNA, 20 nt, Human
gccuaugcacauauggacuc

SEQ ID NO: 3475448 - RNA, 21 nt, Human
gccuauuaucugucagcugca

SEQ ID NO: 3475449 - RNA, 22 nt, Human
gccuauucccacaccuccacag

SEQ ID NO: 3475450 - RNA, 17 nt, Human
gccuauugcuagagcuc

SEQ ID NO: 3475451 - RNA, 20 nt, Human
gccuauugcuagagcuccuc

SEQ ID NO: 3475452 - RNA, 21 nt, Human
gccuauuucaguggcacguca

SEQ ID NO: 3475453 - RNA, 21 nt, Human
gccuauuuucaugauuucuuu

SEQ ID NO: 3475454 - RNA, 22 nt, Human
gccucaacccucccucagcccc

SEQ ID NO: 3475455 - RNA, 17 nt, Human
gccucaacuccucccau

SEQ ID NO: 3475456 - RNA, 21 nt, Human
gccucaagguuuuagguucua

SEQ ID NO: 3475457 - RNA, 21 nt, Human
gccucaagugauucuccugcc

SEQ ID NO: 3475458 - RNA, 17 nt, Human
gccucaauaagccuugu

SEQ ID NO: 3475459 - RNA, 13 nt, Human
gccucacagaaga

SEQ ID NO: 3475460 - RNA, 16 nt, Human
gccucacagaagaaua

SEQ ID NO: 3475461 - RNA, 15 nt, Human
gccucacagcaguga

SEQ ID NO: 3475462 - RNA, 13 nt, Human
gccucacaguccu

SEQ ID NO: 3475463 - RNA, 17 nt, Human
gccucaccgcuucccuc

SEQ ID NO: 3475464 - RNA, 20 nt, Human
gccucaccgcuucccuccug

SEQ ID NO: 3475465 - RNA, 18 nt, Human
gccucaccucuacccaaa

SEQ ID NO: 3475466 - RNA, 16 nt, Human
gccucacuccaggaag

SEQ ID NO: 3475467 - RNA, 22 nt, Human
gccucacugauauauuuuccag

SEQ ID NO: 3475468 - RNA, 20 nt, Human
gccucacuucuaggguaugg

SEQ ID NO: 3475469 - RNA, 22 nt, Human
gccucacuuggucugccaggcc

SEQ ID NO: 3475470 - RNA, 22 nt, Human
gccucacuuuuaaugaacaaau

SEQ ID NO: 3475471 - RNA, 17 nt, Human
gccucagaaaccagacu

SEQ ID NO: 3475472 - RNA, 13 nt, Human
gccucagaagugc

SEQ ID NO: 3475473 - RNA, 19 nt, Human
gccucagaagugcaucugg

SEQ ID NO: 3475474 - RNA, 17 nt, Human
gccucagaugauuuccc

SEQ ID NO: 3475475 - RNA, 15 nt, Human
gccucagauuccuuc

SEQ ID NO: 3475476 - RNA, 16 nt, Human
gccucagauuccuucc

SEQ ID NO: 3475477 - RNA, 16 nt, Human
gccucagcauccuggc

SEQ ID NO: 3475478 - RNA, 14 nt, Human
gccucagccagaga

SEQ ID NO: 3475479 - RNA, 22 nt, Human
gccucagccucccaaagugcug

SEQ ID NO: 3475480 - RNA, 23 nt, Human
gccucagccucccaaagugcugg

SEQ ID NO: 3475481 - RNA, 14 nt, Human
gccucagccucccg

SEQ ID NO: 3475482 - RNA, 15 nt, Human
gccucagccucccga

SEQ ID NO: 3475483 - RNA, 18 nt, Human
gccucagccuccugagua

SEQ ID NO: 3475484 - RNA, 16 nt, Human
gccucagcucccacaa

SEQ ID NO: 3475485 - RNA, 19 nt, Human
gccucagcugaaugccucc

SEQ ID NO: 3475486 - RNA, 16 nt, Human
gccucagcugccucac

SEQ ID NO: 3475487 - RNA, 20 nt, Human
gccucagcugccucacuucc

SEQ ID NO: 3475488 - RNA, 15 nt, Human
gccucaggccucugu

SEQ ID NO: 3475489 - RNA, 21 nt, Human
gccucagggcagccugccugg

SEQ ID NO: 3475490 - RNA, 22 nt, Human
gccucagggcagccugccugga

SEQ ID NO: 3475491 - RNA, 14 nt, Human
gccucagguuccua

SEQ ID NO: 3475492 - RNA, 15 nt, Human
gccucaguccucccc

SEQ ID NO: 3475493 - RNA, 20 nt, Human
gccuggagcccuccgccuuc

SEQ ID NO: 3475494 - RNA, 22 nt, Human
gccuggagcccuccgccuucac

SEQ ID NO: 3475495 - RNA, 16 nt, Human
gccuggagcccuggag

SEQ ID NO: 3475496 - RNA, 17 nt, Human
gccuggagcccuggaga

SEQ ID NO: 3475497 - RNA, 12 nt, Human
gccuggagcucc

SEQ ID NO: 3475498 - RNA, 14 nt, Human
gccuggaggaccug

SEQ ID NO: 3475499 - RNA, 20 nt, Human
gccuggaggaccugagccug

SEQ ID NO: 3475500 - RNA, 22 nt, Human
gccuggaggccgggugcucagg

SEQ ID NO: 3475501 - RNA, 21 nt, Human
gccuggauauuauucuuguag

SEQ ID NO: 3475502 - RNA, 12 nt, Human
gccuggaucucc

SEQ ID NO: 3475503 - RNA, 14 nt, Human
gccuggauggggcu

SEQ ID NO: 3475504 - RNA, 15 nt, Human
gccuggauggggcug

SEQ ID NO: 3475505 - RNA, 16 nt, Human
gccuggauucauuucc

SEQ ID NO: 3475506 - RNA, 18 nt, Human
gccuggauucauuuccug

SEQ ID NO: 3475507 - RNA, 20 nt, Human
gccuggauucauuuccugcc

SEQ ID NO: 3475508 - RNA, 20 nt, Human
gccuggcaauagaccgagac

SEQ ID NO: 3475509 - RNA, 16 nt, Human
gccuggcacacaucag

SEQ ID NO: 3475510 - RNA, 15 nt, Human
gccuggcacaggacu

SEQ ID NO: 3475511 - RNA, 17 nt, Human
gccuggcacaggacuga

SEQ ID NO: 3475512 - RNA, 13 nt, Human
gccuggcacaggg

SEQ ID NO: 3475513 - RNA, 19 nt, Human
gccuggcacagggcagugg

SEQ ID NO: 3475514 - RNA, 20 nt, Human
gccuggcagccgugccuuca

SEQ ID NO: 3475515 - RNA, 20 nt, Human
gccuggccaacauggcgaaa

SEQ ID NO: 3475516 - RNA, 17 nt, Human
gccuggccacgcagcca

SEQ ID NO: 3475517 - RNA, 21 nt, Human
gccuggccacgcagccaggac

SEQ ID NO: 3475518 - RNA, 14 nt, Human
gccuggccagacac

SEQ ID NO: 3475519 - RNA, 16 nt, Human
gccuggccagacacag

SEQ ID NO: 3475520 - RNA, 16 nt, Human
gccuggccagaugcac

SEQ ID NO: 3475521 - RNA, 22 nt, Human
gccuggccagaugcaccagccc

SEQ ID NO: 3475522 - RNA, 15 nt, Human
gccuggccaggagca

SEQ ID NO: 3475523 - RNA, 15 nt, Human
gccuggccaggcaga

SEQ ID NO: 3475524 - RNA, 17 nt, Human
gccuggccagggccugg

SEQ ID NO: 3475525 - RNA, 18 nt, Human
gccuggcccaccccaccc

SEQ ID NO: 3475526 - RNA, 11 nt, Human
gccuggcccag

SEQ ID NO: 3475527 - RNA, 12 nt, Human
gccuggcccagc

SEQ ID NO: 3475528 - RNA, 14 nt, Human
gccuggcccagcuc

SEQ ID NO: 3475529 - RNA, 15 nt, Human
gccuggcccagcucc

SEQ ID NO: 3475530 - RNA, 14 nt, Human
gccuggcccauaga

SEQ ID NO: 3475531 - RNA, 12 nt, Human
gccuggcccaug

SEQ ID NO: 3475532 - RNA, 10 nt, Human
gccuggcccc

SEQ ID NO: 3475533 - RNA, 13 nt, Human
gccuggcccccaa

SEQ ID NO: 3475534 - RNA, 20 nt, Human
gccuggcccccaaccucagg

SEQ ID NO: 3475535 - RNA, 22 nt, Human
gccuggcccccaaccucagggc

SEQ ID NO: 3475536 - RNA, 14 nt, Human
gccuggccccucag

SEQ ID NO: 3475537 - RNA, 17 nt, Human
gccuggccccucagggu

SEQ ID NO: 3475538 - RNA, 12 nt, Human
gccuggcccugc

SEQ ID NO: 3475539 - RNA, 19 nt, Human
gccuggcccugcccugagg

SEQ ID NO: 3475540 - RNA, 14 nt, Human
gccuggccggccag

SEQ ID NO: 3475541 - RNA, 22 nt, Human
gccuggccggccagccagccac

SEQ ID NO: 3475542 - RNA, 18 nt, Human
gccuggccuccaggcccg

SEQ ID NO: 3475543 - RNA, 15 nt, Human
gccuggccuccugcc

SEQ ID NO: 3475544 - RNA, 13 nt, Human
gccuggccugagc

SEQ ID NO: 3475545 - RNA, 19 nt, Human
gccuggccuggcccugccc

SEQ ID NO: 3475546 - RNA, 23 nt, Human
gccuggccuuguccucagccagu

SEQ ID NO: 3475547 - RNA, 21 nt, Human
gccuggcgggaugggccaccg

SEQ ID NO: 3475548 - RNA, 14 nt, Human
gccuggcucagagc

SEQ ID NO: 3475549 - RNA, 18 nt, Human
gccuggcucagagccagu

SEQ ID NO: 3475550 - RNA, 13 nt, Human
gccuggcuccccu

SEQ ID NO: 3475551 - RNA, 14 nt, Human
gccuggcuccccug

SEQ ID NO: 3475552 - RNA, 17 nt, Human
gccuggcuccccugggg

SEQ ID NO: 3475553 - RNA, 17 nt, Human
gccuggcuccgcugugu

SEQ ID NO: 3475554 - RNA, 19 nt, Human
gccuggcucuugugcugga

SEQ ID NO: 3475555 - RNA, 23 nt, Human
gccuggcugcagccugcgccacc

SEQ ID NO: 3475556 - RNA, 12 nt, Human
gccuggcuggcu

SEQ ID NO: 3475557 - RNA, 14 nt, Human
gccuggcuggcuga

SEQ ID NO: 3475558 - RNA, 15 nt, Human
gccuggcuggcugag

SEQ ID NO: 3475559 - RNA, 18 nt, Human
gccuggcuggcugagggc

SEQ ID NO: 3475560 - RNA, 21 nt, Human
gccuggcuggcugagggcagu

SEQ ID NO: 3475561 - RNA, 13 nt, Human
gccuggcuucucc

SEQ ID NO: 3475562 - RNA, 13 nt, Human
gccuggcuucugg

SEQ ID NO: 3475563 - RNA, 15 nt, Human
gccugggaauguauu

SEQ ID NO: 3475564 - RNA, 19 nt, Human
gccugggacaacugcuccc

SEQ ID NO: 3475565 - RNA, 15 nt, Human
gccugggaggcacag

SEQ ID NO: 3475566 - RNA, 18 nt, Human
gccugggaucccucaucc

SEQ ID NO: 3475567 - RNA, 21 nt, Human
gccugggaucccucauccuca

SEQ ID NO: 3475568 - RNA, 20 nt, Human
gccugggcaacacagcgaga

SEQ ID NO: 3475569 - RNA, 20 nt, Human
gccugggcaacagagcaaga

SEQ ID NO: 3475570 - RNA, 21 nt, Human
gccugggcaacagagcaagac

SEQ ID NO: 3475571 - RNA, 17 nt, Human
gccugggcagaaggaag

SEQ ID NO: 3475572 - RNA, 19 nt, Human
gccugggcagcauagcaag

SEQ ID NO: 3475573 - RNA, 20 nt, Human
gccugggcagccaggcugcc

SEQ ID NO: 3475574 - RNA, 15 nt, Human
gccugggcccaucuc

SEQ ID NO: 3475575 - RNA, 16 nt, Human
gccugggcccaucucc

SEQ ID NO: 3475576 - RNA, 18 nt, Human
gccugggcccaucucccu

SEQ ID NO: 3475577 - RNA, 21 nt, Human
gccugggccguagcuugucug

SEQ ID NO: 3475578 - RNA, 19 nt, Human
gccugggccuauggagagc

SEQ ID NO: 3475579 - RNA, 11 nt, Human
gccugggccug

SEQ ID NO: 3475580 - RNA, 20 nt, Human
gccugggcgacagagcgaga

SEQ ID NO: 3475581 - RNA, 21 nt, Human
gccugggcgcugguccuuucu

SEQ ID NO: 3475582 - RNA, 10 nt, Human
gccugggcuc

SEQ ID NO: 3475583 - RNA, 17 nt, Human
gccugggcuccuggacc

SEQ ID NO: 3475584 - RNA, 20 nt, Human
gccugggcuguuggcacuca

SEQ ID NO: 3475585 - RNA, 16 nt, Human
gccuggggccugagag

SEQ ID NO: 3475586 - RNA, 22 nt, Human
gccuggggcuccuuucuccagc

SEQ ID NO: 3475587 - RNA, 23 nt, Human
gccuggggcucuaacgccugagc

SEQ ID NO: 3475588 - RNA, 17 nt, Human
gccugggggccuggcug

SEQ ID NO: 3475589 - RNA, 18 nt, Human
gccugggggccuggcugg

SEQ ID NO: 3475590 - RNA, 21 nt, Human
gccugggggcugggcagagga

SEQ ID NO: 3475591 - RNA, 16 nt, Human
gccugggggugccagg

SEQ ID NO: 3475592 - RNA, 19 nt, Human
gccuggggugacccggcac

SEQ ID NO: 3475593 - RNA, 21 nt, Human
gccugggguguuaguggcacc

SEQ ID NO: 3475594 - RNA, 16 nt, Human
gccuggguccagggga

SEQ ID NO: 3475595 - RNA, 14 nt, Human
gccugggucugugu

SEQ ID NO: 3475596 - RNA, 20 nt, Human
gccugggugacaaagcgaga

SEQ ID NO: 3475597 - RNA, 23 nt, Human
gccugggugacaaagugagacuc

SEQ ID NO: 3475598 - RNA, 22 nt, Human
gccugggugacagagcaagacu

SEQ ID NO: 3475599 - RNA, 20 nt, Human
gccugggugacagagugaga

SEQ ID NO: 3475600 - RNA, 23 nt, Human
gccugggugacagagugagacuc

SEQ ID NO: 3475601 - RNA, 12 nt, Human
gccugggugcug

SEQ ID NO: 3475602 - RNA, 20 nt, Human
gccugggugcuggcugccca

SEQ ID NO: 3475603 - RNA, 16 nt, Human
gccuggguggggcugc

SEQ ID NO: 3475604 - RNA, 20 nt, Human
gccuggguuuaaggggagag

SEQ ID NO: 3475605 - RNA, 19 nt, Human
gccuggguuugguguaugg

SEQ ID NO: 3475606 - RNA, 20 nt, Human
gccugguauauccaaaagcu

SEQ ID NO: 3475607 - RNA, 20 nt, Human
gccugguccaugcagggggc

SEQ ID NO: 3475608 - RNA, 15 nt, Human
gccuggucccuggga

SEQ ID NO: 3475609 - RNA, 16 nt, Human
gccuggucccugggag

SEQ ID NO: 3475610 - RNA, 19 nt, Human
gccuggucucacccuggag

SEQ ID NO: 3475611 - RNA, 13 nt, Human
gccuggugcugcu

SEQ ID NO: 3475612 - RNA, 20 nt, Human
gccugguggaaggaggcgca

SEQ ID NO: 3475613 - RNA, 18 nt, Human
gccugguggcagcugcgg

SEQ ID NO: 3475614 - RNA, 13 nt, Human
gccuggugggccu

SEQ ID NO: 3475615 - RNA, 21 nt, Human
gccugguuaaauaaggcaggg

SEQ ID NO: 3475616 - RNA, 15 nt, Human
gccugguugaagaag

SEQ ID NO: 3475617 - RNA, 19 nt, Human
gccugguugaagaagauga

SEQ ID NO: 3475618 - RNA, 22 nt, Human
gccuguaacacuccucugcguc

SEQ ID NO: 3475619 - RNA, 19 nt, Human
gccuguaaucccagcacuu

SEQ ID NO: 3475620 - RNA, 17 nt, Human
gccuguaaucccagcag

SEQ ID NO: 3475621 - RNA, 18 nt, Human
gccuguaaucccagcagu

SEQ ID NO: 3475622 - RNA, 16 nt, Human
gccuguaaucccagcu

SEQ ID NO: 3475623 - RNA, 19 nt, Human
gccuguaaucccagcuacu

SEQ ID NO: 3475624 - RNA, 21 nt, Human
gccuguacagucugucuucug

SEQ ID NO: 3475625 - RNA, 15 nt, Human
gccuguagaguugcu

SEQ ID NO: 3475626 - RNA, 21 nt, Human
gccuguagccccagugacagc

SEQ ID NO: 3475627 - RNA, 19 nt, Human
gccuguauacuuuaguaug

SEQ ID NO: 3475628 - RNA, 15 nt, Human
gccugucagauccag

SEQ ID NO: 3475629 - RNA, 15 nt, Human
gccuguccacaggcu

SEQ ID NO: 3475630 - RNA, 23 nt, Human
gccuguccacaggcuucugagca

SEQ ID NO: 3475631 - RNA, 14 nt, Human
gccuguccagccug

SEQ ID NO: 3475632 - RNA, 15 nt, Human
gccuguccagccugg

SEQ ID NO: 3475633 - RNA, 13 nt, Human
gccugucccuggc

SEQ ID NO: 3475634 - RNA, 14 nt, Human
gccuguccugccug

SEQ ID NO: 3475635 - RNA, 19 nt, Human
gccuguccugccuguggcc

SEQ ID NO: 3475636 - RNA, 16 nt, Human
gccuguccugggcugg

SEQ ID NO: 3475637 - RNA, 17 nt, Human
gccugucucauccccag

SEQ ID NO: 3475638 - RNA, 12 nt, Human
gcugacaguccu

SEQ ID NO: 3475639 - RNA, 19 nt, Human
gcugacaguccucuccacc

SEQ ID NO: 3475640 - RNA, 22 nt, Human
gcugacaucuugaauccuucca

SEQ ID NO: 3475641 - RNA, 21 nt, Human
gcugacaugaagcuguugugu

SEQ ID NO: 3475642 - RNA, 21 nt, Human
gcugacauuguggcacauucu

SEQ ID NO: 3475643 - RNA, 16 nt, Human
gcugaccaauugugcu

SEQ ID NO: 3475644 - RNA, 20 nt, Human
gcugaccaauugugcugcca

SEQ ID NO: 3475645 - RNA, 13 nt, Human
gcugacccagucc

SEQ ID NO: 3475646 - RNA, 16 nt, Human
gcugacccagucccug

SEQ ID NO: 3475647 - RNA, 19 nt, Human
gcugacccaugggcaggag

SEQ ID NO: 3475648 - RNA, 20 nt, Human
gcugacccaugggcaggaga

SEQ ID NO: 3475649 - RNA, 13 nt, Human
gcugaccccccuc

SEQ ID NO: 3475650 - RNA, 15 nt, Human
gcugacccuccuguu

SEQ ID NO: 3475651 - RNA, 16 nt, Human
gcugaccuccacagcu

SEQ ID NO: 3475652 - RNA, 16 nt, Human
gcugaccucugguggc

SEQ ID NO: 3475653 - RNA, 15 nt, Human
gcugaccugccucuc

SEQ ID NO: 3475654 - RNA, 15 nt, Human
gcugacgaacuucca

SEQ ID NO: 3475655 - RNA, 14 nt, Human
gcugacgaggcugg

SEQ ID NO: 3475656 - RNA, 15 nt, Human
gcugacgaggcuggg

SEQ ID NO: 3475657 - RNA, 16 nt, Human
gcugacuacagggccg

SEQ ID NO: 3475658 - RNA, 15 nt, Human
gcugacuagaagggc

SEQ ID NO: 3475659 - RNA, 17 nt, Human
gcugacucacaccugaa

SEQ ID NO: 3475660 - RNA, 22 nt, Human
gcugacugccaauaacauucuu

SEQ ID NO: 3475661 - RNA, 20 nt, Human
gcugacuguacuccucccag

SEQ ID NO: 3475662 - RNA, 16 nt, Human
gcugacuguccucucc

SEQ ID NO: 3475663 - RNA, 20 nt, Human
gcugacuucacuuauuaguc

SEQ ID NO: 3475664 - RNA, 16 nt, Human
gcugacuuggcuggug

SEQ ID NO: 3475665 - RNA, 16 nt, Human
gcugagaauagaagga

SEQ ID NO: 3475666 - RNA, 15 nt, Human
gcugagacugugcug

SEQ ID NO: 3475667 - RNA, 14 nt, Human
gcugagagacccaa

SEQ ID NO: 3475668 - RNA, 15 nt, Human
gcugagagccccagc

SEQ ID NO: 3475669 - RNA, 17 nt, Human
gcugagagccccagcug

SEQ ID NO: 3475670 - RNA, 14 nt, Human
gcugagauccugga

SEQ ID NO: 3475671 - RNA, 13 nt, Human
gcugagccaggcu

SEQ ID NO: 3475672 - RNA, 14 nt, Human
gcugagccccuacc

SEQ ID NO: 3475673 - RNA, 22 nt, Human
gcugagccucacagcagugaga

SEQ ID NO: 3475674 - RNA, 12 nt, Human
gcugagccucag

SEQ ID NO: 3475675 - RNA, 16 nt, Human
gcugagccucagucuc

SEQ ID NO: 3475676 - RNA, 20 nt, Human
gcugagccucugcuccccag

SEQ ID NO: 3475677 - RNA, 12 nt, Human
gcugagccugca

SEQ ID NO: 3475678 - RNA, 19 nt, Human
gcugagccugcagggaagc

SEQ ID NO: 3475679 - RNA, 21 nt, Human
gcugagcucacaaggcagcaa

SEQ ID NO: 3475680 - RNA, 22 nt, Human
gcugagcucacaaggcagcaag

SEQ ID NO: 3475681 - RNA, 17 nt, Human
gcugagcucugagaggc

SEQ ID NO: 3475682 - RNA, 22 nt, Human
gcugagcugcccacagcaggcc

SEQ ID NO: 3475683 - RNA, 12 nt, Human
gcugaggaaagg

SEQ ID NO: 3475684 - RNA, 18 nt, Human
gcugaggaggcaccuaca

SEQ ID NO: 3475685 - RNA, 21 nt, Human
gcugaggaggccuccaucuca

SEQ ID NO: 3475686 - RNA, 18 nt, Human
gcugaggauuucaagccu

SEQ ID NO: 3475687 - RNA, 19 nt, Human
gcugaggcacaagaaucac

SEQ ID NO: 3475688 - RNA, 16 nt, Human
gcugaggcagaagaau

SEQ ID NO: 3475689 - RNA, 23 nt, Human
gcugaggcagcagugugaggcca

SEQ ID NO: 3475690 - RNA, 21 nt, Human
gcugaggccuggacuuuccug

SEQ ID NO: 3475691 - RNA, 16 nt, Human
gcugaggccugggccg

SEQ ID NO: 3475692 - RNA, 17 nt, Human
gcugaggccugggccgc

SEQ ID NO: 3475693 - RNA, 18 nt, Human
gcugaggcuggcacagga

SEQ ID NO: 3475694 - RNA, 23 nt, Human
gcugaggcugggggagagccgug

SEQ ID NO: 3475695 - RNA, 16 nt, Human
gcugagggaccagcca

SEQ ID NO: 3475696 - RNA, 22 nt, Human
gcugagggauggacugaugcuu

SEQ ID NO: 3475697 - RNA, 12 nt, Human
gcugagggcagu

SEQ ID NO: 3475698 - RNA, 12 nt, Human
gcugagggccug

SEQ ID NO: 3475699 - RNA, 14 nt, Human
gcugagggccugcu

SEQ ID NO: 3475700 - RNA, 17 nt, Human
gcugagggccugcugga

SEQ ID NO: 3475701 - RNA, 22 nt, Human
gcugagggccugcuggaggccu

SEQ ID NO: 3475702 - RNA, 21 nt, Human
gcugaggggggccgugcccag

SEQ ID NO: 3475703 - RNA, 17 nt, Human
gcugaggucucuugagg

SEQ ID NO: 3475704 - RNA, 17 nt, Human
gcugaggugcccaggag

SEQ ID NO: 3475705 - RNA, 14 nt, Human
gcugaggugggagg

SEQ ID NO: 3475706 - RNA, 21 nt, Human
gcugaggugggaggaucucuu

SEQ ID NO: 3475707 - RNA, 21 nt, Human
gcugaggugucuuaagccuuu

SEQ ID NO: 3475708 - RNA, 17 nt, Human
gcugagguuucacccuu

SEQ ID NO: 3475709 - RNA, 20 nt, Human
gcugaguagaugcgcagccc

SEQ ID NO: 3475710 - RNA, 20 nt, Human
gcugaguauggagcagccug

SEQ ID NO: 3475711 - RNA, 21 nt, Human
gcugaguauguuaagcucuuu

SEQ ID NO: 3475712 - RNA, 22 nt, Human
gcugagucaugaucucccugcc

SEQ ID NO: 3475713 - RNA, 21 nt, Human
gcugagucccaggcugagccu

SEQ ID NO: 3475714 - RNA, 16 nt, Human
gcugagucugaaggcu

SEQ ID NO: 3475715 - RNA, 18 nt, Human
gcugagucugaaggcugg

SEQ ID NO: 3475716 - RNA, 12 nt, Human
gcugagugagcu

SEQ ID NO: 3475717 - RNA, 14 nt, Human
gcugagugcaggcc

SEQ ID NO: 3475718 - RNA, 18 nt, Human
gcugagugcaggcccacc

SEQ ID NO: 3475719 - RNA, 21 nt, Human
gcugagugcaggcccacccug

SEQ ID NO: 3475720 - RNA, 23 nt, Human
gcugagugcaggcccacccugcu

SEQ ID NO: 3475721 - RNA, 17 nt, Human
gcugaguggcaggggac

SEQ ID NO: 3475722 - RNA, 22 nt, Human
gcugagugggagaaggcaguga

SEQ ID NO: 3475723 - RNA, 22 nt, Human
gcugagugggggaucacagccu

SEQ ID NO: 3475724 - RNA, 11 nt, Human
gcugaguuucc

SEQ ID NO: 3475725 - RNA, 12 nt, Human
gcugaguuuccu

SEQ ID NO: 3475726 - RNA, 13 nt, Human
gcugaguuuccua

SEQ ID NO: 3475727 - RNA, 20 nt, Human
gcugaguuuucucuuugugg

SEQ ID NO: 3475728 - RNA, 13 nt, Human
gcugauaauuuua

SEQ ID NO: 3475729 - RNA, 14 nt, Human
gcugauaauuuuaa

SEQ ID NO: 3475730 - RNA, 17 nt, Human
gcugauauaaauucugu

SEQ ID NO: 3475731 - RNA, 17 nt, Human
gcugauauuuucucuag

SEQ ID NO: 3475732 - RNA, 22 nt, Human
gcugaucaucgccagaggugcu

SEQ ID NO: 3475733 - RNA, 18 nt, Human
gcugauccagagcacaga

SEQ ID NO: 3475734 - RNA, 15 nt, Human
gcugaucgcuucucc

SEQ ID NO: 3475735 - RNA, 14 nt, Human
gcugaucucaggga

SEQ ID NO: 3475736 - RNA, 16 nt, Human
gcugaugcugggcugg

SEQ ID NO: 3475737 - RNA, 19 nt, Human
gcugaugcugggcugggug

SEQ ID NO: 3475738 - RNA, 13 nt, Human
gcugauggucugg

SEQ ID NO: 3475739 - RNA, 16 nt, Human
gcugauggugcaauga

SEQ ID NO: 3475740 - RNA, 13 nt, Human
gcugauguucagu

SEQ ID NO: 3475741 - RNA, 21 nt, Human
gcugauguucaguguaauuuc

SEQ ID NO: 3475742 - RNA, 21 nt, Human
gcugauuaaaccaaggcuaga

SEQ ID NO: 3475743 - RNA, 19 nt, Human
gcugauuuaaacacauuaa

SEQ ID NO: 3475744 - RNA, 15 nt, Human
gcugauuuccccucu

SEQ ID NO: 3475745 - RNA, 14 nt, Human
gcugauuuuaaugg

SEQ ID NO: 3475746 - RNA, 17 nt, Human
gcugcaaaagugagggc

SEQ ID NO: 3475747 - RNA, 15 nt, Human
gcugcaacaaaaugu

SEQ ID NO: 3475748 - RNA, 18 nt, Human
gcugcaagcacagcccuu

SEQ ID NO: 3475749 - RNA, 19 nt, Human
gcugcaaggccuuucugug

SEQ ID NO: 3475750 - RNA, 20 nt, Human
gcugcaagugacaucucuuu

SEQ ID NO: 3475751 - RNA, 21 nt, Human
gcugcacagggcagcugggcc

SEQ ID NO: 3475752 - RNA, 17 nt, Human
gcugcaccaacccagcc

SEQ ID NO: 3475753 - RNA, 15 nt, Human
gcugcaccccuuccu

SEQ ID NO: 3475754 - RNA, 16 nt, Human
gcugcacccucaggca

SEQ ID NO: 3475755 - RNA, 17 nt, Human
gcugcaccggcuggccu

SEQ ID NO: 3475756 - RNA, 19 nt, Human
gcugcaccggcuggccugg

SEQ ID NO: 3475757 - RNA, 18 nt, Human
gcugcaccugccagccug

SEQ ID NO: 3475758 - RNA, 21 nt, Human
gcugcaccugccagccuggcu

SEQ ID NO: 3475759 - RNA, 15 nt, Human
gcugcacucugugcc

SEQ ID NO: 3475760 - RNA, 16 nt, Human
gcugcacucugugccc

SEQ ID NO: 3475761 - RNA, 20 nt, Human
gcugcacugaugcugccccu

SEQ ID NO: 3475762 - RNA, 17 nt, Human
gcugcagaaggccaaga

SEQ ID NO: 3475763 - RNA, 18 nt, Human
gcugcagagacagagagg

SEQ ID NO: 3475764 - RNA, 19 nt, Human
gcugcagagccacccugug

SEQ ID NO: 3475765 - RNA, 13 nt, Human
gcugcagaggggc

SEQ ID NO: 3475766 - RNA, 23 nt, Human
gcugcagaggggcaggcccugca

SEQ ID NO: 3475767 - RNA, 23 nt, Human
gcugcagagucacaagccucgag

SEQ ID NO: 3475768 - RNA, 21 nt, Human
gcugcagauuugggcuggaac

SEQ ID NO: 3475769 - RNA, 20 nt, Human
gcugcagcaccgaggggccu

SEQ ID NO: 3475770 - RNA, 20 nt, Human
gcugcagcagcgguggccuc

SEQ ID NO: 3475771 - RNA, 23 nt, Human
gcugcagccaggccacuggcccc

SEQ ID NO: 3475772 - RNA, 15 nt, Human
gcugcagccucagga

SEQ ID NO: 3475773 - RNA, 22 nt, Human
gcugcagccucaggacugggag

SEQ ID NO: 3475774 - RNA, 23 nt, Human
gcugcagccucaggacugggagc

SEQ ID NO: 3475775 - RNA, 21 nt, Human
gcugcagccugcgccaccgcc

SEQ ID NO: 3475776 - RNA, 23 nt, Human
gcugcagcucccuggcuucugug

SEQ ID NO: 3475777 - RNA, 14 nt, Human
gcugcagcuggaca

SEQ ID NO: 3475778 - RNA, 15 nt, Human
gcugcagcuggacag

SEQ ID NO: 3475779 - RNA, 16 nt, Human
gcugcagcuggacaga

SEQ ID NO: 3475780 - RNA, 15 nt, Human
gcugcagcugggagc

SEQ ID NO: 3475781 - RNA, 22 nt, Human
gcugcaggaaucaaaaauugaa

SEQ ID NO: 3475782 - RNA, 11 nt, Human
gcuggcccagc

SEQ ID NO: 3475783 - RNA, 20 nt, Human
gcuggcccagcccugcuggc

SEQ ID NO: 3475784 - RNA, 16 nt, Human
gcuggcccagccggcc

SEQ ID NO: 3475785 - RNA, 19 nt, Human
gcuggcccagccggccucu

SEQ ID NO: 3475786 - RNA, 23 nt, Human
gcuggcccagccggccucucugg

SEQ ID NO: 3475787 - RNA, 19 nt, Human
gcuggcccagggcccagag

SEQ ID NO: 3475788 - RNA, 15 nt, Human
gcuggccccagcccu

SEQ ID NO: 3475789 - RNA, 16 nt, Human
gcuggccccagcccug

SEQ ID NO: 3475790 - RNA, 20 nt, Human
gcuggcccccacuggcugug

SEQ ID NO: 3475791 - RNA, 22 nt, Human
gcuggccccgccgccugguacu

SEQ ID NO: 3475792 - RNA, 24 nt, Human
gcuggccccgccgccugguacuca

SEQ ID NO: 3475793 - RNA, 11 nt, Human
gcuggccccuc

SEQ ID NO: 3475794 - RNA, 14 nt, Human
gcuggccccucacc

SEQ ID NO: 3475795 - RNA, 14 nt, Human
gcuggccccuuugg

SEQ ID NO: 3475796 - RNA, 22 nt, Human
gcuggccccuuugggcccugca

SEQ ID NO: 3475797 - RNA, 19 nt, Human
gcuggcccgugacagacuc

SEQ ID NO: 3475798 - RNA, 12 nt, Human
gcuggcccugcc

SEQ ID NO: 3475799 - RNA, 15 nt, Human
gcuggccgagggucc

SEQ ID NO: 3475800 - RNA, 24 nt, Human
gcuggccgaggguccuggcuccug

SEQ ID NO: 3475801 - RNA, 15 nt, Human
gcuggccggacaccc

SEQ ID NO: 3475802 - RNA, 22 nt, Human
gcuggccggagcaaacucugcu

SEQ ID NO: 3475803 - RNA, 17 nt, Human
gcuggccgggagccuga

SEQ ID NO: 3475804 - RNA, 18 nt, Human
gcuggccgugggccuggg

SEQ ID NO: 3475805 - RNA, 16 nt, Human
gcuggccucagacuca

SEQ ID NO: 3475806 - RNA, 21 nt, Human
gcuggccucccaaaugagcca

SEQ ID NO: 3475807 - RNA, 16 nt, Human
gcuggccucuaccaca

SEQ ID NO: 3475808 - RNA, 15 nt, Human
gcuggccucucuagc

SEQ ID NO: 3475809 - RNA, 23 nt, Human
gcuggccucuggcucucaugggg

SEQ ID NO: 3475810 - RNA, 12 nt, Human
gcuggccuggau

SEQ ID NO: 3475811 - RNA, 14 nt, Human
gcuggccuggaucu

SEQ ID NO: 3475812 - RNA, 12 nt, Human
gcuggccuggcc

SEQ ID NO: 3475813 - RNA, 17 nt, Human
gcuggccuggccggcaa

SEQ ID NO: 3475814 - RNA, 20 nt, Human
gcuggccuggggucaggccg

SEQ ID NO: 3475815 - RNA, 12 nt, Human
gcuggccuuccu

SEQ ID NO: 3475816 - RNA, 15 nt, Human
gcuggccuuccugcc

SEQ ID NO: 3475817 - RNA, 19 nt, Human
gcuggccuuccugcccuac

SEQ ID NO: 3475818 - RNA, 23 nt, Human
gcuggccuuccugcccuacagag

SEQ ID NO: 3475819 - RNA, 19 nt, Human
gcuggccuugugguccaaa

SEQ ID NO: 3475820 - RNA, 15 nt, Human
gcuggcgagagucug

SEQ ID NO: 3475821 - RNA, 20 nt, Human
gcuggcgagagucuggcccu

SEQ ID NO: 3475822 - RNA, 13 nt, Human
gcuggcgcagcca

SEQ ID NO: 3475823 - RNA, 15 nt, Human
gcuggcgccucugca

SEQ ID NO: 3475824 - RNA, 21 nt, Human
gcuggcggcuacucagcagcc

SEQ ID NO: 3475825 - RNA, 14 nt, Human
gcuggcgugcagug

SEQ ID NO: 3475826 - RNA, 15 nt, Human
gcuggcgugcagugg

SEQ ID NO: 3475827 - RNA, 17 nt, Human
gcuggcucacaguacag

SEQ ID NO: 3475828 - RNA, 23 nt, Human
gcuggcucacaguacagcaugug

SEQ ID NO: 3475829 - RNA, 17 nt, Human
gcuggcuccagaugcag

SEQ ID NO: 3475830 - RNA, 15 nt, Human
gcuggcuccagccug

SEQ ID NO: 3475831 - RNA, 19 nt, Human
gcuggcucccagggccaug

SEQ ID NO: 3475832 - RNA, 17 nt, Human
gcuggcuccccaaaggg

SEQ ID NO: 3475833 - RNA, 13 nt, Human
gcuggcuccccug

SEQ ID NO: 3475834 - RNA, 16 nt, Human
gcuggcuccccugcag

SEQ ID NO: 3475835 - RNA, 18 nt, Human
gcuggcuccccugcagcc

SEQ ID NO: 3475836 - RNA, 21 nt, Human
gcuggcuccccugcagcccug

SEQ ID NO: 3475837 - RNA, 13 nt, Human
gcuggcuccugau

SEQ ID NO: 3475838 - RNA, 14 nt, Human
gcuggcuccugauc

SEQ ID NO: 3475839 - RNA, 21 nt, Human
gcuggcucuauaaggcagccu

SEQ ID NO: 3475840 - RNA, 16 nt, Human
gcuggcucugagcgcc

SEQ ID NO: 3475841 - RNA, 14 nt, Human
gcuggcucuucugc

SEQ ID NO: 3475842 - RNA, 15 nt, Human
gcuggcugagggcag

SEQ ID NO: 3475843 - RNA, 14 nt, Human
gcuggcugcaguga

SEQ ID NO: 3475844 - RNA, 19 nt, Human
gcuggcugcccagaccccu

SEQ ID NO: 3475845 - RNA, 20 nt, Human
gcuggcugccuuagaaccuu

SEQ ID NO: 3475846 - RNA, 12 nt, Human
gcuggcuggccu

SEQ ID NO: 3475847 - RNA, 21 nt, Human
gcuggcugggguggccugugu

SEQ ID NO: 3475848 - RNA, 22 nt, Human
gcuggcugggguggccugugug

SEQ ID NO: 3475849 - RNA, 18 nt, Human
gcuggcuguuggcugggg

SEQ ID NO: 3475850 - RNA, 19 nt, Human
gcuggcuguuggcuggggg

SEQ ID NO: 3475851 - RNA, 21 nt, Human
gcuggcuuuucuguuuccugu

SEQ ID NO: 3475852 - RNA, 23 nt, Human
gcugggaacucaccuggggcugc

SEQ ID NO: 3475853 - RNA, 19 nt, Human
gcugggaacugcagaccug

SEQ ID NO: 3475854 - RNA, 20 nt, Human
gcugggacaugggaaagggg

SEQ ID NO: 3475855 - RNA, 16 nt, Human
gcugggacgcucugcu

SEQ ID NO: 3475856 - RNA, 17 nt, Human
gcugggacguggcucag

SEQ ID NO: 3475857 - RNA, 22 nt, Human
gcugggacguggcucagccagc

SEQ ID NO: 3475858 - RNA, 20 nt, Human
gcugggacuacaggcaccca

SEQ ID NO: 3475859 - RNA, 12 nt, Human
gcugggacucag

SEQ ID NO: 3475860 - RNA, 15 nt, Human
gcugggacucagccu

SEQ ID NO: 3475861 - RNA, 17 nt, Human
gcugggacugagccagu

SEQ ID NO: 3475862 - RNA, 15 nt, Human
gcugggacugggaac

SEQ ID NO: 3475863 - RNA, 12 nt, Human
gcugggagagcc

SEQ ID NO: 3475864 - RNA, 18 nt, Human
gcugggagagccuuccag

SEQ ID NO: 3475865 - RNA, 13 nt, Human
gcugggagcucca

SEQ ID NO: 3475866 - RNA, 16 nt, Human
gcugggagcuccacuc

SEQ ID NO: 3475867 - RNA, 15 nt, Human
gcugggagcucugca

SEQ ID NO: 3475868 - RNA, 18 nt, Human
gcugggaggagggagagg

SEQ ID NO: 3475869 - RNA, 22 nt, Human
gcugggaggagggagagggagg

SEQ ID NO: 3475870 - RNA, 17 nt, Human
gcugggaucugacugca

SEQ ID NO: 3475871 - RNA, 17 nt, Human
gcugggauuacaggcgu

SEQ ID NO: 3475872 - RNA, 21 nt, Human
gcugggauuacaggcuccugc

SEQ ID NO: 3475873 - RNA, 22 nt, Human
gcugggauuacaggcuccugcc

SEQ ID NO: 3475874 - RNA, 23 nt, Human
gcugggauuacaggcuccugcca

SEQ ID NO: 3475875 - RNA, 14 nt, Human
gcugggauuuuaaa

SEQ ID NO: 3475876 - RNA, 15 nt, Human
gcugggauuuuaaac

SEQ ID NO: 3475877 - RNA, 16 nt, Human
gcugggcaaggaaaaa

SEQ ID NO: 3475878 - RNA, 19 nt, Human
gcugggcaaggaaaaagaa

SEQ ID NO: 3475879 - RNA, 20 nt, Human
gcugggcacacgccucccac

SEQ ID NO: 3475880 - RNA, 20 nt, Human
gcugggcacugcucucaccu

SEQ ID NO: 3475881 - RNA, 13 nt, Human
gcugggcacuucc

SEQ ID NO: 3475882 - RNA, 13 nt, Human
gcugggcagaagg

SEQ ID NO: 3475883 - RNA, 14 nt, Human
gcugggcagaggaa

SEQ ID NO: 3475884 - RNA, 12 nt, Human
gcugggcagcua

SEQ ID NO: 3475885 - RNA, 22 nt, Human
gcugggcaugguaccagcccug

SEQ ID NO: 3475886 - RNA, 23 nt, Human
gcugggcaugguaccagcccugg

SEQ ID NO: 3475887 - RNA, 19 nt, Human
gcugggcccaacccugucu

SEQ ID NO: 3475888 - RNA, 18 nt, Human
gcugggcccagaggcaca

SEQ ID NO: 3475889 - RNA, 21 nt, Human
gcugggcccagaggcacagcc

SEQ ID NO: 3475890 - RNA, 13 nt, Human
gcugggccccagc

SEQ ID NO: 3475891 - RNA, 15 nt, Human
gcugggccccagccc

SEQ ID NO: 3475892 - RNA, 20 nt, Human
gcugggccccagcccacccu

SEQ ID NO: 3475893 - RNA, 20 nt, Human
gcugggccccccagcucagg

SEQ ID NO: 3475894 - RNA, 14 nt, Human
gcugggccccugcc

SEQ ID NO: 3475895 - RNA, 21 nt, Human
gcugggccccugccucucugc

SEQ ID NO: 3475896 - RNA, 21 nt, Human
gcugggcccgacauggcuccg

SEQ ID NO: 3475897 - RNA, 22 nt, Human
gcugggcccgacauggcuccgg

SEQ ID NO: 3475898 - RNA, 18 nt, Human
gcugggcccucucuucuc

SEQ ID NO: 3475899 - RNA, 12 nt, Human
gcugggccuggu

SEQ ID NO: 3475900 - RNA, 22 nt, Human
gcugggccuggucucacccugg

SEQ ID NO: 3475901 - RNA, 16 nt, Human
gcugggcucccuuccc

SEQ ID NO: 3475902 - RNA, 17 nt, Human
gcugggcucccuuccca

SEQ ID NO: 3475903 - RNA, 13 nt, Human
gcugggcucucca

SEQ ID NO: 3475904 - RNA, 19 nt, Human
gcugggcucuccaccucag

SEQ ID NO: 3475905 - RNA, 20 nt, Human
gcugggcucuccaccucagc

SEQ ID NO: 3475906 - RNA, 14 nt, Human
gcugggcugagccc

SEQ ID NO: 3475907 - RNA, 18 nt, Human
gcugggcugagccccuac

SEQ ID NO: 3475908 - RNA, 13 nt, Human
gcugggcuggcuc

SEQ ID NO: 3475909 - RNA, 12 nt, Human
gcugggcugggg

SEQ ID NO: 3475910 - RNA, 14 nt, Human
gcugggcuggggcc

SEQ ID NO: 3475911 - RNA, 15 nt, Human
gcugggcuggggccu

SEQ ID NO: 3475912 - RNA, 22 nt, Human
gcugggcuucaguggcagcugc

SEQ ID NO: 3475913 - RNA, 16 nt, Human
gcuggggaagacagug

SEQ ID NO: 3475914 - RNA, 13 nt, Human
gcuggggaaggaa

SEQ ID NO: 3475915 - RNA, 22 nt, Human
gcuggggauccccgccuggcca

SEQ ID NO: 3475916 - RNA, 17 nt, Human
gcuggggcaagucccug

SEQ ID NO: 3475917 - RNA, 16 nt, Human
gcuggggccaggcugg

SEQ ID NO: 3475918 - RNA, 19 nt, Human
gcuggggccaggcuggguc

SEQ ID NO: 3475919 - RNA, 20 nt, Human
gcuggggccuaucagugugc

SEQ ID NO: 3475920 - RNA, 21 nt, Human
gcuggggccuaucagugugcc

SEQ ID NO: 3475921 - RNA, 12 nt, Human
gcuggggccugg

SEQ ID NO: 3475922 - RNA, 23 nt, Human
gcugggggaagaagcucucuccu

SEQ ID NO: 3475923 - RNA, 21 nt, Human
gcugggggcagccugcguggc

SEQ ID NO: 3475924 - RNA, 23 nt, Human
gcugggggccaugagcuccagac

SEQ ID NO: 3475925 - RNA, 16 nt, Human
gcuggggucccagcag

SEQ ID NO: 3475926 - RNA, 23 nt, Human
guugccagucaccccggccaccu

SEQ ID NO: 3475927 - RNA, 20 nt, Human
guugcccagccucuuucccu

SEQ ID NO: 3475928 - RNA, 12 nt, Human
guugcccaggca

SEQ ID NO: 3475929 - RNA, 13 nt, Human
guugcccaggcug

SEQ ID NO: 3475930 - RNA, 14 nt, Human
guugcccaggcugg

SEQ ID NO: 3475931 - RNA, 20 nt, Human
guugcccaggcuggagugca

SEQ ID NO: 3475932 - RNA, 20 nt, Human
guugcccagggauuuguccu

SEQ ID NO: 3475933 - RNA, 16 nt, Human
guugccccgucucugu

SEQ ID NO: 3475934 - RNA, 15 nt, Human
guugccuaaauccau

SEQ ID NO: 3475935 - RNA, 16 nt, Human
guugccuaaauccauu

SEQ ID NO: 3475936 - RNA, 17 nt, Human
guugccuaaauccauuu

SEQ ID NO: 3475937 - RNA, 21 nt, Human
guugccuaagcauugccuggc

SEQ ID NO: 3475938 - RNA, 23 nt, Human
guugccuauaagccaaaauuaag

SEQ ID NO: 3475939 - RNA, 15 nt, Human
guugccugucgcuuu

SEQ ID NO: 3475940 - RNA, 18 nt, Human
guugccuuaaagaaaguc

SEQ ID NO: 3475941 - RNA, 20 nt, Human
guugccuuuuucauuuucca

SEQ ID NO: 3475942 - RNA, 20 nt, Human
guugcgacggagagaaaaaa

SEQ ID NO: 3475943 - RNA, 13 nt, Human
guugcgggacaga

SEQ ID NO: 3475944 - RNA, 13 nt, Human
guugcggggggag

SEQ ID NO: 3475945 - RNA, 18 nt, Human
guugcgugacacucuccu

SEQ ID NO: 3475946 - RNA, 17 nt, Human
guugcuauuuuuguaaa

SEQ ID NO: 3475947 - RNA, 22 nt, Human
guugcuccgccucugcuggcac

SEQ ID NO: 3475948 - RNA, 22 nt, Human
guugcuccgccuggccuggcca

SEQ ID NO: 3475949 - RNA, 18 nt, Human
guugcuggaucaggaagc

SEQ ID NO: 3475950 - RNA, 16 nt, Human
guugcugggagcugaa

SEQ ID NO: 3475951 - RNA, 20 nt, Human
guugcugguuauaagcagca

SEQ ID NO: 3475952 - RNA, 22 nt, Human
guugcugugggaacgagagggg

SEQ ID NO: 3475953 - RNA, 23 nt, Human
guugcuuaggaugugugcaugug

SEQ ID NO: 3475954 - RNA, 13 nt, Human
guugcuucuggga

SEQ ID NO: 3475955 - RNA, 14 nt, Human
guugcuuucacucu

SEQ ID NO: 3475956 - RNA, 11 nt, Human
guugcuuuguu

SEQ ID NO: 3475957 - RNA, 21 nt, Human
guugcuuuugaaggaauacaa

SEQ ID NO: 3475958 - RNA, 16 nt, Human
guuggaaagcaggugg

SEQ ID NO: 3475959 - RNA, 15 nt, Human
guuggaagaggaaca

SEQ ID NO: 3475960 - RNA, 22 nt, Human
guuggaagcuagcuccccuccu

SEQ ID NO: 3475961 - RNA, 22 nt, Human
guuggaaugaauuaaauaaacc

SEQ ID NO: 3475962 - RNA, 16 nt, Human
guuggaauuaaaacaa

SEQ ID NO: 3475963 - RNA, 21 nt, Human
guuggacaaaugugaagaugc

SEQ ID NO: 3475964 - RNA, 21 nt, Human
guuggacaccuuuagguucuu

SEQ ID NO: 3475965 - RNA, 19 nt, Human
guuggacagcaaaaccauu

SEQ ID NO: 3475966 - RNA, 15 nt, Human
guuggacccgcucug

SEQ ID NO: 3475967 - RNA, 23 nt, Human
guuggacuaaaugccuaguuuuu

SEQ ID NO: 3475968 - RNA, 17 nt, Human
guuggacuuuucguuaa

SEQ ID NO: 3475969 - RNA, 21 nt, Human
guuggacuuuucguuaacauu

SEQ ID NO: 3475970 - RNA, 19 nt, Human
guuggagccugcagggugg

SEQ ID NO: 3475971 - RNA, 14 nt, Human
guuggagugcagug

SEQ ID NO: 3475972 - RNA, 15 nt, Human
guuggagugcagugg

SEQ ID NO: 3475973 - RNA, 13 nt, Human
guuggaucuucaa

SEQ ID NO: 3475974 - RNA, 16 nt, Human
guuggauuccaugcua

SEQ ID NO: 3475975 - RNA, 17 nt, Human
guuggauuccaugcuaa

SEQ ID NO: 3475976 - RNA, 21 nt, Human
guuggauuuauaaaugcuauu

SEQ ID NO: 3475977 - RNA, 14 nt, Human
guuggcaaaaaggc

SEQ ID NO: 3475978 - RNA, 16 nt, Human
guuggcaccuuccccc

SEQ ID NO: 3475979 - RNA, 19 nt, Human
guuggcacucacagaccug

SEQ ID NO: 3475980 - RNA, 14 nt, Human
guuggcaggcuggc

SEQ ID NO: 3475981 - RNA, 16 nt, Human
guuggcagugagugag

SEQ ID NO: 3475982 - RNA, 15 nt, Human
guuggcauagcucug

SEQ ID NO: 3475983 - RNA, 18 nt, Human
guuggcauagcucugggg

SEQ ID NO: 3475984 - RNA, 23 nt, Human
guuggccaaagccaaagcuaggc

SEQ ID NO: 3475985 - RNA, 20 nt, Human
guuggccacgucuuccuucu

SEQ ID NO: 3475986 - RNA, 19 nt, Human
guuggccaggcugcucuug

SEQ ID NO: 3475987 - RNA, 14 nt, Human
guuggccaggcugg

SEQ ID NO: 3475988 - RNA, 13 nt, Human
guuggccccugcc

SEQ ID NO: 3475989 - RNA, 13 nt, Human
guuggccugcacu

SEQ ID NO: 3475990 - RNA, 18 nt, Human
guuggcgagaggaggggc

SEQ ID NO: 3475991 - RNA, 21 nt, Human
guuggcgcacccuccccuccc

SEQ ID NO: 3475992 - RNA, 18 nt, Human
guuggcguaggcuacaga

SEQ ID NO: 3475993 - RNA, 19 nt, Human
guuggcucugccaguccug

SEQ ID NO: 3475994 - RNA, 23 nt, Human
guuggcucugccaguccuguccu

SEQ ID NO: 3475995 - RNA, 14 nt, Human
guuggcugggccca

SEQ ID NO: 3475996 - RNA, 12 nt, Human
guuggcuggggg

SEQ ID NO: 3475997 - RNA, 19 nt, Human
guuggcugggggccucagu

SEQ ID NO: 3475998 - RNA, 16 nt, Human
guuggcuuaccuggcc

SEQ ID NO: 3475999 - RNA, 16 nt, Human
guugggacccaguggc

SEQ ID NO: 3476000 - RNA, 20 nt, Human
guugggacccaguggcaggg

SEQ ID NO: 3476001 - RNA, 21 nt, Human
guugggacccaguggcagggc

SEQ ID NO: 3476002 - RNA, 13 nt, Human
guugggagcugau

SEQ ID NO: 3476003 - RNA, 14 nt, Human
guugggaggauucu

SEQ ID NO: 3476004 - RNA, 18 nt, Human
guugggauacugcagggc

SEQ ID NO: 3476005 - RNA, 18 nt, Human
guugggauuccugaccca

SEQ ID NO: 3476006 - RNA, 21 nt, Human
guugggauuccugacccaggc

SEQ ID NO: 3476007 - RNA, 21 nt, Human
guugggauugggggcuggugc

SEQ ID NO: 3476008 - RNA, 14 nt, Human
guugggcagccaga

SEQ ID NO: 3476009 - RNA, 15 nt, Human
guugggccaggagcc

SEQ ID NO: 3476010 - RNA, 21 nt, Human
guugggccauacuggccucgc

SEQ ID NO: 3476011 - RNA, 13 nt, Human
guugggcccagau

SEQ ID NO: 3476012 - RNA, 13 nt, Human
guugggcuggugu

SEQ ID NO: 3476013 - RNA, 13 nt, Human
guuggggugacag

SEQ ID NO: 3476014 - RNA, 23 nt, Human
guuggggugguuuuugagccaug

SEQ ID NO: 3476015 - RNA, 19 nt, Human
guuggguggcaauuccaau

SEQ ID NO: 3476016 - RNA, 18 nt, Human
guugguauauuuuauauu

SEQ ID NO: 3476017 - RNA, 18 nt, Human
guuggucccccuuccaug

SEQ ID NO: 3476018 - RNA, 16 nt, Human
guuggucgguggguug

SEQ ID NO: 3476019 - RNA, 23 nt, Human
guuggucucugcauuuuucugca

SEQ ID NO: 3476020 - RNA, 14 nt, Human
guugguguguuuuu

SEQ ID NO: 3476021 - RNA, 18 nt, Human
guugguuccaagcccugg

SEQ ID NO: 3476022 - RNA, 14 nt, Human
guugguuggauaag

SEQ ID NO: 3476023 - RNA, 14 nt, Human
guugguugguuuuc

SEQ ID NO: 3476024 - RNA, 16 nt, Human
guugguugugucuuuu

SEQ ID NO: 3476025 - RNA, 15 nt, Human
guugguuuacuuuca

SEQ ID NO: 3476026 - RNA, 12 nt, Human
guugguuuucuu

SEQ ID NO: 3476027 - RNA, 15 nt, Human
guugguuuucuucuu

SEQ ID NO: 3476028 - RNA, 13 nt, Human
guuguaaaaagaa

SEQ ID NO: 3476029 - RNA, 14 nt, Human
guuguaaaauauag

SEQ ID NO: 3476030 - RNA, 16 nt, Human
guuguaaacaggaagc

SEQ ID NO: 3476031 - RNA, 18 nt, Human
guuguaaauauauaaaua

SEQ ID NO: 3476032 - RNA, 17 nt, Human
guuguaaccugcuguga

SEQ ID NO: 3476033 - RNA, 19 nt, Human
guuguaacuaggcucagag

SEQ ID NO: 3476034 - RNA, 21 nt, Human
guuguaacuaggcucagagau

SEQ ID NO: 3476035 - RNA, 12 nt, Human
guuguaacuuau

SEQ ID NO: 3476036 - RNA, 22 nt, Human
guuguaacuuauauugaagaca

SEQ ID NO: 3476037 - RNA, 18 nt, Human
guuguaacuuauguagau

SEQ ID NO: 3476038 - RNA, 12 nt, Human
guuguacaugaa

SEQ ID NO: 3476039 - RNA, 18 nt, Human
guuguacauuuaugauuu

SEQ ID NO: 3476040 - RNA, 20 nt, Human
guuguacauuuaugauuuaa

SEQ ID NO: 3476041 - RNA, 16 nt, Human
guuguaccaagugaaa

SEQ ID NO: 3476042 - RNA, 23 nt, Human
guuguaccucuuuugcuugccaa

SEQ ID NO: 3476043 - RNA, 23 nt, Human
guuguacuauggaaaaucagcug

SEQ ID NO: 3476044 - RNA, 13 nt, Human
guuguacuuuaaa

SEQ ID NO: 3476045 - RNA, 13 nt, Human
guuguagaaugua

SEQ ID NO: 3476046 - RNA, 19 nt, Human
guuguagauacaaucagcu

SEQ ID NO: 3476047 - RNA, 15 nt, Human
guuguaguguccccc

SEQ ID NO: 3476048 - RNA, 21 nt, Human
guuguauaaauuuauuuacug

SEQ ID NO: 3476049 - RNA, 14 nt, Human
guuguauaauuucg

SEQ ID NO: 3476050 - RNA, 14 nt, Human
guuguauuagaugu

SEQ ID NO: 3476051 - RNA, 22 nt, Human
guuguauucuuugauguuaaca

SEQ ID NO: 3476052 - RNA, 18 nt, Human
guugucaagaauagcauu

SEQ ID NO: 3476053 - RNA, 22 nt, Human
guugucaagucucugcuggccc

SEQ ID NO: 3476054 - RNA, 16 nt, Human
guugucaauauuaaau

SEQ ID NO: 3476055 - RNA, 17 nt, Human
guugucaauauuaaaua

SEQ ID NO: 3476056 - RNA, 18 nt, Human
guugucagcaucuucuca

SEQ ID NO: 3476057 - RNA, 12 nt, Human
guugucagcuga

SEQ ID NO: 3476058 - RNA, 22 nt, Human
guuguccaauuguugacaguuc

SEQ ID NO: 3476059 - RNA, 19 nt, Human
guuguccgguuuacuuuaa

SEQ ID NO: 3476060 - RNA, 17 nt, Human
guuguccucagccccgc

SEQ ID NO: 3476061 - RNA, 23 nt, Human
guuguccucagccccgcguggaa

SEQ ID NO: 3476062 - RNA, 18 nt, Human
guugucuaagaaauugaa

SEQ ID NO: 3476063 - RNA, 14 nt, Human
guugucucccuggc

SEQ ID NO: 3476064 - RNA, 12 nt, Human
guugucucuucu

SEQ ID NO: 3476065 - RNA, 19 nt, Human
guugucugaagucacugca

SEQ ID NO: 3476066 - RNA, 19 nt, Human
guugucugcaacucugaag

SEQ ID NO: 3476067 - RNA, 17 nt, Human
guugugaagauguuugc

SEQ ID NO: 3476068 - RNA, 17 nt, Human
guugugaccugaaguuc

SEQ ID NO: 3476069 - RNA, 16 nt, Human
guugugccccuuucca

SEQ ID NO: 3476070 - RNA, 21 nt, Human
guuguggagagugcaacagua

SEQ ID NO: 3476071 - RNA, 12 nt, Human
guuuauguuuug

SEQ ID NO: 3476072 - RNA, 14 nt, Human
guuuauuaaaugcu

SEQ ID NO: 3476073 - RNA, 18 nt, Human
guuuauuaagcaucagaa

SEQ ID NO: 3476074 - RNA, 18 nt, Human
guuuauuaaucuuagugu

SEQ ID NO: 3476075 - RNA, 23 nt, Human
guuuauuaaucuuaguguaugau

SEQ ID NO: 3476076 - RNA, 15 nt, Human
guuuauuacuuauuu

SEQ ID NO: 3476077 - RNA, 19 nt, Human
guuuauuacuuccaugaau

SEQ ID NO: 3476078 - RNA, 18 nt, Human
guuuauucauaugcauau

SEQ ID NO: 3476079 - RNA, 20 nt, Human
guuuauucuucuagaguuca

SEQ ID NO: 3476080 - RNA, 22 nt, Human
guuuauugaauucauuucacug

SEQ ID NO: 3476081 - RNA, 13 nt, Human
guuuauuucacac

SEQ ID NO: 3476082 - RNA, 16 nt, Human
guuuauuucacuugau

SEQ ID NO: 3476083 - RNA, 18 nt, Human
guuuauuuguuuuuccag

SEQ ID NO: 3476084 - RNA, 16 nt, Human
guuuauuuuaaaacaa

SEQ ID NO: 3476085 - RNA, 19 nt, Human
guuuauuuucaagaauaau

SEQ ID NO: 3476086 - RNA, 21 nt, Human
guuuauuuucuacguuucuuu

SEQ ID NO: 3476087 - RNA, 23 nt, Human
guuuauuuucuacguuucuuuaa

SEQ ID NO: 3476088 - RNA, 14 nt, Human
guuuauuuuucaua

SEQ ID NO: 3476089 - RNA, 17 nt, Human
guuuauuuuucauauug

SEQ ID NO: 3476090 - RNA, 19 nt, Human
guuucaaaaacuguauuga

SEQ ID NO: 3476091 - RNA, 13 nt, Human
guuucaaaaaucu

SEQ ID NO: 3476092 - RNA, 16 nt, Human
guuucaaaauaaaaac

SEQ ID NO: 3476093 - RNA, 22 nt, Human
guuucaaagccaagaccucaca

SEQ ID NO: 3476094 - RNA, 23 nt, Human
guuucaaggcacucuagauucca

SEQ ID NO: 3476095 - RNA, 14 nt, Human
guuucaauaaaguu

SEQ ID NO: 3476096 - RNA, 19 nt, Human
guuucaaugugauucuaau

SEQ ID NO: 3476097 - RNA, 15 nt, Human
guuucaauucagugc

SEQ ID NO: 3476098 - RNA, 23 nt, Human
guuucacagccuauaaccagaca

SEQ ID NO: 3476099 - RNA, 21 nt, Human
guuucacuuucacauagaugu

SEQ ID NO: 3476100 - RNA, 11 nt, Human
guuucagaaau

SEQ ID NO: 3476101 - RNA, 12 nt, Human
guuucagcacua

SEQ ID NO: 3476102 - RNA, 23 nt, Human
guuucagcacuagccaaaccuca

SEQ ID NO: 3476103 - RNA, 21 nt, Human
guuucagcuaagggaagacau

SEQ ID NO: 3476104 - RNA, 22 nt, Human
guuucagcuaagggaagacauu

SEQ ID NO: 3476105 - RNA, 23 nt, Human
guuucaggagagaguugaaccua

SEQ ID NO: 3476106 - RNA, 19 nt, Human
guuucaggauacaugugcc

SEQ ID NO: 3476107 - RNA, 10 nt, Human
guuucaggug

SEQ ID NO: 3476108 - RNA, 14 nt, Human
guuucaggugacau

SEQ ID NO: 3476109 - RNA, 15 nt, Human
guuucaggugacaug

SEQ ID NO: 3476110 - RNA, 15 nt, Human
guuucaguuuguugg

SEQ ID NO: 3476111 - RNA, 17 nt, Human
guuucauacucuagauu

SEQ ID NO: 3476112 - RNA, 22 nt, Human
guuucauauuuuucauagcuaa

SEQ ID NO: 3476113 - RNA, 15 nt, Human
guuucauccuuccca

SEQ ID NO: 3476114 - RNA, 16 nt, Human
guuucauccuuuucau

SEQ ID NO: 3476115 - RNA, 11 nt, Human
guuucauugac

SEQ ID NO: 3476116 - RNA, 20 nt, Human
guuucauuuagucaugugac

SEQ ID NO: 3476117 - RNA, 18 nt, Human
guuucauuuaugauacaa

SEQ ID NO: 3476118 - RNA, 19 nt, Human
guuucauuucuacugugac

SEQ ID NO: 3476119 - RNA, 16 nt, Human
guuuccacagccugca

SEQ ID NO: 3476120 - RNA, 22 nt, Human
guuuccacgaugaaaaacuucc

SEQ ID NO: 3476121 - RNA, 13 nt, Human
guuuccagcauuc

SEQ ID NO: 3476122 - RNA, 14 nt, Human
guuucccaggccca

SEQ ID NO: 3476123 - RNA, 15 nt, Human
guuucccauaauuuu

SEQ ID NO: 3476124 - RNA, 20 nt, Human
guuucccauaauuuucuuca

SEQ ID NO: 3476125 - RNA, 15 nt, Human
guuuccccaccagug

SEQ ID NO: 3476126 - RNA, 18 nt, Human
guuucccuacugaagccc

SEQ ID NO: 3476127 - RNA, 17 nt, Human
guuuccgugcguggcac

SEQ ID NO: 3476128 - RNA, 16 nt, Human
guuuccuaaaaguuca

SEQ ID NO: 3476129 - RNA, 16 nt, Human
guuuccucaggcugcu

SEQ ID NO: 3476130 - RNA, 17 nt, Human
guuuccuccaagcuauu

SEQ ID NO: 3476131 - RNA, 20 nt, Human
guuuccucuguucaaagcug

SEQ ID NO: 3476132 - RNA, 17 nt, Human
guuuccugcccugggag

SEQ ID NO: 3476133 - RNA, 19 nt, Human
guuuccuggcacuggaccc

SEQ ID NO: 3476134 - RNA, 14 nt, Human
guuuccuucagugc

SEQ ID NO: 3476135 - RNA, 17 nt, Human
guuuccuuucauuuacu

SEQ ID NO: 3476136 - RNA, 23 nt, Human
guuuccuuucauuuacuguggcu

SEQ ID NO: 3476137 - RNA, 14 nt, Human
guuuccuuuuuucc

SEQ ID NO: 3476138 - RNA, 15 nt, Human
guuuccuuuuuuccc

SEQ ID NO: 3476139 - RNA, 14 nt, Human
guuucguuucugua

SEQ ID NO: 3476140 - RNA, 15 nt, Human
guuucuaaacuggag

SEQ ID NO: 3476141 - RNA, 18 nt, Human
guuucuaaacuggagacu

SEQ ID NO: 3476142 - RNA, 15 nt, Human
guuucuaaagcugcc

SEQ ID NO: 3476143 - RNA, 14 nt, Human
guuucuaagauucu

SEQ ID NO: 3476144 - RNA, 16 nt, Human
guuucuaagauucuaa

SEQ ID NO: 3476145 - RNA, 19 nt, Human
guuucuaagauucuaaagg

SEQ ID NO: 3476146 - RNA, 17 nt, Human
guuucuaauuugcugcu

SEQ ID NO: 3476147 - RNA, 15 nt, Human
guuucuaccucccag

SEQ ID NO: 3476148 - RNA, 19 nt, Human
guuucuagagccugcugga

SEQ ID NO: 3476149 - RNA, 18 nt, Human
guuucuagcacuggccug

SEQ ID NO: 3476150 - RNA, 23 nt, Human
guuucuauucucuccucagacug

SEQ ID NO: 3476151 - RNA, 17 nt, Human
guuucuauuuuuugaaa

SEQ ID NO: 3476152 - RNA, 17 nt, Human
guuucucaaagaaauuu

SEQ ID NO: 3476153 - RNA, 14 nt, Human
guuucucaaaucuu

SEQ ID NO: 3476154 - RNA, 14 nt, Human
guuucucagauccu

SEQ ID NO: 3476155 - RNA, 14 nt, Human
guuucucagcuccc

SEQ ID NO: 3476156 - RNA, 13 nt, Human
guuucucauucuu

SEQ ID NO: 3476157 - RNA, 14 nt, Human
guuucucauuuguu

SEQ ID NO: 3476158 - RNA, 22 nt, Human
guuucucccccauguucugucc

SEQ ID NO: 3476159 - RNA, 14 nt, Human
guuucucccccugg

SEQ ID NO: 3476160 - RNA, 15 nt, Human
guuucuccugagcua

SEQ ID NO: 3476161 - RNA, 18 nt, Human
guuucuccugagcuagga

SEQ ID NO: 3476162 - RNA, 16 nt, Human
guuucucucuacagug

SEQ ID NO: 3476163 - RNA, 12 nt, Human
guuucucugcug

SEQ ID NO: 3476164 - RNA, 18 nt, Human
guuucucuugagcuggcc

SEQ ID NO: 3476165 - RNA, 14 nt, Human
guuucucuuuccuu

SEQ ID NO: 3476166 - RNA, 12 nt, Human
guuucugaaaag

SEQ ID NO: 3476167 - RNA, 20 nt, Human
guuucugaaaauuaacacug

SEQ ID NO: 3476168 - RNA, 19 nt, Human
guuucugaaaauuccagaa

SEQ ID NO: 3476169 - RNA, 22 nt, Human
guuucugaggcuuuaugauaau

SEQ ID NO: 3476170 - RNA, 22 nt, Human
guuucugcaugaauaucauaca

SEQ ID NO: 3476171 - RNA, 21 nt, Human
guuucugcccacauuggaccc

SEQ ID NO: 3476172 - RNA, 14 nt, Human
guuucuggauuuca

SEQ ID NO: 3476173 - RNA, 19 nt, Human
guuucuggguccugaagaa

SEQ ID NO: 3476174 - RNA, 17 nt, Human
guuucugucaggagagc

SEQ ID NO: 3476175 - RNA, 21 nt, Human
guuucugucaggagagcagcg

SEQ ID NO: 3476176 - RNA, 13 nt, Human
guuucugugcaug

SEQ ID NO: 3476177 - RNA, 12 nt, Human
guuucuguucca

SEQ ID NO: 3476178 - RNA, 13 nt, Human
guuucuguuccaa

SEQ ID NO: 3476179 - RNA, 15 nt, Human
guuucuguucugugg

SEQ ID NO: 3476180 - RNA, 17 nt, Human
guuucuguucuguggaa

SEQ ID NO: 3476181 - RNA, 18 nt, Human
guuucuguuugauucuuu

SEQ ID NO: 3476182 - RNA, 21 nt, Human
guuucuuaaauaagaaacuuu

SEQ ID NO: 3476183 - RNA, 22 nt, Human
guuucuuaacccuuuccagagu

SEQ ID NO: 3476184 - RNA, 18 nt, Human
guuucuuaauuuggaaac

SEQ ID NO: 3476185 - RNA, 14 nt, Human
guuucuucacuuuu

SEQ ID NO: 3476186 - RNA, 13 nt, Human
guuucuuccaaag

SEQ ID NO: 3476187 - RNA, 20 nt, Human
guuucuucugcgccucaggc

SEQ ID NO: 3476188 - RNA, 17 nt, Human
guuucuugcuuguaccu

SEQ ID NO: 3476189 - RNA, 19 nt, Human
guuucuuuaaccuuguaua

SEQ ID NO: 3476190 - RNA, 16 nt, Human
guuucuuuagcaguuu

SEQ ID NO: 3476191 - RNA, 19 nt, Human
guuucuuucucugaggaca

SEQ ID NO: 3476192 - RNA, 20 nt, Human
guuucuuucucugaggacaa

SEQ ID NO: 3476193 - RNA, 12 nt, Human
guuucuuucuuu

SEQ ID NO: 3476194 - RNA, 23 nt, Human
guuucuuucuuucuuuauuuuga

SEQ ID NO: 3476195 - RNA, 18 nt, Human
guuucuuuguaaugaaaa

SEQ ID NO: 3476196 - RNA, 19 nt, Human
guuucuuuguaaugaaaac

SEQ ID NO: 3476197 - RNA, 14 nt, Human
guuucuuuguguug

SEQ ID NO: 3476198 - RNA, 14 nt, Human
guuucuuuuaaaga

SEQ ID NO: 3476199 - RNA, 23 nt, Human
guuucuuuuauaaaaaaaaugaa

SEQ ID NO: 3476200 - RNA, 14 nt, Human
guuucuuuuguuug

SEQ ID NO: 3476201 - RNA, 18 nt, Human
guuucuuuuguuugguaa

SEQ ID NO: 3476202 - RNA, 21 nt, Human
guuugaaaauauuaucuuugu

SEQ ID NO: 3476203 - RNA, 18 nt, Human
guuugaaaauauuuucau

SEQ ID NO: 3476204 - RNA, 15 nt, Human
guuugaaacaaagaa

SEQ ID NO: 3476205 - RNA, 17 nt, Human
guuugaaacaaagaagg

SEQ ID NO: 3476206 - RNA, 18 nt, Human
guuugaaagugaauaaac

SEQ ID NO: 3476207 - RNA, 19 nt, Human
guuugaaagugaauaaacu

SEQ ID NO: 3476208 - RNA, 15 nt, Human
guuugaaauucugaa

SEQ ID NO: 3476209 - RNA, 18 nt, Human
guuugaaauucugaauuu

SEQ ID NO: 3476210 - RNA, 19 nt, Human
guuugaaauucugaauuug

SEQ ID NO: 3476211 - RNA, 12 nt, Human
guuugaacuuca

SEQ ID NO: 3476212 - RNA, 15 nt, Human
guuugaagccuggaa

SEQ ID NO: 3476213 - RNA, 15 nt, Human
guuugaaggaaacag

SEQ ID NO: 3476214 - RNA, 16 nt, Human
guuugaaggaaacagu

SEQ ID NO: 3476215 - RNA, 21 nt, Human
guuugaaucuauuuaucuuca

SEQ ID NO: 3476216 - RNA, 15 nt, Human
guuugaauguuaaau

SEQ ID NO: 3476217 - RNA, 17 nt, Human
guuugagaucagccugg

SEQ ID NO: 3476218 - RNA, 18 nt, Human
guuugagaucagccuggg

SEQ ID NO: 3476219 - RNA, 19 nt, Human
guuugagaucagccugggc

SEQ ID NO: 3476220 - RNA, 17 nt, Human
guuugagauggacacac

SEQ ID NO: 3476221 - RNA, 20 nt, Human
guuugagcucugcagcccag

SEQ ID NO: 3476222 - RNA, 13 nt, Human
guuugagcugccu

SEQ ID NO: 3476223 - RNA, 15 nt, Human
guuugagcugccuuc

SEQ ID NO: 3476224 - RNA, 16 nt, Human
guuugaggcugcagcg

SEQ ID NO: 3476225 - RNA, 19 nt, Human
guuugagguuuuuaagccu

SEQ ID NO: 3476226 - RNA, 16 nt, Human
guuugauagauuuucu

SEQ ID NO: 3476227 - RNA, 13 nt, Human
guuugaucuuccu

SEQ ID NO: 3476228 - RNA, 21 nt, Human
guuugaucuuccucugcuaaa

SEQ ID NO: 3476229 - RNA, 19 nt, Human
guuugaugaggcccuccac

SEQ ID NO: 3476230 - RNA, 23 nt, Human
guuugauuaaauucuugcaaagu

SEQ ID NO: 3476231 - RNA, 16 nt, Human
guuugauucagacagc

SEQ ID NO: 3476232 - RNA, 21 nt, Human
guuugauuugucacugcuuca

SEQ ID NO: 3476233 - RNA, 14 nt, Human
guuugcaaggaagc

SEQ ID NO: 3476234 - RNA, 17 nt, Human
guuugcaaggaagccac

SEQ ID NO: 3476235 - RNA, 19 nt, Human
guuugcacucaaaucuuaa

SEQ ID NO: 3476236 - RNA, 19 nt, Human
guuugcacuguaugcugga

SEQ ID NO: 3476237 - RNA, 22 nt, Human
guuugcacuguaugcuggacgg

SEQ ID NO: 3476238 - RNA, 19 nt, Human
guuugcagaaaagcaccug

SEQ ID NO: 3476239 - RNA, 21 nt, Human
guuugcagaaaagcaccugcc

SEQ ID NO: 3476240 - RNA, 16 nt, Human
guuugcagaugacaaa

SEQ ID NO: 3476241 - RNA, 11 nt, Human
guuugcagccu

SEQ ID NO: 3476242 - RNA, 14 nt, Human
guuugcauagguga

SEQ ID NO: 3476243 - RNA, 19 nt, Human
guuugcaucugaaaauuga

SEQ ID NO: 3476244 - RNA, 12 nt, Human
guuugcauuccu

SEQ ID NO: 3476245 - RNA, 15 nt, Human
guuugcauuucagaa

SEQ ID NO: 3476246 - RNA, 19 nt, Human
guuugccccguucuguuug

SEQ ID NO: 3476247 - RNA, 15 nt, Human
guuugccggauacaa

SEQ ID NO: 3476248 - RNA, 13 nt, Human
guuugccucugcc

SEQ ID NO: 3476249 - RNA, 13 nt, Human
guuugcuaaguga

SEQ ID NO: 3476250 - RNA, 17 nt, Human
guuugcucaccuggggu

SEQ ID NO: 3476251 - RNA, 18 nt, Human
guuugcucagaacacauu

SEQ ID NO: 3476252 - RNA, 16 nt, Human
guuugcugauggucug

SEQ ID NO: 3476253 - RNA, 21 nt, Human
guuugcugucaagccauuuuu

SEQ ID NO: 3476254 - RNA, 13 nt, Human
guuugcugugaac

SEQ ID NO: 3476255 - RNA, 14 nt, Human
guuugcuguugcug

SEQ ID NO: 3476256 - RNA, 13 nt, Human
guuugcuuauugu

SEQ ID NO: 3476257 - RNA, 18 nt, Human
guuugcuuauuguuccaa

SEQ ID NO: 3476258 - RNA, 16 nt, Human
guuugcuucauaaaug

SEQ ID NO: 3476259 - RNA, 21 nt, Human
guuugcuucaugugucccaga

SEQ ID NO: 3476260 - RNA, 14 nt, Human
guuugcuuguuucu

SEQ ID NO: 3476261 - RNA, 11 nt, Human
guuugcuuucu

SEQ ID NO: 3476262 - RNA, 20 nt, Human
guuugcuuuguaugcacuuu

SEQ ID NO: 3476263 - RNA, 13 nt, Human
guuuggaaggagc

SEQ ID NO: 3476264 - RNA, 16 nt, Human
guuuggaaggagcaga

SEQ ID NO: 3476265 - RNA, 19 nt, Human
guuuggacaaaauggaaua

SEQ ID NO: 3476266 - RNA, 15 nt, Human
guuuggaccccagcu

SEQ ID NO: 3476267 - RNA, 23 nt, Human
guuuggagacauuccugggcaca

SEQ ID NO: 3476268 - RNA, 17 nt, Human
guuuggagagagcagac

SEQ ID NO: 3476269 - RNA, 20 nt, Human
guuuggauauguaaaacauu

SEQ ID NO: 3476270 - RNA, 20 nt, Human
guuuggaugggagugagaca

SEQ ID NO: 3476271 - RNA, 15 nt, Human
guuuggcaaggaaag

SEQ ID NO: 3476272 - RNA, 19 nt, Human
guuuggcaauaguuugcau

SEQ ID NO: 3476273 - RNA, 22 nt, Human
guuuggcauguaaauguaaacu

SEQ ID NO: 3476274 - RNA, 18 nt, Human
guuuggccagaagucaag

SEQ ID NO: 3476275 - RNA, 19 nt, Human
guuuggcugugucuaaacu

SEQ ID NO: 3476276 - RNA, 13 nt, Human
guuuggcuuucag

SEQ ID NO: 3476277 - RNA, 23 nt, Human
guuugggaagagcuuagaaacug

SEQ ID NO: 3476278 - RNA, 16 nt, Human
guuugggaccccuggu

SEQ ID NO: 3476279 - RNA, 20 nt, Human
guuugggccccagaggcugg

SEQ ID NO: 3476280 - RNA, 21 nt, Human
guuuggggcaagucauguaaa

SEQ ID NO: 3476281 - RNA, 15 nt, Human
guuuggggcaggagu

SEQ ID NO: 3476282 - RNA, 17 nt, Human
guuuggggcaggaguag

SEQ ID NO: 3476283 - RNA, 18 nt, Human
guuuggggcgaggcagag

SEQ ID NO: 3476284 - RNA, 19 nt, Human
guuuggguaaaauacuuuu

SEQ ID NO: 3476285 - RNA, 16 nt, Human
guuuggguauauucau

SEQ ID NO: 3476286 - RNA, 18 nt, Human
guuugguauuguauuuau

SEQ ID NO: 3476287 - RNA, 16 nt, Human
guuugguccagccugg

SEQ ID NO: 3476288 - RNA, 15 nt, Human
guuugguccuguagg

SEQ ID NO: 3476289 - RNA, 23 nt, Human
guuuggucugggacuuccuugcu

SEQ ID NO: 3476290 - RNA, 13 nt, Human
guuuggugcuucu

SEQ ID NO: 3476291 - RNA, 22 nt, Human
guuugguggggguagagcugau

SEQ ID NO: 3476292 - RNA, 15 nt, Human
guuugguguguccca

SEQ ID NO: 3476293 - RNA, 22 nt, Human
guuugguucaaauguguuuugg

SEQ ID NO: 3476294 - RNA, 22 nt, Human
guuugguucacuuacagauagu

SEQ ID NO: 3476295 - RNA, 18 nt, Human
guuugguuccucucuggu

SEQ ID NO: 3476296 - RNA, 14 nt, Human
guuuguaaauguua

SEQ ID NO: 3476297 - RNA, 19 nt, Human
guuuguaaauuaacuuuua

SEQ ID NO: 3476298 - RNA, 17 nt, Human
guuuguaguuguuuuaa

SEQ ID NO: 3476299 - RNA, 16 nt, Human
guuuguauguauaauu

SEQ ID NO: 3476300 - RNA, 20 nt, Human
guuuguauguguguagacaa

SEQ ID NO: 3476301 - RNA, 17 nt, Human
guuugucacaugaaaca

SEQ ID NO: 3476302 - RNA, 14 nt, Human
guuugucuauuuua

SEQ ID NO: 3476303 - RNA, 18 nt, Human
guuugucucuccuuuucu

SEQ ID NO: 3476304 - RNA, 21 nt, Human
guuugucucuccuuuucuuuu

SEQ ID NO: 3476305 - RNA, 15 nt, Human
guuugucucuucugg

SEQ ID NO: 3476306 - RNA, 15 nt, Human
guuugucugucuuca

SEQ ID NO: 3476307 - RNA, 21 nt, Human
guuugucuuccauuccauugu

SEQ ID NO: 3476308 - RNA, 16 nt, Human
guuugucuucucccca

SEQ ID NO: 3476309 - RNA, 17 nt, Human
guuugucuucuccccag

SEQ ID NO: 3476310 - RNA, 19 nt, Human
guuuguggaaaaugaaaau

SEQ ID NO: 3476311 - RNA, 14 nt, Human
guuuguggccucag

SEQ ID NO: 3476312 - RNA, 22 nt, Human
guuuguggcugggggcaggagg

SEQ ID NO: 3476313 - RNA, 15 nt, Human
guuugugugucuuaa

SEQ ID NO: 3476314 - RNA, 20 nt, Human
guuuguguguugucucuuga

SEQ ID NO: 3476315 - RNA, 15 nt, Human
guuuguguucuguuu

SEQ ID NO: 3476316 - RNA, 22 nt, Human
guuuguguucuguuuguuaaaa

SEQ ID NO: 3476317 - RNA, 14 nt, Human
guuuguuccagaau

SEQ ID NO: 3476318 - RNA, 21 nt, Human
guuuguugagcugguaacauc

SEQ ID NO: 3476319 - RNA, 22 nt, Human
guuuguugagcugguaacaucg

SEQ ID NO: 3476320 - RNA, 13 nt, Human
guuuguuggaaag

SEQ ID NO: 3476321 - RNA, 21 nt, Human
guuuguuucucccccugggcu

SEQ ID NO: 3476322 - RNA, 20 nt, Human
guuuguuucugaaagggacg

SEQ ID NO: 3476323 - RNA, 16 nt, Human
guuuguuucuuugaau

SEQ ID NO: 3476324 - RNA, 14 nt, Human
guuuguuucuuugu

SEQ ID NO: 3476325 - RNA, 15 nt, Human
guuuguuucuuugug

SEQ ID NO: 3476326 - RNA, 11 nt, Human
guuuguuuguc

SEQ ID NO: 3476327 - RNA, 14 nt, Human
guuuguuugucugu

SEQ ID NO: 3476328 - RNA, 12 nt, Human
guuuguuuguuu

SEQ ID NO: 3476329 - RNA, 14 nt, Human
guuuguuuguuuca

SEQ ID NO: 3476330 - RNA, 19 nt, Human
guuuuaaaaaaauaaaaca

SEQ ID NO: 3476331 - RNA, 22 nt, Human
guuuuaaaaaaauaaaacauuu

SEQ ID NO: 3476332 - RNA, 15 nt, Human
guuuuaaaaugagaa

SEQ ID NO: 3476333 - RNA, 16 nt, Human
guuuuaaacuuucaau

SEQ ID NO: 3476334 - RNA, 15 nt, Human
guuuuaaagcuucca

SEQ ID NO: 3476335 - RNA, 12 nt, Human
guuuuaaauucu

SEQ ID NO: 3476336 - RNA, 16 nt, Human
guuuuaaauucugaga

SEQ ID NO: 3476337 - RNA, 19 nt, Human
guuuuaacuagaauuuauu

SEQ ID NO: 3476338 - RNA, 14 nt, Human
guuuuaagaggcag

SEQ ID NO: 3476339 - RNA, 16 nt, Human
guuuuaaggaagaaaa

SEQ ID NO: 3476340 - RNA, 19 nt, Human
guuuuaaggaagaaaaauc

SEQ ID NO: 3476341 - RNA, 19 nt, Human
guuuuaaggacugacugag

SEQ ID NO: 3476342 - RNA, 22 nt, Human
guuuuaagugaaagugaggaaa

SEQ ID NO: 3476343 - RNA, 21 nt, Human
guuuuaaucugaaauucuaaa

SEQ ID NO: 3476344 - RNA, 23 nt, Human
guuuuaauuccaauaugaugacu

SEQ ID NO: 3476345 - RNA, 14 nt, Human
guuuuaauuccaug

SEQ ID NO: 3476346 - RNA, 14 nt, Human
guuuuaauuuaaac

SEQ ID NO: 3476347 - RNA, 21 nt, Human
guuuuaauuuaaacaccuccu

SEQ ID NO: 3476348 - RNA, 21 nt, Human
guuuuaauuuauacuggcaug

SEQ ID NO: 3476349 - RNA, 11 nt, Human
guuuuacaaua

SEQ ID NO: 3476350 - RNA, 13 nt, Human
guuuuacaauagu

SEQ ID NO: 3476351 - RNA, 16 nt, Human
guuuuacaauaguucu

SEQ ID NO: 3476352 - RNA, 11 nt, Human
guuuuacacug

SEQ ID NO: 3476353 - RNA, 16 nt, Human
guuuuacccuauaucu

SEQ ID NO: 3476354 - RNA, 16 nt, Human
guuuuacugcagcuuu

SEQ ID NO: 3476355 - RNA, 14 nt, Human
guuuuacugcuuuu

SEQ ID NO: 3476356 - RNA, 13 nt, Human
guuuuacugucua

SEQ ID NO: 3476357 - RNA, 15 nt, Human
guuuuacugucuauu

SEQ ID NO: 3476358 - RNA, 18 nt, Human
guuuuacuuuuaaacugu

SEQ ID NO: 3476359 - RNA, 13 nt, Human
guuuuagaaugau

SEQ ID NO: 3476360 - RNA, 18 nt, Human
guuuuagaguaagaaauu

SEQ ID NO: 3476361 - RNA, 20 nt, Human
guuuuagauuuucugguucu

SEQ ID NO: 3476362 - RNA, 12 nt, Human
guuuuucaauua

SEQ ID NO: 3476363 - RNA, 16 nt, Human
guuuuucaauuaaacg

SEQ ID NO: 3476364 - RNA, 18 nt, Human
guuuuucaauuaaacgga

SEQ ID NO: 3476365 - RNA, 20 nt, Human
guuuuucaguucaaagucau

SEQ ID NO: 3476366 - RNA, 12 nt, Human
guuuuucaguuu

SEQ ID NO: 3476367 - RNA, 14 nt, Human
guuuuucaguuuuc

SEQ ID NO: 3476368 - RNA, 15 nt, Human
guuuuucauaaagca

SEQ ID NO: 3476369 - RNA, 16 nt, Human
guuuuucauuuuaaaa

SEQ ID NO: 3476370 - RNA, 17 nt, Human
guuuuuccacuacugcu

SEQ ID NO: 3476371 - RNA, 13 nt, Human
guuuuucuaaagg

SEQ ID NO: 3476372 - RNA, 19 nt, Human
guuuuucuacuuuuaaaga

SEQ ID NO: 3476373 - RNA, 12 nt, Human
guuuuucuauua

SEQ ID NO: 3476374 - RNA, 15 nt, Human
guuuuucuauuaaaa

SEQ ID NO: 3476375 - RNA, 16 nt, Human
guuuuucuauuaaaag

SEQ ID NO: 3476376 - RNA, 21 nt, Human
guuuuucuauuaaaagacuca

SEQ ID NO: 3476377 - RNA, 14 nt, Human
guuuuucugccagg

SEQ ID NO: 3476378 - RNA, 14 nt, Human
guuuuucugcuuua

SEQ ID NO: 3476379 - RNA, 18 nt, Human
guuuuucugcuuuagacu

SEQ ID NO: 3476380 - RNA, 19 nt, Human
guuuuucugcuuuagacuu

SEQ ID NO: 3476381 - RNA, 22 nt, Human
guuuuucugcuuuagacuugaa

SEQ ID NO: 3476382 - RNA, 20 nt, Human
guuuuucuuaaauaauaaag

SEQ ID NO: 3476383 - RNA, 16 nt, Human
guuuuucuuaauauau

SEQ ID NO: 3476384 - RNA, 23 nt, Human
guuuuucuucaacaucaauguuc

SEQ ID NO: 3476385 - RNA, 15 nt, Human
guuuuucuucucccu

SEQ ID NO: 3476386 - RNA, 15 nt, Human
guuuuucuugcaugg

SEQ ID NO: 3476387 - RNA, 19 nt, Human
guuuuugaaggcagaaagc

SEQ ID NO: 3476388 - RNA, 13 nt, Human
guuuuugagauau

SEQ ID NO: 3476389 - RNA, 23 nt, Human
guuuuugaggcuuucuguugcca

SEQ ID NO: 3476390 - RNA, 18 nt, Human
guuuuugauagcuuuauu

SEQ ID NO: 3476391 - RNA, 15 nt, Human
guuuuugcacauguu

SEQ ID NO: 3476392 - RNA, 17 nt, Human
guuuuugggaugucuua

SEQ ID NO: 3476393 - RNA, 19 nt, Human
guuuuugggugcaagaggg

SEQ ID NO: 3476394 - RNA, 12 nt, Human
guuuuuguaaag

SEQ ID NO: 3476395 - RNA, 15 nt, Human
guuuuuguaaagaaa

SEQ ID NO: 3476396 - RNA, 19 nt, Human
guuuuuguaaagaaaaaua

SEQ ID NO: 3476397 - RNA, 22 nt, Human
guuuuuguaaagauuucuguuc

SEQ ID NO: 3476398 - RNA, 14 nt, Human
guuuuuguacugua

SEQ ID NO: 3476399 - RNA, 15 nt, Human
guuuuuguuuggaga

SEQ ID NO: 3476400 - RNA, 17 nt, Human
guuuuuguuuggagagc

SEQ ID NO: 3476401 - RNA, 22 nt, Human
guuuuuuaucuuuucuacagca

SEQ ID NO: 3476402 - RNA, 23 nt, Human
guuuuuuaucuuuucuacagcaa

SEQ ID NO: 3476403 - RNA, 15 nt, Human
guuuuuuaugcuaau

SEQ ID NO: 3476404 - RNA, 18 nt, Human
guuuuuucaaaauagaaa

SEQ ID NO: 3476405 - RNA, 22 nt, Human
guuuuuuguuggaguguuucua

SEQ ID NO: 3476406 - RNA, 18 nt, Human
guuuuuuguuuuucugcu

SEQ ID NO: 3476407 - RNA, 13 nt, Human
guuuuuuuaauga

SEQ ID NO: 3476408 - RNA, 14 nt, Human
guuuuuuuauuucu

SEQ ID NO: 3476409 - RNA, 23 nt, Human
guuuuuuucauugccaaaaacua

SEQ ID NO: 3476410 - RNA, 10 nt, Human
guuuuuuugc

SEQ ID NO: 3476411 - RNA, 17 nt, Human
guuuuuuuguuauuaaa

SEQ ID NO: 3476412 - RNA, 16 nt, Human
guuuuuuuucagccac

SEQ ID NO: 3476413 - RNA, 23 nt, Human
guuuuuuuuuaaaaaagaaacau

SEQ ID NO: 3476414 - RNA, 20 nt, Human
guuuuuuuuuauacacugua

SEQ ID NO: 3476415 - RNA, 18 nt, Human
guuuuuuuuuucuugucu

SEQ ID NO: 3476416 - RNA, 17 nt, Human
guuuuuuuuuuguuugu

SEQ ID NO: 3476417 - RNA, 21 nt, Human
guuuuuuuuuuuaaaaaaaga

SEQ ID NO: 3476418 - RNA, 23 nt, Human
guuuuuuuuuuuaaaaaaagaaa

SEQ ID NO: 3476419 - RNA, 20 nt, Human
uaaaaaaaaaaaaaagcuuu

SEQ ID NO: 3476420 - RNA, 18 nt, Human
uaaaaaaaaaaaaaggaa

SEQ ID NO: 3476421 - RNA, 20 nt, Human
uaaaaaaaaaaaaaggaaaa

SEQ ID NO: 3476422 - RNA, 23 nt, Human
uaaaaaaaaaaaaaggaaaaaaa

SEQ ID NO: 3476423 - RNA, 16 nt, Human
uaaaaaaaaaaaagua

SEQ ID NO: 3476424 - RNA, 18 nt, Human
uaaaaaaaaaaaaguuau

SEQ ID NO: 3476425 - RNA, 20 nt, Human
uaaaaaaaaaaaaguuauau

SEQ ID NO: 3476426 - RNA, 22 nt, Human
uaaaaaaaaaaaccaaaacugu

SEQ ID NO: 3476427 - RNA, 19 nt, Human
uaaaaaaaaaaagauugua

SEQ ID NO: 3476428 - RNA, 16 nt, Human
uaaaaaaaaaagucac

SEQ ID NO: 3476429 - RNA, 18 nt, Human
uaaaaaaaaaauugggga

SEQ ID NO: 3476430 - RNA, 23 nt, Human
uaaaaaaaaauagaugucuuuua

SEQ ID NO: 3476431 - RNA, 22 nt, Human
uaaaaaaaacaaaaagaacaaa

SEQ ID NO: 3476432 - RNA, 11 nt, Human
uaaaaaaaaga

SEQ ID NO: 3476433 - RNA, 16 nt, Human
uaaaaaaaagaaaaaa

SEQ ID NO: 3476434 - RNA, 17 nt, Human
uaaaaaaaagaaaaaag

SEQ ID NO: 3476435 - RNA, 15 nt, Human
uaaaaaaaagaugaa

SEQ ID NO: 3476436 - RNA, 16 nt, Human
uaaaaaaaauaguuga

SEQ ID NO: 3476437 - RNA, 23 nt, Human
uaaaaaaaauaguugagccagca

SEQ ID NO: 3476438 - RNA, 20 nt, Human
uaaaaaaaauccuucuaauc

SEQ ID NO: 3476439 - RNA, 17 nt, Human
uaaaaaaaaugaaaugu

SEQ ID NO: 3476440 - RNA, 22 nt, Human
uaaaaaaaccaccaaaaacaaa

SEQ ID NO: 3476441 - RNA, 10 nt, Human
uaaaaaaaga

SEQ ID NO: 3476442 - RNA, 12 nt, Human
uaaaaaaagaaa

SEQ ID NO: 3476443 - RNA, 11 nt, Human
uaaaaaaauaa

SEQ ID NO: 3476444 - RNA, 17 nt, Human
uaaaaaaauaaaacauu

SEQ ID NO: 3476445 - RNA, 18 nt, Human
uaaaaaaauaaaacauuu

SEQ ID NO: 3476446 - RNA, 14 nt, Human
uaaaaaacaaagaa

SEQ ID NO: 3476447 - RNA, 19 nt, Human
uaaaaaacaaagaagacaa

SEQ ID NO: 3476448 - RNA, 11 nt, Human
uaaaaaacaac

SEQ ID NO: 3476449 - RNA, 11 nt, Human
uaaaaaacacu

SEQ ID NO: 3476450 - RNA, 16 nt, Human
uaaaaaagauaaacac

SEQ ID NO: 3476451 - RNA, 19 nt, Human
uaaaaaagauauauuaaaa

SEQ ID NO: 3476452 - RNA, 17 nt, Human
uaaaaaagaucccaaau

SEQ ID NO: 3476453 - RNA, 19 nt, Human
uaaaaaagcuuaaaacuuu

SEQ ID NO: 3476454 - RNA, 17 nt, Human
uaaaaaagucucuauuu

SEQ ID NO: 3476455 - RNA, 18 nt, Human
uaaaaaagucucuauuua

SEQ ID NO: 3476456 - RNA, 18 nt, Human
uaaaaaaguuuaaaaugu

SEQ ID NO: 3476457 - RNA, 17 nt, Human
uaaaaaauaaucuauuu

SEQ ID NO: 3476458 - RNA, 14 nt, Human
uaaaaaauauuuuc

SEQ ID NO: 3476459 - RNA, 18 nt, Human
uaaaaaauauuuucucug

SEQ ID NO: 3476460 - RNA, 22 nt, Human
uaaaaaaucaugccaguauuuu

SEQ ID NO: 3476461 - RNA, 14 nt, Human
uaaaaaauggucac

SEQ ID NO: 3476462 - RNA, 15 nt, Human
uaaaaacaaaaggca

SEQ ID NO: 3476463 - RNA, 22 nt, Human
uaaaaacaaaggagauaaaucu

SEQ ID NO: 3476464 - RNA, 13 nt, Human
uaaaaacaacuuu

SEQ ID NO: 3476465 - RNA, 19 nt, Human
uaaaaacaacuuuauaccc

SEQ ID NO: 3476466 - RNA, 20 nt, Human
uaaaaacagauuuggaaaga

SEQ ID NO: 3476467 - RNA, 17 nt, Human
uaaaaacagcauugcuu

SEQ ID NO: 3476468 - RNA, 15 nt, Human
uaaaaacaggcagcu

SEQ ID NO: 3476469 - RNA, 17 nt, Human
uaaaaacauaacauaaa

SEQ ID NO: 3476470 - RNA, 14 nt, Human
uaaaaacuaguagu

SEQ ID NO: 3476471 - RNA, 17 nt, Human
uaaaaacuauuuaacuu

SEQ ID NO: 3476472 - RNA, 20 nt, Human
uaaaaacucaggcaaagaaa

SEQ ID NO: 3476473 - RNA, 16 nt, Human
uaaaaacugaaguucu

SEQ ID NO: 3476474 - RNA, 16 nt, Human
uaaaaacugacuccuu

SEQ ID NO: 3476475 - RNA, 16 nt, Human
uaaaaacugagugacu

SEQ ID NO: 3476476 - RNA, 21 nt, Human
uaaaaacugagugacucuaua

SEQ ID NO: 3476477 - RNA, 20 nt, Human
uaaaaagaaaaaccacuccc

SEQ ID NO: 3476478 - RNA, 21 nt, Human
uaaaaagaaaacaaaaccaaa

SEQ ID NO: 3476479 - RNA, 17 nt, Human
uaaaaagaaaagauaaa

SEQ ID NO: 3476480 - RNA, 20 nt, Human
uaaaaagaaggaaaaugauc

SEQ ID NO: 3476481 - RNA, 22 nt, Human
uaaaaagauaaaaaaacagcuu

SEQ ID NO: 3476482 - RNA, 16 nt, Human
uaaaaagauaaucuca

SEQ ID NO: 3476483 - RNA, 15 nt, Human
uaaaaagauuagcaa

SEQ ID NO: 3476484 - RNA, 13 nt, Human
uaaaaagauuugu

SEQ ID NO: 3476485 - RNA, 20 nt, Human
uaaaaagccacuagacucuu

SEQ ID NO: 3476486 - RNA, 17 nt, Human
uaaaaaggaacugcagc

SEQ ID NO: 3476487 - RNA, 11 nt, Human
uaaaaaggaca

SEQ ID NO: 3476488 - RNA, 18 nt, Human
uaaaaaggaguauacaaa

SEQ ID NO: 3476489 - RNA, 20 nt, Human
uaaaaaggaguauacaaaca

SEQ ID NO: 3476490 - RNA, 16 nt, Human
uaaaaaggccuccugg

SEQ ID NO: 3476491 - RNA, 13 nt, Human
uaaaaaggugacc

SEQ ID NO: 3476492 - RNA, 14 nt, Human
uaaaaaguauuuuu

SEQ ID NO: 3476493 - RNA, 23 nt, Human
uaaaaagucugcauuacauuccu

SEQ ID NO: 3476494 - RNA, 14 nt, Human
uaaaaagucuucac

SEQ ID NO: 3476495 - RNA, 15 nt, Human
uaaaaagugacacag

SEQ ID NO: 3476496 - RNA, 13 nt, Human
uaaaaaguuaaaa

SEQ ID NO: 3476497 - RNA, 15 nt, Human
uaaaaaguuaaaaag

SEQ ID NO: 3476498 - RNA, 17 nt, Human
uaaaaaguuaaaaaguu

SEQ ID NO: 3476499 - RNA, 16 nt, Human
uaaaaauaacuguaau

SEQ ID NO: 3476500 - RNA, 17 nt, Human
uaaaaauaacuguaauu

SEQ ID NO: 3476501 - RNA, 19 nt, Human
uaaaaauaagucaacagua

SEQ ID NO: 3476502 - RNA, 12 nt, Human
uaaaaauacaaa

SEQ ID NO: 3476503 - RNA, 14 nt, Human
uaaaaauacauauc

SEQ ID NO: 3476504 - RNA, 14 nt, Human
uaaaaauagaaaca

SEQ ID NO: 3476505 - RNA, 17 nt, Human
uaaaaauauacauguuu

SEQ ID NO: 3476506 - RNA, 23 nt, Human
uaaaaauaucaaauuaauugugu

SEQ ID NO: 3476507 - RNA, 21 nt, Human
uaaaagguaugcaaucaaauc

SEQ ID NO: 3476508 - RNA, 22 nt, Human
uaaaagguauuaaauugauguu

SEQ ID NO: 3476509 - RNA, 12 nt, Human
uaaaaggugacc

SEQ ID NO: 3476510 - RNA, 19 nt, Human
uaaaaggugaccaaugaug

SEQ ID NO: 3476511 - RNA, 14 nt, Human
uaaaaguaaaaugu

SEQ ID NO: 3476512 - RNA, 16 nt, Human
uaaaaguaaaaugucu

SEQ ID NO: 3476513 - RNA, 12 nt, Human
uaaaaguaaaca

SEQ ID NO: 3476514 - RNA, 13 nt, Human
uaaaagucuugug

SEQ ID NO: 3476515 - RNA, 13 nt, Human
uaaaagugaucaa

SEQ ID NO: 3476516 - RNA, 15 nt, Human
uaaaagugaucaaua

SEQ ID NO: 3476517 - RNA, 17 nt, Human
uaaaagugccauuaaca

SEQ ID NO: 3476518 - RNA, 19 nt, Human
uaaaagugggcuugauucu

SEQ ID NO: 3476519 - RNA, 23 nt, Human
uaaaagugggcuugauucugcag

SEQ ID NO: 3476520 - RNA, 16 nt, Human
uaaaaguguccauuga

SEQ ID NO: 3476521 - RNA, 14 nt, Human
uaaaaguugugauu

SEQ ID NO: 3476522 - RNA, 21 nt, Human
uaaaaguugugauuccagaua

SEQ ID NO: 3476523 - RNA, 17 nt, Human
uaaaauaaaauaaaaau

SEQ ID NO: 3476524 - RNA, 14 nt, Human
uaaaauaaaaugaa

SEQ ID NO: 3476525 - RNA, 20 nt, Human
uaaaauaaaaugaaaauugu

SEQ ID NO: 3476526 - RNA, 13 nt, Human
uaaaauaaauaaa

SEQ ID NO: 3476527 - RNA, 18 nt, Human
uaaaauaaauauugucuu

SEQ ID NO: 3476528 - RNA, 21 nt, Human
uaaaauaacuaguguugcuug

SEQ ID NO: 3476529 - RNA, 16 nt, Human
uaaaauaagcaggugg

SEQ ID NO: 3476530 - RNA, 14 nt, Human
uaaaauaagucuga

SEQ ID NO: 3476531 - RNA, 15 nt, Human
uaaaauaagucugau

SEQ ID NO: 3476532 - RNA, 15 nt, Human
uaaaauaaugggauu

SEQ ID NO: 3476533 - RNA, 19 nt, Human
uaaaauaauuauauaacug

SEQ ID NO: 3476534 - RNA, 15 nt, Human
uaaaauaauucuaaa

SEQ ID NO: 3476535 - RNA, 16 nt, Human
uaaaauaauucuaaag

SEQ ID NO: 3476536 - RNA, 16 nt, Human
uaaaauaauucugagu

SEQ ID NO: 3476537 - RNA, 20 nt, Human
uaaaauaauuuuuauauuug

SEQ ID NO: 3476538 - RNA, 22 nt, Human
uaaaauaauuuuuauauuugaa

SEQ ID NO: 3476539 - RNA, 14 nt, Human
uaaaauacauuuaa

SEQ ID NO: 3476540 - RNA, 18 nt, Human
uaaaauacgguaccuggc

SEQ ID NO: 3476541 - RNA, 21 nt, Human
uaaaauacuauuuuuacugcc

SEQ ID NO: 3476542 - RNA, 14 nt, Human
uaaaauacuuuuac

SEQ ID NO: 3476543 - RNA, 22 nt, Human
uaaaauagaaauauagccaaaa

SEQ ID NO: 3476544 - RNA, 16 nt, Human
uaaaauagaguguagu

SEQ ID NO: 3476545 - RNA, 15 nt, Human
uaaaauagauauaaa

SEQ ID NO: 3476546 - RNA, 13 nt, Human
uaaaauagcaaaa

SEQ ID NO: 3476547 - RNA, 16 nt, Human
uaaaauagcaaaagaa

SEQ ID NO: 3476548 - RNA, 17 nt, Human
uaaaauagcaaaagaag

SEQ ID NO: 3476549 - RNA, 21 nt, Human
uaaaauagcaaaagaagaagu

SEQ ID NO: 3476550 - RNA, 15 nt, Human
uaaaauagccacuua

SEQ ID NO: 3476551 - RNA, 17 nt, Human
uaaaauagcguucuugu

SEQ ID NO: 3476552 - RNA, 19 nt, Human
uaaaauagcguucuuguaa

SEQ ID NO: 3476553 - RNA, 20 nt, Human
uaaaauagcguucuuguaau

SEQ ID NO: 3476554 - RNA, 19 nt, Human
uaaaauaggggauauuuaa

SEQ ID NO: 3476555 - RNA, 16 nt, Human
uaaaauaguaugaaaa

SEQ ID NO: 3476556 - RNA, 23 nt, Human
uaaaauaguuguccauauuuuca

SEQ ID NO: 3476557 - RNA, 18 nt, Human
uaaaauauagcuguacaa

SEQ ID NO: 3476558 - RNA, 14 nt, Human
uaaaauaucauuca

SEQ ID NO: 3476559 - RNA, 18 nt, Human
uaaaauaucuuuugaccu

SEQ ID NO: 3476560 - RNA, 14 nt, Human
uaaaauaugcacua

SEQ ID NO: 3476561 - RNA, 23 nt, Human
uaaaauaugcacuaagucucuuu

SEQ ID NO: 3476562 - RNA, 22 nt, Human
uaaaauauuccugcauuuguga

SEQ ID NO: 3476563 - RNA, 12 nt, Human
uaaaauauuuau

SEQ ID NO: 3476564 - RNA, 14 nt, Human
uaaaauauuuauga

SEQ ID NO: 3476565 - RNA, 22 nt, Human
uaaaauauuuaugaagaaaaua

SEQ ID NO: 3476566 - RNA, 12 nt, Human
uaaaauauuuuc

SEQ ID NO: 3476567 - RNA, 14 nt, Human
uaaaauauuuucug

SEQ ID NO: 3476568 - RNA, 21 nt, Human
uaaaauauuuucuguguguuc

SEQ ID NO: 3476569 - RNA, 23 nt, Human
uaaaauauuuucuguguguuccu

SEQ ID NO: 3476570 - RNA, 24 nt, Human
uaaaauauuuucuguguguuccug

SEQ ID NO: 3476571 - RNA, 20 nt, Human
uaaaauauuuugaaucaaua

SEQ ID NO: 3476572 - RNA, 17 nt, Human
uaaaauauuuuugaaag

SEQ ID NO: 3476573 - RNA, 17 nt, Human
uaaaaucaaguuuuaag

SEQ ID NO: 3476574 - RNA, 15 nt, Human
uaaaaucacguuaaa

SEQ ID NO: 3476575 - RNA, 18 nt, Human
uaaaaucacuaacauuau

SEQ ID NO: 3476576 - RNA, 22 nt, Human
uaaaaucagccaauuauguuaa

SEQ ID NO: 3476577 - RNA, 15 nt, Human
uaaaaucauguacau

SEQ ID NO: 3476578 - RNA, 10 nt, Human
uaaaaucauu

SEQ ID NO: 3476579 - RNA, 18 nt, Human
uaaaaucauuucugcauc

SEQ ID NO: 3476580 - RNA, 19 nt, Human
uaaaauccccaugccugug

SEQ ID NO: 3476581 - RNA, 15 nt, Human
uaaaauccugugcaa

SEQ ID NO: 3476582 - RNA, 20 nt, Human
uaaaaucugagggaaauguu

SEQ ID NO: 3476583 - RNA, 22 nt, Human
uaaaaucugagggaaauguuuu

SEQ ID NO: 3476584 - RNA, 19 nt, Human
uaaaaucuuauaguucuag

SEQ ID NO: 3476585 - RNA, 15 nt, Human
uaaaaucuuauuaaa

SEQ ID NO: 3476586 - RNA, 16 nt, Human
uaaaaucuugaaaaug

SEQ ID NO: 3476587 - RNA, 13 nt, Human
uaaaaucuuggaa

SEQ ID NO: 3476588 - RNA, 17 nt, Human
uaaaaucuuggaaguac

SEQ ID NO: 3476589 - RNA, 24 nt, Human
uaaaaucuuggaaguacaugaaua

SEQ ID NO: 3476590 - RNA, 19 nt, Human
uaaaaucuuggcacagaaa

SEQ ID NO: 3476591 - RNA, 22 nt, Human
uaaaaucuugucauguguauaa

SEQ ID NO: 3476592 - RNA, 23 nt, Human
uaaaaucuugucauguguauaaa

SEQ ID NO: 3476593 - RNA, 22 nt, Human
uaaaaucuuucuuucuuagaaa

SEQ ID NO: 3476594 - RNA, 15 nt, Human
uaaaaugaaaauugu

SEQ ID NO: 3476595 - RNA, 21 nt, Human
uaaaaugacaaucaugugugu

SEQ ID NO: 3476596 - RNA, 13 nt, Human
uaaaaugagaaau

SEQ ID NO: 3476597 - RNA, 23 nt, Human
uaaaaugauauuguuauauacau

SEQ ID NO: 3476598 - RNA, 22 nt, Human
uaaaaugauuguaaaauagcuu

SEQ ID NO: 3476599 - RNA, 14 nt, Human
uaaaaugauuuuau

SEQ ID NO: 3476600 - RNA, 15 nt, Human
uaaaaugauuuuauc

SEQ ID NO: 3476601 - RNA, 13 nt, Human
uaaaaugcaaaaa

SEQ ID NO: 3476602 - RNA, 15 nt, Human
uaaaaugcaaaaaau

SEQ ID NO: 3476603 - RNA, 18 nt, Human
uaaaaugcaaaaaaucuu

SEQ ID NO: 3476604 - RNA, 19 nt, Human
uaaaaugcaaaaaaucuua

SEQ ID NO: 3476605 - RNA, 18 nt, Human
uaaaaugcaauauuugua

SEQ ID NO: 3476606 - RNA, 20 nt, Human
uaaaaugccucaguguauuu

SEQ ID NO: 3476607 - RNA, 23 nt, Human
uaaaaugcuuacauuugaacuug

SEQ ID NO: 3476608 - RNA, 20 nt, Human
uaaaauggaaaacuuaguuu

SEQ ID NO: 3476609 - RNA, 18 nt, Human
uaaaauggcaacaaacug

SEQ ID NO: 3476610 - RNA, 17 nt, Human
uaaaauggguuuuacug

SEQ ID NO: 3476611 - RNA, 9 nt, Human
uaaaauggu

SEQ ID NO: 3476612 - RNA, 16 nt, Human
uaaaaugguuuguccu

SEQ ID NO: 3476613 - RNA, 23 nt, Human
uaaaauguaaagccaugcuggaa

SEQ ID NO: 3476614 - RNA, 19 nt, Human
uaaaauguaauuuaaauga

SEQ ID NO: 3476615 - RNA, 20 nt, Human
uaaaauguaauuuaaaugaa

SEQ ID NO: 3476616 - RNA, 14 nt, Human
uaaaauguacaugu

SEQ ID NO: 3476617 - RNA, 17 nt, Human
uaaaauguacauguauu

SEQ ID NO: 3476618 - RNA, 16 nt, Human
uaaaauguauaaguug

SEQ ID NO: 3476619 - RNA, 16 nt, Human
uaaaauguaugcaugu

SEQ ID NO: 3476620 - RNA, 17 nt, Human
uaaaauguauuuuucua

SEQ ID NO: 3476621 - RNA, 21 nt, Human
uaaaauguccaguaagaucac

SEQ ID NO: 3476622 - RNA, 16 nt, Human
uaaaaugucuuuccaa

SEQ ID NO: 3476623 - RNA, 14 nt, Human
uaaaauguguugaa

SEQ ID NO: 3476624 - RNA, 15 nt, Human
uaaaauguguugaaa

SEQ ID NO: 3476625 - RNA, 14 nt, Human
uaaaauguuaaaac

SEQ ID NO: 3476626 - RNA, 15 nt, Human
uaaaauuaaaaguuu

SEQ ID NO: 3476627 - RNA, 16 nt, Human
uaaaauuaaagcugaa

SEQ ID NO: 3476628 - RNA, 18 nt, Human
uaaaauuaaagcugaaaa

SEQ ID NO: 3476629 - RNA, 19 nt, Human
uaaaauuaaagcugaaaac

SEQ ID NO: 3476630 - RNA, 18 nt, Human
uaaaauuaagaauguucu

SEQ ID NO: 3476631 - RNA, 13 nt, Human
uaaaauuacaacu

SEQ ID NO: 3476632 - RNA, 18 nt, Human
uaaaauuacaguggauug

SEQ ID NO: 3476633 - RNA, 16 nt, Human
uaaaauuagaugcaug

SEQ ID NO: 3476634 - RNA, 15 nt, Human
uaaaauuauacugug

SEQ ID NO: 3476635 - RNA, 19 nt, Human
uaaaauuauacugugugug

SEQ ID NO: 3476636 - RNA, 19 nt, Human
uaaaauuauagaugggaau

SEQ ID NO: 3476637 - RNA, 18 nt, Human
uaaaauuauagcucuaau

SEQ ID NO: 3476638 - RNA, 17 nt, Human
uaaaauuaugaaucuga

SEQ ID NO: 3476639 - RNA, 14 nt, Human
uaaaauuauuuugg

SEQ ID NO: 3476640 - RNA, 15 nt, Human
uaaaauuauuuugga

SEQ ID NO: 3476641 - RNA, 22 nt, Human
uaaaauucaguuuuuuuccagu

SEQ ID NO: 3476642 - RNA, 22 nt, Human
uaaaauuccacugcguugucca

SEQ ID NO: 3476643 - RNA, 16 nt, Human
uaaaauucuacuguau

SEQ ID NO: 3476644 - RNA, 23 nt, Human
uaaaauugaguucuuccuguaau

SEQ ID NO: 3476645 - RNA, 14 nt, Human
uaaaauugcacuuu

SEQ ID NO: 3476646 - RNA, 21 nt, Human
uaaaauugcauggguuuugua

SEQ ID NO: 3476647 - RNA, 22 nt, Human
uaaaauugcauggguuuuguag

SEQ ID NO: 3476648 - RNA, 13 nt, Human
uaaaauugccaua

SEQ ID NO: 3476649 - RNA, 16 nt, Human
uaaaauugccauauug

SEQ ID NO: 3476650 - RNA, 19 nt, Human
uaaaauugccauauugcac

SEQ ID NO: 3476651 - RNA, 19 nt, Human
uaaggaauguagcugguuu

SEQ ID NO: 3476652 - RNA, 22 nt, Human
uaaggaauuuuauuuuuuucug

SEQ ID NO: 3476653 - RNA, 18 nt, Human
uaaggacaaaaaugaacu

SEQ ID NO: 3476654 - RNA, 16 nt, Human
uaaggacaaagugcca

SEQ ID NO: 3476655 - RNA, 20 nt, Human
uaaggacaaagugccaaaga

SEQ ID NO: 3476656 - RNA, 23 nt, Human
uaaggacaaagugccaaagaaag

SEQ ID NO: 3476657 - RNA, 19 nt, Human
uaaggacugacugaggcag

SEQ ID NO: 3476658 - RNA, 10 nt, Human
uaaggacugc

SEQ ID NO: 3476659 - RNA, 13 nt, Human
uaaggacugcaug

SEQ ID NO: 3476660 - RNA, 16 nt, Human
uaaggacuucuuuaau

SEQ ID NO: 3476661 - RNA, 13 nt, Human
uaaggacuuguua

SEQ ID NO: 3476662 - RNA, 17 nt, Human
uaaggagaaucauguuu

SEQ ID NO: 3476663 - RNA, 20 nt, Human
uaaggagaaucauguuucuu

SEQ ID NO: 3476664 - RNA, 16 nt, Human
uaaggagaugggccuu

SEQ ID NO: 3476665 - RNA, 19 nt, Human
uaaggagauguaagagcuu

SEQ ID NO: 3476666 - RNA, 17 nt, Human
uaaggauccggaaagaa

SEQ ID NO: 3476667 - RNA, 21 nt, Human
uaaggaugcuuguacauaaug

SEQ ID NO: 3476668 - RNA, 22 nt, Human
uaaggaugcuuguacauaaugc

SEQ ID NO: 3476669 - RNA, 18 nt, Human
uaaggaugggaaggaggg

SEQ ID NO: 3476670 - RNA, 16 nt, Human
uaaggauguagcuuuu

SEQ ID NO: 3476671 - RNA, 21 nt, Human
uaaggauguagcuuuucaccu

SEQ ID NO: 3476672 - RNA, 20 nt, Human
uaaggauuuuaugcuuuaaa

SEQ ID NO: 3476673 - RNA, 20 nt, Human
uaaggcaacugaacaaaaaa

SEQ ID NO: 3476674 - RNA, 15 nt, Human
uaaggcaaucauggu

SEQ ID NO: 3476675 - RNA, 16 nt, Human
uaaggcaggacagaga

SEQ ID NO: 3476676 - RNA, 14 nt, Human
uaaggcaggcauug

SEQ ID NO: 3476677 - RNA, 18 nt, Human
uaaggccuaggauucuaa

SEQ ID NO: 3476678 - RNA, 19 nt, Human
uaaggccuaggauucuaaa

SEQ ID NO: 3476679 - RNA, 20 nt, Human
uaaggccuaggauucuaaaa

SEQ ID NO: 3476680 - RNA, 14 nt, Human
uaaggccugaauca

SEQ ID NO: 3476681 - RNA, 20 nt, Human
uaaggcguggagcugccuga

SEQ ID NO: 3476682 - RNA, 22 nt, Human
uaaggcucuaugagucuagaug

SEQ ID NO: 3476683 - RNA, 14 nt, Human
uaaggcucugagag

SEQ ID NO: 3476684 - RNA, 19 nt, Human
uaaggcucugagagucuag

SEQ ID NO: 3476685 - RNA, 24 nt, Human
uaaggcucugagagucuagauucu

SEQ ID NO: 3476686 - RNA, 13 nt, Human
uaaggcugaggaa

SEQ ID NO: 3476687 - RNA, 13 nt, Human
uaaggcuguguaa

SEQ ID NO: 3476688 - RNA, 15 nt, Human
uaagggaaaaaucaa

SEQ ID NO: 3476689 - RNA, 17 nt, Human
uaagggaaaagauaaag

SEQ ID NO: 3476690 - RNA, 18 nt, Human
uaagggaagacauuucuu

SEQ ID NO: 3476691 - RNA, 21 nt, Human
uaagggaaggaacucuggcuu

SEQ ID NO: 3476692 - RNA, 21 nt, Human
uaagggaggaggagcuucugg

SEQ ID NO: 3476693 - RNA, 17 nt, Human
uaagggauuucuuaggg

SEQ ID NO: 3476694 - RNA, 14 nt, Human
uaagggcacugacg

SEQ ID NO: 3476695 - RNA, 15 nt, Human
uaaggggaagaauga

SEQ ID NO: 3476696 - RNA, 20 nt, Human
uaaggggaagaaugaaagcu

SEQ ID NO: 3476697 - RNA, 19 nt, Human
uaaggggaggaaccagagu

SEQ ID NO: 3476698 - RNA, 18 nt, Human
uaagggugggugcucaga

SEQ ID NO: 3476699 - RNA, 20 nt, Human
uaagggugggugcucagaau

SEQ ID NO: 3476700 - RNA, 15 nt, Human
uaaggguuaagaaaa

SEQ ID NO: 3476701 - RNA, 22 nt, Human
uaaggguuucccccaacauaua

SEQ ID NO: 3476702 - RNA, 22 nt, Human
uaagguauaucauucuaaagau

SEQ ID NO: 3476703 - RNA, 17 nt, Human
uaaggucagcucagagc

SEQ ID NO: 3476704 - RNA, 18 nt, Human
uaagguccgguguucuaa

SEQ ID NO: 3476705 - RNA, 22 nt, Human
uaaggucuguuugcuguugcug

SEQ ID NO: 3476706 - RNA, 18 nt, Human
uaaggucuuucaguacuu

SEQ ID NO: 3476707 - RNA, 21 nt, Human
uaaggucuuucaguacuuuuu

SEQ ID NO: 3476708 - RNA, 19 nt, Human
uaagguguagccacaccag

SEQ ID NO: 3476709 - RNA, 21 nt, Human
uaagguguagccacaccagga

SEQ ID NO: 3476710 - RNA, 17 nt, Human
uaagguguuugaaaaua

SEQ ID NO: 3476711 - RNA, 21 nt, Human
uaagguguuugaaaauaguuu

SEQ ID NO: 3476712 - RNA, 16 nt, Human
uaagguguuuucugug

SEQ ID NO: 3476713 - RNA, 20 nt, Human
uaagguguuuucuguguaac

SEQ ID NO: 3476714 - RNA, 18 nt, Human
uaagguuaccuuuguucc

SEQ ID NO: 3476715 - RNA, 13 nt, Human
uaaguaaaaccac

SEQ ID NO: 3476716 - RNA, 15 nt, Human
uaaguaaaaccacag

SEQ ID NO: 3476717 - RNA, 17 nt, Human
uaaguaaaaccacagca

SEQ ID NO: 3476718 - RNA, 12 nt, Human
uaaguaaacuaa

SEQ ID NO: 3476719 - RNA, 16 nt, Human
uaaguaaaugucugug

SEQ ID NO: 3476720 - RNA, 15 nt, Human
uaaguaagaaaauau

SEQ ID NO: 3476721 - RNA, 15 nt, Human
uaaguaaucaucuaa

SEQ ID NO: 3476722 - RNA, 11 nt, Human
uaaguacagag

SEQ ID NO: 3476723 - RNA, 14 nt, Human
uaaguacagagaag

SEQ ID NO: 3476724 - RNA, 17 nt, Human
uaaguacagagaagcca

SEQ ID NO: 3476725 - RNA, 17 nt, Human
uaaguacuguaauaaua

SEQ ID NO: 3476726 - RNA, 19 nt, Human
uaaguacuguaauaauacc

SEQ ID NO: 3476727 - RNA, 23 nt, Human
uaaguacuguaauaauaccucaa

SEQ ID NO: 3476728 - RNA, 15 nt, Human
uaaguagauuucaug

SEQ ID NO: 3476729 - RNA, 17 nt, Human
uaaguauaucauguaaa

SEQ ID NO: 3476730 - RNA, 19 nt, Human
uaaguaucaaguauagaaa

SEQ ID NO: 3476731 - RNA, 14 nt, Human
uaaguaucagaaag

SEQ ID NO: 3476732 - RNA, 15 nt, Human
uaaguaucugacauc

SEQ ID NO: 3476733 - RNA, 14 nt, Human
uaaguauguuauuu

SEQ ID NO: 3476734 - RNA, 16 nt, Human
uaaguauuaaaacauu

SEQ ID NO: 3476735 - RNA, 16 nt, Human
uaaguauucuaaauuu

SEQ ID NO: 3476736 - RNA, 11 nt, Human
uaaguauugca

SEQ ID NO: 3476737 - RNA, 17 nt, Human
uaaguauugcaucugua

SEQ ID NO: 3476738 - RNA, 14 nt, Human
uaaguauuuauaua

SEQ ID NO: 3476739 - RNA, 15 nt, Human
uaaguauuuauauau

SEQ ID NO: 3476740 - RNA, 17 nt, Human
uaaguauuuauauauuu

SEQ ID NO: 3476741 - RNA, 19 nt, Human
uaaguauuucagaugcuuu

SEQ ID NO: 3476742 - RNA, 14 nt, Human
uaaguauuucccag

SEQ ID NO: 3476743 - RNA, 21 nt, Human
uaaguauuuuccuguugucaa

SEQ ID NO: 3476744 - RNA, 16 nt, Human
uaagucaacaguaaac

SEQ ID NO: 3476745 - RNA, 17 nt, Human
uaagucaacaguaaacc

SEQ ID NO: 3476746 - RNA, 14 nt, Human
uaagucaguguuga

SEQ ID NO: 3476747 - RNA, 21 nt, Human
uaagucauguuccuucaagau

SEQ ID NO: 3476748 - RNA, 22 nt, Human
uaagucauguuccuucaagauc

SEQ ID NO: 3476749 - RNA, 17 nt, Human
uaagucccugcccccuc

SEQ ID NO: 3476750 - RNA, 15 nt, Human
uaagucccugucacc

SEQ ID NO: 3476751 - RNA, 23 nt, Human
uaaguccuacuuuacauaugcuu

SEQ ID NO: 3476752 - RNA, 12 nt, Human
uaagucucugug

SEQ ID NO: 3476753 - RNA, 14 nt, Human
uaagucugauuuaa

SEQ ID NO: 3476754 - RNA, 21 nt, Human
uaagucuguuuuaugacuuca

SEQ ID NO: 3476755 - RNA, 20 nt, Human
uaagucuuacauaaaccauu

SEQ ID NO: 3476756 - RNA, 20 nt, Human
uaagucuuaucaagcagcca

SEQ ID NO: 3476757 - RNA, 22 nt, Human
uaagucuuaucaagcagccaag

SEQ ID NO: 3476758 - RNA, 20 nt, Human
uaagucuugccuauauuuuc

SEQ ID NO: 3476759 - RNA, 15 nt, Human
uaagugaaaaacaug

SEQ ID NO: 3476760 - RNA, 15 nt, Human
uaagugaaaauauag

SEQ ID NO: 3476761 - RNA, 15 nt, Human
uaagugacauuugua

SEQ ID NO: 3476762 - RNA, 12 nt, Human
uaagugagagag

SEQ ID NO: 3476763 - RNA, 21 nt, Human
uaagugaggaaaucaaagugc

SEQ ID NO: 3476764 - RNA, 15 nt, Human
uaagugagugugcug

SEQ ID NO: 3476765 - RNA, 22 nt, Human
uaagugauugcugguuuuaguu

SEQ ID NO: 3476766 - RNA, 16 nt, Human
uaagugauuguaugaa

SEQ ID NO: 3476767 - RNA, 22 nt, Human
uaagugcacaacauuacaggga

SEQ ID NO: 3476768 - RNA, 15 nt, Human
uaagugcacacagaa

SEQ ID NO: 3476769 - RNA, 18 nt, Human
uaagugcacacagaaaua

SEQ ID NO: 3476770 - RNA, 15 nt, Human
uaagugcagccccgu

SEQ ID NO: 3476771 - RNA, 19 nt, Human
uaagugccucacauuuuuu

SEQ ID NO: 3476772 - RNA, 16 nt, Human
uaagugccuuccaugu

SEQ ID NO: 3476773 - RNA, 16 nt, Human
uaagugcguguguaga

SEQ ID NO: 3476774 - RNA, 17 nt, Human
uaagugcguguguagag

SEQ ID NO: 3476775 - RNA, 19 nt, Human
uaagugcuacauaaauugg

SEQ ID NO: 3476776 - RNA, 16 nt, Human
uaagugcugcauuuaa

SEQ ID NO: 3476777 - RNA, 13 nt, Human
uaagugcuuugua

SEQ ID NO: 3476778 - RNA, 16 nt, Human
uaaguggaggcacuuu

SEQ ID NO: 3476779 - RNA, 19 nt, Human
uaaguggaggcacuuuagg

SEQ ID NO: 3476780 - RNA, 13 nt, Human
uaaguggcugcug

SEQ ID NO: 3476781 - RNA, 19 nt, Human
uaaguggggcaaaaccuug

SEQ ID NO: 3476782 - RNA, 18 nt, Human
uaagugguuuuaauaaaa

SEQ ID NO: 3476783 - RNA, 18 nt, Human
uaaguguacauaugugcu

SEQ ID NO: 3476784 - RNA, 15 nt, Human
uaaguguacuaauua

SEQ ID NO: 3476785 - RNA, 14 nt, Human
uaaguguauuuuga

SEQ ID NO: 3476786 - RNA, 18 nt, Human
uaaguguauuuuucaaua

SEQ ID NO: 3476787 - RNA, 14 nt, Human
uaagugugaacugg

SEQ ID NO: 3476788 - RNA, 15 nt, Human
uaagugugaacugga

SEQ ID NO: 3476789 - RNA, 22 nt, Human
uaagugugaacuggacccuguu

SEQ ID NO: 3476790 - RNA, 19 nt, Human
uaagugugaguaagagcug

SEQ ID NO: 3476791 - RNA, 21 nt, Human
uaagugugaguaagagcuggu

SEQ ID NO: 3476792 - RNA, 14 nt, Human
uaagugugugugug

SEQ ID NO: 3476793 - RNA, 17 nt, Human
uaaguguuggaaaaaau

SEQ ID NO: 3476794 - RNA, 16 nt, Human
uaaguuaauaagcaaa

SEQ ID NO: 3476795 - RNA, 20 nt, Human
uaaguuaauguauauaaaaa

SEQ ID NO: 3476796 - RNA, 14 nt, Human
uaauaucauucacu

SEQ ID NO: 3476797 - RNA, 14 nt, Human
uaauauccuaaaca

SEQ ID NO: 3476798 - RNA, 19 nt, Human
uaauaucuuugugauaauu

SEQ ID NO: 3476799 - RNA, 20 nt, Human
uaauaucuuugugauaauuu

SEQ ID NO: 3476800 - RNA, 21 nt, Human
uaauaucuuugugauaauuua

SEQ ID NO: 3476801 - RNA, 14 nt, Human
uaauaugaaaacuu

SEQ ID NO: 3476802 - RNA, 15 nt, Human
uaauaugaaaacuua

SEQ ID NO: 3476803 - RNA, 13 nt, Human
uaauaugaaguau

SEQ ID NO: 3476804 - RNA, 15 nt, Human
uaauaugcacacauu

SEQ ID NO: 3476805 - RNA, 17 nt, Human
uaauaugcacacauuuu

SEQ ID NO: 3476806 - RNA, 21 nt, Human
uaauaugcugcaacaaaaugu

SEQ ID NO: 3476807 - RNA, 16 nt, Human
uaauaugcugccaaau

SEQ ID NO: 3476808 - RNA, 18 nt, Human
uaauaugcugccaaauuu

SEQ ID NO: 3476809 - RNA, 15 nt, Human
uaauauggaucugua

SEQ ID NO: 3476810 - RNA, 18 nt, Human
uaauauggcuaugcuuaa

SEQ ID NO: 3476811 - RNA, 15 nt, Human
uaauaugggcauugu

SEQ ID NO: 3476812 - RNA, 19 nt, Human
uaauaugggcauuguaguu

SEQ ID NO: 3476813 - RNA, 20 nt, Human
uaauaugggcauuguaguua

SEQ ID NO: 3476814 - RNA, 16 nt, Human
uaauauggggaugcag

SEQ ID NO: 3476815 - RNA, 20 nt, Human
uaauauguuaaccucagugu

SEQ ID NO: 3476816 - RNA, 21 nt, Human
uaauauguuaaccucaguguc

SEQ ID NO: 3476817 - RNA, 18 nt, Human
uaauauguuuccuucccu

SEQ ID NO: 3476818 - RNA, 18 nt, Human
uaauauuaaaaauaugga

SEQ ID NO: 3476819 - RNA, 22 nt, Human
uaauauuaaaaauauggaacuu

SEQ ID NO: 3476820 - RNA, 13 nt, Human
uaauauuaaagcc

SEQ ID NO: 3476821 - RNA, 20 nt, Human
uaauauuaaagccauguuua

SEQ ID NO: 3476822 - RNA, 11 nt, Human
uaauauuauua

SEQ ID NO: 3476823 - RNA, 23 nt, Human
uaauauuauuacuguugauaauu

SEQ ID NO: 3476824 - RNA, 20 nt, Human
uaauauucaggguaaauagg

SEQ ID NO: 3476825 - RNA, 16 nt, Human
uaauauuccucaguuc

SEQ ID NO: 3476826 - RNA, 21 nt, Human
uaauauugauaugcuuauaca

SEQ ID NO: 3476827 - RNA, 20 nt, Human
uaauauuguuugguaaaugu

SEQ ID NO: 3476828 - RNA, 21 nt, Human
uaauauuguuugguaaauguu

SEQ ID NO: 3476829 - RNA, 19 nt, Human
uaauauuguuuuucuuucu

SEQ ID NO: 3476830 - RNA, 13 nt, Human
uaauauuuacaau

SEQ ID NO: 3476831 - RNA, 16 nt, Human
uaauauuuacaaugua

SEQ ID NO: 3476832 - RNA, 21 nt, Human
uaauauuuaugucuauuuaag

SEQ ID NO: 3476833 - RNA, 23 nt, Human
uaauauuuaugucuauuuaagcc

SEQ ID NO: 3476834 - RNA, 14 nt, Human
uaauauuuauugcu

SEQ ID NO: 3476835 - RNA, 17 nt, Human
uaauauuuauugcuuua

SEQ ID NO: 3476836 - RNA, 20 nt, Human
uaauauuuuccuccugagug

SEQ ID NO: 3476837 - RNA, 22 nt, Human
uaauauuuuccuccugagugcu

SEQ ID NO: 3476838 - RNA, 16 nt, Human
uaauauuuuguauuau

SEQ ID NO: 3476839 - RNA, 20 nt, Human
uaauauuuuguauuauugcu

SEQ ID NO: 3476840 - RNA, 15 nt, Human
uaauauuuuuaauua

SEQ ID NO: 3476841 - RNA, 17 nt, Human
uaaucaaaagcuauuua

SEQ ID NO: 3476842 - RNA, 23 nt, Human
uaaucaaauuuguaggguuucua

SEQ ID NO: 3476843 - RNA, 22 nt, Human
uaaucaacauggcuacuugcuu

SEQ ID NO: 3476844 - RNA, 17 nt, Human
uaaucaacugaaagugu

SEQ ID NO: 3476845 - RNA, 21 nt, Human
uaaucaacugggcugaacacu

SEQ ID NO: 3476846 - RNA, 21 nt, Human
uaaucaaguuguaacuuauau

SEQ ID NO: 3476847 - RNA, 14 nt, Human
uaaucaauaaagaa

SEQ ID NO: 3476848 - RNA, 20 nt, Human
uaaucaaugaauauugaagu

SEQ ID NO: 3476849 - RNA, 22 nt, Human
uaaucaauuaauuuuuuuauug

SEQ ID NO: 3476850 - RNA, 21 nt, Human
uaaucacccuaccaacuuuac

SEQ ID NO: 3476851 - RNA, 20 nt, Human
uaaucacucuaauuaauugu

SEQ ID NO: 3476852 - RNA, 10 nt, Human
uaaucacugu

SEQ ID NO: 3476853 - RNA, 22 nt, Human
uaaucacuguguauauuugauu

SEQ ID NO: 3476854 - RNA, 18 nt, Human
uaaucacuuuuuuccaca

SEQ ID NO: 3476855 - RNA, 15 nt, Human
uaaucagaaauuuuu

SEQ ID NO: 3476856 - RNA, 20 nt, Human
uaaucagcaagaauuugauc

SEQ ID NO: 3476857 - RNA, 11 nt, Human
uaaucagccuc

SEQ ID NO: 3476858 - RNA, 13 nt, Human
uaaucagccucuu

SEQ ID NO: 3476859 - RNA, 14 nt, Human
uaaucagccucuua

SEQ ID NO: 3476860 - RNA, 15 nt, Human
uaaucagccucuuaa

SEQ ID NO: 3476861 - RNA, 19 nt, Human
uaaucagguccucagagaa

SEQ ID NO: 3476862 - RNA, 22 nt, Human
uaaucagguccucagagaauuu

SEQ ID NO: 3476863 - RNA, 22 nt, Human
uaaucaguguagccccaagaag

SEQ ID NO: 3476864 - RNA, 11 nt, Human
uaaucaguguc

SEQ ID NO: 3476865 - RNA, 17 nt, Human
uaaucauaguuacugug

SEQ ID NO: 3476866 - RNA, 23 nt, Human
uaaucauaguuacuguguaaacu

SEQ ID NO: 3476867 - RNA, 12 nt, Human
uaaucauauaaa

SEQ ID NO: 3476868 - RNA, 12 nt, Human
uaaucauauuag

SEQ ID NO: 3476869 - RNA, 14 nt, Human
uaaucauauuagac

SEQ ID NO: 3476870 - RNA, 16 nt, Human
uaaucaugaaauuacu

SEQ ID NO: 3476871 - RNA, 16 nt, Human
uaaucaugaaugugua

SEQ ID NO: 3476872 - RNA, 22 nt, Human
uaaucauuucuugggcccuccu

SEQ ID NO: 3476873 - RNA, 12 nt, Human
uaaucauuuuca

SEQ ID NO: 3476874 - RNA, 17 nt, Human
uaaucauuuucauuccu

SEQ ID NO: 3476875 - RNA, 12 nt, Human
uaaucauuuuuu

SEQ ID NO: 3476876 - RNA, 17 nt, Human
uaauccaggcagaucca

SEQ ID NO: 3476877 - RNA, 23 nt, Human
uaaucccagcacuuugggaggcc

SEQ ID NO: 3476878 - RNA, 14 nt, Human
uaaucccccaggag

SEQ ID NO: 3476879 - RNA, 18 nt, Human
uaauccccuucuccccug

SEQ ID NO: 3476880 - RNA, 17 nt, Human
uaaucccgauucacccu

SEQ ID NO: 3476881 - RNA, 14 nt, Human
uaaucccugcuuuu

SEQ ID NO: 3476882 - RNA, 17 nt, Human
uaaucccugcuuuuugu

SEQ ID NO: 3476883 - RNA, 21 nt, Human
uaaucccugcuuuuuguguuu

SEQ ID NO: 3476884 - RNA, 22 nt, Human
uaaucccugggcauugcuuucc

SEQ ID NO: 3476885 - RNA, 23 nt, Human
uaauccucucaaccaccuuucag

SEQ ID NO: 3476886 - RNA, 20 nt, Human
uaauccuucuaguuucccac

SEQ ID NO: 3476887 - RNA, 16 nt, Human
uaauccuugauaauau

SEQ ID NO: 3476888 - RNA, 20 nt, Human
uaauccuuucugccgacccc

SEQ ID NO: 3476889 - RNA, 18 nt, Human
uaauccuuuguuuucuga

SEQ ID NO: 3476890 - RNA, 22 nt, Human
uaauccuuuguuuucugacuaa

SEQ ID NO: 3476891 - RNA, 14 nt, Human
uaaucgaccugccu

SEQ ID NO: 3476892 - RNA, 16 nt, Human
uaaucggcccacagcu

SEQ ID NO: 3476893 - RNA, 22 nt, Human
uaaucggcccacagcucccacc

SEQ ID NO: 3476894 - RNA, 12 nt, Human
uaaucuaaaugg

SEQ ID NO: 3476895 - RNA, 13 nt, Human
uaaucuaaaugga

SEQ ID NO: 3476896 - RNA, 17 nt, Human
uaaucuaauucuaagga

SEQ ID NO: 3476897 - RNA, 14 nt, Human
uaaucuacugcauu

SEQ ID NO: 3476898 - RNA, 14 nt, Human
uaaucuagacaaua

SEQ ID NO: 3476899 - RNA, 15 nt, Human
uaaucuaguuuacag

SEQ ID NO: 3476900 - RNA, 19 nt, Human
uaaucuauuggguucauua

SEQ ID NO: 3476901 - RNA, 20 nt, Human
uaaucucauaccucugacca

SEQ ID NO: 3476902 - RNA, 13 nt, Human
uaaucuccacagu

SEQ ID NO: 3476903 - RNA, 16 nt, Human
uaaucucguuucaaaa

SEQ ID NO: 3476904 - RNA, 17 nt, Human
uaaucucguuucaaaaa

SEQ ID NO: 3476905 - RNA, 19 nt, Human
uaaucucguuucaaaaaca

SEQ ID NO: 3476906 - RNA, 17 nt, Human
uaaucucuaggaaguca

SEQ ID NO: 3476907 - RNA, 21 nt, Human
uaaucucuguuauguacugua

SEQ ID NO: 3476908 - RNA, 14 nt, Human
uaaucucuucuuau

SEQ ID NO: 3476909 - RNA, 15 nt, Human
uaaucucuucuuaua

SEQ ID NO: 3476910 - RNA, 16 nt, Human
uaaucugaaauucuaa

SEQ ID NO: 3476911 - RNA, 20 nt, Human
uaaucugaauaaaguguaac

SEQ ID NO: 3476912 - RNA, 21 nt, Human
uaaucugaauaaaguguaaca

SEQ ID NO: 3476913 - RNA, 22 nt, Human
uaaucugaauaaaguguaacaa

SEQ ID NO: 3476914 - RNA, 20 nt, Human
uaaucugaucguucuuucua

SEQ ID NO: 3476915 - RNA, 21 nt, Human
uaaucugauggcuucuccagg

SEQ ID NO: 3476916 - RNA, 15 nt, Human
uaaucugccucccuc

SEQ ID NO: 3476917 - RNA, 18 nt, Human
uaaucugcuaugcuugaa

SEQ ID NO: 3476918 - RNA, 21 nt, Human
uaaucuggacuccucugucca

SEQ ID NO: 3476919 - RNA, 18 nt, Human
uaaucugggccagaauuu

SEQ ID NO: 3476920 - RNA, 23 nt, Human
uaaucugggccagaauuucaaac

SEQ ID NO: 3476921 - RNA, 18 nt, Human
uaaucuguacauuuuguu

SEQ ID NO: 3476922 - RNA, 23 nt, Human
uaaucuguacauuuuguuguaaa

SEQ ID NO: 3476923 - RNA, 19 nt, Human
uaaucugucaaaacacugu

SEQ ID NO: 3476924 - RNA, 13 nt, Human
uaaucuguuaugu

SEQ ID NO: 3476925 - RNA, 18 nt, Human
uaaucuguuuauuuacaa

SEQ ID NO: 3476926 - RNA, 16 nt, Human
uaaucuuaauguauau

SEQ ID NO: 3476927 - RNA, 19 nt, Human
uaaucuuaggggagagcuu

SEQ ID NO: 3476928 - RNA, 18 nt, Human
uaaucuuaucaagaguug

SEQ ID NO: 3476929 - RNA, 15 nt, Human
uaaucuucaauaguu

SEQ ID NO: 3476930 - RNA, 20 nt, Human
uaaucuucaguuuuaucuuu

SEQ ID NO: 3476931 - RNA, 15 nt, Human
uaaucuucugccuuc

SEQ ID NO: 3476932 - RNA, 19 nt, Human
uaaucuuguugauaaaaau

SEQ ID NO: 3476933 - RNA, 19 nt, Human
uaaucuuuaccuguauaca

SEQ ID NO: 3476934 - RNA, 19 nt, Human
uaaucuuucaaaccagcuu

SEQ ID NO: 3476935 - RNA, 22 nt, Human
uaaucuuuggguaacuucaaaa

SEQ ID NO: 3476936 - RNA, 15 nt, Human
uaaucuuuucacaaa

SEQ ID NO: 3476937 - RNA, 18 nt, Human
uaaucuuuucacaaauaa

SEQ ID NO: 3476938 - RNA, 19 nt, Human
uaaucuuuucacaaauaaa

SEQ ID NO: 3476939 - RNA, 21 nt, Human
uaaugaaaacagaaugucucu

SEQ ID NO: 3476940 - RNA, 17 nt, Human
uaauuaggcaaggcuau

SEQ ID NO: 3476941 - RNA, 21 nt, Human
uaauuaggcaaggcuauguga

SEQ ID NO: 3476942 - RNA, 22 nt, Human
uaauuaggcaaggcuaugugau

SEQ ID NO: 3476943 - RNA, 18 nt, Human
uaauuaggguacauuuau

SEQ ID NO: 3476944 - RNA, 19 nt, Human
uaauuaggguacauuuaua

SEQ ID NO: 3476945 - RNA, 20 nt, Human
uaauuaggguacauuuauaa

SEQ ID NO: 3476946 - RNA, 16 nt, Human
uaauuagguuaacuau

SEQ ID NO: 3476947 - RNA, 17 nt, Human
uaauuagguuaacuaug

SEQ ID NO: 3476948 - RNA, 21 nt, Human
uaauuagugccacuuaaugua

SEQ ID NO: 3476949 - RNA, 22 nt, Human
uaauuagugccacuuaauguau

SEQ ID NO: 3476950 - RNA, 23 nt, Human
uaauuaguuccucauuagcauuu

SEQ ID NO: 3476951 - RNA, 17 nt, Human
uaauuauaucugaggaa

SEQ ID NO: 3476952 - RNA, 22 nt, Human
uaauuauaucugaggaauucug

SEQ ID NO: 3476953 - RNA, 21 nt, Human
uaauuauaugcuauuucuaua

SEQ ID NO: 3476954 - RNA, 17 nt, Human
uaauuaucggaagcagu

SEQ ID NO: 3476955 - RNA, 18 nt, Human
uaauuaucggaagcagug

SEQ ID NO: 3476956 - RNA, 21 nt, Human
uaauuaucgggaacaguguuu

SEQ ID NO: 3476957 - RNA, 16 nt, Human
uaauuaucuaaaguau

SEQ ID NO: 3476958 - RNA, 20 nt, Human
uaauuauggagucauuuuua

SEQ ID NO: 3476959 - RNA, 22 nt, Human
uaauuauggagucauuuuuaca

SEQ ID NO: 3476960 - RNA, 14 nt, Human
uaauuauguagcuc

SEQ ID NO: 3476961 - RNA, 14 nt, Human
uaauuauguuauug

SEQ ID NO: 3476962 - RNA, 19 nt, Human
uaauuauguuauugaaaaa

SEQ ID NO: 3476963 - RNA, 20 nt, Human
uaauuauuaacuacauuuau

SEQ ID NO: 3476964 - RNA, 22 nt, Human
uaauuauuauucagaaaugacu

SEQ ID NO: 3476965 - RNA, 17 nt, Human
uaauuauuauuuccagu

SEQ ID NO: 3476966 - RNA, 14 nt, Human
uaauuauuauuugu

SEQ ID NO: 3476967 - RNA, 18 nt, Human
uaauuauugauguuuuca

SEQ ID NO: 3476968 - RNA, 21 nt, Human
uaauuauuuugguacuuuuau

SEQ ID NO: 3476969 - RNA, 12 nt, Human
uaauucaaagca

SEQ ID NO: 3476970 - RNA, 20 nt, Human
uaauucaaggaauuucuuaa

SEQ ID NO: 3476971 - RNA, 22 nt, Human
uaauucaaggaauuucuuaacu

SEQ ID NO: 3476972 - RNA, 14 nt, Human
uaauucacagugcu

SEQ ID NO: 3476973 - RNA, 22 nt, Human
uaauucacagugcucuuuucuc

SEQ ID NO: 3476974 - RNA, 18 nt, Human
uaauucaccaaaguauuu

SEQ ID NO: 3476975 - RNA, 21 nt, Human
uaauucacucaagcacugaua

SEQ ID NO: 3476976 - RNA, 20 nt, Human
uaauucacuguacuaucagg

SEQ ID NO: 3476977 - RNA, 19 nt, Human
uaauucagccauguacaga

SEQ ID NO: 3476978 - RNA, 22 nt, Human
uaauucaggggcugacacuuca

SEQ ID NO: 3476979 - RNA, 18 nt, Human
uaauucaguauguuuuac

SEQ ID NO: 3476980 - RNA, 22 nt, Human
uaauucaguauguuuuacacug

SEQ ID NO: 3476981 - RNA, 19 nt, Human
uaauucaucccaacugucu

SEQ ID NO: 3476982 - RNA, 15 nt, Human
uaauucauguuucuu

SEQ ID NO: 3476983 - RNA, 15 nt, Human
uaauuccacaccuuu

SEQ ID NO: 3476984 - RNA, 17 nt, Human
uaauuccacaccuuuua

SEQ ID NO: 3476985 - RNA, 13 nt, Human
uaauuccacagcu

SEQ ID NO: 3476986 - RNA, 16 nt, Human
uaauuccauaugcugu

SEQ ID NO: 3476987 - RNA, 17 nt, Human
uaauucccauuuugcaa

SEQ ID NO: 3476988 - RNA, 20 nt, Human
uaauucccauuuugcaaaau

SEQ ID NO: 3476989 - RNA, 20 nt, Human
uaauucccuaucuuuuaguu

SEQ ID NO: 3476990 - RNA, 21 nt, Human
uaauuccuucagcacuuuaga

SEQ ID NO: 3476991 - RNA, 11 nt, Human
uaauucuaaag

SEQ ID NO: 3476992 - RNA, 15 nt, Human
uaauucuaugagaua

SEQ ID NO: 3476993 - RNA, 15 nt, Human
uaauucuaugccugu

SEQ ID NO: 3476994 - RNA, 15 nt, Human
uaauucucaggccau

SEQ ID NO: 3476995 - RNA, 14 nt, Human
uaauucucauuaaa

SEQ ID NO: 3476996 - RNA, 18 nt, Human
uaauucucauuaaaagaa

SEQ ID NO: 3476997 - RNA, 16 nt, Human
uaauucugaaguuaua

SEQ ID NO: 3476998 - RNA, 13 nt, Human
uaauucuguaaau

SEQ ID NO: 3476999 - RNA, 17 nt, Human
uaauucuguacugauuu

SEQ ID NO: 3477000 - RNA, 15 nt, Human
uaauucuguucugau

SEQ ID NO: 3477001 - RNA, 22 nt, Human
uaauucuguucugauauuaauu

SEQ ID NO: 3477002 - RNA, 14 nt, Human
uaauucuuauucca

SEQ ID NO: 3477003 - RNA, 15 nt, Human
uaauucuuauuccau

SEQ ID NO: 3477004 - RNA, 17 nt, Human
uaauucuuauuccauau

SEQ ID NO: 3477005 - RNA, 20 nt, Human
uaauucuucaccuuaggaau

SEQ ID NO: 3477006 - RNA, 23 nt, Human
uaauucuucagcguaaaauggug

SEQ ID NO: 3477007 - RNA, 16 nt, Human
uaauucuuguauauua

SEQ ID NO: 3477008 - RNA, 14 nt, Human
uaauucuuuaauga

SEQ ID NO: 3477009 - RNA, 18 nt, Human
uaauucuuucaauacaga

SEQ ID NO: 3477010 - RNA, 20 nt, Human
uaauucuuucaauacagaua

SEQ ID NO: 3477011 - RNA, 12 nt, Human
uaauucuuugau

SEQ ID NO: 3477012 - RNA, 15 nt, Human
uaauucuuuuuuauu

SEQ ID NO: 3477013 - RNA, 15 nt, Human
uaauugaaagaaugu

SEQ ID NO: 3477014 - RNA, 17 nt, Human
uaauugaaagaauguaa

SEQ ID NO: 3477015 - RNA, 22 nt, Human
uaauugaaguguauaauauaaa

SEQ ID NO: 3477016 - RNA, 23 nt, Human
uaauugacgguuuuuuauuauug

SEQ ID NO: 3477017 - RNA, 16 nt, Human
uaauugagaagaaaaa

SEQ ID NO: 3477018 - RNA, 20 nt, Human
uaauugagaagaaaaacuca

SEQ ID NO: 3477019 - RNA, 18 nt, Human
uaauugaucaaauucauu

SEQ ID NO: 3477020 - RNA, 19 nt, Human
uaauugaucaaauucauuu

SEQ ID NO: 3477021 - RNA, 22 nt, Human
uaauugaugcaaauaacacaaa

SEQ ID NO: 3477022 - RNA, 17 nt, Human
uaauugcauugacuuuc

SEQ ID NO: 3477023 - RNA, 23 nt, Human
uaauugccaccucuaacagcacc

SEQ ID NO: 3477024 - RNA, 23 nt, Human
uaauugccacugagagaucugcu

SEQ ID NO: 3477025 - RNA, 12 nt, Human
uaauugccaugu

SEQ ID NO: 3477026 - RNA, 14 nt, Human
uaauugcuguugaa

SEQ ID NO: 3477027 - RNA, 15 nt, Human
uaauugcuuacauuu

SEQ ID NO: 3477028 - RNA, 21 nt, Human
uaauugcuuacauuuuuacaa

SEQ ID NO: 3477029 - RNA, 23 nt, Human
uaauugcuuacauuuuuacaaua

SEQ ID NO: 3477030 - RNA, 12 nt, Human
uaauuggcagca

SEQ ID NO: 3477031 - RNA, 22 nt, Human
uaauuguaaaguaaaagcuaua

SEQ ID NO: 3477032 - RNA, 15 nt, Human
uaauuguacaaaauu

SEQ ID NO: 3477033 - RNA, 22 nt, Human
uaauuguacaaaauuaagcaaa

SEQ ID NO: 3477034 - RNA, 18 nt, Human
uaauuguacuaaagccaa

SEQ ID NO: 3477035 - RNA, 23 nt, Human
uaauuguacuaaagccaaacaua

SEQ ID NO: 3477036 - RNA, 12 nt, Human
uaauuguauuuu

SEQ ID NO: 3477037 - RNA, 12 nt, Human
uaauugucaugg

SEQ ID NO: 3477038 - RNA, 14 nt, Human
uaauugugaauuga

SEQ ID NO: 3477039 - RNA, 19 nt, Human
uaauugugugauauuucag

SEQ ID NO: 3477040 - RNA, 22 nt, Human
uaauugugugauauuucagaaa

SEQ ID NO: 3477041 - RNA, 14 nt, Human
uaauuguguggauu

SEQ ID NO: 3477042 - RNA, 22 nt, Human
uaauuguguuuacauuuuaugg

SEQ ID NO: 3477043 - RNA, 22 nt, Human
uaauuguucauuuugagcugaa

SEQ ID NO: 3477044 - RNA, 12 nt, Human
uaauuguuccag

SEQ ID NO: 3477045 - RNA, 22 nt, Human
uaauuguuguuuguauguauaa

SEQ ID NO: 3477046 - RNA, 15 nt, Human
uaauuguuucagaau

SEQ ID NO: 3477047 - RNA, 16 nt, Human
uaauuguuuugcacuu

SEQ ID NO: 3477048 - RNA, 16 nt, Human
uaauuuaaaauuguga

SEQ ID NO: 3477049 - RNA, 20 nt, Human
uaauuuaaaauugugaugug

SEQ ID NO: 3477050 - RNA, 20 nt, Human
uaauuuaaacaggcccagca

SEQ ID NO: 3477051 - RNA, 12 nt, Human
uaauuuaaagcc

SEQ ID NO: 3477052 - RNA, 18 nt, Human
uaauuuaaaugauuuaaa

SEQ ID NO: 3477053 - RNA, 21 nt, Human
uaauuuaagagcuaaccaguu

SEQ ID NO: 3477054 - RNA, 18 nt, Human
uaauuuaaggucuguuug

SEQ ID NO: 3477055 - RNA, 14 nt, Human
uaauuuaaguuuug

SEQ ID NO: 3477056 - RNA, 14 nt, Human
uaauuuaaugcaug

SEQ ID NO: 3477057 - RNA, 21 nt, Human
uaauuuacaaaaauauaaaau

SEQ ID NO: 3477058 - RNA, 22 nt, Human
uaauuuacaaaaauauaaaaua

SEQ ID NO: 3477059 - RNA, 18 nt, Human
uaauuuaccugaagucuu

SEQ ID NO: 3477060 - RNA, 14 nt, Human
uaauuuagaaaacu

SEQ ID NO: 3477061 - RNA, 18 nt, Human
uaauuuaggguacuaaau

SEQ ID NO: 3477062 - RNA, 23 nt, Human
uaauuuaggguacuaaauuuaaa

SEQ ID NO: 3477063 - RNA, 20 nt, Human
uaauuuaguaaauguuaucu

SEQ ID NO: 3477064 - RNA, 16 nt, Human
uaauuuagugaucuua

SEQ ID NO: 3477065 - RNA, 15 nt, Human
uaauuuaguuauuga

SEQ ID NO: 3477066 - RNA, 16 nt, Human
uaauuuaguuauugau

SEQ ID NO: 3477067 - RNA, 17 nt, Human
uaauuuauacaggucau

SEQ ID NO: 3477068 - RNA, 15 nt, Human
uaauuuaucagauug

SEQ ID NO: 3477069 - RNA, 15 nt, Human
uaauuuaucuaaauu

SEQ ID NO: 3477070 - RNA, 21 nt, Human
uaauuuaucuaaauuaaagcc

SEQ ID NO: 3477071 - RNA, 22 nt, Human
uaauuuaugcacuuauaaggug

SEQ ID NO: 3477072 - RNA, 14 nt, Human
uaauuuaugcagaa

SEQ ID NO: 3477073 - RNA, 14 nt, Human
uaauuuaugugaaa

SEQ ID NO: 3477074 - RNA, 18 nt, Human
uaauuuauuaauugcuuu

SEQ ID NO: 3477075 - RNA, 20 nt, Human
uaauuuauuguuuuuccuug

SEQ ID NO: 3477076 - RNA, 20 nt, Human
uaauuuauuuaauauuuaau

SEQ ID NO: 3477077 - RNA, 14 nt, Human
uaauuuauuuuguc

SEQ ID NO: 3477078 - RNA, 18 nt, Human
uaauuuauuuuugcaugg

SEQ ID NO: 3477079 - RNA, 12 nt, Human
uaauuucaaaau

SEQ ID NO: 3477080 - RNA, 19 nt, Human
uaauuucaagcuuauuuug

SEQ ID NO: 3477081 - RNA, 21 nt, Human
uaauuucagcuucuauauauu

SEQ ID NO: 3477082 - RNA, 21 nt, Human
uaauuucaggaggaauacuga

SEQ ID NO: 3477083 - RNA, 22 nt, Human
uacaacauaaucuaguuuacag

SEQ ID NO: 3477084 - RNA, 14 nt, Human
uacaaccaagcucu

SEQ ID NO: 3477085 - RNA, 17 nt, Human
uacaaccaagcucucug

SEQ ID NO: 3477086 - RNA, 19 nt, Human
uacaaccaagcucucugca

SEQ ID NO: 3477087 - RNA, 16 nt, Human
uacaaccaauggaaug

SEQ ID NO: 3477088 - RNA, 15 nt, Human
uacaaccucccucuu

SEQ ID NO: 3477089 - RNA, 16 nt, Human
uacaaccucccucuug

SEQ ID NO: 3477090 - RNA, 20 nt, Human
uacaacuaacgcaaccaagu

SEQ ID NO: 3477091 - RNA, 17 nt, Human
uacaacucauacacucg

SEQ ID NO: 3477092 - RNA, 17 nt, Human
uacaacucauuccagau

SEQ ID NO: 3477093 - RNA, 18 nt, Human
uacaacucauuccagauc

SEQ ID NO: 3477094 - RNA, 20 nt, Human
uacaacugaguccuuaaaca

SEQ ID NO: 3477095 - RNA, 17 nt, Human
uacaagacaacauugua

SEQ ID NO: 3477096 - RNA, 16 nt, Human
uacaagacugccauau

SEQ ID NO: 3477097 - RNA, 20 nt, Human
uacaagacugccauauuaaa

SEQ ID NO: 3477098 - RNA, 16 nt, Human
uacaagagcagccugu

SEQ ID NO: 3477099 - RNA, 19 nt, Human
uacaagagcuuaacagugu

SEQ ID NO: 3477100 - RNA, 24 nt, Human
uacaagaugaaggagaggcaacau

SEQ ID NO: 3477101 - RNA, 21 nt, Human
uacaagcauucugucuugaag

SEQ ID NO: 3477102 - RNA, 18 nt, Human
uacaagccagcuggagaa

SEQ ID NO: 3477103 - RNA, 15 nt, Human
uacaagcccccccuu

SEQ ID NO: 3477104 - RNA, 19 nt, Human
uacaagcccccccuuccac

SEQ ID NO: 3477105 - RNA, 21 nt, Human
uacaagcgugagccacugcac

SEQ ID NO: 3477106 - RNA, 17 nt, Human
uacaaggaagguggugg

SEQ ID NO: 3477107 - RNA, 14 nt, Human
uacaaggacagccc

SEQ ID NO: 3477108 - RNA, 14 nt, Human
uacaaggcaacaua

SEQ ID NO: 3477109 - RNA, 18 nt, Human
uacaagggcauaaaguaa

SEQ ID NO: 3477110 - RNA, 19 nt, Human
uacaagggcauaaaguaaa

SEQ ID NO: 3477111 - RNA, 19 nt, Human
uacaaggggccauuuggca

SEQ ID NO: 3477112 - RNA, 18 nt, Human
uacaagggucuagggaga

SEQ ID NO: 3477113 - RNA, 16 nt, Human
uacaagguauaauaaa

SEQ ID NO: 3477114 - RNA, 19 nt, Human
uacaagguauaauaaaauu

SEQ ID NO: 3477115 - RNA, 20 nt, Human
uacaaguagggguugugggu

SEQ ID NO: 3477116 - RNA, 17 nt, Human
uacaaguaguucuguau

SEQ ID NO: 3477117 - RNA, 18 nt, Human
uacaaguaguucuguauu

SEQ ID NO: 3477118 - RNA, 21 nt, Human
uacaaguaguucuguauuuga

SEQ ID NO: 3477119 - RNA, 22 nt, Human
uacaaguaguucuguauuugaa

SEQ ID NO: 3477120 - RNA, 23 nt, Human
uacaaguaguucuguauuugaaa

SEQ ID NO: 3477121 - RNA, 18 nt, Human
uacaagucagcuccagcu

SEQ ID NO: 3477122 - RNA, 21 nt, Human
uacaaguguauaucagaaaag

SEQ ID NO: 3477123 - RNA, 15 nt, Human
uacaaguuagaaaac

SEQ ID NO: 3477124 - RNA, 11 nt, Human
uacaauaaacu

SEQ ID NO: 3477125 - RNA, 19 nt, Human
uacaauaaacuauuggaaa

SEQ ID NO: 3477126 - RNA, 15 nt, Human
uacaauaaauaaucu

SEQ ID NO: 3477127 - RNA, 16 nt, Human
uacaauaaauugcuaa

SEQ ID NO: 3477128 - RNA, 14 nt, Human
uacaauauauaaaa

SEQ ID NO: 3477129 - RNA, 17 nt, Human
uacaauauauaaaaaua

SEQ ID NO: 3477130 - RNA, 21 nt, Human
uacaauauguacauuucuaag

SEQ ID NO: 3477131 - RNA, 15 nt, Human
uacaauauugauugg

SEQ ID NO: 3477132 - RNA, 20 nt, Human
uacaauauuuuaagcauuac

SEQ ID NO: 3477133 - RNA, 20 nt, Human
uacaaucaaaggaaaauagu

SEQ ID NO: 3477134 - RNA, 13 nt, Human
uacaaucagcugc

SEQ ID NO: 3477135 - RNA, 15 nt, Human
uacaaucagcugcuu

SEQ ID NO: 3477136 - RNA, 17 nt, Human
uacaaucauugcugaaa

SEQ ID NO: 3477137 - RNA, 13 nt, Human
uacaaucuauuua

SEQ ID NO: 3477138 - RNA, 17 nt, Human
uacaaucuauuuauugg

SEQ ID NO: 3477139 - RNA, 21 nt, Human
uacaaugaacacuuauaagug

SEQ ID NO: 3477140 - RNA, 21 nt, Human
uacaaugaacccccaugaugu

SEQ ID NO: 3477141 - RNA, 14 nt, Human
uacaaugacuuuau

SEQ ID NO: 3477142 - RNA, 13 nt, Human
uacaaugcugugc

SEQ ID NO: 3477143 - RNA, 21 nt, Human
uacaaugcugugcccuaaagu

SEQ ID NO: 3477144 - RNA, 14 nt, Human
uacaauggaaacaa

SEQ ID NO: 3477145 - RNA, 13 nt, Human
uacaauguagaug

SEQ ID NO: 3477146 - RNA, 13 nt, Human
uacaauguauuaa

SEQ ID NO: 3477147 - RNA, 20 nt, Human
uacaauguauuuauuuaaaa

SEQ ID NO: 3477148 - RNA, 17 nt, Human
uacaaugucauauacug

SEQ ID NO: 3477149 - RNA, 17 nt, Human
uacaaugugaacuuuau

SEQ ID NO: 3477150 - RNA, 14 nt, Human
uacaaugugacuuu

SEQ ID NO: 3477151 - RNA, 20 nt, Human
uacaaugugacuuugaaaau

SEQ ID NO: 3477152 - RNA, 13 nt, Human
uacaauguguuuu

SEQ ID NO: 3477153 - RNA, 19 nt, Human
uacaauguguuuuucucca

SEQ ID NO: 3477154 - RNA, 12 nt, Human
uacaauguuuua

SEQ ID NO: 3477155 - RNA, 21 nt, Human
uacaauuaauaguuugucuau

SEQ ID NO: 3477156 - RNA, 15 nt, Human
uacaauuauaucagu

SEQ ID NO: 3477157 - RNA, 22 nt, Human
uacaauuauuuuuacaguucuc

SEQ ID NO: 3477158 - RNA, 17 nt, Human
uacaauucccugcuguc

SEQ ID NO: 3477159 - RNA, 18 nt, Human
uacaauucuacauuguca

SEQ ID NO: 3477160 - RNA, 16 nt, Human
uacaauugaaaugacu

SEQ ID NO: 3477161 - RNA, 17 nt, Human
uacaauuguaaaacuga

SEQ ID NO: 3477162 - RNA, 21 nt, Human
uacaauuguaaaacugaggca

SEQ ID NO: 3477163 - RNA, 13 nt, Human
uacaauugugggc

SEQ ID NO: 3477164 - RNA, 15 nt, Human
uacaauuuacaaagu

SEQ ID NO: 3477165 - RNA, 22 nt, Human
uacaauuuacaaaguguguauu

SEQ ID NO: 3477166 - RNA, 21 nt, Human
uacaauuuuuuuaauuuugua

SEQ ID NO: 3477167 - RNA, 18 nt, Human
uacaauuuuuuuuauuag

SEQ ID NO: 3477168 - RNA, 21 nt, Human
uacaauuuuuuuuauuaguau

SEQ ID NO: 3477169 - RNA, 20 nt, Human
uacacaaaaucaaauaauac

SEQ ID NO: 3477170 - RNA, 13 nt, Human
uacacaacucacu

SEQ ID NO: 3477171 - RNA, 15 nt, Human
uacacaacucacucc

SEQ ID NO: 3477172 - RNA, 16 nt, Human
uacacaauagaauuau

SEQ ID NO: 3477173 - RNA, 13 nt, Human
uacacaauguguc

SEQ ID NO: 3477174 - RNA, 9 nt, Human
uacacacac

SEQ ID NO: 3477175 - RNA, 10 nt, Human
uacacacaca

SEQ ID NO: 3477176 - RNA, 17 nt, Human
uacacacacaaagagag

SEQ ID NO: 3477177 - RNA, 19 nt, Human
uacacacacaaagagaguu

SEQ ID NO: 3477178 - RNA, 11 nt, Human
uacacacacac

SEQ ID NO: 3477179 - RNA, 12 nt, Human
uacacacacaca

SEQ ID NO: 3477180 - RNA, 14 nt, Human
uacacacacacaca

SEQ ID NO: 3477181 - RNA, 15 nt, Human
uacacacacacacac

SEQ ID NO: 3477182 - RNA, 16 nt, Human
uacacacacacacaca

SEQ ID NO: 3477183 - RNA, 23 nt, Human
uacacacacacacacagccacac

SEQ ID NO: 3477184 - RNA, 16 nt, Human
uacacacacagaugug

SEQ ID NO: 3477185 - RNA, 17 nt, Human
uacacaccuaagggaca

SEQ ID NO: 3477186 - RNA, 22 nt, Human
uacacaccuaagggacauguuu

SEQ ID NO: 3477187 - RNA, 18 nt, Human
uacacaccuuauauuuac

SEQ ID NO: 3477188 - RNA, 16 nt, Human
uacacacgcugccuuc

SEQ ID NO: 3477189 - RNA, 17 nt, Human
uacacacucaaaucaag

SEQ ID NO: 3477190 - RNA, 18 nt, Human
uacacacugguacuuaga

SEQ ID NO: 3477191 - RNA, 18 nt, Human
uacacacuguacacauaa

SEQ ID NO: 3477192 - RNA, 18 nt, Human
uacacagaaauacaguua

SEQ ID NO: 3477193 - RNA, 15 nt, Human
uacacagaaaugcug

SEQ ID NO: 3477194 - RNA, 19 nt, Human
uacacagaaaugcugcugg

SEQ ID NO: 3477195 - RNA, 20 nt, Human
uacacagaaaugcugcuggc

SEQ ID NO: 3477196 - RNA, 21 nt, Human
uacacagaaaugcugcuggcc

SEQ ID NO: 3477197 - RNA, 23 nt, Human
uacacagaaaugcugcuggccaa

SEQ ID NO: 3477198 - RNA, 18 nt, Human
uacacagagcaggacugc

SEQ ID NO: 3477199 - RNA, 13 nt, Human
uacacagucagcu

SEQ ID NO: 3477200 - RNA, 17 nt, Human
uacacagucugcaagau

SEQ ID NO: 3477201 - RNA, 19 nt, Human
uacacauaauuaaaguguc

SEQ ID NO: 3477202 - RNA, 23 nt, Human
uacacauagcauguaaugguauc

SEQ ID NO: 3477203 - RNA, 21 nt, Human
uacacauauaccuauaaugug

SEQ ID NO: 3477204 - RNA, 21 nt, Human
uacacauguaucuaugcauuu

SEQ ID NO: 3477205 - RNA, 21 nt, Human
uacacauuugcuacuguugua

SEQ ID NO: 3477206 - RNA, 13 nt, Human
uacacauuuguac

SEQ ID NO: 3477207 - RNA, 16 nt, Human
uacacauuuuuaaauu

SEQ ID NO: 3477208 - RNA, 17 nt, Human
uacacauuuuuaaauug

SEQ ID NO: 3477209 - RNA, 20 nt, Human
uacacauuuuuaaauuguua

SEQ ID NO: 3477210 - RNA, 15 nt, Human
uacacauuuuucaga

SEQ ID NO: 3477211 - RNA, 14 nt, Human
uacaccacacacaa

SEQ ID NO: 3477212 - RNA, 16 nt, Human
uacaccacacacaaca

SEQ ID NO: 3477213 - RNA, 18 nt, Human
uacaccaccucacuccug

SEQ ID NO: 3477214 - RNA, 14 nt, Human
uacaccacucuggc

SEQ ID NO: 3477215 - RNA, 19 nt, Human
uacaccacucuggcagcca

SEQ ID NO: 3477216 - RNA, 18 nt, Human
uacaccagcauuccuuuu

SEQ ID NO: 3477217 - RNA, 20 nt, Human
uacaccagcauuccuuuuga

SEQ ID NO: 3477218 - RNA, 14 nt, Human
uacaccauuaugug

SEQ ID NO: 3477219 - RNA, 15 nt, Human
uacacccagacccca

SEQ ID NO: 3477220 - RNA, 20 nt, Human
uacacccagaccccaggcug

SEQ ID NO: 3477221 - RNA, 20 nt, Human
uacacccccucuucugagca

SEQ ID NO: 3477222 - RNA, 15 nt, Human
uacacccuuuuccag

SEQ ID NO: 3477223 - RNA, 17 nt, Human
uacaccgggccuggaga

SEQ ID NO: 3477224 - RNA, 16 nt, Human
uacaccuauuauccca

SEQ ID NO: 3477225 - RNA, 21 nt, Human
uacaccucguuagggaagaga

SEQ ID NO: 3477226 - RNA, 24 nt, Human
uacaccucguuagggaagagaaac

SEQ ID NO: 3477227 - RNA, 12 nt, Human
uacaccuggcug

SEQ ID NO: 3477228 - RNA, 16 nt, Human
uagaaugauuucaugc

SEQ ID NO: 3477229 - RNA, 19 nt, Human
uagaauggugauuuuaaau

SEQ ID NO: 3477230 - RNA, 20 nt, Human
uagaauggugauuuuaaaug

SEQ ID NO: 3477231 - RNA, 17 nt, Human
uagaauguaaaugucuc

SEQ ID NO: 3477232 - RNA, 14 nt, Human
uagaauguaguuug

SEQ ID NO: 3477233 - RNA, 16 nt, Human
uagaauguauuguacc

SEQ ID NO: 3477234 - RNA, 16 nt, Human
uagaauuaacacauga

SEQ ID NO: 3477235 - RNA, 15 nt, Human
uagaauuaccauuug

SEQ ID NO: 3477236 - RNA, 19 nt, Human
uagaauuaccauuuguuaa

SEQ ID NO: 3477237 - RNA, 14 nt, Human
uagaauuagcuuuu

SEQ ID NO: 3477238 - RNA, 22 nt, Human
uagaauuauaacuguaaagaug

SEQ ID NO: 3477239 - RNA, 17 nt, Human
uagaauuauaagucaca

SEQ ID NO: 3477240 - RNA, 12 nt, Human
uagaauuauuua

SEQ ID NO: 3477241 - RNA, 18 nt, Human
uagaauuauuuuucacuc

SEQ ID NO: 3477242 - RNA, 22 nt, Human
uagaauuauuuuucacucuaag

SEQ ID NO: 3477243 - RNA, 19 nt, Human
uagaauucccucucucuga

SEQ ID NO: 3477244 - RNA, 20 nt, Human
uagaauucuagugcugcuga

SEQ ID NO: 3477245 - RNA, 11 nt, Human
uagaauucugu

SEQ ID NO: 3477246 - RNA, 21 nt, Human
uagaauucuguauagauuaga

SEQ ID NO: 3477247 - RNA, 18 nt, Human
uagaauugaagguuuuug

SEQ ID NO: 3477248 - RNA, 19 nt, Human
uagaauugaagguuuuuga

SEQ ID NO: 3477249 - RNA, 20 nt, Human
uagaauugaagguuuuugau

SEQ ID NO: 3477250 - RNA, 21 nt, Human
uagaauugaagguuuuugaua

SEQ ID NO: 3477251 - RNA, 19 nt, Human
uagaauugacauugaaauc

SEQ ID NO: 3477252 - RNA, 20 nt, Human
uagaauugaguguuuaaagu

SEQ ID NO: 3477253 - RNA, 17 nt, Human
uagaauugcaaucuaua

SEQ ID NO: 3477254 - RNA, 13 nt, Human
uagaauugcauug

SEQ ID NO: 3477255 - RNA, 12 nt, Human
uagaauuguuau

SEQ ID NO: 3477256 - RNA, 22 nt, Human
uagaauuuauucaauuccucug

SEQ ID NO: 3477257 - RNA, 15 nt, Human
uagacaaaaaguaua

SEQ ID NO: 3477258 - RNA, 14 nt, Human
uagacaaauacuca

SEQ ID NO: 3477259 - RNA, 20 nt, Human
uagacaaauacucaugugua

SEQ ID NO: 3477260 - RNA, 15 nt, Human
uagacaacccugcaa

SEQ ID NO: 3477261 - RNA, 19 nt, Human
uagacaagauauuguacau

SEQ ID NO: 3477262 - RNA, 13 nt, Human
uagacaagccaga

SEQ ID NO: 3477263 - RNA, 16 nt, Human
uagacaaucauuguuu

SEQ ID NO: 3477264 - RNA, 18 nt, Human
uagacaauuuauuauggc

SEQ ID NO: 3477265 - RNA, 13 nt, Human
uagacacaugaag

SEQ ID NO: 3477266 - RNA, 22 nt, Human
uagacacaugaagguaaauaaa

SEQ ID NO: 3477267 - RNA, 14 nt, Human
uagacacauuuaag

SEQ ID NO: 3477268 - RNA, 15 nt, Human
uagacacauuuaagg

SEQ ID NO: 3477269 - RNA, 14 nt, Human
uagacaccaaaguu

SEQ ID NO: 3477270 - RNA, 21 nt, Human
uagacaccaaaguucuaauaa

SEQ ID NO: 3477271 - RNA, 17 nt, Human
uagacacccauuuucac

SEQ ID NO: 3477272 - RNA, 14 nt, Human
uagacacccuggca

SEQ ID NO: 3477273 - RNA, 19 nt, Human
uagacacuggcugccagcu

SEQ ID NO: 3477274 - RNA, 15 nt, Human
uagacagaagaaaca

SEQ ID NO: 3477275 - RNA, 10 nt, Human
uagacagagu

SEQ ID NO: 3477276 - RNA, 19 nt, Human
uagacagcuuugacuggag

SEQ ID NO: 3477277 - RNA, 19 nt, Human
uagacaggagaagaaagaa

SEQ ID NO: 3477278 - RNA, 16 nt, Human
uagacagguccugauu

SEQ ID NO: 3477279 - RNA, 22 nt, Human
uagacaguaugagucaaugugc

SEQ ID NO: 3477280 - RNA, 13 nt, Human
uagacaucaaacu

SEQ ID NO: 3477281 - RNA, 14 nt, Human
uagacaucuguccu

SEQ ID NO: 3477282 - RNA, 11 nt, Human
uagacaugaaa

SEQ ID NO: 3477283 - RNA, 21 nt, Human
uagacauggagguucuaaggc

SEQ ID NO: 3477284 - RNA, 16 nt, Human
uagacauucugucgcc

SEQ ID NO: 3477285 - RNA, 18 nt, Human
uagacauuuuaacaagaa

SEQ ID NO: 3477286 - RNA, 14 nt, Human
uagaccaagcuugu

SEQ ID NO: 3477287 - RNA, 18 nt, Human
uagaccaagcuuguccaa

SEQ ID NO: 3477288 - RNA, 12 nt, Human
uagaccaauaaa

SEQ ID NO: 3477289 - RNA, 19 nt, Human
uagaccagcagacagagcc

SEQ ID NO: 3477290 - RNA, 16 nt, Human
uagaccaggauuucua

SEQ ID NO: 3477291 - RNA, 15 nt, Human
uagacccaucuucuu

SEQ ID NO: 3477292 - RNA, 18 nt, Human
uagacccucaugcugcca

SEQ ID NO: 3477293 - RNA, 13 nt, Human
uagaccguuauaa

SEQ ID NO: 3477294 - RNA, 12 nt, Human
uagaccuacagg

SEQ ID NO: 3477295 - RNA, 15 nt, Human
uagaccuacaggggg

SEQ ID NO: 3477296 - RNA, 22 nt, Human
uagaccuagggaggaccuuauc

SEQ ID NO: 3477297 - RNA, 15 nt, Human
uagaccucagccugu

SEQ ID NO: 3477298 - RNA, 21 nt, Human
uagaccucagccugugcugcc

SEQ ID NO: 3477299 - RNA, 16 nt, Human
uagaccugucuccugg

SEQ ID NO: 3477300 - RNA, 20 nt, Human
uagaccuuuuuuuuuuuucc

SEQ ID NO: 3477301 - RNA, 22 nt, Human
uagaccuuuuuuuuuuuuccaa

SEQ ID NO: 3477302 - RNA, 23 nt, Human
uagacggagcccuggcaugucaa

SEQ ID NO: 3477303 - RNA, 13 nt, Human
uagacuaaaugaa

SEQ ID NO: 3477304 - RNA, 23 nt, Human
uagacuaaggccauuauuguacu

SEQ ID NO: 3477305 - RNA, 14 nt, Human
uagacuacuguuca

SEQ ID NO: 3477306 - RNA, 14 nt, Human
uagacuagagaaac

SEQ ID NO: 3477307 - RNA, 15 nt, Human
uagacuauaaauguu

SEQ ID NO: 3477308 - RNA, 19 nt, Human
uagacuauauacaugugug

SEQ ID NO: 3477309 - RNA, 17 nt, Human
uagacucaucuuacugu

SEQ ID NO: 3477310 - RNA, 19 nt, Human
uagacucaucuuacuguac

SEQ ID NO: 3477311 - RNA, 15 nt, Human
uagacuccaacaaca

SEQ ID NO: 3477312 - RNA, 16 nt, Human
uagacucuaguauuua

SEQ ID NO: 3477313 - RNA, 17 nt, Human
uagacucuuacuuuuua

SEQ ID NO: 3477314 - RNA, 20 nt, Human
uagacucuuacuuuuuaaaa

SEQ ID NO: 3477315 - RNA, 11 nt, Human
uagacugccag

SEQ ID NO: 3477316 - RNA, 12 nt, Human
uagacugccagc

SEQ ID NO: 3477317 - RNA, 13 nt, Human
uagacugccagcu

SEQ ID NO: 3477318 - RNA, 22 nt, Human
uagacugccagcucuuccuagc

SEQ ID NO: 3477319 - RNA, 17 nt, Human
uagacugccuggguucc

SEQ ID NO: 3477320 - RNA, 14 nt, Human
uagacuggacagcu

SEQ ID NO: 3477321 - RNA, 14 nt, Human
uagacuggugacug

SEQ ID NO: 3477322 - RNA, 20 nt, Human
uagacuggugacugauucuu

SEQ ID NO: 3477323 - RNA, 21 nt, Human
uagacuggugacugauucuuc

SEQ ID NO: 3477324 - RNA, 23 nt, Human
uagacuggugacugauucuucag

SEQ ID NO: 3477325 - RNA, 17 nt, Human
uagacugugauucagaa

SEQ ID NO: 3477326 - RNA, 18 nt, Human
uagacugugauucagaaa

SEQ ID NO: 3477327 - RNA, 18 nt, Human
uagacuuaauagaaacau

SEQ ID NO: 3477328 - RNA, 22 nt, Human
uagacuucaagcauggcuauuu

SEQ ID NO: 3477329 - RNA, 21 nt, Human
uagacuucagggagucagcug

SEQ ID NO: 3477330 - RNA, 18 nt, Human
uagacuucgacucaggau

SEQ ID NO: 3477331 - RNA, 19 nt, Human
uagacuucugcuuuccaca

SEQ ID NO: 3477332 - RNA, 12 nt, Human
uagacuugaaaa

SEQ ID NO: 3477333 - RNA, 16 nt, Human
uagacuuggauucuuu

SEQ ID NO: 3477334 - RNA, 20 nt, Human
uagacuuggauucuuuccau

SEQ ID NO: 3477335 - RNA, 14 nt, Human
uagacuuuaacaua

SEQ ID NO: 3477336 - RNA, 19 nt, Human
uagacuuuagaaauaaaug

SEQ ID NO: 3477337 - RNA, 21 nt, Human
uagacuuuaggcuuucagcuu

SEQ ID NO: 3477338 - RNA, 17 nt, Human
uagagaacgcagcccua

SEQ ID NO: 3477339 - RNA, 17 nt, Human
uagagaacuaaacuagu

SEQ ID NO: 3477340 - RNA, 22 nt, Human
uagagaacugaaaagagagcag

SEQ ID NO: 3477341 - RNA, 18 nt, Human
uagagaagacaggcugga

SEQ ID NO: 3477342 - RNA, 19 nt, Human
uagagaaguauacauaagu

SEQ ID NO: 3477343 - RNA, 13 nt, Human
uagagaaugcaca

SEQ ID NO: 3477344 - RNA, 22 nt, Human
uagagaaugcacagauauacuu

SEQ ID NO: 3477345 - RNA, 17 nt, Human
uagagaauguuccagac

SEQ ID NO: 3477346 - RNA, 14 nt, Human
uagagacuggaaca

SEQ ID NO: 3477347 - RNA, 17 nt, Human
uagagacuuuuuucuag

SEQ ID NO: 3477348 - RNA, 13 nt, Human
uagagagcuauuu

SEQ ID NO: 3477349 - RNA, 14 nt, Human
uagagaguguugaa

SEQ ID NO: 3477350 - RNA, 19 nt, Human
uagagauaugcagaaggaa

SEQ ID NO: 3477351 - RNA, 16 nt, Human
uagagauauuuuguaa

SEQ ID NO: 3477352 - RNA, 17 nt, Human
uagagaucugguuuugc

SEQ ID NO: 3477353 - RNA, 17 nt, Human
uagagaugacugagucc

SEQ ID NO: 3477354 - RNA, 19 nt, Human
uagagauggaggaggaggc

SEQ ID NO: 3477355 - RNA, 13 nt, Human
uagagaugugcaa

SEQ ID NO: 3477356 - RNA, 12 nt, Human
uagagauguuuu

SEQ ID NO: 3477357 - RNA, 20 nt, Human
uagagauguuuuuaaaaguu

SEQ ID NO: 3477358 - RNA, 15 nt, Human
uagagauuugucuaa

SEQ ID NO: 3477359 - RNA, 16 nt, Human
uagagcagacuacagc

SEQ ID NO: 3477360 - RNA, 17 nt, Human
uagagcagacuacagcu

SEQ ID NO: 3477361 - RNA, 19 nt, Human
uagagcagaugaccccucc

SEQ ID NO: 3477362 - RNA, 12 nt, Human
uagagcagccca

SEQ ID NO: 3477363 - RNA, 19 nt, Human
uagagcagcccuggaguca

SEQ ID NO: 3477364 - RNA, 16 nt, Human
uagagcaggacugaug

SEQ ID NO: 3477365 - RNA, 17 nt, Human
uagagcaggacugaugu

SEQ ID NO: 3477366 - RNA, 22 nt, Human
uagagcaggcguucagcucacu

SEQ ID NO: 3477367 - RNA, 22 nt, Human
uagagcaguuucuguccugcug

SEQ ID NO: 3477368 - RNA, 14 nt, Human
uagagccaggcaca

SEQ ID NO: 3477369 - RNA, 15 nt, Human
uagagccaggcacac

SEQ ID NO: 3477370 - RNA, 14 nt, Human
uagagccagggucu

SEQ ID NO: 3477371 - RNA, 21 nt, Human
uagagccggguguccccaaca

SEQ ID NO: 3477372 - RNA, 16 nt, Human
uagagccugccuggag

SEQ ID NO: 3477373 - RNA, 17 nt, Human
uagagccugccuggagc

SEQ ID NO: 3477374 - RNA, 18 nt, Human
uagauucaaagguucuag

SEQ ID NO: 3477375 - RNA, 13 nt, Human
uagauucaccugu

SEQ ID NO: 3477376 - RNA, 17 nt, Human
uagauucaccuguaaaa

SEQ ID NO: 3477377 - RNA, 20 nt, Human
uagauucaccuguaaaacuu

SEQ ID NO: 3477378 - RNA, 17 nt, Human
uagauucagguaauaca

SEQ ID NO: 3477379 - RNA, 23 nt, Human
uagauuccccauugccuccuccu

SEQ ID NO: 3477380 - RNA, 13 nt, Human
uagauucuaaaga

SEQ ID NO: 3477381 - RNA, 22 nt, Human
uagauucucugugucuaagauu

SEQ ID NO: 3477382 - RNA, 15 nt, Human
uagauugagaaaugu

SEQ ID NO: 3477383 - RNA, 14 nt, Human
uagauugauuguau

SEQ ID NO: 3477384 - RNA, 16 nt, Human
uagauugauuguauug

SEQ ID NO: 3477385 - RNA, 23 nt, Human
uagauugcagaaaauucugugcc

SEQ ID NO: 3477386 - RNA, 16 nt, Human
uagauuguuaaaauaa

SEQ ID NO: 3477387 - RNA, 23 nt, Human
uagauuuaauauaaaguuuuaua

SEQ ID NO: 3477388 - RNA, 11 nt, Human
uagauuuaugg

SEQ ID NO: 3477389 - RNA, 21 nt, Human
uagauuuauuuuucaguucca

SEQ ID NO: 3477390 - RNA, 22 nt, Human
uagauuuauuuuucaguuccaa

SEQ ID NO: 3477391 - RNA, 16 nt, Human
uagauuucauaguuca

SEQ ID NO: 3477392 - RNA, 18 nt, Human
uagauuucauaguucaga

SEQ ID NO: 3477393 - RNA, 19 nt, Human
uagauuucauaguucagaa

SEQ ID NO: 3477394 - RNA, 20 nt, Human
uagauuucauaguucagaau

SEQ ID NO: 3477395 - RNA, 14 nt, Human
uagauuucugauuu

SEQ ID NO: 3477396 - RNA, 17 nt, Human
uagauuucugauuuuau

SEQ ID NO: 3477397 - RNA, 12 nt, Human
uagauuugaccu

SEQ ID NO: 3477398 - RNA, 21 nt, Human
uagauuugccauagaguacac

SEQ ID NO: 3477399 - RNA, 20 nt, Human
uagauuuggcuccucugcuu

SEQ ID NO: 3477400 - RNA, 19 nt, Human
uagauuugugugcaucagg

SEQ ID NO: 3477401 - RNA, 22 nt, Human
uagauuugugugcaucaggcuu

SEQ ID NO: 3477402 - RNA, 18 nt, Human
uagauuuuaaucaaauuu

SEQ ID NO: 3477403 - RNA, 15 nt, Human
uagauuuuacaugaa

SEQ ID NO: 3477404 - RNA, 18 nt, Human
uagauuuuacaugaagua

SEQ ID NO: 3477405 - RNA, 22 nt, Human
uagauuuuacaugaaguauuuu

SEQ ID NO: 3477406 - RNA, 13 nt, Human
uagauuuuauagu

SEQ ID NO: 3477407 - RNA, 15 nt, Human
uagauuuuauagugu

SEQ ID NO: 3477408 - RNA, 13 nt, Human
uagauuuucugcu

SEQ ID NO: 3477409 - RNA, 16 nt, Human
uagauuuucuuuaaaa

SEQ ID NO: 3477410 - RNA, 19 nt, Human
uagauuuucuuuaaaagaa

SEQ ID NO: 3477411 - RNA, 22 nt, Human
uagauuuuguguuuauucuuga

SEQ ID NO: 3477412 - RNA, 18 nt, Human
uagcaaaaaaaacccaug

SEQ ID NO: 3477413 - RNA, 20 nt, Human
uagcaaaaaaaguuguauga

SEQ ID NO: 3477414 - RNA, 23 nt, Human
uagcaaaaaaaguuguaugaucu

SEQ ID NO: 3477415 - RNA, 18 nt, Human
uagcaaaaacauguaugu

SEQ ID NO: 3477416 - RNA, 14 nt, Human
uagcaaaaaguggg

SEQ ID NO: 3477417 - RNA, 15 nt, Human
uagcaaaacuuuuaa

SEQ ID NO: 3477418 - RNA, 18 nt, Human
uagcaaaacuuuuaaacu

SEQ ID NO: 3477419 - RNA, 15 nt, Human
uagcaaaauaaaaca

SEQ ID NO: 3477420 - RNA, 16 nt, Human
uagcaaaauaaaacau

SEQ ID NO: 3477421 - RNA, 17 nt, Human
uagcaaaauaaaacaua

SEQ ID NO: 3477422 - RNA, 19 nt, Human
uagcaaaauaaaacauagc

SEQ ID NO: 3477423 - RNA, 21 nt, Human
uagcaaaauucuuaaguaugu

SEQ ID NO: 3477424 - RNA, 15 nt, Human
uagcaaacagaggaa

SEQ ID NO: 3477425 - RNA, 14 nt, Human
uagcaaagaauuga

SEQ ID NO: 3477426 - RNA, 17 nt, Human
uagcaaagauaucucau

SEQ ID NO: 3477427 - RNA, 22 nt, Human
uagcaaaugagacagcagucuu

SEQ ID NO: 3477428 - RNA, 18 nt, Human
uagcaacaacaauuggua

SEQ ID NO: 3477429 - RNA, 12 nt, Human
uagcaacaggaa

SEQ ID NO: 3477430 - RNA, 16 nt, Human
uagcaaggcaugaugu

SEQ ID NO: 3477431 - RNA, 17 nt, Human
uagcaaggucauuucuu

SEQ ID NO: 3477432 - RNA, 17 nt, Human
uagcaaguucuagagaa

SEQ ID NO: 3477433 - RNA, 19 nt, Human
uagcacaaguuauuuaaau

SEQ ID NO: 3477434 - RNA, 18 nt, Human
uagcacacacuuuugguu

SEQ ID NO: 3477435 - RNA, 14 nt, Human
uagcacagacccug

SEQ ID NO: 3477436 - RNA, 16 nt, Human
uagcacagacccugcc

SEQ ID NO: 3477437 - RNA, 19 nt, Human
uagcacagacccugcccug

SEQ ID NO: 3477438 - RNA, 16 nt, Human
uagcacagauuuuaau

SEQ ID NO: 3477439 - RNA, 21 nt, Human
uagcacaggcugagugcaggc

SEQ ID NO: 3477440 - RNA, 16 nt, Human
uagcaccagggaaggg

SEQ ID NO: 3477441 - RNA, 18 nt, Human
uagcacguuuaaaguucu

SEQ ID NO: 3477442 - RNA, 19 nt, Human
uagcacguuuaaaguucug

SEQ ID NO: 3477443 - RNA, 20 nt, Human
uagcacuaccacuccugcca

SEQ ID NO: 3477444 - RNA, 17 nt, Human
uagcacucacaugcugg

SEQ ID NO: 3477445 - RNA, 15 nt, Human
uagcacucaggcucu

SEQ ID NO: 3477446 - RNA, 19 nt, Human
uagcacucauuuucuauaa

SEQ ID NO: 3477447 - RNA, 11 nt, Human
uagcacuguug

SEQ ID NO: 3477448 - RNA, 18 nt, Human
uagcacuguugauguauc

SEQ ID NO: 3477449 - RNA, 21 nt, Human
uagcacuucagggcagauuuu

SEQ ID NO: 3477450 - RNA, 21 nt, Human
uagcacuuccuugccagucuu

SEQ ID NO: 3477451 - RNA, 23 nt, Human
uagcacuuucauugccagugucu

SEQ ID NO: 3477452 - RNA, 19 nt, Human
uagcacuuugaaauaccuc

SEQ ID NO: 3477453 - RNA, 17 nt, Human
uagcagaagaaaggaac

SEQ ID NO: 3477454 - RNA, 20 nt, Human
uagcagaaucaaaaugaccu

SEQ ID NO: 3477455 - RNA, 19 nt, Human
uagcagacaggccccguga

SEQ ID NO: 3477456 - RNA, 23 nt, Human
uagcagagaaugaaagggcccag

SEQ ID NO: 3477457 - RNA, 13 nt, Human
uagcagaguuaaa

SEQ ID NO: 3477458 - RNA, 14 nt, Human
uagcagaguuaaau

SEQ ID NO: 3477459 - RNA, 17 nt, Human
uagcagaucuguuuugu

SEQ ID NO: 3477460 - RNA, 14 nt, Human
uagcagauuuuaau

SEQ ID NO: 3477461 - RNA, 18 nt, Human
uagcagcaaaaauauaaa

SEQ ID NO: 3477462 - RNA, 20 nt, Human
uagcagcaaaaauauaaaau

SEQ ID NO: 3477463 - RNA, 16 nt, Human
uagcagccaguucaaa

SEQ ID NO: 3477464 - RNA, 18 nt, Human
uagcagccaguucaaaaa

SEQ ID NO: 3477465 - RNA, 14 nt, Human
uagcagcccacccu

SEQ ID NO: 3477466 - RNA, 20 nt, Human
uagcagccuggcuccccugg

SEQ ID NO: 3477467 - RNA, 16 nt, Human
uagcagccuuucucuc

SEQ ID NO: 3477468 - RNA, 14 nt, Human
uagcagcuaucucu

SEQ ID NO: 3477469 - RNA, 20 nt, Human
uagcagcugacuuucaaagu

SEQ ID NO: 3477470 - RNA, 11 nt, Human
uagcagcugga

SEQ ID NO: 3477471 - RNA, 15 nt, Human
uagcagcuuccagau

SEQ ID NO: 3477472 - RNA, 21 nt, Human
uagcaggagaggagagccaga

SEQ ID NO: 3477473 - RNA, 16 nt, Human
uagcaggggcugcagu

SEQ ID NO: 3477474 - RNA, 17 nt, Human
uagcagguaccacugau

SEQ ID NO: 3477475 - RNA, 15 nt, Human
uagcaggugguccug

SEQ ID NO: 3477476 - RNA, 22 nt, Human
uagcaggugguccugagaccug

SEQ ID NO: 3477477 - RNA, 21 nt, Human
uagcagugauuuuuauccaau

SEQ ID NO: 3477478 - RNA, 15 nt, Human
uagcaguggcaggca

SEQ ID NO: 3477479 - RNA, 19 nt, Human
uagcauagcuuauuauuga

SEQ ID NO: 3477480 - RNA, 18 nt, Human
uagcauauaauucuauau

SEQ ID NO: 3477481 - RNA, 22 nt, Human
uagcauauauguguccauuucc

SEQ ID NO: 3477482 - RNA, 14 nt, Human
uagcauaugaguuu

SEQ ID NO: 3477483 - RNA, 15 nt, Human
uagcaucacuuaaaa

SEQ ID NO: 3477484 - RNA, 17 nt, Human
uagcaucacuuaaaaca

SEQ ID NO: 3477485 - RNA, 18 nt, Human
uagcaucacuuaaaacac

SEQ ID NO: 3477486 - RNA, 15 nt, Human
uagcauccuaagaaa

SEQ ID NO: 3477487 - RNA, 16 nt, Human
uagcauccuaagaaau

SEQ ID NO: 3477488 - RNA, 23 nt, Human
uagcauccuaagaaauaugugag

SEQ ID NO: 3477489 - RNA, 15 nt, Human
uagcauccuggaaua

SEQ ID NO: 3477490 - RNA, 22 nt, Human
uagcaucucaggagauuucaug

SEQ ID NO: 3477491 - RNA, 15 nt, Human
uagcaucuguacaaa

SEQ ID NO: 3477492 - RNA, 13 nt, Human
uagcaucuucugg

SEQ ID NO: 3477493 - RNA, 16 nt, Human
uagcaucuucuggagu

SEQ ID NO: 3477494 - RNA, 23 nt, Human
uagcaucuucuggagucuccagu

SEQ ID NO: 3477495 - RNA, 17 nt, Human
uagcaugacaagcccca

SEQ ID NO: 3477496 - RNA, 18 nt, Human
uagcaugacaagccccag

SEQ ID NO: 3477497 - RNA, 20 nt, Human
uagcaugacaagccccaggc

SEQ ID NO: 3477498 - RNA, 21 nt, Human
uagcaugacaagccccaggca

SEQ ID NO: 3477499 - RNA, 14 nt, Human
uagcaugcacaaag

SEQ ID NO: 3477500 - RNA, 14 nt, Human
uagcaugccaacaa

SEQ ID NO: 3477501 - RNA, 23 nt, Human
uagcaugcuuguugcaauugccu

SEQ ID NO: 3477502 - RNA, 18 nt, Human
uagcauggcauauuuuuc

SEQ ID NO: 3477503 - RNA, 12 nt, Human
uagcauguaaug

SEQ ID NO: 3477504 - RNA, 15 nt, Human
uagcauguauugugu

SEQ ID NO: 3477505 - RNA, 18 nt, Human
uagcauguccuaaugcuu

SEQ ID NO: 3477506 - RNA, 21 nt, Human
uagcauguguuugguucuggg

SEQ ID NO: 3477507 - RNA, 15 nt, Human
uagcauguuguagau

SEQ ID NO: 3477508 - RNA, 14 nt, Human
uagcauucuuugga

SEQ ID NO: 3477509 - RNA, 24 nt, Human
uagcauuguaaaauuauuucauga

SEQ ID NO: 3477510 - RNA, 22 nt, Human
uagcauuguaagcguauggcuu

SEQ ID NO: 3477511 - RNA, 22 nt, Human
uagcauuuaguccaaugucuuu

SEQ ID NO: 3477512 - RNA, 22 nt, Human
uagcauuuaugguaaucauauu

SEQ ID NO: 3477513 - RNA, 16 nt, Human
uagcauuucauucuuc

SEQ ID NO: 3477514 - RNA, 17 nt, Human
uagcauuucauucuucu

SEQ ID NO: 3477515 - RNA, 12 nt, Human
uagcauuucuug

SEQ ID NO: 3477516 - RNA, 13 nt, Human
uagcauuucuuga

SEQ ID NO: 3477517 - RNA, 16 nt, Human
uagcauuucuugaugu

SEQ ID NO: 3477518 - RNA, 19 nt, Human
uagcucuuugucagggagu

SEQ ID NO: 3477519 - RNA, 14 nt, Human
uagcucuuuuccua

SEQ ID NO: 3477520 - RNA, 19 nt, Human
uagcucuuuuuuguuuguu

SEQ ID NO: 3477521 - RNA, 21 nt, Human
uagcugaagaauugaaaaguu

SEQ ID NO: 3477522 - RNA, 18 nt, Human
uagcugacaaaauacuug

SEQ ID NO: 3477523 - RNA, 17 nt, Human
uagcugacagaaucucu

SEQ ID NO: 3477524 - RNA, 21 nt, Human
uagcugacccagccccuugag

SEQ ID NO: 3477525 - RNA, 23 nt, Human
uagcugacccagccccuugagaa

SEQ ID NO: 3477526 - RNA, 17 nt, Human
uagcugagcgugguggc

SEQ ID NO: 3477527 - RNA, 11 nt, Human
uagcugagcuc

SEQ ID NO: 3477528 - RNA, 21 nt, Human
uagcugagcucacaaggcagc

SEQ ID NO: 3477529 - RNA, 11 nt, Human
uagcugagugu

SEQ ID NO: 3477530 - RNA, 14 nt, Human
uagcugaucaguuu

SEQ ID NO: 3477531 - RNA, 23 nt, Human
uagcugaugaacuuauucuguag

SEQ ID NO: 3477532 - RNA, 16 nt, Human
uagcugcaaaggacag

SEQ ID NO: 3477533 - RNA, 11 nt, Human
uagcugcagaa

SEQ ID NO: 3477534 - RNA, 21 nt, Human
uagcugcauccuccaagaauc

SEQ ID NO: 3477535 - RNA, 20 nt, Human
uagcugccaagccccauccu

SEQ ID NO: 3477536 - RNA, 15 nt, Human
uagcugccacuugaa

SEQ ID NO: 3477537 - RNA, 21 nt, Human
uagcugccacuugaacaaaau

SEQ ID NO: 3477538 - RNA, 17 nt, Human
uagcugcugucacauuu

SEQ ID NO: 3477539 - RNA, 19 nt, Human
uagcuggagaggagcccug

SEQ ID NO: 3477540 - RNA, 19 nt, Human
uagcugggacuacaggcac

SEQ ID NO: 3477541 - RNA, 18 nt, Human
uagcugggacuacaggug

SEQ ID NO: 3477542 - RNA, 22 nt, Human
uagcugggagaaagagagagcu

SEQ ID NO: 3477543 - RNA, 15 nt, Human
uagcugggauuuuaa

SEQ ID NO: 3477544 - RNA, 20 nt, Human
uagcugggggugggccaggc

SEQ ID NO: 3477545 - RNA, 17 nt, Human
uagcuguaaggcaugaa

SEQ ID NO: 3477546 - RNA, 18 nt, Human
uagcuguacaaauauaag

SEQ ID NO: 3477547 - RNA, 15 nt, Human
uagcugucuagagua

SEQ ID NO: 3477548 - RNA, 21 nt, Human
uagcugucugcucagacagaa

SEQ ID NO: 3477549 - RNA, 18 nt, Human
uagcugugaccugcugag

SEQ ID NO: 3477550 - RNA, 13 nt, Human
uagcugugggggu

SEQ ID NO: 3477551 - RNA, 14 nt, Human
uagcuguggugagg

SEQ ID NO: 3477552 - RNA, 22 nt, Human
uagcugugugaauaccugcuca

SEQ ID NO: 3477553 - RNA, 14 nt, Human
uagcuuaagaaaaa

SEQ ID NO: 3477554 - RNA, 18 nt, Human
uagcuuacaugagaacag

SEQ ID NO: 3477555 - RNA, 15 nt, Human
uagcuuaccugacac

SEQ ID NO: 3477556 - RNA, 16 nt, Human
uagcuuagaccucagc

SEQ ID NO: 3477557 - RNA, 17 nt, Human
uagcuuagagccucccu

SEQ ID NO: 3477558 - RNA, 15 nt, Human
uagcuucugcuuuuc

SEQ ID NO: 3477559 - RNA, 16 nt, Human
uagcuugcaccuuguc

SEQ ID NO: 3477560 - RNA, 15 nt, Human
uagcuuggaaacugg

SEQ ID NO: 3477561 - RNA, 19 nt, Human
uagcuugggaggcuucccc

SEQ ID NO: 3477562 - RNA, 15 nt, Human
uagcuuggggccagg

SEQ ID NO: 3477563 - RNA, 17 nt, Human
uagcuuguauaguguaa

SEQ ID NO: 3477564 - RNA, 23 nt, Human
uagcuuuaaugauaugcuuguaa

SEQ ID NO: 3477565 - RNA, 19 nt, Human
uagcuuuacuguuuguuau

SEQ ID NO: 3477566 - RNA, 16 nt, Human
uagcuuuagacccugg

SEQ ID NO: 3477567 - RNA, 18 nt, Human
uagcuuuauauauggaca

SEQ ID NO: 3477568 - RNA, 13 nt, Human
uagcuuuauucuu

SEQ ID NO: 3477569 - RNA, 19 nt, Human
uagcuuuauuuuuuaagua

SEQ ID NO: 3477570 - RNA, 20 nt, Human
uagcuuuauuuuuuaaguau

SEQ ID NO: 3477571 - RNA, 11 nt, Human
uagcuuugcuc

SEQ ID NO: 3477572 - RNA, 15 nt, Human
uagcuuugcucuuug

SEQ ID NO: 3477573 - RNA, 17 nt, Human
uagcuuuggaaguuuag

SEQ ID NO: 3477574 - RNA, 22 nt, Human
uagcuuuguguuugguuuacau

SEQ ID NO: 3477575 - RNA, 23 nt, Human
uagcuuuguguuugguuuacauu

SEQ ID NO: 3477576 - RNA, 16 nt, Human
uagcuuuucaccuuua

SEQ ID NO: 3477577 - RNA, 13 nt, Human
uagcuuuucccuu

SEQ ID NO: 3477578 - RNA, 16 nt, Human
uagcuuuugugucuua

SEQ ID NO: 3477579 - RNA, 14 nt, Human
uaggaaaaacugau

SEQ ID NO: 3477580 - RNA, 17 nt, Human
uaggaaaaacugauuuu

SEQ ID NO: 3477581 - RNA, 21 nt, Human
uaggaaaagaaaucuauagaa

SEQ ID NO: 3477582 - RNA, 13 nt, Human
uaggaaacaagug

SEQ ID NO: 3477583 - RNA, 19 nt, Human
uaggaaagaccauuuuucc

SEQ ID NO: 3477584 - RNA, 21 nt, Human
uaggaaagccucacugauaua

SEQ ID NO: 3477585 - RNA, 11 nt, Human
uaggaaaggau

SEQ ID NO: 3477586 - RNA, 16 nt, Human
uaggaaauaaaaccuu

SEQ ID NO: 3477587 - RNA, 16 nt, Human
uaggaaaugaaugugu

SEQ ID NO: 3477588 - RNA, 22 nt, Human
uaggaacaaaucuuccuggucg

SEQ ID NO: 3477589 - RNA, 18 nt, Human
uaggaacugcugggcuug

SEQ ID NO: 3477590 - RNA, 15 nt, Human
uaggaacuucagaga

SEQ ID NO: 3477591 - RNA, 16 nt, Human
uaggaacuugagaacu

SEQ ID NO: 3477592 - RNA, 12 nt, Human
uaggaagaaaga

SEQ ID NO: 3477593 - RNA, 15 nt, Human
uaggaagaauuuuaa

SEQ ID NO: 3477594 - RNA, 17 nt, Human
uaggaagaauuuuaaaa

SEQ ID NO: 3477595 - RNA, 18 nt, Human
uaggaagagcaggacucc

SEQ ID NO: 3477596 - RNA, 16 nt, Human
uaggaagguacuguau

SEQ ID NO: 3477597 - RNA, 15 nt, Human
uaggaagguuaaugu

SEQ ID NO: 3477598 - RNA, 16 nt, Human
uaggaaguuuucugua

SEQ ID NO: 3477599 - RNA, 17 nt, Human
uaggaaguuuucuguag

SEQ ID NO: 3477600 - RNA, 12 nt, Human
uaggaauaaaua

SEQ ID NO: 3477601 - RNA, 23 nt, Human
uaggaauagcaugucacuaaagc

SEQ ID NO: 3477602 - RNA, 15 nt, Human
uaggaauauuauauu

SEQ ID NO: 3477603 - RNA, 16 nt, Human
uaggaauauuauauuu

SEQ ID NO: 3477604 - RNA, 18 nt, Human
uaggaauauuauauuugg

SEQ ID NO: 3477605 - RNA, 14 nt, Human
uaggaaucagcaag

SEQ ID NO: 3477606 - RNA, 15 nt, Human
uaggaaucagcaaga

SEQ ID NO: 3477607 - RNA, 17 nt, Human
uaggaaucauucagaaa

SEQ ID NO: 3477608 - RNA, 20 nt, Human
uaggaauugacccacaagaa

SEQ ID NO: 3477609 - RNA, 20 nt, Human
uaggacaaucaguccccucc

SEQ ID NO: 3477610 - RNA, 20 nt, Human
uaggaccaggauccagccuc

SEQ ID NO: 3477611 - RNA, 19 nt, Human
uaggaccaugguuaagagu

SEQ ID NO: 3477612 - RNA, 23 nt, Human
uaggaccaugguuaagaguccaa

SEQ ID NO: 3477613 - RNA, 16 nt, Human
uaggacccaagcagag

SEQ ID NO: 3477614 - RNA, 19 nt, Human
uaggacccgucuccagcug

SEQ ID NO: 3477615 - RNA, 19 nt, Human
uaggaccuuuccaccacag

SEQ ID NO: 3477616 - RNA, 22 nt, Human
uaggaccuuuccaccacagcca

SEQ ID NO: 3477617 - RNA, 15 nt, Human
uaggacucugaggcu

SEQ ID NO: 3477618 - RNA, 16 nt, Human
uaggagaagccaggaa

SEQ ID NO: 3477619 - RNA, 13 nt, Human
uaggagacuugua

SEQ ID NO: 3477620 - RNA, 14 nt, Human
uaggagagaaggua

SEQ ID NO: 3477621 - RNA, 18 nt, Human
uaggagaggaugagagcc

SEQ ID NO: 3477622 - RNA, 22 nt, Human
uaggagauaccagguugaaaga

SEQ ID NO: 3477623 - RNA, 15 nt, Human
uaggagaucagaaaa

SEQ ID NO: 3477624 - RNA, 23 nt, Human
uaggagccugcuggucacagccu

SEQ ID NO: 3477625 - RNA, 23 nt, Human
uaggagcugccuuggcucagaca

SEQ ID NO: 3477626 - RNA, 14 nt, Human
uaggagcugggagg

SEQ ID NO: 3477627 - RNA, 18 nt, Human
uaggagcugggaggaaaa

SEQ ID NO: 3477628 - RNA, 19 nt, Human
uaggagcuuugacucagga

SEQ ID NO: 3477629 - RNA, 13 nt, Human
uaggaggaugggc

SEQ ID NO: 3477630 - RNA, 20 nt, Human
uaggagugugugacauucca

SEQ ID NO: 3477631 - RNA, 18 nt, Human
uaggauagcuaacuguaa

SEQ ID NO: 3477632 - RNA, 22 nt, Human
uaggauaugguggguggacagg

SEQ ID NO: 3477633 - RNA, 18 nt, Human
uaggaugcucaguugcua

SEQ ID NO: 3477634 - RNA, 19 nt, Human
uaggauguauauuuuauau

SEQ ID NO: 3477635 - RNA, 23 nt, Human
uaggauguauauuuuauauaaag

SEQ ID NO: 3477636 - RNA, 18 nt, Human
uaggauguuuuucaugaa

SEQ ID NO: 3477637 - RNA, 19 nt, Human
uaggauguuuuucaugaaa

SEQ ID NO: 3477638 - RNA, 12 nt, Human
uaggauucacac

SEQ ID NO: 3477639 - RNA, 20 nt, Human
uaggauucacaccccaccug

SEQ ID NO: 3477640 - RNA, 18 nt, Human
uaggauuugaacacuugg

SEQ ID NO: 3477641 - RNA, 23 nt, Human
uaggauuuuaacuuaacugaaau

SEQ ID NO: 3477642 - RNA, 22 nt, Human
uaggauuuuuuuuaauguuuaa

SEQ ID NO: 3477643 - RNA, 20 nt, Human
uaggcaaauguuuaaacauu

SEQ ID NO: 3477644 - RNA, 19 nt, Human
uaggcaaggcuaugugauu

SEQ ID NO: 3477645 - RNA, 13 nt, Human
uaggcacccaucc

SEQ ID NO: 3477646 - RNA, 16 nt, Human
uaggcacuuuaaaaca

SEQ ID NO: 3477647 - RNA, 14 nt, Human
uaggcagacacagg

SEQ ID NO: 3477648 - RNA, 22 nt, Human
uaggcagacucuuuaugcuugc

SEQ ID NO: 3477649 - RNA, 16 nt, Human
uaggcagagccuuugg

SEQ ID NO: 3477650 - RNA, 22 nt, Human
uaggcaggaagcccaauugcug

SEQ ID NO: 3477651 - RNA, 17 nt, Human
uaggcaggacaugcuga

SEQ ID NO: 3477652 - RNA, 22 nt, Human
uaggcaggacaugcugaagcca

SEQ ID NO: 3477653 - RNA, 15 nt, Human
uaggcagggauuuga

SEQ ID NO: 3477654 - RNA, 17 nt, Human
uaggcagggauuugagg

SEQ ID NO: 3477655 - RNA, 20 nt, Human
uaggcaguaggccggugugc

SEQ ID NO: 3477656 - RNA, 15 nt, Human
uaggcaguauaaaga

SEQ ID NO: 3477657 - RNA, 16 nt, Human
uaggcaucccagggga

SEQ ID NO: 3477658 - RNA, 20 nt, Human
uaggcaugaagagcaaaaau

SEQ ID NO: 3477659 - RNA, 21 nt, Human
uaggcaugagggaucacaggg

SEQ ID NO: 3477660 - RNA, 19 nt, Human
uaggcauuaauguuucuau

SEQ ID NO: 3477661 - RNA, 13 nt, Human
uaggcauucugga

SEQ ID NO: 3477662 - RNA, 14 nt, Human
uaguaaaacacaga

SEQ ID NO: 3477663 - RNA, 11 nt, Human
uaguaaaccaa

SEQ ID NO: 3477664 - RNA, 17 nt, Human
uaguaaaccaauccuau

SEQ ID NO: 3477665 - RNA, 21 nt, Human
uaguaaaucacgcuuuuugaa

SEQ ID NO: 3477666 - RNA, 22 nt, Human
uaguaaaucacgcuuuuugaaa

SEQ ID NO: 3477667 - RNA, 16 nt, Human
uaguaaauguaguuca

SEQ ID NO: 3477668 - RNA, 23 nt, Human
uaguaaaugucuuuguaagucag

SEQ ID NO: 3477669 - RNA, 15 nt, Human
uaguaacacuaauau

SEQ ID NO: 3477670 - RNA, 20 nt, Human
uaguaacucccaucaccucu

SEQ ID NO: 3477671 - RNA, 13 nt, Human
uaguaacugacau

SEQ ID NO: 3477672 - RNA, 18 nt, Human
uaguaagaagacaaacug

SEQ ID NO: 3477673 - RNA, 13 nt, Human
uaguaagauacug

SEQ ID NO: 3477674 - RNA, 12 nt, Human
uaguaagcauag

SEQ ID NO: 3477675 - RNA, 16 nt, Human
uaguaagcaucuacuu

SEQ ID NO: 3477676 - RNA, 16 nt, Human
uaguaaguaauuaugc

SEQ ID NO: 3477677 - RNA, 14 nt, Human
uaguaagugccuuc

SEQ ID NO: 3477678 - RNA, 15 nt, Human
uaguaaguuaaugua

SEQ ID NO: 3477679 - RNA, 12 nt, Human
uaguaauaccuc

SEQ ID NO: 3477680 - RNA, 13 nt, Human
uaguaauaccucu

SEQ ID NO: 3477681 - RNA, 15 nt, Human
uaguaauaccucuaa

SEQ ID NO: 3477682 - RNA, 18 nt, Human
uaguaauauauuuaaagg

SEQ ID NO: 3477683 - RNA, 12 nt, Human
uaguaaucauau

SEQ ID NO: 3477684 - RNA, 14 nt, Human
uaguaaucugcauu

SEQ ID NO: 3477685 - RNA, 17 nt, Human
uaguaaucugcauuauu

SEQ ID NO: 3477686 - RNA, 17 nt, Human
uaguaaugaguuuaaaa

SEQ ID NO: 3477687 - RNA, 15 nt, Human
uaguaauucucaggc

SEQ ID NO: 3477688 - RNA, 14 nt, Human
uaguaauugacaug

SEQ ID NO: 3477689 - RNA, 14 nt, Human
uaguaauuucuuuu

SEQ ID NO: 3477690 - RNA, 16 nt, Human
uaguacaaauuauaaa

SEQ ID NO: 3477691 - RNA, 12 nt, Human
uaguacauaaag

SEQ ID NO: 3477692 - RNA, 19 nt, Human
uaguaccaaaugcuuuaaa

SEQ ID NO: 3477693 - RNA, 16 nt, Human
uaguaccaaucauuuu

SEQ ID NO: 3477694 - RNA, 14 nt, Human
uaguacccaccuga

SEQ ID NO: 3477695 - RNA, 16 nt, Human
uaguaccugaaaagua

SEQ ID NO: 3477696 - RNA, 20 nt, Human
uaguaccuucagauccuacc

SEQ ID NO: 3477697 - RNA, 14 nt, Human
uaguaccuuugcuc

SEQ ID NO: 3477698 - RNA, 16 nt, Human
uaguaccuuugcucuu

SEQ ID NO: 3477699 - RNA, 21 nt, Human
uaguacuccugcaaaauuuua

SEQ ID NO: 3477700 - RNA, 17 nt, Human
uaguacuccuuaagaac

SEQ ID NO: 3477701 - RNA, 23 nt, Human
uaguacuggauuauucaggcuuu

SEQ ID NO: 3477702 - RNA, 14 nt, Human
uaguacugugaauc

SEQ ID NO: 3477703 - RNA, 16 nt, Human
uaguacuucuucugua

SEQ ID NO: 3477704 - RNA, 22 nt, Human
uaguacuugaaaucuaggauua

SEQ ID NO: 3477705 - RNA, 13 nt, Human
uaguacuuuauag

SEQ ID NO: 3477706 - RNA, 14 nt, Human
uaguacuuuauaga

SEQ ID NO: 3477707 - RNA, 14 nt, Human
uaguagagacaggg

SEQ ID NO: 3477708 - RNA, 21 nt, Human
uaguagagguacacuugugaa

SEQ ID NO: 3477709 - RNA, 18 nt, Human
uaguagcccuuucugugu

SEQ ID NO: 3477710 - RNA, 19 nt, Human
uaguagcccuuucugugug

SEQ ID NO: 3477711 - RNA, 19 nt, Human
uaguagcguuuuuuaaaug

SEQ ID NO: 3477712 - RNA, 14 nt, Human
uaguaggauaugcc

SEQ ID NO: 3477713 - RNA, 13 nt, Human
uaguaggcaagau

SEQ ID NO: 3477714 - RNA, 16 nt, Human
uaguaggcauuuuuac

SEQ ID NO: 3477715 - RNA, 16 nt, Human
uaguagggguaccacu

SEQ ID NO: 3477716 - RNA, 20 nt, Human
uaguaggugaguuuucaccu

SEQ ID NO: 3477717 - RNA, 16 nt, Human
uaguauaucuggacaa

SEQ ID NO: 3477718 - RNA, 13 nt, Human
uaguauauuaaaa

SEQ ID NO: 3477719 - RNA, 18 nt, Human
uaguauauuuauauaauu

SEQ ID NO: 3477720 - RNA, 21 nt, Human
uaguaucaaauauuagaugug

SEQ ID NO: 3477721 - RNA, 12 nt, Human
uaguauccucca

SEQ ID NO: 3477722 - RNA, 15 nt, Human
uaguaucuaacaugu

SEQ ID NO: 3477723 - RNA, 15 nt, Human
uaguaugaaauuaua

SEQ ID NO: 3477724 - RNA, 23 nt, Human
uaguaugaaauuauauaaguauu

SEQ ID NO: 3477725 - RNA, 20 nt, Human
uaguaugacgcugauacaua

SEQ ID NO: 3477726 - RNA, 17 nt, Human
uaguaugaggcauuugu

SEQ ID NO: 3477727 - RNA, 16 nt, Human
uaguauggccuguguc

SEQ ID NO: 3477728 - RNA, 16 nt, Human
uaguaugguggcuggg

SEQ ID NO: 3477729 - RNA, 23 nt, Human
uaguauuaucaaagggauaaaga

SEQ ID NO: 3477730 - RNA, 22 nt, Human
uaguauuaucuuguucaggaaa

SEQ ID NO: 3477731 - RNA, 17 nt, Human
uaguauucauucugcau

SEQ ID NO: 3477732 - RNA, 22 nt, Human
uaguauugaauacuuacauucu

SEQ ID NO: 3477733 - RNA, 22 nt, Human
uaguauuguuguccuuuucaua

SEQ ID NO: 3477734 - RNA, 16 nt, Human
uaguauuuauuuaugu

SEQ ID NO: 3477735 - RNA, 18 nt, Human
uaguauuucuaugaaaua

SEQ ID NO: 3477736 - RNA, 19 nt, Human
uaguauuucuaugaaauau

SEQ ID NO: 3477737 - RNA, 14 nt, Human
uaguauuugaaaac

SEQ ID NO: 3477738 - RNA, 13 nt, Human
uaguauuugaauu

SEQ ID NO: 3477739 - RNA, 18 nt, Human
uaguauuugaauuaaaac

SEQ ID NO: 3477740 - RNA, 20 nt, Human
uaguauuugauucaaaauau

SEQ ID NO: 3477741 - RNA, 15 nt, Human
uaguauuuuuaucca

SEQ ID NO: 3477742 - RNA, 15 nt, Human
uagucaauaagaaaa

SEQ ID NO: 3477743 - RNA, 16 nt, Human
uagucacacguggucu

SEQ ID NO: 3477744 - RNA, 23 nt, Human
uagucacauggccuaugcacaua

SEQ ID NO: 3477745 - RNA, 20 nt, Human
uagucacuuuuuuuuuccaa

SEQ ID NO: 3477746 - RNA, 21 nt, Human
uagucaggugccucaagagaa

SEQ ID NO: 3477747 - RNA, 15 nt, Human
uagucauguuuaucu

SEQ ID NO: 3477748 - RNA, 15 nt, Human
uagucauucuucccu

SEQ ID NO: 3477749 - RNA, 14 nt, Human
uagucauuuacuaa

SEQ ID NO: 3477750 - RNA, 14 nt, Human
uagucccagcuacu

SEQ ID NO: 3477751 - RNA, 20 nt, Human
uagucccagcuacucaggag

SEQ ID NO: 3477752 - RNA, 12 nt, Human
uagucccuucca

SEQ ID NO: 3477753 - RNA, 15 nt, Human
uagucccuuccccuc

SEQ ID NO: 3477754 - RNA, 22 nt, Human
uagucccuuccccucccuggcu

SEQ ID NO: 3477755 - RNA, 23 nt, Human
uagucccuuccccucccuggcuc

SEQ ID NO: 3477756 - RNA, 21 nt, Human
uaguccgugcugacagcugcu

SEQ ID NO: 3477757 - RNA, 23 nt, Human
uaguccgugcugacagcugcucc

SEQ ID NO: 3477758 - RNA, 15 nt, Human
uaguccuagugaacc

SEQ ID NO: 3477759 - RNA, 16 nt, Human
uaguccuagugaaccu

SEQ ID NO: 3477760 - RNA, 22 nt, Human
uaguccuauucuauugcaguua

SEQ ID NO: 3477761 - RNA, 13 nt, Human
uaguccuuggcau

SEQ ID NO: 3477762 - RNA, 19 nt, Human
uagucguggagaugucuuc

SEQ ID NO: 3477763 - RNA, 20 nt, Human
uagucguggagaugucuucg

SEQ ID NO: 3477764 - RNA, 17 nt, Human
uagucuaagacuauaua

SEQ ID NO: 3477765 - RNA, 22 nt, Human
uagucuacucuuaagccaucuu

SEQ ID NO: 3477766 - RNA, 18 nt, Human
uagucuagauggcuccuc

SEQ ID NO: 3477767 - RNA, 13 nt, Human
uagucuaguguag

SEQ ID NO: 3477768 - RNA, 14 nt, Human
uagucuauuagcca

SEQ ID NO: 3477769 - RNA, 13 nt, Human
uagucucaagaau

SEQ ID NO: 3477770 - RNA, 12 nt, Human
uagucucaggac

SEQ ID NO: 3477771 - RNA, 15 nt, Human
uagucucagugaaga

SEQ ID NO: 3477772 - RNA, 18 nt, Human
uagucucagugaagacua

SEQ ID NO: 3477773 - RNA, 21 nt, Human
uagucucauuacuuuugaagu

SEQ ID NO: 3477774 - RNA, 19 nt, Human
uagucuccuuugcacugag

SEQ ID NO: 3477775 - RNA, 20 nt, Human
uagucuccuuugcacugagg

SEQ ID NO: 3477776 - RNA, 20 nt, Human
uagucucuaucauuaaaguu

SEQ ID NO: 3477777 - RNA, 23 nt, Human
uagucugcaaaaugaggaaugua

SEQ ID NO: 3477778 - RNA, 22 nt, Human
uagucugugugggacuguacac

SEQ ID NO: 3477779 - RNA, 17 nt, Human
uagucuuaagaacugcu

SEQ ID NO: 3477780 - RNA, 17 nt, Human
uagucuucaagcagauu

SEQ ID NO: 3477781 - RNA, 12 nt, Human
uagucuucucau

SEQ ID NO: 3477782 - RNA, 11 nt, Human
uagucuuggaa

SEQ ID NO: 3477783 - RNA, 17 nt, Human
uagucuugucucagauu

SEQ ID NO: 3477784 - RNA, 18 nt, Human
uagucuuugccagucauu

SEQ ID NO: 3477785 - RNA, 15 nt, Human
uagucuuuggagaaa

SEQ ID NO: 3477786 - RNA, 15 nt, Human
uagucuuuugcuuuu

SEQ ID NO: 3477787 - RNA, 21 nt, Human
uagucuuuugcuuuuggcaaa

SEQ ID NO: 3477788 - RNA, 20 nt, Human
uagugaaaauuguuuaguga

SEQ ID NO: 3477789 - RNA, 24 nt, Human
uagugaaaccccaucucuacugaa

SEQ ID NO: 3477790 - RNA, 18 nt, Human
uagugaauacugcuacag

SEQ ID NO: 3477791 - RNA, 21 nt, Human
uagugaaucacguaaagcuag

SEQ ID NO: 3477792 - RNA, 15 nt, Human
uagugacccacaugc

SEQ ID NO: 3477793 - RNA, 22 nt, Human
uagugaccccuucccuguccuu

SEQ ID NO: 3477794 - RNA, 18 nt, Human
uagugacccggaggccac

SEQ ID NO: 3477795 - RNA, 23 nt, Human
uagugacuaaaccauugugcauu

SEQ ID NO: 3477796 - RNA, 16 nt, Human
uagugacuuguguccc

SEQ ID NO: 3477797 - RNA, 11 nt, Human
uagugacuuuu

SEQ ID NO: 3477798 - RNA, 16 nt, Human
uagugagaagaauauu

SEQ ID NO: 3477799 - RNA, 18 nt, Human
uagugagaagaauauugu

SEQ ID NO: 3477800 - RNA, 22 nt, Human
uagugagcagucaggaaagaga

SEQ ID NO: 3477801 - RNA, 17 nt, Human
uagugaucaagaagacu

SEQ ID NO: 3477802 - RNA, 20 nt, Human
uagugaucacagcagcuucu

SEQ ID NO: 3477803 - RNA, 21 nt, Human
uagugauuuuuaugccaccug

SEQ ID NO: 3477804 - RNA, 14 nt, Human
uagugcaaaucaua

SEQ ID NO: 3477805 - RNA, 22 nt, Human
uagugcaauauauuuuguaugc

SEQ ID NO: 3477806 - RNA, 12 nt, Human
uagugcagcuga

SEQ ID NO: 3477807 - RNA, 15 nt, Human
uaugcuguacccagu

SEQ ID NO: 3477808 - RNA, 13 nt, Human
uaugcuuaaaaua

SEQ ID NO: 3477809 - RNA, 19 nt, Human
uaugcuuaaaauaagcagg

SEQ ID NO: 3477810 - RNA, 12 nt, Human
uaugcuucauac

SEQ ID NO: 3477811 - RNA, 14 nt, Human
uaugcuucauacag

SEQ ID NO: 3477812 - RNA, 14 nt, Human
uaugcuuccagaaa

SEQ ID NO: 3477813 - RNA, 17 nt, Human
uaugcuuccagaaacac

SEQ ID NO: 3477814 - RNA, 23 nt, Human
uaugcuuccagaaacacccacag

SEQ ID NO: 3477815 - RNA, 16 nt, Human
uaugcuucuguuuuau

SEQ ID NO: 3477816 - RNA, 13 nt, Human
uaugcuucuuuca

SEQ ID NO: 3477817 - RNA, 13 nt, Human
uaugcuugcucua

SEQ ID NO: 3477818 - RNA, 13 nt, Human
uaugcuuuccuuc

SEQ ID NO: 3477819 - RNA, 15 nt, Human
uaugcuuugaaugua

SEQ ID NO: 3477820 - RNA, 15 nt, Human
uauggaaaaauaaaa

SEQ ID NO: 3477821 - RNA, 17 nt, Human
uauggaaacccgagggu

SEQ ID NO: 3477822 - RNA, 15 nt, Human
uauggaaauauauau

SEQ ID NO: 3477823 - RNA, 16 nt, Human
uauggaacacucugag

SEQ ID NO: 3477824 - RNA, 13 nt, Human
uauggaacuucua

SEQ ID NO: 3477825 - RNA, 17 nt, Human
uauggaauacaguguua

SEQ ID NO: 3477826 - RNA, 14 nt, Human
uauggaauuacaug

SEQ ID NO: 3477827 - RNA, 18 nt, Human
uauggaauuacauguaaa

SEQ ID NO: 3477828 - RNA, 19 nt, Human
uauggaauuuauaauucag

SEQ ID NO: 3477829 - RNA, 22 nt, Human
uauggaauuuauaauucaguau

SEQ ID NO: 3477830 - RNA, 20 nt, Human
uauggaauuuuucauugaua

SEQ ID NO: 3477831 - RNA, 17 nt, Human
uauggacaaugacccag

SEQ ID NO: 3477832 - RNA, 18 nt, Human
uauggacagcauugccag

SEQ ID NO: 3477833 - RNA, 12 nt, Human
uauggacucugc

SEQ ID NO: 3477834 - RNA, 17 nt, Human
uauggagaauugcugaa

SEQ ID NO: 3477835 - RNA, 15 nt, Human
uauggagagcccugg

SEQ ID NO: 3477836 - RNA, 21 nt, Human
uauggagcagccuggagaccc

SEQ ID NO: 3477837 - RNA, 17 nt, Human
uauggagcucagagagg

SEQ ID NO: 3477838 - RNA, 18 nt, Human
uauggauaugaaaaauga

SEQ ID NO: 3477839 - RNA, 19 nt, Human
uauggaugauucagaaauu

SEQ ID NO: 3477840 - RNA, 16 nt, Human
uauggaugauuuaagu

SEQ ID NO: 3477841 - RNA, 13 nt, Human
uauggauucuaaa

SEQ ID NO: 3477842 - RNA, 16 nt, Human
uauggauucuaaaaug

SEQ ID NO: 3477843 - RNA, 15 nt, Human
uauggauuuguuaca

SEQ ID NO: 3477844 - RNA, 14 nt, Human
uauggcaaaaaugg

SEQ ID NO: 3477845 - RNA, 15 nt, Human
uauggcagaagacac

SEQ ID NO: 3477846 - RNA, 18 nt, Human
uauggcagaguuguaaau

SEQ ID NO: 3477847 - RNA, 16 nt, Human
uauggcagugucuuuc

SEQ ID NO: 3477848 - RNA, 19 nt, Human
uauggcauuugcagauuuu

SEQ ID NO: 3477849 - RNA, 22 nt, Human
uauggccaggaaguagcacagg

SEQ ID NO: 3477850 - RNA, 22 nt, Human
uauggcccagugucaaguugug

SEQ ID NO: 3477851 - RNA, 21 nt, Human
uauggcccuggccuagcauac

SEQ ID NO: 3477852 - RNA, 23 nt, Human
uauggccucagcugccucacuuc

SEQ ID NO: 3477853 - RNA, 14 nt, Human
uauggccuguguca

SEQ ID NO: 3477854 - RNA, 17 nt, Human
uauggcguaaguacaga

SEQ ID NO: 3477855 - RNA, 19 nt, Human
uauggcguaaguacagaga

SEQ ID NO: 3477856 - RNA, 21 nt, Human
uauggcguaaguacagagaag

SEQ ID NO: 3477857 - RNA, 22 nt, Human
uauggcguaaguacagagaagc

SEQ ID NO: 3477858 - RNA, 23 nt, Human
uauggcguaaguacagagaagcc

SEQ ID NO: 3477859 - RNA, 21 nt, Human
uauggcuagaauauccuacuu

SEQ ID NO: 3477860 - RNA, 22 nt, Human
uauggcuagaauauccuacuuc

SEQ ID NO: 3477861 - RNA, 17 nt, Human
uauggcuuuugugcauu

SEQ ID NO: 3477862 - RNA, 23 nt, Human
uauggcuuuugugcauuaucuag

SEQ ID NO: 3477863 - RNA, 23 nt, Human
uaugggaaaugagaggcauuucc

SEQ ID NO: 3477864 - RNA, 18 nt, Human
uaugggaacacuggcaga

SEQ ID NO: 3477865 - RNA, 23 nt, Human
uaugggacucaaugcacugacau

SEQ ID NO: 3477866 - RNA, 18 nt, Human
uaugggacugagccuggc

SEQ ID NO: 3477867 - RNA, 16 nt, Human
uaugggagagugucaa

SEQ ID NO: 3477868 - RNA, 15 nt, Human
uaugggagccccagg

SEQ ID NO: 3477869 - RNA, 15 nt, Human
uaugggcaaaaaacu

SEQ ID NO: 3477870 - RNA, 23 nt, Human
uauggggaagguuaucagugcuu

SEQ ID NO: 3477871 - RNA, 22 nt, Human
uauggggagaaaagacaugaau

SEQ ID NO: 3477872 - RNA, 23 nt, Human
uauggggagaggaacuccuuggc

SEQ ID NO: 3477873 - RNA, 20 nt, Human
uauggggauagaugugugga

SEQ ID NO: 3477874 - RNA, 22 nt, Human
uaugggggccuggauucauuuc

SEQ ID NO: 3477875 - RNA, 19 nt, Human
uauggggguuguaaauugg

SEQ ID NO: 3477876 - RNA, 23 nt, Human
uauggggguuguaaauuggcaug

SEQ ID NO: 3477877 - RNA, 19 nt, Human
uauggguaggguaaaucag

SEQ ID NO: 3477878 - RNA, 14 nt, Human
uaugggucuaggac

SEQ ID NO: 3477879 - RNA, 18 nt, Human
uaugguaaucauauuaga

SEQ ID NO: 3477880 - RNA, 14 nt, Human
uaugguagaaaaau

SEQ ID NO: 3477881 - RNA, 13 nt, Human
uaugguauaaugg

SEQ ID NO: 3477882 - RNA, 17 nt, Human
uaugguauauauacaua

SEQ ID NO: 3477883 - RNA, 20 nt, Human
uauggucaucuuuuucucua

SEQ ID NO: 3477884 - RNA, 16 nt, Human
uauggucuaauguuua

SEQ ID NO: 3477885 - RNA, 23 nt, Human
uauggucuaauguuuaagcagaa

SEQ ID NO: 3477886 - RNA, 12 nt, Human
uauggugagaug

SEQ ID NO: 3477887 - RNA, 15 nt, Human
uauggugcucugucu

SEQ ID NO: 3477888 - RNA, 17 nt, Human
uaugguggauccaaacu

SEQ ID NO: 3477889 - RNA, 19 nt, Human
uaugguguuucucccucuc

SEQ ID NO: 3477890 - RNA, 22 nt, Human
uaugguuacuucuucucuuaga

SEQ ID NO: 3477891 - RNA, 13 nt, Human
uaugguuaugaaa

SEQ ID NO: 3477892 - RNA, 21 nt, Human
uauguaaaaggccaaaccucu

SEQ ID NO: 3477893 - RNA, 17 nt, Human
uauguaaaauaaaauua

SEQ ID NO: 3477894 - RNA, 14 nt, Human
uauguaaaauuuug

SEQ ID NO: 3477895 - RNA, 15 nt, Human
uauguaaacaggaga

SEQ ID NO: 3477896 - RNA, 18 nt, Human
uauguaaacauaauucuu

SEQ ID NO: 3477897 - RNA, 20 nt, Human
uauguaaaguauguaaacag

SEQ ID NO: 3477898 - RNA, 20 nt, Human
uauguaaauagguuucuaaa

SEQ ID NO: 3477899 - RNA, 12 nt, Human
uauguaaauccc

SEQ ID NO: 3477900 - RNA, 15 nt, Human
uauguaaaucccauu

SEQ ID NO: 3477901 - RNA, 13 nt, Human
uauguaaaugugc

SEQ ID NO: 3477902 - RNA, 15 nt, Human
uauguaaauuaugua

SEQ ID NO: 3477903 - RNA, 16 nt, Human
uauguaacaauuguuu

SEQ ID NO: 3477904 - RNA, 16 nt, Human
uauguaauaaugugaa

SEQ ID NO: 3477905 - RNA, 14 nt, Human
uauguacaaguguu

SEQ ID NO: 3477906 - RNA, 13 nt, Human
uauguacauuucu

SEQ ID NO: 3477907 - RNA, 16 nt, Human
uauguacauuucuaag

SEQ ID NO: 3477908 - RNA, 14 nt, Human
uauguaccaagaau

SEQ ID NO: 3477909 - RNA, 19 nt, Human
uauguacccucugaaauac

SEQ ID NO: 3477910 - RNA, 14 nt, Human
uauguaccucuuuu

SEQ ID NO: 3477911 - RNA, 20 nt, Human
uauguacuccucuuuacacu

SEQ ID NO: 3477912 - RNA, 15 nt, Human
uauguacuugucaaa

SEQ ID NO: 3477913 - RNA, 23 nt, Human
uauguagaaaaaaguaaauguga

SEQ ID NO: 3477914 - RNA, 17 nt, Human
uauguagauauuuggcu

SEQ ID NO: 3477915 - RNA, 20 nt, Human
uauguagauguaugcacaca

SEQ ID NO: 3477916 - RNA, 23 nt, Human
uauguagccuucacacagauaga

SEQ ID NO: 3477917 - RNA, 18 nt, Human
uauguaggaaaaaaauag

SEQ ID NO: 3477918 - RNA, 14 nt, Human
uauguaguaauuga

SEQ ID NO: 3477919 - RNA, 20 nt, Human
uauguaguaauugacaugug

SEQ ID NO: 3477920 - RNA, 18 nt, Human
uauguaguccgugcugac

SEQ ID NO: 3477921 - RNA, 12 nt, Human
uauguauaaaau

SEQ ID NO: 3477922 - RNA, 19 nt, Human
uauguauauuuuuuuaauu

SEQ ID NO: 3477923 - RNA, 14 nt, Human
uauguauguaaaaa

SEQ ID NO: 3477924 - RNA, 16 nt, Human
uauguaugugaaaguu

SEQ ID NO: 3477925 - RNA, 22 nt, Human
uauguauguguuuagaauugaa

SEQ ID NO: 3477926 - RNA, 22 nt, Human
uauguauguuuacacugucaaa

SEQ ID NO: 3477927 - RNA, 17 nt, Human
uauguauguuuacauau

SEQ ID NO: 3477928 - RNA, 22 nt, Human
uauguauuaauaaauagagcaa

SEQ ID NO: 3477929 - RNA, 17 nt, Human
uauguauuagugauauu

SEQ ID NO: 3477930 - RNA, 22 nt, Human
uauguauuagugauauuucucu

SEQ ID NO: 3477931 - RNA, 23 nt, Human
uauguauuagugauauuucucua

SEQ ID NO: 3477932 - RNA, 12 nt, Human
uauguauucuuu

SEQ ID NO: 3477933 - RNA, 12 nt, Human
uauguauuuaua

SEQ ID NO: 3477934 - RNA, 16 nt, Human
uaugucaagaggcuga

SEQ ID NO: 3477935 - RNA, 15 nt, Human
uaugucacuagaaug

SEQ ID NO: 3477936 - RNA, 15 nt, Human
uaugucaucauacau

SEQ ID NO: 3477937 - RNA, 13 nt, Human
uaugucauuucau

SEQ ID NO: 3477938 - RNA, 16 nt, Human
uaugucauuucauuuc

SEQ ID NO: 3477939 - RNA, 17 nt, Human
uauguccacuguguaua

SEQ ID NO: 3477940 - RNA, 20 nt, Human
uaugucccuucacauaguuu

SEQ ID NO: 3477941 - RNA, 13 nt, Human
uauguccuaagga

SEQ ID NO: 3477942 - RNA, 12 nt, Human
uaugucuauuua

SEQ ID NO: 3477943 - RNA, 13 nt, Human
uaugucuauuuaa

SEQ ID NO: 3477944 - RNA, 15 nt, Human
uaugucuauuuaagc

SEQ ID NO: 3477945 - RNA, 18 nt, Human
uaugucugguucucaauu

SEQ ID NO: 3477946 - RNA, 14 nt, Human
uaugucuguuuaag

SEQ ID NO: 3477947 - RNA, 16 nt, Human
uaugucuguuuaagaa

SEQ ID NO: 3477948 - RNA, 17 nt, Human
uaugucuuggacacugu

SEQ ID NO: 3477949 - RNA, 21 nt, Human
uaugucuuggacacuguacaa

SEQ ID NO: 3477950 - RNA, 23 nt, Human
uaugucuuuugaugaauagaagu

SEQ ID NO: 3477951 - RNA, 14 nt, Human
uaugugaaacaugu

SEQ ID NO: 3477952 - RNA, 14 nt, Human
uauuacaauauuug

SEQ ID NO: 3477953 - RNA, 15 nt, Human
uauuacaaugaucac

SEQ ID NO: 3477954 - RNA, 18 nt, Human
uauuacacauuuguacag

SEQ ID NO: 3477955 - RNA, 17 nt, Human
uauuacagauaaaaugu

SEQ ID NO: 3477956 - RNA, 14 nt, Human
uauuacaguauaau

SEQ ID NO: 3477957 - RNA, 18 nt, Human
uauuacaguauaauuaac

SEQ ID NO: 3477958 - RNA, 22 nt, Human
uauuacauaaaggcuaacuaug

SEQ ID NO: 3477959 - RNA, 13 nt, Human
uauuacauaaaua

SEQ ID NO: 3477960 - RNA, 17 nt, Human
uauuacauauaucauua

SEQ ID NO: 3477961 - RNA, 20 nt, Human
uauuacauguaauuugauga

SEQ ID NO: 3477962 - RNA, 17 nt, Human
uauuaccaaaagucaac

SEQ ID NO: 3477963 - RNA, 20 nt, Human
uauuaccacugaagauagaa

SEQ ID NO: 3477964 - RNA, 19 nt, Human
uauuaccagcaagaauaaa

SEQ ID NO: 3477965 - RNA, 21 nt, Human
uauuaccagcaagaauaaaaa

SEQ ID NO: 3477966 - RNA, 22 nt, Human
uauuacguaugucugguucuca

SEQ ID NO: 3477967 - RNA, 17 nt, Human
uauuacuaaauugaccu

SEQ ID NO: 3477968 - RNA, 22 nt, Human
uauuacuaaggaguaaucugug

SEQ ID NO: 3477969 - RNA, 21 nt, Human
uauuacuagaagaugaauaca

SEQ ID NO: 3477970 - RNA, 22 nt, Human
uauuacuaugacugcuccccag

SEQ ID NO: 3477971 - RNA, 16 nt, Human
uauuacugacauuucu

SEQ ID NO: 3477972 - RNA, 18 nt, Human
uauuacugacauuucuuc

SEQ ID NO: 3477973 - RNA, 21 nt, Human
uauuacuggcguggauuaaac

SEQ ID NO: 3477974 - RNA, 22 nt, Human
uauuacuggcguggauuaaacu

SEQ ID NO: 3477975 - RNA, 21 nt, Human
uauuacuguugauaauucuua

SEQ ID NO: 3477976 - RNA, 15 nt, Human
uauuacuguuuauua

SEQ ID NO: 3477977 - RNA, 21 nt, Human
uauuacuguuugucuucuccc

SEQ ID NO: 3477978 - RNA, 13 nt, Human
uauuacuuccaug

SEQ ID NO: 3477979 - RNA, 19 nt, Human
uauuacuuccaugaauuuu

SEQ ID NO: 3477980 - RNA, 22 nt, Human
uauuacuuguaaauauaaagac

SEQ ID NO: 3477981 - RNA, 14 nt, Human
uauuacuuuaacau

SEQ ID NO: 3477982 - RNA, 15 nt, Human
uauuacuuuaacaug

SEQ ID NO: 3477983 - RNA, 17 nt, Human
uauuacuuuaacaugcc

SEQ ID NO: 3477984 - RNA, 14 nt, Human
uauuagaaaacuuu

SEQ ID NO: 3477985 - RNA, 17 nt, Human
uauuagaaaacuuuguu

SEQ ID NO: 3477986 - RNA, 18 nt, Human
uauuagaaaacuuuguua

SEQ ID NO: 3477987 - RNA, 15 nt, Human
uauuagaaaggcucu

SEQ ID NO: 3477988 - RNA, 15 nt, Human
uauuagaauaccaca

SEQ ID NO: 3477989 - RNA, 22 nt, Human
uauuagaaucaaacauuuugaa

SEQ ID NO: 3477990 - RNA, 23 nt, Human
uauuagaaucaaacauuuugaaa

SEQ ID NO: 3477991 - RNA, 12 nt, Human
uauuagaugaau

SEQ ID NO: 3477992 - RNA, 14 nt, Human
uauuagaugaauua

SEQ ID NO: 3477993 - RNA, 14 nt, Human
uauuagaugugauu

SEQ ID NO: 3477994 - RNA, 16 nt, Human
uauuagaugugauuua

SEQ ID NO: 3477995 - RNA, 21 nt, Human
uauuagauguucucuaucauu

SEQ ID NO: 3477996 - RNA, 15 nt, Human
uauuagccacaaaau

SEQ ID NO: 3477997 - RNA, 13 nt, Human
uauuagccaggau

SEQ ID NO: 3477998 - RNA, 16 nt, Human
uauuagccagucuuua

SEQ ID NO: 3477999 - RNA, 17 nt, Human
uauuagcccugcauuuu

SEQ ID NO: 3478000 - RNA, 22 nt, Human
uauuagcccuucuccauggccc

SEQ ID NO: 3478001 - RNA, 23 nt, Human
uauuagcgacaacagauuggauu

SEQ ID NO: 3478002 - RNA, 19 nt, Human
uauuaggaaguguuuaugu

SEQ ID NO: 3478003 - RNA, 15 nt, Human
uauuagggagaaaau

SEQ ID NO: 3478004 - RNA, 18 nt, Human
uauuagggguaauauauu

SEQ ID NO: 3478005 - RNA, 17 nt, Human
uauuaggugcaauuuca

SEQ ID NO: 3478006 - RNA, 13 nt, Human
uauuaguauuguu

SEQ ID NO: 3478007 - RNA, 15 nt, Human
uauuaguauuguugu

SEQ ID NO: 3478008 - RNA, 17 nt, Human
uauuaguauuguugucc

SEQ ID NO: 3478009 - RNA, 18 nt, Human
uauuagucauagaagaac

SEQ ID NO: 3478010 - RNA, 21 nt, Human
uauuagucuuggggcaggaug

SEQ ID NO: 3478011 - RNA, 14 nt, Human
uauuagugauauuu

SEQ ID NO: 3478012 - RNA, 16 nt, Human
uauuaguguuauauga

SEQ ID NO: 3478013 - RNA, 23 nt, Human
uauuaguguuauaugaacauaca

SEQ ID NO: 3478014 - RNA, 13 nt, Human
uauuaguuaauau

SEQ ID NO: 3478015 - RNA, 19 nt, Human
uauuaguuaauggauuaaa

SEQ ID NO: 3478016 - RNA, 12 nt, Human
uauuaguugcuu

SEQ ID NO: 3478017 - RNA, 15 nt, Human
uauuaguuuugcaua

SEQ ID NO: 3478018 - RNA, 24 nt, Human
uauuauaaaaggggguccguggaa

SEQ ID NO: 3478019 - RNA, 19 nt, Human
uauuauaaacaagaaugaa

SEQ ID NO: 3478020 - RNA, 16 nt, Human
uauuauaacuuaaaaa

SEQ ID NO: 3478021 - RNA, 17 nt, Human
uauuauaagcauugaaa

SEQ ID NO: 3478022 - RNA, 21 nt, Human
uauuauaagcauugaaauuau

SEQ ID NO: 3478023 - RNA, 19 nt, Human
uauuauaagucuuacauaa

SEQ ID NO: 3478024 - RNA, 19 nt, Human
uauuauacaggaaagcaau

SEQ ID NO: 3478025 - RNA, 12 nt, Human
uauuauaccuuu

SEQ ID NO: 3478026 - RNA, 15 nt, Human
uauuauacuaagaaa

SEQ ID NO: 3478027 - RNA, 18 nt, Human
uauuauacuaagaaaaga

SEQ ID NO: 3478028 - RNA, 19 nt, Human
uauuauacuaagaaaagau

SEQ ID NO: 3478029 - RNA, 14 nt, Human
uauuauacuguauu

SEQ ID NO: 3478030 - RNA, 17 nt, Human
uauuauacuuguaauua

SEQ ID NO: 3478031 - RNA, 20 nt, Human
uauuauagagaguuaugaac

SEQ ID NO: 3478032 - RNA, 22 nt, Human
uauuauagagcagaaauucugu

SEQ ID NO: 3478033 - RNA, 12 nt, Human
uauuauauggaa

SEQ ID NO: 3478034 - RNA, 17 nt, Human
uauuauauguucuagaa

SEQ ID NO: 3478035 - RNA, 23 nt, Human
uauuauauucauucuuuuugaaa

SEQ ID NO: 3478036 - RNA, 12 nt, Human
uauuauauuugg

SEQ ID NO: 3478037 - RNA, 17 nt, Human
uauuauauuuggaugca

SEQ ID NO: 3478038 - RNA, 16 nt, Human
uauuaucaaguagacu

SEQ ID NO: 3478039 - RNA, 16 nt, Human
uauuaucaauguuuac

SEQ ID NO: 3478040 - RNA, 22 nt, Human
uauuaucaugcaaaugcuguau

SEQ ID NO: 3478041 - RNA, 13 nt, Human
uauuaucugucag

SEQ ID NO: 3478042 - RNA, 20 nt, Human
uauuaucuuguucaggaaaa

SEQ ID NO: 3478043 - RNA, 13 nt, Human
uauuaucuuugua

SEQ ID NO: 3478044 - RNA, 12 nt, Human
uauuaugaaacu

SEQ ID NO: 3478045 - RNA, 22 nt, Human
uauuaugaaacuuguguaaaua

SEQ ID NO: 3478046 - RNA, 14 nt, Human
uauuaugaauguga

SEQ ID NO: 3478047 - RNA, 20 nt, Human
uauuaugaaugugaagccuu

SEQ ID NO: 3478048 - RNA, 17 nt, Human
uauuaugagaugcuggc

SEQ ID NO: 3478049 - RNA, 24 nt, Human
uauuaugcccaguuucugccucug

SEQ ID NO: 3478050 - RNA, 13 nt, Human
uauuaugcuucuu

SEQ ID NO: 3478051 - RNA, 19 nt, Human
uauuaugcuuuauuggaaa

SEQ ID NO: 3478052 - RNA, 21 nt, Human
uauuauggaagauuuuaaauu

SEQ ID NO: 3478053 - RNA, 15 nt, Human
uauuauguaaauccc

SEQ ID NO: 3478054 - RNA, 17 nt, Human
uauuaugucucuucuga

SEQ ID NO: 3478055 - RNA, 16 nt, Human
uauuauguuaaaacug

SEQ ID NO: 3478056 - RNA, 17 nt, Human
uauuauuacuuguaaau

SEQ ID NO: 3478057 - RNA, 18 nt, Human
uauuauuacuuguaaaua

SEQ ID NO: 3478058 - RNA, 22 nt, Human
uauuauucaccauguaaaacaa

SEQ ID NO: 3478059 - RNA, 16 nt, Human
uauuauugaaauugua

SEQ ID NO: 3478060 - RNA, 16 nt, Human
uauuauugcuguugcu

SEQ ID NO: 3478061 - RNA, 19 nt, Human
uauuauugcuguugcuuga

SEQ ID NO: 3478062 - RNA, 21 nt, Human
uauuauugugguaggccuuuu

SEQ ID NO: 3478063 - RNA, 22 nt, Human
uauuauugugguaggccuuuua

SEQ ID NO: 3478064 - RNA, 12 nt, Human
uauuauuguucu

SEQ ID NO: 3478065 - RNA, 15 nt, Human
uauuauuuauuucug

SEQ ID NO: 3478066 - RNA, 19 nt, Human
uauuauuucuaggaagaau

SEQ ID NO: 3478067 - RNA, 22 nt, Human
uauuauuucuaggaagaauuuu

SEQ ID NO: 3478068 - RNA, 12 nt, Human
uauuauuucuau

SEQ ID NO: 3478069 - RNA, 20 nt, Human
uauuauuugcagugcaguau

SEQ ID NO: 3478070 - RNA, 23 nt, Human
uauuauuuggcaguuugguauuu

SEQ ID NO: 3478071 - RNA, 16 nt, Human
uauuauuuucaccugu

SEQ ID NO: 3478072 - RNA, 13 nt, Human
uauuauuuuccaa

SEQ ID NO: 3478073 - RNA, 18 nt, Human
uauuauuuuggggucucu

SEQ ID NO: 3478074 - RNA, 20 nt, Human
uauuauuuuuauaauuguac

SEQ ID NO: 3478075 - RNA, 17 nt, Human
uauuauuuuuuccacau

SEQ ID NO: 3478076 - RNA, 18 nt, Human
uauucaaaguugccuaaa

SEQ ID NO: 3478077 - RNA, 21 nt, Human
uauucaaaguugccuaaaucc

SEQ ID NO: 3478078 - RNA, 17 nt, Human
uauucaagaaagccagu

SEQ ID NO: 3478079 - RNA, 19 nt, Human
uauucaagaaagccagucu

SEQ ID NO: 3478080 - RNA, 20 nt, Human
uauucaagaaagccagucuu

SEQ ID NO: 3478081 - RNA, 22 nt, Human
uauucaagaaagccagucuuaa

SEQ ID NO: 3478082 - RNA, 19 nt, Human
uauucaagguaaaauucua

SEQ ID NO: 3478083 - RNA, 20 nt, Human
uauucaagguaaaauucuaa

SEQ ID NO: 3478084 - RNA, 11 nt, Human
uauucaauaaa

SEQ ID NO: 3478085 - RNA, 17 nt, Human
uauucaauaagagauua

SEQ ID NO: 3478086 - RNA, 16 nt, Human
uauucaauucuuuuaa

SEQ ID NO: 3478087 - RNA, 21 nt, Human
uauucacgugcagcagcaaca

SEQ ID NO: 3478088 - RNA, 21 nt, Human
uauucacugaaguucuccuga

SEQ ID NO: 3478089 - RNA, 13 nt, Human
uauucacugauuu

SEQ ID NO: 3478090 - RNA, 19 nt, Human
uauucacugauuugacaua

SEQ ID NO: 3478091 - RNA, 14 nt, Human
uauucacugggcca

SEQ ID NO: 3478092 - RNA, 16 nt, Human
uauucagaaucuuugu

SEQ ID NO: 3478093 - RNA, 22 nt, Human
uauucagacaagcaacagguuu

SEQ ID NO: 3478094 - RNA, 22 nt, Human
uauucagcaaggcgcuaacuug

SEQ ID NO: 3478095 - RNA, 23 nt, Human
uauucagcaccaagcauguccca

SEQ ID NO: 3478096 - RNA, 19 nt, Human
uauugccaaacauuaaugu

SEQ ID NO: 3478097 - RNA, 22 nt, Human
uauugccaaacauuaauguuga

SEQ ID NO: 3478098 - RNA, 22 nt, Human
uauugccaggaaaggagaguac

SEQ ID NO: 3478099 - RNA, 21 nt, Human
uauugcccaugauauaacuuu

SEQ ID NO: 3478100 - RNA, 13 nt, Human
uauugccucacuu

SEQ ID NO: 3478101 - RNA, 22 nt, Human
uauugccuucucaccagcugca

SEQ ID NO: 3478102 - RNA, 17 nt, Human
uauugccuuuuaauuuu

SEQ ID NO: 3478103 - RNA, 13 nt, Human
uauugcuacuucc

SEQ ID NO: 3478104 - RNA, 15 nt, Human
uauugcuagagcucc

SEQ ID NO: 3478105 - RNA, 19 nt, Human
uauugcugagagaaauaug

SEQ ID NO: 3478106 - RNA, 22 nt, Human
uauugcugauggugcaaugacc

SEQ ID NO: 3478107 - RNA, 15 nt, Human
uauugcuguugcuug

SEQ ID NO: 3478108 - RNA, 18 nt, Human
uauugcuuaguaaaauuu

SEQ ID NO: 3478109 - RNA, 21 nt, Human
uauugcuugauacuuuugaca

SEQ ID NO: 3478110 - RNA, 19 nt, Human
uauugcuuguuggauuuuu

SEQ ID NO: 3478111 - RNA, 15 nt, Human
uauuggaaaaaucac

SEQ ID NO: 3478112 - RNA, 18 nt, Human
uauuggaaauggaugcaa

SEQ ID NO: 3478113 - RNA, 19 nt, Human
uauuggaaauggaugcaaa

SEQ ID NO: 3478114 - RNA, 17 nt, Human
uauuggacaaagaaccu

SEQ ID NO: 3478115 - RNA, 19 nt, Human
uauuggccaaggaaaggca

SEQ ID NO: 3478116 - RNA, 22 nt, Human
uauuggccauaagcaacaauuu

SEQ ID NO: 3478117 - RNA, 12 nt, Human
uauuggccugga

SEQ ID NO: 3478118 - RNA, 14 nt, Human
uauuggccuggagg

SEQ ID NO: 3478119 - RNA, 14 nt, Human
uauuggcugggagu

SEQ ID NO: 3478120 - RNA, 14 nt, Human
uauuggcuuuucug

SEQ ID NO: 3478121 - RNA, 18 nt, Human
uauuggcuuuucugaucc

SEQ ID NO: 3478122 - RNA, 22 nt, Human
uauuggcuuuucugauccaguu

SEQ ID NO: 3478123 - RNA, 18 nt, Human
uauuggggccaugaguaa

SEQ ID NO: 3478124 - RNA, 16 nt, Human
uauuggguucauuauu

SEQ ID NO: 3478125 - RNA, 17 nt, Human
uauuggguuccauucuc

SEQ ID NO: 3478126 - RNA, 18 nt, Human
uauuguaaacauguguuu

SEQ ID NO: 3478127 - RNA, 16 nt, Human
uauuguaaauacaagu

SEQ ID NO: 3478128 - RNA, 15 nt, Human
uauuguaaauauugu

SEQ ID NO: 3478129 - RNA, 13 nt, Human
uauuguaaauuau

SEQ ID NO: 3478130 - RNA, 17 nt, Human
uauuguaagaaauacug

SEQ ID NO: 3478131 - RNA, 12 nt, Human
uauuguaagaua

SEQ ID NO: 3478132 - RNA, 16 nt, Human
uauuguacaaaguauu

SEQ ID NO: 3478133 - RNA, 15 nt, Human
uauuguacacuuuuu

SEQ ID NO: 3478134 - RNA, 20 nt, Human
uauuguacacuuuuuugggg

SEQ ID NO: 3478135 - RNA, 12 nt, Human
uauuguacaguu

SEQ ID NO: 3478136 - RNA, 11 nt, Human
uauuguacaua

SEQ ID NO: 3478137 - RNA, 13 nt, Human
uauuguacauaaa

SEQ ID NO: 3478138 - RNA, 15 nt, Human
uauuguacauaaaag

SEQ ID NO: 3478139 - RNA, 16 nt, Human
uauuguacauaaaaga

SEQ ID NO: 3478140 - RNA, 17 nt, Human
uauuguacauaaaagaa

SEQ ID NO: 3478141 - RNA, 16 nt, Human
uauuguacguuuaaag

SEQ ID NO: 3478142 - RNA, 18 nt, Human
uauuguagcauccuggaa

SEQ ID NO: 3478143 - RNA, 21 nt, Human
uauuguagcauccuggaauau

SEQ ID NO: 3478144 - RNA, 17 nt, Human
uauuguagcauuucuug

SEQ ID NO: 3478145 - RNA, 22 nt, Human
uauuguauaagauuagaaugaa

SEQ ID NO: 3478146 - RNA, 16 nt, Human
uauuguauuguuagau

SEQ ID NO: 3478147 - RNA, 17 nt, Human
uauuguauuguuagaug

SEQ ID NO: 3478148 - RNA, 18 nt, Human
uauuguauuuauuccaua

SEQ ID NO: 3478149 - RNA, 13 nt, Human
uauugucaaagug

SEQ ID NO: 3478150 - RNA, 17 nt, Human
uauuguccauuguccaa

SEQ ID NO: 3478151 - RNA, 20 nt, Human
uauugucccuggcuuccuua

SEQ ID NO: 3478152 - RNA, 17 nt, Human
uauuguccuauuagugu

SEQ ID NO: 3478153 - RNA, 18 nt, Human
uauuguccuauuaguguu

SEQ ID NO: 3478154 - RNA, 23 nt, Human
uauugucugaacuugcauuguga

SEQ ID NO: 3478155 - RNA, 15 nt, Human
uauugugaaguacau

SEQ ID NO: 3478156 - RNA, 19 nt, Human
uauugugaaguacauauua

SEQ ID NO: 3478157 - RNA, 13 nt, Human
uauugugaucuau

SEQ ID NO: 3478158 - RNA, 22 nt, Human
uauugugauuucccguggcccc

SEQ ID NO: 3478159 - RNA, 18 nt, Human
uauugugauuugacuguu

SEQ ID NO: 3478160 - RNA, 20 nt, Human
uauugugauuugacuguuuu

SEQ ID NO: 3478161 - RNA, 19 nt, Human
uauugugcaauguaaauau

SEQ ID NO: 3478162 - RNA, 23 nt, Human
uauugugcaauguguauaaacaa

SEQ ID NO: 3478163 - RNA, 15 nt, Human
uauugugcuguucua

SEQ ID NO: 3478164 - RNA, 18 nt, Human
uauuguggauaacaaaga

SEQ ID NO: 3478165 - RNA, 20 nt, Human
uauugugggacuuauuacaa

SEQ ID NO: 3478166 - RNA, 22 nt, Human
uauugugggacuuauuacaauu

SEQ ID NO: 3478167 - RNA, 13 nt, Human
uauugugguauug

SEQ ID NO: 3478168 - RNA, 14 nt, Human
uauuguguuccuuu

SEQ ID NO: 3478169 - RNA, 17 nt, Human
uauuguguugacuuuau

SEQ ID NO: 3478170 - RNA, 22 nt, Human
uauuguguugacuuuauaaauu

SEQ ID NO: 3478171 - RNA, 21 nt, Human
uauuguguuugucauuagccu

SEQ ID NO: 3478172 - RNA, 22 nt, Human
uauuguuacguagccuaaggcu

SEQ ID NO: 3478173 - RNA, 14 nt, Human
uauuguuacucuua

SEQ ID NO: 3478174 - RNA, 18 nt, Human
uauuguuacucuuacgaa

SEQ ID NO: 3478175 - RNA, 23 nt, Human
uauuguuccagcaguuuucaagu

SEQ ID NO: 3478176 - RNA, 13 nt, Human
uauuguucccagu

SEQ ID NO: 3478177 - RNA, 13 nt, Human
uauuguuccuaag

SEQ ID NO: 3478178 - RNA, 18 nt, Human
uauuguuccuaaguucuu

SEQ ID NO: 3478179 - RNA, 17 nt, Human
uauuguugaaaaaguuu

SEQ ID NO: 3478180 - RNA, 22 nt, Human
uauuguuguccuuuucauaggu

SEQ ID NO: 3478181 - RNA, 17 nt, Human
uauuguuuaaaaucauu

SEQ ID NO: 3478182 - RNA, 17 nt, Human
uauuguuuaaagcaacu

SEQ ID NO: 3478183 - RNA, 12 nt, Human
uauuguuucugc

SEQ ID NO: 3478184 - RNA, 16 nt, Human
uauuguuugguaaaug

SEQ ID NO: 3478185 - RNA, 17 nt, Human
uauuguuuuacaauagu

SEQ ID NO: 3478186 - RNA, 22 nt, Human
uauuguuuuacaauaguucugu

SEQ ID NO: 3478187 - RNA, 20 nt, Human
uauuguuuucaguguacaug

SEQ ID NO: 3478188 - RNA, 22 nt, Human
uauuguuuucaguguacaugga

SEQ ID NO: 3478189 - RNA, 20 nt, Human
uauuuaaaaaacuaaaaacu

SEQ ID NO: 3478190 - RNA, 13 nt, Human
uauuuaaaaacaa

SEQ ID NO: 3478191 - RNA, 13 nt, Human
uauuuaaaaauaa

SEQ ID NO: 3478192 - RNA, 15 nt, Human
uauuuaaaaauagaa

SEQ ID NO: 3478193 - RNA, 18 nt, Human
uauuuaaaaaugucuugc

SEQ ID NO: 3478194 - RNA, 15 nt, Human
uauuuaaaauagcaa

SEQ ID NO: 3478195 - RNA, 21 nt, Human
uauuuaaaccgcuaaaagaaa

SEQ ID NO: 3478196 - RNA, 12 nt, Human
uauuuaaacuau

SEQ ID NO: 3478197 - RNA, 17 nt, Human
uauuuaaacucaagaca

SEQ ID NO: 3478198 - RNA, 21 nt, Human
uauuuaaacuuauaaaucaua

SEQ ID NO: 3478199 - RNA, 17 nt, Human
uauuuaaagacaaagac

SEQ ID NO: 3478200 - RNA, 12 nt, Human
uauuuaaaggga

SEQ ID NO: 3478201 - RNA, 17 nt, Human
uauuuaaauagaugaca

SEQ ID NO: 3478202 - RNA, 12 nt, Human
uauuuaaauguc

SEQ ID NO: 3478203 - RNA, 19 nt, Human
uauuuaaaugucuaaugua

SEQ ID NO: 3478204 - RNA, 14 nt, Human
uauuuaaauuacaa

SEQ ID NO: 3478205 - RNA, 13 nt, Human
uauuuaaauucuu

SEQ ID NO: 3478206 - RNA, 14 nt, Human
uauuuaaauucuuu

SEQ ID NO: 3478207 - RNA, 15 nt, Human
uauuuaacaagaucu

SEQ ID NO: 3478208 - RNA, 23 nt, Human
uauuuaacagcugaauuaucuau

SEQ ID NO: 3478209 - RNA, 15 nt, Human
uauuuaacauuauuu

SEQ ID NO: 3478210 - RNA, 13 nt, Human
uauuuaacugacu

SEQ ID NO: 3478211 - RNA, 14 nt, Human
uauuuaacuugagg

SEQ ID NO: 3478212 - RNA, 14 nt, Human
uauuuaagacuaaa

SEQ ID NO: 3478213 - RNA, 16 nt, Human
uauuuaagaugugaaa

SEQ ID NO: 3478214 - RNA, 18 nt, Human
uauuuaagaugugaaaau

SEQ ID NO: 3478215 - RNA, 16 nt, Human
uauuuaagcaaauacu

SEQ ID NO: 3478216 - RNA, 18 nt, Human
uauuuaagccucauauuu

SEQ ID NO: 3478217 - RNA, 22 nt, Human
uauuuaaggagauguaagagcu

SEQ ID NO: 3478218 - RNA, 23 nt, Human
uauuuaaggagauguaagagcuu

SEQ ID NO: 3478219 - RNA, 21 nt, Human
uauuuaagguagcuucagcua

SEQ ID NO: 3478220 - RNA, 15 nt, Human
uauuuaaguauucaa

SEQ ID NO: 3478221 - RNA, 18 nt, Human
uauuuaaguauucaagaa

SEQ ID NO: 3478222 - RNA, 21 nt, Human
uauuuaaguauucaagaaagc

SEQ ID NO: 3478223 - RNA, 13 nt, Human
uauuuaauagcaa

SEQ ID NO: 3478224 - RNA, 14 nt, Human
uauuuaauagguuu

SEQ ID NO: 3478225 - RNA, 15 nt, Human
uauuuaauaugcuua

SEQ ID NO: 3478226 - RNA, 13 nt, Human
uauuuaaucuuuu

SEQ ID NO: 3478227 - RNA, 14 nt, Human
uauuuaaugcugug

SEQ ID NO: 3478228 - RNA, 18 nt, Human
uauuuaauguugaacaaa

SEQ ID NO: 3478229 - RNA, 23 nt, Human
uauuuaauguugaacaaaauaaa

SEQ ID NO: 3478230 - RNA, 20 nt, Human
uauuuaauguuuuaaaugua

SEQ ID NO: 3478231 - RNA, 22 nt, Human
uauuuaauguuuuaaauguaca

SEQ ID NO: 3478232 - RNA, 17 nt, Human
uauuuaauuagugcuaa

SEQ ID NO: 3478233 - RNA, 18 nt, Human
uauuuaauuagugcuaag

SEQ ID NO: 3478234 - RNA, 19 nt, Human
uauuuaauuagugcuaagu

SEQ ID NO: 3478235 - RNA, 20 nt, Human
uauuuaauuguaaacuguac

SEQ ID NO: 3478236 - RNA, 13 nt, Human
uauuuaauuugaa

SEQ ID NO: 3478237 - RNA, 14 nt, Human
uauuuacaaauguu

SEQ ID NO: 3478238 - RNA, 15 nt, Human
uauuuacaagaagaa

SEQ ID NO: 3478239 - RNA, 22 nt, Human
uauuuacagugaaaauguaagc

SEQ ID NO: 3478240 - RNA, 14 nt, Human
uauuuacauaugaa

SEQ ID NO: 3478241 - RNA, 16 nt, Human
uauuugcaacauuuac

SEQ ID NO: 3478242 - RNA, 23 nt, Human
uauuugcagucauggagaaccac

SEQ ID NO: 3478243 - RNA, 15 nt, Human
uauuugcauauguau

SEQ ID NO: 3478244 - RNA, 15 nt, Human
uauuugcauguuaug

SEQ ID NO: 3478245 - RNA, 16 nt, Human
uauuugccaugggcuu

SEQ ID NO: 3478246 - RNA, 11 nt, Human
uauuugcuuuu

SEQ ID NO: 3478247 - RNA, 15 nt, Human
uauuuggauaucugu

SEQ ID NO: 3478248 - RNA, 15 nt, Human
uauuuggaugcagag

SEQ ID NO: 3478249 - RNA, 21 nt, Human
uauuuggcaguuugguauuug

SEQ ID NO: 3478250 - RNA, 14 nt, Human
uauuugggaaguga

SEQ ID NO: 3478251 - RNA, 21 nt, Human
uauuugggguugcaucagaaa

SEQ ID NO: 3478252 - RNA, 22 nt, Human
uauuuggugauuacauuuuaaa

SEQ ID NO: 3478253 - RNA, 23 nt, Human
uauuuguaaaagaacaguaaaca

SEQ ID NO: 3478254 - RNA, 16 nt, Human
uauuuguaaaaugaca

SEQ ID NO: 3478255 - RNA, 13 nt, Human
uauuuguaaaucu

SEQ ID NO: 3478256 - RNA, 17 nt, Human
uauuuguaaaucugcca

SEQ ID NO: 3478257 - RNA, 20 nt, Human
uauuuguaaauuuaguguuu

SEQ ID NO: 3478258 - RNA, 12 nt, Human
uauuuguaagau

SEQ ID NO: 3478259 - RNA, 20 nt, Human
uauuuguaauagauguuuga

SEQ ID NO: 3478260 - RNA, 13 nt, Human
uauuuguaauuaa

SEQ ID NO: 3478261 - RNA, 14 nt, Human
uauuuguaauuaaa

SEQ ID NO: 3478262 - RNA, 15 nt, Human
uauuuguaauuaaaa

SEQ ID NO: 3478263 - RNA, 12 nt, Human
uauuuguacaaa

SEQ ID NO: 3478264 - RNA, 22 nt, Human
uauuuguaggggaacucauuug

SEQ ID NO: 3478265 - RNA, 20 nt, Human
uauuugucaugcugggauuu

SEQ ID NO: 3478266 - RNA, 14 nt, Human
uauuugucucagau

SEQ ID NO: 3478267 - RNA, 15 nt, Human
uauuugucuuucagg

SEQ ID NO: 3478268 - RNA, 20 nt, Human
uauuugugacuaauuguaua

SEQ ID NO: 3478269 - RNA, 21 nt, Human
uauuugugacuaauuguauaa

SEQ ID NO: 3478270 - RNA, 22 nt, Human
uauuugugacuaauuguauaac

SEQ ID NO: 3478271 - RNA, 15 nt, Human
uauuugugagacugu

SEQ ID NO: 3478272 - RNA, 18 nt, Human
uauuugugaugacaacug

SEQ ID NO: 3478273 - RNA, 18 nt, Human
uauuugugcuauaguauu

SEQ ID NO: 3478274 - RNA, 13 nt, Human
uauuuguguauuu

SEQ ID NO: 3478275 - RNA, 12 nt, Human
uauuugugugcu

SEQ ID NO: 3478276 - RNA, 18 nt, Human
uauuugugugcuaaacgu

SEQ ID NO: 3478277 - RNA, 22 nt, Human
uauuuguguguucacuaaacuc

SEQ ID NO: 3478278 - RNA, 17 nt, Human
uauuuguuaaauauuua

SEQ ID NO: 3478279 - RNA, 19 nt, Human
uauuuguuaauaguuccug

SEQ ID NO: 3478280 - RNA, 22 nt, Human
uauuuguuaaugguuugaauau

SEQ ID NO: 3478281 - RNA, 18 nt, Human
uauuuguuauuuucagua

SEQ ID NO: 3478282 - RNA, 15 nt, Human
uauuuguuugcauag

SEQ ID NO: 3478283 - RNA, 14 nt, Human
uauuuuaaaagcca

SEQ ID NO: 3478284 - RNA, 16 nt, Human
uauuuuaaaauaaacu

SEQ ID NO: 3478285 - RNA, 23 nt, Human
uauuuuaaaauagcguucuugua

SEQ ID NO: 3478286 - RNA, 13 nt, Human
uauuuuaaaauuu

SEQ ID NO: 3478287 - RNA, 22 nt, Human
uauuuuaaauuauaaggacugc

SEQ ID NO: 3478288 - RNA, 18 nt, Human
uauuuuaaccugcauaaa

SEQ ID NO: 3478289 - RNA, 14 nt, Human
uauuuuaagacgaa

SEQ ID NO: 3478290 - RNA, 19 nt, Human
uauuuuaagcacucuuaaa

SEQ ID NO: 3478291 - RNA, 19 nt, Human
uauuuuaagcauuacucuu

SEQ ID NO: 3478292 - RNA, 22 nt, Human
uauuuuaagcauuacucuugua

SEQ ID NO: 3478293 - RNA, 14 nt, Human
uauuuuaaguauug

SEQ ID NO: 3478294 - RNA, 16 nt, Human
uauuuuaaucucagaa

SEQ ID NO: 3478295 - RNA, 13 nt, Human
uauuuuaauguga

SEQ ID NO: 3478296 - RNA, 14 nt, Human
uauuuuaaugugau

SEQ ID NO: 3478297 - RNA, 21 nt, Human
uauuuuaaugugaugauguaa

SEQ ID NO: 3478298 - RNA, 19 nt, Human
uauuuuaauuagguuaacu

SEQ ID NO: 3478299 - RNA, 17 nt, Human
uauuuuacacagaaaca

SEQ ID NO: 3478300 - RNA, 23 nt, Human
uauuuuacacagaaacacugccu

SEQ ID NO: 3478301 - RNA, 18 nt, Human
uauuuuaccacugcugug

SEQ ID NO: 3478302 - RNA, 13 nt, Human
uauuuuaccauac

SEQ ID NO: 3478303 - RNA, 16 nt, Human
uauuuuacuacugugg

SEQ ID NO: 3478304 - RNA, 17 nt, Human
uauuuuacuauuggaau

SEQ ID NO: 3478305 - RNA, 15 nt, Human
uauuuuacugucuua

SEQ ID NO: 3478306 - RNA, 16 nt, Human
uauuuuacugucuuaa

SEQ ID NO: 3478307 - RNA, 17 nt, Human
uauuuuacugucuuaau

SEQ ID NO: 3478308 - RNA, 18 nt, Human
uauuuuacuucuagagau

SEQ ID NO: 3478309 - RNA, 21 nt, Human
uauuuuacuuggaaauauuaa

SEQ ID NO: 3478310 - RNA, 21 nt, Human
uauuuuagacaaaucuaaggg

SEQ ID NO: 3478311 - RNA, 18 nt, Human
uauuuuaggcagggauuu

SEQ ID NO: 3478312 - RNA, 21 nt, Human
uauuuuaguggacccugaaau

SEQ ID NO: 3478313 - RNA, 16 nt, Human
uauuuuaguuucuguu

SEQ ID NO: 3478314 - RNA, 21 nt, Human
uauuuuaguuucuguucugug

SEQ ID NO: 3478315 - RNA, 21 nt, Human
uauuuuauaaaauuaaagaaa

SEQ ID NO: 3478316 - RNA, 14 nt, Human
uauuuuauaagaaa

SEQ ID NO: 3478317 - RNA, 16 nt, Human
uauuuuauacauuaac

SEQ ID NO: 3478318 - RNA, 23 nt, Human
uauuuuauacucauggaagagau

SEQ ID NO: 3478319 - RNA, 20 nt, Human
uauuuuauauaauaaaguau

SEQ ID NO: 3478320 - RNA, 12 nt, Human
uauuuuaugaga

SEQ ID NO: 3478321 - RNA, 17 nt, Human
uauuuuaugagaaaugu

SEQ ID NO: 3478322 - RNA, 13 nt, Human
uauuuuaugguua

SEQ ID NO: 3478323 - RNA, 16 nt, Human
uauuuuaugguuaugu

SEQ ID NO: 3478324 - RNA, 13 nt, Human
uauuuuauguuua

SEQ ID NO: 3478325 - RNA, 20 nt, Human
uauuuuauuauccuagauua

SEQ ID NO: 3478326 - RNA, 18 nt, Human
uauuuuauuaugaaacuu

SEQ ID NO: 3478327 - RNA, 16 nt, Human
uauuuuauucaaggua

SEQ ID NO: 3478328 - RNA, 13 nt, Human
uauuuuauucccu

SEQ ID NO: 3478329 - RNA, 18 nt, Human
uauuuuauuguaacagac

SEQ ID NO: 3478330 - RNA, 20 nt, Human
uauuuuauuuagacaagaga

SEQ ID NO: 3478331 - RNA, 20 nt, Human
uauuuuauuuuuagaauuuu

SEQ ID NO: 3478332 - RNA, 14 nt, Human
uauuuucaaaacca

SEQ ID NO: 3478333 - RNA, 16 nt, Human
uauuuucaaaaccagg

SEQ ID NO: 3478334 - RNA, 17 nt, Human
uauuuucaaaaccaggu

SEQ ID NO: 3478335 - RNA, 18 nt, Human
uauuuucaauagccacua

SEQ ID NO: 3478336 - RNA, 22 nt, Human
uauuuucaauucaaaaauguac

SEQ ID NO: 3478337 - RNA, 14 nt, Human
uauuuucaccauuu

SEQ ID NO: 3478338 - RNA, 12 nt, Human
uauuuucagaau

SEQ ID NO: 3478339 - RNA, 14 nt, Human
uauuuucagaaucu

SEQ ID NO: 3478340 - RNA, 21 nt, Human
uauuuucagaaucugaaugua

SEQ ID NO: 3478341 - RNA, 14 nt, Human
uauuuucaugaaaa

SEQ ID NO: 3478342 - RNA, 20 nt, Human
uauuuucaugaaaauaccau

SEQ ID NO: 3478343 - RNA, 17 nt, Human
uauuuucauuacaaugg

SEQ ID NO: 3478344 - RNA, 14 nt, Human
uauuuucauucaaa

SEQ ID NO: 3478345 - RNA, 11 nt, Human
uauuuuccagg

SEQ ID NO: 3478346 - RNA, 23 nt, Human
uauuuucccaauagcacuuucau

SEQ ID NO: 3478347 - RNA, 18 nt, Human
uauuuucccccuuuucug

SEQ ID NO: 3478348 - RNA, 16 nt, Human
uauuuuccccuaucau

SEQ ID NO: 3478349 - RNA, 18 nt, Human
uauuuuccugauagcaua

SEQ ID NO: 3478350 - RNA, 14 nt, Human
uauuuuccuguaaa

SEQ ID NO: 3478351 - RNA, 17 nt, Human
uauuuucguaugaaaau

SEQ ID NO: 3478352 - RNA, 14 nt, Human
uauuuucuaaagua

SEQ ID NO: 3478353 - RNA, 14 nt, Human
uauuuucuacagug

SEQ ID NO: 3478354 - RNA, 15 nt, Human
uauuuucuacagugg

SEQ ID NO: 3478355 - RNA, 20 nt, Human
uauuuucuacguuucuuuaa

SEQ ID NO: 3478356 - RNA, 12 nt, Human
uauuuucuguca

SEQ ID NO: 3478357 - RNA, 13 nt, Human
uauuuucugucag

SEQ ID NO: 3478358 - RNA, 17 nt, Human
uauuuucugucagauga

SEQ ID NO: 3478359 - RNA, 20 nt, Human
uauuuucugucagaugagaa

SEQ ID NO: 3478360 - RNA, 22 nt, Human
uauuuucugucagaugagaaca

SEQ ID NO: 3478361 - RNA, 12 nt, Human
uauuuucugugu

SEQ ID NO: 3478362 - RNA, 19 nt, Human
uauuuucuguguguuccug

SEQ ID NO: 3478363 - RNA, 20 nt, Human
uauuuucuguguguuccugg

SEQ ID NO: 3478364 - RNA, 12 nt, Human
uauuuucuucau

SEQ ID NO: 3478365 - RNA, 12 nt, Human
uauuuucuuucu

SEQ ID NO: 3478366 - RNA, 14 nt, Human
uauuuucuuugaaa

SEQ ID NO: 3478367 - RNA, 16 nt, Human
uauuuucuuuuguaaa

SEQ ID NO: 3478368 - RNA, 16 nt, Human
uauuuugaaaagcuuc

SEQ ID NO: 3478369 - RNA, 14 nt, Human
uauuuugaaguuua

SEQ ID NO: 3478370 - RNA, 19 nt, Human
uauuuugaaguuuacauuu

SEQ ID NO: 3478371 - RNA, 22 nt, Human
uauuuugaaguuuacauuuuua

SEQ ID NO: 3478372 - RNA, 12 nt, Human
uauuuugaauca

SEQ ID NO: 3478373 - RNA, 22 nt, Human
uauuuugaaucaauaauauauu

SEQ ID NO: 3478374 - RNA, 14 nt, Human
uauuuugacuuguu

SEQ ID NO: 3478375 - RNA, 20 nt, Human
uauuuugacuuguugagggu

SEQ ID NO: 3478376 - RNA, 18 nt, Human
uauuuugauaauaaauug

SEQ ID NO: 3478377 - RNA, 14 nt, Human
uauuuugaucuuca

SEQ ID NO: 3478378 - RNA, 16 nt, Human
uauuuugaucuucaac

SEQ ID NO: 3478379 - RNA, 13 nt, Human
uauuuugaugcag

SEQ ID NO: 3478380 - RNA, 15 nt, Human
uauuuugaugcagca

SEQ ID NO: 3478381 - RNA, 19 nt, Human
uauuuugaugcagcauuug

SEQ ID NO: 3478382 - RNA, 22 nt, Human
uauuuugccaagggcauaaauu

SEQ ID NO: 3478383 - RNA, 13 nt, Human
uauuuugcuuugu

SEQ ID NO: 3478384 - RNA, 14 nt, Human
uauuuuggaaaguu

SEQ ID NO: 3478385 - RNA, 15 nt, Human
uauuuuggaaaguuu

SEQ ID NO: 3478386 - RNA, 20 nt, Human
uauuuuggauuguauauugu

SEQ ID NO: 3478387 - RNA, 18 nt, Human
aaguauccugcuucugau

SEQ ID NO: 3478388 - RNA, 17 nt, Human
aaguaucuacaugcggu

SEQ ID NO: 3478389 - RNA, 15 nt, Human
aaguaucugacaucu

SEQ ID NO: 3478390 - RNA, 21 nt, Human
aaguaugcauuauuaaauugu

SEQ ID NO: 3478391 - RNA, 22 nt, Human
aaguaugcauuauuaaauugua

SEQ ID NO: 3478392 - RNA, 21 nt, Human
aaguauguaaacaggagacag

SEQ ID NO: 3478393 - RNA, 12 nt, Human
aaguauguaaag

SEQ ID NO: 3478394 - RNA, 18 nt, Human
aaguaugugagugugucc

SEQ ID NO: 3478395 - RNA, 18 nt, Human
aaguauguuagugcaaau

SEQ ID NO: 3478396 - RNA, 19 nt, Human
aaguauguuagugcaaauu

SEQ ID NO: 3478397 - RNA, 13 nt, Human
aaguauguucuaa

SEQ ID NO: 3478398 - RNA, 16 nt, Human
aaguauguuuuagcau

SEQ ID NO: 3478399 - RNA, 17 nt, Human
aaguauuaaaacauugg

SEQ ID NO: 3478400 - RNA, 13 nt, Human
aaguauuaagcau

SEQ ID NO: 3478401 - RNA, 14 nt, Human
aaguauuaagcaua

SEQ ID NO: 3478402 - RNA, 17 nt, Human
aaguauuaagcauauau

SEQ ID NO: 3478403 - RNA, 13 nt, Human
aaguauuauaaau

SEQ ID NO: 3478404 - RNA, 15 nt, Human
aaguauuauaccuuu

SEQ ID NO: 3478405 - RNA, 16 nt, Human
aaguauuauaccuuuu

SEQ ID NO: 3478406 - RNA, 19 nt, Human
aaguauuauaccuuuuuua

SEQ ID NO: 3478407 - RNA, 12 nt, Human
aaguauuauuag

SEQ ID NO: 3478408 - RNA, 20 nt, Human
aaguauuccaccuuaaauua

SEQ ID NO: 3478409 - RNA, 18 nt, Human
aaguauucugccuuugca

SEQ ID NO: 3478410 - RNA, 18 nt, Human
aaguauucuuauuuaaug

SEQ ID NO: 3478411 - RNA, 19 nt, Human
aaguauucuuauuuaauga

SEQ ID NO: 3478412 - RNA, 13 nt, Human
aaguauugccaaa

SEQ ID NO: 3478413 - RNA, 21 nt, Human
aaguauugcugaguccaacaa

SEQ ID NO: 3478414 - RNA, 14 nt, Human
aaguauuguaaauu

SEQ ID NO: 3478415 - RNA, 20 nt, Human
aaguauuguaaauuauauuu

SEQ ID NO: 3478416 - RNA, 20 nt, Human
aaguauuuaauuagugcuaa

SEQ ID NO: 3478417 - RNA, 21 nt, Human
aaguauuuaauuagugcuaag

SEQ ID NO: 3478418 - RNA, 22 nt, Human
aaguauuuaauuagugcuaagu

SEQ ID NO: 3478419 - RNA, 23 nt, Human
aaguauuuaauuagugcuaagug

SEQ ID NO: 3478420 - RNA, 21 nt, Human
aaguauuucaaauuggagcuu

SEQ ID NO: 3478421 - RNA, 17 nt, Human
aaguauuuucauaagua

SEQ ID NO: 3478422 - RNA, 11 nt, Human
aaguauuuucu

SEQ ID NO: 3478423 - RNA, 23 nt, Human
aaguauuuugaaguuuacauuuu

SEQ ID NO: 3478424 - RNA, 18 nt, Human
aaguauuuuguguuugga

SEQ ID NO: 3478425 - RNA, 16 nt, Human
aaguauuuuuucagua

SEQ ID NO: 3478426 - RNA, 22 nt, Human
aagucaaaauauuuuuaaaaga

SEQ ID NO: 3478427 - RNA, 19 nt, Human
aagucaacaguaaaccacu

SEQ ID NO: 3478428 - RNA, 22 nt, Human
aagucaaccaauguagaaagcu

SEQ ID NO: 3478429 - RNA, 15 nt, Human
aagucaacuuagcau

SEQ ID NO: 3478430 - RNA, 20 nt, Human
aagucaauauguggaagcaa

SEQ ID NO: 3478431 - RNA, 17 nt, Human
aagucaaucauuucuca

SEQ ID NO: 3478432 - RNA, 22 nt, Human
aagucaaucauuucucacugug

SEQ ID NO: 3478433 - RNA, 17 nt, Human
aagucaauguuuucagu

SEQ ID NO: 3478434 - RNA, 21 nt, Human
aagucacacauuacaaaguua

SEQ ID NO: 3478435 - RNA, 14 nt, Human
aagucacagggcag

SEQ ID NO: 3478436 - RNA, 13 nt, Human
aagucacaguuaa

SEQ ID NO: 3478437 - RNA, 16 nt, Human
aagucacaguuaagga

SEQ ID NO: 3478438 - RNA, 16 nt, Human
aagucacccggccccc

SEQ ID NO: 3478439 - RNA, 20 nt, Human
aagucacccuagcccucucc

SEQ ID NO: 3478440 - RNA, 19 nt, Human
aagucacugcaaaaccagg

SEQ ID NO: 3478441 - RNA, 20 nt, Human
aagucagaaacuaaaacaaa

SEQ ID NO: 3478442 - RNA, 16 nt, Human
aagucagaaucagaag

SEQ ID NO: 3478443 - RNA, 16 nt, Human
aagucagacugcuggg

SEQ ID NO: 3478444 - RNA, 20 nt, Human
aagucagacugcugggacug

SEQ ID NO: 3478445 - RNA, 12 nt, Human
aagucagaggau

SEQ ID NO: 3478446 - RNA, 13 nt, Human
aagucagaugugg

SEQ ID NO: 3478447 - RNA, 13 nt, Human
aagucagauguuu

SEQ ID NO: 3478448 - RNA, 16 nt, Human
aagucagguccaauuu

SEQ ID NO: 3478449 - RNA, 20 nt, Human
aagucagugcccaacuguua

SEQ ID NO: 3478450 - RNA, 18 nt, Human
aagucagugggaacguga

SEQ ID NO: 3478451 - RNA, 15 nt, Human
aagucaguguugaga

SEQ ID NO: 3478452 - RNA, 16 nt, Human
aagucaguguugagau

SEQ ID NO: 3478453 - RNA, 22 nt, Human
aagucaguugcucaaaaagaaa

SEQ ID NO: 3478454 - RNA, 14 nt, Human
aagucauaauugca

SEQ ID NO: 3478455 - RNA, 13 nt, Human
aagucaucuugcu

SEQ ID NO: 3478456 - RNA, 14 nt, Human
aagucaucuugcua

SEQ ID NO: 3478457 - RNA, 15 nt, Human
aagucaugaagccca

SEQ ID NO: 3478458 - RNA, 19 nt, Human
aagucaugcaaaggcuggg

SEQ ID NO: 3478459 - RNA, 20 nt, Human
aagucaugcaaaggcuggga

SEQ ID NO: 3478460 - RNA, 20 nt, Human
aagucaugcguuuaaucaca

SEQ ID NO: 3478461 - RNA, 20 nt, Human
aagucauggcagguacagua

SEQ ID NO: 3478462 - RNA, 17 nt, Human
aagucauguaaauacug

SEQ ID NO: 3478463 - RNA, 19 nt, Human
aagucauguauguuucucu

SEQ ID NO: 3478464 - RNA, 15 nt, Human
aagucaugugcauuu

SEQ ID NO: 3478465 - RNA, 12 nt, Human
aagucauguucc

SEQ ID NO: 3478466 - RNA, 13 nt, Human
aagucauuaaacu

SEQ ID NO: 3478467 - RNA, 18 nt, Human
aagucauuuuaacuuuau

SEQ ID NO: 3478468 - RNA, 22 nt, Human
aagucauuuuaacuuuaucaca

SEQ ID NO: 3478469 - RNA, 12 nt, Human
aaguccaaugug

SEQ ID NO: 3478470 - RNA, 20 nt, Human
aagugcuaagguucuaaggc

SEQ ID NO: 3478471 - RNA, 21 nt, Human
aagugcuaagguucuaaggcc

SEQ ID NO: 3478472 - RNA, 17 nt, Human
aagugcucaucuguugu

SEQ ID NO: 3478473 - RNA, 15 nt, Human
aagugcugcacucaa

SEQ ID NO: 3478474 - RNA, 19 nt, Human
aagugcuggagucuccuga

SEQ ID NO: 3478475 - RNA, 22 nt, Human
aagugcuggcaaccacuaagaa

SEQ ID NO: 3478476 - RNA, 19 nt, Human
aagugcuguauaaaaucag

SEQ ID NO: 3478477 - RNA, 22 nt, Human
aagugcuguauaaaaucagcca

SEQ ID NO: 3478478 - RNA, 23 nt, Human
aagugcuuggaacauacuguuca

SEQ ID NO: 3478479 - RNA, 14 nt, Human
aagugcuuguguaa

SEQ ID NO: 3478480 - RNA, 19 nt, Human
aaguggaaaaauagccugc

SEQ ID NO: 3478481 - RNA, 12 nt, Human
aaguggaaggaa

SEQ ID NO: 3478482 - RNA, 15 nt, Human
aaguggaaggaaaga

SEQ ID NO: 3478483 - RNA, 21 nt, Human
aaguggaauuucuuguuucuc

SEQ ID NO: 3478484 - RNA, 18 nt, Human
aaguggacaaauuuugag

SEQ ID NO: 3478485 - RNA, 17 nt, Human
aaguggacucagggcag

SEQ ID NO: 3478486 - RNA, 16 nt, Human
aaguggaggcacuuua

SEQ ID NO: 3478487 - RNA, 22 nt, Human
aaguggcaaagcuguucuuccu

SEQ ID NO: 3478488 - RNA, 17 nt, Human
aaguggcaugugcugug

SEQ ID NO: 3478489 - RNA, 18 nt, Human
aaguggcaugugcuguga

SEQ ID NO: 3478490 - RNA, 14 nt, Human
aaguggcauguuuu

SEQ ID NO: 3478491 - RNA, 13 nt, Human
aaguggccucuuu

SEQ ID NO: 3478492 - RNA, 19 nt, Human
aagugggcccacccggugg

SEQ ID NO: 3478493 - RNA, 12 nt, Human
aagugggcuuga

SEQ ID NO: 3478494 - RNA, 15 nt, Human
aaguggggacagagc

SEQ ID NO: 3478495 - RNA, 23 nt, Human
aaguggggcgggcuucauagaga

SEQ ID NO: 3478496 - RNA, 19 nt, Human
aagugggggcagagggcag

SEQ ID NO: 3478497 - RNA, 18 nt, Human
aaguggggugcugggagg

SEQ ID NO: 3478498 - RNA, 19 nt, Human
aaguggguacccccaggac

SEQ ID NO: 3478499 - RNA, 14 nt, Human
aagugggugagaug

SEQ ID NO: 3478500 - RNA, 17 nt, Human
aaguggguuuuuuaguu

SEQ ID NO: 3478501 - RNA, 13 nt, Human
aagugguauagaa

SEQ ID NO: 3478502 - RNA, 22 nt, Human
aagugguccuagaggcccuuug

SEQ ID NO: 3478503 - RNA, 15 nt, Human
aaguggugcucaguu

SEQ ID NO: 3478504 - RNA, 11 nt, Human
aaguguaaagc

SEQ ID NO: 3478505 - RNA, 16 nt, Human
aaguguaaagcauucc

SEQ ID NO: 3478506 - RNA, 17 nt, Human
aaguguaaagcauucca

SEQ ID NO: 3478507 - RNA, 22 nt, Human
aaguguaaagcauuccaacaaa

SEQ ID NO: 3478508 - RNA, 15 nt, Human
aaguguaacagcuga

SEQ ID NO: 3478509 - RNA, 16 nt, Human
aaguguaacagcugag

SEQ ID NO: 3478510 - RNA, 21 nt, Human
aaguguaacauaugcaaacau

SEQ ID NO: 3478511 - RNA, 16 nt, Human
aaguguaauaauauga

SEQ ID NO: 3478512 - RNA, 16 nt, Human
aaguguaauagauuau

SEQ ID NO: 3478513 - RNA, 14 nt, Human
aaguguacauaugu

SEQ ID NO: 3478514 - RNA, 14 nt, Human
aaguguacuaauua

SEQ ID NO: 3478515 - RNA, 17 nt, Human
aaguguaggcagacaca

SEQ ID NO: 3478516 - RNA, 14 nt, Human
aaguguauaauaua

SEQ ID NO: 3478517 - RNA, 18 nt, Human
aaguguaugcacgugugc

SEQ ID NO: 3478518 - RNA, 21 nt, Human
aaguguauuuggaaauaaagu

SEQ ID NO: 3478519 - RNA, 19 nt, Human
aaguguauuuuauaaaauu

SEQ ID NO: 3478520 - RNA, 21 nt, Human
aaguguauuuuuuuacuaaua

SEQ ID NO: 3478521 - RNA, 16 nt, Human
aagugucaacucuuug

SEQ ID NO: 3478522 - RNA, 16 nt, Human
aagugucaccuuuucu

SEQ ID NO: 3478523 - RNA, 21 nt, Human
aaguguccauugacauguaca

SEQ ID NO: 3478524 - RNA, 22 nt, Human
aaguguccauugacauguacag

SEQ ID NO: 3478525 - RNA, 23 nt, Human
aaguguccauugacauguacaga

SEQ ID NO: 3478526 - RNA, 17 nt, Human
aaguguccgagaacuaa

SEQ ID NO: 3478527 - RNA, 21 nt, Human
aagugucucacuaaagcauga

SEQ ID NO: 3478528 - RNA, 16 nt, Human
aagugucucugccuug

SEQ ID NO: 3478529 - RNA, 17 nt, Human
aagugugaacaaaagau

SEQ ID NO: 3478530 - RNA, 13 nt, Human
aagugugaacugg

SEQ ID NO: 3478531 - RNA, 13 nt, Human
aagugugagcaaa

SEQ ID NO: 3478532 - RNA, 15 nt, Human
aagugugagcaguga

SEQ ID NO: 3478533 - RNA, 20 nt, Human
aagugugauugggaauaaau

SEQ ID NO: 3478534 - RNA, 21 nt, Human
aagugugcuuuaugcugaaac

SEQ ID NO: 3478535 - RNA, 10 nt, Human
aagugugggu

SEQ ID NO: 3478536 - RNA, 13 nt, Human
aagugugguagag

SEQ ID NO: 3478537 - RNA, 12 nt, Human
aaguguguaugu

SEQ ID NO: 3478538 - RNA, 13 nt, Human
aaguguguauuaa

SEQ ID NO: 3478539 - RNA, 15 nt, Human
aaguguguauuaaaa

SEQ ID NO: 3478540 - RNA, 23 nt, Human
aaguguguggucccaaguuggaa

SEQ ID NO: 3478541 - RNA, 13 nt, Human
aagugugugugcg

SEQ ID NO: 3478542 - RNA, 17 nt, Human
aaguguguuuccuucag

SEQ ID NO: 3478543 - RNA, 16 nt, Human
aaguguuaauacuagu

SEQ ID NO: 3478544 - RNA, 11 nt, Human
aaguguuacuu

SEQ ID NO: 3478545 - RNA, 22 nt, Human
aaguguuagccuuuuuucccca

SEQ ID NO: 3478546 - RNA, 17 nt, Human
aaguguucuguuacaaa

SEQ ID NO: 3478547 - RNA, 20 nt, Human
aaguguucuguuacaaaaug

SEQ ID NO: 3478548 - RNA, 18 nt, Human
aaguguuguaaauauuua

SEQ ID NO: 3478549 - RNA, 19 nt, Human
aaguguuuauguuguuuau

SEQ ID NO: 3478550 - RNA, 15 nt, Human
aaguguuuauuuuuc

SEQ ID NO: 3478551 - RNA, 21 nt, Human
aaguguuuauuuuucauauug

SEQ ID NO: 3478552 - RNA, 20 nt, Human
aaguguuuccuucauuucug

SEQ ID NO: 3478553 - RNA, 14 nt, Human
aaguguuucuguua

SEQ ID NO: 3478554 - RNA, 23 nt, Human
aaguguuucuguuauuaacaaac

SEQ ID NO: 3478555 - RNA, 15 nt, Human
aaguguuuucagagc

SEQ ID NO: 3478556 - RNA, 13 nt, Human
aaguguuuucucu

SEQ ID NO: 3478557 - RNA, 17 nt, Human
aaguuaaaaaaaauaau

SEQ ID NO: 3478558 - RNA, 18 nt, Human
aaguuaaacauugaagua

SEQ ID NO: 3478559 - RNA, 17 nt, Human
aauaugcaaugugaagc

SEQ ID NO: 3478560 - RNA, 16 nt, Human
aauaugcacacauuuu

SEQ ID NO: 3478561 - RNA, 21 nt, Human
aauaugccccauucaacaucu

SEQ ID NO: 3478562 - RNA, 16 nt, Human
aauaugccucuccuuu

SEQ ID NO: 3478563 - RNA, 21 nt, Human
aauaugccucuccuuuguaua

SEQ ID NO: 3478564 - RNA, 15 nt, Human
aauaugcuaauuugg

SEQ ID NO: 3478565 - RNA, 17 nt, Human
aauaugcugcaacaaaa

SEQ ID NO: 3478566 - RNA, 18 nt, Human
aauaugcugcaacaaaau

SEQ ID NO: 3478567 - RNA, 19 nt, Human
aauaugcugccaaauuuug

SEQ ID NO: 3478568 - RNA, 14 nt, Human
aauaugcuggcugg

SEQ ID NO: 3478569 - RNA, 19 nt, Human
aauaugcuuaaaauaagca

SEQ ID NO: 3478570 - RNA, 17 nt, Human
aauaugcuuauaaccua

SEQ ID NO: 3478571 - RNA, 21 nt, Human
aauaugcuuauauuguucacu

SEQ ID NO: 3478572 - RNA, 16 nt, Human
aauauggaacuuacau

SEQ ID NO: 3478573 - RNA, 20 nt, Human
aauauggaacuuacauuguu

SEQ ID NO: 3478574 - RNA, 17 nt, Human
aauauggacucaguuuu

SEQ ID NO: 3478575 - RNA, 15 nt, Human
aauauggacugcuca

SEQ ID NO: 3478576 - RNA, 19 nt, Human
aauaugggcauuguaguua

SEQ ID NO: 3478577 - RNA, 16 nt, Human
aauaugguugauaguu

SEQ ID NO: 3478578 - RNA, 12 nt, Human
aauauguaccaa

SEQ ID NO: 3478579 - RNA, 19 nt, Human
aauauguaccaagaaucuu

SEQ ID NO: 3478580 - RNA, 16 nt, Human
aauauguaguaucuau

SEQ ID NO: 3478581 - RNA, 15 nt, Human
aauauguauuguaaa

SEQ ID NO: 3478582 - RNA, 11 nt, Human
aauauguauuu

SEQ ID NO: 3478583 - RNA, 13 nt, Human
aauauguauuuua

SEQ ID NO: 3478584 - RNA, 21 nt, Human
aauauguauuuuauguauguu

SEQ ID NO: 3478585 - RNA, 13 nt, Human
aauauguccuggg

SEQ ID NO: 3478586 - RNA, 21 nt, Human
aauaugugaaggaccuucacu

SEQ ID NO: 3478587 - RNA, 18 nt, Human
aauaugugagauuuuuua

SEQ ID NO: 3478588 - RNA, 23 nt, Human
aauauguggaguucaucuugaau

SEQ ID NO: 3478589 - RNA, 15 nt, Human
aauauguuuaaaaua

SEQ ID NO: 3478590 - RNA, 15 nt, Human
aauauguuucaaacu

SEQ ID NO: 3478591 - RNA, 16 nt, Human
aauauguuucaaacuu

SEQ ID NO: 3478592 - RNA, 13 nt, Human
aauauguuucaca

SEQ ID NO: 3478593 - RNA, 14 nt, Human
aauauguuuccuug

SEQ ID NO: 3478594 - RNA, 18 nt, Human
aauauguuuccuuguuua

SEQ ID NO: 3478595 - RNA, 21 nt, Human
aauauguuuuuuagaucaaau

SEQ ID NO: 3478596 - RNA, 21 nt, Human
aauauuaaaaagucuuuuaaa

SEQ ID NO: 3478597 - RNA, 12 nt, Human
aauauuaaaaga

SEQ ID NO: 3478598 - RNA, 13 nt, Human
aauauuaaagcca

SEQ ID NO: 3478599 - RNA, 15 nt, Human
aauauuaaagccaug

SEQ ID NO: 3478600 - RNA, 13 nt, Human
aauauuaaauaca

SEQ ID NO: 3478601 - RNA, 20 nt, Human
aauauuaaauacagacacua

SEQ ID NO: 3478602 - RNA, 13 nt, Human
aauauuaaaucug

SEQ ID NO: 3478603 - RNA, 13 nt, Human
aauauuaagaaag

SEQ ID NO: 3478604 - RNA, 14 nt, Human
aauauuaagacaau

SEQ ID NO: 3478605 - RNA, 13 nt, Human
aauauuaagcaug

SEQ ID NO: 3478606 - RNA, 14 nt, Human
aauauuaccuaaug

SEQ ID NO: 3478607 - RNA, 19 nt, Human
aauauuaccuaaugaaagu

SEQ ID NO: 3478608 - RNA, 17 nt, Human
aauauuacuccuauuuu

SEQ ID NO: 3478609 - RNA, 20 nt, Human
aauauuacuccuauuuuugu

SEQ ID NO: 3478610 - RNA, 20 nt, Human
aauauuacuguuuauuucug

SEQ ID NO: 3478611 - RNA, 14 nt, Human
aauauuagauguga

SEQ ID NO: 3478612 - RNA, 15 nt, Human
aauauuagaugugau

SEQ ID NO: 3478613 - RNA, 16 nt, Human
aauauuagaugugauu

SEQ ID NO: 3478614 - RNA, 17 nt, Human
aauauuagaugugauuu

SEQ ID NO: 3478615 - RNA, 15 nt, Human
aauauuagcuuuacu

SEQ ID NO: 3478616 - RNA, 22 nt, Human
aauauuauaacucauuuguugu

SEQ ID NO: 3478617 - RNA, 15 nt, Human
aauauuauacuaaga

SEQ ID NO: 3478618 - RNA, 13 nt, Human
aauauuauauuug

SEQ ID NO: 3478619 - RNA, 15 nt, Human
aauauuaucuuugua

SEQ ID NO: 3478620 - RNA, 16 nt, Human
aauauuauuccucaaa

SEQ ID NO: 3478621 - RNA, 14 nt, Human
aauauucaauaaag

SEQ ID NO: 3478622 - RNA, 16 nt, Human
aauauucacugggcca

SEQ ID NO: 3478623 - RNA, 18 nt, Human
aauauucauauuggaaaa

SEQ ID NO: 3478624 - RNA, 20 nt, Human
aauauucauauuggaaaaau

SEQ ID NO: 3478625 - RNA, 12 nt, Human
aauauuccagag

SEQ ID NO: 3478626 - RNA, 13 nt, Human
aauauucccaagc

SEQ ID NO: 3478627 - RNA, 20 nt, Human
aauauuccccuaucucuaga

SEQ ID NO: 3478628 - RNA, 15 nt, Human
aauauucccuagaaa

SEQ ID NO: 3478629 - RNA, 17 nt, Human
aauauucccuagaaacu

SEQ ID NO: 3478630 - RNA, 20 nt, Human
aauauuccuuugcauauuau

SEQ ID NO: 3478631 - RNA, 21 nt, Human
aauauuccuuugcauauuaua

SEQ ID NO: 3478632 - RNA, 18 nt, Human
aauauucucuauuugaau

SEQ ID NO: 3478633 - RNA, 17 nt, Human
aauauucucuguacaua

SEQ ID NO: 3478634 - RNA, 18 nt, Human
aauauucucuguacauau

SEQ ID NO: 3478635 - RNA, 10 nt, Human
aauauucugg

SEQ ID NO: 3478636 - RNA, 19 nt, Human
aauauucuuucaauaacga

SEQ ID NO: 3478637 - RNA, 13 nt, Human
aauauugaaaauu

SEQ ID NO: 3478638 - RNA, 20 nt, Human
aauauugaaaauugaaaagu

SEQ ID NO: 3478639 - RNA, 21 nt, Human
aauauugaaaauugaaaagua

SEQ ID NO: 3478640 - RNA, 20 nt, Human
aauauugaaaggcaaacauu

SEQ ID NO: 3478641 - RNA, 15 nt, Human
aauauugaacuuuuu

SEQ ID NO: 3478642 - RNA, 13 nt, Human
aauauugaauuuu

SEQ ID NO: 3478643 - RNA, 22 nt, Human
aauauugaauuuuuauuuuuga

SEQ ID NO: 3478644 - RNA, 12 nt, Human
aauauugacauu

SEQ ID NO: 3478645 - RNA, 14 nt, Human
aauauugagcaaua

SEQ ID NO: 3478646 - RNA, 18 nt, Human
aauauugagcaauauguc

SEQ ID NO: 3478647 - RNA, 22 nt, Human
aauauugaggcuuuguguugua

SEQ ID NO: 3478648 - RNA, 20 nt, Human
aauauugauugggaaaacau

SEQ ID NO: 3478649 - RNA, 21 nt, Human
aauauugauugggaaaacauu

SEQ ID NO: 3478650 - RNA, 23 nt, Human
aauauugauugggaaaacauuug

SEQ ID NO: 3478651 - RNA, 14 nt, Human
aauauugcaaaaua

SEQ ID NO: 3478652 - RNA, 23 nt, Human
aauauugccaaugcuacaguaau

SEQ ID NO: 3478653 - RNA, 22 nt, Human
aauauugcuccaugaugacuua

SEQ ID NO: 3478654 - RNA, 13 nt, Human
aauauuguacagu

SEQ ID NO: 3478655 - RNA, 14 nt, Human
aauauuguacaguu

SEQ ID NO: 3478656 - RNA, 23 nt, Human
aauauuguacaguuuuuauugcu

SEQ ID NO: 3478657 - RNA, 13 nt, Human
aauauugucuuuu

SEQ ID NO: 3478658 - RNA, 10 nt, Human
aauauugugu

SEQ ID NO: 3478659 - RNA, 14 nt, Human
aauauuguuaaggg

SEQ ID NO: 3478660 - RNA, 24 nt, Human
aauauuguuccuaaguucuuagau

SEQ ID NO: 3478661 - RNA, 20 nt, Human
aauauuguugacaacuguga

SEQ ID NO: 3478662 - RNA, 14 nt, Human
aauauuguuucugc

SEQ ID NO: 3478663 - RNA, 21 nt, Human
aauauuguuugguaaauguuu

SEQ ID NO: 3478664 - RNA, 22 nt, Human
aauauuguuugguaaauguuuc

SEQ ID NO: 3478665 - RNA, 12 nt, Human
aaugaaugucua

SEQ ID NO: 3478666 - RNA, 13 nt, Human
aaugaaugucuuu

SEQ ID NO: 3478667 - RNA, 23 nt, Human
aaugaauguuuacacucuuugua

SEQ ID NO: 3478668 - RNA, 13 nt, Human
aaugacaacagaa

SEQ ID NO: 3478669 - RNA, 15 nt, Human
aaugacaacagaagc

SEQ ID NO: 3478670 - RNA, 17 nt, Human
aaugacacucauauaau

SEQ ID NO: 3478671 - RNA, 19 nt, Human
aaugacacucauauaauua

SEQ ID NO: 3478672 - RNA, 21 nt, Human
aaugacauacgcuuuuaauga

SEQ ID NO: 3478673 - RNA, 18 nt, Human
aaugacaucaccacaguu

SEQ ID NO: 3478674 - RNA, 16 nt, Human
aaugacaucuuuuuaa

SEQ ID NO: 3478675 - RNA, 19 nt, Human
aaugacaucuuuuuaaagc

SEQ ID NO: 3478676 - RNA, 20 nt, Human
aaugacaucuuuuuaaagcu

SEQ ID NO: 3478677 - RNA, 19 nt, Human
aaugacaugaauuuuagcu

SEQ ID NO: 3478678 - RNA, 12 nt, Human
aaugacaugcac

SEQ ID NO: 3478679 - RNA, 15 nt, Human
aaugacaugcacuga

SEQ ID NO: 3478680 - RNA, 19 nt, Human
aaugacaugcacugacccu

SEQ ID NO: 3478681 - RNA, 22 nt, Human
aaugacaugcacugacccuucc

SEQ ID NO: 3478682 - RNA, 19 nt, Human
aaugaccacaccugccucu

SEQ ID NO: 3478683 - RNA, 18 nt, Human
aaugaccaguaauuguga

SEQ ID NO: 3478684 - RNA, 21 nt, Human
aaugaccaguaauugugaaaa

SEQ ID NO: 3478685 - RNA, 13 nt, Human
aaugaccuuguaa

SEQ ID NO: 3478686 - RNA, 14 nt, Human
aaugaccuuguaau

SEQ ID NO: 3478687 - RNA, 19 nt, Human
aaugaccuuguaauguaac

SEQ ID NO: 3478688 - RNA, 14 nt, Human
aaugaccuuucaau

SEQ ID NO: 3478689 - RNA, 21 nt, Human
aaugaccuuucaauaggaaaa

SEQ ID NO: 3478690 - RNA, 17 nt, Human
aaugacuaaaaauauua

SEQ ID NO: 3478691 - RNA, 22 nt, Human
aaugacuaagaggaaaguacau

SEQ ID NO: 3478692 - RNA, 16 nt, Human
aaugacuaauuagggu

SEQ ID NO: 3478693 - RNA, 23 nt, Human
aaugacuaauuaggguacauuua

SEQ ID NO: 3478694 - RNA, 15 nt, Human
aaugacuauauaauu

SEQ ID NO: 3478695 - RNA, 16 nt, Human
aaugacucaaagucug

SEQ ID NO: 3478696 - RNA, 14 nt, Human
aaugacuuacugua

SEQ ID NO: 3478697 - RNA, 19 nt, Human
aaugacuuccccaauaucu

SEQ ID NO: 3478698 - RNA, 21 nt, Human
aaugacuuccccaauaucuug

SEQ ID NO: 3478699 - RNA, 15 nt, Human
aaugacuuuauuauu

SEQ ID NO: 3478700 - RNA, 22 nt, Human
aaugagaaaucuaaaaaacgaa

SEQ ID NO: 3478701 - RNA, 21 nt, Human
aaugagaacauguugguauuu

SEQ ID NO: 3478702 - RNA, 15 nt, Human
aaugagaaggcagcc

SEQ ID NO: 3478703 - RNA, 17 nt, Human
aaugagacuugccuucc

SEQ ID NO: 3478704 - RNA, 15 nt, Human
aaugagacuugcucu

SEQ ID NO: 3478705 - RNA, 20 nt, Human
aaugagacuuuaaaagcauu

SEQ ID NO: 3478706 - RNA, 23 nt, Human
aaugagagaauaagucauguucc

SEQ ID NO: 3478707 - RNA, 22 nt, Human
aaugagagacacacugaagaag

SEQ ID NO: 3478708 - RNA, 19 nt, Human
aaugagagggcaguguuuc

SEQ ID NO: 3478709 - RNA, 21 nt, Human
aaugagauagaagauguuugc

SEQ ID NO: 3478710 - RNA, 21 nt, Human
aaugagaucucauuaaaaggu

SEQ ID NO: 3478711 - RNA, 15 nt, Human
aaugagauugaauuu

SEQ ID NO: 3478712 - RNA, 16 nt, Human
aaugagcauguuuaga

SEQ ID NO: 3478713 - RNA, 22 nt, Human
aaugagcauguuuagacuuuaa

SEQ ID NO: 3478714 - RNA, 15 nt, Human
aaugagccuggcaag

SEQ ID NO: 3478715 - RNA, 18 nt, Human
aaugagcuauuaaaacuc

SEQ ID NO: 3478716 - RNA, 22 nt, Human
aaugagcucgcauuugucaaug

SEQ ID NO: 3478717 - RNA, 12 nt, Human
aaugagcuuucu

SEQ ID NO: 3478718 - RNA, 13 nt, Human
aaugagcuuucug

SEQ ID NO: 3478719 - RNA, 16 nt, Human
aaugagcuuucugaac

SEQ ID NO: 3478720 - RNA, 21 nt, Human
aaugagcuuucugaacagcug

SEQ ID NO: 3478721 - RNA, 17 nt, Human
aaugaggaaaauucuua

SEQ ID NO: 3478722 - RNA, 16 nt, Human
aaugaggagagaaaau

SEQ ID NO: 3478723 - RNA, 16 nt, Human
aaugaggccauggacu

SEQ ID NO: 3478724 - RNA, 13 nt, Human
aaugaggcuugcu

SEQ ID NO: 3478725 - RNA, 15 nt, Human
aaugaggcuugcuga

SEQ ID NO: 3478726 - RNA, 24 nt, Human
aaugaggcuuggggcuggagagga

SEQ ID NO: 3478727 - RNA, 15 nt, Human
aaugaggucagcaug

SEQ ID NO: 3478728 - RNA, 16 nt, Human
aaugaggucugaaaug

SEQ ID NO: 3478729 - RNA, 19 nt, Human
aaugaggucugaaauggag

SEQ ID NO: 3478730 - RNA, 16 nt, Human
aaugaggucugggcua

SEQ ID NO: 3478731 - RNA, 18 nt, Human
aaugaguccaaacuggaa

SEQ ID NO: 3478732 - RNA, 13 nt, Human
aaugagugugcau

SEQ ID NO: 3478733 - RNA, 13 nt, Human
aaugaguugugaa

SEQ ID NO: 3478734 - RNA, 15 nt, Human
aaugaguuucuuuua

SEQ ID NO: 3478735 - RNA, 14 nt, Human
aaugauaacuggaa

SEQ ID NO: 3478736 - RNA, 16 nt, Human
aaugauaacuggaaac

SEQ ID NO: 3478737 - RNA, 18 nt, Human
aaugauaguaagaaaagu

SEQ ID NO: 3478738 - RNA, 16 nt, Human
aaugauauugcugaag

SEQ ID NO: 3478739 - RNA, 21 nt, Human
aaugauccuguauucagacag

SEQ ID NO: 3478740 - RNA, 20 nt, Human
aaugaucugccucuaaaagc

SEQ ID NO: 3478741 - RNA, 19 nt, Human
aaugaugacaaaaaauguu

SEQ ID NO: 3478742 - RNA, 12 nt, Human
aaugaugaugac

SEQ ID NO: 3478743 - RNA, 19 nt, Human
aaugaugccaugaggaaca

SEQ ID NO: 3478744 - RNA, 17 nt, Human
aaugaugcccugcucca

SEQ ID NO: 3478745 - RNA, 22 nt, Human
aaugauggacccaaugcacaca

SEQ ID NO: 3478746 - RNA, 21 nt, Human
aaugauggcagugguuugaaa

SEQ ID NO: 3478747 - RNA, 20 nt, Human
aaugauggcccauucuacuu

SEQ ID NO: 3478748 - RNA, 20 nt, Human
aaugauguauguugaagccu

SEQ ID NO: 3478749 - RNA, 19 nt, Human
aaugaugugccugcuucag

SEQ ID NO: 3478750 - RNA, 12 nt, Human
aaugauuaauua

SEQ ID NO: 3478751 - RNA, 21 nt, Human
aaugauuauuuucauuacaau

SEQ ID NO: 3478752 - RNA, 21 nt, Human
aaugauucaaaaagucacagu

SEQ ID NO: 3478753 - RNA, 14 nt, Human
aaugauucaguguu

SEQ ID NO: 3478754 - RNA, 16 nt, Human
aaugauucauguuaua

SEQ ID NO: 3478755 - RNA, 13 nt, Human
aaugauugaaaau

SEQ ID NO: 3478756 - RNA, 23 nt, Human
aauaucgaucagaugacuagaaa

SEQ ID NO: 3478757 - RNA, 14 nt, Human
aauaucuaaaguua

SEQ ID NO: 3478758 - RNA, 18 nt, Human
aauaucuaauaaaaaguc

SEQ ID NO: 3478759 - RNA, 14 nt, Human
aauaucuaauauau

SEQ ID NO: 3478760 - RNA, 22 nt, Human
aauaucuaauauauaugaauaa

SEQ ID NO: 3478761 - RNA, 21 nt, Human
aauaucuaguaauauauuuaa

SEQ ID NO: 3478762 - RNA, 18 nt, Human
aauaucucugaguucugu

SEQ ID NO: 3478763 - RNA, 17 nt, Human
aauaucugaaaauguau

SEQ ID NO: 3478764 - RNA, 18 nt, Human
aauaucugaaaauguaug

SEQ ID NO: 3478765 - RNA, 19 nt, Human
aauaucugaaaauguaugu

SEQ ID NO: 3478766 - RNA, 21 nt, Human
aauaucugaacauuuacuaca

SEQ ID NO: 3478767 - RNA, 21 nt, Human
aauaucuguauuuaauuuuga

SEQ ID NO: 3478768 - RNA, 23 nt, Human
aauaucuguauuuaauuuugaca

SEQ ID NO: 3478769 - RNA, 14 nt, Human
aauaucugugaaau

SEQ ID NO: 3478770 - RNA, 14 nt, Human
aauaucuuguguug

SEQ ID NO: 3478771 - RNA, 18 nt, Human
aauaucuuuuauguuuga

SEQ ID NO: 3478772 - RNA, 21 nt, Human
aauaucuuuuauguuugaaua

SEQ ID NO: 3478773 - RNA, 23 nt, Human
aauaucuuuuauguuugaauaug

SEQ ID NO: 3478774 - RNA, 18 nt, Human
aauaugaacccuuuguuu

SEQ ID NO: 3478775 - RNA, 20 nt, Human
aauaugaacccuuuguuucu

SEQ ID NO: 3478776 - RNA, 19 nt, Human
aauaugaacggugagcauu

SEQ ID NO: 3478777 - RNA, 23 nt, Human
aauaugaaguuacuuucuuaaug

SEQ ID NO: 3478778 - RNA, 20 nt, Human
aauaugacuuuuuauaaaau

SEQ ID NO: 3478779 - RNA, 16 nt, Human
aauaugauguuaaaaa

SEQ ID NO: 3478780 - RNA, 20 nt, Human
aauaugauuaguaaagaaau

SEQ ID NO: 3478781 - RNA, 15 nt, Human
aauaugcaaagcacu

SEQ ID NO: 3478782 - RNA, 17 nt, Human
aauaugcaaagcacuga

SEQ ID NO: 3478783 - RNA, 14 nt, Human
aauaugcaaagucu

SEQ ID NO: 3478784 - RNA, 22 nt, Human
aauguuauuuguuauuuucagu

SEQ ID NO: 3478785 - RNA, 17 nt, Human
aauguucaucaauuccc

SEQ ID NO: 3478786 - RNA, 12 nt, Human
aauguucauugu

SEQ ID NO: 3478787 - RNA, 21 nt, Human
aauguuccugccuccuugaua

SEQ ID NO: 3478788 - RNA, 13 nt, Human
aauguucuaaguu

SEQ ID NO: 3478789 - RNA, 12 nt, Human
aauguucugaca

SEQ ID NO: 3478790 - RNA, 19 nt, Human
aauguucugacauuaacag

SEQ ID NO: 3478791 - RNA, 20 nt, Human
aauguucuuaugcaaaaugg

SEQ ID NO: 3478792 - RNA, 14 nt, Human
aauguucuuuggaa

SEQ ID NO: 3478793 - RNA, 20 nt, Human
aauguucuuuggaaaguaca

SEQ ID NO: 3478794 - RNA, 22 nt, Human
aauguucuuuggaaaguacacu

SEQ ID NO: 3478795 - RNA, 21 nt, Human
aauguugaacaaaauaaauug

SEQ ID NO: 3478796 - RNA, 18 nt, Human
aauguugagaaucccaaa

SEQ ID NO: 3478797 - RNA, 14 nt, Human
aauguugauuucua

SEQ ID NO: 3478798 - RNA, 15 nt, Human
aauguugauuucuag

SEQ ID NO: 3478799 - RNA, 18 nt, Human
aauguugauuucuaguua

SEQ ID NO: 3478800 - RNA, 20 nt, Human
aauguugcuaugugccuuau

SEQ ID NO: 3478801 - RNA, 13 nt, Human
aauguugcugaaa

SEQ ID NO: 3478802 - RNA, 20 nt, Human
aauguuggacaccuuuaggu

SEQ ID NO: 3478803 - RNA, 21 nt, Human
aauguuggacaccuuuagguu

SEQ ID NO: 3478804 - RNA, 19 nt, Human
aauguuggauuuauaaaug

SEQ ID NO: 3478805 - RNA, 21 nt, Human
aauguugggacugcuaaauaa

SEQ ID NO: 3478806 - RNA, 18 nt, Human
aauguugguuuacuuuca

SEQ ID NO: 3478807 - RNA, 21 nt, Human
aauguugguuuacuuucaaau

SEQ ID NO: 3478808 - RNA, 14 nt, Human
aauguuguaguguc

SEQ ID NO: 3478809 - RNA, 17 nt, Human
aauguugugaauaauua

SEQ ID NO: 3478810 - RNA, 18 nt, Human
aauguugugaauaauuac

SEQ ID NO: 3478811 - RNA, 16 nt, Human
aauguugugguuuguu

SEQ ID NO: 3478812 - RNA, 16 nt, Human
aauguuuaaacauuuu

SEQ ID NO: 3478813 - RNA, 13 nt, Human
aauguuuaaucau

SEQ ID NO: 3478814 - RNA, 18 nt, Human
aauguuuaaucauauaaa

SEQ ID NO: 3478815 - RNA, 23 nt, Human
aauguuuaaucauauaaauagaa

SEQ ID NO: 3478816 - RNA, 22 nt, Human
aauguuuacagauccccaagcc

SEQ ID NO: 3478817 - RNA, 16 nt, Human
aauuagguuuuguaca

SEQ ID NO: 3478818 - RNA, 17 nt, Human
aauuagguuuuuccuua

SEQ ID NO: 3478819 - RNA, 21 nt, Human
aauuaguacagaaauauccau

SEQ ID NO: 3478820 - RNA, 18 nt, Human
aauuaguauuuauuuaau

SEQ ID NO: 3478821 - RNA, 23 nt, Human
aauuaguuuccuuuuuaauaugc

SEQ ID NO: 3478822 - RNA, 20 nt, Human
aauuaguuuuauaugcuucu

SEQ ID NO: 3478823 - RNA, 18 nt, Human
aauuauaacuggaaagaa

SEQ ID NO: 3478824 - RNA, 19 nt, Human
aauuauaacuggaaagaag

SEQ ID NO: 3478825 - RNA, 17 nt, Human
aauuauaacuuaaaaua

SEQ ID NO: 3478826 - RNA, 17 nt, Human
aauuauaaggacugcau

SEQ ID NO: 3478827 - RNA, 12 nt, Human
aauuauaaugua

SEQ ID NO: 3478828 - RNA, 13 nt, Human
aauuauaauguau

SEQ ID NO: 3478829 - RNA, 18 nt, Human
aauuauaauguauucaua

SEQ ID NO: 3478830 - RNA, 20 nt, Human
aauuauacaaauuaaaaaga

SEQ ID NO: 3478831 - RNA, 20 nt, Human
aauuauacuggagaagucuu

SEQ ID NO: 3478832 - RNA, 19 nt, Human
aauuauagaugggaaugaa

SEQ ID NO: 3478833 - RNA, 17 nt, Human
aauuauagcucuaaugu

SEQ ID NO: 3478834 - RNA, 18 nt, Human
aauuauagcucuaauguu

SEQ ID NO: 3478835 - RNA, 13 nt, Human
aauuauaguuucu

SEQ ID NO: 3478836 - RNA, 20 nt, Human
aauuauauagguugugcaaa

SEQ ID NO: 3478837 - RNA, 19 nt, Human
aauuauaugcuauuucuau

SEQ ID NO: 3478838 - RNA, 11 nt, Human
aauuauauucc

SEQ ID NO: 3478839 - RNA, 23 nt, Human
aauuauauuccucuugcauuuca

SEQ ID NO: 3478840 - RNA, 20 nt, Human
aauuauauuugugcuauagu

SEQ ID NO: 3478841 - RNA, 22 nt, Human
aauuauauuugugcuauaguau

SEQ ID NO: 3478842 - RNA, 16 nt, Human
aauuaucaagcuaaua

SEQ ID NO: 3478843 - RNA, 13 nt, Human
aauuauccaggaa

SEQ ID NO: 3478844 - RNA, 15 nt, Human
aauuaucccuuuucu

SEQ ID NO: 3478845 - RNA, 14 nt, Human
aauuauccuauuuc

SEQ ID NO: 3478846 - RNA, 17 nt, Human
aauuaucggaagcagug

SEQ ID NO: 3478847 - RNA, 20 nt, Human
aauuaucggaagcagugccu

SEQ ID NO: 3478848 - RNA, 20 nt, Human
aauuaucgggaacaguguuu

SEQ ID NO: 3478849 - RNA, 22 nt, Human
aauuaucuauacauaucuuuau

SEQ ID NO: 3478850 - RNA, 12 nt, Human
aauuaucuauuu

SEQ ID NO: 3478851 - RNA, 16 nt, Human
aauuaucuauuuguau

SEQ ID NO: 3478852 - RNA, 19 nt, Human
aauuaucuauuuguauaua

SEQ ID NO: 3478853 - RNA, 21 nt, Human
aauuaucuugauacauucaaa

SEQ ID NO: 3478854 - RNA, 12 nt, Human
aauuaugacagu

SEQ ID NO: 3478855 - RNA, 23 nt, Human
aauuaugagauugguuuuccugu

SEQ ID NO: 3478856 - RNA, 19 nt, Human
aauuaugaguuauuuuuau

SEQ ID NO: 3478857 - RNA, 20 nt, Human
aauuaugguuaguagaggua

SEQ ID NO: 3478858 - RNA, 15 nt, Human
aauuauguaaauuau

SEQ ID NO: 3478859 - RNA, 17 nt, Human
aauuauguaaauuauca

SEQ ID NO: 3478860 - RNA, 17 nt, Human
aauuauguaaauuaugu

SEQ ID NO: 3478861 - RNA, 22 nt, Human
aauuaugucugcugaauaauaa

SEQ ID NO: 3478862 - RNA, 17 nt, Human
aauuaugugacauuuua

SEQ ID NO: 3478863 - RNA, 13 nt, Human
aauuauguuaaac

SEQ ID NO: 3478864 - RNA, 19 nt, Human
aauuauguuaaacuagcau

SEQ ID NO: 3478865 - RNA, 18 nt, Human
aauuauguuauugaaaaa

SEQ ID NO: 3478866 - RNA, 19 nt, Human
aauuauguugaaaagagua

SEQ ID NO: 3478867 - RNA, 16 nt, Human
aauuauuaacuacauu

SEQ ID NO: 3478868 - RNA, 23 nt, Human
aauuauuaacuacauuuaugagu

SEQ ID NO: 3478869 - RNA, 16 nt, Human
aauuauuaaugaaaau

SEQ ID NO: 3478870 - RNA, 17 nt, Human
aauuauuaaugaaaaua

SEQ ID NO: 3478871 - RNA, 11 nt, Human
aauuauuauuu

SEQ ID NO: 3478872 - RNA, 13 nt, Human
aauuauuauuuau

SEQ ID NO: 3478873 - RNA, 16 nt, Human
aauuauuauuuauaua

SEQ ID NO: 3478874 - RNA, 18 nt, Human
aauuauucaguuaagaaa

SEQ ID NO: 3478875 - RNA, 14 nt, Human
aauuauugacacug

SEQ ID NO: 3478876 - RNA, 20 nt, Human
aauuauugauauauauuaua

SEQ ID NO: 3478877 - RNA, 17 nt, Human
aauuauugauguuuuca

SEQ ID NO: 3478878 - RNA, 17 nt, Human
aauuauugauugcuuuu

SEQ ID NO: 3478879 - RNA, 12 nt, Human
aauuauuguaua

SEQ ID NO: 3478880 - RNA, 13 nt, Human
aauuauugugauu

SEQ ID NO: 3478881 - RNA, 19 nt, Human
aauuauuguuuauauuuuc

SEQ ID NO: 3478882 - RNA, 20 nt, Human
aauuauuguuuauauuuuca

SEQ ID NO: 3478883 - RNA, 22 nt, Human
aauuauuguuuauauuuucaau

SEQ ID NO: 3478884 - RNA, 22 nt, Human
aauuauuuaaaccgcuaaaaga

SEQ ID NO: 3478885 - RNA, 14 nt, Human
aauuauuuaauaaa

SEQ ID NO: 3478886 - RNA, 19 nt, Human
aauuauuuauuuaauaaca

SEQ ID NO: 3478887 - RNA, 22 nt, Human
aauuauuucugucacaguaaaa

SEQ ID NO: 3478888 - RNA, 14 nt, Human
aauuauuugaauga

SEQ ID NO: 3478889 - RNA, 19 nt, Human
aauuauuugcaggucuuua

SEQ ID NO: 3478890 - RNA, 14 nt, Human
aauuauuuguguaa

SEQ ID NO: 3478891 - RNA, 15 nt, Human
aauuauuuuaaaaga

SEQ ID NO: 3478892 - RNA, 15 nt, Human
aauuauuuuaaauua

SEQ ID NO: 3478893 - RNA, 20 nt, Human
aauuauuuuaaauuauaagg

SEQ ID NO: 3478894 - RNA, 17 nt, Human
aauuauuuuaauuaggu

SEQ ID NO: 3478895 - RNA, 11 nt, Human
aauuauuuugu

SEQ ID NO: 3478896 - RNA, 16 nt, Human
aauuauuuuguucaua

SEQ ID NO: 3478897 - RNA, 22 nt, Human
aauuauuuuguucauacauauu

SEQ ID NO: 3478898 - RNA, 15 nt, Human
aauuauuuuuaagug

SEQ ID NO: 3478899 - RNA, 13 nt, Human
aauucaaaaaugu

SEQ ID NO: 3478900 - RNA, 22 nt, Human
aauucaaaaauguacaaaauaa

SEQ ID NO: 3478901 - RNA, 18 nt, Human
aauucaaagcucuauuaa

SEQ ID NO: 3478902 - RNA, 17 nt, Human
aauucaaauaaaaaucc

SEQ ID NO: 3478903 - RNA, 21 nt, Human
aauucaaccacuguaaaauga

SEQ ID NO: 3478904 - RNA, 20 nt, Human
aauucaagaaaacaacuuca

SEQ ID NO: 3478905 - RNA, 16 nt, Human
aauucaaggaauuucu

SEQ ID NO: 3478906 - RNA, 15 nt, Human
aauucaauaguaaua

SEQ ID NO: 3478907 - RNA, 20 nt, Human
aauucaauaguaauauaaua

SEQ ID NO: 3478908 - RNA, 15 nt, Human
aauucaauucaaagc

SEQ ID NO: 3478909 - RNA, 13 nt, Human
aauucacaaagua

SEQ ID NO: 3478910 - RNA, 17 nt, Human
aauucaccaaaguauuu

SEQ ID NO: 3478911 - RNA, 21 nt, Human
aauucacuguacuaucagguu

SEQ ID NO: 3478912 - RNA, 21 nt, Human
aauucacuuucauuuuugaua

SEQ ID NO: 3478913 - RNA, 15 nt, Human
aauucagaaggaucu

SEQ ID NO: 3478914 - RNA, 21 nt, Human
aauucagacaucugagguuuu

SEQ ID NO: 3478915 - RNA, 16 nt, Human
aauucagcaaaccauu

SEQ ID NO: 3478916 - RNA, 20 nt, Human
aauucagcacugauuucaca

SEQ ID NO: 3478917 - RNA, 14 nt, Human
aauucagcauuuga

SEQ ID NO: 3478918 - RNA, 21 nt, Human
aauucaggugaaaauguucau

SEQ ID NO: 3478919 - RNA, 15 nt, Human
aauucagguuuuucc

SEQ ID NO: 3478920 - RNA, 19 nt, Human
aauucagguuuuuccuuuu

SEQ ID NO: 3478921 - RNA, 19 nt, Human
aauucaguguauuucaguu

SEQ ID NO: 3478922 - RNA, 11 nt, Human
aauucaguugu

SEQ ID NO: 3478923 - RNA, 22 nt, Human
aauucaguuguuagugugucuu

SEQ ID NO: 3478924 - RNA, 13 nt, Human
aauucaguuucau

SEQ ID NO: 3478925 - RNA, 13 nt, Human
aauucauauucug

SEQ ID NO: 3478926 - RNA, 23 nt, Human
aauucaucaaauggaagacacau

SEQ ID NO: 3478927 - RNA, 16 nt, Human
aauucaucugucuaua

SEQ ID NO: 3478928 - RNA, 19 nt, Human
aauucauucauacuuaaaa

SEQ ID NO: 3478929 - RNA, 13 nt, Human
aauucauuucuaa

SEQ ID NO: 3478930 - RNA, 16 nt, Human
aauucauuuucucuuu

SEQ ID NO: 3478931 - RNA, 15 nt, Human
aauucauuuuuuuca

SEQ ID NO: 3478932 - RNA, 17 nt, Human
aauuccaaacaugguuu

SEQ ID NO: 3478933 - RNA, 18 nt, Human
aauuccaaagucucuaau

SEQ ID NO: 3478934 - RNA, 16 nt, Human
aauuccacacccucac

SEQ ID NO: 3478935 - RNA, 20 nt, Human
aauuccacacccucacugcu

SEQ ID NO: 3478936 - RNA, 12 nt, Human
aauuccacagcu

SEQ ID NO: 3478937 - RNA, 14 nt, Human
aauuccacuggacu

SEQ ID NO: 3478938 - RNA, 11 nt, Human
aauuccaugaa

SEQ ID NO: 3478939 - RNA, 16 nt, Human
aauuccaugaaucgcu

SEQ ID NO: 3478940 - RNA, 13 nt, Human
aauucucauguga

SEQ ID NO: 3478941 - RNA, 16 nt, Human
aauucucaugugaucc

SEQ ID NO: 3478942 - RNA, 16 nt, Human
aauucuccugccucag

SEQ ID NO: 3478943 - RNA, 16 nt, Human
aauucuccugccuuug

SEQ ID NO: 3478944 - RNA, 12 nt, Human
aauucuccugga

SEQ ID NO: 3478945 - RNA, 11 nt, Human
aauucuccuuu

SEQ ID NO: 3478946 - RNA, 20 nt, Human
aauucucuguggaaugaaua

SEQ ID NO: 3478947 - RNA, 15 nt, Human
aauucucuuauccaa

SEQ ID NO: 3478948 - RNA, 18 nt, Human
aauucugaaguuauauuu

SEQ ID NO: 3478949 - RNA, 19 nt, Human
aauucugaaguuauauuuc

SEQ ID NO: 3478950 - RNA, 14 nt, Human
aauucugaauuugc

SEQ ID NO: 3478951 - RNA, 15 nt, Human
aauucugaauuugca

SEQ ID NO: 3478952 - RNA, 21 nt, Human
aauucugagaaaacuucuuuu

SEQ ID NO: 3478953 - RNA, 23 nt, Human
aauucugauucuggcuuuaagcc

SEQ ID NO: 3478954 - RNA, 21 nt, Human
aauucuggcugguagagcagg

SEQ ID NO: 3478955 - RNA, 12 nt, Human
aauucuguauag

SEQ ID NO: 3478956 - RNA, 20 nt, Human
aauucuguucugauauuaau

SEQ ID NO: 3478957 - RNA, 16 nt, Human
aauucuguuucuugag

SEQ ID NO: 3478958 - RNA, 12 nt, Human
aauucuguuuua

SEQ ID NO: 3478959 - RNA, 22 nt, Human
aauucuguuuuuaaugcuauuu

SEQ ID NO: 3478960 - RNA, 18 nt, Human
aauucuguuuuucuaggc

SEQ ID NO: 3478961 - RNA, 11 nt, Human
aauucuuaaaa

SEQ ID NO: 3478962 - RNA, 23 nt, Human
aauucuuaaaaggcccauagcag

SEQ ID NO: 3478963 - RNA, 13 nt, Human
aauucuuaaauau

SEQ ID NO: 3478964 - RNA, 16 nt, Human
aauucuuaaguauguu

SEQ ID NO: 3478965 - RNA, 17 nt, Human
aauucuuacaaacaugu

SEQ ID NO: 3478966 - RNA, 15 nt, Human
aauucuuacauguuu

SEQ ID NO: 3478967 - RNA, 21 nt, Human
aauucuuauuacuagacugcc

SEQ ID NO: 3478968 - RNA, 18 nt, Human
aauucuuauuccauauua

SEQ ID NO: 3478969 - RNA, 23 nt, Human
aauucuuauuuuuuaaaaagcua

SEQ ID NO: 3478970 - RNA, 20 nt, Human
aauucuucagcguaaaaugg

SEQ ID NO: 3478971 - RNA, 11 nt, Human
aauucuucccu

SEQ ID NO: 3478972 - RNA, 21 nt, Human
aauucuucccuaucuuugcca

SEQ ID NO: 3478973 - RNA, 21 nt, Human
aauucuugaaagaauuuuccu

SEQ ID NO: 3478974 - RNA, 15 nt, Human
aauucuugaaggaaa

SEQ ID NO: 3478975 - RNA, 18 nt, Human
aauucuuguaauuuuuau

SEQ ID NO: 3478976 - RNA, 20 nt, Human
aauucuuguauauuauggaa

SEQ ID NO: 3478977 - RNA, 13 nt, Human
aauucuuuaauga

SEQ ID NO: 3478978 - RNA, 21 nt, Human
aauucuuuauacaacagugcu

SEQ ID NO: 3478979 - RNA, 19 nt, Human
aauucuuucaauacagaua

SEQ ID NO: 3478980 - RNA, 20 nt, Human
aauucuuucaauacagauau

SEQ ID NO: 3478981 - RNA, 22 nt, Human
aauucuuucaauacagauauau

SEQ ID NO: 3478982 - RNA, 17 nt, Human
aauucuuugcaaaaauc

SEQ ID NO: 3478983 - RNA, 14 nt, Human
aauucuuuugaauu

SEQ ID NO: 3478984 - RNA, 18 nt, Human
aauucuuuuuuauuaauc

SEQ ID NO: 3478985 - RNA, 21 nt, Human
aauucuuuuuuauuaaucacu

SEQ ID NO: 3478986 - RNA, 17 nt, Human
aauugaaaaacucuuua

SEQ ID NO: 3478987 - RNA, 14 nt, Human
aauugaaaaguaca

SEQ ID NO: 3478988 - RNA, 13 nt, Human
aauugaaacacuu

SEQ ID NO: 3478989 - RNA, 15 nt, Human
aauugaaacacuuuu

SEQ ID NO: 3478990 - RNA, 17 nt, Human
aauugaaaggcauucuc

SEQ ID NO: 3478991 - RNA, 21 nt, Human
aauugaaaggcauucucugaa

SEQ ID NO: 3478992 - RNA, 12 nt, Human
aauugaaauaua

SEQ ID NO: 3478993 - RNA, 12 nt, Human
aauugaaaugua

SEQ ID NO: 3478994 - RNA, 13 nt, Human
aauugaaccuuug

SEQ ID NO: 3478995 - RNA, 21 nt, Human
aauugaacuuaaauaaauguc

SEQ ID NO: 3478996 - RNA, 14 nt, Human
aauugaaggaaaga

SEQ ID NO: 3478997 - RNA, 18 nt, Human
aauugaagguuuuugaua

SEQ ID NO: 3478998 - RNA, 19 nt, Human
aauugaagguuuuugauag

SEQ ID NO: 3478999 - RNA, 21 nt, Human
aauugaagguuuuugauagca

SEQ ID NO: 3479000 - RNA, 18 nt, Human
aauugaaguaaacuuuuu

SEQ ID NO: 3479001 - RNA, 20 nt, Human
aauugaaguguauaauauaa

SEQ ID NO: 3479002 - RNA, 21 nt, Human
aauugaaguguauaauauaaa

SEQ ID NO: 3479003 - RNA, 18 nt, Human
aauugaauacuuugaaug

SEQ ID NO: 3479004 - RNA, 21 nt, Human
aauugaaucaguauaaacaaa

SEQ ID NO: 3479005 - RNA, 14 nt, Human
aauugaauuuaaca

SEQ ID NO: 3479006 - RNA, 16 nt, Human
aauugaauuuaacaau

SEQ ID NO: 3479007 - RNA, 20 nt, Human
aauugaauuuucaagcaucu

SEQ ID NO: 3479008 - RNA, 21 nt, Human
aauugaauuuucaagcaucuc

SEQ ID NO: 3479009 - RNA, 18 nt, Human
aauugacaggcgaaagaa

SEQ ID NO: 3479010 - RNA, 19 nt, Human
aauugaccaucugcuuuua

SEQ ID NO: 3479011 - RNA, 16 nt, Human
aauugacccacaagaa

SEQ ID NO: 3479012 - RNA, 19 nt, Human
aauugacccacaagaaaug

SEQ ID NO: 3479013 - RNA, 21 nt, Human
aauugacccacaagaaaugaa

SEQ ID NO: 3479014 - RNA, 23 nt, Human
aauugaccgacagcuuuccagua

SEQ ID NO: 3479015 - RNA, 15 nt, Human
aauugacucaaaucu

SEQ ID NO: 3479016 - RNA, 21 nt, Human
aauugacuuauuuauauaaau

SEQ ID NO: 3479017 - RNA, 18 nt, Human
aauugacuucgacuguga

SEQ ID NO: 3479018 - RNA, 20 nt, Human
aauugagaagcguauguuuu

SEQ ID NO: 3479019 - RNA, 23 nt, Human
aauugagcugcuuuuuuugaaac

SEQ ID NO: 3479020 - RNA, 14 nt, Human
aauugaggucugcu

SEQ ID NO: 3479021 - RNA, 19 nt, Human
aauugaggucugcucggcc

SEQ ID NO: 3479022 - RNA, 18 nt, Human
aauugaguguuuaaaguu

SEQ ID NO: 3479023 - RNA, 15 nt, Human
aauugauaauaaacu

SEQ ID NO: 3479024 - RNA, 22 nt, Human
aauugauaauaaacuguccucu

SEQ ID NO: 3479025 - RNA, 22 nt, Human
aauugaucauagguauuucaaa

SEQ ID NO: 3479026 - RNA, 19 nt, Human
aauugaugggauuugguca

SEQ ID NO: 3479027 - RNA, 12 nt, Human
aauugauguuga

SEQ ID NO: 3479028 - RNA, 13 nt, Human
aauugauguugau

SEQ ID NO: 3479029 - RNA, 17 nt, Human
aauugauguugaugcaa

SEQ ID NO: 3479030 - RNA, 20 nt, Human
aauugauugggcacaucauu

SEQ ID NO: 3479031 - RNA, 13 nt, Human
aauugauuugcau

SEQ ID NO: 3479032 - RNA, 13 nt, Human
aauugauuuugaa

SEQ ID NO: 3479033 - RNA, 20 nt, Human
aauugcaaaaacauagaaau

SEQ ID NO: 3479034 - RNA, 14 nt, Human
aauugcaaaucuug

SEQ ID NO: 3479035 - RNA, 15 nt, Human
aauugcaaucuauaa

SEQ ID NO: 3479036 - RNA, 20 nt, Human
aauugcacaccuuggaauuc

SEQ ID NO: 3479037 - RNA, 22 nt, Human
aauugcacagaaguccuguaug

SEQ ID NO: 3479038 - RNA, 18 nt, Human
aauugcacuuuuaaaccu

SEQ ID NO: 3479039 - RNA, 16 nt, Human
aauugcauaaagcaua

SEQ ID NO: 3479040 - RNA, 22 nt, Human
aauugcaugcugcuuuaauugu

SEQ ID NO: 3479041 - RNA, 12 nt, Human
aauugcauuucc

SEQ ID NO: 3479042 - RNA, 13 nt, Human
aauugcauuuuuu

SEQ ID NO: 3479043 - RNA, 21 nt, Human
aauugcauuuuuuaaaacaag

SEQ ID NO: 3479044 - RNA, 23 nt, Human
aauugccaccucuaacagcacca

SEQ ID NO: 3479045 - RNA, 13 nt, Human
aauugccauauug

SEQ ID NO: 3479046 - RNA, 15 nt, Human
aauugccauauugca

SEQ ID NO: 3479047 - RNA, 17 nt, Human
aauugccauauugcaca

SEQ ID NO: 3479048 - RNA, 20 nt, Human
aauugccauguacaguaugu

SEQ ID NO: 3479049 - RNA, 14 nt, Human
aauugccuuucugu

SEQ ID NO: 3479050 - RNA, 22 nt, Human
aauugcguuggucucugcauuu

SEQ ID NO: 3479051 - RNA, 13 nt, Human
aauugcuauguua

SEQ ID NO: 3479052 - RNA, 14 nt, Human
aauugcuauguuac

SEQ ID NO: 3479053 - RNA, 19 nt, Human
aauugcuauguuacuauuu

SEQ ID NO: 3479054 - RNA, 21 nt, Human
aauugcuauguuacuauuuuc

SEQ ID NO: 3479055 - RNA, 17 nt, Human
aauugcucacaguuauu

SEQ ID NO: 3479056 - RNA, 18 nt, Human
aauugcugacuguagcuu

SEQ ID NO: 3479057 - RNA, 18 nt, Human
aauugcuguguaucugau

SEQ ID NO: 3479058 - RNA, 19 nt, Human
aauugcuguugaaagcaaa

SEQ ID NO: 3479059 - RNA, 21 nt, Human
aauugcuguugaaagcaaaaa

SEQ ID NO: 3479060 - RNA, 13 nt, Human
aauugcuuauuua

SEQ ID NO: 3479061 - RNA, 19 nt, Human
aauugcuuauuuauuguau

SEQ ID NO: 3479062 - RNA, 15 nt, Human
aauuggaaagcaggu

SEQ ID NO: 3479063 - RNA, 16 nt, Human
aauuggaggaaagcaa

SEQ ID NO: 3479064 - RNA, 15 nt, Human
aauuggauuuccuaa

SEQ ID NO: 3479065 - RNA, 17 nt, Human
aauuggauuuccuaaua

SEQ ID NO: 3479066 - RNA, 13 nt, Human
aauuggcauuaaa

SEQ ID NO: 3479067 - RNA, 19 nt, Human
aauugggaguccaggcaca

SEQ ID NO: 3479068 - RNA, 18 nt, Human
aauugggcacuauuuauu

SEQ ID NO: 3479069 - RNA, 16 nt, Human
aauugggccagcuuuu

SEQ ID NO: 3479070 - RNA, 15 nt, Human
acaaggccccagaga

SEQ ID NO: 3479071 - RNA, 20 nt, Human
acaaggcugaccaagagaga

SEQ ID NO: 3479072 - RNA, 22 nt, Human
acaaggcugaccaagagagaaa

SEQ ID NO: 3479073 - RNA, 18 nt, Human
acaagggaagauuuaugu

SEQ ID NO: 3479074 - RNA, 18 nt, Human
acaaggggcuguuacaua

SEQ ID NO: 3479075 - RNA, 21 nt, Human
acaaggggcuguuacauaaca

SEQ ID NO: 3479076 - RNA, 17 nt, Human
acaagggucuagggaga

SEQ ID NO: 3479077 - RNA, 13 nt, Human
acaaggguggcau

SEQ ID NO: 3479078 - RNA, 16 nt, Human
acaaggucuuuaaagu

SEQ ID NO: 3479079 - RNA, 15 nt, Human
acaaggugcaggcag

SEQ ID NO: 3479080 - RNA, 19 nt, Human
acaagguuauaugaauaua

SEQ ID NO: 3479081 - RNA, 14 nt, Human
acaaguaacaaaaa

SEQ ID NO: 3479082 - RNA, 15 nt, Human
acaaguaacaaaaau

SEQ ID NO: 3479083 - RNA, 15 nt, Human
acaaguaauuucagu

SEQ ID NO: 3479084 - RNA, 16 nt, Human
acaaguaauuucagug

SEQ ID NO: 3479085 - RNA, 11 nt, Human
acaaguacugg

SEQ ID NO: 3479086 - RNA, 18 nt, Human
acaaguacugguaagauu

SEQ ID NO: 3479087 - RNA, 20 nt, Human
acaaguagaugccugaacuu

SEQ ID NO: 3479088 - RNA, 20 nt, Human
acaaguaguucuguauuuga

SEQ ID NO: 3479089 - RNA, 21 nt, Human
acaaguaguucuguauuugaa

SEQ ID NO: 3479090 - RNA, 23 nt, Human
acaaguaguucuguauuugaaag

SEQ ID NO: 3479091 - RNA, 23 nt, Human
acaaguaugaauaaagacaccua

SEQ ID NO: 3479092 - RNA, 22 nt, Human
acaagucagcuccagcuuucug

SEQ ID NO: 3479093 - RNA, 23 nt, Human
acaagucauuuuaacuuuaucac

SEQ ID NO: 3479094 - RNA, 16 nt, Human
acaagucccuguaauu

SEQ ID NO: 3479095 - RNA, 20 nt, Human
acaaguccuggauguugugu

SEQ ID NO: 3479096 - RNA, 19 nt, Human
acaagugacuguaucugug

SEQ ID NO: 3479097 - RNA, 22 nt, Human
acaagugacuguaucuguguag

SEQ ID NO: 3479098 - RNA, 17 nt, Human
acaagugagacaaaaag

SEQ ID NO: 3479099 - RNA, 19 nt, Human
acaagugcccuccaggcuu

SEQ ID NO: 3479100 - RNA, 13 nt, Human
acaagugcuggca

SEQ ID NO: 3479101 - RNA, 13 nt, Human
acaagugguggua

SEQ ID NO: 3479102 - RNA, 20 nt, Human
acaaguguauaucagaaaag

SEQ ID NO: 3479103 - RNA, 15 nt, Human
acaaguuaaauaaau

SEQ ID NO: 3479104 - RNA, 22 nt, Human
acaaguuauuuaaaucuguuuu

SEQ ID NO: 3479105 - RNA, 13 nt, Human
acaaguuccaugg

SEQ ID NO: 3479106 - RNA, 22 nt, Human
acaaguugcgacggagagaaaa

SEQ ID NO: 3479107 - RNA, 14 nt, Human
acaaguuguguuug

SEQ ID NO: 3479108 - RNA, 16 nt, Human
acaaguuuauauauau

SEQ ID NO: 3479109 - RNA, 16 nt, Human
acaaguuuuucuguca

SEQ ID NO: 3479110 - RNA, 16 nt, Human
acaauaaaaauguuua

SEQ ID NO: 3479111 - RNA, 12 nt, Human
acaauaaaacau

SEQ ID NO: 3479112 - RNA, 22 nt, Human
acaauaaaaguguccauugaaa

SEQ ID NO: 3479113 - RNA, 15 nt, Human
acaauaaaauauuau

SEQ ID NO: 3479114 - RNA, 12 nt, Human
acaauaaaccuc

SEQ ID NO: 3479115 - RNA, 14 nt, Human
acaauaaauaaucu

SEQ ID NO: 3479116 - RNA, 13 nt, Human
acaauaaauagac

SEQ ID NO: 3479117 - RNA, 16 nt, Human
acaauaaauguauuca

SEQ ID NO: 3479118 - RNA, 20 nt, Human
acaauaaauguauucaaaua

SEQ ID NO: 3479119 - RNA, 23 nt, Human
acaauaaauugcuaauguugcug

SEQ ID NO: 3479120 - RNA, 22 nt, Human
acaauaacuacuguguuccugg

SEQ ID NO: 3479121 - RNA, 15 nt, Human
acaauaagcaaaaac

SEQ ID NO: 3479122 - RNA, 21 nt, Human
acaauaauauuguuguauaau

SEQ ID NO: 3479123 - RNA, 13 nt, Human
acaauaauggaaa

SEQ ID NO: 3479124 - RNA, 13 nt, Human
acaauaauuucag

SEQ ID NO: 3479125 - RNA, 13 nt, Human
acaauacaaaugg

SEQ ID NO: 3479126 - RNA, 13 nt, Human
acaauacccccag

SEQ ID NO: 3479127 - RNA, 21 nt, Human
acaauacucauaaugugaagu

SEQ ID NO: 3479128 - RNA, 22 nt, Human
acaauagccgauaucagaauuu

SEQ ID NO: 3479129 - RNA, 22 nt, Human
acaauaggaguggugauuugaa

SEQ ID NO: 3479130 - RNA, 10 nt, Human
acaauauaua

SEQ ID NO: 3479131 - RNA, 18 nt, Human
acaauauauaaaaauaua

SEQ ID NO: 3479132 - RNA, 12 nt, Human
acaauaucauau

SEQ ID NO: 3479133 - RNA, 15 nt, Human
acaauaugaauacag

SEQ ID NO: 3479134 - RNA, 21 nt, Human
acaauaugaauacagggcaug

SEQ ID NO: 3479135 - RNA, 18 nt, Human
acaauauguacauuucua

SEQ ID NO: 3479136 - RNA, 14 nt, Human
acaauaugugagug

SEQ ID NO: 3479137 - RNA, 22 nt, Human
acaauaugugccaaucaauagc

SEQ ID NO: 3479138 - RNA, 14 nt, Human
acaauauugaacuu

SEQ ID NO: 3479139 - RNA, 18 nt, Human
acaauauugacuuugucu

SEQ ID NO: 3479140 - RNA, 14 nt, Human
acaauauuuauugu

SEQ ID NO: 3479141 - RNA, 15 nt, Human
acaauauuuauugua

SEQ ID NO: 3479142 - RNA, 19 nt, Human
acaauauuuauuguauuuu

SEQ ID NO: 3479143 - RNA, 14 nt, Human
acaauauuucugau

SEQ ID NO: 3479144 - RNA, 12 nt, Human
acaauauuugug

SEQ ID NO: 3479145 - RNA, 18 nt, Human
acaauauuuuaagcauua

SEQ ID NO: 3479146 - RNA, 23 nt, Human
acaauauuuuaagcauuacucuu

SEQ ID NO: 3479147 - RNA, 15 nt, Human
acaauauuuuauggu

SEQ ID NO: 3479148 - RNA, 23 nt, Human
acaaucaacucuaauagugcuua

SEQ ID NO: 3479149 - RNA, 12 nt, Human
acaaucacacuc

SEQ ID NO: 3479150 - RNA, 12 nt, Human
acaaucagcugc

SEQ ID NO: 3479151 - RNA, 13 nt, Human
acaaucagcugcu

SEQ ID NO: 3479152 - RNA, 17 nt, Human
acaaucaguccccuccc

SEQ ID NO: 3479153 - RNA, 18 nt, Human
acaaucaugaaauaugca

SEQ ID NO: 3479154 - RNA, 14 nt, Human
acaaucaugugugu

SEQ ID NO: 3479155 - RNA, 21 nt, Human
acaaucauguguguuaaccca

SEQ ID NO: 3479156 - RNA, 22 nt, Human
acaaucauugcugaaaauggua

SEQ ID NO: 3479157 - RNA, 20 nt, Human
acaaucauuguuuugaauau

SEQ ID NO: 3479158 - RNA, 22 nt, Human
acaauccuagugcuuuccuuuu

SEQ ID NO: 3479159 - RNA, 17 nt, Human
acaaucgauggccuugc

SEQ ID NO: 3479160 - RNA, 20 nt, Human
acaaucuauuuauuggacau

SEQ ID NO: 3479161 - RNA, 12 nt, Human
acaaucucaaau

SEQ ID NO: 3479162 - RNA, 13 nt, Human
acaaucucuuaaa

SEQ ID NO: 3479163 - RNA, 14 nt, Human
acaaucucuuaaau

SEQ ID NO: 3479164 - RNA, 21 nt, Human
acaaugaaaacucuuugcugc

SEQ ID NO: 3479165 - RNA, 12 nt, Human
acaaugaaauua

SEQ ID NO: 3479166 - RNA, 18 nt, Human
acaaugaagauaaaaaga

SEQ ID NO: 3479167 - RNA, 16 nt, Human
acaaugacaaagcaga

SEQ ID NO: 3479168 - RNA, 12 nt, Human
acaaugacuuac

SEQ ID NO: 3479169 - RNA, 14 nt, Human
acaaugacuuuauu

SEQ ID NO: 3479170 - RNA, 22 nt, Human
acaaugauccuguauucagaca

SEQ ID NO: 3479171 - RNA, 17 nt, Human
acaaugaugaugauaau

SEQ ID NO: 3479172 - RNA, 18 nt, Human
acaaugaugcuauuugca

SEQ ID NO: 3479173 - RNA, 20 nt, Human
acaaugaugcuauuugcaau

SEQ ID NO: 3479174 - RNA, 12 nt, Human
acaaugcaaaac

SEQ ID NO: 3479175 - RNA, 23 nt, Human
acaaugcaaaccaucauugaaau

SEQ ID NO: 3479176 - RNA, 19 nt, Human
acaaugcaccuagcugugc

SEQ ID NO: 3479177 - RNA, 15 nt, Human
acaaugcagaugcca

SEQ ID NO: 3479178 - RNA, 22 nt, Human
acaaugcagcaaggcccugcug

SEQ ID NO: 3479179 - RNA, 16 nt, Human
acaaugcgaaugguag

SEQ ID NO: 3479180 - RNA, 17 nt, Human
acaaugcugauuuggug

SEQ ID NO: 3479181 - RNA, 21 nt, Human
acaaugcugugcccuaaagug

SEQ ID NO: 3479182 - RNA, 19 nt, Human
acaauggaaacugaaugcu

SEQ ID NO: 3479183 - RNA, 16 nt, Human
acaaugguuuuuaaau

SEQ ID NO: 3479184 - RNA, 20 nt, Human
acaauguagauaaguguucu

SEQ ID NO: 3479185 - RNA, 23 nt, Human
acaauguagauggccucuuacua

SEQ ID NO: 3479186 - RNA, 19 nt, Human
acaauguauuuauuuaaaa

SEQ ID NO: 3479187 - RNA, 21 nt, Human
acaauguauuuauuuaaaaga

SEQ ID NO: 3479188 - RNA, 15 nt, Human
acaauguauuuucuu

SEQ ID NO: 3479189 - RNA, 22 nt, Human
acaaugucaaggugcuguuguc

SEQ ID NO: 3479190 - RNA, 22 nt, Human
acaaugucauauacugccaugu

SEQ ID NO: 3479191 - RNA, 22 nt, Human
acaauguccuaacugaaagaug

SEQ ID NO: 3479192 - RNA, 16 nt, Human
acaaugucugcagccc

SEQ ID NO: 3479193 - RNA, 19 nt, Human
acaaugucugcagcccuga

SEQ ID NO: 3479194 - RNA, 19 nt, Human
acaaugugaaaagaaaaau

SEQ ID NO: 3479195 - RNA, 21 nt, Human
acaauguggccgaggacuuug

SEQ ID NO: 3479196 - RNA, 15 nt, Human
acaauguguuuuucu

SEQ ID NO: 3479197 - RNA, 18 nt, Human
acaauguguuuuucucca

SEQ ID NO: 3479198 - RNA, 17 nt, Human
acaauguuaacauuuuu

SEQ ID NO: 3479199 - RNA, 11 nt, Human
acaauguuaag

SEQ ID NO: 3479200 - RNA, 21 nt, Human
acaauguucaucccaugaugu

SEQ ID NO: 3479201 - RNA, 17 nt, Human
acaauguuuaaaccuuu

SEQ ID NO: 3479202 - RNA, 13 nt, Human
acaauguuuacaa

SEQ ID NO: 3479203 - RNA, 21 nt, Human
acaauuaaaaaccugauggaa

SEQ ID NO: 3479204 - RNA, 19 nt, Human
acaauuaaagcuguuauuu

SEQ ID NO: 3479205 - RNA, 17 nt, Human
acaauuaauaguuuguc

SEQ ID NO: 3479206 - RNA, 13 nt, Human
acaauuagauuuc

SEQ ID NO: 3479207 - RNA, 12 nt, Human
acaauuauaaac

SEQ ID NO: 3479208 - RNA, 21 nt, Human
acaauuauuccaaaccaaauu

SEQ ID NO: 3479209 - RNA, 22 nt, Human
acaauuauuccaaaccaaauuu

SEQ ID NO: 3479210 - RNA, 15 nt, Human
acaauucuacauugu

SEQ ID NO: 3479211 - RNA, 21 nt, Human
acaauucucccgggacucugc

SEQ ID NO: 3479212 - RNA, 14 nt, Human
acaauucuuuauac

SEQ ID NO: 3479213 - RNA, 18 nt, Human
acaauucuuuauacaaca

SEQ ID NO: 3479214 - RNA, 19 nt, Human
acaauugaacuuaaauaaa

SEQ ID NO: 3479215 - RNA, 13 nt, Human
acaauugaaguaa

SEQ ID NO: 3479216 - RNA, 16 nt, Human
acaauugaaguaaacu

SEQ ID NO: 3479217 - RNA, 15 nt, Human
acaauugguaaaacu

SEQ ID NO: 3479218 - RNA, 23 nt, Human
acaauugguaaaacucacuguga

SEQ ID NO: 3479219 - RNA, 19 nt, Human
acaauuguccauggucuca

SEQ ID NO: 3479220 - RNA, 21 nt, Human
acaauuguuugggguugaaaa

SEQ ID NO: 3479221 - RNA, 22 nt, Human
acaauuguuuuaaucugaaauu

SEQ ID NO: 3479222 - RNA, 23 nt, Human
acaauuguuuuaaucugaaauuc

SEQ ID NO: 3479223 - RNA, 17 nt, Human
acaauuuacaaagugug

SEQ ID NO: 3479224 - RNA, 12 nt, Human
acaauuuauuuu

SEQ ID NO: 3479225 - RNA, 14 nt, Human
acaauuuauuuuau

SEQ ID NO: 3479226 - RNA, 16 nt, Human
acaauuuccuuuauau

SEQ ID NO: 3479227 - RNA, 13 nt, Human
acaauuucugugu

SEQ ID NO: 3479228 - RNA, 16 nt, Human
acaauuugauacauaa

SEQ ID NO: 3479229 - RNA, 21 nt, Human
acaauuugauacauaauaaaa

SEQ ID NO: 3479230 - RNA, 20 nt, Human
acaauuuggcaauuuugugg

SEQ ID NO: 3479231 - RNA, 12 nt, Human
acaauuuuaaga

SEQ ID NO: 3479232 - RNA, 13 nt, Human
acaauuuucagau

SEQ ID NO: 3479233 - RNA, 14 nt, Human
acaauuuucagauu

SEQ ID NO: 3479234 - RNA, 21 nt, Human
acaauuuucagauuugcacaa

SEQ ID NO: 3479235 - RNA, 13 nt, Human
acaauuuucuugu

SEQ ID NO: 3479236 - RNA, 18 nt, Human
acaauuuucuugugacag

SEQ ID NO: 3479237 - RNA, 14 nt, Human
acaauuuuguuucu

SEQ ID NO: 3479238 - RNA, 15 nt, Human
acaauuuuguuucug

SEQ ID NO: 3479239 - RNA, 18 nt, Human
acaauuuuguuucuguac

SEQ ID NO: 3479240 - RNA, 19 nt, Human
acaauuuuuauuucuuuua

SEQ ID NO: 3479241 - RNA, 14 nt, Human
acaauuuuuuuaau

SEQ ID NO: 3479242 - RNA, 19 nt, Human
acaauuuuuuuaauuuugu

SEQ ID NO: 3479243 - RNA, 19 nt, Human
acacaaaacuccgccccca

SEQ ID NO: 3479244 - RNA, 17 nt, Human
acacaaacacauuguua

SEQ ID NO: 3479245 - RNA, 16 nt, Human
acacaaacuguaaaua

SEQ ID NO: 3479246 - RNA, 18 nt, Human
acacaaagcuuuugcaua

SEQ ID NO: 3479247 - RNA, 20 nt, Human
acacaaagcuuuugcauauu

SEQ ID NO: 3479248 - RNA, 21 nt, Human
acacaaaggaagugcccccuc

SEQ ID NO: 3479249 - RNA, 18 nt, Human
acacaaauacuuauucau

SEQ ID NO: 3479250 - RNA, 12 nt, Human
acacaaaugaua

SEQ ID NO: 3479251 - RNA, 18 nt, Human
acacaaauuaucuuaaaa

SEQ ID NO: 3479252 - RNA, 18 nt, Human
acacaacagccaacagcu

SEQ ID NO: 3479253 - RNA, 19 nt, Human
acacaacagccaacagcua

SEQ ID NO: 3479254 - RNA, 16 nt, Human
acacaagauugguguu

SEQ ID NO: 3479255 - RNA, 17 nt, Human
acacaagauugguguuu

SEQ ID NO: 3479256 - RNA, 14 nt, Human
acacaagccacaga

SEQ ID NO: 3479257 - RNA, 16 nt, Human
acacaagccacagaag

SEQ ID NO: 3479258 - RNA, 17 nt, Human
acacaagcccacagcac

SEQ ID NO: 3479259 - RNA, 14 nt, Human
acacaagcuggaag

SEQ ID NO: 3479260 - RNA, 15 nt, Human
acacaagcuggaagc

SEQ ID NO: 3479261 - RNA, 22 nt, Human
acacaagcuuuuuuacacaaau

SEQ ID NO: 3479262 - RNA, 19 nt, Human
acacaaggauagaugcugg

SEQ ID NO: 3479263 - RNA, 14 nt, Human
acacaaguaaacau

SEQ ID NO: 3479264 - RNA, 19 nt, Human
acacaaguaagagacucag

SEQ ID NO: 3479265 - RNA, 23 nt, Human
acacaaguaagagacucagccug

SEQ ID NO: 3479266 - RNA, 16 nt, Human
acacaaguccugugaa

SEQ ID NO: 3479267 - RNA, 22 nt, Human
acacaaugguuuuuaaauuuug

SEQ ID NO: 3479268 - RNA, 14 nt, Human
acacaaugugucug

SEQ ID NO: 3479269 - RNA, 13 nt, Human
acacaauguuauu

SEQ ID NO: 3479270 - RNA, 22 nt, Human
acacacaaauuaucuuaaaacu

SEQ ID NO: 3479271 - RNA, 15 nt, Human
acacacaacagccaa

SEQ ID NO: 3479272 - RNA, 13 nt, Human
acacacacaaacc

SEQ ID NO: 3479273 - RNA, 14 nt, Human
acacacacaaagag

SEQ ID NO: 3479274 - RNA, 10 nt, Human
acacacacac

SEQ ID NO: 3479275 - RNA, 12 nt, Human
acacacacacac

SEQ ID NO: 3479276 - RNA, 15 nt, Human
acacacacacacaaa

SEQ ID NO: 3479277 - RNA, 14 nt, Human
acacacacacacac

SEQ ID NO: 3479278 - RNA, 16 nt, Human
acacacacacacacac

SEQ ID NO: 3479279 - RNA, 16 nt, Human
acacacacacacacag

SEQ ID NO: 3479280 - RNA, 15 nt, Human
acacacacacacauc

SEQ ID NO: 3479281 - RNA, 15 nt, Human
acacacacacacaug

SEQ ID NO: 3479282 - RNA, 17 nt, Human
acacacacacacaugca

SEQ ID NO: 3479283 - RNA, 13 nt, Human
acacacacacagc

SEQ ID NO: 3479284 - RNA, 13 nt, Human
acacacacacagg

SEQ ID NO: 3479285 - RNA, 14 nt, Human
acacacacacagga

SEQ ID NO: 3479286 - RNA, 13 nt, Human
acacacacacaua

SEQ ID NO: 3479287 - RNA, 14 nt, Human
acacacacacauac

SEQ ID NO: 3479288 - RNA, 17 nt, Human
acacacacacaugcaua

SEQ ID NO: 3479289 - RNA, 12 nt, Human
acacacacagaa

SEQ ID NO: 3479290 - RNA, 13 nt, Human
acacacacagaaa

SEQ ID NO: 3479291 - RNA, 15 nt, Human
acacacacagccaca

SEQ ID NO: 3479292 - RNA, 16 nt, Human
acacacacagccacac

SEQ ID NO: 3479293 - RNA, 12 nt, Human
acacacacagcu

SEQ ID NO: 3479294 - RNA, 13 nt, Human
acacacacagcuu

SEQ ID NO: 3479295 - RNA, 11 nt, Human
acacacacagg

SEQ ID NO: 3479296 - RNA, 13 nt, Human
acacacacauaca

SEQ ID NO: 3479297 - RNA, 13 nt, Human
acacacacaugca

SEQ ID NO: 3479298 - RNA, 15 nt, Human
acacacacaugcaca

SEQ ID NO: 3479299 - RNA, 16 nt, Human
acacacagaaaagcau

SEQ ID NO: 3479300 - RNA, 14 nt, Human
acacacagaaaaua

SEQ ID NO: 3479301 - RNA, 20 nt, Human
acacacagaaaauauacugu

SEQ ID NO: 3479302 - RNA, 13 nt, Human
acacacagacaca

SEQ ID NO: 3479303 - RNA, 11 nt, Human
acacacagcca

SEQ ID NO: 3479304 - RNA, 15 nt, Human
acacacagccacaca

SEQ ID NO: 3479305 - RNA, 20 nt, Human
acacacagcuaacacacagc

SEQ ID NO: 3479306 - RNA, 12 nt, Human
acacacagcucu

SEQ ID NO: 3479307 - RNA, 19 nt, Human
acacacagcucuguccugg

SEQ ID NO: 3479308 - RNA, 13 nt, Human
acacacaggagga

SEQ ID NO: 3479309 - RNA, 23 nt, Human
acacacagguggugucacugucc

SEQ ID NO: 3479310 - RNA, 12 nt, Human
acacacaguacg

SEQ ID NO: 3479311 - RNA, 12 nt, Human
acacacauaaag

SEQ ID NO: 3479312 - RNA, 21 nt, Human
acacacauauaaacaucacac

SEQ ID NO: 3479313 - RNA, 18 nt, Human
acacacauauauuauuug

SEQ ID NO: 3479314 - RNA, 12 nt, Human
acacacaugcac

SEQ ID NO: 3479315 - RNA, 15 nt, Human
acacacaugcauaca

SEQ ID NO: 3479316 - RNA, 17 nt, Human
acacaccaccacgccug

SEQ ID NO: 3479317 - RNA, 20 nt, Human
acacaccaccacgccuggcu

SEQ ID NO: 3479318 - RNA, 15 nt, Human
acacaccagagccca

SEQ ID NO: 3479319 - RNA, 14 nt, Human
acacaccuaacuua

SEQ ID NO: 3479320 - RNA, 17 nt, Human
acacaccuaagggacau

SEQ ID NO: 3479321 - RNA, 15 nt, Human
acacaccucaccaga

SEQ ID NO: 3479322 - RNA, 11 nt, Human
acacaccugua

SEQ ID NO: 3479323 - RNA, 17 nt, Human
acacaccuuuaaguaga

SEQ ID NO: 3479324 - RNA, 14 nt, Human
acacacgcacgcac

SEQ ID NO: 3479325 - RNA, 18 nt, Human
acacacgcacgcacacac

SEQ ID NO: 3479326 - RNA, 16 nt, Human
acacacgcaggaacuc

SEQ ID NO: 3479327 - RNA, 15 nt, Human
acacacgcgcgcaca

SEQ ID NO: 3479328 - RNA, 21 nt, Human
acacacgcgugcacacaccag

SEQ ID NO: 3479329 - RNA, 13 nt, Human
acacacgcugccu

SEQ ID NO: 3479330 - RNA, 16 nt, Human
acacacggugccuuua

SEQ ID NO: 3479331 - RNA, 13 nt, Human
acacacuacacca

SEQ ID NO: 3479332 - RNA, 20 nt, Human
acacacuaccgaaugugucu

SEQ ID NO: 3479333 - RNA, 13 nt, Human
acacacugaagaa

SEQ ID NO: 3479334 - RNA, 18 nt, Human
acacacugaggcagggaa

SEQ ID NO: 3479335 - RNA, 15 nt, Human
acacacugaugcuua

SEQ ID NO: 3479336 - RNA, 17 nt, Human
acacacuguacacauaa

SEQ ID NO: 3479337 - RNA, 16 nt, Human
acacacugugcuuucu

SEQ ID NO: 3479338 - RNA, 17 nt, Human
acacacugugcuuucua

SEQ ID NO: 3479339 - RNA, 22 nt, Human
acacacugugcuuucuauugua

SEQ ID NO: 3479340 - RNA, 14 nt, Human
acacacuuuuuaag

SEQ ID NO: 3479341 - RNA, 15 nt, Human
acacagaaaauauac

SEQ ID NO: 3479342 - RNA, 16 nt, Human
acacagaaaauauacu

SEQ ID NO: 3479343 - RNA, 19 nt, Human
acacagaaaauauacugua

SEQ ID NO: 3479344 - RNA, 20 nt, Human
acacagaaaauauacuguaa

SEQ ID NO: 3479345 - RNA, 21 nt, Human
acacagaaaauauacuguaaa

SEQ ID NO: 3479346 - RNA, 22 nt, Human
acacagaaaauauacuguaaag

SEQ ID NO: 3479347 - RNA, 12 nt, Human
acacagaaacac

SEQ ID NO: 3479348 - RNA, 19 nt, Human
acacagaaaccuuuuuaaa

SEQ ID NO: 3479349 - RNA, 14 nt, Human
acacagaaauauau

SEQ ID NO: 3479350 - RNA, 14 nt, Human
acacagaaaugcug

SEQ ID NO: 3479351 - RNA, 17 nt, Human
acacagaaaugcugcug

SEQ ID NO: 3479352 - RNA, 18 nt, Human
acacagaaaugcugcugg

SEQ ID NO: 3479353 - RNA, 16 nt, Human
acacagaaugcaacca

SEQ ID NO: 3479354 - RNA, 21 nt, Human
acacagacacuaacgaaauau

SEQ ID NO: 3479355 - RNA, 11 nt, Human
acacagaccac

SEQ ID NO: 3479356 - RNA, 16 nt, Human
acacagacuauugaca

SEQ ID NO: 3479357 - RNA, 16 nt, Human
acacagacucauauua

SEQ ID NO: 3479358 - RNA, 23 nt, Human
acacagacugcgauuugucccag

SEQ ID NO: 3479359 - RNA, 22 nt, Human
acacagagaagcggauuuccag

SEQ ID NO: 3479360 - RNA, 19 nt, Human
acacagaguggucuuucug

SEQ ID NO: 3479361 - RNA, 14 nt, Human
acaggcacccacca

SEQ ID NO: 3479362 - RNA, 17 nt, Human
acaggcaccgagaaugu

SEQ ID NO: 3479363 - RNA, 20 nt, Human
acaggcaccgagaauguugu

SEQ ID NO: 3479364 - RNA, 16 nt, Human
acaggcacuuggcagc

SEQ ID NO: 3479365 - RNA, 20 nt, Human
acaggcacuuggcagccuug

SEQ ID NO: 3479366 - RNA, 14 nt, Human
acaggcagaaagag

SEQ ID NO: 3479367 - RNA, 14 nt, Human
acaggcagcagaga

SEQ ID NO: 3479368 - RNA, 22 nt, Human
acaggcagccuggacauagaga

SEQ ID NO: 3479369 - RNA, 18 nt, Human
acaggcagcuuucuagaa

SEQ ID NO: 3479370 - RNA, 19 nt, Human
acaggcagcuuucuagaag

SEQ ID NO: 3479371 - RNA, 18 nt, Human
acaggcagggcaggacca

SEQ ID NO: 3479372 - RNA, 21 nt, Human
acaggcagggcaggaccagcc

SEQ ID NO: 3479373 - RNA, 13 nt, Human
acaggcaggucca

SEQ ID NO: 3479374 - RNA, 21 nt, Human
acaggcaugggugcaaggaaa

SEQ ID NO: 3479375 - RNA, 20 nt, Human
acaggcauguucucugagga

SEQ ID NO: 3479376 - RNA, 17 nt, Human
acaggcauuuccugggu

SEQ ID NO: 3479377 - RNA, 17 nt, Human
acaggcauuuguucacu

SEQ ID NO: 3479378 - RNA, 16 nt, Human
acaggccacccugugc

SEQ ID NO: 3479379 - RNA, 18 nt, Human
acaggcccaagagaugaa

SEQ ID NO: 3479380 - RNA, 13 nt, Human
acaggcccagcau

SEQ ID NO: 3479381 - RNA, 20 nt, Human
acaggcccagcauugcuggu

SEQ ID NO: 3479382 - RNA, 22 nt, Human
acaggcccggcgcgguggcuca

SEQ ID NO: 3479383 - RNA, 16 nt, Human
acaggcccggcuccag

SEQ ID NO: 3479384 - RNA, 20 nt, Human
acaggcccggcuccaggcuc

SEQ ID NO: 3479385 - RNA, 21 nt, Human
acaggcccucccuguucccca

SEQ ID NO: 3479386 - RNA, 23 nt, Human
acaggcccucccuguuccccaga

SEQ ID NO: 3479387 - RNA, 23 nt, Human
acaggcccuccucccucccagcu

SEQ ID NO: 3479388 - RNA, 17 nt, Human
acaggcccuggcugagg

SEQ ID NO: 3479389 - RNA, 15 nt, Human
acaggcccuuccucu

SEQ ID NO: 3479390 - RNA, 13 nt, Human
acaggccucaccu

SEQ ID NO: 3479391 - RNA, 15 nt, Human
acaggccucagggcu

SEQ ID NO: 3479392 - RNA, 13 nt, Human
acaggccucccug

SEQ ID NO: 3479393 - RNA, 23 nt, Human
acaggccucuccauuugcucuuc

SEQ ID NO: 3479394 - RNA, 14 nt, Human
acaggccugaagau

SEQ ID NO: 3479395 - RNA, 15 nt, Human
acaggccugaagaua

SEQ ID NO: 3479396 - RNA, 20 nt, Human
acaggccugaagauauuacu

SEQ ID NO: 3479397 - RNA, 17 nt, Human
acaggccugagauuuca

SEQ ID NO: 3479398 - RNA, 23 nt, Human
acaggccuguguagcugugaccu

SEQ ID NO: 3479399 - RNA, 16 nt, Human
acaggcgaaagaaaac

SEQ ID NO: 3479400 - RNA, 14 nt, Human
acaggcgaggccug

SEQ ID NO: 3479401 - RNA, 18 nt, Human
acaggcuacucuccucgg

SEQ ID NO: 3479402 - RNA, 14 nt, Human
acaggcucaauauu

SEQ ID NO: 3479403 - RNA, 15 nt, Human
acaggcuccugccac

SEQ ID NO: 3479404 - RNA, 13 nt, Human
acaggcucuuagc

SEQ ID NO: 3479405 - RNA, 20 nt, Human
acaggcugacguuccgggca

SEQ ID NO: 3479406 - RNA, 17 nt, Human
acaggcugagugcaggc

SEQ ID NO: 3479407 - RNA, 21 nt, Human
acaggcugcggccccuccccc

SEQ ID NO: 3479408 - RNA, 20 nt, Human
acaggcuggaagauagcugu

SEQ ID NO: 3479409 - RNA, 17 nt, Human
acaggcugggcugggca

SEQ ID NO: 3479410 - RNA, 21 nt, Human
acaggcugggcugggcacugc

SEQ ID NO: 3479411 - RNA, 23 nt, Human
acaggcugggcuucaguggcagc

SEQ ID NO: 3479412 - RNA, 14 nt, Human
acaggcuuagugau

SEQ ID NO: 3479413 - RNA, 17 nt, Human
acaggcuucugagcagc

SEQ ID NO: 3479414 - RNA, 18 nt, Human
acaggcuucugagcagcg

SEQ ID NO: 3479415 - RNA, 23 nt, Human
acaggcuucugagcagcgagccu

SEQ ID NO: 3479416 - RNA, 22 nt, Human
acagggaacccugcuugcacuu

SEQ ID NO: 3479417 - RNA, 13 nt, Human
acagggaagcuac

SEQ ID NO: 3479418 - RNA, 14 nt, Human
acagggaagcuaca

SEQ ID NO: 3479419 - RNA, 18 nt, Human
acagggaagcuacagguu

SEQ ID NO: 3479420 - RNA, 12 nt, Human
acagggaaggca

SEQ ID NO: 3479421 - RNA, 17 nt, Human
acagggaaggcaggcag

SEQ ID NO: 3479422 - RNA, 19 nt, Human
acagggaaggcaggcaggg

SEQ ID NO: 3479423 - RNA, 20 nt, Human
acagggaaggcaggcagggc

SEQ ID NO: 3479424 - RNA, 22 nt, Human
acagggaaggcaggcagggcuc

SEQ ID NO: 3479425 - RNA, 14 nt, Human
acagggagccuccu

SEQ ID NO: 3479426 - RNA, 21 nt, Human
acagggaggacgcucucuggc

SEQ ID NO: 3479427 - RNA, 14 nt, Human
acagggaugagcau

SEQ ID NO: 3479428 - RNA, 15 nt, Human
acagggauucucaca

SEQ ID NO: 3479429 - RNA, 16 nt, Human
acagggauugauuuua

SEQ ID NO: 3479430 - RNA, 20 nt, Human
acagggcacaccgggcacuc

SEQ ID NO: 3479431 - RNA, 13 nt, Human
acagggcacaggc

SEQ ID NO: 3479432 - RNA, 17 nt, Human
acagggcaccugccacc

SEQ ID NO: 3479433 - RNA, 17 nt, Human
acagggcagcugggccc

SEQ ID NO: 3479434 - RNA, 21 nt, Human
acagggcaucuccaggaaggc

SEQ ID NO: 3479435 - RNA, 22 nt, Human
acagggcaugccccggccaccu

SEQ ID NO: 3479436 - RNA, 23 nt, Human
acagggccaguggggccugugga

SEQ ID NO: 3479437 - RNA, 13 nt, Human
acagggccucugc

SEQ ID NO: 3479438 - RNA, 17 nt, Human
acagggccucugcggag

SEQ ID NO: 3479439 - RNA, 12 nt, Human
acagggccuggc

SEQ ID NO: 3479440 - RNA, 13 nt, Human
acagggccuggcc

SEQ ID NO: 3479441 - RNA, 14 nt, Human
acagggccuggccc

SEQ ID NO: 3479442 - RNA, 15 nt, Human
acagggccuggccca

SEQ ID NO: 3479443 - RNA, 16 nt, Human
acagggccuggcccau

SEQ ID NO: 3479444 - RNA, 17 nt, Human
acagggccuggcccaug

SEQ ID NO: 3479445 - RNA, 16 nt, Human
acagggcuggcccagc

SEQ ID NO: 3479446 - RNA, 17 nt, Human
acagggcuggcccagcc

SEQ ID NO: 3479447 - RNA, 19 nt, Human
acagggcuggcccagcccu

SEQ ID NO: 3479448 - RNA, 21 nt, Human
acagggcuggcccagcccugc

SEQ ID NO: 3479449 - RNA, 20 nt, Human
acaggggaagguggccucug

SEQ ID NO: 3479450 - RNA, 19 nt, Human
acaggggaauauuuuauuc

SEQ ID NO: 3479451 - RNA, 16 nt, Human
acaggggaggugauag

SEQ ID NO: 3479452 - RNA, 12 nt, Human
acaggggccaga

SEQ ID NO: 3479453 - RNA, 12 nt, Human
acaggggcuggu

SEQ ID NO: 3479454 - RNA, 16 nt, Human
acagggggucuggcug

SEQ ID NO: 3479455 - RNA, 18 nt, Human
acagggggucuggcuggu

SEQ ID NO: 3479456 - RNA, 12 nt, Human
acagggguuccu

SEQ ID NO: 3479457 - RNA, 13 nt, Human
acagggguuccuu

SEQ ID NO: 3479458 - RNA, 17 nt, Human
acaggguaaauuauuca

SEQ ID NO: 3479459 - RNA, 18 nt, Human
acaggguaacugugcuga

SEQ ID NO: 3479460 - RNA, 14 nt, Human
acaggguccugcua

SEQ ID NO: 3479461 - RNA, 21 nt, Human
acagggucucuagugcuguga

SEQ ID NO: 3479462 - RNA, 23 nt, Human
acagggucucuagugcugugaaa

SEQ ID NO: 3479463 - RNA, 14 nt, Human
acagggucugcucu

SEQ ID NO: 3479464 - RNA, 14 nt, Human
acaggguugggccc

SEQ ID NO: 3479465 - RNA, 22 nt, Human
acaggguuuggcugugucuaaa

SEQ ID NO: 3479466 - RNA, 23 nt, Human
acaggguuuggcugugucuaaac

SEQ ID NO: 3479467 - RNA, 14 nt, Human
acaggguuuuuacc

SEQ ID NO: 3479468 - RNA, 20 nt, Human
acaggguuuuuaccugucac

SEQ ID NO: 3479469 - RNA, 15 nt, Human
acagguaaaacaggg

SEQ ID NO: 3479470 - RNA, 17 nt, Human
acagguaccaguucuuu

SEQ ID NO: 3479471 - RNA, 15 nt, Human
acagguacuuugucu

SEQ ID NO: 3479472 - RNA, 16 nt, Human
acagguauauacuuug

SEQ ID NO: 3479473 - RNA, 18 nt, Human
acagguauuuuguuucuu

SEQ ID NO: 3479474 - RNA, 13 nt, Human
acaggucccaccu

SEQ ID NO: 3479475 - RNA, 21 nt, Human
acaggucccaccuccagcccg

SEQ ID NO: 3479476 - RNA, 15 nt, Human
acaggucccuccccu

SEQ ID NO: 3479477 - RNA, 18 nt, Human
acagguggacacacaagg

SEQ ID NO: 3479478 - RNA, 15 nt, Human
acagguggcaggacc

SEQ ID NO: 3479479 - RNA, 18 nt, Human
acaggugugguguaauuu

SEQ ID NO: 3479480 - RNA, 21 nt, Human
acaggugugguguaauuuaua

SEQ ID NO: 3479481 - RNA, 17 nt, Human
acagguguuggugacaa

SEQ ID NO: 3479482 - RNA, 12 nt, Human
acagguuacaac

SEQ ID NO: 3479483 - RNA, 14 nt, Human
acagguuacaacag

SEQ ID NO: 3479484 - RNA, 15 nt, Human
acagguuacaacaga

SEQ ID NO: 3479485 - RNA, 17 nt, Human
acagguuacaacagauu

SEQ ID NO: 3479486 - RNA, 20 nt, Human
acagguuacaacagauuugu

SEQ ID NO: 3479487 - RNA, 23 nt, Human
acagguuauuuuaguuucuguuc

SEQ ID NO: 3479488 - RNA, 15 nt, Human
acagguuggaagaga

SEQ ID NO: 3479489 - RNA, 15 nt, Human
acagguuugggaccc

SEQ ID NO: 3479490 - RNA, 12 nt, Human
acaguaaacauu

SEQ ID NO: 3479491 - RNA, 15 nt, Human
acaguaaaccacuga

SEQ ID NO: 3479492 - RNA, 17 nt, Human
acaguaaaccacugaaa

SEQ ID NO: 3479493 - RNA, 14 nt, Human
acaguaaauaaauu

SEQ ID NO: 3479494 - RNA, 17 nt, Human
acaguaaauaaauuguu

SEQ ID NO: 3479495 - RNA, 23 nt, Human
acaguaaauaaauuguuugacca

SEQ ID NO: 3479496 - RNA, 21 nt, Human
acaguaaauaucccaaacugu

SEQ ID NO: 3479497 - RNA, 15 nt, Human
acaguaacuuuaugu

SEQ ID NO: 3479498 - RNA, 21 nt, Human
acaguaacuuuauguguaaau

SEQ ID NO: 3479499 - RNA, 15 nt, Human
acaguaagauaucuc

SEQ ID NO: 3479500 - RNA, 14 nt, Human
acaguaaguuccua

SEQ ID NO: 3479501 - RNA, 13 nt, Human
acaguaauaaaug

SEQ ID NO: 3479502 - RNA, 13 nt, Human
acaguaaucaguu

SEQ ID NO: 3479503 - RNA, 14 nt, Human
acaguacacuguca

SEQ ID NO: 3479504 - RNA, 12 nt, Human
acaguacaggca

SEQ ID NO: 3479505 - RNA, 14 nt, Human
acaguacaggcagc

SEQ ID NO: 3479506 - RNA, 18 nt, Human
acaguacaggcagcacag

SEQ ID NO: 3479507 - RNA, 20 nt, Human
acaguacccugguugugugu

SEQ ID NO: 3479508 - RNA, 13 nt, Human
acaguagagccag

SEQ ID NO: 3479509 - RNA, 14 nt, Human
acaguaggagccca

SEQ ID NO: 3479510 - RNA, 14 nt, Human
acaguagucuugau

SEQ ID NO: 3479511 - RNA, 16 nt, Human
acaguauagauuuuug

SEQ ID NO: 3479512 - RNA, 13 nt, Human
acaguauauuuua

SEQ ID NO: 3479513 - RNA, 20 nt, Human
acaguaucucaaacaauuga

SEQ ID NO: 3479514 - RNA, 18 nt, Human
acaguaugcuugcucuaa

SEQ ID NO: 3479515 - RNA, 20 nt, Human
acaguauggggguuguaaau

SEQ ID NO: 3479516 - RNA, 21 nt, Human
acaguauggggguuguaaauu

SEQ ID NO: 3479517 - RNA, 15 nt, Human
acaguauuacuucug

SEQ ID NO: 3479518 - RNA, 17 nt, Human
acaguauucuguaccau

SEQ ID NO: 3479519 - RNA, 17 nt, Human
acaguauuuguaauuaa

SEQ ID NO: 3479520 - RNA, 17 nt, Human
acaguauuuugguucuu

SEQ ID NO: 3479521 - RNA, 18 nt, Human
acagucaaaacagagaug

SEQ ID NO: 3479522 - RNA, 13 nt, Human
acagucaaaauaa

SEQ ID NO: 3479523 - RNA, 14 nt, Human
acagucaaaauaau

SEQ ID NO: 3479524 - RNA, 18 nt, Human
acagucaccucauggaau

SEQ ID NO: 3479525 - RNA, 23 nt, Human
acagucacugccacuuugcacau

SEQ ID NO: 3479526 - RNA, 14 nt, Human
acagucacugcucu

SEQ ID NO: 3479527 - RNA, 15 nt, Human
acagucagauuucca

SEQ ID NO: 3479528 - RNA, 20 nt, Human
acagucagauuuccagucuc

SEQ ID NO: 3479529 - RNA, 15 nt, Human
acagucagcucuuca

SEQ ID NO: 3479530 - RNA, 16 nt, Human
acagucagcucuucau

SEQ ID NO: 3479531 - RNA, 17 nt, Human
acagucaucaucagggc

SEQ ID NO: 3479532 - RNA, 20 nt, Human
acagucaucaucagggccug

SEQ ID NO: 3479533 - RNA, 13 nt, Human
acagucauuuaaa

SEQ ID NO: 3479534 - RNA, 17 nt, Human
acagucauuugcgcaca

SEQ ID NO: 3479535 - RNA, 21 nt, Human
acagucauuugcgcacaacuu

SEQ ID NO: 3479536 - RNA, 14 nt, Human
acaguccagccugg

SEQ ID NO: 3479537 - RNA, 18 nt, Human
acaguccaggaacaagcu

SEQ ID NO: 3479538 - RNA, 13 nt, Human
acagucccugcca

SEQ ID NO: 3479539 - RNA, 22 nt, Human
acaguccuauuuagacauguaa

SEQ ID NO: 3479540 - RNA, 17 nt, Human
acaguccucccaucuca

SEQ ID NO: 3479541 - RNA, 23 nt, Human
acaguccucuccaccuaguggcu

SEQ ID NO: 3479542 - RNA, 23 nt, Human
acaguccuucaaaauccuuccaa

SEQ ID NO: 3479543 - RNA, 15 nt, Human
acagucuaaagcugg

SEQ ID NO: 3479544 - RNA, 21 nt, Human
acagucuaauuuuuauucaua

SEQ ID NO: 3479545 - RNA, 22 nt, Human
acagucuaauuuuuauucauaa

SEQ ID NO: 3479546 - RNA, 22 nt, Human
acagucucaccauuuccccagg

SEQ ID NO: 3479547 - RNA, 14 nt, Human
acagucucaggaaa

SEQ ID NO: 3479548 - RNA, 16 nt, Human
acagucucaggaaauc

SEQ ID NO: 3479549 - RNA, 18 nt, Human
acagucucugagaacugg

SEQ ID NO: 3479550 - RNA, 20 nt, Human
acagucucuuuaaucuucag

SEQ ID NO: 3479551 - RNA, 13 nt, Human
acagucugucaug

SEQ ID NO: 3479552 - RNA, 17 nt, Human
acagucugucuucugua

SEQ ID NO: 3479553 - RNA, 18 nt, Human
acagucuuguauuaaguu

SEQ ID NO: 3479554 - RNA, 13 nt, Human
acagugaagacag

SEQ ID NO: 3479555 - RNA, 16 nt, Human
acagugaaguuuuacu

SEQ ID NO: 3479556 - RNA, 23 nt, Human
acagugacucgggcuccugugcc

SEQ ID NO: 3479557 - RNA, 14 nt, Human
acagugagacucug

SEQ ID NO: 3479558 - RNA, 12 nt, Human
acagugagagac

SEQ ID NO: 3479559 - RNA, 17 nt, Human
acagugagccugaauuu

SEQ ID NO: 3479560 - RNA, 21 nt, Human
acagugagccugaauuuuguu

SEQ ID NO: 3479561 - RNA, 15 nt, Human
acagugagguccugg

SEQ ID NO: 3479562 - RNA, 18 nt, Human
acagugagguccuggggg

SEQ ID NO: 3479563 - RNA, 18 nt, Human
acagugauauuggaacuu

SEQ ID NO: 3479564 - RNA, 15 nt, Human
acagugaucuccaua

SEQ ID NO: 3479565 - RNA, 19 nt, Human
acagugauuaccagggacu

SEQ ID NO: 3479566 - RNA, 20 nt, Human
acagugauuaccagggacug

SEQ ID NO: 3479567 - RNA, 13 nt, Human
acagugauuuuuu

SEQ ID NO: 3479568 - RNA, 21 nt, Human
acagugcaccugggacaggga

SEQ ID NO: 3479569 - RNA, 14 nt, Human
acagugcagggcaa

SEQ ID NO: 3479570 - RNA, 19 nt, Human
acagugcagggcaaaauau

SEQ ID NO: 3479571 - RNA, 14 nt, Human
acagugcagugcgc

SEQ ID NO: 3479572 - RNA, 13 nt, Human
acagugcaucuca

SEQ ID NO: 3479573 - RNA, 18 nt, Human
acagugccaacuccucac

SEQ ID NO: 3479574 - RNA, 15 nt, Human
acagugccauugucu

SEQ ID NO: 3479575 - RNA, 17 nt, Human
acagugccauugucuuu

SEQ ID NO: 3479576 - RNA, 14 nt, Human
acagugccugcuga

SEQ ID NO: 3479577 - RNA, 14 nt, Human
acagugccugggaa

SEQ ID NO: 3479578 - RNA, 16 nt, Human
acagugcuaaaaaugg

SEQ ID NO: 3479579 - RNA, 15 nt, Human
acagugcuucagccu

SEQ ID NO: 3479580 - RNA, 20 nt, Human
acagugcuucagccugaggc

SEQ ID NO: 3479581 - RNA, 21 nt, Human
acagugcuucagccugaggcu

SEQ ID NO: 3479582 - RNA, 20 nt, Human
acagugcuugccacagagcg

SEQ ID NO: 3479583 - RNA, 16 nt, Human
acaguggaacuacauu

SEQ ID NO: 3479584 - RNA, 15 nt, Human
acaguggaucacaaa

SEQ ID NO: 3479585 - RNA, 18 nt, Human
acaguggaucacaaagug

SEQ ID NO: 3479586 - RNA, 19 nt, Human
acaguggauuguuuauacu

SEQ ID NO: 3479587 - RNA, 16 nt, Human
acagugggaacucuga

SEQ ID NO: 3479588 - RNA, 19 nt, Human
acagugggaacucugacaa

SEQ ID NO: 3479589 - RNA, 21 nt, Human
acagugggaacucugacaagg

SEQ ID NO: 3479590 - RNA, 15 nt, Human
acaguggggaagagu

SEQ ID NO: 3479591 - RNA, 23 nt, Human
acagugguggcaacauucauugc

SEQ ID NO: 3479592 - RNA, 17 nt, Human
acagugguggcagggcc

SEQ ID NO: 3479593 - RNA, 20 nt, Human
acagugguuuuauacugaag

SEQ ID NO: 3479594 - RNA, 12 nt, Human
acaguguacagu

SEQ ID NO: 3479595 - RNA, 17 nt, Human
acaguguacagucuugu

SEQ ID NO: 3479596 - RNA, 18 nt, Human
acaguguaccauuaaaau

SEQ ID NO: 3479597 - RNA, 23 nt, Human
acaguguaccauuaaaauaugca

SEQ ID NO: 3479598 - RNA, 18 nt, Human
acaguguauauugaaauu

SEQ ID NO: 3479599 - RNA, 15 nt, Human
acagugucccccagg

SEQ ID NO: 3479600 - RNA, 16 nt, Human
acagugucccccaggu

SEQ ID NO: 3479601 - RNA, 21 nt, Human
acagugucugggcugacuggg

SEQ ID NO: 3479602 - RNA, 11 nt, Human
acagugucuuu

SEQ ID NO: 3479603 - RNA, 19 nt, Human
acagugucuuuuuuuguau

SEQ ID NO: 3479604 - RNA, 12 nt, Human
acagugugaagu

SEQ ID NO: 3479605 - RNA, 13 nt, Human
acagugugaaguu

SEQ ID NO: 3479606 - RNA, 14 nt, Human
acagugugauuuug

SEQ ID NO: 3479607 - RNA, 13 nt, Human
acaguguguaaac

SEQ ID NO: 3479608 - RNA, 14 nt, Human
acaguguuaaauga

SEQ ID NO: 3479609 - RNA, 21 nt, Human
acaguguuaggccuggcacag

SEQ ID NO: 3479610 - RNA, 23 nt, Human
acaguguuaggccuggcacagug

SEQ ID NO: 3479611 - RNA, 16 nt, Human
acaguguuauuuucuu

SEQ ID NO: 3479612 - RNA, 14 nt, Human
acaguguucuguuu

SEQ ID NO: 3479613 - RNA, 17 nt, Human
acaguguucuguuuaau

SEQ ID NO: 3479614 - RNA, 22 nt, Human
acaguguucuguuuaauacuca

SEQ ID NO: 3479615 - RNA, 9 nt, Human
acaguguuu

SEQ ID NO: 3479616 - RNA, 21 nt, Human
acaguguuuauccuuucauau

SEQ ID NO: 3479617 - RNA, 22 nt, Human
acaguguuucccauaauuuucu

SEQ ID NO: 3479618 - RNA, 17 nt, Human
acaguguuugcaauggu

SEQ ID NO: 3479619 - RNA, 13 nt, Human
acaguuaacuuuc

SEQ ID NO: 3479620 - RNA, 19 nt, Human
acaguuacauaauucacuc

SEQ ID NO: 3479621 - RNA, 16 nt, Human
acaguuacuuuuccuu

SEQ ID NO: 3479622 - RNA, 22 nt, Human
acaguuaggguugaguuacuuc

SEQ ID NO: 3479623 - RNA, 16 nt, Human
acaguuaucuaaguua

SEQ ID NO: 3479624 - RNA, 13 nt, Human
acaguuauuacau

SEQ ID NO: 3479625 - RNA, 15 nt, Human
acaguuauuuugaua

SEQ ID NO: 3479626 - RNA, 21 nt, Human
acaguucaaaauucuaaaugu

SEQ ID NO: 3479627 - RNA, 21 nt, Human
acaguucaauaaacuuaacuu

SEQ ID NO: 3479628 - RNA, 20 nt, Human
acaguucaauucucauuugu

SEQ ID NO: 3479629 - RNA, 14 nt, Human
acaguucacacccu

SEQ ID NO: 3479630 - RNA, 20 nt, Human
acaguucaguggcagggcuc

SEQ ID NO: 3479631 - RNA, 23 nt, Human
acaguucaguggcagggcucagg

SEQ ID NO: 3479632 - RNA, 19 nt, Human
acaguuccaaucaguagcu

SEQ ID NO: 3479633 - RNA, 12 nt, Human
acaguuccucgc

SEQ ID NO: 3479634 - RNA, 15 nt, Human
acaguuccucgcccu

SEQ ID NO: 3479635 - RNA, 16 nt, Human
acaguuccucgcccug

SEQ ID NO: 3479636 - RNA, 21 nt, Human
acaguuccugggaacaucaca

SEQ ID NO: 3479637 - RNA, 13 nt, Human
acaguuccuucag

SEQ ID NO: 3479638 - RNA, 21 nt, Human
acaguucugcucugguuguuu

SEQ ID NO: 3479639 - RNA, 20 nt, Human
acaguucuucgggaagagag

SEQ ID NO: 3479640 - RNA, 23 nt, Human
acaguucuugugugguuuggccc

SEQ ID NO: 3479641 - RNA, 18 nt, Human
acaguucuuugggccaga

SEQ ID NO: 3479642 - RNA, 20 nt, Human
acaguucuuugggccagaca

SEQ ID NO: 3479643 - RNA, 22 nt, Human
acaguucuuuuguuguaaagag

SEQ ID NO: 3479644 - RNA, 15 nt, Human
acaguugaaaaacag

SEQ ID NO: 3479645 - RNA, 13 nt, Human
acaguugcacagc

SEQ ID NO: 3479646 - RNA, 15 nt, Human
acaguugcacagcau

SEQ ID NO: 3479647 - RNA, 23 nt, Human
acaguugcauguaguaacacuaa

SEQ ID NO: 3479648 - RNA, 19 nt, Human
acaguugccaccaccucug

SEQ ID NO: 3479649 - RNA, 21 nt, Human
acaguugccaccaccucugug

SEQ ID NO: 3479650 - RNA, 15 nt, Human
acaguugcugucaua

SEQ ID NO: 3479651 - RNA, 18 nt, Human
acaguugcuguuguguga

SEQ ID NO: 3479652 - RNA, 20 nt, Human
acaguugggaaaauaugucc

SEQ ID NO: 3479653 - RNA, 18 nt, Human
acaguuguauuuaacaga

SEQ ID NO: 3479654 - RNA, 12 nt, Human
acaguuguuuga

SEQ ID NO: 3479655 - RNA, 20 nt, Human
acaguuuaauaccacagcuu

SEQ ID NO: 3479656 - RNA, 19 nt, Human
acaguuuaaugaagaucua

SEQ ID NO: 3479657 - RNA, 17 nt, Human
acaguuuaugcagugcu

SEQ ID NO: 3479658 - RNA, 19 nt, Human
acaguuuaugcagugcugc

SEQ ID NO: 3479659 - RNA, 14 nt, Human
acaguuucuuagcu

SEQ ID NO: 3479660 - RNA, 16 nt, Human
acaguuucuuagcuuu

SEQ ID NO: 3479661 - RNA, 17 nt, Human
acaguuucuuagcuuuu

SEQ ID NO: 3479662 - RNA, 22 nt, Human
acaguuucuuagcuuuuuaauu

SEQ ID NO: 3479663 - RNA, 19 nt, Human
acaguuucuuuuuucuuac

SEQ ID NO: 3479664 - RNA, 20 nt, Human
acaguuugaaauaagcuauu

SEQ ID NO: 3479665 - RNA, 22 nt, Human
acaguuugaaauaagcuauuug

SEQ ID NO: 3479666 - RNA, 18 nt, Human
acaguuuguaaauguuau

SEQ ID NO: 3479667 - RNA, 16 nt, Human
acaguuuguuaguaug

SEQ ID NO: 3479668 - RNA, 17 nt, Human
acaguuuuaacugugga

SEQ ID NO: 3479669 - RNA, 13 nt, Human
acaguuuuaugcu

SEQ ID NO: 3479670 - RNA, 16 nt, Human
acaguuuuaugcucuu

SEQ ID NO: 3479671 - RNA, 20 nt, Human
acaguuuuaugcucuuuuuu

SEQ ID NO: 3479672 - RNA, 17 nt, Human
acaguuuuccaugaaaa

SEQ ID NO: 3479673 - RNA, 21 nt, Human
acaguuuuccaugaaaacguu

SEQ ID NO: 3479674 - RNA, 19 nt, Human
acaguuuucugagaaagac

SEQ ID NO: 3479675 - RNA, 20 nt, Human
acaguuuugagaacguaaag

SEQ ID NO: 3479676 - RNA, 19 nt, Human
acaguuuugguugcuuuaa

SEQ ID NO: 3479677 - RNA, 13 nt, Human
acaguuuugugaa

SEQ ID NO: 3479678 - RNA, 14 nt, Human
acaguuuuuaaacu

SEQ ID NO: 3479679 - RNA, 12 nt, Human
acauaaaaaguu

SEQ ID NO: 3479680 - RNA, 22 nt, Human
acauaaaaaguuaaaaaaaaua

SEQ ID NO: 3479681 - RNA, 11 nt, Human
acauaaacauc

SEQ ID NO: 3479682 - RNA, 21 nt, Human
acauaaaccauuuuuguuacu

SEQ ID NO: 3479683 - RNA, 13 nt, Human
acauaaacugacu

SEQ ID NO: 3479684 - RNA, 22 nt, Human
acauaaaggaaaagacacauuu

SEQ ID NO: 3479685 - RNA, 14 nt, Human
acauaaaucuguga

SEQ ID NO: 3479686 - RNA, 20 nt, Human
acauaaauugcauaaagcau

SEQ ID NO: 3479687 - RNA, 14 nt, Human
acauaacaaaauca

SEQ ID NO: 3479688 - RNA, 17 nt, Human
acauaacaaaaucacuu

SEQ ID NO: 3479689 - RNA, 15 nt, Human
acauaacagaaugca

SEQ ID NO: 3479690 - RNA, 16 nt, Human
acauaaccacugcuuc

SEQ ID NO: 3479691 - RNA, 12 nt, Human
acauaacuaaau

SEQ ID NO: 3479692 - RNA, 13 nt, Human
acauaacuaaauu

SEQ ID NO: 3479693 - RNA, 23 nt, Human
acauaacuaaauuugauacuuau

SEQ ID NO: 3479694 - RNA, 18 nt, Human
acauaacugacuuaguuc

SEQ ID NO: 3479695 - RNA, 17 nt, Human
acauaagaucacugcca

SEQ ID NO: 3479696 - RNA, 18 nt, Human
acauaagccauuauucac

SEQ ID NO: 3479697 - RNA, 12 nt, Human
acauaagcuauu

SEQ ID NO: 3479698 - RNA, 13 nt, Human
acauaagcuauuu

SEQ ID NO: 3479699 - RNA, 18 nt, Human
acauaagcuauuuuucua

SEQ ID NO: 3479700 - RNA, 15 nt, Human
acauaagcuuccauu

SEQ ID NO: 3479701 - RNA, 17 nt, Human
acauaagcuuccauuuu

SEQ ID NO: 3479702 - RNA, 18 nt, Human
acauaagcuuccauuuua

SEQ ID NO: 3479703 - RNA, 21 nt, Human
acauaagggguuugccauuug

SEQ ID NO: 3479704 - RNA, 22 nt, Human
acauaauacacuugcccugcuc

SEQ ID NO: 3479705 - RNA, 14 nt, Human
acauaauacugaac

SEQ ID NO: 3479706 - RNA, 13 nt, Human
acauaaugaaaau

SEQ ID NO: 3479707 - RNA, 23 nt, Human
acauaaugcgugcauaccacuuu

SEQ ID NO: 3479708 - RNA, 20 nt, Human
acauaauguauuguugguaa

SEQ ID NO: 3479709 - RNA, 15 nt, Human
acauaauuaaagugu

SEQ ID NO: 3479710 - RNA, 20 nt, Human
acauaauuaaaguguccauu

SEQ ID NO: 3479711 - RNA, 17 nt, Human
acauaauuauccaggaa

SEQ ID NO: 3479712 - RNA, 16 nt, Human
acauaauucacucuga

SEQ ID NO: 3479713 - RNA, 17 nt, Human
acauaauucacucugag

SEQ ID NO: 3479714 - RNA, 20 nt, Human
acauaauucacucugagugu

SEQ ID NO: 3479715 - RNA, 18 nt, Human
acauacacgaaagagaga

SEQ ID NO: 3479716 - RNA, 21 nt, Human
acauacacuuguauaaaugua

SEQ ID NO: 3479717 - RNA, 18 nt, Human
acauacagaauuacugua

SEQ ID NO: 3479718 - RNA, 20 nt, Human
acauacagaauuacuguaac

SEQ ID NO: 3479719 - RNA, 20 nt, Human
acauacaggaagguagaaau

SEQ ID NO: 3479720 - RNA, 14 nt, Human
acauacauuuugua

SEQ ID NO: 3479721 - RNA, 18 nt, Human
acauaccccuuacaaaug

SEQ ID NO: 3479722 - RNA, 21 nt, Human
acauacccgccuagcugcugu

SEQ ID NO: 3479723 - RNA, 14 nt, Human
acauacgaaacaca

SEQ ID NO: 3479724 - RNA, 20 nt, Human
acauacggucagguuuaaca

SEQ ID NO: 3479725 - RNA, 22 nt, Human
acauacuaaccagcagaaaugc

SEQ ID NO: 3479726 - RNA, 14 nt, Human
acauacuaugaaau

SEQ ID NO: 3479727 - RNA, 24 nt, Human
acauacuccuuccaucaaauagaa

SEQ ID NO: 3479728 - RNA, 16 nt, Human
acauacuggcugguga

SEQ ID NO: 3479729 - RNA, 14 nt, Human
acauacuguucacu

SEQ ID NO: 3479730 - RNA, 12 nt, Human
acauacuucagc

SEQ ID NO: 3479731 - RNA, 17 nt, Human
acauagaaaguucaugg

SEQ ID NO: 3479732 - RNA, 20 nt, Human
acauagaaauggaaauuuug

SEQ ID NO: 3479733 - RNA, 18 nt, Human
acauagaauuaacacaug

SEQ ID NO: 3479734 - RNA, 17 nt, Human
acauagacagaagaaac

SEQ ID NO: 3479735 - RNA, 17 nt, Human
acauagacuagagaaac

SEQ ID NO: 3479736 - RNA, 23 nt, Human
acauagagagggagaagaaguca

SEQ ID NO: 3479737 - RNA, 19 nt, Human
acauagagccggguguccc

SEQ ID NO: 3479738 - RNA, 21 nt, Human
acauagagccgggugucccca

SEQ ID NO: 3479739 - RNA, 21 nt, Human
acauagagguauauuggaaga

SEQ ID NO: 3479740 - RNA, 16 nt, Human
acauagauaaaacauc

SEQ ID NO: 3479741 - RNA, 14 nt, Human
acauagauuaaugg

SEQ ID NO: 3479742 - RNA, 18 nt, Human
acauagauuaauggcacu

SEQ ID NO: 3479743 - RNA, 19 nt, Human
acauagauuaauggcacug

SEQ ID NO: 3479744 - RNA, 20 nt, Human
acauagauuaauggcacuga

SEQ ID NO: 3479745 - RNA, 19 nt, Human
acauagauucaccuguaaa

SEQ ID NO: 3479746 - RNA, 19 nt, Human
acauagcaugacauuucuu

SEQ ID NO: 3479747 - RNA, 19 nt, Human
acauagccaaaaugugagu

SEQ ID NO: 3479748 - RNA, 14 nt, Human
acauagcccauccc

SEQ ID NO: 3479749 - RNA, 16 nt, Human
acauagccuauauuua

SEQ ID NO: 3479750 - RNA, 17 nt, Human
acauagccuauauuuac

SEQ ID NO: 3479751 - RNA, 22 nt, Human
acauagcuugauaaagggccaa

SEQ ID NO: 3479752 - RNA, 21 nt, Human
acauaggaaguuaaaagcaca

SEQ ID NO: 3479753 - RNA, 16 nt, Human
acauaggguucccacg

SEQ ID NO: 3479754 - RNA, 20 nt, Human
acauagucuggcuguaccca

SEQ ID NO: 3479755 - RNA, 18 nt, Human
acauagugaaaauuguuu

SEQ ID NO: 3479756 - RNA, 23 nt, Human
acauagugaaaauuguuuaguga

SEQ ID NO: 3479757 - RNA, 16 nt, Human
acauagugaaaguuua

SEQ ID NO: 3479758 - RNA, 20 nt, Human
acauagugcuaacaugaaga

SEQ ID NO: 3479759 - RNA, 17 nt, Human
acauaguguaggcuuua

SEQ ID NO: 3479760 - RNA, 19 nt, Human
acauaguuuuaaacucauu

SEQ ID NO: 3479761 - RNA, 20 nt, Human
acauauaaacaucacacaca

SEQ ID NO: 3479762 - RNA, 16 nt, Human
acauauauuauuuauu

SEQ ID NO: 3479763 - RNA, 22 nt, Human
acauauauuuuuaaaaaaugaa

SEQ ID NO: 3479764 - RNA, 18 nt, Human
acauauauuuuuuaaaau

SEQ ID NO: 3479765 - RNA, 15 nt, Human
acauaucccuuccag

SEQ ID NO: 3479766 - RNA, 16 nt, Human
acauaucccuuccaga

SEQ ID NO: 3479767 - RNA, 22 nt, Human
acauaucuaguaugaaauuaua

SEQ ID NO: 3479768 - RNA, 13 nt, Human
acauaugaaaaua

SEQ ID NO: 3479769 - RNA, 18 nt, Human
acauaugaaauuuaauau

SEQ ID NO: 3479770 - RNA, 16 nt, Human
acauaugaucugucug

SEQ ID NO: 3479771 - RNA, 17 nt, Human
acauaugaucugucugu

SEQ ID NO: 3479772 - RNA, 19 nt, Human
acauaugaucugucugugg

SEQ ID NO: 3479773 - RNA, 15 nt, Human
acauaugcaccuugu

SEQ ID NO: 3479774 - RNA, 19 nt, Human
acauaugcaccuugugucu

SEQ ID NO: 3479775 - RNA, 20 nt, Human
acauaugcuuuaagaaucga

SEQ ID NO: 3479776 - RNA, 20 nt, Human
acauauggaauuuugcaaag

SEQ ID NO: 3479777 - RNA, 14 nt, Human
acauauggauguua

SEQ ID NO: 3479778 - RNA, 18 nt, Human
acauauggauguuacucu

SEQ ID NO: 3479779 - RNA, 19 nt, Human
acauauggucuccauuuua

SEQ ID NO: 3479780 - RNA, 13 nt, Human
acauaugugaaua

SEQ ID NO: 3479781 - RNA, 20 nt, Human
acauauuagcgacaacagau

SEQ ID NO: 3479782 - RNA, 20 nt, Human
acauauuagugcagccaagu

SEQ ID NO: 3479783 - RNA, 12 nt, Human
acauauucauuu

SEQ ID NO: 3479784 - RNA, 23 nt, Human
acauauugauuuccguuaaaaua

SEQ ID NO: 3479785 - RNA, 13 nt, Human
acauauuuaacug

SEQ ID NO: 3479786 - RNA, 20 nt, Human
acauauuuaacuggugcacu

SEQ ID NO: 3479787 - RNA, 18 nt, Human
acauauuuccaagaaguu

SEQ ID NO: 3479788 - RNA, 15 nt, Human
acauauuuguggaau

SEQ ID NO: 3479789 - RNA, 16 nt, Human
acauauuuguggaaua

SEQ ID NO: 3479790 - RNA, 14 nt, Human
acauauuuguuaaa

SEQ ID NO: 3479791 - RNA, 17 nt, Human
acauauuuuauuaagaa

SEQ ID NO: 3479792 - RNA, 13 nt, Human
acauauuuucugu

SEQ ID NO: 3479793 - RNA, 15 nt, Human
acauauuuuuuauau

SEQ ID NO: 3479794 - RNA, 19 nt, Human
acauauuuuuuauaucugg

SEQ ID NO: 3479795 - RNA, 13 nt, Human
acaucaaaccuuu

SEQ ID NO: 3479796 - RNA, 19 nt, Human
acaucaaacucaaugcuuu

SEQ ID NO: 3479797 - RNA, 13 nt, Human
acaucaaauaaga

SEQ ID NO: 3479798 - RNA, 14 nt, Human
acaucaaauaagaa

SEQ ID NO: 3479799 - RNA, 18 nt, Human
acaucaacaucuugguca

SEQ ID NO: 3479800 - RNA, 18 nt, Human
acaucaauauugucauuc

SEQ ID NO: 3479801 - RNA, 20 nt, Human
acaucaauauugucauuccu

SEQ ID NO: 3479802 - RNA, 13 nt, Human
acaucaauguuca

SEQ ID NO: 3479803 - RNA, 17 nt, Human
acaucaauguucauugu

SEQ ID NO: 3479804 - RNA, 18 nt, Human
acaucaauguucauugua

SEQ ID NO: 3479805 - RNA, 20 nt, Human
acaucaauguucauuguaau

SEQ ID NO: 3479806 - RNA, 14 nt, Human
acaucacaagacua

SEQ ID NO: 3479807 - RNA, 16 nt, Human
acaucacaccugcccu

SEQ ID NO: 3479808 - RNA, 13 nt, Human
acaucacagauga

SEQ ID NO: 3479809 - RNA, 13 nt, Human
acaucacagcagc

SEQ ID NO: 3479810 - RNA, 19 nt, Human
acaucacagggugggccuc

SEQ ID NO: 3479811 - RNA, 16 nt, Human
acaucaccacaguuua

SEQ ID NO: 3479812 - RNA, 22 nt, Human
acaucacccuuaccaugugccu

SEQ ID NO: 3479813 - RNA, 20 nt, Human
acaucaccgacgcgucuccu

SEQ ID NO: 3479814 - RNA, 13 nt, Human
acaucagaaagga

SEQ ID NO: 3479815 - RNA, 18 nt, Human
acaucagcacgauuucug

SEQ ID NO: 3479816 - RNA, 15 nt, Human
acaucagccagcugc

SEQ ID NO: 3479817 - RNA, 12 nt, Human
acaucagcccuu

SEQ ID NO: 3479818 - RNA, 22 nt, Human
acaucagcuggucaaacaaacu

SEQ ID NO: 3479819 - RNA, 23 nt, Human
acaucaguggcauggcuccaguc

SEQ ID NO: 3479820 - RNA, 18 nt, Human
acaucaucuguaagcugu

SEQ ID NO: 3479821 - RNA, 17 nt, Human
acaucaugaauuuuaca

SEQ ID NO: 3479822 - RNA, 16 nt, Human
acaucauuccuuuuua

SEQ ID NO: 3479823 - RNA, 17 nt, Human
acaucauuccuuuuuau

SEQ ID NO: 3479824 - RNA, 21 nt, Human
acaucauuccuuuuuauuuau

SEQ ID NO: 3479825 - RNA, 22 nt, Human
acaucauuccuuuuuauuuaua

SEQ ID NO: 3479826 - RNA, 14 nt, Human
acaucauuucaaga

SEQ ID NO: 3479827 - RNA, 11 nt, Human
acaucauuucu

SEQ ID NO: 3479828 - RNA, 12 nt, Human
acaucauuucuu

SEQ ID NO: 3479829 - RNA, 15 nt, Human
acauccaaagcagac

SEQ ID NO: 3479830 - RNA, 19 nt, Human
acauccaaagcagacagcu

SEQ ID NO: 3479831 - RNA, 16 nt, Human
acauccaacuccagca

SEQ ID NO: 3479832 - RNA, 18 nt, Human
acauccaacuccagcaac

SEQ ID NO: 3479833 - RNA, 13 nt, Human
acauccaagcuuc

SEQ ID NO: 3479834 - RNA, 16 nt, Human
acauccaagcuuccuu

SEQ ID NO: 3479835 - RNA, 20 nt, Human
acauccaauauuuucuuuaa

SEQ ID NO: 3479836 - RNA, 15 nt, Human
acauccacagucucc

SEQ ID NO: 3479837 - RNA, 12 nt, Human
acauccagcaga

SEQ ID NO: 3479838 - RNA, 21 nt, Human
acauccauguccuauguguga

SEQ ID NO: 3479839 - RNA, 20 nt, Human
acauccauguuuguaaaacu

SEQ ID NO: 3479840 - RNA, 21 nt, Human
acauccauucccaagaaaugc

SEQ ID NO: 3479841 - RNA, 20 nt, Human
acauccauuucaucuauuuc

SEQ ID NO: 3479842 - RNA, 20 nt, Human
acaucccaccccauccucca

SEQ ID NO: 3479843 - RNA, 23 nt, Human
acaucccagcccaauccagguac

SEQ ID NO: 3479844 - RNA, 16 nt, Human
acaucccauugcccug

SEQ ID NO: 3479845 - RNA, 18 nt, Human
acaucccauugcccuggu

SEQ ID NO: 3479846 - RNA, 19 nt, Human
acauccccgcuggcugggg

SEQ ID NO: 3479847 - RNA, 17 nt, Human
acaucccugagcaggaa

SEQ ID NO: 3479848 - RNA, 16 nt, Human
acaucccugccagcuc

SEQ ID NO: 3479849 - RNA, 17 nt, Human
acaucccugccagcucu

SEQ ID NO: 3479850 - RNA, 16 nt, Human
acaucccugggccugc

SEQ ID NO: 3479851 - RNA, 20 nt, Human
acaucccugggccugcugcu

SEQ ID NO: 3479852 - RNA, 16 nt, Human
acauccggaggagaag

SEQ ID NO: 3479853 - RNA, 19 nt, Human
acauccggggccagcuccg

SEQ ID NO: 3479854 - RNA, 15 nt, Human
acauccuacaagaca

SEQ ID NO: 3479855 - RNA, 16 nt, Human
acauccucuuccauau

SEQ ID NO: 3479856 - RNA, 15 nt, Human
acauccucuucugcu

SEQ ID NO: 3479857 - RNA, 20 nt, Human
acauccugucaucugagaau

SEQ ID NO: 3479858 - RNA, 16 nt, Human
acauccugugccucca

SEQ ID NO: 3479859 - RNA, 13 nt, Human
acauccuuccuuc

SEQ ID NO: 3479860 - RNA, 18 nt, Human
acauccuuguggcacauu

SEQ ID NO: 3479861 - RNA, 13 nt, Human
acauccuuucuaa

SEQ ID NO: 3479862 - RNA, 18 nt, Human
acauccuuucuaaacaag

SEQ ID NO: 3479863 - RNA, 21 nt, Human
acauccuuucuauugaaaaau

SEQ ID NO: 3479864 - RNA, 20 nt, Human
acauccuuugcagggcagcc

SEQ ID NO: 3479865 - RNA, 14 nt, Human
acaucggaaaaaua

SEQ ID NO: 3479866 - RNA, 17 nt, Human
acaucgugaaacccugu

SEQ ID NO: 3479867 - RNA, 20 nt, Human
acaucgugaaacccugucuc

SEQ ID NO: 3479868 - RNA, 17 nt, Human
acaucucaacaggccuc

SEQ ID NO: 3479869 - RNA, 23 nt, Human
acaucucccuuuuccaugacugu

SEQ ID NO: 3479870 - RNA, 21 nt, Human
acaucucuauuccccacccuc

SEQ ID NO: 3479871 - RNA, 19 nt, Human
accaaccugaagacaccgu

SEQ ID NO: 3479872 - RNA, 23 nt, Human
accaacgcgaaaccaauuccuca

SEQ ID NO: 3479873 - RNA, 14 nt, Human
accaacgucugugc

SEQ ID NO: 3479874 - RNA, 17 nt, Human
accaacgucugugccau

SEQ ID NO: 3479875 - RNA, 21 nt, Human
accaacgucugugccauuuug

SEQ ID NO: 3479876 - RNA, 17 nt, Human
accaacguuacucaggg

SEQ ID NO: 3479877 - RNA, 21 nt, Human
accaacguuacucagggcucc

SEQ ID NO: 3479878 - RNA, 16 nt, Human
accaacuacaaccaag

SEQ ID NO: 3479879 - RNA, 14 nt, Human
accaacucuugcag

SEQ ID NO: 3479880 - RNA, 14 nt, Human
accaacugggccca

SEQ ID NO: 3479881 - RNA, 10 nt, Human
accaacugug

SEQ ID NO: 3479882 - RNA, 16 nt, Human
accaacuguguuguau

SEQ ID NO: 3479883 - RNA, 18 nt, Human
accaacuguguuguauua

SEQ ID NO: 3479884 - RNA, 22 nt, Human
accaacuguguuguauuaacaa

SEQ ID NO: 3479885 - RNA, 23 nt, Human
accaacuguguuguauuaacaaa

SEQ ID NO: 3479886 - RNA, 20 nt, Human
accaacuugguucugcuuca

SEQ ID NO: 3479887 - RNA, 13 nt, Human
accaacuuucaag

SEQ ID NO: 3479888 - RNA, 15 nt, Human
accaacuuucaagaa

SEQ ID NO: 3479889 - RNA, 13 nt, Human
accaacuuucugu

SEQ ID NO: 3479890 - RNA, 14 nt, Human
accaagaaagcagg

SEQ ID NO: 3479891 - RNA, 18 nt, Human
accaagaaaggaaccugu

SEQ ID NO: 3479892 - RNA, 15 nt, Human
accaagaacugcaug

SEQ ID NO: 3479893 - RNA, 16 nt, Human
accaagaagaugucuu

SEQ ID NO: 3479894 - RNA, 21 nt, Human
accaagaauucuccaaaacaa

SEQ ID NO: 3479895 - RNA, 14 nt, Human
accaagacaaauuc

SEQ ID NO: 3479896 - RNA, 15 nt, Human
accaagagagaaaga

SEQ ID NO: 3479897 - RNA, 17 nt, Human
accaagagauugcuaau

SEQ ID NO: 3479898 - RNA, 13 nt, Human
accaagaggcugg

SEQ ID NO: 3479899 - RNA, 14 nt, Human
accaagaggcuggu

SEQ ID NO: 3479900 - RNA, 15 nt, Human
accaagcaggaagcu

SEQ ID NO: 3479901 - RNA, 14 nt, Human
accaagcaucuugg

SEQ ID NO: 3479902 - RNA, 20 nt, Human
accaagccaagggaaccugu

SEQ ID NO: 3479903 - RNA, 23 nt, Human
accaagccaagggaaccuguguc

SEQ ID NO: 3479904 - RNA, 12 nt, Human
accaagcccagu

SEQ ID NO: 3479905 - RNA, 18 nt, Human
accaagccguggcuuccc

SEQ ID NO: 3479906 - RNA, 12 nt, Human
accaagccuuga

SEQ ID NO: 3479907 - RNA, 19 nt, Human
accaagcuauuccuuuccc

SEQ ID NO: 3479908 - RNA, 22 nt, Human
accaagcuauuccuuucccuuc

SEQ ID NO: 3479909 - RNA, 19 nt, Human
accaagcugaguuuccuau

SEQ ID NO: 3479910 - RNA, 20 nt, Human
accaagcugugacccucaau

SEQ ID NO: 3479911 - RNA, 15 nt, Human
accaaggacugagca

SEQ ID NO: 3479912 - RNA, 20 nt, Human
accaaggcaaggcaggugcc

SEQ ID NO: 3479913 - RNA, 21 nt, Human
accaaggcugagacagugaau

SEQ ID NO: 3479914 - RNA, 23 nt, Human
accaaggcuuucucuacugauuc

SEQ ID NO: 3479915 - RNA, 12 nt, Human
accaagucacac

SEQ ID NO: 3479916 - RNA, 19 nt, Human
accaagucggaacagcaga

SEQ ID NO: 3479917 - RNA, 15 nt, Human
accaaguuauauaaa

SEQ ID NO: 3479918 - RNA, 21 nt, Human
accaaguuauauaaagagaaa

SEQ ID NO: 3479919 - RNA, 11 nt, Human
accaauaaagu

SEQ ID NO: 3479920 - RNA, 12 nt, Human
accaauaaagug

SEQ ID NO: 3479921 - RNA, 16 nt, Human
accaauagcccacagc

SEQ ID NO: 3479922 - RNA, 18 nt, Human
accaauauuguacaguuu

SEQ ID NO: 3479923 - RNA, 17 nt, Human
accaauccuaugcaugg

SEQ ID NO: 3479924 - RNA, 15 nt, Human
accaaucuuacuuug

SEQ ID NO: 3479925 - RNA, 16 nt, Human
accaaucuuacuuugu

SEQ ID NO: 3479926 - RNA, 21 nt, Human
accaaucuuacuuuguaaauu

SEQ ID NO: 3479927 - RNA, 17 nt, Human
accaaugcaugcagcca

SEQ ID NO: 3479928 - RNA, 20 nt, Human
accaaugcaugcagccacug

SEQ ID NO: 3479929 - RNA, 22 nt, Human
accaaugccaagauaauucacu

SEQ ID NO: 3479930 - RNA, 14 nt, Human
accaauguacccac

SEQ ID NO: 3479931 - RNA, 12 nt, Human
accaaugucuug

SEQ ID NO: 3479932 - RNA, 16 nt, Human
accaauguuuaaaaaa

SEQ ID NO: 3479933 - RNA, 14 nt, Human
accaauuauugaua

SEQ ID NO: 3479934 - RNA, 16 nt, Human
accaauucaacccuuu

SEQ ID NO: 3479935 - RNA, 15 nt, Human
accaauugcuuuguc

SEQ ID NO: 3479936 - RNA, 15 nt, Human
accaauugugcugcc

SEQ ID NO: 3479937 - RNA, 16 nt, Human
accaauugugcugcca

SEQ ID NO: 3479938 - RNA, 21 nt, Human
accaauuuuuugugugugaag

SEQ ID NO: 3479939 - RNA, 16 nt, Human
accaauuuuuuguucu

SEQ ID NO: 3479940 - RNA, 14 nt, Human
accacaaaauauac

SEQ ID NO: 3479941 - RNA, 18 nt, Human
accacaaacuguaauaca

SEQ ID NO: 3479942 - RNA, 20 nt, Human
accacaaagcacaguuugaa

SEQ ID NO: 3479943 - RNA, 20 nt, Human
accacaaaggccaaacugcu

SEQ ID NO: 3479944 - RNA, 21 nt, Human
accacaaaggccaaacugcug

SEQ ID NO: 3479945 - RNA, 17 nt, Human
accacaacaugaggcca

SEQ ID NO: 3479946 - RNA, 20 nt, Human
accacaacuauuuucagaug

SEQ ID NO: 3479947 - RNA, 13 nt, Human
accacaacugaca

SEQ ID NO: 3479948 - RNA, 11 nt, Human
accacacaaag

SEQ ID NO: 3479949 - RNA, 18 nt, Human
accacacacaacagccaa

SEQ ID NO: 3479950 - RNA, 17 nt, Human
accacacagaggcugcc

SEQ ID NO: 3479951 - RNA, 15 nt, Human
accacacagccuaca

SEQ ID NO: 3479952 - RNA, 13 nt, Human
accacacauccca

SEQ ID NO: 3479953 - RNA, 14 nt, Human
accacacaucccag

SEQ ID NO: 3479954 - RNA, 13 nt, Human
accacacccaacu

SEQ ID NO: 3479955 - RNA, 17 nt, Human
accacacccacacucag

SEQ ID NO: 3479956 - RNA, 12 nt, Human
accacacccagc

SEQ ID NO: 3479957 - RNA, 21 nt, Human
accacacccagcccacuucug

SEQ ID NO: 3479958 - RNA, 24 nt, Human
accacacccagccucaguccuccc

SEQ ID NO: 3479959 - RNA, 17 nt, Human
accacacccuguacugu

SEQ ID NO: 3479960 - RNA, 14 nt, Human
accacaccuggcua

SEQ ID NO: 3479961 - RNA, 13 nt, Human
accacacuuccug

SEQ ID NO: 3479962 - RNA, 17 nt, Human
accacacuuccugucca

SEQ ID NO: 3479963 - RNA, 17 nt, Human
accacacuugaaaccuu

SEQ ID NO: 3479964 - RNA, 20 nt, Human
accacacuugucggcuccag

SEQ ID NO: 3479965 - RNA, 14 nt, Human
accacagacacaca

SEQ ID NO: 3479966 - RNA, 15 nt, Human
accacagagcuguca

SEQ ID NO: 3479967 - RNA, 23 nt, Human
accacagcaacgaucacaaauga

SEQ ID NO: 3479968 - RNA, 19 nt, Human
accacagcaaggcaccugc

SEQ ID NO: 3479969 - RNA, 16 nt, Human
accacagcagcugaac

SEQ ID NO: 3479970 - RNA, 21 nt, Human
accacagcagcugaacagcca

SEQ ID NO: 3479971 - RNA, 19 nt, Human
accacagcaggugucauau

SEQ ID NO: 3479972 - RNA, 20 nt, Human
accacagccagcaccuggca

SEQ ID NO: 3479973 - RNA, 15 nt, Human
accacagcuccuuuu

SEQ ID NO: 3479974 - RNA, 16 nt, Human
accacagcugcuggag

SEQ ID NO: 3479975 - RNA, 22 nt, Human
accacaggcccuuuccucaggc

SEQ ID NO: 3479976 - RNA, 22 nt, Human
accacaggguucaaaaugucug

SEQ ID NO: 3479977 - RNA, 15 nt, Human
accacaggugcccgc

SEQ ID NO: 3479978 - RNA, 21 nt, Human
accacaguguaccauuaaaau

SEQ ID NO: 3479979 - RNA, 17 nt, Human
accacaucaaauaagaa

SEQ ID NO: 3479980 - RNA, 20 nt, Human
accacauccuccguccagcc

SEQ ID NO: 3479981 - RNA, 21 nt, Human
accacauccuccguccagccg

SEQ ID NO: 3479982 - RNA, 20 nt, Human
accacaucuaagccugaagg

SEQ ID NO: 3479983 - RNA, 19 nt, Human
accacaucuugcucugcug

SEQ ID NO: 3479984 - RNA, 21 nt, Human
accacaucuugcucugcugac

SEQ ID NO: 3479985 - RNA, 22 nt, Human
accacaugccaagcacugugcu

SEQ ID NO: 3479986 - RNA, 14 nt, Human
accaccaaaaacaa

SEQ ID NO: 3479987 - RNA, 12 nt, Human
accaccaagccu

SEQ ID NO: 3479988 - RNA, 15 nt, Human
accaccacuggccac

SEQ ID NO: 3479989 - RNA, 21 nt, Human
accaccacuggccaccaggcu

SEQ ID NO: 3479990 - RNA, 16 nt, Human
accaccagaagcccag

SEQ ID NO: 3479991 - RNA, 17 nt, Human
accaccagaagcccaga

SEQ ID NO: 3479992 - RNA, 17 nt, Human
accaccagggcaucucu

SEQ ID NO: 3479993 - RNA, 22 nt, Human
accaccagggcaucucugggcu

SEQ ID NO: 3479994 - RNA, 14 nt, Human
accaccaggucucc

SEQ ID NO: 3479995 - RNA, 20 nt, Human
accaccauccaccgcugcuc

SEQ ID NO: 3479996 - RNA, 21 nt, Human
accaccauccaccgcugcucc

SEQ ID NO: 3479997 - RNA, 20 nt, Human
accaccccagcugcuccccu

SEQ ID NO: 3479998 - RNA, 18 nt, Human
accaccccggcccccugc

SEQ ID NO: 3479999 - RNA, 20 nt, Human
accaccccggcccccugccc

SEQ ID NO: 3480000 - RNA, 13 nt, Human
accaccccuacca

SEQ ID NO: 3480001 - RNA, 15 nt, Human
accaccccugccucc

SEQ ID NO: 3480002 - RNA, 22 nt, Human
accaccccugccuccacccucu

SEQ ID NO: 3480003 - RNA, 14 nt, Human
accaccccuuccug

SEQ ID NO: 3480004 - RNA, 20 nt, Human
accacccuagucccuucccc

SEQ ID NO: 3480005 - RNA, 20 nt, Human
accacccucacuggcucucc

SEQ ID NO: 3480006 - RNA, 17 nt, Human
accacccuccccucucu

SEQ ID NO: 3480007 - RNA, 23 nt, Human
accacccuccccucucuugcacc

SEQ ID NO: 3480008 - RNA, 12 nt, Human
accacccugagc

SEQ ID NO: 3480009 - RNA, 14 nt, Human
accacccugagccg

SEQ ID NO: 3480010 - RNA, 18 nt, Human
accaccgcccgucugugu

SEQ ID NO: 3480011 - RNA, 21 nt, Human
accaccgcgcccagccuuuuu

SEQ ID NO: 3480012 - RNA, 14 nt, Human
accaccgcucccca

SEQ ID NO: 3480013 - RNA, 23 nt, Human
accaccgcuccccagcccagggu

SEQ ID NO: 3480014 - RNA, 18 nt, Human
accaccuaggccacuccu

SEQ ID NO: 3480015 - RNA, 15 nt, Human
accaccucacuccug

SEQ ID NO: 3480016 - RNA, 14 nt, Human
accaccucccucac

SEQ ID NO: 3480017 - RNA, 15 nt, Human
accaccucucaauau

SEQ ID NO: 3480018 - RNA, 13 nt, Human
accaccuucccag

SEQ ID NO: 3480019 - RNA, 14 nt, Human
accaccuucccagc

SEQ ID NO: 3480020 - RNA, 20 nt, Human
accaccuucccagcucuccc

SEQ ID NO: 3480021 - RNA, 20 nt, Human
accccucaacaccucugcac

SEQ ID NO: 3480022 - RNA, 15 nt, Human
accccucacucuggc

SEQ ID NO: 3480023 - RNA, 17 nt, Human
accccucauagcccuca

SEQ ID NO: 3480024 - RNA, 13 nt, Human
accccuccacucu

SEQ ID NO: 3480025 - RNA, 12 nt, Human
accccuccagga

SEQ ID NO: 3480026 - RNA, 16 nt, Human
accccucccagcugac

SEQ ID NO: 3480027 - RNA, 19 nt, Human
accccucccauuaggacaa

SEQ ID NO: 3480028 - RNA, 18 nt, Human
accccuccccuaaugccu

SEQ ID NO: 3480029 - RNA, 13 nt, Human
accccuccccucc

SEQ ID NO: 3480030 - RNA, 14 nt, Human
accccuccccucca

SEQ ID NO: 3480031 - RNA, 19 nt, Human
accccucccggcccugccu

SEQ ID NO: 3480032 - RNA, 21 nt, Human
accccucccggcccugccugc

SEQ ID NO: 3480033 - RNA, 22 nt, Human
accccucccucacucccaccug

SEQ ID NO: 3480034 - RNA, 17 nt, Human
accccucccucugucca

SEQ ID NO: 3480035 - RNA, 14 nt, Human
accccucccuuucu

SEQ ID NO: 3480036 - RNA, 19 nt, Human
accccuccucacuggccau

SEQ ID NO: 3480037 - RNA, 21 nt, Human
accccuccucacuggccaucc

SEQ ID NO: 3480038 - RNA, 14 nt, Human
accccuccuggggc

SEQ ID NO: 3480039 - RNA, 12 nt, Human
accccuccuucc

SEQ ID NO: 3480040 - RNA, 17 nt, Human
agcauguauaguugcuu

SEQ ID NO: 3480041 - RNA, 22 nt, Human
agcauguauugugucuuuugca

SEQ ID NO: 3480042 - RNA, 23 nt, Human
agcauguauugugucuuuugcau

SEQ ID NO: 3480043 - RNA, 20 nt, Human
agcauguauuuuugucaauu

SEQ ID NO: 3480044 - RNA, 23 nt, Human
agcauguccuaaugcuugcugcu

SEQ ID NO: 3480045 - RNA, 17 nt, Human
agcaugucgucaaagcu

SEQ ID NO: 3480046 - RNA, 17 nt, Human
agcaugucuauucagcu

SEQ ID NO: 3480047 - RNA, 15 nt, Human
agcaugugcccuccu

SEQ ID NO: 3480048 - RNA, 16 nt, Human
agcaugugccuuaaug

SEQ ID NO: 3480049 - RNA, 17 nt, Human
agcauguggcauguuca

SEQ ID NO: 3480050 - RNA, 19 nt, Human
agcauguguauuuccagug

SEQ ID NO: 3480051 - RNA, 12 nt, Human
agcauguuacug

SEQ ID NO: 3480052 - RNA, 20 nt, Human
agcauguugagccaggccug

SEQ ID NO: 3480053 - RNA, 18 nt, Human
agcauguugcugaggagu

SEQ ID NO: 3480054 - RNA, 21 nt, Human
agcauguuuagacuuuaacau

SEQ ID NO: 3480055 - RNA, 22 nt, Human
agcauguuuagacuuuaacaua

SEQ ID NO: 3480056 - RNA, 23 nt, Human
agcauguuuagacuuuaacauaa

SEQ ID NO: 3480057 - RNA, 14 nt, Human
agcauguuucaugu

SEQ ID NO: 3480058 - RNA, 14 nt, Human
agcauguuugcuga

SEQ ID NO: 3480059 - RNA, 14 nt, Human
agcauguuuugcau

SEQ ID NO: 3480060 - RNA, 17 nt, Human
agcauguuuuguauaca

SEQ ID NO: 3480061 - RNA, 17 nt, Human
agcauuacaaauugcuu

SEQ ID NO: 3480062 - RNA, 14 nt, Human
agcauuacaggcaa

SEQ ID NO: 3480063 - RNA, 17 nt, Human
agcauuaccucuuugga

SEQ ID NO: 3480064 - RNA, 18 nt, Human
agcauuacucuuguaaga

SEQ ID NO: 3480065 - RNA, 20 nt, Human
agcauuacucuuguaagauu

SEQ ID NO: 3480066 - RNA, 17 nt, Human
agcauuagauuucucau

SEQ ID NO: 3480067 - RNA, 23 nt, Human
agcauucaauuuauucaagaaaa

SEQ ID NO: 3480068 - RNA, 18 nt, Human
agcauucacaacuuguuu

SEQ ID NO: 3480069 - RNA, 17 nt, Human
agcauucagaagaaaaa

SEQ ID NO: 3480070 - RNA, 16 nt, Human
agcauucagagagcag

SEQ ID NO: 3480071 - RNA, 19 nt, Human
agcauuccaacaaaggguu

SEQ ID NO: 3480072 - RNA, 16 nt, Human
agcauuccagccccuc

SEQ ID NO: 3480073 - RNA, 19 nt, Human
agcauuccagccccucugg

SEQ ID NO: 3480074 - RNA, 12 nt, Human
agcauucccagg

SEQ ID NO: 3480075 - RNA, 13 nt, Human
agcauucccaggu

SEQ ID NO: 3480076 - RNA, 14 nt, Human
agcauucccuccca

SEQ ID NO: 3480077 - RNA, 17 nt, Human
agcauuccuucuuugau

SEQ ID NO: 3480078 - RNA, 18 nt, Human
agcauuccuucuuugaua

SEQ ID NO: 3480079 - RNA, 24 nt, Human
agcauuccuucuuugauaauguua

SEQ ID NO: 3480080 - RNA, 19 nt, Human
agcauucgagacagaaccu

SEQ ID NO: 3480081 - RNA, 18 nt, Human
agcauucucacuccuacc

SEQ ID NO: 3480082 - RNA, 20 nt, Human
agcauucucacuccuaccug

SEQ ID NO: 3480083 - RNA, 13 nt, Human
agcauucucccca

SEQ ID NO: 3480084 - RNA, 18 nt, Human
agcauucuuagccugugg

SEQ ID NO: 3480085 - RNA, 20 nt, Human
agcauucuuagccuguggca

SEQ ID NO: 3480086 - RNA, 23 nt, Human
agcauucuuagccuguggcagua

SEQ ID NO: 3480087 - RNA, 19 nt, Human
agcauucuugucacaauaa

SEQ ID NO: 3480088 - RNA, 20 nt, Human
agcauucuugucacaauaaa

SEQ ID NO: 3480089 - RNA, 15 nt, Human
agcauugaauggcua

SEQ ID NO: 3480090 - RNA, 18 nt, Human
agcauugauauuugugca

SEQ ID NO: 3480091 - RNA, 16 nt, Human
agcauugcugguucua

SEQ ID NO: 3480092 - RNA, 23 nt, Human
agcauugcugguucuauuuaaug

SEQ ID NO: 3480093 - RNA, 15 nt, Human
agcauugcuguuaug

SEQ ID NO: 3480094 - RNA, 11 nt, Human
agcauugcuuu

SEQ ID NO: 3480095 - RNA, 12 nt, Human
agcauugcuuuc

SEQ ID NO: 3480096 - RNA, 14 nt, Human
agcauugcuuucug

SEQ ID NO: 3480097 - RNA, 17 nt, Human
agcauuggauacagcag

SEQ ID NO: 3480098 - RNA, 15 nt, Human
agcauuguaaaagca

SEQ ID NO: 3480099 - RNA, 20 nt, Human
agcauuguaaaauaauucug

SEQ ID NO: 3480100 - RNA, 21 nt, Human
agcauugugaacugacaggca

SEQ ID NO: 3480101 - RNA, 21 nt, Human
agcauuguggcugucagcagg

SEQ ID NO: 3480102 - RNA, 15 nt, Human
agcauuguuugcuua

SEQ ID NO: 3480103 - RNA, 23 nt, Human
agcauuguuugcuuauuguucca

SEQ ID NO: 3480104 - RNA, 21 nt, Human
agcauuuaaccccccuguaca

SEQ ID NO: 3480105 - RNA, 17 nt, Human
agcauuuaauguagcca

SEQ ID NO: 3480106 - RNA, 20 nt, Human
agcauuuaauguagccaugg

SEQ ID NO: 3480107 - RNA, 17 nt, Human
agcauuuacuuugaauu

SEQ ID NO: 3480108 - RNA, 15 nt, Human
agcauuuagaaaacu

SEQ ID NO: 3480109 - RNA, 21 nt, Human
agcauuuaguccaaugucuuu

SEQ ID NO: 3480110 - RNA, 18 nt, Human
agcauuuagucuugccag

SEQ ID NO: 3480111 - RNA, 14 nt, Human
agcauuuauaaauu

SEQ ID NO: 3480112 - RNA, 17 nt, Human
agcauuucacuuauuua

SEQ ID NO: 3480113 - RNA, 17 nt, Human
agcauuuccaacaccac

SEQ ID NO: 3480114 - RNA, 19 nt, Human
agcauuuccaacaccacag

SEQ ID NO: 3480115 - RNA, 17 nt, Human
agcauuucccuuccuuc

SEQ ID NO: 3480116 - RNA, 18 nt, Human
agcauuucucaucaguag

SEQ ID NO: 3480117 - RNA, 12 nt, Human
agcauuugaaug

SEQ ID NO: 3480118 - RNA, 13 nt, Human
agcauuugaaugc

SEQ ID NO: 3480119 - RNA, 15 nt, Human
agcauuugaaugcau

SEQ ID NO: 3480120 - RNA, 16 nt, Human
agcauuugaaugcauu

SEQ ID NO: 3480121 - RNA, 17 nt, Human
agcauuugauaaugaua

SEQ ID NO: 3480122 - RNA, 22 nt, Human
agcauuugauaaugauaaaaca

SEQ ID NO: 3480123 - RNA, 23 nt, Human
agcauuuggaccaauagcccaca

SEQ ID NO: 3480124 - RNA, 14 nt, Human
agcauuuguauuuu

SEQ ID NO: 3480125 - RNA, 17 nt, Human
agauugagcucucugcc

SEQ ID NO: 3480126 - RNA, 18 nt, Human
agauugagcucucugccc

SEQ ID NO: 3480127 - RNA, 17 nt, Human
agauugauaucuauaaa

SEQ ID NO: 3480128 - RNA, 21 nt, Human
agauugauaucuauaaaauag

SEQ ID NO: 3480129 - RNA, 20 nt, Human
agauugcagaaaauucugug

SEQ ID NO: 3480130 - RNA, 21 nt, Human
agauugcagaaaauucugugc

SEQ ID NO: 3480131 - RNA, 16 nt, Human
agauugccccaggucu

SEQ ID NO: 3480132 - RNA, 14 nt, Human
agauugcucaaauc

SEQ ID NO: 3480133 - RNA, 16 nt, Human
agauugcucaaaucag

SEQ ID NO: 3480134 - RNA, 19 nt, Human
agauugcugaaaaaguaga

SEQ ID NO: 3480135 - RNA, 22 nt, Human
agauugcugaaauuuuauaugc

SEQ ID NO: 3480136 - RNA, 15 nt, Human
agauugcugcuucug

SEQ ID NO: 3480137 - RNA, 15 nt, Human
agauugcuucuguag

SEQ ID NO: 3480138 - RNA, 17 nt, Human
agauugcuucuguagua

SEQ ID NO: 3480139 - RNA, 13 nt, Human
agauuggaaggaa

SEQ ID NO: 3480140 - RNA, 23 nt, Human
agauuggacauaacugacuuagu

SEQ ID NO: 3480141 - RNA, 20 nt, Human
agauuggaguggggaagugu

SEQ ID NO: 3480142 - RNA, 15 nt, Human
agauuggaucaagua

SEQ ID NO: 3480143 - RNA, 22 nt, Human
agauuggauuuuauguugacau

SEQ ID NO: 3480144 - RNA, 19 nt, Human
agauugguguuuuuuucua

SEQ ID NO: 3480145 - RNA, 11 nt, Human
agauuguaaac

SEQ ID NO: 3480146 - RNA, 23 nt, Human
agauuguaaaccgcuuuggccug

SEQ ID NO: 3480147 - RNA, 21 nt, Human
agauuguccagugcaaccaca

SEQ ID NO: 3480148 - RNA, 20 nt, Human
agauuguccuuuugcaaaga

SEQ ID NO: 3480149 - RNA, 17 nt, Human
agauugucuuaauuucu

SEQ ID NO: 3480150 - RNA, 13 nt, Human
agauugugaauaa

SEQ ID NO: 3480151 - RNA, 18 nt, Human
agauugugaauauuucca

SEQ ID NO: 3480152 - RNA, 16 nt, Human
agauugugccccugca

SEQ ID NO: 3480153 - RNA, 21 nt, Human
agauuguggaauguuggauaa

SEQ ID NO: 3480154 - RNA, 22 nt, Human
agauuguggaauguuggauaag

SEQ ID NO: 3480155 - RNA, 20 nt, Human
agauugugggggaaaaauaa

SEQ ID NO: 3480156 - RNA, 13 nt, Human
agauuguguaaca

SEQ ID NO: 3480157 - RNA, 17 nt, Human
agauuguuauuaaaugu

SEQ ID NO: 3480158 - RNA, 15 nt, Human
agauuguuguuugcc

SEQ ID NO: 3480159 - RNA, 14 nt, Human
agauuguuucuaua

SEQ ID NO: 3480160 - RNA, 22 nt, Human
agauuguuuuaucaugacaugu

SEQ ID NO: 3480161 - RNA, 23 nt, Human
agauuguuuuaucaugacauguu

SEQ ID NO: 3480162 - RNA, 21 nt, Human
agauuuaaacucugaauuuau

SEQ ID NO: 3480163 - RNA, 20 nt, Human
agauuuaagcacaaacuuua

SEQ ID NO: 3480164 - RNA, 18 nt, Human
agauuuaauauuacagau

SEQ ID NO: 3480165 - RNA, 21 nt, Human
agauuuaauuugccaaaauaa

SEQ ID NO: 3480166 - RNA, 15 nt, Human
agauuuacacuggga

SEQ ID NO: 3480167 - RNA, 20 nt, Human
agauuuaccagggauguaga

SEQ ID NO: 3480168 - RNA, 21 nt, Human
agauuuacccagaaugucaga

SEQ ID NO: 3480169 - RNA, 12 nt, Human
agauuuagugua

SEQ ID NO: 3480170 - RNA, 17 nt, Human
agauuuaucaaaucagu

SEQ ID NO: 3480171 - RNA, 16 nt, Human
agauuuauuccuuugu

SEQ ID NO: 3480172 - RNA, 18 nt, Human
agauuuauuuuucaguuc

SEQ ID NO: 3480173 - RNA, 18 nt, Human
agauuucaagaaaaaaua

SEQ ID NO: 3480174 - RNA, 13 nt, Human
agauuucaagaga

SEQ ID NO: 3480175 - RNA, 14 nt, Human
agauuucaagagau

SEQ ID NO: 3480176 - RNA, 12 nt, Human
agauuucaagau

SEQ ID NO: 3480177 - RNA, 19 nt, Human
agauuucacucuccuuggu

SEQ ID NO: 3480178 - RNA, 20 nt, Human
agauuucauaguucagaauu

SEQ ID NO: 3480179 - RNA, 13 nt, Human
agauuuccuccug

SEQ ID NO: 3480180 - RNA, 21 nt, Human
agauuuccuucuuuuuuucuu

SEQ ID NO: 3480181 - RNA, 18 nt, Human
agauuucucauugacuuu

SEQ ID NO: 3480182 - RNA, 14 nt, Human
agauuucucuuuga

SEQ ID NO: 3480183 - RNA, 15 nt, Human
agauuucugaggaaa

SEQ ID NO: 3480184 - RNA, 12 nt, Human
agauuucuguuc

SEQ ID NO: 3480185 - RNA, 13 nt, Human
agauuugaccucc

SEQ ID NO: 3480186 - RNA, 22 nt, Human
agauuugcccauuuacacuuuu

SEQ ID NO: 3480187 - RNA, 22 nt, Human
agauuuggaauaggaauaagcu

SEQ ID NO: 3480188 - RNA, 16 nt, Human
agauuuggagcacucu

SEQ ID NO: 3480189 - RNA, 12 nt, Human
agauuugggaga

SEQ ID NO: 3480190 - RNA, 13 nt, Human
agauuugggcugg

SEQ ID NO: 3480191 - RNA, 17 nt, Human
agauuugggcuggaaca

SEQ ID NO: 3480192 - RNA, 16 nt, Human
agauuugugaacucag

SEQ ID NO: 3480193 - RNA, 20 nt, Human
agauuuguuuuuaaacugua

SEQ ID NO: 3480194 - RNA, 22 nt, Human
agauuuuaaauucacaauagaa

SEQ ID NO: 3480195 - RNA, 15 nt, Human
agauuuuaaucaaau

SEQ ID NO: 3480196 - RNA, 18 nt, Human
agauuuuaaucaaauuug

SEQ ID NO: 3480197 - RNA, 14 nt, Human
agauuuuaauuguc

SEQ ID NO: 3480198 - RNA, 17 nt, Human
agauuuuaauugucaug

SEQ ID NO: 3480199 - RNA, 17 nt, Human
agauuuuaauuuugaau

SEQ ID NO: 3480200 - RNA, 21 nt, Human
agauuuuaauuuugaauaaau

SEQ ID NO: 3480201 - RNA, 15 nt, Human
agauuuuagguguug

SEQ ID NO: 3480202 - RNA, 22 nt, Human
agauuuuaguuuuauuuucuaa

SEQ ID NO: 3480203 - RNA, 17 nt, Human
agauuuuauuauguaaa

SEQ ID NO: 3480204 - RNA, 21 nt, Human
agauuuuauuauguaaauccc

SEQ ID NO: 3480205 - RNA, 17 nt, Human
agauuuucagaaaauau

SEQ ID NO: 3480206 - RNA, 19 nt, Human
agauuuucagcaaacucuu

SEQ ID NO: 3480207 - RNA, 11 nt, Human
agauuuuccuu

SEQ ID NO: 3480208 - RNA, 19 nt, Human
agauuuuccuuuuuuauac

SEQ ID NO: 3480209 - RNA, 20 nt, Human
agauuuuccuuuuuuauaca

SEQ ID NO: 3480210 - RNA, 12 nt, Human
agauuuucuggu

SEQ ID NO: 3480211 - RNA, 18 nt, Human
agauuuucugguucuaac

SEQ ID NO: 3480212 - RNA, 19 nt, Human
agauuuucugguucuaaca

SEQ ID NO: 3480213 - RNA, 14 nt, Human
agauuuugaaugcu

SEQ ID NO: 3480214 - RNA, 16 nt, Human
agauuuugauaacugu

SEQ ID NO: 3480215 - RNA, 15 nt, Human
agauuuugauagcaa

SEQ ID NO: 3480216 - RNA, 18 nt, Human
agauuuugauagcaaagc

SEQ ID NO: 3480217 - RNA, 22 nt, Human
agauuuugggguuguguuguca

SEQ ID NO: 3480218 - RNA, 14 nt, Human
agauuuuguuuugc

SEQ ID NO: 3480219 - RNA, 21 nt, Human
agauuuuguuuugcuuuuucu

SEQ ID NO: 3480220 - RNA, 13 nt, Human
agauuuuuacaaa

SEQ ID NO: 3480221 - RNA, 22 nt, Human
agauuuuuauauuaguugcuuu

SEQ ID NO: 3480222 - RNA, 23 nt, Human
agauuuuuuauugcuaguauuug

SEQ ID NO: 3480223 - RNA, 21 nt, Human
agauuuuuucagacuugucaa

SEQ ID NO: 3480224 - RNA, 15 nt, Human
agauuuuuuuguugu

SEQ ID NO: 3480225 - RNA, 16 nt, Human
agauuuuuuuguuguu

SEQ ID NO: 3480226 - RNA, 19 nt, Human
agcaaaaaaaacccaugug

SEQ ID NO: 3480227 - RNA, 13 nt, Human
agcaaaaaaugaa

SEQ ID NO: 3480228 - RNA, 20 nt, Human
agcaaaaaaugaaugucuaa

SEQ ID NO: 3480229 - RNA, 13 nt, Human
agcaaaaaugcua

SEQ ID NO: 3480230 - RNA, 21 nt, Human
agcaaaaaugcuaauauuaaa

SEQ ID NO: 3480231 - RNA, 16 nt, Human
agcaaaaccauugcuu

SEQ ID NO: 3480232 - RNA, 14 nt, Human
agcaaaacuuuuaa

SEQ ID NO: 3480233 - RNA, 14 nt, Human
agcaaaagaagaag

SEQ ID NO: 3480234 - RNA, 17 nt, Human
agcaaaagaauggcaga

SEQ ID NO: 3480235 - RNA, 18 nt, Human
agcaaaagggugucugag

SEQ ID NO: 3480236 - RNA, 13 nt, Human
agcaaaaucaaga

SEQ ID NO: 3480237 - RNA, 15 nt, Human
agcaaaaucauuuua

SEQ ID NO: 3480238 - RNA, 15 nt, Human
agcaaaaugcaugua

SEQ ID NO: 3480239 - RNA, 23 nt, Human
agcaaaauuuuuucucuaggaaa

SEQ ID NO: 3480240 - RNA, 24 nt, Human
agcaaaauuuuuucucuaggaaau

SEQ ID NO: 3480241 - RNA, 13 nt, Human
agcaaacacauua

SEQ ID NO: 3480242 - RNA, 13 nt, Human
agcaaaccaagag

SEQ ID NO: 3480243 - RNA, 16 nt, Human
agcaaacccugucaaa

SEQ ID NO: 3480244 - RNA, 15 nt, Human
agcaaaccugcccca

SEQ ID NO: 3480245 - RNA, 19 nt, Human
agcaaacugcaugcccaga

SEQ ID NO: 3480246 - RNA, 19 nt, Human
agcaaacuuguugaauuua

SEQ ID NO: 3480247 - RNA, 23 nt, Human
agcaaagaggacucgcuuguaaa

SEQ ID NO: 3480248 - RNA, 16 nt, Human
agcaaagagugggcug

SEQ ID NO: 3480249 - RNA, 22 nt, Human
agcaaagagugggcugcaucug

SEQ ID NO: 3480250 - RNA, 12 nt, Human
agcaaagaucaa

SEQ ID NO: 3480251 - RNA, 14 nt, Human
agcaaagcacagag

SEQ ID NO: 3480252 - RNA, 15 nt, Human
agcaaagcacagaga

SEQ ID NO: 3480253 - RNA, 22 nt, Human
agcaaagcacccauuucaaugu

SEQ ID NO: 3480254 - RNA, 15 nt, Human
agcaaagcccccaga

SEQ ID NO: 3480255 - RNA, 17 nt, Human
agcaaagcccccagagc

SEQ ID NO: 3480256 - RNA, 23 nt, Human
agcaaagcugaugacaacuuccc

SEQ ID NO: 3480257 - RNA, 21 nt, Human
acucuuguugaguucuguaga

SEQ ID NO: 3480258 - RNA, 15 nt, Human
acucuuuaacuugua

SEQ ID NO: 3480259 - RNA, 19 nt, Human
acucuuuaacuuguaauaa

SEQ ID NO: 3480260 - RNA, 14 nt, Human
acucuuuaugcuug

SEQ ID NO: 3480261 - RNA, 18 nt, Human
acucuuuaugcuugcaaa

SEQ ID NO: 3480262 - RNA, 19 nt, Human
acucuuuauugucuguaaa

SEQ ID NO: 3480263 - RNA, 16 nt, Human
acucuuucuaaugcug

SEQ ID NO: 3480264 - RNA, 18 nt, Human
acucuuucugagugccuu

SEQ ID NO: 3480265 - RNA, 22 nt, Human
acucuuucuguauauacuuuuu

SEQ ID NO: 3480266 - RNA, 22 nt, Human
acucuuuggauagcaugucuuu

SEQ ID NO: 3480267 - RNA, 14 nt, Human
acucuuuguaagag

SEQ ID NO: 3480268 - RNA, 15 nt, Human
acuucuaaaacugua

SEQ ID NO: 3480269 - RNA, 23 nt, Human
acuucuaaaacuguacuuugauu

SEQ ID NO: 3480270 - RNA, 15 nt, Human
acuucuaaaugaagu

SEQ ID NO: 3480271 - RNA, 16 nt, Human
acuucuaaaugaagug

SEQ ID NO: 3480272 - RNA, 13 nt, Human
acuucuaaguaaa

SEQ ID NO: 3480273 - RNA, 18 nt, Human
acuucuaaguaaaaccac

SEQ ID NO: 3480274 - RNA, 19 nt, Human
acuucuaaguaaaaccaca

SEQ ID NO: 3480275 - RNA, 19 nt, Human
acuucuaaguugaguauau

SEQ ID NO: 3480276 - RNA, 15 nt, Human
acuucuaauaucauu

SEQ ID NO: 3480277 - RNA, 16 nt, Human
acuucuaauaucauuc

SEQ ID NO: 3480278 - RNA, 14 nt, Human
acuucuaauugcca

SEQ ID NO: 3480279 - RNA, 21 nt, Human
acuucuauuuuaaagacaaug

SEQ ID NO: 3480280 - RNA, 18 nt, Human
acuucucaggacacaggc

SEQ ID NO: 3480281 - RNA, 19 nt, Human
acuucucauuuuuuaaaaa

SEQ ID NO: 3480282 - RNA, 14 nt, Human
acuucuccacccug

SEQ ID NO: 3480283 - RNA, 22 nt, Human
acuucuccagacccaccacacc

SEQ ID NO: 3480284 - RNA, 16 nt, Human
acuucuccaggucuca

SEQ ID NO: 3480285 - RNA, 19 nt, Human
acuucucuauaaaaaauau

SEQ ID NO: 3480286 - RNA, 21 nt, Human
acuucucuauaaaaaauaugu

SEQ ID NO: 3480287 - RNA, 14 nt, Human
acuucugacagccu

SEQ ID NO: 3480288 - RNA, 15 nt, Human
acuucugacagccuc

SEQ ID NO: 3480289 - RNA, 15 nt, Human
acuucugaccacacu

SEQ ID NO: 3480290 - RNA, 16 nt, Human
acuucugaccacacuu

SEQ ID NO: 3480291 - RNA, 16 nt, Human
acuucugacucuuccc

SEQ ID NO: 3480292 - RNA, 18 nt, Human
acuucugcaacaagcaug

SEQ ID NO: 3480293 - RNA, 19 nt, Human
acuucugcaacaagcaugc

SEQ ID NO: 3480294 - RNA, 12 nt, Human
acuucugccaga

SEQ ID NO: 3480295 - RNA, 19 nt, Human
acuucugccagauguccua

SEQ ID NO: 3480296 - RNA, 22 nt, Human
acuucugccagcauaauacuug

SEQ ID NO: 3480297 - RNA, 18 nt, Human
acuucugccauauucugu

SEQ ID NO: 3480298 - RNA, 19 nt, Human
acuucugccauauucuguu

SEQ ID NO: 3480299 - RNA, 23 nt, Human
acuucugccugaggggcagccug

SEQ ID NO: 3480300 - RNA, 12 nt, Human
acuucugccugg

SEQ ID NO: 3480301 - RNA, 13 nt, Human
acuucugccugga

SEQ ID NO: 3480302 - RNA, 14 nt, Human
acuucuguccugug

SEQ ID NO: 3480303 - RNA, 19 nt, Human
acuucugugagacccccac

SEQ ID NO: 3480304 - RNA, 15 nt, Human
acuucuguuuagucu

SEQ ID NO: 3480305 - RNA, 12 nt, Human
acuucuguuuca

SEQ ID NO: 3480306 - RNA, 15 nt, Human
acuucuguuuuacca

SEQ ID NO: 3480307 - RNA, 16 nt, Human
acuucuguuuucaauc

SEQ ID NO: 3480308 - RNA, 17 nt, Human
acuucuuacgcaaugcu

SEQ ID NO: 3480309 - RNA, 21 nt, Human
acuucuuauggaauugauuug

SEQ ID NO: 3480310 - RNA, 16 nt, Human
acuucuucucuuagau

SEQ ID NO: 3480311 - RNA, 11 nt, Human
acuucuucugu

SEQ ID NO: 3480312 - RNA, 16 nt, Human
acuucuucuguaauau

SEQ ID NO: 3480313 - RNA, 20 nt, Human
acuucuucuguccaagcaga

SEQ ID NO: 3480314 - RNA, 19 nt, Human
acuucuugcuggucuaguc

SEQ ID NO: 3480315 - RNA, 11 nt, Human
acuucuugcuu

SEQ ID NO: 3480316 - RNA, 22 nt, Human
acuucuuggcuuggugaggaaa

SEQ ID NO: 3480317 - RNA, 12 nt, Human
acuucuugucag

SEQ ID NO: 3480318 - RNA, 16 nt, Human
acuucuugucagacau

SEQ ID NO: 3480319 - RNA, 20 nt, Human
acuucuugucagacauaaag

SEQ ID NO: 3480320 - RNA, 23 nt, Human
acuucuugucagacauaaagcca

SEQ ID NO: 3480321 - RNA, 18 nt, Human
acuucuuuaauuuuggaa

SEQ ID NO: 3480322 - RNA, 19 nt, Human
acuucuuuaauuuuggaau

SEQ ID NO: 3480323 - RNA, 20 nt, Human
acuucuuuaauuuuggaauu

SEQ ID NO: 3480324 - RNA, 19 nt, Human
acuucuuucccuuccucca

SEQ ID NO: 3480325 - RNA, 21 nt, Human
acuucuuugcaguucccaucu

SEQ ID NO: 3480326 - RNA, 20 nt, Human
acuucuuugcuuugcccagc

SEQ ID NO: 3480327 - RNA, 21 nt, Human
acuucuuugcuuugcccagca

SEQ ID NO: 3480328 - RNA, 22 nt, Human
acuucuuuuauaacuaguccuu

SEQ ID NO: 3480329 - RNA, 11 nt, Human
acuucuuuuca

SEQ ID NO: 3480330 - RNA, 12 nt, Human
acuucuuuucac

SEQ ID NO: 3480331 - RNA, 15 nt, Human
acuucuuuucacauu

SEQ ID NO: 3480332 - RNA, 19 nt, Human
acuucuuuucacauucuua

SEQ ID NO: 3480333 - RNA, 20 nt, Human
acuugaaaagagacaggcag

SEQ ID NO: 3480334 - RNA, 21 nt, Human
acuugaaaagagacaggcagg

SEQ ID NO: 3480335 - RNA, 12 nt, Human
acuugaaaauua

SEQ ID NO: 3480336 - RNA, 16 nt, Human
acuugaaauuauaucu

SEQ ID NO: 3480337 - RNA, 16 nt, Human
acuugaaauuugaauu

SEQ ID NO: 3480338 - RNA, 16 nt, Human
acuugaacaaaagggu

SEQ ID NO: 3480339 - RNA, 21 nt, Human
acuugaacccauauuuguaca

SEQ ID NO: 3480340 - RNA, 17 nt, Human
acuugaacguuuucuaa

SEQ ID NO: 3480341 - RNA, 18 nt, Human
acuugaacguuuucuaau

SEQ ID NO: 3480342 - RNA, 19 nt, Human
acuugaacguuuucuaauu

SEQ ID NO: 3480343 - RNA, 21 nt, Human
acuugaacugauucacaucuc

SEQ ID NO: 3480344 - RNA, 14 nt, Human
acuugaacuugccu

SEQ ID NO: 3480345 - RNA, 15 nt, Human
acuugaacuugccuc

SEQ ID NO: 3480346 - RNA, 16 nt, Human
acuugaacuugccucu

SEQ ID NO: 3480347 - RNA, 19 nt, Human
acuugaagccugcuccuuc

SEQ ID NO: 3480348 - RNA, 20 nt, Human
acuugaagccugcuccuucc

SEQ ID NO: 3480349 - RNA, 14 nt, Human
acuugaagggccag

SEQ ID NO: 3480350 - RNA, 17 nt, Human
acuugaagggccagagc

SEQ ID NO: 3480351 - RNA, 19 nt, Human
acuugaagggccagagcca

SEQ ID NO: 3480352 - RNA, 22 nt, Human
acuugaagggccagagccaggg

SEQ ID NO: 3480353 - RNA, 15 nt, Human
acuugaauaguauug

SEQ ID NO: 3480354 - RNA, 18 nt, Human
acuugaauaguauugugu

SEQ ID NO: 3480355 - RNA, 19 nt, Human
acuugaauccuagggccug

SEQ ID NO: 3480356 - RNA, 16 nt, Human
acuugaaugugucacu

SEQ ID NO: 3480357 - RNA, 18 nt, Human
acuugaauuuucccacug

SEQ ID NO: 3480358 - RNA, 14 nt, Human
acuugacccugagc

SEQ ID NO: 3480359 - RNA, 18 nt, Human
acuugacuccauuucauc

SEQ ID NO: 3480360 - RNA, 23 nt, Human
acuugagaacuugacaaguugcg

SEQ ID NO: 3480361 - RNA, 12 nt, Human
acuugagaggau

SEQ ID NO: 3480362 - RNA, 12 nt, Human
acuugagcaugu

SEQ ID NO: 3480363 - RNA, 15 nt, Human
acuugagcuuuaaaa

SEQ ID NO: 3480364 - RNA, 12 nt, Human
acuugaggacac

SEQ ID NO: 3480365 - RNA, 14 nt, Human
acuugaggacacau

SEQ ID NO: 3480366 - RNA, 17 nt, Human
acuugaggacacauguc

SEQ ID NO: 3480367 - RNA, 18 nt, Human
acuugaggauuuugagua

SEQ ID NO: 3480368 - RNA, 21 nt, Human
acuugagggcccagagcagga

SEQ ID NO: 3480369 - RNA, 21 nt, Human
acuugagguggccuccuugcu

SEQ ID NO: 3480370 - RNA, 18 nt, Human
acuugaguuacaccagac

SEQ ID NO: 3480371 - RNA, 17 nt, Human
acuugauacuuguuuuc

SEQ ID NO: 3480372 - RNA, 19 nt, Human
acuugauagcaaacacugg

SEQ ID NO: 3480373 - RNA, 20 nt, Human
acuugauccauuucuaauua

SEQ ID NO: 3480374 - RNA, 19 nt, Human
acuugauggcuaacuuaca

SEQ ID NO: 3480375 - RNA, 18 nt, Human
acuugcaaaaucaguuuu

SEQ ID NO: 3480376 - RNA, 21 nt, Human
acuugcacagggauucucaca

SEQ ID NO: 3480377 - RNA, 15 nt, Human
acuugcacucuucua

SEQ ID NO: 3480378 - RNA, 16 nt, Human
acuugcacucuucuac

SEQ ID NO: 3480379 - RNA, 19 nt, Human
acuugcagacucuacagag

SEQ ID NO: 3480380 - RNA, 23 nt, Human
acuugcagcugauguuggaagag

SEQ ID NO: 3480381 - RNA, 19 nt, Human
acuugcauccaacuccagg

SEQ ID NO: 3480382 - RNA, 14 nt, Human
acuugcaugaagag

SEQ ID NO: 3480383 - RNA, 15 nt, Human
acuugcauggagcag

SEQ ID NO: 3480384 - RNA, 11 nt, Human
acuugcauuuc

SEQ ID NO: 3480385 - RNA, 18 nt, Human
acuugcauuuuugcagga

SEQ ID NO: 3480386 - RNA, 13 nt, Human
acuugcccugcuc

SEQ ID NO: 3480387 - RNA, 18 nt, Human
acuugccuccgugucacc

SEQ ID NO: 3480388 - RNA, 13 nt, Human
acuugccucuucc

SEQ ID NO: 3480389 - RNA, 17 nt, Human
acuugccucuuccuuga

SEQ ID NO: 3480390 - RNA, 23 nt, Human
acuugccucuuuuaccugcugcu

SEQ ID NO: 3480391 - RNA, 21 nt, Human
acuugccugccuuuccaucca

SEQ ID NO: 3480392 - RNA, 13 nt, Human
acuugccuggguc

SEQ ID NO: 3480393 - RNA, 22 nt, Human
acuugcgagaaauucguguguu

SEQ ID NO: 3480394 - RNA, 14 nt, Human
acuugcgcagaaaa

SEQ ID NO: 3480395 - RNA, 22 nt, Human
acuugcucagguacuuguaaau

SEQ ID NO: 3480396 - RNA, 23 nt, Human
acuugcucucuggccuuuuccua

SEQ ID NO: 3480397 - RNA, 12 nt, Human
acuugcucugga

SEQ ID NO: 3480398 - RNA, 14 nt, Human
acuugcucuggacc

SEQ ID NO: 3480399 - RNA, 20 nt, Human
acuugcucuugaugccuggc

SEQ ID NO: 3480400 - RNA, 21 nt, Human
acuugcugcaguaugaaaaua

SEQ ID NO: 3480401 - RNA, 11 nt, Human
acuugcugccu

SEQ ID NO: 3480402 - RNA, 13 nt, Human
acuugcugccucg

SEQ ID NO: 3480403 - RNA, 17 nt, Human
acuugcugccugaagaa

SEQ ID NO: 3480404 - RNA, 23 nt, Human
acuugcugccugaagaacaguaa

SEQ ID NO: 3480405 - RNA, 14 nt, Human
acuugcugcuauuu

SEQ ID NO: 3480406 - RNA, 17 nt, Human
acuugcugcuauuuuac

SEQ ID NO: 3480407 - RNA, 15 nt, Human
acuugcugcugucuu

SEQ ID NO: 3480408 - RNA, 17 nt, Human
acuugcuuaaaugugaa

SEQ ID NO: 3480409 - RNA, 19 nt, Human
acuugcuuaaauuucuuau

SEQ ID NO: 3480410 - RNA, 16 nt, Human
acuugcuucucuagcu

SEQ ID NO: 3480411 - RNA, 19 nt, Human
acuugcuuuggucacuuuu

SEQ ID NO: 3480412 - RNA, 23 nt, Human
acuugcuuuggucacuuuuagau

SEQ ID NO: 3480413 - RNA, 14 nt, Human
acuuggaagcuccg

SEQ ID NO: 3480414 - RNA, 22 nt, Human
acuuggaauuuguaaccucagc

SEQ ID NO: 3480415 - RNA, 23 nt, Human
acuuggaauuuguaaccucagcu

SEQ ID NO: 3480416 - RNA, 18 nt, Human
acuuggacucuugcucuu

SEQ ID NO: 3480417 - RNA, 21 nt, Human
acuuggacuuguccucagcag

SEQ ID NO: 3480418 - RNA, 14 nt, Human
acuuuauaaauuuc

SEQ ID NO: 3480419 - RNA, 18 nt, Human
acuuuauaacuaacaugu

SEQ ID NO: 3480420 - RNA, 16 nt, Human
acuuuauacauuagua

SEQ ID NO: 3480421 - RNA, 19 nt, Human
acuuuauacauuaguaaau

SEQ ID NO: 3480422 - RNA, 20 nt, Human
acuuuauacccagaaaguua

SEQ ID NO: 3480423 - RNA, 22 nt, Human
acuuuauacccagaaaguuauu

SEQ ID NO: 3480424 - RNA, 13 nt, Human
acuuuaucacuua

SEQ ID NO: 3480425 - RNA, 13 nt, Human
acuuuaucacuuu

SEQ ID NO: 3480426 - RNA, 17 nt, Human
acuuuaucacuuuuuga

SEQ ID NO: 3480427 - RNA, 12 nt, Human
acuuuaugcuaa

SEQ ID NO: 3480428 - RNA, 12 nt, Human
acuuuauuaaau

SEQ ID NO: 3480429 - RNA, 20 nt, Human
acuuuauuaaauacaaaacu

SEQ ID NO: 3480430 - RNA, 13 nt, Human
acuuuauugcauc

SEQ ID NO: 3480431 - RNA, 12 nt, Human
acuuuauuucca

SEQ ID NO: 3480432 - RNA, 20 nt, Human
acuuuauuuuauauaauaaa

SEQ ID NO: 3480433 - RNA, 13 nt, Human
acuuucaaaauua

SEQ ID NO: 3480434 - RNA, 21 nt, Human
acuuucaaaguggaugcaauu

SEQ ID NO: 3480435 - RNA, 19 nt, Human
acuuucaagaacuuguuua

SEQ ID NO: 3480436 - RNA, 21 nt, Human
acuuucagguacuaaauaccu

SEQ ID NO: 3480437 - RNA, 18 nt, Human
acuuucagugaaagcauc

SEQ ID NO: 3480438 - RNA, 15 nt, Human
acuuucauuccuuca

SEQ ID NO: 3480439 - RNA, 20 nt, Human
acuuucauuccuucagauuu

SEQ ID NO: 3480440 - RNA, 17 nt, Human
acuuucauugccagugu

SEQ ID NO: 3480441 - RNA, 14 nt, Human
acuuucauuggaaa

SEQ ID NO: 3480442 - RNA, 20 nt, Human
acuuucauuuuuuuccaggc

SEQ ID NO: 3480443 - RNA, 21 nt, Human
acuuucauuuuuuuccaggcu

SEQ ID NO: 3480444 - RNA, 19 nt, Human
acuuuccaauaaagaguuc

SEQ ID NO: 3480445 - RNA, 17 nt, Human
acuuuccaauucuccuu

SEQ ID NO: 3480446 - RNA, 19 nt, Human
acuuuccacccccucccug

SEQ ID NO: 3480447 - RNA, 20 nt, Human
acuuuccacccccucccugg

SEQ ID NO: 3480448 - RNA, 18 nt, Human
acuuuccacuucuuccuu

SEQ ID NO: 3480449 - RNA, 13 nt, Human
acuuuccauuaca

SEQ ID NO: 3480450 - RNA, 14 nt, Human
acuuuccauuacaa

SEQ ID NO: 3480451 - RNA, 21 nt, Human
acuuuccccaccagaugcuga

SEQ ID NO: 3480452 - RNA, 22 nt, Human
acuuuccccgugggccauggca

SEQ ID NO: 3480453 - RNA, 11 nt, Human
acuuucccuug

SEQ ID NO: 3480454 - RNA, 13 nt, Human
acuuucccuugcu

SEQ ID NO: 3480455 - RNA, 18 nt, Human
acuuuccucuuccugccu

SEQ ID NO: 3480456 - RNA, 23 nt, Human
acuuuccuucauucaacccaccu

SEQ ID NO: 3480457 - RNA, 16 nt, Human
acuuucguacauuggc

SEQ ID NO: 3480458 - RNA, 15 nt, Human
acuuucuaauguuuc

SEQ ID NO: 3480459 - RNA, 19 nt, Human
acuuucuacaaugugaacu

SEQ ID NO: 3480460 - RNA, 15 nt, Human
acuuucuagauuaag

SEQ ID NO: 3480461 - RNA, 19 nt, Human
acuuucuauuuuaaucuug

SEQ ID NO: 3480462 - RNA, 12 nt, Human
acuuucucuaau

SEQ ID NO: 3480463 - RNA, 13 nt, Human
acuuucugccugg

SEQ ID NO: 3480464 - RNA, 18 nt, Human
acuuucuguaaacucaaa

SEQ ID NO: 3480465 - RNA, 19 nt, Human
acuuucuguaaacucaaaa

SEQ ID NO: 3480466 - RNA, 17 nt, Human
acuuucuguuaaaaugc

SEQ ID NO: 3480467 - RNA, 23 nt, Human
acuuucuguuaaaaugcaugauu

SEQ ID NO: 3480468 - RNA, 19 nt, Human
acuuucuguugccacaacc

SEQ ID NO: 3480469 - RNA, 14 nt, Human
acuuucuucaaaau

SEQ ID NO: 3480470 - RNA, 14 nt, Human
acuuucuucugaau

SEQ ID NO: 3480471 - RNA, 20 nt, Human
acuuucuucugaauauuuua

SEQ ID NO: 3480472 - RNA, 21 nt, Human
acuuucuuuucgccguggcug

SEQ ID NO: 3480473 - RNA, 15 nt, Human
acuuucuuuucugga

SEQ ID NO: 3480474 - RNA, 15 nt, Human
acuuugaaauaccuc

SEQ ID NO: 3480475 - RNA, 19 nt, Human
acuuugaaauguguuucug

SEQ ID NO: 3480476 - RNA, 23 nt, Human
acuuugaaauguguuucuguaua

SEQ ID NO: 3480477 - RNA, 14 nt, Human
acuuugaaguuagc

SEQ ID NO: 3480478 - RNA, 12 nt, Human
acuuugaauaaa

SEQ ID NO: 3480479 - RNA, 12 nt, Human
acuuugaaugug

SEQ ID NO: 3480480 - RNA, 14 nt, Human
acuuugaauguguu

SEQ ID NO: 3480481 - RNA, 16 nt, Human
acuuugacaaccauga

SEQ ID NO: 3480482 - RNA, 22 nt, Human
acuuugacacuuuucauaucau

SEQ ID NO: 3480483 - RNA, 23 nt, Human
acuuugacacuuuucauaucauu

SEQ ID NO: 3480484 - RNA, 22 nt, Human
acuuugaccuaaauuauuuacu

SEQ ID NO: 3480485 - RNA, 15 nt, Human
acuuugaccucugca

SEQ ID NO: 3480486 - RNA, 23 nt, Human
acuuugacgagucaccuuccagg

SEQ ID NO: 3480487 - RNA, 18 nt, Human
acuuugagaucuaaaaau

SEQ ID NO: 3480488 - RNA, 19 nt, Human
acuuugagaucuaaaaaua

SEQ ID NO: 3480489 - RNA, 10 nt, Human
acuuugaugu

SEQ ID NO: 3480490 - RNA, 16 nt, Human
acuuugaugucagcag

SEQ ID NO: 3480491 - RNA, 22 nt, Human
acuuugaugucagcaguugcug

SEQ ID NO: 3480492 - RNA, 22 nt, Human
acuuugaugucauguguucccu

SEQ ID NO: 3480493 - RNA, 13 nt, Human
acuuugauucaca

SEQ ID NO: 3480494 - RNA, 19 nt, Human
acuuugauucacauguuuu

SEQ ID NO: 3480495 - RNA, 23 nt, Human
acuuugauucacauguuuucaaa

SEQ ID NO: 3480496 - RNA, 19 nt, Human
acuuugcacgacgcccucu

SEQ ID NO: 3480497 - RNA, 20 nt, Human
acuuugcacgacgcccucuc

SEQ ID NO: 3480498 - RNA, 22 nt, Human
acuuugcagcacagcugagagg

SEQ ID NO: 3480499 - RNA, 23 nt, Human
acuuugccuccuguguacugugu

SEQ ID NO: 3480500 - RNA, 21 nt, Human
acuuugcuaaagacaugaagc

SEQ ID NO: 3480501 - RNA, 20 nt, Human
acuuugcuugcaguagauuu

SEQ ID NO: 3480502 - RNA, 13 nt, Human
acuuugcuugcuu

SEQ ID NO: 3480503 - RNA, 16 nt, Human
acuuugcuuuaauaua

SEQ ID NO: 3480504 - RNA, 19 nt, Human
acuuugcuuuaauauaaau

SEQ ID NO: 3480505 - RNA, 22 nt, Human
acuuugcuuuaauauaaaugca

SEQ ID NO: 3480506 - RNA, 13 nt, Human
acuuuggaaagac

SEQ ID NO: 3480507 - RNA, 16 nt, Human
acuuuggaaccagacu

SEQ ID NO: 3480508 - RNA, 17 nt, Human
acuuuggaaccagacuc

SEQ ID NO: 3480509 - RNA, 23 nt, Human
acuuuggaaccagacucuugccu

SEQ ID NO: 3480510 - RNA, 23 nt, Human
acuuuggagagugagcuacagag

SEQ ID NO: 3480511 - RNA, 22 nt, Human
acuuuggaguccccucaccucc

SEQ ID NO: 3480512 - RNA, 14 nt, Human
acuuuggcugcaug

SEQ ID NO: 3480513 - RNA, 12 nt, Human
acuuugggaggc

SEQ ID NO: 3480514 - RNA, 16 nt, Human
acuuugggaggccaag

SEQ ID NO: 3480515 - RNA, 16 nt, Human
acuuugggaggccgag

SEQ ID NO: 3480516 - RNA, 19 nt, Human
acuuugggaggcugaggug

SEQ ID NO: 3480517 - RNA, 15 nt, Human
acuuuggggaaggga

SEQ ID NO: 3480518 - RNA, 17 nt, Human
acuuuggggcuaauuua

SEQ ID NO: 3480519 - RNA, 16 nt, Human
acuuugguaccagaua

SEQ ID NO: 3480520 - RNA, 23 nt, Human
acuuuggugcgggcacaauaaau

SEQ ID NO: 3480521 - RNA, 10 nt, Human
acuuugguua

SEQ ID NO: 3480522 - RNA, 23 nt, Human
acuuugguuauuuuacuuuuugg

SEQ ID NO: 3480523 - RNA, 17 nt, Human
acuuuguaaauucugau

SEQ ID NO: 3480524 - RNA, 15 nt, Human
acuuuguaguguuug

SEQ ID NO: 3480525 - RNA, 20 nt, Human
acuuuguaguguuuggugcu

SEQ ID NO: 3480526 - RNA, 18 nt, Human
acuuuguauacuuuaaau

SEQ ID NO: 3480527 - RNA, 17 nt, Human
acuuuguauaguuaugu

SEQ ID NO: 3480528 - RNA, 24 nt, Human
acuuuguauuguccuauuaguguu

SEQ ID NO: 3480529 - RNA, 20 nt, Human
acuuugucgcccaggcugga

SEQ ID NO: 3480530 - RNA, 17 nt, Human
acuuugucugaaaaauu

SEQ ID NO: 3480531 - RNA, 10 nt, Human
acuuugugcu

SEQ ID NO: 3480532 - RNA, 22 nt, Human
acuuugugcugggguuaucuga

SEQ ID NO: 3480533 - RNA, 17 nt, Human
acuuuguggaccaauua

SEQ ID NO: 3480534 - RNA, 20 nt, Human
acuuuguggaccaauuauug

SEQ ID NO: 3480535 - RNA, 17 nt, Human
acuuuguggaugucuuc

SEQ ID NO: 3480536 - RNA, 20 nt, Human
acuuuguuaggauuuucaca

SEQ ID NO: 3480537 - RNA, 20 nt, Human
acuuuguuucguggggaggu

SEQ ID NO: 3480538 - RNA, 12 nt, Human
acuuuuaaacag

SEQ ID NO: 3480539 - RNA, 21 nt, Human
acuuuuaaagaauuucuuuau

SEQ ID NO: 3480540 - RNA, 12 nt, Human
acuuuuaagacu

SEQ ID NO: 3480541 - RNA, 14 nt, Human
acuuuuaaggcagu

SEQ ID NO: 3480542 - RNA, 18 nt, Human
acuuuuaaugaacaaaug

SEQ ID NO: 3480543 - RNA, 19 nt, Human
acuuuuacucugccuacag

SEQ ID NO: 3480544 - RNA, 17 nt, Human
acuuuuauaaagcaugu

SEQ ID NO: 3480545 - RNA, 12 nt, Human
acuuuuaugaua

SEQ ID NO: 3480546 - RNA, 23 nt, Human
acuuuuauuuccagugaaaucag

SEQ ID NO: 3480547 - RNA, 14 nt, Human
acuuuuauuugcaa

SEQ ID NO: 3480548 - RNA, 14 nt, Human
acuuuucauucucu

SEQ ID NO: 3480549 - RNA, 18 nt, Human
acuuuucauucucuuuua

SEQ ID NO: 3480550 - RNA, 11 nt, Human
acuuuuccagu

SEQ ID NO: 3480551 - RNA, 17 nt, Human
acuuuuccauguaucua

SEQ ID NO: 3480552 - RNA, 12 nt, Human
acuuuuccuucc

SEQ ID NO: 3480553 - RNA, 23 nt, Human
acuuuuccuucccucaaagcuuc

SEQ ID NO: 3480554 - RNA, 14 nt, Human
acuuuuccuugcau

SEQ ID NO: 3480555 - RNA, 15 nt, Human
acuuuuccuugcaua

SEQ ID NO: 3480556 - RNA, 21 nt, Human
acuuuuccuugcauacaaaca

SEQ ID NO: 3480557 - RNA, 19 nt, Human
acuuuuccuuugaauccuc

SEQ ID NO: 3480558 - RNA, 17 nt, Human
acuuuucguuaacauug

SEQ ID NO: 3480559 - RNA, 18 nt, Human
acuuuucuagaauuauuu

SEQ ID NO: 3480560 - RNA, 17 nt, Human
acuuuucuauuaaaagu

SEQ ID NO: 3480561 - RNA, 15 nt, Human
acuuuucuccaugag

SEQ ID NO: 3480562 - RNA, 17 nt, Human
acuuuucuuaaaaaguu

SEQ ID NO: 3480563 - RNA, 24 nt, Human
acuuuucuuaaaccuucaguuaug

SEQ ID NO: 3480564 - RNA, 16 nt, Human
acuuuugagacuuuuu

SEQ ID NO: 3480565 - RNA, 12 nt, Human
acuuuugagugu

SEQ ID NO: 3480566 - RNA, 16 nt, Human
acuuuugagugugugu

SEQ ID NO: 3480567 - RNA, 11 nt, Human
acuuuugcaag

SEQ ID NO: 3480568 - RNA, 15 nt, Human
acugccuauuuuaau

SEQ ID NO: 3480569 - RNA, 21 nt, Human
acugccuauuuuaauaaacac

SEQ ID NO: 3480570 - RNA, 16 nt, Human
acugccucucccucug

SEQ ID NO: 3480571 - RNA, 18 nt, Human
acugccucucccuggccc

SEQ ID NO: 3480572 - RNA, 19 nt, Human
acugccucucccuggcccu

SEQ ID NO: 3480573 - RNA, 13 nt, Human
acugccucugcca

SEQ ID NO: 3480574 - RNA, 15 nt, Human
acugccucugccaca

SEQ ID NO: 3480575 - RNA, 13 nt, Human
acugccucugccu

SEQ ID NO: 3480576 - RNA, 15 nt, Human
acugccucugccuua

SEQ ID NO: 3480577 - RNA, 22 nt, Human
acugccucugccuuagaggagc

SEQ ID NO: 3480578 - RNA, 15 nt, Human
acugccucuuccucc

SEQ ID NO: 3480579 - RNA, 17 nt, Human
acugccugauggaccug

SEQ ID NO: 3480580 - RNA, 20 nt, Human
acugccugauggaccuguca

SEQ ID NO: 3480581 - RNA, 18 nt, Human
acugccugccuuaaguga

SEQ ID NO: 3480582 - RNA, 11 nt, Human
acugccugcuc

SEQ ID NO: 3480583 - RNA, 13 nt, Human
acugccugcuccc

SEQ ID NO: 3480584 - RNA, 19 nt, Human
acugccugcucccauccug

SEQ ID NO: 3480585 - RNA, 11 nt, Human
acugccugggc

SEQ ID NO: 3480586 - RNA, 12 nt, Human
acugccugggcu

SEQ ID NO: 3480587 - RNA, 14 nt, Human
acugccugggcucc

SEQ ID NO: 3480588 - RNA, 15 nt, Human
acugccuguauacuu

SEQ ID NO: 3480589 - RNA, 16 nt, Human
acugccuguauacuuu

SEQ ID NO: 3480590 - RNA, 20 nt, Human
acugccuguauacuuuagua

SEQ ID NO: 3480591 - RNA, 11 nt, Human
acugccuuaau

SEQ ID NO: 3480592 - RNA, 15 nt, Human
acugccuucgcuucu

SEQ ID NO: 3480593 - RNA, 21 nt, Human
acugccuucgcuucuugccuc

SEQ ID NO: 3480594 - RNA, 13 nt, Human
acugccuuuagaa

SEQ ID NO: 3480595 - RNA, 16 nt, Human
acugccuuuggcagag

SEQ ID NO: 3480596 - RNA, 20 nt, Human
acugccuuuuuauuuauaug

SEQ ID NO: 3480597 - RNA, 15 nt, Human
acugcgacuuucugc

SEQ ID NO: 3480598 - RNA, 17 nt, Human
acugcgacuuucugccu

SEQ ID NO: 3480599 - RNA, 19 nt, Human
acugcgacuuucugccugg

SEQ ID NO: 3480600 - RNA, 22 nt, Human
acugcgacuuucugccuggagu

SEQ ID NO: 3480601 - RNA, 23 nt, Human
acugcgcccuuaacugcauccag

SEQ ID NO: 3480602 - RNA, 18 nt, Human
acugcgcuuuauuuucuu

SEQ ID NO: 3480603 - RNA, 22 nt, Human
acugcgggaugguccuggggcu

SEQ ID NO: 3480604 - RNA, 16 nt, Human
acugcggggcuuggcu

SEQ ID NO: 3480605 - RNA, 14 nt, Human
acugcguucugcaa

SEQ ID NO: 3480606 - RNA, 14 nt, Human
acugcuaaauaaaa

SEQ ID NO: 3480607 - RNA, 15 nt, Human
acugcuaaauaaaau

SEQ ID NO: 3480608 - RNA, 19 nt, Human
acugcuaaauaaaauuugu

SEQ ID NO: 3480609 - RNA, 17 nt, Human
acugcuaaguauuuccc

SEQ ID NO: 3480610 - RNA, 18 nt, Human
acugcuaaguauuuccca

SEQ ID NO: 3480611 - RNA, 18 nt, Human
acugcuacuguaauuuua

SEQ ID NO: 3480612 - RNA, 16 nt, Human
acugcuaggugggcca

SEQ ID NO: 3480613 - RNA, 17 nt, Human
acugcuaggugggccag

SEQ ID NO: 3480614 - RNA, 13 nt, Human
acugcuaguguuc

SEQ ID NO: 3480615 - RNA, 19 nt, Human
acugcuauuuuccuguucu

SEQ ID NO: 3480616 - RNA, 15 nt, Human
acugcucaggcugca

SEQ ID NO: 3480617 - RNA, 21 nt, Human
acugcuccccagcccuggcuc

SEQ ID NO: 3480618 - RNA, 23 nt, Human
acugcucccuaagccagccuggu

SEQ ID NO: 3480619 - RNA, 17 nt, Human
acugcucccugaagcca

SEQ ID NO: 3480620 - RNA, 21 nt, Human
acugcucccugaagccagccu

SEQ ID NO: 3480621 - RNA, 23 nt, Human
acugcucccugaagccagccuuc

SEQ ID NO: 3480622 - RNA, 13 nt, Human
acugcuccgugga

SEQ ID NO: 3480623 - RNA, 21 nt, Human
acugcuccugagcccccagcu

SEQ ID NO: 3480624 - RNA, 22 nt, Human
acugcuccugagcccccagcuu

SEQ ID NO: 3480625 - RNA, 18 nt, Human
acugcucuaacagcccuc

SEQ ID NO: 3480626 - RNA, 12 nt, Human
acugcucugaga

SEQ ID NO: 3480627 - RNA, 13 nt, Human
acugcucugagaa

SEQ ID NO: 3480628 - RNA, 18 nt, Human
acugcucuuguuucuuuu

SEQ ID NO: 3480629 - RNA, 11 nt, Human
acugcugcaag

SEQ ID NO: 3480630 - RNA, 15 nt, Human
acugcugcaaggccu

SEQ ID NO: 3480631 - RNA, 13 nt, Human
acugcugccacug

SEQ ID NO: 3480632 - RNA, 14 nt, Human
acugcugccacuga

SEQ ID NO: 3480633 - RNA, 17 nt, Human
acugcugccacugaggg

SEQ ID NO: 3480634 - RNA, 16 nt, Human
acugcugcccagccuc

SEQ ID NO: 3480635 - RNA, 18 nt, Human
acugcugcccagccucca

SEQ ID NO: 3480636 - RNA, 22 nt, Human
acugcugccccaaaggaagcuu

SEQ ID NO: 3480637 - RNA, 22 nt, Human
acugcugcgucauuacagggca

SEQ ID NO: 3480638 - RNA, 17 nt, Human
acugcugcuagagccag

SEQ ID NO: 3480639 - RNA, 15 nt, Human
acugcugcugccugg

SEQ ID NO: 3480640 - RNA, 19 nt, Human
acugcugcugccuggccac

SEQ ID NO: 3480641 - RNA, 21 nt, Human
acugcugcuuuuugagguggc

SEQ ID NO: 3480642 - RNA, 16 nt, Human
acugcuggagaggccc

SEQ ID NO: 3480643 - RNA, 12 nt, Human
acugcuggcugc

SEQ ID NO: 3480644 - RNA, 18 nt, Human
acugcugggacuggccag

SEQ ID NO: 3480645 - RNA, 13 nt, Human
acugcuggguggc

SEQ ID NO: 3480646 - RNA, 17 nt, Human
acugcuggguggcccau

SEQ ID NO: 3480647 - RNA, 18 nt, Human
acugcuggguggcccauc

SEQ ID NO: 3480648 - RNA, 22 nt, Human
acugcugugaacccuggggccu

SEQ ID NO: 3480649 - RNA, 18 nt, Human
acugcuguggccaggagg

SEQ ID NO: 3480650 - RNA, 19 nt, Human
acugcuucccauccuaccc

SEQ ID NO: 3480651 - RNA, 20 nt, Human
acugcuucccauccuacccu

SEQ ID NO: 3480652 - RNA, 18 nt, Human
acugcuuccuauaauuuu

SEQ ID NO: 3480653 - RNA, 13 nt, Human
acugcuugaauaa

SEQ ID NO: 3480654 - RNA, 15 nt, Human
acugcuugaggaaaa

SEQ ID NO: 3480655 - RNA, 18 nt, Human
acugcuugaugaagcaag

SEQ ID NO: 3480656 - RNA, 23 nt, Human
acugcuugaugaagcaaggaaga

SEQ ID NO: 3480657 - RNA, 16 nt, Human
acugcuugcccuaagc

SEQ ID NO: 3480658 - RNA, 18 nt, Human
acugcuuggagcugagca

SEQ ID NO: 3480659 - RNA, 12 nt, Human
acugcuuucugu

SEQ ID NO: 3480660 - RNA, 14 nt, Human
acugcuuucuguuc

SEQ ID NO: 3480661 - RNA, 18 nt, Human
acugcuuucuguuccaaa

SEQ ID NO: 3480662 - RNA, 15 nt, Human
acugcuuuuggccug

SEQ ID NO: 3480663 - RNA, 20 nt, Human
acugcuuuuggucuguguga

SEQ ID NO: 3480664 - RNA, 19 nt, Human
acugcuuuuuuuuuuccag

SEQ ID NO: 3480665 - RNA, 16 nt, Human
acuggaaaacagaaca

SEQ ID NO: 3480666 - RNA, 23 nt, Human
acuggaaaacagaacacuuaugu

SEQ ID NO: 3480667 - RNA, 12 nt, Human
acuggaaagaag

SEQ ID NO: 3480668 - RNA, 23 nt, Human
acuggaaagcuuuucuauuuuaa

SEQ ID NO: 3480669 - RNA, 15 nt, Human
acuggaaaggggaga

SEQ ID NO: 3480670 - RNA, 22 nt, Human
acuggaacacuagacaagccag

SEQ ID NO: 3480671 - RNA, 15 nt, Human
acuggaaccagggag

SEQ ID NO: 3480672 - RNA, 12 nt, Human
acuggaagcaca

SEQ ID NO: 3480673 - RNA, 14 nt, Human
acuggaagcacaga

SEQ ID NO: 3480674 - RNA, 15 nt, Human
acuggaagcacagcu

SEQ ID NO: 3480675 - RNA, 20 nt, Human
acuggaagcauguaggagaa

SEQ ID NO: 3480676 - RNA, 16 nt, Human
acuggaagcuaauuug

SEQ ID NO: 3480677 - RNA, 19 nt, Human
acuggaagcuaauuugcau

SEQ ID NO: 3480678 - RNA, 18 nt, Human
acuggaagguggggacag

SEQ ID NO: 3480679 - RNA, 12 nt, Human
acuggaaguuca

SEQ ID NO: 3480680 - RNA, 19 nt, Human
acuggaaguucauaccuaa

SEQ ID NO: 3480681 - RNA, 13 nt, Human
acuggaauuaaaa

SEQ ID NO: 3480682 - RNA, 13 nt, Human
acuggaauuuuua

SEQ ID NO: 3480683 - RNA, 24 nt, Human
acuggaauuuuuauuaugcauaac

SEQ ID NO: 3480684 - RNA, 13 nt, Human
acuggacagcuug

SEQ ID NO: 3480685 - RNA, 15 nt, Human
acuggacagcuugug

SEQ ID NO: 3480686 - RNA, 18 nt, Human
acuggacccuguugcuaa

SEQ ID NO: 3480687 - RNA, 18 nt, Human
acuggacuccggcccucc

SEQ ID NO: 3480688 - RNA, 14 nt, Human
acuggacucuucaa

SEQ ID NO: 3480689 - RNA, 22 nt, Human
acuggacuugagcuuggcagcu

SEQ ID NO: 3480690 - RNA, 21 nt, Human
acuggagacaaugcagaugcc

SEQ ID NO: 3480691 - RNA, 21 nt, Human
acuggagacugugugugcccu

SEQ ID NO: 3480692 - RNA, 19 nt, Human
acuggagcaccaggcacga

SEQ ID NO: 3480693 - RNA, 13 nt, Human
acuggagcaucug

SEQ ID NO: 3480694 - RNA, 14 nt, Human
acuggagcaucuga

SEQ ID NO: 3480695 - RNA, 16 nt, Human
acuggagcaucugacu

SEQ ID NO: 3480696 - RNA, 15 nt, Human
acuggaggccccugg

SEQ ID NO: 3480697 - RNA, 21 nt, Human
acuggaggucacauucaggaa

SEQ ID NO: 3480698 - RNA, 23 nt, Human
acuggaggucacauucaggaaga

SEQ ID NO: 3480699 - RNA, 12 nt, Human
acuggaguccag

SEQ ID NO: 3480700 - RNA, 13 nt, Human
acuggagucugga

SEQ ID NO: 3480701 - RNA, 15 nt, Human
acuggagucuggagu

SEQ ID NO: 3480702 - RNA, 17 nt, Human
acuggagugcagggagg

SEQ ID NO: 3480703 - RNA, 21 nt, Human
acuggaguggcucgccaggcc

SEQ ID NO: 3480704 - RNA, 14 nt, Human
acuggaguuacauu

SEQ ID NO: 3480705 - RNA, 13 nt, Human
acuggauaaauug

SEQ ID NO: 3480706 - RNA, 10 nt, Human
acuggaugaa

SEQ ID NO: 3480707 - RNA, 11 nt, Human
acuggaugaaa

SEQ ID NO: 3480708 - RNA, 22 nt, Human
acuggauuaaacuuaaucuaaa

SEQ ID NO: 3480709 - RNA, 21 nt, Human
acuggcaaacagggccucugc

SEQ ID NO: 3480710 - RNA, 18 nt, Human
acuggcaacauuccaaga

SEQ ID NO: 3480711 - RNA, 16 nt, Human
acuggcaaugguaguu

SEQ ID NO: 3480712 - RNA, 21 nt, Human
acuggcaaugguaguuucugu

SEQ ID NO: 3480713 - RNA, 12 nt, Human
acuggcacagag

SEQ ID NO: 3480714 - RNA, 22 nt, Human
acuggcacaguuuucugagaaa

SEQ ID NO: 3480715 - RNA, 20 nt, Human
acuggcacugaauuaaucau

SEQ ID NO: 3480716 - RNA, 21 nt, Human
acuggcaggcaggcucccagg

SEQ ID NO: 3480717 - RNA, 16 nt, Human
acuggcaguuuuccau

SEQ ID NO: 3480718 - RNA, 20 nt, Human
acuggcaucugacacaaaaa

SEQ ID NO: 3480719 - RNA, 15 nt, Human
acuucauugucccuc

SEQ ID NO: 3480720 - RNA, 20 nt, Human
acuucauuuaaaaaaaucac

SEQ ID NO: 3480721 - RNA, 16 nt, Human
acuuccaaacuaauuu

SEQ ID NO: 3480722 - RNA, 19 nt, Human
acuuccaaacuaauuuuua

SEQ ID NO: 3480723 - RNA, 21 nt, Human
acuuccaaauccccuaagcag

SEQ ID NO: 3480724 - RNA, 18 nt, Human
acuuccaauuuacauacu

SEQ ID NO: 3480725 - RNA, 20 nt, Human
acuuccacagggucccacag

SEQ ID NO: 3480726 - RNA, 21 nt, Human
acuuccacagggucccacagc

SEQ ID NO: 3480727 - RNA, 14 nt, Human
acuuccaccagccu

SEQ ID NO: 3480728 - RNA, 15 nt, Human
acuuccaccagccug

SEQ ID NO: 3480729 - RNA, 18 nt, Human
acuuccaccagccugcac

SEQ ID NO: 3480730 - RNA, 21 nt, Human
acuuccaccucgggcacauuu

SEQ ID NO: 3480731 - RNA, 20 nt, Human
acuuccagauccuggaaauc

SEQ ID NO: 3480732 - RNA, 21 nt, Human
acuuccaggggaaccugccau

SEQ ID NO: 3480733 - RNA, 20 nt, Human
acuuccagugcaacacugaa

SEQ ID NO: 3480734 - RNA, 13 nt, Human
acuuccaugaauu

SEQ ID NO: 3480735 - RNA, 18 nt, Human
acuuccauggcccucauu

SEQ ID NO: 3480736 - RNA, 22 nt, Human
acuuccaugugaggguuuucag

SEQ ID NO: 3480737 - RNA, 13 nt, Human
acuucccacccug

SEQ ID NO: 3480738 - RNA, 18 nt, Human
acuuccccauacaaauaa

SEQ ID NO: 3480739 - RNA, 11 nt, Human
acuucccccaa

SEQ ID NO: 3480740 - RNA, 14 nt, Human
acuuccccuaugga

SEQ ID NO: 3480741 - RNA, 17 nt, Human
acuuccccuccuacccc

SEQ ID NO: 3480742 - RNA, 23 nt, Human
acuucccgucccauauccugccu

SEQ ID NO: 3480743 - RNA, 14 nt, Human
acuucccucuguuu

SEQ ID NO: 3480744 - RNA, 21 nt, Human
acuucccugauugaccugcuc

SEQ ID NO: 3480745 - RNA, 11 nt, Human
acuucccugcu

SEQ ID NO: 3480746 - RNA, 16 nt, Human
acuucccugcugccug

SEQ ID NO: 3480747 - RNA, 14 nt, Human
acuucccugggcaa

SEQ ID NO: 3480748 - RNA, 22 nt, Human
acuucccuuucugcuuguguua

SEQ ID NO: 3480749 - RNA, 18 nt, Human
acuuccucucgcggcccu

SEQ ID NO: 3480750 - RNA, 20 nt, Human
acuuccugagggaucuauac

SEQ ID NO: 3480751 - RNA, 22 nt, Human
acuuccugauugguuucucuuc

SEQ ID NO: 3480752 - RNA, 23 nt, Human
acuuccugauugguuucucuucu

SEQ ID NO: 3480753 - RNA, 14 nt, Human
acuuccugccuggu

SEQ ID NO: 3480754 - RNA, 16 nt, Human
acuuccugccuggucu

SEQ ID NO: 3480755 - RNA, 18 nt, Human
acuuccugccuggucucc

SEQ ID NO: 3480756 - RNA, 12 nt, Human
acuuccugucca

SEQ ID NO: 3480757 - RNA, 13 nt, Human
acuuccuguccag

SEQ ID NO: 3480758 - RNA, 23 nt, Human
acuuccuguccagcuccaaccug

SEQ ID NO: 3480759 - RNA, 22 nt, Human
acuuccuugagacacggagccc

SEQ ID NO: 3480760 - RNA, 14 nt, Human
acuuccuugccagu

SEQ ID NO: 3480761 - RNA, 16 nt, Human
acuuccuugcucuccc

SEQ ID NO: 3480762 - RNA, 20 nt, Human
acuuccuuuaaagaugaacu

SEQ ID NO: 3480763 - RNA, 14 nt, Human
acuucgacacuguu

SEQ ID NO: 3480764 - RNA, 21 nt, Human
acuucgacacuguucuuagcu

SEQ ID NO: 3480765 - RNA, 22 nt, Human
acuucgcaucaaaagacaauuc

SEQ ID NO: 3480766 - RNA, 24 nt, Human
acuucgcaucaaaagacaauucuu

SEQ ID NO: 3480767 - RNA, 22 nt, Human
acuucggcagauacugucucuu

SEQ ID NO: 3480768 - RNA, 22 nt, Human
acuucgggaggucgaggcagga

SEQ ID NO: 3480769 - RNA, 15 nt, Human
acuucgucuucuaau

SEQ ID NO: 3480770 - RNA, 17 nt, Human
acuucguuuaaugaaug

SEQ ID NO: 3480771 - RNA, 15 nt, Human
acccaaaagaaacug

SEQ ID NO: 3480772 - RNA, 15 nt, Human
acccaaaagagaaaa

SEQ ID NO: 3480773 - RNA, 21 nt, Human
acccaaaagcucagccagccc

SEQ ID NO: 3480774 - RNA, 18 nt, Human
acccaaaaggcagaagca

SEQ ID NO: 3480775 - RNA, 23 nt, Human
acccaaaagucaaaaggugccug

SEQ ID NO: 3480776 - RNA, 11 nt, Human
acccaaagcag

SEQ ID NO: 3480777 - RNA, 17 nt, Human
acccaaagcugagccug

SEQ ID NO: 3480778 - RNA, 22 nt, Human
acccaaagcugagccugcaggg

SEQ ID NO: 3480779 - RNA, 14 nt, Human
acccaaauccucuc

SEQ ID NO: 3480780 - RNA, 15 nt, Human
acccaaauccucucc

SEQ ID NO: 3480781 - RNA, 16 nt, Human
acccaaauguucauca

SEQ ID NO: 3480782 - RNA, 23 nt, Human
acccaaccacaucccacucacaa

SEQ ID NO: 3480783 - RNA, 19 nt, Human
acccaaccccaagccagcc

SEQ ID NO: 3480784 - RNA, 17 nt, Human
acccaacccuaucuccu

SEQ ID NO: 3480785 - RNA, 13 nt, Human
acccaacgcucca

SEQ ID NO: 3480786 - RNA, 19 nt, Human
acccaacuagcucuauguu

SEQ ID NO: 3480787 - RNA, 13 nt, Human
acccaacucuccu

SEQ ID NO: 3480788 - RNA, 15 nt, Human
acccaacucuccugg

SEQ ID NO: 3480789 - RNA, 16 nt, Human
acccaacucuccugga

SEQ ID NO: 3480790 - RNA, 19 nt, Human
acccaagaccucagggcac

SEQ ID NO: 3480791 - RNA, 20 nt, Human
acccaagaugcaagaaggag

SEQ ID NO: 3480792 - RNA, 22 nt, Human
acccaagaugggcaucuuuugu

SEQ ID NO: 3480793 - RNA, 15 nt, Human
acccaagcaggaggc

SEQ ID NO: 3480794 - RNA, 15 nt, Human
acccaagcuccuccu

SEQ ID NO: 3480795 - RNA, 19 nt, Human
acccaaggagcacaggucc

SEQ ID NO: 3480796 - RNA, 17 nt, Human
acccaagggcagaaagu

SEQ ID NO: 3480797 - RNA, 20 nt, Human
acccaagggcagaaaguaga

SEQ ID NO: 3480798 - RNA, 21 nt, Human
acccaauagcugcccauuucg

SEQ ID NO: 3480799 - RNA, 13 nt, Human
acccacaagugcc

SEQ ID NO: 3480800 - RNA, 19 nt, Human
acccacagccucugccugu

SEQ ID NO: 3480801 - RNA, 13 nt, Human
acccacagggcua

SEQ ID NO: 3480802 - RNA, 12 nt, Human
acccaccacaca

SEQ ID NO: 3480803 - RNA, 16 nt, Human
acccaccccaccugca

SEQ ID NO: 3480804 - RNA, 15 nt, Human
acccacccccaccca

SEQ ID NO: 3480805 - RNA, 12 nt, Human
acccaccccugc

SEQ ID NO: 3480806 - RNA, 14 nt, Human
acccaccccugugc

SEQ ID NO: 3480807 - RNA, 20 nt, Human
acccaccgccacaauaaaga

SEQ ID NO: 3480808 - RNA, 14 nt, Human
acccaccgggccac

SEQ ID NO: 3480809 - RNA, 19 nt, Human
acccaccguccgcccugcu

SEQ ID NO: 3480810 - RNA, 15 nt, Human
acccaccguggagga

SEQ ID NO: 3480811 - RNA, 14 nt, Human
acccaccucagccu

SEQ ID NO: 3480812 - RNA, 15 nt, Human
acccaccucagccuc

SEQ ID NO: 3480813 - RNA, 14 nt, Human
acccaccucccugc

SEQ ID NO: 3480814 - RNA, 16 nt, Human
acccaccugagcuuug

SEQ ID NO: 3480815 - RNA, 21 nt, Human
acccaccuuguuggagccugc

SEQ ID NO: 3480816 - RNA, 19 nt, Human
acccacgauuuucuccagc

SEQ ID NO: 3480817 - RNA, 20 nt, Human
acccacgauuuucuccagcu

SEQ ID NO: 3480818 - RNA, 14 nt, Human
acccacguggcugc

SEQ ID NO: 3480819 - RNA, 18 nt, Human
acccacucuccucugccu

SEQ ID NO: 3480820 - RNA, 22 nt, Human
acccacuucucaucacacacau

SEQ ID NO: 3480821 - RNA, 21 nt, Human
acccagaaacgccacaucccc

SEQ ID NO: 3480822 - RNA, 21 nt, Human
acccagacagcucccucugcc

SEQ ID NO: 3480823 - RNA, 22 nt, Human
acccagacagcucccucugccu

SEQ ID NO: 3480824 - RNA, 19 nt, Human
acccagacauaaaggaaaa

SEQ ID NO: 3480825 - RNA, 17 nt, Human
acccagaccccaggcug

SEQ ID NO: 3480826 - RNA, 15 nt, Human
acccagacucagaca

SEQ ID NO: 3480827 - RNA, 17 nt, Human
acccagagaagccccuu

SEQ ID NO: 3480828 - RNA, 19 nt, Human
acccagagaagccccuucc

SEQ ID NO: 3480829 - RNA, 22 nt, Human
acccagagaagccccuucccca

SEQ ID NO: 3480830 - RNA, 21 nt, Human
acccagauaaagguucaugca

SEQ ID NO: 3480831 - RNA, 22 nt, Human
acccagaugggggaaagcacag

SEQ ID NO: 3480832 - RNA, 19 nt, Human
acccagauuuugcuguaua

SEQ ID NO: 3480833 - RNA, 14 nt, Human
acccagcaguucug

SEQ ID NO: 3480834 - RNA, 17 nt, Human
acccagccaggcccagc

SEQ ID NO: 3480835 - RNA, 14 nt, Human
acccagcccacccc

SEQ ID NO: 3480836 - RNA, 15 nt, Human
acccagcccaccccc

SEQ ID NO: 3480837 - RNA, 16 nt, Human
acccagcccacccccg

SEQ ID NO: 3480838 - RNA, 16 nt, Human
acccagcccacuucug

SEQ ID NO: 3480839 - RNA, 11 nt, Human
acccagcccau

SEQ ID NO: 3480840 - RNA, 19 nt, Human
acccagcccauucucucuc

SEQ ID NO: 3480841 - RNA, 22 nt, Human
acccagcccauucucucuccug

SEQ ID NO: 3480842 - RNA, 16 nt, Human
acccagcccucauccc

SEQ ID NO: 3480843 - RNA, 21 nt, Human
acccagcccuggucucagcag

SEQ ID NO: 3480844 - RNA, 14 nt, Human
acccagccgcugcc

SEQ ID NO: 3480845 - RNA, 16 nt, Human
acccagccgcugcccg

SEQ ID NO: 3480846 - RNA, 13 nt, Human
acccagccucagu

SEQ ID NO: 3480847 - RNA, 16 nt, Human
acccagcgagcccugg

SEQ ID NO: 3480848 - RNA, 19 nt, Human
acccagcgagcccuggugg

SEQ ID NO: 3480849 - RNA, 15 nt, Human
acccagcggacacac

SEQ ID NO: 3480850 - RNA, 13 nt, Human
acccagcugcacc

SEQ ID NO: 3480851 - RNA, 14 nt, Human
acccaggacaagca

SEQ ID NO: 3480852 - RNA, 17 nt, Human
acccaggacaagcaugg

SEQ ID NO: 3480853 - RNA, 11 nt, Human
acccaggacag

SEQ ID NO: 3480854 - RNA, 14 nt, Human
acccaggaccaagc

SEQ ID NO: 3480855 - RNA, 19 nt, Human
acccaggagccccgaggcc

SEQ ID NO: 3480856 - RNA, 19 nt, Human
acccaggaggggaacacug

SEQ ID NO: 3480857 - RNA, 20 nt, Human
acccaggaggggaacacugc

SEQ ID NO: 3480858 - RNA, 14 nt, Human
acccaggaggugga

SEQ ID NO: 3480859 - RNA, 20 nt, Human
acccaggagguggagguugc

SEQ ID NO: 3480860 - RNA, 22 nt, Human
acccaggccgcagcucuugccc

SEQ ID NO: 3480861 - RNA, 23 nt, Human
acccaggccgcagcucuugcccu

SEQ ID NO: 3480862 - RNA, 11 nt, Human
acccaggcucc

SEQ ID NO: 3480863 - RNA, 13 nt, Human
acccaggcugggc

SEQ ID NO: 3480864 - RNA, 14 nt, Human
acccaggcugggca

SEQ ID NO: 3480865 - RNA, 20 nt, Human
acccaggcugggcaaggagg

SEQ ID NO: 3480866 - RNA, 13 nt, Human
acccagggccugc

SEQ ID NO: 3480867 - RNA, 14 nt, Human
acccagggccugca

SEQ ID NO: 3480868 - RNA, 17 nt, Human
acccagggccugcagga

SEQ ID NO: 3480869 - RNA, 16 nt, Human
acccagggcucugccc

SEQ ID NO: 3480870 - RNA, 19 nt, Human
acccagggcucugccccag

SEQ ID NO: 3480871 - RNA, 19 nt, Human
acccaggguggagugcagu

SEQ ID NO: 3480872 - RNA, 20 nt, Human
acccaggguggagugcagug

SEQ ID NO: 3480873 - RNA, 21 nt, Human
acccaggguggagugcagugg

SEQ ID NO: 3480874 - RNA, 22 nt, Human
acccaggguucccgcggggcug

SEQ ID NO: 3480875 - RNA, 14 nt, Human
acccaggucucccu

SEQ ID NO: 3480876 - RNA, 21 nt, Human
acccaggugauguuaguguuu

SEQ ID NO: 3480877 - RNA, 16 nt, Human
acccaggugggucccg

SEQ ID NO: 3480878 - RNA, 21 nt, Human
acccaguccccgugccccgcc

SEQ ID NO: 3480879 - RNA, 14 nt, Human
acccagucgcccuu

SEQ ID NO: 3480880 - RNA, 19 nt, Human
acccagucgcccuuacuuc

SEQ ID NO: 3480881 - RNA, 18 nt, Human
acccagucucugcuccac

SEQ ID NO: 3480882 - RNA, 18 nt, Human
acccagugcccccacuga

SEQ ID NO: 3480883 - RNA, 22 nt, Human
acccagugcccccacugaccag

SEQ ID NO: 3480884 - RNA, 18 nt, Human
acccaguggcagggcaca

SEQ ID NO: 3480885 - RNA, 20 nt, Human
acccaguggcagggcacagg

SEQ ID NO: 3480886 - RNA, 19 nt, Human
acccaguguuuuaggagca

SEQ ID NO: 3480887 - RNA, 17 nt, Human
acccaguuuccuuggga

SEQ ID NO: 3480888 - RNA, 20 nt, Human
acccaguuucuaaacuggag

SEQ ID NO: 3480889 - RNA, 21 nt, Human
acccaguuucuaaacuggaga

SEQ ID NO: 3480890 - RNA, 17 nt, Human
acccauaauccuuucug

SEQ ID NO: 3480891 - RNA, 21 nt, Human
acccauagaucuucugaaaug

SEQ ID NO: 3480892 - RNA, 22 nt, Human
acccauaggcccacacacaggu

SEQ ID NO: 3480893 - RNA, 14 nt, Human
acccauauccccuc

SEQ ID NO: 3480894 - RNA, 23 nt, Human
acccauauccuuacccuccuugg

SEQ ID NO: 3480895 - RNA, 20 nt, Human
acccauauuguaaaacaggu

SEQ ID NO: 3480896 - RNA, 15 nt, Human
acccaucaacaaaaa

SEQ ID NO: 3480897 - RNA, 15 nt, Human
acccaucgcugugug

SEQ ID NO: 3480898 - RNA, 16 nt, Human
acccaucuaccccugg

SEQ ID NO: 3480899 - RNA, 20 nt, Human
acccaucugcaccccccugg

SEQ ID NO: 3480900 - RNA, 21 nt, Human
acccaucugcaccccccuggg

SEQ ID NO: 3480901 - RNA, 17 nt, Human
acccaucuguuuuuugu

SEQ ID NO: 3480902 - RNA, 11 nt, Human
acccaugaaaa

SEQ ID NO: 3480903 - RNA, 12 nt, Human
acccaugaagau

SEQ ID NO: 3480904 - RNA, 23 nt, Human
acccaugacuuuauauggaugau

SEQ ID NO: 3480905 - RNA, 20 nt, Human
acccaugaguuggggucugg

SEQ ID NO: 3480906 - RNA, 18 nt, Human
acccaugaugagcuccuc

SEQ ID NO: 3480907 - RNA, 14 nt, Human
acccaugcugcccu

SEQ ID NO: 3480908 - RNA, 18 nt, Human
acccaugcugcccuguga

SEQ ID NO: 3480909 - RNA, 19 nt, Human
acccaugcugcccugugag

SEQ ID NO: 3480910 - RNA, 13 nt, Human
acccaugggcagg

SEQ ID NO: 3480911 - RNA, 18 nt, Human
acccaugggcaggagacu

SEQ ID NO: 3480912 - RNA, 16 nt, Human
acccauguuucucugg

SEQ ID NO: 3480913 - RNA, 21 nt, Human
accaccuucccagcucucccu

SEQ ID NO: 3480914 - RNA, 14 nt, Human
accaccuuucagau

SEQ ID NO: 3480915 - RNA, 13 nt, Human
accacgacuggcc

SEQ ID NO: 3480916 - RNA, 16 nt, Human
accacgacuggccagg

SEQ ID NO: 3480917 - RNA, 16 nt, Human
accacgauguggcccu

SEQ ID NO: 3480918 - RNA, 19 nt, Human
accacgauguggcccuggc

SEQ ID NO: 3480919 - RNA, 20 nt, Human
accacgcccggcuaauuuuu

SEQ ID NO: 3480920 - RNA, 20 nt, Human
accacgcccguccugccugu

SEQ ID NO: 3480921 - RNA, 23 nt, Human
accacgcccguccugccuguggc

SEQ ID NO: 3480922 - RNA, 22 nt, Human
accacgccucuugaccaggcug

SEQ ID NO: 3480923 - RNA, 20 nt, Human
accacgcuugacaggacagc

SEQ ID NO: 3480924 - RNA, 18 nt, Human
accacggaaaagagcgca

SEQ ID NO: 3480925 - RNA, 20 nt, Human
accacguugggacagggagg

SEQ ID NO: 3480926 - RNA, 16 nt, Human
accacuacauucuguu

SEQ ID NO: 3480927 - RNA, 14 nt, Human
accacuauaaaaug

SEQ ID NO: 3480928 - RNA, 15 nt, Human
accacucaaaggcca

SEQ ID NO: 3480929 - RNA, 14 nt, Human
accacucagagaca

SEQ ID NO: 3480930 - RNA, 12 nt, Human
accacucagccc

SEQ ID NO: 3480931 - RNA, 13 nt, Human
accacucagcccc

SEQ ID NO: 3480932 - RNA, 14 nt, Human
accacucagccccu

SEQ ID NO: 3480933 - RNA, 15 nt, Human
accacucagccccua

SEQ ID NO: 3480934 - RNA, 17 nt, Human
accacucagccccuagg

SEQ ID NO: 3480935 - RNA, 20 nt, Human
accacucuggcagccacacu

SEQ ID NO: 3480936 - RNA, 16 nt, Human
accacugaaaaaauau

SEQ ID NO: 3480937 - RNA, 19 nt, Human
accacugaaaaaauauaug

SEQ ID NO: 3480938 - RNA, 18 nt, Human
accacugcacuccagccu

SEQ ID NO: 3480939 - RNA, 21 nt, Human
accacugcacuccagccuggg

SEQ ID NO: 3480940 - RNA, 21 nt, Human
accacugcugauauuuucucu

SEQ ID NO: 3480941 - RNA, 19 nt, Human
accacugcugugaacaagu

SEQ ID NO: 3480942 - RNA, 12 nt, Human
accacuggccac

SEQ ID NO: 3480943 - RNA, 15 nt, Human
accacuggccaccag

SEQ ID NO: 3480944 - RNA, 13 nt, Human
accacugucuucu

SEQ ID NO: 3480945 - RNA, 13 nt, Human
accacuguuucuu

SEQ ID NO: 3480946 - RNA, 16 nt, Human
accacuguuucuugcu

SEQ ID NO: 3480947 - RNA, 20 nt, Human
accacuguuucuugcuugua

SEQ ID NO: 3480948 - RNA, 22 nt, Human
accacuguuucuugcuuguacc

SEQ ID NO: 3480949 - RNA, 14 nt, Human
accacuucagcuga

SEQ ID NO: 3480950 - RNA, 15 nt, Human
accacuucagcugac

SEQ ID NO: 3480951 - RNA, 14 nt, Human
accacuucauucug

SEQ ID NO: 3480952 - RNA, 20 nt, Human
accacuuccaggggaaccug

SEQ ID NO: 3480953 - RNA, 15 nt, Human
accacuuccuuuaaa

SEQ ID NO: 3480954 - RNA, 15 nt, Human
accacuucuuuuaua

SEQ ID NO: 3480955 - RNA, 20 nt, Human
accacuugaggccugaucug

SEQ ID NO: 3480956 - RNA, 23 nt, Human
accacuuguguuuugcaagccag

SEQ ID NO: 3480957 - RNA, 16 nt, Human
accacuuuuguucuug

SEQ ID NO: 3480958 - RNA, 12 nt, Human
accacuuuuuag

SEQ ID NO: 3480959 - RNA, 17 nt, Human
accacuuuuugcagcuu

SEQ ID NO: 3480960 - RNA, 18 nt, Human
accacuuuuugcagcuuu

SEQ ID NO: 3480961 - RNA, 23 nt, Human
accagaaagcaguugagacaaga

SEQ ID NO: 3480962 - RNA, 19 nt, Human
accagaaccaauuauuuuc

SEQ ID NO: 3480963 - RNA, 21 nt, Human
accagaaccaauuauuuucau

SEQ ID NO: 3480964 - RNA, 19 nt, Human
accagaagcucccccagca

SEQ ID NO: 3480965 - RNA, 14 nt, Human
accagaagggaaac

SEQ ID NO: 3480966 - RNA, 13 nt, Human
accagacacaaac

SEQ ID NO: 3480967 - RNA, 14 nt, Human
accagacggggcug

SEQ ID NO: 3480968 - RNA, 20 nt, Human
accagacgguucaccagccu

SEQ ID NO: 3480969 - RNA, 14 nt, Human
accagacugcaggu

SEQ ID NO: 3480970 - RNA, 18 nt, Human
accagacuguggagaaau

SEQ ID NO: 3480971 - RNA, 20 nt, Human
accagacuguggagaaauaa

SEQ ID NO: 3480972 - RNA, 20 nt, Human
accagagauaauaugagaau

SEQ ID NO: 3480973 - RNA, 19 nt, Human
accagagcaaccucucacu

SEQ ID NO: 3480974 - RNA, 13 nt, Human
accagagcacugu

SEQ ID NO: 3480975 - RNA, 14 nt, Human
accagagcacugua

SEQ ID NO: 3480976 - RNA, 16 nt, Human
accagagcacuguaua

SEQ ID NO: 3480977 - RNA, 14 nt, Human
accagagccaugga

SEQ ID NO: 3480978 - RNA, 17 nt, Human
accagagccauggacuc

SEQ ID NO: 3480979 - RNA, 23 nt, Human
accagagccauggacucuacacu

SEQ ID NO: 3480980 - RNA, 17 nt, Human
accagagcccaccuugg

SEQ ID NO: 3480981 - RNA, 19 nt, Human
accagagcccaccuuggcu

SEQ ID NO: 3480982 - RNA, 22 nt, Human
accagagcccaccuuggcucaa

SEQ ID NO: 3480983 - RNA, 20 nt, Human
accagagccccacacggagg

SEQ ID NO: 3480984 - RNA, 14 nt, Human
accagagcucugga

SEQ ID NO: 3480985 - RNA, 16 nt, Human
accagagcugccaccu

SEQ ID NO: 3480986 - RNA, 19 nt, Human
accagagcugccaccugcc

SEQ ID NO: 3480987 - RNA, 17 nt, Human
accagagcuguggagag

SEQ ID NO: 3480988 - RNA, 15 nt, Human
accagaggaaucacu

SEQ ID NO: 3480989 - RNA, 20 nt, Human
accagauaaaauuauagaug

SEQ ID NO: 3480990 - RNA, 13 nt, Human
accagauaacuuu

SEQ ID NO: 3480991 - RNA, 13 nt, Human
accagaucauugu

SEQ ID NO: 3480992 - RNA, 16 nt, Human
accagaugagaauuag

SEQ ID NO: 3480993 - RNA, 17 nt, Human
accagaugaugggggag

SEQ ID NO: 3480994 - RNA, 18 nt, Human
accagaugaugggggagg

SEQ ID NO: 3480995 - RNA, 17 nt, Human
accagcacacucccgag

SEQ ID NO: 3480996 - RNA, 19 nt, Human
accagcagacagagccagg

SEQ ID NO: 3480997 - RNA, 12 nt, Human
accagcagagca

SEQ ID NO: 3480998 - RNA, 21 nt, Human
accagcagaucccagcucacg

SEQ ID NO: 3480999 - RNA, 17 nt, Human
accagcagccuggaccc

SEQ ID NO: 3481000 - RNA, 17 nt, Human
accagcagcgccuuucc

SEQ ID NO: 3481001 - RNA, 18 nt, Human
accagcagcgccuuuccc

SEQ ID NO: 3481002 - RNA, 22 nt, Human
accagcaucccuugaccaggcc

SEQ ID NO: 3481003 - RNA, 15 nt, Human
accagcauuccuuuu

SEQ ID NO: 3481004 - RNA, 11 nt, Human
accagccagcg

SEQ ID NO: 3481005 - RNA, 17 nt, Human
accagccaggcucugug

SEQ ID NO: 3481006 - RNA, 23 nt, Human
accagccaggcucugugcugacc

SEQ ID NO: 3481007 - RNA, 15 nt, Human
accagcccagacccu

SEQ ID NO: 3481008 - RNA, 14 nt, Human
accagcccagaugu

SEQ ID NO: 3481009 - RNA, 20 nt, Human
accagccccacugccagcag

SEQ ID NO: 3481010 - RNA, 21 nt, Human
accagccccacugccagcagc

SEQ ID NO: 3481011 - RNA, 12 nt, Human
accagccccugc

SEQ ID NO: 3481012 - RNA, 16 nt, Human
accagccccugcccca

SEQ ID NO: 3481013 - RNA, 12 nt, Human
accagcccuggg

SEQ ID NO: 3481014 - RNA, 21 nt, Human
accagccuccaugcugccucc

SEQ ID NO: 3481015 - RNA, 17 nt, Human
accagccucgucuucau

SEQ ID NO: 3481016 - RNA, 12 nt, Human
accagccuggcc

SEQ ID NO: 3481017 - RNA, 15 nt, Human
accagccuggccaac

SEQ ID NO: 3481018 - RNA, 20 nt, Human
accagccuggccaacauggu

SEQ ID NO: 3481019 - RNA, 13 nt, Human
accagccuggccc

SEQ ID NO: 3481020 - RNA, 20 nt, Human
accagccuggucaacauggu

SEQ ID NO: 3481021 - RNA, 16 nt, Human
accagccuuucuccca

SEQ ID NO: 3481022 - RNA, 23 nt, Human
accagcgaggaggcuccagaggg

SEQ ID NO: 3481023 - RNA, 23 nt, Human
accagcgcacugauggucacugg

SEQ ID NO: 3481024 - RNA, 14 nt, Human
accagcgcccgcug

SEQ ID NO: 3481025 - RNA, 18 nt, Human
accagcgcccgcugggcu

SEQ ID NO: 3481026 - RNA, 13 nt, Human
accagcucaggac

SEQ ID NO: 3481027 - RNA, 20 nt, Human
accagcugaaaguugggacu

SEQ ID NO: 3481028 - RNA, 12 nt, Human
accagcugcaaa

SEQ ID NO: 3481029 - RNA, 14 nt, Human
accagcugcaaagu

SEQ ID NO: 3481030 - RNA, 15 nt, Human
accagcugcaaagug

SEQ ID NO: 3481031 - RNA, 17 nt, Human
accagcugcaaaguguu

SEQ ID NO: 3481032 - RNA, 15 nt, Human
accagcugccucuuc

SEQ ID NO: 3481033 - RNA, 23 nt, Human
accagcuggggcguggggagggc

SEQ ID NO: 3481034 - RNA, 17 nt, Human
accagcuuaaaggcagu

SEQ ID NO: 3481035 - RNA, 15 nt, Human
accagcuuccuucag

SEQ ID NO: 3481036 - RNA, 17 nt, Human
accagcuuccuucagag

SEQ ID NO: 3481037 - RNA, 20 nt, Human
accagcuuccuucagagagc

SEQ ID NO: 3481038 - RNA, 21 nt, Human
accagcuuccuucagagagca

SEQ ID NO: 3481039 - RNA, 23 nt, Human
accagcuuccuucagagagcagu

SEQ ID NO: 3481040 - RNA, 15 nt, Human
accagcuucuccagg

SEQ ID NO: 3481041 - RNA, 16 nt, Human
accagcuucuccaggc

SEQ ID NO: 3481042 - RNA, 13 nt, Human
accagcuuuuaac

SEQ ID NO: 3481043 - RNA, 20 nt, Human
accaggaauguuaaagucag

SEQ ID NO: 3481044 - RNA, 22 nt, Human
accaggacuagggcuggaguga

SEQ ID NO: 3481045 - RNA, 21 nt, Human
accaggacuauagcccagguc

SEQ ID NO: 3481046 - RNA, 14 nt, Human
accaggagaaccac

SEQ ID NO: 3481047 - RNA, 20 nt, Human
accaggagaaccacuacaug

SEQ ID NO: 3481048 - RNA, 15 nt, Human
accaggagcugcuca

SEQ ID NO: 3481049 - RNA, 18 nt, Human
accaggagggcacuggag

SEQ ID NO: 3481050 - RNA, 22 nt, Human
accaggagucccugguaauaag

SEQ ID NO: 3481051 - RNA, 16 nt, Human
accaggauagagacug

SEQ ID NO: 3481052 - RNA, 19 nt, Human
accaggauagagacuggaa

SEQ ID NO: 3481053 - RNA, 19 nt, Human
accaggauccagccucacu

SEQ ID NO: 3481054 - RNA, 15 nt, Human
accaggauuucuaau

SEQ ID NO: 3481055 - RNA, 17 nt, Human
accaggcaccucuuccu

SEQ ID NO: 3481056 - RNA, 17 nt, Human
accaggcagccucuggg

SEQ ID NO: 3481057 - RNA, 12 nt, Human
accaggccaccu

SEQ ID NO: 3481058 - RNA, 16 nt, Human
accaggccgccccagc

SEQ ID NO: 3481059 - RNA, 23 nt, Human
accaggcuggcgcagccaaggcc

SEQ ID NO: 3481060 - RNA, 23 nt, Human
accagggaagaagaucaacgccu

SEQ ID NO: 3481061 - RNA, 15 nt, Human
accagggccagaagu

SEQ ID NO: 3481062 - RNA, 16 nt, Human
accagggccagccucu

SEQ ID NO: 3481063 - RNA, 17 nt, Human
acccugaguuuuguuuu

SEQ ID NO: 3481064 - RNA, 23 nt, Human
acccugcaaacagaacaggguca

SEQ ID NO: 3481065 - RNA, 15 nt, Human
acccugccaggcaca

SEQ ID NO: 3481066 - RNA, 16 nt, Human
acccugccaggcacag

SEQ ID NO: 3481067 - RNA, 18 nt, Human
acccugccaggcacaggc

SEQ ID NO: 3481068 - RNA, 19 nt, Human
acccugccaggcacaggca

SEQ ID NO: 3481069 - RNA, 14 nt, Human
acccugccauggaa

SEQ ID NO: 3481070 - RNA, 17 nt, Human
acccugccccucagaga

SEQ ID NO: 3481071 - RNA, 14 nt, Human
acccugccccugcc

SEQ ID NO: 3481072 - RNA, 22 nt, Human
acccugcccugugggcccccaa

SEQ ID NO: 3481073 - RNA, 17 nt, Human
acccugccgucaccacc

SEQ ID NO: 3481074 - RNA, 19 nt, Human
acccugccgucaccaccac

SEQ ID NO: 3481075 - RNA, 22 nt, Human
acccugccgucaccaccacccc

SEQ ID NO: 3481076 - RNA, 14 nt, Human
acccugccucccuu

SEQ ID NO: 3481077 - RNA, 20 nt, Human
acccugccucccuugacuuu

SEQ ID NO: 3481078 - RNA, 16 nt, Human
acccugccucucccag

SEQ ID NO: 3481079 - RNA, 20 nt, Human
acccugccucucccaggcag

SEQ ID NO: 3481080 - RNA, 18 nt, Human
acccugccuuaucuugca

SEQ ID NO: 3481081 - RNA, 19 nt, Human
acccugcgaaggggcccug

SEQ ID NO: 3481082 - RNA, 16 nt, Human
acccugcugcuggugc

SEQ ID NO: 3481083 - RNA, 14 nt, Human
acccuggacccagc

SEQ ID NO: 3481084 - RNA, 16 nt, Human
acccuggaucaguccu

SEQ ID NO: 3481085 - RNA, 22 nt, Human
acccuggcaaagcagcaacaca

SEQ ID NO: 3481086 - RNA, 14 nt, Human
acuggcauuuuaua

SEQ ID NO: 3481087 - RNA, 18 nt, Human
acuggcauuuuauagaca

SEQ ID NO: 3481088 - RNA, 16 nt, Human
acuggccaagcugagg

SEQ ID NO: 3481089 - RNA, 19 nt, Human
acuggccaagcugaggugc

SEQ ID NO: 3481090 - RNA, 21 nt, Human
acuggccaagcugaggugccc

SEQ ID NO: 3481091 - RNA, 14 nt, Human
acuggccaccaggc

SEQ ID NO: 3481092 - RNA, 18 nt, Human
acuggccaccaggcuggc

SEQ ID NO: 3481093 - RNA, 21 nt, Human
acuggccaccaggcuggcgca

SEQ ID NO: 3481094 - RNA, 12 nt, Human
acuggccccacc

SEQ ID NO: 3481095 - RNA, 13 nt, Human
acuggccccaccc

SEQ ID NO: 3481096 - RNA, 21 nt, Human
acuggccccggaucagagcag

SEQ ID NO: 3481097 - RNA, 13 nt, Human
acuggccccuggg

SEQ ID NO: 3481098 - RNA, 17 nt, Human
acuggccgcgggggcag

SEQ ID NO: 3481099 - RNA, 19 nt, Human
acuggccggagucagugcc

SEQ ID NO: 3481100 - RNA, 18 nt, Human
acuggccucgccuggccu

SEQ ID NO: 3481101 - RNA, 19 nt, Human
acuggccucgccuggccug

SEQ ID NO: 3481102 - RNA, 14 nt, Human
acuggccucugcug

SEQ ID NO: 3481103 - RNA, 23 nt, Human
acuggccuucugaugaaauguua

SEQ ID NO: 3481104 - RNA, 18 nt, Human
acuggccuuuuucauuua

SEQ ID NO: 3481105 - RNA, 15 nt, Human
acuggcgccuccgag

SEQ ID NO: 3481106 - RNA, 12 nt, Human
acuggcucaccc

SEQ ID NO: 3481107 - RNA, 15 nt, Human
acuggcucacccagu

SEQ ID NO: 3481108 - RNA, 14 nt, Human
acuggcucuccaag

SEQ ID NO: 3481109 - RNA, 16 nt, Human
acuggcucuccaagug

SEQ ID NO: 3481110 - RNA, 20 nt, Human
acuggcucuccaagugccag

SEQ ID NO: 3481111 - RNA, 22 nt, Human
acuggcucuccaagugccagag

SEQ ID NO: 3481112 - RNA, 16 nt, Human
acuggcucucuccagg

SEQ ID NO: 3481113 - RNA, 17 nt, Human
acuggcucucuccagga

SEQ ID NO: 3481114 - RNA, 19 nt, Human
acuggcugccagcuauuuu

SEQ ID NO: 3481115 - RNA, 17 nt, Human
acuggcugccuccacuc

SEQ ID NO: 3481116 - RNA, 21 nt, Human
acuggcugccuccacucccac

SEQ ID NO: 3481117 - RNA, 16 nt, Human
acuggcugugggcucc

SEQ ID NO: 3481118 - RNA, 19 nt, Human
acuggcugugggcucccuu

SEQ ID NO: 3481119 - RNA, 20 nt, Human
acuggcugugggcucccuuc

SEQ ID NO: 3481120 - RNA, 16 nt, Human
acuggcugugugaccu

SEQ ID NO: 3481121 - RNA, 21 nt, Human
acuggcugugugaccuuaggc

SEQ ID NO: 3481122 - RNA, 13 nt, Human
acuggcuucagca

SEQ ID NO: 3481123 - RNA, 23 nt, Human
acuggcuugaauuggugacauuu

SEQ ID NO: 3481124 - RNA, 20 nt, Human
acuggcuuuuauuaaugcac

SEQ ID NO: 3481125 - RNA, 18 nt, Human
acugggacaggggagaac

SEQ ID NO: 3481126 - RNA, 23 nt, Human
acugggaccaacccuggggaagg

SEQ ID NO: 3481127 - RNA, 16 nt, Human
acugggagaaaugaaa

SEQ ID NO: 3481128 - RNA, 19 nt, Human
acugggagaggugccagca

SEQ ID NO: 3481129 - RNA, 18 nt, Human
acugggagcccccagccu

SEQ ID NO: 3481130 - RNA, 19 nt, Human
acugggagcccccagccug

SEQ ID NO: 3481131 - RNA, 20 nt, Human
acugggagcccccagccugu

SEQ ID NO: 3481132 - RNA, 12 nt, Human
acugggaggcuc

SEQ ID NO: 3481133 - RNA, 17 nt, Human
acugggaggcuccccuu

SEQ ID NO: 3481134 - RNA, 22 nt, Human
acugggaugggaggagaggaca

SEQ ID NO: 3481135 - RNA, 18 nt, Human
acugggcaaugauggcaa

SEQ ID NO: 3481136 - RNA, 15 nt, Human
acugggccaggggag

SEQ ID NO: 3481137 - RNA, 12 nt, Human
acugggcccuga

SEQ ID NO: 3481138 - RNA, 14 nt, Human
acugggcccugagu

SEQ ID NO: 3481139 - RNA, 17 nt, Human
acugggccuguagcuca

SEQ ID NO: 3481140 - RNA, 16 nt, Human
acugggcucccgggcc

SEQ ID NO: 3481141 - RNA, 16 nt, Human
acugggcugaacacuc

SEQ ID NO: 3481142 - RNA, 17 nt, Human
acugggcugagggagcc

SEQ ID NO: 3481143 - RNA, 19 nt, Human
acuggggacuuggccucuc

SEQ ID NO: 3481144 - RNA, 17 nt, Human
acuggggaugugggagg

SEQ ID NO: 3481145 - RNA, 18 nt, Human
acuggggaugugggaggg

SEQ ID NO: 3481146 - RNA, 17 nt, Human
acuggggauuggguggg

SEQ ID NO: 3481147 - RNA, 16 nt, Human
acuggggcagacaaua

SEQ ID NO: 3481148 - RNA, 14 nt, Human
acuggggcaggggc

SEQ ID NO: 3481149 - RNA, 16 nt, Human
acuggggcaggggccg

SEQ ID NO: 3481150 - RNA, 16 nt, Human
acuggggccuccagaa

SEQ ID NO: 3481151 - RNA, 17 nt, Human
acuggggccuccagaac

SEQ ID NO: 3481152 - RNA, 18 nt, Human
acuggggcucagagccgg

SEQ ID NO: 3481153 - RNA, 18 nt, Human
acugggguccuggggccu

SEQ ID NO: 3481154 - RNA, 19 nt, Human
acuggggugccgccugccc

SEQ ID NO: 3481155 - RNA, 22 nt, Human
acuggggugggaggucuugcua

SEQ ID NO: 3481156 - RNA, 14 nt, Human
acuggguaaugaaa

SEQ ID NO: 3481157 - RNA, 17 nt, Human
acuggguacuuguggac

SEQ ID NO: 3481158 - RNA, 15 nt, Human
acuggguaggaaaga

SEQ ID NO: 3481159 - RNA, 21 nt, Human
acugggugcccaagcucagaa

SEQ ID NO: 3481160 - RNA, 18 nt, Human
acuggguggggugaggac

SEQ ID NO: 3481161 - RNA, 18 nt, Human
acugggugguggccuggu

SEQ ID NO: 3481162 - RNA, 16 nt, Human
acuggguucccaugcu

SEQ ID NO: 3481163 - RNA, 13 nt, Human
acuggguugacuu

SEQ ID NO: 3481164 - RNA, 20 nt, Human
acuggguugacuuucaggua

SEQ ID NO: 3481165 - RNA, 15 nt, Human
acuggguugcgggac

SEQ ID NO: 3481166 - RNA, 17 nt, Human
acugguacuuagaguuu

SEQ ID NO: 3481167 - RNA, 23 nt, Human
acugguacuuagaguuucuguuu

SEQ ID NO: 3481168 - RNA, 15 nt, Human
acugguaggaccaag

SEQ ID NO: 3481169 - RNA, 18 nt, Human
acugguauguaaaagaaa

SEQ ID NO: 3481170 - RNA, 16 nt, Human
acugguauucuguucu

SEQ ID NO: 3481171 - RNA, 14 nt, Human
acugguauuuuauc

SEQ ID NO: 3481172 - RNA, 21 nt, Human
acugguccaaaagauugcuga

SEQ ID NO: 3481173 - RNA, 15 nt, Human
acugguccugugugc

SEQ ID NO: 3481174 - RNA, 15 nt, Human
acuggucuguaggga

SEQ ID NO: 3481175 - RNA, 16 nt, Human
acuggugacugauucu

SEQ ID NO: 3481176 - RNA, 15 nt, Human
acuggugauauaucu

SEQ ID NO: 3481177 - RNA, 23 nt, Human
acuggugcuauaggcuggagaag

SEQ ID NO: 3481178 - RNA, 12 nt, Human
acugguggcccg

SEQ ID NO: 3481179 - RNA, 14 nt, Human
acuggugugaccug

SEQ ID NO: 3481180 - RNA, 17 nt, Human
acuggugugaccugagg

SEQ ID NO: 3481181 - RNA, 19 nt, Human
acugguguuugaaaguagg

SEQ ID NO: 3481182 - RNA, 18 nt, Human
acugguuaucacaccauc

SEQ ID NO: 3481183 - RNA, 17 nt, Human
acugguucucaaugaaa

SEQ ID NO: 3481184 - RNA, 18 nt, Human
acugguucucaaugaaaa

SEQ ID NO: 3481185 - RNA, 18 nt, Human
acugguugcauggaaauc

SEQ ID NO: 3481186 - RNA, 18 nt, Human
acugguuuacaggcccug

SEQ ID NO: 3481187 - RNA, 17 nt, Human
acugguuugaagaaugu

SEQ ID NO: 3481188 - RNA, 20 nt, Human
acugguuugaagaauguuaa

SEQ ID NO: 3481189 - RNA, 14 nt, Human
acugguuuuaaaua

SEQ ID NO: 3481190 - RNA, 13 nt, Human
acugguuuucugc

SEQ ID NO: 3481191 - RNA, 17 nt, Human
acuguaaaauaauaacu

SEQ ID NO: 3481192 - RNA, 17 nt, Human
acuguaaaauacuucuu

SEQ ID NO: 3481193 - RNA, 16 nt, Human
acuguaaaaugaaauu

SEQ ID NO: 3481194 - RNA, 24 nt, Human
acuguaaaaugcaaaaaaucuuaa

SEQ ID NO: 3481195 - RNA, 21 nt, Human
acuguaaaaugugggauuaug

SEQ ID NO: 3481196 - RNA, 17 nt, Human
acuguaaaccaauuuuu

SEQ ID NO: 3481197 - RNA, 17 nt, Human
acuguaaacuucugcaa

SEQ ID NO: 3481198 - RNA, 15 nt, Human
acuguaaagaaagag

SEQ ID NO: 3481199 - RNA, 22 nt, Human
acuguaaagaaagagagaaaau

SEQ ID NO: 3481200 - RNA, 23 nt, Human
acuguaaagaaagagagaaaaua

SEQ ID NO: 3481201 - RNA, 16 nt, Human
acuguaaauaugaauc

SEQ ID NO: 3481202 - RNA, 17 nt, Human
acuguaaauaugaaucu

SEQ ID NO: 3481203 - RNA, 15 nt, Human
acuguaacauucagg

SEQ ID NO: 3481204 - RNA, 20 nt, Human
acuguaacuuccaaauaaau

SEQ ID NO: 3481205 - RNA, 13 nt, Human
acuguaagaaaau

SEQ ID NO: 3481206 - RNA, 19 nt, Human
acuguaagaaaauaucacu

SEQ ID NO: 3481207 - RNA, 14 nt, Human
acuguaagaauaau

SEQ ID NO: 3481208 - RNA, 15 nt, Human
acuguaagaauaauu

SEQ ID NO: 3481209 - RNA, 13 nt, Human
acuguaagggauu

SEQ ID NO: 3481210 - RNA, 22 nt, Human
acuguaaugaaccgcugaauau

SEQ ID NO: 3481211 - RNA, 12 nt, Human
acuguaauuuag

SEQ ID NO: 3481212 - RNA, 19 nt, Human
acuguacaaaaaaaucuuc

SEQ ID NO: 3481213 - RNA, 14 nt, Human
acuguacacacuuu

SEQ ID NO: 3481214 - RNA, 22 nt, Human
acuguacagauugcugcuucug

SEQ ID NO: 3481215 - RNA, 13 nt, Human
acuguacagcugg

SEQ ID NO: 3481216 - RNA, 12 nt, Human
acuguacagggg

SEQ ID NO: 3481217 - RNA, 17 nt, Human
acuguacagugucuuuu

SEQ ID NO: 3481218 - RNA, 21 nt, Human
acuguacagugucuuuuuuug

SEQ ID NO: 3481219 - RNA, 13 nt, Human
acuguacaugaaa

SEQ ID NO: 3481220 - RNA, 14 nt, Human
acuguacaugaaaa

SEQ ID NO: 3481221 - RNA, 19 nt, Human
acuguacaugaaaacacau

SEQ ID NO: 3481222 - RNA, 21 nt, Human
acuguacaugggacuaugcuu

SEQ ID NO: 3481223 - RNA, 21 nt, Human
acuguaccaugugcuacaggg

SEQ ID NO: 3481224 - RNA, 14 nt, Human
acuguacuccuccc

SEQ ID NO: 3481225 - RNA, 17 nt, Human
acuguacugacuugagg

SEQ ID NO: 3481226 - RNA, 15 nt, Human
acuguacugggccau

SEQ ID NO: 3481227 - RNA, 23 nt, Human
acuguagaaaagggaacugaaca

SEQ ID NO: 3481228 - RNA, 20 nt, Human
acuguagauauguauucuuu

SEQ ID NO: 3481229 - RNA, 15 nt, Human
acuguagaugaugua

SEQ ID NO: 3481230 - RNA, 21 nt, Human
acuguagauugcuucuguagu

SEQ ID NO: 3481231 - RNA, 22 nt, Human
acuguagauugcuucuguagua

SEQ ID NO: 3481232 - RNA, 17 nt, Human
acuguagccuggauauu

SEQ ID NO: 3481233 - RNA, 20 nt, Human
acuguaggaagaguagcauu

SEQ ID NO: 3481234 - RNA, 13 nt, Human
acuguagggaggg

SEQ ID NO: 3481235 - RNA, 16 nt, Human
acuguaguaaauaaug

SEQ ID NO: 3481236 - RNA, 13 nt, Human
agaaacaugacac

SEQ ID NO: 3481237 - RNA, 14 nt, Human
agaaacaugguuuu

SEQ ID NO: 3481238 - RNA, 14 nt, Human
agaaacauuggaag

SEQ ID NO: 3481239 - RNA, 16 nt, Human
agaaacauuggaagca

SEQ ID NO: 3481240 - RNA, 15 nt, Human
agaaacauuugguaa

SEQ ID NO: 3481241 - RNA, 18 nt, Human
agaaaccacuucugguca

SEQ ID NO: 3481242 - RNA, 13 nt, Human
agaaaccagcuuc

SEQ ID NO: 3481243 - RNA, 19 nt, Human
agaaaccaggaguaaaaga

SEQ ID NO: 3481244 - RNA, 21 nt, Human
agaaaccaguuaugugaauga

SEQ ID NO: 3481245 - RNA, 15 nt, Human
agaaacccaagcucc

SEQ ID NO: 3481246 - RNA, 19 nt, Human
agaaacccaagcuccuccu

SEQ ID NO: 3481247 - RNA, 18 nt, Human
agaaacccgacagaggga

SEQ ID NO: 3481248 - RNA, 21 nt, Human
agaaacccgacagagggaaga

SEQ ID NO: 3481249 - RNA, 21 nt, Human
agaaacccucauuguguuucu

SEQ ID NO: 3481250 - RNA, 13 nt, Human
agaaacccugcac

SEQ ID NO: 3481251 - RNA, 16 nt, Human
agaaaccguccucuuu

SEQ ID NO: 3481252 - RNA, 23 nt, Human
agaaaccuacugcccaggcacug

SEQ ID NO: 3481253 - RNA, 14 nt, Human
agaaaccuguaucu

SEQ ID NO: 3481254 - RNA, 17 nt, Human
agaaaccuguaucuuuc

SEQ ID NO: 3481255 - RNA, 19 nt, Human
agaaacgcaacaagaaacu

SEQ ID NO: 3481256 - RNA, 15 nt, Human
agaaacgucuucuaa

SEQ ID NO: 3481257 - RNA, 19 nt, Human
agaaacguuuggaacaauc

SEQ ID NO: 3481258 - RNA, 19 nt, Human
agaaacucuauggucuuau

SEQ ID NO: 3481259 - RNA, 20 nt, Human
agaaacugacaugcccuccc

SEQ ID NO: 3481260 - RNA, 21 nt, Human
agaaacugacaugcccucccu

SEQ ID NO: 3481261 - RNA, 22 nt, Human
agaaacugacaugcccucccuu

SEQ ID NO: 3481262 - RNA, 18 nt, Human
agaaacugaggaauuuuc

SEQ ID NO: 3481263 - RNA, 15 nt, Human
agaaacuggaacucu

SEQ ID NO: 3481264 - RNA, 17 nt, Human
agaaacuggcaaagcag

SEQ ID NO: 3481265 - RNA, 17 nt, Human
agaaacugucuagcacu

SEQ ID NO: 3481266 - RNA, 23 nt, Human
agaaacugucuagcacuuccuug

SEQ ID NO: 3481267 - RNA, 18 nt, Human
agaaacuuaaauguuauu

SEQ ID NO: 3481268 - RNA, 13 nt, Human
agaaacuugugaa

SEQ ID NO: 3481269 - RNA, 23 nt, Human
agaaacuugugaaguggaaaugu

SEQ ID NO: 3481270 - RNA, 13 nt, Human
agaaacuuguucu

SEQ ID NO: 3481271 - RNA, 16 nt, Human
agaaacuuuauacauu

SEQ ID NO: 3481272 - RNA, 22 nt, Human
agaaacuuuauacauuaguaaa

SEQ ID NO: 3481273 - RNA, 15 nt, Human
agaaacuuucuuucu

SEQ ID NO: 3481274 - RNA, 17 nt, Human
agaaacuuuuguaaaga

SEQ ID NO: 3481275 - RNA, 15 nt, Human
agaaacuuuuuuauu

SEQ ID NO: 3481276 - RNA, 19 nt, Human
agaaacuuuuuuauuuaaa

SEQ ID NO: 3481277 - RNA, 12 nt, Human
agaaagaaagaa

SEQ ID NO: 3481278 - RNA, 12 nt, Human
agaaagaagccc

SEQ ID NO: 3481279 - RNA, 22 nt, Human
agaaagacuaucuaaauguuga

SEQ ID NO: 3481280 - RNA, 18 nt, Human
agaaagacuauucaaaca

SEQ ID NO: 3481281 - RNA, 19 nt, Human
agaaagacuauucaaacag

SEQ ID NO: 3481282 - RNA, 17 nt, Human
agaaagagaaacaguug

SEQ ID NO: 3481283 - RNA, 13 nt, Human
agaaagagagaaa

SEQ ID NO: 3481284 - RNA, 23 nt, Human
agaaagagagagaauucuuucaa

SEQ ID NO: 3481285 - RNA, 11 nt, Human
agaaagagagc

SEQ ID NO: 3481286 - RNA, 13 nt, Human
agaaagagcacuu

SEQ ID NO: 3481287 - RNA, 19 nt, Human
agaaagaggugaccccagg

SEQ ID NO: 3481288 - RNA, 17 nt, Human
agaaagaucauugaaau

SEQ ID NO: 3481289 - RNA, 12 nt, Human
agaaagauguau

SEQ ID NO: 3481290 - RNA, 15 nt, Human
agaaagcaaaauuau

SEQ ID NO: 3481291 - RNA, 14 nt, Human
agaaagcaacuuau

SEQ ID NO: 3481292 - RNA, 15 nt, Human
agaaagcaagaugua

SEQ ID NO: 3481293 - RNA, 20 nt, Human
agaaagcagaacagugauua

SEQ ID NO: 3481294 - RNA, 15 nt, Human
agaaagcagaggcug

SEQ ID NO: 3481295 - RNA, 16 nt, Human
agaaagcagaggcugg

SEQ ID NO: 3481296 - RNA, 23 nt, Human
agaaagcagaggcuggccucaga

SEQ ID NO: 3481297 - RNA, 21 nt, Human
agaaagcagauaccucacccu

SEQ ID NO: 3481298 - RNA, 17 nt, Human
agaaagcaucccucacc

SEQ ID NO: 3481299 - RNA, 16 nt, Human
agaaagcauuacauuu

SEQ ID NO: 3481300 - RNA, 18 nt, Human
agaaagcauuugaaugca

SEQ ID NO: 3481301 - RNA, 20 nt, Human
agaaagcauuugaaugcauu

SEQ ID NO: 3481302 - RNA, 20 nt, Human
agaaagccagucuuaacauu

SEQ ID NO: 3481303 - RNA, 22 nt, Human
agaaagcccuuaggaagaauuu

SEQ ID NO: 3481304 - RNA, 15 nt, Human
agaaagccucagaga

SEQ ID NO: 3481305 - RNA, 20 nt, Human
agaaagccugggugacauuu

SEQ ID NO: 3481306 - RNA, 22 nt, Human
agaaagccuuucauuuugcuuu

SEQ ID NO: 3481307 - RNA, 11 nt, Human
agaaagcucaa

SEQ ID NO: 3481308 - RNA, 14 nt, Human
agaaagcugacauu

SEQ ID NO: 3481309 - RNA, 16 nt, Human
agaaagcugacuuggc

SEQ ID NO: 3481310 - RNA, 20 nt, Human
agaaagcugacuuggcuggu

SEQ ID NO: 3481311 - RNA, 19 nt, Human
agaaagcugguaaacuauu

SEQ ID NO: 3481312 - RNA, 16 nt, Human
agaaagcugugaacag

SEQ ID NO: 3481313 - RNA, 16 nt, Human
agaaaggaaaaccuga

SEQ ID NO: 3481314 - RNA, 14 nt, Human
agaaaggaaaccuu

SEQ ID NO: 3481315 - RNA, 15 nt, Human
agaaaggaagcauug

SEQ ID NO: 3481316 - RNA, 17 nt, Human
agaaaggaagcauugua

SEQ ID NO: 3481317 - RNA, 21 nt, Human
agaaaggaagcauuguaaaau

SEQ ID NO: 3481318 - RNA, 16 nt, Human
agaaaggaccugcaaa

SEQ ID NO: 3481319 - RNA, 19 nt, Human
agaaaggacuccugaaaaa

SEQ ID NO: 3481320 - RNA, 11 nt, Human
agaaaggagac

SEQ ID NO: 3481321 - RNA, 18 nt, Human
agaaaggagagucuugca

SEQ ID NO: 3481322 - RNA, 17 nt, Human
agaaaggagucugcaca

SEQ ID NO: 3481323 - RNA, 19 nt, Human
agaaaggauauuuaagaaa

SEQ ID NO: 3481324 - RNA, 15 nt, Human
agaaaggccugcaca

SEQ ID NO: 3481325 - RNA, 15 nt, Human
agaaaggccuuuaaa

SEQ ID NO: 3481326 - RNA, 15 nt, Human
agaaaggcugcugua

SEQ ID NO: 3481327 - RNA, 15 nt, Human
agaaaggcuguuaaa

SEQ ID NO: 3481328 - RNA, 16 nt, Human
agaaaggcuguuaaau

SEQ ID NO: 3481329 - RNA, 21 nt, Human
agaaaggcuguuaaauacagg

SEQ ID NO: 3481330 - RNA, 14 nt, Human
agaaagggagggcu

SEQ ID NO: 3481331 - RNA, 16 nt, Human
agaaagggagggcucu

SEQ ID NO: 3481332 - RNA, 18 nt, Human
agaaagggagggcucuga

SEQ ID NO: 3481333 - RNA, 19 nt, Human
agaaagggagggcucugag

SEQ ID NO: 3481334 - RNA, 21 nt, Human
agaaagggagggcucugaggc

SEQ ID NO: 3481335 - RNA, 20 nt, Human
agaaagggcaacaauaaaau

SEQ ID NO: 3481336 - RNA, 15 nt, Human
agaaaggggagccca

SEQ ID NO: 3481337 - RNA, 17 nt, Human
agaaaggggcaggagcu

SEQ ID NO: 3481338 - RNA, 21 nt, Human
agaaaggggcaggagcucaga

SEQ ID NO: 3481339 - RNA, 22 nt, Human
agaaaggggcaggagcucagau

SEQ ID NO: 3481340 - RNA, 14 nt, Human
agaaaggguguuuu

SEQ ID NO: 3481341 - RNA, 22 nt, Human
agaaaggugaguuugagcugcc

SEQ ID NO: 3481342 - RNA, 23 nt, Human
agaaaggugaguuugagcugccu

SEQ ID NO: 3481343 - RNA, 19 nt, Human
agaaagguuuugagcaugg

SEQ ID NO: 3481344 - RNA, 15 nt, Human
agaaaguaauuucuu

SEQ ID NO: 3481345 - RNA, 17 nt, Human
agaaagucauuccuucu

SEQ ID NO: 3481346 - RNA, 21 nt, Human
agaaagucgaauuaauagcuu

SEQ ID NO: 3481347 - RNA, 19 nt, Human
agaaagucuuauuuauuca

SEQ ID NO: 3481348 - RNA, 22 nt, Human
agaaagucuuauuuauucauau

SEQ ID NO: 3481349 - RNA, 15 nt, Human
agaaagugccugaca

SEQ ID NO: 3481350 - RNA, 18 nt, Human
agaaagugccuuucagga

SEQ ID NO: 3481351 - RNA, 19 nt, Human
agaaagugggaggucagga

SEQ ID NO: 3481352 - RNA, 22 nt, Human
agaaagugggcuuaauggaguu

SEQ ID NO: 3481353 - RNA, 17 nt, Human
agaaaguggugcucagu

SEQ ID NO: 3481354 - RNA, 11 nt, Human
agaaaguguau

SEQ ID NO: 3481355 - RNA, 17 nt, Human
agaaagugugagcaaac

SEQ ID NO: 3481356 - RNA, 22 nt, Human
agaaagugugcuuuaugcugaa

SEQ ID NO: 3481357 - RNA, 16 nt, Human
agaaaguguucuguua

SEQ ID NO: 3481358 - RNA, 19 nt, Human
agaaaguguucuguuacaa

SEQ ID NO: 3481359 - RNA, 13 nt, Human
agaaaguuuagaa

SEQ ID NO: 3481360 - RNA, 18 nt, Human
agaaauaaaaggaagcca

SEQ ID NO: 3481361 - RNA, 23 nt, Human
agaaauaaaagugaaugaaagau

SEQ ID NO: 3481362 - RNA, 14 nt, Human
agaaauaaaccaaa

SEQ ID NO: 3481363 - RNA, 23 nt, Human
agaaauaaaccaaaggaaaaugu

SEQ ID NO: 3481364 - RNA, 16 nt, Human
agaaauaaaccuuaau

SEQ ID NO: 3481365 - RNA, 19 nt, Human
agaaauaaaguuggugaca

SEQ ID NO: 3481366 - RNA, 21 nt, Human
agaaauaaaguuggugacaga

SEQ ID NO: 3481367 - RNA, 18 nt, Human
agaaauaaaguuucuguu

SEQ ID NO: 3481368 - RNA, 21 nt, Human
agaaauaaaguuugcuuagaa

SEQ ID NO: 3481369 - RNA, 18 nt, Human
agaaauaaauagcuauau

SEQ ID NO: 3481370 - RNA, 13 nt, Human
agaaauaacagaa

SEQ ID NO: 3481371 - RNA, 21 nt, Human
agaaauaacagaagaaaauag

SEQ ID NO: 3481372 - RNA, 22 nt, Human
agaaauaacagaagaaaauaga

SEQ ID NO: 3481373 - RNA, 14 nt, Human
agaaauaauaugca

SEQ ID NO: 3481374 - RNA, 17 nt, Human
agaaauaaugcuacaau

SEQ ID NO: 3481375 - RNA, 19 nt, Human
agaaauaaugcuacaauuu

SEQ ID NO: 3481376 - RNA, 22 nt, Human
agaaauaaugcuacaauuuuaa

SEQ ID NO: 3481377 - RNA, 14 nt, Human
agaaauacaaaaau

SEQ ID NO: 3481378 - RNA, 19 nt, Human
agaaauacaauucuacauu

SEQ ID NO: 3481379 - RNA, 12 nt, Human
agaaauacaguc

SEQ ID NO: 3481380 - RNA, 23 nt, Human
agaaauaccaaaauuauuucaga

SEQ ID NO: 3481381 - RNA, 21 nt, Human
agaaauacuauaacauaugua

SEQ ID NO: 3481382 - RNA, 14 nt, Human
agaaauacuguaca

SEQ ID NO: 3481383 - RNA, 13 nt, Human
agaaauagaacaa

SEQ ID NO: 3481384 - RNA, 16 nt, Human
agaaauagaauuauaa

SEQ ID NO: 3481385 - RNA, 19 nt, Human
agaaauagcuuaugaaaag

SEQ ID NO: 3481386 - RNA, 15 nt, Human
agaaauaguucugug

SEQ ID NO: 3481387 - RNA, 16 nt, Human
agaaauauaacacauu

SEQ ID NO: 3481388 - RNA, 17 nt, Human
agaaauauaacacauuu

SEQ ID NO: 3481389 - RNA, 19 nt, Human
agaaauauaacacauuuuu

SEQ ID NO: 3481390 - RNA, 14 nt, Human
agaaauauaauuga

SEQ ID NO: 3481391 - RNA, 13 nt, Human
agaaauauauaua

SEQ ID NO: 3481392 - RNA, 20 nt, Human
agaaauaucugaaaauguau

SEQ ID NO: 3481393 - RNA, 13 nt, Human
agaaauaugauuu

SEQ ID NO: 3481394 - RNA, 22 nt, Human
agaaauaugauuuuauuugaca

SEQ ID NO: 3481395 - RNA, 17 nt, Human
agaaauauggaacuuac

SEQ ID NO: 3481396 - RNA, 20 nt, Human
agaaauauggaacuuacauu

SEQ ID NO: 3481397 - RNA, 17 nt, Human
agaaauauggacacuua

SEQ ID NO: 3481398 - RNA, 17 nt, Human
agaaauauguauucugu

SEQ ID NO: 3481399 - RNA, 13 nt, Human
agaaauaugugag

SEQ ID NO: 3481400 - RNA, 14 nt, Human
agaaauaugugaga

SEQ ID NO: 3481401 - RNA, 18 nt, Human
agaaauauuccaaauguc

SEQ ID NO: 3481402 - RNA, 17 nt, Human
agaaauauuuuaaaauc

SEQ ID NO: 3481403 - RNA, 17 nt, Human
agaaaucacagaaucau

SEQ ID NO: 3481404 - RNA, 18 nt, Human
agaaaucaguaauauuua

SEQ ID NO: 3481405 - RNA, 12 nt, Human
agaaaucauguu

SEQ ID NO: 3481406 - RNA, 23 nt, Human
agaaaucuaguauuucaugcugg

SEQ ID NO: 3481407 - RNA, 20 nt, Human
agaaaucuauagaaaguguu

SEQ ID NO: 3481408 - RNA, 22 nt, Human
agaaaucuauagaacugaauga

SEQ ID NO: 3481409 - RNA, 20 nt, Human
agaaaucucccaugugcaua

SEQ ID NO: 3481410 - RNA, 16 nt, Human
agaaaugaaaacagug

SEQ ID NO: 3481411 - RNA, 14 nt, Human
agaaaugaaauuuu

SEQ ID NO: 3481412 - RNA, 15 nt, Human
agaaaugaacauucc

SEQ ID NO: 3481413 - RNA, 19 nt, Human
agaaaugaauaauuuccca

SEQ ID NO: 3481414 - RNA, 19 nt, Human
agaaaugagaucaggcucu

SEQ ID NO: 3481415 - RNA, 23 nt, Human
agaaaugaugauguggaagaacu

SEQ ID NO: 3481416 - RNA, 18 nt, Human
agaaaugauguuggagaa

SEQ ID NO: 3481417 - RNA, 18 nt, Human
agaaaugcauauuguauu

SEQ ID NO: 3481418 - RNA, 22 nt, Human
agaaaugcauccauuccucagg

SEQ ID NO: 3481419 - RNA, 15 nt, Human
agaaaugcugccugc

SEQ ID NO: 3481420 - RNA, 15 nt, Human
agaaaugcugcuggc

SEQ ID NO: 3481421 - RNA, 16 nt, Human
agaaauggaaagcaga

SEQ ID NO: 3481422 - RNA, 20 nt, Human
agaaaugggacuuaacuccu

SEQ ID NO: 3481423 - RNA, 16 nt, Human
agaaauggggaauucu

SEQ ID NO: 3481424 - RNA, 21 nt, Human
agaaauggggaauucucuaau

SEQ ID NO: 3481425 - RNA, 15 nt, Human
agaaaugguuguauu

SEQ ID NO: 3481426 - RNA, 16 nt, Human
agaaaugguuguauua

SEQ ID NO: 3481427 - RNA, 13 nt, Human
agaaauguaaacu

SEQ ID NO: 3481428 - RNA, 15 nt, Human
agaaauguaaacugc

SEQ ID NO: 3481429 - RNA, 16 nt, Human
agaaauguaaacugcc

SEQ ID NO: 3481430 - RNA, 17 nt, Human
agaaauguaaacugcca

SEQ ID NO: 3481431 - RNA, 12 nt, Human
agaaauguaaug

SEQ ID NO: 3481432 - RNA, 14 nt, Human
agaaauguacagca

SEQ ID NO: 3481433 - RNA, 16 nt, Human
agaaauguacagcaag

SEQ ID NO: 3481434 - RNA, 15 nt, Human
agaaauguaguugau

SEQ ID NO: 3481435 - RNA, 16 nt, Human
agaaauguauaaacuu

SEQ ID NO: 3481436 - RNA, 19 nt, Human
agaaaugucccuuucuucu

SEQ ID NO: 3481437 - RNA, 15 nt, Human
agaaaugucuggaga

SEQ ID NO: 3481438 - RNA, 11 nt, Human
agaaauguguu

SEQ ID NO: 3481439 - RNA, 16 nt, Human
agaaauguuguucauu

SEQ ID NO: 3481440 - RNA, 19 nt, Human
agaaauuaccuguggauau

SEQ ID NO: 3481441 - RNA, 20 nt, Human
agaaauuaccuguggauauu

SEQ ID NO: 3481442 - RNA, 17 nt, Human
agaaauuagaaaccuua

SEQ ID NO: 3481443 - RNA, 17 nt, Human
agaaauuagcuguguga

SEQ ID NO: 3481444 - RNA, 21 nt, Human
agaaauuagggcucuaauuuc

SEQ ID NO: 3481445 - RNA, 12 nt, Human
agaaauuaugug

SEQ ID NO: 3481446 - RNA, 13 nt, Human
agaaauuaugugc

SEQ ID NO: 3481447 - RNA, 17 nt, Human
agaaauuauuuaauaaa

SEQ ID NO: 3481448 - RNA, 22 nt, Human
agaaauucaauuuggauuuaaa

SEQ ID NO: 3481449 - RNA, 14 nt, Human
agaaauucccugga

SEQ ID NO: 3481450 - RNA, 18 nt, Human
agaaauucccuggaccag

SEQ ID NO: 3481451 - RNA, 22 nt, Human
agaaauucccuggaccagaugc

SEQ ID NO: 3481452 - RNA, 16 nt, Human
agaaauuccuguagca

SEQ ID NO: 3481453 - RNA, 23 nt, Human
agaaauuccuguagcaucuucug

SEQ ID NO: 3481454 - RNA, 23 nt, Human
agaaauuccuugauucacaauga

SEQ ID NO: 3481455 - RNA, 18 nt, Human
agaaauucguguguuuuu

SEQ ID NO: 3481456 - RNA, 13 nt, Human
agaaauucuguua

SEQ ID NO: 3481457 - RNA, 15 nt, Human
agaaauucuguuaaa

SEQ ID NO: 3481458 - RNA, 19 nt, Human
agaaauucuguuaaaaucu

SEQ ID NO: 3481459 - RNA, 20 nt, Human
agaaauucuguuaaaaucua

SEQ ID NO: 3481460 - RNA, 16 nt, Human
agaaauucuguuuuua

SEQ ID NO: 3481461 - RNA, 19 nt, Human
agaaauucuguuuuuaaaa

SEQ ID NO: 3481462 - RNA, 18 nt, Human
agaaauucuuguuauggu

SEQ ID NO: 3481463 - RNA, 21 nt, Human
agaaauugaauacuuugaaug

SEQ ID NO: 3481464 - RNA, 22 nt, Human
agaaauugaauacuuugaaugu

SEQ ID NO: 3481465 - RNA, 20 nt, Human
agaaauugcauuuccugaca

SEQ ID NO: 3481466 - RNA, 19 nt, Human
agaaauuggaacagaaugu

SEQ ID NO: 3481467 - RNA, 22 nt, Human
agaaauugguaccuugcacaca

SEQ ID NO: 3481468 - RNA, 23 nt, Human
agaaauugguaccuugcacacau

SEQ ID NO: 3481469 - RNA, 16 nt, Human
agaaauuguauauugu

SEQ ID NO: 3481470 - RNA, 20 nt, Human
agaaauuuaaacuauaagca

SEQ ID NO: 3481471 - RNA, 14 nt, Human
agaaauuuacuaua

SEQ ID NO: 3481472 - RNA, 15 nt, Human
agaaauuuacuauau

SEQ ID NO: 3481473 - RNA, 19 nt, Human
agaaauuuacuauauauau

SEQ ID NO: 3481474 - RNA, 13 nt, Human
agaaauuuauuuc

SEQ ID NO: 3481475 - RNA, 16 nt, Human
agaaauuuccacucag

SEQ ID NO: 3481476 - RNA, 22 nt, Human
agaaauuuccacucaggucugu

SEQ ID NO: 3481477 - RNA, 16 nt, Human
agaaauuugauuucua

SEQ ID NO: 3481478 - RNA, 20 nt, Human
agaaauuugauuucuauuca

SEQ ID NO: 3481479 - RNA, 13 nt, Human
agaaauuuuguaa

SEQ ID NO: 3481480 - RNA, 14 nt, Human
agaaauuuuguaag

SEQ ID NO: 3481481 - RNA, 17 nt, Human
agaaauuuuguaagaag

SEQ ID NO: 3481482 - RNA, 21 nt, Human
agaaauuuuguaagaaggcaa

SEQ ID NO: 3481483 - RNA, 22 nt, Human
agaaauuuuguaagaaggcaau

SEQ ID NO: 3481484 - RNA, 22 nt, Human
agaaauuuuuauuuuucuaagg

SEQ ID NO: 3481485 - RNA, 21 nt, Human
agaaauuuuucagaugcuucu

SEQ ID NO: 3481486 - RNA, 19 nt, Human
agaacaaaaaaaucugcag

SEQ ID NO: 3481487 - RNA, 14 nt, Human
agaacaaagcuguu

SEQ ID NO: 3481488 - RNA, 18 nt, Human
agaacaaagcuguuaaac

SEQ ID NO: 3481489 - RNA, 21 nt, Human
agaacaaagcuguuaaacugu

SEQ ID NO: 3481490 - RNA, 20 nt, Human
agaacaaagugagacagucc

SEQ ID NO: 3481491 - RNA, 18 nt, Human
agaacaaauauucagaau

SEQ ID NO: 3481492 - RNA, 17 nt, Human
agaacaaccaaaaucuu

SEQ ID NO: 3481493 - RNA, 22 nt, Human
agaacaagaaagggccaggaga

SEQ ID NO: 3481494 - RNA, 19 nt, Human
agaacaauauugacuuugu

SEQ ID NO: 3481495 - RNA, 12 nt, Human
agaacacacaca

SEQ ID NO: 3481496 - RNA, 15 nt, Human
agaacacacacacuu

SEQ ID NO: 3481497 - RNA, 19 nt, Human
agaacacagaaagccuauc

SEQ ID NO: 3481498 - RNA, 21 nt, Human
agaacacagccgauucaccug

SEQ ID NO: 3481499 - RNA, 14 nt, Human
agaacacuaauuca

SEQ ID NO: 3481500 - RNA, 16 nt, Human
agaacacuauuuucag

SEQ ID NO: 3481501 - RNA, 18 nt, Human
agaacacuauuuucagaa

SEQ ID NO: 3481502 - RNA, 19 nt, Human
agaacacuauuuucagaau

SEQ ID NO: 3481503 - RNA, 21 nt, Human
agaacacuauuuucagaaucu

SEQ ID NO: 3481504 - RNA, 23 nt, Human
agaacacuauuuucagaaucuga

SEQ ID NO: 3481505 - RNA, 11 nt, Human
agaacagaaaa

SEQ ID NO: 3481506 - RNA, 13 nt, Human
agaacagaaaaca

SEQ ID NO: 3481507 - RNA, 14 nt, Human
agaacagaaaacaa

SEQ ID NO: 3481508 - RNA, 20 nt, Human
agaacagaucuccaaagcuu

SEQ ID NO: 3481509 - RNA, 13 nt, Human
agaacagcaggcc

SEQ ID NO: 3481510 - RNA, 16 nt, Human
agaacagcuucagguu

SEQ ID NO: 3481511 - RNA, 16 nt, Human
agaacaggcaagugaa

SEQ ID NO: 3481512 - RNA, 11 nt, Human
agaacaggguc

SEQ ID NO: 3481513 - RNA, 17 nt, Human
agaacaguaucuuugca

SEQ ID NO: 3481514 - RNA, 21 nt, Human
agaacagugcuugccacagag

SEQ ID NO: 3481515 - RNA, 16 nt, Human
agaacauaaagcaaau

SEQ ID NO: 3481516 - RNA, 20 nt, Human
agaacauaaagguaaaacaa

SEQ ID NO: 3481517 - RNA, 16 nt, Human
agaacaucccugccag

SEQ ID NO: 3481518 - RNA, 18 nt, Human
agaacaucuguccuguga

SEQ ID NO: 3481519 - RNA, 14 nt, Human
agaacaugcaguuu

SEQ ID NO: 3481520 - RNA, 16 nt, Human
agaacaugcaguuuga

SEQ ID NO: 3481521 - RNA, 21 nt, Human
agaacaugcaguuugaaauuc

SEQ ID NO: 3481522 - RNA, 14 nt, Human
agaacauggacuug

SEQ ID NO: 3481523 - RNA, 18 nt, Human
agaacauggccuaagggc

SEQ ID NO: 3481524 - RNA, 18 nt, Human
agaacauguagaaaacaa

SEQ ID NO: 3481525 - RNA, 21 nt, Human
agaacauguugguauuuaucu

SEQ ID NO: 3481526 - RNA, 19 nt, Human
agaacauugauugcugugu

SEQ ID NO: 3481527 - RNA, 18 nt, Human
agaaccaaaaagaggcua

SEQ ID NO: 3481528 - RNA, 17 nt, Human
agaaccaaagcucaaau

SEQ ID NO: 3481529 - RNA, 13 nt, Human
agaaccaaaucug

SEQ ID NO: 3481530 - RNA, 18 nt, Human
agaaccaaaucuggaagc

SEQ ID NO: 3481531 - RNA, 16 nt, Human
agaaccaagaagggcu

SEQ ID NO: 3481532 - RNA, 13 nt, Human
agaaccacuauga

SEQ ID NO: 3481533 - RNA, 14 nt, Human
agaaccagccauau

SEQ ID NO: 3481534 - RNA, 17 nt, Human
agaaccagucuuucaac

SEQ ID NO: 3481535 - RNA, 11 nt, Human
acuuggagcca

SEQ ID NO: 3481536 - RNA, 17 nt, Human
acuuggaguggagagga

SEQ ID NO: 3481537 - RNA, 18 nt, Human
acuuggauacuuggauuu

SEQ ID NO: 3481538 - RNA, 17 nt, Human
acuuggauucuuuccau

SEQ ID NO: 3481539 - RNA, 22 nt, Human
acuuggauucuuuccauuugca

SEQ ID NO: 3481540 - RNA, 15 nt, Human
acuuggcagccuugu

SEQ ID NO: 3481541 - RNA, 17 nt, Human
acuuggcagccuuguga

SEQ ID NO: 3481542 - RNA, 15 nt, Human
acuuggccucucucu

SEQ ID NO: 3481543 - RNA, 14 nt, Human
acuuggccucugga

SEQ ID NO: 3481544 - RNA, 19 nt, Human
acuuggcucgaaucucugu

SEQ ID NO: 3481545 - RNA, 14 nt, Human
acuuggcucugagg

SEQ ID NO: 3481546 - RNA, 14 nt, Human
acuuggcuggugug

SEQ ID NO: 3481547 - RNA, 19 nt, Human
acuuggcuggugugguaca

SEQ ID NO: 3481548 - RNA, 22 nt, Human
acuuggcuggugugguacagag

SEQ ID NO: 3481549 - RNA, 11 nt, Human
acuuggcuuuc

SEQ ID NO: 3481550 - RNA, 13 nt, Human
acuugggaauaua

SEQ ID NO: 3481551 - RNA, 13 nt, Human
acuugggacauug

SEQ ID NO: 3481552 - RNA, 22 nt, Human
acuugggaggcugagaugggag

SEQ ID NO: 3481553 - RNA, 22 nt, Human
acuugggaggcugaggcaggag

SEQ ID NO: 3481554 - RNA, 22 nt, Human
acuugggcacccccagccuggg

SEQ ID NO: 3481555 - RNA, 14 nt, Human
acuugggccacugu

SEQ ID NO: 3481556 - RNA, 15 nt, Human
acuugggccacugug

SEQ ID NO: 3481557 - RNA, 18 nt, Human
acuuggggagauuugcca

SEQ ID NO: 3481558 - RNA, 23 nt, Human
acuuggggaguuaagaccuggca

SEQ ID NO: 3481559 - RNA, 17 nt, Human
acuuggggcacagggag

SEQ ID NO: 3481560 - RNA, 22 nt, Human
acuugggggaacgaugugucug

SEQ ID NO: 3481561 - RNA, 17 nt, Human
acuugggggcucagcaa

SEQ ID NO: 3481562 - RNA, 22 nt, Human
acuugggggcucagcaaggcca

SEQ ID NO: 3481563 - RNA, 20 nt, Human
acuuggggguucaggcccgg

SEQ ID NO: 3481564 - RNA, 21 nt, Human
acuuggguccaggccuacucc

SEQ ID NO: 3481565 - RNA, 15 nt, Human
acuugggucuucccu

SEQ ID NO: 3481566 - RNA, 20 nt, Human
acuuggucacagccaggcgc

SEQ ID NO: 3481567 - RNA, 14 nt, Human
acuuggucaccagc

SEQ ID NO: 3481568 - RNA, 20 nt, Human
acuugguccaacugcaacuc

SEQ ID NO: 3481569 - RNA, 14 nt, Human
acuuggucugugag

SEQ ID NO: 3481570 - RNA, 22 nt, Human
acuuggugcuuauugauauucu

SEQ ID NO: 3481571 - RNA, 22 nt, Human
acuugguguccuuucccuccac

SEQ ID NO: 3481572 - RNA, 13 nt, Human
acuugguuauaca

SEQ ID NO: 3481573 - RNA, 13 nt, Human
acuugguuuuaug

SEQ ID NO: 3481574 - RNA, 14 nt, Human
acuugguuuugcua

SEQ ID NO: 3481575 - RNA, 19 nt, Human
acuuguaaaggaauuuaaa

SEQ ID NO: 3481576 - RNA, 13 nt, Human
acuuguaaauaca

SEQ ID NO: 3481577 - RNA, 18 nt, Human
acuuguaaauauaaagac

SEQ ID NO: 3481578 - RNA, 19 nt, Human
acuuguaaauauaaagacg

SEQ ID NO: 3481579 - RNA, 20 nt, Human
acuuguaaaugugguaaaga

SEQ ID NO: 3481580 - RNA, 14 nt, Human
acuuguacaaaaua

SEQ ID NO: 3481581 - RNA, 20 nt, Human
acuuguacaaaauaaacaaa

SEQ ID NO: 3481582 - RNA, 12 nt, Human
acuuguagauuu

SEQ ID NO: 3481583 - RNA, 13 nt, Human
acuuguagauuug

SEQ ID NO: 3481584 - RNA, 14 nt, Human
acuuguagauuuga

SEQ ID NO: 3481585 - RNA, 16 nt, Human
acuuguagauuugauu

SEQ ID NO: 3481586 - RNA, 17 nt, Human
acuuguagauuugauuu

SEQ ID NO: 3481587 - RNA, 18 nt, Human
acuuguagauuugauuuu

SEQ ID NO: 3481588 - RNA, 11 nt, Human
acuuguagcug

SEQ ID NO: 3481589 - RNA, 17 nt, Human
acuuguagggaugccuu

SEQ ID NO: 3481590 - RNA, 15 nt, Human
acuuguauaaaugua

SEQ ID NO: 3481591 - RNA, 21 nt, Human
acuuguauaaauguauauaca

SEQ ID NO: 3481592 - RNA, 20 nt, Human
acuuguauauucuauuuuac

SEQ ID NO: 3481593 - RNA, 20 nt, Human
acuuguauccaggccuggga

SEQ ID NO: 3481594 - RNA, 14 nt, Human
acuugucaaagaag

SEQ ID NO: 3481595 - RNA, 16 nt, Human
acuugucaaagaaggu

SEQ ID NO: 3481596 - RNA, 18 nt, Human
acuugucaagccugugca

SEQ ID NO: 3481597 - RNA, 15 nt, Human
acuugucaauaaaau

SEQ ID NO: 3481598 - RNA, 16 nt, Human
acuugucaauauuuaa

SEQ ID NO: 3481599 - RNA, 17 nt, Human
acuugucaauauuuaaa

SEQ ID NO: 3481600 - RNA, 20 nt, Human
acuugucaauauuuaaacau

SEQ ID NO: 3481601 - RNA, 20 nt, Human
acuugucacugacacaaagg

SEQ ID NO: 3481602 - RNA, 22 nt, Human
acuugucacugacacaaaggaa

SEQ ID NO: 3481603 - RNA, 15 nt, Human
acuugucacuugcau

SEQ ID NO: 3481604 - RNA, 18 nt, Human
acuugucacuugcauguc

SEQ ID NO: 3481605 - RNA, 23 nt, Human
acuugucccgggacaccuaggcu

SEQ ID NO: 3481606 - RNA, 23 nt, Human
acuuguccuuuuguaccauggug

SEQ ID NO: 3481607 - RNA, 16 nt, Human
acuugucucauuuuaa

SEQ ID NO: 3481608 - RNA, 20 nt, Human
acuugucucauuuuaaugua

SEQ ID NO: 3481609 - RNA, 12 nt, Human
acuugucuguuu

SEQ ID NO: 3481610 - RNA, 13 nt, Human
acuugucuguuuu

SEQ ID NO: 3481611 - RNA, 19 nt, Human
acuugucuuaaauaaaaga

SEQ ID NO: 3481612 - RNA, 23 nt, Human
acuugucuuaaauaaaagaaaug

SEQ ID NO: 3481613 - RNA, 16 nt, Human
acuugucuuucugggg

SEQ ID NO: 3481614 - RNA, 14 nt, Human
acuugucuuuggac

SEQ ID NO: 3481615 - RNA, 18 nt, Human
acuugucuuuggacccug

SEQ ID NO: 3481616 - RNA, 16 nt, Human
acuugucuuuuucugg

SEQ ID NO: 3481617 - RNA, 17 nt, Human
acuugucuuuuucugga

SEQ ID NO: 3481618 - RNA, 19 nt, Human
acuugugaaacacagcugu

SEQ ID NO: 3481619 - RNA, 11 nt, Human
acuugugaaug

SEQ ID NO: 3481620 - RNA, 13 nt, Human
acuugugaaugcu

SEQ ID NO: 3481621 - RNA, 18 nt, Human
acuugugaaugcuucuca

SEQ ID NO: 3481622 - RNA, 17 nt, Human
acuugugauuauuuauu

SEQ ID NO: 3481623 - RNA, 18 nt, Human
acuugugccaacacucaa

SEQ ID NO: 3481624 - RNA, 21 nt, Human
acuugugcuuucaguuagccu

SEQ ID NO: 3481625 - RNA, 15 nt, Human
acuuguggacacagc

SEQ ID NO: 3481626 - RNA, 20 nt, Human
acuuguggacuaaaagauau

SEQ ID NO: 3481627 - RNA, 16 nt, Human
acuugugguugaauua

SEQ ID NO: 3481628 - RNA, 13 nt, Human
acuuguguaaaua

SEQ ID NO: 3481629 - RNA, 23 nt, Human
acuuguguaaauacaauuuuguu

SEQ ID NO: 3481630 - RNA, 21 nt, Human
acuugugucucugugcuuuua

SEQ ID NO: 3481631 - RNA, 20 nt, Human
acuugugugugggcugugag

SEQ ID NO: 3481632 - RNA, 21 nt, Human
acuugugugugggcugugagu

SEQ ID NO: 3481633 - RNA, 17 nt, Human
acuuguguuuuaaaaua

SEQ ID NO: 3481634 - RNA, 13 nt, Human
acuuguuauugug

SEQ ID NO: 3481635 - RNA, 20 nt, Human
acuuguuauugugaaugauu

SEQ ID NO: 3481636 - RNA, 17 nt, Human
acuuguuccagcucuuu

SEQ ID NO: 3481637 - RNA, 12 nt, Human
acuuguucuucc

SEQ ID NO: 3481638 - RNA, 13 nt, Human
acuuguucuucca

SEQ ID NO: 3481639 - RNA, 15 nt, Human
acuuguugccuauaa

SEQ ID NO: 3481640 - RNA, 22 nt, Human
acuuguuggcguaggcuacaga

SEQ ID NO: 3481641 - RNA, 21 nt, Human
acuuguuguuuuacuaaagaa

SEQ ID NO: 3481642 - RNA, 22 nt, Human
acuuguuuuauuuaaccucuaa

SEQ ID NO: 3481643 - RNA, 18 nt, Human
acuuguuuuggauggcuu

SEQ ID NO: 3481644 - RNA, 16 nt, Human
acuuguuuuuguaaag

SEQ ID NO: 3481645 - RNA, 21 nt, Human
acuuguuuuuguaaagaaaaa

SEQ ID NO: 3481646 - RNA, 16 nt, Human
acuuuaaaaauuuacu

SEQ ID NO: 3481647 - RNA, 12 nt, Human
acuuuaaaagca

SEQ ID NO: 3481648 - RNA, 14 nt, Human
acuuuaaaagcauu

SEQ ID NO: 3481649 - RNA, 20 nt, Human
acuuuaaaggaaaaaauguu

SEQ ID NO: 3481650 - RNA, 21 nt, Human
acuuuaaaggaaaaaauguug

SEQ ID NO: 3481651 - RNA, 13 nt, Human
acuuuaaauugug

SEQ ID NO: 3481652 - RNA, 14 nt, Human
acuuuaacauaagc

SEQ ID NO: 3481653 - RNA, 18 nt, Human
acuuuaacauaagcuauu

SEQ ID NO: 3481654 - RNA, 19 nt, Human
acuuuaacauaagcuauuu

SEQ ID NO: 3481655 - RNA, 20 nt, Human
acuuuaacuuaguuuugcau

SEQ ID NO: 3481656 - RNA, 16 nt, Human
acuuuaacuucuguuu

SEQ ID NO: 3481657 - RNA, 13 nt, Human
acuuuaagcacua

SEQ ID NO: 3481658 - RNA, 15 nt, Human
acuuuaaguuucagg

SEQ ID NO: 3481659 - RNA, 19 nt, Human
acuuuaauuaccaaccugu

SEQ ID NO: 3481660 - RNA, 23 nt, Human
acuuuaauucucaugugauccuu

SEQ ID NO: 3481661 - RNA, 10 nt, Human
acuuuaauuu

SEQ ID NO: 3481662 - RNA, 18 nt, Human
acuuuacacaauagaauu

SEQ ID NO: 3481663 - RNA, 18 nt, Human
acuuuacagaaauggacu

SEQ ID NO: 3481664 - RNA, 17 nt, Human
acuuuacaugacacagc

SEQ ID NO: 3481665 - RNA, 17 nt, Human
acuuuacccaccuagaa

SEQ ID NO: 3481666 - RNA, 16 nt, Human
acuuuacuaagaugac

SEQ ID NO: 3481667 - RNA, 18 nt, Human
acuuuacuaagaugacau

SEQ ID NO: 3481668 - RNA, 22 nt, Human
acuuuacuaagaugacauugcu

SEQ ID NO: 3481669 - RNA, 17 nt, Human
acuuuagaaagcugaca

SEQ ID NO: 3481670 - RNA, 12 nt, Human
acuuuagaaaua

SEQ ID NO: 3481671 - RNA, 14 nt, Human
acuuuagaaauaaa

SEQ ID NO: 3481672 - RNA, 21 nt, Human
acuuuagaagcacaguaaaua

SEQ ID NO: 3481673 - RNA, 19 nt, Human
acuuuagaagugcauuucu

SEQ ID NO: 3481674 - RNA, 15 nt, Human
acuuuagaguagcau

SEQ ID NO: 3481675 - RNA, 15 nt, Human
acuuuagaugcugau

SEQ ID NO: 3481676 - RNA, 19 nt, Human
acuuuaggcuuucagcuua

SEQ ID NO: 3481677 - RNA, 22 nt, Human
acuuuagggcuguaaaaugcau

SEQ ID NO: 3481678 - RNA, 19 nt, Human
acuuuagggggugggauuc

SEQ ID NO: 3481679 - RNA, 19 nt, Human
acuuuaggguaaaaauugc

SEQ ID NO: 3481680 - RNA, 13 nt, Human
acuuuaguaugac

SEQ ID NO: 3481681 - RNA, 15 nt, Human
acuuuagucugcaaa

SEQ ID NO: 3481682 - RNA, 17 nt, Human
acuuuagucugcaaaau

SEQ ID NO: 3481683 - RNA, 12 nt, Human
acuuuauaaauu

SEQ ID NO: 3481684 - RNA, 13 nt, Human
acuuuauaaauuu

SEQ ID NO: 3481685 - RNA, 13 nt, Human
agaagcauuugua

SEQ ID NO: 3481686 - RNA, 23 nt, Human
agaagccaacuaugauuauuaac

SEQ ID NO: 3481687 - RNA, 15 nt, Human
agaagccaagggaaa

SEQ ID NO: 3481688 - RNA, 21 nt, Human
agaagccaagggaaaggggug

SEQ ID NO: 3481689 - RNA, 17 nt, Human
agaagccacccaaagca

SEQ ID NO: 3481690 - RNA, 12 nt, Human
agaagccaggaa

SEQ ID NO: 3481691 - RNA, 13 nt, Human
agaagccaggaau

SEQ ID NO: 3481692 - RNA, 18 nt, Human
agaagccaucaccucaga

SEQ ID NO: 3481693 - RNA, 22 nt, Human
agaagccauggaaaaacuuccu

SEQ ID NO: 3481694 - RNA, 12 nt, Human
agaagccauugu

SEQ ID NO: 3481695 - RNA, 15 nt, Human
agaagccauugucuu

SEQ ID NO: 3481696 - RNA, 20 nt, Human
agaagccauugucuucggaa

SEQ ID NO: 3481697 - RNA, 21 nt, Human
agaagcccaauauuauaauuu

SEQ ID NO: 3481698 - RNA, 11 nt, Human
agaagcccaga

SEQ ID NO: 3481699 - RNA, 18 nt, Human
agaagcccaggaaaggcu

SEQ ID NO: 3481700 - RNA, 20 nt, Human
agaagcccaggaaaggcucc

SEQ ID NO: 3481701 - RNA, 21 nt, Human
agaagcccaggaaaggcucca

SEQ ID NO: 3481702 - RNA, 23 nt, Human
agaagcccaggaaaggcuccagg

SEQ ID NO: 3481703 - RNA, 17 nt, Human
agaagcccccagcuaag

SEQ ID NO: 3481704 - RNA, 21 nt, Human
agaagccccuuccccauggga

SEQ ID NO: 3481705 - RNA, 20 nt, Human
agaagcccggcuccugguca

SEQ ID NO: 3481706 - RNA, 21 nt, Human
agaagccgagagccuuuugug

SEQ ID NO: 3481707 - RNA, 20 nt, Human
agaagccucguuuugaugcc

SEQ ID NO: 3481708 - RNA, 12 nt, Human
agaagccucugg

SEQ ID NO: 3481709 - RNA, 21 nt, Human
agaagccugaugcugacauuc

SEQ ID NO: 3481710 - RNA, 21 nt, Human
agaagccugcauaauguuucu

SEQ ID NO: 3481711 - RNA, 11 nt, Human
agaagccuggg

SEQ ID NO: 3481712 - RNA, 13 nt, Human
agaagccuggggg

SEQ ID NO: 3481713 - RNA, 22 nt, Human
agaagccuguaacacuccucug

SEQ ID NO: 3481714 - RNA, 12 nt, Human
agaagccuucag

SEQ ID NO: 3481715 - RNA, 13 nt, Human
agaagccuucagc

SEQ ID NO: 3481716 - RNA, 14 nt, Human
agaagccuugguac

SEQ ID NO: 3481717 - RNA, 14 nt, Human
agaagcgagcacug

SEQ ID NO: 3481718 - RNA, 22 nt, Human
agaagcgauuaugaaagcaaca

SEQ ID NO: 3481719 - RNA, 13 nt, Human
agaagcuaagcug

SEQ ID NO: 3481720 - RNA, 21 nt, Human
agaagcuaugucaagaggcug

SEQ ID NO: 3481721 - RNA, 13 nt, Human
agaagcucagcug

SEQ ID NO: 3481722 - RNA, 17 nt, Human
agaagcucccaggaaca

SEQ ID NO: 3481723 - RNA, 14 nt, Human
agaagcuccucucc

SEQ ID NO: 3481724 - RNA, 18 nt, Human
agaagcuccucuccccag

SEQ ID NO: 3481725 - RNA, 22 nt, Human
agaagcuccucuccccagccca

SEQ ID NO: 3481726 - RNA, 15 nt, Human
agaagcugagcacca

SEQ ID NO: 3481727 - RNA, 20 nt, Human
agaagcugagcaccagggga

SEQ ID NO: 3481728 - RNA, 12 nt, Human
agaagcugcagg

SEQ ID NO: 3481729 - RNA, 19 nt, Human
agaagcugcuccaggccug

SEQ ID NO: 3481730 - RNA, 16 nt, Human
agaagcugcugaccaa

SEQ ID NO: 3481731 - RNA, 16 nt, Human
agaagcuguuguacau

SEQ ID NO: 3481732 - RNA, 20 nt, Human
agaagcuguuguacauuuau

SEQ ID NO: 3481733 - RNA, 21 nt, Human
agaagcuguuguacauuuaug

SEQ ID NO: 3481734 - RNA, 15 nt, Human
agaagcuuaggcagg

SEQ ID NO: 3481735 - RNA, 18 nt, Human
agaagcuucuaauaaauu

SEQ ID NO: 3481736 - RNA, 15 nt, Human
agaagcuuuauuucu

SEQ ID NO: 3481737 - RNA, 16 nt, Human
agaaggaaaaaugugu

SEQ ID NO: 3481738 - RNA, 19 nt, Human
agaaggaaaaugaucugag

SEQ ID NO: 3481739 - RNA, 23 nt, Human
agaaggaaagcuuuggcaguguu

SEQ ID NO: 3481740 - RNA, 14 nt, Human
agaaggaagcaggu

SEQ ID NO: 3481741 - RNA, 11 nt, Human
agaaggaaggc

SEQ ID NO: 3481742 - RNA, 17 nt, Human
agaaggaaggcagggag

SEQ ID NO: 3481743 - RNA, 19 nt, Human
agaaggaaggcagggagga

SEQ ID NO: 3481744 - RNA, 15 nt, Human
agaaggaauuugagu

SEQ ID NO: 3481745 - RNA, 18 nt, Human
agaaggagagaaaguggg

SEQ ID NO: 3481746 - RNA, 19 nt, Human
agaaggagagaaagugggu

SEQ ID NO: 3481747 - RNA, 22 nt, Human
agaaggaggaaugcuggacugg

SEQ ID NO: 3481748 - RNA, 16 nt, Human
agaaggcaaaaauagu

SEQ ID NO: 3481749 - RNA, 15 nt, Human
agaaggcaaaaaugu

SEQ ID NO: 3481750 - RNA, 14 nt, Human
agaaggcaaaugac

SEQ ID NO: 3481751 - RNA, 15 nt, Human
agaaggcaaaugacu

SEQ ID NO: 3481752 - RNA, 13 nt, Human
agaaggcagccac

SEQ ID NO: 3481753 - RNA, 22 nt, Human
agaaggcauaucagucucugag

SEQ ID NO: 3481754 - RNA, 23 nt, Human
agaaggccuucauggccccagca

SEQ ID NO: 3481755 - RNA, 16 nt, Human
agaaggcuggggcuau

SEQ ID NO: 3481756 - RNA, 15 nt, Human
agaagggaaagccca

SEQ ID NO: 3481757 - RNA, 18 nt, Human
agaagggaaggggagagg

SEQ ID NO: 3481758 - RNA, 16 nt, Human
agaagggaauccuccu

SEQ ID NO: 3481759 - RNA, 18 nt, Human
agaagggagcuagccaga

SEQ ID NO: 3481760 - RNA, 18 nt, Human
agaagggagcuggcucca

SEQ ID NO: 3481761 - RNA, 19 nt, Human
agaagggagggcagagcug

SEQ ID NO: 3481762 - RNA, 21 nt, Human
agaagggagggcagagcuggu

SEQ ID NO: 3481763 - RNA, 22 nt, Human
agaagggagggcagagcuggug

SEQ ID NO: 3481764 - RNA, 19 nt, Human
agaagggccaguccugccu

SEQ ID NO: 3481765 - RNA, 17 nt, Human
agaagggcuccugcagg

SEQ ID NO: 3481766 - RNA, 20 nt, Human
agaagggcugcaugauguuu

SEQ ID NO: 3481767 - RNA, 15 nt, Human
agaaggggagaugga

SEQ ID NO: 3481768 - RNA, 18 nt, Human
agaagggggucaaagcaa

SEQ ID NO: 3481769 - RNA, 20 nt, Human
agaaggguuuuccacccugg

SEQ ID NO: 3481770 - RNA, 22 nt, Human
agaaggguuuuccacccuggaa

SEQ ID NO: 3481771 - RNA, 21 nt, Human
agaagguauuccuuuugugua

SEQ ID NO: 3481772 - RNA, 20 nt, Human
agaagguccuuaaugauccg

SEQ ID NO: 3481773 - RNA, 21 nt, Human
agaagguccuuaaugauccgu

SEQ ID NO: 3481774 - RNA, 20 nt, Human
agaaggucggaggcuuggga

SEQ ID NO: 3481775 - RNA, 21 nt, Human
agaagguggaccuuuuaaagu

SEQ ID NO: 3481776 - RNA, 19 nt, Human
agaagguggggguuggcug

SEQ ID NO: 3481777 - RNA, 20 nt, Human
agaagguuaccaagaagccu

SEQ ID NO: 3481778 - RNA, 17 nt, Human
agaagguugacacaguu

SEQ ID NO: 3481779 - RNA, 21 nt, Human
agaagguuuacuuuuuggugu

SEQ ID NO: 3481780 - RNA, 18 nt, Human
agaagguuuauuguuaau

SEQ ID NO: 3481781 - RNA, 22 nt, Human
agaagguuugguccagccuggu

SEQ ID NO: 3481782 - RNA, 13 nt, Human
agaaguaacaaga

SEQ ID NO: 3481783 - RNA, 21 nt, Human
agaaguaacaagagugauucu

SEQ ID NO: 3481784 - RNA, 20 nt, Human
agaaguaagaggcuaccucu

SEQ ID NO: 3481785 - RNA, 14 nt, Human
agaaguaccagacu

SEQ ID NO: 3481786 - RNA, 21 nt, Human
agaaguacugcccuuuugugu

SEQ ID NO: 3481787 - RNA, 18 nt, Human
agaaguaggggaagacau

SEQ ID NO: 3481788 - RNA, 19 nt, Human
agaaguaggggaagacaug

SEQ ID NO: 3481789 - RNA, 19 nt, Human
agaaguauaaagaauugug

SEQ ID NO: 3481790 - RNA, 16 nt, Human
agaaguauuauaaauu

SEQ ID NO: 3481791 - RNA, 16 nt, Human
agaagucaaggcuuag

SEQ ID NO: 3481792 - RNA, 18 nt, Human
agaagucaaggcuuagac

SEQ ID NO: 3481793 - RNA, 19 nt, Human
agaagucaaggcuuagacc

SEQ ID NO: 3481794 - RNA, 15 nt, Human
agaagucacagggca

SEQ ID NO: 3481795 - RNA, 17 nt, Human
agaagucacagggcagu

SEQ ID NO: 3481796 - RNA, 21 nt, Human
agaagucacauuccugaacag

SEQ ID NO: 3481797 - RNA, 22 nt, Human
agaagucagagagggugacaag

SEQ ID NO: 3481798 - RNA, 15 nt, Human
agaagucaucuugcu

SEQ ID NO: 3481799 - RNA, 13 nt, Human
agaaguccagagu

SEQ ID NO: 3481800 - RNA, 21 nt, Human
agaaguccuguaugucuguca

SEQ ID NO: 3481801 - RNA, 21 nt, Human
agaagucuucuauuuauuuau

SEQ ID NO: 3481802 - RNA, 21 nt, Human
agaagugaaaaucuacacucc

SEQ ID NO: 3481803 - RNA, 18 nt, Human
agaagugaauaacugcaa

SEQ ID NO: 3481804 - RNA, 13 nt, Human
agaagugacaggg

SEQ ID NO: 3481805 - RNA, 16 nt, Human
agaagugacagggaag

SEQ ID NO: 3481806 - RNA, 19 nt, Human
agaagugacagggaagcua

SEQ ID NO: 3481807 - RNA, 17 nt, Human
agaagugaccaaggagg

SEQ ID NO: 3481808 - RNA, 16 nt, Human
agaagugacgguuccu

SEQ ID NO: 3481809 - RNA, 17 nt, Human
agaagugacgguuccua

SEQ ID NO: 3481810 - RNA, 18 nt, Human
agaagugagcaaaaaaga

SEQ ID NO: 3481811 - RNA, 19 nt, Human
agaagugagcuuugcugcu

SEQ ID NO: 3481812 - RNA, 23 nt, Human
agaagugcaucuggagagaacag

SEQ ID NO: 3481813 - RNA, 14 nt, Human
agaagugcauuucu

SEQ ID NO: 3481814 - RNA, 16 nt, Human
agaagugcauuucuga

SEQ ID NO: 3481815 - RNA, 19 nt, Human
agaagugcauuucugaaua

SEQ ID NO: 3481816 - RNA, 13 nt, Human
agaagugccccug

SEQ ID NO: 3481817 - RNA, 22 nt, Human
agaagugccccugcugccuccc

SEQ ID NO: 3481818 - RNA, 17 nt, Human
agaaguggacuggagga

SEQ ID NO: 3481819 - RNA, 14 nt, Human
agaagugucauguu

SEQ ID NO: 3481820 - RNA, 14 nt, Human
agaagugugauugg

SEQ ID NO: 3481821 - RNA, 22 nt, Human
agaagugugauugggaauaaau

SEQ ID NO: 3481822 - RNA, 22 nt, Human
agaaugacggaauaagagaccu

SEQ ID NO: 3481823 - RNA, 12 nt, Human
agaaugagccuc

SEQ ID NO: 3481824 - RNA, 20 nt, Human
agaaugaguccuugauuuca

SEQ ID NO: 3481825 - RNA, 16 nt, Human
agacauuucuuuucuu

SEQ ID NO: 3481826 - RNA, 20 nt, Human
agacauuucuuuucuuuuua

SEQ ID NO: 3481827 - RNA, 21 nt, Human
agacauuugcuaugagcuggg

SEQ ID NO: 3481828 - RNA, 19 nt, Human
agacauuuuaaaaaauggu

SEQ ID NO: 3481829 - RNA, 20 nt, Human
agacauuuuaaaaaaugguc

SEQ ID NO: 3481830 - RNA, 22 nt, Human
agacauuuuaaaaaauggucac

SEQ ID NO: 3481831 - RNA, 15 nt, Human
agacauuuuaacaag

SEQ ID NO: 3481832 - RNA, 17 nt, Human
agacauuuuaacaagaa

SEQ ID NO: 3481833 - RNA, 22 nt, Human
agacauuuuaacaagaagauga

SEQ ID NO: 3481834 - RNA, 23 nt, Human
agacauuuuaacaagaagaugaa

SEQ ID NO: 3481835 - RNA, 24 nt, Human
agaccaaacuucacucugggcaca

SEQ ID NO: 3481836 - RNA, 17 nt, Human
agaccaaauggaaacag

SEQ ID NO: 3481837 - RNA, 14 nt, Human
agaccaaccugacc

SEQ ID NO: 3481838 - RNA, 13 nt, Human
agaccaagcuugu

SEQ ID NO: 3481839 - RNA, 19 nt, Human
agaccaaggcuuucucuac

SEQ ID NO: 3481840 - RNA, 16 nt, Human
agaccacaaaaauuga

SEQ ID NO: 3481841 - RNA, 17 nt, Human
agaccacagagcuguca

SEQ ID NO: 3481842 - RNA, 20 nt, Human
agaccacaggguucaaaaug

SEQ ID NO: 3481843 - RNA, 21 nt, Human
agaccacaggguucaaaaugu

SEQ ID NO: 3481844 - RNA, 14 nt, Human
agaccacaugcccc

SEQ ID NO: 3481845 - RNA, 14 nt, Human
agaccaccaagccu

SEQ ID NO: 3481846 - RNA, 11 nt, Human
agaccaccagg

SEQ ID NO: 3481847 - RNA, 14 nt, Human
agaccaccagggca

SEQ ID NO: 3481848 - RNA, 17 nt, Human
agaccaccauccaccgc

SEQ ID NO: 3481849 - RNA, 20 nt, Human
agaccacgcccguccugccu

SEQ ID NO: 3481850 - RNA, 14 nt, Human
agaccagaaauucc

SEQ ID NO: 3481851 - RNA, 15 nt, Human
agaccagagcucugg

SEQ ID NO: 3481852 - RNA, 20 nt, Human
agaccagagcucuggagcca

SEQ ID NO: 3481853 - RNA, 15 nt, Human
agaccagauuaaacu

SEQ ID NO: 3481854 - RNA, 18 nt, Human
agaccagauuaaacuuca

SEQ ID NO: 3481855 - RNA, 16 nt, Human
agaccagcagacagag

SEQ ID NO: 3481856 - RNA, 20 nt, Human
agaccagcagacagagccag

SEQ ID NO: 3481857 - RNA, 12 nt, Human
agaccagccugg

SEQ ID NO: 3481858 - RNA, 16 nt, Human
agaccagggcuccagc

SEQ ID NO: 3481859 - RNA, 18 nt, Human
agaccagggcuccagccc

SEQ ID NO: 3481860 - RNA, 20 nt, Human
agaccaguugggagcacugg

SEQ ID NO: 3481861 - RNA, 22 nt, Human
agaccaguugggagcacuggag

SEQ ID NO: 3481862 - RNA, 23 nt, Human
agaccaguugggagcacuggagu

SEQ ID NO: 3481863 - RNA, 15 nt, Human
agaccauagugacca

SEQ ID NO: 3481864 - RNA, 13 nt, Human
agaccaucccuga

SEQ ID NO: 3481865 - RNA, 17 nt, Human
agaccaucccugaaggc

SEQ ID NO: 3481866 - RNA, 15 nt, Human
agaccauccuggcua

SEQ ID NO: 3481867 - RNA, 16 nt, Human
agaccaugcagagcgc

SEQ ID NO: 3481868 - RNA, 21 nt, Human
agaccauggacacuacaccca

SEQ ID NO: 3481869 - RNA, 20 nt, Human
agaccauuggggcucccagc

SEQ ID NO: 3481870 - RNA, 22 nt, Human
agaccauuggggcucccagcca

SEQ ID NO: 3481871 - RNA, 14 nt, Human
agacccaaggagga

SEQ ID NO: 3481872 - RNA, 18 nt, Human
agacccagcccucauccc

SEQ ID NO: 3481873 - RNA, 19 nt, Human
agacccagcccucaucccg

SEQ ID NO: 3481874 - RNA, 17 nt, Human
agacccauuccuuccca

SEQ ID NO: 3481875 - RNA, 22 nt, Human
agacccauuccuucccagaggg

SEQ ID NO: 3481876 - RNA, 15 nt, Human
agaccccacccaagc

SEQ ID NO: 3481877 - RNA, 13 nt, Human
agacccccacacc

SEQ ID NO: 3481878 - RNA, 12 nt, Human
agacccccaccc

SEQ ID NO: 3481879 - RNA, 21 nt, Human
agacccccaccccuuccccac

SEQ ID NO: 3481880 - RNA, 12 nt, Human
agacccccacuc

SEQ ID NO: 3481881 - RNA, 13 nt, Human
agacccccacucu

SEQ ID NO: 3481882 - RNA, 20 nt, Human
agacccccagcaacccuccu

SEQ ID NO: 3481883 - RNA, 14 nt, Human
agacccccagcacu

SEQ ID NO: 3481884 - RNA, 19 nt, Human
agacccccuggagacuaac

SEQ ID NO: 3481885 - RNA, 14 nt, Human
agaccccucuggcc

SEQ ID NO: 3481886 - RNA, 13 nt, Human
agaccccuggccu

SEQ ID NO: 3481887 - RNA, 16 nt, Human
agaccccuggccuccg

SEQ ID NO: 3481888 - RNA, 13 nt, Human
agaccccugucuc

SEQ ID NO: 3481889 - RNA, 18 nt, Human
agacccuaccccaccacg

SEQ ID NO: 3481890 - RNA, 17 nt, Human
agacccucaugcugcca

SEQ ID NO: 3481891 - RNA, 18 nt, Human
agacccucaugcugccaa

SEQ ID NO: 3481892 - RNA, 21 nt, Human
agacccucugccaccagagac

SEQ ID NO: 3481893 - RNA, 15 nt, Human
agacccucuugccca

SEQ ID NO: 3481894 - RNA, 18 nt, Human
agacccucuugcccaucc

SEQ ID NO: 3481895 - RNA, 19 nt, Human
agacccucuugcccauccu

SEQ ID NO: 3481896 - RNA, 13 nt, Human
agacccugcccug

SEQ ID NO: 3481897 - RNA, 23 nt, Human
agacccugcccugugggccccca

SEQ ID NO: 3481898 - RNA, 20 nt, Human
agacccugggugggcucugu

SEQ ID NO: 3481899 - RNA, 14 nt, Human
agacccuggugccu

SEQ ID NO: 3481900 - RNA, 19 nt, Human
agacccuuguggucccacc

SEQ ID NO: 3481901 - RNA, 20 nt, Human
agacccuuguggucccaccc

SEQ ID NO: 3481902 - RNA, 23 nt, Human
agacccuuguggucccaccccac

SEQ ID NO: 3481903 - RNA, 20 nt, Human
agaccgaacuguuguauaaa

SEQ ID NO: 3481904 - RNA, 17 nt, Human
agaccggccugccagga

SEQ ID NO: 3481905 - RNA, 13 nt, Human
agaccguccucac

SEQ ID NO: 3481906 - RNA, 16 nt, Human
agaccguccucacccc

SEQ ID NO: 3481907 - RNA, 20 nt, Human
agaccgugaagauacuuugu

SEQ ID NO: 3481908 - RNA, 18 nt, Human
agaccguuuaccuagaag

SEQ ID NO: 3481909 - RNA, 16 nt, Human
agaccuaaccagggcc

SEQ ID NO: 3481910 - RNA, 17 nt, Human
agaccuaaccagggcca

SEQ ID NO: 3481911 - RNA, 21 nt, Human
agaccuaaucucuguaaagcu

SEQ ID NO: 3481912 - RNA, 15 nt, Human
agaccuaaugcuccu

SEQ ID NO: 3481913 - RNA, 14 nt, Human
agaccuacaggggg

SEQ ID NO: 3481914 - RNA, 19 nt, Human
agaccuaccucagguugcu

SEQ ID NO: 3481915 - RNA, 19 nt, Human
agaccuacuguucuaaagc

SEQ ID NO: 3481916 - RNA, 16 nt, Human
agaccuauuccuccug

SEQ ID NO: 3481917 - RNA, 14 nt, Human
agaccucagaagua

SEQ ID NO: 3481918 - RNA, 15 nt, Human
agaccucagaaguaa

SEQ ID NO: 3481919 - RNA, 11 nt, Human
agaccucagcc

SEQ ID NO: 3481920 - RNA, 14 nt, Human
agaccucagccugu

SEQ ID NO: 3481921 - RNA, 16 nt, Human
agaccucagccugugc

SEQ ID NO: 3481922 - RNA, 15 nt, Human
agaccucagggcaca

SEQ ID NO: 3481923 - RNA, 16 nt, Human
agaccucaucaggaug

SEQ ID NO: 3481924 - RNA, 11 nt, Human
agaccucugga

SEQ ID NO: 3481925 - RNA, 23 nt, Human
agaccucugugaggaaagcacac

SEQ ID NO: 3481926 - RNA, 18 nt, Human
agaccucugugcacuuau

SEQ ID NO: 3481927 - RNA, 23 nt, Human
agagcccacuccaucugguagaa

SEQ ID NO: 3481928 - RNA, 14 nt, Human
agagcccagaggua

SEQ ID NO: 3481929 - RNA, 20 nt, Human
agagcccagagguaacagaa

SEQ ID NO: 3481930 - RNA, 24 nt, Human
agagcccagagguaacagaacagc

SEQ ID NO: 3481931 - RNA, 18 nt, Human
agagcccagagucccccc

SEQ ID NO: 3481932 - RNA, 21 nt, Human
agagcccagcagggccucaaa

SEQ ID NO: 3481933 - RNA, 13 nt, Human
agagcccagcucc

SEQ ID NO: 3481934 - RNA, 15 nt, Human
agagcccaggagcuc

SEQ ID NO: 3481935 - RNA, 16 nt, Human
agagcccaggagcucc

SEQ ID NO: 3481936 - RNA, 13 nt, Human
agagcccaggccu

SEQ ID NO: 3481937 - RNA, 14 nt, Human
agagcccaggccuc

SEQ ID NO: 3481938 - RNA, 13 nt, Human
agagccccacagc

SEQ ID NO: 3481939 - RNA, 15 nt, Human
agagccccacucuca

SEQ ID NO: 3481940 - RNA, 16 nt, Human
agagccccacucucag

SEQ ID NO: 3481941 - RNA, 17 nt, Human
agagccccacucucaga

SEQ ID NO: 3481942 - RNA, 20 nt, Human
agagccccacucucagaggc

SEQ ID NO: 3481943 - RNA, 23 nt, Human
agagccccacucucagaggcccc

SEQ ID NO: 3481944 - RNA, 21 nt, Human
agagccccgcaaaacccacug

SEQ ID NO: 3481945 - RNA, 20 nt, Human
agagccccuccuccagcccc

SEQ ID NO: 3481946 - RNA, 22 nt, Human
agagccccuccuccagccccug

SEQ ID NO: 3481947 - RNA, 16 nt, Human
agagccccuggggccu

SEQ ID NO: 3481948 - RNA, 21 nt, Human
agagcccgaggaggugucuca

SEQ ID NO: 3481949 - RNA, 13 nt, Human
agagcccugcucc

SEQ ID NO: 3481950 - RNA, 13 nt, Human
agagcccugggac

SEQ ID NO: 3481951 - RNA, 21 nt, Human
agagcccuguaucaacccaga

SEQ ID NO: 3481952 - RNA, 19 nt, Human
agagcccuugccuccccau

SEQ ID NO: 3481953 - RNA, 22 nt, Human
agagccgggcacauugagcugu

SEQ ID NO: 3481954 - RNA, 17 nt, Human
agagccguaaaaacuga

SEQ ID NO: 3481955 - RNA, 21 nt, Human
agagccguggucccugaggau

SEQ ID NO: 3481956 - RNA, 14 nt, Human
agagccucaaauga

SEQ ID NO: 3481957 - RNA, 22 nt, Human
agagccucccaaggagaacaaa

SEQ ID NO: 3481958 - RNA, 23 nt, Human
agagccucccaaggagaacaaau

SEQ ID NO: 3481959 - RNA, 16 nt, Human
agagccugaucucuuc

SEQ ID NO: 3481960 - RNA, 18 nt, Human
agagccugaucucuuccu

SEQ ID NO: 3481961 - RNA, 20 nt, Human
agagccugaucucuuccugu

SEQ ID NO: 3481962 - RNA, 15 nt, Human
agagccugcuccccc

SEQ ID NO: 3481963 - RNA, 20 nt, Human
agagccugcucccccacccc

SEQ ID NO: 3481964 - RNA, 11 nt, Human
agagccugcug

SEQ ID NO: 3481965 - RNA, 13 nt, Human
agagccugcuggc

SEQ ID NO: 3481966 - RNA, 13 nt, Human
agagccuggagaa

SEQ ID NO: 3481967 - RNA, 15 nt, Human
agagccuggagaagc

SEQ ID NO: 3481968 - RNA, 17 nt, Human
agagccuggagaagcug

SEQ ID NO: 3481969 - RNA, 10 nt, Human
agagccuggu

SEQ ID NO: 3481970 - RNA, 16 nt, Human
agagccuggugcugcu

SEQ ID NO: 3481971 - RNA, 20 nt, Human
agagccugguugcccaggga

SEQ ID NO: 3481972 - RNA, 14 nt, Human
agagccuuaaaaca

SEQ ID NO: 3481973 - RNA, 13 nt, Human
agagccuucucag

SEQ ID NO: 3481974 - RNA, 18 nt, Human
agagccuucucagaagca

SEQ ID NO: 3481975 - RNA, 21 nt, Human
agagccuucugaugucucuaa

SEQ ID NO: 3481976 - RNA, 21 nt, Human
agagccuugcggaagguucua

SEQ ID NO: 3481977 - RNA, 23 nt, Human
agagccuugguguccaccuggcc

SEQ ID NO: 3481978 - RNA, 19 nt, Human
agagccuuuccucaaaacu

SEQ ID NO: 3481979 - RNA, 23 nt, Human
agagccuuuggaugaccagaaca

SEQ ID NO: 3481980 - RNA, 18 nt, Human
agagccuuuuucuaggcc

SEQ ID NO: 3481981 - RNA, 17 nt, Human
agagcgagagucugucu

SEQ ID NO: 3481982 - RNA, 14 nt, Human
agagcgaggcugag

SEQ ID NO: 3481983 - RNA, 14 nt, Human
agagcgcagcaucc

SEQ ID NO: 3481984 - RNA, 20 nt, Human
agagcgccgugaguucucag

SEQ ID NO: 3481985 - RNA, 23 nt, Human
agagcgccugccccucccagaac

SEQ ID NO: 3481986 - RNA, 13 nt, Human
agagcgcgucugg

SEQ ID NO: 3481987 - RNA, 23 nt, Human
agagcggucucaggcugguggga

SEQ ID NO: 3481988 - RNA, 16 nt, Human
agagcgugagcugagc

SEQ ID NO: 3481989 - RNA, 20 nt, Human
agagcgugagcugagcaggc

SEQ ID NO: 3481990 - RNA, 20 nt, Human
agagcuaaacuccuuccugg

SEQ ID NO: 3481991 - RNA, 21 nt, Human
agagcuaacccuuaucuguaa

SEQ ID NO: 3481992 - RNA, 17 nt, Human
agagcuaagggugggug

SEQ ID NO: 3481993 - RNA, 22 nt, Human
agagcuaagggugggugcucag

SEQ ID NO: 3481994 - RNA, 11 nt, Human
agagcuacaua

SEQ ID NO: 3481995 - RNA, 14 nt, Human
agagcuacauaauu

SEQ ID NO: 3481996 - RNA, 16 nt, Human
agagcuacauaauuua

SEQ ID NO: 3481997 - RNA, 18 nt, Human
agagcuacauaauuuagu

SEQ ID NO: 3481998 - RNA, 22 nt, Human
agagcuagaacauggagagcua

SEQ ID NO: 3481999 - RNA, 23 nt, Human
agagcuagaacccggcaggcuag

SEQ ID NO: 3482000 - RNA, 13 nt, Human
agagcuagcgcug

SEQ ID NO: 3482001 - RNA, 14 nt, Human
agagcuaggcaggg

SEQ ID NO: 3482002 - RNA, 23 nt, Human
agagcuauggacagcauugccag

SEQ ID NO: 3482003 - RNA, 13 nt, Human
agagcucaggaug

SEQ ID NO: 3482004 - RNA, 13 nt, Human
agagcuccucccu

SEQ ID NO: 3482005 - RNA, 14 nt, Human
agagcucuccagcu

SEQ ID NO: 3482006 - RNA, 15 nt, Human
agagcucuccagcuc

SEQ ID NO: 3482007 - RNA, 18 nt, Human
agagcucuggagccaccu

SEQ ID NO: 3482008 - RNA, 19 nt, Human
agagcucuggagccaccug

SEQ ID NO: 3482009 - RNA, 20 nt, Human
agagcucuggagccaccugu

SEQ ID NO: 3482010 - RNA, 21 nt, Human
agagcucuggugauaaggaca

SEQ ID NO: 3482011 - RNA, 19 nt, Human
agagcugaagguuguggcc

SEQ ID NO: 3482012 - RNA, 18 nt, Human
agagcugacacaaaccug

SEQ ID NO: 3482013 - RNA, 19 nt, Human
agagcugauccagagcaca

SEQ ID NO: 3482014 - RNA, 16 nt, Human
agagcugauggagaag

SEQ ID NO: 3482015 - RNA, 21 nt, Human
agagcugauggagaaggaagg

SEQ ID NO: 3482016 - RNA, 13 nt, Human
agagcugccagug

SEQ ID NO: 3482017 - RNA, 14 nt, Human
agagcugcccucuc

SEQ ID NO: 3482018 - RNA, 17 nt, Human
agagcugcccucuccug

SEQ ID NO: 3482019 - RNA, 15 nt, Human
agagcugcucuggaa

SEQ ID NO: 3482020 - RNA, 16 nt, Human
agagcugcucuggaaa

SEQ ID NO: 3482021 - RNA, 21 nt, Human
agagcuggagaugaggccaga

SEQ ID NO: 3482022 - RNA, 12 nt, Human
agagcuggcucu

SEQ ID NO: 3482023 - RNA, 13 nt, Human
agagcuggcucug

SEQ ID NO: 3482024 - RNA, 13 nt, Human
agagcugggaggg

SEQ ID NO: 3482025 - RNA, 23 nt, Human
agagcugguaguuaguagcaugu

SEQ ID NO: 3482026 - RNA, 13 nt, Human
agagcuggugccc

SEQ ID NO: 3482027 - RNA, 18 nt, Human
agagcuggugcggcuggc

SEQ ID NO: 3482028 - RNA, 19 nt, Human
agagcuggugcggcuggcc

SEQ ID NO: 3482029 - RNA, 22 nt, Human
agagcuggugcggcuggccaug

SEQ ID NO: 3482030 - RNA, 11 nt, Human
agagcuggugu

SEQ ID NO: 3482031 - RNA, 16 nt, Human
agagcuguggagaggg

SEQ ID NO: 3482032 - RNA, 20 nt, Human
agagcuguggaggauugcua

SEQ ID NO: 3482033 - RNA, 18 nt, Human
agagcuguugaugggaug

SEQ ID NO: 3482034 - RNA, 14 nt, Human
agagcuuagaaacu

SEQ ID NO: 3482035 - RNA, 20 nt, Human
agagcuucccugacucauuc

SEQ ID NO: 3482036 - RNA, 23 nt, Human
agagcuucuuccaggugcccagc

SEQ ID NO: 3482037 - RNA, 14 nt, Human
agagcuuggacugg

SEQ ID NO: 3482038 - RNA, 16 nt, Human
agagcuuuacaaaaag

SEQ ID NO: 3482039 - RNA, 23 nt, Human
agagcuuucuguccuuuuggcac

SEQ ID NO: 3482040 - RNA, 20 nt, Human
agagcuuucuucccgaaccc

SEQ ID NO: 3482041 - RNA, 17 nt, Human
agagcuuugucguauuu

SEQ ID NO: 3482042 - RNA, 13 nt, Human
agagcuuuucaga

SEQ ID NO: 3482043 - RNA, 20 nt, Human
agagcuuuucagauugugga

SEQ ID NO: 3482044 - RNA, 16 nt, Human
agaggaaaaaaaugac

SEQ ID NO: 3482045 - RNA, 17 nt, Human
agaggaaaaaaaugacu

SEQ ID NO: 3482046 - RNA, 12 nt, Human
agaggaaaagaa

SEQ ID NO: 3482047 - RNA, 19 nt, Human
agaggaaaaguaaggugca

SEQ ID NO: 3482048 - RNA, 16 nt, Human
agaggaaaaugaauaa

SEQ ID NO: 3482049 - RNA, 12 nt, Human
agaggaaagcaa

SEQ ID NO: 3482050 - RNA, 18 nt, Human
agaggaaagcaaaggaga

SEQ ID NO: 3482051 - RNA, 19 nt, Human
agaggaaagcaaaggagau

SEQ ID NO: 3482052 - RNA, 23 nt, Human
agaggaaauaagaaaaaucaugu

SEQ ID NO: 3482053 - RNA, 21 nt, Human
agaggaaaucaccgaaaacgu

SEQ ID NO: 3482054 - RNA, 14 nt, Human
agaggaaccaaccc

SEQ ID NO: 3482055 - RNA, 20 nt, Human
agaggaaccucugauuuauu

SEQ ID NO: 3482056 - RNA, 17 nt, Human
agaggaacuccuuggcc

SEQ ID NO: 3482057 - RNA, 12 nt, Human
agaggaacuguc

SEQ ID NO: 3482058 - RNA, 19 nt, Human
agaggaacuguccagagag

SEQ ID NO: 3482059 - RNA, 20 nt, Human
agaggaacuguccagagagc

SEQ ID NO: 3482060 - RNA, 21 nt, Human
agaggaacuguccagagagca

SEQ ID NO: 3482061 - RNA, 16 nt, Human
agaggaagagacacuc

SEQ ID NO: 3482062 - RNA, 13 nt, Human
agaggaagagcag

SEQ ID NO: 3482063 - RNA, 16 nt, Human
agaggaaggggccaga

SEQ ID NO: 3482064 - RNA, 23 nt, Human
agaggaaucagacuucacacugc

SEQ ID NO: 3482065 - RNA, 13 nt, Human
agaggaaugaagu

SEQ ID NO: 3482066 - RNA, 23 nt, Human
agaggacaccuguacuggagagc

SEQ ID NO: 3482067 - RNA, 17 nt, Human
agaggaccagggccuuu

SEQ ID NO: 3482068 - RNA, 19 nt, Human
agaggaccuguauuuaagc

SEQ ID NO: 3482069 - RNA, 19 nt, Human
agaggacucacuugcccac

SEQ ID NO: 3482070 - RNA, 18 nt, Human
agaggacucccaacccug

SEQ ID NO: 3482071 - RNA, 21 nt, Human
agaggacucccaacccuggcu

SEQ ID NO: 3482072 - RNA, 17 nt, Human
agaggacucgcuuguaa

SEQ ID NO: 3482073 - RNA, 19 nt, Human
agaggacucgcuuguaaau

SEQ ID NO: 3482074 - RNA, 22 nt, Human
agaggacuuuucuuuguggcuu

SEQ ID NO: 3482075 - RNA, 20 nt, Human
agaggagaacuugcugccuc

SEQ ID NO: 3482076 - RNA, 14 nt, Human
agccccugguccug

SEQ ID NO: 3482077 - RNA, 15 nt, Human
agccccugucauggu

SEQ ID NO: 3482078 - RNA, 22 nt, Human
agccccugucuagagagggagg

SEQ ID NO: 3482079 - RNA, 17 nt, Human
agccccuuccuugcucu

SEQ ID NO: 3482080 - RNA, 24 nt, Human
agccccuucugacccaugcugccc

SEQ ID NO: 3482081 - RNA, 19 nt, Human
agccccuucugcucagcuc

SEQ ID NO: 3482082 - RNA, 20 nt, Human
agccccuugcucuccccugc

SEQ ID NO: 3482083 - RNA, 14 nt, Human
agcccgaggaggug

SEQ ID NO: 3482084 - RNA, 19 nt, Human
agcccgaggcaccaguguc

SEQ ID NO: 3482085 - RNA, 15 nt, Human
agcccgcacaccugc

SEQ ID NO: 3482086 - RNA, 17 nt, Human
agcccgcacccccaccc

SEQ ID NO: 3482087 - RNA, 15 nt, Human
agcccgcaucagcug

SEQ ID NO: 3482088 - RNA, 14 nt, Human
agcccgcaugcagc

SEQ ID NO: 3482089 - RNA, 18 nt, Human
agcccgcaugcagcagcu

SEQ ID NO: 3482090 - RNA, 13 nt, Human
agcccgccugcca

SEQ ID NO: 3482091 - RNA, 22 nt, Human
agcccgccugccaguccuagcu

SEQ ID NO: 3482092 - RNA, 15 nt, Human
agcccgcggggacau

SEQ ID NO: 3482093 - RNA, 14 nt, Human
agcccggaugcuuc

SEQ ID NO: 3482094 - RNA, 21 nt, Human
agcccggccugcucccagcag

SEQ ID NO: 3482095 - RNA, 22 nt, Human
agcccggcgccccugccaccuc

SEQ ID NO: 3482096 - RNA, 15 nt, Human
agcccggcucccacc

SEQ ID NO: 3482097 - RNA, 13 nt, Human
agcccggcuccug

SEQ ID NO: 3482098 - RNA, 14 nt, Human
agcccggcuccugg

SEQ ID NO: 3482099 - RNA, 16 nt, Human
agcccggcuccugguc

SEQ ID NO: 3482100 - RNA, 21 nt, Human
agcccgggagccuaggaccac

SEQ ID NO: 3482101 - RNA, 20 nt, Human
agcccgggcucugccuccca

SEQ ID NO: 3482102 - RNA, 13 nt, Human
agcccgggcugcc

SEQ ID NO: 3482103 - RNA, 16 nt, Human
agcccgggcugccugg

SEQ ID NO: 3482104 - RNA, 22 nt, Human
agcccgguaagagcaaaagaau

SEQ ID NO: 3482105 - RNA, 16 nt, Human
agcccguguggccccu

SEQ ID NO: 3482106 - RNA, 17 nt, Human
agcccguguggccccuu

SEQ ID NO: 3482107 - RNA, 21 nt, Human
agcccuaaggaucucucagga

SEQ ID NO: 3482108 - RNA, 15 nt, Human
agcccuacagagcug

SEQ ID NO: 3482109 - RNA, 17 nt, Human
agcccuacagagcugug

SEQ ID NO: 3482110 - RNA, 13 nt, Human
agcccuacucccu

SEQ ID NO: 3482111 - RNA, 18 nt, Human
agcccuacucccugcaga

SEQ ID NO: 3482112 - RNA, 24 nt, Human
agcccuacucccugcagaugccac

SEQ ID NO: 3482113 - RNA, 17 nt, Human
agcccuagacuggugcu

SEQ ID NO: 3482114 - RNA, 15 nt, Human
agcccuagagccugc

SEQ ID NO: 3482115 - RNA, 16 nt, Human
agcccuagagccugcc

SEQ ID NO: 3482116 - RNA, 16 nt, Human
agcccuaggguggaga

SEQ ID NO: 3482117 - RNA, 12 nt, Human
agcccuauggau

SEQ ID NO: 3482118 - RNA, 15 nt, Human
agcccuauggaugug

SEQ ID NO: 3482119 - RNA, 16 nt, Human
agcccucacacacccu

SEQ ID NO: 3482120 - RNA, 19 nt, Human
agcccucacacacccuguc

SEQ ID NO: 3482121 - RNA, 17 nt, Human
agcccuccaaaagcacu

SEQ ID NO: 3482122 - RNA, 23 nt, Human
agcccuccaucuaaacugccccc

SEQ ID NO: 3482123 - RNA, 12 nt, Human
agcccuccccau

SEQ ID NO: 3482124 - RNA, 19 nt, Human
agcccucccugccccuccc

SEQ ID NO: 3482125 - RNA, 21 nt, Human
agcccucccuguccuccucgg

SEQ ID NO: 3482126 - RNA, 12 nt, Human
agcccuccucac

SEQ ID NO: 3482127 - RNA, 17 nt, Human
agcccucucacuguguc

SEQ ID NO: 3482128 - RNA, 23 nt, Human
agcccucucuggcuaaggacagg

SEQ ID NO: 3482129 - RNA, 13 nt, Human
agcccucuuccau

SEQ ID NO: 3482130 - RNA, 19 nt, Human
agcccucuuccaucauguc

SEQ ID NO: 3482131 - RNA, 18 nt, Human
agcccugaacauuucaug

SEQ ID NO: 3482132 - RNA, 20 nt, Human
agcccugcaccaugcugcug

SEQ ID NO: 3482133 - RNA, 15 nt, Human
agcccugcagagggc

SEQ ID NO: 3482134 - RNA, 16 nt, Human
agcccugcagagggca

SEQ ID NO: 3482135 - RNA, 19 nt, Human
agcccugcagagggcacag

SEQ ID NO: 3482136 - RNA, 20 nt, Human
agcccugcagugugguagcg

SEQ ID NO: 3482137 - RNA, 15 nt, Human
agcccugccccacac

SEQ ID NO: 3482138 - RNA, 16 nt, Human
agcccugccucuccgc

SEQ ID NO: 3482139 - RNA, 13 nt, Human
agcccugccugga

SEQ ID NO: 3482140 - RNA, 15 nt, Human
agcccugccuggagg

SEQ ID NO: 3482141 - RNA, 19 nt, Human
agcccugccuggaggaccu

SEQ ID NO: 3482142 - RNA, 22 nt, Human
agcccugccuggaggaccugag

SEQ ID NO: 3482143 - RNA, 23 nt, Human
agcccugccuggaggaccugagc

SEQ ID NO: 3482144 - RNA, 13 nt, Human
agcccugcucccu

SEQ ID NO: 3482145 - RNA, 18 nt, Human
agcccugcugcugccugc

SEQ ID NO: 3482146 - RNA, 20 nt, Human
agcccugcugcugccugccu

SEQ ID NO: 3482147 - RNA, 19 nt, Human
agcccugcuggggaucccc

SEQ ID NO: 3482148 - RNA, 19 nt, Human
agcccuggagccaacugcu

SEQ ID NO: 3482149 - RNA, 23 nt, Human
agcccuggagccaacugcugcuu

SEQ ID NO: 3482150 - RNA, 17 nt, Human
agcccuggaggugccag

SEQ ID NO: 3482151 - RNA, 18 nt, Human
agcccuggaggugccagc

SEQ ID NO: 3482152 - RNA, 13 nt, Human
agcccuggccaga

SEQ ID NO: 3482153 - RNA, 17 nt, Human
agcccuggcccaucaug

SEQ ID NO: 3482154 - RNA, 16 nt, Human
agcccuggcccccuga

SEQ ID NO: 3482155 - RNA, 14 nt, Human
agcccuggcucugc

SEQ ID NO: 3482156 - RNA, 15 nt, Human
agcccuggcugaagg

SEQ ID NO: 3482157 - RNA, 11 nt, Human
agcccugggac

SEQ ID NO: 3482158 - RNA, 15 nt, Human
agcccugggaccgcu

SEQ ID NO: 3482159 - RNA, 17 nt, Human
agcccugggccccacca

SEQ ID NO: 3482160 - RNA, 19 nt, Human
agcccugggccccaccacc

SEQ ID NO: 3482161 - RNA, 13 nt, Human
agcccuggggcug

SEQ ID NO: 3482162 - RNA, 14 nt, Human
agcccuggggcugg

SEQ ID NO: 3482163 - RNA, 14 nt, Human
agcccugguggcag

SEQ ID NO: 3482164 - RNA, 22 nt, Human
agcccuguaucguauucaccuu

SEQ ID NO: 3482165 - RNA, 14 nt, Human
agcccugucagugc

SEQ ID NO: 3482166 - RNA, 17 nt, Human
agcccugucagugcagc

SEQ ID NO: 3482167 - RNA, 21 nt, Human
agcccuguccuggugguauuu

SEQ ID NO: 3482168 - RNA, 17 nt, Human
agcccugucgagacacu

SEQ ID NO: 3482169 - RNA, 12 nt, Human
agcccuguggaa

SEQ ID NO: 3482170 - RNA, 22 nt, Human
agcccuguggaugagcccucag

SEQ ID NO: 3482171 - RNA, 23 nt, Human
agcccuguggaugagcccucaga

SEQ ID NO: 3482172 - RNA, 18 nt, Human
agcccuguugacacaggu

SEQ ID NO: 3482173 - RNA, 21 nt, Human
agcccuguugacacaggucuu

SEQ ID NO: 3482174 - RNA, 23 nt, Human
agcccuguugacacaggucuuuc

SEQ ID NO: 3482175 - RNA, 17 nt, Human
agcccuguugugccaca

SEQ ID NO: 3482176 - RNA, 16 nt, Human
agcccuuagcagggaa

SEQ ID NO: 3482177 - RNA, 15 nt, Human
agcccuuaucugugc

SEQ ID NO: 3482178 - RNA, 18 nt, Human
agcccuuaucugugcuca

SEQ ID NO: 3482179 - RNA, 13 nt, Human
agcccuucauuug

SEQ ID NO: 3482180 - RNA, 20 nt, Human
agcccuuccaugucgccucu

SEQ ID NO: 3482181 - RNA, 20 nt, Human
agcccuuccucugcuccccc

SEQ ID NO: 3482182 - RNA, 22 nt, Human
agcccuucuauacccacccaga

SEQ ID NO: 3482183 - RNA, 21 nt, Human
agcccuucuccauggcccugc

SEQ ID NO: 3482184 - RNA, 19 nt, Human
agcccuugaagucacccgg

SEQ ID NO: 3482185 - RNA, 17 nt, Human
agcccuugagcucccca

SEQ ID NO: 3482186 - RNA, 20 nt, Human
agcccuugagggagaacuua

SEQ ID NO: 3482187 - RNA, 13 nt, Human
agcccuugccucc

SEQ ID NO: 3482188 - RNA, 16 nt, Human
agcccuugccucccca

SEQ ID NO: 3482189 - RNA, 12 nt, Human
agcccuuggcca

SEQ ID NO: 3482190 - RNA, 14 nt, Human
agcccuuggggguc

SEQ ID NO: 3482191 - RNA, 21 nt, Human
agcccuuggggguccuccucc

SEQ ID NO: 3482192 - RNA, 22 nt, Human
agcccuuggggguccuccucca

SEQ ID NO: 3482193 - RNA, 12 nt, Human
agcccuuucugu

SEQ ID NO: 3482194 - RNA, 22 nt, Human
agcccuuugggaggcugaggcg

SEQ ID NO: 3482195 - RNA, 15 nt, Human
agcccuuuugucucu

SEQ ID NO: 3482196 - RNA, 21 nt, Human
agccgacaccuuuuuucaaca

SEQ ID NO: 3482197 - RNA, 13 nt, Human
agccgaccucagc

SEQ ID NO: 3482198 - RNA, 19 nt, Human
agccgaccugaggacaugg

SEQ ID NO: 3482199 - RNA, 13 nt, Human
agccgacucuggc

SEQ ID NO: 3482200 - RNA, 15 nt, Human
agccgacucuggccc

SEQ ID NO: 3482201 - RNA, 22 nt, Human
agccgagacucgacucugugcc

SEQ ID NO: 3482202 - RNA, 16 nt, Human
agccgagagccugcuc

SEQ ID NO: 3482203 - RNA, 13 nt, Human
aaaaaaaaaaaga

SEQ ID NO: 3482204 - RNA, 13 nt, Human
aaaaaaaaaguca

SEQ ID NO: 3482205 - RNA, 12 nt, Human
aaaaaaaaaugc

SEQ ID NO: 3482206 - RNA, 13 nt, Human
aaaaaaaacucuu

SEQ ID NO: 3482207 - RNA, 11 nt, Human
aaaaaaaagaa

SEQ ID NO: 3482208 - RNA, 12 nt, Human
aaaaaaaagaau

SEQ ID NO: 3482209 - RNA, 14 nt, Human
aaaaaaaagcuuua

SEQ ID NO: 3482210 - RNA, 12 nt, Human
aaaaaaaauaca

SEQ ID NO: 3482211 - RNA, 13 nt, Human
aaaaaaaauacuu

SEQ ID NO: 3482212 - RNA, 13 nt, Human
aaaaaaaauccuu

SEQ ID NO: 3482213 - RNA, 12 nt, Human
aaaaaaacucuu

SEQ ID NO: 3482214 - RNA, 9 nt, Human
aaaaaaaga

SEQ ID NO: 3482215 - RNA, 13 nt, Human
aaaaaaagaagaa

SEQ ID NO: 3482216 - RNA, 11 nt, Human
aaaaaaagaca

SEQ ID NO: 3482217 - RNA, 11 nt, Human
aaaaaaagcuu

SEQ ID NO: 3482218 - RNA, 11 nt, Human
aaaaaaauagu

SEQ ID NO: 3482219 - RNA, 12 nt, Human
aaaaaaaucuuc

SEQ ID NO: 3482220 - RNA, 13 nt, Human
aaaaaaaugcuga

SEQ ID NO: 3482221 - RNA, 16 nt, Human
aaaaaaccacaaaggc

SEQ ID NO: 3482222 - RNA, 15 nt, Human
aaaaaagagaauuag

SEQ ID NO: 3482223 - RNA, 11 nt, Human
aaaaaagauga

SEQ ID NO: 3482224 - RNA, 13 nt, Human
aaaaaagcuuuau

SEQ ID NO: 3482225 - RNA, 15 nt, Human
aaaaagggaggggga

SEQ ID NO: 3482226 - RNA, 21 nt, Human
aaaaagggucaaugcuauuuu

SEQ ID NO: 3482227 - RNA, 23 nt, Human
aaaaagggucaaugcuauuuuug

SEQ ID NO: 3482228 - RNA, 14 nt, Human
aaaaaguauaaaau

SEQ ID NO: 3482229 - RNA, 12 nt, Human
aaaaaguauugc

SEQ ID NO: 3482230 - RNA, 16 nt, Human
aaaaaguauugccaaa

SEQ ID NO: 3482231 - RNA, 20 nt, Human
aaaaaguauugccaaacauu

SEQ ID NO: 3482232 - RNA, 19 nt, Human
aaaaagucagagacagaua

SEQ ID NO: 3482233 - RNA, 22 nt, Human
aaaaagucucuauuuaaauucu

SEQ ID NO: 3482234 - RNA, 23 nt, Human
aaaaagucucuauuuaaauucuu

SEQ ID NO: 3482235 - RNA, 14 nt, Human
aaaaagugacacag

SEQ ID NO: 3482236 - RNA, 16 nt, Human
aaaaagugacacagca

SEQ ID NO: 3482237 - RNA, 17 nt, Human
aaaaagugacacagcag

SEQ ID NO: 3482238 - RNA, 23 nt, Human
aaaaagugacacagcagcuucac

SEQ ID NO: 3482239 - RNA, 17 nt, Human
aaaaaguggaauuucuu

SEQ ID NO: 3482240 - RNA, 15 nt, Human
aaaaaguggggcaga

SEQ ID NO: 3482241 - RNA, 22 nt, Human
aaaaaguggggcagagccuccc

SEQ ID NO: 3482242 - RNA, 22 nt, Human
aaaaaguggguuuuuuaguuga

SEQ ID NO: 3482243 - RNA, 12 nt, Human
aaaaagugucaa

SEQ ID NO: 3482244 - RNA, 12 nt, Human
aaaaaguguuua

SEQ ID NO: 3482245 - RNA, 13 nt, Human
aaaaaguguuuau

SEQ ID NO: 3482246 - RNA, 15 nt, Human
aaaaaguuaaugcuu

SEQ ID NO: 3482247 - RNA, 17 nt, Human
aaaaaguuauauagguu

SEQ ID NO: 3482248 - RNA, 20 nt, Human
aaaaaguugcagcuguuuug

SEQ ID NO: 3482249 - RNA, 12 nt, Human
aaaaaguuuaaa

SEQ ID NO: 3482250 - RNA, 17 nt, Human
aaaaaguuugccagaag

SEQ ID NO: 3482251 - RNA, 18 nt, Human
aaaaaguuugccagaagu

SEQ ID NO: 3482252 - RNA, 19 nt, Human
aaaaaguuugguucugugu

SEQ ID NO: 3482253 - RNA, 11 nt, Human
aaaaaguuugu

SEQ ID NO: 3482254 - RNA, 13 nt, Human
aaaaaguuuguuu

SEQ ID NO: 3482255 - RNA, 14 nt, Human
aaaaauaaaaaaca

SEQ ID NO: 3482256 - RNA, 21 nt, Human
aaaaauaaaaacugacuccuu

SEQ ID NO: 3482257 - RNA, 14 nt, Human
aaaaauaaaacugu

SEQ ID NO: 3482258 - RNA, 14 nt, Human
aaaaauaaacacua

SEQ ID NO: 3482259 - RNA, 12 nt, Human
aaaaauaaagaa

SEQ ID NO: 3482260 - RNA, 18 nt, Human
aaaaauaaauauaucuac

SEQ ID NO: 3482261 - RNA, 19 nt, Human
aaaaauaacuguaauuauu

SEQ ID NO: 3482262 - RNA, 16 nt, Human
aaaaauaagaagaaug

SEQ ID NO: 3482263 - RNA, 22 nt, Human
aaaaauaagaagaaugcuuaau

SEQ ID NO: 3482264 - RNA, 13 nt, Human
aaaaauacaaaaa

SEQ ID NO: 3482265 - RNA, 17 nt, Human
aaaaauacaaaaauuug

SEQ ID NO: 3482266 - RNA, 17 nt, Human
aaaaauacaauuuuuau

SEQ ID NO: 3482267 - RNA, 14 nt, Human
aaaaauacauguuc

SEQ ID NO: 3482268 - RNA, 15 nt, Human
aaaaauacauuuuau

SEQ ID NO: 3482269 - RNA, 15 nt, Human
aaaaauacucuaauu

SEQ ID NO: 3482270 - RNA, 16 nt, Human
aaaaauacucuaauuc

SEQ ID NO: 3482271 - RNA, 10 nt, Human
aaaaauacuu

SEQ ID NO: 3482272 - RNA, 18 nt, Human
aaaaauacuuuuucuaau

SEQ ID NO: 3482273 - RNA, 21 nt, Human
aaaaauacuuuuucuaaugag

SEQ ID NO: 3482274 - RNA, 21 nt, Human
aaaaauagcuaaauaccucaa

SEQ ID NO: 3482275 - RNA, 14 nt, Human
aaaaauaguuugga

SEQ ID NO: 3482276 - RNA, 12 nt, Human
aaaaauauaaaa

SEQ ID NO: 3482277 - RNA, 13 nt, Human
aaaaauauaaaac

SEQ ID NO: 3482278 - RNA, 17 nt, Human
aaaaauauacauguuua

SEQ ID NO: 3482279 - RNA, 15 nt, Human
aaaaauauauacuaa

SEQ ID NO: 3482280 - RNA, 18 nt, Human
aaaaauauauaucuaucu

SEQ ID NO: 3482281 - RNA, 17 nt, Human
aaaaauauauguauaua

SEQ ID NO: 3482282 - RNA, 13 nt, Human
aaaaauauauuua

SEQ ID NO: 3482283 - RNA, 14 nt, Human
aaaaauaucaaauu

SEQ ID NO: 3482284 - RNA, 16 nt, Human
aaaaauaucaaauuaa

SEQ ID NO: 3482285 - RNA, 21 nt, Human
aaaaauaugaccacacuccag

SEQ ID NO: 3482286 - RNA, 11 nt, Human
aaaaauauuua

SEQ ID NO: 3482287 - RNA, 13 nt, Human
aaaaauauuuaau

SEQ ID NO: 3482288 - RNA, 16 nt, Human
aaaaauauuuaauguu

SEQ ID NO: 3482289 - RNA, 22 nt, Human
aaaaauauuuucucuguacuuu

SEQ ID NO: 3482290 - RNA, 18 nt, Human
aaaaauauuuuuuuuucu

SEQ ID NO: 3482291 - RNA, 18 nt, Human
aaaaaucacaauuuuuaa

SEQ ID NO: 3482292 - RNA, 20 nt, Human
aaaaaucacuugauucauaa

SEQ ID NO: 3482293 - RNA, 18 nt, Human
aaaaagcucauauuuugu

SEQ ID NO: 3482294 - RNA, 22 nt, Human
aaaaagcuggugggugaaagaa

SEQ ID NO: 3482295 - RNA, 19 nt, Human
aaaaagcuuuaugauuuuc

SEQ ID NO: 3482296 - RNA, 16 nt, Human
aaaaaggaaaaaaaga

SEQ ID NO: 3482297 - RNA, 19 nt, Human
aaaaaggaaaaaauuaaua

SEQ ID NO: 3482298 - RNA, 13 nt, Human
aaaaaggaacugc

SEQ ID NO: 3482299 - RNA, 20 nt, Human
aaaaaggcuuauaaaacaga

SEQ ID NO: 3482300 - RNA, 16 nt, Human
aaaaagggaguuuuug

SEQ ID NO: 3482301 - RNA, 21 nt, Human
aaaaagggauccguacauuca

SEQ ID NO: 3482302 - RNA, 11 nt, Human
aaaaaggguca

SEQ ID NO: 3482303 - RNA, 19 nt, Human
aaaaagggucaaugcuauu

SEQ ID NO: 3482304 - RNA, 13 nt, Human
aaaaagguuuaca

SEQ ID NO: 3482305 - RNA, 18 nt, Human
aaaaagguuuacagaauu

SEQ ID NO: 3482306 - RNA, 21 nt, Human
aaaaaguaaguaccacucagg

SEQ ID NO: 3482307 - RNA, 19 nt, Human
aaaaaguaggaaaugaaug

SEQ ID NO: 3482308 - RNA, 22 nt, Human
aaaaagucuacgcucuccuuuc

SEQ ID NO: 3482309 - RNA, 15 nt, Human
aaaaagucucuauuu

SEQ ID NO: 3482310 - RNA, 18 nt, Human
aaaaagucucuauuuaaa

SEQ ID NO: 3482311 - RNA, 21 nt, Human
aaaaagucucuauuuaaauuc

SEQ ID NO: 3482312 - RNA, 14 nt, Human
aaaaagugaaauaa

SEQ ID NO: 3482313 - RNA, 13 nt, Human
aaaaagugacaca

SEQ ID NO: 3482314 - RNA, 15 nt, Human
aaaaagugacacagc

SEQ ID NO: 3482315 - RNA, 20 nt, Human
aaaaagugacacagcagcuu

SEQ ID NO: 3482316 - RNA, 20 nt, Human
aaaaaguggguuuuuuaguu

SEQ ID NO: 3482317 - RNA, 23 nt, Human
aaaaaguggguuuuuuaguugaa

SEQ ID NO: 3482318 - RNA, 12 nt, Human
aaaaaguuauau

SEQ ID NO: 3482319 - RNA, 23 nt, Human
aaaaaguuguaugaucugugccu

SEQ ID NO: 3482320 - RNA, 14 nt, Human
aaaaaguuuaaaau

SEQ ID NO: 3482321 - RNA, 18 nt, Human
aaaaaguuugucuuaguu

SEQ ID NO: 3482322 - RNA, 16 nt, Human
aaaaaguuuuaguuuu

SEQ ID NO: 3482323 - RNA, 17 nt, Human
aaaaaguuuuauuuuuc

SEQ ID NO: 3482324 - RNA, 23 nt, Human
aaaaaguuuugcccuuuuuaagg

SEQ ID NO: 3482325 - RNA, 14 nt, Human
aaaaauaaaacauu

SEQ ID NO: 3482326 - RNA, 12 nt, Human
aaaaauaaagca

SEQ ID NO: 3482327 - RNA, 24 nt, Human
aaaaauaaauauaucuaccccaga

SEQ ID NO: 3482328 - RNA, 22 nt, Human
aaaaauaaccccaaaaugaaga

SEQ ID NO: 3482329 - RNA, 17 nt, Human
aaaaauaauaaauugca

SEQ ID NO: 3482330 - RNA, 16 nt, Human
aaaaauaauaauaaug

SEQ ID NO: 3482331 - RNA, 18 nt, Human
aaaaauaaucaaaagcua

SEQ ID NO: 3482332 - RNA, 12 nt, Human
aaaaauaauuuu

SEQ ID NO: 3482333 - RNA, 14 nt, Human
aaaaauacucagau

SEQ ID NO: 3482334 - RNA, 22 nt, Human
aaaaauacucuaauucuaacca

SEQ ID NO: 3482335 - RNA, 11 nt, Human
aaaaauacugc

SEQ ID NO: 3482336 - RNA, 15 nt, Human
aaaaauacuugucaa

SEQ ID NO: 3482337 - RNA, 22 nt, Human
aaaaauacuugucaauauuuaa

SEQ ID NO: 3482338 - RNA, 11 nt, Human
aaaaauagaaa

SEQ ID NO: 3482339 - RNA, 16 nt, Human
aaaaauagaaacauau

SEQ ID NO: 3482340 - RNA, 14 nt, Human
aaaaauagcaacuu

SEQ ID NO: 3482341 - RNA, 15 nt, Human
aaaaauagcaacuug

SEQ ID NO: 3482342 - RNA, 17 nt, Human
aaaaauagugucuuugu

SEQ ID NO: 3482343 - RNA, 22 nt, Human
aaaaauauaaaauuaugagauu

SEQ ID NO: 3482344 - RNA, 14 nt, Human
aaaaauauaacuua

SEQ ID NO: 3482345 - RNA, 18 nt, Human
aaaaauauacauguuuau

SEQ ID NO: 3482346 - RNA, 15 nt, Human
aaaaauaucaaauua

SEQ ID NO: 3482347 - RNA, 15 nt, Human
aaaaauaucuguaag

SEQ ID NO: 3482348 - RNA, 23 nt, Human
aaaaauaugaccacacuccagcu

SEQ ID NO: 3482349 - RNA, 13 nt, Human
aaaaauauuccau

SEQ ID NO: 3482350 - RNA, 11 nt, Human
aaaaauauugu

SEQ ID NO: 3482351 - RNA, 15 nt, Human
aaaaauauuuaaugu

SEQ ID NO: 3482352 - RNA, 22 nt, Human
aaaaaucaacuuuuuauugccu

SEQ ID NO: 3482353 - RNA, 12 nt, Human
aaaaaucaagua

SEQ ID NO: 3482354 - RNA, 20 nt, Human
aaaaaucaugccaguauuuu

SEQ ID NO: 3482355 - RNA, 16 nt, Human
aaaaaucauguuugcu

SEQ ID NO: 3482356 - RNA, 18 nt, Human
aaaaauccaaauauuguu

SEQ ID NO: 3482357 - RNA, 14 nt, Human
aaaaauccagaaac

SEQ ID NO: 3482358 - RNA, 16 nt, Human
aaaaauccuucuaauc

SEQ ID NO: 3482359 - RNA, 17 nt, Human
aaaaauccuucuaaucu

SEQ ID NO: 3482360 - RNA, 18 nt, Human
aaaaauccuucuaaucug

SEQ ID NO: 3482361 - RNA, 20 nt, Human
aaaaauccuucuaaucugcu

SEQ ID NO: 3482362 - RNA, 17 nt, Human
aaaaaucucaaauuucu

SEQ ID NO: 3482363 - RNA, 13 nt, Human
aaaaaucugaaga

SEQ ID NO: 3482364 - RNA, 17 nt, Human
aaaaaucugaagauugu

SEQ ID NO: 3482365 - RNA, 20 nt, Human
aaaaaucugaagauuguuua

SEQ ID NO: 3482366 - RNA, 21 nt, Human
aaaaaucugaagauuguuuau

SEQ ID NO: 3482367 - RNA, 23 nt, Human
aaaaaucugaagauuguuuaucu

SEQ ID NO: 3482368 - RNA, 20 nt, Human
aaaaaucugcagaaggaaaa

SEQ ID NO: 3482369 - RNA, 17 nt, Human
aaaaaucuuccaauuua

SEQ ID NO: 3482370 - RNA, 16 nt, Human
aaaaaucuucuccaga

SEQ ID NO: 3482371 - RNA, 12 nt, Human
aaaaaugaaagc

SEQ ID NO: 3482372 - RNA, 15 nt, Human
aaaaaugaaugucua

SEQ ID NO: 3482373 - RNA, 14 nt, Human
aaaaaugagaacau

SEQ ID NO: 3482374 - RNA, 17 nt, Human
aaaaaugagaacauguu

SEQ ID NO: 3482375 - RNA, 14 nt, Human
aaaaaugaucuaaa

SEQ ID NO: 3482376 - RNA, 18 nt, Human
aaaaaugcaaauccuaug

SEQ ID NO: 3482377 - RNA, 22 nt, Human
aaaaaugcaaauccuaugugau

SEQ ID NO: 3482378 - RNA, 19 nt, Human
aaaaaugcacccuuucccu

SEQ ID NO: 3482379 - RNA, 18 nt, Human
aaaaaugccauaauacaa

SEQ ID NO: 3482380 - RNA, 24 nt, Human
aaaaaugccuuugagacaguuucu

SEQ ID NO: 3482381 - RNA, 23 nt, Human
aaaaauggaaacauuuauuccuu

SEQ ID NO: 3482382 - RNA, 14 nt, Human
aaaagggaguuuuu

SEQ ID NO: 3482383 - RNA, 21 nt, Human
aaaagggucaaugcuauuuuu

SEQ ID NO: 3482384 - RNA, 13 nt, Human
aaaagggucagag

SEQ ID NO: 3482385 - RNA, 14 nt, Human
aaaagguaaaacuu

SEQ ID NO: 3482386 - RNA, 23 nt, Human
aaaagguaaaacuuuuuauauuu

SEQ ID NO: 3482387 - RNA, 22 nt, Human
aaaaggugccugugaggcaggg

SEQ ID NO: 3482388 - RNA, 19 nt, Human
aaaagguucuuacugcuug

SEQ ID NO: 3482389 - RNA, 20 nt, Human
aaaagguucuucaucccuuu

SEQ ID NO: 3482390 - RNA, 13 nt, Human
aaaagguuuacag

SEQ ID NO: 3482391 - RNA, 14 nt, Human
aaaagguuuacaga

SEQ ID NO: 3482392 - RNA, 16 nt, Human
aaaagguuuacagaau

SEQ ID NO: 3482393 - RNA, 23 nt, Human
aaaagguuuaugaaaaagaagaa

SEQ ID NO: 3482394 - RNA, 16 nt, Human
aaaagguuuuauuuug

SEQ ID NO: 3482395 - RNA, 23 nt, Human
aaaagguuuuauuuuguaauuau

SEQ ID NO: 3482396 - RNA, 12 nt, Human
aaaaguaaaaug

SEQ ID NO: 3482397 - RNA, 11 nt, Human
aaaaguaaaca

SEQ ID NO: 3482398 - RNA, 15 nt, Human
aaaaguaaauguaca

SEQ ID NO: 3482399 - RNA, 12 nt, Human
aaaaguaacuug

SEQ ID NO: 3482400 - RNA, 16 nt, Human
aaaaguaaugccucug

SEQ ID NO: 3482401 - RNA, 21 nt, Human
aaaaguaucgggggcuggggc

SEQ ID NO: 3482402 - RNA, 20 nt, Human
aaaaguauguuagugcaaau

SEQ ID NO: 3482403 - RNA, 23 nt, Human
aaaaguauuuugaaguuuacauu

SEQ ID NO: 3482404 - RNA, 19 nt, Human
aaaaguauuuuuucaaguu

SEQ ID NO: 3482405 - RNA, 14 nt, Human
aaaagucacaaugu

SEQ ID NO: 3482406 - RNA, 15 nt, Human
aaaagucacaauguu

SEQ ID NO: 3482407 - RNA, 23 nt, Human
aaaagucaccaaauagugugaaa

SEQ ID NO: 3482408 - RNA, 15 nt, Human
aaaagucagauguuu

SEQ ID NO: 3482409 - RNA, 22 nt, Human
aaaagucauaaaauguaucuuc

SEQ ID NO: 3482410 - RNA, 13 nt, Human
aaaaguccaauuu

SEQ ID NO: 3482411 - RNA, 18 nt, Human
aaaaguccaauuuuaauu

SEQ ID NO: 3482412 - RNA, 20 nt, Human
aaaaguccauaccuuauaua

SEQ ID NO: 3482413 - RNA, 15 nt, Human
aaaagucguuuucca

SEQ ID NO: 3482414 - RNA, 16 nt, Human
aaaagucguuuuccaa

SEQ ID NO: 3482415 - RNA, 19 nt, Human
aaaagucguuuuccaaacu

SEQ ID NO: 3482416 - RNA, 22 nt, Human
aaaagucguuuuccaaacugac

SEQ ID NO: 3482417 - RNA, 20 nt, Human
aaaagucucuauuuaaauuc

SEQ ID NO: 3482418 - RNA, 19 nt, Human
aaaagucuuuuaaaaagua

SEQ ID NO: 3482419 - RNA, 21 nt, Human
aaaagugaucaauaaaaugug

SEQ ID NO: 3482420 - RNA, 18 nt, Human
aaaagugcuucauucuuu

SEQ ID NO: 3482421 - RNA, 16 nt, Human
aaaaguggaagugaca

SEQ ID NO: 3482422 - RNA, 16 nt, Human
aaaaguggccucuuug

SEQ ID NO: 3482423 - RNA, 14 nt, Human
aaaaguggggcaga

SEQ ID NO: 3482424 - RNA, 23 nt, Human
aaaaguggguuuuuuaguugaau

SEQ ID NO: 3482425 - RNA, 20 nt, Human
aaaaguguguauauauuuug

SEQ ID NO: 3482426 - RNA, 16 nt, Human
aaaaguuaaugcuuaa

SEQ ID NO: 3482427 - RNA, 18 nt, Human
aaaaguuaaugcuuaaga

SEQ ID NO: 3482428 - RNA, 23 nt, Human
aaaaguuccaagagucuaaagau

SEQ ID NO: 3482429 - RNA, 17 nt, Human
aaaaguucccugaaaca

SEQ ID NO: 3482430 - RNA, 17 nt, Human
aaaaguucugacuugac

SEQ ID NO: 3482431 - RNA, 18 nt, Human
aaaaguugaagaucguga

SEQ ID NO: 3482432 - RNA, 23 nt, Human
aaaaguuggacuaaaugccuagu

SEQ ID NO: 3482433 - RNA, 23 nt, Human
aaaaguuggguuuucuccauuca

SEQ ID NO: 3482434 - RNA, 18 nt, Human
aaaaguuguaugaucugu

SEQ ID NO: 3482435 - RNA, 15 nt, Human
aaaaguuguucaacu

SEQ ID NO: 3482436 - RNA, 18 nt, Human
aaaaguuuaauauuaaag

SEQ ID NO: 3482437 - RNA, 18 nt, Human
aaaacaagaaaguuuccc

SEQ ID NO: 3482438 - RNA, 15 nt, Human
aaaacaagaaugaaa

SEQ ID NO: 3482439 - RNA, 18 nt, Human
aaaacaauaggaugggcu

SEQ ID NO: 3482440 - RNA, 20 nt, Human
aaaacaauauuuauuguauu

SEQ ID NO: 3482441 - RNA, 23 nt, Human
aaaacaauauuuauuguauuuua

SEQ ID NO: 3482442 - RNA, 18 nt, Human
aaaacaauggaguauucu

SEQ ID NO: 3482443 - RNA, 19 nt, Human
aaaacaaugguaacauuuu

SEQ ID NO: 3482444 - RNA, 11 nt, Human
aaaacacagag

SEQ ID NO: 3482445 - RNA, 17 nt, Human
aaaacacauuuuucuua

SEQ ID NO: 3482446 - RNA, 15 nt, Human
aaaacaccuucuaua

SEQ ID NO: 3482447 - RNA, 21 nt, Human
aaaacacuaaaaauaaaaaug

SEQ ID NO: 3482448 - RNA, 21 nt, Human
aaaacacuauuuuuuuuucuu

SEQ ID NO: 3482449 - RNA, 23 nt, Human
aaaacacuguggaacuaauaaau

SEQ ID NO: 3482450 - RNA, 16 nt, Human
aaaacagaaaaaaaac

SEQ ID NO: 3482451 - RNA, 15 nt, Human
aaaacagaaauuggu

SEQ ID NO: 3482452 - RNA, 17 nt, Human
aaaacagacacuggcau

SEQ ID NO: 3482453 - RNA, 15 nt, Human
aaaacagacucaggu

SEQ ID NO: 3482454 - RNA, 18 nt, Human
aaaacagaguaaucuugu

SEQ ID NO: 3482455 - RNA, 19 nt, Human
aaaacagaguaaucuuguu

SEQ ID NO: 3482456 - RNA, 18 nt, Human
aaaacagggccacauaga

SEQ ID NO: 3482457 - RNA, 18 nt, Human
aaaacagguauauacuuu

SEQ ID NO: 3482458 - RNA, 19 nt, Human
aaaacagguauauacuuug

SEQ ID NO: 3482459 - RNA, 18 nt, Human
aaaacaggucaauacagu

SEQ ID NO: 3482460 - RNA, 21 nt, Human
aaaacaggucuucaucgaauc

SEQ ID NO: 3482461 - RNA, 18 nt, Human
aaaacaguaguguauuaa

SEQ ID NO: 3482462 - RNA, 21 nt, Human
aaaacaguauuuauuuuguaa

SEQ ID NO: 3482463 - RNA, 23 nt, Human
aaaacaguauuuauuuuguaauu

SEQ ID NO: 3482464 - RNA, 19 nt, Human
aaaacaguggaucacaaag

SEQ ID NO: 3482465 - RNA, 17 nt, Human
aaaacauaaucuucugc

SEQ ID NO: 3482466 - RNA, 18 nt, Human
aaaacauaaucuucugcc

SEQ ID NO: 3482467 - RNA, 22 nt, Human
aaaacaucauuccuuuuuauuu

SEQ ID NO: 3482468 - RNA, 21 nt, Human
aaaacaucuauucucuccaaa

SEQ ID NO: 3482469 - RNA, 13 nt, Human
aaaacaucucauc

SEQ ID NO: 3482470 - RNA, 24 nt, Human
aaaacaucuuugaaauuauguaaa

SEQ ID NO: 3482471 - RNA, 19 nt, Human
aaaacauguaauauaaaga

SEQ ID NO: 3482472 - RNA, 13 nt, Human
aaaacauguaugu

SEQ ID NO: 3482473 - RNA, 19 nt, Human
aaaacauguuuauuuuucu

SEQ ID NO: 3482474 - RNA, 16 nt, Human
aaaacauuaagaaaau

SEQ ID NO: 3482475 - RNA, 19 nt, Human
aaaacauuaagaaaaucau

SEQ ID NO: 3482476 - RNA, 23 nt, Human
aaaacauuaagaaaaucauauug

SEQ ID NO: 3482477 - RNA, 20 nt, Human
aaaacauuccguuuacauuu

SEQ ID NO: 3482478 - RNA, 21 nt, Human
aaaacauuccguuuacauuuu

SEQ ID NO: 3482479 - RNA, 12 nt, Human
aaaacauucuau

SEQ ID NO: 3482480 - RNA, 12 nt, Human
aaaacauuguuc

SEQ ID NO: 3482481 - RNA, 16 nt, Human
aaaacauuuauuuuga

SEQ ID NO: 3482482 - RNA, 13 nt, Human
aaaacauuugcug

SEQ ID NO: 3482483 - RNA, 18 nt, Human
aaaacauuuggcagaaaa

SEQ ID NO: 3482484 - RNA, 19 nt, Human
aaaacauuuuaaauggaca

SEQ ID NO: 3482485 - RNA, 21 nt, Human
aaaacauuuuuuaauagaaua

SEQ ID NO: 3482486 - RNA, 21 nt, Human
aaaacauuuuuuuuuuaaauc

SEQ ID NO: 3482487 - RNA, 23 nt, Human
aaaaccaaaaguuauuaaaauug

SEQ ID NO: 3482488 - RNA, 15 nt, Human
aaaaccaaauguuua

SEQ ID NO: 3482489 - RNA, 12 nt, Human
aaaaccaaauuc

SEQ ID NO: 3482490 - RNA, 14 nt, Human
aaaaccaagaagau

SEQ ID NO: 3482491 - RNA, 19 nt, Human
aaaaccaagccguggcuuc

SEQ ID NO: 3482492 - RNA, 15 nt, Human
aaaaccaauguucuc

SEQ ID NO: 3482493 - RNA, 12 nt, Human
aaaaccacacaa

SEQ ID NO: 3482494 - RNA, 12 nt, Human
aaaaccacagca

SEQ ID NO: 3482495 - RNA, 19 nt, Human
aaaaccacagcccugucag

SEQ ID NO: 3482496 - RNA, 18 nt, Human
aaaaccaccaaaaacaaa

SEQ ID NO: 3482497 - RNA, 17 nt, Human
aaaaccacuagaacucu

SEQ ID NO: 3482498 - RNA, 22 nt, Human
aaaacccaccuuguuggagccu

SEQ ID NO: 3482499 - RNA, 13 nt, Human
aaaacccagagag

SEQ ID NO: 3482500 - RNA, 19 nt, Human
aaaacccagcugcaccccu

SEQ ID NO: 3482501 - RNA, 13 nt, Human
aaaacccccaaac

SEQ ID NO: 3482502 - RNA, 17 nt, Human
aaaaccccccagauauc

SEQ ID NO: 3482503 - RNA, 15 nt, Human
aaaacccucaagggc

SEQ ID NO: 3482504 - RNA, 15 nt, Human
aaaacccugccccca

SEQ ID NO: 3482505 - RNA, 16 nt, Human
aaaacccuugggccag

SEQ ID NO: 3482506 - RNA, 14 nt, Human
aaaaccgaauaaau

SEQ ID NO: 3482507 - RNA, 15 nt, Human
aaaaccgaauaaaug

SEQ ID NO: 3482508 - RNA, 16 nt, Human
aaaaccuacauauucc

SEQ ID NO: 3482509 - RNA, 14 nt, Human
aaaaccugucaaug

SEQ ID NO: 3482510 - RNA, 17 nt, Human
aaaaccugucaaugaua

SEQ ID NO: 3482511 - RNA, 13 nt, Human
aaaacgaaaacag

SEQ ID NO: 3482512 - RNA, 15 nt, Human
aaaacgcgcagaugu

SEQ ID NO: 3482513 - RNA, 17 nt, Human
aaaacgcgcagaugugc

SEQ ID NO: 3482514 - RNA, 18 nt, Human
aaaacgguuaaaacuguc

SEQ ID NO: 3482515 - RNA, 21 nt, Human
aaaacguggcugcuucaagga

SEQ ID NO: 3482516 - RNA, 17 nt, Human
aaaacguuuuauugugu

SEQ ID NO: 3482517 - RNA, 19 nt, Human
aaaacguuuuauuguguuu

SEQ ID NO: 3482518 - RNA, 18 nt, Human
aaaacuaaaucucuaaua

SEQ ID NO: 3482519 - RNA, 19 nt, Human
aaaacuaaaucucuaauau

SEQ ID NO: 3482520 - RNA, 18 nt, Human
aaaacuacauuuuaacau

SEQ ID NO: 3482521 - RNA, 17 nt, Human
aaaacuacuucuuuuuu

SEQ ID NO: 3482522 - RNA, 21 nt, Human
aaaacuauacuugaacaaaag

SEQ ID NO: 3482523 - RNA, 20 nt, Human
aaaacuauucaugcuaccca

SEQ ID NO: 3482524 - RNA, 23 nt, Human
aaaacucaaccaaaugguacaaa

SEQ ID NO: 3482525 - RNA, 12 nt, Human
aaaacucagccu

SEQ ID NO: 3482526 - RNA, 23 nt, Human
aaaacucaggcaaagaaaaugaa

SEQ ID NO: 3482527 - RNA, 16 nt, Human
aaaacucccauuuacg

SEQ ID NO: 3482528 - RNA, 12 nt, Human
aaaacucuacuu

SEQ ID NO: 3482529 - RNA, 15 nt, Human
aaaacucuacuuaau

SEQ ID NO: 3482530 - RNA, 18 nt, Human
aaaacucuccucugcugc

SEQ ID NO: 3482531 - RNA, 19 nt, Human
aaaacucuuauaaauuucu

SEQ ID NO: 3482532 - RNA, 12 nt, Human
aaaacucuuuaa

SEQ ID NO: 3482533 - RNA, 15 nt, Human
aaaacucuuucggua

SEQ ID NO: 3482534 - RNA, 19 nt, Human
aaaacugaaaaucuaauau

SEQ ID NO: 3482535 - RNA, 15 nt, Human
aaaacugaagucuga

SEQ ID NO: 3482536 - RNA, 21 nt, Human
aaaacugaagucugaaauuug

SEQ ID NO: 3482537 - RNA, 15 nt, Human
aaaacugaugugaaa

SEQ ID NO: 3482538 - RNA, 14 nt, Human
aaaacugcauuuca

SEQ ID NO: 3482539 - RNA, 19 nt, Human
aaaacugcguuaaaggcuc

SEQ ID NO: 3482540 - RNA, 14 nt, Human
aaaagauaaauauu

SEQ ID NO: 3482541 - RNA, 15 nt, Human
aaaagauaauauuuu

SEQ ID NO: 3482542 - RNA, 21 nt, Human
aaaagauaccuuaaaauuuga

SEQ ID NO: 3482543 - RNA, 12 nt, Human
aaaagauauaag

SEQ ID NO: 3482544 - RNA, 18 nt, Human
aaaagaugaaagagcagu

SEQ ID NO: 3482545 - RNA, 22 nt, Human
aaaagaugcacuuugcuuuaau

SEQ ID NO: 3482546 - RNA, 19 nt, Human
aaaagaugcuuuuaacaga

SEQ ID NO: 3482547 - RNA, 18 nt, Human
aaaagauggccuuugcuu

SEQ ID NO: 3482548 - RNA, 19 nt, Human
aaaagauggggucuguaaa

SEQ ID NO: 3482549 - RNA, 16 nt, Human
aaaagaugguaucaua

SEQ ID NO: 3482550 - RNA, 23 nt, Human
aaaagauguagauuuauuucauc

SEQ ID NO: 3482551 - RNA, 14 nt, Human
aaaagauguauccu

SEQ ID NO: 3482552 - RNA, 16 nt, Human
aaaagauugcugaaau

SEQ ID NO: 3482553 - RNA, 18 nt, Human
aaaagauugcugaaauuu

SEQ ID NO: 3482554 - RNA, 15 nt, Human
aaaagauuguauugc

SEQ ID NO: 3482555 - RNA, 13 nt, Human
aaaagauuuaagc

SEQ ID NO: 3482556 - RNA, 13 nt, Human
aaaagauuuguuu

SEQ ID NO: 3482557 - RNA, 17 nt, Human
aaaagauuuguuuuguc

SEQ ID NO: 3482558 - RNA, 21 nt, Human
aaaagauuuucagaaaauauu

SEQ ID NO: 3482559 - RNA, 13 nt, Human
aaaagcaaaauaa

SEQ ID NO: 3482560 - RNA, 13 nt, Human
aaaagcaacacuu

SEQ ID NO: 3482561 - RNA, 14 nt, Human
aaaagcaacauuca

SEQ ID NO: 3482562 - RNA, 15 nt, Human
aaaagcaaugguuga

SEQ ID NO: 3482563 - RNA, 16 nt, Human
aaaagcaauuccaacc

SEQ ID NO: 3482564 - RNA, 14 nt, Human
aaaagcagcauaaa

SEQ ID NO: 3482565 - RNA, 16 nt, Human
aaaagcagcucucccc

SEQ ID NO: 3482566 - RNA, 22 nt, Human
aaaagcaggcuucuaugaaaga

SEQ ID NO: 3482567 - RNA, 19 nt, Human
aaaagcaguaaauuugcua

SEQ ID NO: 3482568 - RNA, 13 nt, Human
aaaagcauaaaug

SEQ ID NO: 3482569 - RNA, 12 nt, Human
aaaagcauguac

SEQ ID NO: 3482570 - RNA, 18 nt, Human
aaaagcauguacaguguu

SEQ ID NO: 3482571 - RNA, 10 nt, Human
aaaagcauuu

SEQ ID NO: 3482572 - RNA, 17 nt, Human
aaaagccacuagacucu

SEQ ID NO: 3482573 - RNA, 23 nt, Human
aaaagccagguuccacagaggac

SEQ ID NO: 3482574 - RNA, 13 nt, Human
aaaagccauguuu

SEQ ID NO: 3482575 - RNA, 14 nt, Human
aaaagccauguuua

SEQ ID NO: 3482576 - RNA, 15 nt, Human
aaaagccauguuuaa

SEQ ID NO: 3482577 - RNA, 20 nt, Human
aaaagccauguuuaagauuu

SEQ ID NO: 3482578 - RNA, 21 nt, Human
aaaagccauguuuaagauuua

SEQ ID NO: 3482579 - RNA, 17 nt, Human
aaaagcccaggagccca

SEQ ID NO: 3482580 - RNA, 16 nt, Human
aaaagccuaaucacag

SEQ ID NO: 3482581 - RNA, 14 nt, Human
aaaagccuugugua

SEQ ID NO: 3482582 - RNA, 14 nt, Human
aaaauggugccuga

SEQ ID NO: 3482583 - RNA, 18 nt, Human
aaaaugguggcuucagcu

SEQ ID NO: 3482584 - RNA, 21 nt, Human
aaaaugguggcuucagcucca

SEQ ID NO: 3482585 - RNA, 20 nt, Human
aaaaugguguuuuaucuucu

SEQ ID NO: 3482586 - RNA, 18 nt, Human
aaaaugguuuaaaugguc

SEQ ID NO: 3482587 - RNA, 14 nt, Human
aaaaugguuuauuu

SEQ ID NO: 3482588 - RNA, 19 nt, Human
aaaauguaaaggagucaaa

SEQ ID NO: 3482589 - RNA, 20 nt, Human
aaaauguaaauauucuauau

SEQ ID NO: 3482590 - RNA, 22 nt, Human
aaaauguaagauuauagauucu

SEQ ID NO: 3482591 - RNA, 18 nt, Human
aaaauguaauuuaaauga

SEQ ID NO: 3482592 - RNA, 15 nt, Human
aaaauguacauguau

SEQ ID NO: 3482593 - RNA, 12 nt, Human
aaaauguauaua

SEQ ID NO: 3482594 - RNA, 14 nt, Human
aaaauguauaugca

SEQ ID NO: 3482595 - RNA, 14 nt, Human
aaacauuuucacac

SEQ ID NO: 3482596 - RNA, 16 nt, Human
aaacauuuucacacaa

SEQ ID NO: 3482597 - RNA, 13 nt, Human
aaacauuuucucc

SEQ ID NO: 3482598 - RNA, 19 nt, Human
aaacauuuucucuuagaaa

SEQ ID NO: 3482599 - RNA, 12 nt, Human
aaacauuuucug

SEQ ID NO: 3482600 - RNA, 16 nt, Human
aaacauuuucuugaau

SEQ ID NO: 3482601 - RNA, 18 nt, Human
aaacauuuugucauauaa

SEQ ID NO: 3482602 - RNA, 14 nt, Human
aaaccaaagaagaa

SEQ ID NO: 3482603 - RNA, 20 nt, Human
aaaccaaagagggcuuccuc

SEQ ID NO: 3482604 - RNA, 17 nt, Human
aaaccaaaggacauuau

SEQ ID NO: 3482605 - RNA, 23 nt, Human
aaaccaaaggacauuaugugugc

SEQ ID NO: 3482606 - RNA, 16 nt, Human
aaaccaagagauugcu

SEQ ID NO: 3482607 - RNA, 20 nt, Human
aaaccaagagauugcuaauu

SEQ ID NO: 3482608 - RNA, 16 nt, Human
aaaccaagccguggcu

SEQ ID NO: 3482609 - RNA, 19 nt, Human
aaaccaagccguggcuucc

SEQ ID NO: 3482610 - RNA, 14 nt, Human
aaaccaaggacuga

SEQ ID NO: 3482611 - RNA, 22 nt, Human
aaaccaagggggaugacaugug

SEQ ID NO: 3482612 - RNA, 23 nt, Human
aaaccaagucaagugaaaaagga

SEQ ID NO: 3482613 - RNA, 22 nt, Human
aaaccacaacugacacaggaaa

SEQ ID NO: 3482614 - RNA, 21 nt, Human
aaaccacaaggcuguugcaug

SEQ ID NO: 3482615 - RNA, 14 nt, Human
aaaccacacaaaga

SEQ ID NO: 3482616 - RNA, 12 nt, Human
aaaccacagcag

SEQ ID NO: 3482617 - RNA, 15 nt, Human
aaaccacagcaguug

SEQ ID NO: 3482618 - RNA, 15 nt, Human
aaaccacagcccugu

SEQ ID NO: 3482619 - RNA, 16 nt, Human
aaaccacagcccuguc

SEQ ID NO: 3482620 - RNA, 18 nt, Human
aaaccaccagaagcccag

SEQ ID NO: 3482621 - RNA, 23 nt, Human
aaaccaccagugcccaaagucug

SEQ ID NO: 3482622 - RNA, 20 nt, Human
aaaccacuuuuugcagcuuu

SEQ ID NO: 3482623 - RNA, 16 nt, Human
aaaccagcuuccuuca

SEQ ID NO: 3482624 - RNA, 18 nt, Human
aaaccagcuuccuucaga

SEQ ID NO: 3482625 - RNA, 12 nt, Human
aaaccagggagc

SEQ ID NO: 3482626 - RNA, 23 nt, Human
aaaccaguuuagauuucaagaaa

SEQ ID NO: 3482627 - RNA, 22 nt, Human
aaaccaucaaguugugccaaau

SEQ ID NO: 3482628 - RNA, 19 nt, Human
aaaccaucucccuggugcu

SEQ ID NO: 3482629 - RNA, 20 nt, Human
aaaccaugggauaaaugcca

SEQ ID NO: 3482630 - RNA, 13 nt, Human
aaaccauugcuuc

SEQ ID NO: 3482631 - RNA, 15 nt, Human
aaaccauugcuucac

SEQ ID NO: 3482632 - RNA, 19 nt, Human
aaacccaagauuauuaaaa

SEQ ID NO: 3482633 - RNA, 15 nt, Human
aaacccaauccaaau

SEQ ID NO: 3482634 - RNA, 12 nt, Human
aaacccagagag

SEQ ID NO: 3482635 - RNA, 18 nt, Human
aaacccagcucuggucca

SEQ ID NO: 3482636 - RNA, 21 nt, Human
aaacccauaggcccacacaca

SEQ ID NO: 3482637 - RNA, 22 nt, Human
aaacccauaggcccacacacag

SEQ ID NO: 3482638 - RNA, 23 nt, Human
aaacccauaggcccacacacagg

SEQ ID NO: 3482639 - RNA, 20 nt, Human
aaaccccaccuuuauuccuu

SEQ ID NO: 3482640 - RNA, 13 nt, Human
aaaccccaucucu

SEQ ID NO: 3482641 - RNA, 17 nt, Human
aaaccccaucucuacaa

SEQ ID NO: 3482642 - RNA, 16 nt, Human
aaacccccacacacac

SEQ ID NO: 3482643 - RNA, 17 nt, Human
aaacccccuuugugcug

SEQ ID NO: 3482644 - RNA, 18 nt, Human
aaaccccuguaggccuca

SEQ ID NO: 3482645 - RNA, 16 nt, Human
aaacccuagccuugcu

SEQ ID NO: 3482646 - RNA, 23 nt, Human
aaacccucguuucugauuaaugc

SEQ ID NO: 3482647 - RNA, 18 nt, Human
aaacccugucaaacauua

SEQ ID NO: 3482648 - RNA, 12 nt, Human
aaacccugucuc

SEQ ID NO: 3482649 - RNA, 21 nt, Human
aaacccugucucuacuaaaaa

SEQ ID NO: 3482650 - RNA, 13 nt, Human
aaaccgccagcuc

SEQ ID NO: 3482651 - RNA, 14 nt, Human
aaaccgcuaaaaga

SEQ ID NO: 3482652 - RNA, 16 nt, Human
aaaccgcuaaaagaaa

SEQ ID NO: 3482653 - RNA, 23 nt, Human
aaaccgcuaaaagaaacuuucuu

SEQ ID NO: 3482654 - RNA, 13 nt, Human
aaaccguguuugu

SEQ ID NO: 3482655 - RNA, 20 nt, Human
aaaccguguuugucucuucu

SEQ ID NO: 3482656 - RNA, 21 nt, Human
aaaccguguuugucucuucug

SEQ ID NO: 3482657 - RNA, 17 nt, Human
aaaccuaaaaaagauau

SEQ ID NO: 3482658 - RNA, 15 nt, Human
aaaccuacauauucc

SEQ ID NO: 3482659 - RNA, 16 nt, Human
aaaccuaguacugccc

SEQ ID NO: 3482660 - RNA, 22 nt, Human
aaaccucaaaaugucuaagaua

SEQ ID NO: 3482661 - RNA, 21 nt, Human
aaaccuccaaaacuccugccc

SEQ ID NO: 3482662 - RNA, 22 nt, Human
aaaccugaaaaaaaguuuacaa

SEQ ID NO: 3482663 - RNA, 18 nt, Human
aaaccugaagacugagga

SEQ ID NO: 3482664 - RNA, 14 nt, Human
aaaccugauguuaa

SEQ ID NO: 3482665 - RNA, 14 nt, Human
aaaccugcuuuuca

SEQ ID NO: 3482666 - RNA, 21 nt, Human
aaaccugggauucaggaaugu

SEQ ID NO: 3482667 - RNA, 16 nt, Human
aaaccuguaucuuucu

SEQ ID NO: 3482668 - RNA, 16 nt, Human
aaaccuguuuaaauau

SEQ ID NO: 3482669 - RNA, 19 nt, Human
aaaccuguuuaaauauuuc

SEQ ID NO: 3482670 - RNA, 14 nt, Human
aaaccuuaauauuu

SEQ ID NO: 3482671 - RNA, 21 nt, Human
aaaccuuaauauuucuucaaa

SEQ ID NO: 3482672 - RNA, 17 nt, Human
aaaccuucacuuaggaa

SEQ ID NO: 3482673 - RNA, 23 nt, Human
aaaccuuccacccagugcugaau

SEQ ID NO: 3482674 - RNA, 14 nt, Human
aaaccuugccuuuc

SEQ ID NO: 3482675 - RNA, 22 nt, Human
aaaccuugguguaguugaacug

SEQ ID NO: 3482676 - RNA, 17 nt, Human
aaaccuuucuucaccaa

SEQ ID NO: 3482677 - RNA, 16 nt, Human
aaaccuuuucuuguau

SEQ ID NO: 3482678 - RNA, 13 nt, Human
aaaccuuuugaaa

SEQ ID NO: 3482679 - RNA, 21 nt, Human
aaaccuuuuuuaagauuuuuc

SEQ ID NO: 3482680 - RNA, 14 nt, Human
aaacgaaagcuggg

SEQ ID NO: 3482681 - RNA, 19 nt, Human
aaacgagucaauccccuca

SEQ ID NO: 3482682 - RNA, 13 nt, Human
aaacgcaucuagu

SEQ ID NO: 3482683 - RNA, 15 nt, Human
aaacgcgcagaugug

SEQ ID NO: 3482684 - RNA, 23 nt, Human
aaacgcgcagaugugcagcagau

SEQ ID NO: 3482685 - RNA, 22 nt, Human
aaacgcuaaagagcccuugccu

SEQ ID NO: 3482686 - RNA, 21 nt, Human
aaacgcuaccucucugucccu

SEQ ID NO: 3482687 - RNA, 19 nt, Human
aaacgcucucuacucugcu

SEQ ID NO: 3482688 - RNA, 13 nt, Human
aaacgcugucaaa

SEQ ID NO: 3482689 - RNA, 18 nt, Human
aaacgcugucaaaaguug

SEQ ID NO: 3482690 - RNA, 22 nt, Human
aaacgcugucaaaaguuggacu

SEQ ID NO: 3482691 - RNA, 18 nt, Human
aaacggaugauuucuaug

SEQ ID NO: 3482692 - RNA, 23 nt, Human
aaacggauuagggcauuugagaa

SEQ ID NO: 3482693 - RNA, 12 nt, Human
aaacggauuauu

SEQ ID NO: 3482694 - RNA, 23 nt, Human
aaacggauuauuuuuucagaccg

SEQ ID NO: 3482695 - RNA, 20 nt, Human
aaacgggaacaugcccccug

SEQ ID NO: 3482696 - RNA, 17 nt, Human
aaacgguucaguuucuu

SEQ ID NO: 3482697 - RNA, 16 nt, Human
aaacguaugcauguga

SEQ ID NO: 3482698 - RNA, 14 nt, Human
aaacguccucuuua

SEQ ID NO: 3482699 - RNA, 12 nt, Human
aaacgugaaaau

SEQ ID NO: 3482700 - RNA, 21 nt, Human
aaacguggcugcuucaaggau

SEQ ID NO: 3482701 - RNA, 21 nt, Human
aaacguuucaguaauaaaaca

SEQ ID NO: 3482702 - RNA, 16 nt, Human
aaacguuuuauugugu

SEQ ID NO: 3482703 - RNA, 17 nt, Human
aaacguuuuguuugaaa

SEQ ID NO: 3482704 - RNA, 17 nt, Human
aaacuaaaaaauuaaac

SEQ ID NO: 3482705 - RNA, 14 nt, Human
aaacuaaaaauaau

SEQ ID NO: 3482706 - RNA, 15 nt, Human
aaacuaaaagacauu

SEQ ID NO: 3482707 - RNA, 18 nt, Human
aaacuaaaagacauuugu

SEQ ID NO: 3482708 - RNA, 16 nt, Human
aaacuaaagcaauaga

SEQ ID NO: 3482709 - RNA, 17 nt, Human
aaacuaaauagcaugua

SEQ ID NO: 3482710 - RNA, 23 nt, Human
aaacuaaauagcauguauugugu

SEQ ID NO: 3482711 - RNA, 13 nt, Human
aaacuaaaucucu

SEQ ID NO: 3482712 - RNA, 15 nt, Human
aaacuaaauuguaaa

SEQ ID NO: 3482713 - RNA, 15 nt, Human
aaacuaacagauaag

SEQ ID NO: 3482714 - RNA, 16 nt, Human
aaacuaagaugugcag

SEQ ID NO: 3482715 - RNA, 18 nt, Human
aaacuaaggcccucuuga

SEQ ID NO: 3482716 - RNA, 12 nt, Human
aaacuaauaaaa

SEQ ID NO: 3482717 - RNA, 18 nt, Human
aaacuaauaaaauauuuu

SEQ ID NO: 3482718 - RNA, 20 nt, Human
aaacuaauaaaauauuuucu

SEQ ID NO: 3482719 - RNA, 22 nt, Human
aaacuaauaaaauauuuucugu

SEQ ID NO: 3482720 - RNA, 23 nt, Human
aaacuaauaaaauauuuucugug

SEQ ID NO: 3482721 - RNA, 13 nt, Human
aaacuaaugaguu

SEQ ID NO: 3482722 - RNA, 18 nt, Human
aaacuacagaccugcuuu

SEQ ID NO: 3482723 - RNA, 12 nt, Human
aaacuacucuuu

SEQ ID NO: 3482724 - RNA, 19 nt, Human
aaacuacugccuuuagaaa

SEQ ID NO: 3482725 - RNA, 16 nt, Human
aaacuacuuugcugcu

SEQ ID NO: 3482726 - RNA, 17 nt, Human
aaacugcccccucugcc

SEQ ID NO: 3482727 - RNA, 20 nt, Human
aaacugcccccucugcccug

SEQ ID NO: 3482728 - RNA, 22 nt, Human
aaacugcccccucugcccugcg

SEQ ID NO: 3482729 - RNA, 22 nt, Human
aaacugcuucccuuacuuugcu

SEQ ID NO: 3482730 - RNA, 19 nt, Human
aaacugcuuccuuucuuga

SEQ ID NO: 3482731 - RNA, 14 nt, Human
aaacugcuuguuuc

SEQ ID NO: 3482732 - RNA, 15 nt, Human
aaacuggaaguuauu

SEQ ID NO: 3482733 - RNA, 13 nt, Human
aaacuggcuuugg

SEQ ID NO: 3482734 - RNA, 20 nt, Human
aaacuggggccuccagaacu

SEQ ID NO: 3482735 - RNA, 22 nt, Human
aaacugguauuuuaucuuugau

SEQ ID NO: 3482736 - RNA, 11 nt, Human
aaacuguacag

SEQ ID NO: 3482737 - RNA, 13 nt, Human
aaacuguacagug

SEQ ID NO: 3482738 - RNA, 18 nt, Human
aaacuguacagugucuuu

SEQ ID NO: 3482739 - RNA, 16 nt, Human
aaacuguacauuuaaa

SEQ ID NO: 3482740 - RNA, 15 nt, Human
aaacuguacuuugau

SEQ ID NO: 3482741 - RNA, 15 nt, Human
aaacuguagaaauga

SEQ ID NO: 3482742 - RNA, 18 nt, Human
aaacuguagaaaugauga

SEQ ID NO: 3482743 - RNA, 13 nt, Human
aaacuguaugcuc

SEQ ID NO: 3482744 - RNA, 21 nt, Human
aaacuguccucuuucagaaaa

SEQ ID NO: 3482745 - RNA, 18 nt, Human
aaacugucuuuaaaagag

SEQ ID NO: 3482746 - RNA, 12 nt, Human
aaacugugcacc

SEQ ID NO: 3482747 - RNA, 20 nt, Human
aaacuguguaacugcccaaa

SEQ ID NO: 3482748 - RNA, 19 nt, Human
aaacuguguggacugugau

SEQ ID NO: 3482749 - RNA, 15 nt, Human
aaacuguguugccac

SEQ ID NO: 3482750 - RNA, 17 nt, Human
aaacuguguugccacag

SEQ ID NO: 3482751 - RNA, 22 nt, Human
aaacuguuaacuuauucaaaga

SEQ ID NO: 3482752 - RNA, 12 nt, Human
aaacuguuagca

SEQ ID NO: 3482753 - RNA, 19 nt, Human
aaacuguuagcacuguuga

SEQ ID NO: 3482754 - RNA, 21 nt, Human
aaacuguuagcacuguugaug

SEQ ID NO: 3482755 - RNA, 11 nt, Human
aaacuauuuau

SEQ ID NO: 3482756 - RNA, 22 nt, Human
aaacuauuuaucuguguuuuug

SEQ ID NO: 3482757 - RNA, 13 nt, Human
aaacucaaaacuu

SEQ ID NO: 3482758 - RNA, 19 nt, Human
aaacucaaaacuuaacaua

SEQ ID NO: 3482759 - RNA, 13 nt, Human
aaacucaaaauau

SEQ ID NO: 3482760 - RNA, 11 nt, Human
aaacucaaaug

SEQ ID NO: 3482761 - RNA, 18 nt, Human
aaacucaaccaaauggua

SEQ ID NO: 3482762 - RNA, 13 nt, Human
aaacucaagacaa

SEQ ID NO: 3482763 - RNA, 14 nt, Human
aaacucaaugcuuu

SEQ ID NO: 3482764 - RNA, 18 nt, Human
aaacucaccauguaaaag

SEQ ID NO: 3482765 - RNA, 16 nt, Human
aaacucacugcucaag

SEQ ID NO: 3482766 - RNA, 22 nt, Human
aaacucacugugaucaauauuu

SEQ ID NO: 3482767 - RNA, 22 nt, Human
aaacucauuuccuauguaacug

SEQ ID NO: 3482768 - RNA, 22 nt, Human
aaacuccugccccuguucucuu

SEQ ID NO: 3482769 - RNA, 16 nt, Human
aaacucguuuuuuaca

SEQ ID NO: 3482770 - RNA, 20 nt, Human
aaacucuaucggagaacaug

SEQ ID NO: 3482771 - RNA, 15 nt, Human
aaacucugaauuuau

SEQ ID NO: 3482772 - RNA, 14 nt, Human
aaacucugccagcc

SEQ ID NO: 3482773 - RNA, 12 nt, Human
aaacucuuaaaa

SEQ ID NO: 3482774 - RNA, 15 nt, Human
aaacucuuaucucag

SEQ ID NO: 3482775 - RNA, 12 nt, Human
aaacucuugcua

SEQ ID NO: 3482776 - RNA, 20 nt, Human
aaacucuuuaacuuguaaua

SEQ ID NO: 3482777 - RNA, 19 nt, Human
aaacugaaaaucuaauauu

SEQ ID NO: 3482778 - RNA, 18 nt, Human
aaacugaagcagccucuc

SEQ ID NO: 3482779 - RNA, 15 nt, Human
aaacugaagucugaa

SEQ ID NO: 3482780 - RNA, 16 nt, Human
aaacugaagucugaaa

SEQ ID NO: 3482781 - RNA, 16 nt, Human
aaacugacucuuaaga

SEQ ID NO: 3482782 - RNA, 17 nt, Human
aaacugacucuuaagaa

SEQ ID NO: 3482783 - RNA, 22 nt, Human
aaacugagauccuuccuuuuga

SEQ ID NO: 3482784 - RNA, 22 nt, Human
aaacugauccaguauaagacua

SEQ ID NO: 3482785 - RNA, 14 nt, Human
aaacugaugugaaa

SEQ ID NO: 3482786 - RNA, 20 nt, Human
aaacugauuuuuuuuuccuu

SEQ ID NO: 3482787 - RNA, 22 nt, Human
aaacugauuuuuuuuuccuuca

SEQ ID NO: 3482788 - RNA, 17 nt, Human
aaacugcaauagagacu

SEQ ID NO: 3482789 - RNA, 14 nt, Human
aaacugcacaugau

SEQ ID NO: 3482790 - RNA, 20 nt, Human
aaacugcacaugauuucaca

SEQ ID NO: 3482791 - RNA, 13 nt, Human
aaacugcaguccu

SEQ ID NO: 3482792 - RNA, 17 nt, Human
aaacugcauuagaaauu

SEQ ID NO: 3482793 - RNA, 11 nt, Human
aaacugcauuu

SEQ ID NO: 3482794 - RNA, 14 nt, Human
aaacugcauuugug

SEQ ID NO: 3482795 - RNA, 13 nt, Human
aaacugcccccuc

SEQ ID NO: 3482796 - RNA, 21 nt, Human
aaacugcccccucugcccugc

SEQ ID NO: 3482797 - RNA, 15 nt, Human
aaacugcccuggcuc

SEQ ID NO: 3482798 - RNA, 19 nt, Human
aaacugcucuaagcacacg

SEQ ID NO: 3482799 - RNA, 21 nt, Human
aaacugcuggacgucuuucuu

SEQ ID NO: 3482800 - RNA, 20 nt, Human
aaacugcuuccuuucuugau

SEQ ID NO: 3482801 - RNA, 19 nt, Human
aaacugcuuguuuccuagc

SEQ ID NO: 3482802 - RNA, 14 nt, Human
aaacuggaaauacu

SEQ ID NO: 3482803 - RNA, 21 nt, Human
aaacuggaaauacuagauuug

SEQ ID NO: 3482804 - RNA, 14 nt, Human
aaacuggaaguuau

SEQ ID NO: 3482805 - RNA, 14 nt, Human
aaacuggaauaaga

SEQ ID NO: 3482806 - RNA, 15 nt, Human
aaacuggaauaagaa

SEQ ID NO: 3482807 - RNA, 15 nt, Human
aaacuggaaugagca

SEQ ID NO: 3482808 - RNA, 11 nt, Human
aaacuggagac

SEQ ID NO: 3482809 - RNA, 15 nt, Human
aaacuggagucugga

SEQ ID NO: 3482810 - RNA, 16 nt, Human
aaacuggauuaaacuu

SEQ ID NO: 3482811 - RNA, 15 nt, Human
aaacuggcaaagcag

SEQ ID NO: 3482812 - RNA, 21 nt, Human
aaacuggcaucugacacaaaa

SEQ ID NO: 3482813 - RNA, 15 nt, Human
aaacuggccccggau

SEQ ID NO: 3482814 - RNA, 18 nt, Human
aaacugggaaccccuuuc

SEQ ID NO: 3482815 - RNA, 16 nt, Human
aaacuggggccucccu

SEQ ID NO: 3482816 - RNA, 21 nt, Human
aaacuguaaaaaaugugugua

SEQ ID NO: 3482817 - RNA, 12 nt, Human
aaacuguacagu

SEQ ID NO: 3482818 - RNA, 12 nt, Human
aaacuguacuuu

SEQ ID NO: 3482819 - RNA, 14 nt, Human
aaacuguacuuuga

SEQ ID NO: 3482820 - RNA, 16 nt, Human
aaacuguagaaaugau

SEQ ID NO: 3482821 - RNA, 15 nt, Human
aaacuguagucucag

SEQ ID NO: 3482822 - RNA, 16 nt, Human
aaacuguagucucagg

SEQ ID NO: 3482823 - RNA, 14 nt, Human
aaacuguauugaug

SEQ ID NO: 3482824 - RNA, 12 nt, Human
aaacugucccuu

SEQ ID NO: 3482825 - RNA, 15 nt, Human
aaacuguccucuuuc

SEQ ID NO: 3482826 - RNA, 19 nt, Human
aaacugucuuuaaaagaga

SEQ ID NO: 3482827 - RNA, 20 nt, Human
aaacugucuuuaaaagagag

SEQ ID NO: 3482828 - RNA, 10 nt, Human
aaacugugua

SEQ ID NO: 3482829 - RNA, 21 nt, Human
aaacuguguacauaacugaaa

SEQ ID NO: 3482830 - RNA, 18 nt, Human
aaacuguguauuccaaga

SEQ ID NO: 3482831 - RNA, 21 nt, Human
aaacuguuaccuaaaguauuu

SEQ ID NO: 3482832 - RNA, 16 nt, Human
aaacuguuagcacugu

SEQ ID NO: 3482833 - RNA, 14 nt, Human
aaacuguucucuau

SEQ ID NO: 3482834 - RNA, 23 nt, Human
aaacuguucucuauuagacuuua

SEQ ID NO: 3482835 - RNA, 23 nt, Human
aaacuguuucagauuuuuuauuu

SEQ ID NO: 3482836 - RNA, 21 nt, Human
aaacuuaaauguuauuaucug

SEQ ID NO: 3482837 - RNA, 20 nt, Human
aaacuuaaccgcaucagaag

SEQ ID NO: 3482838 - RNA, 15 nt, Human
aaacuuaagccaauu

SEQ ID NO: 3482839 - RNA, 17 nt, Human
aaacuuaaucuaaaugg

SEQ ID NO: 3482840 - RNA, 19 nt, Human
aaacuuaaucuaaauggaa

SEQ ID NO: 3482841 - RNA, 14 nt, Human
aaacuuacacacaa

SEQ ID NO: 3482842 - RNA, 14 nt, Human
aaacuuacuauuuu

SEQ ID NO: 3482843 - RNA, 18 nt, Human
aaacuuagaauaaaauug

SEQ ID NO: 3482844 - RNA, 21 nt, Human
aaacuuauaaaucauauugau

SEQ ID NO: 3482845 - RNA, 14 nt, Human
aaacuuaucuuaca

SEQ ID NO: 3482846 - RNA, 13 nt, Human
aaacuuauuuuuu

SEQ ID NO: 3482847 - RNA, 20 nt, Human
aaacuucagaugggaggaaa

SEQ ID NO: 3482848 - RNA, 15 nt, Human
aaacuucauguaacu

SEQ ID NO: 3482849 - RNA, 17 nt, Human
aaacuuccaaagaaagu

SEQ ID NO: 3482850 - RNA, 19 nt, Human
aaacuuccagugcaacacu

SEQ ID NO: 3482851 - RNA, 17 nt, Human
aaacuuccccaucuucu

SEQ ID NO: 3482852 - RNA, 19 nt, Human
aaacuucucugaagggagg

SEQ ID NO: 3482853 - RNA, 13 nt, Human
aaacuucuuaaau

SEQ ID NO: 3482854 - RNA, 21 nt, Human
aaacuucuuaaauaucuuuua

SEQ ID NO: 3482855 - RNA, 16 nt, Human
aaacuugcugagcugu

SEQ ID NO: 3482856 - RNA, 18 nt, Human
aaacuugcuuuaugccuu

SEQ ID NO: 3482857 - RNA, 17 nt, Human
aaacuuggauacuugga

SEQ ID NO: 3482858 - RNA, 18 nt, Human
aaacuuggauacuuggau

SEQ ID NO: 3482859 - RNA, 22 nt, Human
aaacuugucuuuucaaaauauu

SEQ ID NO: 3482860 - RNA, 12 nt, Human
aaacuugugaau

SEQ ID NO: 3482861 - RNA, 17 nt, Human
aaacuuguguaaauaca

SEQ ID NO: 3482862 - RNA, 16 nt, Human
aaacuuguuauuguga

SEQ ID NO: 3482863 - RNA, 21 nt, Human
aaacuuguuauugugaaugau

SEQ ID NO: 3482864 - RNA, 16 nt, Human
aaacuuuaaaaaauau

SEQ ID NO: 3482865 - RNA, 21 nt, Human
aaacuuuaaaaaauauuuauu

SEQ ID NO: 3482866 - RNA, 22 nt, Human
aaacuuuaaagcguuugcacag

SEQ ID NO: 3482867 - RNA, 22 nt, Human
aaacuuuaccuuuuuuauacau

SEQ ID NO: 3482868 - RNA, 19 nt, Human
aaacuuuacuaagaugaca

SEQ ID NO: 3482869 - RNA, 24 nt, Human
aaacuuuagguuuuuuuaaugaua

SEQ ID NO: 3482870 - RNA, 19 nt, Human
aaacuuuaugcuaagugaa

SEQ ID NO: 3482871 - RNA, 15 nt, Human
aaacuuugaaauaua

SEQ ID NO: 3482872 - RNA, 14 nt, Human
aaagaaauuuacua

SEQ ID NO: 3482873 - RNA, 21 nt, Human
aaagaacaugcaguuugaaau

SEQ ID NO: 3482874 - RNA, 20 nt, Human
aaagaacauggacuuguaua

SEQ ID NO: 3482875 - RNA, 23 nt, Human
aaagaaccaacaaccucaacugc

SEQ ID NO: 3482876 - RNA, 23 nt, Human
aaagaacguggucagaguagaac

SEQ ID NO: 3482877 - RNA, 12 nt, Human
aaagaacuuacu

SEQ ID NO: 3482878 - RNA, 17 nt, Human
aaagaacuuacugauua

SEQ ID NO: 3482879 - RNA, 16 nt, Human
aaagaagaaagacucu

SEQ ID NO: 3482880 - RNA, 15 nt, Human
aaagaagacaaacuu

SEQ ID NO: 3482881 - RNA, 15 nt, Human
aaagaagacauguuu

SEQ ID NO: 3482882 - RNA, 11 nt, Human
aaagaagaccg

SEQ ID NO: 3482883 - RNA, 22 nt, Human
aaagaagagcgagagaucaaag

SEQ ID NO: 3482884 - RNA, 15 nt, Human
aaagaagaucuguaa

SEQ ID NO: 3482885 - RNA, 15 nt, Human
aaagaagauguuuaa

SEQ ID NO: 3482886 - RNA, 13 nt, Human
aaagaagcagacc

SEQ ID NO: 3482887 - RNA, 16 nt, Human
aaagaagcagaccauu

SEQ ID NO: 3482888 - RNA, 16 nt, Human
aaagaagcccccagcu

SEQ ID NO: 3482889 - RNA, 23 nt, Human
aaagaaggcauggacuucuggau

SEQ ID NO: 3482890 - RNA, 21 nt, Human
aaagaagggcugguauuguuc

SEQ ID NO: 3482891 - RNA, 20 nt, Human
aaagaagguuucagaaagaa

SEQ ID NO: 3482892 - RNA, 15 nt, Human
aaagaaguaaaagca

SEQ ID NO: 3482893 - RNA, 14 nt, Human
aaagaauaagaaaa

SEQ ID NO: 3482894 - RNA, 17 nt, Human
aaagaauacuugaacuu

SEQ ID NO: 3482895 - RNA, 15 nt, Human
aaagaauaugacuuu

SEQ ID NO: 3482896 - RNA, 22 nt, Human
aaagaaucaccuaauuaauuuc

SEQ ID NO: 3482897 - RNA, 18 nt, Human
aaagaaucauuauuuauu

SEQ ID NO: 3482898 - RNA, 13 nt, Human
aaagaaugaaaga

SEQ ID NO: 3482899 - RNA, 14 nt, Human
aaagaaugaaagag

SEQ ID NO: 3482900 - RNA, 13 nt, Human
aaagaauguaaag

SEQ ID NO: 3482901 - RNA, 13 nt, Human
aaagaauguuacu

SEQ ID NO: 3482902 - RNA, 18 nt, Human
aaagaauguuacugccuu

SEQ ID NO: 3482903 - RNA, 15 nt, Human
aaagaauucaaauuu

SEQ ID NO: 3482904 - RNA, 18 nt, Human
aaagaauuccuacaauau

SEQ ID NO: 3482905 - RNA, 19 nt, Human
aaagaauugugguuuauau

SEQ ID NO: 3482906 - RNA, 22 nt, Human
aaagaauuguuggggguuuuuu

SEQ ID NO: 3482907 - RNA, 16 nt, Human
aaagaauuuaguauua

SEQ ID NO: 3482908 - RNA, 16 nt, Human
aaagaauuuuuggugu

SEQ ID NO: 3482909 - RNA, 16 nt, Human
aaagacaaauucuguu

SEQ ID NO: 3482910 - RNA, 13 nt, Human
aaagacaauucuu

SEQ ID NO: 3482911 - RNA, 15 nt, Human
aaagacaauucuuua

SEQ ID NO: 3482912 - RNA, 20 nt, Human
aaagacaauucuuuauacaa

SEQ ID NO: 3482913 - RNA, 17 nt, Human
aaagacaccauuuaucu

SEQ ID NO: 3482914 - RNA, 16 nt, Human
aaagacacugccuggg

SEQ ID NO: 3482915 - RNA, 9 nt, Human
aaagacaga

SEQ ID NO: 3482916 - RNA, 13 nt, Human
aaagacagaagcc

SEQ ID NO: 3482917 - RNA, 20 nt, Human
aaagaaaccccaaacucagg

SEQ ID NO: 3482918 - RNA, 23 nt, Human
aaagaaacccgacagagggaaga

SEQ ID NO: 3482919 - RNA, 15 nt, Human
aaagaaacugacaug

SEQ ID NO: 3482920 - RNA, 14 nt, Human
aaagaaagagagaa

SEQ ID NO: 3482921 - RNA, 17 nt, Human
aaagaaagagagaaaau

SEQ ID NO: 3482922 - RNA, 14 nt, Human
aaagaaagcaacuu

SEQ ID NO: 3482923 - RNA, 12 nt, Human
aaagaaaggaaa

SEQ ID NO: 3482924 - RNA, 17 nt, Human
aaagaaaggguucugua

SEQ ID NO: 3482925 - RNA, 10 nt, Human
aaagaaagug

SEQ ID NO: 3482926 - RNA, 12 nt, Human
aaagaaauacag

SEQ ID NO: 3482927 - RNA, 15 nt, Human
aaagaaauauaccua

SEQ ID NO: 3482928 - RNA, 18 nt, Human
aaagaaaucauguccaua

SEQ ID NO: 3482929 - RNA, 18 nt, Human
aaagaaaucauguuauga

SEQ ID NO: 3482930 - RNA, 18 nt, Human
aaagaaaucuauagaaag

SEQ ID NO: 3482931 - RNA, 22 nt, Human
aaagaaaucuauagaaaguguu

SEQ ID NO: 3482932 - RNA, 17 nt, Human
aaagaaaugucuuaauu

SEQ ID NO: 3482933 - RNA, 15 nt, Human
aaagaaauuaugugc

SEQ ID NO: 3482934 - RNA, 19 nt, Human
aaagaaauucccuggacca

SEQ ID NO: 3482935 - RNA, 21 nt, Human
aaagaaauuuacuauauauau

SEQ ID NO: 3482936 - RNA, 16 nt, Human
aaagaacaaaaaaauc

SEQ ID NO: 3482937 - RNA, 12 nt, Human
aaagaacauaaa

SEQ ID NO: 3482938 - RNA, 20 nt, Human
aaagaacaugcaguuugaaa

SEQ ID NO: 3482939 - RNA, 13 nt, Human
aaagaaccacuug

SEQ ID NO: 3482940 - RNA, 18 nt, Human
aaagaacgcugauuuaaa

SEQ ID NO: 3482941 - RNA, 16 nt, Human
aaagaacuaucuucau

SEQ ID NO: 3482942 - RNA, 20 nt, Human
aaagaacuaucuucaucuga

SEQ ID NO: 3482943 - RNA, 22 nt, Human
aaagaacuaucuucaucugaga

SEQ ID NO: 3482944 - RNA, 12 nt, Human
aaagaacuuacc

SEQ ID NO: 3482945 - RNA, 9 nt, Human
aaagaagaa

SEQ ID NO: 3482946 - RNA, 19 nt, Human
aaagaagaaauaguucugu

SEQ ID NO: 3482947 - RNA, 20 nt, Human
aaagaagaauguguuucaaa

SEQ ID NO: 3482948 - RNA, 14 nt, Human
aaagaagaccugag

SEQ ID NO: 3482949 - RNA, 20 nt, Human
aaagaagaccugagaaugua

SEQ ID NO: 3482950 - RNA, 14 nt, Human
aaagaagaucugua

SEQ ID NO: 3482951 - RNA, 12 nt, Human
aaagaagauguu

SEQ ID NO: 3482952 - RNA, 18 nt, Human
aaagaaggaaaaugaucu

SEQ ID NO: 3482953 - RNA, 17 nt, Human
aaagaaggaaagauggu

SEQ ID NO: 3482954 - RNA, 12 nt, Human
aaagaaggaagu

SEQ ID NO: 3482955 - RNA, 21 nt, Human
aaagaaguguccgagaacuaa

SEQ ID NO: 3482956 - RNA, 24 nt, Human
aaagaaguguggggauuuucacug

SEQ ID NO: 3482957 - RNA, 18 nt, Human
aaagaaguuauuuuccag

SEQ ID NO: 3482958 - RNA, 15 nt, Human
aaagaaguuugauau

SEQ ID NO: 3482959 - RNA, 13 nt, Human
aaagaauacuuga

SEQ ID NO: 3482960 - RNA, 16 nt, Human
aaagaauacuugaacu

SEQ ID NO: 3482961 - RNA, 16 nt, Human
aaagaauagaagcuaa

SEQ ID NO: 3482962 - RNA, 17 nt, Human
aaagaauauauuuauuu

SEQ ID NO: 3482963 - RNA, 15 nt, Human
aaagaaucauuauuu

SEQ ID NO: 3482964 - RNA, 16 nt, Human
aaagaaucccuguuca

SEQ ID NO: 3482965 - RNA, 22 nt, Human
aaagaaucccuguucauuguaa

SEQ ID NO: 3482966 - RNA, 12 nt, Human
aaagaaucuacu

SEQ ID NO: 3482967 - RNA, 16 nt, Human
aaagaaugaaagagua

SEQ ID NO: 3482968 - RNA, 13 nt, Human
aaagaaugacuau

SEQ ID NO: 3482969 - RNA, 16 nt, Human
aaagaaugauuaugaa

SEQ ID NO: 3482970 - RNA, 23 nt, Human
aaagaaugggcaguuacaugcau

SEQ ID NO: 3482971 - RNA, 19 nt, Human
aaagaauguuacugccuua

SEQ ID NO: 3482972 - RNA, 15 nt, Human
aaagaauuauuuugu

SEQ ID NO: 3482973 - RNA, 18 nt, Human
aaagaauuccaaagcaaa

SEQ ID NO: 3482974 - RNA, 20 nt, Human
aaagaauuguuggggguuuu

SEQ ID NO: 3482975 - RNA, 18 nt, Human
aaagacaaaagucugucu

SEQ ID NO: 3482976 - RNA, 11 nt, Human
aaagacaaaua

SEQ ID NO: 3482977 - RNA, 12 nt, Human
aaagacaaauag

SEQ ID NO: 3482978 - RNA, 16 nt, Human
aaagacaaaucaaagc

SEQ ID NO: 3482979 - RNA, 19 nt, Human
aaagacaaaucaaagcaga

SEQ ID NO: 3482980 - RNA, 17 nt, Human
aaagacaaauucuguuu

SEQ ID NO: 3482981 - RNA, 19 nt, Human
aaagacaaauucuguuucu

SEQ ID NO: 3482982 - RNA, 22 nt, Human
aaagacaaauucuguuucuuga

SEQ ID NO: 3482983 - RNA, 14 nt, Human
aaagacaacacaac

SEQ ID NO: 3482984 - RNA, 13 nt, Human
aaagacaagacuu

SEQ ID NO: 3482985 - RNA, 17 nt, Human
aaagacaagacuucagu

SEQ ID NO: 3482986 - RNA, 17 nt, Human
aaagacaauucuuuaua

SEQ ID NO: 3482987 - RNA, 18 nt, Human
aaagacacagaacacaga

SEQ ID NO: 3482988 - RNA, 22 nt, Human
aaagacacauuuuuuaggaaau

SEQ ID NO: 3482989 - RNA, 13 nt, Human
aaagacaccuacu

SEQ ID NO: 3482990 - RNA, 12 nt, Human
aaagacacugcc

SEQ ID NO: 3482991 - RNA, 14 nt, Human
aaagacaucaagca

SEQ ID NO: 3482992 - RNA, 19 nt, Human
aaagacauucugacaucuu

SEQ ID NO: 3482993 - RNA, 20 nt, Human
aaagacauugauucagccug

SEQ ID NO: 3482994 - RNA, 14 nt, Human
aaagaccaggccaa

SEQ ID NO: 3482995 - RNA, 14 nt, Human
aaagacccuggcuu

SEQ ID NO: 3482996 - RNA, 18 nt, Human
aaagacccuggcuuucau

SEQ ID NO: 3482997 - RNA, 19 nt, Human
aaagaccuuguguguaugu

SEQ ID NO: 3482998 - RNA, 22 nt, Human
aaagaccuuuggagcaaagcug

SEQ ID NO: 3482999 - RNA, 19 nt, Human
aaagacgauuugucaguua

SEQ ID NO: 3483000 - RNA, 14 nt, Human
aaagacuauucaaa

SEQ ID NO: 3483001 - RNA, 21 nt, Human
aaagacuauucaaacagucuc

SEQ ID NO: 3483002 - RNA, 14 nt, Human
aaagacucauccgu

SEQ ID NO: 3483003 - RNA, 19 nt, Human
aaagacugaccaauauugu

SEQ ID NO: 3483004 - RNA, 23 nt, Human
aaagacugaguacguugugcauu

SEQ ID NO: 3483005 - RNA, 13 nt, Human
aaagacuggcuuu

SEQ ID NO: 3483006 - RNA, 16 nt, Human
aaagacugguuuucug

SEQ ID NO: 3483007 - RNA, 15 nt, Human
aaagacuguacaaag

SEQ ID NO: 3483008 - RNA, 20 nt, Human
aaagacuuaguauauuuucu

SEQ ID NO: 3483009 - RNA, 16 nt, Human
aaagacuuccaaagaa

SEQ ID NO: 3483010 - RNA, 23 nt, Human
aaagacuucucuacccaucuuaa

SEQ ID NO: 3483011 - RNA, 13 nt, Human
aaagagaaaagaa

SEQ ID NO: 3483012 - RNA, 14 nt, Human
aaagagaaaagaaa

SEQ ID NO: 3483013 - RNA, 19 nt, Human
aaagagaaacaguugguaa

SEQ ID NO: 3483014 - RNA, 14 nt, Human
aaagagaaacuuug

SEQ ID NO: 3483015 - RNA, 14 nt, Human
aaagagaagaagaa

SEQ ID NO: 3483016 - RNA, 19 nt, Human
aaagagaagaagaaaaaaa

SEQ ID NO: 3483017 - RNA, 14 nt, Human
aaagagaaggagcc

SEQ ID NO: 3483018 - RNA, 12 nt, Human
aaagagaaugag

SEQ ID NO: 3483019 - RNA, 18 nt, Human
aaauuuuuuguugacauu

SEQ ID NO: 3483020 - RNA, 14 nt, Human
aaauuuuuuuguau

SEQ ID NO: 3483021 - RNA, 17 nt, Human
aaauuuuuuuguaugaa

SEQ ID NO: 3483022 - RNA, 18 nt, Human
aaauuuuuuuguaugaaa

SEQ ID NO: 3483023 - RNA, 15 nt, Human
aaauuuuuuuuacau

SEQ ID NO: 3483024 - RNA, 17 nt, Human
aaauuuuuuuuacauuu

SEQ ID NO: 3483025 - RNA, 23 nt, Human
aaauuuuuuuucaugcuuuauca

SEQ ID NO: 3483026 - RNA, 22 nt, Human
aaauuuuuuuucauguuuuaac

SEQ ID NO: 3483027 - RNA, 18 nt, Human
aaauuuuuuuuguuucau

SEQ ID NO: 3483028 - RNA, 19 nt, Human
aaauuuuuuuuuaaagcag

SEQ ID NO: 3483029 - RNA, 14 nt, Human
aacaaaaagcuucc

SEQ ID NO: 3483030 - RNA, 11 nt, Human
aacaaaaauaa

SEQ ID NO: 3483031 - RNA, 14 nt, Human
aacaaaaauuugaa

SEQ ID NO: 3483032 - RNA, 14 nt, Human
aacaaaacaaaaca

SEQ ID NO: 3483033 - RNA, 21 nt, Human
aacaaaagcgacccauucaga

SEQ ID NO: 3483034 - RNA, 11 nt, Human
aacaaaaggca

SEQ ID NO: 3483035 - RNA, 12 nt, Human
aacaaaaggguc

SEQ ID NO: 3483036 - RNA, 14 nt, Human
aacaaaauacauuc

SEQ ID NO: 3483037 - RNA, 17 nt, Human
aacaaaauacauucuuu

SEQ ID NO: 3483038 - RNA, 18 nt, Human
aacaaaauacauucuuuu

SEQ ID NO: 3483039 - RNA, 12 nt, Human
aacaaaauagaa

SEQ ID NO: 3483040 - RNA, 13 nt, Human
aacaaaaucuguu

SEQ ID NO: 3483041 - RNA, 14 nt, Human
aacaaaaugaagcu

SEQ ID NO: 3483042 - RNA, 14 nt, Human
aacaaaauguagaa

SEQ ID NO: 3483043 - RNA, 17 nt, Human
aacaaaauguaugucug

SEQ ID NO: 3483044 - RNA, 15 nt, Human
aacaaaauuauuugu

SEQ ID NO: 3483045 - RNA, 13 nt, Human
aacaaaauuucua

SEQ ID NO: 3483046 - RNA, 11 nt, Human
aacaaaauuug

SEQ ID NO: 3483047 - RNA, 21 nt, Human
aacaaaauuuuauuuugugcu

SEQ ID NO: 3483048 - RNA, 17 nt, Human
aacaaacagaugcucug

SEQ ID NO: 3483049 - RNA, 16 nt, Human
aacaaacucucugaac

SEQ ID NO: 3483050 - RNA, 20 nt, Human
aacaaacuguguaacugccc

SEQ ID NO: 3483051 - RNA, 22 nt, Human
aacaaacuuuucaaggcuuaua

SEQ ID NO: 3483052 - RNA, 15 nt, Human
aacaaagaaauuaug

SEQ ID NO: 3483053 - RNA, 17 nt, Human
aacaaagaaauuaugug

SEQ ID NO: 3483054 - RNA, 11 nt, Human
aacaaagauau

SEQ ID NO: 3483055 - RNA, 16 nt, Human
aacaaagcacaguguu

SEQ ID NO: 3483056 - RNA, 16 nt, Human
aacaaagccacuuuca

SEQ ID NO: 3483057 - RNA, 16 nt, Human
aaaguggugcucaguu

SEQ ID NO: 3483058 - RNA, 13 nt, Human
aaaguguaaagca

SEQ ID NO: 3483059 - RNA, 15 nt, Human
aaaguguaaagcauu

SEQ ID NO: 3483060 - RNA, 17 nt, Human
aaaguguaaagcauucc

SEQ ID NO: 3483061 - RNA, 22 nt, Human
aaaguguaaagcauuccaacaa

SEQ ID NO: 3483062 - RNA, 14 nt, Human
aaaguguauuauaa

SEQ ID NO: 3483063 - RNA, 23 nt, Human
aaaguguauuuggaaauaaaguc

SEQ ID NO: 3483064 - RNA, 19 nt, Human
aaaguguauuuuauaaaau

SEQ ID NO: 3483065 - RNA, 21 nt, Human
aaaguguauuuuauaaaauua

SEQ ID NO: 3483066 - RNA, 21 nt, Human
aaaguguccauugacauguac

SEQ ID NO: 3483067 - RNA, 17 nt, Human
aaaguguguauuaaaaa

SEQ ID NO: 3483068 - RNA, 22 nt, Human
aaaguguguauuaaaaaaaaca

SEQ ID NO: 3483069 - RNA, 23 nt, Human
aaaguguguauuaaaaaaaacaa

SEQ ID NO: 3483070 - RNA, 17 nt, Human
aaaguguucuguuacaa

SEQ ID NO: 3483071 - RNA, 19 nt, Human
aaaguguuggcuaaugaag

SEQ ID NO: 3483072 - RNA, 18 nt, Human
aaaguguuuauuuuucau

SEQ ID NO: 3483073 - RNA, 20 nt, Human
aaaguguuuauuuuucauau

SEQ ID NO: 3483074 - RNA, 15 nt, Human
aaaguguuucagcua

SEQ ID NO: 3483075 - RNA, 15 nt, Human
aaaguguuuccuuca

SEQ ID NO: 3483076 - RNA, 11 nt, Human
aaaguguuuuc

SEQ ID NO: 3483077 - RNA, 14 nt, Human
aaaguguuuucaga

SEQ ID NO: 3483078 - RNA, 16 nt, Human
aaaguguuuucagagc

SEQ ID NO: 3483079 - RNA, 15 nt, Human
aaaguguuuuguacc

SEQ ID NO: 3483080 - RNA, 16 nt, Human
aaaguguuuuguacca

SEQ ID NO: 3483081 - RNA, 22 nt, Human
aaaguuaaacauugaaguaaug

SEQ ID NO: 3483082 - RNA, 20 nt, Human
aaaguuaaacgugaugugcu

SEQ ID NO: 3483083 - RNA, 12 nt, Human
aaaguuaacauu

SEQ ID NO: 3483084 - RNA, 15 nt, Human
aaaguuaacauuaau

SEQ ID NO: 3483085 - RNA, 13 nt, Human
aaaguuaaguuga

SEQ ID NO: 3483086 - RNA, 15 nt, Human
aaaguuaaugcuuaa

SEQ ID NO: 3483087 - RNA, 16 nt, Human
aaaguuaccagugccu

SEQ ID NO: 3483088 - RNA, 22 nt, Human
aaaguuaccagugccuuaaacu

SEQ ID NO: 3483089 - RNA, 17 nt, Human
aaaguuacccacugaag

SEQ ID NO: 3483090 - RNA, 21 nt, Human
aaaguuaccuggaaucaaaua

SEQ ID NO: 3483091 - RNA, 15 nt, Human
aaaguuacuagguaa

SEQ ID NO: 3483092 - RNA, 20 nt, Human
aaaguuacuagguaacuuca

SEQ ID NO: 3483093 - RNA, 21 nt, Human
aaaguuacuagguaacuucau

SEQ ID NO: 3483094 - RNA, 22 nt, Human
aaaguuacugauucacugcaug

SEQ ID NO: 3483095 - RNA, 14 nt, Human
aaaguuagcugagc

SEQ ID NO: 3483096 - RNA, 22 nt, Human
aaaguuauauuucagauguaau

SEQ ID NO: 3483097 - RNA, 18 nt, Human
aaaguuauuagugguuua

SEQ ID NO: 3483098 - RNA, 14 nt, Human
aaaguuauucuuga

SEQ ID NO: 3483099 - RNA, 19 nt, Human
aaaguuauugugauauccu

SEQ ID NO: 3483100 - RNA, 22 nt, Human
aaaguucauagggucucuucag

SEQ ID NO: 3483101 - RNA, 21 nt, Human
aaaguuccaagagucuaaaga

SEQ ID NO: 3483102 - RNA, 18 nt, Human
aaaguucccugaaacacg

SEQ ID NO: 3483103 - RNA, 15 nt, Human
aaaguucuaagauuc

SEQ ID NO: 3483104 - RNA, 22 nt, Human
aaaguucugcuuucuccccaau

SEQ ID NO: 3483105 - RNA, 14 nt, Human
aaaguucuguacuc

SEQ ID NO: 3483106 - RNA, 20 nt, Human
aaaguucuguguauuuaauu

SEQ ID NO: 3483107 - RNA, 21 nt, Human
aaaguucuguguauuuaauug

SEQ ID NO: 3483108 - RNA, 12 nt, Human
aaaguugaaauu

SEQ ID NO: 3483109 - RNA, 13 nt, Human
aaaguugaauuua

SEQ ID NO: 3483110 - RNA, 16 nt, Human
aaaguugaauuuauug

SEQ ID NO: 3483111 - RNA, 22 nt, Human
aaaguugaauuuauuggcuuuu

SEQ ID NO: 3483112 - RNA, 17 nt, Human
aaaguugauaaagauuu

SEQ ID NO: 3483113 - RNA, 18 nt, Human
aaaguugauaaagauuuu

SEQ ID NO: 3483114 - RNA, 17 nt, Human
aaaguugcagcuguuuu

SEQ ID NO: 3483115 - RNA, 23 nt, Human
aaaguugccuaaauccauuugga

SEQ ID NO: 3483116 - RNA, 14 nt, Human
aaaguuggacuaaa

SEQ ID NO: 3483117 - RNA, 16 nt, Human
aaaguugguaaaccuu

SEQ ID NO: 3483118 - RNA, 17 nt, Human
aaaguugguauuaauaa

SEQ ID NO: 3483119 - RNA, 16 nt, Human
aaaguugguuggauaa

SEQ ID NO: 3483120 - RNA, 18 nt, Human
aaaguuguaugaucugug

SEQ ID NO: 3483121 - RNA, 17 nt, Human
aaaguuguucaacuauu

SEQ ID NO: 3483122 - RNA, 16 nt, Human
aaaguuuaaaauguau

SEQ ID NO: 3483123 - RNA, 12 nt, Human
aaaguuuaauaa

SEQ ID NO: 3483124 - RNA, 19 nt, Human
aaaguuuaauauuaaagcc

SEQ ID NO: 3483125 - RNA, 20 nt, Human
aaaguuuaauauuaaagcca

SEQ ID NO: 3483126 - RNA, 21 nt, Human
aaaguuuacaguaaauaaauu

SEQ ID NO: 3483127 - RNA, 18 nt, Human
aaaguuuauaaaagugaa

SEQ ID NO: 3483128 - RNA, 12 nt, Human
aaaguuucaaaa

SEQ ID NO: 3483129 - RNA, 13 nt, Human
aaaguuucaaugu

SEQ ID NO: 3483130 - RNA, 13 nt, Human
aaaguuuccauau

SEQ ID NO: 3483131 - RNA, 13 nt, Human
aaaguuucucaga

SEQ ID NO: 3483132 - RNA, 17 nt, Human
aaaguuucucagauccu

SEQ ID NO: 3483133 - RNA, 21 nt, Human
aaaguuucucuuuucaaaaca

SEQ ID NO: 3483134 - RNA, 23 nt, Human
aaaguuucucuuuucaaaacauu

SEQ ID NO: 3483135 - RNA, 13 nt, Human
aaaguuucuuuga

SEQ ID NO: 3483136 - RNA, 24 nt, Human
aaaguuugaucuuccucugcuaaa

SEQ ID NO: 3483137 - RNA, 22 nt, Human
aaaguuugcuuguuucuugguc

SEQ ID NO: 3483138 - RNA, 14 nt, Human
aaaguuuguuugcu

SEQ ID NO: 3483139 - RNA, 15 nt, Human
aaaguuuuauauauu

SEQ ID NO: 3483140 - RNA, 23 nt, Human
aaaguuuuauauauuauauggaa

SEQ ID NO: 3483141 - RNA, 17 nt, Human
aaaguuuuauaugcuuu

SEQ ID NO: 3483142 - RNA, 13 nt, Human
aaaguuuuaucaa

SEQ ID NO: 3483143 - RNA, 14 nt, Human
aaaguuuugaaaag

SEQ ID NO: 3483144 - RNA, 18 nt, Human
aaaguuuugaaaagcuau

SEQ ID NO: 3483145 - RNA, 19 nt, Human
aaaguuuugaguagauauu

SEQ ID NO: 3483146 - RNA, 22 nt, Human
aaaguuuugaguagauauuacu

SEQ ID NO: 3483147 - RNA, 24 nt, Human
aaaguuuugaguagauauuacuuu

SEQ ID NO: 3483148 - RNA, 13 nt, Human
aaaguuuugccua

SEQ ID NO: 3483149 - RNA, 16 nt, Human
aaaguuuuguaaaaga

SEQ ID NO: 3483150 - RNA, 12 nt, Human
aaaguuuuguug

SEQ ID NO: 3483151 - RNA, 22 nt, Human
aaaguuuuuuauuaugcauuau

SEQ ID NO: 3483152 - RNA, 17 nt, Human
aaauaaaaaaaagaaaa

SEQ ID NO: 3483153 - RNA, 15 nt, Human
aaauaaaaaagaucc

SEQ ID NO: 3483154 - RNA, 14 nt, Human
aaauaaaaacuaaa

SEQ ID NO: 3483155 - RNA, 13 nt, Human
aaauaaaaagaaa

SEQ ID NO: 3483156 - RNA, 20 nt, Human
aaauaaaaagugacacagca

SEQ ID NO: 3483157 - RNA, 21 nt, Human
aaauaaaaagugacacagcag

SEQ ID NO: 3483158 - RNA, 19 nt, Human
aaauaaaaaguuaaaaagu

SEQ ID NO: 3483159 - RNA, 14 nt, Human
aaauaaaaauaaau

SEQ ID NO: 3483160 - RNA, 13 nt, Human
aaauaaaacaaag

SEQ ID NO: 3483161 - RNA, 15 nt, Human
aaauaaaacaaaggg

SEQ ID NO: 3483162 - RNA, 16 nt, Human
aaauaaaacauagcaa

SEQ ID NO: 3483163 - RNA, 23 nt, Human
aaauaaaacauuuuaaauggaca

SEQ ID NO: 3483164 - RNA, 12 nt, Human
aaauaaaacugu

SEQ ID NO: 3483165 - RNA, 19 nt, Human
aacaucuuuauugaaauuc

SEQ ID NO: 3483166 - RNA, 20 nt, Human
aacaucuuugacacucugca

SEQ ID NO: 3483167 - RNA, 22 nt, Human
aacaucuuugacacucugcaga

SEQ ID NO: 3483168 - RNA, 15 nt, Human
aacaucuuuucuugc

SEQ ID NO: 3483169 - RNA, 21 nt, Human
aacaucuuuuuaaccugcaaa

SEQ ID NO: 3483170 - RNA, 22 nt, Human
aacaugaagaccuuuuucugca

SEQ ID NO: 3483171 - RNA, 23 nt, Human
aacaugaagaccuuuuucugcac

SEQ ID NO: 3483172 - RNA, 20 nt, Human
aacaugaaucaaaagugccu

SEQ ID NO: 3483173 - RNA, 13 nt, Human
aacaugacacuga

SEQ ID NO: 3483174 - RNA, 14 nt, Human
aacaugacacugac

SEQ ID NO: 3483175 - RNA, 22 nt, Human
aacaugacauuuaccagcaacu

SEQ ID NO: 3483176 - RNA, 20 nt, Human
aacaugacucuuuauugucu

SEQ ID NO: 3483177 - RNA, 18 nt, Human
aacaugaggggacauuuu

SEQ ID NO: 3483178 - RNA, 21 nt, Human
aacaugaggggacauuuuggu

SEQ ID NO: 3483179 - RNA, 23 nt, Human
aacaugaguagauaauuucaggg

SEQ ID NO: 3483180 - RNA, 17 nt, Human
aacaugagucaagagca

SEQ ID NO: 3483181 - RNA, 22 nt, Human
aacaugcaauuuugcauuugaa

SEQ ID NO: 3483182 - RNA, 19 nt, Human
aacaugcacugauguugug

SEQ ID NO: 3483183 - RNA, 19 nt, Human
aacaugcagaacaaaugaa

SEQ ID NO: 3483184 - RNA, 11 nt, Human
aacaugcaguu

SEQ ID NO: 3483185 - RNA, 19 nt, Human
aacaugcaguuugaaauuc

SEQ ID NO: 3483186 - RNA, 13 nt, Human
aacaugcccccug

SEQ ID NO: 3483187 - RNA, 14 nt, Human
aacaugcccccugc

SEQ ID NO: 3483188 - RNA, 22 nt, Human
aacaugcuggugaauauuuuca

SEQ ID NO: 3483189 - RNA, 14 nt, Human
aacaugcuguguaa

SEQ ID NO: 3483190 - RNA, 19 nt, Human
aacaugcuguguaagcugu

SEQ ID NO: 3483191 - RNA, 21 nt, Human
aacaugcuguguaagcugugu

SEQ ID NO: 3483192 - RNA, 16 nt, Human
aacauggacuuguaua

SEQ ID NO: 3483193 - RNA, 19 nt, Human
aacauggagaaacccuguc

SEQ ID NO: 3483194 - RNA, 20 nt, Human
aacauggcuacuugcuuuga

SEQ ID NO: 3483195 - RNA, 18 nt, Human
aacauggugucuggauuc

SEQ ID NO: 3483196 - RNA, 20 nt, Human
aacaugguuuaaaagaaaaa

SEQ ID NO: 3483197 - RNA, 14 nt, Human
aacauguaauuaag

SEQ ID NO: 3483198 - RNA, 17 nt, Human
aacauguauaauauuuu

SEQ ID NO: 3483199 - RNA, 16 nt, Human
aacauguaugugcauu

SEQ ID NO: 3483200 - RNA, 16 nt, Human
aacauguauuuaugua

SEQ ID NO: 3483201 - RNA, 19 nt, Human
aacaugucuccuauccugg

SEQ ID NO: 3483202 - RNA, 15 nt, Human
aacauguuaaaccau

SEQ ID NO: 3483203 - RNA, 16 nt, Human
aacauguuaaaccaug

SEQ ID NO: 3483204 - RNA, 23 nt, Human
aacauguuaaaccaugggauaaa

SEQ ID NO: 3483205 - RNA, 19 nt, Human
aacauguugguauuuaucu

SEQ ID NO: 3483206 - RNA, 15 nt, Human
aacauguuuccagca

SEQ ID NO: 3483207 - RNA, 15 nt, Human
aacauuaaaugucuu

SEQ ID NO: 3483208 - RNA, 23 nt, Human
aacauuaaaugucuuauauagca

SEQ ID NO: 3483209 - RNA, 13 nt, Human
aacauuaagaaaa

SEQ ID NO: 3483210 - RNA, 19 nt, Human
aacauuaagaaaaucauau

SEQ ID NO: 3483211 - RNA, 21 nt, Human
aacauuaagauugaggccugc

SEQ ID NO: 3483212 - RNA, 19 nt, Human
aacauuaauguugauuucu

SEQ ID NO: 3483213 - RNA, 20 nt, Human
aacauuaauguugauuucua

SEQ ID NO: 3483214 - RNA, 17 nt, Human
aacauuaccuuacugug

SEQ ID NO: 3483215 - RNA, 19 nt, Human
aacauuaccuuacugugga

SEQ ID NO: 3483216 - RNA, 24 nt, Human
aacauuaguacuuuauagaagaau

SEQ ID NO: 3483217 - RNA, 21 nt, Human
aacauuauagauuuucauguu

SEQ ID NO: 3483218 - RNA, 17 nt, Human
aacauuauuacuuuucc

SEQ ID NO: 3483219 - RNA, 11 nt, Human
aacauuccaag

SEQ ID NO: 3483220 - RNA, 19 nt, Human
aacauuccucaugaaugua

SEQ ID NO: 3483221 - RNA, 18 nt, Human
aacauucuccuguggaag

SEQ ID NO: 3483222 - RNA, 21 nt, Human
aacauucuuuuaacuucuuuc

SEQ ID NO: 3483223 - RNA, 22 nt, Human
aacauugaccaagaacugcaug

SEQ ID NO: 3483224 - RNA, 20 nt, Human
aacauugagauuaugaugaa

SEQ ID NO: 3483225 - RNA, 15 nt, Human
aacauugcaauagaa

SEQ ID NO: 3483226 - RNA, 16 nt, Human
aacauugccuauuuca

SEQ ID NO: 3483227 - RNA, 18 nt, Human
aacauugccuuugaaugu

SEQ ID NO: 3483228 - RNA, 22 nt, Human
aacauugccuuugaauguuaau

SEQ ID NO: 3483229 - RNA, 15 nt, Human
aacauugcuuuuaaa

SEQ ID NO: 3483230 - RNA, 23 nt, Human
aacauuggaagcagguuaaaugu

SEQ ID NO: 3483231 - RNA, 15 nt, Human
aacauuggaauguuc

SEQ ID NO: 3483232 - RNA, 18 nt, Human
aacauugguucuuguauu

SEQ ID NO: 3483233 - RNA, 19 nt, Human
aacauugguucuuguauua

SEQ ID NO: 3483234 - RNA, 22 nt, Human
aacauugguucuuguauuaaga

SEQ ID NO: 3483235 - RNA, 12 nt, Human
aacauuguauua

SEQ ID NO: 3483236 - RNA, 15 nt, Human
aacauugugauguau

SEQ ID NO: 3483237 - RNA, 22 nt, Human
aacauugugauguauauuccuu

SEQ ID NO: 3483238 - RNA, 19 nt, Human
aacauuguugcucccugug

SEQ ID NO: 3483239 - RNA, 15 nt, Human
aacauuuauauguag

SEQ ID NO: 3483240 - RNA, 21 nt, Human
aacauuuauuuuaugagaaau

SEQ ID NO: 3483241 - RNA, 23 nt, Human
aacauuuauuuuaugagaaaugu

SEQ ID NO: 3483242 - RNA, 17 nt, Human
aacauuuauuuugacau

SEQ ID NO: 3483243 - RNA, 22 nt, Human
aacauuucaagggcaauaccgu

SEQ ID NO: 3483244 - RNA, 22 nt, Human
aacauuucuauagccaaaaaua

SEQ ID NO: 3483245 - RNA, 18 nt, Human
aacauuucuguaaauacc

SEQ ID NO: 3483246 - RNA, 20 nt, Human
aacauuucuguaaauaccau

SEQ ID NO: 3483247 - RNA, 12 nt, Human
aacauuugcugc

SEQ ID NO: 3483248 - RNA, 13 nt, Human
aacauuugcugcc

SEQ ID NO: 3483249 - RNA, 14 nt, Human
aacauuugcuguuu

SEQ ID NO: 3483250 - RNA, 18 nt, Human
aacauuugguaaggggaa

SEQ ID NO: 3483251 - RNA, 20 nt, Human
aacauuuguucuauagcuuu

SEQ ID NO: 3483252 - RNA, 22 nt, Human
aacauuuuaaaaacauagaaaa

SEQ ID NO: 3483253 - RNA, 19 nt, Human
aacauuuuaaauaaaagaa

SEQ ID NO: 3483254 - RNA, 13 nt, Human
aacauuuuaaaug

SEQ ID NO: 3483255 - RNA, 15 nt, Human
aacauuuuacccaca

SEQ ID NO: 3483256 - RNA, 17 nt, Human
aacauuuuacccacaca

SEQ ID NO: 3483257 - RNA, 13 nt, Human
aacauuuucacac

SEQ ID NO: 3483258 - RNA, 14 nt, Human
aacauuuucucuua

SEQ ID NO: 3483259 - RNA, 18 nt, Human
aacauuuucucuuagaaa

SEQ ID NO: 3483260 - RNA, 16 nt, Human
aacauuuucuggccag

SEQ ID NO: 3483261 - RNA, 16 nt, Human
aacauuuugagaacaa

SEQ ID NO: 3483262 - RNA, 14 nt, Human
aacauuuuguucuu

SEQ ID NO: 3483263 - RNA, 23 nt, Human
aacauuuuguucuuacacauaca

SEQ ID NO: 3483264 - RNA, 19 nt, Human
aacauuuuugauaaagccu

SEQ ID NO: 3483265 - RNA, 14 nt, Human
aaccaaaaagaaaa

SEQ ID NO: 3483266 - RNA, 19 nt, Human
aaccaaaaagaccagacua

SEQ ID NO: 3483267 - RNA, 21 nt, Human
aaccaaaagaacaagaauuuc

SEQ ID NO: 3483268 - RNA, 18 nt, Human
aaccaggagcugcucacu

SEQ ID NO: 3483269 - RNA, 22 nt, Human
aaccaggagcugcucacuaccu

SEQ ID NO: 3483270 - RNA, 18 nt, Human
aaccagggaagcuguccc

SEQ ID NO: 3483271 - RNA, 15 nt, Human
aaccagggagcugca

SEQ ID NO: 3483272 - RNA, 16 nt, Human
aaccagggauuguuuc

SEQ ID NO: 3483273 - RNA, 17 nt, Human
aaccagguccaaugagc

SEQ ID NO: 3483274 - RNA, 21 nt, Human
aaccagguuuagacaguauga

SEQ ID NO: 3483275 - RNA, 16 nt, Human
aaccaguauacaagau

SEQ ID NO: 3483276 - RNA, 14 nt, Human
aaccaguauuguac

SEQ ID NO: 3483277 - RNA, 20 nt, Human
aaccaguauuguacaaagua

SEQ ID NO: 3483278 - RNA, 21 nt, Human
aaccaguauuuuugcugcuuc

SEQ ID NO: 3483279 - RNA, 22 nt, Human
aaccagucugaaguuucauuua

SEQ ID NO: 3483280 - RNA, 17 nt, Human
aaccaguguuguggauu

SEQ ID NO: 3483281 - RNA, 14 nt, Human
aaccaguuauguga

SEQ ID NO: 3483282 - RNA, 23 nt, Human
aaccaguuggcuaggggagcagg

SEQ ID NO: 3483283 - RNA, 19 nt, Human
aaccaguuguggugugagu

SEQ ID NO: 3483284 - RNA, 21 nt, Human
aaccaguuguggugugaguau

SEQ ID NO: 3483285 - RNA, 13 nt, Human
aaccauaaacuuc

SEQ ID NO: 3483286 - RNA, 22 nt, Human
aaccauacaaaaauuccuuuuc

SEQ ID NO: 3483287 - RNA, 21 nt, Human
aaccauaccuuccuucccugg

SEQ ID NO: 3483288 - RNA, 12 nt, Human
aaccauaguuac

SEQ ID NO: 3483289 - RNA, 13 nt, Human
aaccauaugauac

SEQ ID NO: 3483290 - RNA, 14 nt, Human
aaccauauggauau

SEQ ID NO: 3483291 - RNA, 18 nt, Human
aaccaucauugaaaucuu

SEQ ID NO: 3483292 - RNA, 19 nt, Human
aaccaucauugaaaucuuu

SEQ ID NO: 3483293 - RNA, 21 nt, Human
aaccauccacuuacauauauu

SEQ ID NO: 3483294 - RNA, 14 nt, Human
aaccaucucccugg

SEQ ID NO: 3483295 - RNA, 20 nt, Human
aaccaucugucccugccuca

SEQ ID NO: 3483296 - RNA, 15 nt, Human
aaccaugaagacagg

SEQ ID NO: 3483297 - RNA, 21 nt, Human
aaccaugaagagauuuuucau

SEQ ID NO: 3483298 - RNA, 22 nt, Human
aaccaugagaccacuguuauca

SEQ ID NO: 3483299 - RNA, 23 nt, Human
aaccaugaguggcauggccacca

SEQ ID NO: 3483300 - RNA, 15 nt, Human
aaccauggacuuuau

SEQ ID NO: 3483301 - RNA, 20 nt, Human
aaccaugggauaaaugccau

SEQ ID NO: 3483302 - RNA, 20 nt, Human
aaccauguaaagaacauaaa

SEQ ID NO: 3483303 - RNA, 22 nt, Human
aaccauguagcagugagucaua

SEQ ID NO: 3483304 - RNA, 21 nt, Human
aaccaugucagcaaaaagcaa

SEQ ID NO: 3483305 - RNA, 23 nt, Human
aaccaugucagcaaaaagcaaaa

SEQ ID NO: 3483306 - RNA, 13 nt, Human
aaccauuaaaguc

SEQ ID NO: 3483307 - RNA, 14 nt, Human
aaccauuaaaguca

SEQ ID NO: 3483308 - RNA, 22 nt, Human
aaccuacuuucauacugaagau

SEQ ID NO: 3483309 - RNA, 14 nt, Human
aaccuagaagggcu

SEQ ID NO: 3483310 - RNA, 17 nt, Human
aaccuagggugauauua

SEQ ID NO: 3483311 - RNA, 17 nt, Human
aaccuaguacugccccc

SEQ ID NO: 3483312 - RNA, 21 nt, Human
aaccuaugaagcaauggauau

SEQ ID NO: 3483313 - RNA, 12 nt, Human
aaccuauuucuc

SEQ ID NO: 3483314 - RNA, 22 nt, Human
aaccuauuucuuaaacacuugc

SEQ ID NO: 3483315 - RNA, 23 nt, Human
aaccuauuuugaaaaauuccuau

SEQ ID NO: 3483316 - RNA, 16 nt, Human
aaccucaacugccuac

SEQ ID NO: 3483317 - RNA, 20 nt, Human
aaccucaccaacuccuaguu

SEQ ID NO: 3483318 - RNA, 12 nt, Human
aaccucaccccg

SEQ ID NO: 3483319 - RNA, 21 nt, Human
aaccucacccgaggcugccca

SEQ ID NO: 3483320 - RNA, 19 nt, Human
aaccucagacuuaccagga

SEQ ID NO: 3483321 - RNA, 14 nt, Human
aaccucagccuggc

SEQ ID NO: 3483322 - RNA, 15 nt, Human
aaccucagcucuggg

SEQ ID NO: 3483323 - RNA, 16 nt, Human
aaccucagcucuggga

SEQ ID NO: 3483324 - RNA, 21 nt, Human
aaccucagcucugggagagga

SEQ ID NO: 3483325 - RNA, 19 nt, Human
aaccucagugucauuuaug

SEQ ID NO: 3483326 - RNA, 20 nt, Human
aaccucauccuccuucuuca

SEQ ID NO: 3483327 - RNA, 22 nt, Human
aaccuccauucuauuuuagaau

SEQ ID NO: 3483328 - RNA, 15 nt, Human
aaccucccaacccag

SEQ ID NO: 3483329 - RNA, 12 nt, Human
aaccucccagag

SEQ ID NO: 3483330 - RNA, 15 nt, Human
aaccuccccagccug

SEQ ID NO: 3483331 - RNA, 14 nt, Human
aaccucccucuugu

SEQ ID NO: 3483332 - RNA, 14 nt, Human
aaccuccucuguga

SEQ ID NO: 3483333 - RNA, 13 nt, Human
aaccuccuggaca

SEQ ID NO: 3483334 - RNA, 19 nt, Human
aaccucgaguacugugggc

SEQ ID NO: 3483335 - RNA, 16 nt, Human
aaccucgggccugcug

SEQ ID NO: 3483336 - RNA, 20 nt, Human
aaccucuaauuuauuuuguc

SEQ ID NO: 3483337 - RNA, 18 nt, Human
aaccucuagaauuuuaag

SEQ ID NO: 3483338 - RNA, 14 nt, Human
aaccucugucucau

SEQ ID NO: 3483339 - RNA, 16 nt, Human
aaccucugucucaucc

SEQ ID NO: 3483340 - RNA, 12 nt, Human
aaccucuguuca

SEQ ID NO: 3483341 - RNA, 18 nt, Human
aaccucuucagaggcccu

SEQ ID NO: 3483342 - RNA, 12 nt, Human
aaccucuucccc

SEQ ID NO: 3483343 - RNA, 12 nt, Human
aaccucuuccuc

SEQ ID NO: 3483344 - RNA, 18 nt, Human
aaccucuuuucugcauca

SEQ ID NO: 3483345 - RNA, 21 nt, Human
aaccugaaaaaaaguuuacaa

SEQ ID NO: 3483346 - RNA, 15 nt, Human
aaccugaaccuagga

SEQ ID NO: 3483347 - RNA, 16 nt, Human
aaccugaccccugcuc

SEQ ID NO: 3483348 - RNA, 20 nt, Human
aaccugaccgugggcggggc

SEQ ID NO: 3483349 - RNA, 17 nt, Human
aaccugacguagcugca

SEQ ID NO: 3483350 - RNA, 14 nt, Human
aaccugagauuuau

SEQ ID NO: 3483351 - RNA, 15 nt, Human
aaccugagauuuauu

SEQ ID NO: 3483352 - RNA, 22 nt, Human
aaccugagauuuauuaaagaaa

SEQ ID NO: 3483353 - RNA, 20 nt, Human
aaccugaugaaaauaaagaa

SEQ ID NO: 3483354 - RNA, 15 nt, Human
aaccugaugcugacu

SEQ ID NO: 3483355 - RNA, 18 nt, Human
aaccugauguuaaaauuc

SEQ ID NO: 3483356 - RNA, 19 nt, Human
aaccugauugugucucuug

SEQ ID NO: 3483357 - RNA, 21 nt, Human
aaccugcaaaaaauacuuuuu

SEQ ID NO: 3483358 - RNA, 19 nt, Human
aaccugcaagggcucccca

SEQ ID NO: 3483359 - RNA, 19 nt, Human
aaccugccagggagacaga

SEQ ID NO: 3483360 - RNA, 15 nt, Human
aaccugcccugccug

SEQ ID NO: 3483361 - RNA, 19 nt, Human
aaccugccugacauuugga

SEQ ID NO: 3483362 - RNA, 14 nt, Human
aaccugcucuccuc

SEQ ID NO: 3483363 - RNA, 23 nt, Human
aaccugcuuggguggagaagcca

SEQ ID NO: 3483364 - RNA, 17 nt, Human
aaccuggaccaaagcug

SEQ ID NO: 3483365 - RNA, 18 nt, Human
aaccuggaccaaagcuga

SEQ ID NO: 3483366 - RNA, 10 nt, Human
aaccuggaga

SEQ ID NO: 3483367 - RNA, 20 nt, Human
aaccuggaggggcuagaacc

SEQ ID NO: 3483368 - RNA, 19 nt, Human
aaccuggaggucaauguua

SEQ ID NO: 3483369 - RNA, 16 nt, Human
aaccugggaaagagau

SEQ ID NO: 3483370 - RNA, 20 nt, Human
aaccugggauucaggaaugu

SEQ ID NO: 3483371 - RNA, 17 nt, Human
aaccuguaaauuauuuu

SEQ ID NO: 3483372 - RNA, 18 nt, Human
aaccuguaauaaauauga

SEQ ID NO: 3483373 - RNA, 23 nt, Human
aaccuguacuucaaguuaaagug

SEQ ID NO: 3483374 - RNA, 22 nt, Human
aaccuguagaaucaauuuaagu

SEQ ID NO: 3483375 - RNA, 22 nt, Human
aaccuguauaaguggaggcacu

SEQ ID NO: 3483376 - RNA, 13 nt, Human
aaccuguaucuuu

SEQ ID NO: 3483377 - RNA, 14 nt, Human
aaccugucuuuugg

SEQ ID NO: 3483378 - RNA, 16 nt, Human
aaccugucuuuuggga

SEQ ID NO: 3483379 - RNA, 22 nt, Human
aaccugugaccagucugacccu

SEQ ID NO: 3483380 - RNA, 12 nt, Human
aaccugugucug

SEQ ID NO: 3483381 - RNA, 15 nt, Human
aaccugugucugcga

SEQ ID NO: 3483382 - RNA, 21 nt, Human
aaccugugucugcgaaguccu

SEQ ID NO: 3483383 - RNA, 22 nt, Human
aaccugugucugcgaaguccua

SEQ ID NO: 3483384 - RNA, 21 nt, Human
aaccuguuaccuacuuugacu

SEQ ID NO: 3483385 - RNA, 17 nt, Human
aaccuguucugcuuucc

SEQ ID NO: 3483386 - RNA, 19 nt, Human
aaccuguuuaaauauuuca

SEQ ID NO: 3483387 - RNA, 18 nt, Human
aaccuguuuuuuuuucau

SEQ ID NO: 3483388 - RNA, 12 nt, Human
aaccuuaaguaa

SEQ ID NO: 3483389 - RNA, 17 nt, Human
aaccuuauccugcauug

SEQ ID NO: 3483390 - RNA, 22 nt, Human
aaccuuaucuccacaaccucuu

SEQ ID NO: 3483391 - RNA, 18 nt, Human
aaccuuauuguaccucuc

SEQ ID NO: 3483392 - RNA, 19 nt, Human
aaccuuauuguaccucucu

SEQ ID NO: 3483393 - RNA, 13 nt, Human
aaccuuccaccca

SEQ ID NO: 3483394 - RNA, 15 nt, Human
aaccuuccacccagu

SEQ ID NO: 3483395 - RNA, 21 nt, Human
aaccuucgccaccuggguucc

SEQ ID NO: 3483396 - RNA, 17 nt, Human
aaccuucuggccuccca

SEQ ID NO: 3483397 - RNA, 17 nt, Human
aaccuugaaaaaaaaca

SEQ ID NO: 3483398 - RNA, 15 nt, Human
aaccuugaaugcugc

SEQ ID NO: 3483399 - RNA, 19 nt, Human
aaccuugaaugcugccagu

SEQ ID NO: 3483400 - RNA, 16 nt, Human
aaccuugagacagcuu

SEQ ID NO: 3483401 - RNA, 11 nt, Human
aaccuugcugu

SEQ ID NO: 3483402 - RNA, 16 nt, Human
aaccuugcuguccuga

SEQ ID NO: 3483403 - RNA, 21 nt, Human
aaccuuggguuagaccuacag

SEQ ID NO: 3483404 - RNA, 20 nt, Human
aaccuugguguaguugaacu

SEQ ID NO: 3483405 - RNA, 21 nt, Human
aaccuugguguaguugaacug

SEQ ID NO: 3483406 - RNA, 19 nt, Human
aaccuuguauaaauuauuc

SEQ ID NO: 3483407 - RNA, 23 nt, Human
aaccuugucucuaugccagcuca

SEQ ID NO: 3483408 - RNA, 18 nt, Human
aaccuuguuauuucucag

SEQ ID NO: 3483409 - RNA, 19 nt, Human
aaccuuguuuauuaaauug

SEQ ID NO: 3483410 - RNA, 14 nt, Human
aaccuuuaagaaaa

SEQ ID NO: 3483411 - RNA, 23 nt, Human
aaccuuuaagaaaagcccugaga

SEQ ID NO: 3483412 - RNA, 19 nt, Human
aaccuuuagggcagcuugc

SEQ ID NO: 3483413 - RNA, 15 nt, Human
aaccuuuauucuuuu

SEQ ID NO: 3483414 - RNA, 14 nt, Human
aaccuuucaaauuu

SEQ ID NO: 3483415 - RNA, 20 nt, Human
aaccuuucaccuuuguguau

SEQ ID NO: 3483416 - RNA, 13 nt, Human
aaccuuucccuca

SEQ ID NO: 3483417 - RNA, 15 nt, Human
aaccuuucccucacc

SEQ ID NO: 3483418 - RNA, 18 nt, Human
aaccuuucccucaccccc

SEQ ID NO: 3483419 - RNA, 19 nt, Human
aaccuuucccucacccccu

SEQ ID NO: 3483420 - RNA, 13 nt, Human
aaccuuuuacugg

SEQ ID NO: 3483421 - RNA, 22 nt, Human
aaccuuuucuuguaucuggauu

SEQ ID NO: 3483422 - RNA, 16 nt, Human
aaccuuuugagugccu

SEQ ID NO: 3483423 - RNA, 16 nt, Human
aaccuuuuuccuagua

SEQ ID NO: 3483424 - RNA, 23 nt, Human
aaccuuuuuuaagauuuuucuca

SEQ ID NO: 3483425 - RNA, 15 nt, Human
aacgaaacugcucua

SEQ ID NO: 3483426 - RNA, 13 nt, Human
aacgaaagcuggg

SEQ ID NO: 3483427 - RNA, 15 nt, Human
aacgaaccuuggccu

SEQ ID NO: 3483428 - RNA, 16 nt, Human
aacgaagaguucccuu

SEQ ID NO: 3483429 - RNA, 23 nt, Human
aacgacaaagccaaacucugcca

SEQ ID NO: 3483430 - RNA, 16 nt, Human
aacgagacuuuccauu

SEQ ID NO: 3483431 - RNA, 16 nt, Human
aacgagucaauccccu

SEQ ID NO: 3483432 - RNA, 16 nt, Human
aacccuagccuugcuu

SEQ ID NO: 3483433 - RNA, 20 nt, Human
aacccuagguucccgguccc

SEQ ID NO: 3483434 - RNA, 17 nt, Human
aacccuagguucccugu

SEQ ID NO: 3483435 - RNA, 19 nt, Human
aacccuaucuccugacaga

SEQ ID NO: 3483436 - RNA, 12 nt, Human
aacccucagagc

SEQ ID NO: 3483437 - RNA, 11 nt, Human
aacccucaggg

SEQ ID NO: 3483438 - RNA, 20 nt, Human
aacccucagggcaaagccag

SEQ ID NO: 3483439 - RNA, 23 nt, Human
aacccucaggggaaaacuguuac

SEQ ID NO: 3483440 - RNA, 13 nt, Human
aacccucccucag

SEQ ID NO: 3483441 - RNA, 17 nt, Human
aacccucccucagcccc

SEQ ID NO: 3483442 - RNA, 15 nt, Human
aacccucguuucuga

SEQ ID NO: 3483443 - RNA, 17 nt, Human
aacccugcaaaggacug

SEQ ID NO: 3483444 - RNA, 13 nt, Human
aacccugccaugg

SEQ ID NO: 3483445 - RNA, 14 nt, Human
aacccugccccugc

SEQ ID NO: 3483446 - RNA, 19 nt, Human
aacccugccgucaccacca

SEQ ID NO: 3483447 - RNA, 22 nt, Human
aacccugccgucaccaccaccc

SEQ ID NO: 3483448 - RNA, 21 nt, Human
aacccuggggaaggagccagu

SEQ ID NO: 3483449 - RNA, 12 nt, Human
aacccugugcug

SEQ ID NO: 3483450 - RNA, 16 nt, Human
aacccuguuacaaagc

SEQ ID NO: 3483451 - RNA, 15 nt, Human
aacccuguuuuauac

SEQ ID NO: 3483452 - RNA, 23 nt, Human
aacccuguuuuauacuguacuua

SEQ ID NO: 3483453 - RNA, 19 nt, Human
aacuuuuauaaacuuuacc

SEQ ID NO: 3483454 - RNA, 18 nt, Human
aacuuuuauaaauuaaau

SEQ ID NO: 3483455 - RNA, 19 nt, Human
aacuuuuauaaauuaaaua

SEQ ID NO: 3483456 - RNA, 17 nt, Human
aacuuuucaaugacauu

SEQ ID NO: 3483457 - RNA, 21 nt, Human
aacuuuuguaagacaaagguu

SEQ ID NO: 3483458 - RNA, 17 nt, Human
aacuuuuguacugaauu

SEQ ID NO: 3483459 - RNA, 20 nt, Human
aacuuuuguguaaugaaaau

SEQ ID NO: 3483460 - RNA, 20 nt, Human
aacuuuuuauugauuuuugg

SEQ ID NO: 3483461 - RNA, 16 nt, Human
aacuuuuuauugccuu

SEQ ID NO: 3483462 - RNA, 20 nt, Human
aacuuuuuauugccuucuca

SEQ ID NO: 3483463 - RNA, 15 nt, Human
aacuuuuuguucugg

SEQ ID NO: 3483464 - RNA, 14 nt, Human
aacuuuuuuaaaua

SEQ ID NO: 3483465 - RNA, 16 nt, Human
aacuuuuuuaaauaaa

SEQ ID NO: 3483466 - RNA, 18 nt, Human
aacuuuuuuaaauaaacu

SEQ ID NO: 3483467 - RNA, 20 nt, Human
aacuuuuuuaaauaaacuuu

SEQ ID NO: 3483468 - RNA, 16 nt, Human
aacuuuuuuucaaugu

SEQ ID NO: 3483469 - RNA, 17 nt, Human
aacuuuuuuuucuuuuu

SEQ ID NO: 3483470 - RNA, 18 nt, Human
aacuuuuuuuucuuuuuu

SEQ ID NO: 3483471 - RNA, 23 nt, Human
aacuuuuuuuuuucuuuauaaga

SEQ ID NO: 3483472 - RNA, 17 nt, Human
aagaaaaaaaaaagaag

SEQ ID NO: 3483473 - RNA, 22 nt, Human
aagaaaaaaaaaagaagaagaa

SEQ ID NO: 3483474 - RNA, 16 nt, Human
aagaaaaaaaaaauau

SEQ ID NO: 3483475 - RNA, 14 nt, Human
aagaaaaaaaaaga

SEQ ID NO: 3483476 - RNA, 19 nt, Human
aagaaaaaaaaagaaaaaa

SEQ ID NO: 3483477 - RNA, 18 nt, Human
aagaaaaaaaaaugccau

SEQ ID NO: 3483478 - RNA, 14 nt, Human
aagaaaaaaauacu

SEQ ID NO: 3483479 - RNA, 20 nt, Human
aagaaaaaaauugaaaugua

SEQ ID NO: 3483480 - RNA, 15 nt, Human
aagaaaaaagaaugu

SEQ ID NO: 3483481 - RNA, 20 nt, Human
aagaaaaaagagaaaagaaa

SEQ ID NO: 3483482 - RNA, 11 nt, Human
aagaaaaaagu

SEQ ID NO: 3483483 - RNA, 14 nt, Human
aagaaaaaauacau

SEQ ID NO: 3483484 - RNA, 15 nt, Human
aagaaaaagaagcaa

SEQ ID NO: 3483485 - RNA, 15 nt, Human
aagaaaaaggaugca

SEQ ID NO: 3483486 - RNA, 18 nt, Human
aagaaaaaggaugcacag

SEQ ID NO: 3483487 - RNA, 20 nt, Human
aagaaaaagucauccaaucu

SEQ ID NO: 3483488 - RNA, 18 nt, Human
aacaauaggcuguuccca

SEQ ID NO: 3483489 - RNA, 18 nt, Human
aacaauaucauaucauca

SEQ ID NO: 3483490 - RNA, 16 nt, Human
aacaauauuguuucua

SEQ ID NO: 3483491 - RNA, 12 nt, Human
aacaauauuuau

SEQ ID NO: 3483492 - RNA, 15 nt, Human
aacaaugaaguugaa

SEQ ID NO: 3483493 - RNA, 20 nt, Human
aacaaugacacuagaaaacu

SEQ ID NO: 3483494 - RNA, 16 nt, Human
aacaaugcgaauggua

SEQ ID NO: 3483495 - RNA, 14 nt, Human
aacaaugcuguauu

SEQ ID NO: 3483496 - RNA, 17 nt, Human
aacaauggaagauuugc

SEQ ID NO: 3483497 - RNA, 15 nt, Human
aacaauggaguauuc

SEQ ID NO: 3483498 - RNA, 11 nt, Human
aacaauguuaa

SEQ ID NO: 3483499 - RNA, 22 nt, Human
aacaauguuaaggaaacucuua

SEQ ID NO: 3483500 - RNA, 15 nt, Human
aacaauuaauugucu

SEQ ID NO: 3483501 - RNA, 17 nt, Human
aacaauugguaaaacuc

SEQ ID NO: 3483502 - RNA, 23 nt, Human
aacaauugguaaaacucacugug

SEQ ID NO: 3483503 - RNA, 24 nt, Human
aacaauugguaaaacucacuguga

SEQ ID NO: 3483504 - RNA, 19 nt, Human
aacaauuuaaaaaugagug

SEQ ID NO: 3483505 - RNA, 16 nt, Human
aacaauuuaugaauug

SEQ ID NO: 3483506 - RNA, 21 nt, Human
aacaauuuccuuuauauuuag

SEQ ID NO: 3483507 - RNA, 22 nt, Human
aacaauuuccuuuauauuuagu

SEQ ID NO: 3483508 - RNA, 18 nt, Human
aacaauuuggcaauuuug

SEQ ID NO: 3483509 - RNA, 19 nt, Human
aacaauuuggcaauuuugu

SEQ ID NO: 3483510 - RNA, 20 nt, Human
aacaauuugggcuuccuguu

SEQ ID NO: 3483511 - RNA, 17 nt, Human
aacaauuuucagauuug

SEQ ID NO: 3483512 - RNA, 18 nt, Human
aacaauuuucagauuugc

SEQ ID NO: 3483513 - RNA, 19 nt, Human
aacaauuuucagauuugca

SEQ ID NO: 3483514 - RNA, 15 nt, Human
aacacaaaccacaac

SEQ ID NO: 3483515 - RNA, 17 nt, Human
aacacaaacccccacuc

SEQ ID NO: 3483516 - RNA, 15 nt, Human
aacacaaacuguaaa

SEQ ID NO: 3483517 - RNA, 16 nt, Human
aacacaaacuguaaau

SEQ ID NO: 3483518 - RNA, 19 nt, Human
aacacaaacuguaaauaaa

SEQ ID NO: 3483519 - RNA, 19 nt, Human
aacacaaagcggggggagg

SEQ ID NO: 3483520 - RNA, 21 nt, Human
aacacaaagcuuuugcauauu

SEQ ID NO: 3483521 - RNA, 20 nt, Human
aacacaaaugcagggauugc

SEQ ID NO: 3483522 - RNA, 16 nt, Human
aacacaacuauauugu

SEQ ID NO: 3483523 - RNA, 23 nt, Human
aacacaagauugguguuuuuuuc

SEQ ID NO: 3483524 - RNA, 16 nt, Human
aacacaagccacagaa

SEQ ID NO: 3483525 - RNA, 17 nt, Human
aacacaauguuauucgu

SEQ ID NO: 3483526 - RNA, 14 nt, Human
aacacacacaaaag

SEQ ID NO: 3483527 - RNA, 17 nt, Human
aacacacacauauacac

SEQ ID NO: 3483528 - RNA, 22 nt, Human
aacacacagaaggggacugcca

SEQ ID NO: 3483529 - RNA, 18 nt, Human
aacacacauaaaggauaa

SEQ ID NO: 3483530 - RNA, 18 nt, Human
aacacacuguuguuuagu

SEQ ID NO: 3483531 - RNA, 19 nt, Human
aacacagaaaccuuuuuaa

SEQ ID NO: 3483532 - RNA, 19 nt, Human
aacacagacauucugccag

SEQ ID NO: 3483533 - RNA, 18 nt, Human
aacacagcaauuccucag

SEQ ID NO: 3483534 - RNA, 19 nt, Human
aacacagcaguucugcaga

SEQ ID NO: 3483535 - RNA, 14 nt, Human
aacacagccugggc

SEQ ID NO: 3483536 - RNA, 19 nt, Human
aacacagcugagagacuuu

SEQ ID NO: 3483537 - RNA, 11 nt, Human
aacacagcugu

SEQ ID NO: 3483538 - RNA, 24 nt, Human
aacacagcuguucuucuguucugc

SEQ ID NO: 3483539 - RNA, 16 nt, Human
aacacaggccacccug

SEQ ID NO: 3483540 - RNA, 14 nt, Human
aacacaguauuuuc

SEQ ID NO: 3483541 - RNA, 16 nt, Human
aacacagucaaaauaa

SEQ ID NO: 3483542 - RNA, 19 nt, Human
aacacaguguuuuuguaaa

SEQ ID NO: 3483543 - RNA, 17 nt, Human
aacacauaauuaacacu

SEQ ID NO: 3483544 - RNA, 16 nt, Human
aacacaucacagauga

SEQ ID NO: 3483545 - RNA, 21 nt, Human
aacacauggggaaaaaaauca

SEQ ID NO: 3483546 - RNA, 20 nt, Human
aacacauuaaagguacuuug

SEQ ID NO: 3483547 - RNA, 16 nt, Human
aacacauuguuauuuu

SEQ ID NO: 3483548 - RNA, 20 nt, Human
aacacauuguuauuuucagu

SEQ ID NO: 3483549 - RNA, 20 nt, Human
aacacauuugauucugugug

SEQ ID NO: 3483550 - RNA, 20 nt, Human
aacacauuuugguucuucuc

SEQ ID NO: 3483551 - RNA, 15 nt, Human
aacacauuuuguaua

SEQ ID NO: 3483552 - RNA, 19 nt, Human
aacacauuuuguauaauug

SEQ ID NO: 3483553 - RNA, 15 nt, Human
aacaccaacauaaaa

SEQ ID NO: 3483554 - RNA, 19 nt, Human
aacaccaagcacagcagcc

SEQ ID NO: 3483555 - RNA, 15 nt, Human
aacaccagccccugc

SEQ ID NO: 3483556 - RNA, 18 nt, Human
aacaccagccccugcccc

SEQ ID NO: 3483557 - RNA, 19 nt, Human
aacaccagccccugcccca

SEQ ID NO: 3483558 - RNA, 23 nt, Human
aacaccagccccugccccagccc

SEQ ID NO: 3483559 - RNA, 15 nt, Human
aacaccauugaaggc

SEQ ID NO: 3483560 - RNA, 21 nt, Human
aacacccaugaaucaaagaca

SEQ ID NO: 3483561 - RNA, 17 nt, Human
aacacccauuuuuccuu

SEQ ID NO: 3483562 - RNA, 13 nt, Human
aacaccccucagu

SEQ ID NO: 3483563 - RNA, 17 nt, Human
aacacccucacacuggg

SEQ ID NO: 3483564 - RNA, 13 nt, Human
aacacccuuagaa

SEQ ID NO: 3483565 - RNA, 15 nt, Human
aacacccuuagaaaa

SEQ ID NO: 3483566 - RNA, 21 nt, Human
aacaccucacaccucacucuu

SEQ ID NO: 3483567 - RNA, 13 nt, Human
aacaccucccagg

SEQ ID NO: 3483568 - RNA, 19 nt, Human
aacaccucugcacaagcug

SEQ ID NO: 3483569 - RNA, 13 nt, Human
aacaccugaugug

SEQ ID NO: 3483570 - RNA, 22 nt, Human
aacaccuucagaggcugaggug

SEQ ID NO: 3483571 - RNA, 19 nt, Human
aacaccuucuuauuauaua

SEQ ID NO: 3483572 - RNA, 21 nt, Human
aacaccuucuuauuauauaua

SEQ ID NO: 3483573 - RNA, 22 nt, Human
aacaccuucuuauuauauauau

SEQ ID NO: 3483574 - RNA, 15 nt, Human
aacacgagcaggcua

SEQ ID NO: 3483575 - RNA, 13 nt, Human
aacacgcaggagc

SEQ ID NO: 3483576 - RNA, 14 nt, Human
aacacgcaggagca

SEQ ID NO: 3483577 - RNA, 19 nt, Human
aacacgcauggucaacccu

SEQ ID NO: 3483578 - RNA, 16 nt, Human
aacacgcguauuuaca

SEQ ID NO: 3483579 - RNA, 16 nt, Human
aacacgugaugugaua

SEQ ID NO: 3483580 - RNA, 13 nt, Human
aacacguuuuaag

SEQ ID NO: 3483581 - RNA, 19 nt, Human
aacacuaaacagacuauuu

SEQ ID NO: 3483582 - RNA, 15 nt, Human
aacacuaaauguuaa

SEQ ID NO: 3483583 - RNA, 17 nt, Human
aacacuaacucaccagc

SEQ ID NO: 3483584 - RNA, 18 nt, Human
aacacuaacucaccagcc

SEQ ID NO: 3483585 - RNA, 14 nt, Human
aacacuaauauauu

SEQ ID NO: 3483586 - RNA, 20 nt, Human
aacacuaauauauuuaaaaa

SEQ ID NO: 3483587 - RNA, 14 nt, Human
aacacuaauucaua

SEQ ID NO: 3483588 - RNA, 15 nt, Human
aacacuaauucauaa

SEQ ID NO: 3483589 - RNA, 18 nt, Human
aacacuagacaagccaga

SEQ ID NO: 3483590 - RNA, 19 nt, Human
aacacuagacaagccagaa

SEQ ID NO: 3483591 - RNA, 14 nt, Human
aacacuagccagac

SEQ ID NO: 3483592 - RNA, 13 nt, Human
aacacuauuuuau

SEQ ID NO: 3483593 - RNA, 15 nt, Human
aacacuauuuucaga

SEQ ID NO: 3483594 - RNA, 17 nt, Human
aacacuauuuucagaau

SEQ ID NO: 3483595 - RNA, 17 nt, Human
aacacucagaagccugg

SEQ ID NO: 3483596 - RNA, 20 nt, Human
aacacucagaagccuggggg

SEQ ID NO: 3483597 - RNA, 22 nt, Human
aagaacaugcaguuugaaauuc

SEQ ID NO: 3483598 - RNA, 22 nt, Human
aagaacauggacuuguauauuu

SEQ ID NO: 3483599 - RNA, 22 nt, Human
aagaaccaaaaguuuuccugag

SEQ ID NO: 3483600 - RNA, 16 nt, Human
aagaaccaaagaagaa

SEQ ID NO: 3483601 - RNA, 15 nt, Human
aagaaccccucugcu

SEQ ID NO: 3483602 - RNA, 17 nt, Human
aagaaccccucugcuuu

SEQ ID NO: 3483603 - RNA, 14 nt, Human
aagaaccuggaacu

SEQ ID NO: 3483604 - RNA, 21 nt, Human
aagaacggggcucuucucauu

SEQ ID NO: 3483605 - RNA, 23 nt, Human
aagaacggggcucuucucauuuc

SEQ ID NO: 3483606 - RNA, 20 nt, Human
aagaacuacaaacaaaauuu

SEQ ID NO: 3483607 - RNA, 19 nt, Human
aagaacugaaaacauaaaa

SEQ ID NO: 3483608 - RNA, 17 nt, Human
aagaacugcacaugaag

SEQ ID NO: 3483609 - RNA, 23 nt, Human
aagaacugcaggcccuggccucc

SEQ ID NO: 3483610 - RNA, 11 nt, Human
aagaacugcau

SEQ ID NO: 3483611 - RNA, 13 nt, Human
aagaacugcaugg

SEQ ID NO: 3483612 - RNA, 20 nt, Human
aagaacuuacugauuauuuu

SEQ ID NO: 3483613 - RNA, 12 nt, Human
aagaacuuguuu

SEQ ID NO: 3483614 - RNA, 17 nt, Human
aagaacuuuaaauugug

SEQ ID NO: 3483615 - RNA, 13 nt, Human
aagaacuuugagc

SEQ ID NO: 3483616 - RNA, 12 nt, Human
aagaagaaaaag

SEQ ID NO: 3483617 - RNA, 15 nt, Human
aagaagaaaagagaa

SEQ ID NO: 3483618 - RNA, 21 nt, Human
aagaagaaaauugcugugccu

SEQ ID NO: 3483619 - RNA, 21 nt, Human
aagaagaacucaccaggguuu

SEQ ID NO: 3483620 - RNA, 13 nt, Human
aagaagaaguuca

SEQ ID NO: 3483621 - RNA, 13 nt, Human
aagaagaaugugu

SEQ ID NO: 3483622 - RNA, 15 nt, Human
aagaagacaaacuuu

SEQ ID NO: 3483623 - RNA, 12 nt, Human
aagaagacauga

SEQ ID NO: 3483624 - RNA, 13 nt, Human
aagaagacauguu

SEQ ID NO: 3483625 - RNA, 20 nt, Human
aagaagacugcauuauauuu

SEQ ID NO: 3483626 - RNA, 13 nt, Human
aagaagacuuuuu

SEQ ID NO: 3483627 - RNA, 16 nt, Human
aagaagagaagcugcu

SEQ ID NO: 3483628 - RNA, 14 nt, Human
aagaagagccacag

SEQ ID NO: 3483629 - RNA, 15 nt, Human
aagaagagccacagu

SEQ ID NO: 3483630 - RNA, 14 nt, Human
aagaagaugaaugg

SEQ ID NO: 3483631 - RNA, 18 nt, Human
aagaagaugaauggcguc

SEQ ID NO: 3483632 - RNA, 17 nt, Human
aagaagaugacuuccca

SEQ ID NO: 3483633 - RNA, 22 nt, Human
aagaagaugaucaguggacagu

SEQ ID NO: 3483634 - RNA, 17 nt, Human
aagaagcccaggaaagg

SEQ ID NO: 3483635 - RNA, 16 nt, Human
aagaagcccccagcua

SEQ ID NO: 3483636 - RNA, 19 nt, Human
aagaagcccccagcuaaga

SEQ ID NO: 3483637 - RNA, 17 nt, Human
aagaagcccggcuccug

SEQ ID NO: 3483638 - RNA, 24 nt, Human
aagaagcccggcuccuggucaccu

SEQ ID NO: 3483639 - RNA, 15 nt, Human
aagaagcucucuccu

SEQ ID NO: 3483640 - RNA, 16 nt, Human
aagaagcuguuguaca

SEQ ID NO: 3483641 - RNA, 22 nt, Human
aagaagcuguuguacauuuaug

SEQ ID NO: 3483642 - RNA, 16 nt, Human
aagaagcuuaggcagg

SEQ ID NO: 3483643 - RNA, 19 nt, Human
aagaagcuucuaauaaauu

SEQ ID NO: 3483644 - RNA, 16 nt, Human
aagaagcuuuauuucu

SEQ ID NO: 3483645 - RNA, 20 nt, Human
aagaaggaaaugaauuucuc

SEQ ID NO: 3483646 - RNA, 14 nt, Human
aagaaggaugaugu

SEQ ID NO: 3483647 - RNA, 17 nt, Human
aagaaggaugaugucuu

SEQ ID NO: 3483648 - RNA, 23 nt, Human
aagaaggcaucgucaugcacagu

SEQ ID NO: 3483649 - RNA, 11 nt, Human
aagaagggcug

SEQ ID NO: 3483650 - RNA, 21 nt, Human
aagaagggcugcaugauguuu

SEQ ID NO: 3483651 - RNA, 16 nt, Human
aagaagggcugguauu

SEQ ID NO: 3483652 - RNA, 14 nt, Human
aagaaggugaauag

SEQ ID NO: 3483653 - RNA, 20 nt, Human
aagaagguggaccuuuuaaa

SEQ ID NO: 3483654 - RNA, 15 nt, Human
aacagaacagcuuca

SEQ ID NO: 3483655 - RNA, 12 nt, Human
aacagaacaggg

SEQ ID NO: 3483656 - RNA, 18 nt, Human
aacagaacauagacagaa

SEQ ID NO: 3483657 - RNA, 15 nt, Human
aacagaagcauuugu

SEQ ID NO: 3483658 - RNA, 22 nt, Human
aacagaagcucuuacucuuucc

SEQ ID NO: 3483659 - RNA, 14 nt, Human
aacagaagcuucca

SEQ ID NO: 3483660 - RNA, 13 nt, Human
aacagaaggauga

SEQ ID NO: 3483661 - RNA, 18 nt, Human
aacagaagggagggcaga

SEQ ID NO: 3483662 - RNA, 21 nt, Human
aacagaagggagggcagagcu

SEQ ID NO: 3483663 - RNA, 22 nt, Human
aacagaagggagggcagagcug

SEQ ID NO: 3483664 - RNA, 23 nt, Human
aacagaauacuguuaaaggaaaa

SEQ ID NO: 3483665 - RNA, 12 nt, Human
aacagaaugaaa

SEQ ID NO: 3483666 - RNA, 21 nt, Human
aacagacaaaaacagccucac

SEQ ID NO: 3483667 - RNA, 18 nt, Human
aacagacaacagaaguca

SEQ ID NO: 3483668 - RNA, 11 nt, Human
aacagacaagu

SEQ ID NO: 3483669 - RNA, 21 nt, Human
aacagacaauaugugagugcc

SEQ ID NO: 3483670 - RNA, 13 nt, Human
aacagacauuguu

SEQ ID NO: 3483671 - RNA, 14 nt, Human
aacagacauuguuu

SEQ ID NO: 3483672 - RNA, 18 nt, Human
aacagacccccucuagaa

SEQ ID NO: 3483673 - RNA, 19 nt, Human
aacagacccccucuagaaa

SEQ ID NO: 3483674 - RNA, 13 nt, Human
aacagacuauuua

SEQ ID NO: 3483675 - RNA, 17 nt, Human
aacagacuauuuaacuu

SEQ ID NO: 3483676 - RNA, 20 nt, Human
aacagacuauuuaacuugag

SEQ ID NO: 3483677 - RNA, 19 nt, Human
aacagacuggaagcacagc

SEQ ID NO: 3483678 - RNA, 20 nt, Human
aacagacuggaagcacagcu

SEQ ID NO: 3483679 - RNA, 19 nt, Human
aacagagacaggcccaaga

SEQ ID NO: 3483680 - RNA, 12 nt, Human
aacagaggacca

SEQ ID NO: 3483681 - RNA, 18 nt, Human
aacagaggaccagcacac

SEQ ID NO: 3483682 - RNA, 20 nt, Human
aacagaggaccagcacacuc

SEQ ID NO: 3483683 - RNA, 17 nt, Human
aacagaggccauggcag

SEQ ID NO: 3483684 - RNA, 14 nt, Human
aacagauaaagauu

SEQ ID NO: 3483685 - RNA, 18 nt, Human
aacagauaagcaagagag

SEQ ID NO: 3483686 - RNA, 19 nt, Human
aacagauaagcaagagaga

SEQ ID NO: 3483687 - RNA, 23 nt, Human
aacagauacuggaaguuuugcau

SEQ ID NO: 3483688 - RNA, 20 nt, Human
aacagauauaaauggcuggu

SEQ ID NO: 3483689 - RNA, 18 nt, Human
aacagaucuccaaagcuu

SEQ ID NO: 3483690 - RNA, 13 nt, Human
aacagaucuggaa

SEQ ID NO: 3483691 - RNA, 13 nt, Human
aacagaugaaaag

SEQ ID NO: 3483692 - RNA, 14 nt, Human
aacagaugaaaagc

SEQ ID NO: 3483693 - RNA, 18 nt, Human
aacagaugaccccugccc

SEQ ID NO: 3483694 - RNA, 21 nt, Human
aacagaugaugagaauuucua

SEQ ID NO: 3483695 - RNA, 22 nt, Human
aacagaugcaaugugcuacuga

SEQ ID NO: 3483696 - RNA, 23 nt, Human
aacagaugcaaugugcuacugau

SEQ ID NO: 3483697 - RNA, 19 nt, Human
aacagauguccaucagaug

SEQ ID NO: 3483698 - RNA, 20 nt, Human
aacagauguccaucagauga

SEQ ID NO: 3483699 - RNA, 19 nt, Human
aacagauuauuaccuuaca

SEQ ID NO: 3483700 - RNA, 14 nt, Human
aacagauucuuuua

SEQ ID NO: 3483701 - RNA, 18 nt, Human
aacagauuggauuuuaug

SEQ ID NO: 3483702 - RNA, 23 nt, Human
aacagauuggauuuuauguugac

SEQ ID NO: 3483703 - RNA, 24 nt, Human
aacagauuggauuuuauguugaca

SEQ ID NO: 3483704 - RNA, 14 nt, Human
aacagauuuuuaca

SEQ ID NO: 3483705 - RNA, 18 nt, Human
aacagcaaaccaagagau

SEQ ID NO: 3483706 - RNA, 15 nt, Human
aacagcaagugugaa

SEQ ID NO: 3483707 - RNA, 16 nt, Human
aacagcaagugugaau

SEQ ID NO: 3483708 - RNA, 23 nt, Human
aacagcacuggcucucuccagga

SEQ ID NO: 3483709 - RNA, 17 nt, Human
aacagcagagguucuuu

SEQ ID NO: 3483710 - RNA, 22 nt, Human
aacagcauccccaaaacaaagu

SEQ ID NO: 3483711 - RNA, 10 nt, Human
aacagcaucu

SEQ ID NO: 3483712 - RNA, 19 nt, Human
aacagcaucuccaagcagc

SEQ ID NO: 3483713 - RNA, 21 nt, Human
aacagcaucuccaagcagcuu

SEQ ID NO: 3483714 - RNA, 12 nt, Human
aacagcauugcu

SEQ ID NO: 3483715 - RNA, 16 nt, Human
aacagcauugcuuucu

SEQ ID NO: 3483716 - RNA, 20 nt, Human
aacagcauugcuuucugaaa

SEQ ID NO: 3483717 - RNA, 15 nt, Human
aacagccaacaggug

SEQ ID NO: 3483718 - RNA, 22 nt, Human
aacagccgaguggauagaugcc

SEQ ID NO: 3483719 - RNA, 21 nt, Human
aacagccgcuccugucugcca

SEQ ID NO: 3483720 - RNA, 14 nt, Human
aacagccucacaga

SEQ ID NO: 3483721 - RNA, 20 nt, Human
aacagccuuugggaaaugcu

SEQ ID NO: 3483722 - RNA, 19 nt, Human
aacagcguuccuagagaag

SEQ ID NO: 3483723 - RNA, 16 nt, Human
aacagcuaaugggaca

SEQ ID NO: 3483724 - RNA, 22 nt, Human
aacagcuacaacagccucacuu

SEQ ID NO: 3483725 - RNA, 16 nt, Human
aacagcuaugagagga

SEQ ID NO: 3483726 - RNA, 18 nt, Human
aacagcuccuugggagga

SEQ ID NO: 3483727 - RNA, 22 nt, Human
aacagcuccuugggaggaagca

SEQ ID NO: 3483728 - RNA, 24 nt, Human
aacagcucgauccaaauugugcuu

SEQ ID NO: 3483729 - RNA, 22 nt, Human
aacagcucucuucaaugacaua

SEQ ID NO: 3483730 - RNA, 20 nt, Human
aacagcucugcaggcuuaau

SEQ ID NO: 3483731 - RNA, 20 nt, Human
aacagcugaggucucuugag

SEQ ID NO: 3483732 - RNA, 16 nt, Human
aacagcugcauuagaa

SEQ ID NO: 3483733 - RNA, 18 nt, Human
aacagcugcauuagaaaa

SEQ ID NO: 3483734 - RNA, 10 nt, Human
aacagcugcc

SEQ ID NO: 3483735 - RNA, 14 nt, Human
aacagcugccuuag

SEQ ID NO: 3483736 - RNA, 15 nt, Human
aacagcugccuuagc

SEQ ID NO: 3483737 - RNA, 23 nt, Human
aacagcuggacccugaccagcuc

SEQ ID NO: 3483738 - RNA, 17 nt, Human
aacagcuggugcccugc

SEQ ID NO: 3483739 - RNA, 16 nt, Human
aacagcugguguagcu

SEQ ID NO: 3483740 - RNA, 23 nt, Human
aacagcugguguagcuacagaga

SEQ ID NO: 3483741 - RNA, 11 nt, Human
aagcaggaagc

SEQ ID NO: 3483742 - RNA, 13 nt, Human
aagcaggaagcuc

SEQ ID NO: 3483743 - RNA, 15 nt, Human
aagcagggacuugaa

SEQ ID NO: 3483744 - RNA, 19 nt, Human
aagcaggggaguaugcaaa

SEQ ID NO: 3483745 - RNA, 17 nt, Human
aagcagggucugggcag

SEQ ID NO: 3483746 - RNA, 19 nt, Human
aagcagguggaucuauuuc

SEQ ID NO: 3483747 - RNA, 15 nt, Human
aagcagguuaaaugu

SEQ ID NO: 3483748 - RNA, 17 nt, Human
aagcagguuaaauguuu

SEQ ID NO: 3483749 - RNA, 20 nt, Human
aagcagguuaaauguuuugu

SEQ ID NO: 3483750 - RNA, 14 nt, Human
aagcagguucuugu

SEQ ID NO: 3483751 - RNA, 15 nt, Human
aagcagguucuuguu

SEQ ID NO: 3483752 - RNA, 19 nt, Human
aagcagguugauaaaucau

SEQ ID NO: 3483753 - RNA, 20 nt, Human
aagcaguauauuaguauuau

SEQ ID NO: 3483754 - RNA, 13 nt, Human
aagcaguauuuug

SEQ ID NO: 3483755 - RNA, 19 nt, Human
aagcagucgugccuguguc

SEQ ID NO: 3483756 - RNA, 18 nt, Human
aagcagucuacccaccuc

SEQ ID NO: 3483757 - RNA, 22 nt, Human
aagcaguugaaaugaggcauga

SEQ ID NO: 3483758 - RNA, 14 nt, Human
aagcaguuucaaua

SEQ ID NO: 3483759 - RNA, 20 nt, Human
aagcaguuucaauaaaguuu

SEQ ID NO: 3483760 - RNA, 22 nt, Human
aagcaguuucaauaaaguuuga

SEQ ID NO: 3483761 - RNA, 15 nt, Human
aagcauaaaaacauu

SEQ ID NO: 3483762 - RNA, 23 nt, Human
aagcauacaugcaaaaagaaaug

SEQ ID NO: 3483763 - RNA, 22 nt, Human
aagcauagauaauauuguuugg

SEQ ID NO: 3483764 - RNA, 17 nt, Human
aagcauagauguuuugg

SEQ ID NO: 3483765 - RNA, 13 nt, Human
aagcauauaaaau

SEQ ID NO: 3483766 - RNA, 14 nt, Human
aagcauauaaaaug

SEQ ID NO: 3483767 - RNA, 16 nt, Human
aagcauauaaaauggc

SEQ ID NO: 3483768 - RNA, 17 nt, Human
aagcauauaaaauggca

SEQ ID NO: 3483769 - RNA, 16 nt, Human
aagcauauagagauga

SEQ ID NO: 3483770 - RNA, 23 nt, Human
aagcauauauuuuuauauuuacu

SEQ ID NO: 3483771 - RNA, 19 nt, Human
aagcauauguguuggcuug

SEQ ID NO: 3483772 - RNA, 13 nt, Human
aagcauauugacu

SEQ ID NO: 3483773 - RNA, 15 nt, Human
aagcaucaccucagg

SEQ ID NO: 3483774 - RNA, 16 nt, Human
aagcaucaccucaggc

SEQ ID NO: 3483775 - RNA, 23 nt, Human
aagcaucaccucaggccaggugc

SEQ ID NO: 3483776 - RNA, 21 nt, Human
aagcaucauuauuuauguauu

SEQ ID NO: 3483777 - RNA, 14 nt, Human
aagcaucccucacc

SEQ ID NO: 3483778 - RNA, 13 nt, Human
aagcaucuaaacu

SEQ ID NO: 3483779 - RNA, 13 nt, Human
aagcaucuacuuc

SEQ ID NO: 3483780 - RNA, 13 nt, Human
aagcaucuggcuc

SEQ ID NO: 3483781 - RNA, 21 nt, Human
aagcaucuuccagaaguguga

SEQ ID NO: 3483782 - RNA, 12 nt, Human
aagcaugaaaug

SEQ ID NO: 3483783 - RNA, 13 nt, Human
aagcaugaaaugu

SEQ ID NO: 3483784 - RNA, 18 nt, Human
aagcaugaaaugugaauu

SEQ ID NO: 3483785 - RNA, 19 nt, Human
aagcaugacagaaaauaug

SEQ ID NO: 3483786 - RNA, 22 nt, Human
aagcaugacagaaaauauguau

SEQ ID NO: 3483787 - RNA, 18 nt, Human
aagcauguacaguguucu

SEQ ID NO: 3483788 - RNA, 13 nt, Human
aagcaugugucau

SEQ ID NO: 3483789 - RNA, 15 nt, Human
aagcauguguuugca

SEQ ID NO: 3483790 - RNA, 20 nt, Human
aagcauguuucauguuuugu

SEQ ID NO: 3483791 - RNA, 13 nt, Human
aagcauguuuugc

SEQ ID NO: 3483792 - RNA, 15 nt, Human
aagcauguuuugcau

SEQ ID NO: 3483793 - RNA, 18 nt, Human
aagcauuacauuuccaaa

SEQ ID NO: 3483794 - RNA, 18 nt, Human
aagcauuaccacucaggc

SEQ ID NO: 3483795 - RNA, 17 nt, Human
aagcauuacucuuguaa

SEQ ID NO: 3483796 - RNA, 19 nt, Human
aagcauuacucuuguaaga

SEQ ID NO: 3483797 - RNA, 20 nt, Human
aagcauuacucuuguaagau

SEQ ID NO: 3483798 - RNA, 22 nt, Human
aagcauuacucuuguaagauuu

SEQ ID NO: 3483799 - RNA, 15 nt, Human
aagcauucagagagc

SEQ ID NO: 3483800 - RNA, 14 nt, Human
aagcauuccaacaa

SEQ ID NO: 3483801 - RNA, 17 nt, Human
aagcauuccaacaaagg

SEQ ID NO: 3483802 - RNA, 14 nt, Human
aagcauuccuucuu

SEQ ID NO: 3483803 - RNA, 16 nt, Human
aagcauuccuucuuug

SEQ ID NO: 3483804 - RNA, 17 nt, Human
aagcauuccuucuuuga

SEQ ID NO: 3483805 - RNA, 15 nt, Human
aagcauucucauugg

SEQ ID NO: 3483806 - RNA, 18 nt, Human
aagcauucucauuggaaa

SEQ ID NO: 3483807 - RNA, 13 nt, Human
aagcauugaaugg

SEQ ID NO: 3483808 - RNA, 16 nt, Human
aagcauugaauggcua

SEQ ID NO: 3483809 - RNA, 14 nt, Human
aagcauugccuggc

SEQ ID NO: 3483810 - RNA, 20 nt, Human
aagcauugcuuuuauuuuga

SEQ ID NO: 3483811 - RNA, 13 nt, Human
aagcauuguaaau

SEQ ID NO: 3483812 - RNA, 18 nt, Human
aagcauuguaaaugugcu

SEQ ID NO: 3483813 - RNA, 19 nt, Human
aagcauuguaaaugugcuu

SEQ ID NO: 3483814 - RNA, 14 nt, Human
aagcauugugagua

SEQ ID NO: 3483815 - RNA, 11 nt, Human
aagcauuguuu

SEQ ID NO: 3483816 - RNA, 21 nt, Human
aagcauuguuugcuuauuguu

SEQ ID NO: 3483817 - RNA, 16 nt, Human
aagcauuuacuuugaa

SEQ ID NO: 3483818 - RNA, 16 nt, Human
aagcauuuagaaaacu

SEQ ID NO: 3483819 - RNA, 16 nt, Human
aagcauuuagauguau

SEQ ID NO: 3483820 - RNA, 17 nt, Human
aagcauuugaaugcauu

SEQ ID NO: 3483821 - RNA, 18 nt, Human
aagcauuugaaugcauuu

SEQ ID NO: 3483822 - RNA, 21 nt, Human
aagcauuugaaugcauuuugu

SEQ ID NO: 3483823 - RNA, 17 nt, Human
aagcauuuguauuuugu

SEQ ID NO: 3483824 - RNA, 23 nt, Human
aagcauuuguuucuacuuugaua

SEQ ID NO: 3483825 - RNA, 19 nt, Human
aagcauuuuguaaguugaa

SEQ ID NO: 3483826 - RNA, 18 nt, Human
aagccaaaacaauguuua

SEQ ID NO: 3483827 - RNA, 14 nt, Human
aagccaaaauuaag

SEQ ID NO: 3483828 - RNA, 11 nt, Human
aagccaaagaa

SEQ ID NO: 3483829 - RNA, 15 nt, Human
aagccaaagaaaaau

SEQ ID NO: 3483830 - RNA, 21 nt, Human
aagccaaagaaaaauaacccu

SEQ ID NO: 3483831 - RNA, 15 nt, Human
aagccaaagaaauga

SEQ ID NO: 3483832 - RNA, 22 nt, Human
aagccaaagaaaugaacauucc

SEQ ID NO: 3483833 - RNA, 23 nt, Human
aagccaaagaaaugaacauucca

SEQ ID NO: 3483834 - RNA, 16 nt, Human
aagccaaagacuuagu

SEQ ID NO: 3483835 - RNA, 13 nt, Human
aagccaaauuuau

SEQ ID NO: 3483836 - RNA, 16 nt, Human
aagccaacuuguaaau

SEQ ID NO: 3483837 - RNA, 13 nt, Human
aagccaagaggca

SEQ ID NO: 3483838 - RNA, 13 nt, Human
aagccaagcagcc

SEQ ID NO: 3483839 - RNA, 14 nt, Human
aagccaagcagcca

SEQ ID NO: 3483840 - RNA, 17 nt, Human
aagccaagcagccaagc

SEQ ID NO: 3483841 - RNA, 13 nt, Human
aagccaagggaaa

SEQ ID NO: 3483842 - RNA, 19 nt, Human
aagccaagggaaccugugu

SEQ ID NO: 3483843 - RNA, 13 nt, Human
aagccaagugggg

SEQ ID NO: 3483844 - RNA, 17 nt, Human
aagccaauaacacacag

SEQ ID NO: 3483845 - RNA, 14 nt, Human
aagccaauuucaau

SEQ ID NO: 3483846 - RNA, 11 nt, Human
aagccaauuuu

SEQ ID NO: 3483847 - RNA, 14 nt, Human
aagccaauuuuucu

SEQ ID NO: 3483848 - RNA, 17 nt, Human
aagccaauuuuucugca

SEQ ID NO: 3483849 - RNA, 11 nt, Human
aagccacagaa

SEQ ID NO: 3483850 - RNA, 22 nt, Human
aagccacaggccugagauuuca

SEQ ID NO: 3483851 - RNA, 21 nt, Human
aagccaccaacauacucccau

SEQ ID NO: 3483852 - RNA, 11 nt, Human
aagccaccucu

SEQ ID NO: 3483853 - RNA, 20 nt, Human
aagccaccucucccucaaca

SEQ ID NO: 3483854 - RNA, 17 nt, Human
aagccacuagacucuuc

SEQ ID NO: 3483855 - RNA, 14 nt, Human
aagccacugaagcu

SEQ ID NO: 3483856 - RNA, 17 nt, Human
aagccacugaagcuggg

SEQ ID NO: 3483857 - RNA, 17 nt, Human
aagccacugccucuccc

SEQ ID NO: 3483858 - RNA, 22 nt, Human
aagccacugccucucccucugg

SEQ ID NO: 3483859 - RNA, 18 nt, Human
aagccacuugaaauguua

SEQ ID NO: 3483860 - RNA, 20 nt, Human
aagccagaagcuaagcugca

SEQ ID NO: 3483861 - RNA, 13 nt, Human
aagccagaagcug

SEQ ID NO: 3483862 - RNA, 23 nt, Human
aagccagacucugccaaaaccaa

SEQ ID NO: 3483863 - RNA, 15 nt, Human
aagccagaggcuggg

SEQ ID NO: 3483864 - RNA, 13 nt, Human
aagccagauuuuc

SEQ ID NO: 3483865 - RNA, 19 nt, Human
aagccagauuuuccugaaa

SEQ ID NO: 3483866 - RNA, 23 nt, Human
aagccagauuuuuuaaaauuuau

SEQ ID NO: 3483867 - RNA, 14 nt, Human
aaccugggauucag

SEQ ID NO: 3483868 - RNA, 17 nt, Human
aaccuggguccaaauaa

SEQ ID NO: 3483869 - RNA, 22 nt, Human
aaccuggguccaaauaaaaacu

SEQ ID NO: 3483870 - RNA, 20 nt, Human
aaccuggguugcagacagga

SEQ ID NO: 3483871 - RNA, 11 nt, Human
aaccuggugcu

SEQ ID NO: 3483872 - RNA, 11 nt, Human
aaccuguaaau

SEQ ID NO: 3483873 - RNA, 15 nt, Human
aaccuguaaauuauu

SEQ ID NO: 3483874 - RNA, 16 nt, Human
aaccuguaaauuauuu

SEQ ID NO: 3483875 - RNA, 14 nt, Human
aaccuguaauaaau

SEQ ID NO: 3483876 - RNA, 16 nt, Human
aaccuguaauaaauau

SEQ ID NO: 3483877 - RNA, 17 nt, Human
aaccuguagaaucaauu

SEQ ID NO: 3483878 - RNA, 18 nt, Human
aaccuguagaaucaauuu

SEQ ID NO: 3483879 - RNA, 24 nt, Human
aaccugucuccacugugccuuugc

SEQ ID NO: 3483880 - RNA, 11 nt, Human
aaccugucuga

SEQ ID NO: 3483881 - RNA, 16 nt, Human
aaccugugucugcgaa

SEQ ID NO: 3483882 - RNA, 24 nt, Human
aaccuguuaccuacuuugacuuuu

SEQ ID NO: 3483883 - RNA, 13 nt, Human
aaccuguucugcu

SEQ ID NO: 3483884 - RNA, 21 nt, Human
aaccuguugauagcaagugaa

SEQ ID NO: 3483885 - RNA, 21 nt, Human
aaccuguugcuguguuuaauu

SEQ ID NO: 3483886 - RNA, 23 nt, Human
aaccuguugcuguguuuaauuug

SEQ ID NO: 3483887 - RNA, 22 nt, Human
aagcuaacagcaguuucaggua

SEQ ID NO: 3483888 - RNA, 22 nt, Human
aagcuaacagggaaggcaggca

SEQ ID NO: 3483889 - RNA, 15 nt, Human
aagcuaauuauuuua

SEQ ID NO: 3483890 - RNA, 16 nt, Human
aagcuaauuauuuuaa

SEQ ID NO: 3483891 - RNA, 17 nt, Human
aagcuacaaucuguuca

SEQ ID NO: 3483892 - RNA, 13 nt, Human
aagcuacagguua

SEQ ID NO: 3483893 - RNA, 22 nt, Human
aagcuacagguuacaacagauu

SEQ ID NO: 3483894 - RNA, 17 nt, Human
aagcuacuagcaaaaua

SEQ ID NO: 3483895 - RNA, 22 nt, Human
aagcuacugccauccuggccca

SEQ ID NO: 3483896 - RNA, 22 nt, Human
aagcuacugugugugugaauga

SEQ ID NO: 3483897 - RNA, 19 nt, Human
aagcuagaaggccacaugu

SEQ ID NO: 3483898 - RNA, 10 nt, Human
aagcuagaau

SEQ ID NO: 3483899 - RNA, 21 nt, Human
aagcuagacagauccccguuc

SEQ ID NO: 3483900 - RNA, 22 nt, Human
aagcuagacgagcaggcuucuu

SEQ ID NO: 3483901 - RNA, 14 nt, Human
aagcuagagauaug

SEQ ID NO: 3483902 - RNA, 18 nt, Human
aagcuagcuccccuccuc

SEQ ID NO: 3483903 - RNA, 20 nt, Human
aagcuagcuccccuccucuc

SEQ ID NO: 3483904 - RNA, 21 nt, Human
aagcuaggaaaagaaaucuau

SEQ ID NO: 3483905 - RNA, 23 nt, Human
aagcuaggaaaagaaaucuauag

SEQ ID NO: 3483906 - RNA, 21 nt, Human
aagcuaggugcuauuugucau

SEQ ID NO: 3483907 - RNA, 14 nt, Human
aagcuagucuuuug

SEQ ID NO: 3483908 - RNA, 15 nt, Human
aagcuagucuuuugc

SEQ ID NO: 3483909 - RNA, 20 nt, Human
aagcuagucuuuugcuuuug

SEQ ID NO: 3483910 - RNA, 21 nt, Human
aagcuaguguaccuccucuca

SEQ ID NO: 3483911 - RNA, 13 nt, Human
aagcuaguugaau

SEQ ID NO: 3483912 - RNA, 15 nt, Human
aagcuaguugaauac

SEQ ID NO: 3483913 - RNA, 17 nt, Human
aagcuaguugaauacuu

SEQ ID NO: 3483914 - RNA, 15 nt, Human
aagcuauaaagcagu

SEQ ID NO: 3483915 - RNA, 21 nt, Human
aagcuauaaauuccucuuugc

SEQ ID NO: 3483916 - RNA, 17 nt, Human
aagcuauccaaauaacu

SEQ ID NO: 3483917 - RNA, 12 nt, Human
aagcuaugguga

SEQ ID NO: 3483918 - RNA, 19 nt, Human
aagcuauuagccaggauca

SEQ ID NO: 3483919 - RNA, 18 nt, Human
aagcuauucacauuguua

SEQ ID NO: 3483920 - RNA, 13 nt, Human
aagcuauuccuuu

SEQ ID NO: 3483921 - RNA, 19 nt, Human
aagcuauuccuuucccuuc

SEQ ID NO: 3483922 - RNA, 22 nt, Human
aagcuauuccuuucccuuccuc

SEQ ID NO: 3483923 - RNA, 18 nt, Human
aagcuauuuaaagcaucu

SEQ ID NO: 3483924 - RNA, 18 nt, Human
aagcuauuugauguaaua

SEQ ID NO: 3483925 - RNA, 13 nt, Human
aagcuauuuuucu

SEQ ID NO: 3483926 - RNA, 16 nt, Human
aagcuauuuuucuaac

SEQ ID NO: 3483927 - RNA, 21 nt, Human
aagcuauuuuucuaacuacaa

SEQ ID NO: 3483928 - RNA, 11 nt, Human
aagcucacagu

SEQ ID NO: 3483929 - RNA, 23 nt, Human
aagcucacaguuccucgcccugg

SEQ ID NO: 3483930 - RNA, 16 nt, Human
aagcucaccuguugcu

SEQ ID NO: 3483931 - RNA, 18 nt, Human
aagcucaccuguugcuua

SEQ ID NO: 3483932 - RNA, 17 nt, Human
aagcucacguccugaga

SEQ ID NO: 3483933 - RNA, 19 nt, Human
aagcucacguccugagaaa

SEQ ID NO: 3483934 - RNA, 14 nt, Human
aagcucagaaggcu

SEQ ID NO: 3483935 - RNA, 12 nt, Human
aagcucagaauc

SEQ ID NO: 3483936 - RNA, 22 nt, Human
aagcucagaggcgcacugugac

SEQ ID NO: 3483937 - RNA, 15 nt, Human
aagcucagcccaccc

SEQ ID NO: 3483938 - RNA, 21 nt, Human
aagcucagcccaccccccuca

SEQ ID NO: 3483939 - RNA, 18 nt, Human
aagcucagggccuggcuc

SEQ ID NO: 3483940 - RNA, 20 nt, Human
aagcucagggccuggcucag

SEQ ID NO: 3483941 - RNA, 20 nt, Human
aagcucauauuuuguauaua

SEQ ID NO: 3483942 - RNA, 19 nt, Human
aagcucauuucaugcucug

SEQ ID NO: 3483943 - RNA, 18 nt, Human
aagcuccaagcucccagg

SEQ ID NO: 3483944 - RNA, 21 nt, Human
aagcuccacugucacccucca

SEQ ID NO: 3483945 - RNA, 21 nt, Human
aagcuccaguccugcucucua

SEQ ID NO: 3483946 - RNA, 19 nt, Human
aagcucccaagggauggug

SEQ ID NO: 3483947 - RNA, 14 nt, Human
aagcucccaggaac

SEQ ID NO: 3483948 - RNA, 16 nt, Human
aagcucccaggaacaa

SEQ ID NO: 3483949 - RNA, 22 nt, Human
aagcucccaggcauuccccagg

SEQ ID NO: 3483950 - RNA, 15 nt, Human
aagcucccagggccu

SEQ ID NO: 3483951 - RNA, 16 nt, Human
aagcuccgcaggacuu

SEQ ID NO: 3483952 - RNA, 15 nt, Human
aagcuccuccucccu

SEQ ID NO: 3483953 - RNA, 14 nt, Human
aagcuccuccucgg

SEQ ID NO: 3483954 - RNA, 21 nt, Human
aagcuccucuccccagcccag

SEQ ID NO: 3483955 - RNA, 23 nt, Human
aagcuccucuccccagcccagag

SEQ ID NO: 3483956 - RNA, 21 nt, Human
aagcucuacugaggugcuaug

SEQ ID NO: 3483957 - RNA, 15 nt, Human
aagcucuagaaucug

SEQ ID NO: 3483958 - RNA, 23 nt, Human
aagcucucuugccgaggagccag

SEQ ID NO: 3483959 - RNA, 15 nt, Human
aagcucugaagaacu

SEQ ID NO: 3483960 - RNA, 13 nt, Human
aagcucugcuccu

SEQ ID NO: 3483961 - RNA, 15 nt, Human
aagcucuggcugaac

SEQ ID NO: 3483962 - RNA, 22 nt, Human
aagcucuggcugaacccugugc

SEQ ID NO: 3483963 - RNA, 16 nt, Human
aagcucuuacucuuuc

SEQ ID NO: 3483964 - RNA, 12 nt, Human
aagcucuuccuu

SEQ ID NO: 3483965 - RNA, 20 nt, Human
aagcucuugaagacacugaa

SEQ ID NO: 3483966 - RNA, 19 nt, Human
aagcucuuggagcugugag

SEQ ID NO: 3483967 - RNA, 14 nt, Human
aagcugaaaauaua

SEQ ID NO: 3483968 - RNA, 18 nt, Human
aagcugaaauuuuagaaa

SEQ ID NO: 3483969 - RNA, 14 nt, Human
aagcugaagugcau

SEQ ID NO: 3483970 - RNA, 22 nt, Human
aagcugacauugccaaaaagga

SEQ ID NO: 3483971 - RNA, 22 nt, Human
aagcugacgaacuuccauggcc

SEQ ID NO: 3483972 - RNA, 14 nt, Human
aagcugacuuggcu

SEQ ID NO: 3483973 - RNA, 18 nt, Human
aagcugacuuggcuggug

SEQ ID NO: 3483974 - RNA, 20 nt, Human
aagcugacuuggcuggugug

SEQ ID NO: 3483975 - RNA, 11 nt, Human
aagcugagccu

SEQ ID NO: 3483976 - RNA, 13 nt, Human
aagcugagccugc

SEQ ID NO: 3483977 - RNA, 17 nt, Human
aagcugaggugcccagg

SEQ ID NO: 3483978 - RNA, 20 nt, Human
aagcugaggugcccaggaga

SEQ ID NO: 3483979 - RNA, 13 nt, Human
aagcugaguauua

SEQ ID NO: 3483980 - RNA, 13 nt, Human
aagcugaguuucc

SEQ ID NO: 3483981 - RNA, 22 nt, Human
aagcugaguuuccuaugggaac

SEQ ID NO: 3483982 - RNA, 15 nt, Human
aagcugauuaaauga

SEQ ID NO: 3483983 - RNA, 17 nt, Human
aagcugauuacugucaa

SEQ ID NO: 3483984 - RNA, 20 nt, Human
aagcugcacccucaggcagg

SEQ ID NO: 3483985 - RNA, 15 nt, Human
aagcugcagagauuu

SEQ ID NO: 3483986 - RNA, 23 nt, Human
aagcugcagagauuucucauuga

SEQ ID NO: 3483987 - RNA, 18 nt, Human
aagcugcaucuagaggcu

SEQ ID NO: 3483988 - RNA, 12 nt, Human
aagcugccagcc

SEQ ID NO: 3483989 - RNA, 15 nt, Human
aagcugcccugccca

SEQ ID NO: 3483990 - RNA, 20 nt, Human
aagcugccgaaccaaaagaa

SEQ ID NO: 3483991 - RNA, 18 nt, Human
aagcugccucccugucca

SEQ ID NO: 3483992 - RNA, 19 nt, Human
aagcugccucccuguccac

SEQ ID NO: 3483993 - RNA, 20 nt, Human
aagcugccucccuguccacc

SEQ ID NO: 3483994 - RNA, 22 nt, Human
aagcugccucccuguccacccc

SEQ ID NO: 3483995 - RNA, 12 nt, Human
aagcugcucaac

SEQ ID NO: 3483996 - RNA, 20 nt, Human
aagcugcucaacuugcaaaa

SEQ ID NO: 3483997 - RNA, 16 nt, Human
aagcugcuccaggccu

SEQ ID NO: 3483998 - RNA, 20 nt, Human
aagcugcucugagccacagu

SEQ ID NO: 3483999 - RNA, 16 nt, Human
aagcugcugacagugu

SEQ ID NO: 3484000 - RNA, 22 nt, Human
aagcugcugaccaauugugcug

SEQ ID NO: 3484001 - RNA, 13 nt, Human
aagcugcugugau

SEQ ID NO: 3484002 - RNA, 23 nt, Human
aagcugcuuggaccucgugcuuu

SEQ ID NO: 3484003 - RNA, 21 nt, Human
aagcugcuuuaaaaaaauaca

SEQ ID NO: 3484004 - RNA, 11 nt, Human
aagcugcuuuu

SEQ ID NO: 3484005 - RNA, 11 nt, Human
aagcuggaagc

SEQ ID NO: 3484006 - RNA, 17 nt, Human
aagcuggagugcagugg

SEQ ID NO: 3484007 - RNA, 21 nt, Human
aagcuggccgaggguccuggc

SEQ ID NO: 3484008 - RNA, 22 nt, Human
aagcuggccgaggguccuggcu

SEQ ID NO: 3484009 - RNA, 14 nt, Human
aagcuggccugaga

SEQ ID NO: 3484010 - RNA, 15 nt, Human
aagcuggcuggggug

SEQ ID NO: 3484011 - RNA, 16 nt, Human
aagcugggguucauga

SEQ ID NO: 3484012 - RNA, 22 nt, Human
aagcugggguucaugacaaugg

SEQ ID NO: 3484013 - RNA, 23 nt, Human
aagcuggugggugaaagaaauca

SEQ ID NO: 3484014 - RNA, 18 nt, Human
aagcuguaaaaagagaga

SEQ ID NO: 3484015 - RNA, 13 nt, Human
aagcuguggccag

SEQ ID NO: 3484016 - RNA, 12 nt, Human
aagcuguguccu

SEQ ID NO: 3484017 - RNA, 21 nt, Human
aagcugugucugcccaaugaa

SEQ ID NO: 3484018 - RNA, 16 nt, Human
aagcuguuaaacuguu

SEQ ID NO: 3484019 - RNA, 13 nt, Human
aagcuguuccugu

SEQ ID NO: 3484020 - RNA, 16 nt, Human
aagcuguucuuccugg

SEQ ID NO: 3484021 - RNA, 22 nt, Human
aagcuguugaugguagguggca

SEQ ID NO: 3484022 - RNA, 18 nt, Human
aagcuguuguacauuuau

SEQ ID NO: 3484023 - RNA, 15 nt, Human
aagcuguuuccauag

SEQ ID NO: 3484024 - RNA, 17 nt, Human
aagcuguuuggaaaaga

SEQ ID NO: 3484025 - RNA, 17 nt, Human
aagcuguuugguuuuaa

SEQ ID NO: 3484026 - RNA, 15 nt, Human
aagcuuaaaacuuug

SEQ ID NO: 3484027 - RNA, 21 nt, Human
aagcuuaauggcugauaauuu

SEQ ID NO: 3484028 - RNA, 11 nt, Human
aagcuuagaac

SEQ ID NO: 3484029 - RNA, 18 nt, Human
aagcuuaugcuuaaauuc

SEQ ID NO: 3484030 - RNA, 18 nt, Human
aagcuuauuaaaacucau

SEQ ID NO: 3484031 - RNA, 23 nt, Human
aaguacggcuggcuacaacugcu

SEQ ID NO: 3484032 - RNA, 19 nt, Human
aaguacuaagcgcuagagg

SEQ ID NO: 3484033 - RNA, 16 nt, Human
aaguacugagcaguga

SEQ ID NO: 3484034 - RNA, 20 nt, Human
aaguacugcuguaaauaaau

SEQ ID NO: 3484035 - RNA, 23 nt, Human
aaguacugguaagauuguuauua

SEQ ID NO: 3484036 - RNA, 17 nt, Human
aaguacuguaagaauaa

SEQ ID NO: 3484037 - RNA, 22 nt, Human
aaguacuguaagaauaauuuau

SEQ ID NO: 3484038 - RNA, 19 nt, Human
aaguacuguaauaauaccu

SEQ ID NO: 3484039 - RNA, 22 nt, Human
aaguacuguaauaauaccucaa

SEQ ID NO: 3484040 - RNA, 16 nt, Human
aaguacuguguacaga

SEQ ID NO: 3484041 - RNA, 14 nt, Human
aaguacuguuuacc

SEQ ID NO: 3484042 - RNA, 21 nt, Human
aaguacuucuccacccugcuc

SEQ ID NO: 3484043 - RNA, 22 nt, Human
aaguacuucuccacccugcucu

SEQ ID NO: 3484044 - RNA, 23 nt, Human
aaguacuucuccacccugcucuc

SEQ ID NO: 3484045 - RNA, 11 nt, Human
aaguacuucuu

SEQ ID NO: 3484046 - RNA, 14 nt, Human
aaguacuugagugu

SEQ ID NO: 3484047 - RNA, 14 nt, Human
aaguacuuuuggca

SEQ ID NO: 3484048 - RNA, 13 nt, Human
aaguagaaaucau

SEQ ID NO: 3484049 - RNA, 15 nt, Human
aaguagaaaucauag

SEQ ID NO: 3484050 - RNA, 23 nt, Human
aaguagaacuuuguauaguuaug

SEQ ID NO: 3484051 - RNA, 20 nt, Human
aaguagaagucuuagaugua

SEQ ID NO: 3484052 - RNA, 17 nt, Human
aaguagacaaucauugu

SEQ ID NO: 3484053 - RNA, 18 nt, Human
aaguagacaguuuugaga

SEQ ID NO: 3484054 - RNA, 21 nt, Human
aaguagacaguuuugagaacg

SEQ ID NO: 3484055 - RNA, 19 nt, Human
aaguagacuucauuuuucc

SEQ ID NO: 3484056 - RNA, 19 nt, Human
aaguagaugauaaaggcca

SEQ ID NO: 3484057 - RNA, 14 nt, Human
aaguagauuucaug

SEQ ID NO: 3484058 - RNA, 21 nt, Human
aaguagcaaaugagacagcag

SEQ ID NO: 3484059 - RNA, 15 nt, Human
aaguagcacaggcug

SEQ ID NO: 3484060 - RNA, 16 nt, Human
aaguagcauuuacugu

SEQ ID NO: 3484061 - RNA, 14 nt, Human
aaguagccucuccu

SEQ ID NO: 3484062 - RNA, 19 nt, Human
aaguagcugggauuuuaaa

SEQ ID NO: 3484063 - RNA, 15 nt, Human
aaguaggaaaaauaa

SEQ ID NO: 3484064 - RNA, 15 nt, Human
aaguaggcaggacca

SEQ ID NO: 3484065 - RNA, 15 nt, Human
aaguaggcaugaggg

SEQ ID NO: 3484066 - RNA, 17 nt, Human
aaguaggggaagaauaa

SEQ ID NO: 3484067 - RNA, 19 nt, Human
aaguaguaaaaauuaaaaa

SEQ ID NO: 3484068 - RNA, 18 nt, Human
aaguaguacuucuucugu

SEQ ID NO: 3484069 - RNA, 14 nt, Human
aaguaguccuguga

SEQ ID NO: 3484070 - RNA, 14 nt, Human
aaguagucugcuca

SEQ ID NO: 3484071 - RNA, 17 nt, Human
aaguaguggagccccug

SEQ ID NO: 3484072 - RNA, 18 nt, Human
aaguaguuaucauguuag

SEQ ID NO: 3484073 - RNA, 16 nt, Human
aaguaguucuguauuu

SEQ ID NO: 3484074 - RNA, 12 nt, Human
aaguaguuugua

SEQ ID NO: 3484075 - RNA, 15 nt, Human
aaguauaaaauacaa

SEQ ID NO: 3484076 - RNA, 18 nt, Human
aaguauaaauuuguguaa

SEQ ID NO: 3484077 - RNA, 20 nt, Human
aaguauaauguuuauuaaau

SEQ ID NO: 3484078 - RNA, 22 nt, Human
aaguauaauguuuauuaaaugc

SEQ ID NO: 3484079 - RNA, 18 nt, Human
aaguauagaaaaucuuca

SEQ ID NO: 3484080 - RNA, 19 nt, Human
aaguauagaaaaucuucau

SEQ ID NO: 3484081 - RNA, 14 nt, Human
aaguauagagagaa

SEQ ID NO: 3484082 - RNA, 17 nt, Human
aaguauagagagaaguu

SEQ ID NO: 3484083 - RNA, 23 nt, Human
aaguauagagagaaguucauaca

SEQ ID NO: 3484084 - RNA, 23 nt, Human
aaguauauaaugguuucaaagau

SEQ ID NO: 3484085 - RNA, 22 nt, Human
aaguauauaauuuuuuuauguu

SEQ ID NO: 3484086 - RNA, 16 nt, Human
aaguauauauagaauc

SEQ ID NO: 3484087 - RNA, 17 nt, Human
aaguaucaaguauagaa

SEQ ID NO: 3484088 - RNA, 21 nt, Human
aaguaucaaguauagaaaauc

SEQ ID NO: 3484089 - RNA, 11 nt, Human
aaguaucaugc

SEQ ID NO: 3484090 - RNA, 18 nt, Human
aaguaucccuacuguaau

SEQ ID NO: 3484091 - RNA, 14 nt, Human
aaguaucuucaugu

SEQ ID NO: 3484092 - RNA, 19 nt, Human
aaguaucuucguucuuguu

SEQ ID NO: 3484093 - RNA, 16 nt, Human
aaguaugaaucuaugc

SEQ ID NO: 3484094 - RNA, 17 nt, Human
aaguaugagggaaaaug

SEQ ID NO: 3484095 - RNA, 18 nt, Human
aaguaugcauuauuaaau

SEQ ID NO: 3484096 - RNA, 20 nt, Human
aaguaugcauuauuaaauug

SEQ ID NO: 3484097 - RNA, 19 nt, Human
aaguauguauauuaaaaaa

SEQ ID NO: 3484098 - RNA, 18 nt, Human
aaguauguguaaaaugug

SEQ ID NO: 3484099 - RNA, 19 nt, Human
aaguauguguaaaauguga

SEQ ID NO: 3484100 - RNA, 15 nt, Human
aaguauguuuuacuu

SEQ ID NO: 3484101 - RNA, 13 nt, Human
aaguauuaaaaca

SEQ ID NO: 3484102 - RNA, 15 nt, Human
aaguauuaagcauau

SEQ ID NO: 3484103 - RNA, 17 nt, Human
aaguauuacuaaauuga

SEQ ID NO: 3484104 - RNA, 13 nt, Human
aaguauuagaaua

SEQ ID NO: 3484105 - RNA, 20 nt, Human
aaguauuauaaacaagaaug

SEQ ID NO: 3484106 - RNA, 13 nt, Human
aaguauuaucaga

SEQ ID NO: 3484107 - RNA, 15 nt, Human
aaguauuaugucucu

SEQ ID NO: 3484108 - RNA, 12 nt, Human
aaguauucaaga

SEQ ID NO: 3484109 - RNA, 18 nt, Human
aaguauuccaccuuaaau

SEQ ID NO: 3484110 - RNA, 15 nt, Human
aaguauucuaaauuu

SEQ ID NO: 3484111 - RNA, 13 nt, Human
aaguauucucuuu

SEQ ID NO: 3484112 - RNA, 18 nt, Human
aaguauucucuuuucaag

SEQ ID NO: 3484113 - RNA, 22 nt, Human
aaguauucugccuuugcagaaa

SEQ ID NO: 3484114 - RNA, 21 nt, Human
aaguauucuuauuuaaugaaa

SEQ ID NO: 3484115 - RNA, 14 nt, Human
aaguauucuuuuuc

SEQ ID NO: 3484116 - RNA, 18 nt, Human
aaguauugcaucuguaua

SEQ ID NO: 3484117 - RNA, 22 nt, Human
aaguauugcaucuguauaagua

SEQ ID NO: 3484118 - RNA, 12 nt, Human
aaguauuguaaa

SEQ ID NO: 3484119 - RNA, 15 nt, Human
aaguauuguaaauua

SEQ ID NO: 3484120 - RNA, 17 nt, Human
aaguauuguaaauuaua

SEQ ID NO: 3484121 - RNA, 22 nt, Human
aaguauuguaaauuauauuugu

SEQ ID NO: 3484122 - RNA, 17 nt, Human
aaguauuguacaaauaa

SEQ ID NO: 3484123 - RNA, 20 nt, Human
aaguauuuaagccuaaagau

SEQ ID NO: 3484124 - RNA, 21 nt, Human
aaguauuuaagccuaaagauu

SEQ ID NO: 3484125 - RNA, 18 nt, Human
aaguauuuaauuagugcu

SEQ ID NO: 3484126 - RNA, 10 nt, Human
aaguauuuag

SEQ ID NO: 3484127 - RNA, 16 nt, Human
aaguauuuagguuuuu

SEQ ID NO: 3484128 - RNA, 12 nt, Human
aaguauuuauau

SEQ ID NO: 3484129 - RNA, 18 nt, Human
aaguauuuauauauuuau

SEQ ID NO: 3484130 - RNA, 14 nt, Human
aaguauuucccagc

SEQ ID NO: 3484131 - RNA, 15 nt, Human
aaguauuuugaaguu

SEQ ID NO: 3484132 - RNA, 19 nt, Human
aaguauuuugaaguuuaca

SEQ ID NO: 3484133 - RNA, 20 nt, Human
aaguauuuugaaguuuacau

SEQ ID NO: 3484134 - RNA, 11 nt, Human
aaguauuuugc

SEQ ID NO: 3484135 - RNA, 15 nt, Human
aaguauuuugcugga

SEQ ID NO: 3484136 - RNA, 15 nt, Human
aaguauuuuuaauua

SEQ ID NO: 3484137 - RNA, 18 nt, Human
aaguauuuuuaauuaauu

SEQ ID NO: 3484138 - RNA, 17 nt, Human
aaguauuuuuagaauaa

SEQ ID NO: 3484139 - RNA, 15 nt, Human
aaguauuuuuuuauc

SEQ ID NO: 3484140 - RNA, 19 nt, Human
aagucaaaaggugccugug

SEQ ID NO: 3484141 - RNA, 16 nt, Human
aagucaaacacuugug

SEQ ID NO: 3484142 - RNA, 19 nt, Human
aagucaaacacuugugacu

SEQ ID NO: 3484143 - RNA, 15 nt, Human
aagucaaacuuggau

SEQ ID NO: 3484144 - RNA, 16 nt, Human
aagucaaccaauguag

SEQ ID NO: 3484145 - RNA, 13 nt, Human
aagucaaggcuua

SEQ ID NO: 3484146 - RNA, 18 nt, Human
aagucaauguuuucaguu

SEQ ID NO: 3484147 - RNA, 18 nt, Human
aagucacaaaggaaugga

SEQ ID NO: 3484148 - RNA, 15 nt, Human
aagucacaauguucu

SEQ ID NO: 3484149 - RNA, 19 nt, Human
aagucacagggcaguaccu

SEQ ID NO: 3484150 - RNA, 23 nt, Human
aagucacagggcaguaccugagg

SEQ ID NO: 3484151 - RNA, 20 nt, Human
aagucacauuccugaacagg

SEQ ID NO: 3484152 - RNA, 19 nt, Human
aagucaccacuccauuccc

SEQ ID NO: 3484153 - RNA, 14 nt, Human
aagucaccggagcu

SEQ ID NO: 3484154 - RNA, 18 nt, Human
aagucaccggagcuuuca

SEQ ID NO: 3484155 - RNA, 16 nt, Human
aagucacucaauuguu

SEQ ID NO: 3484156 - RNA, 22 nt, Human
aagucacugcaaaaccagguuu

SEQ ID NO: 3484157 - RNA, 12 nt, Human
aagucacugcac

SEQ ID NO: 3484158 - RNA, 21 nt, Human
aagucacuggccaguggcugg

SEQ ID NO: 3484159 - RNA, 19 nt, Human
aagucagacugcugggacu

SEQ ID NO: 3484160 - RNA, 14 nt, Human
aagucagagacaga

SEQ ID NO: 3484161 - RNA, 15 nt, Human
aagucagaggauggc

SEQ ID NO: 3484162 - RNA, 20 nt, Human
aagucagaggauggccagug

SEQ ID NO: 3484163 - RNA, 21 nt, Human
aagucagaggauggccagugu

SEQ ID NO: 3484164 - RNA, 18 nt, Human
aagucagaucugccuaag

SEQ ID NO: 3484165 - RNA, 21 nt, Human
aagucagaucugccuaaggac

SEQ ID NO: 3484166 - RNA, 23 nt, Human
aagucagaucugccuaaggacuu

SEQ ID NO: 3484167 - RNA, 23 nt, Human
aagucagauggaaaauucauuuu

SEQ ID NO: 3484168 - RNA, 18 nt, Human
aagucagauguuugagca

SEQ ID NO: 3484169 - RNA, 18 nt, Human
aagucagcucuucuccau

SEQ ID NO: 3484170 - RNA, 19 nt, Human
aagucagcuuugccuucca

SEQ ID NO: 3484171 - RNA, 15 nt, Human
aagucagguccaauu

SEQ ID NO: 3484172 - RNA, 21 nt, Human
aagucagugcccaacuguuau

SEQ ID NO: 3484173 - RNA, 15 nt, Human
aagucauccaaucua

SEQ ID NO: 3484174 - RNA, 21 nt, Human
aagucaucuauaguugauaug

SEQ ID NO: 3484175 - RNA, 14 nt, Human
aagaaacauuggaa

SEQ ID NO: 3484176 - RNA, 17 nt, Human
aagaaacauuggaagca

SEQ ID NO: 3484177 - RNA, 11 nt, Human
aagaaacccaa

SEQ ID NO: 3484178 - RNA, 15 nt, Human
aagaaaccuacugcc

SEQ ID NO: 3484179 - RNA, 19 nt, Human
aagaaacucuauggucuua

SEQ ID NO: 3484180 - RNA, 21 nt, Human
aagaaacugaggaauuuucuu

SEQ ID NO: 3484181 - RNA, 21 nt, Human
aagaaacuggggcuccuccag

SEQ ID NO: 3484182 - RNA, 19 nt, Human
aagaaacuuuuguaaagaa

SEQ ID NO: 3484183 - RNA, 16 nt, Human
aagaaagaacuaucuu

SEQ ID NO: 3484184 - RNA, 20 nt, Human
aagaaagaauguuacugccu

SEQ ID NO: 3484185 - RNA, 12 nt, Human
aagaaagacauc

SEQ ID NO: 3484186 - RNA, 14 nt, Human
aagaaagacaucuu

SEQ ID NO: 3484187 - RNA, 20 nt, Human
aagaaagacgcacuuuggcu

SEQ ID NO: 3484188 - RNA, 15 nt, Human
aagaaagagagaaaa

SEQ ID NO: 3484189 - RNA, 17 nt, Human
aagaaagaggagugcuu

SEQ ID NO: 3484190 - RNA, 16 nt, Human
aagaaagcauagacau

SEQ ID NO: 3484191 - RNA, 17 nt, Human
aagaaagccagucuuaa

SEQ ID NO: 3484192 - RNA, 22 nt, Human
aagaaagcuucaaacugcauga

SEQ ID NO: 3484193 - RNA, 20 nt, Human
aagaaaggaagcauuguaaa

SEQ ID NO: 3484194 - RNA, 12 nt, Human
aagaaaguguau

SEQ ID NO: 3484195 - RNA, 22 nt, Human
aagaaaguugcacggcugcuga

SEQ ID NO: 3484196 - RNA, 13 nt, Human
aagaaaguuuccc

SEQ ID NO: 3484197 - RNA, 15 nt, Human
aagaaaguuucccca

SEQ ID NO: 3484198 - RNA, 21 nt, Human
aagaaauaaaaggaagccaaa

SEQ ID NO: 3484199 - RNA, 19 nt, Human
aagaaauaaugcuacaauu

SEQ ID NO: 3484200 - RNA, 15 nt, Human
aagaaauacuguaca

SEQ ID NO: 3484201 - RNA, 15 nt, Human
aagaaauagaacaag

SEQ ID NO: 3484202 - RNA, 20 nt, Human
aagaaauagaacaaggcuga

SEQ ID NO: 3484203 - RNA, 22 nt, Human
aagaaauauaaacacaaauaua

SEQ ID NO: 3484204 - RNA, 23 nt, Human
aagaaauaucugagcucuuugca

SEQ ID NO: 3484205 - RNA, 11 nt, Human
aagaaauaugu

SEQ ID NO: 3484206 - RNA, 14 nt, Human
aagaaaucacagaa

SEQ ID NO: 3484207 - RNA, 16 nt, Human
aagaaaucauguccau

SEQ ID NO: 3484208 - RNA, 15 nt, Human
aagaaaucauguuau

SEQ ID NO: 3484209 - RNA, 19 nt, Human
aagaaauccggagaagcug

SEQ ID NO: 3484210 - RNA, 12 nt, Human
aagaaaugaaca

SEQ ID NO: 3484211 - RNA, 12 nt, Human
aagaaaugaaga

SEQ ID NO: 3484212 - RNA, 16 nt, Human
aagaaaugacuaauua

SEQ ID NO: 3484213 - RNA, 12 nt, Human
aagaaaugaugu

SEQ ID NO: 3484214 - RNA, 15 nt, Human
aagaaaugauguugg

SEQ ID NO: 3484215 - RNA, 16 nt, Human
aagaaaugcaaaaauc

SEQ ID NO: 3484216 - RNA, 16 nt, Human
aagaaaugcacaaugu

SEQ ID NO: 3484217 - RNA, 20 nt, Human
aagaaaugcauaugucacua

SEQ ID NO: 3484218 - RNA, 18 nt, Human
aagaaauggauucuauuu

SEQ ID NO: 3484219 - RNA, 13 nt, Human
aagaaauggugaa

SEQ ID NO: 3484220 - RNA, 13 nt, Human
aagaaauuaacuu

SEQ ID NO: 3484221 - RNA, 17 nt, Human
aagaaauuauaaagaua

SEQ ID NO: 3484222 - RNA, 17 nt, Human
aagaaauugaauacuuu

SEQ ID NO: 3484223 - RNA, 18 nt, Human
aagaaauugaauacuuug

SEQ ID NO: 3484224 - RNA, 16 nt, Human
aagaaauuuacuauau

SEQ ID NO: 3484225 - RNA, 15 nt, Human
aagaaauuucacaua

SEQ ID NO: 3484226 - RNA, 21 nt, Human
aagaacaaagagaaaaaauac

SEQ ID NO: 3484227 - RNA, 12 nt, Human
aagaacaaagua

SEQ ID NO: 3484228 - RNA, 14 nt, Human
aagaacaagaauuu

SEQ ID NO: 3484229 - RNA, 13 nt, Human
aagaacaggccuc

SEQ ID NO: 3484230 - RNA, 20 nt, Human
aagaaccaguccccccaccc

SEQ ID NO: 3484231 - RNA, 22 nt, Human
aagaacccauggaaaaaugcca

SEQ ID NO: 3484232 - RNA, 13 nt, Human
aagaaccccucug

SEQ ID NO: 3484233 - RNA, 18 nt, Human
aagaacggggcucuucuc

SEQ ID NO: 3484234 - RNA, 21 nt, Human
aagaacuagagguuuuaugau

SEQ ID NO: 3484235 - RNA, 14 nt, Human
aagaacuagcauaa

SEQ ID NO: 3484236 - RNA, 14 nt, Human
aagaacuaucuuca

SEQ ID NO: 3484237 - RNA, 16 nt, Human
aagaacuaucuucauc

SEQ ID NO: 3484238 - RNA, 19 nt, Human
aagaacucaucacuguggc

SEQ ID NO: 3484239 - RNA, 14 nt, Human
aagaacugaaaaca

SEQ ID NO: 3484240 - RNA, 12 nt, Human
aagaacugaaau

SEQ ID NO: 3484241 - RNA, 18 nt, Human
aagaacugcaggcccugg

SEQ ID NO: 3484242 - RNA, 18 nt, Human
aagaacugcauggaccua

SEQ ID NO: 3484243 - RNA, 13 nt, Human
aagucuguuuacu

SEQ ID NO: 3484244 - RNA, 14 nt, Human
aagucuguuuacug

SEQ ID NO: 3484245 - RNA, 14 nt, Human
aagucuguuuuaug

SEQ ID NO: 3484246 - RNA, 19 nt, Human
aagucuguuuuaugacuuc

SEQ ID NO: 3484247 - RNA, 20 nt, Human
aagucuguuuuaugacuuca

SEQ ID NO: 3484248 - RNA, 23 nt, Human
aagucuuaaaauaacuuauauca

SEQ ID NO: 3484249 - RNA, 17 nt, Human
aagucuuagauguauau

SEQ ID NO: 3484250 - RNA, 19 nt, Human
aagucuuagauguauauau

SEQ ID NO: 3484251 - RNA, 22 nt, Human
aagucuuauauauuguagauaa

SEQ ID NO: 3484252 - RNA, 17 nt, Human
aagucuucaagggcugc

SEQ ID NO: 3484253 - RNA, 13 nt, Human
aagucuucaugaa

SEQ ID NO: 3484254 - RNA, 16 nt, Human
aagucuucaugaaaug

SEQ ID NO: 3484255 - RNA, 19 nt, Human
aagucuucaugaaaugcua

SEQ ID NO: 3484256 - RNA, 13 nt, Human
aagucuucuauuu

SEQ ID NO: 3484257 - RNA, 17 nt, Human
aagucuucuauuuauuu

SEQ ID NO: 3484258 - RNA, 17 nt, Human
aagucuugccuauauuu

SEQ ID NO: 3484259 - RNA, 21 nt, Human
aagucuugcuguggucucuuu

SEQ ID NO: 3484260 - RNA, 19 nt, Human
aagucuugugacuagugcu

SEQ ID NO: 3484261 - RNA, 23 nt, Human
aagucuugugacuagugcugaag

SEQ ID NO: 3484262 - RNA, 18 nt, Human
aagucuuuaauaaauaac

SEQ ID NO: 3484263 - RNA, 23 nt, Human
aagucuuuaggucuuuguaagaa

SEQ ID NO: 3484264 - RNA, 17 nt, Human
aagucuuucaagaauga

SEQ ID NO: 3484265 - RNA, 17 nt, Human
aagucuuucucuuuccc

SEQ ID NO: 3484266 - RNA, 18 nt, Human
aagucuuucucuuucccu

SEQ ID NO: 3484267 - RNA, 20 nt, Human
aagucuuucucuuucccugg

SEQ ID NO: 3484268 - RNA, 22 nt, Human
aagucuuucucuuucccugguc

SEQ ID NO: 3484269 - RNA, 23 nt, Human
aagucuuucucuuucccuggucc

SEQ ID NO: 3484270 - RNA, 16 nt, Human
aagucuuuuaaaaagu

SEQ ID NO: 3484271 - RNA, 18 nt, Human
aagucuuuuguucgcaug

SEQ ID NO: 3484272 - RNA, 16 nt, Human
aagucuuuuuugauca

SEQ ID NO: 3484273 - RNA, 15 nt, Human
aagucuuuuuuuucc

SEQ ID NO: 3484274 - RNA, 13 nt, Human
aagugaaaaacau

SEQ ID NO: 3484275 - RNA, 14 nt, Human
aagugaaaaucuua

SEQ ID NO: 3484276 - RNA, 18 nt, Human
aagugaaauaacaaaaug

SEQ ID NO: 3484277 - RNA, 12 nt, Human
aagugaaauuua

SEQ ID NO: 3484278 - RNA, 17 nt, Human
aagugaagacaaugacu

SEQ ID NO: 3484279 - RNA, 13 nt, Human
aagugaagacaga

SEQ ID NO: 3484280 - RNA, 14 nt, Human
aagugaauaaaaau

SEQ ID NO: 3484281 - RNA, 13 nt, Human
aagugaauaaacu

SEQ ID NO: 3484282 - RNA, 15 nt, Human
aagugaauugaaguu

SEQ ID NO: 3484283 - RNA, 16 nt, Human
aagugaauugaaguuu

SEQ ID NO: 3484284 - RNA, 21 nt, Human
aagugaauugaaguuucaagu

SEQ ID NO: 3484285 - RNA, 13 nt, Human
aagugaauuuaua

SEQ ID NO: 3484286 - RNA, 14 nt, Human
aagugaauuugaau

SEQ ID NO: 3484287 - RNA, 17 nt, Human
aagugaauuugaaugaa

SEQ ID NO: 3484288 - RNA, 17 nt, Human
aagugaauuugccugua

SEQ ID NO: 3484289 - RNA, 14 nt, Human
aagugaauuuuucu

SEQ ID NO: 3484290 - RNA, 19 nt, Human
aagugaauuuuucucuaac

SEQ ID NO: 3484291 - RNA, 19 nt, Human
aagugacaaggccccagag

SEQ ID NO: 3484292 - RNA, 21 nt, Human
aagugacaaggccccagagac

SEQ ID NO: 3484293 - RNA, 24 nt, Human
aagugacacagcagcuucaccaga

SEQ ID NO: 3484294 - RNA, 16 nt, Human
aagugacagggaagcu

SEQ ID NO: 3484295 - RNA, 20 nt, Human
aagugacagggaagcuacag

SEQ ID NO: 3484296 - RNA, 22 nt, Human
aagugacauugcaucaaagcau

SEQ ID NO: 3484297 - RNA, 16 nt, Human
aagugacuguaucugu

SEQ ID NO: 3484298 - RNA, 15 nt, Human
aagugagaagauggu

SEQ ID NO: 3484299 - RNA, 22 nt, Human
aagugagacaguccagccugga

SEQ ID NO: 3484300 - RNA, 12 nt, Human
aagugagagagg

SEQ ID NO: 3484301 - RNA, 15 nt, Human
aagugagcaaaccug

SEQ ID NO: 3484302 - RNA, 19 nt, Human
aagugagcaaaccugcccc

SEQ ID NO: 3484303 - RNA, 17 nt, Human
aagugagcuuugcugcu

SEQ ID NO: 3484304 - RNA, 21 nt, Human
aagugagcuuugcugcuacag

SEQ ID NO: 3484305 - RNA, 11 nt, Human
aagugaggaag

SEQ ID NO: 3484306 - RNA, 15 nt, Human
aagugaggccacuga

SEQ ID NO: 3484307 - RNA, 17 nt, Human
aagugagucucucuggg

SEQ ID NO: 3484308 - RNA, 17 nt, Human
aagugagugugcugcug

SEQ ID NO: 3484309 - RNA, 19 nt, Human
aagugagugugcugcugua

SEQ ID NO: 3484310 - RNA, 15 nt, Human
aagugauaauuucug

SEQ ID NO: 3484311 - RNA, 22 nt, Human
aagugaucaauaaaaugugauu

SEQ ID NO: 3484312 - RNA, 22 nt, Human
aagugaucuacaugaggaacug

SEQ ID NO: 3484313 - RNA, 13 nt, Human
aagugauucucau

SEQ ID NO: 3484314 - RNA, 16 nt, Human
aagugauucuccugcc

SEQ ID NO: 3484315 - RNA, 18 nt, Human
aagugauugggacagagg

SEQ ID NO: 3484316 - RNA, 13 nt, Human
aagugauuguaug

SEQ ID NO: 3484317 - RNA, 22 nt, Human
aagugcaauaaaucugacccag

SEQ ID NO: 3484318 - RNA, 17 nt, Human
aagugcacacagaaaua

SEQ ID NO: 3484319 - RNA, 18 nt, Human
aagugcacacagaaauau

SEQ ID NO: 3484320 - RNA, 22 nt, Human
aagugcacacagaaauauauau

SEQ ID NO: 3484321 - RNA, 22 nt, Human
aagugcaguucuuagcccucua

SEQ ID NO: 3484322 - RNA, 16 nt, Human
aagugcauccaaaggu

SEQ ID NO: 3484323 - RNA, 16 nt, Human
aagugcaugcucucug

SEQ ID NO: 3484324 - RNA, 13 nt, Human
aagugccaaagaa

SEQ ID NO: 3484325 - RNA, 14 nt, Human
aagugccaaagaaa

SEQ ID NO: 3484326 - RNA, 17 nt, Human
aagugccaaaugcucuc

SEQ ID NO: 3484327 - RNA, 12 nt, Human
aagugccagaaa

SEQ ID NO: 3484328 - RNA, 14 nt, Human
aagugccagaggug

SEQ ID NO: 3484329 - RNA, 15 nt, Human
aagugccagaggugg

SEQ ID NO: 3484330 - RNA, 18 nt, Human
aagugccagaggugggca

SEQ ID NO: 3484331 - RNA, 19 nt, Human
aagugccagaggugggcag

SEQ ID NO: 3484332 - RNA, 20 nt, Human
aagugccagaggugggcagg

SEQ ID NO: 3484333 - RNA, 15 nt, Human
aagugcccuuccugc

SEQ ID NO: 3484334 - RNA, 20 nt, Human
aagugccucaagaggaauga

SEQ ID NO: 3484335 - RNA, 20 nt, Human
aagugccuuucaggaucuau

SEQ ID NO: 3484336 - RNA, 18 nt, Human
aagugccuuucugcaguu

SEQ ID NO: 3484337 - RNA, 16 nt, Human
aagugccuuugcagcu

SEQ ID NO: 3484338 - RNA, 17 nt, Human
aagugcggugcuuuagc

SEQ ID NO: 3484339 - RNA, 17 nt, Human
aagugcguguguagagu

SEQ ID NO: 3484340 - RNA, 15 nt, Human
aagugcuaagguucu

SEQ ID NO: 3484341 - RNA, 17 nt, Human
aagugcuaagguucuaa

SEQ ID NO: 3484342 - RNA, 19 nt, Human
aagugcuaagguucuaagg

SEQ ID NO: 3484343 - RNA, 18 nt, Human
aagugcuauuacgaaguu

SEQ ID NO: 3484344 - RNA, 13 nt, Human
aagugcugagauu

SEQ ID NO: 3484345 - RNA, 14 nt, Human
aagugcugagauua

SEQ ID NO: 3484346 - RNA, 14 nt, Human
aagugcugcacuca

SEQ ID NO: 3484347 - RNA, 19 nt, Human
aagugcugcacucaaauga

SEQ ID NO: 3484348 - RNA, 19 nt, Human
aagugcugcggagcaagag

SEQ ID NO: 3484349 - RNA, 21 nt, Human
aagugcuggcaccaccaggca

SEQ ID NO: 3484350 - RNA, 12 nt, Human
aagugcuguaua

SEQ ID NO: 3484351 - RNA, 15 nt, Human
aagugcuguauaaaa

SEQ ID NO: 3484352 - RNA, 23 nt, Human
aagugcuguauaaaaucagccaa

SEQ ID NO: 3484353 - RNA, 14 nt, Human
aagugcuguuuauu

SEQ ID NO: 3484354 - RNA, 16 nt, Human
aagugcuguuuauuaa

SEQ ID NO: 3484355 - RNA, 17 nt, Human
aagugcuuccaaggcag

SEQ ID NO: 3484356 - RNA, 22 nt, Human
aagugcuuggaacauacuguuc

SEQ ID NO: 3484357 - RNA, 13 nt, Human
aagugcuugugua

SEQ ID NO: 3484358 - RNA, 15 nt, Human
aagugcuuguguaau

SEQ ID NO: 3484359 - RNA, 14 nt, Human
aagugcuuuaaaaa

SEQ ID NO: 3484360 - RNA, 21 nt, Human
aaguggaaaaauagccugccu

SEQ ID NO: 3484361 - RNA, 20 nt, Human
aaguggaacgaaaaugaaag

SEQ ID NO: 3484362 - RNA, 17 nt, Human
aaguggaaggaaagaug

SEQ ID NO: 3484363 - RNA, 17 nt, Human
aaguggaauuucuuguu

SEQ ID NO: 3484364 - RNA, 16 nt, Human
aaguggaccaggacag

SEQ ID NO: 3484365 - RNA, 20 nt, Human
aaguggaccaggacaggacc

SEQ ID NO: 3484366 - RNA, 22 nt, Human
aaguggaccuuaggccuuccuc

SEQ ID NO: 3484367 - RNA, 22 nt, Human
aaguggcaaucucagaugcagu

SEQ ID NO: 3484368 - RNA, 14 nt, Human
aaguggcauaaaaa

SEQ ID NO: 3484369 - RNA, 22 nt, Human
aaguggcauguuuugugcauuu

SEQ ID NO: 3484370 - RNA, 17 nt, Human
aaguggccucuuugucu

SEQ ID NO: 3484371 - RNA, 16 nt, Human
aaguggcuauuucuuu

SEQ ID NO: 3484372 - RNA, 19 nt, Human
aagugggaggucaggaaac

SEQ ID NO: 3484373 - RNA, 16 nt, Human
aagugggccaggacag

SEQ ID NO: 3484374 - RNA, 13 nt, Human
aagugggcccacc

SEQ ID NO: 3484375 - RNA, 16 nt, Human
aagugggcuugauucu

SEQ ID NO: 3484376 - RNA, 20 nt, Human
aaguggggcagcagcagugg

SEQ ID NO: 3484377 - RNA, 13 nt, Human
aaguggggcucgc

SEQ ID NO: 3484378 - RNA, 19 nt, Human
aagugggugagaugcugga

SEQ ID NO: 3484379 - RNA, 19 nt, Human
aaguggguuauucuggagu

SEQ ID NO: 3484380 - RNA, 19 nt, Human
aaguggugcucaguuguag

SEQ ID NO: 3484381 - RNA, 18 nt, Human
aaguggugguaacccugg

SEQ ID NO: 3484382 - RNA, 22 nt, Human
aaguguaaaauauuuugaauca

SEQ ID NO: 3484383 - RNA, 13 nt, Human
aaguguaaagcau

SEQ ID NO: 3484384 - RNA, 21 nt, Human
aaguguaaagcauuccaacaa

SEQ ID NO: 3484385 - RNA, 18 nt, Human
aaguguaaguucacaacu

SEQ ID NO: 3484386 - RNA, 14 nt, Human
aaguguaaugaaua

SEQ ID NO: 3484387 - RNA, 14 nt, Human
aaguguaauugaga

SEQ ID NO: 3484388 - RNA, 17 nt, Human
aaguguacuaauuaaca

SEQ ID NO: 3484389 - RNA, 21 nt, Human
aaguguaggcagacacaggga

SEQ ID NO: 3484390 - RNA, 18 nt, Human
aaguguagguaucauuuu

SEQ ID NO: 3484391 - RNA, 21 nt, Human
aaguguauaauauaaaaaauu

SEQ ID NO: 3484392 - RNA, 19 nt, Human
aaguguauuugaaaaauau

SEQ ID NO: 3484393 - RNA, 18 nt, Human
aagggcagaacacuaacc

SEQ ID NO: 3484394 - RNA, 13 nt, Human
aagggcagaauga

SEQ ID NO: 3484395 - RNA, 22 nt, Human
aagggcaggcccaaauuaucaa

SEQ ID NO: 3484396 - RNA, 22 nt, Human
aagggcagggcaucuccugugc

SEQ ID NO: 3484397 - RNA, 17 nt, Human
aagggcauccuucugcc

SEQ ID NO: 3484398 - RNA, 14 nt, Human
aagggcaugccuug

SEQ ID NO: 3484399 - RNA, 20 nt, Human
aagggccaaagaaccaaaga

SEQ ID NO: 3484400 - RNA, 13 nt, Human
aagggccagagcc

SEQ ID NO: 3484401 - RNA, 15 nt, Human
aagggccagagccag

SEQ ID NO: 3484402 - RNA, 21 nt, Human
aagggccagcguggcucuaaa

SEQ ID NO: 3484403 - RNA, 14 nt, Human
aagggccaguccug

SEQ ID NO: 3484404 - RNA, 15 nt, Human
aagggcccagagagg

SEQ ID NO: 3484405 - RNA, 11 nt, Human
aagggcccagg

SEQ ID NO: 3484406 - RNA, 23 nt, Human
aagggccugcccaguugcacuca

SEQ ID NO: 3484407 - RNA, 14 nt, Human
aagggcugcaugau

SEQ ID NO: 3484408 - RNA, 17 nt, Human
aagggcugcaugauguu

SEQ ID NO: 3484409 - RNA, 21 nt, Human
aagggcugccggggcagcccc

SEQ ID NO: 3484410 - RNA, 17 nt, Human
aagggcuucugcacccu

SEQ ID NO: 3484411 - RNA, 14 nt, Human
aagggcuuuccugu

SEQ ID NO: 3484412 - RNA, 18 nt, Human
aagggcuuuguuuugcac

SEQ ID NO: 3484413 - RNA, 20 nt, Human
aagggcuuuucaaaaucauu

SEQ ID NO: 3484414 - RNA, 18 nt, Human
aaggggaagcacucgugu

SEQ ID NO: 3484415 - RNA, 23 nt, Human
aaggggaauguuugccucugccu

SEQ ID NO: 3484416 - RNA, 16 nt, Human
aaggggacagcugugu

SEQ ID NO: 3484417 - RNA, 12 nt, Human
aaggggacaggc

SEQ ID NO: 3484418 - RNA, 19 nt, Human
aaggggacccuccgcucug

SEQ ID NO: 3484419 - RNA, 17 nt, Human
aaggggacugccaccuc

SEQ ID NO: 3484420 - RNA, 16 nt, Human
aaggggagaagggaau

SEQ ID NO: 3484421 - RNA, 19 nt, Human
aaggggaggaccucugggc

SEQ ID NO: 3484422 - RNA, 15 nt, Human
aaggggaggagggcg

SEQ ID NO: 3484423 - RNA, 16 nt, Human
aaggggaggcagccgg

SEQ ID NO: 3484424 - RNA, 19 nt, Human
aaggggagucaccuucccu

SEQ ID NO: 3484425 - RNA, 21 nt, Human
aaggggagucaccuucccuug

SEQ ID NO: 3484426 - RNA, 21 nt, Human
aaggggaucauaaaguuagaa

SEQ ID NO: 3484427 - RNA, 22 nt, Human
aaggggauguauccaugggggc

SEQ ID NO: 3484428 - RNA, 18 nt, Human
aaggggcaaauuuuuauu

SEQ ID NO: 3484429 - RNA, 18 nt, Human
aaggggcagucuggaggg

SEQ ID NO: 3484430 - RNA, 17 nt, Human
aaggggccagaggcucg

SEQ ID NO: 3484431 - RNA, 15 nt, Human
aaggggcccguggga

SEQ ID NO: 3484432 - RNA, 13 nt, Human
aaggggcccuggu

SEQ ID NO: 3484433 - RNA, 23 nt, Human
aaggggccucaccgagugggggc

SEQ ID NO: 3484434 - RNA, 21 nt, Human
aaggggccuuugucuugucaa

SEQ ID NO: 3484435 - RNA, 18 nt, Human
aagggggaggggaagucc

SEQ ID NO: 3484436 - RNA, 18 nt, Human
aagggggcaucuggccuu

SEQ ID NO: 3484437 - RNA, 13 nt, Human
aaggggggagggg

SEQ ID NO: 3484438 - RNA, 19 nt, Human
aagggggggcuacauuaua

SEQ ID NO: 3484439 - RNA, 19 nt, Human
aagggggucccagugggag

SEQ ID NO: 3484440 - RNA, 17 nt, Human
aaggggucaaaauuugc

SEQ ID NO: 3484441 - RNA, 14 nt, Human
aaggggugcuuuua

SEQ ID NO: 3484442 - RNA, 17 nt, Human
aaggggugcuuuuauag

SEQ ID NO: 3484443 - RNA, 15 nt, Human
aagggguugggguga

SEQ ID NO: 3484444 - RNA, 22 nt, Human
aagggguuggggugacagucau

SEQ ID NO: 3484445 - RNA, 20 nt, Human
aagggguugguugaggugga

SEQ ID NO: 3484446 - RNA, 16 nt, Human
aagggguuugccauuu

SEQ ID NO: 3484447 - RNA, 12 nt, Human
aagggguuuucu

SEQ ID NO: 3484448 - RNA, 22 nt, Human
aagggguuuucuugauaauuuu

SEQ ID NO: 3484449 - RNA, 13 nt, Human
aaggguaaacaau

SEQ ID NO: 3484450 - RNA, 13 nt, Human
aaggguaaagaag

SEQ ID NO: 3484451 - RNA, 18 nt, Human
aagggucaacaucuuuua

SEQ ID NO: 3484452 - RNA, 14 nt, Human
aagggucaggccuu

SEQ ID NO: 3484453 - RNA, 19 nt, Human
aagggucgaaagcucuaga

SEQ ID NO: 3484454 - RNA, 21 nt, Human
aagggucgaaagcucuagaau

SEQ ID NO: 3484455 - RNA, 20 nt, Human
aagggucuagggagagaccc

SEQ ID NO: 3484456 - RNA, 23 nt, Human
aagggucuccgaaaugcugucuu

SEQ ID NO: 3484457 - RNA, 15 nt, Human
aagggugaaaauuau

SEQ ID NO: 3484458 - RNA, 19 nt, Human
aagggugaugggaaagcau

SEQ ID NO: 3484459 - RNA, 19 nt, Human
aagggugauguacacaugu

SEQ ID NO: 3484460 - RNA, 20 nt, Human
aagggugcugcuucccucug

SEQ ID NO: 3484461 - RNA, 16 nt, Human
aagggugggugcucag

SEQ ID NO: 3484462 - RNA, 14 nt, Human
aaggguuaagaaaa

SEQ ID NO: 3484463 - RNA, 15 nt, Human
aaggguuaaggccug

SEQ ID NO: 3484464 - RNA, 16 nt, Human
aaggguuaaggccuga

SEQ ID NO: 3484465 - RNA, 14 nt, Human
aaggguuauauuuu

SEQ ID NO: 3484466 - RNA, 22 nt, Human
aagugcauuucugaauagaaau

SEQ ID NO: 3484467 - RNA, 23 nt, Human
aagugcauuucugaauagaaaug

SEQ ID NO: 3484468 - RNA, 16 nt, Human
aagugcauuuuuguaa

SEQ ID NO: 3484469 - RNA, 20 nt, Human
aagugccacucauuccugua

SEQ ID NO: 3484470 - RNA, 22 nt, Human
aagugccacugcccgagcuggu

SEQ ID NO: 3484471 - RNA, 15 nt, Human
aagugccaguauuuu

SEQ ID NO: 3484472 - RNA, 23 nt, Human
aagugccaguauuuuaaaauagc

SEQ ID NO: 3484473 - RNA, 12 nt, Human
aagugcccccuc

SEQ ID NO: 3484474 - RNA, 14 nt, Human
aagugcccccuccc

SEQ ID NO: 3484475 - RNA, 19 nt, Human
aagugccccugcugccucc

SEQ ID NO: 3484476 - RNA, 18 nt, Human
aagugcccuccaggcuuu

SEQ ID NO: 3484477 - RNA, 15 nt, Human
aagugcccucuccca

SEQ ID NO: 3484478 - RNA, 16 nt, Human
aagugccgcaaauugu

SEQ ID NO: 3484479 - RNA, 18 nt, Human
aagugccuacauuaucua

SEQ ID NO: 3484480 - RNA, 21 nt, Human
aagugccuuucaggaucuauu

SEQ ID NO: 3484481 - RNA, 23 nt, Human
aagugccuuucugcaguuuuuca

SEQ ID NO: 3484482 - RNA, 15 nt, Human
aagugcgugaaugua

SEQ ID NO: 3484483 - RNA, 18 nt, Human
aagugcguguguagaguu

SEQ ID NO: 3484484 - RNA, 14 nt, Human
aagugcuacauaaa

SEQ ID NO: 3484485 - RNA, 17 nt, Human
aagugcuacauaaauug

SEQ ID NO: 3484486 - RNA, 13 nt, Human
aagugcugcauuu

SEQ ID NO: 3484487 - RNA, 22 nt, Human
aagugcugcauuuaaaagauac

SEQ ID NO: 3484488 - RNA, 23 nt, Human
aagugcuggcaaccacuaagaau

SEQ ID NO: 3484489 - RNA, 17 nt, Human
aagugcuguuuauuaau

SEQ ID NO: 3484490 - RNA, 18 nt, Human
aagugcuguuuauuaauc

SEQ ID NO: 3484491 - RNA, 20 nt, Human
aagugcuguuuauuaaucuu

SEQ ID NO: 3484492 - RNA, 21 nt, Human
aagugcuguuuauuaaucuua

SEQ ID NO: 3484493 - RNA, 22 nt, Human
aagugcuguuuauuaaucuuag

SEQ ID NO: 3484494 - RNA, 19 nt, Human
aagugcuucauucuuugca

SEQ ID NO: 3484495 - RNA, 13 nt, Human
aaguggaaauguu

SEQ ID NO: 3484496 - RNA, 13 nt, Human
aaguggaaggaaa

SEQ ID NO: 3484497 - RNA, 18 nt, Human
aaguggacuggccccugg

SEQ ID NO: 3484498 - RNA, 20 nt, Human
aaguggacuggccccugggu

SEQ ID NO: 3484499 - RNA, 18 nt, Human
aaguggcaccugucugcu

SEQ ID NO: 3484500 - RNA, 23 nt, Human
aaguggccuccgucacuaccugg

SEQ ID NO: 3484501 - RNA, 14 nt, Human
aaguggccucuuug

SEQ ID NO: 3484502 - RNA, 12 nt, Human
aaguggcugcug

SEQ ID NO: 3484503 - RNA, 20 nt, Human
aagugggaggucaggaaacu

SEQ ID NO: 3484504 - RNA, 15 nt, Human
aagugggcccacccg

SEQ ID NO: 3484505 - RNA, 13 nt, Human
aaguggggcagag

SEQ ID NO: 3484506 - RNA, 15 nt, Human
aaguggggcucgcca

SEQ ID NO: 3484507 - RNA, 20 nt, Human
aagugggguugcaaccacug

SEQ ID NO: 3484508 - RNA, 15 nt, Human
aaguggguaccccca

SEQ ID NO: 3484509 - RNA, 21 nt, Human
aaguggguuuuuuaguugaau

SEQ ID NO: 3484510 - RNA, 17 nt, Human
aagugguauagaaaugc

SEQ ID NO: 3484511 - RNA, 17 nt, Human
aaguggugguaacccug

SEQ ID NO: 3484512 - RNA, 17 nt, Human
aaguguaaacaccauag

SEQ ID NO: 3484513 - RNA, 14 nt, Human
aaguguaaagcauu

SEQ ID NO: 3484514 - RNA, 20 nt, Human
aaguguaaagcauuccaaca

SEQ ID NO: 3484515 - RNA, 16 nt, Human
aaguguaaauccuuuu

SEQ ID NO: 3484516 - RNA, 14 nt, Human
aaguguaacagcug

SEQ ID NO: 3484517 - RNA, 21 nt, Human
aaguguaacagcugaggucuc

SEQ ID NO: 3484518 - RNA, 11 nt, Human
aaguguaacug

SEQ ID NO: 3484519 - RNA, 15 nt, Human
aaguguacuggauuu

SEQ ID NO: 3484520 - RNA, 15 nt, Human
aaguguaggcagaca

SEQ ID NO: 3484521 - RNA, 16 nt, Human
aaguguaggcagacac

SEQ ID NO: 3484522 - RNA, 20 nt, Human
aaguguaggcagacacaggg

SEQ ID NO: 3484523 - RNA, 17 nt, Human
aaguguauuuugaaauu

SEQ ID NO: 3484524 - RNA, 23 nt, Human
aaguguauuuuuuuacuaauaga

SEQ ID NO: 3484525 - RNA, 23 nt, Human
aagugucaccuuuucuugccuga

SEQ ID NO: 3484526 - RNA, 14 nt, Human
aagugucugugugc

SEQ ID NO: 3484527 - RNA, 18 nt, Human
aagugugaauacugcuug

SEQ ID NO: 3484528 - RNA, 11 nt, Human
aagugugagua

SEQ ID NO: 3484529 - RNA, 20 nt, Human
aagugugaguaagagcuggu

SEQ ID NO: 3484530 - RNA, 21 nt, Human
aagugugauugggaauaaaua

SEQ ID NO: 3484531 - RNA, 22 nt, Human
aagugugauugggaauaaauau

SEQ ID NO: 3484532 - RNA, 11 nt, Human
aagugugcaua

SEQ ID NO: 3484533 - RNA, 17 nt, Human
aagugugcauauuguac

SEQ ID NO: 3484534 - RNA, 19 nt, Human
aagugugcauauuguacac

SEQ ID NO: 3484535 - RNA, 23 nt, Human
aagugugcuuuaugcugaaacag

SEQ ID NO: 3484536 - RNA, 19 nt, Human
aaguguggucccaacagga

SEQ ID NO: 3484537 - RNA, 16 nt, Human
aaguguguauauauuu

SEQ ID NO: 3484538 - RNA, 17 nt, Human
aaguguguauauauuuu

SEQ ID NO: 3484539 - RNA, 16 nt, Human
aaguguguguaguuuu

SEQ ID NO: 3484540 - RNA, 12 nt, Human
aaguguguguuu

SEQ ID NO: 3484541 - RNA, 15 nt, Human
aaguguuagauagaa

SEQ ID NO: 3484542 - RNA, 23 nt, Human
aaguguuagccuuuuuuccccag

SEQ ID NO: 3484543 - RNA, 21 nt, Human
aaguguuauuuuucaaggaag

SEQ ID NO: 3484544 - RNA, 22 nt, Human
aaguguuauuuuucaaggaagg

SEQ ID NO: 3484545 - RNA, 18 nt, Human
aaguguugaagggaggug

SEQ ID NO: 3484546 - RNA, 23 nt, Human
aaguguugggguuugguuuuguu

SEQ ID NO: 3484547 - RNA, 17 nt, Human
aaguguuguaaauauuu

SEQ ID NO: 3484548 - RNA, 20 nt, Human
aaguguuguaaauauuuaug

SEQ ID NO: 3484549 - RNA, 23 nt, Human
aaguguuuaacuugucaaaaaac

SEQ ID NO: 3484550 - RNA, 16 nt, Human
aaguguuuauuuuuca

SEQ ID NO: 3484551 - RNA, 22 nt, Human
aaguguuuucucugaacacauu

SEQ ID NO: 3484552 - RNA, 11 nt, Human
aaguuaaaagu

SEQ ID NO: 3484553 - RNA, 13 nt, Human
aaguuaaaauugu

SEQ ID NO: 3484554 - RNA, 14 nt, Human
aaguuaaauaaauc

SEQ ID NO: 3484555 - RNA, 17 nt, Human
aaguuaaauguagaguu

SEQ ID NO: 3484556 - RNA, 20 nt, Human
aaguuaagagaaacuuuaua

SEQ ID NO: 3484557 - RNA, 17 nt, Human
aaguuaauguauauaaa

SEQ ID NO: 3484558 - RNA, 19 nt, Human
aaguuaauguauauaaaaa

SEQ ID NO: 3484559 - RNA, 13 nt, Human
aaguuacagaaau

SEQ ID NO: 3484560 - RNA, 20 nt, Human
aaguuacauguuugcaccuu

SEQ ID NO: 3484561 - RNA, 18 nt, Human
aaguuacuauccuggcuu

SEQ ID NO: 3484562 - RNA, 15 nt, Human
aaguuacuuauucua

SEQ ID NO: 3484563 - RNA, 23 nt, Human
aaguuacuucacuuuaauucuca

SEQ ID NO: 3484564 - RNA, 16 nt, Human
aaguuacuuucuuaau

SEQ ID NO: 3484565 - RNA, 12 nt, Human
aaguuacuuugu

SEQ ID NO: 3484566 - RNA, 22 nt, Human
aaguuagaacuagccaaaccag

SEQ ID NO: 3484567 - RNA, 16 nt, Human
aaguuagaaucuauuu

SEQ ID NO: 3484568 - RNA, 17 nt, Human
aaguuagaaucuauuuu

SEQ ID NO: 3484569 - RNA, 21 nt, Human
aaguuagaauuccuucagggu

SEQ ID NO: 3484570 - RNA, 21 nt, Human
aaguuagccuuuaucuaccaa

SEQ ID NO: 3484571 - RNA, 15 nt, Human
aaguuagcucaggag

SEQ ID NO: 3484572 - RNA, 14 nt, Human
aaguuagcugagcg

SEQ ID NO: 3484573 - RNA, 19 nt, Human
aaguuaguaucuuuugaua

SEQ ID NO: 3484574 - RNA, 11 nt, Human
aaguuagucua

SEQ ID NO: 3484575 - RNA, 23 nt, Human
aaguuagugcuuguucuaagauu

SEQ ID NO: 3484576 - RNA, 16 nt, Human
aaguuaguggaaaucu

SEQ ID NO: 3484577 - RNA, 19 nt, Human
aaguuaguggaaaucugaa

SEQ ID NO: 3484578 - RNA, 22 nt, Human
aaguuaguggaaaucugaacau

SEQ ID NO: 3484579 - RNA, 15 nt, Human
aaguuaguuuguaua

SEQ ID NO: 3484580 - RNA, 17 nt, Human
aaguuaguuuguauaua

SEQ ID NO: 3484581 - RNA, 20 nt, Human
aaguuauaaaucaaugucac

SEQ ID NO: 3484582 - RNA, 15 nt, Human
aaguuauaagacucu

SEQ ID NO: 3484583 - RNA, 16 nt, Human
aaguuauauaaagaga

SEQ ID NO: 3484584 - RNA, 19 nt, Human
aaguuauauaaagagaaaa

SEQ ID NO: 3484585 - RNA, 20 nt, Human
aaguuauauaaagagaaaau

SEQ ID NO: 3484586 - RNA, 17 nt, Human
aaguuauauuucagaug

SEQ ID NO: 3484587 - RNA, 22 nt, Human
aaguuauauuuccuauaccauu

SEQ ID NO: 3484588 - RNA, 16 nt, Human
aaguuauguguaugug

SEQ ID NO: 3484589 - RNA, 23 nt, Human
aaguuauuaagagguaagacuua

SEQ ID NO: 3484590 - RNA, 17 nt, Human
aaguuauuaauuucuuc

SEQ ID NO: 3484591 - RNA, 14 nt, Human
aaguuauugacaaa

SEQ ID NO: 3484592 - RNA, 14 nt, Human
aaguuauugcaguu

SEQ ID NO: 3484593 - RNA, 17 nt, Human
aaguuauugcaguuuau

SEQ ID NO: 3484594 - RNA, 13 nt, Human
aaguuauuucuug

SEQ ID NO: 3484595 - RNA, 19 nt, Human
aaguuauuucuuguuuguu

SEQ ID NO: 3484596 - RNA, 18 nt, Human
aaguuauuuucuacagug

SEQ ID NO: 3484597 - RNA, 15 nt, Human
aaguuauuuuuguac

SEQ ID NO: 3484598 - RNA, 15 nt, Human
aagaugcaaggacca

SEQ ID NO: 3484599 - RNA, 15 nt, Human
aagaugcaauguaga

SEQ ID NO: 3484600 - RNA, 23 nt, Human
aagaugcacuuugcuuuaauaua

SEQ ID NO: 3484601 - RNA, 12 nt, Human
aagaugcagccg

SEQ ID NO: 3484602 - RNA, 15 nt, Human
aagaugcauuguagu

SEQ ID NO: 3484603 - RNA, 23 nt, Human
aagaugcuccagcaacacagccu

SEQ ID NO: 3484604 - RNA, 15 nt, Human
aagaugcucuaucuu

SEQ ID NO: 3484605 - RNA, 17 nt, Human
aagaugcucuucugugg

SEQ ID NO: 3484606 - RNA, 21 nt, Human
aagaugcugaaacaggagaga

SEQ ID NO: 3484607 - RNA, 14 nt, Human
aagaugcuggguug

SEQ ID NO: 3484608 - RNA, 20 nt, Human
aagaugcuggguuggugcac

SEQ ID NO: 3484609 - RNA, 15 nt, Human
aagauggaaaggauu

SEQ ID NO: 3484610 - RNA, 23 nt, Human
aaguucaaauucuucugaacuca

SEQ ID NO: 3484611 - RNA, 14 nt, Human
aaguucagaguuuu

SEQ ID NO: 3484612 - RNA, 12 nt, Human
aaguucauacau

SEQ ID NO: 3484613 - RNA, 21 nt, Human
aaguucauaccuaaguacugu

SEQ ID NO: 3484614 - RNA, 23 nt, Human
aaguucauaccuaaguacuguaa

SEQ ID NO: 3484615 - RNA, 21 nt, Human
aaguucauauuccauauuuau

SEQ ID NO: 3484616 - RNA, 21 nt, Human
aaguucauguccaaacguccu

SEQ ID NO: 3484617 - RNA, 16 nt, Human
aaguuccaagagucua

SEQ ID NO: 3484618 - RNA, 17 nt, Human
aaguuccaagagucuaa

SEQ ID NO: 3484619 - RNA, 20 nt, Human
aaguuccaagagucuaaaga

SEQ ID NO: 3484620 - RNA, 21 nt, Human
aaguuccaagagucuaaagau

SEQ ID NO: 3484621 - RNA, 15 nt, Human
aaguuccacugagcu

SEQ ID NO: 3484622 - RNA, 17 nt, Human
aaguucccaguuggagc

SEQ ID NO: 3484623 - RNA, 14 nt, Human
aaguucccuacuuc

SEQ ID NO: 3484624 - RNA, 11 nt, Human
aaguuccuucc

SEQ ID NO: 3484625 - RNA, 14 nt, Human
aaguuccuuugggu

SEQ ID NO: 3484626 - RNA, 15 nt, Human
aaguucgucuguugu

SEQ ID NO: 3484627 - RNA, 14 nt, Human
aaguucuaagauuc

SEQ ID NO: 3484628 - RNA, 19 nt, Human
aaguucuaagauucuaaug

SEQ ID NO: 3484629 - RNA, 16 nt, Human
aaguucuaagauucug

SEQ ID NO: 3484630 - RNA, 17 nt, Human
aaguucuaauaauuucu

SEQ ID NO: 3484631 - RNA, 18 nt, Human
aaguucuaauaauuucua

SEQ ID NO: 3484632 - RNA, 19 nt, Human
aaguucuaauaauuucuaa

SEQ ID NO: 3484633 - RNA, 14 nt, Human
aaguucuaguguuu

SEQ ID NO: 3484634 - RNA, 17 nt, Human
aaguucuauuuaagugu

SEQ ID NO: 3484635 - RNA, 13 nt, Human
aaguucugcagau

SEQ ID NO: 3484636 - RNA, 15 nt, Human
aaguucugccucuga

SEQ ID NO: 3484637 - RNA, 17 nt, Human
aaguucugccucugaug

SEQ ID NO: 3484638 - RNA, 20 nt, Human
aaguucuggaugcauuucuc

SEQ ID NO: 3484639 - RNA, 22 nt, Human
aaguucuguguuuaauuucuuc

SEQ ID NO: 3484640 - RNA, 9 nt, Human
aaguucuua

SEQ ID NO: 3484641 - RNA, 15 nt, Human
aaguucuuaguugcu

SEQ ID NO: 3484642 - RNA, 11 nt, Human
aaguucuuaug

SEQ ID NO: 3484643 - RNA, 19 nt, Human
aaguucuuaugaggagggg

SEQ ID NO: 3484644 - RNA, 15 nt, Human
aaguucuucuccaau

SEQ ID NO: 3484645 - RNA, 14 nt, Human
aaguucuuugauuc

SEQ ID NO: 3484646 - RNA, 17 nt, Human
aaguugaaauuaaccau

SEQ ID NO: 3484647 - RNA, 24 nt, Human
aaguugaauuuauuggcuuuucug

SEQ ID NO: 3484648 - RNA, 20 nt, Human
aaguugacuuauaguacaug

SEQ ID NO: 3484649 - RNA, 23 nt, Human
aaguugagauaguuuucauccau

SEQ ID NO: 3484650 - RNA, 19 nt, Human
aaguugagcuaugacuuaa

SEQ ID NO: 3484651 - RNA, 16 nt, Human
aaguugaggcauuugg

SEQ ID NO: 3484652 - RNA, 13 nt, Human
aaguugaggggcu

SEQ ID NO: 3484653 - RNA, 20 nt, Human
aaguugauauagaacagugc

SEQ ID NO: 3484654 - RNA, 17 nt, Human
aaguugaucuccccagc

SEQ ID NO: 3484655 - RNA, 14 nt, Human
aaguugcagcuguu

SEQ ID NO: 3484656 - RNA, 17 nt, Human
aaguugcagcuguuuug

SEQ ID NO: 3484657 - RNA, 21 nt, Human
aaguugcagcuguuuuguuga

SEQ ID NO: 3484658 - RNA, 16 nt, Human
aaguugcagugagcug

SEQ ID NO: 3484659 - RNA, 20 nt, Human
aaguugcgacggagagaaaa

SEQ ID NO: 3484660 - RNA, 22 nt, Human
aaguugcgacggagagaaaaaa

SEQ ID NO: 3484661 - RNA, 20 nt, Human
aaguuggaaacacuaaaugu

SEQ ID NO: 3484662 - RNA, 18 nt, Human
aaguuggacuaaaugccu

SEQ ID NO: 3484663 - RNA, 16 nt, Human
aaguuggcuucuguuu

SEQ ID NO: 3484664 - RNA, 17 nt, Human
aaguuggcuucuguuuc

SEQ ID NO: 3484665 - RNA, 16 nt, Human
aaguugggacucugga

SEQ ID NO: 3484666 - RNA, 16 nt, Human
aaguugggagccugaa

SEQ ID NO: 3484667 - RNA, 20 nt, Human
aaguugggcaauauaaccaa

SEQ ID NO: 3484668 - RNA, 21 nt, Human
aaguuggggacacauguauuu

SEQ ID NO: 3484669 - RNA, 16 nt, Human
aaguugguauuaauaa

SEQ ID NO: 3484670 - RNA, 19 nt, Human
aaguugguauuaauaaaaa

SEQ ID NO: 3484671 - RNA, 14 nt, Human
aaguuguaaaguau

SEQ ID NO: 3484672 - RNA, 17 nt, Human
aaguuguaaaguaugua

SEQ ID NO: 3484673 - RNA, 12 nt, Human
aaguuguacuuu

SEQ ID NO: 3484674 - RNA, 21 nt, Human
aaguuguacuuuaaaaauuua

SEQ ID NO: 3484675 - RNA, 22 nt, Human
aaguuguaggcauaaagucagg

SEQ ID NO: 3484676 - RNA, 18 nt, Human
aaguugugccuuuuauag

SEQ ID NO: 3484677 - RNA, 16 nt, Human
aaguuguggugcugac

SEQ ID NO: 3484678 - RNA, 18 nt, Human
aaguuguucaaacauuua

SEQ ID NO: 3484679 - RNA, 14 nt, Human
aaguuguucaacua

SEQ ID NO: 3484680 - RNA, 20 nt, Human
aaguuguuccuuaagucaga

SEQ ID NO: 3484681 - RNA, 15 nt, Human
aaguuguuugagaaa

SEQ ID NO: 3484682 - RNA, 21 nt, Human
aaguuguuugagaaauuaagu

SEQ ID NO: 3484683 - RNA, 17 nt, Human
aaguuguuugucaucuu

SEQ ID NO: 3484684 - RNA, 13 nt, Human
aaguuuaaaaugu

SEQ ID NO: 3484685 - RNA, 17 nt, Human
aaguuuaaagcucgaaa

SEQ ID NO: 3484686 - RNA, 15 nt, Human
aaguuuaauauuaaa

SEQ ID NO: 3484687 - RNA, 18 nt, Human
aaguuuacaaguguauau

SEQ ID NO: 3484688 - RNA, 21 nt, Human
aaguuuacaaguguauaucag

SEQ ID NO: 3484689 - RNA, 18 nt, Human
aaguuuacaguaaauaaa

SEQ ID NO: 3484690 - RNA, 18 nt, Human
aaguuuacauuguaaaua

SEQ ID NO: 3484691 - RNA, 11 nt, Human
aaguuuagaga

SEQ ID NO: 3484692 - RNA, 14 nt, Human
aaguuuagcucuga

SEQ ID NO: 3484693 - RNA, 15 nt, Human
aaguuuagcucugag

SEQ ID NO: 3484694 - RNA, 13 nt, Human
aaguuuauauaua

SEQ ID NO: 3484695 - RNA, 20 nt, Human
aaguuuaucaguaaauaacu

SEQ ID NO: 3484696 - RNA, 12 nt, Human
aaguuuauucuc

SEQ ID NO: 3484697 - RNA, 14 nt, Human
aaguuucaaaaauc

SEQ ID NO: 3484698 - RNA, 21 nt, Human
aaguuucaaaaaucugaagau

SEQ ID NO: 3484699 - RNA, 20 nt, Human
aaguuucaaacuuacuauuu

SEQ ID NO: 3484700 - RNA, 12 nt, Human
aaguuucaggug

SEQ ID NO: 3484701 - RNA, 15 nt, Human
aaguuucaggugaca

SEQ ID NO: 3484702 - RNA, 22 nt, Human
aaguuucaggugacaugugaaa

SEQ ID NO: 3484703 - RNA, 15 nt, Human
aaguuucaucauuuu

SEQ ID NO: 3484704 - RNA, 13 nt, Human
aaguuuccaagca

SEQ ID NO: 3484705 - RNA, 24 nt, Human
aaguuuccaagcaaauguuacaua

SEQ ID NO: 3484706 - RNA, 17 nt, Human
aaguuuccccaccagug

SEQ ID NO: 3484707 - RNA, 21 nt, Human
aaguuuccuaaucagaaauuu

SEQ ID NO: 3484708 - RNA, 20 nt, Human
aaguuuccuuccagcccaga

SEQ ID NO: 3484709 - RNA, 21 nt, Human
aaguuuccuuccagcccagaa

SEQ ID NO: 3484710 - RNA, 20 nt, Human
aaguuuccuuggcuggugca

SEQ ID NO: 3484711 - RNA, 12 nt, Human
aaguuucuaaga

SEQ ID NO: 3484712 - RNA, 16 nt, Human
aaguuucuaagauucu

SEQ ID NO: 3484713 - RNA, 18 nt, Human
aaguuucuaagauucuaa

SEQ ID NO: 3484714 - RNA, 21 nt, Human
aaguuucuaagauucuaaagg

SEQ ID NO: 3484715 - RNA, 21 nt, Human
aaguuucuagcuagaaauaug

SEQ ID NO: 3484716 - RNA, 23 nt, Human
aaguuucuagcuagaaauaugau

SEQ ID NO: 3484717 - RNA, 13 nt, Human
aaguuucucagau

SEQ ID NO: 3484718 - RNA, 22 nt, Human
aaguuucucagauccuuguuuc

SEQ ID NO: 3484719 - RNA, 23 nt, Human
aaguuucucagauccuuguuuca

SEQ ID NO: 3484720 - RNA, 13 nt, Human
aaguuugaauguu

SEQ ID NO: 3484721 - RNA, 22 nt, Human
aaguuugaauguuaaauaaauu

SEQ ID NO: 3484722 - RNA, 15 nt, Human
aaguuugaucuuccu

SEQ ID NO: 3484723 - RNA, 18 nt, Human
aaguuugaucuuccucug

SEQ ID NO: 3484724 - RNA, 12 nt, Human
aaguuugcaauu

SEQ ID NO: 3484725 - RNA, 21 nt, Human
aaguuugcacuaucuuucagc

SEQ ID NO: 3484726 - RNA, 19 nt, Human
aaguuuguaguuguuuuaa

SEQ ID NO: 3484727 - RNA, 23 nt, Human
aaguuuguuagauagcugcaugu

SEQ ID NO: 3484728 - RNA, 16 nt, Human
aaguuuguuuuugcgu

SEQ ID NO: 3484729 - RNA, 13 nt, Human
aaguuuuaaaguu

SEQ ID NO: 3484730 - RNA, 15 nt, Human
aaguuuuaaaguuca

SEQ ID NO: 3484731 - RNA, 13 nt, Human
aaguuuuaaugua

SEQ ID NO: 3484732 - RNA, 14 nt, Human
aaguuuuaauguau

SEQ ID NO: 3484733 - RNA, 21 nt, Human
aaguuuuaggacaaacagcuc

SEQ ID NO: 3484734 - RNA, 15 nt, Human
aaguuuuauauauua

SEQ ID NO: 3484735 - RNA, 17 nt, Human
aaguuuuauauauuaua

SEQ ID NO: 3484736 - RNA, 13 nt, Human
aaguuuuauaugc

SEQ ID NO: 3484737 - RNA, 23 nt, Human
aaguuuucagaaccucuucccca

SEQ ID NO: 3484738 - RNA, 16 nt, Human
aaguuuucccugaagu

SEQ ID NO: 3484739 - RNA, 23 nt, Human
aaguuuucccugaaguuaugugu

SEQ ID NO: 3484740 - RNA, 15 nt, Human
aaguuuugcauuuau

SEQ ID NO: 3484741 - RNA, 23 nt, Human
aaguuuuggguauguuuaaucug

SEQ ID NO: 3484742 - RNA, 19 nt, Human
aaguuuuguaaaagaaauc

SEQ ID NO: 3484743 - RNA, 14 nt, Human
aaguuuuguacaga

SEQ ID NO: 3484744 - RNA, 12 nt, Human
aaguuuugugaa

SEQ ID NO: 3484745 - RNA, 19 nt, Human
aaguuuugugaaauuuuuc

SEQ ID NO: 3484746 - RNA, 17 nt, Human
aaguuuuuguacuguaa

SEQ ID NO: 3484747 - RNA, 13 nt, Human
aaguuuuuuugcu

SEQ ID NO: 3484748 - RNA, 13 nt, Human
aauaaaaaaaaga

SEQ ID NO: 3484749 - RNA, 15 nt, Human
aauaaaaaaaagaaa

SEQ ID NO: 3484750 - RNA, 18 nt, Human
aauaaaaaaaagaaaaaa

SEQ ID NO: 3484751 - RNA, 14 nt, Human
aauaaaaaaagaaa

SEQ ID NO: 3484752 - RNA, 13 nt, Human
aauaaaaaauaua

SEQ ID NO: 3484753 - RNA, 13 nt, Human
aauaaaaaaugga

SEQ ID NO: 3484754 - RNA, 14 nt, Human
aauaaaaaauuaug

SEQ ID NO: 3484755 - RNA, 15 nt, Human
aaucaucauuauuau

SEQ ID NO: 3484756 - RNA, 14 nt, Human
aaucaucgaaaauu

SEQ ID NO: 3484757 - RNA, 12 nt, Human
aaucaucuauuu

SEQ ID NO: 3484758 - RNA, 18 nt, Human
aaucaugaaagcaucuga

SEQ ID NO: 3484759 - RNA, 17 nt, Human
aaucaugaaauaugcau

SEQ ID NO: 3484760 - RNA, 19 nt, Human
aaucaugaaucuuuguuuc

SEQ ID NO: 3484761 - RNA, 17 nt, Human
aaucaugagccugcugg

SEQ ID NO: 3484762 - RNA, 18 nt, Human
aaucaugagccugcugga

SEQ ID NO: 3484763 - RNA, 17 nt, Human
aaucaugaugcuagcca

SEQ ID NO: 3484764 - RNA, 17 nt, Human
aagcaauagaaacaaca

SEQ ID NO: 3484765 - RNA, 19 nt, Human
aagcaauaugcauuuaaau

SEQ ID NO: 3484766 - RNA, 12 nt, Human
aagcaaucaaga

SEQ ID NO: 3484767 - RNA, 18 nt, Human
aagcaauccuccugagug

SEQ ID NO: 3484768 - RNA, 13 nt, Human
aagcaaugguuga

SEQ ID NO: 3484769 - RNA, 15 nt, Human
aagcaauuagacaag

SEQ ID NO: 3484770 - RNA, 13 nt, Human
aagcaauugcugc

SEQ ID NO: 3484771 - RNA, 14 nt, Human
aagcaauuuuccuu

SEQ ID NO: 3484772 - RNA, 13 nt, Human
aagcacaagaagc

SEQ ID NO: 3484773 - RNA, 23 nt, Human
aagcacaagcagagugcacagcu

SEQ ID NO: 3484774 - RNA, 21 nt, Human
aagcacaaugucucacauggg

SEQ ID NO: 3484775 - RNA, 19 nt, Human
aagcacacucauccccuca

SEQ ID NO: 3484776 - RNA, 17 nt, Human
aagcacagaaaacuaga

SEQ ID NO: 3484777 - RNA, 13 nt, Human
aagcacagcccuu

SEQ ID NO: 3484778 - RNA, 18 nt, Human
aagcacaggagacacugu

SEQ ID NO: 3484779 - RNA, 15 nt, Human
aagcacaguuugaac

SEQ ID NO: 3484780 - RNA, 17 nt, Human
aagcacaguuugaacaa

SEQ ID NO: 3484781 - RNA, 21 nt, Human
aagcacauauuagugcagcca

SEQ ID NO: 3484782 - RNA, 16 nt, Human
aagcacauguuuauuu

SEQ ID NO: 3484783 - RNA, 16 nt, Human
aagcaccaaaauaaga

SEQ ID NO: 3484784 - RNA, 21 nt, Human
aagcaccagcuucuccaggcu

SEQ ID NO: 3484785 - RNA, 13 nt, Human
aagcaccuccugc

SEQ ID NO: 3484786 - RNA, 14 nt, Human
aagcaccuccugcc

SEQ ID NO: 3484787 - RNA, 15 nt, Human
aagcaccuccugccu

SEQ ID NO: 3484788 - RNA, 17 nt, Human
aagcaccugccgaccuc

SEQ ID NO: 3484789 - RNA, 20 nt, Human
aagcaccugccgaccucguc

SEQ ID NO: 3484790 - RNA, 13 nt, Human
aagcaccuguaau

SEQ ID NO: 3484791 - RNA, 16 nt, Human
aagcaccuuagcuggc

SEQ ID NO: 3484792 - RNA, 19 nt, Human
aagcaccuuagcuggcauu

SEQ ID NO: 3484793 - RNA, 17 nt, Human
aagcacuacauaaacug

SEQ ID NO: 3484794 - RNA, 19 nt, Human
aagcacucuggaugaugga

SEQ ID NO: 3484795 - RNA, 11 nt, Human
aagcacugaua

SEQ ID NO: 3484796 - RNA, 13 nt, Human
aagcacuguuuuu

SEQ ID NO: 3484797 - RNA, 19 nt, Human
aagcagaaaauaaaggaag

SEQ ID NO: 3484798 - RNA, 20 nt, Human
aagcagaaaauacagcugga

SEQ ID NO: 3484799 - RNA, 13 nt, Human
aagcagaaagugc

SEQ ID NO: 3484800 - RNA, 15 nt, Human
aagcagaaagugccu

SEQ ID NO: 3484801 - RNA, 20 nt, Human
aagcagaaagugccuuucag

SEQ ID NO: 3484802 - RNA, 12 nt, Human
aagcagaaauac

SEQ ID NO: 3484803 - RNA, 15 nt, Human
aagcagaaauccaag

SEQ ID NO: 3484804 - RNA, 13 nt, Human
aagcagaauaaag

SEQ ID NO: 3484805 - RNA, 16 nt, Human
aagcagaauaaagcaa

SEQ ID NO: 3484806 - RNA, 20 nt, Human
aagcagaauaaagcaauuuu

SEQ ID NO: 3484807 - RNA, 14 nt, Human
aagcagaaugugau

SEQ ID NO: 3484808 - RNA, 15 nt, Human
aagcagaauuggaaa

SEQ ID NO: 3484809 - RNA, 16 nt, Human
aagcagacauuuuaaa

SEQ ID NO: 3484810 - RNA, 22 nt, Human
aagcagaccauuggggcuccca

SEQ ID NO: 3484811 - RNA, 14 nt, Human
aagcagagaagcuc

SEQ ID NO: 3484812 - RNA, 23 nt, Human
aagcagagauuuucaacauuuca

SEQ ID NO: 3484813 - RNA, 13 nt, Human
aagcagagcuucc

SEQ ID NO: 3484814 - RNA, 13 nt, Human
aagcagaggacca

SEQ ID NO: 3484815 - RNA, 19 nt, Human
aagcagaggaccagggccu

SEQ ID NO: 3484816 - RNA, 12 nt, Human
aagcagaggagg

SEQ ID NO: 3484817 - RNA, 20 nt, Human
aagcagaggaggggccgcug

SEQ ID NO: 3484818 - RNA, 11 nt, Human
aagcagagugg

SEQ ID NO: 3484819 - RNA, 14 nt, Human
aagcagaguggcag

SEQ ID NO: 3484820 - RNA, 16 nt, Human
aagcagcaacuauuca

SEQ ID NO: 3484821 - RNA, 14 nt, Human
aagcagcagccucg

SEQ ID NO: 3484822 - RNA, 16 nt, Human
aagcagcagccucgcc

SEQ ID NO: 3484823 - RNA, 16 nt, Human
aagcagcaucuucugg

SEQ ID NO: 3484824 - RNA, 16 nt, Human
aagcagccaagcuccu

SEQ ID NO: 3484825 - RNA, 13 nt, Human
aagcagcucaaag

SEQ ID NO: 3484826 - RNA, 14 nt, Human
aagcagcucucccc

SEQ ID NO: 3484827 - RNA, 16 nt, Human
aagcaggaagcucaga

SEQ ID NO: 3484828 - RNA, 23 nt, Human
aagcaggacuuugaggcaagugu

SEQ ID NO: 3484829 - RNA, 17 nt, Human
aagcagggaauuucuau

SEQ ID NO: 3484830 - RNA, 17 nt, Human
aagcaggggaguaugca

SEQ ID NO: 3484831 - RNA, 21 nt, Human
aagcaggggcuacaagaggga

SEQ ID NO: 3484832 - RNA, 22 nt, Human
aagcaggggcuacaagagggaa

SEQ ID NO: 3484833 - RNA, 14 nt, Human
aagcagguggaucu

SEQ ID NO: 3484834 - RNA, 20 nt, Human
aagcagguggaucuauuuca

SEQ ID NO: 3484835 - RNA, 16 nt, Human
aagcagguuaaauguu

SEQ ID NO: 3484836 - RNA, 18 nt, Human
aagcagguuaaauguuuu

SEQ ID NO: 3484837 - RNA, 15 nt, Human
aagcagguuagagaa

SEQ ID NO: 3484838 - RNA, 19 nt, Human
aagcagguucccaagcuca

SEQ ID NO: 3484839 - RNA, 22 nt, Human
aagcagguugaggggcuccugg

SEQ ID NO: 3484840 - RNA, 14 nt, Human
aagcagguugauaa

SEQ ID NO: 3484841 - RNA, 19 nt, Human
aagcagguuucaaggaagu

SEQ ID NO: 3484842 - RNA, 14 nt, Human
aagcaguaaaaacu

SEQ ID NO: 3484843 - RNA, 17 nt, Human
aagcaguaaauuugcua

SEQ ID NO: 3484844 - RNA, 13 nt, Human
aagcaguaacuga

SEQ ID NO: 3484845 - RNA, 20 nt, Human
aagcaguagaaauaauaugc

SEQ ID NO: 3484846 - RNA, 21 nt, Human
aagcaguagaaauaauaugca

SEQ ID NO: 3484847 - RNA, 12 nt, Human
aagcaguauuuu

SEQ ID NO: 3484848 - RNA, 17 nt, Human
aagcagucacuuuuccu

SEQ ID NO: 3484849 - RNA, 19 nt, Human
aagcagucuacccaccuca

SEQ ID NO: 3484850 - RNA, 12 nt, Human
aagcagugcaug

SEQ ID NO: 3484851 - RNA, 15 nt, Human
aagcagugcaugcug

SEQ ID NO: 3484852 - RNA, 14 nt, Human
aagcagugcccagg

SEQ ID NO: 3484853 - RNA, 16 nt, Human
aagcagugcccaggug

SEQ ID NO: 3484854 - RNA, 18 nt, Human
aagcagugcccagguggc

SEQ ID NO: 3484855 - RNA, 15 nt, Human
aagcagugcuucuca

SEQ ID NO: 3484856 - RNA, 17 nt, Human
aagcaguggauacgugu

SEQ ID NO: 3484857 - RNA, 13 nt, Human
aagcaguuucaau

SEQ ID NO: 3484858 - RNA, 17 nt, Human
aagcauaaaaacauuuu

SEQ ID NO: 3484859 - RNA, 14 nt, Human
aagcauaaagcuca

SEQ ID NO: 3484860 - RNA, 18 nt, Human
aagcauacuuuguaaaua

SEQ ID NO: 3484861 - RNA, 16 nt, Human
aagcauagauguuuug

SEQ ID NO: 3484862 - RNA, 21 nt, Human
aagcaucacaaaugauauuaa

SEQ ID NO: 3484863 - RNA, 18 nt, Human
aagcaucauuauuuaugu

SEQ ID NO: 3484864 - RNA, 22 nt, Human
aagcaucauuauuuauguauug

SEQ ID NO: 3484865 - RNA, 17 nt, Human
aagcauccaugugugga

SEQ ID NO: 3484866 - RNA, 19 nt, Human
aagcauccauguguggacu

SEQ ID NO: 3484867 - RNA, 23 nt, Human
aagcaucccucacccauccuaga

SEQ ID NO: 3484868 - RNA, 23 nt, Human
aagcauccuuuaggguucugccu

SEQ ID NO: 3484869 - RNA, 12 nt, Human
aagcaucuaaac

SEQ ID NO: 3484870 - RNA, 20 nt, Human
aagcaucuaaacuuuaauau

SEQ ID NO: 3484871 - RNA, 13 nt, Human
aagcaucuaagga

SEQ ID NO: 3484872 - RNA, 16 nt, Human
aagcaucuccugagga

SEQ ID NO: 3484873 - RNA, 17 nt, Human
aagcaucuccugaggau

SEQ ID NO: 3484874 - RNA, 17 nt, Human
aagcaucuggcucuaau

SEQ ID NO: 3484875 - RNA, 19 nt, Human
aagcaucuggcucuaauuc

SEQ ID NO: 3484876 - RNA, 13 nt, Human
aagcaugaaaaag

SEQ ID NO: 3484877 - RNA, 19 nt, Human
aagcaugccaauuucucuu

SEQ ID NO: 3484878 - RNA, 22 nt, Human
aagcaugcuugugaaaaugugu

SEQ ID NO: 3484879 - RNA, 14 nt, Human
aagcauggacauuu

SEQ ID NO: 3484880 - RNA, 16 nt, Human
aagcauggagaacagu

SEQ ID NO: 3484881 - RNA, 15 nt, Human
aagcauggcuauuuu

SEQ ID NO: 3484882 - RNA, 17 nt, Human
aagcaugggauuauuag

SEQ ID NO: 3484883 - RNA, 12 nt, Human
aagcauguacag

SEQ ID NO: 3484884 - RNA, 13 nt, Human
aagcauguacagu

SEQ ID NO: 3484885 - RNA, 22 nt, Human
aagcauguacaguguucuguuu

SEQ ID NO: 3484886 - RNA, 18 nt, Human
aagcauguauucagcuuu

SEQ ID NO: 3484887 - RNA, 17 nt, Human
aagcaugugucaugcau

SEQ ID NO: 3484888 - RNA, 17 nt, Human
aagcauguuuugcaugu

SEQ ID NO: 3484889 - RNA, 16 nt, Human
aagcauuacucuugua

SEQ ID NO: 3484890 - RNA, 18 nt, Human
aagcauuacucuuguaag

SEQ ID NO: 3484891 - RNA, 21 nt, Human
aagcauucaauuuauucaaga

SEQ ID NO: 3484892 - RNA, 22 nt, Human
aagcauucaauuuauucaagaa

SEQ ID NO: 3484893 - RNA, 23 nt, Human
aagcauucaauuuauucaagaaa

SEQ ID NO: 3484894 - RNA, 15 nt, Human
aagcauucagaagaa

SEQ ID NO: 3484895 - RNA, 17 nt, Human
aagcauucagagagcag

SEQ ID NO: 3484896 - RNA, 13 nt, Human
aagcauuccaaca

SEQ ID NO: 3484897 - RNA, 13 nt, Human
aagcauuccuucu

SEQ ID NO: 3484898 - RNA, 17 nt, Human
aagcauucucauuggaa

SEQ ID NO: 3484899 - RNA, 23 nt, Human
aagcauucucauuggaaauuuag

SEQ ID NO: 3484900 - RNA, 14 nt, Human
aagcauucucccca

SEQ ID NO: 3484901 - RNA, 18 nt, Human
aagcauucuccccagugu

SEQ ID NO: 3484902 - RNA, 23 nt, Human
aaugcuggacuggaggccccugg

SEQ ID NO: 3484903 - RNA, 12 nt, Human
aaugcuggagcg

SEQ ID NO: 3484904 - RNA, 18 nt, Human
aaugcugggacucagccu

SEQ ID NO: 3484905 - RNA, 12 nt, Human
aaugcugggcug

SEQ ID NO: 3484906 - RNA, 18 nt, Human
aaugcugguuuuccuaaa

SEQ ID NO: 3484907 - RNA, 21 nt, Human
aaugcugguuuuccuaaaugc

SEQ ID NO: 3484908 - RNA, 15 nt, Human
aaugcugguuuuuca

SEQ ID NO: 3484909 - RNA, 20 nt, Human
aaugcuguauuuuaaaagaa

SEQ ID NO: 3484910 - RNA, 17 nt, Human
aaugcugucuuucuugc

SEQ ID NO: 3484911 - RNA, 22 nt, Human
aaugcugucuuucuugcucccu

SEQ ID NO: 3484912 - RNA, 16 nt, Human
aaugcuguugccucau

SEQ ID NO: 3484913 - RNA, 12 nt, Human
aaugcuuaagag

SEQ ID NO: 3484914 - RNA, 21 nt, Human
aaugcuuaagagggaaugaua

SEQ ID NO: 3484915 - RNA, 14 nt, Human
aaugcuuaaucaga

SEQ ID NO: 3484916 - RNA, 22 nt, Human
aaugcuuaaucagauagauauu

SEQ ID NO: 3484917 - RNA, 20 nt, Human
aaugcuuaucaucuaaagau

SEQ ID NO: 3484918 - RNA, 11 nt, Human
aaugcuucaga

SEQ ID NO: 3484919 - RNA, 17 nt, Human
aaugcuucauucaauau

SEQ ID NO: 3484920 - RNA, 20 nt, Human
aaugcuucuaaguaaauaca

SEQ ID NO: 3484921 - RNA, 23 nt, Human
aaugcuucuaaguaaauacaauu

SEQ ID NO: 3484922 - RNA, 16 nt, Human
aaugcuucuucucagg

SEQ ID NO: 3484923 - RNA, 19 nt, Human
aaugcuugaaaaaugugca

SEQ ID NO: 3484924 - RNA, 12 nt, Human
aaugcuuggaau

SEQ ID NO: 3484925 - RNA, 21 nt, Human
aaugcuuggaauaucugcugu

SEQ ID NO: 3484926 - RNA, 22 nt, Human
aaugcuuggaauaucugcugua

SEQ ID NO: 3484927 - RNA, 21 nt, Human
aaugcuuggcuucucauacgu

SEQ ID NO: 3484928 - RNA, 18 nt, Human
aaugcuuuaaaaacuauu

SEQ ID NO: 3484929 - RNA, 23 nt, Human
aaugcuuuaaaaacuauuuaacu

SEQ ID NO: 3484930 - RNA, 19 nt, Human
aaugcuuuagaaagguuuu

SEQ ID NO: 3484931 - RNA, 14 nt, Human
aaugcuuuauuugu

SEQ ID NO: 3484932 - RNA, 16 nt, Human
aaugcuuuauuuguaa

SEQ ID NO: 3484933 - RNA, 19 nt, Human
aaugcuuuauuuguaaauu

SEQ ID NO: 3484934 - RNA, 13 nt, Human
aaugcuuucugaa

SEQ ID NO: 3484935 - RNA, 12 nt, Human
aaugcuuugaua

SEQ ID NO: 3484936 - RNA, 13 nt, Human
aaugcuuuuaaaa

SEQ ID NO: 3484937 - RNA, 14 nt, Human
aaugcuuuuagugu

SEQ ID NO: 3484938 - RNA, 20 nt, Human
aauggaaaaaaaaaaaagag

SEQ ID NO: 3484939 - RNA, 21 nt, Human
aauggaaaaaaaaaaaagagg

SEQ ID NO: 3484940 - RNA, 22 nt, Human
aauggaaaaaaaaaaaagagga

SEQ ID NO: 3484941 - RNA, 19 nt, Human
aauggaaaacagacucagg

SEQ ID NO: 3484942 - RNA, 16 nt, Human
aauggaaacugaaugc

SEQ ID NO: 3484943 - RNA, 17 nt, Human
aauggaaacugaaugcu

SEQ ID NO: 3484944 - RNA, 15 nt, Human
aauggaaauuuugcu

SEQ ID NO: 3484945 - RNA, 17 nt, Human
aauggaaauuuugcuau

SEQ ID NO: 3484946 - RNA, 16 nt, Human
aauggaaccuccuuuc

SEQ ID NO: 3484947 - RNA, 13 nt, Human
aauggaagacaca

SEQ ID NO: 3484948 - RNA, 16 nt, Human
aauggaagacagcucu

SEQ ID NO: 3484949 - RNA, 23 nt, Human
aauggaagauuugcccauuuaca

SEQ ID NO: 3484950 - RNA, 18 nt, Human
aauggaagguuuguauau

SEQ ID NO: 3484951 - RNA, 20 nt, Human
aauggaagguuuguauauug

SEQ ID NO: 3484952 - RNA, 22 nt, Human
aauggacauccuguauaagcac

SEQ ID NO: 3484953 - RNA, 20 nt, Human
aauggacgguuuaggugaaa

SEQ ID NO: 3484954 - RNA, 16 nt, Human
aauggacguguuauga

SEQ ID NO: 3484955 - RNA, 21 nt, Human
aauggacguguuaugacucca

SEQ ID NO: 3484956 - RNA, 17 nt, Human
aauggacuggaagggga

SEQ ID NO: 3484957 - RNA, 17 nt, Human
aauggacugguuugaga

SEQ ID NO: 3484958 - RNA, 19 nt, Human
aauggacuuuuguacauag

SEQ ID NO: 3484959 - RNA, 16 nt, Human
aauggagaagcugcag

SEQ ID NO: 3484960 - RNA, 20 nt, Human
aauggagauucaguuuucau

SEQ ID NO: 3484961 - RNA, 21 nt, Human
aauggaggaacuuuccaaaca

SEQ ID NO: 3484962 - RNA, 19 nt, Human
aauggaggaucucuaaaga

SEQ ID NO: 3484963 - RNA, 19 nt, Human
aauggaggggcagagccag

SEQ ID NO: 3484964 - RNA, 22 nt, Human
aauggaggggcagagccaggaa

SEQ ID NO: 3484965 - RNA, 19 nt, Human
aauggagucaguuugcagu

SEQ ID NO: 3484966 - RNA, 13 nt, Human
aauggaguuggag

SEQ ID NO: 3484967 - RNA, 21 nt, Human
aagcuguuugguuuuaaaaua

SEQ ID NO: 3484968 - RNA, 16 nt, Human
aagcuuaaaaaaaacu

SEQ ID NO: 3484969 - RNA, 14 nt, Human
aagcuuaaaacuuu

SEQ ID NO: 3484970 - RNA, 13 nt, Human
aagcuuagcagga

SEQ ID NO: 3484971 - RNA, 15 nt, Human
aagcuuagcaggaga

SEQ ID NO: 3484972 - RNA, 14 nt, Human
aagcuuaguauaaa

SEQ ID NO: 3484973 - RNA, 22 nt, Human
aagcuuauccauaaaaaaaaau

SEQ ID NO: 3484974 - RNA, 19 nt, Human
aagcuuauuaaugcuaagg

SEQ ID NO: 3484975 - RNA, 18 nt, Human
aagcuucaaacugcauga

SEQ ID NO: 3484976 - RNA, 15 nt, Human
aagcuucaguugcuu

SEQ ID NO: 3484977 - RNA, 18 nt, Human
aagcuucaguugcuuguc

SEQ ID NO: 3484978 - RNA, 15 nt, Human
aagcuuccaggaaaa

SEQ ID NO: 3484979 - RNA, 19 nt, Human
aagcuuccaguccaaucuc

SEQ ID NO: 3484980 - RNA, 21 nt, Human
aagcuuccaguccaaucucau

SEQ ID NO: 3484981 - RNA, 23 nt, Human
aagcuuccuuuguuuuuuuuucc

SEQ ID NO: 3484982 - RNA, 22 nt, Human
aagcuucgaggcccagcgaccu

SEQ ID NO: 3484983 - RNA, 18 nt, Human
aagcuucuaauaaauuau

SEQ ID NO: 3484984 - RNA, 20 nt, Human
aagcuucugucuccagcuuc

SEQ ID NO: 3484985 - RNA, 12 nt, Human
aagcuucuuaau

SEQ ID NO: 3484986 - RNA, 15 nt, Human
aagcuugacucccaa

SEQ ID NO: 3484987 - RNA, 14 nt, Human
aagcuugcucacau

SEQ ID NO: 3484988 - RNA, 12 nt, Human
aagcuuggggaa

SEQ ID NO: 3484989 - RNA, 23 nt, Human
aagcuuguguauccauuaucaug

SEQ ID NO: 3484990 - RNA, 13 nt, Human
aagcuuuaaauua

SEQ ID NO: 3484991 - RNA, 17 nt, Human
aagcuuuaaauuaugug

SEQ ID NO: 3484992 - RNA, 22 nt, Human
aagcuuuacuggggcuggggaa

SEQ ID NO: 3484993 - RNA, 19 nt, Human
aagcuuuauacguguagcu

SEQ ID NO: 3484994 - RNA, 12 nt, Human
aagcuuuaugau

SEQ ID NO: 3484995 - RNA, 18 nt, Human
aagcuuuaugauuuucau

SEQ ID NO: 3484996 - RNA, 16 nt, Human
aagcuuuauuucuagc

SEQ ID NO: 3484997 - RNA, 20 nt, Human
aagcuuuauuuugagaugua

SEQ ID NO: 3484998 - RNA, 22 nt, Human
aagcuuucauguaaacugugca

SEQ ID NO: 3484999 - RNA, 23 nt, Human
aagcuuucauguaaacugugcac

SEQ ID NO: 3485000 - RNA, 21 nt, Human
aagcuuucaugucccagaacu

SEQ ID NO: 3485001 - RNA, 22 nt, Human
aagcuuuccugccccaggccug

SEQ ID NO: 3485002 - RNA, 11 nt, Human
aagcuuucucu

SEQ ID NO: 3485003 - RNA, 17 nt, Human
aagcuuucucugcuuca

SEQ ID NO: 3485004 - RNA, 15 nt, Human
aagcuuucugucucc

SEQ ID NO: 3485005 - RNA, 20 nt, Human
aagcuuugacucuauaagca

SEQ ID NO: 3485006 - RNA, 22 nt, Human
aagcuuugauuuagauugagua

SEQ ID NO: 3485007 - RNA, 23 nt, Human
aagcuuugcuuaugguaauaaaa

SEQ ID NO: 3485008 - RNA, 21 nt, Human
aagcuuuggacccaaggaaaa

SEQ ID NO: 3485009 - RNA, 20 nt, Human
aagcuuuguccccugcuuca

SEQ ID NO: 3485010 - RNA, 20 nt, Human
aagcuuuguugaaagaaagu

SEQ ID NO: 3485011 - RNA, 13 nt, Human
aagcuuuuagaaa

SEQ ID NO: 3485012 - RNA, 14 nt, Human
aagcuuuuagaaau

SEQ ID NO: 3485013 - RNA, 14 nt, Human
aagcuuuuccuaau

SEQ ID NO: 3485014 - RNA, 22 nt, Human
aagcuuuugucuacacacccug

SEQ ID NO: 3485015 - RNA, 12 nt, Human
aagcuuuuuagu

SEQ ID NO: 3485016 - RNA, 23 nt, Human
aagcuuuuuauuccuccugcuca

SEQ ID NO: 3485017 - RNA, 18 nt, Human
aagcuuuuuggaaucuuu

SEQ ID NO: 3485018 - RNA, 14 nt, Human
aaggaaaaaaagac

SEQ ID NO: 3485019 - RNA, 19 nt, Human
aaggaaaaacacaagcaaa

SEQ ID NO: 3485020 - RNA, 16 nt, Human
aaggaaaaagcacaag

SEQ ID NO: 3485021 - RNA, 12 nt, Human
aaggaaaaagcu

SEQ ID NO: 3485022 - RNA, 12 nt, Human
aaggaaaaguuu

SEQ ID NO: 3485023 - RNA, 12 nt, Human
aaggaaaaugau

SEQ ID NO: 3485024 - RNA, 14 nt, Human
aaggaaaaugauac

SEQ ID NO: 3485025 - RNA, 13 nt, Human
aaggaaaaugauc

SEQ ID NO: 3485026 - RNA, 17 nt, Human
aaggaaaccacagcugc

SEQ ID NO: 3485027 - RNA, 18 nt, Human
aaggaaaccacagcugcu

SEQ ID NO: 3485028 - RNA, 15 nt, Human
aaggaaaccagugca

SEQ ID NO: 3485029 - RNA, 16 nt, Human
aaggaaacccagcucu

SEQ ID NO: 3485030 - RNA, 17 nt, Human
aaggaaacccagcucug

SEQ ID NO: 3485031 - RNA, 21 nt, Human
aaggaaaccgccuaguuuacu

SEQ ID NO: 3485032 - RNA, 19 nt, Human
aaggaaaccuuuucuugua

SEQ ID NO: 3485033 - RNA, 21 nt, Human
aaggaaacuugaaucaaagca

SEQ ID NO: 3485034 - RNA, 13 nt, Human
aaggaaaggcaaa

SEQ ID NO: 3485035 - RNA, 23 nt, Human
aaggaaauacccuucuuuuauga

SEQ ID NO: 3485036 - RNA, 15 nt, Human
aaggaaauauauuuu

SEQ ID NO: 3485037 - RNA, 14 nt, Human
aaggaaaugauuga

SEQ ID NO: 3485038 - RNA, 13 nt, Human
aaggaaauuuuac

SEQ ID NO: 3485039 - RNA, 16 nt, Human
aaggaaccaacaaucu

SEQ ID NO: 3485040 - RNA, 12 nt, Human
aaggaaccuucc

SEQ ID NO: 3485041 - RNA, 23 nt, Human
aaggaacuaggucaaaaaucugu

SEQ ID NO: 3485042 - RNA, 18 nt, Human
aaggaacucuggcuucca

SEQ ID NO: 3485043 - RNA, 20 nt, Human
aaggaacucuggcuuccagg

SEQ ID NO: 3485044 - RNA, 22 nt, Human
aaggaacucuggcuuccaggua

SEQ ID NO: 3485045 - RNA, 18 nt, Human
aaggaacuugaaaaauac

SEQ ID NO: 3485046 - RNA, 15 nt, Human
aaugguucugaaaua

SEQ ID NO: 3485047 - RNA, 18 nt, Human
aaugguugccuuaaagaa

SEQ ID NO: 3485048 - RNA, 12 nt, Human
aaugguuguauu

SEQ ID NO: 3485049 - RNA, 18 nt, Human
aaugguuguauuagaugu

SEQ ID NO: 3485050 - RNA, 19 nt, Human
aaugguuguauuagauguu

SEQ ID NO: 3485051 - RNA, 14 nt, Human
aaugguuuaaaugg

SEQ ID NO: 3485052 - RNA, 16 nt, Human
aaugguuuauuuugua

SEQ ID NO: 3485053 - RNA, 17 nt, Human
aaugguuugaauauaaa

SEQ ID NO: 3485054 - RNA, 14 nt, Human
aaugguuuucaaaa

SEQ ID NO: 3485055 - RNA, 16 nt, Human
aaugguuuucuugugu

SEQ ID NO: 3485056 - RNA, 12 nt, Human
aauguaaaauga

SEQ ID NO: 3485057 - RNA, 14 nt, Human
aauguaaacauuuu

SEQ ID NO: 3485058 - RNA, 15 nt, Human
aauguaaagacaaaa

SEQ ID NO: 3485059 - RNA, 15 nt, Human
aauguaaagauuugc

SEQ ID NO: 3485060 - RNA, 23 nt, Human
aauguaaaggagucaaaacuaca

SEQ ID NO: 3485061 - RNA, 12 nt, Human
aauguaaauauu

SEQ ID NO: 3485062 - RNA, 16 nt, Human
aauguaaauauuuuaa

SEQ ID NO: 3485063 - RNA, 19 nt, Human
aauguaaauauuuuaaaga

SEQ ID NO: 3485064 - RNA, 12 nt, Human
aauguaaauguc

SEQ ID NO: 3485065 - RNA, 13 nt, Human
aauguaaaugucu

SEQ ID NO: 3485066 - RNA, 14 nt, Human
aauguaaauuugua

SEQ ID NO: 3485067 - RNA, 11 nt, Human
aauguaacugc

SEQ ID NO: 3485068 - RNA, 20 nt, Human
aauguaacuguuaccauugg

SEQ ID NO: 3485069 - RNA, 23 nt, Human
aauguaacuguuaccauuggaaa

SEQ ID NO: 3485070 - RNA, 15 nt, Human
aauguaacuuuugua

SEQ ID NO: 3485071 - RNA, 22 nt, Human
aauguaagauuauagauucuaa

SEQ ID NO: 3485072 - RNA, 16 nt, Human
aauguaagcauacuuu

SEQ ID NO: 3485073 - RNA, 15 nt, Human
aauguaagcucuacu

SEQ ID NO: 3485074 - RNA, 22 nt, Human
aauguaaggcuguguaagauuu

SEQ ID NO: 3485075 - RNA, 19 nt, Human
aauguaaguaaaugucugu

SEQ ID NO: 3485076 - RNA, 19 nt, Human
aauguaaucaauguuucuu

SEQ ID NO: 3485077 - RNA, 18 nt, Human
aauguaauuaaacuguua

SEQ ID NO: 3485078 - RNA, 12 nt, Human
aauguaauuauu

SEQ ID NO: 3485079 - RNA, 17 nt, Human
aauguaauuauuuaugu

SEQ ID NO: 3485080 - RNA, 17 nt, Human
aauguaauuuaaaugaa

SEQ ID NO: 3485081 - RNA, 17 nt, Human
aauguaauuuguguaau

SEQ ID NO: 3485082 - RNA, 18 nt, Human
aauguaauuuguguaaua

SEQ ID NO: 3485083 - RNA, 16 nt, Human
aauguacagacauauu

SEQ ID NO: 3485084 - RNA, 17 nt, Human
aauguacagacauauuu

SEQ ID NO: 3485085 - RNA, 23 nt, Human
aauguacagcaaggagauuuaca

SEQ ID NO: 3485086 - RNA, 16 nt, Human
aauguacaguugaaau

SEQ ID NO: 3485087 - RNA, 17 nt, Human
aauguacaucuggccuu

SEQ ID NO: 3485088 - RNA, 18 nt, Human
aauguacccaccgggcca

SEQ ID NO: 3485089 - RNA, 20 nt, Human
aauguacuaggauacugcug

SEQ ID NO: 3485090 - RNA, 12 nt, Human
aauguacugaga

SEQ ID NO: 3485091 - RNA, 15 nt, Human
aauguacugagauuu

SEQ ID NO: 3485092 - RNA, 20 nt, Human
aauguagaauauucagacaa

SEQ ID NO: 3485093 - RNA, 12 nt, Human
aauguagagggg

SEQ ID NO: 3485094 - RNA, 15 nt, Human
aauguagauaagugu

SEQ ID NO: 3485095 - RNA, 21 nt, Human
aauguaggccaaauuuguagu

SEQ ID NO: 3485096 - RNA, 22 nt, Human
aauguaggcuuaguuugugugu

SEQ ID NO: 3485097 - RNA, 20 nt, Human
aauguaggggaaaguuucau

SEQ ID NO: 3485098 - RNA, 23 nt, Human
aauguaguucugcuccagacagg

SEQ ID NO: 3485099 - RNA, 15 nt, Human
aauguaguuugagga

SEQ ID NO: 3485100 - RNA, 15 nt, Human
aauguauaaauauac

SEQ ID NO: 3485101 - RNA, 14 nt, Human
aauguauaaguuga

SEQ ID NO: 3485102 - RNA, 20 nt, Human
aauguauaccuguaacugca

SEQ ID NO: 3485103 - RNA, 21 nt, Human
aauguauaguauuugaaaaca

SEQ ID NO: 3485104 - RNA, 13 nt, Human
aauguauauaaaa

SEQ ID NO: 3485105 - RNA, 15 nt, Human
aauguauauaaaaau

SEQ ID NO: 3485106 - RNA, 13 nt, Human
aauguauauacac

SEQ ID NO: 3485107 - RNA, 14 nt, Human
aauguauauacaca

SEQ ID NO: 3485108 - RNA, 15 nt, Human
aauguauauacacau

SEQ ID NO: 3485109 - RNA, 13 nt, Human
aauguauaugcac

SEQ ID NO: 3485110 - RNA, 18 nt, Human
aauguaucaaauacauuu

SEQ ID NO: 3485111 - RNA, 13 nt, Human
aauguaucaggaa

SEQ ID NO: 3485112 - RNA, 16 nt, Human
aauguaucuuauucac

SEQ ID NO: 3485113 - RNA, 15 nt, Human
aauguaugcuucaua

SEQ ID NO: 3485114 - RNA, 21 nt, Human
aauguaugcuucauacaggga

SEQ ID NO: 3485115 - RNA, 19 nt, Human
aauguauguaauguguggu

SEQ ID NO: 3485116 - RNA, 13 nt, Human
aauguaugucugg

SEQ ID NO: 3485117 - RNA, 13 nt, Human
aauguaugugcac

SEQ ID NO: 3485118 - RNA, 12 nt, Human
aauguaugugua

SEQ ID NO: 3485119 - RNA, 14 nt, Human
aauguauguguaag

SEQ ID NO: 3485120 - RNA, 13 nt, Human
aauguauguuacc

SEQ ID NO: 3485121 - RNA, 22 nt, Human
aauguauuacaguggggaauga

SEQ ID NO: 3485122 - RNA, 17 nt, Human
aauguauuauucugcag

SEQ ID NO: 3485123 - RNA, 13 nt, Human
aauguauucaaau

SEQ ID NO: 3485124 - RNA, 20 nt, Human
aaggagaaucauguuucuuu

SEQ ID NO: 3485125 - RNA, 22 nt, Human
aaggagaaucauguuucuuuga

SEQ ID NO: 3485126 - RNA, 14 nt, Human
aaggagacaaguuc

SEQ ID NO: 3485127 - RNA, 12 nt, Human
aaggagacacaa

SEQ ID NO: 3485128 - RNA, 17 nt, Human
aaggagacacagauguu

SEQ ID NO: 3485129 - RNA, 22 nt, Human
aaggagacucaccucugccuca

SEQ ID NO: 3485130 - RNA, 23 nt, Human
aaggagacucaccucugccucaa

SEQ ID NO: 3485131 - RNA, 12 nt, Human
aaggagagaaag

SEQ ID NO: 3485132 - RNA, 18 nt, Human
aaggagagaaggggagga

SEQ ID NO: 3485133 - RNA, 18 nt, Human
aaggagagacucccauga

SEQ ID NO: 3485134 - RNA, 22 nt, Human
aaggagagacucccaugaagcc

SEQ ID NO: 3485135 - RNA, 14 nt, Human
aaggagagccugcu

SEQ ID NO: 3485136 - RNA, 20 nt, Human
aaggagaggcaacauccaaa

SEQ ID NO: 3485137 - RNA, 15 nt, Human
aaggagagucuugca

SEQ ID NO: 3485138 - RNA, 15 nt, Human
aaggagauguaagag

SEQ ID NO: 3485139 - RNA, 17 nt, Human
aaggagauuuacaacug

SEQ ID NO: 3485140 - RNA, 18 nt, Human
aaggagauuuacaacugg

SEQ ID NO: 3485141 - RNA, 13 nt, Human
aaggagcacaagc

SEQ ID NO: 3485142 - RNA, 19 nt, Human
aaggagccccauuccuggg

SEQ ID NO: 3485143 - RNA, 22 nt, Human
aaggagcucacuguggugucug

SEQ ID NO: 3485144 - RNA, 17 nt, Human
aaggagcugagaauaga

SEQ ID NO: 3485145 - RNA, 23 nt, Human
aaggagcugagaauagaaggaaa

SEQ ID NO: 3485146 - RNA, 11 nt, Human
aaggagcugcc

SEQ ID NO: 3485147 - RNA, 12 nt, Human
aaggagcugccu

SEQ ID NO: 3485148 - RNA, 19 nt, Human
aaggagcugccuggacccg

SEQ ID NO: 3485149 - RNA, 12 nt, Human
aaggagcugcua

SEQ ID NO: 3485150 - RNA, 21 nt, Human
aaggagcuuaccucccaccuu

SEQ ID NO: 3485151 - RNA, 18 nt, Human
aaggaggaagagaaaaaa

SEQ ID NO: 3485152 - RNA, 14 nt, Human
aaggaggacccagg

SEQ ID NO: 3485153 - RNA, 15 nt, Human
aaggaggagagggaa

SEQ ID NO: 3485154 - RNA, 16 nt, Human
aaggaggagccugucc

SEQ ID NO: 3485155 - RNA, 17 nt, Human
aaggaggagccuguccu

SEQ ID NO: 3485156 - RNA, 23 nt, Human
aaggaggauggcauauaauacaa

SEQ ID NO: 3485157 - RNA, 23 nt, Human
aaggaggauuccauuuggcagag

SEQ ID NO: 3485158 - RNA, 12 nt, Human
aaggaggccacc

SEQ ID NO: 3485159 - RNA, 15 nt, Human
aaggaggccaccucc

SEQ ID NO: 3485160 - RNA, 23 nt, Human
aaggaggcgcacuuuccuccugg

SEQ ID NO: 3485161 - RNA, 14 nt, Human
aaggaggcuccagg

SEQ ID NO: 3485162 - RNA, 21 nt, Human
aaggaggggaaaaaaauguug

SEQ ID NO: 3485163 - RNA, 13 nt, Human
aaggaggggaacc

SEQ ID NO: 3485164 - RNA, 18 nt, Human
aaggaggggaagcugcag

SEQ ID NO: 3485165 - RNA, 18 nt, Human
aaggaggguuagggaggg

SEQ ID NO: 3485166 - RNA, 19 nt, Human
aaggaggugagggauguga

SEQ ID NO: 3485167 - RNA, 13 nt, Human
aaggaguagaaaa

SEQ ID NO: 3485168 - RNA, 17 nt, Human
aaggagucaaaacuaca

SEQ ID NO: 3485169 - RNA, 17 nt, Human
aaggagucacugagacc

SEQ ID NO: 3485170 - RNA, 18 nt, Human
aaggagucacugagacca

SEQ ID NO: 3485171 - RNA, 17 nt, Human
aaggaguuuauguucca

SEQ ID NO: 3485172 - RNA, 21 nt, Human
aaggauacaaaagcaugugag

SEQ ID NO: 3485173 - RNA, 19 nt, Human
aaggauaccuucuuauuua

SEQ ID NO: 3485174 - RNA, 19 nt, Human
aaggauacuguaacacuuu

SEQ ID NO: 3485175 - RNA, 23 nt, Human
aaggauacuguaacacuuuacaa

SEQ ID NO: 3485176 - RNA, 16 nt, Human
aaggauacuuauuuaa

SEQ ID NO: 3485177 - RNA, 19 nt, Human
aaggauagaugcuggccca

SEQ ID NO: 3485178 - RNA, 14 nt, Human
aaggauaguaagca

SEQ ID NO: 3485179 - RNA, 20 nt, Human
aaggauaguaagcauagaaa

SEQ ID NO: 3485180 - RNA, 17 nt, Human
aaggauaguauuuuuau

SEQ ID NO: 3485181 - RNA, 18 nt, Human
aaggauauuuaagaaaau

SEQ ID NO: 3485182 - RNA, 22 nt, Human
aaggauauuuacuacuuuugca

SEQ ID NO: 3485183 - RNA, 22 nt, Human
aaggaucagaacagcagagguu

SEQ ID NO: 3485184 - RNA, 16 nt, Human
aaggauccggaaagaa

SEQ ID NO: 3485185 - RNA, 11 nt, Human
aaggauccuga

SEQ ID NO: 3485186 - RNA, 20 nt, Human
aaggauccugagccagauuu

SEQ ID NO: 3485187 - RNA, 16 nt, Human
aaggaucucucaggag

SEQ ID NO: 3485188 - RNA, 21 nt, Human
aaggaucucucaggagcacag

SEQ ID NO: 3485189 - RNA, 21 nt, Human
aaggaucuguuuuuaaaaauc

SEQ ID NO: 3485190 - RNA, 22 nt, Human
aaggaucuuucacccacagaaa

SEQ ID NO: 3485191 - RNA, 19 nt, Human
aaggaugaagggcccgaga

SEQ ID NO: 3485192 - RNA, 18 nt, Human
aauauuuaugaagaaaau

SEQ ID NO: 3485193 - RNA, 13 nt, Human
aauauuuauggau

SEQ ID NO: 3485194 - RNA, 15 nt, Human
aauauuuauguaaac

SEQ ID NO: 3485195 - RNA, 19 nt, Human
aauauuuaugucuauuuaa

SEQ ID NO: 3485196 - RNA, 16 nt, Human
aauauuuauuaaauuu

SEQ ID NO: 3485197 - RNA, 20 nt, Human
aauauuuauuauuuucaccu

SEQ ID NO: 3485198 - RNA, 13 nt, Human
aauauuuauuuau

SEQ ID NO: 3485199 - RNA, 15 nt, Human
aauauuucaagacau

SEQ ID NO: 3485200 - RNA, 18 nt, Human
aauauuuccuuaaacugu

SEQ ID NO: 3485201 - RNA, 18 nt, Human
aauauuucuauugaauuc

SEQ ID NO: 3485202 - RNA, 17 nt, Human
aauauuucugcuuucuu

SEQ ID NO: 3485203 - RNA, 12 nt, Human
aauauuugaauc

SEQ ID NO: 3485204 - RNA, 20 nt, Human
aauauuugaaucuugucuca

SEQ ID NO: 3485205 - RNA, 21 nt, Human
aauauuugaauguaugcuuca

SEQ ID NO: 3485206 - RNA, 18 nt, Human
aauauuugacuauucugu

SEQ ID NO: 3485207 - RNA, 23 nt, Human
aauauuugacuugcaugaagaga

SEQ ID NO: 3485208 - RNA, 17 nt, Human
aauauuugugugcuaaa

SEQ ID NO: 3485209 - RNA, 15 nt, Human
aauauuuuaaagaau

SEQ ID NO: 3485210 - RNA, 23 nt, Human
aauauuuuaagcauuacucuugu

SEQ ID NO: 3485211 - RNA, 15 nt, Human
aauauuuuaaguauu

SEQ ID NO: 3485212 - RNA, 17 nt, Human
aauauuuuaaguauugc

SEQ ID NO: 3485213 - RNA, 11 nt, Human
aauauuuuaau

SEQ ID NO: 3485214 - RNA, 20 nt, Human
aauauuuuaauuuuuaaaug

SEQ ID NO: 3485215 - RNA, 15 nt, Human
aauauuuuacauaca

SEQ ID NO: 3485216 - RNA, 19 nt, Human
aauauuuuaccacugcugu

SEQ ID NO: 3485217 - RNA, 16 nt, Human
aauauuuucagccuac

SEQ ID NO: 3485218 - RNA, 13 nt, Human
aauauuuucuauu

SEQ ID NO: 3485219 - RNA, 16 nt, Human
aauauuuucuauuuua

SEQ ID NO: 3485220 - RNA, 23 nt, Human
aauauuuucucuguacuuuucau

SEQ ID NO: 3485221 - RNA, 15 nt, Human
aauauuuucuggguu

SEQ ID NO: 3485222 - RNA, 14 nt, Human
aauauuuucuuuuc

SEQ ID NO: 3485223 - RNA, 16 nt, Human
aauauuuugaaucaau

SEQ ID NO: 3485224 - RNA, 20 nt, Human
aauauuuugaaucaauaaua

SEQ ID NO: 3485225 - RNA, 22 nt, Human
aauauuuugaaucaauaauaua

SEQ ID NO: 3485226 - RNA, 14 nt, Human
aauauuuugauaau

SEQ ID NO: 3485227 - RNA, 21 nt, Human
aauauuuugaucuucaacaaa

SEQ ID NO: 3485228 - RNA, 16 nt, Human
aauauuuuguauuauu

SEQ ID NO: 3485229 - RNA, 21 nt, Human
aauauuuugucuaaaaugccu

SEQ ID NO: 3485230 - RNA, 17 nt, Human
aauauuuuuaauauaua

SEQ ID NO: 3485231 - RNA, 23 nt, Human
aauauuuuuauauacagaggaaa

SEQ ID NO: 3485232 - RNA, 23 nt, Human
aauauuuuuauaucaugcaaaau

SEQ ID NO: 3485233 - RNA, 21 nt, Human
aauauuuuuauauuuccuuua

SEQ ID NO: 3485234 - RNA, 18 nt, Human
aauauuuuuucuuuucua

SEQ ID NO: 3485235 - RNA, 21 nt, Human
aauauuuuuuuguagaugaaa

SEQ ID NO: 3485236 - RNA, 10 nt, Human
aaucaaaacu

SEQ ID NO: 3485237 - RNA, 18 nt, Human
aaucaaaacucuccuaca

SEQ ID NO: 3485238 - RNA, 15 nt, Human
aaucaaaaucucucc

SEQ ID NO: 3485239 - RNA, 16 nt, Human
aaucaaacauuuucug

SEQ ID NO: 3485240 - RNA, 15 nt, Human
aaucaaacauuuuga

SEQ ID NO: 3485241 - RNA, 18 nt, Human
aaucaaagcaaugcauuu

SEQ ID NO: 3485242 - RNA, 17 nt, Human
aaucaaagccagggucu

SEQ ID NO: 3485243 - RNA, 13 nt, Human
aaucaaagugcua

SEQ ID NO: 3485244 - RNA, 14 nt, Human
aaucaaauguaaag

SEQ ID NO: 3485245 - RNA, 19 nt, Human
aaucaaauuuguaggguuu

SEQ ID NO: 3485246 - RNA, 15 nt, Human
aaucaacagggcagc

SEQ ID NO: 3485247 - RNA, 14 nt, Human
aaucaacucuaaua

SEQ ID NO: 3485248 - RNA, 17 nt, Human
aaucaacugaaaguguu

SEQ ID NO: 3485249 - RNA, 18 nt, Human
aaucaacugaaaguguuu

SEQ ID NO: 3485250 - RNA, 19 nt, Human
aaucaacugggcugaacac

SEQ ID NO: 3485251 - RNA, 13 nt, Human
aaucaacuugcuu

SEQ ID NO: 3485252 - RNA, 15 nt, Human
aaucaacuugcuuau

SEQ ID NO: 3485253 - RNA, 18 nt, Human
aaucaacuuuuuauugcc

SEQ ID NO: 3485254 - RNA, 20 nt, Human
aaucaacuuuuuauugccuu

SEQ ID NO: 3485255 - RNA, 21 nt, Human
aaucaacuuuuuauugccuuc

SEQ ID NO: 3485256 - RNA, 23 nt, Human
aaucaacuuuuuauugccuucuc

SEQ ID NO: 3485257 - RNA, 14 nt, Human
aaucaagaaacaaa

SEQ ID NO: 3485258 - RNA, 15 nt, Human
aaucaagaaacuuaa

SEQ ID NO: 3485259 - RNA, 17 nt, Human
aaucaagagccuuaaaa

SEQ ID NO: 3485260 - RNA, 21 nt, Human
aaucaagagccuuaaaacauc

SEQ ID NO: 3485261 - RNA, 16 nt, Human
aaucaagagcugcccu

SEQ ID NO: 3485262 - RNA, 11 nt, Human
aaucaagauaa

SEQ ID NO: 3485263 - RNA, 18 nt, Human
aaucaagcagguuagaga

SEQ ID NO: 3485264 - RNA, 13 nt, Human
aaucaagccucug

SEQ ID NO: 3485265 - RNA, 23 nt, Human
aaucaagccucuggucacauggc

SEQ ID NO: 3485266 - RNA, 23 nt, Human
aaucaagggcaaaaagucuacau

SEQ ID NO: 3485267 - RNA, 14 nt, Human
aaucaagggucagg

SEQ ID NO: 3485268 - RNA, 14 nt, Human
aaucaaguaaugaa

SEQ ID NO: 3485269 - RNA, 17 nt, Human
aaucaaguauuauaaac

SEQ ID NO: 3485270 - RNA, 14 nt, Human
aaucaaguauuuug

SEQ ID NO: 3485271 - RNA, 15 nt, Human
aaucaaguauuuugu

SEQ ID NO: 3485272 - RNA, 15 nt, Human
aaucaagucuguuua

SEQ ID NO: 3485273 - RNA, 22 nt, Human
aaucaaguuggcuucuaaucaa

SEQ ID NO: 3485274 - RNA, 20 nt, Human
aaucaaguuuccaagcaaau

SEQ ID NO: 3485275 - RNA, 16 nt, Human
aaucaauaaacgauuu

SEQ ID NO: 3485276 - RNA, 17 nt, Human
aaucaauaacagccgcu

SEQ ID NO: 3485277 - RNA, 18 nt, Human
aaucaauacacuaguugu

SEQ ID NO: 3485278 - RNA, 19 nt, Human
aaucaauacacuaguuguu

SEQ ID NO: 3485279 - RNA, 18 nt, Human
aauguauugaacuuggaa

SEQ ID NO: 3485280 - RNA, 19 nt, Human
aauguauugaacuuggaaa

SEQ ID NO: 3485281 - RNA, 14 nt, Human
aauguauuguaccu

SEQ ID NO: 3485282 - RNA, 16 nt, Human
aauguauuguaccuuu

SEQ ID NO: 3485283 - RNA, 22 nt, Human
aauguauuguaccuuuuaacac

SEQ ID NO: 3485284 - RNA, 21 nt, Human
aauguauuuauuuaaaagauu

SEQ ID NO: 3485285 - RNA, 14 nt, Human
aauguauuuguuca

SEQ ID NO: 3485286 - RNA, 15 nt, Human
aauguauuuguucau

SEQ ID NO: 3485287 - RNA, 17 nt, Human
aauguauuuguucaugu

SEQ ID NO: 3485288 - RNA, 18 nt, Human
aauguauuuguucauguu

SEQ ID NO: 3485289 - RNA, 21 nt, Human
aauguauuuguucauguuugg

SEQ ID NO: 3485290 - RNA, 15 nt, Human
aauguauuuuauguu

SEQ ID NO: 3485291 - RNA, 19 nt, Human
aauguauuuuauguuauau

SEQ ID NO: 3485292 - RNA, 16 nt, Human
aauguauuuuauugua

SEQ ID NO: 3485293 - RNA, 13 nt, Human
aauguauuuucuu

SEQ ID NO: 3485294 - RNA, 14 nt, Human
aauguauuuuuccu

SEQ ID NO: 3485295 - RNA, 15 nt, Human
aaugucaaaaguaga

SEQ ID NO: 3485296 - RNA, 19 nt, Human
aaugucaaaaguagaacuu

SEQ ID NO: 3485297 - RNA, 23 nt, Human
aaugucaaaaguagaacuuugua

SEQ ID NO: 3485298 - RNA, 13 nt, Human
aaugucacaggca

SEQ ID NO: 3485299 - RNA, 19 nt, Human
aaugucacaggcaggucca

SEQ ID NO: 3485300 - RNA, 19 nt, Human
aaugucacguacugucuga

SEQ ID NO: 3485301 - RNA, 20 nt, Human
aaugucacguacugucugau

SEQ ID NO: 3485302 - RNA, 18 nt, Human
aaugucagaaaaacaaua

SEQ ID NO: 3485303 - RNA, 22 nt, Human
aaugucagaaaaacaauaagag

SEQ ID NO: 3485304 - RNA, 18 nt, Human
aaugucaggaacagaagg

SEQ ID NO: 3485305 - RNA, 20 nt, Human
aaugucaggaacagaaggau

SEQ ID NO: 3485306 - RNA, 15 nt, Human
aaugucaguaugugg

SEQ ID NO: 3485307 - RNA, 22 nt, Human
aaugucaguauguggaagugug

SEQ ID NO: 3485308 - RNA, 13 nt, Human
aaugucaguguga

SEQ ID NO: 3485309 - RNA, 21 nt, Human
aaugucagugugacugaucuc

SEQ ID NO: 3485310 - RNA, 22 nt, Human
aaugucaguuguuauuuauuga

SEQ ID NO: 3485311 - RNA, 17 nt, Human
aaugucaucagaacuuu

SEQ ID NO: 3485312 - RNA, 15 nt, Human
aaugucaugcugccu

SEQ ID NO: 3485313 - RNA, 19 nt, Human
aaugucauuaaaauaaaua

SEQ ID NO: 3485314 - RNA, 23 nt, Human
aauguccaacuaaaaacaaaccc

SEQ ID NO: 3485315 - RNA, 15 nt, Human
aauguccauaugcua

SEQ ID NO: 3485316 - RNA, 18 nt, Human
aauguccaugauggaaua

SEQ ID NO: 3485317 - RNA, 18 nt, Human
aauguccauucuuuauca

SEQ ID NO: 3485318 - RNA, 23 nt, Human
aauguccuccagaagccucuggc

SEQ ID NO: 3485319 - RNA, 19 nt, Human
aaugucuaauguauuuuau

SEQ ID NO: 3485320 - RNA, 22 nt, Human
aaugucuaguuguaacaccaug

SEQ ID NO: 3485321 - RNA, 14 nt, Human
aaugucuauuaagg

SEQ ID NO: 3485322 - RNA, 20 nt, Human
aaugucucaaggcaguuaau

SEQ ID NO: 3485323 - RNA, 22 nt, Human
aaugucucacugagcacuguuu

SEQ ID NO: 3485324 - RNA, 13 nt, Human
aaugucuccuccc

SEQ ID NO: 3485325 - RNA, 17 nt, Human
aaugucucugugagacu

SEQ ID NO: 3485326 - RNA, 18 nt, Human
aaugucucugugagacuc

SEQ ID NO: 3485327 - RNA, 15 nt, Human
aaugucugcagcccu

SEQ ID NO: 3485328 - RNA, 22 nt, Human
aaugucuggagaauaauucuuu

SEQ ID NO: 3485329 - RNA, 23 nt, Human
aaugucuguagcuccucaacuca

SEQ ID NO: 3485330 - RNA, 18 nt, Human
aaugucuuaauuuuugaa

SEQ ID NO: 3485331 - RNA, 15 nt, Human
aaugucuucaaggcu

SEQ ID NO: 3485332 - RNA, 19 nt, Human
aaugucuucaaggcuucag

SEQ ID NO: 3485333 - RNA, 17 nt, Human
aaugucuucuagaauau

SEQ ID NO: 3485334 - RNA, 13 nt, Human
aaugucuugagcu

SEQ ID NO: 3485335 - RNA, 17 nt, Human
aaugucuugagcucuau

SEQ ID NO: 3485336 - RNA, 20 nt, Human
aaucagccaauuauguuaaa

SEQ ID NO: 3485337 - RNA, 23 nt, Human
aaucagccuaggggucagggacc

SEQ ID NO: 3485338 - RNA, 11 nt, Human
aaucagccugc

SEQ ID NO: 3485339 - RNA, 23 nt, Human
aaucagcuauuuacugccaaagg

SEQ ID NO: 3485340 - RNA, 13 nt, Human
aaucagcugcuuu

SEQ ID NO: 3485341 - RNA, 16 nt, Human
aaucagcugcuuuguu

SEQ ID NO: 3485342 - RNA, 20 nt, Human
aaucaggaauauuuuccaaa

SEQ ID NO: 3485343 - RNA, 16 nt, Human
aaucaggguuaguauu

SEQ ID NO: 3485344 - RNA, 18 nt, Human
aaucagguccugcucagc

SEQ ID NO: 3485345 - RNA, 14 nt, Human
aaucaguaaacacu

SEQ ID NO: 3485346 - RNA, 16 nt, Human
aaucaguaaacacugu

SEQ ID NO: 3485347 - RNA, 21 nt, Human
aaucaguaauauuuauauauu

SEQ ID NO: 3485348 - RNA, 21 nt, Human
aaucaguagcuuaagaaaaaa

SEQ ID NO: 3485349 - RNA, 14 nt, Human
aaucaguauaaaca

SEQ ID NO: 3485350 - RNA, 14 nt, Human
aaucaguauaauuc

SEQ ID NO: 3485351 - RNA, 14 nt, Human
aaucaguccccucc

SEQ ID NO: 3485352 - RNA, 16 nt, Human
aaucaguccccuccca

SEQ ID NO: 3485353 - RNA, 17 nt, Human
aaucaguccccucccau

SEQ ID NO: 3485354 - RNA, 18 nt, Human
aaucaguccccucccauc

SEQ ID NO: 3485355 - RNA, 17 nt, Human
aaucagugugucuaaau

SEQ ID NO: 3485356 - RNA, 23 nt, Human
aaucaguucauuagaaauauuuu

SEQ ID NO: 3485357 - RNA, 13 nt, Human
aaucauaaaacuu

SEQ ID NO: 3485358 - RNA, 16 nt, Human
aaucauaguuacugug

SEQ ID NO: 3485359 - RNA, 17 nt, Human
aaucauaguuacugugu

SEQ ID NO: 3485360 - RNA, 20 nt, Human
aaucauauaaauagaaugua

SEQ ID NO: 3485361 - RNA, 21 nt, Human
aaucauauaaauagaauguaa

SEQ ID NO: 3485362 - RNA, 22 nt, Human
aaucauauaaauagaauguaaa

SEQ ID NO: 3485363 - RNA, 13 nt, Human
aaucauauauaau

SEQ ID NO: 3485364 - RNA, 14 nt, Human
aaucauaugauucu

SEQ ID NO: 3485365 - RNA, 13 nt, Human
aaucauaugugau

SEQ ID NO: 3485366 - RNA, 23 nt, Human
aaucauaugugaucugucuugua

SEQ ID NO: 3485367 - RNA, 19 nt, Human
aaucauauuaauacaauga

SEQ ID NO: 3485368 - RNA, 14 nt, Human
aaucauauugauga

SEQ ID NO: 3485369 - RNA, 18 nt, Human
aaucauauugaugaaaag

SEQ ID NO: 3485370 - RNA, 12 nt, Human
aaucaucaagaa

SEQ ID NO: 3485371 - RNA, 20 nt, Human
aaucauccauccuugccaau

SEQ ID NO: 3485372 - RNA, 16 nt, Human
aaucaucgaaaauuca

SEQ ID NO: 3485373 - RNA, 19 nt, Human
aaucaucgaaaauucauuu

SEQ ID NO: 3485374 - RNA, 21 nt, Human
aaucaucgaaaauucauuuca

SEQ ID NO: 3485375 - RNA, 24 nt, Human
aaucaucggagucagccaggagcu

SEQ ID NO: 3485376 - RNA, 23 nt, Human
aaucaucuauuuugaugcagcau

SEQ ID NO: 3485377 - RNA, 18 nt, Human
aaucaucugugugaaaau

SEQ ID NO: 3485378 - RNA, 16 nt, Human
aaucaugaaauaugca

SEQ ID NO: 3485379 - RNA, 15 nt, Human
aaucaugaauuaguu

SEQ ID NO: 3485380 - RNA, 19 nt, Human
aaucaugaauuaguuuuau

SEQ ID NO: 3485381 - RNA, 16 nt, Human
aaucaugagccugcug

SEQ ID NO: 3485382 - RNA, 15 nt, Human
aaucaugccaguauu

SEQ ID NO: 3485383 - RNA, 12 nt, Human
aaucaugugugu

SEQ ID NO: 3485384 - RNA, 13 nt, Human
aaucauguguguu

SEQ ID NO: 3485385 - RNA, 13 nt, Human
aaucauguuauga

SEQ ID NO: 3485386 - RNA, 22 nt, Human
aaucauguugaucauguacuuu

SEQ ID NO: 3485387 - RNA, 23 nt, Human
aaucauguugaucauguacuuuu

SEQ ID NO: 3485388 - RNA, 13 nt, Human
aaucauguuucuu

SEQ ID NO: 3485389 - RNA, 19 nt, Human
aaucauguuucuuugauca

SEQ ID NO: 3485390 - RNA, 20 nt, Human
aaucauuauuuauuaaauuu

SEQ ID NO: 3485391 - RNA, 22 nt, Human
aaucauuauuuauuaaauuuuu

SEQ ID NO: 3485392 - RNA, 13 nt, Human
aaucauucagaaa

SEQ ID NO: 3485393 - RNA, 15 nt, Human
aaucauucucgauuu

SEQ ID NO: 3485394 - RNA, 17 nt, Human
aaucauucucgauuuaa

SEQ ID NO: 3485395 - RNA, 18 nt, Human
aaucauucuuacuaaaaa

SEQ ID NO: 3485396 - RNA, 12 nt, Human
aaucauugcuua

SEQ ID NO: 3485397 - RNA, 14 nt, Human
aaucauugcuuuga

SEQ ID NO: 3485398 - RNA, 19 nt, Human
aaucauugcuuugaagcag

SEQ ID NO: 3485399 - RNA, 22 nt, Human
aaucauugcuuugaagcaguug

SEQ ID NO: 3485400 - RNA, 15 nt, Human
aaucauuguacaguu

SEQ ID NO: 3485401 - RNA, 17 nt, Human
aaucauuguacaguuug

SEQ ID NO: 3485402 - RNA, 20 nt, Human
aaucauuguacaguuuguuu

SEQ ID NO: 3485403 - RNA, 14 nt, Human
aaucauuguugccu

SEQ ID NO: 3485404 - RNA, 18 nt, Human
aaucauuguuuugaauau

SEQ ID NO: 3485405 - RNA, 15 nt, Human
aaucauuuguuuaaa

SEQ ID NO: 3485406 - RNA, 22 nt, Human
aaucauuuuaauuauuauucuu

SEQ ID NO: 3485407 - RNA, 19 nt, Human
aaucauuuuauaugucaaa

SEQ ID NO: 3485408 - RNA, 20 nt, Human
aaucauuuuauaugucaaag

SEQ ID NO: 3485409 - RNA, 17 nt, Human
aaucauuuucauuccua

SEQ ID NO: 3485410 - RNA, 17 nt, Human
aauccaagcaaauguga

SEQ ID NO: 3485411 - RNA, 18 nt, Human
aauccaagcaaaugugaa

SEQ ID NO: 3485412 - RNA, 18 nt, Human
aauccaagcucccugccc

SEQ ID NO: 3485413 - RNA, 20 nt, Human
aauccaagcucccugcccca

SEQ ID NO: 3485414 - RNA, 15 nt, Human
aauccaaugaaauga

SEQ ID NO: 3485415 - RNA, 16 nt, Human
aauccacauuucuaaa

SEQ ID NO: 3485416 - RNA, 23 nt, Human
aauccacccauccuaccaaugca

SEQ ID NO: 3485417 - RNA, 19 nt, Human
aauccagaaacuuguucuu

SEQ ID NO: 3485418 - RNA, 18 nt, Human
aauccagcgguucucaaa

SEQ ID NO: 3485419 - RNA, 16 nt, Human
aauccaggcacagcug

SEQ ID NO: 3485420 - RNA, 21 nt, Human
aauccaggcagauccaggacu

SEQ ID NO: 3485421 - RNA, 17 nt, Human
aauccagugaccucucu

SEQ ID NO: 3485422 - RNA, 13 nt, Human
aauccaguuauaa

SEQ ID NO: 3485423 - RNA, 16 nt, Human
aauccaguuauaagaa

SEQ ID NO: 3485424 - RNA, 19 nt, Human
aauccaguuauaagaagaa

SEQ ID NO: 3485425 - RNA, 19 nt, Human
aauccauguuaguuuuuac

SEQ ID NO: 3485426 - RNA, 15 nt, Human
aauccauuuggaaau

SEQ ID NO: 3485427 - RNA, 18 nt, Human
aauccauuuggaaaucuu

SEQ ID NO: 3485428 - RNA, 21 nt, Human
aaucccaaauuugauugauuu

SEQ ID NO: 3485429 - RNA, 20 nt, Human
aaucccaagaucugugcagc

SEQ ID NO: 3485430 - RNA, 18 nt, Human
aaucccacccacauguga

SEQ ID NO: 3485431 - RNA, 23 nt, Human
aaucccagccggccaauggaaac

SEQ ID NO: 3485432 - RNA, 18 nt, Human
aaucccagcuacucagga

SEQ ID NO: 3485433 - RNA, 12 nt, Human
aaucccaggaug

SEQ ID NO: 3485434 - RNA, 17 nt, Human
aaucccauuuaaaaaaa

SEQ ID NO: 3485435 - RNA, 16 nt, Human
aauccccaguaaaauu

SEQ ID NO: 3485436 - RNA, 17 nt, Human
aauccccaguaaaauug

SEQ ID NO: 3485437 - RNA, 21 nt, Human
aaggccuggggugacccggca

SEQ ID NO: 3485438 - RNA, 23 nt, Human
aaggccugucccuggccaucucu

SEQ ID NO: 3485439 - RNA, 16 nt, Human
aaggccuuuaaaauuu

SEQ ID NO: 3485440 - RNA, 19 nt, Human
aaggcguggagcugccuga

SEQ ID NO: 3485441 - RNA, 13 nt, Human
aaggcuaaaaagu

SEQ ID NO: 3485442 - RNA, 19 nt, Human
aaggcuaccuuuguauucu

SEQ ID NO: 3485443 - RNA, 15 nt, Human
aaggcuauacuuguc

SEQ ID NO: 3485444 - RNA, 23 nt, Human
aaggcuauggggauagaugugug

SEQ ID NO: 3485445 - RNA, 17 nt, Human
aaggcucagucucagga

SEQ ID NO: 3485446 - RNA, 14 nt, Human
aaggcuccaggagc

SEQ ID NO: 3485447 - RNA, 15 nt, Human
aaggcuccugccccc

SEQ ID NO: 3485448 - RNA, 19 nt, Human
aaggcucgagcaugccugg

SEQ ID NO: 3485449 - RNA, 22 nt, Human
aaggcucgauuuuguaucugca

SEQ ID NO: 3485450 - RNA, 17 nt, Human
aaggcucugaaagccag

SEQ ID NO: 3485451 - RNA, 17 nt, Human
aaggcucugagagucua

SEQ ID NO: 3485452 - RNA, 22 nt, Human
aaggcucugagagucuagauuc

SEQ ID NO: 3485453 - RNA, 16 nt, Human
aaggcucuucugacua

SEQ ID NO: 3485454 - RNA, 22 nt, Human
aaggcugagacagugaauuugg

SEQ ID NO: 3485455 - RNA, 23 nt, Human
aaggcugagacagugaauuuggg

SEQ ID NO: 3485456 - RNA, 19 nt, Human
aaggcugaggaaaggccag

SEQ ID NO: 3485457 - RNA, 23 nt, Human
aaggcugaugccaaguuguuuga

SEQ ID NO: 3485458 - RNA, 16 nt, Human
aaggcugaugucaauu

SEQ ID NO: 3485459 - RNA, 16 nt, Human
aaggcugcgucuggag

SEQ ID NO: 3485460 - RNA, 19 nt, Human
aaggcugcgucuggagggg

SEQ ID NO: 3485461 - RNA, 13 nt, Human
aaggcuggcaggu

SEQ ID NO: 3485462 - RNA, 20 nt, Human
aaggcuggcgagagucuggc

SEQ ID NO: 3485463 - RNA, 22 nt, Human
aaggcuggcgagagucuggccc

SEQ ID NO: 3485464 - RNA, 14 nt, Human
aaggcugggggaag

SEQ ID NO: 3485465 - RNA, 22 nt, Human
aaggcugguacaacggaggccu

SEQ ID NO: 3485466 - RNA, 14 nt, Human
aaggcuguguaaga

SEQ ID NO: 3485467 - RNA, 16 nt, Human
aaggcuguguaagauu

SEQ ID NO: 3485468 - RNA, 21 nt, Human
aaggcuguuaaauacaggaaa

SEQ ID NO: 3485469 - RNA, 13 nt, Human
aaggcuguuugcu

SEQ ID NO: 3485470 - RNA, 15 nt, Human
aaggcuuaaacccau

SEQ ID NO: 3485471 - RNA, 19 nt, Human
aaggcuucaauuuauugca

SEQ ID NO: 3485472 - RNA, 15 nt, Human
aaggcuucagucuca

SEQ ID NO: 3485473 - RNA, 12 nt, Human
aaggcuucucuc

SEQ ID NO: 3485474 - RNA, 15 nt, Human
aaggcuucucucuca

SEQ ID NO: 3485475 - RNA, 15 nt, Human
aaggcuugcugcaga

SEQ ID NO: 3485476 - RNA, 14 nt, Human
aaggcuugggauuu

SEQ ID NO: 3485477 - RNA, 17 nt, Human
aaggcuuguugugcuuu

SEQ ID NO: 3485478 - RNA, 19 nt, Human
aaggcuuguugugcuuuua

SEQ ID NO: 3485479 - RNA, 20 nt, Human
aaggcuuguugugcuuuuag

SEQ ID NO: 3485480 - RNA, 18 nt, Human
agcaccacucaagaccaa

SEQ ID NO: 3485481 - RNA, 19 nt, Human
agcaccagcuucuccaggc

SEQ ID NO: 3485482 - RNA, 17 nt, Human
agcaccagggcucacgu

SEQ ID NO: 3485483 - RNA, 20 nt, Human
agcaccauccgccagggccc

SEQ ID NO: 3485484 - RNA, 20 nt, Human
agcaccauuuuaagucccug

SEQ ID NO: 3485485 - RNA, 23 nt, Human
agcaccauuuuaagucccuguca

SEQ ID NO: 3485486 - RNA, 23 nt, Human
agcacccauccaccguccccucc

SEQ ID NO: 3485487 - RNA, 15 nt, Human
agcaccccucucugc

SEQ ID NO: 3485488 - RNA, 18 nt, Human
agcaccggaccagccugg

SEQ ID NO: 3485489 - RNA, 20 nt, Human
agcaccgugucaagcugcuc

SEQ ID NO: 3485490 - RNA, 22 nt, Human
agcaccuacaguguacagucuu

SEQ ID NO: 3485491 - RNA, 16 nt, Human
agcaccucagccugca

SEQ ID NO: 3485492 - RNA, 14 nt, Human
agcaccuccagccu

SEQ ID NO: 3485493 - RNA, 22 nt, Human
agcaccucccagccccugcccc

SEQ ID NO: 3485494 - RNA, 18 nt, Human
agcaccuccucagccuga

SEQ ID NO: 3485495 - RNA, 13 nt, Human
agcaccuccugcc

SEQ ID NO: 3485496 - RNA, 19 nt, Human
agcaccuccuugucacuuu

SEQ ID NO: 3485497 - RNA, 21 nt, Human
agcaccugccuccucguuccu

SEQ ID NO: 3485498 - RNA, 14 nt, Human
agcaccugcugucu

SEQ ID NO: 3485499 - RNA, 14 nt, Human
agcaccuguaagaa

SEQ ID NO: 3485500 - RNA, 22 nt, Human
agcaccuuagacagucccugcc

SEQ ID NO: 3485501 - RNA, 20 nt, Human
agcaccuuccucacuuccau

SEQ ID NO: 3485502 - RNA, 16 nt, Human
agcaccuugugccugg

SEQ ID NO: 3485503 - RNA, 18 nt, Human
agcacgaaauguuauuuu

SEQ ID NO: 3485504 - RNA, 17 nt, Human
agcacgacaguggaugc

SEQ ID NO: 3485505 - RNA, 15 nt, Human
agcacgauuucuguu

SEQ ID NO: 3485506 - RNA, 16 nt, Human
agcacgauuucuguuu

SEQ ID NO: 3485507 - RNA, 15 nt, Human
agcacggacaauaaa

SEQ ID NO: 3485508 - RNA, 17 nt, Human
agcacggacaauaaacc

SEQ ID NO: 3485509 - RNA, 20 nt, Human
agcacggccaacaaagcugu

SEQ ID NO: 3485510 - RNA, 17 nt, Human
agcacguuuaaaguucu

SEQ ID NO: 3485511 - RNA, 18 nt, Human
agcacguuuaaaguucug

SEQ ID NO: 3485512 - RNA, 13 nt, Human
agcacuaaagcag

SEQ ID NO: 3485513 - RNA, 17 nt, Human
agcacuaaagcagugga

SEQ ID NO: 3485514 - RNA, 18 nt, Human
agcacuacaccuugccuu

SEQ ID NO: 3485515 - RNA, 15 nt, Human
acugcauguuuguga

SEQ ID NO: 3485516 - RNA, 22 nt, Human
acugcauuaccgcguuguaaaa

SEQ ID NO: 3485517 - RNA, 23 nt, Human
acugcauuaccgcguuguaaaau

SEQ ID NO: 3485518 - RNA, 15 nt, Human
acugcauuauucucu

SEQ ID NO: 3485519 - RNA, 15 nt, Human
acugcauugagaacu

SEQ ID NO: 3485520 - RNA, 19 nt, Human
acugcauuuagggaguauu

SEQ ID NO: 3485521 - RNA, 14 nt, Human
acugccaaccucgc

SEQ ID NO: 3485522 - RNA, 14 nt, Human
acugccaaccuggg

SEQ ID NO: 3485523 - RNA, 17 nt, Human
acugccaacugaucugu

SEQ ID NO: 3485524 - RNA, 16 nt, Human
acugccaagacugcug

SEQ ID NO: 3485525 - RNA, 19 nt, Human
acugccaagacugcugugg

SEQ ID NO: 3485526 - RNA, 20 nt, Human
acugccaagacugcuguggc

SEQ ID NO: 3485527 - RNA, 18 nt, Human
acugccaagccaugggua

SEQ ID NO: 3485528 - RNA, 15 nt, Human
acugccacaaggaag

SEQ ID NO: 3485529 - RNA, 18 nt, Human
acugccacaaggaagaaa

SEQ ID NO: 3485530 - RNA, 18 nt, Human
acugccacacucuccauc

SEQ ID NO: 3485531 - RNA, 21 nt, Human
acugccacacucuccaucacc

SEQ ID NO: 3485532 - RNA, 11 nt, Human
acugccaccuc

SEQ ID NO: 3485533 - RNA, 23 nt, Human
acugccaccuccccuugccagcu

SEQ ID NO: 3485534 - RNA, 16 nt, Human
acugccacuuugcaca

SEQ ID NO: 3485535 - RNA, 23 nt, Human
acugccagaugcugauguucagu

SEQ ID NO: 3485536 - RNA, 12 nt, Human
acugccagcagc

SEQ ID NO: 3485537 - RNA, 12 nt, Human
acugccagcauu

SEQ ID NO: 3485538 - RNA, 16 nt, Human
acugccaggccagccu

SEQ ID NO: 3485539 - RNA, 18 nt, Human
acugccaggccagccucc

SEQ ID NO: 3485540 - RNA, 13 nt, Human
acugccaggcucu

SEQ ID NO: 3485541 - RNA, 18 nt, Human
acugccagucccccugcc

SEQ ID NO: 3485542 - RNA, 23 nt, Human
acugccauaaaacauuaagaaaa

SEQ ID NO: 3485543 - RNA, 19 nt, Human
acugccauaugauuuacau

SEQ ID NO: 3485544 - RNA, 16 nt, Human
acugccaugcagggcc

SEQ ID NO: 3485545 - RNA, 14 nt, Human
acugccaugccagc

SEQ ID NO: 3485546 - RNA, 18 nt, Human
acugccauggaggcacac

SEQ ID NO: 3485547 - RNA, 21 nt, Human
acugccauggaggcacacagc

SEQ ID NO: 3485548 - RNA, 18 nt, Human
acugccauuauuuucugu

SEQ ID NO: 3485549 - RNA, 21 nt, Human
acugccauuauuuucugucag

SEQ ID NO: 3485550 - RNA, 14 nt, Human
acugcccaaagugc

SEQ ID NO: 3485551 - RNA, 14 nt, Human
acugcccagcggac

SEQ ID NO: 3485552 - RNA, 22 nt, Human
acugccccccaugaggaaggaa

SEQ ID NO: 3485553 - RNA, 16 nt, Human
acugcccccugcugcc

SEQ ID NO: 3485554 - RNA, 18 nt, Human
acugcccccugcugccau

SEQ ID NO: 3485555 - RNA, 17 nt, Human
acugccccgugcagacu

SEQ ID NO: 3485556 - RNA, 14 nt, Human
acugcccgagcugg

SEQ ID NO: 3485557 - RNA, 16 nt, Human
acugcccgagcuggug

SEQ ID NO: 3485558 - RNA, 18 nt, Human
acugcccgagcuggugca

SEQ ID NO: 3485559 - RNA, 22 nt, Human
acugcccggcaggguccuagaa

SEQ ID NO: 3485560 - RNA, 20 nt, Human
acugcccggggcagcugcca

SEQ ID NO: 3485561 - RNA, 21 nt, Human
acugcccggggcagcugccag

SEQ ID NO: 3485562 - RNA, 19 nt, Human
acugcccuaacuguacauu

SEQ ID NO: 3485563 - RNA, 20 nt, Human
acugcccuccagcucuuucc

SEQ ID NO: 3485564 - RNA, 11 nt, Human
acugcccucug

SEQ ID NO: 3485565 - RNA, 12 nt, Human
acugcccucugu

SEQ ID NO: 3485566 - RNA, 14 nt, Human
acugcccucuguuc

SEQ ID NO: 3485567 - RNA, 12 nt, Human
acugcccuggcu

SEQ ID NO: 3485568 - RNA, 23 nt, Human
acugccgaccgaggcuggagcug

SEQ ID NO: 3485569 - RNA, 15 nt, Human
acugccguaauuuaa

SEQ ID NO: 3485570 - RNA, 16 nt, Human
acugccguaauuuaac

SEQ ID NO: 3485571 - RNA, 17 nt, Human
acugccguaauuuaacu

SEQ ID NO: 3485572 - RNA, 18 nt, Human
acugccgucagugcugug

SEQ ID NO: 3485573 - RNA, 21 nt, Human
acugccuagaaacaacacugu

SEQ ID NO: 3485574 - RNA, 23 nt, Human
acugccuagaaacaacacuguag

SEQ ID NO: 3485575 - RNA, 16 nt, Human
acugccuauuuuaaua

SEQ ID NO: 3485576 - RNA, 12 nt, Human
acugccucaggu

SEQ ID NO: 3485577 - RNA, 13 nt, Human
acugccucagguu

SEQ ID NO: 3485578 - RNA, 21 nt, Human
acugccuccccaaggcccccu

SEQ ID NO: 3485579 - RNA, 17 nt, Human
acugccucgaaacacag

SEQ ID NO: 3485580 - RNA, 22 nt, Human
acugccucgggaaccucacucu

SEQ ID NO: 3485581 - RNA, 15 nt, Human
acugccucucacagc

SEQ ID NO: 3485582 - RNA, 22 nt, Human
acugccucucacagcugaguug

SEQ ID NO: 3485583 - RNA, 13 nt, Human
acugccucucccu

SEQ ID NO: 3485584 - RNA, 16 nt, Human
acugccucucccuggc

SEQ ID NO: 3485585 - RNA, 14 nt, Human
acugccucuuccuc

SEQ ID NO: 3485586 - RNA, 15 nt, Human
acugccugaauaaag

SEQ ID NO: 3485587 - RNA, 17 nt, Human
acugccugaauaaagag

SEQ ID NO: 3485588 - RNA, 19 nt, Human
acugccugaauaaagagcc

SEQ ID NO: 3485589 - RNA, 22 nt, Human
acugccugcagaggucugugcu

SEQ ID NO: 3485590 - RNA, 23 nt, Human
acugccugcagaggucugugcug

SEQ ID NO: 3485591 - RNA, 16 nt, Human
acugccugcccacccg

SEQ ID NO: 3485592 - RNA, 22 nt, Human
acugccugcccacccguggaga

SEQ ID NO: 3485593 - RNA, 14 nt, Human
acugccugccuuaa

SEQ ID NO: 3485594 - RNA, 15 nt, Human
acugccugcucccau

SEQ ID NO: 3485595 - RNA, 13 nt, Human
acugccuguauac

SEQ ID NO: 3485596 - RNA, 14 nt, Human
acugccuguauacu

SEQ ID NO: 3485597 - RNA, 17 nt, Human
acugccuguauacuuua

SEQ ID NO: 3485598 - RNA, 18 nt, Human
acugccuguauacuuuag

SEQ ID NO: 3485599 - RNA, 19 nt, Human
acugccuguauacuuuagu

SEQ ID NO: 3485600 - RNA, 23 nt, Human
acugccuuaauaaaaaaugaaaa

SEQ ID NO: 3485601 - RNA, 13 nt, Human
acugccuucucaa

SEQ ID NO: 3485602 - RNA, 20 nt, Human
acugccuucucaacuccaaa

SEQ ID NO: 3485603 - RNA, 12 nt, Human
acugccuugaaa

SEQ ID NO: 3485604 - RNA, 23 nt, Human
acugccuugaaccugugaguaaa

SEQ ID NO: 3485605 - RNA, 17 nt, Human
acugccuugaauauccc

SEQ ID NO: 3485606 - RNA, 18 nt, Human
acugccuugaauaucccc

SEQ ID NO: 3485607 - RNA, 22 nt, Human
acugccuugaauauccccuccc

SEQ ID NO: 3485608 - RNA, 13 nt, Human
acugccuuugacc

SEQ ID NO: 3485609 - RNA, 18 nt, Human
acugcgacuuucugccug

SEQ ID NO: 3485610 - RNA, 21 nt, Human
acugcgacuuucugccuggag

SEQ ID NO: 3485611 - RNA, 23 nt, Human
acugcgacuuucugccuggagug

SEQ ID NO: 3485612 - RNA, 18 nt, Human
acugcgaucuucagagca

SEQ ID NO: 3485613 - RNA, 20 nt, Human
acugcggaaaaggaaggaaa

SEQ ID NO: 3485614 - RNA, 20 nt, Human
acugcgggaugguccugggg

SEQ ID NO: 3485615 - RNA, 20 nt, Human
acugcguucugcaagcauca

SEQ ID NO: 3485616 - RNA, 17 nt, Human
acugcuaaauaaaauuu

SEQ ID NO: 3485617 - RNA, 23 nt, Human
acugcuacaaauacucuuaggaa

SEQ ID NO: 3485618 - RNA, 20 nt, Human
acugcuaccuuucaaagcuu

SEQ ID NO: 3485619 - RNA, 20 nt, Human
acugcuaggugggccagccc

SEQ ID NO: 3485620 - RNA, 21 nt, Human
acugcuaggugggccagcccc

SEQ ID NO: 3485621 - RNA, 23 nt, Human
acugcuaggugggccagccccuc

SEQ ID NO: 3485622 - RNA, 15 nt, Human
acugcuaguguucug

SEQ ID NO: 3485623 - RNA, 17 nt, Human
acugcuaguguucuguc

SEQ ID NO: 3485624 - RNA, 22 nt, Human
agguucugguuagcucagcccc

SEQ ID NO: 3485625 - RNA, 16 nt, Human
agguucuucuuccuga

SEQ ID NO: 3485626 - RNA, 21 nt, Human
agguucuucuuccugaagcug

SEQ ID NO: 3485627 - RNA, 19 nt, Human
agguucuucuuguucugag

SEQ ID NO: 3485628 - RNA, 17 nt, Human
agguucuuguuggugca

SEQ ID NO: 3485629 - RNA, 18 nt, Human
agguucuuguuggugcac

SEQ ID NO: 3485630 - RNA, 15 nt, Human
agguugaagccaagu

SEQ ID NO: 3485631 - RNA, 15 nt, Human
agguugaauaauaua

SEQ ID NO: 3485632 - RNA, 21 nt, Human
agguugacaauaaaugugcuu

SEQ ID NO: 3485633 - RNA, 20 nt, Human
agguugaggggcuccuggaa

SEQ ID NO: 3485634 - RNA, 12 nt, Human
agguugauaaau

SEQ ID NO: 3485635 - RNA, 20 nt, Human
agguugauaaaucauuuuau

SEQ ID NO: 3485636 - RNA, 22 nt, Human
agguugauaaaucauuuuaugu

SEQ ID NO: 3485637 - RNA, 18 nt, Human
agguugauaacuuugcuu

SEQ ID NO: 3485638 - RNA, 20 nt, Human
agguugauaacuuugcuugc

SEQ ID NO: 3485639 - RNA, 13 nt, Human
agguugcacacuu

SEQ ID NO: 3485640 - RNA, 16 nt, Human
agguugcacacuuugg

SEQ ID NO: 3485641 - RNA, 19 nt, Human
agguugcagugagccaaga

SEQ ID NO: 3485642 - RNA, 17 nt, Human
agguugcagugagcuga

SEQ ID NO: 3485643 - RNA, 18 nt, Human
agguugcagugagcugag

SEQ ID NO: 3485644 - RNA, 14 nt, Human
agguuggaagagaa

SEQ ID NO: 3485645 - RNA, 19 nt, Human
agguuggcucugccagucc

SEQ ID NO: 3485646 - RNA, 19 nt, Human
agguugggagccaaaugug

SEQ ID NO: 3485647 - RNA, 14 nt, Human
agguuguagcaugg

SEQ ID NO: 3485648 - RNA, 12 nt, Human
agguugugaaug

SEQ ID NO: 3485649 - RNA, 16 nt, Human
agguuuaaagagucua

SEQ ID NO: 3485650 - RNA, 14 nt, Human
agguuuaaaugaac

SEQ ID NO: 3485651 - RNA, 17 nt, Human
agguuuaacucagauca

SEQ ID NO: 3485652 - RNA, 18 nt, Human
agguuuaacucagaucac

SEQ ID NO: 3485653 - RNA, 19 nt, Human
agguuuaaguagauuucau

SEQ ID NO: 3485654 - RNA, 18 nt, Human
agguuuacaauuuacaaa

SEQ ID NO: 3485655 - RNA, 18 nt, Human
agguuuaggcugguggcc

SEQ ID NO: 3485656 - RNA, 14 nt, Human
agguuuaugaaaaa

SEQ ID NO: 3485657 - RNA, 12 nt, Human
agguuuaugaca

SEQ ID NO: 3485658 - RNA, 22 nt, Human
agguuuaugacaguaauugugu

SEQ ID NO: 3485659 - RNA, 20 nt, Human
agguuucacuguguuggcca

SEQ ID NO: 3485660 - RNA, 12 nt, Human
agguuucauacu

SEQ ID NO: 3485661 - RNA, 16 nt, Human
agguuucccaauggug

SEQ ID NO: 3485662 - RNA, 18 nt, Human
agguuucccaaugguguu

SEQ ID NO: 3485663 - RNA, 19 nt, Human
agguuucugaguuccugca

SEQ ID NO: 3485664 - RNA, 22 nt, Human
agguuucuggucucuaggcugg

SEQ ID NO: 3485665 - RNA, 18 nt, Human
agguuugcagucccaagc

SEQ ID NO: 3485666 - RNA, 20 nt, Human
agguuuggcuccugcccacu

SEQ ID NO: 3485667 - RNA, 21 nt, Human
agguuugggaccccugguggu

SEQ ID NO: 3485668 - RNA, 20 nt, Human
agguuuguauauugucagau

SEQ ID NO: 3485669 - RNA, 23 nt, Human
agguuugucgggcaccagccagc

SEQ ID NO: 3485670 - RNA, 10 nt, Human
agguuuguga

SEQ ID NO: 3485671 - RNA, 20 nt, Human
agguuuuaauuuaguaaacc

SEQ ID NO: 3485672 - RNA, 15 nt, Human
agguuuuagguucua

SEQ ID NO: 3485673 - RNA, 16 nt, Human
agguuuuagguucuaa

SEQ ID NO: 3485674 - RNA, 17 nt, Human
agguuuuauaaggcuga

SEQ ID NO: 3485675 - RNA, 20 nt, Human
agguuuuauuucauuuuuca

SEQ ID NO: 3485676 - RNA, 14 nt, Human
agguuuuauuuugu

SEQ ID NO: 3485677 - RNA, 14 nt, Human
agguuuucuccacu

SEQ ID NO: 3485678 - RNA, 13 nt, Human
agguuuuguacaa

SEQ ID NO: 3485679 - RNA, 12 nt, Human
agguuuuguugu

SEQ ID NO: 3485680 - RNA, 17 nt, Human
agguuuuguuugcuauc

SEQ ID NO: 3485681 - RNA, 23 nt, Human
agguuuuguuugcuaucuuaauu

SEQ ID NO: 3485682 - RNA, 13 nt, Human
agguuuuuauuag

SEQ ID NO: 3485683 - RNA, 15 nt, Human
agguuuuuauuagua

SEQ ID NO: 3485684 - RNA, 21 nt, Human
agguuuuucaauuaaacggau

SEQ ID NO: 3485685 - RNA, 20 nt, Human
agguuuuuccuuauuugcuu

SEQ ID NO: 3485686 - RNA, 13 nt, Human
agguuuuucuuaa

SEQ ID NO: 3485687 - RNA, 19 nt, Human
agguuuuuguuuguuuccu

SEQ ID NO: 3485688 - RNA, 21 nt, Human
agguuuuuuuguauaguaaag

SEQ ID NO: 3485689 - RNA, 22 nt, Human
agguuuuuuuguauaguaaagu

SEQ ID NO: 3485690 - RNA, 19 nt, Human
aguaaaaaacaacuucuuu

SEQ ID NO: 3485691 - RNA, 12 nt, Human
aguaaaaauaaa

SEQ ID NO: 3485692 - RNA, 19 nt, Human
aguaaaaauacaaaaauua

SEQ ID NO: 3485693 - RNA, 16 nt, Human
aguaaaacaaacaaua

SEQ ID NO: 3485694 - RNA, 19 nt, Human
aguaaaacaaacaauaccu

SEQ ID NO: 3485695 - RNA, 13 nt, Human
aguaaaacacaga

SEQ ID NO: 3485696 - RNA, 20 nt, Human
aguaaaaccacagcaguuga

SEQ ID NO: 3485697 - RNA, 14 nt, Human
aguaaaacuugcug

SEQ ID NO: 3485698 - RNA, 23 nt, Human
aguaaaagaagaaauaguucugu

SEQ ID NO: 3485699 - RNA, 19 nt, Human
aguaaaauaaauauugucu

SEQ ID NO: 3485700 - RNA, 13 nt, Human
aguaaaauccaca

SEQ ID NO: 3485701 - RNA, 21 nt, Human
aguaaaauuauacugugugug

SEQ ID NO: 3485702 - RNA, 14 nt, Human
aguaaaauucaguu

SEQ ID NO: 3485703 - RNA, 23 nt, Human
aguaaacaauaaaaguguccauu

SEQ ID NO: 3485704 - RNA, 13 nt, Human
aguaaacacugug

SEQ ID NO: 3485705 - RNA, 16 nt, Human
aguaaacacuguguau

SEQ ID NO: 3485706 - RNA, 15 nt, Human
aguaaaccacugaaa

SEQ ID NO: 3485707 - RNA, 15 nt, Human
aguaaaccugucuga

SEQ ID NO: 3485708 - RNA, 21 nt, Human
aguaaacgggaacaugccccc

SEQ ID NO: 3485709 - RNA, 15 nt, Human
aguaaacugcagucc

SEQ ID NO: 3485710 - RNA, 16 nt, Human
aguaaagaauuauuuu

SEQ ID NO: 3485711 - RNA, 13 nt, Human
aguaaagagaaac

SEQ ID NO: 3485712 - RNA, 22 nt, Human
aguaaagagaaacuuugugcua

SEQ ID NO: 3485713 - RNA, 18 nt, Human
aguaaagccguuguuuac

SEQ ID NO: 3485714 - RNA, 19 nt, Human
aguaaaggaguaagaaccu

SEQ ID NO: 3485715 - RNA, 16 nt, Human
aguaaagguuaaaaau

SEQ ID NO: 3485716 - RNA, 15 nt, Human
aguaaaguguaacau

SEQ ID NO: 3485717 - RNA, 15 nt, Human
aguaaauaaauuguu

SEQ ID NO: 3485718 - RNA, 18 nt, Human
aguaaauaaauuguuuga

SEQ ID NO: 3485719 - RNA, 19 nt, Human
aguaaauaaauuguuugac

SEQ ID NO: 3485720 - RNA, 14 nt, Human
aguaaauaaugcuu

SEQ ID NO: 3485721 - RNA, 15 nt, Human
aguaaauacaauuuu

SEQ ID NO: 3485722 - RNA, 13 nt, Human
aguaaauauugag

SEQ ID NO: 3485723 - RNA, 14 nt, Human
aguaaauauuucag

SEQ ID NO: 3485724 - RNA, 20 nt, Human
aguaaaucacgcuuuuugaa

SEQ ID NO: 3485725 - RNA, 18 nt, Human
aguaaaucagauguugaa

SEQ ID NO: 3485726 - RNA, 22 nt, Human
aguaaaugcuagguuaauucca

SEQ ID NO: 3485727 - RNA, 23 nt, Human
aguaaaugcuagguuaauuccaa

SEQ ID NO: 3485728 - RNA, 22 nt, Human
aguaaauggcuuauccagcugg

SEQ ID NO: 3485729 - RNA, 19 nt, Human
aguaaaugggggugcauuu

SEQ ID NO: 3485730 - RNA, 11 nt, Human
aguaaaugucu

SEQ ID NO: 3485731 - RNA, 12 nt, Human
aguaaaugucuu

SEQ ID NO: 3485732 - RNA, 16 nt, Human
aguaaaugucuuugua

SEQ ID NO: 3485733 - RNA, 19 nt, Human
aguaaaugucuuuguaagu

SEQ ID NO: 3485734 - RNA, 22 nt, Human
aguaaauguuaucuuauacugu

SEQ ID NO: 3485735 - RNA, 13 nt, Human
aguaacaaaaaua

SEQ ID NO: 3485736 - RNA, 15 nt, Human
aguaacaaaaauaaa

SEQ ID NO: 3485737 - RNA, 22 nt, Human
aguaacaagagugauucuugcu

SEQ ID NO: 3485738 - RNA, 19 nt, Human
aguaacaauacaaauggau

SEQ ID NO: 3485739 - RNA, 20 nt, Human
aguaacaauacaaauggauu

SEQ ID NO: 3485740 - RNA, 14 nt, Human
aguaacacaggcca

SEQ ID NO: 3485741 - RNA, 17 nt, Human
aguaacagggccuugcu

SEQ ID NO: 3485742 - RNA, 17 nt, Human
aguaacaugaggggaca

SEQ ID NO: 3485743 - RNA, 18 nt, Human
aguaacauucauguucua

SEQ ID NO: 3485744 - RNA, 21 nt, Human
aguaaccuuuugcaccugcuc

SEQ ID NO: 3485745 - RNA, 23 nt, Human
aguaaccuuuugcaccugcucuc

SEQ ID NO: 3485746 - RNA, 17 nt, Human
aguaacuacaguuaggg

SEQ ID NO: 3485747 - RNA, 11 nt, Human
aguaacuccca

SEQ ID NO: 3485748 - RNA, 18 nt, Human
aguaacuggugauauauc

SEQ ID NO: 3485749 - RNA, 14 nt, Human
aguaacuugggagu

SEQ ID NO: 3485750 - RNA, 18 nt, Human
aguaacuugggagugugg

SEQ ID NO: 3485751 - RNA, 17 nt, Human
aguaacuugguuauaca

SEQ ID NO: 3485752 - RNA, 16 nt, Human
aguaacuuuaugugua

SEQ ID NO: 3485753 - RNA, 17 nt, Human
aguaacuuuauguguaa

SEQ ID NO: 3485754 - RNA, 19 nt, Human
aguaacuuuauguguaaau

SEQ ID NO: 3485755 - RNA, 21 nt, Human
aguaagaaagugaagcaaauc

SEQ ID NO: 3485756 - RNA, 17 nt, Human
aguaagaaccuugccug

SEQ ID NO: 3485757 - RNA, 15 nt, Human
aguaagaagacauga

SEQ ID NO: 3485758 - RNA, 14 nt, Human
aguaagagcuggug

SEQ ID NO: 3485759 - RNA, 14 nt, Human
aguccucuccaccu

SEQ ID NO: 3485760 - RNA, 19 nt, Human
aguccucuccaccuagugg

SEQ ID NO: 3485761 - RNA, 21 nt, Human
aguccucuccaccuaguggcu

SEQ ID NO: 3485762 - RNA, 22 nt, Human
aguccucuggauggcaccagag

SEQ ID NO: 3485763 - RNA, 20 nt, Human
aguccucuggguaggaauca

SEQ ID NO: 3485764 - RNA, 19 nt, Human
aguccugaagaggcgggcc

SEQ ID NO: 3485765 - RNA, 21 nt, Human
aguccugaagaggcgggccag

SEQ ID NO: 3485766 - RNA, 22 nt, Human
aguccugaagaggcgggccagc

SEQ ID NO: 3485767 - RNA, 23 nt, Human
aguccuggaagccagcuuucccu

SEQ ID NO: 3485768 - RNA, 16 nt, Human
aguggcaugugcugug

SEQ ID NO: 3485769 - RNA, 20 nt, Human
aguggcauuggcagcaggug

SEQ ID NO: 3485770 - RNA, 22 nt, Human
aguggccacuaagcagaggagg

SEQ ID NO: 3485771 - RNA, 14 nt, Human
aguggccacucagc

SEQ ID NO: 3485772 - RNA, 11 nt, Human
aguggccagac

SEQ ID NO: 3485773 - RNA, 17 nt, Human
aguggccagaccagagc

SEQ ID NO: 3485774 - RNA, 16 nt, Human
aguggccaucauuucu

SEQ ID NO: 3485775 - RNA, 15 nt, Human
aguggcccaacaggg

SEQ ID NO: 3485776 - RNA, 13 nt, Human
aguggccccaccu

SEQ ID NO: 3485777 - RNA, 18 nt, Human
aguggccuacaaaucagu

SEQ ID NO: 3485778 - RNA, 21 nt, Human
aguggccucgaacuccuggca

SEQ ID NO: 3485779 - RNA, 15 nt, Human
aguggccucuuuguc

SEQ ID NO: 3485780 - RNA, 23 nt, Human
aguggccucuuugucuaaaacaa

SEQ ID NO: 3485781 - RNA, 15 nt, Human
aguggccuggccagg

SEQ ID NO: 3485782 - RNA, 18 nt, Human
aguggccuggccaggagc

SEQ ID NO: 3485783 - RNA, 20 nt, Human
aguggccuggccaggagcuc

SEQ ID NO: 3485784 - RNA, 22 nt, Human
aguggccuggccaggagcucuu

SEQ ID NO: 3485785 - RNA, 23 nt, Human
aguggccuggccaggagcucuuc

SEQ ID NO: 3485786 - RNA, 14 nt, Human
aguggccuggcucc

SEQ ID NO: 3485787 - RNA, 18 nt, Human
aguggccuuaccccugcc

SEQ ID NO: 3485788 - RNA, 19 nt, Human
aguggccuuccccagcaug

SEQ ID NO: 3485789 - RNA, 23 nt, Human
aguggcgaaaucccugcucacug

SEQ ID NO: 3485790 - RNA, 20 nt, Human
aguggcgcgaucucagcuca

SEQ ID NO: 3485791 - RNA, 19 nt, Human
aguggcgugggagccagcc

SEQ ID NO: 3485792 - RNA, 15 nt, Human
aguggcguugggagg

SEQ ID NO: 3485793 - RNA, 14 nt, Human
aguggcucaacauu

SEQ ID NO: 3485794 - RNA, 17 nt, Human
aguggcuccucccggug

SEQ ID NO: 3485795 - RNA, 16 nt, Human
aguggcucgccaggcc

SEQ ID NO: 3485796 - RNA, 11 nt, Human
aguggcugcug

SEQ ID NO: 3485797 - RNA, 16 nt, Human
aguggcuggggcaugg

SEQ ID NO: 3485798 - RNA, 12 nt, Human
aguggcugucca

SEQ ID NO: 3485799 - RNA, 15 nt, Human
aguggcuucaaaaua

SEQ ID NO: 3485800 - RNA, 22 nt, Human
aguggcuucauuagagcaggcg

SEQ ID NO: 3485801 - RNA, 14 nt, Human
aguggcuuguccuc

SEQ ID NO: 3485802 - RNA, 17 nt, Human
agugggaaaaauguagg

SEQ ID NO: 3485803 - RNA, 18 nt, Human
agugggaacucugacaag

SEQ ID NO: 3485804 - RNA, 19 nt, Human
agugggacagggcauggcc

SEQ ID NO: 3485805 - RNA, 21 nt, Human
agugggacccauagaucuucu

SEQ ID NO: 3485806 - RNA, 22 nt, Human
agugggacccauagaucuucug

SEQ ID NO: 3485807 - RNA, 14 nt, Human
agugggagaaggca

SEQ ID NO: 3485808 - RNA, 15 nt, Human
agugggagcugccug

SEQ ID NO: 3485809 - RNA, 16 nt, Human
agugggaggcgcgagc

SEQ ID NO: 3485810 - RNA, 15 nt, Human
agugggaggggcagg

SEQ ID NO: 3485811 - RNA, 18 nt, Human
agugggaggggcaggcug

SEQ ID NO: 3485812 - RNA, 19 nt, Human
agugggaggggcaggcuga

SEQ ID NO: 3485813 - RNA, 24 nt, Human
agugggcaaaagcuuacaaauacu

SEQ ID NO: 3485814 - RNA, 20 nt, Human
agugggcagagcccccagga

SEQ ID NO: 3485815 - RNA, 14 nt, Human
agugggcagucaca

SEQ ID NO: 3485816 - RNA, 15 nt, Human
agugggccagggcug

SEQ ID NO: 3485817 - RNA, 16 nt, Human
agugggcuugauucug

SEQ ID NO: 3485818 - RNA, 12 nt, Human
aguggggaagag

SEQ ID NO: 3485819 - RNA, 16 nt, Human
aguggggaaugaagau

SEQ ID NO: 3485820 - RNA, 16 nt, Human
aguggggcagagccuc

SEQ ID NO: 3485821 - RNA, 18 nt, Human
aguggggcucgccaugcc

SEQ ID NO: 3485822 - RNA, 15 nt, Human
aguggggcucucuga

SEQ ID NO: 3485823 - RNA, 17 nt, Human
aguggggggaacgccca

SEQ ID NO: 3485824 - RNA, 16 nt, Human
agugggguagguuggg

SEQ ID NO: 3485825 - RNA, 19 nt, Human
aguggggucucccucuccu

SEQ ID NO: 3485826 - RNA, 23 nt, Human
aguggggucucccucuccugccu

SEQ ID NO: 3485827 - RNA, 14 nt, Human
aguggggugcuggg

SEQ ID NO: 3485828 - RNA, 18 nt, Human
aguggggugcugggagga

SEQ ID NO: 3485829 - RNA, 21 nt, Human
agugggguuaucucuguguua

SEQ ID NO: 3485830 - RNA, 22 nt, Human
agugggguugcaaccacugcaa

SEQ ID NO: 3485831 - RNA, 15 nt, Human
agugggguuuccugg

SEQ ID NO: 3485832 - RNA, 19 nt, Human
aguggguaaaauuagaugc

SEQ ID NO: 3485833 - RNA, 22 nt, Human
aguggguacccccaggaccaga

SEQ ID NO: 3485834 - RNA, 14 nt, Human
agugggucccagau

SEQ ID NO: 3485835 - RNA, 18 nt, Human
agugggugguggaucugu

SEQ ID NO: 3485836 - RNA, 16 nt, Human
aguggguuauucugga

SEQ ID NO: 3485837 - RNA, 12 nt, Human
aguggguuuuuu

SEQ ID NO: 3485838 - RNA, 19 nt, Human
agugguaaaaaggccuccu

SEQ ID NO: 3485839 - RNA, 19 nt, Human
agugguaagcucuggcuuu

SEQ ID NO: 3485840 - RNA, 14 nt, Human
agugguauagaaau

SEQ ID NO: 3485841 - RNA, 15 nt, Human
agugguauagaaaug

SEQ ID NO: 3485842 - RNA, 16 nt, Human
agugguauagaaaugc

SEQ ID NO: 3485843 - RNA, 22 nt, Human
aguggucaaaccgcacucaccc

SEQ ID NO: 3485844 - RNA, 15 nt, Human
aguggucccugcccu

SEQ ID NO: 3485845 - RNA, 13 nt, Human
agugguccuagag

SEQ ID NO: 3485846 - RNA, 23 nt, Human
aguggucuuaagaaauguauaaa

SEQ ID NO: 3485847 - RNA, 20 nt, Human
aguggucuuuguaagagugu

SEQ ID NO: 3485848 - RNA, 21 nt, Human
aguggucuuuguaagagugua

SEQ ID NO: 3485849 - RNA, 16 nt, Human
aguggugcgaucuggg

SEQ ID NO: 3485850 - RNA, 13 nt, Human
aguggugcucagu

SEQ ID NO: 3485851 - RNA, 11 nt, Human
agugguggcag

SEQ ID NO: 3485852 - RNA, 16 nt, Human
agugguggcagggccu

SEQ ID NO: 3485853 - RNA, 18 nt, Human
agugguggcagggccuag

SEQ ID NO: 3485854 - RNA, 15 nt, Human
agugguggcucugag

SEQ ID NO: 3485855 - RNA, 16 nt, Human
agugguggcucugaga

SEQ ID NO: 3485856 - RNA, 16 nt, Human
aguggugggggaaggc

SEQ ID NO: 3485857 - RNA, 18 nt, Human
aguggugguaacccuggu

SEQ ID NO: 3485858 - RNA, 19 nt, Human
aguggugguaacccuggug

SEQ ID NO: 3485859 - RNA, 17 nt, Human
aguggugguuuucuguu

SEQ ID NO: 3485860 - RNA, 19 nt, Human
aguggugguuuucuguucu

SEQ ID NO: 3485861 - RNA, 17 nt, Human
agugguguuuuaaagag

SEQ ID NO: 3485862 - RNA, 21 nt, Human
agugguuccuaauccucuagg

SEQ ID NO: 3485863 - RNA, 20 nt, Human
agugguucuacaaucuauuu

SEQ ID NO: 3485864 - RNA, 21 nt, Human
agugguucuacaaucuauuua

SEQ ID NO: 3485865 - RNA, 13 nt, Human
agugguugaauau

SEQ ID NO: 3485866 - RNA, 14 nt, Human
agugguugaauaug

SEQ ID NO: 3485867 - RNA, 15 nt, Human
agugguugaauauga

SEQ ID NO: 3485868 - RNA, 18 nt, Human
agugguugaauaugauua

SEQ ID NO: 3485869 - RNA, 13 nt, Human
agugguuuagaaa

SEQ ID NO: 3485870 - RNA, 20 nt, Human
agugguuuccacaugcucug

SEQ ID NO: 3485871 - RNA, 23 nt, Human
agugguuuuauacugaaggaaaa

SEQ ID NO: 3485872 - RNA, 13 nt, Human
aguguaaaaauga

SEQ ID NO: 3485873 - RNA, 21 nt, Human
aguguaaaauauuuugaauca

SEQ ID NO: 3485874 - RNA, 14 nt, Human
aguguaaagcauuc

SEQ ID NO: 3485875 - RNA, 22 nt, Human
aguguaaagcauuccaacaaag

SEQ ID NO: 3485876 - RNA, 21 nt, Human
aguguaaauaguuacuccagu

SEQ ID NO: 3485877 - RNA, 15 nt, Human
aguguaacaagaaag

SEQ ID NO: 3485878 - RNA, 16 nt, Human
aguguaacaagaaagg

SEQ ID NO: 3485879 - RNA, 15 nt, Human
aguguaacaauugug

SEQ ID NO: 3485880 - RNA, 18 nt, Human
aguguaacaauuguguag

SEQ ID NO: 3485881 - RNA, 14 nt, Human
aguguaacagcuga

SEQ ID NO: 3485882 - RNA, 15 nt, Human
aguguaacagcugag

SEQ ID NO: 3485883 - RNA, 13 nt, Human
aguguaaguguga

SEQ ID NO: 3485884 - RNA, 13 nt, Human
aguguaauaagac

SEQ ID NO: 3485885 - RNA, 19 nt, Human
aguguaaucccccaggaga

SEQ ID NO: 3485886 - RNA, 22 nt, Human
aguguaaugaauaccuuagugc

SEQ ID NO: 3485887 - RNA, 16 nt, Human
aguguacagucuugua

SEQ ID NO: 3485888 - RNA, 21 nt, Human
aguguacauggaauaacaugu

SEQ ID NO: 3485889 - RNA, 13 nt, Human
aguguaccauaau

SEQ ID NO: 3485890 - RNA, 21 nt, Human
aguguaccauuaaaauaugca

SEQ ID NO: 3485891 - RNA, 17 nt, Human
aguguaccuccucucag

SEQ ID NO: 3485892 - RNA, 20 nt, Human
aguguaccuguguacauaac

SEQ ID NO: 3485893 - RNA, 16 nt, Human
aguguacgauucuuaa

SEQ ID NO: 3485894 - RNA, 16 nt, Human
aguguacuggauuuaa

SEQ ID NO: 3485895 - RNA, 22 nt, Human
aguguagaaaagaacuggaaac

SEQ ID NO: 3485896 - RNA, 14 nt, Human
aguguagaagcauu

SEQ ID NO: 3485897 - RNA, 15 nt, Human
aguguagaagcauuc

SEQ ID NO: 3485898 - RNA, 18 nt, Human
aguguagaagcauuccuu

SEQ ID NO: 3485899 - RNA, 19 nt, Human
aguguagaagcauuccuuc

SEQ ID NO: 3485900 - RNA, 22 nt, Human
aguguagaagcauuccuucuuu

SEQ ID NO: 3485901 - RNA, 15 nt, Human
aguguagaucagagc

SEQ ID NO: 3485902 - RNA, 15 nt, Human
aguguagccaggucc

SEQ ID NO: 3485903 - RNA, 23 nt, Human
aguguagcccacacuugagagga

SEQ ID NO: 3485904 - RNA, 13 nt, Human
aguguagccuugc

SEQ ID NO: 3485905 - RNA, 17 nt, Human
aguguagccuugcccgg

SEQ ID NO: 3485906 - RNA, 18 nt, Human
aguguagccuugcccgga

SEQ ID NO: 3485907 - RNA, 16 nt, Human
aguguaggcagacaca

SEQ ID NO: 3485908 - RNA, 18 nt, Human
aguguaggcagacacagg

SEQ ID NO: 3485909 - RNA, 16 nt, Human
aguguaguuaauuuau

SEQ ID NO: 3485910 - RNA, 19 nt, Human
aguguaguuuacagaaaaa

SEQ ID NO: 3485911 - RNA, 14 nt, Human
aguguaucaaaaug

SEQ ID NO: 3485912 - RNA, 18 nt, Human
aguguaucaaaaugcucu

SEQ ID NO: 3485913 - RNA, 14 nt, Human
aguuaaacauaaau

SEQ ID NO: 3485914 - RNA, 16 nt, Human
aguuaaagaaaggaaa

SEQ ID NO: 3485915 - RNA, 23 nt, Human
aguuaaagugaggccacugaaga

SEQ ID NO: 3485916 - RNA, 12 nt, Human
aguuaaauaaau

SEQ ID NO: 3485917 - RNA, 21 nt, Human
aguuaaauagaguauaugcac

SEQ ID NO: 3485918 - RNA, 12 nt, Human
aguuaacagaga

SEQ ID NO: 3485919 - RNA, 21 nt, Human
aguuaacgggugaauaauaaa

SEQ ID NO: 3485920 - RNA, 20 nt, Human
aguuaacuauugcauuuaua

SEQ ID NO: 3485921 - RNA, 24 nt, Human
aguuaacuauugcauuuauaugua

SEQ ID NO: 3485922 - RNA, 14 nt, Human
aguuaacuuucaga

SEQ ID NO: 3485923 - RNA, 14 nt, Human
aguuaagaaaaaaa

SEQ ID NO: 3485924 - RNA, 18 nt, Human
aguuaagaaaaaaauaau

SEQ ID NO: 3485925 - RNA, 18 nt, Human
aguuaagaagcuguugua

SEQ ID NO: 3485926 - RNA, 21 nt, Human
aguuaagaagcuguuguacau

SEQ ID NO: 3485927 - RNA, 14 nt, Human
aguuaagagaaacu

SEQ ID NO: 3485928 - RNA, 19 nt, Human
aguuaagagaaacuuuaua

SEQ ID NO: 3485929 - RNA, 21 nt, Human
aguuaagagaaacuuuauaca

SEQ ID NO: 3485930 - RNA, 13 nt, Human
aguuaagccuuug

SEQ ID NO: 3485931 - RNA, 19 nt, Human
aguuaaggaccguggcccu

SEQ ID NO: 3485932 - RNA, 22 nt, Human
aguuaaggagaaucauguuucu

SEQ ID NO: 3485933 - RNA, 16 nt, Human
aguuaauaagcaaaau

SEQ ID NO: 3485934 - RNA, 21 nt, Human
aguuaauauaucccagaaauu

SEQ ID NO: 3485935 - RNA, 15 nt, Human
aguuaauauugugaa

SEQ ID NO: 3485936 - RNA, 18 nt, Human
aguuaaucaucaagagaa

SEQ ID NO: 3485937 - RNA, 19 nt, Human
aguuaaucaucaagagaau

SEQ ID NO: 3485938 - RNA, 14 nt, Human
aguuaaucuugcuu

SEQ ID NO: 3485939 - RNA, 15 nt, Human
aguuaaucuugcuuu

SEQ ID NO: 3485940 - RNA, 18 nt, Human
aguuaaucuugcuuucuu

SEQ ID NO: 3485941 - RNA, 15 nt, Human
aguuaauguauauaa

SEQ ID NO: 3485942 - RNA, 18 nt, Human
aguuaauguauauaaaaa

SEQ ID NO: 3485943 - RNA, 19 nt, Human
aguuaauguauauaaaaau

SEQ ID NO: 3485944 - RNA, 15 nt, Human
aguuaauuuaucuaa

SEQ ID NO: 3485945 - RNA, 18 nt, Human
aguuaauuuaucuaaauu

SEQ ID NO: 3485946 - RNA, 23 nt, Human
aguuaauuuuuccaacuacuaau

SEQ ID NO: 3485947 - RNA, 23 nt, Human
aguuacaaauuauaauguauuca

SEQ ID NO: 3485948 - RNA, 21 nt, Human
aguuacaacuuccuaauuuua

SEQ ID NO: 3485949 - RNA, 12 nt, Human
aguuacagaaag

SEQ ID NO: 3485950 - RNA, 17 nt, Human
aguuacagcgagaggca

SEQ ID NO: 3485951 - RNA, 13 nt, Human
aguuacaguucug

SEQ ID NO: 3485952 - RNA, 16 nt, Human
aguuacaguucugugg

SEQ ID NO: 3485953 - RNA, 21 nt, Human
aguuacauauguauacaugug

SEQ ID NO: 3485954 - RNA, 17 nt, Human
aguuacaugcauacuuc

SEQ ID NO: 3485955 - RNA, 16 nt, Human
aguuacauuaauguua

SEQ ID NO: 3485956 - RNA, 21 nt, Human
aguuaccuuauaguuacugug

SEQ ID NO: 3485957 - RNA, 18 nt, Human
aguuacuagguaacuuca

SEQ ID NO: 3485958 - RNA, 17 nt, Human
aguuacuauccuggcuu

SEQ ID NO: 3485959 - RNA, 16 nt, Human
aguuacucagcccugg

SEQ ID NO: 3485960 - RNA, 17 nt, Human
aguuacucagcccuggg

SEQ ID NO: 3485961 - RNA, 18 nt, Human
aguuacucagcccugggc

SEQ ID NO: 3485962 - RNA, 19 nt, Human
aguuacucagcccugggcc

SEQ ID NO: 3485963 - RNA, 21 nt, Human
aguuacuccagugccaacaau

SEQ ID NO: 3485964 - RNA, 16 nt, Human
aguuacucugaagggc

SEQ ID NO: 3485965 - RNA, 21 nt, Human
aguuacugccgguuugaaaau

SEQ ID NO: 3485966 - RNA, 16 nt, Human
aguuacuguaaaaugc

SEQ ID NO: 3485967 - RNA, 15 nt, Human
aguuacuguguaaac

SEQ ID NO: 3485968 - RNA, 15 nt, Human
aguuacuguguaauu

SEQ ID NO: 3485969 - RNA, 18 nt, Human
aguuacuguguaauuagu

SEQ ID NO: 3485970 - RNA, 13 nt, Human
aguuacuguugug

SEQ ID NO: 3485971 - RNA, 14 nt, Human
aguuacuuuagaug

SEQ ID NO: 3485972 - RNA, 22 nt, Human
aguuacuuuccaauucuccuuu

SEQ ID NO: 3485973 - RNA, 19 nt, Human
aguuagaauaauaaauauu

SEQ ID NO: 3485974 - RNA, 13 nt, Human
aguuagacuguug

SEQ ID NO: 3485975 - RNA, 14 nt, Human
aguuagagaaucug

SEQ ID NO: 3485976 - RNA, 19 nt, Human
aguuagcucaggaggcuug

SEQ ID NO: 3485977 - RNA, 22 nt, Human
aguuagcucaggaggcuuggaa

SEQ ID NO: 3485978 - RNA, 13 nt, Human
aguuaggaaauaa

SEQ ID NO: 3485979 - RNA, 15 nt, Human
aguuaggaaugagaa

SEQ ID NO: 3485980 - RNA, 18 nt, Human
aguuaggauagcauuuuu

SEQ ID NO: 3485981 - RNA, 19 nt, Human
agccucagcccccugcuuc

SEQ ID NO: 3485982 - RNA, 21 nt, Human
agccucaggacugggagcccc

SEQ ID NO: 3485983 - RNA, 23 nt, Human
agccucaggggucugagcuccag

SEQ ID NO: 3485984 - RNA, 11 nt, Human
agccucagucc

SEQ ID NO: 3485985 - RNA, 15 nt, Human
agccucaguccuccc

SEQ ID NO: 3485986 - RNA, 16 nt, Human
agccucaguccucccc

SEQ ID NO: 3485987 - RNA, 20 nt, Human
agccucagugacccuggcuc

SEQ ID NO: 3485988 - RNA, 14 nt, Human
agccucauauuuaa

SEQ ID NO: 3485989 - RNA, 17 nt, Human
agccucauauuuaaaga

SEQ ID NO: 3485990 - RNA, 17 nt, Human
agccucauccgaggcag

SEQ ID NO: 3485991 - RNA, 12 nt, Human
agccucaucucu

SEQ ID NO: 3485992 - RNA, 20 nt, Human
agccucauguccacugguuc

SEQ ID NO: 3485993 - RNA, 21 nt, Human
agccuccaagcuccaucucca

SEQ ID NO: 3485994 - RNA, 22 nt, Human
agccuccaauuuuuuaagugaa

SEQ ID NO: 3485995 - RNA, 14 nt, Human
agccuccacagcga

SEQ ID NO: 3485996 - RNA, 21 nt, Human
agccuccacagcgagggcagc

SEQ ID NO: 3485997 - RNA, 13 nt, Human
agccuccagccuc

SEQ ID NO: 3485998 - RNA, 22 nt, Human
agccuccaguccaaggaaacca

SEQ ID NO: 3485999 - RNA, 18 nt, Human
agccuccaugcugccucc

SEQ ID NO: 3486000 - RNA, 15 nt, Human
agccuccauuuaguu

SEQ ID NO: 3486001 - RNA, 21 nt, Human
agccucccaaagugcugggau

SEQ ID NO: 3486002 - RNA, 20 nt, Human
agccucccaaggagaacaaa

SEQ ID NO: 3486003 - RNA, 18 nt, Human
agccucccacagugcugg

SEQ ID NO: 3486004 - RNA, 13 nt, Human
agccucccacccc

SEQ ID NO: 3486005 - RNA, 17 nt, Human
agccucccauccagggc

SEQ ID NO: 3486006 - RNA, 14 nt, Human
agccuccccugcca

SEQ ID NO: 3486007 - RNA, 15 nt, Human
agccuccccugccag

SEQ ID NO: 3486008 - RNA, 16 nt, Human
agccuccccugccagg

SEQ ID NO: 3486009 - RNA, 22 nt, Human
agccuccccugccagggcaggg

SEQ ID NO: 3486010 - RNA, 19 nt, Human
agccucccgaauagcuggg

SEQ ID NO: 3486011 - RNA, 17 nt, Human
agccucccgaguagcug

SEQ ID NO: 3486012 - RNA, 22 nt, Human
agccucccgaguagcugggacu

SEQ ID NO: 3486013 - RNA, 12 nt, Human
agccucccugaa

SEQ ID NO: 3486014 - RNA, 15 nt, Human
agccucccugaagcc

SEQ ID NO: 3486015 - RNA, 12 nt, Human
agccucccugcc

SEQ ID NO: 3486016 - RNA, 13 nt, Human
agccucccugccu

SEQ ID NO: 3486017 - RNA, 14 nt, Human
agccucccugccuc

SEQ ID NO: 3486018 - RNA, 20 nt, Human
agccuccgcuucccugguuc

SEQ ID NO: 3486019 - RNA, 22 nt, Human
agccuccgcuucccugguucaa

SEQ ID NO: 3486020 - RNA, 16 nt, Human
agccuccuccugacca

SEQ ID NO: 3486021 - RNA, 19 nt, Human
agccuccucuggacggcag

SEQ ID NO: 3486022 - RNA, 19 nt, Human
agccuccucugucugcccu

SEQ ID NO: 3486023 - RNA, 21 nt, Human
agccuccucugucugcccuuc

SEQ ID NO: 3486024 - RNA, 14 nt, Human
agccuccugaccug

SEQ ID NO: 3486025 - RNA, 17 nt, Human
agccuccugaccugagg

SEQ ID NO: 3486026 - RNA, 11 nt, Human
agccuccugag

SEQ ID NO: 3486027 - RNA, 11 nt, Human
agccuccugcc

SEQ ID NO: 3486028 - RNA, 13 nt, Human
agccuccugccca

SEQ ID NO: 3486029 - RNA, 16 nt, Human
agccuccugcccaguc

SEQ ID NO: 3486030 - RNA, 18 nt, Human
agccuccugcccuuaccu

SEQ ID NO: 3486031 - RNA, 21 nt, Human
agccuccuguguagcugggau

SEQ ID NO: 3486032 - RNA, 17 nt, Human
agccuccuuagaaaaaa

SEQ ID NO: 3486033 - RNA, 16 nt, Human
agccuccuuucuggcu

SEQ ID NO: 3486034 - RNA, 17 nt, Human
agccucgaacuccuggg

SEQ ID NO: 3486035 - RNA, 23 nt, Human
agccucgcaggccucccugccag

SEQ ID NO: 3486036 - RNA, 14 nt, Human
agccucgccccugg

SEQ ID NO: 3486037 - RNA, 21 nt, Human
agccucguuggaagaggaaca

SEQ ID NO: 3486038 - RNA, 21 nt, Human
agccucuagggaccccuccuc

SEQ ID NO: 3486039 - RNA, 22 nt, Human
agccucuagggaccccuccucc

SEQ ID NO: 3486040 - RNA, 18 nt, Human
agccucucaccuguacuc

SEQ ID NO: 3486041 - RNA, 12 nt, Human
agccucuccagg

SEQ ID NO: 3486042 - RNA, 18 nt, Human
agccucuccccaggucca

SEQ ID NO: 3486043 - RNA, 22 nt, Human
agccucuccccagguccagcuc

SEQ ID NO: 3486044 - RNA, 23 nt, Human
agccucuccccagguccagcucu

SEQ ID NO: 3486045 - RNA, 21 nt, Human
agccucuccccugccugcccu

SEQ ID NO: 3486046 - RNA, 14 nt, Human
agccucucucccag

SEQ ID NO: 3486047 - RNA, 16 nt, Human
agccucucucccaguc

SEQ ID NO: 3486048 - RNA, 18 nt, Human
agccucucucccagucua

SEQ ID NO: 3486049 - RNA, 20 nt, Human
agccucugaccccuccucac

SEQ ID NO: 3486050 - RNA, 22 nt, Human
agccucugcagcggaaucuguu

SEQ ID NO: 3486051 - RNA, 16 nt, Human
agccucugccugugca

SEQ ID NO: 3486052 - RNA, 16 nt, Human
agccucugcuccccag

SEQ ID NO: 3486053 - RNA, 13 nt, Human
agccucugcugcc

SEQ ID NO: 3486054 - RNA, 22 nt, Human
agccucuggcauuagaauuauu

SEQ ID NO: 3486055 - RNA, 14 nt, Human
agccucuggcuaga

SEQ ID NO: 3486056 - RNA, 20 nt, Human
agccucugggggguggccag

SEQ ID NO: 3486057 - RNA, 13 nt, Human
aguuuguuggaaa

SEQ ID NO: 3486058 - RNA, 16 nt, Human
aguuuguuucuuugaa

SEQ ID NO: 3486059 - RNA, 18 nt, Human
aguuuguuucuuugaauu

SEQ ID NO: 3486060 - RNA, 13 nt, Human
aguuuguuuuugc

SEQ ID NO: 3486061 - RNA, 13 nt, Human
aguuuuaacugug

SEQ ID NO: 3486062 - RNA, 18 nt, Human
aguuuuaacuguggauau

SEQ ID NO: 3486063 - RNA, 17 nt, Human
aguuuuacccuauaucu

SEQ ID NO: 3486064 - RNA, 20 nt, Human
aguuuuacucugcugcaaaa

SEQ ID NO: 3486065 - RNA, 15 nt, Human
aguuuuaguugcaga

SEQ ID NO: 3486066 - RNA, 14 nt, Human
aguuuuauaaaaga

SEQ ID NO: 3486067 - RNA, 12 nt, Human
aguuuuauauau

SEQ ID NO: 3486068 - RNA, 20 nt, Human
aguuuuauauauuauaugga

SEQ ID NO: 3486069 - RNA, 17 nt, Human
aguuuuaucacauguau

SEQ ID NO: 3486070 - RNA, 20 nt, Human
aguuuuaucacauguauguu

SEQ ID NO: 3486071 - RNA, 12 nt, Human
aguuuuaucauu

SEQ ID NO: 3486072 - RNA, 23 nt, Human
aguuuuaugcucuuuuuuacuca

SEQ ID NO: 3486073 - RNA, 17 nt, Human
aguuuuauuuauauuua

SEQ ID NO: 3486074 - RNA, 22 nt, Human
aguuuucacucuuauugcccac

SEQ ID NO: 3486075 - RNA, 20 nt, Human
aguuuucagaaccucuuccc

SEQ ID NO: 3486076 - RNA, 11 nt, Human
aguuuucaguu

SEQ ID NO: 3486077 - RNA, 15 nt, Human
aguuuucaguuugua

SEQ ID NO: 3486078 - RNA, 18 nt, Human
aguuuucauaguauccau

SEQ ID NO: 3486079 - RNA, 22 nt, Human
aguuuucaugugcucagaauua

SEQ ID NO: 3486080 - RNA, 21 nt, Human
aguuuucauuuagaaaauaga

SEQ ID NO: 3486081 - RNA, 13 nt, Human
aguuuuccaugaa

SEQ ID NO: 3486082 - RNA, 16 nt, Human
aguuuuccaugaaaac

SEQ ID NO: 3486083 - RNA, 11 nt, Human
aguuuuccuga

SEQ ID NO: 3486084 - RNA, 14 nt, Human
aguuuuccuucuca

SEQ ID NO: 3486085 - RNA, 18 nt, Human
aguuuuccuucucaucug

SEQ ID NO: 3486086 - RNA, 23 nt, Human
aguuuuccuucucaucugugauu

SEQ ID NO: 3486087 - RNA, 13 nt, Human
aguuuucuccuuu

SEQ ID NO: 3486088 - RNA, 14 nt, Human
aguuuucugagaaa

SEQ ID NO: 3486089 - RNA, 17 nt, Human
aguuuucugagaaagac

SEQ ID NO: 3486090 - RNA, 18 nt, Human
aguuuucugagaaagacu

SEQ ID NO: 3486091 - RNA, 19 nt, Human
aguuuucuggcuggagccu

SEQ ID NO: 3486092 - RNA, 19 nt, Human
aguuuucuuguugcuuugu

SEQ ID NO: 3486093 - RNA, 19 nt, Human
aguuuucuuuccuccuuuc

SEQ ID NO: 3486094 - RNA, 12 nt, Human
aguuuugaaaag

SEQ ID NO: 3486095 - RNA, 17 nt, Human
aguuuugaagauucuau

SEQ ID NO: 3486096 - RNA, 13 nt, Human
aguuuugaauguu

SEQ ID NO: 3486097 - RNA, 21 nt, Human
aguuuugaauguuaagaauug

SEQ ID NO: 3486098 - RNA, 15 nt, Human
aguuuugacaagcug

SEQ ID NO: 3486099 - RNA, 18 nt, Human
aguuuugacaagcuggcu

SEQ ID NO: 3486100 - RNA, 22 nt, Human
aguuuugaguagauauuacuuu

SEQ ID NO: 3486101 - RNA, 23 nt, Human
aguuuugaugacuggcauuuuau

SEQ ID NO: 3486102 - RNA, 23 nt, Human
aguuuugcuuuuaguuuuucugu

SEQ ID NO: 3486103 - RNA, 17 nt, Human
aguuuuggccaccacau

SEQ ID NO: 3486104 - RNA, 16 nt, Human
aguuuugggaaguuaa

SEQ ID NO: 3486105 - RNA, 15 nt, Human
aguuuugguugcuuu

SEQ ID NO: 3486106 - RNA, 13 nt, Human
aguuuugucuuga

SEQ ID NO: 3486107 - RNA, 19 nt, Human
aguuuuguguuuguuguag

SEQ ID NO: 3486108 - RNA, 22 nt, Human
aguuuuguguuuguuguagauu

SEQ ID NO: 3486109 - RNA, 12 nt, Human
aguuuuguugcc

SEQ ID NO: 3486110 - RNA, 23 nt, Human
aguuuuguuguacuuaaauggua

SEQ ID NO: 3486111 - RNA, 17 nt, Human
aguuuuguuuaaaagga

SEQ ID NO: 3486112 - RNA, 14 nt, Human
aguuuuguuuggac

SEQ ID NO: 3486113 - RNA, 23 nt, Human
aguuuuuaacucuacuguguaau

SEQ ID NO: 3486114 - RNA, 17 nt, Human
aguuuuuaccuaccaca

SEQ ID NO: 3486115 - RNA, 22 nt, Human
aguuuuuaccuaccacaguguc

SEQ ID NO: 3486116 - RNA, 16 nt, Human
aguuuuuaugagaaac

SEQ ID NO: 3486117 - RNA, 18 nt, Human
aguuuuuaugagaaacuu

SEQ ID NO: 3486118 - RNA, 19 nt, Human
aguuuuuauuaaaccccuu

SEQ ID NO: 3486119 - RNA, 18 nt, Human
aguuuuuauuccuuguga

SEQ ID NO: 3486120 - RNA, 18 nt, Human
aguuuuucauuaaauaaa

SEQ ID NO: 3486121 - RNA, 22 nt, Human
aguuuuucauuaaauaaauuug

SEQ ID NO: 3486122 - RNA, 15 nt, Human
aguuuuucauuuuaa

SEQ ID NO: 3486123 - RNA, 11 nt, Human
aguuuuucugu

SEQ ID NO: 3486124 - RNA, 12 nt, Human
aguuuuucuguc

SEQ ID NO: 3486125 - RNA, 22 nt, Human
aguuuuucuguuuuguuuggca

SEQ ID NO: 3486126 - RNA, 22 nt, Human
aguuuuuggaguguuauguauu

SEQ ID NO: 3486127 - RNA, 21 nt, Human
aguuuuuggauaaagaauacu

SEQ ID NO: 3486128 - RNA, 18 nt, Human
aguuuuuguacuguaaag

SEQ ID NO: 3486129 - RNA, 13 nt, Human
aguuuuuucaucu

SEQ ID NO: 3486130 - RNA, 22 nt, Human
aguuuuuugaaaaugggcucaa

SEQ ID NO: 3486131 - RNA, 23 nt, Human
aguuuuuuuuuauacacuguaau

SEQ ID NO: 3486132 - RNA, 22 nt, Human
aguuuuuuuuuucuugucuaua

SEQ ID NO: 3486133 - RNA, 17 nt, Human
auaaaaaaaagaaaaaa

SEQ ID NO: 3486134 - RNA, 17 nt, Human
auaaaaaaacaaucauu

SEQ ID NO: 3486135 - RNA, 14 nt, Human
auaaaaaaauaaaa

SEQ ID NO: 3486136 - RNA, 11 nt, Human
auaaaaaagau

SEQ ID NO: 3486137 - RNA, 15 nt, Human
auaaaaaagauccca

SEQ ID NO: 3486138 - RNA, 17 nt, Human
auaaaaaagaucccaaa

SEQ ID NO: 3486139 - RNA, 22 nt, Human
auaaaaaagcuggugggugaaa

SEQ ID NO: 3486140 - RNA, 18 nt, Human
auaaaaaagucucuauuu

SEQ ID NO: 3486141 - RNA, 14 nt, Human
auaaaaaauaauaa

SEQ ID NO: 3486142 - RNA, 17 nt, Human
auaaaaaauauguauuu

SEQ ID NO: 3486143 - RNA, 19 nt, Human
auaaaaaauauucuuguca

SEQ ID NO: 3486144 - RNA, 11 nt, Human
auaaaaaaugg

SEQ ID NO: 3486145 - RNA, 13 nt, Human
auaaaaaaugguu

SEQ ID NO: 3486146 - RNA, 13 nt, Human
auaaaaaauuuua

SEQ ID NO: 3486147 - RNA, 18 nt, Human
auaaaaaauuuuguaauu

SEQ ID NO: 3486148 - RNA, 14 nt, Human
auaaaaacaacuuu

SEQ ID NO: 3486149 - RNA, 18 nt, Human
auaaaaacccacaaaaau

SEQ ID NO: 3486150 - RNA, 22 nt, Human
auaaaaagaaaagauaaagaug

SEQ ID NO: 3486151 - RNA, 13 nt, Human
auaaaaagaauga

SEQ ID NO: 3486152 - RNA, 14 nt, Human
auaaaaagaucacu

SEQ ID NO: 3486153 - RNA, 13 nt, Human
auaaaaagcaaaa

SEQ ID NO: 3486154 - RNA, 11 nt, Human
auaaaaaggac

SEQ ID NO: 3486155 - RNA, 17 nt, Human
auaaaaagugacacagc

SEQ ID NO: 3486156 - RNA, 16 nt, Human
auaaaaagugcuuuug

SEQ ID NO: 3486157 - RNA, 20 nt, Human
auaaaaaguggaauuucuug

SEQ ID NO: 3486158 - RNA, 13 nt, Human
auaaaaaguuaaa

SEQ ID NO: 3486159 - RNA, 14 nt, Human
auaaaaauaaaaaa

SEQ ID NO: 3486160 - RNA, 13 nt, Human
auaaaaauauauu

SEQ ID NO: 3486161 - RNA, 16 nt, Human
auaaaaauauguacaa

SEQ ID NO: 3486162 - RNA, 14 nt, Human
auaaaaauauugug

SEQ ID NO: 3486163 - RNA, 12 nt, Human
auaaaaauggau

SEQ ID NO: 3486164 - RNA, 14 nt, Human
auaaaaaugucuug

SEQ ID NO: 3486165 - RNA, 15 nt, Human
auaaaaauucugaau

SEQ ID NO: 3486166 - RNA, 12 nt, Human
auaaaacaggua

SEQ ID NO: 3486167 - RNA, 18 nt, Human
auaaaacaggucaauaca

SEQ ID NO: 3486168 - RNA, 22 nt, Human
auaaaacaguuggcaugcaucc

SEQ ID NO: 3486169 - RNA, 15 nt, Human
auaaaacauagcaaa

SEQ ID NO: 3486170 - RNA, 20 nt, Human
auaaaacaucuuugaaauua

SEQ ID NO: 3486171 - RNA, 14 nt, Human
auaaaacauuaaga

SEQ ID NO: 3486172 - RNA, 18 nt, Human
auaaaacauuaagaaaau

SEQ ID NO: 3486173 - RNA, 22 nt, Human
auaaaacauuaugcuccagaaa

SEQ ID NO: 3486174 - RNA, 18 nt, Human
auaaaacauuuuaaaugg

SEQ ID NO: 3486175 - RNA, 18 nt, Human
auaaaacauuuucacaca

SEQ ID NO: 3486176 - RNA, 12 nt, Human
auaaaacccuua

SEQ ID NO: 3486177 - RNA, 20 nt, Human
auaaaaccuuucaaauuuca

SEQ ID NO: 3486178 - RNA, 22 nt, Human
auaaaaccuuucaaauuucaca

SEQ ID NO: 3486179 - RNA, 11 nt, Human
auaaaacucug

SEQ ID NO: 3486180 - RNA, 17 nt, Human
auaaaacuuuuuaaaau

SEQ ID NO: 3486181 - RNA, 13 nt, Human
auaaaagaaauaa

SEQ ID NO: 3486182 - RNA, 15 nt, Human
auaaaagacaaggaa

SEQ ID NO: 3486183 - RNA, 14 nt, Human
auaaaagacacaga

SEQ ID NO: 3486184 - RNA, 15 nt, Human
auaaaagacagugaa

SEQ ID NO: 3486185 - RNA, 19 nt, Human
auaaaagauggggucugua

SEQ ID NO: 3486186 - RNA, 16 nt, Human
auaaaagcagcaucug

SEQ ID NO: 3486187 - RNA, 15 nt, Human
aguguaguuaauuua

SEQ ID NO: 3486188 - RNA, 17 nt, Human
aguguaguuaauuuauc

SEQ ID NO: 3486189 - RNA, 15 nt, Human
aguguauaauaagaa

SEQ ID NO: 3486190 - RNA, 15 nt, Human
aguguaucaaaaugc

SEQ ID NO: 3486191 - RNA, 18 nt, Human
aguguaugacugcacaug

SEQ ID NO: 3486192 - RNA, 17 nt, Human
aguguaugcacgugugc

SEQ ID NO: 3486193 - RNA, 21 nt, Human
aguguauggaaauaaauguau

SEQ ID NO: 3486194 - RNA, 15 nt, Human
aguguauuauaacag

SEQ ID NO: 3486195 - RNA, 12 nt, Human
aguguauuuauu

SEQ ID NO: 3486196 - RNA, 14 nt, Human
aguguauuuggaaa

SEQ ID NO: 3486197 - RNA, 14 nt, Human
aguguauuuguauu

SEQ ID NO: 3486198 - RNA, 18 nt, Human
aguguauuuuauaaaauu

SEQ ID NO: 3486199 - RNA, 19 nt, Human
agugucaaauaaacacugu

SEQ ID NO: 3486200 - RNA, 21 nt, Human
agugucaaauaaacacugugu

SEQ ID NO: 3486201 - RNA, 17 nt, Human
agugucaaccagacaga

SEQ ID NO: 3486202 - RNA, 15 nt, Human
agugucaaguugugc

SEQ ID NO: 3486203 - RNA, 13 nt, Human
aguuaaaaaaaau

SEQ ID NO: 3486204 - RNA, 20 nt, Human
aguuaaaaaaaauaauaaau

SEQ ID NO: 3486205 - RNA, 13 nt, Human
aguuaaagcagug

SEQ ID NO: 3486206 - RNA, 17 nt, Human
aguuaaaggcugacuac

SEQ ID NO: 3486207 - RNA, 16 nt, Human
aguuaaagugaauaac

SEQ ID NO: 3486208 - RNA, 23 nt, Human
aguuaaauagaguauaugcacuu

SEQ ID NO: 3486209 - RNA, 18 nt, Human
aguuaaauguuaccucug

SEQ ID NO: 3486210 - RNA, 20 nt, Human
aguuaacaccuuuaaagugu

SEQ ID NO: 3486211 - RNA, 21 nt, Human
aguuaacaucaugaauuuauu

SEQ ID NO: 3486212 - RNA, 13 nt, Human
aguuaacggguga

SEQ ID NO: 3486213 - RNA, 17 nt, Human
aguuaacgggugaauaa

SEQ ID NO: 3486214 - RNA, 18 nt, Human
aguuaacuuuaagacuga

SEQ ID NO: 3486215 - RNA, 17 nt, Human
aguuaagaaaaaaauaa

SEQ ID NO: 3486216 - RNA, 17 nt, Human
aguuaagaagcuguugu

SEQ ID NO: 3486217 - RNA, 20 nt, Human
aguuaagaagcuguuguaca

SEQ ID NO: 3486218 - RNA, 20 nt, Human
aguuaagacaugauuuccuu

SEQ ID NO: 3486219 - RNA, 13 nt, Human
aguuaagaccugg

SEQ ID NO: 3486220 - RNA, 16 nt, Human
aguuaagagaaacuuu

SEQ ID NO: 3486221 - RNA, 17 nt, Human
aguuaagagaaacuuua

SEQ ID NO: 3486222 - RNA, 23 nt, Human
aguuaagagaaacuuuauacauu

SEQ ID NO: 3486223 - RNA, 23 nt, Human
aguuaagagaaaugagcuugacc

SEQ ID NO: 3486224 - RNA, 14 nt, Human
aguuaagaguagca

SEQ ID NO: 3486225 - RNA, 21 nt, Human
aguuaaggagaaucauguuuc

SEQ ID NO: 3486226 - RNA, 15 nt, Human
aguuaagugaauguc

SEQ ID NO: 3486227 - RNA, 13 nt, Human
aguuaaucuauaa

SEQ ID NO: 3486228 - RNA, 20 nt, Human
aguuaaugaugguugauggg

SEQ ID NO: 3486229 - RNA, 20 nt, Human
aguuaauuacauccucaugc

SEQ ID NO: 3486230 - RNA, 19 nt, Human
aguuaauuagcauucuggc

SEQ ID NO: 3486231 - RNA, 13 nt, Human
aguuaauuuaucu

SEQ ID NO: 3486232 - RNA, 20 nt, Human
aguuacaaauugcuugaaag

SEQ ID NO: 3486233 - RNA, 20 nt, Human
aguuacacagaaaugcugcu

SEQ ID NO: 3486234 - RNA, 22 nt, Human
aguuacacagaaaugcugcugg

SEQ ID NO: 3486235 - RNA, 18 nt, Human
aguuacacaugaucauaa

SEQ ID NO: 3486236 - RNA, 16 nt, Human
aguuacacauuuuuca

SEQ ID NO: 3486237 - RNA, 18 nt, Human
aguuacacuaaaagguga

SEQ ID NO: 3486238 - RNA, 15 nt, Human
aguuacagaaagugg

SEQ ID NO: 3486239 - RNA, 14 nt, Human
aguuacagacaaag

SEQ ID NO: 3486240 - RNA, 17 nt, Human
aguuacagacaaagcgu

SEQ ID NO: 3486241 - RNA, 20 nt, Human
aguuacagccuguuaguaac

SEQ ID NO: 3486242 - RNA, 15 nt, Human
aguuacaguucugug

SEQ ID NO: 3486243 - RNA, 20 nt, Human
aguuacauauguauacaugu

SEQ ID NO: 3486244 - RNA, 20 nt, Human
aguuacaugcauacuucaaa

SEQ ID NO: 3486245 - RNA, 15 nt, Human
aguuacauguuugca

SEQ ID NO: 3486246 - RNA, 17 nt, Human
aguuaccauuaaaccau

SEQ ID NO: 3486247 - RNA, 16 nt, Human
aguuaccuuauaguua

SEQ ID NO: 3486248 - RNA, 22 nt, Human
aguuacuagguaacuucauauu

SEQ ID NO: 3486249 - RNA, 23 nt, Human
aguuacuaucaugucaaacguga

SEQ ID NO: 3486250 - RNA, 16 nt, Human
aguuacuauccuggcu

SEQ ID NO: 3486251 - RNA, 13 nt, Human
aguuacucagaau

SEQ ID NO: 3486252 - RNA, 14 nt, Human
aguuacucagcccu

SEQ ID NO: 3486253 - RNA, 15 nt, Human
aguuacucagcccug

SEQ ID NO: 3486254 - RNA, 23 nt, Human
aguuacucagcccugggccccac

SEQ ID NO: 3486255 - RNA, 16 nt, Human
aguuacugaacaguaa

SEQ ID NO: 3486256 - RNA, 21 nt, Human
aguuacuguccuguugauuaa

SEQ ID NO: 3486257 - RNA, 11 nt, Human
aguuacugugu

SEQ ID NO: 3486258 - RNA, 14 nt, Human
aguuacuguguaaa

SEQ ID NO: 3486259 - RNA, 19 nt, Human
aguuacuguguaauuagug

SEQ ID NO: 3486260 - RNA, 17 nt, Human
aguuacuguugugaccu

SEQ ID NO: 3486261 - RNA, 14 nt, Human
aguuacuuccuauc

SEQ ID NO: 3486262 - RNA, 15 nt, Human
aguuacuuccuauca

SEQ ID NO: 3486263 - RNA, 23 nt, Human
aguuacuugcugcccugugcucc

SEQ ID NO: 3486264 - RNA, 14 nt, Human
aguuacuuuauguu

SEQ ID NO: 3486265 - RNA, 16 nt, Human
aguuacuuucuuaaug

SEQ ID NO: 3486266 - RNA, 19 nt, Human
aguuacuuugucagaggca

SEQ ID NO: 3486267 - RNA, 14 nt, Human
aguuacuuuuccuu

SEQ ID NO: 3486268 - RNA, 18 nt, Human
aguuacuuuuccuugcau

SEQ ID NO: 3486269 - RNA, 23 nt, Human
aguuacuuuuccuugcauacaaa

SEQ ID NO: 3486270 - RNA, 15 nt, Human
aguuagaauaauaaa

SEQ ID NO: 3486271 - RNA, 17 nt, Human
aguuagaaucuauuuuc

SEQ ID NO: 3486272 - RNA, 18 nt, Human
aguuagaaucuauuuucu

SEQ ID NO: 3486273 - RNA, 19 nt, Human
aguuagaauuccuucaggg

SEQ ID NO: 3486274 - RNA, 21 nt, Human
aguuagagaacuaaacuaguu

SEQ ID NO: 3486275 - RNA, 14 nt, Human
aguuagagaugccu

SEQ ID NO: 3486276 - RNA, 15 nt, Human
aguuagcaaacuuug

SEQ ID NO: 3486277 - RNA, 11 nt, Human
aguuagcacca

SEQ ID NO: 3486278 - RNA, 16 nt, Human
aguuagccuuuaucua

SEQ ID NO: 3486279 - RNA, 14 nt, Human
aguuagcucaggag

SEQ ID NO: 3486280 - RNA, 18 nt, Human
aguuagcugaagaauuga

SEQ ID NO: 3486281 - RNA, 20 nt, Human
aguuagcuuuaacuuaaaua

SEQ ID NO: 3486282 - RNA, 21 nt, Human
aguuagcuuuaacuuaaauag

SEQ ID NO: 3486283 - RNA, 22 nt, Human
aguuagcuuuaacuuaaauagu

SEQ ID NO: 3486284 - RNA, 12 nt, Human
aguuaggaaaua

SEQ ID NO: 3486285 - RNA, 17 nt, Human
aguuaggaaauaaaacc

SEQ ID NO: 3486286 - RNA, 16 nt, Human
aguuaggaugcucagu

SEQ ID NO: 3486287 - RNA, 16 nt, Human
aguuaggcuuucucuu

SEQ ID NO: 3486288 - RNA, 14 nt, Human
aguuaggggccuua

SEQ ID NO: 3486289 - RNA, 19 nt, Human
aguuagguuuaacauaaag

SEQ ID NO: 3486290 - RNA, 14 nt, Human
aguuaguagcaugu

SEQ ID NO: 3486291 - RNA, 22 nt, Human
aguuagucuacucuuaagccau

SEQ ID NO: 3486292 - RNA, 23 nt, Human
aguuagucuacucuuaagccauc

SEQ ID NO: 3486293 - RNA, 17 nt, Human
aguuaguggauuacugc

SEQ ID NO: 3486294 - RNA, 20 nt, Human
aguuaguggauuacugccau

SEQ ID NO: 3486295 - RNA, 15 nt, Human
aguuauaaaauuaaa

SEQ ID NO: 3486296 - RNA, 18 nt, Human
aguuauacaguuauaaaa

SEQ ID NO: 3486297 - RNA, 15 nt, Human
aguuauagaaagcaa

SEQ ID NO: 3486298 - RNA, 16 nt, Human
aguuauaguuucagau

SEQ ID NO: 3486299 - RNA, 22 nt, Human
aguuauauaaagagaaaauuga

SEQ ID NO: 3486300 - RNA, 14 nt, Human
aguuauauuuugca

SEQ ID NO: 3486301 - RNA, 18 nt, Human
aguuaucaugaauuuuaa

SEQ ID NO: 3486302 - RNA, 18 nt, Human
aguuaucaugcauguuau

SEQ ID NO: 3486303 - RNA, 14 nt, Human
aguuaucauguuag

SEQ ID NO: 3486304 - RNA, 15 nt, Human
aguuaucauguuagu

SEQ ID NO: 3486305 - RNA, 18 nt, Human
aguuaucauguuaguaau

SEQ ID NO: 3486306 - RNA, 17 nt, Human
aguuaucuaaaagaaau

SEQ ID NO: 3486307 - RNA, 22 nt, Human
aguuaucuaaguuaauuuaaag

SEQ ID NO: 3486308 - RNA, 20 nt, Human
aguuaugauuuuuuuuucau

SEQ ID NO: 3486309 - RNA, 21 nt, Human
aguuauggccuauacacuauu

SEQ ID NO: 3486310 - RNA, 19 nt, Human
aguuauggcuauaggugcu

SEQ ID NO: 3486311 - RNA, 23 nt, Human
aguuauggugccgaauugucuuu

SEQ ID NO: 3486312 - RNA, 13 nt, Human
aguuauguaaaua

SEQ ID NO: 3486313 - RNA, 15 nt, Human
aguuaugugaaugau

SEQ ID NO: 3486314 - RNA, 14 nt, Human
aguuauuaaaauug

SEQ ID NO: 3486315 - RNA, 21 nt, Human
aguuauuaagagguaagacuu

SEQ ID NO: 3486316 - RNA, 19 nt, Human
aguuauucacaaaaauuga

SEQ ID NO: 3486317 - RNA, 19 nt, Human
aguuauucauauucuguug

SEQ ID NO: 3486318 - RNA, 19 nt, Human
aguuauugagauuguccuc

SEQ ID NO: 3486319 - RNA, 19 nt, Human
aguuauugauaaguucaua

SEQ ID NO: 3486320 - RNA, 19 nt, Human
aguuauugcaguuuaucau

SEQ ID NO: 3486321 - RNA, 13 nt, Human
aguuauuguacag

SEQ ID NO: 3486322 - RNA, 21 nt, Human
aguuauuuauuuauuggagau

SEQ ID NO: 3486323 - RNA, 18 nt, Human
aguuauuucuuguuuguu

SEQ ID NO: 3486324 - RNA, 19 nt, Human
aguuauuuuaauuaucuuu

SEQ ID NO: 3486325 - RNA, 15 nt, Human
aguucaaagucauga

SEQ ID NO: 3486326 - RNA, 19 nt, Human
aguucaagaaauaaguuuu

SEQ ID NO: 3486327 - RNA, 15 nt, Human
aguucaagaaaugaa

SEQ ID NO: 3486328 - RNA, 16 nt, Human
aguucaagaccagccu

SEQ ID NO: 3486329 - RNA, 19 nt, Human
aguucaagaccagccuggc

SEQ ID NO: 3486330 - RNA, 23 nt, Human
aguucaaggaacuugaaaaauac

SEQ ID NO: 3486331 - RNA, 21 nt, Human
aguucaauaaaugucuguuga

SEQ ID NO: 3486332 - RNA, 24 nt, Human
aguucaaucuggauucauauuuaa

SEQ ID NO: 3486333 - RNA, 11 nt, Human
aguucaaugau

SEQ ID NO: 3486334 - RNA, 12 nt, Human
aguucaaugauc

SEQ ID NO: 3486335 - RNA, 15 nt, Human
aguucaaugaucuag

SEQ ID NO: 3486336 - RNA, 16 nt, Human
aguucaaugaucuagg

SEQ ID NO: 3486337 - RNA, 20 nt, Human
aguucaaugaucuagguuua

SEQ ID NO: 3486338 - RNA, 23 nt, Human
aguucaaugaucuagguuuaacu

SEQ ID NO: 3486339 - RNA, 14 nt, Human
aguucaauggcugc

SEQ ID NO: 3486340 - RNA, 17 nt, Human
aguucaauggcugcuga

SEQ ID NO: 3486341 - RNA, 18 nt, Human
aguucacacccugcaagg

SEQ ID NO: 3486342 - RNA, 18 nt, Human
aguucacauuagaauuag

SEQ ID NO: 3486343 - RNA, 22 nt, Human
aguucacuucaucuucucagcu

SEQ ID NO: 3486344 - RNA, 15 nt, Human
aguucagaauuuagu

SEQ ID NO: 3486345 - RNA, 16 nt, Human
aguucagagcugcccu

SEQ ID NO: 3486346 - RNA, 19 nt, Human
aguucagagcugcccucuc

SEQ ID NO: 3486347 - RNA, 21 nt, Human
auacuacugaaacagauuuca

SEQ ID NO: 3486348 - RNA, 12 nt, Human
auacuacuuaug

SEQ ID NO: 3486349 - RNA, 19 nt, Human
auacuacuuaugaaaugug

SEQ ID NO: 3486350 - RNA, 15 nt, Human
auacuagauuuggga

SEQ ID NO: 3486351 - RNA, 16 nt, Human
auacuagggagccauu

SEQ ID NO: 3486352 - RNA, 13 nt, Human
auacuaguuguga

SEQ ID NO: 3486353 - RNA, 16 nt, Human
auacuaguugugaccu

SEQ ID NO: 3486354 - RNA, 20 nt, Human
auacuaguugugaccuuagu

SEQ ID NO: 3486355 - RNA, 15 nt, Human
auacuauauuuuagg

SEQ ID NO: 3486356 - RNA, 22 nt, Human
auacuauuaaaaagguuuacag

SEQ ID NO: 3486357 - RNA, 17 nt, Human
auacuauuaaacaugcu

SEQ ID NO: 3486358 - RNA, 20 nt, Human
auacuauuaaacaugcugua

SEQ ID NO: 3486359 - RNA, 20 nt, Human
auacuauuuaagaugugaaa

SEQ ID NO: 3486360 - RNA, 20 nt, Human
auacuauuuaguuuuuguaa

SEQ ID NO: 3486361 - RNA, 18 nt, Human
auacuauuuuuacugcca

SEQ ID NO: 3486362 - RNA, 20 nt, Human
auacuauuuuuacugccacu

SEQ ID NO: 3486363 - RNA, 23 nt, Human
auacucaagagugguaucuugca

SEQ ID NO: 3486364 - RNA, 20 nt, Human
auacucagccugcugcccag

SEQ ID NO: 3486365 - RNA, 17 nt, Human
auacucauaaugugaag

SEQ ID NO: 3486366 - RNA, 18 nt, Human
auacucauaaugugaagu

SEQ ID NO: 3486367 - RNA, 14 nt, Human
auacucauguguau

SEQ ID NO: 3486368 - RNA, 14 nt, Human
auacucauuucuaa

SEQ ID NO: 3486369 - RNA, 22 nt, Human
auacuccaaccauauggauauu

SEQ ID NO: 3486370 - RNA, 17 nt, Human
auacuccuaugcuuuag

SEQ ID NO: 3486371 - RNA, 13 nt, Human
auacucuaauucu

SEQ ID NO: 3486372 - RNA, 21 nt, Human
auacucuagauuuuguuuugc

SEQ ID NO: 3486373 - RNA, 16 nt, Human
auacucugcuuagaau

SEQ ID NO: 3486374 - RNA, 12 nt, Human
auacucugucag

SEQ ID NO: 3486375 - RNA, 14 nt, Human
auacucugucagau

SEQ ID NO: 3486376 - RNA, 16 nt, Human
auacucugucagaugg

SEQ ID NO: 3486377 - RNA, 21 nt, Human
auacucuuaggaagagaaacc

SEQ ID NO: 3486378 - RNA, 18 nt, Human
auacucuuauaucuauau

SEQ ID NO: 3486379 - RNA, 22 nt, Human
auacucuuccuauuuuuguagu

SEQ ID NO: 3486380 - RNA, 23 nt, Human
auacucuuucuguauauacuuuu

SEQ ID NO: 3486381 - RNA, 15 nt, Human
auacugaacaucuga

SEQ ID NO: 3486382 - RNA, 20 nt, Human
auacugaacaucugaguccu

SEQ ID NO: 3486383 - RNA, 23 nt, Human
auacugaaccacuuguagauuug

SEQ ID NO: 3486384 - RNA, 13 nt, Human
auacugaagaugc

SEQ ID NO: 3486385 - RNA, 14 nt, Human
auacugaaggaaaa

SEQ ID NO: 3486386 - RNA, 13 nt, Human
auacugauguguu

SEQ ID NO: 3486387 - RNA, 17 nt, Human
auacugauuaugucuuu

SEQ ID NO: 3486388 - RNA, 15 nt, Human
auacugcagggccag

SEQ ID NO: 3486389 - RNA, 17 nt, Human
auacugcagggccagga

SEQ ID NO: 3486390 - RNA, 17 nt, Human
auacugccagaugcuga

SEQ ID NO: 3486391 - RNA, 13 nt, Human
auacugccucccc

SEQ ID NO: 3486392 - RNA, 15 nt, Human
auacugccuccccca

SEQ ID NO: 3486393 - RNA, 15 nt, Human
auacugcuacagcaa

SEQ ID NO: 3486394 - RNA, 19 nt, Human
auacugcuacagcaauuuc

SEQ ID NO: 3486395 - RNA, 15 nt, Human
auacugcuuggagcu

SEQ ID NO: 3486396 - RNA, 14 nt, Human
auacuggaaagcuu

SEQ ID NO: 3486397 - RNA, 16 nt, Human
auacuggaaguuuugc

SEQ ID NO: 3486398 - RNA, 20 nt, Human
auacuggaaguuuugcauuu

SEQ ID NO: 3486399 - RNA, 15 nt, Human
auacuggccuggacu

SEQ ID NO: 3486400 - RNA, 23 nt, Human
auacugggacaccauuaccaaaa

SEQ ID NO: 3486401 - RNA, 16 nt, Human
auacuguaaagaaaga

SEQ ID NO: 3486402 - RNA, 18 nt, Human
auacuguaaagaaagaga

SEQ ID NO: 3486403 - RNA, 19 nt, Human
auacuguaaagaaagagag

SEQ ID NO: 3486404 - RNA, 15 nt, Human
auacuguacaugaaa

SEQ ID NO: 3486405 - RNA, 19 nt, Human
auacuguacaugaaaguag

SEQ ID NO: 3486406 - RNA, 16 nt, Human
auacuguaguauucuu

SEQ ID NO: 3486407 - RNA, 16 nt, Human
auacuguauuaagagu

SEQ ID NO: 3486408 - RNA, 22 nt, Human
auacugugugcuuguuuuauaa

SEQ ID NO: 3486409 - RNA, 14 nt, Human
auacuguguggaac

SEQ ID NO: 3486410 - RNA, 15 nt, Human
auacuguuauucuuu

SEQ ID NO: 3486411 - RNA, 14 nt, Human
agcuguuaaacugu

SEQ ID NO: 3486412 - RNA, 16 nt, Human
agcuguuaaacuguua

SEQ ID NO: 3486413 - RNA, 19 nt, Human
agcuguuaaacuguuagca

SEQ ID NO: 3486414 - RNA, 23 nt, Human
agcuguuaaacuguuagcacugu

SEQ ID NO: 3486415 - RNA, 15 nt, Human
agcuguuaccauuca

SEQ ID NO: 3486416 - RNA, 14 nt, Human
agcuguuacugucu

SEQ ID NO: 3486417 - RNA, 19 nt, Human
agcuguuacugucuucagu

SEQ ID NO: 3486418 - RNA, 16 nt, Human
agcuguucacagccag

SEQ ID NO: 3486419 - RNA, 19 nt, Human
agcuguucacagccagacu

SEQ ID NO: 3486420 - RNA, 19 nt, Human
agcuguuccuguucaguaa

SEQ ID NO: 3486421 - RNA, 17 nt, Human
agcuguucuaauggauu

SEQ ID NO: 3486422 - RNA, 15 nt, Human
agcuguucugucccu

SEQ ID NO: 3486423 - RNA, 20 nt, Human
agcuguucugucccuuggag

SEQ ID NO: 3486424 - RNA, 22 nt, Human
agcuguucugucccuuggagcu

SEQ ID NO: 3486425 - RNA, 15 nt, Human
agcuguucuuccugg

SEQ ID NO: 3486426 - RNA, 13 nt, Human
agcuguugaccag

SEQ ID NO: 3486427 - RNA, 15 nt, Human
agcuguugaccaggc

SEQ ID NO: 3486428 - RNA, 13 nt, Human
agcuguugacucu

SEQ ID NO: 3486429 - RNA, 14 nt, Human
agcuguugagcugu

SEQ ID NO: 3486430 - RNA, 23 nt, Human
agcuguugaugggaugauugaag

SEQ ID NO: 3486431 - RNA, 18 nt, Human
agcuguuguacauuuaug

SEQ ID NO: 3486432 - RNA, 20 nt, Human
agcuguuguacauuuaugau

SEQ ID NO: 3486433 - RNA, 22 nt, Human
agcuguuguacauuuaugauuu

SEQ ID NO: 3486434 - RNA, 21 nt, Human
agcuguugucucuucuccuua

SEQ ID NO: 3486435 - RNA, 13 nt, Human
agcuguuuaugca

SEQ ID NO: 3486436 - RNA, 17 nt, Human
agcuguuuauggccuca

SEQ ID NO: 3486437 - RNA, 19 nt, Human
agcuguuuauggccucagc

SEQ ID NO: 3486438 - RNA, 17 nt, Human
agcuguuuauguuuuua

SEQ ID NO: 3486439 - RNA, 13 nt, Human
agcuguuuggaaa

SEQ ID NO: 3486440 - RNA, 18 nt, Human
agcuguuuuaguuaaauu

SEQ ID NO: 3486441 - RNA, 12 nt, Human
agcuuaaaacuu

SEQ ID NO: 3486442 - RNA, 16 nt, Human
agcuuaaaacuuugaa

SEQ ID NO: 3486443 - RNA, 23 nt, Human
agcuuaaaauaaacaguugugaa

SEQ ID NO: 3486444 - RNA, 13 nt, Human
agcuuaaaauaca

SEQ ID NO: 3486445 - RNA, 15 nt, Human
agcuuaaaauacaag

SEQ ID NO: 3486446 - RNA, 17 nt, Human
agcuuaaaauacaagac

SEQ ID NO: 3486447 - RNA, 20 nt, Human
agcuuaaaauacaagacugc

SEQ ID NO: 3486448 - RNA, 20 nt, Human
agcuuaagaaauuuguggaa

SEQ ID NO: 3486449 - RNA, 16 nt, Human
agcuuaagccacugcc

SEQ ID NO: 3486450 - RNA, 20 nt, Human
agcuuaagccacugccucuc

SEQ ID NO: 3486451 - RNA, 21 nt, Human
agcuuaagccacugccucucc

SEQ ID NO: 3486452 - RNA, 23 nt, Human
agcuuaagccacugccucucccu

SEQ ID NO: 3486453 - RNA, 14 nt, Human
agcuuaaugcuaca

SEQ ID NO: 3486454 - RNA, 22 nt, Human
agcuuaauggcugauaauuuua

SEQ ID NO: 3486455 - RNA, 19 nt, Human
agcuuacaagccagcugga

SEQ ID NO: 3486456 - RNA, 16 nt, Human
agcuuacacaaaucua

SEQ ID NO: 3486457 - RNA, 20 nt, Human
agcuuacacaaaucuauuua

SEQ ID NO: 3486458 - RNA, 15 nt, Human
agcuuaccugacaca

SEQ ID NO: 3486459 - RNA, 17 nt, Human
agcuuaccugacacaag

SEQ ID NO: 3486460 - RNA, 10 nt, Human
agcuuagaac

SEQ ID NO: 3486461 - RNA, 18 nt, Human
agcuuagaauuauuugca

SEQ ID NO: 3486462 - RNA, 15 nt, Human
agcuuagagccuccc

SEQ ID NO: 3486463 - RNA, 22 nt, Human
agcuuagaguuggccauauuua

SEQ ID NO: 3486464 - RNA, 15 nt, Human
agcuuagauuucaua

SEQ ID NO: 3486465 - RNA, 16 nt, Human
agcuuagcaggagagg

SEQ ID NO: 3486466 - RNA, 22 nt, Human
agcuuagcaggagaggagagcc

SEQ ID NO: 3486467 - RNA, 17 nt, Human
agcuuagccaauguggg

SEQ ID NO: 3486468 - RNA, 15 nt, Human
agcuuagggcccugg

SEQ ID NO: 3486469 - RNA, 14 nt, Human
agcuuagggucuca

SEQ ID NO: 3486470 - RNA, 18 nt, Human
agcuuagggucucagggu

SEQ ID NO: 3486471 - RNA, 22 nt, Human
agcuuaucaauuugucauuuug

SEQ ID NO: 3486472 - RNA, 19 nt, Human
agcuuaucaugcugucuuu

SEQ ID NO: 3486473 - RNA, 23 nt, Human
agcuuaucuacuuccaaacuaau

SEQ ID NO: 3486474 - RNA, 12 nt, Human
agcuuaucucag

SEQ ID NO: 3486475 - RNA, 14 nt, Human
agcuuaucucaggg

SEQ ID NO: 3486476 - RNA, 11 nt, Human
agcuuaucucu

SEQ ID NO: 3486477 - RNA, 23 nt, Human
agcuuaucucuuuuauauuugua

SEQ ID NO: 3486478 - RNA, 15 nt, Human
agcuuauuaaaacuc

SEQ ID NO: 3486479 - RNA, 15 nt, Human
agcuuauuaaugcua

SEQ ID NO: 3486480 - RNA, 16 nt, Human
agcuuauuaaugcuaa

SEQ ID NO: 3486481 - RNA, 21 nt, Human
agcuuauuaaugcuaagggca

SEQ ID NO: 3486482 - RNA, 20 nt, Human
agcuuauuuccucauuuuua

SEQ ID NO: 3486483 - RNA, 14 nt, Human
agcuuauuuuuaca

SEQ ID NO: 3486484 - RNA, 22 nt, Human
agcuuauuuuuacaguuauaga

SEQ ID NO: 3486485 - RNA, 17 nt, Human
agcuucaagucugugcc

SEQ ID NO: 3486486 - RNA, 19 nt, Human
agcuucaagucugugccug

SEQ ID NO: 3486487 - RNA, 24 nt, Human
agcuucaagucugugccuggagcu

SEQ ID NO: 3486488 - RNA, 15 nt, Human
agcuucaccagagca

SEQ ID NO: 3486489 - RNA, 21 nt, Human
agcuucaccccaaucccagcu

SEQ ID NO: 3486490 - RNA, 18 nt, Human
agcuucacuguaaaauaa

SEQ ID NO: 3486491 - RNA, 16 nt, Human
agcuucagaaguuugg

SEQ ID NO: 3486492 - RNA, 14 nt, Human
auaacaaagauauc

SEQ ID NO: 3486493 - RNA, 17 nt, Human
auaacaaagauaucuuu

SEQ ID NO: 3486494 - RNA, 15 nt, Human
auaacaaccuggaga

SEQ ID NO: 3486495 - RNA, 16 nt, Human
auaacaagaucuuuca

SEQ ID NO: 3486496 - RNA, 21 nt, Human
auaacaagguccaagauaccu

SEQ ID NO: 3486497 - RNA, 15 nt, Human
auaacaaugcuguau

SEQ ID NO: 3486498 - RNA, 22 nt, Human
auaacaauguuaaggaaacucu

SEQ ID NO: 3486499 - RNA, 15 nt, Human
auaacaauuccucua

SEQ ID NO: 3486500 - RNA, 23 nt, Human
auaacacacagcuaacacacagc

SEQ ID NO: 3486501 - RNA, 12 nt, Human
auaacacauuuu

SEQ ID NO: 3486502 - RNA, 23 nt, Human
auaacacuauaaagguugacaau

SEQ ID NO: 3486503 - RNA, 17 nt, Human
auaacacugugaagagc

SEQ ID NO: 3486504 - RNA, 16 nt, Human
auaacagaaugcacca

SEQ ID NO: 3486505 - RNA, 15 nt, Human
auaacagauuucuca

SEQ ID NO: 3486506 - RNA, 20 nt, Human
auaacagggauugauuuuaa

SEQ ID NO: 3486507 - RNA, 21 nt, Human
auaacagggauugauuuuaaa

SEQ ID NO: 3486508 - RNA, 22 nt, Human
auaacagggauugauuuuaaaa

SEQ ID NO: 3486509 - RNA, 18 nt, Human
auaacagguuauuuuagu

SEQ ID NO: 3486510 - RNA, 16 nt, Human
auaacaguaaaugugc

SEQ ID NO: 3486511 - RNA, 19 nt, Human
auaacagucuuacugcagg

SEQ ID NO: 3486512 - RNA, 20 nt, Human
auaacagugcauauuccuuu

SEQ ID NO: 3486513 - RNA, 14 nt, Human
auaacagugccauu

SEQ ID NO: 3486514 - RNA, 23 nt, Human
auaacagugccauugucuuuaua

SEQ ID NO: 3486515 - RNA, 14 nt, Human
auaacauaaaucug

SEQ ID NO: 3486516 - RNA, 15 nt, Human
auaacauaaaucugu

SEQ ID NO: 3486517 - RNA, 18 nt, Human
auaacauaaaucugugaa

SEQ ID NO: 3486518 - RNA, 18 nt, Human
auaacaucuuuauugaaa

SEQ ID NO: 3486519 - RNA, 16 nt, Human
auaacaugaaaugaua

SEQ ID NO: 3486520 - RNA, 12 nt, Human
auaacauguaau

SEQ ID NO: 3486521 - RNA, 18 nt, Human
auaacauguaauuaagua

SEQ ID NO: 3486522 - RNA, 20 nt, Human
auaaccaaagcccaaagugg

SEQ ID NO: 3486523 - RNA, 12 nt, Human
auaaccacugcu

SEQ ID NO: 3486524 - RNA, 12 nt, Human
auaaccccaccc

SEQ ID NO: 3486525 - RNA, 15 nt, Human
auaacccuaacacac

SEQ ID NO: 3486526 - RNA, 23 nt, Human
auaaccguuuccuuucauuuacu

SEQ ID NO: 3486527 - RNA, 15 nt, Human
auaaccuaguuaaag

SEQ ID NO: 3486528 - RNA, 17 nt, Human
auaaccuaguuaaagaa

SEQ ID NO: 3486529 - RNA, 20 nt, Human
auaaccuaguuaaagaaagg

SEQ ID NO: 3486530 - RNA, 17 nt, Human
auaacgaaguugggcaa

SEQ ID NO: 3486531 - RNA, 21 nt, Human
auaacggaucagaaauacaga

SEQ ID NO: 3486532 - RNA, 18 nt, Human
auaacguuuaagccaaaa

SEQ ID NO: 3486533 - RNA, 17 nt, Human
auaacguuuuuccuuua

SEQ ID NO: 3486534 - RNA, 15 nt, Human
auaacuaaaauguau

SEQ ID NO: 3486535 - RNA, 15 nt, Human
auaacuaaauuugau

SEQ ID NO: 3486536 - RNA, 16 nt, Human
auaacuaaauuugaua

SEQ ID NO: 3486537 - RNA, 21 nt, Human
auaacuaacaaccaaagacua

SEQ ID NO: 3486538 - RNA, 19 nt, Human
auaacuacuccggagacag

SEQ ID NO: 3486539 - RNA, 13 nt, Human
auaacuacugugu

SEQ ID NO: 3486540 - RNA, 18 nt, Human
auaacuacuguguuccug

SEQ ID NO: 3486541 - RNA, 19 nt, Human
auaacuagaacugaauuuu

SEQ ID NO: 3486542 - RNA, 14 nt, Human
auaacuauucaguu

SEQ ID NO: 3486543 - RNA, 16 nt, Human
auaacucaucauaaaa

SEQ ID NO: 3486544 - RNA, 17 nt, Human
auaacuccucauuguaa

SEQ ID NO: 3486545 - RNA, 22 nt, Human
auaacuccucccaggguuuuaa

SEQ ID NO: 3486546 - RNA, 21 nt, Human
auaacucuguaaaaacacuga

SEQ ID NO: 3486547 - RNA, 13 nt, Human
auaacugaaaaug

SEQ ID NO: 3486548 - RNA, 17 nt, Human
auaacugaaaauuauuu

SEQ ID NO: 3486549 - RNA, 14 nt, Human
auaacugaacaucc

SEQ ID NO: 3486550 - RNA, 16 nt, Human
auaacugaaggagaag

SEQ ID NO: 3486551 - RNA, 16 nt, Human
auaacugacaaaucaa

SEQ ID NO: 3486552 - RNA, 17 nt, Human
auaacugacaaaucaag

SEQ ID NO: 3486553 - RNA, 21 nt, Human
auaacugacaaaucaaguuuc

SEQ ID NO: 3486554 - RNA, 20 nt, Human
auaacugcaaagugaaguug

SEQ ID NO: 3486555 - RNA, 22 nt, Human
auaacuggaaaacagaacacuu

SEQ ID NO: 3486556 - RNA, 15 nt, Human
auaacuggaaagaag

SEQ ID NO: 3486557 - RNA, 13 nt, Human
auaacugugaagu

SEQ ID NO: 3486558 - RNA, 15 nt, Human
auaacuguguacugu

SEQ ID NO: 3486559 - RNA, 16 nt, Human
auaacuguguacuguu

SEQ ID NO: 3486560 - RNA, 12 nt, Human
auaacuuaaaaa

SEQ ID NO: 3486561 - RNA, 16 nt, Human
auaacuuaaaaaaaug

SEQ ID NO: 3486562 - RNA, 21 nt, Human
auaacuuaaaaauguaaauau

SEQ ID NO: 3486563 - RNA, 16 nt, Human
auaacuuaaugaaaac

SEQ ID NO: 3486564 - RNA, 23 nt, Human
auaacuuaaugaaaacaaugcag

SEQ ID NO: 3486565 - RNA, 13 nt, Human
auaacuucaaauu

SEQ ID NO: 3486566 - RNA, 18 nt, Human
auaacuuccacagggucc

SEQ ID NO: 3486567 - RNA, 12 nt, Human
auaacuuccugu

SEQ ID NO: 3486568 - RNA, 19 nt, Human
auaacuugagaccuaaucu

SEQ ID NO: 3486569 - RNA, 21 nt, Human
auaacuuugcuugcaguagau

SEQ ID NO: 3486570 - RNA, 18 nt, Human
auaacuuuuacacgacca

SEQ ID NO: 3486571 - RNA, 18 nt, Human
auaacuuuuuauauucuc

SEQ ID NO: 3486572 - RNA, 23 nt, Human
auaacuuuuuuuuuucuuuauaa

SEQ ID NO: 3486573 - RNA, 15 nt, Human
auaagaaaaacuuuu

SEQ ID NO: 3486574 - RNA, 15 nt, Human
auaagaaaaaucaug

SEQ ID NO: 3486575 - RNA, 22 nt, Human
auaagaaaaccaccccuuagau

SEQ ID NO: 3486576 - RNA, 18 nt, Human
agcuugggagagccccug

SEQ ID NO: 3486577 - RNA, 22 nt, Human
agcuugggagagccccuggggc

SEQ ID NO: 3486578 - RNA, 10 nt, Human
agcuugggcc

SEQ ID NO: 3486579 - RNA, 18 nt, Human
agcuugggcccagcuggg

SEQ ID NO: 3486580 - RNA, 21 nt, Human
agcuugggcccagcugggcuc

SEQ ID NO: 3486581 - RNA, 14 nt, Human
agcuuggggaagac

SEQ ID NO: 3486582 - RNA, 20 nt, Human
agcuuggggccaccaaagcu

SEQ ID NO: 3486583 - RNA, 14 nt, Human
agcuuggggccagg

SEQ ID NO: 3486584 - RNA, 21 nt, Human
agcuugggggaugacuagagg

SEQ ID NO: 3486585 - RNA, 20 nt, Human
agcuuguaaauagcucaggu

SEQ ID NO: 3486586 - RNA, 14 nt, Human
agcuuguagccagc

SEQ ID NO: 3486587 - RNA, 15 nt, Human
agcuuguagccagcc

SEQ ID NO: 3486588 - RNA, 17 nt, Human
agcuuguaggagcugag

SEQ ID NO: 3486589 - RNA, 22 nt, Human
agcuuguauuuugugaagacug

SEQ ID NO: 3486590 - RNA, 18 nt, Human
agcuuguggcaagugaau

SEQ ID NO: 3486591 - RNA, 12 nt, Human
agcuuguguauc

SEQ ID NO: 3486592 - RNA, 17 nt, Human
agcuuguucccugucuu

SEQ ID NO: 3486593 - RNA, 18 nt, Human
agcuuguuuacaugcuua

SEQ ID NO: 3486594 - RNA, 19 nt, Human
agcuuuaaacucagggaca

SEQ ID NO: 3486595 - RNA, 20 nt, Human
agcuuuaaacucagggacag

SEQ ID NO: 3486596 - RNA, 21 nt, Human
agcuuuaaacucagggacaga

SEQ ID NO: 3486597 - RNA, 20 nt, Human
agcuuuaaccauuaaaacug

SEQ ID NO: 3486598 - RNA, 13 nt, Human
agcuuuacacaca

SEQ ID NO: 3486599 - RNA, 14 nt, Human
agcuuuaccagcug

SEQ ID NO: 3486600 - RNA, 15 nt, Human
agcuuuacuguuugu

SEQ ID NO: 3486601 - RNA, 19 nt, Human
agcuuuagacccugggugg

SEQ ID NO: 3486602 - RNA, 18 nt, Human
agcuuuauacguguagcu

SEQ ID NO: 3486603 - RNA, 23 nt, Human
agcuuuaucaccagagagggacu

SEQ ID NO: 3486604 - RNA, 10 nt, Human
agcuuuauga

SEQ ID NO: 3486605 - RNA, 15 nt, Human
agcuuuaugauuuuc

SEQ ID NO: 3486606 - RNA, 17 nt, Human
agcuuuaugauuuucau

SEQ ID NO: 3486607 - RNA, 23 nt, Human
agcuuuaugauuuucauaacuua

SEQ ID NO: 3486608 - RNA, 14 nt, Human
agcuuuauucuuca

SEQ ID NO: 3486609 - RNA, 21 nt, Human
agcuuuauuuugagauguaaa

SEQ ID NO: 3486610 - RNA, 16 nt, Human
agcuuucaagugccuu

SEQ ID NO: 3486611 - RNA, 17 nt, Human
agcuuucagaauauguc

SEQ ID NO: 3486612 - RNA, 22 nt, Human
agcuuucauguaaacugugcac

SEQ ID NO: 3486613 - RNA, 16 nt, Human
agcuuuccauguugcu

SEQ ID NO: 3486614 - RNA, 21 nt, Human
agcuuucccaaauaaacucua

SEQ ID NO: 3486615 - RNA, 16 nt, Human
agcuuucccugccucu

SEQ ID NO: 3486616 - RNA, 12 nt, Human
agcuuuccugcc

SEQ ID NO: 3486617 - RNA, 20 nt, Human
agcuuuccugccccaggccu

SEQ ID NO: 3486618 - RNA, 21 nt, Human
agcuuuccugccccaggccug

SEQ ID NO: 3486619 - RNA, 22 nt, Human
agcuuucuagaaguuucccuuc

SEQ ID NO: 3486620 - RNA, 15 nt, Human
agcuuucucugcuuc

SEQ ID NO: 3486621 - RNA, 16 nt, Human
agcuuucucugcuuca

SEQ ID NO: 3486622 - RNA, 18 nt, Human
agcuuucucugcuucagc

SEQ ID NO: 3486623 - RNA, 12 nt, Human
agcuuucugaac

SEQ ID NO: 3486624 - RNA, 21 nt, Human
agcuuucugaacagcuggugu

SEQ ID NO: 3486625 - RNA, 14 nt, Human
agcuuucugagcaa

SEQ ID NO: 3486626 - RNA, 20 nt, Human
agcuuucuguccuuuuggca

SEQ ID NO: 3486627 - RNA, 16 nt, Human
agcuuucuugcucccu

SEQ ID NO: 3486628 - RNA, 12 nt, Human
agcuuucuuuuu

SEQ ID NO: 3486629 - RNA, 22 nt, Human
agcuuugaaggccgaaggcagu

SEQ ID NO: 3486630 - RNA, 22 nt, Human
agcuuugacacuggaaugaguu

SEQ ID NO: 3486631 - RNA, 15 nt, Human
agcuuugacucagga

SEQ ID NO: 3486632 - RNA, 19 nt, Human
agcuuugacucuauaagca

SEQ ID NO: 3486633 - RNA, 19 nt, Human
agcuuugauuuagauugag

SEQ ID NO: 3486634 - RNA, 16 nt, Human
agcuuugccagcugcu

SEQ ID NO: 3486635 - RNA, 15 nt, Human
agcuuugcccaacac

SEQ ID NO: 3486636 - RNA, 10 nt, Human
agcuuugcua

SEQ ID NO: 3486637 - RNA, 16 nt, Human
agcucucugcccugug

SEQ ID NO: 3486638 - RNA, 17 nt, Human
agcucucugcccugugu

SEQ ID NO: 3486639 - RNA, 19 nt, Human
agcucucugcccuguguac

SEQ ID NO: 3486640 - RNA, 12 nt, Human
agcucucuguau

SEQ ID NO: 3486641 - RNA, 21 nt, Human
agcucucuguauaaacauuaa

SEQ ID NO: 3486642 - RNA, 13 nt, Human
agcucugaaaucu

SEQ ID NO: 3486643 - RNA, 20 nt, Human
agcucugacauucugauucg

SEQ ID NO: 3486644 - RNA, 22 nt, Human
agcucugaccacuugaggccug

SEQ ID NO: 3486645 - RNA, 15 nt, Human
agcucugagaggccc

SEQ ID NO: 3486646 - RNA, 15 nt, Human
agcucugagcuguca

SEQ ID NO: 3486647 - RNA, 15 nt, Human
agcucugagggaaag

SEQ ID NO: 3486648 - RNA, 16 nt, Human
agcucugcagcccagg

SEQ ID NO: 3486649 - RNA, 12 nt, Human
agcucugcaggc

SEQ ID NO: 3486650 - RNA, 23 nt, Human
agcucugcaggcuuaauaaaaau

SEQ ID NO: 3486651 - RNA, 16 nt, Human
agcucugcaucuccug

SEQ ID NO: 3486652 - RNA, 12 nt, Human
agcucugcauua

SEQ ID NO: 3486653 - RNA, 17 nt, Human
agcucugccgcaauggc

SEQ ID NO: 3486654 - RNA, 23 nt, Human
agcucugcgucgguccuggugcc

SEQ ID NO: 3486655 - RNA, 23 nt, Human
agcucugcuauuaggccagcaag

SEQ ID NO: 3486656 - RNA, 22 nt, Human
agcucugcuccucuccccagca

SEQ ID NO: 3486657 - RNA, 18 nt, Human
agcucuggacagccccac

SEQ ID NO: 3486658 - RNA, 21 nt, Human
agcucuggacagccccacccu

SEQ ID NO: 3486659 - RNA, 19 nt, Human
agcucuggagccaccuguc

SEQ ID NO: 3486660 - RNA, 16 nt, Human
agcucuggaggggagg

SEQ ID NO: 3486661 - RNA, 19 nt, Human
agcucuggaggggaggggg

SEQ ID NO: 3486662 - RNA, 22 nt, Human
agcucuggccacaacagggcau

SEQ ID NO: 3486663 - RNA, 12 nt, Human
agcucuggcuga

SEQ ID NO: 3486664 - RNA, 17 nt, Human
agcucuggcugaacccu

SEQ ID NO: 3486665 - RNA, 20 nt, Human
agcucuggcugaacccugug

SEQ ID NO: 3486666 - RNA, 22 nt, Human
agcucuggcugaacccugugcu

SEQ ID NO: 3486667 - RNA, 23 nt, Human
agcucuggcugaacccugugcug

SEQ ID NO: 3486668 - RNA, 15 nt, Human
agcucugggagagga

SEQ ID NO: 3486669 - RNA, 14 nt, Human
agcucugggguggg

SEQ ID NO: 3486670 - RNA, 21 nt, Human
agcucuggggugggcaguuuu

SEQ ID NO: 3486671 - RNA, 19 nt, Human
agcucuggugacaccagcc

SEQ ID NO: 3486672 - RNA, 20 nt, Human
agcucuggugacaccagccu

SEQ ID NO: 3486673 - RNA, 23 nt, Human
agcucuggugagucuuggcggca

SEQ ID NO: 3486674 - RNA, 12 nt, Human
agcucuguccug

SEQ ID NO: 3486675 - RNA, 16 nt, Human
agcucuguggccacau

SEQ ID NO: 3486676 - RNA, 18 nt, Human
agcucuguguugccaugu

SEQ ID NO: 3486677 - RNA, 23 nt, Human
agcucuguguugccaugugugcu

SEQ ID NO: 3486678 - RNA, 21 nt, Human
agcucuguucuuccucagcca

SEQ ID NO: 3486679 - RNA, 21 nt, Human
agcucuguugcaauuaggauu

SEQ ID NO: 3486680 - RNA, 17 nt, Human
agcucuuacucuuuccu

SEQ ID NO: 3486681 - RNA, 19 nt, Human
agcucuuacucuuuccuau

SEQ ID NO: 3486682 - RNA, 23 nt, Human
agcucuucaucugcccaacugug

SEQ ID NO: 3486683 - RNA, 20 nt, Human
agcucuuccuggacaggcca

SEQ ID NO: 3486684 - RNA, 22 nt, Human
agcucuuccuuacucccaggca

SEQ ID NO: 3486685 - RNA, 16 nt, Human
agcucuucuccaggcu

SEQ ID NO: 3486686 - RNA, 17 nt, Human
agcucuucuccaggcug

SEQ ID NO: 3486687 - RNA, 18 nt, Human
agcucuucuccaggcugu

SEQ ID NO: 3486688 - RNA, 21 nt, Human
agcucuucugccggcccuggg

SEQ ID NO: 3486689 - RNA, 22 nt, Human
agcucuucugccggcccugggg

SEQ ID NO: 3486690 - RNA, 19 nt, Human
agcucuugaagacacugaa

SEQ ID NO: 3486691 - RNA, 12 nt, Human
agcucuugcccu

SEQ ID NO: 3486692 - RNA, 15 nt, Human
agcucuugcccuucc

SEQ ID NO: 3486693 - RNA, 21 nt, Human
agcucuugcccuucccugucc

SEQ ID NO: 3486694 - RNA, 21 nt, Human
agcucuugcuaaucagugucu

SEQ ID NO: 3486695 - RNA, 23 nt, Human
agcucuuguccucaguccauuua

SEQ ID NO: 3486696 - RNA, 16 nt, Human
agcucuugugaggaaa

SEQ ID NO: 3486697 - RNA, 12 nt, Human
agcucuuuccuc

SEQ ID NO: 3486698 - RNA, 15 nt, Human
agcucuuuccuccuu

SEQ ID NO: 3486699 - RNA, 18 nt, Human
agcucuuuuuuguuuguu

SEQ ID NO: 3486700 - RNA, 22 nt, Human
agcugaaaaaucacauccuggc

SEQ ID NO: 3486701 - RNA, 12 nt, Human
agcugaaauacu

SEQ ID NO: 3486702 - RNA, 18 nt, Human
agcugaaaugcugcauuu

SEQ ID NO: 3486703 - RNA, 17 nt, Human
agcugaaauuuuagaaa

SEQ ID NO: 3486704 - RNA, 22 nt, Human
agcugaacagaugaccccugcc

SEQ ID NO: 3486705 - RNA, 15 nt, Human
agcugaaccugggua

SEQ ID NO: 3486706 - RNA, 23 nt, Human
agcugaagagugaggauaugagu

SEQ ID NO: 3486707 - RNA, 14 nt, Human
agcugaagccgcca

SEQ ID NO: 3486708 - RNA, 23 nt, Human
agcugaagguuguggccuuugcg

SEQ ID NO: 3486709 - RNA, 17 nt, Human
agcugaagugcauccaa

SEQ ID NO: 3486710 - RNA, 13 nt, Human
agcugaaguuacu

SEQ ID NO: 3486711 - RNA, 18 nt, Human
agcugaauacauucugcu

SEQ ID NO: 3486712 - RNA, 20 nt, Human
agcugaaugccuccuguggg

SEQ ID NO: 3486713 - RNA, 21 nt, Human
agcugaaugccuccugugggg

SEQ ID NO: 3486714 - RNA, 16 nt, Human
agcugacaaaauacuu

SEQ ID NO: 3486715 - RNA, 21 nt, Human
agcugacaguccucuccaccu

SEQ ID NO: 3486716 - RNA, 16 nt, Human
agcugaccacaggcag

SEQ ID NO: 3486717 - RNA, 17 nt, Human
agcugaccacaggcagu

SEQ ID NO: 3486718 - RNA, 21 nt, Human
agcugaccucuguuguccucc

SEQ ID NO: 3486719 - RNA, 19 nt, Human
agcugacgaacuuccaugg

SEQ ID NO: 3486720 - RNA, 16 nt, Human
agcugacgaggcuggg

SEQ ID NO: 3486721 - RNA, 17 nt, Human
agcugacuuggcuggug

SEQ ID NO: 3486722 - RNA, 18 nt, Human
agcugacuuggcuggugu

SEQ ID NO: 3486723 - RNA, 22 nt, Human
agcugacuuggcugguguggua

SEQ ID NO: 3486724 - RNA, 19 nt, Human
agcugacuuucaaagugga

SEQ ID NO: 3486725 - RNA, 19 nt, Human
agcugagaacuccugacug

SEQ ID NO: 3486726 - RNA, 14 nt, Human
agcugagaauagaa

SEQ ID NO: 3486727 - RNA, 15 nt, Human
agcugagaauagaag

SEQ ID NO: 3486728 - RNA, 19 nt, Human
agcugagacuacaagugug

SEQ ID NO: 3486729 - RNA, 16 nt, Human
agcugagagaaaauaa

SEQ ID NO: 3486730 - RNA, 14 nt, Human
agcugagagacuuu

SEQ ID NO: 3486731 - RNA, 23 nt, Human
agcugagauuauaggcaccuacc

SEQ ID NO: 3486732 - RNA, 16 nt, Human
agcugagcaaaucacc

SEQ ID NO: 3486733 - RNA, 13 nt, Human
agcugagcaggga

SEQ ID NO: 3486734 - RNA, 15 nt, Human
agcugagcagggaga

SEQ ID NO: 3486735 - RNA, 18 nt, Human
agcuucccucccugcugu

SEQ ID NO: 3486736 - RNA, 15 nt, Human
agcuuccugucaaca

SEQ ID NO: 3486737 - RNA, 21 nt, Human
agcuuccuguccccaucuguc

SEQ ID NO: 3486738 - RNA, 19 nt, Human
agcuuccuucugugaaagu

SEQ ID NO: 3486739 - RNA, 15 nt, Human
agcuuccuuggcuuu

SEQ ID NO: 3486740 - RNA, 18 nt, Human
agcuucuaauaaauuaua

SEQ ID NO: 3486741 - RNA, 18 nt, Human
agcuucuaccaugaacag

SEQ ID NO: 3486742 - RNA, 18 nt, Human
agcuucuaucccaggagg

SEQ ID NO: 3486743 - RNA, 12 nt, Human
agcuucuccagg

SEQ ID NO: 3486744 - RNA, 12 nt, Human
agcuucuccugu

SEQ ID NO: 3486745 - RNA, 19 nt, Human
agcuucucuuuaacucagg

SEQ ID NO: 3486746 - RNA, 22 nt, Human
agcuucucuuuaacucaggacu

SEQ ID NO: 3486747 - RNA, 16 nt, Human
agcuucugaccucagc

SEQ ID NO: 3486748 - RNA, 12 nt, Human
agcuucugagac

SEQ ID NO: 3486749 - RNA, 18 nt, Human
agcuucugaggcgcugcu

SEQ ID NO: 3486750 - RNA, 15 nt, Human
agcuucugcccccug

SEQ ID NO: 3486751 - RNA, 14 nt, Human
agcuucugcugggc

SEQ ID NO: 3486752 - RNA, 17 nt, Human
agcuucugcugggcugg

SEQ ID NO: 3486753 - RNA, 17 nt, Human
agcuucugguacucucc

SEQ ID NO: 3486754 - RNA, 20 nt, Human
agcuucugguacucuccuag

SEQ ID NO: 3486755 - RNA, 13 nt, Human
agcuucugucucc

SEQ ID NO: 3486756 - RNA, 16 nt, Human
agcuucuuaaaugaga

SEQ ID NO: 3486757 - RNA, 22 nt, Human
agcuucuuaauauaacugccuu

SEQ ID NO: 3486758 - RNA, 18 nt, Human
agcuucuuaauuaauuug

SEQ ID NO: 3486759 - RNA, 20 nt, Human
agcuucuuccaggugcccag

SEQ ID NO: 3486760 - RNA, 22 nt, Human
agcuucuuccaggugcccagcu

SEQ ID NO: 3486761 - RNA, 17 nt, Human
agcuucuuguuuccuug

SEQ ID NO: 3486762 - RNA, 16 nt, Human
agcuugaaaguuuuca

SEQ ID NO: 3486763 - RNA, 20 nt, Human
agcuugaccgugaggccaga

SEQ ID NO: 3486764 - RNA, 23 nt, Human
agcuugaccgugaggccagagac

SEQ ID NO: 3486765 - RNA, 16 nt, Human
agcuugaccugaggcu

SEQ ID NO: 3486766 - RNA, 15 nt, Human
agcuugacucccaag

SEQ ID NO: 3486767 - RNA, 13 nt, Human
agcuugagccuga

SEQ ID NO: 3486768 - RNA, 18 nt, Human
agcuugauaaagggccaa

SEQ ID NO: 3486769 - RNA, 15 nt, Human
agcuugcacauuugg

SEQ ID NO: 3486770 - RNA, 15 nt, Human
agcuugccagaugcu

SEQ ID NO: 3486771 - RNA, 14 nt, Human
agcuugccccggcc

SEQ ID NO: 3486772 - RNA, 16 nt, Human
agcuugcccuguuaaa

SEQ ID NO: 3486773 - RNA, 19 nt, Human
agcuugcccuguuaaaaga

SEQ ID NO: 3486774 - RNA, 23 nt, Human
agcuugcguuagaaugaggagga

SEQ ID NO: 3486775 - RNA, 16 nt, Human
agcuugcucccugugu

SEQ ID NO: 3486776 - RNA, 20 nt, Human
agcuugcugcccuaggcucc

SEQ ID NO: 3486777 - RNA, 19 nt, Human
agcuugcuucauugggcug

SEQ ID NO: 3486778 - RNA, 16 nt, Human
agcuuggaagagccug

SEQ ID NO: 3486779 - RNA, 17 nt, Human
agcuuggaagagccugc

SEQ ID NO: 3486780 - RNA, 16 nt, Human
agcuuggauuaaauac

SEQ ID NO: 3486781 - RNA, 18 nt, Human
agaauuauuuuuaaaaag

SEQ ID NO: 3486782 - RNA, 17 nt, Human
agaauucaaauuuuauc

SEQ ID NO: 3486783 - RNA, 13 nt, Human
agaauucagcugc

SEQ ID NO: 3486784 - RNA, 16 nt, Human
agaauucagcugcccc

SEQ ID NO: 3486785 - RNA, 17 nt, Human
agaauucagcugccccc

SEQ ID NO: 3486786 - RNA, 15 nt, Human
agaauuccaaagcaa

SEQ ID NO: 3486787 - RNA, 13 nt, Human
agaauuccaagga

SEQ ID NO: 3486788 - RNA, 14 nt, Human
agaauuccaaggag

SEQ ID NO: 3486789 - RNA, 20 nt, Human
agaauuccaaggaguuccau

SEQ ID NO: 3486790 - RNA, 22 nt, Human
agaauucccucucucugacucu

SEQ ID NO: 3486791 - RNA, 19 nt, Human
agaauuccuacaauauaua

SEQ ID NO: 3486792 - RNA, 18 nt, Human
agaauucuagugcugcug

SEQ ID NO: 3486793 - RNA, 19 nt, Human
agaauucucuaguuugauu

SEQ ID NO: 3486794 - RNA, 15 nt, Human
agaauucugauugau

SEQ ID NO: 3486795 - RNA, 15 nt, Human
agaauugaaacacuu

SEQ ID NO: 3486796 - RNA, 16 nt, Human
agaauugaagguuuuu

SEQ ID NO: 3486797 - RNA, 18 nt, Human
agaauugaagguuuuuga

SEQ ID NO: 3486798 - RNA, 16 nt, Human
agaauugacauugaaa

SEQ ID NO: 3486799 - RNA, 17 nt, Human
agaauugacauugaaau

SEQ ID NO: 3486800 - RNA, 21 nt, Human
agaauugaccaucugcuuuua

SEQ ID NO: 3486801 - RNA, 20 nt, Human
agaauugauauacacggaug

SEQ ID NO: 3486802 - RNA, 21 nt, Human
agaauugaucauuuucccccc

SEQ ID NO: 3486803 - RNA, 22 nt, Human
agaauugauugggcacaucauu

SEQ ID NO: 3486804 - RNA, 21 nt, Human
agaauuggagaguaaaaacug

SEQ ID NO: 3486805 - RNA, 21 nt, Human
agaauuggcugaacucaugag

SEQ ID NO: 3486806 - RNA, 18 nt, Human
agaauugugcaaauggaa

SEQ ID NO: 3486807 - RNA, 23 nt, Human
agaauugugcaaauggaagacaa

SEQ ID NO: 3486808 - RNA, 15 nt, Human
agaauugugucugca

SEQ ID NO: 3486809 - RNA, 18 nt, Human
agaauugugucugcagga

SEQ ID NO: 3486810 - RNA, 16 nt, Human
agaauuguugagauac

SEQ ID NO: 3486811 - RNA, 21 nt, Human
agaauuguuggggguuuuuuu

SEQ ID NO: 3486812 - RNA, 21 nt, Human
agaauuuaucacacuucugug

SEQ ID NO: 3486813 - RNA, 14 nt, Human
agaauuuauucaau

SEQ ID NO: 3486814 - RNA, 14 nt, Human
agaauuucaauuug

SEQ ID NO: 3486815 - RNA, 22 nt, Human
agaauuucuaaaaagauuagca

SEQ ID NO: 3486816 - RNA, 23 nt, Human
agaauuucuaaaaagauuagcaa

SEQ ID NO: 3486817 - RNA, 16 nt, Human
agaauuucuaccauuu

SEQ ID NO: 3486818 - RNA, 21 nt, Human
agaauuucuaggacugaauua

SEQ ID NO: 3486819 - RNA, 13 nt, Human
agaauuucuuuau

SEQ ID NO: 3486820 - RNA, 18 nt, Human
agaauuugagugcucuga

SEQ ID NO: 3486821 - RNA, 17 nt, Human
agaauuugauaugugaa

SEQ ID NO: 3486822 - RNA, 20 nt, Human
agaauuugauaugugaacag

SEQ ID NO: 3486823 - RNA, 21 nt, Human
agaauuugauaugugaacagu

SEQ ID NO: 3486824 - RNA, 22 nt, Human
agaauuugauaugugaacaguu

SEQ ID NO: 3486825 - RNA, 19 nt, Human
agaauuuguguugaaggaa

SEQ ID NO: 3486826 - RNA, 23 nt, Human
agaauuuguguugaaggaacuug

SEQ ID NO: 3486827 - RNA, 12 nt, Human
agaauuuuaaaa

SEQ ID NO: 3486828 - RNA, 14 nt, Human
agaauuuuaaaaau

SEQ ID NO: 3486829 - RNA, 16 nt, Human
agaauuuuaaaaauga

SEQ ID NO: 3486830 - RNA, 16 nt, Human
agaauuuuaagugcuu

SEQ ID NO: 3486831 - RNA, 21 nt, Human
agaauuuucagaccccagcgg

SEQ ID NO: 3486832 - RNA, 14 nt, Human
agaauuuuuaaugu

SEQ ID NO: 3486833 - RNA, 14 nt, Human
agaauuuuuuauuu

SEQ ID NO: 3486834 - RNA, 19 nt, Human
agacaaaaaacuauaugua

SEQ ID NO: 3486835 - RNA, 14 nt, Human
agacaaaaaguaua

SEQ ID NO: 3486836 - RNA, 12 nt, Human
agacaaaaauua

SEQ ID NO: 3486837 - RNA, 14 nt, Human
agacaaaaauuauc

SEQ ID NO: 3486838 - RNA, 24 nt, Human
agacaaaaucucuauacugcccug

SEQ ID NO: 3486839 - RNA, 13 nt, Human
agacaaaauuuua

SEQ ID NO: 3486840 - RNA, 20 nt, Human
agacaaaauuuuaguccaaa

SEQ ID NO: 3486841 - RNA, 15 nt, Human
agacaaacuuugcau

SEQ ID NO: 3486842 - RNA, 17 nt, Human
agacaaauacucaugug

SEQ ID NO: 3486843 - RNA, 18 nt, Human
agacaaauacucaugugu

SEQ ID NO: 3486844 - RNA, 17 nt, Human
agacaaauaguaggcaa

SEQ ID NO: 3486845 - RNA, 12 nt, Human
agacaaauauuc

SEQ ID NO: 3486846 - RNA, 12 nt, Human
agacaaauauuu

SEQ ID NO: 3486847 - RNA, 18 nt, Human
agacaaauucauauucuu

SEQ ID NO: 3486848 - RNA, 17 nt, Human
agacaaauucuguuucu

SEQ ID NO: 3486849 - RNA, 18 nt, Human
agacaaauucuguuucuu

SEQ ID NO: 3486850 - RNA, 21 nt, Human
agacaaauucuguuucuugag

SEQ ID NO: 3486851 - RNA, 13 nt, Human
agacaacagaagu

SEQ ID NO: 3486852 - RNA, 15 nt, Human
agacaacagaaguca

SEQ ID NO: 3486853 - RNA, 19 nt, Human
agacaacagguaaaacagg

SEQ ID NO: 3486854 - RNA, 15 nt, Human
agacaaccaaguaug

SEQ ID NO: 3486855 - RNA, 14 nt, Human
agacaacccugcaa

SEQ ID NO: 3486856 - RNA, 20 nt, Human
agacaacccugcaaaggacu

SEQ ID NO: 3486857 - RNA, 17 nt, Human
agacaagaaaucccugu

SEQ ID NO: 3486858 - RNA, 17 nt, Human
agacaagauauuguaca

SEQ ID NO: 3486859 - RNA, 20 nt, Human
agacaagauauuguacauaa

SEQ ID NO: 3486860 - RNA, 23 nt, Human
agacaagauuuuuuaauuguuua

SEQ ID NO: 3486861 - RNA, 13 nt, Human
agacaagcugcaa

SEQ ID NO: 3486862 - RNA, 19 nt, Human
agacaaggaaaaaauaaca

SEQ ID NO: 3486863 - RNA, 16 nt, Human
agacaagguagcccug

SEQ ID NO: 3486864 - RNA, 23 nt, Human
agacaagugaugcuaaaaccuga

SEQ ID NO: 3486865 - RNA, 22 nt, Human
agacaaguuccaugggauacaa

SEQ ID NO: 3486866 - RNA, 12 nt, Human
agacaauaaacc

SEQ ID NO: 3486867 - RNA, 11 nt, Human
agacaauauac

SEQ ID NO: 3486868 - RNA, 13 nt, Human
agacaauauacaa

SEQ ID NO: 3486869 - RNA, 15 nt, Human
agacaauauacaagc

SEQ ID NO: 3486870 - RNA, 14 nt, Human
agacaaucauuguu

SEQ ID NO: 3486871 - RNA, 16 nt, Human
agacaaucauuguuuu

SEQ ID NO: 3486872 - RNA, 22 nt, Human
agacaaucauuguuuugaauau

SEQ ID NO: 3486873 - RNA, 23 nt, Human
agacaaucauuguuuugaauauu

SEQ ID NO: 3486874 - RNA, 23 nt, Human
agacaaugacuuacuguacauga

SEQ ID NO: 3486875 - RNA, 20 nt, Human
agacaaugucugcagcccug

SEQ ID NO: 3486876 - RNA, 17 nt, Human
agacaaugugaaaagaa

SEQ ID NO: 3486877 - RNA, 13 nt, Human
agacaauucuuua

SEQ ID NO: 3486878 - RNA, 19 nt, Human
agacaauugacaacaguua

SEQ ID NO: 3486879 - RNA, 23 nt, Human
agacaauugagguaaguuuuuug

SEQ ID NO: 3486880 - RNA, 18 nt, Human
agacaauuugcacaucuu

SEQ ID NO: 3486881 - RNA, 20 nt, Human
agacacaaacaaacaagcua

SEQ ID NO: 3486882 - RNA, 15 nt, Human
agacacacaaagcag

SEQ ID NO: 3486883 - RNA, 15 nt, Human
agacacacacacgca

SEQ ID NO: 3486884 - RNA, 16 nt, Human
agacacacacacgcac

SEQ ID NO: 3486885 - RNA, 18 nt, Human
agacacacgcacacacac

SEQ ID NO: 3486886 - RNA, 16 nt, Human
agacacagaacacaga

SEQ ID NO: 3486887 - RNA, 14 nt, Human
agacacagauaaua

SEQ ID NO: 3486888 - RNA, 14 nt, Human
agacacagauguuc

SEQ ID NO: 3486889 - RNA, 12 nt, Human
agacacaggccc

SEQ ID NO: 3486890 - RNA, 13 nt, Human
agcugagcagggc

SEQ ID NO: 3486891 - RNA, 14 nt, Human
agcugagcagggcc

SEQ ID NO: 3486892 - RNA, 14 nt, Human
agcugagccaggcu

SEQ ID NO: 3486893 - RNA, 13 nt, Human
agcugagccucuc

SEQ ID NO: 3486894 - RNA, 15 nt, Human
agcugagccuucuga

SEQ ID NO: 3486895 - RNA, 14 nt, Human
agcugagcgccagg

SEQ ID NO: 3486896 - RNA, 22 nt, Human
agcugagcucacaaggcagcaa

SEQ ID NO: 3486897 - RNA, 17 nt, Human
agcugaggcaauucuaa

SEQ ID NO: 3486898 - RNA, 18 nt, Human
agcugaggucucuugagg

SEQ ID NO: 3486899 - RNA, 22 nt, Human
agcugaggugcccaggagaaga

SEQ ID NO: 3486900 - RNA, 21 nt, Human
agcugaguuaggugucugucc

SEQ ID NO: 3486901 - RNA, 16 nt, Human
agcugaguuaugaugu

SEQ ID NO: 3486902 - RNA, 14 nt, Human
agcugaguuuccua

SEQ ID NO: 3486903 - RNA, 13 nt, Human
agcugaucaguuu

SEQ ID NO: 3486904 - RNA, 19 nt, Human
agcugauccagagcacaga

SEQ ID NO: 3486905 - RNA, 20 nt, Human
agcugaucgcuucuccccca

SEQ ID NO: 3486906 - RNA, 23 nt, Human
agcugaugaaacucacaaaugau

SEQ ID NO: 3486907 - RNA, 11 nt, Human
agcugaugacu

SEQ ID NO: 3486908 - RNA, 15 nt, Human
agcugauggagaagg

SEQ ID NO: 3486909 - RNA, 19 nt, Human
agcugauggagaaggaagg

SEQ ID NO: 3486910 - RNA, 17 nt, Human
agcugauguuggaagag

SEQ ID NO: 3486911 - RNA, 21 nt, Human
agcugauguuggaagagaaag

SEQ ID NO: 3486912 - RNA, 19 nt, Human
agcugauuacugucaauaa

SEQ ID NO: 3486913 - RNA, 20 nt, Human
agcugauuacugucaauaaa

SEQ ID NO: 3486914 - RNA, 14 nt, Human
agcugauuuuaaca

SEQ ID NO: 3486915 - RNA, 21 nt, Human
agcugauuuugaggguuuuua

SEQ ID NO: 3486916 - RNA, 20 nt, Human
agcugcaaaguguuuuguac

SEQ ID NO: 3486917 - RNA, 18 nt, Human
agcugcaagugacaucuc

SEQ ID NO: 3486918 - RNA, 19 nt, Human
agcugcaaucgcuuuccua

SEQ ID NO: 3486919 - RNA, 21 nt, Human
agcugcacagggcagcugggc

SEQ ID NO: 3486920 - RNA, 18 nt, Human
agcugcacccucaggcag

SEQ ID NO: 3486921 - RNA, 20 nt, Human
agcugcacugaugcugcccc

SEQ ID NO: 3486922 - RNA, 11 nt, Human
agcugcagcuu

SEQ ID NO: 3486923 - RNA, 23 nt, Human
agcugcaggaaucaaaaauugaa

SEQ ID NO: 3486924 - RNA, 14 nt, Human
agcugcaggggcau

SEQ ID NO: 3486925 - RNA, 18 nt, Human
agcugcauacaguuugca

SEQ ID NO: 3486926 - RNA, 13 nt, Human
aggaaagcaagaa

SEQ ID NO: 3486927 - RNA, 19 nt, Human
aggaaagcaguugaaauga

SEQ ID NO: 3486928 - RNA, 20 nt, Human
aggaaagccucacugauaua

SEQ ID NO: 3486929 - RNA, 16 nt, Human
aggaaaggcuccagga

SEQ ID NO: 3486930 - RNA, 20 nt, Human
aggaaaggcuccaggagcag

SEQ ID NO: 3486931 - RNA, 23 nt, Human
aggaaaggcuccaggagcagcca

SEQ ID NO: 3486932 - RNA, 13 nt, Human
aggaaagggaagg

SEQ ID NO: 3486933 - RNA, 18 nt, Human
aggaaaggggagaaggga

SEQ ID NO: 3486934 - RNA, 16 nt, Human
aggaaagucauuggcu

SEQ ID NO: 3486935 - RNA, 17 nt, Human
aggaaagucauuggcuu

SEQ ID NO: 3486936 - RNA, 20 nt, Human
aggaaagucauuggcuuuau

SEQ ID NO: 3486937 - RNA, 21 nt, Human
aggaaaguucagaguuuucug

SEQ ID NO: 3486938 - RNA, 18 nt, Human
aggaaauaaaaaagucuc

SEQ ID NO: 3486939 - RNA, 16 nt, Human
aggaaauaaaaccuuu

SEQ ID NO: 3486940 - RNA, 20 nt, Human
aggaaauaaaaccuuucaaa

SEQ ID NO: 3486941 - RNA, 21 nt, Human
aggaaauaaaaccuuucaaau

SEQ ID NO: 3486942 - RNA, 13 nt, Human
aggaaaucaaagu

SEQ ID NO: 3486943 - RNA, 14 nt, Human
aggaaaucaaagug

SEQ ID NO: 3486944 - RNA, 19 nt, Human
aggaaaucaaagugcuauu

SEQ ID NO: 3486945 - RNA, 20 nt, Human
aggaaaucaaauaugcaaag

SEQ ID NO: 3486946 - RNA, 13 nt, Human
aggaaaucaaaug

SEQ ID NO: 3486947 - RNA, 21 nt, Human
aggaaaucaacuugcuuauca

SEQ ID NO: 3486948 - RNA, 22 nt, Human
aggaaaucccuucauacuugaa

SEQ ID NO: 3486949 - RNA, 11 nt, Human
aggaaaucugu

SEQ ID NO: 3486950 - RNA, 17 nt, Human
aggaaaugaaugugugu

SEQ ID NO: 3486951 - RNA, 21 nt, Human
aggaaaugcugacccaugggc

SEQ ID NO: 3486952 - RNA, 22 nt, Human
aggaaaugcugacccaugggca

SEQ ID NO: 3486953 - RNA, 23 nt, Human
aggaaaugcugacccaugggcag

SEQ ID NO: 3486954 - RNA, 20 nt, Human
aggaaauguuuuuaauaaaa

SEQ ID NO: 3486955 - RNA, 22 nt, Human
aggaacaaaaaaaccacaaagg

SEQ ID NO: 3486956 - RNA, 13 nt, Human
aggaacaaaucuu

SEQ ID NO: 3486957 - RNA, 17 nt, Human
aggaacaaggcaaggcu

SEQ ID NO: 3486958 - RNA, 23 nt, Human
aggaacacaggcgcugaguaugg

SEQ ID NO: 3486959 - RNA, 23 nt, Human
aggaacacccgacuccucaaaag

SEQ ID NO: 3486960 - RNA, 15 nt, Human
aggaacacucugaau

SEQ ID NO: 3486961 - RNA, 14 nt, Human
aggaacagaaggau

SEQ ID NO: 3486962 - RNA, 13 nt, Human
aggaaccaaagcg

SEQ ID NO: 3486963 - RNA, 13 nt, Human
aggaaccaacaau

SEQ ID NO: 3486964 - RNA, 23 nt, Human
aggaaccgagggggcugcuccca

SEQ ID NO: 3486965 - RNA, 21 nt, Human
aggaaccucugauuuauuuug

SEQ ID NO: 3486966 - RNA, 19 nt, Human
aggaaccuggaccaaagcu

SEQ ID NO: 3486967 - RNA, 13 nt, Human
aggaaccuguccu

SEQ ID NO: 3486968 - RNA, 19 nt, Human
aggaaccuuccuuccugcu

SEQ ID NO: 3486969 - RNA, 13 nt, Human
aggaacucccagc

SEQ ID NO: 3486970 - RNA, 17 nt, Human
aggaacugcagcaaucu

SEQ ID NO: 3486971 - RNA, 22 nt, Human
aggaacugcugggcuuggcagc

SEQ ID NO: 3486972 - RNA, 13 nt, Human
aggaacuguacag

SEQ ID NO: 3486973 - RNA, 15 nt, Human
aggaacuguacagaa

SEQ ID NO: 3486974 - RNA, 18 nt, Human
aggaacuguagaugaugu

SEQ ID NO: 3486975 - RNA, 17 nt, Human
aggaacuguccagagag

SEQ ID NO: 3486976 - RNA, 20 nt, Human
aggaacuguccagagagcaa

SEQ ID NO: 3486977 - RNA, 18 nt, Human
aggaacuugaaaaauacu

SEQ ID NO: 3486978 - RNA, 18 nt, Human
aggaacuugagaacuuua

SEQ ID NO: 3486979 - RNA, 19 nt, Human
aggaagaaacagaagagag

SEQ ID NO: 3486980 - RNA, 11 nt, Human
aggaagaaauu

SEQ ID NO: 3486981 - RNA, 12 nt, Human
aggaagaacggg

SEQ ID NO: 3486982 - RNA, 18 nt, Human
aggaagaacggggcucuu

SEQ ID NO: 3486983 - RNA, 20 nt, Human
aggaagaagcuuaggcaggg

SEQ ID NO: 3486984 - RNA, 18 nt, Human
aggaagaauagggcccau

SEQ ID NO: 3486985 - RNA, 20 nt, Human
aggaagaauggugugggaga

SEQ ID NO: 3486986 - RNA, 20 nt, Human
aggaagaauuuuaaaaauga

SEQ ID NO: 3486987 - RNA, 14 nt, Human
aggaagacuuugga

SEQ ID NO: 3486988 - RNA, 17 nt, Human
aggaagagaaggagcag

SEQ ID NO: 3486989 - RNA, 17 nt, Human
aggaagagcaggcacau

SEQ ID NO: 3486990 - RNA, 14 nt, Human
aggaagagggacag

SEQ ID NO: 3486991 - RNA, 21 nt, Human
aggaagaguagcauuucauuc

SEQ ID NO: 3486992 - RNA, 20 nt, Human
aggaagaucacuuugcucug

SEQ ID NO: 3486993 - RNA, 14 nt, Human
aggaagaucaggcc

SEQ ID NO: 3486994 - RNA, 19 nt, Human
aggaagaugggggcaagaa

SEQ ID NO: 3486995 - RNA, 13 nt, Human
aggaagauuugga

SEQ ID NO: 3486996 - RNA, 16 nt, Human
aggaagcaaacuaagc

SEQ ID NO: 3486997 - RNA, 15 nt, Human
aggaagcaagcuuaa

SEQ ID NO: 3486998 - RNA, 16 nt, Human
aggaagcacaugccuc

SEQ ID NO: 3486999 - RNA, 13 nt, Human
aggaagcagaaua

SEQ ID NO: 3487000 - RNA, 16 nt, Human
aggaagcauuguaaaa

SEQ ID NO: 3487001 - RNA, 19 nt, Human
aggaagcauuguaaaauaa

SEQ ID NO: 3487002 - RNA, 13 nt, Human
aggaagccagcag

SEQ ID NO: 3487003 - RNA, 14 nt, Human
aggaagccagcagg

SEQ ID NO: 3487004 - RNA, 17 nt, Human
aggaagccagcaggcuc

SEQ ID NO: 3487005 - RNA, 22 nt, Human
aggaagccagcaggcucucagg

SEQ ID NO: 3487006 - RNA, 19 nt, Human
aggaagcccaauugcugga

SEQ ID NO: 3487007 - RNA, 22 nt, Human
aggaagcccccaccgugggcag

SEQ ID NO: 3487008 - RNA, 18 nt, Human
aggaagccgcuggggcca

SEQ ID NO: 3487009 - RNA, 17 nt, Human
aggaagccugauuaaag

SEQ ID NO: 3487010 - RNA, 20 nt, Human
aggaagccugcaguccugga

SEQ ID NO: 3487011 - RNA, 14 nt, Human
aggaagcucagacu

SEQ ID NO: 3487012 - RNA, 17 nt, Human
aggaagcucagacuggu

SEQ ID NO: 3487013 - RNA, 15 nt, Human
aggaagcuccacugu

SEQ ID NO: 3487014 - RNA, 21 nt, Human
aggaagcuccaguccugcucu

SEQ ID NO: 3487015 - RNA, 17 nt, Human
aggaagcuuucucugcu

SEQ ID NO: 3487016 - RNA, 21 nt, Human
aggaagcuuucucugcuucag

SEQ ID NO: 3487017 - RNA, 23 nt, Human
aggaagcuuuggugagaaccugg

SEQ ID NO: 3487018 - RNA, 19 nt, Human
aggaaggaaacccagcucu

SEQ ID NO: 3487019 - RNA, 22 nt, Human
aggaaggaaacccagcucuggu

SEQ ID NO: 3487020 - RNA, 23 nt, Human
aggaaggaaacccagcucugguc

SEQ ID NO: 3487021 - RNA, 14 nt, Human
aggaaggacccuga

SEQ ID NO: 3487022 - RNA, 21 nt, Human
aggaaggagcugccuggaccc

SEQ ID NO: 3487023 - RNA, 16 nt, Human
aggaaggcagggagga

SEQ ID NO: 3487024 - RNA, 14 nt, Human
aggaaggccugggu

SEQ ID NO: 3487025 - RNA, 21 nt, Human
aggaaggcucuucuccccaga

SEQ ID NO: 3487026 - RNA, 23 nt, Human
aggaagggaccaaggcaaggcag

SEQ ID NO: 3487027 - RNA, 12 nt, Human
aggaagggcaaa

SEQ ID NO: 3487028 - RNA, 21 nt, Human
aggaagggggucuaaggucua

SEQ ID NO: 3487029 - RNA, 20 nt, Human
aggaagggguuggauugcaa

SEQ ID NO: 3487030 - RNA, 17 nt, Human
aggaagguacuguauga

SEQ ID NO: 3487031 - RNA, 14 nt, Human
aggaaggucauuuc

SEQ ID NO: 3487032 - RNA, 16 nt, Human
aggaaggucucauucu

SEQ ID NO: 3487033 - RNA, 15 nt, Human
aggaaguacuggaga

SEQ ID NO: 3487034 - RNA, 14 nt, Human
aggaaguaggaagu

SEQ ID NO: 3487035 - RNA, 15 nt, Human
aggaaguaggaagua

SEQ ID NO: 3487036 - RNA, 18 nt, Human
aggaagucaaagcaagga

SEQ ID NO: 3487037 - RNA, 23 nt, Human
aggaaguccuuaucuagcugcau

SEQ ID NO: 3487038 - RNA, 17 nt, Human
aggaagucuaggagcug

SEQ ID NO: 3487039 - RNA, 19 nt, Human
aggaagucucaucugggga

SEQ ID NO: 3487040 - RNA, 23 nt, Human
aggaagugauuuuugagcccuug

SEQ ID NO: 3487041 - RNA, 13 nt, Human
aggaaguggaaug

SEQ ID NO: 3487042 - RNA, 18 nt, Human
aggaaguguaacagcuga

SEQ ID NO: 3487043 - RNA, 19 nt, Human
aggaauaaauaaaaaugga

SEQ ID NO: 3487044 - RNA, 22 nt, Human
agcugggcaugguaccagcccu

SEQ ID NO: 3487045 - RNA, 15 nt, Human
agcugggcccaaccc

SEQ ID NO: 3487046 - RNA, 21 nt, Human
agcugggcccaacccugucug

SEQ ID NO: 3487047 - RNA, 16 nt, Human
agcugggccccagccc

SEQ ID NO: 3487048 - RNA, 11 nt, Human
agcugggcccg

SEQ ID NO: 3487049 - RNA, 15 nt, Human
agcugggccgggacc

SEQ ID NO: 3487050 - RNA, 13 nt, Human
agcugggccuggu

SEQ ID NO: 3487051 - RNA, 15 nt, Human
agcugggccuggucu

SEQ ID NO: 3487052 - RNA, 15 nt, Human
agcugggcucugcaa

SEQ ID NO: 3487053 - RNA, 11 nt, Human
agcugggcugu

SEQ ID NO: 3487054 - RNA, 14 nt, Human
agcuggggaccugg

SEQ ID NO: 3487055 - RNA, 17 nt, Human
agcuggggcugagggau

SEQ ID NO: 3487056 - RNA, 22 nt, Human
agcuggggcuuugauguuccuu

SEQ ID NO: 3487057 - RNA, 18 nt, Human
agcugggggugggccagg

SEQ ID NO: 3487058 - RNA, 19 nt, Human
agcugggggugggccaggc

SEQ ID NO: 3487059 - RNA, 15 nt, Human
agcuggggugcaggg

SEQ ID NO: 3487060 - RNA, 22 nt, Human
agcuggggugcagggauguggg

SEQ ID NO: 3487061 - RNA, 23 nt, Human
agcuggggugcagggaugugggu

SEQ ID NO: 3487062 - RNA, 20 nt, Human
agcugggguggggaccucag

SEQ ID NO: 3487063 - RNA, 19 nt, Human
agcugggguucaugacaau

SEQ ID NO: 3487064 - RNA, 16 nt, Human
agcugggucaggcagg

SEQ ID NO: 3487065 - RNA, 19 nt, Human
agcugguaguuaguagcau

SEQ ID NO: 3487066 - RNA, 17 nt, Human
agcuggucccacucagu

SEQ ID NO: 3487067 - RNA, 18 nt, Human
agcuggucccacucaguc

SEQ ID NO: 3487068 - RNA, 21 nt, Human
agcuggucccacucaguccau

SEQ ID NO: 3487069 - RNA, 19 nt, Human
agcuggugcauuacagaga

SEQ ID NO: 3487070 - RNA, 14 nt, Human
aggauauauuuuau

SEQ ID NO: 3487071 - RNA, 18 nt, Human
aggauauauuuuauuuuu

SEQ ID NO: 3487072 - RNA, 21 nt, Human
aggauauauuuucacuuugug

SEQ ID NO: 3487073 - RNA, 20 nt, Human
aggauauccuuaucagagcu

SEQ ID NO: 3487074 - RNA, 17 nt, Human
aggauaucggcauuugu

SEQ ID NO: 3487075 - RNA, 19 nt, Human
aggauauucagauguaugu

SEQ ID NO: 3487076 - RNA, 15 nt, Human
aggaucaagaaagug

SEQ ID NO: 3487077 - RNA, 20 nt, Human
aggaucacuggagcccagga

SEQ ID NO: 3487078 - RNA, 22 nt, Human
aggaucacuggagcccaggagu

SEQ ID NO: 3487079 - RNA, 19 nt, Human
aggaucacuugagcccagg

SEQ ID NO: 3487080 - RNA, 13 nt, Human
aggaucagaaagu

SEQ ID NO: 3487081 - RNA, 14 nt, Human
aggaucagaaagua

SEQ ID NO: 3487082 - RNA, 18 nt, Human
aggaucagaaaguaauuu

SEQ ID NO: 3487083 - RNA, 12 nt, Human
aggaucagucug

SEQ ID NO: 3487084 - RNA, 13 nt, Human
aggaucagucuga

SEQ ID NO: 3487085 - RNA, 18 nt, Human
aggaucaugguguaauaa

SEQ ID NO: 3487086 - RNA, 22 nt, Human
aggaucaugguguaauaagaca

SEQ ID NO: 3487087 - RNA, 14 nt, Human
aggauccugagcca

SEQ ID NO: 3487088 - RNA, 16 nt, Human
aggauccugagccaga

SEQ ID NO: 3487089 - RNA, 18 nt, Human
aggauccugagccagauu

SEQ ID NO: 3487090 - RNA, 14 nt, Human
agacuaauuuaaaa

SEQ ID NO: 3487091 - RNA, 16 nt, Human
agacuacagcuggggu

SEQ ID NO: 3487092 - RNA, 15 nt, Human
agacuacuguucagc

SEQ ID NO: 3487093 - RNA, 17 nt, Human
agacuagaauucuagug

SEQ ID NO: 3487094 - RNA, 23 nt, Human
agacuagaauucuagugcugcug

SEQ ID NO: 3487095 - RNA, 14 nt, Human
agacuagauguagu

SEQ ID NO: 3487096 - RNA, 16 nt, Human
agacuagauguaguau

SEQ ID NO: 3487097 - RNA, 22 nt, Human
agacuaggauaauguccaacua

SEQ ID NO: 3487098 - RNA, 13 nt, Human
agacuauauacau

SEQ ID NO: 3487099 - RNA, 14 nt, Human
agacuauauacaug

SEQ ID NO: 3487100 - RNA, 20 nt, Human
agacuauauacaugugugua

SEQ ID NO: 3487101 - RNA, 21 nt, Human
agacuauauacauguguguau

SEQ ID NO: 3487102 - RNA, 18 nt, Human
agacuaucuaaauguuga

SEQ ID NO: 3487103 - RNA, 16 nt, Human
agacuauggagccugg

SEQ ID NO: 3487104 - RNA, 18 nt, Human
agacuauguaaaaauaac

SEQ ID NO: 3487105 - RNA, 12 nt, Human
agacuauucaaa

SEQ ID NO: 3487106 - RNA, 14 nt, Human
agacuauucaaaca

SEQ ID NO: 3487107 - RNA, 15 nt, Human
agacuauucaaacag

SEQ ID NO: 3487108 - RNA, 18 nt, Human
agacuauucaaacagucu

SEQ ID NO: 3487109 - RNA, 23 nt, Human
agacuauucaaacagucucagga

SEQ ID NO: 3487110 - RNA, 18 nt, Human
agacuauuuaacuugagg

SEQ ID NO: 3487111 - RNA, 23 nt, Human
agacucaaauguucuaaguuucu

SEQ ID NO: 3487112 - RNA, 20 nt, Human
agacucacaaccugaaccua

SEQ ID NO: 3487113 - RNA, 14 nt, Human
agacucacaggaag

SEQ ID NO: 3487114 - RNA, 15 nt, Human
agacucacaggaagg

SEQ ID NO: 3487115 - RNA, 15 nt, Human
agacucaccucugcc

SEQ ID NO: 3487116 - RNA, 17 nt, Human
agacucaccucugccuc

SEQ ID NO: 3487117 - RNA, 15 nt, Human
agacucagacuccau

SEQ ID NO: 3487118 - RNA, 14 nt, Human
agacucagccugca

SEQ ID NO: 3487119 - RNA, 23 nt, Human
agacucagccugcaguuaauuag

SEQ ID NO: 3487120 - RNA, 18 nt, Human
agacucagcucugacauu

SEQ ID NO: 3487121 - RNA, 20 nt, Human
agacucagcucugacauucu

SEQ ID NO: 3487122 - RNA, 20 nt, Human
agacucaggccaagaaacgu

SEQ ID NO: 3487123 - RNA, 17 nt, Human
agacucagggccccagc

SEQ ID NO: 3487124 - RNA, 21 nt, Human
agacucagggccccagcacua

SEQ ID NO: 3487125 - RNA, 23 nt, Human
agacucagguuguaguaaagaaa

SEQ ID NO: 3487126 - RNA, 16 nt, Human
agacucagugcagaug

SEQ ID NO: 3487127 - RNA, 21 nt, Human
agacucaguggggaggggcug

SEQ ID NO: 3487128 - RNA, 13 nt, Human
agacucaguguuc

SEQ ID NO: 3487129 - RNA, 15 nt, Human
agacucauauuacug

SEQ ID NO: 3487130 - RNA, 14 nt, Human
agacuccagaccug

SEQ ID NO: 3487131 - RNA, 21 nt, Human
agacuccagcuggguuggaaa

SEQ ID NO: 3487132 - RNA, 16 nt, Human
agacucccaugaggga

SEQ ID NO: 3487133 - RNA, 17 nt, Human
agacucccauuccugaa

SEQ ID NO: 3487134 - RNA, 23 nt, Human
agacuccugacugucucccggga

SEQ ID NO: 3487135 - RNA, 21 nt, Human
agacuccuucaacaauucuaa

SEQ ID NO: 3487136 - RNA, 14 nt, Human
agacucgagaacuu

SEQ ID NO: 3487137 - RNA, 15 nt, Human
agacucgagaacuuu

SEQ ID NO: 3487138 - RNA, 18 nt, Human
agacucgagaacuuucau

SEQ ID NO: 3487139 - RNA, 17 nt, Human
agacucgcgacaaugca

SEQ ID NO: 3487140 - RNA, 12 nt, Human
agacucuaagaa

SEQ ID NO: 3487141 - RNA, 17 nt, Human
agacucuacagaggcca

SEQ ID NO: 3487142 - RNA, 23 nt, Human
agacucuagacaagauauuguac

SEQ ID NO: 3487143 - RNA, 17 nt, Human
agacucuagaguccaag

SEQ ID NO: 3487144 - RNA, 21 nt, Human
agacucuagaguccaagguuu

SEQ ID NO: 3487145 - RNA, 21 nt, Human
agacucuaggacauaaauuag

SEQ ID NO: 3487146 - RNA, 16 nt, Human
agacucucagcccaga

SEQ ID NO: 3487147 - RNA, 17 nt, Human
agacucucagcccagaa

SEQ ID NO: 3487148 - RNA, 23 nt, Human
agacucucgcaucuucccaaccc

SEQ ID NO: 3487149 - RNA, 14 nt, Human
agacucucuuagga

SEQ ID NO: 3487150 - RNA, 16 nt, Human
agacucugaaaucuca

SEQ ID NO: 3487151 - RNA, 13 nt, Human
agacucugucuaa

SEQ ID NO: 3487152 - RNA, 18 nt, Human
agacucugucucagucca

SEQ ID NO: 3487153 - RNA, 16 nt, Human
agacucuguggggccu

SEQ ID NO: 3487154 - RNA, 17 nt, Human
agacucuugccuguuuc

SEQ ID NO: 3487155 - RNA, 22 nt, Human
agacucuugccuguuucccagg

SEQ ID NO: 3487156 - RNA, 18 nt, Human
agacugaacuuaccguga

SEQ ID NO: 3487157 - RNA, 21 nt, Human
agacugaauagauaugaaagc

SEQ ID NO: 3487158 - RNA, 22 nt, Human
agacugacaguuuacagacgcu

SEQ ID NO: 3487159 - RNA, 21 nt, Human
agacugaccaauauuguacag

SEQ ID NO: 3487160 - RNA, 22 nt, Human
agacugaccaauauuguacagu

SEQ ID NO: 3487161 - RNA, 20 nt, Human
agacugaccuugaugagcug

SEQ ID NO: 3487162 - RNA, 13 nt, Human
agacugagcucaa

SEQ ID NO: 3487163 - RNA, 15 nt, Human
agacugaggggucga

SEQ ID NO: 3487164 - RNA, 22 nt, Human
agacugaguacguugugcauuu

SEQ ID NO: 3487165 - RNA, 23 nt, Human
agacugaguacguugugcauuug

SEQ ID NO: 3487166 - RNA, 16 nt, Human
agacugaucaggaccu

SEQ ID NO: 3487167 - RNA, 21 nt, Human
agacugcaagugagcaaaccu

SEQ ID NO: 3487168 - RNA, 14 nt, Human
agacugcacccagg

SEQ ID NO: 3487169 - RNA, 22 nt, Human
agacugccagcucuuccuagcu

SEQ ID NO: 3487170 - RNA, 23 nt, Human
agacugcgauuugucccaggucc

SEQ ID NO: 3487171 - RNA, 23 nt, Human
agacugcgggaugguccuggggc

SEQ ID NO: 3487172 - RNA, 17 nt, Human
agacugcguucugcaag

SEQ ID NO: 3487173 - RNA, 18 nt, Human
agacugcuaguguucugu

SEQ ID NO: 3487174 - RNA, 19 nt, Human
agacugcuccugagccccc

SEQ ID NO: 3487175 - RNA, 14 nt, Human
agacugcugggacu

SEQ ID NO: 3487176 - RNA, 19 nt, Human
agacugcugggacuggcca

SEQ ID NO: 3487177 - RNA, 22 nt, Human
agacugcugggacuggccaggu

SEQ ID NO: 3487178 - RNA, 14 nt, Human
agacugcuucccau

SEQ ID NO: 3487179 - RNA, 22 nt, Human
agacugcuucccauccuacccu

SEQ ID NO: 3487180 - RNA, 23 nt, Human
agacugcuucccauccuacccuc

SEQ ID NO: 3487181 - RNA, 16 nt, Human
agacugcuuugagaaa

SEQ ID NO: 3487182 - RNA, 18 nt, Human
agacuggaaaaaaugagc

SEQ ID NO: 3487183 - RNA, 18 nt, Human
agacuggaacacuagaca

SEQ ID NO: 3487184 - RNA, 23 nt, Human
agacuggaacuugaacugauuca

SEQ ID NO: 3487185 - RNA, 19 nt, Human
agacuggaagcacagcuuc

SEQ ID NO: 3487186 - RNA, 19 nt, Human
agacuggaagcuaauuugc

SEQ ID NO: 3487187 - RNA, 21 nt, Human
agacuggaagcuaauuugcau

SEQ ID NO: 3487188 - RNA, 14 nt, Human
agacuggaaguuca

SEQ ID NO: 3487189 - RNA, 19 nt, Human
agacuggaaguucauaccu

SEQ ID NO: 3487190 - RNA, 17 nt, Human
agacuggacagcuugug

SEQ ID NO: 3487191 - RNA, 16 nt, Human
agacuggagcaucuga

SEQ ID NO: 3487192 - RNA, 13 nt, Human
agacuggagggga

SEQ ID NO: 3487193 - RNA, 14 nt, Human
agacuggcacaguu

SEQ ID NO: 3487194 - RNA, 23 nt, Human
agacuggcacaguuuucugagaa

SEQ ID NO: 3487195 - RNA, 20 nt, Human
agacuggccugaaccacagg

SEQ ID NO: 3487196 - RNA, 18 nt, Human
agacuggcuuuuauuaau

SEQ ID NO: 3487197 - RNA, 21 nt, Human
agacugggaagauaggcucug

SEQ ID NO: 3487198 - RNA, 23 nt, Human
agacugggaagauaggcucugca

SEQ ID NO: 3487199 - RNA, 15 nt, Human
agacugggcugaggg

SEQ ID NO: 3487200 - RNA, 22 nt, Human
agacuggguaggaaagaggaag

SEQ ID NO: 3487201 - RNA, 21 nt, Human
agacugggugaggauaacaca

SEQ ID NO: 3487202 - RNA, 15 nt, Human
agacuggguuucuag

SEQ ID NO: 3487203 - RNA, 14 nt, Human
agacuggugacuga

SEQ ID NO: 3487204 - RNA, 16 nt, Human
agacuggugacugauu

SEQ ID NO: 3487205 - RNA, 19 nt, Human
agacuggugacugauucuu

SEQ ID NO: 3487206 - RNA, 21 nt, Human
agacuggugacugauucuuca

SEQ ID NO: 3487207 - RNA, 22 nt, Human
agacuguaacuuccaaauaaau

SEQ ID NO: 3487208 - RNA, 16 nt, Human
agacuguaaugaaucu

SEQ ID NO: 3487209 - RNA, 15 nt, Human
agacuguacaaagua

SEQ ID NO: 3487210 - RNA, 18 nt, Human
agacuguagccuggauau

SEQ ID NO: 3487211 - RNA, 18 nt, Human
agacuguggagacugcuc

SEQ ID NO: 3487212 - RNA, 20 nt, Human
agacuguggagacugcuccu

SEQ ID NO: 3487213 - RNA, 15 nt, Human
aggacauggcuucug

SEQ ID NO: 3487214 - RNA, 15 nt, Human
aggacauguuuuugu

SEQ ID NO: 3487215 - RNA, 21 nt, Human
aggacauguuuuuguuuucuu

SEQ ID NO: 3487216 - RNA, 14 nt, Human
aggacauuccaaga

SEQ ID NO: 3487217 - RNA, 18 nt, Human
aggacauuccaagacagu

SEQ ID NO: 3487218 - RNA, 14 nt, Human
aggacauucuugua

SEQ ID NO: 3487219 - RNA, 22 nt, Human
aggacauugauuugauuuuuau

SEQ ID NO: 3487220 - RNA, 17 nt, Human
aggacauugcggacagc

SEQ ID NO: 3487221 - RNA, 23 nt, Human
aggacauugcggacagccacggc

SEQ ID NO: 3487222 - RNA, 14 nt, Human
aggacauuucucua

SEQ ID NO: 3487223 - RNA, 17 nt, Human
aggaccaaaaaaauaag

SEQ ID NO: 3487224 - RNA, 17 nt, Human
aggaccaagcaucuugg

SEQ ID NO: 3487225 - RNA, 17 nt, Human
aggaccacaggcucagg

SEQ ID NO: 3487226 - RNA, 14 nt, Human
aggaccacucagcc

SEQ ID NO: 3487227 - RNA, 22 nt, Human
aggaccacuccuguacacugaa

SEQ ID NO: 3487228 - RNA, 14 nt, Human
aggaccagcccacg

SEQ ID NO: 3487229 - RNA, 18 nt, Human
aggaccagcccacgcuga

SEQ ID NO: 3487230 - RNA, 24 nt, Human
aggaccagcucaggacagaugcca

SEQ ID NO: 3487231 - RNA, 16 nt, Human
aggaccaggacucccu

SEQ ID NO: 3487232 - RNA, 21 nt, Human
aggaccaggacucccuccuca

SEQ ID NO: 3487233 - RNA, 16 nt, Human
aggaccagucccagag

SEQ ID NO: 3487234 - RNA, 13 nt, Human
aggacccaagcag

SEQ ID NO: 3487235 - RNA, 12 nt, Human
aggacccaggac

SEQ ID NO: 3487236 - RNA, 13 nt, Human
aggacccaggaca

SEQ ID NO: 3487237 - RNA, 17 nt, Human
aggacccagggcucugu

SEQ ID NO: 3487238 - RNA, 14 nt, Human
aggaccccagcucu

SEQ ID NO: 3487239 - RNA, 16 nt, Human
aggaccccagcucugc

SEQ ID NO: 3487240 - RNA, 17 nt, Human
aggaccccagcucugcg

SEQ ID NO: 3487241 - RNA, 16 nt, Human
aggacccccuuccccu

SEQ ID NO: 3487242 - RNA, 13 nt, Human
aggaccccucacc

SEQ ID NO: 3487243 - RNA, 23 nt, Human
aggaccccucaccuugcaacaca

SEQ ID NO: 3487244 - RNA, 14 nt, Human
aggaucucuaaaga

SEQ ID NO: 3487245 - RNA, 19 nt, Human
aggaucucuaaagagcauc

SEQ ID NO: 3487246 - RNA, 22 nt, Human
aggaucucucaggagcacaggc

SEQ ID NO: 3487247 - RNA, 17 nt, Human
aggaucucuugagccug

SEQ ID NO: 3487248 - RNA, 19 nt, Human
aggaucucuugagccuggg

SEQ ID NO: 3487249 - RNA, 22 nt, Human
aggaucucuugagccugggagg

SEQ ID NO: 3487250 - RNA, 20 nt, Human
aggaucuguuuuuaaaaauc

SEQ ID NO: 3487251 - RNA, 18 nt, Human
aggaucuuuguggccaag

SEQ ID NO: 3487252 - RNA, 21 nt, Human
aggaugaaugaggucccaggc

SEQ ID NO: 3487253 - RNA, 22 nt, Human
aggaugaaugaggucccaggca

SEQ ID NO: 3487254 - RNA, 18 nt, Human
aggaugaauguaugugca

SEQ ID NO: 3487255 - RNA, 20 nt, Human
aggaugaauguaugugcacu

SEQ ID NO: 3487256 - RNA, 20 nt, Human
aggaugaccuggauaacuua

SEQ ID NO: 3487257 - RNA, 23 nt, Human
aggaugacgguauuaugcuucuu

SEQ ID NO: 3487258 - RNA, 18 nt, Human
aggaugagagcccagagg

SEQ ID NO: 3487259 - RNA, 20 nt, Human
aggaugagcucuacccaggg

SEQ ID NO: 3487260 - RNA, 15 nt, Human
aggaugagcuggaag

SEQ ID NO: 3487261 - RNA, 16 nt, Human
aggaugagcuggaagg

SEQ ID NO: 3487262 - RNA, 16 nt, Human
aggaugaucuaggaag

SEQ ID NO: 3487263 - RNA, 17 nt, Human
aggaugaucuaggaaga

SEQ ID NO: 3487264 - RNA, 20 nt, Human
aggaugaucuaggaagacuu

SEQ ID NO: 3487265 - RNA, 22 nt, Human
aggaugaucuaggaagacuuug

SEQ ID NO: 3487266 - RNA, 15 nt, Human
aggaugauuguacag

SEQ ID NO: 3487267 - RNA, 20 nt, Human
aggaugauuguacagaauca

SEQ ID NO: 3487268 - RNA, 22 nt, Human
aggaugcacagaguuguuacau

SEQ ID NO: 3487269 - RNA, 19 nt, Human
aggaugcagagucagcaga

SEQ ID NO: 3487270 - RNA, 22 nt, Human
aggaugcccagggccacucugc

SEQ ID NO: 3487271 - RNA, 16 nt, Human
aggaugcuaacaucua

SEQ ID NO: 3487272 - RNA, 19 nt, Human
aggauggaacacggccaca

SEQ ID NO: 3487273 - RNA, 19 nt, Human
aggauggagagaggggaau

SEQ ID NO: 3487274 - RNA, 19 nt, Human
aggauggaggggugguccu

SEQ ID NO: 3487275 - RNA, 16 nt, Human
aggauggccagugucu

SEQ ID NO: 3487276 - RNA, 19 nt, Human
aggauggccagugucuguc

SEQ ID NO: 3487277 - RNA, 17 nt, Human
aggauggccuggccagg

SEQ ID NO: 3487278 - RNA, 22 nt, Human
aggauggccuggccagggccug

SEQ ID NO: 3487279 - RNA, 18 nt, Human
aggauggcuuugaaugcg

SEQ ID NO: 3487280 - RNA, 20 nt, Human
aggaugggcaugguguucuc

SEQ ID NO: 3487281 - RNA, 16 nt, Human
aggaugggcuucugug

SEQ ID NO: 3487282 - RNA, 19 nt, Human
aggaugggggcuggccucu

SEQ ID NO: 3487283 - RNA, 16 nt, Human
aggaugggucagagcu

SEQ ID NO: 3487284 - RNA, 17 nt, Human
aggaugggucagagcua

SEQ ID NO: 3487285 - RNA, 18 nt, Human
aggauguaaacagugccu

SEQ ID NO: 3487286 - RNA, 16 nt, Human
aggauguauauuuuau

SEQ ID NO: 3487287 - RNA, 15 nt, Human
aggaugucacagggc

SEQ ID NO: 3487288 - RNA, 22 nt, Human
aggaugucccugggccaggguc

SEQ ID NO: 3487289 - RNA, 13 nt, Human
aggaugucugggc

SEQ ID NO: 3487290 - RNA, 14 nt, Human
aggaugugauauau

SEQ ID NO: 3487291 - RNA, 18 nt, Human
aggaugugauauauaagu

SEQ ID NO: 3487292 - RNA, 20 nt, Human
aggauguggaaaccuccuuc

SEQ ID NO: 3487293 - RNA, 21 nt, Human
aggaugugucccaucuaggga

SEQ ID NO: 3487294 - RNA, 15 nt, Human
aggaugugugcaugu

SEQ ID NO: 3487295 - RNA, 17 nt, Human
aggauguguuugcuuuc

SEQ ID NO: 3487296 - RNA, 17 nt, Human
aggauguugaaaaaguu

SEQ ID NO: 3487297 - RNA, 18 nt, Human
aggauuaguuuagaacag

SEQ ID NO: 3487298 - RNA, 12 nt, Human
aggauuauggaa

SEQ ID NO: 3487299 - RNA, 14 nt, Human
aggauucacacccc

SEQ ID NO: 3487300 - RNA, 13 nt, Human
aggauucuaugag

SEQ ID NO: 3487301 - RNA, 16 nt, Human
aggauucuaugaggca

SEQ ID NO: 3487302 - RNA, 18 nt, Human
aggauucucaccagcugu

SEQ ID NO: 3487303 - RNA, 22 nt, Human
aggauucucaccagcugugucc

SEQ ID NO: 3487304 - RNA, 14 nt, Human
aggauucuccuuuu

SEQ ID NO: 3487305 - RNA, 13 nt, Human
aggauucugcugg

SEQ ID NO: 3487306 - RNA, 22 nt, Human
aggauucugcuggccucugcga

SEQ ID NO: 3487307 - RNA, 19 nt, Human
aggauucuuccucccuccc

SEQ ID NO: 3487308 - RNA, 14 nt, Human
aggauugaagagca

SEQ ID NO: 3487309 - RNA, 15 nt, Human
aggauugcgagagau

SEQ ID NO: 3487310 - RNA, 18 nt, Human
aggauugcgagagaugug

SEQ ID NO: 3487311 - RNA, 19 nt, Human
aggauugcgagagaugugu

SEQ ID NO: 3487312 - RNA, 14 nt, Human
aggauugcuaucug

SEQ ID NO: 3487313 - RNA, 17 nt, Human
aggauugcuugagccca

SEQ ID NO: 3487314 - RNA, 22 nt, Human
aggauugcuugagcccaggagu

SEQ ID NO: 3487315 - RNA, 19 nt, Human
aggauuguaaaaaaaaaug

SEQ ID NO: 3487316 - RNA, 23 nt, Human
aggauuguaaaaaaaaaugccuu

SEQ ID NO: 3487317 - RNA, 20 nt, Human
aggauuuaacagucauuuaa

SEQ ID NO: 3487318 - RNA, 19 nt, Human
aggauuucaugauuucauu

SEQ ID NO: 3487319 - RNA, 18 nt, Human
aggauuucuaaucaaaag

SEQ ID NO: 3487320 - RNA, 11 nt, Human
aggauuuuaug

SEQ ID NO: 3487321 - RNA, 15 nt, Human
aggauuuuaugcuuu

SEQ ID NO: 3487322 - RNA, 16 nt, Human
aggauuuuaugcuuua

SEQ ID NO: 3487323 - RNA, 12 nt, Human
aggauuuuuaga

SEQ ID NO: 3487324 - RNA, 15 nt, Human
aggauuuuuaucuuu

SEQ ID NO: 3487325 - RNA, 16 nt, Human
aggauuuuuuucugag

SEQ ID NO: 3487326 - RNA, 19 nt, Human
aggcaaaauugcaaaucuu

SEQ ID NO: 3487327 - RNA, 23 nt, Human
aggcaaacauuuucucuuagaaa

SEQ ID NO: 3487328 - RNA, 22 nt, Human
aggcaaacccaucaacaaaaau

SEQ ID NO: 3487329 - RNA, 22 nt, Human
aggcaaaccuuucuauaauuuu

SEQ ID NO: 3487330 - RNA, 17 nt, Human
aggcaaagaaaaugaaa

SEQ ID NO: 3487331 - RNA, 14 nt, Human
aggcaaaugacuuu

SEQ ID NO: 3487332 - RNA, 15 nt, Human
aggcaaaugacuuug

SEQ ID NO: 3487333 - RNA, 18 nt, Human
aggcaaaugacuuuggac

SEQ ID NO: 3487334 - RNA, 14 nt, Human
aggcaaaugcccaa

SEQ ID NO: 3487335 - RNA, 17 nt, Human
aggcaaauguguacaug

SEQ ID NO: 3487336 - RNA, 19 nt, Human
aggcaaauguuuaaacauu

SEQ ID NO: 3487337 - RNA, 14 nt, Human
aggcaaauguuuau

SEQ ID NO: 3487338 - RNA, 16 nt, Human
aggcaacauccaaaau

SEQ ID NO: 3487339 - RNA, 15 nt, Human
aggcaaccugauugu

SEQ ID NO: 3487340 - RNA, 19 nt, Human
aggcaaccugauuguaaac

SEQ ID NO: 3487341 - RNA, 19 nt, Human
aggcaacugaacaaaaaaa

SEQ ID NO: 3487342 - RNA, 14 nt, Human
aggcaacugaggca

SEQ ID NO: 3487343 - RNA, 15 nt, Human
aggcaacugaggcag

SEQ ID NO: 3487344 - RNA, 17 nt, Human
aggcaacuucaguccug

SEQ ID NO: 3487345 - RNA, 21 nt, Human
aggcaagaggggguggagggg

SEQ ID NO: 3487346 - RNA, 13 nt, Human
aggcaagaggggu

SEQ ID NO: 3487347 - RNA, 16 nt, Human
aggcaagauggcacag

SEQ ID NO: 3487348 - RNA, 17 nt, Human
aggcaagcaccuccugc

SEQ ID NO: 3487349 - RNA, 20 nt, Human
aggcaagcaccuccugccuc

SEQ ID NO: 3487350 - RNA, 22 nt, Human
aggcaagccaggcucacucaca

SEQ ID NO: 3487351 - RNA, 20 nt, Human
aggcaaggaaagaaauacag

SEQ ID NO: 3487352 - RNA, 22 nt, Human
aggcaaggcaggugccuccagg

SEQ ID NO: 3487353 - RNA, 20 nt, Human
aggcaaggcuaugugauuac

SEQ ID NO: 3487354 - RNA, 16 nt, Human
aggcaaggcugucaau

SEQ ID NO: 3487355 - RNA, 18 nt, Human
aggcaaggggugccuggg

SEQ ID NO: 3487356 - RNA, 22 nt, Human
aggcaaguuuucccugaaguua

SEQ ID NO: 3487357 - RNA, 13 nt, Human
aggcaaucauggu

SEQ ID NO: 3487358 - RNA, 22 nt, Human
aggcaaugauuguuaauuuaca

SEQ ID NO: 3487359 - RNA, 18 nt, Human
aggcacacaaggggcccu

SEQ ID NO: 3487360 - RNA, 14 nt, Human
aggcacacacugug

SEQ ID NO: 3487361 - RNA, 16 nt, Human
aggcacacacugugcu

SEQ ID NO: 3487362 - RNA, 19 nt, Human
aggcacacacugugcuuuc

SEQ ID NO: 3487363 - RNA, 20 nt, Human
aggcacacacugugcuuucu

SEQ ID NO: 3487364 - RNA, 16 nt, Human
aggcacacuucuucuu

SEQ ID NO: 3487365 - RNA, 20 nt, Human
aggcacacuucuucuugguc

SEQ ID NO: 3487366 - RNA, 14 nt, Human
aggcacagcugagu

SEQ ID NO: 3487367 - RNA, 14 nt, Human
aggcacaggcaggg

SEQ ID NO: 3487368 - RNA, 15 nt, Human
aggcacaggcagggc

SEQ ID NO: 3487369 - RNA, 14 nt, Human
aggcacauggagga

SEQ ID NO: 3487370 - RNA, 20 nt, Human
aggcaccaaaagaaguaaaa

SEQ ID NO: 3487371 - RNA, 14 nt, Human
aggcaccagaagaa

SEQ ID NO: 3487372 - RNA, 12 nt, Human
aggcaccaggaa

SEQ ID NO: 3487373 - RNA, 13 nt, Human
aggcaccaggaag

SEQ ID NO: 3487374 - RNA, 16 nt, Human
aggcaccaggaagccg

SEQ ID NO: 3487375 - RNA, 16 nt, Human
aggcaccagucccugu

SEQ ID NO: 3487376 - RNA, 20 nt, Human
aggcaccaguguccuccccu

SEQ ID NO: 3487377 - RNA, 14 nt, Human
aggcacccaucugu

SEQ ID NO: 3487378 - RNA, 12 nt, Human
aggcaccucaag

SEQ ID NO: 3487379 - RNA, 19 nt, Human
aggcaccucacagaaauga

SEQ ID NO: 3487380 - RNA, 13 nt, Human
aggcaccucuucc

SEQ ID NO: 3487381 - RNA, 21 nt, Human
aggcaccugguggccaugcuc

SEQ ID NO: 3487382 - RNA, 14 nt, Human
aggcacgaacccac

SEQ ID NO: 3487383 - RNA, 17 nt, Human
aggcacgaacccaccug

SEQ ID NO: 3487384 - RNA, 19 nt, Human
aggcacgaacccaccugcu

SEQ ID NO: 3487385 - RNA, 16 nt, Human
aggcacgggugguccc

SEQ ID NO: 3487386 - RNA, 15 nt, Human
aggcacuagccuuug

SEQ ID NO: 3487387 - RNA, 23 nt, Human
aggcacuagccuuuggcucugga

SEQ ID NO: 3487388 - RNA, 15 nt, Human
aggcacucuagauuc

SEQ ID NO: 3487389 - RNA, 17 nt, Human
aggcacugaagugcuua

SEQ ID NO: 3487390 - RNA, 19 nt, Human
aggcacugcaaaccgccac

SEQ ID NO: 3487391 - RNA, 14 nt, Human
aggcacugcccugg

SEQ ID NO: 3487392 - RNA, 16 nt, Human
aggcacugcugcccag

SEQ ID NO: 3487393 - RNA, 15 nt, Human
agacuugagaacuug

SEQ ID NO: 3487394 - RNA, 12 nt, Human
agacuugccaac

SEQ ID NO: 3487395 - RNA, 17 nt, Human
agacuugccaugugacu

SEQ ID NO: 3487396 - RNA, 13 nt, Human
agacuugcucucu

SEQ ID NO: 3487397 - RNA, 15 nt, Human
agacuuggauucuuu

SEQ ID NO: 3487398 - RNA, 23 nt, Human
agacuugguguccuuucccucca

SEQ ID NO: 3487399 - RNA, 22 nt, Human
agacuugguugguaggguggga

SEQ ID NO: 3487400 - RNA, 11 nt, Human
agacuuguugg

SEQ ID NO: 3487401 - RNA, 21 nt, Human
agacuuuaacauaagcuauuu

SEQ ID NO: 3487402 - RNA, 16 nt, Human
agacuuuaggcuuuca

SEQ ID NO: 3487403 - RNA, 17 nt, Human
agacuuuaggcuuucag

SEQ ID NO: 3487404 - RNA, 18 nt, Human
agacuuuccccauacucu

SEQ ID NO: 3487405 - RNA, 17 nt, Human
agacuuugaugucagca

SEQ ID NO: 3487406 - RNA, 21 nt, Human
agacuuuggaaaaugcauugu

SEQ ID NO: 3487407 - RNA, 15 nt, Human
agacuuuggaaagac

SEQ ID NO: 3487408 - RNA, 13 nt, Human
agacuuuuuggug

SEQ ID NO: 3487409 - RNA, 19 nt, Human
agacuuuuuuuaaauagua

SEQ ID NO: 3487410 - RNA, 15 nt, Human
agacuuuuuuuauga

SEQ ID NO: 3487411 - RNA, 14 nt, Human
agagaaaaaagcca

SEQ ID NO: 3487412 - RNA, 22 nt, Human
agagaaaaaauauuuuccugcc

SEQ ID NO: 3487413 - RNA, 15 nt, Human
agagaaaaacaaauu

SEQ ID NO: 3487414 - RNA, 13 nt, Human
agagaaaaagaaa

SEQ ID NO: 3487415 - RNA, 14 nt, Human
agagaaaaagaaau

SEQ ID NO: 3487416 - RNA, 20 nt, Human
agagaaaaagaaaugcaaaa

SEQ ID NO: 3487417 - RNA, 17 nt, Human
agagaaaacaugcagaa

SEQ ID NO: 3487418 - RNA, 20 nt, Human
agagaaaacuuauuugagug

SEQ ID NO: 3487419 - RNA, 14 nt, Human
agagaaaagaaaaa

SEQ ID NO: 3487420 - RNA, 21 nt, Human
agagaaaagaaaaaaaaagaa

SEQ ID NO: 3487421 - RNA, 16 nt, Human
agagaaaauaaaaagu

SEQ ID NO: 3487422 - RNA, 20 nt, Human
agagaaaauaaaaaguuaaa

SEQ ID NO: 3487423 - RNA, 14 nt, Human
agagaaaauauaug

SEQ ID NO: 3487424 - RNA, 17 nt, Human
agagaaaauguaaauaa

SEQ ID NO: 3487425 - RNA, 21 nt, Human
agagaaaauugaauuuaacaa

SEQ ID NO: 3487426 - RNA, 13 nt, Human
agagaaacaaacu

SEQ ID NO: 3487427 - RNA, 18 nt, Human
agagaaacaauaaagaga

SEQ ID NO: 3487428 - RNA, 14 nt, Human
agagaaaccagcuu

SEQ ID NO: 3487429 - RNA, 18 nt, Human
agagaaaccagcuuccuu

SEQ ID NO: 3487430 - RNA, 19 nt, Human
agagaaaccagcuuccuuc

SEQ ID NO: 3487431 - RNA, 17 nt, Human
agagaaaccguccucuu

SEQ ID NO: 3487432 - RNA, 23 nt, Human
agagaaaccguccucuuuuucca

SEQ ID NO: 3487433 - RNA, 12 nt, Human
agagaaacuuua

SEQ ID NO: 3487434 - RNA, 19 nt, Human
agagaaacuuugugcuaca

SEQ ID NO: 3487435 - RNA, 15 nt, Human
agagaaagaaaauga

SEQ ID NO: 3487436 - RNA, 14 nt, Human
agagaaagaagaga

SEQ ID NO: 3487437 - RNA, 17 nt, Human
agagaaagaagagacag

SEQ ID NO: 3487438 - RNA, 13 nt, Human
agagaaagagaga

SEQ ID NO: 3487439 - RNA, 18 nt, Human
agagaaagcacgugucuc

SEQ ID NO: 3487440 - RNA, 19 nt, Human
agagaaagcauauugacuu

SEQ ID NO: 3487441 - RNA, 17 nt, Human
agagaaaggccugcaca

SEQ ID NO: 3487442 - RNA, 20 nt, Human
agagaaaggccugcacacaa

SEQ ID NO: 3487443 - RNA, 21 nt, Human
agagaaaggggagcccacugu

SEQ ID NO: 3487444 - RNA, 23 nt, Human
agagaaaggggagcccacugucc

SEQ ID NO: 3487445 - RNA, 18 nt, Human
agagaaaguacuucucca

SEQ ID NO: 3487446 - RNA, 23 nt, Human
agagaaauaagugcccucuccca

SEQ ID NO: 3487447 - RNA, 14 nt, Human
agagaaauaugaag

SEQ ID NO: 3487448 - RNA, 14 nt, Human
agagaaauauggaa

SEQ ID NO: 3487449 - RNA, 15 nt, Human
agagaaauauuuuaa

SEQ ID NO: 3487450 - RNA, 18 nt, Human
agagaaauauuuuaauuu

SEQ ID NO: 3487451 - RNA, 13 nt, Human
agagaaauggcaa

SEQ ID NO: 3487452 - RNA, 14 nt, Human
agagaaaugucuuu

SEQ ID NO: 3487453 - RNA, 18 nt, Human
agagaacccagcccaccc

SEQ ID NO: 3487454 - RNA, 23 nt, Human
agagaaccucacgcaccucccau

SEQ ID NO: 3487455 - RNA, 14 nt, Human
agagaacgcagccc

SEQ ID NO: 3487456 - RNA, 15 nt, Human
agagaacgcagcccu

SEQ ID NO: 3487457 - RNA, 12 nt, Human
agagaacugaaa

SEQ ID NO: 3487458 - RNA, 14 nt, Human
agagaacugaaaag

SEQ ID NO: 3487459 - RNA, 12 nt, Human
agagaagaagaa

SEQ ID NO: 3487460 - RNA, 15 nt, Human
agagaagaagaaaaa

SEQ ID NO: 3487461 - RNA, 14 nt, Human
agagaagacaggcu

SEQ ID NO: 3487462 - RNA, 15 nt, Human
agagaagacaggcug

SEQ ID NO: 3487463 - RNA, 21 nt, Human
agagaagauggauaugaccag

SEQ ID NO: 3487464 - RNA, 15 nt, Human
agagaagcaaguaaa

SEQ ID NO: 3487465 - RNA, 22 nt, Human
agagaagcauucucauuggaaa

SEQ ID NO: 3487466 - RNA, 23 nt, Human
agagaagcauucucauuggaaau

SEQ ID NO: 3487467 - RNA, 12 nt, Human
agagaagccagc

SEQ ID NO: 3487468 - RNA, 13 nt, Human
agagaagccagcu

SEQ ID NO: 3487469 - RNA, 14 nt, Human
agagaagccagcuu

SEQ ID NO: 3487470 - RNA, 16 nt, Human
agagaagccaucaccu

SEQ ID NO: 3487471 - RNA, 21 nt, Human
agagaagccuucaagcucuga

SEQ ID NO: 3487472 - RNA, 22 nt, Human
agagaagccuucaagcucugag

SEQ ID NO: 3487473 - RNA, 20 nt, Human
agagaaggaaugucuuuggu

SEQ ID NO: 3487474 - RNA, 13 nt, Human
agagaaggagcca

SEQ ID NO: 3487475 - RNA, 18 nt, Human
agagaaggccucccuagc

SEQ ID NO: 3487476 - RNA, 12 nt, Human
agagaaggggag

SEQ ID NO: 3487477 - RNA, 18 nt, Human
agagaagucacagggcag

SEQ ID NO: 3487478 - RNA, 19 nt, Human
agagaagucacagggcagu

SEQ ID NO: 3487479 - RNA, 23 nt, Human
agagaagucacagggcaguaccu

SEQ ID NO: 3487480 - RNA, 15 nt, Human
agagaagugacaggg

SEQ ID NO: 3487481 - RNA, 17 nt, Human
agagaagugacagggaa

SEQ ID NO: 3487482 - RNA, 19 nt, Human
agagaagugacgguuccua

SEQ ID NO: 3487483 - RNA, 18 nt, Human
agagaagugccccugcug

SEQ ID NO: 3487484 - RNA, 12 nt, Human
agagaaguugua

SEQ ID NO: 3487485 - RNA, 13 nt, Human
agagaauauaaca

SEQ ID NO: 3487486 - RNA, 17 nt, Human
agagaauauaacaugaa

SEQ ID NO: 3487487 - RNA, 18 nt, Human
agagaauauaacaugaaa

SEQ ID NO: 3487488 - RNA, 12 nt, Human
agagaaucaaca

SEQ ID NO: 3487489 - RNA, 18 nt, Human
agagaaugaaagggccca

SEQ ID NO: 3487490 - RNA, 14 nt, Human
agagaaugcacaga

SEQ ID NO: 3487491 - RNA, 16 nt, Human
agagaaugcugaccug

SEQ ID NO: 3487492 - RNA, 18 nt, Human
agagaauguuauagugaa

SEQ ID NO: 3487493 - RNA, 13 nt, Human
agagacaaaauau

SEQ ID NO: 3487494 - RNA, 22 nt, Human
agagacaaacuguaaaaaaugu

SEQ ID NO: 3487495 - RNA, 14 nt, Human
agagacaagaagca

SEQ ID NO: 3487496 - RNA, 16 nt, Human
agagacaagaagcaaa

SEQ ID NO: 3487497 - RNA, 15 nt, Human
agagacaagacuucg

SEQ ID NO: 3487498 - RNA, 14 nt, Human
agagacaaguaauu

SEQ ID NO: 3487499 - RNA, 19 nt, Human
agagacaaguaauuucagu

SEQ ID NO: 3487500 - RNA, 19 nt, Human
agagacaauagcauuagaa

SEQ ID NO: 3487501 - RNA, 19 nt, Human
agagacacaagccuucggc

SEQ ID NO: 3487502 - RNA, 18 nt, Human
agagacacacugaagaag

SEQ ID NO: 3487503 - RNA, 15 nt, Human
agagacaccugcacc

SEQ ID NO: 3487504 - RNA, 19 nt, Human
agagacaccugcaccuccc

SEQ ID NO: 3487505 - RNA, 20 nt, Human
agagacaccugcaccucccc

SEQ ID NO: 3487506 - RNA, 21 nt, Human
agagacaccugcaccuccccc

SEQ ID NO: 3487507 - RNA, 15 nt, Human
agagacacugguggg

SEQ ID NO: 3487508 - RNA, 15 nt, Human
agagacagaaagcag

SEQ ID NO: 3487509 - RNA, 24 nt, Human
agagacagaaagcagaacagugau

SEQ ID NO: 3487510 - RNA, 20 nt, Human
agagacagaagcaggcugga

SEQ ID NO: 3487511 - RNA, 18 nt, Human
agagacagacuugagaac

SEQ ID NO: 3487512 - RNA, 13 nt, Human
agagacagagagg

SEQ ID NO: 3487513 - RNA, 14 nt, Human
agagacagcccagg

SEQ ID NO: 3487514 - RNA, 16 nt, Human
agagacagcccaggau

SEQ ID NO: 3487515 - RNA, 21 nt, Human
agagacagcuacacagagcuu

SEQ ID NO: 3487516 - RNA, 21 nt, Human
agagacaggaaaauccucugg

SEQ ID NO: 3487517 - RNA, 23 nt, Human
agagacaggaaaauccucuggcu

SEQ ID NO: 3487518 - RNA, 20 nt, Human
agagacaggguuucaccaug

SEQ ID NO: 3487519 - RNA, 12 nt, Human
agagacagucac

SEQ ID NO: 3487520 - RNA, 22 nt, Human
agagacaguuauuuauagucau

SEQ ID NO: 3487521 - RNA, 20 nt, Human
agagacaguugggugagaac

SEQ ID NO: 3487522 - RNA, 17 nt, Human
agagacauacuugaagg

SEQ ID NO: 3487523 - RNA, 23 nt, Human
agagacauacuugaagggccaga

SEQ ID NO: 3487524 - RNA, 24 nt, Human
agagacaucuuugggccugucccu

SEQ ID NO: 3487525 - RNA, 12 nt, Human
agagacauuccu

SEQ ID NO: 3487526 - RNA, 14 nt, Human
agagaccagggcuc

SEQ ID NO: 3487527 - RNA, 20 nt, Human
agagaccagggcuccagccc

SEQ ID NO: 3487528 - RNA, 23 nt, Human
agagaccaucccugaaggccccg

SEQ ID NO: 3487529 - RNA, 13 nt, Human
agagacccaagga

SEQ ID NO: 3487530 - RNA, 19 nt, Human
agagacccucugccaccag

SEQ ID NO: 3487531 - RNA, 15 nt, Human
agagaccguccucac

SEQ ID NO: 3487532 - RNA, 23 nt, Human
agagaccguccucaccccugucc

SEQ ID NO: 3487533 - RNA, 21 nt, Human
agagaccgucgggggcugagg

SEQ ID NO: 3487534 - RNA, 13 nt, Human
agagaccucauca

SEQ ID NO: 3487535 - RNA, 19 nt, Human
agagaccucaucaggauga

SEQ ID NO: 3487536 - RNA, 15 nt, Human
agagaccuccugccu

SEQ ID NO: 3487537 - RNA, 16 nt, Human
agagaccuuccagaaa

SEQ ID NO: 3487538 - RNA, 17 nt, Human
agagacgggcccuggug

SEQ ID NO: 3487539 - RNA, 16 nt, Human
agagacggugucuugu

SEQ ID NO: 3487540 - RNA, 21 nt, Human
agagacggugucuuguucugu

SEQ ID NO: 3487541 - RNA, 14 nt, Human
agagacguguacau

SEQ ID NO: 3487542 - RNA, 13 nt, Human
agagacucagccu

SEQ ID NO: 3487543 - RNA, 15 nt, Human
agagacucagccugc

SEQ ID NO: 3487544 - RNA, 20 nt, Human
aggaccccuccaugugggcu

SEQ ID NO: 3487545 - RNA, 15 nt, Human
aggacccugaagggg

SEQ ID NO: 3487546 - RNA, 19 nt, Human
aggacccugaaggggccau

SEQ ID NO: 3487547 - RNA, 18 nt, Human
aggacccugccaggcaca

SEQ ID NO: 3487548 - RNA, 20 nt, Human
aggacccugccaggcacagg

SEQ ID NO: 3487549 - RNA, 21 nt, Human
aggacccugccaggcacaggc

SEQ ID NO: 3487550 - RNA, 22 nt, Human
aggacccugccaggcacaggca

SEQ ID NO: 3487551 - RNA, 23 nt, Human
aggacccugccaggcacaggcag

SEQ ID NO: 3487552 - RNA, 19 nt, Human
aggacccuucagagguggc

SEQ ID NO: 3487553 - RNA, 23 nt, Human
aggaccguggcccugcccucucc

SEQ ID NO: 3487554 - RNA, 19 nt, Human
aggaccuagggauguucug

SEQ ID NO: 3487555 - RNA, 22 nt, Human
aggaccuagggauguucuggcc

SEQ ID NO: 3487556 - RNA, 21 nt, Human
aggaccuauguuugcucagaa

SEQ ID NO: 3487557 - RNA, 13 nt, Human
aggaccucaggug

SEQ ID NO: 3487558 - RNA, 15 nt, Human
aggaccuccaagcca

SEQ ID NO: 3487559 - RNA, 13 nt, Human
aggaccucccuuc

SEQ ID NO: 3487560 - RNA, 15 nt, Human
aggaccucccuuccg

SEQ ID NO: 3487561 - RNA, 22 nt, Human
aggaccuccucuucccccuucc

SEQ ID NO: 3487562 - RNA, 13 nt, Human
aggaccucugggc

SEQ ID NO: 3487563 - RNA, 13 nt, Human
aggaccugcaaac

SEQ ID NO: 3487564 - RNA, 14 nt, Human
aggaccugccugua

SEQ ID NO: 3487565 - RNA, 19 nt, Human
aggaccugggaccuccccu

SEQ ID NO: 3487566 - RNA, 13 nt, Human
aggaccuggggca

SEQ ID NO: 3487567 - RNA, 23 nt, Human
aggaccuggggcacaguccagga

SEQ ID NO: 3487568 - RNA, 17 nt, Human
aggaccuguauuuaagc

SEQ ID NO: 3487569 - RNA, 21 nt, Human
aggaccuucacucuaagaugu

SEQ ID NO: 3487570 - RNA, 14 nt, Human
aggaccuugggcca

SEQ ID NO: 3487571 - RNA, 15 nt, Human
aggaccuugggccaa

SEQ ID NO: 3487572 - RNA, 20 nt, Human
aggacgaacauccaaccuuc

SEQ ID NO: 3487573 - RNA, 16 nt, Human
aggacgcucucuggcc

SEQ ID NO: 3487574 - RNA, 13 nt, Human
aggacggccggcu

SEQ ID NO: 3487575 - RNA, 14 nt, Human
aggacguacguaau

SEQ ID NO: 3487576 - RNA, 18 nt, Human
aggacuaacacucagaag

SEQ ID NO: 3487577 - RNA, 20 nt, Human
aggacuaacacucagaagcc

SEQ ID NO: 3487578 - RNA, 21 nt, Human
aggacuaacacucagaagccu

SEQ ID NO: 3487579 - RNA, 23 nt, Human
aggacuaacacucagaagccugg

SEQ ID NO: 3487580 - RNA, 13 nt, Human
aggacuaauagaa

SEQ ID NO: 3487581 - RNA, 19 nt, Human
aggacuacguuaagggaag

SEQ ID NO: 3487582 - RNA, 20 nt, Human
aggacuacguuaagggaagg

SEQ ID NO: 3487583 - RNA, 22 nt, Human
aggacuagaaccuggagggcug

SEQ ID NO: 3487584 - RNA, 18 nt, Human
aggacuauagcccagguc

SEQ ID NO: 3487585 - RNA, 20 nt, Human
aggacuauagcccagguccu

SEQ ID NO: 3487586 - RNA, 17 nt, Human
aggacucaccacugccc

SEQ ID NO: 3487587 - RNA, 18 nt, Human
aggacucagaagccucug

SEQ ID NO: 3487588 - RNA, 14 nt, Human
aggacucagcuccc

SEQ ID NO: 3487589 - RNA, 18 nt, Human
aggacucagcuccccaga

SEQ ID NO: 3487590 - RNA, 12 nt, Human
aggacuccagcc

SEQ ID NO: 3487591 - RNA, 23 nt, Human
aggacuccaggcagcagacacau

SEQ ID NO: 3487592 - RNA, 20 nt, Human
aggacuccaggcccaaggcu

SEQ ID NO: 3487593 - RNA, 18 nt, Human
aggacucccaacccuggc

SEQ ID NO: 3487594 - RNA, 19 nt, Human
aggacucccaacccuggcu

SEQ ID NO: 3487595 - RNA, 13 nt, Human
aggacuccccagg

SEQ ID NO: 3487596 - RNA, 19 nt, Human
aggacuccccaggccaggc

SEQ ID NO: 3487597 - RNA, 19 nt, Human
aggacuccuccuuuuucca

SEQ ID NO: 3487598 - RNA, 14 nt, Human
aggacuccugaaaa

SEQ ID NO: 3487599 - RNA, 16 nt, Human
aggacucgcuuguaaa

SEQ ID NO: 3487600 - RNA, 17 nt, Human
aggacucgcuuguaaau

SEQ ID NO: 3487601 - RNA, 14 nt, Human
aggacucugaggcu

SEQ ID NO: 3487602 - RNA, 15 nt, Human
aggacucugcagccu

SEQ ID NO: 3487603 - RNA, 17 nt, Human
aggacucugcagccuca

SEQ ID NO: 3487604 - RNA, 12 nt, Human
aggacucugccu

SEQ ID NO: 3487605 - RNA, 16 nt, Human
aggacucugccuccuc

SEQ ID NO: 3487606 - RNA, 19 nt, Human
aggacugaauuaugaaacu

SEQ ID NO: 3487607 - RNA, 20 nt, Human
aggacugaauuguccccagu

SEQ ID NO: 3487608 - RNA, 20 nt, Human
aggacugagcacccucugga

SEQ ID NO: 3487609 - RNA, 15 nt, Human
aggacugaugucucc

SEQ ID NO: 3487610 - RNA, 19 nt, Human
aggacugcaccauugcugc

SEQ ID NO: 3487611 - RNA, 19 nt, Human
aggacugcaugguaauuua

SEQ ID NO: 3487612 - RNA, 18 nt, Human
aggacugccccgugcaga

SEQ ID NO: 3487613 - RNA, 21 nt, Human
aggacugccgaccgaggcugg

SEQ ID NO: 3487614 - RNA, 22 nt, Human
aggacugccgaccgaggcugga

SEQ ID NO: 3487615 - RNA, 22 nt, Human
aggacuggcuuugucccacagc

SEQ ID NO: 3487616 - RNA, 21 nt, Human
aggacugggagcccccagccu

SEQ ID NO: 3487617 - RNA, 22 nt, Human
aggacugggagcccccagccug

SEQ ID NO: 3487618 - RNA, 23 nt, Human
aggacugggagcccccagccugu

SEQ ID NO: 3487619 - RNA, 17 nt, Human
aggacuguauuugugac

SEQ ID NO: 3487620 - RNA, 22 nt, Human
aggacuguauuugugacuaauu

SEQ ID NO: 3487621 - RNA, 17 nt, Human
aggacugugacaggcag

SEQ ID NO: 3487622 - RNA, 19 nt, Human
aggacugugacaggcagca

SEQ ID NO: 3487623 - RNA, 22 nt, Human
aggacugugacaggcagcagag

SEQ ID NO: 3487624 - RNA, 22 nt, Human
aggacuguuacucaaugugugc

SEQ ID NO: 3487625 - RNA, 17 nt, Human
aggacuuaacggcucca

SEQ ID NO: 3487626 - RNA, 21 nt, Human
aggacuuccccggagggcugc

SEQ ID NO: 3487627 - RNA, 15 nt, Human
aggacuucccugugu

SEQ ID NO: 3487628 - RNA, 21 nt, Human
aggacuuccuguccagcucca

SEQ ID NO: 3487629 - RNA, 21 nt, Human
aggacuucuuuaauuuuggaa

SEQ ID NO: 3487630 - RNA, 22 nt, Human
aggacuucuuuaauuuuggaau

SEQ ID NO: 3487631 - RNA, 20 nt, Human
aggacuuggucugauuucag

SEQ ID NO: 3487632 - RNA, 13 nt, Human
aggacuugugucu

SEQ ID NO: 3487633 - RNA, 16 nt, Human
aggacuugugucucug

SEQ ID NO: 3487634 - RNA, 21 nt, Human
aggacuuuauagaucagccag

SEQ ID NO: 3487635 - RNA, 21 nt, Human
aggacuuuccuaaauguuuaa

SEQ ID NO: 3487636 - RNA, 11 nt, Human
aggacuuugca

SEQ ID NO: 3487637 - RNA, 13 nt, Human
aggacuuuguaca

SEQ ID NO: 3487638 - RNA, 19 nt, Human
aggacuuuucuuuguggcu

SEQ ID NO: 3487639 - RNA, 12 nt, Human
aggagaaacaca

SEQ ID NO: 3487640 - RNA, 14 nt, Human
aggagaaacacauc

SEQ ID NO: 3487641 - RNA, 18 nt, Human
aggagaaacagagacagg

SEQ ID NO: 3487642 - RNA, 14 nt, Human
aggagaacaaauau

SEQ ID NO: 3487643 - RNA, 16 nt, Human
aggagaacuugcugcc

SEQ ID NO: 3487644 - RNA, 18 nt, Human
aggagaacuugcugccuc

SEQ ID NO: 3487645 - RNA, 18 nt, Human
aggagaagaguugaggaa

SEQ ID NO: 3487646 - RNA, 14 nt, Human
aggagaagccagga

SEQ ID NO: 3487647 - RNA, 13 nt, Human
aggagaagcucag

SEQ ID NO: 3487648 - RNA, 20 nt, Human
aggagaaucacuugaaccug

SEQ ID NO: 3487649 - RNA, 18 nt, Human
aggagaaucaucaggacc

SEQ ID NO: 3487650 - RNA, 18 nt, Human
aggagaauccaagcgagg

SEQ ID NO: 3487651 - RNA, 16 nt, Human
aggagaaugaaaugua

SEQ ID NO: 3487652 - RNA, 14 nt, Human
aggagaaugaauca

SEQ ID NO: 3487653 - RNA, 15 nt, Human
aggagaaugagccuc

SEQ ID NO: 3487654 - RNA, 20 nt, Human
aggagaauugcuugaaccug

SEQ ID NO: 3487655 - RNA, 11 nt, Human
aggagacacaa

SEQ ID NO: 3487656 - RNA, 19 nt, Human
aggagacacaacaacuccu

SEQ ID NO: 3487657 - RNA, 18 nt, Human
aggagacacaccugaggc

SEQ ID NO: 3487658 - RNA, 14 nt, Human
aggagacacagaug

SEQ ID NO: 3487659 - RNA, 20 nt, Human
aggagacacguguggcgggc

SEQ ID NO: 3487660 - RNA, 22 nt, Human
aggagacacugugcuauaaauc

SEQ ID NO: 3487661 - RNA, 13 nt, Human
aggagacaggcag

SEQ ID NO: 3487662 - RNA, 18 nt, Human
aggagacaggcagagcug

SEQ ID NO: 3487663 - RNA, 17 nt, Human
aggagaccaaggcggga

SEQ ID NO: 3487664 - RNA, 14 nt, Human
aggagacccacagg

SEQ ID NO: 3487665 - RNA, 14 nt, Human
aggagacucaccuc

SEQ ID NO: 3487666 - RNA, 21 nt, Human
aggagacuguggagacugcuc

SEQ ID NO: 3487667 - RNA, 16 nt, Human
aggagagaaaauauau

SEQ ID NO: 3487668 - RNA, 17 nt, Human
aggagagaaaauauaug

SEQ ID NO: 3487669 - RNA, 17 nt, Human
aggagagaaggggagga

SEQ ID NO: 3487670 - RNA, 14 nt, Human
aggagagacacugg

SEQ ID NO: 3487671 - RNA, 21 nt, Human
aggagagacucccaugaagcc

SEQ ID NO: 3487672 - RNA, 22 nt, Human
aggagagacucccaugaagccu

SEQ ID NO: 3487673 - RNA, 20 nt, Human
aggagagagaucaugagaaa

SEQ ID NO: 3487674 - RNA, 19 nt, Human
aggagagcaucggccuagg

SEQ ID NO: 3487675 - RNA, 12 nt, Human
aggagagccaga

SEQ ID NO: 3487676 - RNA, 15 nt, Human
aggagagccagagaa

SEQ ID NO: 3487677 - RNA, 16 nt, Human
aggagagcccuucauu

SEQ ID NO: 3487678 - RNA, 13 nt, Human
aggagagccugcu

SEQ ID NO: 3487679 - RNA, 18 nt, Human
aggagagccugcugcaug

SEQ ID NO: 3487680 - RNA, 13 nt, Human
aggagagccuggu

SEQ ID NO: 3487681 - RNA, 15 nt, Human
aggagaggagagagg

SEQ ID NO: 3487682 - RNA, 16 nt, Human
aggagaggagagaggc

SEQ ID NO: 3487683 - RNA, 17 nt, Human
aggagaggagagaggca

SEQ ID NO: 3487684 - RNA, 14 nt, Human
aggagaggagagcc

SEQ ID NO: 3487685 - RNA, 15 nt, Human
aggagaggagagcca

SEQ ID NO: 3487686 - RNA, 15 nt, Human
aggagaggagagggg

SEQ ID NO: 3487687 - RNA, 21 nt, Human
aggagaggaugagagcccaga

SEQ ID NO: 3487688 - RNA, 19 nt, Human
aggagagggaaaauguuuu

SEQ ID NO: 3487689 - RNA, 20 nt, Human
aggagagggcgcuccucucu

SEQ ID NO: 3487690 - RNA, 18 nt, Human
aggagaggggaagggcca

SEQ ID NO: 3487691 - RNA, 19 nt, Human
aggagaggggaagggccag

SEQ ID NO: 3487692 - RNA, 18 nt, Human
aggagaggggcacagggu

SEQ ID NO: 3487693 - RNA, 17 nt, Human
aggcacuguaguucuaa

SEQ ID NO: 3487694 - RNA, 21 nt, Human
aggcacuguaguucuaagacu

SEQ ID NO: 3487695 - RNA, 16 nt, Human
aggcacuuauuguaaa

SEQ ID NO: 3487696 - RNA, 17 nt, Human
aggcacuuauuguaaau

SEQ ID NO: 3487697 - RNA, 21 nt, Human
aggcacuuauuguaaauuuua

SEQ ID NO: 3487698 - RNA, 15 nt, Human
aggcacuucugccug

SEQ ID NO: 3487699 - RNA, 19 nt, Human
aggcacuugagggggaagg

SEQ ID NO: 3487700 - RNA, 15 nt, Human
aggcacuuuaaaaca

SEQ ID NO: 3487701 - RNA, 22 nt, Human
aggcacuuuagggcuguaaaau

SEQ ID NO: 3487702 - RNA, 23 nt, Human
aggcacuuuggggguuugagggu

SEQ ID NO: 3487703 - RNA, 15 nt, Human
aggcagaagaauuga

SEQ ID NO: 3487704 - RNA, 11 nt, Human
aggcagacaca

SEQ ID NO: 3487705 - RNA, 14 nt, Human
aggcagacacaggg

SEQ ID NO: 3487706 - RNA, 15 nt, Human
aggcagacacaggga

SEQ ID NO: 3487707 - RNA, 13 nt, Human
aggcagacagcag

SEQ ID NO: 3487708 - RNA, 19 nt, Human
aggcagacagcagcucagg

SEQ ID NO: 3487709 - RNA, 18 nt, Human
aggcagacuacacaggau

SEQ ID NO: 3487710 - RNA, 14 nt, Human
aggcagagaaaucu

SEQ ID NO: 3487711 - RNA, 14 nt, Human
aggcagagcccaga

SEQ ID NO: 3487712 - RNA, 14 nt, Human
aggcagaggcccag

SEQ ID NO: 3487713 - RNA, 19 nt, Human
aggcagaggcccaggcugc

SEQ ID NO: 3487714 - RNA, 22 nt, Human
aggcagaggcccaggcugccgu

SEQ ID NO: 3487715 - RNA, 20 nt, Human
aggcagagugccccaccugc

SEQ ID NO: 3487716 - RNA, 19 nt, Human
aggcagaguuugccuuccu

SEQ ID NO: 3487717 - RNA, 16 nt, Human
aggcagauccaggacu

SEQ ID NO: 3487718 - RNA, 15 nt, Human
aggcagaucugugcc

SEQ ID NO: 3487719 - RNA, 16 nt, Human
aggcagaucugugccc

SEQ ID NO: 3487720 - RNA, 17 nt, Human
aggcagauugaaaagga

SEQ ID NO: 3487721 - RNA, 16 nt, Human
aggcagcaaggcccga

SEQ ID NO: 3487722 - RNA, 18 nt, Human
aggcagcaaggcccgagc

SEQ ID NO: 3487723 - RNA, 23 nt, Human
aggcagcagugugaggccagggc

SEQ ID NO: 3487724 - RNA, 16 nt, Human
aggcagcauguauagu

SEQ ID NO: 3487725 - RNA, 16 nt, Human
aggcagccaggccaca

SEQ ID NO: 3487726 - RNA, 20 nt, Human
aggcagccagugcccugagc

SEQ ID NO: 3487727 - RNA, 16 nt, Human
aggcagccuccagccu

SEQ ID NO: 3487728 - RNA, 17 nt, Human
aggcagccugagagucu

SEQ ID NO: 3487729 - RNA, 20 nt, Human
aggcagccuggacauagaga

SEQ ID NO: 3487730 - RNA, 21 nt, Human
aggcagcuguugucucuucuc

SEQ ID NO: 3487731 - RNA, 19 nt, Human
aggcaggaacaaacagggc

SEQ ID NO: 3487732 - RNA, 13 nt, Human
aggcaggaagccc

SEQ ID NO: 3487733 - RNA, 14 nt, Human
aggcaggacaugcu

SEQ ID NO: 3487734 - RNA, 16 nt, Human
aggcaggauugaaaau

SEQ ID NO: 3487735 - RNA, 18 nt, Human
aggcaggauugaaaaugu

SEQ ID NO: 3487736 - RNA, 14 nt, Human
aggcaggcagggcu

SEQ ID NO: 3487737 - RNA, 20 nt, Human
aggcaggcagggcucuccug

SEQ ID NO: 3487738 - RNA, 17 nt, Human
aggcaggcauggcccug

SEQ ID NO: 3487739 - RNA, 18 nt, Human
aggcaggcauggcccugg

SEQ ID NO: 3487740 - RNA, 20 nt, Human
aggcaggcauggcccugggc

SEQ ID NO: 3487741 - RNA, 14 nt, Human
aggcaggcauugag

SEQ ID NO: 3487742 - RNA, 19 nt, Human
aggcaggccuauuucauca

SEQ ID NO: 3487743 - RNA, 22 nt, Human
aggcaggcuaaggcguggagcu

SEQ ID NO: 3487744 - RNA, 14 nt, Human
aggcaggcuuuguu

SEQ ID NO: 3487745 - RNA, 22 nt, Human
aggcagggaaaggcucugaaag

SEQ ID NO: 3487746 - RNA, 16 nt, Human
aggcagggagggccug

SEQ ID NO: 3487747 - RNA, 14 nt, Human
aggcagggauuuga

SEQ ID NO: 3487748 - RNA, 15 nt, Human
aggcagggauuugag

SEQ ID NO: 3487749 - RNA, 24 nt, Human
aggcagggcaaaugacaugcacug

SEQ ID NO: 3487750 - RNA, 16 nt, Human
aggcagggcaggacca

SEQ ID NO: 3487751 - RNA, 21 nt, Human
aggcagggccuugcccagaga

SEQ ID NO: 3487752 - RNA, 22 nt, Human
aggcagggcucuccuggcuucc

SEQ ID NO: 3487753 - RNA, 22 nt, Human
aggcagggcucucuuuccuucu

SEQ ID NO: 3487754 - RNA, 18 nt, Human
aggcaggggcccugcagc

SEQ ID NO: 3487755 - RNA, 19 nt, Human
aggcaggggcccugcagcu

SEQ ID NO: 3487756 - RNA, 20 nt, Human
aggcaggggcccugcagcuc

SEQ ID NO: 3487757 - RNA, 21 nt, Human
aggcaggggcccugcagcucu

SEQ ID NO: 3487758 - RNA, 15 nt, Human
aggcaggggccucca

SEQ ID NO: 3487759 - RNA, 14 nt, Human
aggcaggggcuucc

SEQ ID NO: 3487760 - RNA, 15 nt, Human
aggcaggggcuuccu

SEQ ID NO: 3487761 - RNA, 23 nt, Human
aggcagggggaaggugggguccu

SEQ ID NO: 3487762 - RNA, 14 nt, Human
aggcagggucagga

SEQ ID NO: 3487763 - RNA, 17 nt, Human
aggcagggucaggagag

SEQ ID NO: 3487764 - RNA, 19 nt, Human
aggcagggucaggagaggg

SEQ ID NO: 3487765 - RNA, 12 nt, Human
aggcagggucuc

SEQ ID NO: 3487766 - RNA, 20 nt, Human
aggcagggucucacucuguc

SEQ ID NO: 3487767 - RNA, 22 nt, Human
aggcagggucucacucugucgc

SEQ ID NO: 3487768 - RNA, 15 nt, Human
aggcagguagccagg

SEQ ID NO: 3487769 - RNA, 12 nt, Human
aggcaggucccc

SEQ ID NO: 3487770 - RNA, 14 nt, Human
aggcagguccccag

SEQ ID NO: 3487771 - RNA, 21 nt, Human
aggcaggucuugaacuccugg

SEQ ID NO: 3487772 - RNA, 17 nt, Human
aggcaggugacagugag

SEQ ID NO: 3487773 - RNA, 17 nt, Human
aggcaggugccuccagg

SEQ ID NO: 3487774 - RNA, 18 nt, Human
aggcaggugccuccaggu

SEQ ID NO: 3487775 - RNA, 20 nt, Human
aggcaggugccuccaggugu

SEQ ID NO: 3487776 - RNA, 22 nt, Human
aggcaguaggccggugugccug

SEQ ID NO: 3487777 - RNA, 22 nt, Human
aggcagucgggggcuggccuag

SEQ ID NO: 3487778 - RNA, 19 nt, Human
aggcagugaugcuggaugc

SEQ ID NO: 3487779 - RNA, 16 nt, Human
aggcagugggucccac

SEQ ID NO: 3487780 - RNA, 18 nt, Human
aggcagugggucccacuu

SEQ ID NO: 3487781 - RNA, 14 nt, Human
aggcagugucauuu

SEQ ID NO: 3487782 - RNA, 21 nt, Human
aggcaguuagagaugccuccc

SEQ ID NO: 3487783 - RNA, 18 nt, Human
aggcaguucaaagcagga

SEQ ID NO: 3487784 - RNA, 15 nt, Human
aggcaguuugaggau

SEQ ID NO: 3487785 - RNA, 23 nt, Human
aggcaguuugaggauuaguuuag

SEQ ID NO: 3487786 - RNA, 14 nt, Human
aggcaguuugcaaa

SEQ ID NO: 3487787 - RNA, 14 nt, Human
aggcaguuuucuaa

SEQ ID NO: 3487788 - RNA, 22 nt, Human
aggcauaaagucagggguuccc

SEQ ID NO: 3487789 - RNA, 20 nt, Human
aggcauacgagagcagaggu

SEQ ID NO: 3487790 - RNA, 14 nt, Human
aggcauaggccugg

SEQ ID NO: 3487791 - RNA, 17 nt, Human
aggcauaggccugggug

SEQ ID NO: 3487792 - RNA, 18 nt, Human
aggcauaggccugggugc

SEQ ID NO: 3487793 - RNA, 20 nt, Human
aggcauaggccugggugcug

SEQ ID NO: 3487794 - RNA, 22 nt, Human
aggcauauugcuuuuucuaaug

SEQ ID NO: 3487795 - RNA, 19 nt, Human
aggcaucagucccuaugua

SEQ ID NO: 3487796 - RNA, 13 nt, Human
aggcaucccaggg

SEQ ID NO: 3487797 - RNA, 23 nt, Human
aggcaucccaggggaccacaccu

SEQ ID NO: 3487798 - RNA, 19 nt, Human
aggcaucggggagccggga

SEQ ID NO: 3487799 - RNA, 19 nt, Human
aggcaucgucaugcacagu

SEQ ID NO: 3487800 - RNA, 15 nt, Human
aggcaugccucugau

SEQ ID NO: 3487801 - RNA, 23 nt, Human
aggcaugccucugauaugggacu

SEQ ID NO: 3487802 - RNA, 13 nt, Human
aggcauggcccug

SEQ ID NO: 3487803 - RNA, 14 nt, Human
aggcauggcccugg

SEQ ID NO: 3487804 - RNA, 16 nt, Human
aggcauggcccugggc

SEQ ID NO: 3487805 - RNA, 21 nt, Human
aggcauggcccugggguccca

SEQ ID NO: 3487806 - RNA, 17 nt, Human
aggcaugggccaccacg

SEQ ID NO: 3487807 - RNA, 19 nt, Human
aggcaugggugcaaggaaa

SEQ ID NO: 3487808 - RNA, 20 nt, Human
aggcaugggugcaaggaaaa

SEQ ID NO: 3487809 - RNA, 15 nt, Human
aggcaugguggccca

SEQ ID NO: 3487810 - RNA, 12 nt, Human
aggcauguccug

SEQ ID NO: 3487811 - RNA, 19 nt, Human
aggcaugugaugagaggaa

SEQ ID NO: 3487812 - RNA, 22 nt, Human
aggcaugugccacccacccaac

SEQ ID NO: 3487813 - RNA, 23 nt, Human
aggcaugugucaccaugcccagc

SEQ ID NO: 3487814 - RNA, 17 nt, Human
aggcauguucucugagg

SEQ ID NO: 3487815 - RNA, 22 nt, Human
aggcauguucucugaggacacu

SEQ ID NO: 3487816 - RNA, 13 nt, Human
aggcauuaacaca

SEQ ID NO: 3487817 - RNA, 17 nt, Human
aggcauuccccaggagg

SEQ ID NO: 3487818 - RNA, 22 nt, Human
aggcauuccccaggaggccagc

SEQ ID NO: 3487819 - RNA, 13 nt, Human
aggcauugccaag

SEQ ID NO: 3487820 - RNA, 16 nt, Human
aggcauugccaagggc

SEQ ID NO: 3487821 - RNA, 21 nt, Human
aggcauugccaagggcuuugu

SEQ ID NO: 3487822 - RNA, 18 nt, Human
aggcauugugggaagggg

SEQ ID NO: 3487823 - RNA, 20 nt, Human
aggcauuuaggccaugggac

SEQ ID NO: 3487824 - RNA, 13 nt, Human
aggcauuuccugg

SEQ ID NO: 3487825 - RNA, 15 nt, Human
aggcauuuccugggu

SEQ ID NO: 3487826 - RNA, 20 nt, Human
aggcauuucuaucacauauu

SEQ ID NO: 3487827 - RNA, 21 nt, Human
aggcauuugcaggguccucuu

SEQ ID NO: 3487828 - RNA, 20 nt, Human
aggcauuugcugaauacaga

SEQ ID NO: 3487829 - RNA, 18 nt, Human
aggcauuuggcauuuauu

SEQ ID NO: 3487830 - RNA, 17 nt, Human
aggccaaacaggcccuc

SEQ ID NO: 3487831 - RNA, 16 nt, Human
aggccaaaccucuguu

SEQ ID NO: 3487832 - RNA, 17 nt, Human
aggccaaaccucuguuc

SEQ ID NO: 3487833 - RNA, 18 nt, Human
aggccaaaccucuguuca

SEQ ID NO: 3487834 - RNA, 13 nt, Human
aggccaaacugcu

SEQ ID NO: 3487835 - RNA, 21 nt, Human
aggccaaacuggcaaacuuca

SEQ ID NO: 3487836 - RNA, 13 nt, Human
aggccaaagacaa

SEQ ID NO: 3487837 - RNA, 15 nt, Human
aggccaaagacaaau

SEQ ID NO: 3487838 - RNA, 17 nt, Human
aggccaaagacaaauag

SEQ ID NO: 3487839 - RNA, 19 nt, Human
aggccaaagacaaauagua

SEQ ID NO: 3487840 - RNA, 21 nt, Human
aggccaaagagucuccaguuu

SEQ ID NO: 3487841 - RNA, 14 nt, Human
aggccaaaggaagc

SEQ ID NO: 3487842 - RNA, 16 nt, Human
agagacuccagcuggg

SEQ ID NO: 3487843 - RNA, 16 nt, Human
agagacucccaugaag

SEQ ID NO: 3487844 - RNA, 11 nt, Human
agagacuccug

SEQ ID NO: 3487845 - RNA, 15 nt, Human
agagacuccugcagg

SEQ ID NO: 3487846 - RNA, 17 nt, Human
agagacuccugcaggca

SEQ ID NO: 3487847 - RNA, 17 nt, Human
agagacuggagcaucug

SEQ ID NO: 3487848 - RNA, 13 nt, Human
agagacugggaag

SEQ ID NO: 3487849 - RNA, 13 nt, Human
agagacuguagau

SEQ ID NO: 3487850 - RNA, 18 nt, Human
agagacuuguuuuggaug

SEQ ID NO: 3487851 - RNA, 17 nt, Human
agagacuuuuaaucaga

SEQ ID NO: 3487852 - RNA, 17 nt, Human
agagacuuuuuucuagu

SEQ ID NO: 3487853 - RNA, 19 nt, Human
agagagaaaacuuauuuga

SEQ ID NO: 3487854 - RNA, 12 nt, Human
agagagaaaaua

SEQ ID NO: 3487855 - RNA, 16 nt, Human
agagagaaaauaaaaa

SEQ ID NO: 3487856 - RNA, 20 nt, Human
agagagaaaauaaaaaguua

SEQ ID NO: 3487857 - RNA, 14 nt, Human
agagagaaagccag

SEQ ID NO: 3487858 - RNA, 15 nt, Human
agagagaaagccagg

SEQ ID NO: 3487859 - RNA, 13 nt, Human
agagagaaauucu

SEQ ID NO: 3487860 - RNA, 14 nt, Human
agagagaaauucug

SEQ ID NO: 3487861 - RNA, 21 nt, Human
agagagaaauucuguuaaaau

SEQ ID NO: 3487862 - RNA, 20 nt, Human
agagagaacaacuacuguga

SEQ ID NO: 3487863 - RNA, 16 nt, Human
agagagaacaggacua

SEQ ID NO: 3487864 - RNA, 19 nt, Human
agagagaaccuaacuguau

SEQ ID NO: 3487865 - RNA, 18 nt, Human
agagagaagacccuucuc

SEQ ID NO: 3487866 - RNA, 13 nt, Human
agagagagaagug

SEQ ID NO: 3487867 - RNA, 17 nt, Human
agagagagagacagaga

SEQ ID NO: 3487868 - RNA, 12 nt, Human
agagagagagag

SEQ ID NO: 3487869 - RNA, 15 nt, Human
agagagagaggacag

SEQ ID NO: 3487870 - RNA, 15 nt, Human
agagagaggcaaugg

SEQ ID NO: 3487871 - RNA, 11 nt, Human
agagagcaaga

SEQ ID NO: 3487872 - RNA, 19 nt, Human
agagagcagcuucugccac

SEQ ID NO: 3487873 - RNA, 23 nt, Human
agagagcagcuucugccacuucc

SEQ ID NO: 3487874 - RNA, 19 nt, Human
agagagccauuuugugaau

SEQ ID NO: 3487875 - RNA, 18 nt, Human
agagagcccgaggaggug

SEQ ID NO: 3487876 - RNA, 14 nt, Human
agagagccugcagg

SEQ ID NO: 3487877 - RNA, 13 nt, Human
agagagcgcagcc

SEQ ID NO: 3487878 - RNA, 20 nt, Human
agagagcgcagccgccuuca

SEQ ID NO: 3487879 - RNA, 21 nt, Human
agagagcggucucaggcuggu

SEQ ID NO: 3487880 - RNA, 12 nt, Human
agagagcuggua

SEQ ID NO: 3487881 - RNA, 23 nt, Human
agagagcugguaguuaguagcau

SEQ ID NO: 3487882 - RNA, 16 nt, Human
agagagcuucuguugc

SEQ ID NO: 3487883 - RNA, 20 nt, Human
agagagcuucuguugcugcc

SEQ ID NO: 3487884 - RNA, 23 nt, Human
agagagcuucuguugcugccuca

SEQ ID NO: 3487885 - RNA, 16 nt, Human
agagaggagaaacaca

SEQ ID NO: 3487886 - RNA, 18 nt, Human
agagaggagaaacacauc

SEQ ID NO: 3487887 - RNA, 17 nt, Human
agagaggaguucaauga

SEQ ID NO: 3487888 - RNA, 21 nt, Human
agagaggaguucaaugaucua

SEQ ID NO: 3487889 - RNA, 22 nt, Human
agagaggcagaagaacccuggc

SEQ ID NO: 3487890 - RNA, 14 nt, Human
agagaggcagagag

SEQ ID NO: 3487891 - RNA, 12 nt, Human
agagaggccauu

SEQ ID NO: 3487892 - RNA, 17 nt, Human
agagagggaggcaagcc

SEQ ID NO: 3487893 - RNA, 18 nt, Human
agagagggaggcaagccc

SEQ ID NO: 3487894 - RNA, 22 nt, Human
agagagggugaguccuccagaa

SEQ ID NO: 3487895 - RNA, 15 nt, Human
agagagucccacugc

SEQ ID NO: 3487896 - RNA, 18 nt, Human
agagagucccacugccuc

SEQ ID NO: 3487897 - RNA, 22 nt, Human
agagaguccucuggauggcacc

SEQ ID NO: 3487898 - RNA, 16 nt, Human
agagaguggcuccucc

SEQ ID NO: 3487899 - RNA, 15 nt, Human
agagaguuaaucaac

SEQ ID NO: 3487900 - RNA, 22 nt, Human
agagaguuaaucaacugaaagu

SEQ ID NO: 3487901 - RNA, 22 nt, Human
agagauaccaagaugccaucug

SEQ ID NO: 3487902 - RNA, 14 nt, Human
agagauagccugug

SEQ ID NO: 3487903 - RNA, 15 nt, Human
agagauagccugugg

SEQ ID NO: 3487904 - RNA, 16 nt, Human
agagauauaucugaaa

SEQ ID NO: 3487905 - RNA, 17 nt, Human
agagauauggcagcgaa

SEQ ID NO: 3487906 - RNA, 17 nt, Human
agagauauuuuaaaaug

SEQ ID NO: 3487907 - RNA, 20 nt, Human
agagauauuuugggcaugug

SEQ ID NO: 3487908 - RNA, 13 nt, Human
agagauauuuugu

SEQ ID NO: 3487909 - RNA, 14 nt, Human
agagaucaggaaga

SEQ ID NO: 3487910 - RNA, 15 nt, Human
agagaucaggaagag

SEQ ID NO: 3487911 - RNA, 14 nt, Human
agagauccaaagac

SEQ ID NO: 3487912 - RNA, 16 nt, Human
agagauccaaagacuc

SEQ ID NO: 3487913 - RNA, 14 nt, Human
agagaucugcuguc

SEQ ID NO: 3487914 - RNA, 14 nt, Human
agagaugagcuuuc

SEQ ID NO: 3487915 - RNA, 15 nt, Human
agagaugagcuuucu

SEQ ID NO: 3487916 - RNA, 16 nt, Human
agagaugcagaaauau

SEQ ID NO: 3487917 - RNA, 17 nt, Human
agagaugcagaaauauu

SEQ ID NO: 3487918 - RNA, 12 nt, Human
agagaugccucc

SEQ ID NO: 3487919 - RNA, 14 nt, Human
agagaugccuccac

SEQ ID NO: 3487920 - RNA, 21 nt, Human
agagaugccuccaccgcugcc

SEQ ID NO: 3487921 - RNA, 14 nt, Human
agagaugccucccu

SEQ ID NO: 3487922 - RNA, 15 nt, Human
agagaugccucccug

SEQ ID NO: 3487923 - RNA, 13 nt, Human
agagauggaggag

SEQ ID NO: 3487924 - RNA, 14 nt, Human
agagauggaggagg

SEQ ID NO: 3487925 - RNA, 18 nt, Human
agagauggagucuugcua

SEQ ID NO: 3487926 - RNA, 20 nt, Human
agagauggcuuacaaaaaga

SEQ ID NO: 3487927 - RNA, 19 nt, Human
agagaugggagcuccucuc

SEQ ID NO: 3487928 - RNA, 17 nt, Human
agagaugucaucagagc

SEQ ID NO: 3487929 - RNA, 21 nt, Human
agagaugugcaauugauuucu

SEQ ID NO: 3487930 - RNA, 15 nt, Human
agagaugugcaccca

SEQ ID NO: 3487931 - RNA, 17 nt, Human
agagaugugcacccaug

SEQ ID NO: 3487932 - RNA, 14 nt, Human
agagauguguaauu

SEQ ID NO: 3487933 - RNA, 13 nt, Human
agagauguguguu

SEQ ID NO: 3487934 - RNA, 15 nt, Human
agagauguguguuga

SEQ ID NO: 3487935 - RNA, 20 nt, Human
agagauguguguugauacug

SEQ ID NO: 3487936 - RNA, 16 nt, Human
agagauuaccuccuga

SEQ ID NO: 3487937 - RNA, 13 nt, Human
aggcuccuuccug

SEQ ID NO: 3487938 - RNA, 15 nt, Human
aggcuccuuccuguc

SEQ ID NO: 3487939 - RNA, 17 nt, Human
aggcucgagcaugccug

SEQ ID NO: 3487940 - RNA, 14 nt, Human
aggcucgauuuugu

SEQ ID NO: 3487941 - RNA, 23 nt, Human
aggcucgauuuuguaucugcagg

SEQ ID NO: 3487942 - RNA, 15 nt, Human
aggcucgccuucccu

SEQ ID NO: 3487943 - RNA, 16 nt, Human
aggcucgccuucccuc

SEQ ID NO: 3487944 - RNA, 19 nt, Human
aggcucgccuucccuccug

SEQ ID NO: 3487945 - RNA, 20 nt, Human
aggcucuaaccacacagccu

SEQ ID NO: 3487946 - RNA, 21 nt, Human
aggcucuaugagucuagaugu

SEQ ID NO: 3487947 - RNA, 12 nt, Human
aggcucucaggc

SEQ ID NO: 3487948 - RNA, 20 nt, Human
aggcucucaggccagcugcu

SEQ ID NO: 3487949 - RNA, 18 nt, Human
aggcucugaaagccagcu

SEQ ID NO: 3487950 - RNA, 20 nt, Human
aggcucugagagucuagauu

SEQ ID NO: 3487951 - RNA, 23 nt, Human
aggcucugagagucuagauucuc

SEQ ID NO: 3487952 - RNA, 13 nt, Human
aggcucugcccug

SEQ ID NO: 3487953 - RNA, 13 nt, Human
aggcucugcccuu

SEQ ID NO: 3487954 - RNA, 18 nt, Human
aggcucugcgccugcccc

SEQ ID NO: 3487955 - RNA, 15 nt, Human
aggcucuggagccca

SEQ ID NO: 3487956 - RNA, 18 nt, Human
aggcucuggagcccacug

SEQ ID NO: 3487957 - RNA, 22 nt, Human
aggcucuggagcccacuguacu

SEQ ID NO: 3487958 - RNA, 16 nt, Human
aggcucugugcugacc

SEQ ID NO: 3487959 - RNA, 18 nt, Human
aggcucuguuuaugcuuu

SEQ ID NO: 3487960 - RNA, 16 nt, Human
aggcucuucuccccag

SEQ ID NO: 3487961 - RNA, 17 nt, Human
aggcucuucuccccaga

SEQ ID NO: 3487962 - RNA, 15 nt, Human
aggcucuucugacua

SEQ ID NO: 3487963 - RNA, 15 nt, Human
aggcucuuucugggc

SEQ ID NO: 3487964 - RNA, 18 nt, Human
aggcucuuucugggccaa

SEQ ID NO: 3487965 - RNA, 22 nt, Human
aggcucuuuggggucagccagg

SEQ ID NO: 3487966 - RNA, 16 nt, Human
aggcugaaagaggcca

SEQ ID NO: 3487967 - RNA, 20 nt, Human
aggcugacgugugagggagg

SEQ ID NO: 3487968 - RNA, 17 nt, Human
aggcugacguuccgggc

SEQ ID NO: 3487969 - RNA, 15 nt, Human
aggcugacuccuggu

SEQ ID NO: 3487970 - RNA, 16 nt, Human
aggcugacuccugguc

SEQ ID NO: 3487971 - RNA, 16 nt, Human
aggcugagaacacugu

SEQ ID NO: 3487972 - RNA, 19 nt, Human
aggcugagaacacugugaa

SEQ ID NO: 3487973 - RNA, 17 nt, Human
aggcugagacugcggga

SEQ ID NO: 3487974 - RNA, 11 nt, Human
aggcugagccu

SEQ ID NO: 3487975 - RNA, 13 nt, Human
aggcugagccuca

SEQ ID NO: 3487976 - RNA, 11 nt, Human
aggcugaggac

SEQ ID NO: 3487977 - RNA, 13 nt, Human
aggcugaggcaca

SEQ ID NO: 3487978 - RNA, 14 nt, Human
aggcugaggcacaa

SEQ ID NO: 3487979 - RNA, 14 nt, Human
aggcugaggcuggc

SEQ ID NO: 3487980 - RNA, 15 nt, Human
aggcugaggcuggca

SEQ ID NO: 3487981 - RNA, 19 nt, Human
aggcugagugcaggcccac

SEQ ID NO: 3487982 - RNA, 21 nt, Human
aggcugagugcaggcccaccc

SEQ ID NO: 3487983 - RNA, 17 nt, Human
aggcugaguuuucucuu

SEQ ID NO: 3487984 - RNA, 21 nt, Human
aggcugcaagguuuaggcugg

SEQ ID NO: 3487985 - RNA, 22 nt, Human
aggcugcaagguuuaggcuggu

SEQ ID NO: 3487986 - RNA, 18 nt, Human
aggcugcagaaggccaag

SEQ ID NO: 3487987 - RNA, 21 nt, Human
aggcugcagaaggccaagaau

SEQ ID NO: 3487988 - RNA, 23 nt, Human
aggcugcagauaacagaaaggcu

SEQ ID NO: 3487989 - RNA, 15 nt, Human
aggcugcagcgagcu

SEQ ID NO: 3487990 - RNA, 16 nt, Human
aggcugcagcuggaca

SEQ ID NO: 3487991 - RNA, 17 nt, Human
aggcugcagcuggacag

SEQ ID NO: 3487992 - RNA, 18 nt, Human
aggcugcagcuggacaga

SEQ ID NO: 3487993 - RNA, 19 nt, Human
aggcugcauagaaggagga

SEQ ID NO: 3487994 - RNA, 23 nt, Human
aggcugcauagaaggaggagagg

SEQ ID NO: 3487995 - RNA, 20 nt, Human
aggcugcauugaaaagagcu

SEQ ID NO: 3487996 - RNA, 17 nt, Human
aggcugccaaggccaga

SEQ ID NO: 3487997 - RNA, 20 nt, Human
aggcugccagugccugggug

SEQ ID NO: 3487998 - RNA, 20 nt, Human
aggcugcccccggcccccug

SEQ ID NO: 3487999 - RNA, 12 nt, Human
aggcugccccuc

SEQ ID NO: 3488000 - RNA, 15 nt, Human
aggcugccccucuca

SEQ ID NO: 3488001 - RNA, 18 nt, Human
aggcugccucucccauca

SEQ ID NO: 3488002 - RNA, 13 nt, Human
aggcugccugagu

SEQ ID NO: 3488003 - RNA, 16 nt, Human
aggcugcggccccucc

SEQ ID NO: 3488004 - RNA, 18 nt, Human
aggcugcggccccucccc

SEQ ID NO: 3488005 - RNA, 23 nt, Human
aggcugcucggggugcacaggag

SEQ ID NO: 3488006 - RNA, 16 nt, Human
aggcugcucugccugu

SEQ ID NO: 3488007 - RNA, 14 nt, Human
aggcugcuggcgcc

SEQ ID NO: 3488008 - RNA, 18 nt, Human
aggcugcuggcgccucug

SEQ ID NO: 3488009 - RNA, 18 nt, Human
aggcugcuggggccucag

SEQ ID NO: 3488010 - RNA, 13 nt, Human
aggcugcuuucca

SEQ ID NO: 3488011 - RNA, 21 nt, Human
aggcugcuuuccaaagccaau

SEQ ID NO: 3488012 - RNA, 18 nt, Human
aggcuggaagcugggagg

SEQ ID NO: 3488013 - RNA, 13 nt, Human
aggcuggaaggag

SEQ ID NO: 3488014 - RNA, 17 nt, Human
aggcuggacaugcugac

SEQ ID NO: 3488015 - RNA, 18 nt, Human
aggcuggacaugcugacu

SEQ ID NO: 3488016 - RNA, 16 nt, Human
aggcuggacuccagau

SEQ ID NO: 3488017 - RNA, 17 nt, Human
aggcuggacuccagauc

SEQ ID NO: 3488018 - RNA, 12 nt, Human
aggcuggagaag

SEQ ID NO: 3488019 - RNA, 13 nt, Human
aggcuggagccca

SEQ ID NO: 3488020 - RNA, 15 nt, Human
aggcuggaggcaggg

SEQ ID NO: 3488021 - RNA, 19 nt, Human
aggcuggaggcagggccuu

SEQ ID NO: 3488022 - RNA, 23 nt, Human
aggcuggaggcagggccuugccc

SEQ ID NO: 3488023 - RNA, 18 nt, Human
aggcuggaguacaguggu

SEQ ID NO: 3488024 - RNA, 20 nt, Human
aggcuggagugcaguggcau

SEQ ID NO: 3488025 - RNA, 22 nt, Human
aggcuggauccuagccuuaucc

SEQ ID NO: 3488026 - RNA, 22 nt, Human
aggcuggauuuugaauuuucuu

SEQ ID NO: 3488027 - RNA, 17 nt, Human
aggcuggcacaggacau

SEQ ID NO: 3488028 - RNA, 19 nt, Human
aggcuggcaccgccuucuc

SEQ ID NO: 3488029 - RNA, 20 nt, Human
aggcuggcaccgccuucucu

SEQ ID NO: 3488030 - RNA, 16 nt, Human
aggcuggcagcucucc

SEQ ID NO: 3488031 - RNA, 20 nt, Human
aggcuggcagcucuccaguc

SEQ ID NO: 3488032 - RNA, 12 nt, Human
aggcuggcaggu

SEQ ID NO: 3488033 - RNA, 15 nt, Human
aggcuggcagguaug

SEQ ID NO: 3488034 - RNA, 18 nt, Human
aggcuggccagccccaca

SEQ ID NO: 3488035 - RNA, 19 nt, Human
aggcuggccagccccacag

SEQ ID NO: 3488036 - RNA, 20 nt, Human
aggcuggccagccccacagc

SEQ ID NO: 3488037 - RNA, 21 nt, Human
aggcuggccagccccacagcc

SEQ ID NO: 3488038 - RNA, 18 nt, Human
aggcaugugugaaacaua

SEQ ID NO: 3488039 - RNA, 18 nt, Human
aggcauguucucugagga

SEQ ID NO: 3488040 - RNA, 20 nt, Human
aggcauguucucugaggaca

SEQ ID NO: 3488041 - RNA, 13 nt, Human
aggcauuaauguu

SEQ ID NO: 3488042 - RNA, 21 nt, Human
aggcauuccccaggaggccag

SEQ ID NO: 3488043 - RNA, 14 nt, Human
aggcauugaggaag

SEQ ID NO: 3488044 - RNA, 19 nt, Human
aggcauugaggaagagucu

SEQ ID NO: 3488045 - RNA, 14 nt, Human
aggcauugccaagg

SEQ ID NO: 3488046 - RNA, 21 nt, Human
aggcauugccucggcuggcuc

SEQ ID NO: 3488047 - RNA, 17 nt, Human
aggcauuuccugggugg

SEQ ID NO: 3488048 - RNA, 20 nt, Human
aggcauuuguugguuuauca

SEQ ID NO: 3488049 - RNA, 23 nt, Human
aggccaaaauuaccaaaaaucuu

SEQ ID NO: 3488050 - RNA, 15 nt, Human
aggccaaaccucugu

SEQ ID NO: 3488051 - RNA, 17 nt, Human
aggccaaacugcuggac

SEQ ID NO: 3488052 - RNA, 16 nt, Human
aggccaaaggcuggug

SEQ ID NO: 3488053 - RNA, 21 nt, Human
aggccaaaggggaccuggaag

SEQ ID NO: 3488054 - RNA, 22 nt, Human
aggccaacccaaaauaagcagg

SEQ ID NO: 3488055 - RNA, 14 nt, Human
aggccaagaggcug

SEQ ID NO: 3488056 - RNA, 15 nt, Human
aggccaagaguggcc

SEQ ID NO: 3488057 - RNA, 19 nt, Human
aggccaagaguggccccac

SEQ ID NO: 3488058 - RNA, 22 nt, Human
aggccaagaguggccccaccug

SEQ ID NO: 3488059 - RNA, 13 nt, Human
aggccaaggggag

SEQ ID NO: 3488060 - RNA, 18 nt, Human
aggccaaggucugagcca

SEQ ID NO: 3488061 - RNA, 16 nt, Human
aggccaaggugggagg

SEQ ID NO: 3488062 - RNA, 18 nt, Human
aggccaaggugggaggau

SEQ ID NO: 3488063 - RNA, 19 nt, Human
aggccaagguguccuacag

SEQ ID NO: 3488064 - RNA, 19 nt, Human
aggccaaguacacugagag

SEQ ID NO: 3488065 - RNA, 14 nt, Human
aggccaagugcagg

SEQ ID NO: 3488066 - RNA, 15 nt, Human
aggccaagugcaggc

SEQ ID NO: 3488067 - RNA, 20 nt, Human
aggccacaagacccuugugg

SEQ ID NO: 3488068 - RNA, 17 nt, Human
aggccacacucagcaca

SEQ ID NO: 3488069 - RNA, 18 nt, Human
aggccacacucagcacaa

SEQ ID NO: 3488070 - RNA, 12 nt, Human
aggccaccagga

SEQ ID NO: 3488071 - RNA, 15 nt, Human
aggccacccugugca

SEQ ID NO: 3488072 - RNA, 17 nt, Human
aggccaccuccccagca

SEQ ID NO: 3488073 - RNA, 22 nt, Human
aggccaccuccuaaaaggccca

SEQ ID NO: 3488074 - RNA, 23 nt, Human
aggccaccuccuaaaaggcccag

SEQ ID NO: 3488075 - RNA, 12 nt, Human
aggccaccucuc

SEQ ID NO: 3488076 - RNA, 14 nt, Human
aggccaccucucca

SEQ ID NO: 3488077 - RNA, 17 nt, Human
aggccaccucuccaagg

SEQ ID NO: 3488078 - RNA, 18 nt, Human
aggccaccucuccaaggg

SEQ ID NO: 3488079 - RNA, 21 nt, Human
aggccaccucuuccuggccgg

SEQ ID NO: 3488080 - RNA, 17 nt, Human
aggccaccugcccccuu

SEQ ID NO: 3488081 - RNA, 13 nt, Human
aggccacuccucc

SEQ ID NO: 3488082 - RNA, 12 nt, Human
aggccacugaag

SEQ ID NO: 3488083 - RNA, 16 nt, Human
aggccacugaagagga

SEQ ID NO: 3488084 - RNA, 14 nt, Human
aggccacuggagac

SEQ ID NO: 3488085 - RNA, 19 nt, Human
aggccacuguguuccuucc

SEQ ID NO: 3488086 - RNA, 19 nt, Human
aggccacuguuuggaaaua

SEQ ID NO: 3488087 - RNA, 12 nt, Human
aggccagaccug

SEQ ID NO: 3488088 - RNA, 12 nt, Human
aggccagagaca

SEQ ID NO: 3488089 - RNA, 23 nt, Human
aggccagagacacaagccuucgg

SEQ ID NO: 3488090 - RNA, 14 nt, Human
aggccagagcccac

SEQ ID NO: 3488091 - RNA, 18 nt, Human
aggccagauuacaaauua

SEQ ID NO: 3488092 - RNA, 12 nt, Human
aggccagcaacg

SEQ ID NO: 3488093 - RNA, 18 nt, Human
aggccagcaagguggagu

SEQ ID NO: 3488094 - RNA, 22 nt, Human
aggccagccagugaccugagga

SEQ ID NO: 3488095 - RNA, 13 nt, Human
aggccagccccac

SEQ ID NO: 3488096 - RNA, 14 nt, Human
aggccagccccacc

SEQ ID NO: 3488097 - RNA, 16 nt, Human
aggccagccccaccca

SEQ ID NO: 3488098 - RNA, 21 nt, Human
aggccagccccacccaggagg

SEQ ID NO: 3488099 - RNA, 22 nt, Human
aggccagccgcgcaucagacug

SEQ ID NO: 3488100 - RNA, 11 nt, Human
aggccagccuc

SEQ ID NO: 3488101 - RNA, 18 nt, Human
aggccagccuccgagagg

SEQ ID NO: 3488102 - RNA, 13 nt, Human
aggccagccuggc

SEQ ID NO: 3488103 - RNA, 14 nt, Human
aggccagccuggcc

SEQ ID NO: 3488104 - RNA, 15 nt, Human
aggccagccuggccu

SEQ ID NO: 3488105 - RNA, 18 nt, Human
aggccagccuggccuccu

SEQ ID NO: 3488106 - RNA, 20 nt, Human
aggccagccuggccuccugc

SEQ ID NO: 3488107 - RNA, 22 nt, Human
aggccagccuggccuccugccu

SEQ ID NO: 3488108 - RNA, 13 nt, Human
aggccagccuuga

SEQ ID NO: 3488109 - RNA, 17 nt, Human
aggccagcuggcagcag

SEQ ID NO: 3488110 - RNA, 17 nt, Human
aggccaggacucugcag

SEQ ID NO: 3488111 - RNA, 21 nt, Human
aggccaggacucugcagccuc

SEQ ID NO: 3488112 - RNA, 22 nt, Human
aggccaggacucugcagccuca

SEQ ID NO: 3488113 - RNA, 13 nt, Human
aggccaggccagc

SEQ ID NO: 3488114 - RNA, 13 nt, Human
aggccaggcccuc

SEQ ID NO: 3488115 - RNA, 23 nt, Human
aggccaggcccucugcccacucc

SEQ ID NO: 3488116 - RNA, 12 nt, Human
aggccaggccgg

SEQ ID NO: 3488117 - RNA, 20 nt, Human
aggccaggcgcgguggcuca

SEQ ID NO: 3488118 - RNA, 23 nt, Human
aggccagggcuauagcucaggac

SEQ ID NO: 3488119 - RNA, 23 nt, Human
aggccagggucacugaaggccug

SEQ ID NO: 3488120 - RNA, 21 nt, Human
aggccaguaagggaaauagaa

SEQ ID NO: 3488121 - RNA, 19 nt, Human
aggccaguaguucucaaag

SEQ ID NO: 3488122 - RNA, 21 nt, Human
aggccauccuucccugucugc

SEQ ID NO: 3488123 - RNA, 10 nt, Human
aggccaucug

SEQ ID NO: 3488124 - RNA, 15 nt, Human
aggccaucuggagag

SEQ ID NO: 3488125 - RNA, 13 nt, Human
aggccauggacuc

SEQ ID NO: 3488126 - RNA, 18 nt, Human
aggccauggacucugucc

SEQ ID NO: 3488127 - RNA, 22 nt, Human
aggccauggagagcuggagccu

SEQ ID NO: 3488128 - RNA, 16 nt, Human
aggccauggaggcagu

SEQ ID NO: 3488129 - RNA, 15 nt, Human
aggccauggcagaau

SEQ ID NO: 3488130 - RNA, 22 nt, Human
aggccauggcaucccuuuuuca

SEQ ID NO: 3488131 - RNA, 12 nt, Human
aggccauggcuc

SEQ ID NO: 3488132 - RNA, 14 nt, Human
aggccaugggccuc

SEQ ID NO: 3488133 - RNA, 20 nt, Human
aggccauuccccgucucugg

SEQ ID NO: 3488134 - RNA, 17 nt, Human
aggccauucuuucccaa

SEQ ID NO: 3488135 - RNA, 18 nt, Human
aggccauugugaaccaau

SEQ ID NO: 3488136 - RNA, 21 nt, Human
aggcccaaauuaucaagcuaa

SEQ ID NO: 3488137 - RNA, 15 nt, Human
aggcccaaggcuccc

SEQ ID NO: 3488138 - RNA, 12 nt, Human
aggcccacagga

SEQ ID NO: 3488139 - RNA, 13 nt, Human
aggcccacaggag

SEQ ID NO: 3488140 - RNA, 19 nt, Human
aggcccacauuggaagagc

SEQ ID NO: 3488141 - RNA, 12 nt, Human
aggcccacccug

SEQ ID NO: 3488142 - RNA, 13 nt, Human
aggcccacccugc

SEQ ID NO: 3488143 - RNA, 23 nt, Human
aggcccaccuaccuucaaagcug

SEQ ID NO: 3488144 - RNA, 15 nt, Human
aggcccacucagggg

SEQ ID NO: 3488145 - RNA, 19 nt, Human
aggcccagagggccugcaa

SEQ ID NO: 3488146 - RNA, 12 nt, Human
aggcccagcacc

SEQ ID NO: 3488147 - RNA, 18 nt, Human
aggcccagcauugcuggu

SEQ ID NO: 3488148 - RNA, 19 nt, Human
aggcccagcauugcugguu

SEQ ID NO: 3488149 - RNA, 20 nt, Human
aggcccagcauugcugguuc

SEQ ID NO: 3488150 - RNA, 14 nt, Human
aggcccagccccua

SEQ ID NO: 3488151 - RNA, 16 nt, Human
aggcccagccccuaga

SEQ ID NO: 3488152 - RNA, 17 nt, Human
aggcccagccccuagaa

SEQ ID NO: 3488153 - RNA, 19 nt, Human
aggcccagccccuagaaac

SEQ ID NO: 3488154 - RNA, 18 nt, Human
aggcccagccgacccccu

SEQ ID NO: 3488155 - RNA, 13 nt, Human
aggcccaggcugc

SEQ ID NO: 3488156 - RNA, 18 nt, Human
aggcccaggcugccgucc

SEQ ID NO: 3488157 - RNA, 17 nt, Human
aggcccaggcugggaac

SEQ ID NO: 3488158 - RNA, 16 nt, Human
aggcccauuccccucg

SEQ ID NO: 3488159 - RNA, 18 nt, Human
aggccccaaaaccacagc

SEQ ID NO: 3488160 - RNA, 13 nt, Human
aggccccaaagga

SEQ ID NO: 3488161 - RNA, 15 nt, Human
aggccccacugaugc

SEQ ID NO: 3488162 - RNA, 13 nt, Human
aggccccacuggg

SEQ ID NO: 3488163 - RNA, 14 nt, Human
aggccccagccucc

SEQ ID NO: 3488164 - RNA, 12 nt, Human
aggccccaggaa

SEQ ID NO: 3488165 - RNA, 14 nt, Human
aggccccaggaagc

SEQ ID NO: 3488166 - RNA, 16 nt, Human
aggccccaugaccucc

SEQ ID NO: 3488167 - RNA, 17 nt, Human
aggcccccaccuggcuc

SEQ ID NO: 3488168 - RNA, 18 nt, Human
aggcccccaccuggcuca

SEQ ID NO: 3488169 - RNA, 19 nt, Human
aggcccccaccuggcucac

SEQ ID NO: 3488170 - RNA, 13 nt, Human
aggcccccacuug

SEQ ID NO: 3488171 - RNA, 22 nt, Human
aggcccccagcccagggcuccu

SEQ ID NO: 3488172 - RNA, 23 nt, Human
aggcccccagcccagggcuccug

SEQ ID NO: 3488173 - RNA, 15 nt, Human
aggcccccaggugcc

SEQ ID NO: 3488174 - RNA, 19 nt, Human
aggcccccaucauccucug

SEQ ID NO: 3488175 - RNA, 20 nt, Human
aggcccccaucauccucugg

SEQ ID NO: 3488176 - RNA, 21 nt, Human
aggcccccaucauccucuggc

SEQ ID NO: 3488177 - RNA, 23 nt, Human
aggcccccgggugugaagcacag

SEQ ID NO: 3488178 - RNA, 16 nt, Human
aggccccgcccaggcu

SEQ ID NO: 3488179 - RNA, 17 nt, Human
aggccccgcccaggcuu

SEQ ID NO: 3488180 - RNA, 17 nt, Human
aggccccgcuuguccag

SEQ ID NO: 3488181 - RNA, 18 nt, Human
aggccccgcuuguccagc

SEQ ID NO: 3488182 - RNA, 21 nt, Human
aggccccgcuuguccagcgcc

SEQ ID NO: 3488183 - RNA, 20 nt, Human
aggccccucccucuccagca

SEQ ID NO: 3488184 - RNA, 16 nt, Human
aggccccuggagccag

SEQ ID NO: 3488185 - RNA, 15 nt, Human
aggccccuggcccag

SEQ ID NO: 3488186 - RNA, 20 nt, Human
aggccccuggcccagcggcc

SEQ ID NO: 3488187 - RNA, 18 nt, Human
aggccccuucucucccug

SEQ ID NO: 3488188 - RNA, 14 nt, Human
aggcccgagcagcu

SEQ ID NO: 3488189 - RNA, 19 nt, Human
aggcccgagcagcugagca

SEQ ID NO: 3488190 - RNA, 21 nt, Human
aggcccgagcagcugagcagg

SEQ ID NO: 3488191 - RNA, 20 nt, Human
aggcccgcucuacaucuucu

SEQ ID NO: 3488192 - RNA, 13 nt, Human
aggcccggccucu

SEQ ID NO: 3488193 - RNA, 14 nt, Human
aggcccggccucuc

SEQ ID NO: 3488194 - RNA, 14 nt, Human
aggcccggcuccag

SEQ ID NO: 3488195 - RNA, 13 nt, Human
aggcccggggcug

SEQ ID NO: 3488196 - RNA, 14 nt, Human
aggcccggggcugg

SEQ ID NO: 3488197 - RNA, 15 nt, Human
aggcccggggcuggc

SEQ ID NO: 3488198 - RNA, 20 nt, Human
aggcccgucuguccaucugc

SEQ ID NO: 3488199 - RNA, 21 nt, Human
aggcccgucuguccaucugcc

SEQ ID NO: 3488200 - RNA, 22 nt, Human
aggcccuaucuguuuacagugu

SEQ ID NO: 3488201 - RNA, 23 nt, Human
aggcccuccacaccugcggccca

SEQ ID NO: 3488202 - RNA, 20 nt, Human
aggcccucccuguuccccag

SEQ ID NO: 3488203 - RNA, 23 nt, Human
aggcccucccuguuccccagaga

SEQ ID NO: 3488204 - RNA, 21 nt, Human
aggcccuccucucccauccuu

SEQ ID NO: 3488205 - RNA, 17 nt, Human
aggcccuccugugcugg

SEQ ID NO: 3488206 - RNA, 16 nt, Human
aggcccucgggcccag

SEQ ID NO: 3488207 - RNA, 15 nt, Human
aggcccucugcccac

SEQ ID NO: 3488208 - RNA, 20 nt, Human
aggcccucuggaguggccac

SEQ ID NO: 3488209 - RNA, 22 nt, Human
aggcccucuggaguggccacua

SEQ ID NO: 3488210 - RNA, 15 nt, Human
aggcccugagacagg

SEQ ID NO: 3488211 - RNA, 15 nt, Human
aggcccugcacuguc

SEQ ID NO: 3488212 - RNA, 12 nt, Human
aggcccugcaug

SEQ ID NO: 3488213 - RNA, 16 nt, Human
aggcccugcuccugca

SEQ ID NO: 3488214 - RNA, 21 nt, Human
aggcccugcuccugcagcaug

SEQ ID NO: 3488215 - RNA, 22 nt, Human
aggcccugcuccugcagcaugg

SEQ ID NO: 3488216 - RNA, 13 nt, Human
aggcccuggauca

SEQ ID NO: 3488217 - RNA, 18 nt, Human
aggcccuggaucagcgug

SEQ ID NO: 3488218 - RNA, 10 nt, Human
aggcccuggc

SEQ ID NO: 3488219 - RNA, 14 nt, Human
aggcccuggccucc

SEQ ID NO: 3488220 - RNA, 15 nt, Human
aggcccuggccuccc

SEQ ID NO: 3488221 - RNA, 21 nt, Human
aggcccuucucuccagccccu

SEQ ID NO: 3488222 - RNA, 17 nt, Human
aggcccuuuccucaggc

SEQ ID NO: 3488223 - RNA, 13 nt, Human
aggcccuuugcug

SEQ ID NO: 3488224 - RNA, 14 nt, Human
aggcccuuugcugu

SEQ ID NO: 3488225 - RNA, 15 nt, Human
aggcccuuugcuguc

SEQ ID NO: 3488226 - RNA, 17 nt, Human
aggccgaagaagggucc

SEQ ID NO: 3488227 - RNA, 23 nt, Human
aggccgaagcucuggcugaaccc

SEQ ID NO: 3488228 - RNA, 16 nt, Human
agauaacaaucuguau

SEQ ID NO: 3488229 - RNA, 22 nt, Human
agauaacacacuuuuuauuaga

SEQ ID NO: 3488230 - RNA, 22 nt, Human
agauaacgcuuaaaggaaguca

SEQ ID NO: 3488231 - RNA, 14 nt, Human
agauaacucuuugg

SEQ ID NO: 3488232 - RNA, 16 nt, Human
agauaacucuuuggau

SEQ ID NO: 3488233 - RNA, 19 nt, Human
agauaacuuugacuuucuu

SEQ ID NO: 3488234 - RNA, 11 nt, Human
agauaacuuuu

SEQ ID NO: 3488235 - RNA, 20 nt, Human
agauaagcaagagagauguu

SEQ ID NO: 3488236 - RNA, 17 nt, Human
agauaaggguaucuggu

SEQ ID NO: 3488237 - RNA, 23 nt, Human
agauaaguggccuugacacauua

SEQ ID NO: 3488238 - RNA, 20 nt, Human
agauaaguguauuuuucaau

SEQ ID NO: 3488239 - RNA, 20 nt, Human
agauaaguuggaaacacuaa

SEQ ID NO: 3488240 - RNA, 22 nt, Human
agauaaguuggaaacacuaaau

SEQ ID NO: 3488241 - RNA, 14 nt, Human
agauaauaauauau

SEQ ID NO: 3488242 - RNA, 17 nt, Human
agauaauaauauauguu

SEQ ID NO: 3488243 - RNA, 22 nt, Human
agauaauaauggguuucuuuca

SEQ ID NO: 3488244 - RNA, 17 nt, Human
agauaauaugagaauca

SEQ ID NO: 3488245 - RNA, 20 nt, Human
agauaauauuguuugguaaa

SEQ ID NO: 3488246 - RNA, 20 nt, Human
agauaauauuuuacauacac

SEQ ID NO: 3488247 - RNA, 17 nt, Human
agauaaucagccucuua

SEQ ID NO: 3488248 - RNA, 19 nt, Human
agauaaucagugugucuaa

SEQ ID NO: 3488249 - RNA, 16 nt, Human
agauaaucucagugcu

SEQ ID NO: 3488250 - RNA, 19 nt, Human
agauaaucucagugcuuuc

SEQ ID NO: 3488251 - RNA, 15 nt, Human
agauaaucucucagc

SEQ ID NO: 3488252 - RNA, 22 nt, Human
agauaaugugaacuagcuggaa

SEQ ID NO: 3488253 - RNA, 18 nt, Human
agauaauugcuauuuauu

SEQ ID NO: 3488254 - RNA, 16 nt, Human
agauaauuucagggug

SEQ ID NO: 3488255 - RNA, 12 nt, Human
agauacaauaaa

SEQ ID NO: 3488256 - RNA, 15 nt, Human
agauacaaucagcug

SEQ ID NO: 3488257 - RNA, 16 nt, Human
agauacaaucagcugc

SEQ ID NO: 3488258 - RNA, 17 nt, Human
agauacaaucagcugcu

SEQ ID NO: 3488259 - RNA, 18 nt, Human
agauacaaucagcugcuu

SEQ ID NO: 3488260 - RNA, 13 nt, Human
agauacaauguau

SEQ ID NO: 3488261 - RNA, 15 nt, Human
agauacaauguauuu

SEQ ID NO: 3488262 - RNA, 23 nt, Human
agauacaauguauuuauuuaaaa

SEQ ID NO: 3488263 - RNA, 18 nt, Human
agauacagaacucuuuca

SEQ ID NO: 3488264 - RNA, 17 nt, Human
agauacaggaaaagcug

SEQ ID NO: 3488265 - RNA, 13 nt, Human
agauacaguuacu

SEQ ID NO: 3488266 - RNA, 15 nt, Human
agauacauacagaau

SEQ ID NO: 3488267 - RNA, 22 nt, Human
agauacauaugaguguggaagc

SEQ ID NO: 3488268 - RNA, 13 nt, Human
agauacaucacug

SEQ ID NO: 3488269 - RNA, 16 nt, Human
agauacaucacugcuu

SEQ ID NO: 3488270 - RNA, 18 nt, Human
agauacauuuguauguug

SEQ ID NO: 3488271 - RNA, 19 nt, Human
agauaccauacucauuucu

SEQ ID NO: 3488272 - RNA, 19 nt, Human
agauaccuaaaagagauuu

SEQ ID NO: 3488273 - RNA, 17 nt, Human
agauaccucacccugcu

SEQ ID NO: 3488274 - RNA, 18 nt, Human
agauaccuuaaaauuuga

SEQ ID NO: 3488275 - RNA, 19 nt, Human
agauacgacuuuauuuucu

SEQ ID NO: 3488276 - RNA, 12 nt, Human
agauacucuggg

SEQ ID NO: 3488277 - RNA, 15 nt, Human
agauacugaaauaaa

SEQ ID NO: 3488278 - RNA, 19 nt, Human
agauacuggaaguuuugca

SEQ ID NO: 3488279 - RNA, 20 nt, Human
agauacuggaaguuuugcau

SEQ ID NO: 3488280 - RNA, 21 nt, Human
agauacuggaaguuuugcauu

SEQ ID NO: 3488281 - RNA, 17 nt, Human
agauacuggauuguacu

SEQ ID NO: 3488282 - RNA, 22 nt, Human
agauacuuggggggcugaggug

SEQ ID NO: 3488283 - RNA, 21 nt, Human
agauacuuggucacagccagg

SEQ ID NO: 3488284 - RNA, 14 nt, Human
agauacuuugcauu

SEQ ID NO: 3488285 - RNA, 16 nt, Human
agauacuuugcauugu

SEQ ID NO: 3488286 - RNA, 16 nt, Human
agauacuuuguauugu

SEQ ID NO: 3488287 - RNA, 17 nt, Human
agauacuuuuucuuuug

SEQ ID NO: 3488288 - RNA, 23 nt, Human
agauacuuuuucuuuuguaagug

SEQ ID NO: 3488289 - RNA, 14 nt, Human
agauagaaagcauu

SEQ ID NO: 3488290 - RNA, 20 nt, Human
agauagaaagggugcugcca

SEQ ID NO: 3488291 - RNA, 18 nt, Human
agauagaaauaaauagcu

SEQ ID NO: 3488292 - RNA, 21 nt, Human
agauagaagaaaaaagaaugu

SEQ ID NO: 3488293 - RNA, 13 nt, Human
agauagaagaacu

SEQ ID NO: 3488294 - RNA, 17 nt, Human
agauagaagauguuugc

SEQ ID NO: 3488295 - RNA, 15 nt, Human
agauagaaugacagu

SEQ ID NO: 3488296 - RNA, 16 nt, Human
agauagaaugacaguc

SEQ ID NO: 3488297 - RNA, 21 nt, Human
agauagagagugaguacaugc

SEQ ID NO: 3488298 - RNA, 20 nt, Human
agauagauaggucagugcaa

SEQ ID NO: 3488299 - RNA, 14 nt, Human
agauagcauuguga

SEQ ID NO: 3488300 - RNA, 13 nt, Human
agauagccaaggc

SEQ ID NO: 3488301 - RNA, 16 nt, Human
agauagccaaggccaa

SEQ ID NO: 3488302 - RNA, 14 nt, Human
agauagccuguggc

SEQ ID NO: 3488303 - RNA, 20 nt, Human
agauaggaaggucauuucca

SEQ ID NO: 3488304 - RNA, 16 nt, Human
agauaggaccuugggc

SEQ ID NO: 3488305 - RNA, 14 nt, Human
agauaggcucugca

SEQ ID NO: 3488306 - RNA, 16 nt, Human
agauaggcucugcaca

SEQ ID NO: 3488307 - RNA, 21 nt, Human
agauaggcucugcacagaugg

SEQ ID NO: 3488308 - RNA, 18 nt, Human
agauaguacauaaaggug

SEQ ID NO: 3488309 - RNA, 22 nt, Human
agauaguaucuagcaaucacaa

SEQ ID NO: 3488310 - RNA, 14 nt, Human
agauaguuuucauc

SEQ ID NO: 3488311 - RNA, 15 nt, Human
agauauaaaagacug

SEQ ID NO: 3488312 - RNA, 15 nt, Human
agauauaaauuuuua

SEQ ID NO: 3488313 - RNA, 18 nt, Human
agauauaagugcuguaua

SEQ ID NO: 3488314 - RNA, 16 nt, Human
agauauaaugaacaaa

SEQ ID NO: 3488315 - RNA, 11 nt, Human
agauauacugg

SEQ ID NO: 3488316 - RNA, 23 nt, Human
agauauacuuguuuuuguaaaga

SEQ ID NO: 3488317 - RNA, 17 nt, Human
agauauacuuuguggac

SEQ ID NO: 3488318 - RNA, 23 nt, Human
agauauacuuuguggaccaauua

SEQ ID NO: 3488319 - RNA, 17 nt, Human
agauauaucugaaaacu

SEQ ID NO: 3488320 - RNA, 13 nt, Human
agauauauuaaaa

SEQ ID NO: 3488321 - RNA, 17 nt, Human
agauauauuaaaaauau

SEQ ID NO: 3488322 - RNA, 20 nt, Human
agauauauuaagugacuguu

SEQ ID NO: 3488323 - RNA, 21 nt, Human
agauauauuuuuaagauaaua

SEQ ID NO: 3488324 - RNA, 15 nt, Human
agauauauuuuucac

SEQ ID NO: 3488325 - RNA, 21 nt, Human
agauaucacagaggccuauaa

SEQ ID NO: 3488326 - RNA, 23 nt, Human
agauaucaucuaccuagauuuaa

SEQ ID NO: 3488327 - RNA, 18 nt, Human
agauauccucugcuuaaa

SEQ ID NO: 3488328 - RNA, 17 nt, Human
agauaucuugaaaugaa

SEQ ID NO: 3488329 - RNA, 18 nt, Human
agauaucuuuuuauugau

SEQ ID NO: 3488330 - RNA, 16 nt, Human
agauaugauucaaaug

SEQ ID NO: 3488331 - RNA, 16 nt, Human
agauaugggaacacug

SEQ ID NO: 3488332 - RNA, 15 nt, Human
agauauguauucuuu

SEQ ID NO: 3488333 - RNA, 14 nt, Human
agauauuauugcuu

SEQ ID NO: 3488334 - RNA, 16 nt, Human
agauauuggacaaaga

SEQ ID NO: 3488335 - RNA, 19 nt, Human
agauauugugaaguacaua

SEQ ID NO: 3488336 - RNA, 21 nt, Human
agauauugugaaguacauauu

SEQ ID NO: 3488337 - RNA, 13 nt, Human
agauauuguucaa

SEQ ID NO: 3488338 - RNA, 23 nt, Human
agauauuuacaugaauugcauuu

SEQ ID NO: 3488339 - RNA, 17 nt, Human
agauauuuauauauauu

SEQ ID NO: 3488340 - RNA, 17 nt, Human
agauauuuauauuuuua

SEQ ID NO: 3488341 - RNA, 20 nt, Human
agauauuuauauuuuuauuu

SEQ ID NO: 3488342 - RNA, 23 nt, Human
agauauuuauauuuuuauuuuau

SEQ ID NO: 3488343 - RNA, 15 nt, Human
aggcuggccagccgc

SEQ ID NO: 3488344 - RNA, 17 nt, Human
aggcuggccaguccagg

SEQ ID NO: 3488345 - RNA, 15 nt, Human
aggcuggcccugccc

SEQ ID NO: 3488346 - RNA, 19 nt, Human
aggcuggcccugcccuggu

SEQ ID NO: 3488347 - RNA, 13 nt, Human
aggcuggccucag

SEQ ID NO: 3488348 - RNA, 20 nt, Human
aggcuggcgagagucuggcc

SEQ ID NO: 3488349 - RNA, 17 nt, Human
aggcuggcgcagccaag

SEQ ID NO: 3488350 - RNA, 18 nt, Human
aggcuggcgugcaguggu

SEQ ID NO: 3488351 - RNA, 20 nt, Human
aggcuggcgugcaguggugc

SEQ ID NO: 3488352 - RNA, 20 nt, Human
aggcuggcuuguccccuccu

SEQ ID NO: 3488353 - RNA, 17 nt, Human
aggcuggcuuucagagu

SEQ ID NO: 3488354 - RNA, 18 nt, Human
aggcugggaacucaucug

SEQ ID NO: 3488355 - RNA, 14 nt, Human
aggcugggagagcc

SEQ ID NO: 3488356 - RNA, 16 nt, Human
aggcugggagagccuu

SEQ ID NO: 3488357 - RNA, 19 nt, Human
aggcugggagagccuucca

SEQ ID NO: 3488358 - RNA, 12 nt, Human
aggcugggccaa

SEQ ID NO: 3488359 - RNA, 20 nt, Human
aggcugggccaagccaggga

SEQ ID NO: 3488360 - RNA, 18 nt, Human
aggcugggccauguccaa

SEQ ID NO: 3488361 - RNA, 21 nt, Human
aggcugggccauguccaaaga

SEQ ID NO: 3488362 - RNA, 22 nt, Human
aggcugggcccagaggcacagc

SEQ ID NO: 3488363 - RNA, 18 nt, Human
aggcugggcguaguggcu

SEQ ID NO: 3488364 - RNA, 15 nt, Human
aggcugggcugggca

SEQ ID NO: 3488365 - RNA, 22 nt, Human
aggcugggcugggcacugcucu

SEQ ID NO: 3488366 - RNA, 20 nt, Human
aggcugggcuucaguggcag

SEQ ID NO: 3488367 - RNA, 21 nt, Human
aggcugggcuucaguggcagc

SEQ ID NO: 3488368 - RNA, 23 nt, Human
aggcugggcuucaguggcagcug

SEQ ID NO: 3488369 - RNA, 22 nt, Human
aggcuggggaaguccucugggu

SEQ ID NO: 3488370 - RNA, 12 nt, Human
aggcuggggcug

SEQ ID NO: 3488371 - RNA, 22 nt, Human
aggcugggggaagaagcucucu

SEQ ID NO: 3488372 - RNA, 12 nt, Human
aaaaacaggcac

SEQ ID NO: 3488373 - RNA, 18 nt, Human
aaaaacagguauauacuu

SEQ ID NO: 3488374 - RNA, 19 nt, Human
aaaaacauucuaucuacug

SEQ ID NO: 3488375 - RNA, 12 nt, Human
aaaaacauugcc

SEQ ID NO: 3488376 - RNA, 15 nt, Human
aaaaacauugccuuu

SEQ ID NO: 3488377 - RNA, 15 nt, Human
aaaaaccaacaucua

SEQ ID NO: 3488378 - RNA, 20 nt, Human
aaaaaccaguauuguacaaa

SEQ ID NO: 3488379 - RNA, 16 nt, Human
aaaaaccuauuccacu

SEQ ID NO: 3488380 - RNA, 22 nt, Human
aaaaaccugagauuuauuaaag

SEQ ID NO: 3488381 - RNA, 13 nt, Human
aaaaacuacacau

SEQ ID NO: 3488382 - RNA, 18 nt, Human
aaaaacucaaccaaaugg

SEQ ID NO: 3488383 - RNA, 22 nt, Human
aaaaacucaaccaaaugguaca

SEQ ID NO: 3488384 - RNA, 17 nt, Human
aaaaacucgaggacugu

SEQ ID NO: 3488385 - RNA, 21 nt, Human
aaaaacucgaggacuguauuu

SEQ ID NO: 3488386 - RNA, 12 nt, Human
aaaaacugaaug

SEQ ID NO: 3488387 - RNA, 15 nt, Human
aaaaacugagugacu

SEQ ID NO: 3488388 - RNA, 15 nt, Human
aaaaacugucuuuaa

SEQ ID NO: 3488389 - RNA, 21 nt, Human
aaaaacuuagugacaaaauag

SEQ ID NO: 3488390 - RNA, 19 nt, Human
aaaaacuucaguaaguacg

SEQ ID NO: 3488391 - RNA, 12 nt, Human
aaaaacuuuuau

SEQ ID NO: 3488392 - RNA, 11 nt, Human
aaaaagaaaaa

SEQ ID NO: 3488393 - RNA, 23 nt, Human
aaaaagaaaggcuguuaaauaca

SEQ ID NO: 3488394 - RNA, 14 nt, Human
aaaaagaagugcug

SEQ ID NO: 3488395 - RNA, 11 nt, Human
aaaaagaaugu

SEQ ID NO: 3488396 - RNA, 15 nt, Human
aaaaagacucuuuuu

SEQ ID NO: 3488397 - RNA, 19 nt, Human
aaaaagacuuuaaaaguga

SEQ ID NO: 3488398 - RNA, 19 nt, Human
aaaaagagaauuagauuau

SEQ ID NO: 3488399 - RNA, 12 nt, Human
aaaaagagacau

SEQ ID NO: 3488400 - RNA, 15 nt, Human
aaaaagagacaucca

SEQ ID NO: 3488401 - RNA, 18 nt, Human
aaaaagaggaaagaauga

SEQ ID NO: 3488402 - RNA, 19 nt, Human
aaaaagaggaaagaaugaa

SEQ ID NO: 3488403 - RNA, 19 nt, Human
aaaaagauaaacacaagau

SEQ ID NO: 3488404 - RNA, 17 nt, Human
aaaaagauauauuaaaa

SEQ ID NO: 3488405 - RNA, 23 nt, Human
aaaaagauuuucagaaaauauua

SEQ ID NO: 3488406 - RNA, 17 nt, Human
aaaaagcauaaaaacau

SEQ ID NO: 3488407 - RNA, 12 nt, Human
aaaaagcaugua

SEQ ID NO: 3488408 - RNA, 20 nt, Human
aaaaagccugcaauuucaua

SEQ ID NO: 3488409 - RNA, 12 nt, Human
aaaaagccuucc

SEQ ID NO: 3488410 - RNA, 19 nt, Human
aaaaagcucauauuuugua

SEQ ID NO: 3488411 - RNA, 20 nt, Human
aaaaagcuccuguccuccca

SEQ ID NO: 3488412 - RNA, 15 nt, Human
aaaaagcuuaaaacu

SEQ ID NO: 3488413 - RNA, 19 nt, Human
aaaaagcuuaaaacuuuga

SEQ ID NO: 3488414 - RNA, 12 nt, Human
aaaaagcuuuau

SEQ ID NO: 3488415 - RNA, 14 nt, Human
aaaaagcuuuuucc

SEQ ID NO: 3488416 - RNA, 15 nt, Human
aaaaaggauacauaa

SEQ ID NO: 3488417 - RNA, 21 nt, Human
aaaaaggaugcacagaguugu

SEQ ID NO: 3488418 - RNA, 12 nt, Human
aaaaaggcagga

SEQ ID NO: 3488419 - RNA, 13 nt, Human
aaaaaggcaguua

SEQ ID NO: 3488420 - RNA, 17 nt, Human
aaaaaggcauuguuuga

SEQ ID NO: 3488421 - RNA, 22 nt, Human
aaaaaguaucauggaaauauua

SEQ ID NO: 3488422 - RNA, 13 nt, Human
aaaaaguauuauu

SEQ ID NO: 3488423 - RNA, 14 nt, Human
aaaaaguauuauuu

SEQ ID NO: 3488424 - RNA, 15 nt, Human
aaaaaguauugccaa

SEQ ID NO: 3488425 - RNA, 14 nt, Human
aaaaagucagaugu

SEQ ID NO: 3488426 - RNA, 16 nt, Human
aaaaagucagauguuu

SEQ ID NO: 3488427 - RNA, 20 nt, Human
aaaaaguccaauuuuaauuu

SEQ ID NO: 3488428 - RNA, 14 nt, Human
aaaaagucugcauu

SEQ ID NO: 3488429 - RNA, 17 nt, Human
aaaaagugaaauaaugu

SEQ ID NO: 3488430 - RNA, 19 nt, Human
aaaaagugacacagcagcu

SEQ ID NO: 3488431 - RNA, 18 nt, Human
aaaaagugcuucauucuu

SEQ ID NO: 3488432 - RNA, 19 nt, Human
aaaaaguggaauuucuugu

SEQ ID NO: 3488433 - RNA, 20 nt, Human
aaaaaguuaaaaaaaauaau

SEQ ID NO: 3488434 - RNA, 13 nt, Human
aaaaaguugaagg

SEQ ID NO: 3488435 - RNA, 15 nt, Human
aaaaaguugcagcug

SEQ ID NO: 3488436 - RNA, 13 nt, Human
aaaaaguuguuca

SEQ ID NO: 3488437 - RNA, 17 nt, Human
aaaaaguuuacaagugu

SEQ ID NO: 3488438 - RNA, 12 nt, Human
aaaaauaaaaua

SEQ ID NO: 3488439 - RNA, 20 nt, Human
aaaaauaaaauaauuauaaa

SEQ ID NO: 3488440 - RNA, 11 nt, Human
aaaaauaaagc

SEQ ID NO: 3488441 - RNA, 17 nt, Human
aaaaauaaauaaaagcc

SEQ ID NO: 3488442 - RNA, 12 nt, Human
aaaaauaaaugg

SEQ ID NO: 3488443 - RNA, 21 nt, Human
aaaaauaaauuugguucuaau

SEQ ID NO: 3488444 - RNA, 14 nt, Human
aaaaauaacaauga

SEQ ID NO: 3488445 - RNA, 18 nt, Human
aaaaauaacuguaauuau

SEQ ID NO: 3488446 - RNA, 11 nt, Human
aaaaauaaggu

SEQ ID NO: 3488447 - RNA, 18 nt, Human
aaaaauaagucaacagua

SEQ ID NO: 3488448 - RNA, 21 nt, Human
aaaaauaagucaacaguaaac

SEQ ID NO: 3488449 - RNA, 12 nt, Human
aaaaauaauaaa

SEQ ID NO: 3488450 - RNA, 12 nt, Human
aaaaauaauaau

SEQ ID NO: 3488451 - RNA, 17 nt, Human
aaaaauaauuuuuauau

SEQ ID NO: 3488452 - RNA, 13 nt, Human
aaaaauacaaaau

SEQ ID NO: 3488453 - RNA, 14 nt, Human
aaaaauacaugcau

SEQ ID NO: 3488454 - RNA, 14 nt, Human
aaaaauacauuuua

SEQ ID NO: 3488455 - RNA, 23 nt, Human
aaaaauaccucaggaaagaauag

SEQ ID NO: 3488456 - RNA, 18 nt, Human
aaaaauacuauuuaagau

SEQ ID NO: 3488457 - RNA, 13 nt, Human
aaaaauacucaga

SEQ ID NO: 3488458 - RNA, 14 nt, Human
aaaaauacucuaau

SEQ ID NO: 3488459 - RNA, 17 nt, Human
aaaaauacucuaauucu

SEQ ID NO: 3488460 - RNA, 12 nt, Human
aaaaauagaaac

SEQ ID NO: 3488461 - RNA, 15 nt, Human
aaaaauagaaacaua

SEQ ID NO: 3488462 - RNA, 17 nt, Human
aaaaauagcaacuugug

SEQ ID NO: 3488463 - RNA, 23 nt, Human
aaaaauaguuuggauauguaaaa

SEQ ID NO: 3488464 - RNA, 14 nt, Human
aaaaauauaaaacu

SEQ ID NO: 3488465 - RNA, 14 nt, Human
aaaaauauacaugu

SEQ ID NO: 3488466 - RNA, 20 nt, Human
aaaaauauggaacuucuaau

SEQ ID NO: 3488467 - RNA, 13 nt, Human
aaaaauaugugaa

SEQ ID NO: 3488468 - RNA, 16 nt, Human
aaaaauaugugaagga

SEQ ID NO: 3488469 - RNA, 10 nt, Human
aaaaauauua

SEQ ID NO: 3488470 - RNA, 23 nt, Human
aaaaauauuguuucugcauucau

SEQ ID NO: 3488471 - RNA, 14 nt, Human
aaaaauauuuuaug

SEQ ID NO: 3488472 - RNA, 23 nt, Human
aaaaaucaacuuuuuauugccuu

SEQ ID NO: 3488473 - RNA, 16 nt, Human
aaaaaucaauuaacca

SEQ ID NO: 3488474 - RNA, 17 nt, Human
aaaaaucauaaacugug

SEQ ID NO: 3488475 - RNA, 20 nt, Human
aaaaaucaucuauuuugaug

SEQ ID NO: 3488476 - RNA, 19 nt, Human
aaaaauccucuuccucuga

SEQ ID NO: 3488477 - RNA, 20 nt, Human
aaaaaucucaaauuucuaaa

SEQ ID NO: 3488478 - RNA, 22 nt, Human
aaaaaucugaccaaaacaaaca

SEQ ID NO: 3488479 - RNA, 18 nt, Human
aaaaaucugcagaaggaa

SEQ ID NO: 3488480 - RNA, 15 nt, Human
aaaaaucuuaauacu

SEQ ID NO: 3488481 - RNA, 18 nt, Human
aaaaaucuuaauacuguu

SEQ ID NO: 3488482 - RNA, 20 nt, Human
aaaaaucuugugcuagaaua

SEQ ID NO: 3488483 - RNA, 12 nt, Human
aaaaaugaaaga

SEQ ID NO: 3488484 - RNA, 17 nt, Human
aaaaaugaaagaugauu

SEQ ID NO: 3488485 - RNA, 14 nt, Human
aaaaaugaaauuau

SEQ ID NO: 3488486 - RNA, 11 nt, Human
aaaaaugagaa

SEQ ID NO: 3488487 - RNA, 16 nt, Human
aaaaaugagaacaugu

SEQ ID NO: 3488488 - RNA, 16 nt, Human
aaaaaugauuucagua

SEQ ID NO: 3488489 - RNA, 21 nt, Human
aaaaaugcacaaacaaugcaa

SEQ ID NO: 3488490 - RNA, 21 nt, Human
aaaaaugcacguagcugaggc

SEQ ID NO: 3488491 - RNA, 21 nt, Human
aaaaaugccauaauacaaaag

SEQ ID NO: 3488492 - RNA, 18 nt, Human
aaaaaugccaucaaauga

SEQ ID NO: 3488493 - RNA, 18 nt, Human
aaaaaugcccuuaaauca

SEQ ID NO: 3488494 - RNA, 13 nt, Human
aaaaaugccuuug

SEQ ID NO: 3488495 - RNA, 12 nt, Human
aaaaaugcuaau

SEQ ID NO: 3488496 - RNA, 14 nt, Human
aaaaaugcugaaca

SEQ ID NO: 3488497 - RNA, 15 nt, Human
aaaaaugcugaacau

SEQ ID NO: 3488498 - RNA, 19 nt, Human
aaaaaugcugaacauugca

SEQ ID NO: 3488499 - RNA, 23 nt, Human
aaaaauggauauuauuagaaauu

SEQ ID NO: 3488500 - RNA, 19 nt, Human
aggcgagaagggcugcuuc

SEQ ID NO: 3488501 - RNA, 19 nt, Human
aggcgagagaggagccaga

SEQ ID NO: 3488502 - RNA, 23 nt, Human
aggcgagagaggagccagacaga

SEQ ID NO: 3488503 - RNA, 18 nt, Human
aggcgagugccaggacuc

SEQ ID NO: 3488504 - RNA, 19 nt, Human
aggcgaucacaacgugcau

SEQ ID NO: 3488505 - RNA, 21 nt, Human
aggcgaucacaacgugcauug

SEQ ID NO: 3488506 - RNA, 22 nt, Human
aggcgcacugugacccccagcu

SEQ ID NO: 3488507 - RNA, 22 nt, Human
aggcgccccaacccguggaggc

SEQ ID NO: 3488508 - RNA, 14 nt, Human
aggcgccccuuccc

SEQ ID NO: 3488509 - RNA, 19 nt, Human
aggcgcuagcacagcuccc

SEQ ID NO: 3488510 - RNA, 17 nt, Human
aggcggacguuccagcc

SEQ ID NO: 3488511 - RNA, 15 nt, Human
aggcggagaguacag

SEQ ID NO: 3488512 - RNA, 16 nt, Human
aggcggccccucccgc

SEQ ID NO: 3488513 - RNA, 14 nt, Human
aggcgggaaggagg

SEQ ID NO: 3488514 - RNA, 18 nt, Human
aggcgggacagugcugca

SEQ ID NO: 3488515 - RNA, 14 nt, Human
aggcgggccagcca

SEQ ID NO: 3488516 - RNA, 16 nt, Human
aggcgggccagccagg

SEQ ID NO: 3488517 - RNA, 21 nt, Human
aggcgggccagccaggcgggc

SEQ ID NO: 3488518 - RNA, 15 nt, Human
aggcgggcggucagg

SEQ ID NO: 3488519 - RNA, 17 nt, Human
agggacaggaccccagc

SEQ ID NO: 3488520 - RNA, 20 nt, Human
agggacaggaccccagcucu

SEQ ID NO: 3488521 - RNA, 21 nt, Human
agggacaggaccccagcucug

SEQ ID NO: 3488522 - RNA, 17 nt, Human
agggacaggauaagagg

SEQ ID NO: 3488523 - RNA, 16 nt, Human
agggacagucucacca

SEQ ID NO: 3488524 - RNA, 22 nt, Human
agggacauguuuugauaaagua

SEQ ID NO: 3488525 - RNA, 24 nt, Human
agggacauguuuugauaaaguagu

SEQ ID NO: 3488526 - RNA, 19 nt, Human
agggaccaacugggcccaa

SEQ ID NO: 3488527 - RNA, 14 nt, Human
agggaccaaggacc

SEQ ID NO: 3488528 - RNA, 18 nt, Human
agggaccaaggaccccuc

SEQ ID NO: 3488529 - RNA, 12 nt, Human
agggaccaaggc

SEQ ID NO: 3488530 - RNA, 21 nt, Human
agggaccaaggcaaggcaggu

SEQ ID NO: 3488531 - RNA, 13 nt, Human
agggaccacagca

SEQ ID NO: 3488532 - RNA, 23 nt, Human
agggaccacagcaaggcaccugc

SEQ ID NO: 3488533 - RNA, 12 nt, Human
agggaccccucc

SEQ ID NO: 3488534 - RNA, 13 nt, Human
agggaccccuccu

SEQ ID NO: 3488535 - RNA, 14 nt, Human
agggaccccuccuc

SEQ ID NO: 3488536 - RNA, 15 nt, Human
agggacccuccacca

SEQ ID NO: 3488537 - RNA, 16 nt, Human
agggaccucucccagg

SEQ ID NO: 3488538 - RNA, 14 nt, Human
agggaccuggggaa

SEQ ID NO: 3488539 - RNA, 13 nt, Human
agggacgccuggg

SEQ ID NO: 3488540 - RNA, 22 nt, Human
agggacgccugggggugccagg

SEQ ID NO: 3488541 - RNA, 23 nt, Human
agggacgccugggggugccagga

SEQ ID NO: 3488542 - RNA, 21 nt, Human
agggacgcuuugggagaaugu

SEQ ID NO: 3488543 - RNA, 14 nt, Human
agggacgcuuuguc

SEQ ID NO: 3488544 - RNA, 20 nt, Human
agggacucaauuucucccca

SEQ ID NO: 3488545 - RNA, 20 nt, Human
agggacucaucauuuccauu

SEQ ID NO: 3488546 - RNA, 19 nt, Human
agggacucaucuuucccuc

SEQ ID NO: 3488547 - RNA, 23 nt, Human
agggacucaucuuucccuccuug

SEQ ID NO: 3488548 - RNA, 14 nt, Human
agggacucugaagc

SEQ ID NO: 3488549 - RNA, 19 nt, Human
agggacucugaagccucug

SEQ ID NO: 3488550 - RNA, 15 nt, Human
agggacugagaaauu

SEQ ID NO: 3488551 - RNA, 13 nt, Human
agggacugagaga

SEQ ID NO: 3488552 - RNA, 20 nt, Human
agggacugagagaugcagaa

SEQ ID NO: 3488553 - RNA, 23 nt, Human
agggacugccagucccccugccc

SEQ ID NO: 3488554 - RNA, 13 nt, Human
agggacuuaaaaa

SEQ ID NO: 3488555 - RNA, 22 nt, Human
agggacuucaggaucaaguccu

SEQ ID NO: 3488556 - RNA, 14 nt, Human
agggacuugaaguu

SEQ ID NO: 3488557 - RNA, 18 nt, Human
agggacuuggaagcuccg

SEQ ID NO: 3488558 - RNA, 20 nt, Human
agggacuuggaagcuccgcu

SEQ ID NO: 3488559 - RNA, 14 nt, Human
agggagaacuuaug

SEQ ID NO: 3488560 - RNA, 13 nt, Human
agggagaagcucc

SEQ ID NO: 3488561 - RNA, 15 nt, Human
agggagaaggaucua

SEQ ID NO: 3488562 - RNA, 22 nt, Human
agggagaaggaucuagaaugug

SEQ ID NO: 3488563 - RNA, 18 nt, Human
agggagaagggauggagg

SEQ ID NO: 3488564 - RNA, 16 nt, Human
agggagaccuggacac

SEQ ID NO: 3488565 - RNA, 22 nt, Human
agggagaccuggacacaggccu

SEQ ID NO: 3488566 - RNA, 20 nt, Human
agggagacgguuuccaggga

SEQ ID NO: 3488567 - RNA, 16 nt, Human
agggagagaccucauc

SEQ ID NO: 3488568 - RNA, 23 nt, Human
agggagagaccucaucaggauga

SEQ ID NO: 3488569 - RNA, 15 nt, Human
agggagagccagcuc

SEQ ID NO: 3488570 - RNA, 14 nt, Human
agggagagcggggc

SEQ ID NO: 3488571 - RNA, 16 nt, Human
agggagagcggggcag

SEQ ID NO: 3488572 - RNA, 16 nt, Human
agggagagggggcugg

SEQ ID NO: 3488573 - RNA, 20 nt, Human
agggagagucucccagggag

SEQ ID NO: 3488574 - RNA, 19 nt, Human
agggagcaaguccuucccu

SEQ ID NO: 3488575 - RNA, 23 nt, Human
agggagcacaacccccagcuccc

SEQ ID NO: 3488576 - RNA, 16 nt, Human
agggagcaccugguga

SEQ ID NO: 3488577 - RNA, 23 nt, Human
agggagcagacuuuuaaagacuu

SEQ ID NO: 3488578 - RNA, 19 nt, Human
agggagcagggaaggccug

SEQ ID NO: 3488579 - RNA, 14 nt, Human
agggagcaguggcu

SEQ ID NO: 3488580 - RNA, 21 nt, Human
agggagcauagaaggcaggug

SEQ ID NO: 3488581 - RNA, 17 nt, Human
agggagcaugagaggag

SEQ ID NO: 3488582 - RNA, 20 nt, Human
agggagcaugagaggaggca

SEQ ID NO: 3488583 - RNA, 15 nt, Human
agggagcauuuuccu

SEQ ID NO: 3488584 - RNA, 11 nt, Human
agggagccaag

SEQ ID NO: 3488585 - RNA, 12 nt, Human
agggagccaagg

SEQ ID NO: 3488586 - RNA, 14 nt, Human
agggagccaaggga

SEQ ID NO: 3488587 - RNA, 16 nt, Human
agggagccaagggaug

SEQ ID NO: 3488588 - RNA, 17 nt, Human
agggagccaagggaugg

SEQ ID NO: 3488589 - RNA, 17 nt, Human
agggagccauuugagag

SEQ ID NO: 3488590 - RNA, 20 nt, Human
agggagccuagaagcuggug

SEQ ID NO: 3488591 - RNA, 16 nt, Human
agggagccuccugccc

SEQ ID NO: 3488592 - RNA, 17 nt, Human
agggagccuccugccca

SEQ ID NO: 3488593 - RNA, 16 nt, Human
agggagcgagggagaa

SEQ ID NO: 3488594 - RNA, 14 nt, Human
agggagcggaaagc

SEQ ID NO: 3488595 - RNA, 17 nt, Human
agggagcguagaaucug

SEQ ID NO: 3488596 - RNA, 22 nt, Human
agggagcuccaacucagaaggg

SEQ ID NO: 3488597 - RNA, 20 nt, Human
agggagcuggcuccagccug

SEQ ID NO: 3488598 - RNA, 21 nt, Human
agggagcuggcuccagccugg

SEQ ID NO: 3488599 - RNA, 22 nt, Human
agggagcuggcuccagccugga

SEQ ID NO: 3488600 - RNA, 16 nt, Human
agggagcugggcccga

SEQ ID NO: 3488601 - RNA, 23 nt, Human
agggaggaagaagcuuaggcagg

SEQ ID NO: 3488602 - RNA, 17 nt, Human
agggaggaccuggggca

SEQ ID NO: 3488603 - RNA, 20 nt, Human
agggaggaccuggggcacag

SEQ ID NO: 3488604 - RNA, 19 nt, Human
agggaggacgggagcuggg

SEQ ID NO: 3488605 - RNA, 15 nt, Human
agggaggaggccacc

SEQ ID NO: 3488606 - RNA, 21 nt, Human
agggaggaggccaccucucca

SEQ ID NO: 3488607 - RNA, 23 nt, Human
agggaggaggccaccucuccaag

SEQ ID NO: 3488608 - RNA, 15 nt, Human
agggaggaguggagg

SEQ ID NO: 3488609 - RNA, 12 nt, Human
agggaggcagcc

SEQ ID NO: 3488610 - RNA, 15 nt, Human
agggaggcagccucc

SEQ ID NO: 3488611 - RNA, 13 nt, Human
agggaggcagggg

SEQ ID NO: 3488612 - RNA, 15 nt, Human
agggaggccccaggg

SEQ ID NO: 3488613 - RNA, 16 nt, Human
agggaggccgaagcua

SEQ ID NO: 3488614 - RNA, 23 nt, Human
agggaggccgaagcuaacaggga

SEQ ID NO: 3488615 - RNA, 15 nt, Human
agggaggcugcugcu

SEQ ID NO: 3488616 - RNA, 14 nt, Human
agggaggcuggucc

SEQ ID NO: 3488617 - RNA, 15 nt, Human
agggaggcugguccu

SEQ ID NO: 3488618 - RNA, 15 nt, Human
agggagggagggcuc

SEQ ID NO: 3488619 - RNA, 13 nt, Human
agggagggagugg

SEQ ID NO: 3488620 - RNA, 17 nt, Human
agggagggcagagcugg

SEQ ID NO: 3488621 - RNA, 16 nt, Human
agggagggcuccagac

SEQ ID NO: 3488622 - RNA, 22 nt, Human
agggagggcuccagacacaugu

SEQ ID NO: 3488623 - RNA, 14 nt, Human
agggagggcucuga

SEQ ID NO: 3488624 - RNA, 20 nt, Human
agggagggcucugaggcgcc

SEQ ID NO: 3488625 - RNA, 15 nt, Human
agggagggcuucugc

SEQ ID NO: 3488626 - RNA, 12 nt, Human
agggaggggccu

SEQ ID NO: 3488627 - RNA, 13 nt, Human
agggaggggcugu

SEQ ID NO: 3488628 - RNA, 17 nt, Human
agggaggucaggcccug

SEQ ID NO: 3488629 - RNA, 19 nt, Human
agggaggugugaggcagga

SEQ ID NO: 3488630 - RNA, 13 nt, Human
agggagguuugug

SEQ ID NO: 3488631 - RNA, 18 nt, Human
agggagguuugugagagc

SEQ ID NO: 3488632 - RNA, 15 nt, Human
agggaguauucuaau

SEQ ID NO: 3488633 - RNA, 14 nt, Human
agggagucagcugu

SEQ ID NO: 3488634 - RNA, 20 nt, Human
agggaguccgaaagggacuu

SEQ ID NO: 3488635 - RNA, 14 nt, Human
agggagucugccag

SEQ ID NO: 3488636 - RNA, 18 nt, Human
agggagugacagaggcag

SEQ ID NO: 3488637 - RNA, 20 nt, Human
agggagugaguugauagcac

SEQ ID NO: 3488638 - RNA, 16 nt, Human
agggagugcuggcuca

SEQ ID NO: 3488639 - RNA, 18 nt, Human
agggagugcuggcucaca

SEQ ID NO: 3488640 - RNA, 13 nt, Human
agggaguuuuuga

SEQ ID NO: 3488641 - RNA, 21 nt, Human
agggauaaagaaaaaaauacu

SEQ ID NO: 3488642 - RNA, 20 nt, Human
agggauagucaccuuuuaaa

SEQ ID NO: 3488643 - RNA, 22 nt, Human
agggaucacagggccccagaag

SEQ ID NO: 3488644 - RNA, 18 nt, Human
agggaucagcccugcccu

SEQ ID NO: 3488645 - RNA, 19 nt, Human
agggaucuugcauucccag

SEQ ID NO: 3488646 - RNA, 17 nt, Human
agggaugaaagagaagg

SEQ ID NO: 3488647 - RNA, 18 nt, Human
agggaugaaggccucccu

SEQ ID NO: 3488648 - RNA, 15 nt, Human
agggaugacuaaaau

SEQ ID NO: 3488649 - RNA, 19 nt, Human
agggaugaggugcugggag

SEQ ID NO: 3488650 - RNA, 18 nt, Human
agggaugauucaagccau

SEQ ID NO: 3488651 - RNA, 15 nt, Human
agggaugcauggaga

SEQ ID NO: 3488652 - RNA, 21 nt, Human
agggaugcccuggagguggcu

SEQ ID NO: 3488653 - RNA, 15 nt, Human
agggauggaaaagga

SEQ ID NO: 3488654 - RNA, 11 nt, Human
agauauuuuau

SEQ ID NO: 3488655 - RNA, 21 nt, Human
agauauuuugcuuugugauuu

SEQ ID NO: 3488656 - RNA, 13 nt, Human
agauauuuuguaa

SEQ ID NO: 3488657 - RNA, 15 nt, Human
agauauuuuguaaaa

SEQ ID NO: 3488658 - RNA, 22 nt, Human
agauauuuuguaaaauguauua

SEQ ID NO: 3488659 - RNA, 13 nt, Human
agauauuuuucau

SEQ ID NO: 3488660 - RNA, 19 nt, Human
agauauuuuucaugauuuu

SEQ ID NO: 3488661 - RNA, 19 nt, Human
agauauuuuuccauuuuuu

SEQ ID NO: 3488662 - RNA, 13 nt, Human
agauauuuuuucu

SEQ ID NO: 3488663 - RNA, 16 nt, Human
agaucaaaaaggcuua

SEQ ID NO: 3488664 - RNA, 23 nt, Human
agguauaauucacauuguauuca

SEQ ID NO: 3488665 - RNA, 11 nt, Human
agguauaauuu

SEQ ID NO: 3488666 - RNA, 15 nt, Human
agguauaccucacuu

SEQ ID NO: 3488667 - RNA, 17 nt, Human
agguauacuuuaguaga

SEQ ID NO: 3488668 - RNA, 21 nt, Human
agguauacuuuaguagacauu

SEQ ID NO: 3488669 - RNA, 21 nt, Human
agguauaucauucuaaagaua

SEQ ID NO: 3488670 - RNA, 22 nt, Human
agguauaucauucuaaagauag

SEQ ID NO: 3488671 - RNA, 22 nt, Human
agguauaucuagguuuaugaca

SEQ ID NO: 3488672 - RNA, 17 nt, Human
agguauauuggaagagg

SEQ ID NO: 3488673 - RNA, 17 nt, Human
agguaucaguugcaaua

SEQ ID NO: 3488674 - RNA, 22 nt, Human
agguaucaguugcaauaauacu

SEQ ID NO: 3488675 - RNA, 15 nt, Human
agguaucuagagcuu

SEQ ID NO: 3488676 - RNA, 15 nt, Human
agguaucuccaggau

SEQ ID NO: 3488677 - RNA, 20 nt, Human
agguaugaccuucuaggaag

SEQ ID NO: 3488678 - RNA, 16 nt, Human
agguaugaggucuagg

SEQ ID NO: 3488679 - RNA, 17 nt, Human
agguaugcaaucaaauc

SEQ ID NO: 3488680 - RNA, 21 nt, Human
agguaugcaaucaaaucugcu

SEQ ID NO: 3488681 - RNA, 20 nt, Human
agguauguugccuuuauggu

SEQ ID NO: 3488682 - RNA, 15 nt, Human
agguauuauuaucuu

SEQ ID NO: 3488683 - RNA, 18 nt, Human
agguauuauuaucuuuaa

SEQ ID NO: 3488684 - RNA, 20 nt, Human
agguauucaauauccuuugc

SEQ ID NO: 3488685 - RNA, 17 nt, Human
agguauuuugaauacca

SEQ ID NO: 3488686 - RNA, 19 nt, Human
agguauuuuucuuuaacca

SEQ ID NO: 3488687 - RNA, 20 nt, Human
aggucaaaauagugccacua

SEQ ID NO: 3488688 - RNA, 19 nt, Human
aggucaacagaaugaaaaa

SEQ ID NO: 3488689 - RNA, 19 nt, Human
aggucaaggccugucccug

SEQ ID NO: 3488690 - RNA, 21 nt, Human
aggucaaggcugcagugagcc

SEQ ID NO: 3488691 - RNA, 17 nt, Human
aggucaaguugucaggu

SEQ ID NO: 3488692 - RNA, 19 nt, Human
aggucaaguugucagguua

SEQ ID NO: 3488693 - RNA, 21 nt, Human
aggucaauacaguacaggcag

SEQ ID NO: 3488694 - RNA, 19 nt, Human
aggucacauucaggaagau

SEQ ID NO: 3488695 - RNA, 12 nt, Human
aggucaccagca

SEQ ID NO: 3488696 - RNA, 15 nt, Human
aggucacccuuugcu

SEQ ID NO: 3488697 - RNA, 14 nt, Human
aggucaccucacuc

SEQ ID NO: 3488698 - RNA, 17 nt, Human
aggucaccucacucagc

SEQ ID NO: 3488699 - RNA, 23 nt, Human
aggucaccucacucagcaccacu

SEQ ID NO: 3488700 - RNA, 22 nt, Human
agauuuguuuuuaaacuguaca

SEQ ID NO: 3488701 - RNA, 16 nt, Human
agauuuuaaucaaauu

SEQ ID NO: 3488702 - RNA, 16 nt, Human
agauuuuaauugucau

SEQ ID NO: 3488703 - RNA, 14 nt, Human
agauuuuaauuuug

SEQ ID NO: 3488704 - RNA, 19 nt, Human
agauuuuacaaaagaugua

SEQ ID NO: 3488705 - RNA, 20 nt, Human
agauuuuacaaaagauguau

SEQ ID NO: 3488706 - RNA, 13 nt, Human
agauuuuacauga

SEQ ID NO: 3488707 - RNA, 18 nt, Human
agauuuuauuauguaaau

SEQ ID NO: 3488708 - RNA, 19 nt, Human
agauuuuauuauguaaauc

SEQ ID NO: 3488709 - RNA, 14 nt, Human
agauuuucagucua

SEQ ID NO: 3488710 - RNA, 20 nt, Human
agauuuuccucuugugauuu

SEQ ID NO: 3488711 - RNA, 14 nt, Human
agauuuuccugaaa

SEQ ID NO: 3488712 - RNA, 15 nt, Human
agauuuuccugaaaa

SEQ ID NO: 3488713 - RNA, 13 nt, Human
agauuuuccugug

SEQ ID NO: 3488714 - RNA, 22 nt, Human
agauuuucugggccuaaaggau

SEQ ID NO: 3488715 - RNA, 17 nt, Human
agauuuucugguucuaa

SEQ ID NO: 3488716 - RNA, 20 nt, Human
agauuuucuuuaaaagaaug

SEQ ID NO: 3488717 - RNA, 21 nt, Human
agauuuugaaauuuuuauuaa

SEQ ID NO: 3488718 - RNA, 14 nt, Human
agauuuugauaacu

SEQ ID NO: 3488719 - RNA, 17 nt, Human
agauuuugauaacuguu

SEQ ID NO: 3488720 - RNA, 12 nt, Human
agauuuuguugg

SEQ ID NO: 3488721 - RNA, 16 nt, Human
agauuuuguuuugcuu

SEQ ID NO: 3488722 - RNA, 24 nt, Human
agauuuuguuuugcuuuuucugac

SEQ ID NO: 3488723 - RNA, 21 nt, Human
agauuuuuaaaaaauauuuuc

SEQ ID NO: 3488724 - RNA, 21 nt, Human
agauuuuuauauuaguugcuu

SEQ ID NO: 3488725 - RNA, 14 nt, Human
agauuuuugcaaua

SEQ ID NO: 3488726 - RNA, 14 nt, Human
agauuuuuuaauaa

SEQ ID NO: 3488727 - RNA, 18 nt, Human
agauuuuuuauugcuagu

SEQ ID NO: 3488728 - RNA, 22 nt, Human
agauuuuuuauugcuaguauuu

SEQ ID NO: 3488729 - RNA, 22 nt, Human
agauuuuuucagacuugucaag

SEQ ID NO: 3488730 - RNA, 18 nt, Human
agauuuuuuuguuguuug

SEQ ID NO: 3488731 - RNA, 19 nt, Human
agauuuuuuuguuguuugu

SEQ ID NO: 3488732 - RNA, 13 nt, Human
agauuuuuuuuaa

SEQ ID NO: 3488733 - RNA, 18 nt, Human
agauuuuuuuuuuuucuc

SEQ ID NO: 3488734 - RNA, 15 nt, Human
agcaaaaaaaguugu

SEQ ID NO: 3488735 - RNA, 18 nt, Human
agcaaaaaaaguuguaug

SEQ ID NO: 3488736 - RNA, 20 nt, Human
agcaaaaaaaguuguaugau

SEQ ID NO: 3488737 - RNA, 12 nt, Human
agcaaaaaagaa

SEQ ID NO: 3488738 - RNA, 22 nt, Human
agcaaaaaaguccaauuuuaau

SEQ ID NO: 3488739 - RNA, 17 nt, Human
agcaaaaaguggggcag

SEQ ID NO: 3488740 - RNA, 11 nt, Human
agcaaaaaugc

SEQ ID NO: 3488741 - RNA, 14 nt, Human
agcaaaaaugcuaa

SEQ ID NO: 3488742 - RNA, 15 nt, Human
agcaaaaaugcuaau

SEQ ID NO: 3488743 - RNA, 17 nt, Human
agcaaaaaugcuaauau

SEQ ID NO: 3488744 - RNA, 12 nt, Human
agcaaaacaaaa

SEQ ID NO: 3488745 - RNA, 18 nt, Human
agcaaaaccauugcuuca

SEQ ID NO: 3488746 - RNA, 20 nt, Human
agcaaaaccauugcuucacu

SEQ ID NO: 3488747 - RNA, 17 nt, Human
agcaaaacuccaucuca

SEQ ID NO: 3488748 - RNA, 13 nt, Human
agcaaaacuuuua

SEQ ID NO: 3488749 - RNA, 13 nt, Human
agcaaaagaaaaa

SEQ ID NO: 3488750 - RNA, 14 nt, Human
agcaaaagaaaaag

SEQ ID NO: 3488751 - RNA, 21 nt, Human
agcaaaagaauggcagaaaag

SEQ ID NO: 3488752 - RNA, 18 nt, Human
agcaaaagaugcuucuca

SEQ ID NO: 3488753 - RNA, 12 nt, Human
agcaaaaggcau

SEQ ID NO: 3488754 - RNA, 21 nt, Human
agcaaaagggugucugagccc

SEQ ID NO: 3488755 - RNA, 16 nt, Human
agcaaaauaaaaacua

SEQ ID NO: 3488756 - RNA, 20 nt, Human
agcaaaaucauggaaugguu

SEQ ID NO: 3488757 - RNA, 23 nt, Human
agcaaaaucauggaaugguuaua

SEQ ID NO: 3488758 - RNA, 15 nt, Human
agcaaaaugugaaug

SEQ ID NO: 3488759 - RNA, 13 nt, Human
agcaaaauugaug

SEQ ID NO: 3488760 - RNA, 23 nt, Human
agcaaaauugauguguuuauuua

SEQ ID NO: 3488761 - RNA, 21 nt, Human
agcaaaccaagagauugcuaa

SEQ ID NO: 3488762 - RNA, 17 nt, Human
agcaaaccauuuuuaaa

SEQ ID NO: 3488763 - RNA, 13 nt, Human
agcaaacccagac

SEQ ID NO: 3488764 - RNA, 15 nt, Human
agcaaacccagacgg

SEQ ID NO: 3488765 - RNA, 20 nt, Human
agcaaacccugucaaacauu

SEQ ID NO: 3488766 - RNA, 19 nt, Human
agcaaaccuaauugcacaa

SEQ ID NO: 3488767 - RNA, 20 nt, Human
agcaaaccuaauugcacaac

SEQ ID NO: 3488768 - RNA, 14 nt, Human
agcaaaccugcccc

SEQ ID NO: 3488769 - RNA, 13 nt, Human
agcaaacuaagcc

SEQ ID NO: 3488770 - RNA, 15 nt, Human
agcaaacugcaugcc

SEQ ID NO: 3488771 - RNA, 18 nt, Human
agcaaacugguuauuuaa

SEQ ID NO: 3488772 - RNA, 13 nt, Human
agcaaacuuggaa

SEQ ID NO: 3488773 - RNA, 22 nt, Human
agcaaagaggacucgcuuguaa

SEQ ID NO: 3488774 - RNA, 13 nt, Human
agcaaagaucaaa

SEQ ID NO: 3488775 - RNA, 14 nt, Human
agcaaagaucaaaa

SEQ ID NO: 3488776 - RNA, 15 nt, Human
agcaaagaucaaaau

SEQ ID NO: 3488777 - RNA, 20 nt, Human
agcaaagcaugccaauuucu

SEQ ID NO: 3488778 - RNA, 16 nt, Human
agcaaagcccccagag

SEQ ID NO: 3488779 - RNA, 21 nt, Human
agcaaagcccccagagcccag

SEQ ID NO: 3488780 - RNA, 22 nt, Human
agcaaagcccccagagcccagg

SEQ ID NO: 3488781 - RNA, 21 nt, Human
agcaaagccuguucauggcag

SEQ ID NO: 3488782 - RNA, 22 nt, Human
agcaaagcggguuauaaugaau

SEQ ID NO: 3488783 - RNA, 20 nt, Human
agcaaaggagauuggaagga

SEQ ID NO: 3488784 - RNA, 23 nt, Human
agcaaaggaguagaaagacagag

SEQ ID NO: 3488785 - RNA, 11 nt, Human
agcaaauacau

SEQ ID NO: 3488786 - RNA, 14 nt, Human
agcaaauacuuagc

SEQ ID NO: 3488787 - RNA, 22 nt, Human
agcaaauacuuagcaaaaagug

SEQ ID NO: 3488788 - RNA, 11 nt, Human
agcaaaucacc

SEQ ID NO: 3488789 - RNA, 13 nt, Human
agcaaaucaguuu

SEQ ID NO: 3488790 - RNA, 12 nt, Human
agcaaauccuuu

SEQ ID NO: 3488791 - RNA, 17 nt, Human
agcaaaucgaaugaaau

SEQ ID NO: 3488792 - RNA, 15 nt, Human
agcaaauggccucau

SEQ ID NO: 3488793 - RNA, 14 nt, Human
agcaaauguuacau

SEQ ID NO: 3488794 - RNA, 13 nt, Human
agcaaauguuucu

SEQ ID NO: 3488795 - RNA, 16 nt, Human
agcaaauuaauuggca

SEQ ID NO: 3488796 - RNA, 21 nt, Human
agcaaauuaauuggcagcaga

SEQ ID NO: 3488797 - RNA, 16 nt, Human
agcaaauuuauaauuu

SEQ ID NO: 3488798 - RNA, 19 nt, Human
agcaaauuuauaauuuuaa

SEQ ID NO: 3488799 - RNA, 15 nt, Human
agcaacacaaagcuu

SEQ ID NO: 3488800 - RNA, 18 nt, Human
agcaacacaagcuggaag

SEQ ID NO: 3488801 - RNA, 15 nt, Human
agcaacacagccugg

SEQ ID NO: 3488802 - RNA, 21 nt, Human
agcaacaucuagcaaauguua

SEQ ID NO: 3488803 - RNA, 12 nt, Human
agcaacauggcu

SEQ ID NO: 3488804 - RNA, 14 nt, Human
agcaaccaaaaaga

SEQ ID NO: 3488805 - RNA, 16 nt, Human
agcaaccagagcacug

SEQ ID NO: 3488806 - RNA, 22 nt, Human
agcaaccauauagaaagcuuug

SEQ ID NO: 3488807 - RNA, 16 nt, Human
agcaaccccaggcuga

SEQ ID NO: 3488808 - RNA, 19 nt, Human
agcaaccccuggaccccag

SEQ ID NO: 3488809 - RNA, 15 nt, Human
agcacaugcuggcca

SEQ ID NO: 3488810 - RNA, 22 nt, Human
agcaccaaaagcuuaccaaggg

SEQ ID NO: 3488811 - RNA, 19 nt, Human
agcaccaaaauaagaaaag

SEQ ID NO: 3488812 - RNA, 21 nt, Human
agcaccaaaauaagaaaagau

SEQ ID NO: 3488813 - RNA, 18 nt, Human
agcaccaaaucaaaaucu

SEQ ID NO: 3488814 - RNA, 18 nt, Human
agcaccaagcucaaagcg

SEQ ID NO: 3488815 - RNA, 12 nt, Human
agcaccacccua

SEQ ID NO: 3488816 - RNA, 23 nt, Human
agcaccaggcacgaacccaccug

SEQ ID NO: 3488817 - RNA, 10 nt, Human
agcaccaggg

SEQ ID NO: 3488818 - RNA, 13 nt, Human
agcaccagggaag

SEQ ID NO: 3488819 - RNA, 14 nt, Human
agcaccauccccuc

SEQ ID NO: 3488820 - RNA, 19 nt, Human
agcaccauccgccagggcc

SEQ ID NO: 3488821 - RNA, 20 nt, Human
agcacccagcaacuccaacu

SEQ ID NO: 3488822 - RNA, 19 nt, Human
agcaccccucucugcaucu

SEQ ID NO: 3488823 - RNA, 15 nt, Human
agcaccccugucucu

SEQ ID NO: 3488824 - RNA, 17 nt, Human
agcacccgggcucaggg

SEQ ID NO: 3488825 - RNA, 13 nt, Human
agcacccucugga

SEQ ID NO: 3488826 - RNA, 12 nt, Human
agcacccugagg

SEQ ID NO: 3488827 - RNA, 14 nt, Human
agcacccugagggc

SEQ ID NO: 3488828 - RNA, 14 nt, Human
agcaccgaggggcc

SEQ ID NO: 3488829 - RNA, 17 nt, Human
agcaccgaggggccuuu

SEQ ID NO: 3488830 - RNA, 15 nt, Human
agcaccguucugugc

SEQ ID NO: 3488831 - RNA, 15 nt, Human
agcaccuacagugua

SEQ ID NO: 3488832 - RNA, 17 nt, Human
agcaccuagccucgcuc

SEQ ID NO: 3488833 - RNA, 16 nt, Human
agcaccuccagccuga

SEQ ID NO: 3488834 - RNA, 21 nt, Human
agcaccuccauuaaagucuga

SEQ ID NO: 3488835 - RNA, 13 nt, Human
agcaccucccagc

SEQ ID NO: 3488836 - RNA, 16 nt, Human
agcaccuccucagccu

SEQ ID NO: 3488837 - RNA, 14 nt, Human
agcaccuccugccu

SEQ ID NO: 3488838 - RNA, 21 nt, Human
agcaccugccgaccucguccu

SEQ ID NO: 3488839 - RNA, 15 nt, Human
agcaccugcugucug

SEQ ID NO: 3488840 - RNA, 21 nt, Human
agcaccugcuucaugcucagc

SEQ ID NO: 3488841 - RNA, 15 nt, Human
agcaccuuccucacu

SEQ ID NO: 3488842 - RNA, 16 nt, Human
agcaccuuccucacuu

SEQ ID NO: 3488843 - RNA, 18 nt, Human
agcaccuugugccugggg

SEQ ID NO: 3488844 - RNA, 19 nt, Human
agcaccuugugccuggggu

SEQ ID NO: 3488845 - RNA, 19 nt, Human
agcaccuuugcacaggaug

SEQ ID NO: 3488846 - RNA, 14 nt, Human
agcacgauuucugu

SEQ ID NO: 3488847 - RNA, 19 nt, Human
agcacgauuucuguuuaga

SEQ ID NO: 3488848 - RNA, 21 nt, Human
agcacggacaauaaaccuccg

SEQ ID NO: 3488849 - RNA, 20 nt, Human
agcacggcucuguccccagc

SEQ ID NO: 3488850 - RNA, 21 nt, Human
agcacggcucuguccccagcc

SEQ ID NO: 3488851 - RNA, 16 nt, Human
agcacguuuaaaguuc

SEQ ID NO: 3488852 - RNA, 19 nt, Human
agcacuaaacuuggugcuu

SEQ ID NO: 3488853 - RNA, 16 nt, Human
agcacuaaagcagugg

SEQ ID NO: 3488854 - RNA, 19 nt, Human
agcacuaaggugugcucug

SEQ ID NO: 3488855 - RNA, 20 nt, Human
agcacuagagaaugcacaga

SEQ ID NO: 3488856 - RNA, 23 nt, Human
agcacuagguucaauucccugaa

SEQ ID NO: 3488857 - RNA, 16 nt, Human
agcacucacacaggac

SEQ ID NO: 3488858 - RNA, 13 nt, Human
agcacucacaugc

SEQ ID NO: 3488859 - RNA, 21 nt, Human
agcacucacaugcuggacagg

SEQ ID NO: 3488860 - RNA, 18 nt, Human
agcacucacgcccuaagc

SEQ ID NO: 3488861 - RNA, 18 nt, Human
agcacucaggcucuccau

SEQ ID NO: 3488862 - RNA, 13 nt, Human
agcacucccaagu

SEQ ID NO: 3488863 - RNA, 20 nt, Human
agcacucccaagucuacaga

SEQ ID NO: 3488864 - RNA, 24 nt, Human
agcacucgcuagcaguggcaggca

SEQ ID NO: 3488865 - RNA, 19 nt, Human
agggccgacuaagagaagu

SEQ ID NO: 3488866 - RNA, 21 nt, Human
agggccgaggaggugccugga

SEQ ID NO: 3488867 - RNA, 18 nt, Human
agggccgggcagaggggc

SEQ ID NO: 3488868 - RNA, 20 nt, Human
agggccggggaacuggccaa

SEQ ID NO: 3488869 - RNA, 23 nt, Human
agggccggggaacuggccaagcu

SEQ ID NO: 3488870 - RNA, 18 nt, Human
agggccguaccccacccu

SEQ ID NO: 3488871 - RNA, 16 nt, Human
agggccuagcugcuac

SEQ ID NO: 3488872 - RNA, 20 nt, Human
agggccuccauuccuggagc

SEQ ID NO: 3488873 - RNA, 20 nt, Human
agggccugagccuggccagc

SEQ ID NO: 3488874 - RNA, 22 nt, Human
agggccugagccuggccagccu

SEQ ID NO: 3488875 - RNA, 21 nt, Human
agggccugaggucuggcugcu

SEQ ID NO: 3488876 - RNA, 19 nt, Human
agggccugaugggguggaa

SEQ ID NO: 3488877 - RNA, 15 nt, Human
agggccugcaaggga

SEQ ID NO: 3488878 - RNA, 15 nt, Human
agggccugcuggagg

SEQ ID NO: 3488879 - RNA, 16 nt, Human
agggccugcuggaggc

SEQ ID NO: 3488880 - RNA, 19 nt, Human
agggccugcuggaggccuc

SEQ ID NO: 3488881 - RNA, 16 nt, Human
agggccuggcccaugu

SEQ ID NO: 3488882 - RNA, 15 nt, Human
agggccuggccugag

SEQ ID NO: 3488883 - RNA, 17 nt, Human
agggccuggccugagcu

SEQ ID NO: 3488884 - RNA, 18 nt, Human
agggccuggccugagcug

SEQ ID NO: 3488885 - RNA, 19 nt, Human
agggccugggccuggcucc

SEQ ID NO: 3488886 - RNA, 21 nt, Human
agggccuggggccugagagaa

SEQ ID NO: 3488887 - RNA, 17 nt, Human
agggccuggucccuggg

SEQ ID NO: 3488888 - RNA, 17 nt, Human
agggccugguugaagaa

SEQ ID NO: 3488889 - RNA, 17 nt, Human
agggccuuaaaagccau

SEQ ID NO: 3488890 - RNA, 12 nt, Human
agggccuugccc

SEQ ID NO: 3488891 - RNA, 17 nt, Human
agggccuugcccagaga

SEQ ID NO: 3488892 - RNA, 23 nt, Human
agggccuugcccagagaugccuc

SEQ ID NO: 3488893 - RNA, 19 nt, Human
agggccuuuucuggcaccg

SEQ ID NO: 3488894 - RNA, 21 nt, Human
agggcgaccccgucacagccu

SEQ ID NO: 3488895 - RNA, 17 nt, Human
agggcgggcagagggcu

SEQ ID NO: 3488896 - RNA, 23 nt, Human
agggcggggcacagauuggagag

SEQ ID NO: 3488897 - RNA, 21 nt, Human
agggcggggugucugucuucc

SEQ ID NO: 3488898 - RNA, 16 nt, Human
agggcgugacucaccc

SEQ ID NO: 3488899 - RNA, 21 nt, Human
agggcguucuuaggcugcugg

SEQ ID NO: 3488900 - RNA, 23 nt, Human
agggcuaagagcuagcgcugccg

SEQ ID NO: 3488901 - RNA, 19 nt, Human
agggcuacccucccccagg

SEQ ID NO: 3488902 - RNA, 17 nt, Human
agggcuagaaccuggaa

SEQ ID NO: 3488903 - RNA, 18 nt, Human
agggcuagaaccuggaag

SEQ ID NO: 3488904 - RNA, 19 nt, Human
agggcuagaaccuggaagg

SEQ ID NO: 3488905 - RNA, 19 nt, Human
agggcuagaaccuggagag

SEQ ID NO: 3488906 - RNA, 17 nt, Human
agggcuagaacuggaga

SEQ ID NO: 3488907 - RNA, 18 nt, Human
agggcuagaacuggagag

SEQ ID NO: 3488908 - RNA, 18 nt, Human
agggcuagaaucuggaga

SEQ ID NO: 3488909 - RNA, 15 nt, Human
agggcuauggugugg

SEQ ID NO: 3488910 - RNA, 19 nt, Human
agggcuaugguguggacug

SEQ ID NO: 3488911 - RNA, 23 nt, Human
agggcucagcggggacagcuccu

SEQ ID NO: 3488912 - RNA, 15 nt, Human
agggcuccagacaca

SEQ ID NO: 3488913 - RNA, 14 nt, Human
agggcuccagcccc

SEQ ID NO: 3488914 - RNA, 20 nt, Human
agggcuccagccccucuugg

SEQ ID NO: 3488915 - RNA, 14 nt, Human
agggcucccagggg

SEQ ID NO: 3488916 - RNA, 20 nt, Human
agggcuccccacugccuacu

SEQ ID NO: 3488917 - RNA, 14 nt, Human
agggcuccucccag

SEQ ID NO: 3488918 - RNA, 19 nt, Human
agggcuccucuccagucug

SEQ ID NO: 3488919 - RNA, 15 nt, Human
agggcuccugccuuc

SEQ ID NO: 3488920 - RNA, 22 nt, Human
agggcuccuugugggccugggc

SEQ ID NO: 3488921 - RNA, 15 nt, Human
agggcucuccuggcu

SEQ ID NO: 3488922 - RNA, 16 nt, Human
agggcucucuuaggca

SEQ ID NO: 3488923 - RNA, 21 nt, Human
agggcucucuuuccuucuugc

SEQ ID NO: 3488924 - RNA, 17 nt, Human
agggcucugacaaagcu

SEQ ID NO: 3488925 - RNA, 15 nt, Human
agggcucugauauuc

SEQ ID NO: 3488926 - RNA, 14 nt, Human
agggcucugcccca

SEQ ID NO: 3488927 - RNA, 15 nt, Human
agggcucugccccag

SEQ ID NO: 3488928 - RNA, 14 nt, Human
agggcugaaagcca

SEQ ID NO: 3488929 - RNA, 15 nt, Human
agggcugaccugccu

SEQ ID NO: 3488930 - RNA, 23 nt, Human
agggcugaccugccucucacaca

SEQ ID NO: 3488931 - RNA, 16 nt, Human
agggcugagccugguc

SEQ ID NO: 3488932 - RNA, 12 nt, Human
agggcugcaguu

SEQ ID NO: 3488933 - RNA, 23 nt, Human
agggcugcggcguacaggcuggc

SEQ ID NO: 3488934 - RNA, 17 nt, Human
agggcugcuagacggag

SEQ ID NO: 3488935 - RNA, 13 nt, Human
agggcugcuguga

SEQ ID NO: 3488936 - RNA, 12 nt, Human
agggcuggaccu

SEQ ID NO: 3488937 - RNA, 14 nt, Human
agggcuggagaaca

SEQ ID NO: 3488938 - RNA, 17 nt, Human
agggcuggaggcccagg

SEQ ID NO: 3488939 - RNA, 19 nt, Human
agggcuggaggcccaggcu

SEQ ID NO: 3488940 - RNA, 18 nt, Human
agggcuggcccagcccug

SEQ ID NO: 3488941 - RNA, 19 nt, Human
agggcuggcccagcccugc

SEQ ID NO: 3488942 - RNA, 14 nt, Human
agggcuggcuccug

SEQ ID NO: 3488943 - RNA, 19 nt, Human
agggcuggcuccugaucca

SEQ ID NO: 3488944 - RNA, 12 nt, Human
agggcuggcugg

SEQ ID NO: 3488945 - RNA, 13 nt, Human
agggcuggcuggc

SEQ ID NO: 3488946 - RNA, 22 nt, Human
agggcugggaaacacuccuugc

SEQ ID NO: 3488947 - RNA, 14 nt, Human
agggcugggaggaa

SEQ ID NO: 3488948 - RNA, 16 nt, Human
agggcugggaggaagg

SEQ ID NO: 3488949 - RNA, 20 nt, Human
agggcugggcaaggaaaaag

SEQ ID NO: 3488950 - RNA, 21 nt, Human
agggcugggcaaggaaaaaga

SEQ ID NO: 3488951 - RNA, 18 nt, Human
agggcuggggcagccucu

SEQ ID NO: 3488952 - RNA, 12 nt, Human
agggcugggugu

SEQ ID NO: 3488953 - RNA, 19 nt, Human
acacguauuugaauggccu

SEQ ID NO: 3488954 - RNA, 14 nt, Human
acacguccacccca

SEQ ID NO: 3488955 - RNA, 21 nt, Human
acacgugggcuccccucuucc

SEQ ID NO: 3488956 - RNA, 15 nt, Human
acacguuggaguaua

SEQ ID NO: 3488957 - RNA, 15 nt, Human
acacguuuuaaggac

SEQ ID NO: 3488958 - RNA, 22 nt, Human
acacguuuuaaggacugacuga

SEQ ID NO: 3488959 - RNA, 12 nt, Human
acacuaaaauuu

SEQ ID NO: 3488960 - RNA, 15 nt, Human
acacuaaacagacua

SEQ ID NO: 3488961 - RNA, 20 nt, Human
acacuaacgauuuguuaaug

SEQ ID NO: 3488962 - RNA, 13 nt, Human
acacuaagagaga

SEQ ID NO: 3488963 - RNA, 19 nt, Human
acacuaaguuauaguauau

SEQ ID NO: 3488964 - RNA, 22 nt, Human
acacuaauauauuuaaaaauaa

SEQ ID NO: 3488965 - RNA, 22 nt, Human
acacuaaugaggaaacugcacu

SEQ ID NO: 3488966 - RNA, 13 nt, Human
acacuaauucaua

SEQ ID NO: 3488967 - RNA, 17 nt, Human
acacuaauuccuuucua

SEQ ID NO: 3488968 - RNA, 13 nt, Human
acacuacacccag

SEQ ID NO: 3488969 - RNA, 23 nt, Human
acacuacacccagcaauagagac

SEQ ID NO: 3488970 - RNA, 14 nt, Human
acacuacauuagaa

SEQ ID NO: 3488971 - RNA, 20 nt, Human
acacuaccagcguauauaua

SEQ ID NO: 3488972 - RNA, 16 nt, Human
acacuagacaagccag

SEQ ID NO: 3488973 - RNA, 13 nt, Human
acacuagccucuc

SEQ ID NO: 3488974 - RNA, 22 nt, Human
acacuagcuaauaucaauagaa

SEQ ID NO: 3488975 - RNA, 15 nt, Human
acacuagucugugug

SEQ ID NO: 3488976 - RNA, 13 nt, Human
acacuauaucugu

SEQ ID NO: 3488977 - RNA, 14 nt, Human
acacuauaucugua

SEQ ID NO: 3488978 - RNA, 18 nt, Human
acacuauaucuguauaua

SEQ ID NO: 3488979 - RNA, 19 nt, Human
acacuaucauaguuaacau

SEQ ID NO: 3488980 - RNA, 11 nt, Human
acacuauuuua

SEQ ID NO: 3488981 - RNA, 13 nt, Human
acacuauuuucag

SEQ ID NO: 3488982 - RNA, 16 nt, Human
acacuauuuucagaau

SEQ ID NO: 3488983 - RNA, 19 nt, Human
acacuauuuucagaaucug

SEQ ID NO: 3488984 - RNA, 20 nt, Human
acacuauuuuuuuuucuuuu

SEQ ID NO: 3488985 - RNA, 21 nt, Human
acacucaaaagcugggcaggu

SEQ ID NO: 3488986 - RNA, 19 nt, Human
acacucaaaucaagaaacu

SEQ ID NO: 3488987 - RNA, 20 nt, Human
acacucacauuuauucugcu

SEQ ID NO: 3488988 - RNA, 20 nt, Human
acacucaccaugaagcgaaa

SEQ ID NO: 3488989 - RNA, 15 nt, Human
acacucacuucucuu

SEQ ID NO: 3488990 - RNA, 13 nt, Human
acacucagaagcc

SEQ ID NO: 3488991 - RNA, 14 nt, Human
acacucagaagccu

SEQ ID NO: 3488992 - RNA, 15 nt, Human
acacucagaagccug

SEQ ID NO: 3488993 - RNA, 17 nt, Human
acacucagaagccuggg

SEQ ID NO: 3488994 - RNA, 14 nt, Human
acacucagaccuga

SEQ ID NO: 3488995 - RNA, 12 nt, Human
acacucagcugu

SEQ ID NO: 3488996 - RNA, 20 nt, Human
acacucagcuguucagauug

SEQ ID NO: 3488997 - RNA, 14 nt, Human
acacucaugcugaa

SEQ ID NO: 3488998 - RNA, 16 nt, Human
acacucauugaccuga

SEQ ID NO: 3488999 - RNA, 18 nt, Human
acacuccaauuaaggauu

SEQ ID NO: 3489000 - RNA, 15 nt, Human
acaggagagaaaggg

SEQ ID NO: 3489001 - RNA, 18 nt, Human
acaggagaugcugugccc

SEQ ID NO: 3489002 - RNA, 14 nt, Human
acaggagcuaccug

SEQ ID NO: 3489003 - RNA, 19 nt, Human
acaggaggcaagcaagcuc

SEQ ID NO: 3489004 - RNA, 18 nt, Human
acaggagggcaagggcca

SEQ ID NO: 3489005 - RNA, 23 nt, Human
acaggagggggucguggagagcu

SEQ ID NO: 3489006 - RNA, 17 nt, Human
acaggagguuggaggga

SEQ ID NO: 3489007 - RNA, 21 nt, Human
acaggaguguccucuucccuc

SEQ ID NO: 3489008 - RNA, 12 nt, Human
acaggauccagg

SEQ ID NO: 3489009 - RNA, 18 nt, Human
acaggauccaggccggcu

SEQ ID NO: 3489010 - RNA, 14 nt, Human
acaggaugaaggca

SEQ ID NO: 3489011 - RNA, 18 nt, Human
acaggaugaccuggauaa

SEQ ID NO: 3489012 - RNA, 19 nt, Human
acaggauguguuugcuuuc

SEQ ID NO: 3489013 - RNA, 19 nt, Human
acaggcaacugaggcagac

SEQ ID NO: 3489014 - RNA, 15 nt, Human
acaggcaagcaccuc

SEQ ID NO: 3489015 - RNA, 23 nt, Human
acaggcaagcaccuccugccucg

SEQ ID NO: 3489016 - RNA, 23 nt, Human
acaggcaaugcuggcuguuggcu

SEQ ID NO: 3489017 - RNA, 12 nt, Human
acaggcaauucc

SEQ ID NO: 3489018 - RNA, 12 nt, Human
acaggcacaaaa

SEQ ID NO: 3489019 - RNA, 23 nt, Human
acaggcacccaccaucaugucug

SEQ ID NO: 3489020 - RNA, 14 nt, Human
acaggcaccgagaa

SEQ ID NO: 3489021 - RNA, 21 nt, Human
acaggcaccgagaauguugua

SEQ ID NO: 3489022 - RNA, 15 nt, Human
acaggcacugcccug

SEQ ID NO: 3489023 - RNA, 18 nt, Human
acaggcacugcccuggug

SEQ ID NO: 3489024 - RNA, 12 nt, Human
acaggcagaaag

SEQ ID NO: 3489025 - RNA, 15 nt, Human
acaggcagaaagagu

SEQ ID NO: 3489026 - RNA, 17 nt, Human
acaggcagcacagagac

SEQ ID NO: 3489027 - RNA, 21 nt, Human
acaggcagccagugcccugag

SEQ ID NO: 3489028 - RNA, 20 nt, Human
acaggcagcuuuaaccauua

SEQ ID NO: 3489029 - RNA, 14 nt, Human
acaggcagguccag

SEQ ID NO: 3489030 - RNA, 16 nt, Human
acaggcagguccaggg

SEQ ID NO: 3489031 - RNA, 22 nt, Human
acaggcagucucucucuuccuc

SEQ ID NO: 3489032 - RNA, 19 nt, Human
acaggcaguuacuucugag

SEQ ID NO: 3489033 - RNA, 18 nt, Human
acaggcauuuguucacug

SEQ ID NO: 3489034 - RNA, 19 nt, Human
acaggccacccugugcaga

SEQ ID NO: 3489035 - RNA, 21 nt, Human
acaggccacccugugcagaag

SEQ ID NO: 3489036 - RNA, 15 nt, Human
acaggcccagcauug

SEQ ID NO: 3489037 - RNA, 21 nt, Human
acaggcccccuugaguggggu

SEQ ID NO: 3489038 - RNA, 17 nt, Human
acaggcccggcuccagg

SEQ ID NO: 3489039 - RNA, 17 nt, Human
acaggcccugcuccugc

SEQ ID NO: 3489040 - RNA, 12 nt, Human
acaggcccuggc

SEQ ID NO: 3489041 - RNA, 16 nt, Human
acaggcccuuccucuc

SEQ ID NO: 3489042 - RNA, 22 nt, Human
acaggcccuuccucuccacugc

SEQ ID NO: 3489043 - RNA, 19 nt, Human
acaggccucacacacaaug

SEQ ID NO: 3489044 - RNA, 14 nt, Human
acaggccucagggc

SEQ ID NO: 3489045 - RNA, 18 nt, Human
acaggccucagggcuccu

SEQ ID NO: 3489046 - RNA, 11 nt, Human
acaggccuccc

SEQ ID NO: 3489047 - RNA, 19 nt, Human
acaggccuguguagcugug

SEQ ID NO: 3489048 - RNA, 20 nt, Human
acaggccuguguagcuguga

SEQ ID NO: 3489049 - RNA, 17 nt, Human
acaggcgggaggaggug

SEQ ID NO: 3489050 - RNA, 19 nt, Human
acaggcgugagccaccucg

SEQ ID NO: 3489051 - RNA, 16 nt, Human
acaggcucaggcaggg

SEQ ID NO: 3489052 - RNA, 15 nt, Human
acaggcucuuagcag

SEQ ID NO: 3489053 - RNA, 18 nt, Human
acaggcugagugcaggcc

SEQ ID NO: 3489054 - RNA, 19 nt, Human
acaggcugagugcaggccc

SEQ ID NO: 3489055 - RNA, 24 nt, Human
acaggcugcggccccucccccguc

SEQ ID NO: 3489056 - RNA, 18 nt, Human
acaggcuggaagauagcu

SEQ ID NO: 3489057 - RNA, 14 nt, Human
acaggcuggcgggg

SEQ ID NO: 3489058 - RNA, 17 nt, Human
acaggcugggcuucagu

SEQ ID NO: 3489059 - RNA, 22 nt, Human
acaggcuguucugcacugaaaa

SEQ ID NO: 3489060 - RNA, 21 nt, Human
acagggaacgugauuagugaa

SEQ ID NO: 3489061 - RNA, 15 nt, Human
acagggaagcuacag

SEQ ID NO: 3489062 - RNA, 19 nt, Human
acagggaagcuacagguua

SEQ ID NO: 3489063 - RNA, 23 nt, Human
acagggaagcuacagguuacaac

SEQ ID NO: 3489064 - RNA, 14 nt, Human
acagggaaggcagg

SEQ ID NO: 3489065 - RNA, 23 nt, Human
acagggaaggcaggcagggcucu

SEQ ID NO: 3489066 - RNA, 22 nt, Human
acagggaaugccugagugccug

SEQ ID NO: 3489067 - RNA, 22 nt, Human
acagggaauuaggcccccauca

SEQ ID NO: 3489068 - RNA, 12 nt, Human
acagggacccac

SEQ ID NO: 3489069 - RNA, 16 nt, Human
acagggacuugaaguu

SEQ ID NO: 3489070 - RNA, 18 nt, Human
acagggagccuccugccc

SEQ ID NO: 3489071 - RNA, 19 nt, Human
acagggagccuccugccca

SEQ ID NO: 3489072 - RNA, 20 nt, Human
acagggaggacgcucucugg

SEQ ID NO: 3489073 - RNA, 10 nt, Human
acagggaggg

SEQ ID NO: 3489074 - RNA, 18 nt, Human
acagggauaaggccugug

SEQ ID NO: 3489075 - RNA, 23 nt, Human
acagggaugagcauggagcuggc

SEQ ID NO: 3489076 - RNA, 16 nt, Human
acagggauucucacaa

SEQ ID NO: 3489077 - RNA, 15 nt, Human
acagggcaccugcca

SEQ ID NO: 3489078 - RNA, 18 nt, Human
acagggcagcugggccca

SEQ ID NO: 3489079 - RNA, 16 nt, Human
acagggcaucuccagg

SEQ ID NO: 3489080 - RNA, 17 nt, Human
acagggcaucuccagga

SEQ ID NO: 3489081 - RNA, 20 nt, Human
acagggccaguggggccugu

SEQ ID NO: 3489082 - RNA, 20 nt, Human
acagggcccuguugaauuuu

SEQ ID NO: 3489083 - RNA, 12 nt, Human
acagggccucug

SEQ ID NO: 3489084 - RNA, 19 nt, Human
acagggccuggcccaugua

SEQ ID NO: 3489085 - RNA, 15 nt, Human
acagggcuggcccag

SEQ ID NO: 3489086 - RNA, 24 nt, Human
acagggcuggcccagcccugcugg

SEQ ID NO: 3489087 - RNA, 22 nt, Human
acaggggaauauuuuauucaag

SEQ ID NO: 3489088 - RNA, 22 nt, Human
acaggggcgugaggucccagga

SEQ ID NO: 3489089 - RNA, 14 nt, Human
acaggggcuugacu

SEQ ID NO: 3489090 - RNA, 16 nt, Human
acagggggccagaaca

SEQ ID NO: 3489091 - RNA, 19 nt, Human
acagggggucuggcuggug

SEQ ID NO: 3489092 - RNA, 21 nt, Human
acaggguaacuaacuaaaaca

SEQ ID NO: 3489093 - RNA, 19 nt, Human
acagggucucuagugcugu

SEQ ID NO: 3489094 - RNA, 15 nt, Human
acagggucugcucuu

SEQ ID NO: 3489095 - RNA, 14 nt, Human
acagggugggccuc

SEQ ID NO: 3489096 - RNA, 21 nt, Human
acaggguguugucagcaucuu

SEQ ID NO: 3489097 - RNA, 13 nt, Human
acagcuacacaga

SEQ ID NO: 3489098 - RNA, 16 nt, Human
acagcuaccaugacaa

SEQ ID NO: 3489099 - RNA, 14 nt, Human
acagcuacucuccc

SEQ ID NO: 3489100 - RNA, 15 nt, Human
acagcuauauuucug

SEQ ID NO: 3489101 - RNA, 14 nt, Human
acagcuaugaagaa

SEQ ID NO: 3489102 - RNA, 16 nt, Human
acagcuaugggagccc

SEQ ID NO: 3489103 - RNA, 21 nt, Human
acagcucagcuuuuugucuuu

SEQ ID NO: 3489104 - RNA, 13 nt, Human
acagcucaggcug

SEQ ID NO: 3489105 - RNA, 14 nt, Human
acagcucauuaaac

SEQ ID NO: 3489106 - RNA, 19 nt, Human
acagcucauuaaacuuuuu

SEQ ID NO: 3489107 - RNA, 15 nt, Human
acagcuccaagaauu

SEQ ID NO: 3489108 - RNA, 14 nt, Human
acagcucccacccc

SEQ ID NO: 3489109 - RNA, 16 nt, Human
acagcucccaccccac

SEQ ID NO: 3489110 - RNA, 14 nt, Human
acagcucccucugc

SEQ ID NO: 3489111 - RNA, 12 nt, Human
acagcuccuucu

SEQ ID NO: 3489112 - RNA, 13 nt, Human
acagcuccuucug

SEQ ID NO: 3489113 - RNA, 15 nt, Human
acagcuccuucuguc

SEQ ID NO: 3489114 - RNA, 23 nt, Human
acagcuccuucuguccuacucug

SEQ ID NO: 3489115 - RNA, 14 nt, Human
acagcuccuuggga

SEQ ID NO: 3489116 - RNA, 15 nt, Human
acagcucugacuuua

SEQ ID NO: 3489117 - RNA, 17 nt, Human
acagcucugacuuuaca

SEQ ID NO: 3489118 - RNA, 14 nt, Human
acagcucugcauac

SEQ ID NO: 3489119 - RNA, 15 nt, Human
acagcucuggccaca

SEQ ID NO: 3489120 - RNA, 16 nt, Human
acagcucuuaaaugua

SEQ ID NO: 3489121 - RNA, 19 nt, Human
acagcugagagacuuuuaa

SEQ ID NO: 3489122 - RNA, 22 nt, Human
acagcugaggucucuugaggga

SEQ ID NO: 3489123 - RNA, 17 nt, Human
acagcugaguuguugag

SEQ ID NO: 3489124 - RNA, 20 nt, Human
acagcugcauuagaaaaaga

SEQ ID NO: 3489125 - RNA, 13 nt, Human
acagcugccuggg

SEQ ID NO: 3489126 - RNA, 11 nt, Human
acagcugccuu

SEQ ID NO: 3489127 - RNA, 12 nt, Human
acagcugccuua

SEQ ID NO: 3489128 - RNA, 21 nt, Human
acagcugcucaauaaaguaca

SEQ ID NO: 3489129 - RNA, 20 nt, Human
acagcugcuccuagagggag

SEQ ID NO: 3489130 - RNA, 23 nt, Human
acagcugcuccuagagggagggg

SEQ ID NO: 3489131 - RNA, 16 nt, Human
acagcuggcucuacuu

SEQ ID NO: 3489132 - RNA, 21 nt, Human
acagcuggggugcagggaugu

SEQ ID NO: 3489133 - RNA, 12 nt, Human
acagcuggugua

SEQ ID NO: 3489134 - RNA, 15 nt, Human
acagcugguguagcu

SEQ ID NO: 3489135 - RNA, 14 nt, Human
acagcuguaugauu

SEQ ID NO: 3489136 - RNA, 19 nt, Human
acagcuguaugauucccag

SEQ ID NO: 3489137 - RNA, 20 nt, Human
acagcuguaugauucccagc

SEQ ID NO: 3489138 - RNA, 23 nt, Human
acagcuguaugauucccagccag

SEQ ID NO: 3489139 - RNA, 20 nt, Human
acagcuguauugucugaacu

SEQ ID NO: 3489140 - RNA, 15 nt, Human
acagcugugccucgc

SEQ ID NO: 3489141 - RNA, 16 nt, Human
acagcugugccucgcu

SEQ ID NO: 3489142 - RNA, 17 nt, Human
acagcugugccucgcuc

SEQ ID NO: 3489143 - RNA, 10 nt, Human
acagcugugu

SEQ ID NO: 3489144 - RNA, 23 nt, Human
acagcugugugacauuuggagag

SEQ ID NO: 3489145 - RNA, 22 nt, Human
acagcuguguuauucuuugcgu

SEQ ID NO: 3489146 - RNA, 14 nt, Human
acagcuguugacuc

SEQ ID NO: 3489147 - RNA, 17 nt, Human
acagcuguuuaagaugg

SEQ ID NO: 3489148 - RNA, 16 nt, Human
acagcuuagauuucau

SEQ ID NO: 3489149 - RNA, 17 nt, Human
acagcuucagccaggag

SEQ ID NO: 3489150 - RNA, 15 nt, Human
acagcuucagguuau

SEQ ID NO: 3489151 - RNA, 20 nt, Human
acagcuucaugccuuuguaa

SEQ ID NO: 3489152 - RNA, 19 nt, Human
acagcuucauuuccugugu

SEQ ID NO: 3489153 - RNA, 11 nt, Human
acagcuuccug

SEQ ID NO: 3489154 - RNA, 15 nt, Human
acagcuugaccugag

SEQ ID NO: 3489155 - RNA, 21 nt, Human
acagcuugaccugaggcugug

SEQ ID NO: 3489156 - RNA, 22 nt, Human
acagcuugaccugaggcugugg

SEQ ID NO: 3489157 - RNA, 19 nt, Human
acagcuuguuuuggacuuu

SEQ ID NO: 3489158 - RNA, 22 nt, Human
acagcuuguuuuggacuuuguu

SEQ ID NO: 3489159 - RNA, 16 nt, Human
acagcuuuacacacac

SEQ ID NO: 3489160 - RNA, 20 nt, Human
acagcuuucaugauuagcaa

SEQ ID NO: 3489161 - RNA, 22 nt, Human
acagcuuucugaccuucagcuc

SEQ ID NO: 3489162 - RNA, 21 nt, Human
acagcuuucuugcucccuuca

SEQ ID NO: 3489163 - RNA, 12 nt, Human
acagcuuugcug

SEQ ID NO: 3489164 - RNA, 15 nt, Human
acagcuuugcugcug

SEQ ID NO: 3489165 - RNA, 19 nt, Human
acagcuuuuaguacccacc

SEQ ID NO: 3489166 - RNA, 22 nt, Human
acagcuuuuaguacccaccuga

SEQ ID NO: 3489167 - RNA, 14 nt, Human
acagcuuuugcaac

SEQ ID NO: 3489168 - RNA, 22 nt, Human
acagcuuuugcaacuuaauacu

SEQ ID NO: 3489169 - RNA, 23 nt, Human
acaggaaaaaaacuuuuauaaau

SEQ ID NO: 3489170 - RNA, 12 nt, Human
acaggaaaaagu

SEQ ID NO: 3489171 - RNA, 19 nt, Human
acaggaaaagcaugucuua

SEQ ID NO: 3489172 - RNA, 21 nt, Human
acaggaaaagcaugucuuauu

SEQ ID NO: 3489173 - RNA, 15 nt, Human
acaggaaaagcugcu

SEQ ID NO: 3489174 - RNA, 20 nt, Human
acaggaaaagcugcugacag

SEQ ID NO: 3489175 - RNA, 21 nt, Human
acaggaaaagcugcugacagu

SEQ ID NO: 3489176 - RNA, 16 nt, Human
acaggaaaguguuauu

SEQ ID NO: 3489177 - RNA, 22 nt, Human
acaggaaaguucagaguuuucu

SEQ ID NO: 3489178 - RNA, 22 nt, Human
acaggaaccacaagacugcaca

SEQ ID NO: 3489179 - RNA, 18 nt, Human
acaggaagaucuuaaauu

SEQ ID NO: 3489180 - RNA, 20 nt, Human
acaggaagguggugcuuaca

SEQ ID NO: 3489181 - RNA, 13 nt, Human
acaggaaguacug

SEQ ID NO: 3489182 - RNA, 17 nt, Human
acaggaagucuucaggg

SEQ ID NO: 3489183 - RNA, 15 nt, Human
acaggaagugaagaa

SEQ ID NO: 3489184 - RNA, 19 nt, Human
acaggaaucaagagcugcc

SEQ ID NO: 3489185 - RNA, 14 nt, Human
acaggacacaguca

SEQ ID NO: 3489186 - RNA, 22 nt, Human
acaggacagcauggugcaugcc

SEQ ID NO: 3489187 - RNA, 18 nt, Human
acaggacagggguuccuu

SEQ ID NO: 3489188 - RNA, 13 nt, Human
acaggaccccagc

SEQ ID NO: 3489189 - RNA, 14 nt, Human
acaggaccccagcu

SEQ ID NO: 3489190 - RNA, 15 nt, Human
acaggaccccagcuc

SEQ ID NO: 3489191 - RNA, 14 nt, Human
acaggacccccuuc

SEQ ID NO: 3489192 - RNA, 20 nt, Human
acaggaccccugcaguuccc

SEQ ID NO: 3489193 - RNA, 21 nt, Human
acaggacuaacacucagaagc

SEQ ID NO: 3489194 - RNA, 22 nt, Human
acaggacuaacacucagaagcc

SEQ ID NO: 3489195 - RNA, 15 nt, Human
acaggagacaaaaga

SEQ ID NO: 3489196 - RNA, 18 nt, Human
acaggagacaaaagagca

SEQ ID NO: 3489197 - RNA, 19 nt, Human
acaggagaugcugugcccc

SEQ ID NO: 3489198 - RNA, 16 nt, Human
acaggaggacaauuca

SEQ ID NO: 3489199 - RNA, 17 nt, Human
acaggaggacaauucau

SEQ ID NO: 3489200 - RNA, 20 nt, Human
acaggagggcggccuccuuc

SEQ ID NO: 3489201 - RNA, 20 nt, Human
acaggagggggucguggaga

SEQ ID NO: 3489202 - RNA, 16 nt, Human
acaggagugagcacua

SEQ ID NO: 3489203 - RNA, 19 nt, Human
acaggauaaagauaucaau

SEQ ID NO: 3489204 - RNA, 14 nt, Human
acaggaucagucug

SEQ ID NO: 3489205 - RNA, 13 nt, Human
acaggauccaggc

SEQ ID NO: 3489206 - RNA, 21 nt, Human
acaggauccuauucucaccag

SEQ ID NO: 3489207 - RNA, 16 nt, Human
aaugugaagaugcauu

SEQ ID NO: 3489208 - RNA, 17 nt, Human
aaugugaauaaaauuau

SEQ ID NO: 3489209 - RNA, 17 nt, Human
aaugugaaugggaaaag

SEQ ID NO: 3489210 - RNA, 15 nt, Human
aaugugaccaggggu

SEQ ID NO: 3489211 - RNA, 19 nt, Human
aaugugacccuccaaaugg

SEQ ID NO: 3489212 - RNA, 14 nt, Human
aaugugacuuugaa

SEQ ID NO: 3489213 - RNA, 23 nt, Human
aaugugagugguugaauaugauu

SEQ ID NO: 3489214 - RNA, 14 nt, Human
aaugugaucuaugu

SEQ ID NO: 3489215 - RNA, 17 nt, Human
aaugugaugauguaauu

SEQ ID NO: 3489216 - RNA, 15 nt, Human
aaugugauguucuaa

SEQ ID NO: 3489217 - RNA, 19 nt, Human
aaugugauguucuaaggcu

SEQ ID NO: 3489218 - RNA, 21 nt, Human
aaugugauuccuuugaagagg

SEQ ID NO: 3489219 - RNA, 22 nt, Human
aaugugauucuaaugucuucau

SEQ ID NO: 3489220 - RNA, 20 nt, Human
aaugugauuuacgcucauug

SEQ ID NO: 3489221 - RNA, 15 nt, Human
aaugugcaauagaag

SEQ ID NO: 3489222 - RNA, 20 nt, Human
aaugugcagaugcaauuguu

SEQ ID NO: 3489223 - RNA, 19 nt, Human
aaugugcagguuuguuaca

SEQ ID NO: 3489224 - RNA, 24 nt, Human
aaugugcauucuuuuaaaagacaa

SEQ ID NO: 3489225 - RNA, 13 nt, Human
aaugugcugugua

SEQ ID NO: 3489226 - RNA, 15 nt, Human
aaugugcuguguaaa

SEQ ID NO: 3489227 - RNA, 16 nt, Human
aaugugcuguguaaag

SEQ ID NO: 3489228 - RNA, 18 nt, Human
aaugugcuguguaaaguu

SEQ ID NO: 3489229 - RNA, 15 nt, Human
aauguggaagaaaau

SEQ ID NO: 3489230 - RNA, 16 nt, Human
aauguggaagaaaaug

SEQ ID NO: 3489231 - RNA, 21 nt, Human
aauguggacucaaucccuagg

SEQ ID NO: 3489232 - RNA, 22 nt, Human
aauguggcaaggaaaaacaggu

SEQ ID NO: 3489233 - RNA, 17 nt, Human
aauguggccgaggacuu

SEQ ID NO: 3489234 - RNA, 20 nt, Human
aauguggccuaaaaaugcaa

SEQ ID NO: 3489235 - RNA, 14 nt, Human
aauguggcuccugg

SEQ ID NO: 3489236 - RNA, 18 nt, Human
aaugugggagcagcgguu

SEQ ID NO: 3489237 - RNA, 15 nt, Human
aauguggucucagga

SEQ ID NO: 3489238 - RNA, 16 nt, Human
aauguggucucaggau

SEQ ID NO: 3489239 - RNA, 18 nt, Human
aaugugguuauuucucug

SEQ ID NO: 3489240 - RNA, 21 nt, Human
aaugugguuauuucucugauu

SEQ ID NO: 3489241 - RNA, 18 nt, Human
aaugugguuucaaucuaa

SEQ ID NO: 3489242 - RNA, 14 nt, Human
acauuuuuaaauug

SEQ ID NO: 3489243 - RNA, 20 nt, Human
acauuuuuaaauuguuagcu

SEQ ID NO: 3489244 - RNA, 22 nt, Human
acauuuuuaagugcugcauuua

SEQ ID NO: 3489245 - RNA, 12 nt, Human
acauuuuuauuu

SEQ ID NO: 3489246 - RNA, 13 nt, Human
acauuuuuauuua

SEQ ID NO: 3489247 - RNA, 14 nt, Human
acauuuuucaacuu

SEQ ID NO: 3489248 - RNA, 15 nt, Human
acauuuuucaacuuu

SEQ ID NO: 3489249 - RNA, 16 nt, Human
acauuuuucaacuuug

SEQ ID NO: 3489250 - RNA, 13 nt, Human
acauuuuucuuag

SEQ ID NO: 3489251 - RNA, 15 nt, Human
acauuuuuugaaaug

SEQ ID NO: 3489252 - RNA, 18 nt, Human
acauuuuuuugcaugcau

SEQ ID NO: 3489253 - RNA, 21 nt, Human
accaaaaaagcuguauuuuga

SEQ ID NO: 3489254 - RNA, 12 nt, Human
accaaaaaccag

SEQ ID NO: 3489255 - RNA, 23 nt, Human
accaaaaaucucaauauuucaga

SEQ ID NO: 3489256 - RNA, 14 nt, Human
accaaaacugcucc

SEQ ID NO: 3489257 - RNA, 18 nt, Human
accaaaacugugcagagu

SEQ ID NO: 3489258 - RNA, 14 nt, Human
accaaaagaaguaa

SEQ ID NO: 3489259 - RNA, 21 nt, Human
accaaaagaaguaaaagcaaa

SEQ ID NO: 3489260 - RNA, 14 nt, Human
accaaaagacacug

SEQ ID NO: 3489261 - RNA, 17 nt, Human
accaaaauaagaaaaga

SEQ ID NO: 3489262 - RNA, 15 nt, Human
accaaaauaauaaaa

SEQ ID NO: 3489263 - RNA, 16 nt, Human
accaaaaugacaauga

SEQ ID NO: 3489264 - RNA, 16 nt, Human
accaaaaugacaucuu

SEQ ID NO: 3489265 - RNA, 22 nt, Human
accaaaaugacaucuuuuuaaa

SEQ ID NO: 3489266 - RNA, 17 nt, Human
accaaaauuauuucaga

SEQ ID NO: 3489267 - RNA, 23 nt, Human
accaaaccgccagcgaacuugac

SEQ ID NO: 3489268 - RNA, 15 nt, Human
accaaacucccauca

SEQ ID NO: 3489269 - RNA, 18 nt, Human
accaaacuggaucacugg

SEQ ID NO: 3489270 - RNA, 18 nt, Human
accaaagagggcuuccuc

SEQ ID NO: 3489271 - RNA, 11 nt, Human
accaaagcaca

SEQ ID NO: 3489272 - RNA, 21 nt, Human
accaaagcugacgaggcuggg

SEQ ID NO: 3489273 - RNA, 23 nt, Human
accaaagcugacgaggcugggcc

SEQ ID NO: 3489274 - RNA, 19 nt, Human
accaaaggacauuaugugu

SEQ ID NO: 3489275 - RNA, 21 nt, Human
accaaaguucuaauaauuucu

SEQ ID NO: 3489276 - RNA, 23 nt, Human
accaaaguucuaauaauuucuaa

SEQ ID NO: 3489277 - RNA, 16 nt, Human
accaaauaaaaauauu

SEQ ID NO: 3489278 - RNA, 18 nt, Human
accaaauaaaaauauugu

SEQ ID NO: 3489279 - RNA, 16 nt, Human
accaaauagugugaaa

SEQ ID NO: 3489280 - RNA, 14 nt, Human
accaaaucaaaauc

SEQ ID NO: 3489281 - RNA, 20 nt, Human
accaaaucaaaaucucucca

SEQ ID NO: 3489282 - RNA, 19 nt, Human
accaaaucagcugcuacua

SEQ ID NO: 3489283 - RNA, 13 nt, Human
accaaaucuggaa

SEQ ID NO: 3489284 - RNA, 13 nt, Human
accaaaugguaca

SEQ ID NO: 3489285 - RNA, 15 nt, Human
accaaauuaucuuga

SEQ ID NO: 3489286 - RNA, 13 nt, Human
accaaauuuuaau

SEQ ID NO: 3489287 - RNA, 22 nt, Human
accaacaagaauaaaggcagcu

SEQ ID NO: 3489288 - RNA, 20 nt, Human
accaacaaucuuccuguuua

SEQ ID NO: 3489289 - RNA, 22 nt, Human
accaacacccaaagcauggacu

SEQ ID NO: 3489290 - RNA, 20 nt, Human
accaacacguggccaagaga

SEQ ID NO: 3489291 - RNA, 17 nt, Human
accaacauacucccauc

SEQ ID NO: 3489292 - RNA, 19 nt, Human
accaacauacucccaucug

SEQ ID NO: 3489293 - RNA, 18 nt, Human
accaacaucccauugccc

SEQ ID NO: 3489294 - RNA, 15 nt, Human
accaacauggagaaa

SEQ ID NO: 3489295 - RNA, 16 nt, Human
accaacauggagaaac

SEQ ID NO: 3489296 - RNA, 12 nt, Human
accaacccagcc

SEQ ID NO: 3489297 - RNA, 13 nt, Human
accaacccagccg

SEQ ID NO: 3489298 - RNA, 14 nt, Human
accaacccagccgc

SEQ ID NO: 3489299 - RNA, 16 nt, Human
accaacccagccgcug

SEQ ID NO: 3489300 - RNA, 13 nt, Human
accaacccucagg

SEQ ID NO: 3489301 - RNA, 19 nt, Human
accaacccuggggaaggag

SEQ ID NO: 3489302 - RNA, 20 nt, Human
accaacguuacucagggcuc

SEQ ID NO: 3489303 - RNA, 19 nt, Human
accaacuagacauucuguc

SEQ ID NO: 3489304 - RNA, 20 nt, Human
accaacuagacauucugucg

SEQ ID NO: 3489305 - RNA, 17 nt, Human
accaacuccuaguucua

SEQ ID NO: 3489306 - RNA, 22 nt, Human
accaacuccuaguucuagaaaa

SEQ ID NO: 3489307 - RNA, 13 nt, Human
accaacuggaagc

SEQ ID NO: 3489308 - RNA, 18 nt, Human
accaacuggaagcacaga

SEQ ID NO: 3489309 - RNA, 19 nt, Human
accaacuggcccucuucuu

SEQ ID NO: 3489310 - RNA, 11 nt, Human
accaacugugu

SEQ ID NO: 3489311 - RNA, 15 nt, Human
accaacuguguugua

SEQ ID NO: 3489312 - RNA, 21 nt, Human
accaacuguguuguauuaaca

SEQ ID NO: 3489313 - RNA, 12 nt, Human
accaacuuucug

SEQ ID NO: 3489314 - RNA, 18 nt, Human
accaacuuucuguaaacu

SEQ ID NO: 3489315 - RNA, 12 nt, Human
accaagaacugc

SEQ ID NO: 3489316 - RNA, 14 nt, Human
accaagaacugcau

SEQ ID NO: 3489317 - RNA, 24 nt, Human
accaagaagccuuuccuguagccu

SEQ ID NO: 3489318 - RNA, 22 nt, Human
accaagaauucuccaaaacaau

SEQ ID NO: 3489319 - RNA, 16 nt, Human
accaagagauugcuaa

SEQ ID NO: 3489320 - RNA, 21 nt, Human
accaagagauugcuaauugcu

SEQ ID NO: 3489321 - RNA, 15 nt, Human
accaagaggcugguu

SEQ ID NO: 3489322 - RNA, 15 nt, Human
accaagauacuuaag

SEQ ID NO: 3489323 - RNA, 20 nt, Human
accaagauacuuaagugcug

SEQ ID NO: 3489324 - RNA, 20 nt, Human
accaagaucuauaaagcgau

SEQ ID NO: 3489325 - RNA, 16 nt, Human
accaagaugccaucug

SEQ ID NO: 3489326 - RNA, 22 nt, Human
accaagaugccaucuguguccu

SEQ ID NO: 3489327 - RNA, 13 nt, Human
accaagcaggaaa

SEQ ID NO: 3489328 - RNA, 14 nt, Human
accaagcaggaagc

SEQ ID NO: 3489329 - RNA, 16 nt, Human
accaagcaggaagcuc

SEQ ID NO: 3489330 - RNA, 24 nt, Human
accaagcaggaagcucagacuggu

SEQ ID NO: 3489331 - RNA, 16 nt, Human
accaagcaucaggggg

SEQ ID NO: 3489332 - RNA, 15 nt, Human
accaagccguggcuu

SEQ ID NO: 3489333 - RNA, 19 nt, Human
accaagccuggucagccca

SEQ ID NO: 3489334 - RNA, 20 nt, Human
accaagccuggucagcccaa

SEQ ID NO: 3489335 - RNA, 17 nt, Human
accaagcuauccuggcu

SEQ ID NO: 3489336 - RNA, 17 nt, Human
accaagcucacaguucc

SEQ ID NO: 3489337 - RNA, 14 nt, Human
accaagcucucugc

SEQ ID NO: 3489338 - RNA, 14 nt, Human
accaagcugaguuu

SEQ ID NO: 3489339 - RNA, 12 nt, Human
accaagcugugc

SEQ ID NO: 3489340 - RNA, 13 nt, Human
accaagcugugcc

SEQ ID NO: 3489341 - RNA, 13 nt, Human
accaaggaccccu

SEQ ID NO: 3489342 - RNA, 18 nt, Human
accaaggcaaggcaggug

SEQ ID NO: 3489343 - RNA, 20 nt, Human
accaaggcugauuaaaccaa

SEQ ID NO: 3489344 - RNA, 23 nt, Human
accaagguagaaugaccuuguaa

SEQ ID NO: 3489345 - RNA, 15 nt, Human
accaaggucuucagc

SEQ ID NO: 3489346 - RNA, 19 nt, Human
accaaggucuucagccauc

SEQ ID NO: 3489347 - RNA, 24 nt, Human
accaaguaaaacaaaaccacuggg

SEQ ID NO: 3489348 - RNA, 14 nt, Human
accaagucacacgc

SEQ ID NO: 3489349 - RNA, 12 nt, Human
accaagugaaau

SEQ ID NO: 3489350 - RNA, 18 nt, Human
accaagugugcuaaaaau

SEQ ID NO: 3489351 - RNA, 13 nt, Human
accaaguuauaua

SEQ ID NO: 3489352 - RNA, 23 nt, Human
accaaguuggaacauccuuggaa

SEQ ID NO: 3489353 - RNA, 23 nt, Human
accaaguuucagguauuaagaaa

SEQ ID NO: 3489354 - RNA, 17 nt, Human
accaauauuuaaucuuu

SEQ ID NO: 3489355 - RNA, 20 nt, Human
accaauauuuaaucuuuuau

SEQ ID NO: 3489356 - RNA, 23 nt, Human
accaauauuuaaucuuuuaugau

SEQ ID NO: 3489357 - RNA, 20 nt, Human
accaaucaagauaaaggaca

SEQ ID NO: 3489358 - RNA, 13 nt, Human
accaaucauuuua

SEQ ID NO: 3489359 - RNA, 20 nt, Human
accaaucauuuuaauuauua

SEQ ID NO: 3489360 - RNA, 17 nt, Human
accaaucuuacuuugua

SEQ ID NO: 3489361 - RNA, 19 nt, Human
accaaucuuacuuuguaaa

SEQ ID NO: 3489362 - RNA, 17 nt, Human
accaaugaaaaaaugua

SEQ ID NO: 3489363 - RNA, 12 nt, Human
accaaugcaugc

SEQ ID NO: 3489364 - RNA, 18 nt, Human
accaaugcaugcagccac

SEQ ID NO: 3489365 - RNA, 19 nt, Human
accaaugcuuuuaucaaac

SEQ ID NO: 3489366 - RNA, 21 nt, Human
accaauguacccaccgggcca

SEQ ID NO: 3489367 - RNA, 23 nt, Human
accaauuauugauauauauuaua

SEQ ID NO: 3489368 - RNA, 14 nt, Human
accaauuauuuuca

SEQ ID NO: 3489369 - RNA, 17 nt, Human
accaauugauuuuaaac

SEQ ID NO: 3489370 - RNA, 14 nt, Human
accaauugccaaag

SEQ ID NO: 3489371 - RNA, 14 nt, Human
accaauugugcugc

SEQ ID NO: 3489372 - RNA, 18 nt, Human
accaauugugcugccauu

SEQ ID NO: 3489373 - RNA, 17 nt, Human
aauguuuuuaaauauau

SEQ ID NO: 3489374 - RNA, 15 nt, Human
aauguuuuucuaaag

SEQ ID NO: 3489375 - RNA, 13 nt, Human
aauguuuuucuau

SEQ ID NO: 3489376 - RNA, 17 nt, Human
aauuaaaaaaaaauugu

SEQ ID NO: 3489377 - RNA, 13 nt, Human
aauuaaaaaagau

SEQ ID NO: 3489378 - RNA, 19 nt, Human
aauuaaaaaagauaaacac

SEQ ID NO: 3489379 - RNA, 20 nt, Human
aauuaaaaaagauaaacaca

SEQ ID NO: 3489380 - RNA, 21 nt, Human
aauuaaaaacuaguaguucuc

SEQ ID NO: 3489381 - RNA, 21 nt, Human
aauuaaaaagauucuuuuucu

SEQ ID NO: 3489382 - RNA, 21 nt, Human
aauuaaaacaaugucaaggug

SEQ ID NO: 3489383 - RNA, 13 nt, Human
aauuaaaacacuu

SEQ ID NO: 3489384 - RNA, 20 nt, Human
aauuaaaagcaaaucauuug

SEQ ID NO: 3489385 - RNA, 21 nt, Human
aauuaaaagcaaaucauuugu

SEQ ID NO: 3489386 - RNA, 12 nt, Human
aauuaaacggau

SEQ ID NO: 3489387 - RNA, 16 nt, Human
acauuuggaauacuuu

SEQ ID NO: 3489388 - RNA, 21 nt, Human
acauuugggagacaugugaca

SEQ ID NO: 3489389 - RNA, 21 nt, Human
acauuuggguuacuauuucuu

SEQ ID NO: 3489390 - RNA, 17 nt, Human
acauuugguaauguuuu

SEQ ID NO: 3489391 - RNA, 14 nt, Human
acauuuguaguuga

SEQ ID NO: 3489392 - RNA, 17 nt, Human
acauuuguaguuggagu

SEQ ID NO: 3489393 - RNA, 16 nt, Human
acauuuguauaaaaua

SEQ ID NO: 3489394 - RNA, 21 nt, Human
acauuuguauaaaauaauuuu

SEQ ID NO: 3489395 - RNA, 11 nt, Human
acauuugucau

SEQ ID NO: 3489396 - RNA, 17 nt, Human
acauuugucauuuucau

SEQ ID NO: 3489397 - RNA, 23 nt, Human
acauuugucauuuucauuagcaa

SEQ ID NO: 3489398 - RNA, 21 nt, Human
acauuuguguaaacaguguuu

SEQ ID NO: 3489399 - RNA, 20 nt, Human
acauuuuaaaaaauggucac

SEQ ID NO: 3489400 - RNA, 19 nt, Human
acauuuuaaaagugccauu

SEQ ID NO: 3489401 - RNA, 16 nt, Human
acauuuuaaacacauu

SEQ ID NO: 3489402 - RNA, 17 nt, Human
acauuuuaaauaaaaga

SEQ ID NO: 3489403 - RNA, 21 nt, Human
acauuuuaacaagaagaugaa

SEQ ID NO: 3489404 - RNA, 19 nt, Human
acauuuuaaugcaccugaa

SEQ ID NO: 3489405 - RNA, 15 nt, Human
acauuuuacauuaaa

SEQ ID NO: 3489406 - RNA, 15 nt, Human
acauuuuaguucuuu

SEQ ID NO: 3489407 - RNA, 13 nt, Human
acauuuuaugucu

SEQ ID NO: 3489408 - RNA, 15 nt, Human
acauuuuaugucuuu

SEQ ID NO: 3489409 - RNA, 19 nt, Human
acauuuuauuuuauuaugc

SEQ ID NO: 3489410 - RNA, 13 nt, Human
acauuuucacaca

SEQ ID NO: 3489411 - RNA, 15 nt, Human
acauuuucacacaau

SEQ ID NO: 3489412 - RNA, 12 nt, Human
acauuuucauuu

SEQ ID NO: 3489413 - RNA, 11 nt, Human
acauuuucucc

SEQ ID NO: 3489414 - RNA, 17 nt, Human
acauuuucucccuggau

SEQ ID NO: 3489415 - RNA, 16 nt, Human
acauuuucucuuagaa

SEQ ID NO: 3489416 - RNA, 17 nt, Human
acauuuucucuuagaaa

SEQ ID NO: 3489417 - RNA, 18 nt, Human
acauuuucucuuagaaaa

SEQ ID NO: 3489418 - RNA, 20 nt, Human
acauuuuguaacaaagaacu

SEQ ID NO: 3489419 - RNA, 19 nt, Human
acauuuuguauaauuguau

SEQ ID NO: 3489420 - RNA, 12 nt, Human
acauuuuguucu

SEQ ID NO: 3489421 - RNA, 14 nt, Human
acauuuuguuguaa

SEQ ID NO: 3489422 - RNA, 19 nt, Human
acauuuuguuguaaaaaga

SEQ ID NO: 3489423 - RNA, 15 nt, Human
acauuuuuaagugcu

SEQ ID NO: 3489424 - RNA, 15 nt, Human
acauuuuuauuuaug

SEQ ID NO: 3489425 - RNA, 21 nt, Human
accaguucucauggguggcac

SEQ ID NO: 3489426 - RNA, 15 nt, Human
accaguugcagucac

SEQ ID NO: 3489427 - RNA, 20 nt, Human
accaguugcagucacucuag

SEQ ID NO: 3489428 - RNA, 16 nt, Human
accaguugccuuuuau

SEQ ID NO: 3489429 - RNA, 18 nt, Human
accaguugggagcacugg

SEQ ID NO: 3489430 - RNA, 15 nt, Human
accauaaaaagcuga

SEQ ID NO: 3489431 - RNA, 18 nt, Human
accauaaaugaaucauca

SEQ ID NO: 3489432 - RNA, 22 nt, Human
accauaaauucaacuuuguaaa

SEQ ID NO: 3489433 - RNA, 23 nt, Human
accauaacccaggaaugaagaua

SEQ ID NO: 3489434 - RNA, 22 nt, Human
accauaagcuacugccauccug

SEQ ID NO: 3489435 - RNA, 13 nt, Human
accauaauguuac

SEQ ID NO: 3489436 - RNA, 14 nt, Human
accauacauuuaaa

SEQ ID NO: 3489437 - RNA, 16 nt, Human
accauacuaauuauac

SEQ ID NO: 3489438 - RNA, 12 nt, Human
accauacugaaa

SEQ ID NO: 3489439 - RNA, 15 nt, Human
accauacugagggac

SEQ ID NO: 3489440 - RNA, 20 nt, Human
accauaguaccauuuauaca

SEQ ID NO: 3489441 - RNA, 21 nt, Human
accauaguaccauuuauacaa

SEQ ID NO: 3489442 - RNA, 22 nt, Human
accauaguuacuguaaaaugca

SEQ ID NO: 3489443 - RNA, 23 nt, Human
accauauaaagggggagggaaau

SEQ ID NO: 3489444 - RNA, 17 nt, Human
accauauagcaaaacuu

SEQ ID NO: 3489445 - RNA, 19 nt, Human
accauaugaucuguuuugu

SEQ ID NO: 3489446 - RNA, 16 nt, Human
accauaugcccacauu

SEQ ID NO: 3489447 - RNA, 20 nt, Human
accauauggauauuagucau

SEQ ID NO: 3489448 - RNA, 16 nt, Human
accauauuaccacaga

SEQ ID NO: 3489449 - RNA, 15 nt, Human
accauauuuagcagu

SEQ ID NO: 3489450 - RNA, 16 nt, Human
accaucaauccugauu

SEQ ID NO: 3489451 - RNA, 22 nt, Human
accaucaccagaauuaauuuua

SEQ ID NO: 3489452 - RNA, 12 nt, Human
accaucauugaa

SEQ ID NO: 3489453 - RNA, 19 nt, Human
accaucauuggaaaugaaa

SEQ ID NO: 3489454 - RNA, 16 nt, Human
accaucccugaaggcc

SEQ ID NO: 3489455 - RNA, 22 nt, Human
accaucccugaaggccccgccc

SEQ ID NO: 3489456 - RNA, 20 nt, Human
accaucccuuuuugaagugu

SEQ ID NO: 3489457 - RNA, 21 nt, Human
accaucccuuuuugaagugua

SEQ ID NO: 3489458 - RNA, 13 nt, Human
accauccuauuua

SEQ ID NO: 3489459 - RNA, 15 nt, Human
accaucgcuggcccc

SEQ ID NO: 3489460 - RNA, 20 nt, Human
accaucgcuggccccuuugg

SEQ ID NO: 3489461 - RNA, 15 nt, Human
accaucgcuuuauug

SEQ ID NO: 3489462 - RNA, 14 nt, Human
accaucucaggcca

SEQ ID NO: 3489463 - RNA, 11 nt, Human
accaucucccu

SEQ ID NO: 3489464 - RNA, 16 nt, Human
accaucucccuggugc

SEQ ID NO: 3489465 - RNA, 18 nt, Human
accaucucccuggugcuu

SEQ ID NO: 3489466 - RNA, 20 nt, Human
accaucucccuggugcuuau

SEQ ID NO: 3489467 - RNA, 18 nt, Human
accaucugcugucuuuuc

SEQ ID NO: 3489468 - RNA, 18 nt, Human
accaucugcuuuuauuaa

SEQ ID NO: 3489469 - RNA, 15 nt, Human
accaucuggccuggc

SEQ ID NO: 3489470 - RNA, 22 nt, Human
accaucuggccuggccuggccc

SEQ ID NO: 3489471 - RNA, 14 nt, Human
accaugaaagacuu

SEQ ID NO: 3489472 - RNA, 23 nt, Human
accaugaacagaaaacauucuga

SEQ ID NO: 3489473 - RNA, 17 nt, Human
accaugaagaacauaaa

SEQ ID NO: 3489474 - RNA, 14 nt, Human
accaugaagacagg

SEQ ID NO: 3489475 - RNA, 19 nt, Human
accaugaagagauuuuuca

SEQ ID NO: 3489476 - RNA, 23 nt, Human
accaugagaauaagagaaagaaa

SEQ ID NO: 3489477 - RNA, 23 nt, Human
accaugauuaaccacuucagcug

SEQ ID NO: 3489478 - RNA, 18 nt, Human
accaugauuccuuuaaca

SEQ ID NO: 3489479 - RNA, 19 nt, Human
accaugccucacuaauuuu

SEQ ID NO: 3489480 - RNA, 22 nt, Human
accaugcucaaugaaaagguga

SEQ ID NO: 3489481 - RNA, 14 nt, Human
accaugcugcuggg

SEQ ID NO: 3489482 - RNA, 17 nt, Human
accaugcugcuggggaa

SEQ ID NO: 3489483 - RNA, 19 nt, Human
accaugcugcuggggaaga

SEQ ID NO: 3489484 - RNA, 21 nt, Human
accaugcugcuggggaagaca

SEQ ID NO: 3489485 - RNA, 15 nt, Human
accauggacuuuaua

SEQ ID NO: 3489486 - RNA, 22 nt, Human
accauggaguggcagcccagcc

SEQ ID NO: 3489487 - RNA, 15 nt, Human
accauggccagccaa

SEQ ID NO: 3489488 - RNA, 20 nt, Human
accauggccagcuaauuuuu

SEQ ID NO: 3489489 - RNA, 15 nt, Human
accauggcugaagga

SEQ ID NO: 3489490 - RNA, 12 nt, Human
accaugggacca

SEQ ID NO: 3489491 - RNA, 20 nt, Human
accaugggaccaggucuugg

SEQ ID NO: 3489492 - RNA, 22 nt, Human
accauggucggaaaacaugcua

SEQ ID NO: 3489493 - RNA, 17 nt, Human
accaugguuaagagucc

SEQ ID NO: 3489494 - RNA, 17 nt, Human
accauguacaugaagaa

SEQ ID NO: 3489495 - RNA, 17 nt, Human
accauguagaaaauuug

SEQ ID NO: 3489496 - RNA, 15 nt, Human
accaugucagcaaaa

SEQ ID NO: 3489497 - RNA, 22 nt, Human
accaugucuaugauucguguaa

SEQ ID NO: 3489498 - RNA, 14 nt, Human
accaugucuuucuc

SEQ ID NO: 3489499 - RNA, 16 nt, Human
accaugugccugaucc

SEQ ID NO: 3489500 - RNA, 22 nt, Human
accauguggauaacuuuacaga

SEQ ID NO: 3489501 - RNA, 12 nt, Human
accauguuugag

SEQ ID NO: 3489502 - RNA, 21 nt, Human
accauguuugagcucagaccc

SEQ ID NO: 3489503 - RNA, 12 nt, Human
accauuaaaacu

SEQ ID NO: 3489504 - RNA, 18 nt, Human
accauuaaaacugcuuuu

SEQ ID NO: 3489505 - RNA, 19 nt, Human
accauuaaaauaugcacua

SEQ ID NO: 3489506 - RNA, 19 nt, Human
accauuaaaccaucucccu

SEQ ID NO: 3489507 - RNA, 13 nt, Human
accauuaaccaga

SEQ ID NO: 3489508 - RNA, 16 nt, Human
accauuauaaugaauu

SEQ ID NO: 3489509 - RNA, 21 nt, Human
accauuccaagucuccacccc

SEQ ID NO: 3489510 - RNA, 12 nt, Human
accauuccccau

SEQ ID NO: 3489511 - RNA, 15 nt, Human
accauuccccauggg

SEQ ID NO: 3489512 - RNA, 18 nt, Human
accauucuccaccugcca

SEQ ID NO: 3489513 - RNA, 19 nt, Human
accauucuccaccugccag

SEQ ID NO: 3489514 - RNA, 20 nt, Human
accauucuccaccugccagg

SEQ ID NO: 3489515 - RNA, 16 nt, Human
accauugaaggcuuaa

SEQ ID NO: 3489516 - RNA, 18 nt, Human
accauugcaacaaaauac

SEQ ID NO: 3489517 - RNA, 13 nt, Human
accauugcuucac

SEQ ID NO: 3489518 - RNA, 14 nt, Human
accauuggaaauuu

SEQ ID NO: 3489519 - RNA, 18 nt, Human
accauuggggcucccagc

SEQ ID NO: 3489520 - RNA, 13 nt, Human
accauuuauacaa

SEQ ID NO: 3489521 - RNA, 16 nt, Human
accauuuauacaaauu

SEQ ID NO: 3489522 - RNA, 20 nt, Human
accauuucagagaggccuuu

SEQ ID NO: 3489523 - RNA, 17 nt, Human
accauuuccccagggca

SEQ ID NO: 3489524 - RNA, 18 nt, Human
accauuuccccagggcac

SEQ ID NO: 3489525 - RNA, 23 nt, Human
accauuucuugagguaaaagcau

SEQ ID NO: 3489526 - RNA, 16 nt, Human
accauuugcuacugua

SEQ ID NO: 3489527 - RNA, 19 nt, Human
accauuugcuacuguacau

SEQ ID NO: 3489528 - RNA, 23 nt, Human
accauuuggauccuguguggaga

SEQ ID NO: 3489529 - RNA, 15 nt, Human
accauuuuaaaguua

SEQ ID NO: 3489530 - RNA, 17 nt, Human
accauuuuauaaagugc

SEQ ID NO: 3489531 - RNA, 14 nt, Human
accauuuuccugca

SEQ ID NO: 3489532 - RNA, 20 nt, Human
acccaugaugagcuccucuu

SEQ ID NO: 3489533 - RNA, 23 nt, Human
acccaugccucccccuagccauu

SEQ ID NO: 3489534 - RNA, 13 nt, Human
acccaugcugccc

SEQ ID NO: 3489535 - RNA, 17 nt, Human
acccaugcugcccugug

SEQ ID NO: 3489536 - RNA, 14 nt, Human
acccaugggcagga

SEQ ID NO: 3489537 - RNA, 16 nt, Human
acccaugggcaggaga

SEQ ID NO: 3489538 - RNA, 24 nt, Human
acccauguaaauaccagacugcag

SEQ ID NO: 3489539 - RNA, 14 nt, Human
acccaugugccaag

SEQ ID NO: 3489540 - RNA, 17 nt, Human
acccaugugccaaggug

SEQ ID NO: 3489541 - RNA, 19 nt, Human
acccauuccauuuaucuuu

SEQ ID NO: 3489542 - RNA, 13 nt, Human
acccauuccuauu

SEQ ID NO: 3489543 - RNA, 13 nt, Human
acccauuccuucc

SEQ ID NO: 3489544 - RNA, 23 nt, Human
acccauuccuucccagaggggcc

SEQ ID NO: 3489545 - RNA, 22 nt, Human
accccaaaauuagccaguaauc

SEQ ID NO: 3489546 - RNA, 16 nt, Human
accccaaacaccuucc

SEQ ID NO: 3489547 - RNA, 19 nt, Human
accccaaacagugacugua

SEQ ID NO: 3489548 - RNA, 14 nt, Human
accccaaaccucca

SEQ ID NO: 3489549 - RNA, 14 nt, Human
accccaaagagccu

SEQ ID NO: 3489550 - RNA, 17 nt, Human
accccaaagcuuuccug

SEQ ID NO: 3489551 - RNA, 19 nt, Human
accccaaccugcucuccuc

SEQ ID NO: 3489552 - RNA, 18 nt, Human
accccaagacucccauga

SEQ ID NO: 3489553 - RNA, 19 nt, Human
accccaagauuucagauau

SEQ ID NO: 3489554 - RNA, 21 nt, Human
accccaagcgcccuggccccc

SEQ ID NO: 3489555 - RNA, 14 nt, Human
accccaaucccagc

SEQ ID NO: 3489556 - RNA, 15 nt, Human
accccaauuccuugu

SEQ ID NO: 3489557 - RNA, 16 nt, Human
accccacacacgccag

SEQ ID NO: 3489558 - RNA, 17 nt, Human
accccacacacgccaga

SEQ ID NO: 3489559 - RNA, 16 nt, Human
accccacaccaggccg

SEQ ID NO: 3489560 - RNA, 11 nt, Human
accccacacuu

SEQ ID NO: 3489561 - RNA, 22 nt, Human
accccaccacgauguggcccug

SEQ ID NO: 3489562 - RNA, 11 nt, Human
accccacccaa

SEQ ID NO: 3489563 - RNA, 22 nt, Human
accccacccccuucagugccca

SEQ ID NO: 3489564 - RNA, 21 nt, Human
accccacccuaguuucccuga

SEQ ID NO: 3489565 - RNA, 15 nt, Human
accccacccucagca

SEQ ID NO: 3489566 - RNA, 21 nt, Human
accccacccucagcaccccuu

SEQ ID NO: 3489567 - RNA, 16 nt, Human
accccacccucccugg

SEQ ID NO: 3489568 - RNA, 17 nt, Human
accccacccucccugga

SEQ ID NO: 3489569 - RNA, 14 nt, Human
accccaccucuucc

SEQ ID NO: 3489570 - RNA, 21 nt, Human
accccaccuuuauuccuucau

SEQ ID NO: 3489571 - RNA, 14 nt, Human
accccacuacacag

SEQ ID NO: 3489572 - RNA, 17 nt, Human
accccacuuaucccucu

SEQ ID NO: 3489573 - RNA, 18 nt, Human
accccacuuaucccucuc

SEQ ID NO: 3489574 - RNA, 14 nt, Human
accccagacacugg

SEQ ID NO: 3489575 - RNA, 10 nt, Human
accccagagc

SEQ ID NO: 3489576 - RNA, 17 nt, Human
accccagagccacacau

SEQ ID NO: 3489577 - RNA, 22 nt, Human
accccagcauucucaggcacca

SEQ ID NO: 3489578 - RNA, 23 nt, Human
accccagcauucucaggcaccag

SEQ ID NO: 3489579 - RNA, 13 nt, Human
accccagccccaa

SEQ ID NO: 3489580 - RNA, 22 nt, Human
accccagccccaaaacucuccu

SEQ ID NO: 3489581 - RNA, 12 nt, Human
accccagccuca

SEQ ID NO: 3489582 - RNA, 20 nt, Human
accccagccucaaauccagg

SEQ ID NO: 3489583 - RNA, 21 nt, Human
accccagccuggccacgcagc

SEQ ID NO: 3489584 - RNA, 13 nt, Human
accccagcggcug

SEQ ID NO: 3489585 - RNA, 11 nt, Human
accccagcucu

SEQ ID NO: 3489586 - RNA, 11 nt, Human
accccagcugg

SEQ ID NO: 3489587 - RNA, 17 nt, Human
accccagcugugagccu

SEQ ID NO: 3489588 - RNA, 11 nt, Human
accccaggacg

SEQ ID NO: 3489589 - RNA, 23 nt, Human
accccaggacgccacucauuuca

SEQ ID NO: 3489590 - RNA, 16 nt, Human
accacagcccugucag

SEQ ID NO: 3489591 - RNA, 12 nt, Human
accacagcuccu

SEQ ID NO: 3489592 - RNA, 22 nt, Human
accacaggaauuuuaaaaacaa

SEQ ID NO: 3489593 - RNA, 17 nt, Human
accacaggcucaggcag

SEQ ID NO: 3489594 - RNA, 23 nt, Human
accacaggguucaaaaugucugu

SEQ ID NO: 3489595 - RNA, 11 nt, Human
accacaguguc

SEQ ID NO: 3489596 - RNA, 14 nt, Human
accacauccuccgu

SEQ ID NO: 3489597 - RNA, 16 nt, Human
accacaucuaagccug

SEQ ID NO: 3489598 - RNA, 14 nt, Human
accacaucuugcuc

SEQ ID NO: 3489599 - RNA, 16 nt, Human
accacaucuugcucug

SEQ ID NO: 3489600 - RNA, 17 nt, Human
accacaucuuuaucugu

SEQ ID NO: 3489601 - RNA, 20 nt, Human
accacaugccaagcacugug

SEQ ID NO: 3489602 - RNA, 18 nt, Human
accacaugcggagaacaa

SEQ ID NO: 3489603 - RNA, 15 nt, Human
accacauugaagaau

SEQ ID NO: 3489604 - RNA, 15 nt, Human
accaccaaaaacaaa

SEQ ID NO: 3489605 - RNA, 19 nt, Human
accaccaacuacuaccugu

SEQ ID NO: 3489606 - RNA, 20 nt, Human
accaccacacccagcccacu

SEQ ID NO: 3489607 - RNA, 16 nt, Human
accaccacacccggcu

SEQ ID NO: 3489608 - RNA, 12 nt, Human
accaccaccccu

SEQ ID NO: 3489609 - RNA, 20 nt, Human
accaccacuggccaccaggc

SEQ ID NO: 3489610 - RNA, 22 nt, Human
accaccacuggccaccaggcug

SEQ ID NO: 3489611 - RNA, 23 nt, Human
accaccacuggccaccaggcugg

SEQ ID NO: 3489612 - RNA, 24 nt, Human
accaccacuggccaccaggcuggc

SEQ ID NO: 3489613 - RNA, 13 nt, Human
accaccagaagcc

SEQ ID NO: 3489614 - RNA, 15 nt, Human
accaccagaagccca

SEQ ID NO: 3489615 - RNA, 12 nt, Human
accaccagcugu

SEQ ID NO: 3489616 - RNA, 13 nt, Human
accaccagcugug

SEQ ID NO: 3489617 - RNA, 21 nt, Human
accaccagggcaucucugggc

SEQ ID NO: 3489618 - RNA, 13 nt, Human
accaccaggucuc

SEQ ID NO: 3489619 - RNA, 17 nt, Human
accaccauccaccgcug

SEQ ID NO: 3489620 - RNA, 19 nt, Human
accaccauccaccgcugcu

SEQ ID NO: 3489621 - RNA, 14 nt, Human
accacccauaucau

SEQ ID NO: 3489622 - RNA, 17 nt, Human
accacccauaucaugca

SEQ ID NO: 3489623 - RNA, 19 nt, Human
accaccccagcugcucccc

SEQ ID NO: 3489624 - RNA, 22 nt, Human
accaccccagcugcuccccucc

SEQ ID NO: 3489625 - RNA, 15 nt, Human
accaccccccacucu

SEQ ID NO: 3489626 - RNA, 22 nt, Human
accaccccgccugcccucaugg

SEQ ID NO: 3489627 - RNA, 20 nt, Human
accaccccugccuccacccu

SEQ ID NO: 3489628 - RNA, 13 nt, Human
accacccuccccu

SEQ ID NO: 3489629 - RNA, 14 nt, Human
accacccuccccuc

SEQ ID NO: 3489630 - RNA, 15 nt, Human
accacccuccccucu

SEQ ID NO: 3489631 - RNA, 16 nt, Human
accacccuccccucuc

SEQ ID NO: 3489632 - RNA, 21 nt, Human
accacccuccccucucuugca

SEQ ID NO: 3489633 - RNA, 14 nt, Human
accacccuccuucc

SEQ ID NO: 3489634 - RNA, 13 nt, Human
accacccugaggc

SEQ ID NO: 3489635 - RNA, 19 nt, Human
accaccgcuccccagccca

SEQ ID NO: 3489636 - RNA, 21 nt, Human
accaccgcuccccagcccagg

SEQ ID NO: 3489637 - RNA, 13 nt, Human
accaccuaccccu

SEQ ID NO: 3489638 - RNA, 17 nt, Human
accaccuaggccacucc

SEQ ID NO: 3489639 - RNA, 21 nt, Human
accaccuaggccacuccucca

SEQ ID NO: 3489640 - RNA, 23 nt, Human
accaccucucaauauucaauaaa

SEQ ID NO: 3489641 - RNA, 12 nt, Human
accaccugccca

SEQ ID NO: 3489642 - RNA, 16 nt, Human
accaccuucccagcuc

SEQ ID NO: 3489643 - RNA, 19 nt, Human
accaccuucccagcucucc

SEQ ID NO: 3489644 - RNA, 17 nt, Human
accacgauguggcccug

SEQ ID NO: 3489645 - RNA, 20 nt, Human
accacgauguggcccuggcc

SEQ ID NO: 3489646 - RNA, 18 nt, Human
accacgcccguccugccu

SEQ ID NO: 3489647 - RNA, 19 nt, Human
accacgcccguccugccug

SEQ ID NO: 3489648 - RNA, 18 nt, Human
accacgccucuugaccag

SEQ ID NO: 3489649 - RNA, 20 nt, Human
accacgccuggcuaauuuuu

SEQ ID NO: 3489650 - RNA, 14 nt, Human
accacgcuggaccu

SEQ ID NO: 3489651 - RNA, 18 nt, Human
accacgcuugacaggaca

SEQ ID NO: 3489652 - RNA, 20 nt, Human
accacggacguuuccaucag

SEQ ID NO: 3489653 - RNA, 18 nt, Human
accacggccacuggccau

SEQ ID NO: 3489654 - RNA, 22 nt, Human
accacggccacuggccaucucc

SEQ ID NO: 3489655 - RNA, 14 nt, Human
accacguccagcug

SEQ ID NO: 3489656 - RNA, 23 nt, Human
accacgucuauuucaucagaaca

SEQ ID NO: 3489657 - RNA, 17 nt, Human
accacgucugucuucac

SEQ ID NO: 3489658 - RNA, 18 nt, Human
accacgucugucuucaca

SEQ ID NO: 3489659 - RNA, 19 nt, Human
accacguuucuaaaggcua

SEQ ID NO: 3489660 - RNA, 17 nt, Human
accacuaacuccugaga

SEQ ID NO: 3489661 - RNA, 15 nt, Human
accacuacauucugu

SEQ ID NO: 3489662 - RNA, 13 nt, Human
accacuagaacuc

SEQ ID NO: 3489663 - RNA, 20 nt, Human
accacuagaacucuccaucu

SEQ ID NO: 3489664 - RNA, 17 nt, Human
accacuaggacucugag

SEQ ID NO: 3489665 - RNA, 15 nt, Human
accacuaugaagcua

SEQ ID NO: 3489666 - RNA, 16 nt, Human
accacucaagaccaaa

SEQ ID NO: 3489667 - RNA, 16 nt, Human
accacucagccccuag

SEQ ID NO: 3489668 - RNA, 12 nt, Human
accacuccauuc

SEQ ID NO: 3489669 - RNA, 21 nt, Human
accacucgugcaucccugaga

SEQ ID NO: 3489670 - RNA, 13 nt, Human
accacucuggcag

SEQ ID NO: 3489671 - RNA, 18 nt, Human
accacucuggcagccaca

SEQ ID NO: 3489672 - RNA, 12 nt, Human
accacucuguaa

SEQ ID NO: 3489673 - RNA, 14 nt, Human
accacugaaaaaau

SEQ ID NO: 3489674 - RNA, 15 nt, Human
accacugaaaaaaua

SEQ ID NO: 3489675 - RNA, 15 nt, Human
accacugcaaguccu

SEQ ID NO: 3489676 - RNA, 17 nt, Human
accacugcaaguccuuu

SEQ ID NO: 3489677 - RNA, 19 nt, Human
accacugcagaagacagua

SEQ ID NO: 3489678 - RNA, 14 nt, Human
accguguaaaccaa

SEQ ID NO: 3489679 - RNA, 19 nt, Human
accgugucaagcugcucug

SEQ ID NO: 3489680 - RNA, 17 nt, Human
accgugucugucuggca

SEQ ID NO: 3489681 - RNA, 13 nt, Human
accguuucuuccc

SEQ ID NO: 3489682 - RNA, 14 nt, Human
accguuucuucccu

SEQ ID NO: 3489683 - RNA, 21 nt, Human
accuaaaaggaaaucucaccc

SEQ ID NO: 3489684 - RNA, 23 nt, Human
accuaaacauagaaauugccuga

SEQ ID NO: 3489685 - RNA, 20 nt, Human
accuaaauaaacacauagau

SEQ ID NO: 3489686 - RNA, 20 nt, Human
accuaacaacauuguagccu

SEQ ID NO: 3489687 - RNA, 18 nt, Human
accuaacauuauuuauuc

SEQ ID NO: 3489688 - RNA, 16 nt, Human
accuaacccagaaaau

SEQ ID NO: 3489689 - RNA, 18 nt, Human
accuaaccccuuuccugc

SEQ ID NO: 3489690 - RNA, 14 nt, Human
accuaaccuguguc

SEQ ID NO: 3489691 - RNA, 16 nt, Human
accuaaccugugucug

SEQ ID NO: 3489692 - RNA, 16 nt, Human
accuaacuguaucuug

SEQ ID NO: 3489693 - RNA, 15 nt, Human
accuaagggacaugu

SEQ ID NO: 3489694 - RNA, 23 nt, Human
accuaagggacauguuuugauaa

SEQ ID NO: 3489695 - RNA, 23 nt, Human
accuaaguacuguaauaauaccu

SEQ ID NO: 3489696 - RNA, 18 nt, Human
accuaaguccuuuaugug

SEQ ID NO: 3489697 - RNA, 20 nt, Human
accuaaucaccauguaagca

SEQ ID NO: 3489698 - RNA, 21 nt, Human
accuaauccaggcagauccag

SEQ ID NO: 3489699 - RNA, 14 nt, Human
accuaauuaauuuc

SEQ ID NO: 3489700 - RNA, 15 nt, Human
accuaauuagagcag

SEQ ID NO: 3489701 - RNA, 16 nt, Human
accuaauuagagcaga

SEQ ID NO: 3489702 - RNA, 22 nt, Human
accuacagaauacuagccagag

SEQ ID NO: 3489703 - RNA, 20 nt, Human
accuacagagaugcuaagag

SEQ ID NO: 3489704 - RNA, 21 nt, Human
accuacagggggucuggcugg

SEQ ID NO: 3489705 - RNA, 16 nt, Human
accuacaguguacagu

SEQ ID NO: 3489706 - RNA, 16 nt, Human
accuacaguuuuaacu

SEQ ID NO: 3489707 - RNA, 17 nt, Human
accuacaguuuuaacug

SEQ ID NO: 3489708 - RNA, 20 nt, Human
accuacauauuccauguuug

SEQ ID NO: 3489709 - RNA, 14 nt, Human
accuaccaaaaaau

SEQ ID NO: 3489710 - RNA, 16 nt, Human
accuaccaccacgccc

SEQ ID NO: 3489711 - RNA, 20 nt, Human
accuaccaccacgcccggcu

SEQ ID NO: 3489712 - RNA, 18 nt, Human
accuaccaccccuuccug

SEQ ID NO: 3489713 - RNA, 21 nt, Human
accuaccaccccuuccugucc

SEQ ID NO: 3489714 - RNA, 14 nt, Human
accuaccaucaggg

SEQ ID NO: 3489715 - RNA, 15 nt, Human
accuacccauacacc

SEQ ID NO: 3489716 - RNA, 13 nt, Human
accuaccucaggu

SEQ ID NO: 3489717 - RNA, 16 nt, Human
accuaccucagguugc

SEQ ID NO: 3489718 - RNA, 20 nt, Human
accuaccucagguugcuggu

SEQ ID NO: 3489719 - RNA, 18 nt, Human
accuaccuguaacuuuuu

SEQ ID NO: 3489720 - RNA, 24 nt, Human
accuaccuguugagcaucacagaa

SEQ ID NO: 3489721 - RNA, 17 nt, Human
accuaccuucaaagcug

SEQ ID NO: 3489722 - RNA, 18 nt, Human
accuaccuucaaagcuga

SEQ ID NO: 3489723 - RNA, 16 nt, Human
accuacucacacaggc

SEQ ID NO: 3489724 - RNA, 18 nt, Human
accuacucuggcuagaag

SEQ ID NO: 3489725 - RNA, 16 nt, Human
accuacuguucuaaag

SEQ ID NO: 3489726 - RNA, 20 nt, Human
accuacuguucuaaagcucu

SEQ ID NO: 3489727 - RNA, 20 nt, Human
accuacuuugacuuuuugca

SEQ ID NO: 3489728 - RNA, 20 nt, Human
accuagaagaagcuauguca

SEQ ID NO: 3489729 - RNA, 14 nt, Human
accuagaagggcua

SEQ ID NO: 3489730 - RNA, 20 nt, Human
accuagagacuucacccggg

SEQ ID NO: 3489731 - RNA, 13 nt, Human
accuagagccaga

SEQ ID NO: 3489732 - RNA, 18 nt, Human
accuagcaauuccaucac

SEQ ID NO: 3489733 - RNA, 22 nt, Human
accuagcagcaccguucugugc

SEQ ID NO: 3489734 - RNA, 13 nt, Human
accuagccagcug

SEQ ID NO: 3489735 - RNA, 16 nt, Human
accuagcgucaguauu

SEQ ID NO: 3489736 - RNA, 23 nt, Human
accuagcugaauguuuuucuaaa

SEQ ID NO: 3489737 - RNA, 18 nt, Human
accuaggccacuccucca

SEQ ID NO: 3489738 - RNA, 14 nt, Human
accuagugaaacuu

SEQ ID NO: 3489739 - RNA, 21 nt, Human
accuaguggcuguccagugcc

SEQ ID NO: 3489740 - RNA, 14 nt, Human
accuaguuuuccau

SEQ ID NO: 3489741 - RNA, 18 nt, Human
accuauaaaguaaagcua

SEQ ID NO: 3489742 - RNA, 15 nt, Human
accuauaaugugugu

SEQ ID NO: 3489743 - RNA, 22 nt, Human
accuauaauguguguaugugua

SEQ ID NO: 3489744 - RNA, 13 nt, Human
accuauaugauuu

SEQ ID NO: 3489745 - RNA, 14 nt, Human
accuaucccaccuc

SEQ ID NO: 3489746 - RNA, 12 nt, Human
accuaugucauu

SEQ ID NO: 3489747 - RNA, 16 nt, Human
accuaugucauuucau

SEQ ID NO: 3489748 - RNA, 17 nt, Human
accuauguccuaaggac

SEQ ID NO: 3489749 - RNA, 23 nt, Human
accuauguccuaaggacacacua

SEQ ID NO: 3489750 - RNA, 16 nt, Human
accuauuccuccuggg

SEQ ID NO: 3489751 - RNA, 18 nt, Human
accuauuucaaaaauuug

SEQ ID NO: 3489752 - RNA, 20 nt, Human
accuauuucaaaaauuugga

SEQ ID NO: 3489753 - RNA, 14 nt, Human
accuauuucucuuu

SEQ ID NO: 3489754 - RNA, 22 nt, Human
accuauuucucuuucuuuacaa

SEQ ID NO: 3489755 - RNA, 18 nt, Human
accuauuucuuaaacacu

SEQ ID NO: 3489756 - RNA, 23 nt, Human
accuauuucuuaaacacuugcaa

SEQ ID NO: 3489757 - RNA, 14 nt, Human
accuauuugacaua

SEQ ID NO: 3489758 - RNA, 17 nt, Human
accuauuugacuuacca

SEQ ID NO: 3489759 - RNA, 21 nt, Human
accuauuuugaaaaauuccua

SEQ ID NO: 3489760 - RNA, 19 nt, Human
accucaaaaugucuaagau

SEQ ID NO: 3489761 - RNA, 22 nt, Human
accucaaagcaccugaacaguu

SEQ ID NO: 3489762 - RNA, 16 nt, Human
accucaacaagaagaa

SEQ ID NO: 3489763 - RNA, 16 nt, Human
accucaaccaaugcca

SEQ ID NO: 3489764 - RNA, 16 nt, Human
accucaaccuguaaau

SEQ ID NO: 3489765 - RNA, 16 nt, Human
accucaacugccuacu

SEQ ID NO: 3489766 - RNA, 16 nt, Human
accucaagcugcaucu

SEQ ID NO: 3489767 - RNA, 19 nt, Human
accucaagugaucugccca

SEQ ID NO: 3489768 - RNA, 21 nt, Human
accucaaucagucucagaaug

SEQ ID NO: 3489769 - RNA, 15 nt, Human
accucacagugaccc

SEQ ID NO: 3489770 - RNA, 19 nt, Human
accucaccaacuccuaguu

SEQ ID NO: 3489771 - RNA, 11 nt, Human
accucacccca

SEQ ID NO: 3489772 - RNA, 15 nt, Human
accucaccccacuua

SEQ ID NO: 3489773 - RNA, 21 nt, Human
accucaccccgaggcccugca

SEQ ID NO: 3489774 - RNA, 22 nt, Human
accucaccccgaggcccugcau

SEQ ID NO: 3489775 - RNA, 14 nt, Human
accucacccugcua

SEQ ID NO: 3489776 - RNA, 21 nt, Human
accucacgugcaaagccacca

SEQ ID NO: 3489777 - RNA, 14 nt, Human
accucacucagcac

SEQ ID NO: 3489778 - RNA, 15 nt, Human
accucacucagcacc

SEQ ID NO: 3489779 - RNA, 19 nt, Human
accucacucagcaccacuc

SEQ ID NO: 3489780 - RNA, 16 nt, Human
accucacucuuuauag

SEQ ID NO: 3489781 - RNA, 17 nt, Human
accucacucuuuauagu

SEQ ID NO: 3489782 - RNA, 20 nt, Human
accucacugaaaacaucugg

SEQ ID NO: 3489783 - RNA, 23 nt, Human
accucacugggguccuggggccu

SEQ ID NO: 3489784 - RNA, 20 nt, Human
accucagaaguaaaggaauu

SEQ ID NO: 3489785 - RNA, 20 nt, Human
accucagaguccaggcccca

SEQ ID NO: 3489786 - RNA, 12 nt, Human
accucagccugg

SEQ ID NO: 3489787 - RNA, 14 nt, Human
accucagccuggcc

SEQ ID NO: 3489788 - RNA, 17 nt, Human
accucagccugggcgcu

SEQ ID NO: 3489789 - RNA, 20 nt, Human
accucagccuuccccuugcc

SEQ ID NO: 3489790 - RNA, 17 nt, Human
accucagcucugggaga

SEQ ID NO: 3489791 - RNA, 18 nt, Human
accucagcucugggagag

SEQ ID NO: 3489792 - RNA, 22 nt, Human
acccagacggcuccacuaggac

SEQ ID NO: 3489793 - RNA, 18 nt, Human
acccagagaagccccuuc

SEQ ID NO: 3489794 - RNA, 24 nt, Human
acccagagcauuacgugagccagg

SEQ ID NO: 3489795 - RNA, 17 nt, Human
acccagcaacagaaaaa

SEQ ID NO: 3489796 - RNA, 17 nt, Human
acccagcaguucuguua

SEQ ID NO: 3489797 - RNA, 15 nt, Human
acccagccaucugcc

SEQ ID NO: 3489798 - RNA, 19 nt, Human
acccagccaucugcccagg

SEQ ID NO: 3489799 - RNA, 14 nt, Human
acccagcccauucu

SEQ ID NO: 3489800 - RNA, 17 nt, Human
acccagccccagccagg

SEQ ID NO: 3489801 - RNA, 14 nt, Human
acccagccccaggg

SEQ ID NO: 3489802 - RNA, 16 nt, Human
acccagccccuugaga

SEQ ID NO: 3489803 - RNA, 12 nt, Human
acccagcccugg

SEQ ID NO: 3489804 - RNA, 14 nt, Human
acccagcccugguc

SEQ ID NO: 3489805 - RNA, 15 nt, Human
acccagcccuggucu

SEQ ID NO: 3489806 - RNA, 21 nt, Human
acccagccgccaucagcccaa

SEQ ID NO: 3489807 - RNA, 22 nt, Human
acccagccucaguccuccccuc

SEQ ID NO: 3489808 - RNA, 23 nt, Human
acccagccucaguccuccccuca

SEQ ID NO: 3489809 - RNA, 13 nt, Human
acccagcgagccc

SEQ ID NO: 3489810 - RNA, 23 nt, Human
acccagcgagcccugguggcagu

SEQ ID NO: 3489811 - RNA, 24 nt, Human
acccagcgagcccugguggcagug

SEQ ID NO: 3489812 - RNA, 15 nt, Human
acccagcguggccuc

SEQ ID NO: 3489813 - RNA, 14 nt, Human
acccagcuaaauaa

SEQ ID NO: 3489814 - RNA, 14 nt, Human
acccagcugcaccc

SEQ ID NO: 3489815 - RNA, 20 nt, Human
acccagcugcaccccuuccu

SEQ ID NO: 3489816 - RNA, 17 nt, Human
acccagcugccaccucu

SEQ ID NO: 3489817 - RNA, 16 nt, Human
acccaggacaagcaug

SEQ ID NO: 3489818 - RNA, 20 nt, Human
acccaggacaggauccaggc

SEQ ID NO: 3489819 - RNA, 23 nt, Human
acccaggagauggaaguugcagu

SEQ ID NO: 3489820 - RNA, 23 nt, Human
acccaggagccccgaggccuucu

SEQ ID NO: 3489821 - RNA, 13 nt, Human
acccaggaggcag

SEQ ID NO: 3489822 - RNA, 13 nt, Human
acccccaccaagg

SEQ ID NO: 3489823 - RNA, 16 nt, Human
acccccacccccacca

SEQ ID NO: 3489824 - RNA, 14 nt, Human
acccccacccccag

SEQ ID NO: 3489825 - RNA, 15 nt, Human
acccccaccccuucc

SEQ ID NO: 3489826 - RNA, 17 nt, Human
acccccaccccuugcuc

SEQ ID NO: 3489827 - RNA, 12 nt, Human
acccccacccuu

SEQ ID NO: 3489828 - RNA, 15 nt, Human
acccccacuccagcu

SEQ ID NO: 3489829 - RNA, 13 nt, Human
acccccacucuca

SEQ ID NO: 3489830 - RNA, 17 nt, Human
acccccacucucauucc

SEQ ID NO: 3489831 - RNA, 22 nt, Human
acccccacucucauuccccagg

SEQ ID NO: 3489832 - RNA, 13 nt, Human
acccccagcaacc

SEQ ID NO: 3489833 - RNA, 13 nt, Human
acccccagcaccc

SEQ ID NO: 3489834 - RNA, 12 nt, Human
acccccagcacu

SEQ ID NO: 3489835 - RNA, 13 nt, Human
acccccagccccg

SEQ ID NO: 3489836 - RNA, 23 nt, Human
acccccagccccgacuccagcca

SEQ ID NO: 3489837 - RNA, 13 nt, Human
acccccagccugc

SEQ ID NO: 3489838 - RNA, 13 nt, Human
acccccagcucaa

SEQ ID NO: 3489839 - RNA, 18 nt, Human
acccccagcuccggccug

SEQ ID NO: 3489840 - RNA, 19 nt, Human
acccccagcugcuuguguc

SEQ ID NO: 3489841 - RNA, 16 nt, Human
acccccaggaccccug

SEQ ID NO: 3489842 - RNA, 17 nt, Human
acccccaucucucccuc

SEQ ID NO: 3489843 - RNA, 16 nt, Human
acccccauucucaucu

SEQ ID NO: 3489844 - RNA, 17 nt, Human
acccccauuucuauuua

SEQ ID NO: 3489845 - RNA, 22 nt, Human
acccccccagcuucacuucuga

SEQ ID NO: 3489846 - RNA, 13 nt, Human
accccccccccac

SEQ ID NO: 3489847 - RNA, 12 nt, Human
accccccugggc

SEQ ID NO: 3489848 - RNA, 15 nt, Human
accccccugggcuga

SEQ ID NO: 3489849 - RNA, 22 nt, Human
accccccuguacacaacucacu

SEQ ID NO: 3489850 - RNA, 12 nt, Human
accccccuguuc

SEQ ID NO: 3489851 - RNA, 15 nt, Human
accccccuguucuaa

SEQ ID NO: 3489852 - RNA, 17 nt, Human
accccccuguucuaagg

SEQ ID NO: 3489853 - RNA, 16 nt, Human
acccccgcccaggcug

SEQ ID NO: 3489854 - RNA, 18 nt, Human
acccccgcccccugcccu

SEQ ID NO: 3489855 - RNA, 13 nt, Human
acccccgcuggag

SEQ ID NO: 3489856 - RNA, 19 nt, Human
acccccucaagccaauccc

SEQ ID NO: 3489857 - RNA, 12 nt, Human
acccccucccca

SEQ ID NO: 3489858 - RNA, 14 nt, Human
acccccuccucucu

SEQ ID NO: 3489859 - RNA, 11 nt, Human
acccccuccuu

SEQ ID NO: 3489860 - RNA, 12 nt, Human
acccccuccuuc

SEQ ID NO: 3489861 - RNA, 18 nt, Human
acccccucgggucuccuc

SEQ ID NO: 3489862 - RNA, 15 nt, Human
acccccugcagcuug

SEQ ID NO: 3489863 - RNA, 16 nt, Human
acccccuucagugccc

SEQ ID NO: 3489864 - RNA, 20 nt, Human
acccccuucagugcccacca

SEQ ID NO: 3489865 - RNA, 12 nt, Human
acccccuucccc

SEQ ID NO: 3489866 - RNA, 18 nt, Human
acccccuucuacugagcc

SEQ ID NO: 3489867 - RNA, 19 nt, Human
acccccuucuacugagccu

SEQ ID NO: 3489868 - RNA, 21 nt, Human
acccccuucucugcccauucc

SEQ ID NO: 3489869 - RNA, 22 nt, Human
acccccuucucugcccauuccc

SEQ ID NO: 3489870 - RNA, 17 nt, Human
acccccuucucugcucc

SEQ ID NO: 3489871 - RNA, 15 nt, Human
acccccuucugggca

SEQ ID NO: 3489872 - RNA, 18 nt, Human
accccgaccaccugccca

SEQ ID NO: 3489873 - RNA, 15 nt, Human
accccgaggcccugc

SEQ ID NO: 3489874 - RNA, 20 nt, Human
accccgaggcccugcauggg

SEQ ID NO: 3489875 - RNA, 18 nt, Human
accccgcagacaccuugg

SEQ ID NO: 3489876 - RNA, 14 nt, Human
accccgccugcccu

SEQ ID NO: 3489877 - RNA, 20 nt, Human
accccggcaggcccugcagu

SEQ ID NO: 3489878 - RNA, 21 nt, Human
accccgggcucucugcuguac

SEQ ID NO: 3489879 - RNA, 16 nt, Human
accccggggacccugu

SEQ ID NO: 3489880 - RNA, 20 nt, Human
accccggggugcccacaggc

SEQ ID NO: 3489881 - RNA, 23 nt, Human
accccggggugcccacaggccgc

SEQ ID NO: 3489882 - RNA, 20 nt, Human
accccgucgaggggcucuca

SEQ ID NO: 3489883 - RNA, 22 nt, Human
accccgucugggguucagcccc

SEQ ID NO: 3489884 - RNA, 17 nt, Human
accccgugaagcaucca

SEQ ID NO: 3489885 - RNA, 18 nt, Human
accccguuacagcucccc

SEQ ID NO: 3489886 - RNA, 20 nt, Human
accccguuacagcuccccaa

SEQ ID NO: 3489887 - RNA, 15 nt, Human
accccucaccuugca

SEQ ID NO: 3489888 - RNA, 19 nt, Human
accccucaccuugcaacac

SEQ ID NO: 3489889 - RNA, 18 nt, Human
accccucacucuggccuc

SEQ ID NO: 3489890 - RNA, 17 nt, Human
accccuccacucuuucu

SEQ ID NO: 3489891 - RNA, 14 nt, Human
accccucccagcug

SEQ ID NO: 3489892 - RNA, 22 nt, Human
accccucccagcugacaguccu

SEQ ID NO: 3489893 - RNA, 19 nt, Human
accccuccccuccaucccu

SEQ ID NO: 3489894 - RNA, 20 nt, Human
accccucccggcccugccug

SEQ ID NO: 3489895 - RNA, 13 nt, Human
accccucccuuuc

SEQ ID NO: 3489896 - RNA, 13 nt, Human
accccuccucacu

SEQ ID NO: 3489897 - RNA, 18 nt, Human
accccuccucccuuuuuc

SEQ ID NO: 3489898 - RNA, 17 nt, Human
accccuccuggggccag

SEQ ID NO: 3489899 - RNA, 20 nt, Human
accccuccuggggccaggcc

SEQ ID NO: 3489900 - RNA, 16 nt, Human
accccuccuuccuuga

SEQ ID NO: 3489901 - RNA, 21 nt, Human
accccuccuuccuugaccagc

SEQ ID NO: 3489902 - RNA, 23 nt, Human
accccuccuuccuugaccagcag

SEQ ID NO: 3489903 - RNA, 14 nt, Human
accccucgcccagu

SEQ ID NO: 3489904 - RNA, 19 nt, Human
accccucgcccagucccag

SEQ ID NO: 3489905 - RNA, 14 nt, Human
accccucuggccag

SEQ ID NO: 3489906 - RNA, 13 nt, Human
accccucuguagc

SEQ ID NO: 3489907 - RNA, 16 nt, Human
accccugacucaucau

SEQ ID NO: 3489908 - RNA, 22 nt, Human
accccugcauuggaacuggagg

SEQ ID NO: 3489909 - RNA, 10 nt, Human
accccugccc

SEQ ID NO: 3489910 - RNA, 12 nt, Human
accccugccccc

SEQ ID NO: 3489911 - RNA, 17 nt, Human
accccugcccccagccc

SEQ ID NO: 3489912 - RNA, 12 nt, Human
accccugcccug

SEQ ID NO: 3489913 - RNA, 13 nt, Human
accccugcccugg

SEQ ID NO: 3489914 - RNA, 15 nt, Human
accccugcccuggga

SEQ ID NO: 3489915 - RNA, 22 nt, Human
accccugccuccacccucugag

SEQ ID NO: 3489916 - RNA, 23 nt, Human
accccugccuccacccucugagc

SEQ ID NO: 3489917 - RNA, 20 nt, Human
accccuggcuccaggccagg

SEQ ID NO: 3489918 - RNA, 22 nt, Human
accccuggcuccaggccagggg

SEQ ID NO: 3489919 - RNA, 11 nt, Human
accccuggcug

SEQ ID NO: 3489920 - RNA, 20 nt, Human
accccuggcuuuucacugcu

SEQ ID NO: 3489921 - RNA, 16 nt, Human
accccugggggcucuc

SEQ ID NO: 3489922 - RNA, 16 nt, Human
accccugguucucauc

SEQ ID NO: 3489923 - RNA, 22 nt, Human
accccugguucucaucuuucuu

SEQ ID NO: 3489924 - RNA, 17 nt, Human
accccuguaggccucag

SEQ ID NO: 3489925 - RNA, 21 nt, Human
accccugucccaugcaggccc

SEQ ID NO: 3489926 - RNA, 22 nt, Human
accccugucccaugcaggcccu

SEQ ID NO: 3489927 - RNA, 17 nt, Human
accccuguccucacugc

SEQ ID NO: 3489928 - RNA, 19 nt, Human
accccuguccucacugcuc

SEQ ID NO: 3489929 - RNA, 21 nt, Human
accccuguccucacugcuccc

SEQ ID NO: 3489930 - RNA, 13 nt, Human
accccuguggagc

SEQ ID NO: 3489931 - RNA, 16 nt, Human
accccuuagccucccu

SEQ ID NO: 3489932 - RNA, 18 nt, Human
accccuuagccucccuga

SEQ ID NO: 3489933 - RNA, 20 nt, Human
accccuuccagaucacugcc

SEQ ID NO: 3489934 - RNA, 21 nt, Human
accccuuccagaucacugcca

SEQ ID NO: 3489935 - RNA, 15 nt, Human
accccuuccaugugg

SEQ ID NO: 3489936 - RNA, 20 nt, Human
accccuuccccacugccugc

SEQ ID NO: 3489937 - RNA, 21 nt, Human
accccuuccccacugccugcc

SEQ ID NO: 3489938 - RNA, 22 nt, Human
accccuuccccacugccugccc

SEQ ID NO: 3489939 - RNA, 15 nt, Human
accccuuccugggca

SEQ ID NO: 3489940 - RNA, 22 nt, Human
accccuuccugggcacacgcug

SEQ ID NO: 3489941 - RNA, 23 nt, Human
accccuuccugggcacacgcugc

SEQ ID NO: 3489942 - RNA, 16 nt, Human
accccuucgcuccugu

SEQ ID NO: 3489943 - RNA, 19 nt, Human
accccuucgcuccuguguc

SEQ ID NO: 3489944 - RNA, 15 nt, Human
accccuucucuccuc

SEQ ID NO: 3489945 - RNA, 17 nt, Human
accccuucucuccuccc

SEQ ID NO: 3489946 - RNA, 23 nt, Human
accccuucucuccuccccaaauc

SEQ ID NO: 3489947 - RNA, 16 nt, Human
accccuucucugugac

SEQ ID NO: 3489948 - RNA, 18 nt, Human
accccuucucugugaccc

SEQ ID NO: 3489949 - RNA, 21 nt, Human
accccuucucugugacccacu

SEQ ID NO: 3489950 - RNA, 14 nt, Human
accccuuucccacc

SEQ ID NO: 3489951 - RNA, 17 nt, Human
accccuuucccacccca

SEQ ID NO: 3489952 - RNA, 12 nt, Human
accccuuuccug

SEQ ID NO: 3489953 - RNA, 17 nt, Human
accccuuuucagcuucu

SEQ ID NO: 3489954 - RNA, 19 nt, Human
accccuuuucagcuucugc

SEQ ID NO: 3489955 - RNA, 21 nt, Human
acccgaccccccgugggcucc

SEQ ID NO: 3489956 - RNA, 15 nt, Human
acccgagcugggacc

SEQ ID NO: 3489957 - RNA, 13 nt, Human
acccgaggaaacu

SEQ ID NO: 3489958 - RNA, 16 nt, Human
acacacagaaaauaua

SEQ ID NO: 3489959 - RNA, 13 nt, Human
acacacagaggaa

SEQ ID NO: 3489960 - RNA, 23 nt, Human
acacacagauuugagcucagccc

SEQ ID NO: 3489961 - RNA, 12 nt, Human
acacacagccac

SEQ ID NO: 3489962 - RNA, 13 nt, Human
acacacagccaca

SEQ ID NO: 3489963 - RNA, 17 nt, Human
acacacagccacacaca

SEQ ID NO: 3489964 - RNA, 18 nt, Human
acacacagccacacacac

SEQ ID NO: 3489965 - RNA, 12 nt, Human
acacacagcucc

SEQ ID NO: 3489966 - RNA, 13 nt, Human
acacacagcucug

SEQ ID NO: 3489967 - RNA, 17 nt, Human
acacacaggcaacugag

SEQ ID NO: 3489968 - RNA, 17 nt, Human
acccugggcucuguggg

SEQ ID NO: 3489969 - RNA, 11 nt, Human
accucugugug

SEQ ID NO: 3489970 - RNA, 12 nt, Human
accucugugugc

SEQ ID NO: 3489971 - RNA, 14 nt, Human
accucuguucagug

SEQ ID NO: 3489972 - RNA, 22 nt, Human
accucuguucaguguaaauagu

SEQ ID NO: 3489973 - RNA, 17 nt, Human
accucuguuguccuccc

SEQ ID NO: 3489974 - RNA, 15 nt, Human
accucuucagaggcc

SEQ ID NO: 3489975 - RNA, 17 nt, Human
accucuucagaggcccu

SEQ ID NO: 3489976 - RNA, 18 nt, Human
accucuucagaggcccuc

SEQ ID NO: 3489977 - RNA, 22 nt, Human
accucuuccgacucuuucugag

SEQ ID NO: 3489978 - RNA, 17 nt, Human
accucuuccuggccggu

SEQ ID NO: 3489979 - RNA, 16 nt, Human
accucuucuggcucaa

SEQ ID NO: 3489980 - RNA, 17 nt, Human
accucuugcugucucug

SEQ ID NO: 3489981 - RNA, 20 nt, Human
accucuugcugucucugcuc

SEQ ID NO: 3489982 - RNA, 12 nt, Human
accucuuguuuu

SEQ ID NO: 3489983 - RNA, 13 nt, Human
accucuuuggaaa

SEQ ID NO: 3489984 - RNA, 21 nt, Human
accucuuuuagucauuuugcu

SEQ ID NO: 3489985 - RNA, 18 nt, Human
accucuuuucugcaucau

SEQ ID NO: 3489986 - RNA, 22 nt, Human
accucuuuugcuugccaaagua

SEQ ID NO: 3489987 - RNA, 21 nt, Human
accugaaaaaaaguuuacaag

SEQ ID NO: 3489988 - RNA, 11 nt, Human
accugaaaaca

SEQ ID NO: 3489989 - RNA, 22 nt, Human
accugaaaagauguugugucuu

SEQ ID NO: 3489990 - RNA, 14 nt, Human
accugaaauuccaa

SEQ ID NO: 3489991 - RNA, 15 nt, Human
accugaaauuccaaa

SEQ ID NO: 3489992 - RNA, 19 nt, Human
accugaaauuccaaagucu

SEQ ID NO: 3489993 - RNA, 20 nt, Human
accugaaauuccaaagucuc

SEQ ID NO: 3489994 - RNA, 22 nt, Human
accugaaauuccaaagucucua

SEQ ID NO: 3489995 - RNA, 20 nt, Human
accugaacacuuauugcuuu

SEQ ID NO: 3489996 - RNA, 14 nt, Human
accugaagaaucac

SEQ ID NO: 3489997 - RNA, 19 nt, Human
accugaagaugggagccuu

SEQ ID NO: 3489998 - RNA, 15 nt, Human
accugaaggguugac

SEQ ID NO: 3489999 - RNA, 22 nt, Human
accugaagucuuuguacagaca

SEQ ID NO: 3490000 - RNA, 21 nt, Human
accugaaguuuuuuugcugcu

SEQ ID NO: 3490001 - RNA, 16 nt, Human
accugacaagcacugc

SEQ ID NO: 3490002 - RNA, 12 nt, Human
accugacacaag

SEQ ID NO: 3490003 - RNA, 16 nt, Human
accugacacaagagga

SEQ ID NO: 3490004 - RNA, 21 nt, Human
accugacacaccaggcgcuaa

SEQ ID NO: 3490005 - RNA, 17 nt, Human
accugacacucccuugg

SEQ ID NO: 3490006 - RNA, 19 nt, Human
accugacacucccuugggc

SEQ ID NO: 3490007 - RNA, 22 nt, Human
accugacagaugucagccgagc

SEQ ID NO: 3490008 - RNA, 17 nt, Human
accugaccccugcucag

SEQ ID NO: 3490009 - RNA, 23 nt, Human
accugaccccugcucaguaaagc

SEQ ID NO: 3490010 - RNA, 16 nt, Human
accugacuaagaaauu

SEQ ID NO: 3490011 - RNA, 20 nt, Human
accugacuauugaaguugca

SEQ ID NO: 3490012 - RNA, 14 nt, Human
accugacucugaaa

SEQ ID NO: 3490013 - RNA, 15 nt, Human
accugacucugaaau

SEQ ID NO: 3490014 - RNA, 15 nt, Human
accugagaccugaag

SEQ ID NO: 3490015 - RNA, 18 nt, Human
accugagauuuauuaaag

SEQ ID NO: 3490016 - RNA, 20 nt, Human
accugagauuuauuaaagaa

SEQ ID NO: 3490017 - RNA, 10 nt, Human
accugagccu

SEQ ID NO: 3490018 - RNA, 12 nt, Human
accugagccugc

SEQ ID NO: 3490019 - RNA, 16 nt, Human
accugagccugccgag

SEQ ID NO: 3490020 - RNA, 17 nt, Human
accugagccugccgagc

SEQ ID NO: 3490021 - RNA, 19 nt, Human
accugagcuagaagcugga

SEQ ID NO: 3490022 - RNA, 12 nt, Human
accugagcugcc

SEQ ID NO: 3490023 - RNA, 18 nt, Human
accugagcugccauccag

SEQ ID NO: 3490024 - RNA, 14 nt, Human
accugagcuuugga

SEQ ID NO: 3490025 - RNA, 23 nt, Human
accugagcuuuggacgcacacag

SEQ ID NO: 3490026 - RNA, 14 nt, Human
accugaggcccuuc

SEQ ID NO: 3490027 - RNA, 15 nt, Human
accugaggccugaag

SEQ ID NO: 3490028 - RNA, 16 nt, Human
accugaggcuccugug

SEQ ID NO: 3490029 - RNA, 14 nt, Human
accugagggucugu

SEQ ID NO: 3490030 - RNA, 19 nt, Human
accugagggucuguagguu

SEQ ID NO: 3490031 - RNA, 23 nt, Human
accugaggucgggaguuggagac

SEQ ID NO: 3490032 - RNA, 12 nt, Human
accugagguggg

SEQ ID NO: 3490033 - RNA, 17 nt, Human
accugaggugggcccag

SEQ ID NO: 3490034 - RNA, 24 nt, Human
accugaggugggcccaggaccagc

SEQ ID NO: 3490035 - RNA, 14 nt, Human
accugaguugaaga

SEQ ID NO: 3490036 - RNA, 16 nt, Human
accugaguugaagagg

SEQ ID NO: 3490037 - RNA, 16 nt, Human
accugauacggcuccc

SEQ ID NO: 3490038 - RNA, 14 nt, Human
accugaucaaugac

SEQ ID NO: 3490039 - RNA, 15 nt, Human
accugaucccacucc

SEQ ID NO: 3490040 - RNA, 13 nt, Human
accugauccugga

SEQ ID NO: 3490041 - RNA, 19 nt, Human
accugaugaaaauaaagaa

SEQ ID NO: 3490042 - RNA, 22 nt, Human
accugauguguacaucccaugu

SEQ ID NO: 3490043 - RNA, 17 nt, Human
accugauuaacugaggc

SEQ ID NO: 3490044 - RNA, 14 nt, Human
accugauuguaaac

SEQ ID NO: 3490045 - RNA, 16 nt, Human
accugauuguaaacuu

SEQ ID NO: 3490046 - RNA, 11 nt, Human
accugauuuuu

SEQ ID NO: 3490047 - RNA, 13 nt, Human
accugcaaaaaau

SEQ ID NO: 3490048 - RNA, 15 nt, Human
accugcaaaaaauac

SEQ ID NO: 3490049 - RNA, 22 nt, Human
accugcaaacgcuucaguuguu

SEQ ID NO: 3490050 - RNA, 17 nt, Human
accugcaaucccagcua

SEQ ID NO: 3490051 - RNA, 20 nt, Human
accugcacacuguccuauua

SEQ ID NO: 3490052 - RNA, 19 nt, Human
accugcaccuccccccacu

SEQ ID NO: 3490053 - RNA, 18 nt, Human
accugcacuaacagagug

SEQ ID NO: 3490054 - RNA, 14 nt, Human
accugcagccuccc

SEQ ID NO: 3490055 - RNA, 13 nt, Human
accugcagcuccc

SEQ ID NO: 3490056 - RNA, 17 nt, Human
accugcaggcugagcca

SEQ ID NO: 3490057 - RNA, 13 nt, Human
accugcagguugg

SEQ ID NO: 3490058 - RNA, 22 nt, Human
accugcagguugggccauacug

SEQ ID NO: 3490059 - RNA, 18 nt, Human
accugcaucuaagcccau

SEQ ID NO: 3490060 - RNA, 17 nt, Human
accugcaucuuuagugc

SEQ ID NO: 3490061 - RNA, 18 nt, Human
accugccacuaggcuggg

SEQ ID NO: 3490062 - RNA, 21 nt, Human
accugccacuaggcugggugc

SEQ ID NO: 3490063 - RNA, 14 nt, Human
accugccacucaca

SEQ ID NO: 3490064 - RNA, 20 nt, Human
accugccacucacacagcca

SEQ ID NO: 3490065 - RNA, 21 nt, Human
accugccagccuggcuucugg

SEQ ID NO: 3490066 - RNA, 17 nt, Human
accugccaggaagccag

SEQ ID NO: 3490067 - RNA, 21 nt, Human
accugccaggaagccagcagg

SEQ ID NO: 3490068 - RNA, 22 nt, Human
accugccaggaagccagcaggc

SEQ ID NO: 3490069 - RNA, 13 nt, Human
accugccaggcag

SEQ ID NO: 3490070 - RNA, 19 nt, Human
accugccaugccaggaacc

SEQ ID NO: 3490071 - RNA, 19 nt, Human
accugccauuugcacccuc

SEQ ID NO: 3490072 - RNA, 13 nt, Human
accugcccaaccu

SEQ ID NO: 3490073 - RNA, 19 nt, Human
accugccccacuuguccuu

SEQ ID NO: 3490074 - RNA, 16 nt, Human
accugcccccuucucc

SEQ ID NO: 3490075 - RNA, 23 nt, Human
accugcccccuucucccacacug

SEQ ID NO: 3490076 - RNA, 23 nt, Human
accugccccgcccagcugcaccu

SEQ ID NO: 3490077 - RNA, 12 nt, Human
accugccccuca

SEQ ID NO: 3490078 - RNA, 22 nt, Human
accugccccucaacucuccucc

SEQ ID NO: 3490079 - RNA, 23 nt, Human
accugccccucaacucuccucca

SEQ ID NO: 3490080 - RNA, 17 nt, Human
accugcccuaaacccug

SEQ ID NO: 3490081 - RNA, 17 nt, Human
accugcccucaagggug

SEQ ID NO: 3490082 - RNA, 12 nt, Human
accugcccugcc

SEQ ID NO: 3490083 - RNA, 16 nt, Human
accugcccugcccugc

SEQ ID NO: 3490084 - RNA, 18 nt, Human
accugcccugcccugcca

SEQ ID NO: 3490085 - RNA, 13 nt, Human
accugcccugccu

SEQ ID NO: 3490086 - RNA, 16 nt, Human
accugcccugccugag

SEQ ID NO: 3490087 - RNA, 19 nt, Human
accugcccugccugagggc

SEQ ID NO: 3490088 - RNA, 20 nt, Human
accugcccugcugaguccca

SEQ ID NO: 3490089 - RNA, 14 nt, Human
accugcccuggaac

SEQ ID NO: 3490090 - RNA, 23 nt, Human
accugcccuuuuuucugccuccu

SEQ ID NO: 3490091 - RNA, 23 nt, Human
accugccgagaguccaucagccu

SEQ ID NO: 3490092 - RNA, 13 nt, Human
accugccuccucg

SEQ ID NO: 3490093 - RNA, 20 nt, Human
accugccuccucguuccuuu

SEQ ID NO: 3490094 - RNA, 17 nt, Human
accugccucggccuccc

SEQ ID NO: 3490095 - RNA, 21 nt, Human
accugccucggccucccaaag

SEQ ID NO: 3490096 - RNA, 15 nt, Human
accugccucucacac

SEQ ID NO: 3490097 - RNA, 22 nt, Human
accugccucucacacacauaga

SEQ ID NO: 3490098 - RNA, 13 nt, Human
accugccugcguc

SEQ ID NO: 3490099 - RNA, 14 nt, Human
accugccuggccgg

SEQ ID NO: 3490100 - RNA, 18 nt, Human
accugccuggccggccag

SEQ ID NO: 3490101 - RNA, 20 nt, Human
accugccuggccggccagcc

SEQ ID NO: 3490102 - RNA, 21 nt, Human
accugccuggccggccagcca

SEQ ID NO: 3490103 - RNA, 14 nt, Human
accugccuguagcc

SEQ ID NO: 3490104 - RNA, 23 nt, Human
accugccuguugggccaggagcc

SEQ ID NO: 3490105 - RNA, 18 nt, Human
accugcggugcuaucucc

SEQ ID NO: 3490106 - RNA, 23 nt, Human
accugcggugcuaucucccccag

SEQ ID NO: 3490107 - RNA, 18 nt, Human
accugcuaggccagagcc

SEQ ID NO: 3490108 - RNA, 15 nt, Human
accugcuaucagcag

SEQ ID NO: 3490109 - RNA, 16 nt, Human
accugcuccgcugcuc

SEQ ID NO: 3490110 - RNA, 17 nt, Human
accugcuccgcugcucc

SEQ ID NO: 3490111 - RNA, 12 nt, Human
accugcucuccu

SEQ ID NO: 3490112 - RNA, 19 nt, Human
accugcucuccucuugcca

SEQ ID NO: 3490113 - RNA, 18 nt, Human
accuguuaccuacuuuga

SEQ ID NO: 3490114 - RNA, 19 nt, Human
accuguucagugucccggg

SEQ ID NO: 3490115 - RNA, 22 nt, Human
accuguucagugucccgggccc

SEQ ID NO: 3490116 - RNA, 22 nt, Human
accuguugagcaucacagaaug

SEQ ID NO: 3490117 - RNA, 18 nt, Human
accuguugcuguguuuaa

SEQ ID NO: 3490118 - RNA, 19 nt, Human
accuguugcuguguuuaau

SEQ ID NO: 3490119 - RNA, 22 nt, Human
accuguugcuguguuuaauuug

SEQ ID NO: 3490120 - RNA, 16 nt, Human
accuguugcuuacaau

SEQ ID NO: 3490121 - RNA, 16 nt, Human
accuguuuaaauugcu

SEQ ID NO: 3490122 - RNA, 21 nt, Human
accuguuuaugagaugcuggu

SEQ ID NO: 3490123 - RNA, 13 nt, Human
accuuaaaauuug

SEQ ID NO: 3490124 - RNA, 14 nt, Human
accuuaaaauuuga

SEQ ID NO: 3490125 - RNA, 13 nt, Human
accuuaaauuaaa

SEQ ID NO: 3490126 - RNA, 14 nt, Human
accuuaaauuaaac

SEQ ID NO: 3490127 - RNA, 16 nt, Human
accuuaaauuaaacaa

SEQ ID NO: 3490128 - RNA, 19 nt, Human
accuuaaauuaaacaauuu

SEQ ID NO: 3490129 - RNA, 21 nt, Human
accuuaaauuaaacaauuuau

SEQ ID NO: 3490130 - RNA, 20 nt, Human
accuuaaauuaguacagcac

SEQ ID NO: 3490131 - RNA, 12 nt, Human
accuuaagaccu

SEQ ID NO: 3490132 - RNA, 19 nt, Human
accuuaaguaaucaucuaa

SEQ ID NO: 3490133 - RNA, 15 nt, Human
accuuaauauuucuu

SEQ ID NO: 3490134 - RNA, 14 nt, Human
accuuaauuuauua

SEQ ID NO: 3490135 - RNA, 21 nt, Human
accuuacgaucaggcacaggu

SEQ ID NO: 3490136 - RNA, 13 nt, Human
accuuacuaauua

SEQ ID NO: 3490137 - RNA, 15 nt, Human
accuuacuguggagg

SEQ ID NO: 3490138 - RNA, 16 nt, Human
accuuacuuacagcau

SEQ ID NO: 3490139 - RNA, 18 nt, Human
accuuagacagucccugc

SEQ ID NO: 3490140 - RNA, 18 nt, Human
accuuagaccaccaagcc

SEQ ID NO: 3490141 - RNA, 22 nt, Human
accuuagauguucuaagucuuu

SEQ ID NO: 3490142 - RNA, 14 nt, Human
accuuagccugccc

SEQ ID NO: 3490143 - RNA, 19 nt, Human
accuuagcucccucccgca

SEQ ID NO: 3490144 - RNA, 21 nt, Human
accuuagcuggcauuacagcu

SEQ ID NO: 3490145 - RNA, 15 nt, Human
accuuaggcagggaa

SEQ ID NO: 3490146 - RNA, 13 nt, Human
accuuaggccuuc

SEQ ID NO: 3490147 - RNA, 14 nt, Human
accuuaggccuucc

SEQ ID NO: 3490148 - RNA, 20 nt, Human
accuuaggccuuccucucuc

SEQ ID NO: 3490149 - RNA, 12 nt, Human
accuuauaguua

SEQ ID NO: 3490150 - RNA, 23 nt, Human
accuuaucacugcauuauucucu

SEQ ID NO: 3490151 - RNA, 15 nt, Human
accuuauccugcauu

SEQ ID NO: 3490152 - RNA, 22 nt, Human
accuuaucugugcgugaaacac

SEQ ID NO: 3490153 - RNA, 17 nt, Human
accuuauuguaccucuc

SEQ ID NO: 3490154 - RNA, 18 nt, Human
accuuauuguaccucucu

SEQ ID NO: 3490155 - RNA, 20 nt, Human
accuuauuguaccucucuua

SEQ ID NO: 3490156 - RNA, 22 nt, Human
accuuauuguaccucucuuaua

SEQ ID NO: 3490157 - RNA, 17 nt, Human
accuuauuuaaguaacu

SEQ ID NO: 3490158 - RNA, 18 nt, Human
accuuauuuuuucccaaa

SEQ ID NO: 3490159 - RNA, 12 nt, Human
accuucaauaaa

SEQ ID NO: 3490160 - RNA, 15 nt, Human
accuucaauaaagua

SEQ ID NO: 3490161 - RNA, 23 nt, Human
accuucaauaaaguaucuacaug

SEQ ID NO: 3490162 - RNA, 16 nt, Human
accuucaauuccuggg

SEQ ID NO: 3490163 - RNA, 17 nt, Human
accuucacacacagacu

SEQ ID NO: 3490164 - RNA, 15 nt, Human
accuucagauccuac

SEQ ID NO: 3490165 - RNA, 18 nt, Human
accuucagauccuacccc

SEQ ID NO: 3490166 - RNA, 17 nt, Human
accuucagcucacgcuu

SEQ ID NO: 3490167 - RNA, 15 nt, Human
accuucauaagaucu

SEQ ID NO: 3490168 - RNA, 18 nt, Human
accuucauuucaggaggg

SEQ ID NO: 3490169 - RNA, 13 nt, Human
accuucauuuuga

SEQ ID NO: 3490170 - RNA, 20 nt, Human
acgacacggguggggaaagg

SEQ ID NO: 3490171 - RNA, 13 nt, Human
acgaccuuuaccu

SEQ ID NO: 3490172 - RNA, 14 nt, Human
acgacgcugcagag

SEQ ID NO: 3490173 - RNA, 22 nt, Human
acgacuucagggcagggcucug

SEQ ID NO: 3490174 - RNA, 21 nt, Human
acgagaaccugaaggggaagg

SEQ ID NO: 3490175 - RNA, 14 nt, Human
acgagaccccggcu

SEQ ID NO: 3490176 - RNA, 20 nt, Human
acgagacccuacaggagagg

SEQ ID NO: 3490177 - RNA, 14 nt, Human
acgagacuuuccau

SEQ ID NO: 3490178 - RNA, 20 nt, Human
acgagaugggaaggcacagg

SEQ ID NO: 3490179 - RNA, 12 nt, Human
acgaggaagccc

SEQ ID NO: 3490180 - RNA, 22 nt, Human
acgaggaaucugugggucuggg

SEQ ID NO: 3490181 - RNA, 18 nt, Human
acgaggcccucgggccca

SEQ ID NO: 3490182 - RNA, 19 nt, Human
acgagggauguggagcaca

SEQ ID NO: 3490183 - RNA, 20 nt, Human
acgagggcuggcuggccuca

SEQ ID NO: 3490184 - RNA, 18 nt, Human
acgaggggugucuugggc

SEQ ID NO: 3490185 - RNA, 16 nt, Human
acgaguaauuuauugu

SEQ ID NO: 3490186 - RNA, 16 nt, Human
acgagucaccuuccag

SEQ ID NO: 3490187 - RNA, 17 nt, Human
acgagugggaaggacuu

SEQ ID NO: 3490188 - RNA, 14 nt, Human
acgauaaggaagaa

SEQ ID NO: 3490189 - RNA, 17 nt, Human
acgauaaggaagaaaca

SEQ ID NO: 3490190 - RNA, 14 nt, Human
acgaucaggcacag

SEQ ID NO: 3490191 - RNA, 19 nt, Human
acgauccugccacccugua

SEQ ID NO: 3490192 - RNA, 20 nt, Human
acgauucauuuuugaaacug

SEQ ID NO: 3490193 - RNA, 13 nt, Human
acgauuccuucuc

SEQ ID NO: 3490194 - RNA, 19 nt, Human
acgauuuaauucucuugaa

SEQ ID NO: 3490195 - RNA, 14 nt, Human
acgauuuaauuuau

SEQ ID NO: 3490196 - RNA, 17 nt, Human
acgauuucuguuuagau

SEQ ID NO: 3490197 - RNA, 18 nt, Human
acgauuuuuaaaauguac

SEQ ID NO: 3490198 - RNA, 17 nt, Human
acgcaaagggcugaaag

SEQ ID NO: 3490199 - RNA, 21 nt, Human
acgcaaagggcugaaagccau

SEQ ID NO: 3490200 - RNA, 12 nt, Human
acgcacacacac

SEQ ID NO: 3490201 - RNA, 14 nt, Human
acgcacacacacaa

SEQ ID NO: 3490202 - RNA, 14 nt, Human
acgcacacugucug

SEQ ID NO: 3490203 - RNA, 14 nt, Human
acgcacagacaggu

SEQ ID NO: 3490204 - RNA, 15 nt, Human
acgcacaugcgaccc

SEQ ID NO: 3490205 - RNA, 14 nt, Human
acgcaccacaucuc

SEQ ID NO: 3490206 - RNA, 13 nt, Human
acgcaccucccau

SEQ ID NO: 3490207 - RNA, 15 nt, Human
acgcaccugccucag

SEQ ID NO: 3490208 - RNA, 13 nt, Human
acgcacgcacaca

SEQ ID NO: 3490209 - RNA, 16 nt, Human
acgcacgcacacacac

SEQ ID NO: 3490210 - RNA, 20 nt, Human
acgcacgugggucuucaggg

SEQ ID NO: 3490211 - RNA, 16 nt, Human
acgcacuccaugagca

SEQ ID NO: 3490212 - RNA, 17 nt, Human
acgcacuccaugagcac

SEQ ID NO: 3490213 - RNA, 19 nt, Human
acgcagaugauccaugagu

SEQ ID NO: 3490214 - RNA, 14 nt, Human
acgcagcaggaggc

SEQ ID NO: 3490215 - RNA, 15 nt, Human
acgcagccaggacac

SEQ ID NO: 3490216 - RNA, 23 nt, Human
acgcagcccugcuuugggcugcc

SEQ ID NO: 3490217 - RNA, 14 nt, Human
acgcaguggccuuc

SEQ ID NO: 3490218 - RNA, 18 nt, Human
acgcauggucaacccuca

SEQ ID NO: 3490219 - RNA, 19 nt, Human
acgcauggucaacccucag

SEQ ID NO: 3490220 - RNA, 12 nt, Human
acgccacagccc

SEQ ID NO: 3490221 - RNA, 14 nt, Human
acgccacagcccag

SEQ ID NO: 3490222 - RNA, 20 nt, Human
acgccacagcccagccacgg

SEQ ID NO: 3490223 - RNA, 17 nt, Human
acgccacagcccuuuug

SEQ ID NO: 3490224 - RNA, 13 nt, Human
acgccaccucgcc

SEQ ID NO: 3490225 - RNA, 15 nt, Human
acgccacucauuuca

SEQ ID NO: 3490226 - RNA, 16 nt, Human
acgccacucauuucau

SEQ ID NO: 3490227 - RNA, 17 nt, Human
acgccacucauuucauc

SEQ ID NO: 3490228 - RNA, 20 nt, Human
acgccacugcacuccagccu

SEQ ID NO: 3490229 - RNA, 22 nt, Human
acgccagauucuuuccugaggc

SEQ ID NO: 3490230 - RNA, 23 nt, Human
acgccagauucuuuccugaggcu

SEQ ID NO: 3490231 - RNA, 11 nt, Human
acgccagggac

SEQ ID NO: 3490232 - RNA, 23 nt, Human
acgccaggggaaaaucagccugc

SEQ ID NO: 3490233 - RNA, 20 nt, Human
acgcccacccaaccccaagc

SEQ ID NO: 3490234 - RNA, 21 nt, Human
acgccccagauaccagccccu

SEQ ID NO: 3490235 - RNA, 14 nt, Human
acgcccccacuggu

SEQ ID NO: 3490236 - RNA, 23 nt, Human
acgcccccccccaccccuggggg

SEQ ID NO: 3490237 - RNA, 13 nt, Human
acgcccuccccuc

SEQ ID NO: 3490238 - RNA, 18 nt, Human
acgcccuccccuccccug

SEQ ID NO: 3490239 - RNA, 15 nt, Human
acgcccucuccccac

SEQ ID NO: 3490240 - RNA, 18 nt, Human
acgcccucuccccacccc

SEQ ID NO: 3490241 - RNA, 23 nt, Human
acgcccucuccccaccccuaccc

SEQ ID NO: 3490242 - RNA, 17 nt, Human
acgcccuuuccuccuca

SEQ ID NO: 3490243 - RNA, 20 nt, Human
acgccggggacagaggccug

SEQ ID NO: 3490244 - RNA, 18 nt, Human
acgccgucuccauggcau

SEQ ID NO: 3490245 - RNA, 23 nt, Human
acgccucucccuaggagaagagu

SEQ ID NO: 3490246 - RNA, 15 nt, Human
acgccucuugaccag

SEQ ID NO: 3490247 - RNA, 16 nt, Human
acgccucuugaccagg

SEQ ID NO: 3490248 - RNA, 11 nt, Human
acgccugagcc

SEQ ID NO: 3490249 - RNA, 13 nt, Human
acgccugagccca

SEQ ID NO: 3490250 - RNA, 19 nt, Human
acgccugagcccagggagg

SEQ ID NO: 3490251 - RNA, 21 nt, Human
acgccugaggaacccuuacag

SEQ ID NO: 3490252 - RNA, 14 nt, Human
acgccugcaaacgc

SEQ ID NO: 3490253 - RNA, 17 nt, Human
acgccugcaaacgcugc

SEQ ID NO: 3490254 - RNA, 19 nt, Human
acgccugcccuccccagag

SEQ ID NO: 3490255 - RNA, 22 nt, Human
acgccugcccuccccagagcac

SEQ ID NO: 3490256 - RNA, 21 nt, Human
acgccugcuugucccugccca

SEQ ID NO: 3490257 - RNA, 17 nt, Human
acgccuguaaucccagc

SEQ ID NO: 3490258 - RNA, 15 nt, Human
acgguuuccagggag

SEQ ID NO: 3490259 - RNA, 21 nt, Human
acgguuuuuuauuauuguggu

SEQ ID NO: 3490260 - RNA, 22 nt, Human
acguaaaucuguucaaggaauc

SEQ ID NO: 3490261 - RNA, 18 nt, Human
acguaaccacggaaaaga

SEQ ID NO: 3490262 - RNA, 18 nt, Human
acguaaugaaacuuggau

SEQ ID NO: 3490263 - RNA, 16 nt, Human
acguacaaguaguucu

SEQ ID NO: 3490264 - RNA, 19 nt, Human
acguacaaguaguucugua

SEQ ID NO: 3490265 - RNA, 16 nt, Human
acguacuuagcagcua

SEQ ID NO: 3490266 - RNA, 18 nt, Human
acguacuuagcagcuauc

SEQ ID NO: 3490267 - RNA, 16 nt, Human
acguagcugcaaagga

SEQ ID NO: 3490268 - RNA, 17 nt, Human
acguaugucugguucuc

SEQ ID NO: 3490269 - RNA, 13 nt, Human
acguauuauuguc

SEQ ID NO: 3490270 - RNA, 15 nt, Human
acguauuuaauagca

SEQ ID NO: 3490271 - RNA, 16 nt, Human
acguauuuaauagcaa

SEQ ID NO: 3490272 - RNA, 16 nt, Human
acgucaaacaugaagu

SEQ ID NO: 3490273 - RNA, 17 nt, Human
acgucaaacaugaagug

SEQ ID NO: 3490274 - RNA, 17 nt, Human
acgucagauguuuaaaa

SEQ ID NO: 3490275 - RNA, 12 nt, Human
acgucauguauu

SEQ ID NO: 3490276 - RNA, 21 nt, Human
acguccagguucaacccacag

SEQ ID NO: 3490277 - RNA, 19 nt, Human
acgucgucuucuguauacu

SEQ ID NO: 3490278 - RNA, 19 nt, Human
acgucuagcuaugcuguau

SEQ ID NO: 3490279 - RNA, 22 nt, Human
acgucuauuucaucagaacagc

SEQ ID NO: 3490280 - RNA, 16 nt, Human
acgucucgccaagcag

SEQ ID NO: 3490281 - RNA, 20 nt, Human
acgucugaagcuugacuccc

SEQ ID NO: 3490282 - RNA, 15 nt, Human
acgucugacaggcaa

SEQ ID NO: 3490283 - RNA, 23 nt, Human
acgucugggagaaauugacagau

SEQ ID NO: 3490284 - RNA, 17 nt, Human
acgucuggguggcccuu

SEQ ID NO: 3490285 - RNA, 13 nt, Human
acgucugucuuca

SEQ ID NO: 3490286 - RNA, 13 nt, Human
acgucuuaaauau

SEQ ID NO: 3490287 - RNA, 23 nt, Human
acgucuuccuucugccugagcuu

SEQ ID NO: 3490288 - RNA, 13 nt, Human
acgugacacaaac

SEQ ID NO: 3490289 - RNA, 16 nt, Human
acgugacagugccugg

SEQ ID NO: 3490290 - RNA, 20 nt, Human
acgugacugccccaacuccu

SEQ ID NO: 3490291 - RNA, 15 nt, Human
acgugagccagguaa

SEQ ID NO: 3490292 - RNA, 22 nt, Human
acgugauuagugaaaggaagau

SEQ ID NO: 3490293 - RNA, 19 nt, Human
acgugcaacugacacuccc

SEQ ID NO: 3490294 - RNA, 20 nt, Human
acgugcaauuuguuugugcu

SEQ ID NO: 3490295 - RNA, 21 nt, Human
acgugcaauuuguuugugcuu

SEQ ID NO: 3490296 - RNA, 19 nt, Human
acgugcacaaauucaugug

SEQ ID NO: 3490297 - RNA, 21 nt, Human
acgugcaccuguacucaggag

SEQ ID NO: 3490298 - RNA, 14 nt, Human
acgugcauugugcu

SEQ ID NO: 3490299 - RNA, 16 nt, Human
acgugcauugugcuuc

SEQ ID NO: 3490300 - RNA, 13 nt, Human
acgugccaggccc

SEQ ID NO: 3490301 - RNA, 19 nt, Human
acgugccaggcccggggcu

SEQ ID NO: 3490302 - RNA, 19 nt, Human
acgugccuuuugcaccccu

SEQ ID NO: 3490303 - RNA, 20 nt, Human
acgugccuuuugcaccccuc

SEQ ID NO: 3490304 - RNA, 23 nt, Human
acgugcgcugggcacuucccugc

SEQ ID NO: 3490305 - RNA, 19 nt, Human
acgugcucuuuguuuugug

SEQ ID NO: 3490306 - RNA, 23 nt, Human
acgugcucuuuguuuugugucuc

SEQ ID NO: 3490307 - RNA, 16 nt, Human
acguggaaccucuguc

SEQ ID NO: 3490308 - RNA, 17 nt, Human
acguggaaccucugucu

SEQ ID NO: 3490309 - RNA, 22 nt, Human
acguggagaaucacaggcuggg

SEQ ID NO: 3490310 - RNA, 15 nt, Human
acguggagagcuggu

SEQ ID NO: 3490311 - RNA, 12 nt, Human
acguggagaggg

SEQ ID NO: 3490312 - RNA, 13 nt, Human
acguggagaggga

SEQ ID NO: 3490313 - RNA, 15 nt, Human
acguggcauguggcc

SEQ ID NO: 3490314 - RNA, 14 nt, Human
acguggcucagcca

SEQ ID NO: 3490315 - RNA, 11 nt, Human
acguggcugcu

SEQ ID NO: 3490316 - RNA, 21 nt, Human
acgugggaguucagcugcuuc

SEQ ID NO: 3490317 - RNA, 11 nt, Human
acguguauguu

SEQ ID NO: 3490318 - RNA, 23 nt, Human
acguguauguuuuucaguucaaa

SEQ ID NO: 3490319 - RNA, 15 nt, Human
acgugugcauguguc

SEQ ID NO: 3490320 - RNA, 22 nt, Human
acguguguuucuagagccugcu

SEQ ID NO: 3490321 - RNA, 23 nt, Human
acguguguuuuucuauuaaaaga

SEQ ID NO: 3490322 - RNA, 19 nt, Human
acguuacucagggcuccuc

SEQ ID NO: 3490323 - RNA, 20 nt, Human
acguuagaggaaaaauauuu

SEQ ID NO: 3490324 - RNA, 16 nt, Human
acguuaugguguuucu

SEQ ID NO: 3490325 - RNA, 17 nt, Human
acguuaugguguuucuc

SEQ ID NO: 3490326 - RNA, 18 nt, Human
acguucacccaucuuauc

SEQ ID NO: 3490327 - RNA, 16 nt, Human
acguucaccccuccac

SEQ ID NO: 3490328 - RNA, 13 nt, Human
acguuccacaguu

SEQ ID NO: 3490329 - RNA, 14 nt, Human
acguuccagccggc

SEQ ID NO: 3490330 - RNA, 17 nt, Human
accuucauuuugagggg

SEQ ID NO: 3490331 - RNA, 14 nt, Human
accuuccagcuccu

SEQ ID NO: 3490332 - RNA, 17 nt, Human
accuuccagcuccugua

SEQ ID NO: 3490333 - RNA, 20 nt, Human
accuuccaugucaagauuca

SEQ ID NO: 3490334 - RNA, 17 nt, Human
accuucccccuccccca

SEQ ID NO: 3490335 - RNA, 13 nt, Human
accuuccugucuu

SEQ ID NO: 3490336 - RNA, 22 nt, Human
accuuccuucccugggcugugc

SEQ ID NO: 3490337 - RNA, 16 nt, Human
accuuccuuccugcuu

SEQ ID NO: 3490338 - RNA, 13 nt, Human
accuuccuuuuac

SEQ ID NO: 3490339 - RNA, 20 nt, Human
accuuccuuuuacuuuucuu

SEQ ID NO: 3490340 - RNA, 21 nt, Human
accuucguuuacuaugccugu

SEQ ID NO: 3490341 - RNA, 16 nt, Human
accuucuagaauuaua

SEQ ID NO: 3490342 - RNA, 17 nt, Human
accuucuagaauuauaa

SEQ ID NO: 3490343 - RNA, 22 nt, Human
accuucuaggacgccacccagc

SEQ ID NO: 3490344 - RNA, 18 nt, Human
accuucuauagcaucacu

SEQ ID NO: 3490345 - RNA, 14 nt, Human
accuucuccccagc

SEQ ID NO: 3490346 - RNA, 19 nt, Human
accuucuccccagcuccca

SEQ ID NO: 3490347 - RNA, 21 nt, Human
accuucuccccagcucccagg

SEQ ID NO: 3490348 - RNA, 23 nt, Human
accuucucccucauuucaggagc

SEQ ID NO: 3490349 - RNA, 12 nt, Human
accuucuccuuc

SEQ ID NO: 3490350 - RNA, 13 nt, Human
accuucuccuuca

SEQ ID NO: 3490351 - RNA, 18 nt, Human
accuucuggccucccaca

SEQ ID NO: 3490352 - RNA, 13 nt, Human
accuucuguaguu

SEQ ID NO: 3490353 - RNA, 12 nt, Human
accuucuguggc

SEQ ID NO: 3490354 - RNA, 19 nt, Human
accuucuuauuauauauau

SEQ ID NO: 3490355 - RNA, 18 nt, Human
accuucuuauuuaaucuu

SEQ ID NO: 3490356 - RNA, 20 nt, Human
accuucuucagccaccucuc

SEQ ID NO: 3490357 - RNA, 17 nt, Human
accuucuuucacucugu

SEQ ID NO: 3490358 - RNA, 23 nt, Human
accuugaaaaaaaacaguggauc

SEQ ID NO: 3490359 - RNA, 20 nt, Human
accuugaaaauaagaauaga

SEQ ID NO: 3490360 - RNA, 20 nt, Human
accuugaacuggguacuugu

SEQ ID NO: 3490361 - RNA, 16 nt, Human
accuugaaugcugcca

SEQ ID NO: 3490362 - RNA, 14 nt, Human
accuugacagggca

SEQ ID NO: 3490363 - RNA, 16 nt, Human
accuugacuguugaug

SEQ ID NO: 3490364 - RNA, 15 nt, Human
accuugcaacacaca

SEQ ID NO: 3490365 - RNA, 17 nt, Human
accuugcaacacacaga

SEQ ID NO: 3490366 - RNA, 14 nt, Human
accuugcacacauc

SEQ ID NO: 3490367 - RNA, 16 nt, Human
accuugcacacaucau

SEQ ID NO: 3490368 - RNA, 21 nt, Human
accuugcauuuuagcuaauuu

SEQ ID NO: 3490369 - RNA, 14 nt, Human
accuugccccaacc

SEQ ID NO: 3490370 - RNA, 21 nt, Human
accuugccccaacccuucuuc

SEQ ID NO: 3490371 - RNA, 21 nt, Human
accuugccugaacauccuucc

SEQ ID NO: 3490372 - RNA, 23 nt, Human
accuugccugaacauccuuccuu

SEQ ID NO: 3490373 - RNA, 13 nt, Human
accuugcuaauuu

SEQ ID NO: 3490374 - RNA, 19 nt, Human
accuugcuguccugaucug

SEQ ID NO: 3490375 - RNA, 19 nt, Human
accuugcuuugauggaaua

SEQ ID NO: 3490376 - RNA, 17 nt, Human
accuugcuuuugcuucu

SEQ ID NO: 3490377 - RNA, 17 nt, Human
accuuggagagacacag

SEQ ID NO: 3490378 - RNA, 17 nt, Human
accuuggcaccagacac

SEQ ID NO: 3490379 - RNA, 14 nt, Human
accuuggccugggc

SEQ ID NO: 3490380 - RNA, 14 nt, Human
accuuggcucaagu

SEQ ID NO: 3490381 - RNA, 17 nt, Human
accuuggcugcagggag

SEQ ID NO: 3490382 - RNA, 15 nt, Human
accuugguuccuggg

SEQ ID NO: 3490383 - RNA, 15 nt, Human
accuugguuggaagg

SEQ ID NO: 3490384 - RNA, 17 nt, Human
accuuguaauguaacug

SEQ ID NO: 3490385 - RNA, 22 nt, Human
accuuguaauguaacugcucuu

SEQ ID NO: 3490386 - RNA, 14 nt, Human
accuugugccuggg

SEQ ID NO: 3490387 - RNA, 18 nt, Human
accuugugucuguacacg

SEQ ID NO: 3490388 - RNA, 18 nt, Human
accuuguguguaugugua

SEQ ID NO: 3490389 - RNA, 17 nt, Human
accuuguuacuucugag

SEQ ID NO: 3490390 - RNA, 22 nt, Human
accuuguuauuucucagacuuu

SEQ ID NO: 3490391 - RNA, 15 nt, Human
accuuguuggagccu

SEQ ID NO: 3490392 - RNA, 17 nt, Human
accuuguuggagccugc

SEQ ID NO: 3490393 - RNA, 20 nt, Human
accuuguuuauuaaauugca

SEQ ID NO: 3490394 - RNA, 16 nt, Human
accuuuaaucuguuuu

SEQ ID NO: 3490395 - RNA, 14 nt, Human
accuuuagggcagc

SEQ ID NO: 3490396 - RNA, 21 nt, Human
accuuuagggcagcuugcccc

SEQ ID NO: 3490397 - RNA, 14 nt, Human
accuuuagguucuu

SEQ ID NO: 3490398 - RNA, 20 nt, Human
accuuuagugguggccauuu

SEQ ID NO: 3490399 - RNA, 16 nt, Human
accuuuauuaaaaucu

SEQ ID NO: 3490400 - RNA, 16 nt, Human
accuuucaauaggaaa

SEQ ID NO: 3490401 - RNA, 17 nt, Human
accuuucaauaggaaaa

SEQ ID NO: 3490402 - RNA, 21 nt, Human
accuuucaauaggaaaaacug

SEQ ID NO: 3490403 - RNA, 21 nt, Human
acucagcccugggccccacca

SEQ ID NO: 3490404 - RNA, 23 nt, Human
acucagccggcguggcaaauaua

SEQ ID NO: 3490405 - RNA, 22 nt, Human
acucagccucaauaagccuugu

SEQ ID NO: 3490406 - RNA, 12 nt, Human
acucagccugcu

SEQ ID NO: 3490407 - RNA, 22 nt, Human
acucagccugcugcccaggcug

SEQ ID NO: 3490408 - RNA, 14 nt, Human
acucagcuccguga

SEQ ID NO: 3490409 - RNA, 17 nt, Human
acucaggacuccagccc

SEQ ID NO: 3490410 - RNA, 19 nt, Human
acucaggaggcugaggcag

SEQ ID NO: 3490411 - RNA, 16 nt, Human
acucaggaugcccagg

SEQ ID NO: 3490412 - RNA, 17 nt, Human
acucagggacagagcca

SEQ ID NO: 3490413 - RNA, 18 nt, Human
acucagggacagagccau

SEQ ID NO: 3490414 - RNA, 20 nt, Human
acucagggaggcuaaaucag

SEQ ID NO: 3490415 - RNA, 18 nt, Human
acucagggccaugccugc

SEQ ID NO: 3490416 - RNA, 18 nt, Human
acucagggccccagcacu

SEQ ID NO: 3490417 - RNA, 14 nt, Human
acucagggcuccuc

SEQ ID NO: 3490418 - RNA, 16 nt, Human
acucagggcuccuggg

SEQ ID NO: 3490419 - RNA, 13 nt, Human
acucaggugggcc

SEQ ID NO: 3490420 - RNA, 20 nt, Human
acucagguuguaguaaagaa

SEQ ID NO: 3490421 - RNA, 23 nt, Human
acucagguuguaguaaagaaauu

SEQ ID NO: 3490422 - RNA, 14 nt, Human
acucaguggggagg

SEQ ID NO: 3490423 - RNA, 13 nt, Human
acucaguuuucuu

SEQ ID NO: 3490424 - RNA, 21 nt, Human
acucauaaaaagccugcaauu

SEQ ID NO: 3490425 - RNA, 17 nt, Human
acucauaccuuuaaagg

SEQ ID NO: 3490426 - RNA, 20 nt, Human
acucauacugugcuggagcc

SEQ ID NO: 3490427 - RNA, 21 nt, Human
acucauacugugcuggagcca

SEQ ID NO: 3490428 - RNA, 23 nt, Human
acucauacugugcuggagccacu

SEQ ID NO: 3490429 - RNA, 22 nt, Human
acucauauccccuauuuaacag

SEQ ID NO: 3490430 - RNA, 15 nt, Human
acucauauuacuggu

SEQ ID NO: 3490431 - RNA, 20 nt, Human
acucaucaauggggccaguc

SEQ ID NO: 3490432 - RNA, 16 nt, Human
acucaucacuguggcu

SEQ ID NO: 3490433 - RNA, 9 nt, Human
acucaucau

SEQ ID NO: 3490434 - RNA, 15 nt, Human
acucaucauaaaaua

SEQ ID NO: 3490435 - RNA, 17 nt, Human
acucaucauaaaauaaa

SEQ ID NO: 3490436 - RNA, 19 nt, Human
acucaucccuaaugcugca

SEQ ID NO: 3490437 - RNA, 17 nt, Human
acucauccugaacagca

SEQ ID NO: 3490438 - RNA, 18 nt, Human
acucauccugaacagcau

SEQ ID NO: 3490439 - RNA, 16 nt, Human
acucaucuagguaaau

SEQ ID NO: 3490440 - RNA, 15 nt, Human
acucaucugaaaugu

SEQ ID NO: 3490441 - RNA, 12 nt, Human
acucaucuuaua

SEQ ID NO: 3490442 - RNA, 13 nt, Human
acucaucuuuccc

SEQ ID NO: 3490443 - RNA, 17 nt, Human
acucaucuuucccuccu

SEQ ID NO: 3490444 - RNA, 21 nt, Human
acucaucuuucccuccuuggu

SEQ ID NO: 3490445 - RNA, 14 nt, Human
acucaugaggaggg

SEQ ID NO: 3490446 - RNA, 15 nt, Human
acucaugaucuugug

SEQ ID NO: 3490447 - RNA, 17 nt, Human
acucaugcaugcaaauu

SEQ ID NO: 3490448 - RNA, 17 nt, Human
acucaugcauuguccuc

SEQ ID NO: 3490449 - RNA, 13 nt, Human
acucaugcugaaa

SEQ ID NO: 3490450 - RNA, 16 nt, Human
acucaugcugaaagcc

SEQ ID NO: 3490451 - RNA, 16 nt, Human
acucaugugacucuuu

SEQ ID NO: 3490452 - RNA, 12 nt, Human
acucauguguau

SEQ ID NO: 3490453 - RNA, 21 nt, Human
acucauguguaugggcaaaaa

SEQ ID NO: 3490454 - RNA, 17 nt, Human
acucauuagaauuacca

SEQ ID NO: 3490455 - RNA, 21 nt, Human
acucauucaaaaguugaaauu

SEQ ID NO: 3490456 - RNA, 15 nt, Human
acucauucugaagga

SEQ ID NO: 3490457 - RNA, 19 nt, Human
acucauucugaauuaauua

SEQ ID NO: 3490458 - RNA, 18 nt, Human
acucauugaccugaggcc

SEQ ID NO: 3490459 - RNA, 20 nt, Human
acucauugcaucauuuacaa

SEQ ID NO: 3490460 - RNA, 15 nt, Human
acucauugcugagcc

SEQ ID NO: 3490461 - RNA, 20 nt, Human
acucauugcugagccucugc

SEQ ID NO: 3490462 - RNA, 23 nt, Human
acucauugcugagccucugcucc

SEQ ID NO: 3490463 - RNA, 19 nt, Human
acucauugcuucacaaccc

SEQ ID NO: 3490464 - RNA, 23 nt, Human
acucauugcuucacaacccaucu

SEQ ID NO: 3490465 - RNA, 21 nt, Human
acucauuuauaaagcuaaaau

SEQ ID NO: 3490466 - RNA, 14 nt, Human
acucauuucaucuc

SEQ ID NO: 3490467 - RNA, 16 nt, Human
acucauuuccuaugua

SEQ ID NO: 3490468 - RNA, 18 nt, Human
acucauuucuaaaagaau

SEQ ID NO: 3490469 - RNA, 19 nt, Human
acucauuucuaaaagaaua

SEQ ID NO: 3490470 - RNA, 15 nt, Human
acucauuuucuauaa

SEQ ID NO: 3490471 - RNA, 14 nt, Human
acucauuuugcuug

SEQ ID NO: 3490472 - RNA, 19 nt, Human
acucauuuuucaugauaau

SEQ ID NO: 3490473 - RNA, 20 nt, Human
acucauuuuucaugauaaug

SEQ ID NO: 3490474 - RNA, 15 nt, Human
acucauuuuugccau

SEQ ID NO: 3490475 - RNA, 19 nt, Human
acucauuuuugccauacau

SEQ ID NO: 3490476 - RNA, 21 nt, Human
acucauuuuugccauacauca

SEQ ID NO: 3490477 - RNA, 22 nt, Human
acuccaaaauguuggucauuuu

SEQ ID NO: 3490478 - RNA, 21 nt, Human
acuccaaagaaauguaaggga

SEQ ID NO: 3490479 - RNA, 18 nt, Human
acuccaacagaagaacug

SEQ ID NO: 3490480 - RNA, 19 nt, Human
acuccaacagaagaacugu

SEQ ID NO: 3490481 - RNA, 20 nt, Human
acuccaaccuaaccuguguc

SEQ ID NO: 3490482 - RNA, 23 nt, Human
acuccaaccuaaccugugucugc

SEQ ID NO: 3490483 - RNA, 15 nt, Human
acuccaagcccagcc

SEQ ID NO: 3490484 - RNA, 17 nt, Human
acuccaagguucccuug

SEQ ID NO: 3490485 - RNA, 21 nt, Human
acuccaauuaaggauuuuaug

SEQ ID NO: 3490486 - RNA, 17 nt, Human
acuccacacugcacaau

SEQ ID NO: 3490487 - RNA, 13 nt, Human
acuccacaucugc

SEQ ID NO: 3490488 - RNA, 16 nt, Human
acuccacaucugccuu

SEQ ID NO: 3490489 - RNA, 13 nt, Human
acuccaccaccca

SEQ ID NO: 3490490 - RNA, 15 nt, Human
acuccacccauccua

SEQ ID NO: 3490491 - RNA, 18 nt, Human
acuccagaaagugacaag

SEQ ID NO: 3490492 - RNA, 17 nt, Human
acuccagaauuucccaa

SEQ ID NO: 3490493 - RNA, 23 nt, Human
acuccagaauuucccaaagcagu

SEQ ID NO: 3490494 - RNA, 18 nt, Human
acuccagaccccuggcuu

SEQ ID NO: 3490495 - RNA, 15 nt, Human
acuccagcaacuucu

SEQ ID NO: 3490496 - RNA, 11 nt, Human
acuccagccag

SEQ ID NO: 3490497 - RNA, 13 nt, Human
acuccagccagcg

SEQ ID NO: 3490498 - RNA, 21 nt, Human
acuccagccagcgccucccuc

SEQ ID NO: 3490499 - RNA, 15 nt, Human
acuccagccugagca

SEQ ID NO: 3490500 - RNA, 15 nt, Human
acuccagccugggcg

SEQ ID NO: 3490501 - RNA, 20 nt, Human
acuccaggaaggggcuggac

SEQ ID NO: 3490502 - RNA, 20 nt, Human
acuccaggcagcagacacau

SEQ ID NO: 3490503 - RNA, 13 nt, Human
acuccaggcccaa

SEQ ID NO: 3490504 - RNA, 19 nt, Human
acuccaggcccaaggcucc

SEQ ID NO: 3490505 - RNA, 15 nt, Human
acuccaggcccuccu

SEQ ID NO: 3490506 - RNA, 20 nt, Human
acuccagggacacacagccu

SEQ ID NO: 3490507 - RNA, 24 nt, Human
acuccagggacacacagccuagca

SEQ ID NO: 3490508 - RNA, 17 nt, Human
acuccaguacuggagcu

SEQ ID NO: 3490509 - RNA, 19 nt, Human
acuccagugagacagcucu

SEQ ID NO: 3490510 - RNA, 20 nt, Human
acuccagugauguucuucaa

SEQ ID NO: 3490511 - RNA, 21 nt, Human
acuccagugccaacaauccua

SEQ ID NO: 3490512 - RNA, 19 nt, Human
acuccagugccagcaauga

SEQ ID NO: 3490513 - RNA, 22 nt, Human
acuccaguggggcaagauuuuc

SEQ ID NO: 3490514 - RNA, 16 nt, Human
acuccaguggugaaga

SEQ ID NO: 3490515 - RNA, 14 nt, Human
acuccaguguacau

SEQ ID NO: 3490516 - RNA, 18 nt, Human
acuccaguuaaaaaaaau

SEQ ID NO: 3490517 - RNA, 20 nt, Human
acuccaguuaaaaaaaauuu

SEQ ID NO: 3490518 - RNA, 14 nt, Human
acuccaucagcuua

SEQ ID NO: 3490519 - RNA, 14 nt, Human
acuccaugagaagc

SEQ ID NO: 3490520 - RNA, 17 nt, Human
acuccaugagaagccgu

SEQ ID NO: 3490521 - RNA, 17 nt, Human
acuccaugagcacccca

SEQ ID NO: 3490522 - RNA, 18 nt, Human
acuccauucccaacuaga

SEQ ID NO: 3490523 - RNA, 16 nt, Human
acucccaacccuggcu

SEQ ID NO: 3490524 - RNA, 22 nt, Human
acucccaagaacagcaggccca

SEQ ID NO: 3490525 - RNA, 19 nt, Human
acucccaagguuggagccc

SEQ ID NO: 3490526 - RNA, 19 nt, Human
acucccaagucuacagagu

SEQ ID NO: 3490527 - RNA, 14 nt, Human
acucccacuucccu

SEQ ID NO: 3490528 - RNA, 16 nt, Human
acucccacuucccuga

SEQ ID NO: 3490529 - RNA, 22 nt, Human
acucccaguccaaauguccucc

SEQ ID NO: 3490530 - RNA, 23 nt, Human
acuagagaucugguuuugcuauu

SEQ ID NO: 3490531 - RNA, 16 nt, Human
acuagagaugugcaau

SEQ ID NO: 3490532 - RNA, 16 nt, Human
acuagagcagcccugg

SEQ ID NO: 3490533 - RNA, 14 nt, Human
acuagaggcaggga

SEQ ID NO: 3490534 - RNA, 20 nt, Human
acuagagggaccucucccag

SEQ ID NO: 3490535 - RNA, 21 nt, Human
acuagagggaccucucccagg

SEQ ID NO: 3490536 - RNA, 22 nt, Human
acuagagggaccucucccaggg

SEQ ID NO: 3490537 - RNA, 19 nt, Human
acuagagguuuuaugauau

SEQ ID NO: 3490538 - RNA, 17 nt, Human
acuagaugaccucauua

SEQ ID NO: 3490539 - RNA, 18 nt, Human
acuagauggaccugccug

SEQ ID NO: 3490540 - RNA, 20 nt, Human
acuagauggaccugccugca

SEQ ID NO: 3490541 - RNA, 16 nt, Human
acuagauggugcugag

SEQ ID NO: 3490542 - RNA, 18 nt, Human
acuagauggugcugagaa

SEQ ID NO: 3490543 - RNA, 15 nt, Human
acuagauuugggaga

SEQ ID NO: 3490544 - RNA, 14 nt, Human
acuagcaaaauaaa

SEQ ID NO: 3490545 - RNA, 15 nt, Human
acuagcaaaauaaaa

SEQ ID NO: 3490546 - RNA, 23 nt, Human
acuagcaaucucuucauuauucu

SEQ ID NO: 3490547 - RNA, 21 nt, Human
acucccccuaaaccccugucc

SEQ ID NO: 3490548 - RNA, 22 nt, Human
acucccccuaaaccccuguccc

SEQ ID NO: 3490549 - RNA, 14 nt, Human
acuccccgaagucu

SEQ ID NO: 3490550 - RNA, 22 nt, Human
acuccccugcacuggaguccag

SEQ ID NO: 3490551 - RNA, 14 nt, Human
acuccccuguuuca

SEQ ID NO: 3490552 - RNA, 20 nt, Human
acuccccuugagcugagaug

SEQ ID NO: 3490553 - RNA, 13 nt, Human
acucccuccucac

SEQ ID NO: 3490554 - RNA, 20 nt, Human
acucccuccucaccucugga

SEQ ID NO: 3490555 - RNA, 18 nt, Human
acucccuucuaccugcca

SEQ ID NO: 3490556 - RNA, 19 nt, Human
acucccuucuaccugccac

SEQ ID NO: 3490557 - RNA, 21 nt, Human
acucccuugcuggccccagcc

SEQ ID NO: 3490558 - RNA, 22 nt, Human
acucccuugcuggccccagccc

SEQ ID NO: 3490559 - RNA, 14 nt, Human
acucccuuucaaca

SEQ ID NO: 3490560 - RNA, 14 nt, Human
acucccuuucagug

SEQ ID NO: 3490561 - RNA, 23 nt, Human
acuccgagaggugggccagucug

SEQ ID NO: 3490562 - RNA, 16 nt, Human
acuccgcccccagccu

SEQ ID NO: 3490563 - RNA, 17 nt, Human
acuccgcccccagccua

SEQ ID NO: 3490564 - RNA, 16 nt, Human
acuccggagacagggu

SEQ ID NO: 3490565 - RNA, 14 nt, Human
acuccggcccuccu

SEQ ID NO: 3490566 - RNA, 23 nt, Human
acuccggccugaugacagagcga

SEQ ID NO: 3490567 - RNA, 15 nt, Human
acuccggcugugcug

SEQ ID NO: 3490568 - RNA, 18 nt, Human
acuccggcugugcuggga

SEQ ID NO: 3490569 - RNA, 17 nt, Human
acuccggggagcgcccg

SEQ ID NO: 3490570 - RNA, 15 nt, Human
acuccggugugccug

SEQ ID NO: 3490571 - RNA, 16 nt, Human
acuccgucucaaggaa

SEQ ID NO: 3490572 - RNA, 17 nt, Human
acuccguuggccacucc

SEQ ID NO: 3490573 - RNA, 17 nt, Human
acuccuaaaccuuugcc

SEQ ID NO: 3490574 - RNA, 18 nt, Human
acuccuaaccucaaguga

SEQ ID NO: 3490575 - RNA, 22 nt, Human
acuccuacaagauuuagaaaaa

SEQ ID NO: 3490576 - RNA, 14 nt, Human
acuccuaccucagc

SEQ ID NO: 3490577 - RNA, 15 nt, Human
acuccuaccucagcc

SEQ ID NO: 3490578 - RNA, 17 nt, Human
acuccuaccugcccugg

SEQ ID NO: 3490579 - RNA, 16 nt, Human
acuccuaggcaggaca

SEQ ID NO: 3490580 - RNA, 21 nt, Human
acuccuaggcaggacaugcug

SEQ ID NO: 3490581 - RNA, 18 nt, Human
acuccuaguucuagaaaa

SEQ ID NO: 3490582 - RNA, 20 nt, Human
acuccuaguucuagaaaaac

SEQ ID NO: 3490583 - RNA, 18 nt, Human
acuccuaugaucucaggu

SEQ ID NO: 3490584 - RNA, 17 nt, Human
acuccuauuuuuguaaa

SEQ ID NO: 3490585 - RNA, 18 nt, Human
acuccucagggcagccuc

SEQ ID NO: 3490586 - RNA, 19 nt, Human
acuccucauuguaaacaaa

SEQ ID NO: 3490587 - RNA, 21 nt, Human
acuccucccaggguuuuaacu

SEQ ID NO: 3490588 - RNA, 11 nt, Human
acuccucccau

SEQ ID NO: 3490589 - RNA, 19 nt, Human
acuccuccccacccuccug

SEQ ID NO: 3490590 - RNA, 20 nt, Human
acuccuccccacccuccugg

SEQ ID NO: 3490591 - RNA, 21 nt, Human
acuccuccccacccuccuggc

SEQ ID NO: 3490592 - RNA, 17 nt, Human
acuccucccugauguac

SEQ ID NO: 3490593 - RNA, 20 nt, Human
acuccucccugauguacagu

SEQ ID NO: 3490594 - RNA, 21 nt, Human
acuccucccuuuccuuccuaa

SEQ ID NO: 3490595 - RNA, 21 nt, Human
acuccuccuccaaaggccccc

SEQ ID NO: 3490596 - RNA, 22 nt, Human
acuccuccuccaaaggcccccu

SEQ ID NO: 3490597 - RNA, 11 nt, Human
acuccuccucu

SEQ ID NO: 3490598 - RNA, 12 nt, Human
acuccuccucuu

SEQ ID NO: 3490599 - RNA, 16 nt, Human
acuccuccucuuucuc

SEQ ID NO: 3490600 - RNA, 18 nt, Human
acuccuccucuuucucuc

SEQ ID NO: 3490601 - RNA, 22 nt, Human
acuccuccucuuucucucccca

SEQ ID NO: 3490602 - RNA, 17 nt, Human
acuccucggccuggcuc

SEQ ID NO: 3490603 - RNA, 21 nt, Human
acuccucuaagccacucuucc

SEQ ID NO: 3490604 - RNA, 14 nt, Human
acuccucugacuca

SEQ ID NO: 3490605 - RNA, 13 nt, Human
acuccucugucca

SEQ ID NO: 3490606 - RNA, 13 nt, Human
acuccugaaaaaa

SEQ ID NO: 3490607 - RNA, 19 nt, Human
acuccugacagucuugugc

SEQ ID NO: 3490608 - RNA, 21 nt, Human
acuccugacagucuugugcuu

SEQ ID NO: 3490609 - RNA, 15 nt, Human
acuccugaccucaag

SEQ ID NO: 3490610 - RNA, 18 nt, Human
acuccugaccucaaguga

SEQ ID NO: 3490611 - RNA, 21 nt, Human
acuccugacgucugaagcuug

SEQ ID NO: 3490612 - RNA, 12 nt, Human
acuccugacucc

SEQ ID NO: 3490613 - RNA, 18 nt, Human
acuccugacuccuaccug

SEQ ID NO: 3490614 - RNA, 17 nt, Human
acuccugagaccccugg

SEQ ID NO: 3490615 - RNA, 23 nt, Human
acuccugcacacgcuccuuccuc

SEQ ID NO: 3490616 - RNA, 12 nt, Human
acuccugcaggc

SEQ ID NO: 3490617 - RNA, 16 nt, Human
acuccugcaggcagcc

SEQ ID NO: 3490618 - RNA, 21 nt, Human
acuccugcaggcagccaggcc

SEQ ID NO: 3490619 - RNA, 10 nt, Human
acuccugcuc

SEQ ID NO: 3490620 - RNA, 13 nt, Human
acuccugcucugc

SEQ ID NO: 3490621 - RNA, 14 nt, Human
acuccugcuguaaa

SEQ ID NO: 3490622 - RNA, 16 nt, Human
acuccuggggccucuu

SEQ ID NO: 3490623 - RNA, 21 nt, Human
acuccuggggccucuuggguc

SEQ ID NO: 3490624 - RNA, 14 nt, Human
acuccuggguugag

SEQ ID NO: 3490625 - RNA, 16 nt, Human
acuccugguccuaggc

SEQ ID NO: 3490626 - RNA, 16 nt, Human
acuccuguacacugaa

SEQ ID NO: 3490627 - RNA, 17 nt, Human
acuccugucuucugcuu

SEQ ID NO: 3490628 - RNA, 20 nt, Human
acuccugucuucugcuuugu

SEQ ID NO: 3490629 - RNA, 15 nt, Human
acuccugugggagcc

SEQ ID NO: 3490630 - RNA, 20 nt, Human
acuccuguuacuuaccuaaa

SEQ ID NO: 3490631 - RNA, 22 nt, Human
acuccuucaacaauucuaaaau

SEQ ID NO: 3490632 - RNA, 12 nt, Human
acuccuuccugc

SEQ ID NO: 3490633 - RNA, 20 nt, Human
acuccuuccugccaccugcu

SEQ ID NO: 3490634 - RNA, 15 nt, Human
acuccuuccugcccc

SEQ ID NO: 3490635 - RNA, 24 nt, Human
acuccuugaaaacacuguucucug

SEQ ID NO: 3490636 - RNA, 18 nt, Human
acuccuugagagaccagg

SEQ ID NO: 3490637 - RNA, 18 nt, Human
acuccuugugguuuaugu

SEQ ID NO: 3490638 - RNA, 19 nt, Human
acuccuugugguuuauguc

SEQ ID NO: 3490639 - RNA, 21 nt, Human
acuccuugugguuuaugucau

SEQ ID NO: 3490640 - RNA, 23 nt, Human
acuccuuuuaaagaaaaaaauug

SEQ ID NO: 3490641 - RNA, 15 nt, Human
acucgacucugugcc

SEQ ID NO: 3490642 - RNA, 13 nt, Human
acucgagaacuuu

SEQ ID NO: 3490643 - RNA, 23 nt, Human
acucgagaccuuuucaacuuggc

SEQ ID NO: 3490644 - RNA, 19 nt, Human
acucgauucauauugaaua

SEQ ID NO: 3490645 - RNA, 20 nt, Human
acucgcccgcccacuguccu

SEQ ID NO: 3490646 - RNA, 17 nt, Human
acucgcgacaaugcaaa

SEQ ID NO: 3490647 - RNA, 16 nt, Human
acucgcuagcaguggc

SEQ ID NO: 3490648 - RNA, 17 nt, Human
acucgcuugcuagaagu

SEQ ID NO: 3490649 - RNA, 14 nt, Human
acucgcuuguaaau

SEQ ID NO: 3490650 - RNA, 17 nt, Human
acucgcuuguaaauacc

SEQ ID NO: 3490651 - RNA, 18 nt, Human
acucgcuuguaaauacca

SEQ ID NO: 3490652 - RNA, 15 nt, Human
acucgcuugugcaga

SEQ ID NO: 3490653 - RNA, 16 nt, Human
acucggcacccugcaa

SEQ ID NO: 3490654 - RNA, 22 nt, Human
acucggcuuuggagacuuucuu

SEQ ID NO: 3490655 - RNA, 14 nt, Human
acucgggcuccugu

SEQ ID NO: 3490656 - RNA, 17 nt, Human
acucgggcuccugugcc

SEQ ID NO: 3490657 - RNA, 18 nt, Human
acucgggcuccugugccc

SEQ ID NO: 3490658 - RNA, 19 nt, Human
acucgggcuccugugcccu

SEQ ID NO: 3490659 - RNA, 16 nt, Human
acucggggugcuuccu

SEQ ID NO: 3490660 - RNA, 20 nt, Human
acucggggugcuuccuugua

SEQ ID NO: 3490661 - RNA, 22 nt, Human
acucgguguccccaccaucugc

SEQ ID NO: 3490662 - RNA, 12 nt, Human
acucgguuucuc

SEQ ID NO: 3490663 - RNA, 14 nt, Human
acucgguuucucca

SEQ ID NO: 3490664 - RNA, 16 nt, Human
acucgguuucuccaaa

SEQ ID NO: 3490665 - RNA, 23 nt, Human
acucguauaagcauggagaacag

SEQ ID NO: 3490666 - RNA, 15 nt, Human
acucgugagcgccag

SEQ ID NO: 3490667 - RNA, 16 nt, Human
acucgugugcaacaga

SEQ ID NO: 3490668 - RNA, 23 nt, Human
acucguguguuucuauuuuuuga

SEQ ID NO: 3490669 - RNA, 12 nt, Human
acucuaaaagau

SEQ ID NO: 3490670 - RNA, 21 nt, Human
acucuaagaucuuagauucuc

SEQ ID NO: 3490671 - RNA, 13 nt, Human
acucuaagauguu

SEQ ID NO: 3490672 - RNA, 19 nt, Human
acucuaagucauguauguu

SEQ ID NO: 3490673 - RNA, 22 nt, Human
acucuaagucauguauguuucu

SEQ ID NO: 3490674 - RNA, 20 nt, Human
acucuaauucccauuuugca

SEQ ID NO: 3490675 - RNA, 21 nt, Human
acucuaauucccauuuugcaa

SEQ ID NO: 3490676 - RNA, 14 nt, Human
acucuaauucuaac

SEQ ID NO: 3490677 - RNA, 18 nt, Human
acucuaccagugcaggcu

SEQ ID NO: 3490678 - RNA, 15 nt, Human
acucuacuguguaau

SEQ ID NO: 3490679 - RNA, 20 nt, Human
acucuacuuagcaugucccu

SEQ ID NO: 3490680 - RNA, 19 nt, Human
acucuagacaagauauugu

SEQ ID NO: 3490681 - RNA, 21 nt, Human
acucuagaugaaguuuuacau

SEQ ID NO: 3490682 - RNA, 13 nt, Human
acucuagauucca

SEQ ID NO: 3490683 - RNA, 19 nt, Human
acucuagauuuuguuuugc

SEQ ID NO: 3490684 - RNA, 20 nt, Human
acucuaggauguauauuuua

SEQ ID NO: 3490685 - RNA, 13 nt, Human
acucuagucaaug

SEQ ID NO: 3490686 - RNA, 15 nt, Human
acucuagucaaugac

SEQ ID NO: 3490687 - RNA, 22 nt, Human
acucuagucaaugacaugaauu

SEQ ID NO: 3490688 - RNA, 22 nt, Human
acucuauaacaaaggauacuua

SEQ ID NO: 3490689 - RNA, 19 nt, Human
acauagccuauauuuacag

SEQ ID NO: 3490690 - RNA, 21 nt, Human
acauagcuacccaaaagagaa

SEQ ID NO: 3490691 - RNA, 13 nt, Human
acucagggacaga

SEQ ID NO: 3490692 - RNA, 15 nt, Human
acucagggacagagc

SEQ ID NO: 3490693 - RNA, 22 nt, Human
acucagggcagcgccaggcuga

SEQ ID NO: 3490694 - RNA, 13 nt, Human
acucagggcccca

SEQ ID NO: 3490695 - RNA, 14 nt, Human
acucagggccccag

SEQ ID NO: 3490696 - RNA, 18 nt, Human
acucagggcuccucccag

SEQ ID NO: 3490697 - RNA, 20 nt, Human
acucagggcuccucccagcu

SEQ ID NO: 3490698 - RNA, 19 nt, Human
acucaggggucacugaggc

SEQ ID NO: 3490699 - RNA, 15 nt, Human
acucaggugggcccu

SEQ ID NO: 3490700 - RNA, 21 nt, Human
acucagguuguaguaaagaaa

SEQ ID NO: 3490701 - RNA, 19 nt, Human
acucaguccauagcagaga

SEQ ID NO: 3490702 - RNA, 23 nt, Human
acucagucucucuucucuccagc

SEQ ID NO: 3490703 - RNA, 13 nt, Human
acucagucuuuaa

SEQ ID NO: 3490704 - RNA, 22 nt, Human
acucaguuugucagacuuuaaa

SEQ ID NO: 3490705 - RNA, 15 nt, Human
acucaguuuuaacua

SEQ ID NO: 3490706 - RNA, 23 nt, Human
acucauaaucuauaaacaaugaa

SEQ ID NO: 3490707 - RNA, 14 nt, Human
acucauaaugugaa

SEQ ID NO: 3490708 - RNA, 16 nt, Human
acucauaaugugaagu

SEQ ID NO: 3490709 - RNA, 19 nt, Human
acucauaaugugaaguguu

SEQ ID NO: 3490710 - RNA, 23 nt, Human
acucauacacucguaugauacuu

SEQ ID NO: 3490711 - RNA, 15 nt, Human
acucauacugugcug

SEQ ID NO: 3490712 - RNA, 17 nt, Human
acucauacugugcugga

SEQ ID NO: 3490713 - RNA, 19 nt, Human
acucauacugugcuggagc

SEQ ID NO: 3490714 - RNA, 18 nt, Human
acucauagauguuaugca

SEQ ID NO: 3490715 - RNA, 17 nt, Human
acucauauaauuauaug

SEQ ID NO: 3490716 - RNA, 15 nt, Human
acucauauauaucua

SEQ ID NO: 3490717 - RNA, 19 nt, Human
acucauauuacaaaaacaa

SEQ ID NO: 3490718 - RNA, 22 nt, Human
acucauauuacugguaggaacu

SEQ ID NO: 3490719 - RNA, 15 nt, Human
acucauauuuucaug

SEQ ID NO: 3490720 - RNA, 20 nt, Human
acucaucaaucaaauaagua

SEQ ID NO: 3490721 - RNA, 13 nt, Human
acucaucacugug

SEQ ID NO: 3490722 - RNA, 13 nt, Human
acucaucauaaaa

SEQ ID NO: 3490723 - RNA, 13 nt, Human
acucaucauuugu

SEQ ID NO: 3490724 - RNA, 16 nt, Human
acucauccugaacagc

SEQ ID NO: 3490725 - RNA, 13 nt, Human
acucaucugaaau

SEQ ID NO: 3490726 - RNA, 17 nt, Human
acucaucugaaauguua

SEQ ID NO: 3490727 - RNA, 19 nt, Human
acucaucugaaauguuaca

SEQ ID NO: 3490728 - RNA, 23 nt, Human
acucaucugaaauguuacaaaaa

SEQ ID NO: 3490729 - RNA, 19 nt, Human
acucaucuggaguucucaa

SEQ ID NO: 3490730 - RNA, 22 nt, Human
acucaucuggaguucucaaaga

SEQ ID NO: 3490731 - RNA, 20 nt, Human
acucaucuuucccuccuugg

SEQ ID NO: 3490732 - RNA, 14 nt, Human
acucaugagaaguu

SEQ ID NO: 3490733 - RNA, 14 nt, Human
acucaugcugaaag

SEQ ID NO: 3490734 - RNA, 15 nt, Human
acucauggguaauaa

SEQ ID NO: 3490735 - RNA, 17 nt, Human
acucaugugacucuuuc

SEQ ID NO: 3490736 - RNA, 13 nt, Human
acucaugugauuu

SEQ ID NO: 3490737 - RNA, 10 nt, Human
acucaugugu

SEQ ID NO: 3490738 - RNA, 14 nt, Human
acucauuagacugg

SEQ ID NO: 3490739 - RNA, 15 nt, Human
acucauuagacugga

SEQ ID NO: 3490740 - RNA, 19 nt, Human
acucauuccagaucccagg

SEQ ID NO: 3490741 - RNA, 13 nt, Human
acucauuccugua

SEQ ID NO: 3490742 - RNA, 15 nt, Human
acucauucugaauua

SEQ ID NO: 3490743 - RNA, 15 nt, Human
acucauucuucugua

SEQ ID NO: 3490744 - RNA, 13 nt, Human
acucauugaaaug

SEQ ID NO: 3490745 - RNA, 15 nt, Human
acucauugaaauguc

SEQ ID NO: 3490746 - RNA, 17 nt, Human
acucauugaccugaggc

SEQ ID NO: 3490747 - RNA, 22 nt, Human
acucauugaccugaggcccuuc

SEQ ID NO: 3490748 - RNA, 14 nt, Human
acucauuucuaaaa

SEQ ID NO: 3490749 - RNA, 15 nt, Human
acucauuucuaaaag

SEQ ID NO: 3490750 - RNA, 16 nt, Human
acucauuuuuuuaauu

SEQ ID NO: 3490751 - RNA, 19 nt, Human
acucauuuuuuuaauuuau

SEQ ID NO: 3490752 - RNA, 19 nt, Human
acuccaaacagaccccugu

SEQ ID NO: 3490753 - RNA, 17 nt, Human
acuccaacauccacucu

SEQ ID NO: 3490754 - RNA, 19 nt, Human
acuccaacauccacucucu

SEQ ID NO: 3490755 - RNA, 18 nt, Human
acuccaaccuaaccugug

SEQ ID NO: 3490756 - RNA, 14 nt, Human
acuccaacucuucc

SEQ ID NO: 3490757 - RNA, 15 nt, Human
acuccaagguucccu

SEQ ID NO: 3490758 - RNA, 20 nt, Human
acuccaaugucugcugagga

SEQ ID NO: 3490759 - RNA, 21 nt, Human
acuccaaugucugcugaggag

SEQ ID NO: 3490760 - RNA, 14 nt, Human
acuccacacugcac

SEQ ID NO: 3490761 - RNA, 16 nt, Human
acuccacacugcacaa

SEQ ID NO: 3490762 - RNA, 14 nt, Human
acuccacaucugcc

SEQ ID NO: 3490763 - RNA, 15 nt, Human
acuccaccaacccau

SEQ ID NO: 3490764 - RNA, 15 nt, Human
acuccacuuucauag

SEQ ID NO: 3490765 - RNA, 23 nt, Human
acuccagaaaugucccuuucuuc

SEQ ID NO: 3490766 - RNA, 15 nt, Human
acuccagaccccugg

SEQ ID NO: 3490767 - RNA, 22 nt, Human
agaggaaauaagaaaaaucaug

SEQ ID NO: 3490768 - RNA, 19 nt, Human
agaggaaauauugcugggg

SEQ ID NO: 3490769 - RNA, 15 nt, Human
agaggaacuguccag

SEQ ID NO: 3490770 - RNA, 13 nt, Human
agaggaagagaca

SEQ ID NO: 3490771 - RNA, 17 nt, Human
agaggaagagugcaaaa

SEQ ID NO: 3490772 - RNA, 15 nt, Human
agaggaaguucagau

SEQ ID NO: 3490773 - RNA, 14 nt, Human
agaggaauaagaau

SEQ ID NO: 3490774 - RNA, 17 nt, Human
agaggaauccuggcagc

SEQ ID NO: 3490775 - RNA, 18 nt, Human
agaggaauuacgugcucu

SEQ ID NO: 3490776 - RNA, 13 nt, Human
agaggaauuuaua

SEQ ID NO: 3490777 - RNA, 21 nt, Human
agaggacaccuguacuggaga

SEQ ID NO: 3490778 - RNA, 18 nt, Human
agaggacagaucaauggc

SEQ ID NO: 3490779 - RNA, 19 nt, Human
agaggacaguggauuguuu

SEQ ID NO: 3490780 - RNA, 14 nt, Human
agaggaccagggcc

SEQ ID NO: 3490781 - RNA, 23 nt, Human
agaggaccuguauuuaagcaaau

SEQ ID NO: 3490782 - RNA, 22 nt, Human
agaggacgagcgauugaggugu

SEQ ID NO: 3490783 - RNA, 19 nt, Human
agaggagaacuugcugccu

SEQ ID NO: 3490784 - RNA, 14 nt, Human
agaggagagccaga

SEQ ID NO: 3490785 - RNA, 16 nt, Human
agaggagagccagaga

SEQ ID NO: 3490786 - RNA, 17 nt, Human
agaggagagccagagaa

SEQ ID NO: 3490787 - RNA, 21 nt, Human
agaggagagccagagaaguga

SEQ ID NO: 3490788 - RNA, 17 nt, Human
agaggagaggagagagg

SEQ ID NO: 3490789 - RNA, 12 nt, Human
agaggagcccug

SEQ ID NO: 3490790 - RNA, 12 nt, Human
agaggaggcagc

SEQ ID NO: 3490791 - RNA, 17 nt, Human
agaggagggaugcugcc

SEQ ID NO: 3490792 - RNA, 12 nt, Human
agaggaggggcc

SEQ ID NO: 3490793 - RNA, 18 nt, Human
agaggaggggccgcugcc

SEQ ID NO: 3490794 - RNA, 20 nt, Human
agaggaggggccgcugccac

SEQ ID NO: 3490795 - RNA, 16 nt, Human
agaggagugacugagc

SEQ ID NO: 3490796 - RNA, 13 nt, Human
agaggaguucaau

SEQ ID NO: 3490797 - RNA, 16 nt, Human
agaggaguucaaugau

SEQ ID NO: 3490798 - RNA, 21 nt, Human
agaggaugaauguaugugcac

SEQ ID NO: 3490799 - RNA, 22 nt, Human
agaggaugaauguaugugcacu

SEQ ID NO: 3490800 - RNA, 18 nt, Human
agaggaugagagcccaga

SEQ ID NO: 3490801 - RNA, 22 nt, Human
agaggaugagagcccagaggua

SEQ ID NO: 3490802 - RNA, 20 nt, Human
agaggaugagcucuacccag

SEQ ID NO: 3490803 - RNA, 18 nt, Human
agaggaugcugugaaauu

SEQ ID NO: 3490804 - RNA, 15 nt, Human
agaggauggccagug

SEQ ID NO: 3490805 - RNA, 22 nt, Human
agaggauggccagugucugucc

SEQ ID NO: 3490806 - RNA, 19 nt, Human
agaggauuaguaagaucuc

SEQ ID NO: 3490807 - RNA, 22 nt, Human
agaggauuggcucccaucuuuu

SEQ ID NO: 3490808 - RNA, 14 nt, Human
agaggauuuugcgu

SEQ ID NO: 3490809 - RNA, 19 nt, Human
agaggauuuuuuucugagc

SEQ ID NO: 3490810 - RNA, 18 nt, Human
agaggcaagcugaaauuu

SEQ ID NO: 3490811 - RNA, 14 nt, Human
agaggcaccaggaa

SEQ ID NO: 3490812 - RNA, 20 nt, Human
agaggcagaaaauugcacaa

SEQ ID NO: 3490813 - RNA, 15 nt, Human
agaggcagaacccug

SEQ ID NO: 3490814 - RNA, 19 nt, Human
agaggcagaacccugguga

SEQ ID NO: 3490815 - RNA, 14 nt, Human
agaggcagagagcg

SEQ ID NO: 3490816 - RNA, 11 nt, Human
agaggcagccc

SEQ ID NO: 3490817 - RNA, 13 nt, Human
agaggcagcccca

SEQ ID NO: 3490818 - RNA, 23 nt, Human
agaggcagccccauucugccugc

SEQ ID NO: 3490819 - RNA, 24 nt, Human
agaggcagccccauucugccugcc

SEQ ID NO: 3490820 - RNA, 17 nt, Human
agaggcagcuucuuugc

SEQ ID NO: 3490821 - RNA, 10 nt, Human
agaggcaggg

SEQ ID NO: 3490822 - RNA, 19 nt, Human
agaggccaaacaggcccuc

SEQ ID NO: 3490823 - RNA, 21 nt, Human
agaggccagccccacccagga

SEQ ID NO: 3490824 - RNA, 15 nt, Human
agaggccauggcaga

SEQ ID NO: 3490825 - RNA, 19 nt, Human
agaggccaugggccuccug

SEQ ID NO: 3490826 - RNA, 18 nt, Human
agaggcccaggcugccgu

SEQ ID NO: 3490827 - RNA, 16 nt, Human
agaggccccagccucc

SEQ ID NO: 3490828 - RNA, 17 nt, Human
agaggcccccagcccag

SEQ ID NO: 3490829 - RNA, 22 nt, Human
agaggcccccagcccagggcuc

SEQ ID NO: 3490830 - RNA, 24 nt, Human
agaggcccuggaucagcguggccu

SEQ ID NO: 3490831 - RNA, 14 nt, Human
agaggccguggcug

SEQ ID NO: 3490832 - RNA, 20 nt, Human
agaggccugaaauccugguu

SEQ ID NO: 3490833 - RNA, 22 nt, Human
agaggccugccuccagggcugg

SEQ ID NO: 3490834 - RNA, 19 nt, Human
agaggccuuuuggaaugug

SEQ ID NO: 3490835 - RNA, 19 nt, Human
agaggcgggccagccaggc

SEQ ID NO: 3490836 - RNA, 14 nt, Human
agaggcuaaaaugu

SEQ ID NO: 3490837 - RNA, 17 nt, Human
agaggcuaaaauguuuu

SEQ ID NO: 3490838 - RNA, 15 nt, Human
agaggcuacagggcc

SEQ ID NO: 3490839 - RNA, 16 nt, Human
agaggcuacagggcca

SEQ ID NO: 3490840 - RNA, 10 nt, Human
agaggcucag

SEQ ID NO: 3490841 - RNA, 16 nt, Human
agaggcugagacagga

SEQ ID NO: 3490842 - RNA, 14 nt, Human
agaggcugaggccu

SEQ ID NO: 3490843 - RNA, 18 nt, Human
agaggcugaggccuggac

SEQ ID NO: 3490844 - RNA, 19 nt, Human
agaggcugaggccuggacu

SEQ ID NO: 3490845 - RNA, 21 nt, Human
agaggcugcagaaggccaaga

SEQ ID NO: 3490846 - RNA, 22 nt, Human
agaggcugcagaaggccaagaa

SEQ ID NO: 3490847 - RNA, 14 nt, Human
agaggcugccccuc

SEQ ID NO: 3490848 - RNA, 16 nt, Human
agaggcugccccucuc

SEQ ID NO: 3490849 - RNA, 17 nt, Human
agaggcuggaggcaggg

SEQ ID NO: 3490850 - RNA, 22 nt, Human
agaggcuggaggcagggccuug

SEQ ID NO: 3490851 - RNA, 10 nt, Human
agaggcuggu

SEQ ID NO: 3490852 - RNA, 16 nt, Human
agaggcugguuccaga

SEQ ID NO: 3490853 - RNA, 14 nt, Human
agaggcugucuguu

SEQ ID NO: 3490854 - RNA, 16 nt, Human
agaggcuguggcuggu

SEQ ID NO: 3490855 - RNA, 17 nt, Human
agaggcuucuccgccag

SEQ ID NO: 3490856 - RNA, 21 nt, Human
agaggcuucuccgccagccuc

SEQ ID NO: 3490857 - RNA, 22 nt, Human
agaggcuucuccgccagccucc

SEQ ID NO: 3490858 - RNA, 14 nt, Human
agaggcuucuucag

SEQ ID NO: 3490859 - RNA, 15 nt, Human
agagggaacagggcg

SEQ ID NO: 3490860 - RNA, 13 nt, Human
agagggaauguga

SEQ ID NO: 3490861 - RNA, 14 nt, Human
agagggaaugugaa

SEQ ID NO: 3490862 - RNA, 18 nt, Human
agagggaaugugaaauuu

SEQ ID NO: 3490863 - RNA, 12 nt, Human
agagggacagau

SEQ ID NO: 3490864 - RNA, 17 nt, Human
agagggaccauguguca

SEQ ID NO: 3490865 - RNA, 15 nt, Human
agagggaccucuccc

SEQ ID NO: 3490866 - RNA, 19 nt, Human
agagggaccucucccaggg

SEQ ID NO: 3490867 - RNA, 22 nt, Human
agagggacggccaagaauguac

SEQ ID NO: 3490868 - RNA, 13 nt, Human
agagggagagaga

SEQ ID NO: 3490869 - RNA, 21 nt, Human
agagggagggagggcuccaga

SEQ ID NO: 3490870 - RNA, 14 nt, Human
agagggaggggccu

SEQ ID NO: 3490871 - RNA, 20 nt, Human
agagggaggucacuggaaag

SEQ ID NO: 3490872 - RNA, 14 nt, Human
agagggagguguuu

SEQ ID NO: 3490873 - RNA, 16 nt, Human
agagggcacacacugu

SEQ ID NO: 3490874 - RNA, 16 nt, Human
agagggcacucugcuu

SEQ ID NO: 3490875 - RNA, 19 nt, Human
agagggccaugcaauucau

SEQ ID NO: 3490876 - RNA, 22 nt, Human
agagggccauugaacucugaga

SEQ ID NO: 3490877 - RNA, 21 nt, Human
agagggcccaggcaggccacc

SEQ ID NO: 3490878 - RNA, 15 nt, Human
agagggccgggcaga

SEQ ID NO: 3490879 - RNA, 14 nt, Human
agagggcgcaggcc

SEQ ID NO: 3490880 - RNA, 16 nt, Human
agagggcgcaggccgu

SEQ ID NO: 3490881 - RNA, 11 nt, Human
agagggcugga

SEQ ID NO: 3490882 - RNA, 13 nt, Human
agagggcuuccuc

SEQ ID NO: 3490883 - RNA, 16 nt, Human
agaggggaaaagagau

SEQ ID NO: 3490884 - RNA, 22 nt, Human
agaggggaacagacuggaagca

SEQ ID NO: 3490885 - RNA, 22 nt, Human
agaggggaagaguguacugggg

SEQ ID NO: 3490886 - RNA, 12 nt, Human
agaggggaagga

SEQ ID NO: 3490887 - RNA, 16 nt, Human
agaggggaagggccag

SEQ ID NO: 3490888 - RNA, 18 nt, Human
agaggggagagcugaaca

SEQ ID NO: 3490889 - RNA, 18 nt, Human
agaggggcagauggaaag

SEQ ID NO: 3490890 - RNA, 13 nt, Human
agaggggcagccc

SEQ ID NO: 3490891 - RNA, 16 nt, Human
agaggggcagcccuug

SEQ ID NO: 3490892 - RNA, 19 nt, Human
agaggggcagcccuugcuu

SEQ ID NO: 3490893 - RNA, 15 nt, Human
agaggggcaggcccu

SEQ ID NO: 3490894 - RNA, 13 nt, Human
agaggggccugcc

SEQ ID NO: 3490895 - RNA, 22 nt, Human
agaggggccugccaccuggacc

SEQ ID NO: 3490896 - RNA, 23 nt, Human
agaggggccugccaccuggaccc

SEQ ID NO: 3490897 - RNA, 21 nt, Human
agaggggcugaauagcagaag

SEQ ID NO: 3490898 - RNA, 12 nt, Human
agagggggccac

SEQ ID NO: 3490899 - RNA, 12 nt, Human
agagggggccug

SEQ ID NO: 3490900 - RNA, 14 nt, Human
agagggggcuggug

SEQ ID NO: 3490901 - RNA, 19 nt, Human
agagggggcuggugggugc

SEQ ID NO: 3490902 - RNA, 19 nt, Human
agaggggguggaggggugu

SEQ ID NO: 3490903 - RNA, 19 nt, Human
agagggugaguccuccaga

SEQ ID NO: 3490904 - RNA, 22 nt, Human
agaggguggugaccucugccug

SEQ ID NO: 3490905 - RNA, 16 nt, Human
agaggguguccugcac

SEQ ID NO: 3490906 - RNA, 13 nt, Human
agaggguuccugu

SEQ ID NO: 3490907 - RNA, 19 nt, Human
agagguaaaagugugagca

SEQ ID NO: 3490908 - RNA, 20 nt, Human
agagguaaaagugugagcag

SEQ ID NO: 3490909 - RNA, 21 nt, Human
agagguacaggguuuuuaccu

SEQ ID NO: 3490910 - RNA, 17 nt, Human
agagguacccugggugu

SEQ ID NO: 3490911 - RNA, 13 nt, Human
agagguauaauug

SEQ ID NO: 3490912 - RNA, 17 nt, Human
agagguauuuaucuuua

SEQ ID NO: 3490913 - RNA, 12 nt, Human
agagguccagcc

SEQ ID NO: 3490914 - RNA, 16 nt, Human
agagguccagcccauc

SEQ ID NO: 3490915 - RNA, 18 nt, Human
agagguccagcccaucuc

SEQ ID NO: 3490916 - RNA, 21 nt, Human
agaggucccaagguucugggu

SEQ ID NO: 3490917 - RNA, 22 nt, Human
agagggaugaggugcugggagg

SEQ ID NO: 3490918 - RNA, 17 nt, Human
agagggaugcauggaga

SEQ ID NO: 3490919 - RNA, 18 nt, Human
agagggccaagacuuggc

SEQ ID NO: 3490920 - RNA, 18 nt, Human
agagggcccugguguuuc

SEQ ID NO: 3490921 - RNA, 23 nt, Human
agagggcccugguguuucuagca

SEQ ID NO: 3490922 - RNA, 16 nt, Human
agagggccugugggag

SEQ ID NO: 3490923 - RNA, 17 nt, Human
agagggcucugugcuga

SEQ ID NO: 3490924 - RNA, 19 nt, Human
agagggcucugugcugaca

SEQ ID NO: 3490925 - RNA, 10 nt, Human
agagggcugc

SEQ ID NO: 3490926 - RNA, 18 nt, Human
agagggcuugugaacaga

SEQ ID NO: 3490927 - RNA, 19 nt, Human
agaggggaauaauagaaga

SEQ ID NO: 3490928 - RNA, 14 nt, Human
agaggggacucugg

SEQ ID NO: 3490929 - RNA, 12 nt, Human
agaggggcagcc

SEQ ID NO: 3490930 - RNA, 20 nt, Human
agaggggccgaugcccagag

SEQ ID NO: 3490931 - RNA, 21 nt, Human
agaggggccugccaccuggac

SEQ ID NO: 3490932 - RNA, 18 nt, Human
agaggggcuuucuggaga

SEQ ID NO: 3490933 - RNA, 16 nt, Human
agagggggacugcugc

SEQ ID NO: 3490934 - RNA, 19 nt, Human
agagggggccugggacuuc

SEQ ID NO: 3490935 - RNA, 22 nt, Human
agagggggccugggacuuccau

SEQ ID NO: 3490936 - RNA, 19 nt, Human
agagggguacauuucccug

SEQ ID NO: 3490937 - RNA, 21 nt, Human
agaggguaauaaccagacaca

SEQ ID NO: 3490938 - RNA, 15 nt, Human
agagggucacagugu

SEQ ID NO: 3490939 - RNA, 18 nt, Human
agagggucuggagaagca

SEQ ID NO: 3490940 - RNA, 22 nt, Human
agagggucuggagaagcaguga

SEQ ID NO: 3490941 - RNA, 18 nt, Human
agagggucugggggcaca

SEQ ID NO: 3490942 - RNA, 21 nt, Human
agagggugaguccuccagaac

SEQ ID NO: 3490943 - RNA, 19 nt, Human
agaggguggugaccucugc

SEQ ID NO: 3490944 - RNA, 23 nt, Human
agaggguggugaccucugccuga

SEQ ID NO: 3490945 - RNA, 15 nt, Human
agagggugucaucua

SEQ ID NO: 3490946 - RNA, 18 nt, Human
agagguaaaagugugagc

SEQ ID NO: 3490947 - RNA, 22 nt, Human
agagguaaaagugugagcagug

SEQ ID NO: 3490948 - RNA, 17 nt, Human
agagguaacagaacagc

SEQ ID NO: 3490949 - RNA, 18 nt, Human
agagguaacagaacagcu

SEQ ID NO: 3490950 - RNA, 20 nt, Human
agagguaacagaacagcuuc

SEQ ID NO: 3490951 - RNA, 22 nt, Human
agagguaacagaacagcuucag

SEQ ID NO: 3490952 - RNA, 17 nt, Human
agagguacaggguuuuu

SEQ ID NO: 3490953 - RNA, 16 nt, Human
agagguauuaaaacua

SEQ ID NO: 3490954 - RNA, 20 nt, Human
agaggucaagcccaggagga

SEQ ID NO: 3490955 - RNA, 14 nt, Human
agaggucagacuaa

SEQ ID NO: 3490956 - RNA, 18 nt, Human
agagguccucuggagccc

SEQ ID NO: 3490957 - RNA, 16 nt, Human
agaggucugugcugag

SEQ ID NO: 3490958 - RNA, 17 nt, Human
agaggugaccccagggc

SEQ ID NO: 3490959 - RNA, 18 nt, Human
agaggugaccccagggca

SEQ ID NO: 3490960 - RNA, 16 nt, Human
agaggugagaaauuua

SEQ ID NO: 3490961 - RNA, 17 nt, Human
agaggugagaaauuuaa

SEQ ID NO: 3490962 - RNA, 19 nt, Human
agaggugccagcaacugaa

SEQ ID NO: 3490963 - RNA, 21 nt, Human
agaggugccagcaacugaaua

SEQ ID NO: 3490964 - RNA, 18 nt, Human
agagguggccagagcugg

SEQ ID NO: 3490965 - RNA, 14 nt, Human
agaggugggagggc

SEQ ID NO: 3490966 - RNA, 17 nt, Human
agaggugggcagguggu

SEQ ID NO: 3490967 - RNA, 19 nt, Human
agaggugggcagguggugg

SEQ ID NO: 3490968 - RNA, 16 nt, Human
agagguuaaggugcaa

SEQ ID NO: 3490969 - RNA, 15 nt, Human
agagguuaagguggg

SEQ ID NO: 3490970 - RNA, 20 nt, Human
agagguuaucugucccaggu

SEQ ID NO: 3490971 - RNA, 19 nt, Human
agagguucaaagauauuuu

SEQ ID NO: 3490972 - RNA, 20 nt, Human
agagguuguagugagcccag

SEQ ID NO: 3490973 - RNA, 14 nt, Human
agagguugucugug

SEQ ID NO: 3490974 - RNA, 15 nt, Human
agagguuugcagucc

SEQ ID NO: 3490975 - RNA, 17 nt, Human
agagguuuuaugauauu

SEQ ID NO: 3490976 - RNA, 18 nt, Human
agaguaaaggaaaugauu

SEQ ID NO: 3490977 - RNA, 16 nt, Human
agaguaagaaauuuca

SEQ ID NO: 3490978 - RNA, 14 nt, Human
agaguaagacauug

SEQ ID NO: 3490979 - RNA, 15 nt, Human
agaguaagcugcuuu

SEQ ID NO: 3490980 - RNA, 22 nt, Human
agaguaauccaagcaaauguga

SEQ ID NO: 3490981 - RNA, 16 nt, Human
agaguacagugagcca

SEQ ID NO: 3490982 - RNA, 19 nt, Human
agaguacagugagccaaga

SEQ ID NO: 3490983 - RNA, 12 nt, Human
agaguacuuugg

SEQ ID NO: 3490984 - RNA, 16 nt, Human
agaguagaauugcauu

SEQ ID NO: 3490985 - RNA, 22 nt, Human
agaguagauggugaaauuuauu

SEQ ID NO: 3490986 - RNA, 15 nt, Human
agaguagcauuucau

SEQ ID NO: 3490987 - RNA, 23 nt, Human
agaguagccgagagccugcuccc

SEQ ID NO: 3490988 - RNA, 14 nt, Human
agaguaguccaggu

SEQ ID NO: 3490989 - RNA, 23 nt, Human
agaguaguuauauaauuguugaa

SEQ ID NO: 3490990 - RNA, 13 nt, Human
agaguauggagcu

SEQ ID NO: 3490991 - RNA, 14 nt, Human
agaguauggagcuc

SEQ ID NO: 3490992 - RNA, 21 nt, Human
agaguauggagcucagagagg

SEQ ID NO: 3490993 - RNA, 15 nt, Human
agaguauggauugaa

SEQ ID NO: 3490994 - RNA, 23 nt, Human
agaguauuggucuccucucagcc

SEQ ID NO: 3490995 - RNA, 14 nt, Human
agaguauuuuugac

SEQ ID NO: 3490996 - RNA, 17 nt, Human
agaguauuuuugacaga

SEQ ID NO: 3490997 - RNA, 20 nt, Human
agaguauuuuugacagaaua

SEQ ID NO: 3490998 - RNA, 18 nt, Human
agagucagccaggaccau

SEQ ID NO: 3490999 - RNA, 18 nt, Human
agagucagccuucccccu

SEQ ID NO: 3491000 - RNA, 16 nt, Human
agagucagcucucugc

SEQ ID NO: 3491001 - RNA, 21 nt, Human
agagucagcucucugcccugu

SEQ ID NO: 3491002 - RNA, 13 nt, Human
agagucaucucca

SEQ ID NO: 3491003 - RNA, 14 nt, Human
agagucaucuccau

SEQ ID NO: 3491004 - RNA, 19 nt, Human
agagucaucuccaucagcu

SEQ ID NO: 3491005 - RNA, 16 nt, Human
agagucauuguaaugu

SEQ ID NO: 3491006 - RNA, 22 nt, Human
agagucauuguaauguugugaa

SEQ ID NO: 3491007 - RNA, 23 nt, Human
agagucauuguaauguugugaau

SEQ ID NO: 3491008 - RNA, 16 nt, Human
agaguccaggccccaa

SEQ ID NO: 3491009 - RNA, 14 nt, Human
agagucccacugcc

SEQ ID NO: 3491010 - RNA, 20 nt, Human
agagucccagguuggcucug

SEQ ID NO: 3491011 - RNA, 21 nt, Human
agaguccccccacucccagca

SEQ ID NO: 3491012 - RNA, 14 nt, Human
agagucccugccug

SEQ ID NO: 3491013 - RNA, 17 nt, Human
agagucccugccuggac

SEQ ID NO: 3491014 - RNA, 13 nt, Human
agaguccucacuc

SEQ ID NO: 3491015 - RNA, 21 nt, Human
agaguccugcacaguuuucug

SEQ ID NO: 3491016 - RNA, 14 nt, Human
agagucgcugugcc

SEQ ID NO: 3491017 - RNA, 13 nt, Human
agagucuaaagau

SEQ ID NO: 3491018 - RNA, 22 nt, Human
agagucuaaagauggaguuucu

SEQ ID NO: 3491019 - RNA, 21 nt, Human
agagucuaauagucuuugcca

SEQ ID NO: 3491020 - RNA, 12 nt, Human
agagucuagauu

SEQ ID NO: 3491021 - RNA, 19 nt, Human
agagucuagauucaaaggu

SEQ ID NO: 3491022 - RNA, 14 nt, Human
agagucuagauucu

SEQ ID NO: 3491023 - RNA, 20 nt, Human
agagucucacuguugcccag

SEQ ID NO: 3491024 - RNA, 15 nt, Human
agagucucccaggga

SEQ ID NO: 3491025 - RNA, 16 nt, Human
agagucugaacagcug

SEQ ID NO: 3491026 - RNA, 14 nt, Human
agagucugagggcu

SEQ ID NO: 3491027 - RNA, 21 nt, Human
agagucugagggcuuguaguu

SEQ ID NO: 3491028 - RNA, 15 nt, Human
agagucuggcccuag

SEQ ID NO: 3491029 - RNA, 18 nt, Human
agagucuggugaagcuca

SEQ ID NO: 3491030 - RNA, 16 nt, Human
agagugaaaaagagaa

SEQ ID NO: 3491031 - RNA, 17 nt, Human
agagugaauucccucac

SEQ ID NO: 3491032 - RNA, 16 nt, Human
agagugagacucuguc

SEQ ID NO: 3491033 - RNA, 21 nt, Human
agagugagagggcaugcgcac

SEQ ID NO: 3491034 - RNA, 22 nt, Human
agagugagcuacagagccgagc

SEQ ID NO: 3491035 - RNA, 22 nt, Human
agagugauagucuuuugcuuuu

SEQ ID NO: 3491036 - RNA, 13 nt, Human
agagugcaacagu

SEQ ID NO: 3491037 - RNA, 17 nt, Human
agagugcaacaguagca

SEQ ID NO: 3491038 - RNA, 14 nt, Human
agaguggccccacc

SEQ ID NO: 3491039 - RNA, 15 nt, Human
agaguggccccaccu

SEQ ID NO: 3491040 - RNA, 17 nt, Human
agaguggccuggccagg

SEQ ID NO: 3491041 - RNA, 13 nt, Human
agaguggcugggg

SEQ ID NO: 3491042 - RNA, 11 nt, Human
agagugggagc

SEQ ID NO: 3491043 - RNA, 18 nt, Human
agagugggcugcaucugg

SEQ ID NO: 3491044 - RNA, 18 nt, Human
agagugggggagagcagg

SEQ ID NO: 3491045 - RNA, 20 nt, Human
agagugggggagagcaggcu

SEQ ID NO: 3491046 - RNA, 18 nt, Human
agagugguauuugcagac

SEQ ID NO: 3491047 - RNA, 13 nt, Human
agagugguggggg

SEQ ID NO: 3491048 - RNA, 15 nt, Human
agaguguagaagcau

SEQ ID NO: 3491049 - RNA, 17 nt, Human
agaguguagaagcauuc

SEQ ID NO: 3491050 - RNA, 18 nt, Human
agaguguagaagcauucc

SEQ ID NO: 3491051 - RNA, 22 nt, Human
agaguguagaagcauuccuucu

SEQ ID NO: 3491052 - RNA, 14 nt, Human
agagugucucugau

SEQ ID NO: 3491053 - RNA, 20 nt, Human
agagugucuucacggcagga

SEQ ID NO: 3491054 - RNA, 15 nt, Human
agagugucuuuccac

SEQ ID NO: 3491055 - RNA, 20 nt, Human
agaguguggagucauucuca

SEQ ID NO: 3491056 - RNA, 15 nt, Human
agaguuaagaagcug

SEQ ID NO: 3491057 - RNA, 17 nt, Human
agaguuacaguucugug

SEQ ID NO: 3491058 - RNA, 14 nt, Human
agaguuagacuguu

SEQ ID NO: 3491059 - RNA, 20 nt, Human
agaguuagguuuaacauaaa

SEQ ID NO: 3491060 - RNA, 23 nt, Human
agaguuagguuuaacauaaaggu

SEQ ID NO: 3491061 - RNA, 17 nt, Human
agaguuauuuaggcuuu

SEQ ID NO: 3491062 - RNA, 14 nt, Human
agaguucaagaaau

SEQ ID NO: 3491063 - RNA, 21 nt, Human
agaguucaauggcugcugaag

SEQ ID NO: 3491064 - RNA, 22 nt, Human
agaguucaguaagaccggaagc

SEQ ID NO: 3491065 - RNA, 14 nt, Human
agaguucaucccag

SEQ ID NO: 3491066 - RNA, 22 nt, Human
agaggucucugccggcucuuuc

SEQ ID NO: 3491067 - RNA, 13 nt, Human
agaggucugugcu

SEQ ID NO: 3491068 - RNA, 18 nt, Human
agaggucugugcugaggc

SEQ ID NO: 3491069 - RNA, 12 nt, Human
agaggucuuuuu

SEQ ID NO: 3491070 - RNA, 19 nt, Human
agaggucuuuuuuaaaagg

SEQ ID NO: 3491071 - RNA, 14 nt, Human
agaggugagggaag

SEQ ID NO: 3491072 - RNA, 14 nt, Human
agaggugccagcaa

SEQ ID NO: 3491073 - RNA, 16 nt, Human
agaggugccagcaacu

SEQ ID NO: 3491074 - RNA, 16 nt, Human
agaggugcuucacccu

SEQ ID NO: 3491075 - RNA, 13 nt, Human
agagguggccaga

SEQ ID NO: 3491076 - RNA, 13 nt, Human
agaggugggcagg

SEQ ID NO: 3491077 - RNA, 21 nt, Human
agaggugggccagucugugga

SEQ ID NO: 3491078 - RNA, 16 nt, Human
agagguggggagcaga

SEQ ID NO: 3491079 - RNA, 23 nt, Human
agaggugugcaagagagggaugc

SEQ ID NO: 3491080 - RNA, 16 nt, Human
agagguguuauuugga

SEQ ID NO: 3491081 - RNA, 17 nt, Human
agagguuaucuguccca

SEQ ID NO: 3491082 - RNA, 20 nt, Human
agagguucaaagauauuuug

SEQ ID NO: 3491083 - RNA, 22 nt, Human
agagguuugacuagaugaugga

SEQ ID NO: 3491084 - RNA, 18 nt, Human
agagguuuggcuccugcc

SEQ ID NO: 3491085 - RNA, 18 nt, Human
agagguuuuaaagugauu

SEQ ID NO: 3491086 - RNA, 12 nt, Human
agagguuuuguu

SEQ ID NO: 3491087 - RNA, 15 nt, Human
agaguaaaaacugaa

SEQ ID NO: 3491088 - RNA, 18 nt, Human
agaguaauccaagcaaau

SEQ ID NO: 3491089 - RNA, 18 nt, Human
agaguaaucuuguugguu

SEQ ID NO: 3491090 - RNA, 18 nt, Human
agaguaauggguuucaua

SEQ ID NO: 3491091 - RNA, 12 nt, Human
agaguacacugc

SEQ ID NO: 3491092 - RNA, 19 nt, Human
agaguacuuugguuucuga

SEQ ID NO: 3491093 - RNA, 15 nt, Human
agaguagaaauaaaa

SEQ ID NO: 3491094 - RNA, 18 nt, Human
agaguagagguauaauug

SEQ ID NO: 3491095 - RNA, 21 nt, Human
agaguagauggugaaauuuau

SEQ ID NO: 3491096 - RNA, 18 nt, Human
agaguagcauuucauucu

SEQ ID NO: 3491097 - RNA, 23 nt, Human
agaguagccaggguguggcccug

SEQ ID NO: 3491098 - RNA, 13 nt, Human
agaguagccgaga

SEQ ID NO: 3491099 - RNA, 18 nt, Human
agaguagccgagagccug

SEQ ID NO: 3491100 - RNA, 13 nt, Human
agaguauaugcac

SEQ ID NO: 3491101 - RNA, 14 nt, Human
agaguaugaacacc

SEQ ID NO: 3491102 - RNA, 18 nt, Human
agaguauuuuugacagaa

SEQ ID NO: 3491103 - RNA, 17 nt, Human
agaguauuuuuguauuc

SEQ ID NO: 3491104 - RNA, 21 nt, Human
agagucaacuacacaaagcag

SEQ ID NO: 3491105 - RNA, 22 nt, Human
agagucaacuacacaaagcagg

SEQ ID NO: 3491106 - RNA, 16 nt, Human
agagucaaggccugcu

SEQ ID NO: 3491107 - RNA, 21 nt, Human
agagucacacgggggcagcug

SEQ ID NO: 3491108 - RNA, 22 nt, Human
agagucagaaguuucugccgca

SEQ ID NO: 3491109 - RNA, 14 nt, Human
agagucagaucuuu

SEQ ID NO: 3491110 - RNA, 20 nt, Human
agagucagcucucugcccug

SEQ ID NO: 3491111 - RNA, 15 nt, Human
agagucauauuuuga

SEQ ID NO: 3491112 - RNA, 17 nt, Human
agagucauauuuugauu

SEQ ID NO: 3491113 - RNA, 14 nt, Human
agagucauuguaau

SEQ ID NO: 3491114 - RNA, 21 nt, Human
agagucauuguaauguuguga

SEQ ID NO: 3491115 - RNA, 20 nt, Human
agagucccacugccucaggu

SEQ ID NO: 3491116 - RNA, 21 nt, Human
agagucccagagcaggaggcc

SEQ ID NO: 3491117 - RNA, 22 nt, Human
agaguccccccucccaccucca

SEQ ID NO: 3491118 - RNA, 14 nt, Human
agaguccucacucc

SEQ ID NO: 3491119 - RNA, 13 nt, Human
agaguccucugaa

SEQ ID NO: 3491120 - RNA, 14 nt, Human
agaguccucugaau

SEQ ID NO: 3491121 - RNA, 14 nt, Human
agaguccucuggau

SEQ ID NO: 3491122 - RNA, 17 nt, Human
agaguccugugcugaau

SEQ ID NO: 3491123 - RNA, 22 nt, Human
agagucggaacggagaaaggug

SEQ ID NO: 3491124 - RNA, 12 nt, Human
agagucuaaaga

SEQ ID NO: 3491125 - RNA, 14 nt, Human
agagucuaaagaug

SEQ ID NO: 3491126 - RNA, 21 nt, Human
acucccuugguggcaagagcc

SEQ ID NO: 3491127 - RNA, 22 nt, Human
acuccgagaggugggccagucu

SEQ ID NO: 3491128 - RNA, 13 nt, Human
acuccgcccccag

SEQ ID NO: 3491129 - RNA, 14 nt, Human
acuccggagacagg

SEQ ID NO: 3491130 - RNA, 15 nt, Human
acuccggagacaggg

SEQ ID NO: 3491131 - RNA, 18 nt, Human
acuccggagugagaagcu

SEQ ID NO: 3491132 - RNA, 20 nt, Human
acuccggauugcguuccucc

SEQ ID NO: 3491133 - RNA, 13 nt, Human
acuccggcugugc

SEQ ID NO: 3491134 - RNA, 19 nt, Human
acuccggugugccugcagc

SEQ ID NO: 3491135 - RNA, 20 nt, Human
acuccggugugccugcagcc

SEQ ID NO: 3491136 - RNA, 19 nt, Human
acuccguaacagauuuugu

SEQ ID NO: 3491137 - RNA, 15 nt, Human
acuccgucucaagga

SEQ ID NO: 3491138 - RNA, 15 nt, Human
acuccguuggccacu

SEQ ID NO: 3491139 - RNA, 18 nt, Human
acuccguuggccacuccg

SEQ ID NO: 3491140 - RNA, 16 nt, Human
acuccuacaccuaacu

SEQ ID NO: 3491141 - RNA, 16 nt, Human
acuccuaccugcccug

SEQ ID NO: 3491142 - RNA, 18 nt, Human
acuccuaccugcccugga

SEQ ID NO: 3491143 - RNA, 14 nt, Human
acuccuaccuggua

SEQ ID NO: 3491144 - RNA, 22 nt, Human
acuccuagagaacgcagcccua

SEQ ID NO: 3491145 - RNA, 23 nt, Human
acuccuagagaacgcagcccuag

SEQ ID NO: 3491146 - RNA, 16 nt, Human
acuccuagcuguccuu

SEQ ID NO: 3491147 - RNA, 16 nt, Human
acuccuaggaaaauac

SEQ ID NO: 3491148 - RNA, 13 nt, Human
acuccuaggcagg

SEQ ID NO: 3491149 - RNA, 20 nt, Human
acuccuaggcaggacaugcu

SEQ ID NO: 3491150 - RNA, 19 nt, Human
acuccuaguucuagaaaaa

SEQ ID NO: 3491151 - RNA, 14 nt, Human
acuccuauuuuugu

SEQ ID NO: 3491152 - RNA, 16 nt, Human
acuccuauuuuuguaa

SEQ ID NO: 3491153 - RNA, 20 nt, Human
acuccuauuuuuguaaacug

SEQ ID NO: 3491154 - RNA, 21 nt, Human
acuccucaaaagcaaaugaga

SEQ ID NO: 3491155 - RNA, 13 nt, Human
acuccucacacuu

SEQ ID NO: 3491156 - RNA, 17 nt, Human
acuccucaguucuugcc

SEQ ID NO: 3491157 - RNA, 15 nt, Human
acuccucccaggguu

SEQ ID NO: 3491158 - RNA, 15 nt, Human
acuccuccccacccu

SEQ ID NO: 3491159 - RNA, 18 nt, Human
acuccuccccacccuccu

SEQ ID NO: 3491160 - RNA, 14 nt, Human
acuccuccuagcca

SEQ ID NO: 3491161 - RNA, 15 nt, Human
acuccuccuagccac

SEQ ID NO: 3491162 - RNA, 18 nt, Human
acuccuccuagccaccca

SEQ ID NO: 3491163 - RNA, 23 nt, Human
acuccuccuccaaaggcccccua

SEQ ID NO: 3491164 - RNA, 19 nt, Human
acuccuccucuuucucucc

SEQ ID NO: 3491165 - RNA, 21 nt, Human
acuccuccucuuucucucccc

SEQ ID NO: 3491166 - RNA, 16 nt, Human
acuccucggccuggcu

SEQ ID NO: 3491167 - RNA, 19 nt, Human
acuccucggccuggcuccu

SEQ ID NO: 3491168 - RNA, 23 nt, Human
acuccucuaagccacucuuccaa

SEQ ID NO: 3491169 - RNA, 13 nt, Human
acuccucugcuga

SEQ ID NO: 3491170 - RNA, 16 nt, Human
acuccucugcugaccu

SEQ ID NO: 3491171 - RNA, 14 nt, Human
acuccucuguccag

SEQ ID NO: 3491172 - RNA, 14 nt, Human
acuccugaaaaaaa

SEQ ID NO: 3491173 - RNA, 19 nt, Human
acuccugaaaaaaaaccug

SEQ ID NO: 3491174 - RNA, 15 nt, Human
acuccugaccucagg

SEQ ID NO: 3491175 - RNA, 18 nt, Human
acuccugagaccccuggc

SEQ ID NO: 3491176 - RNA, 20 nt, Human
acuccugagaccccuggccu

SEQ ID NO: 3491177 - RNA, 21 nt, Human
acuccugagaccccuggccuc

SEQ ID NO: 3491178 - RNA, 17 nt, Human
acuccugaggacagcug

SEQ ID NO: 3491179 - RNA, 20 nt, Human
acuccugaggacagcugucc

SEQ ID NO: 3491180 - RNA, 13 nt, Human
acuccugcaaaau

SEQ ID NO: 3491181 - RNA, 14 nt, Human
acuccugcaggcag

SEQ ID NO: 3491182 - RNA, 15 nt, Human
acuccugcaggcagc

SEQ ID NO: 3491183 - RNA, 17 nt, Human
acuccugcaggcagcca

SEQ ID NO: 3491184 - RNA, 22 nt, Human
acuccugcaggcagccaggcca

SEQ ID NO: 3491185 - RNA, 14 nt, Human
acuccugcccuguu

SEQ ID NO: 3491186 - RNA, 11 nt, Human
acuccuggccu

SEQ ID NO: 3491187 - RNA, 14 nt, Human
acuccuggccucaa

SEQ ID NO: 3491188 - RNA, 21 nt, Human
acuccugggcucaagcagucu

SEQ ID NO: 3491189 - RNA, 23 nt, Human
acuccugguccuaggcuggaagg

SEQ ID NO: 3491190 - RNA, 15 nt, Human
acuccuguaauuccu

SEQ ID NO: 3491191 - RNA, 18 nt, Human
acuccuguacacugaaua

SEQ ID NO: 3491192 - RNA, 16 nt, Human
acuccugugggagccu

SEQ ID NO: 3491193 - RNA, 20 nt, Human
acuccugugggagccucgca

SEQ ID NO: 3491194 - RNA, 16 nt, Human
acuccuguuacuuacc

SEQ ID NO: 3491195 - RNA, 22 nt, Human
acuccuuauuuggcgugacccg

SEQ ID NO: 3491196 - RNA, 12 nt, Human
acuccuuccagc

SEQ ID NO: 3491197 - RNA, 13 nt, Human
acuccuuccagcu

SEQ ID NO: 3491198 - RNA, 11 nt, Human
acuccuuccug

SEQ ID NO: 3491199 - RNA, 13 nt, Human
acuccuuccugcc

SEQ ID NO: 3491200 - RNA, 14 nt, Human
acuccuuccugccc

SEQ ID NO: 3491201 - RNA, 23 nt, Human
acuccuugaaaacacuguucucu

SEQ ID NO: 3491202 - RNA, 17 nt, Human
acuccuugagagaccag

SEQ ID NO: 3491203 - RNA, 20 nt, Human
acuccuugcaucaagggguc

SEQ ID NO: 3491204 - RNA, 11 nt, Human
acuccuuggcc

SEQ ID NO: 3491205 - RNA, 14 nt, Human
acuccuuucucauc

SEQ ID NO: 3491206 - RNA, 14 nt, Human
acuccuuuuaaaga

SEQ ID NO: 3491207 - RNA, 17 nt, Human
acucgagaccuuuucaa

SEQ ID NO: 3491208 - RNA, 21 nt, Human
acucgaggacuguauuuguga

SEQ ID NO: 3491209 - RNA, 15 nt, Human
acucgagucugaggc

SEQ ID NO: 3491210 - RNA, 14 nt, Human
acucgcccgcccac

SEQ ID NO: 3491211 - RNA, 19 nt, Human
acucgcccgcccacugucc

SEQ ID NO: 3491212 - RNA, 18 nt, Human
acucgcgacaaugcaaac

SEQ ID NO: 3491213 - RNA, 15 nt, Human
acucgcgcucaguaa

SEQ ID NO: 3491214 - RNA, 16 nt, Human
acucgcgcucaguaaa

SEQ ID NO: 3491215 - RNA, 15 nt, Human
acucgcuucccccau

SEQ ID NO: 3491216 - RNA, 20 nt, Human
acucgcuucccccauagcca

SEQ ID NO: 3491217 - RNA, 16 nt, Human
acucgcuucucuguga

SEQ ID NO: 3491218 - RNA, 22 nt, Human
acucggccucccaaagugcugg

SEQ ID NO: 3491219 - RNA, 16 nt, Human
acucggcucugcaguc

SEQ ID NO: 3491220 - RNA, 20 nt, Human
acucggguuucucuguggcu

SEQ ID NO: 3491221 - RNA, 22 nt, Human
acucgugucuggcacagccugg

SEQ ID NO: 3491222 - RNA, 20 nt, Human
agaguucccuugaaacuuug

SEQ ID NO: 3491223 - RNA, 20 nt, Human
agaguucuauacuguaaagc

SEQ ID NO: 3491224 - RNA, 20 nt, Human
agaguucuuuuugaaguauu

SEQ ID NO: 3491225 - RNA, 12 nt, Human
agaguugaaccu

SEQ ID NO: 3491226 - RNA, 19 nt, Human
agaguugaggaacuguaca

SEQ ID NO: 3491227 - RNA, 20 nt, Human
agaguugaugguuguacaua

SEQ ID NO: 3491228 - RNA, 19 nt, Human
agaguugggacaauugcuu

SEQ ID NO: 3491229 - RNA, 13 nt, Human
agaguuguaaaua

SEQ ID NO: 3491230 - RNA, 21 nt, Human
agaguuguaaauauauaaaua

SEQ ID NO: 3491231 - RNA, 12 nt, Human
agaguuguuaca

SEQ ID NO: 3491232 - RNA, 19 nt, Human
agaguuguuacauuuuuaa

SEQ ID NO: 3491233 - RNA, 21 nt, Human
agaguuguuacauuuuuaagu

SEQ ID NO: 3491234 - RNA, 22 nt, Human
agaguuuaacacaaguccugug

SEQ ID NO: 3491235 - RNA, 15 nt, Human
agaguuuagcccuga

SEQ ID NO: 3491236 - RNA, 16 nt, Human
agaguuuagcuggaaa

SEQ ID NO: 3491237 - RNA, 23 nt, Human
agaguuuagcuguaacaguucuu

SEQ ID NO: 3491238 - RNA, 16 nt, Human
agaguuucaaccauga

SEQ ID NO: 3491239 - RNA, 13 nt, Human
agaguuuccugaa

SEQ ID NO: 3491240 - RNA, 19 nt, Human
agaguuucguggcuucagg

SEQ ID NO: 3491241 - RNA, 23 nt, Human
agaguuugaugaggcccuccaca

SEQ ID NO: 3491242 - RNA, 17 nt, Human
agaguuugccuuauaaa

SEQ ID NO: 3491243 - RNA, 16 nt, Human
agaguuugguuugguc

SEQ ID NO: 3491244 - RNA, 19 nt, Human
agaguuuguguguugucuu

SEQ ID NO: 3491245 - RNA, 17 nt, Human
agaguuuuggaugcagu

SEQ ID NO: 3491246 - RNA, 20 nt, Human
agaguuuuggaugcagugcu

SEQ ID NO: 3491247 - RNA, 21 nt, Human
agaguuuuggaugcagugcuc

SEQ ID NO: 3491248 - RNA, 12 nt, Human
agaguuuuggga

SEQ ID NO: 3491249 - RNA, 17 nt, Human
agauaaaaaaacagcuu

SEQ ID NO: 3491250 - RNA, 21 nt, Human
agauaaaaagauggccuuugc

SEQ ID NO: 3491251 - RNA, 16 nt, Human
agauaaaaaguggaau

SEQ ID NO: 3491252 - RNA, 17 nt, Human
agauaaaaaguggaauu

SEQ ID NO: 3491253 - RNA, 22 nt, Human
agauaaaauuauagaugggaau

SEQ ID NO: 3491254 - RNA, 14 nt, Human
agauaaacacaaga

SEQ ID NO: 3491255 - RNA, 15 nt, Human
agauaaacacaagau

SEQ ID NO: 3491256 - RNA, 21 nt, Human
agauaaacacagcugcuuucu

SEQ ID NO: 3491257 - RNA, 11 nt, Human
agauaaagaug

SEQ ID NO: 3491258 - RNA, 15 nt, Human
agauaaagaugaucu

SEQ ID NO: 3491259 - RNA, 12 nt, Human
agauaaauauua

SEQ ID NO: 3491260 - RNA, 21 nt, Human
agauaacaaugcagcaaggcc

SEQ ID NO: 3491261 - RNA, 13 nt, Human
agauaacuaggaa

SEQ ID NO: 3491262 - RNA, 20 nt, Human
agauaacuguuauuuauaau

SEQ ID NO: 3491263 - RNA, 12 nt, Human
agauaagacaua

SEQ ID NO: 3491264 - RNA, 13 nt, Human
agauaagcaagag

SEQ ID NO: 3491265 - RNA, 16 nt, Human
agauaagcaagagaga

SEQ ID NO: 3491266 - RNA, 16 nt, Human
agauaaguguauuuuu

SEQ ID NO: 3491267 - RNA, 18 nt, Human
agauaaguguauuuuuca

SEQ ID NO: 3491268 - RNA, 16 nt, Human
agauaaguuggaaaca

SEQ ID NO: 3491269 - RNA, 19 nt, Human
agauaaguuggaaacacua

SEQ ID NO: 3491270 - RNA, 21 nt, Human
agauaaguuggaaacacuaaa

SEQ ID NO: 3491271 - RNA, 16 nt, Human
agauaauaauauaugu

SEQ ID NO: 3491272 - RNA, 14 nt, Human
agauaaucagccuc

SEQ ID NO: 3491273 - RNA, 13 nt, Human
agauaaucccugu

SEQ ID NO: 3491274 - RNA, 23 nt, Human
agauaaucuagaacacaggcaaa

SEQ ID NO: 3491275 - RNA, 19 nt, Human
agauaaucuuagcugccaa

SEQ ID NO: 3491276 - RNA, 18 nt, Human
agauaaugugaaaauggu

SEQ ID NO: 3491277 - RNA, 19 nt, Human
agauaauuacugccuugaa

SEQ ID NO: 3491278 - RNA, 14 nt, Human
agauaauugcuauu

SEQ ID NO: 3491279 - RNA, 19 nt, Human
agauacaggaaaagcugcu

SEQ ID NO: 3491280 - RNA, 22 nt, Human
agauacaguuacucagaauucu

SEQ ID NO: 3491281 - RNA, 14 nt, Human
agauacauacagaa

SEQ ID NO: 3491282 - RNA, 17 nt, Human
agauacaucacagucac

SEQ ID NO: 3491283 - RNA, 15 nt, Human
agauaccaucagcaa

SEQ ID NO: 3491284 - RNA, 14 nt, Human
agauaccuaaaaca

SEQ ID NO: 3491285 - RNA, 14 nt, Human
agauaccucacccu

SEQ ID NO: 3491286 - RNA, 20 nt, Human
agauaccuuaaaauuugaaa

SEQ ID NO: 3491287 - RNA, 22 nt, Human
agauaccuuaucuuacaauauu

SEQ ID NO: 3491288 - RNA, 19 nt, Human
agauacugcuacuguaauu

SEQ ID NO: 3491289 - RNA, 16 nt, Human
agauacugcuguguaa

SEQ ID NO: 3491290 - RNA, 22 nt, Human
agauacugcuguguaaugguua

SEQ ID NO: 3491291 - RNA, 16 nt, Human
agauacuguaucauga

SEQ ID NO: 3491292 - RNA, 16 nt, Human
agauacuuaagugcug

SEQ ID NO: 3491293 - RNA, 22 nt, Human
agauacuuggucacagccaggc

SEQ ID NO: 3491294 - RNA, 22 nt, Human
agauacuuuguauuguccuauu

SEQ ID NO: 3491295 - RNA, 14 nt, Human
agauagaagaacug

SEQ ID NO: 3491296 - RNA, 16 nt, Human
agauagaagaacugca

SEQ ID NO: 3491297 - RNA, 12 nt, Human
agauagaaugac

SEQ ID NO: 3491298 - RNA, 14 nt, Human
agauagacaggucc

SEQ ID NO: 3491299 - RNA, 15 nt, Human
agauagacagguccu

SEQ ID NO: 3491300 - RNA, 18 nt, Human
agauagagaguuguugug

SEQ ID NO: 3491301 - RNA, 17 nt, Human
agauagcauugugaacu

SEQ ID NO: 3491302 - RNA, 20 nt, Human
agauagccaaggccaaagga

SEQ ID NO: 3491303 - RNA, 19 nt, Human
agauagccccacaggaggu

SEQ ID NO: 3491304 - RNA, 15 nt, Human
agauagcccuguccu

SEQ ID NO: 3491305 - RNA, 17 nt, Human
agauagcccuguccugg

SEQ ID NO: 3491306 - RNA, 18 nt, Human
agauagcccuguccuggu

SEQ ID NO: 3491307 - RNA, 18 nt, Human
agauagccuguggcccug

SEQ ID NO: 3491308 - RNA, 14 nt, Human
agauagcugcaugu

SEQ ID NO: 3491309 - RNA, 21 nt, Human
agauagcugcauguggcuuuu

SEQ ID NO: 3491310 - RNA, 14 nt, Human
agauagcugugacu

SEQ ID NO: 3491311 - RNA, 14 nt, Human
agauaggaccuugg

SEQ ID NO: 3491312 - RNA, 12 nt, Human
agauaggccugu

SEQ ID NO: 3491313 - RNA, 22 nt, Human
agauaggcucugcacagaugga

SEQ ID NO: 3491314 - RNA, 15 nt, Human
agauagggcugggca

SEQ ID NO: 3491315 - RNA, 14 nt, Human
agauaguacauaaa

SEQ ID NO: 3491316 - RNA, 19 nt, Human
agauaguaucuagcaauca

SEQ ID NO: 3491317 - RNA, 21 nt, Human
agauaguaugcacuauauaca

SEQ ID NO: 3491318 - RNA, 21 nt, Human
agauaguccauaauguucugc

SEQ ID NO: 3491319 - RNA, 21 nt, Human
agauagucuuggaagcuguuu

SEQ ID NO: 3491320 - RNA, 23 nt, Human
agauaguuuugccagaacaguuu

SEQ ID NO: 3491321 - RNA, 16 nt, Human
agauauaagugcugua

SEQ ID NO: 3491322 - RNA, 17 nt, Human
agauauaagugcuguau

SEQ ID NO: 3491323 - RNA, 21 nt, Human
agauauaagugcuguauaaaa

SEQ ID NO: 3491324 - RNA, 19 nt, Human
agauauaaugaacaaaauu

SEQ ID NO: 3491325 - RNA, 19 nt, Human
agauauacuggaacccuuu

SEQ ID NO: 3491326 - RNA, 15 nt, Human
agauauacuuguuuu

SEQ ID NO: 3491327 - RNA, 13 nt, Human
agauauauaucau

SEQ ID NO: 3491328 - RNA, 14 nt, Human
agauauauauucau

SEQ ID NO: 3491329 - RNA, 18 nt, Human
agauauaucugaaaacug

SEQ ID NO: 3491330 - RNA, 18 nt, Human
agauauauuaaaaauaua

SEQ ID NO: 3491331 - RNA, 19 nt, Human
agauauauuaaaaauauaa

SEQ ID NO: 3491332 - RNA, 17 nt, Human
agauauauuuuuaagau

SEQ ID NO: 3491333 - RNA, 20 nt, Human
agauauauuuuuaagauaau

SEQ ID NO: 3491334 - RNA, 23 nt, Human
agauauauuuuuaagauaauaau

SEQ ID NO: 3491335 - RNA, 14 nt, Human
agauauauuuuuca

SEQ ID NO: 3491336 - RNA, 17 nt, Human
agauauccucugcuuaa

SEQ ID NO: 3491337 - RNA, 17 nt, Human
agauaucugagggagga

SEQ ID NO: 3491338 - RNA, 23 nt, Human
agauaucuugaaaugaaaguaua

SEQ ID NO: 3491339 - RNA, 14 nt, Human
agauaucuuuucuu

SEQ ID NO: 3491340 - RNA, 18 nt, Human
agauaucuuuucuuuaga

SEQ ID NO: 3491341 - RNA, 14 nt, Human
agauaucuuuuuau

SEQ ID NO: 3491342 - RNA, 22 nt, Human
agauaucuuuuuauugaugugc

SEQ ID NO: 3491343 - RNA, 14 nt, Human
agauaugaauauau

SEQ ID NO: 3491344 - RNA, 14 nt, Human
agauaugauucaaa

SEQ ID NO: 3491345 - RNA, 15 nt, Human
agauaugauucaaau

SEQ ID NO: 3491346 - RNA, 13 nt, Human
agauaugcaaaag

SEQ ID NO: 3491347 - RNA, 16 nt, Human
agauaugugaagaaaa

SEQ ID NO: 3491348 - RNA, 22 nt, Human
agauauuaaaugauguuuuauu

SEQ ID NO: 3491349 - RNA, 21 nt, Human
agauauuacuacuuaccauuu

SEQ ID NO: 3491350 - RNA, 15 nt, Human
agauauuacuuuauc

SEQ ID NO: 3491351 - RNA, 17 nt, Human
agauauuacuuuaucac

SEQ ID NO: 3491352 - RNA, 12 nt, Human
agauauuauuca

SEQ ID NO: 3491353 - RNA, 18 nt, Human
agauauuccuauugugca

SEQ ID NO: 3491354 - RNA, 20 nt, Human
agauauugaggccaagaaua

SEQ ID NO: 3491355 - RNA, 17 nt, Human
agauauuggacaaagaa

SEQ ID NO: 3491356 - RNA, 22 nt, Human
agauauugucagaguucugcuc

SEQ ID NO: 3491357 - RNA, 18 nt, Human
agauauugugaaguacau

SEQ ID NO: 3491358 - RNA, 19 nt, Human
agauauuguucaaacaaua

SEQ ID NO: 3491359 - RNA, 13 nt, Human
agauauuuauaua

SEQ ID NO: 3491360 - RNA, 13 nt, Human
agauauuugcacc

SEQ ID NO: 3491361 - RNA, 11 nt, Human
agauauuuggc

SEQ ID NO: 3491362 - RNA, 12 nt, Human
agauauuuggcu

SEQ ID NO: 3491363 - RNA, 16 nt, Human
agauauuuggcuuaaa

SEQ ID NO: 3491364 - RNA, 20 nt, Human
agauauuuggcuuaaauaua

SEQ ID NO: 3491365 - RNA, 20 nt, Human
agauauuuugcuuugugauu

SEQ ID NO: 3491366 - RNA, 19 nt, Human
agauauuuugggcaugugg

SEQ ID NO: 3491367 - RNA, 20 nt, Human
agauauuuuguaaaauguau

SEQ ID NO: 3491368 - RNA, 21 nt, Human
agauauuuuguaaaauguauu

SEQ ID NO: 3491369 - RNA, 16 nt, Human
agauauuuuucauaaa

SEQ ID NO: 3491370 - RNA, 18 nt, Human
agauauuuuuucagaaau

SEQ ID NO: 3491371 - RNA, 22 nt, Human
agauauuuuuucagaaauaugu

SEQ ID NO: 3491372 - RNA, 19 nt, Human
agauaaagaccagaaauuc

SEQ ID NO: 3491373 - RNA, 13 nt, Human
agauaaagaugau

SEQ ID NO: 3491374 - RNA, 13 nt, Human
agauaaagccaga

SEQ ID NO: 3491375 - RNA, 13 nt, Human
agauaaaggacag

SEQ ID NO: 3491376 - RNA, 14 nt, Human
agauaaaucuagua

SEQ ID NO: 3491377 - RNA, 16 nt, Human
agauaaaugauucaaa

SEQ ID NO: 3491378 - RNA, 13 nt, Human
agauaaauuauaa

SEQ ID NO: 3491379 - RNA, 18 nt, Human
agauaacugaaaauuauu

SEQ ID NO: 3491380 - RNA, 14 nt, Human
agauaacugagaau

SEQ ID NO: 3491381 - RNA, 16 nt, Human
agauaacuguuauuua

SEQ ID NO: 3491382 - RNA, 17 nt, Human
agauaagcaagagagau

SEQ ID NO: 3491383 - RNA, 22 nt, Human
agauaagcaagagagauguuuu

SEQ ID NO: 3491384 - RNA, 19 nt, Human
agauaaggguaucugguga

SEQ ID NO: 3491385 - RNA, 18 nt, Human
agauaagguaaaaugcca

SEQ ID NO: 3491386 - RNA, 15 nt, Human
agauaaguuggaaac

SEQ ID NO: 3491387 - RNA, 18 nt, Human
agauaaguuggaaacacu

SEQ ID NO: 3491388 - RNA, 18 nt, Human
agauaauacaccacuaca

SEQ ID NO: 3491389 - RNA, 15 nt, Human
agauaauaugagaau

SEQ ID NO: 3491390 - RNA, 15 nt, Human
agauaauauuacugu

SEQ ID NO: 3491391 - RNA, 16 nt, Human
agauaauauuacuguu

SEQ ID NO: 3491392 - RNA, 14 nt, Human
agauaauauuguuu

SEQ ID NO: 3491393 - RNA, 17 nt, Human
agauaauauuguuuggu

SEQ ID NO: 3491394 - RNA, 15 nt, Human
agauaaucagccucu

SEQ ID NO: 3491395 - RNA, 16 nt, Human
agauaaucagccucuu

SEQ ID NO: 3491396 - RNA, 12 nt, Human
agauaaugugaa

SEQ ID NO: 3491397 - RNA, 13 nt, Human
agauaaugugaaa

SEQ ID NO: 3491398 - RNA, 19 nt, Human
agauaaugugauauuauac

SEQ ID NO: 3491399 - RNA, 15 nt, Human
agauaauuaaaaaga

SEQ ID NO: 3491400 - RNA, 19 nt, Human
agauaauuaccuacucugg

SEQ ID NO: 3491401 - RNA, 17 nt, Human
agauaauuacugccuug

SEQ ID NO: 3491402 - RNA, 12 nt, Human
agauaauuauaa

SEQ ID NO: 3491403 - RNA, 18 nt, Human
agauaauucuagcuuuga

SEQ ID NO: 3491404 - RNA, 14 nt, Human
agauacaaauuaau

SEQ ID NO: 3491405 - RNA, 18 nt, Human
agauacaaauuaauuuua

SEQ ID NO: 3491406 - RNA, 13 nt, Human
agauacaauaaau

SEQ ID NO: 3491407 - RNA, 21 nt, Human
agauacaaucagcugcuuugu

SEQ ID NO: 3491408 - RNA, 20 nt, Human
agauacaggaaaagcugcug

SEQ ID NO: 3491409 - RNA, 21 nt, Human
agauacaggaaaagcugcuga

SEQ ID NO: 3491410 - RNA, 21 nt, Human
agauacaugguugugaccuga

SEQ ID NO: 3491411 - RNA, 15 nt, Human
agauaccaagcaugu

SEQ ID NO: 3491412 - RNA, 14 nt, Human
agauaccagcgagg

SEQ ID NO: 3491413 - RNA, 19 nt, Human
agauaccagcgaggaggcu

SEQ ID NO: 3491414 - RNA, 23 nt, Human
agauaccagcgaggaggcuccag

SEQ ID NO: 3491415 - RNA, 18 nt, Human
agauaccagguugaaaga

SEQ ID NO: 3491416 - RNA, 20 nt, Human
agcaaugacaucucaggggc

SEQ ID NO: 3491417 - RNA, 20 nt, Human
agcaaugauguccagaagaa

SEQ ID NO: 3491418 - RNA, 13 nt, Human
agcaaugcauuuu

SEQ ID NO: 3491419 - RNA, 21 nt, Human
agcaaugcccguaaugcuuag

SEQ ID NO: 3491420 - RNA, 22 nt, Human
agcaaugcugaugaaucacugu

SEQ ID NO: 3491421 - RNA, 15 nt, Human
agcaaugucugugcu

SEQ ID NO: 3491422 - RNA, 23 nt, Human
agcaauuccaugcuauaaaaacu

SEQ ID NO: 3491423 - RNA, 13 nt, Human
agauuuuccuucc

SEQ ID NO: 3491424 - RNA, 16 nt, Human
agauuuucugguucua

SEQ ID NO: 3491425 - RNA, 14 nt, Human
agauuuucuuuaaa

SEQ ID NO: 3491426 - RNA, 18 nt, Human
agauuuucuuuaaaagaa

SEQ ID NO: 3491427 - RNA, 22 nt, Human
agauuuucuuuugccuuuugca

SEQ ID NO: 3491428 - RNA, 12 nt, Human
agauuuugaaaa

SEQ ID NO: 3491429 - RNA, 17 nt, Human
agauuuugaaaacuaca

SEQ ID NO: 3491430 - RNA, 19 nt, Human
agauuuugagguaaagaua

SEQ ID NO: 3491431 - RNA, 18 nt, Human
agauuuugauaacuguuu

SEQ ID NO: 3491432 - RNA, 19 nt, Human
agauuuugauagcaaagcg

SEQ ID NO: 3491433 - RNA, 16 nt, Human
agauuuugcuuuucca

SEQ ID NO: 3491434 - RNA, 18 nt, Human
agauuuuguguuuauucu

SEQ ID NO: 3491435 - RNA, 19 nt, Human
agauuuuguguuuauucuu

SEQ ID NO: 3491436 - RNA, 22 nt, Human
agauuuuguguuuauucuugau

SEQ ID NO: 3491437 - RNA, 23 nt, Human
agauuuuguguuuauucuugaug

SEQ ID NO: 3491438 - RNA, 22 nt, Human
agauuuuguuuugcuuuuucug

SEQ ID NO: 3491439 - RNA, 17 nt, Human
agauuuuucaugauuuu

SEQ ID NO: 3491440 - RNA, 21 nt, Human
agauuuuucggaggccccacu

SEQ ID NO: 3491441 - RNA, 13 nt, Human
agauuuuucucaa

SEQ ID NO: 3491442 - RNA, 13 nt, Human
agauuuuugcaau

SEQ ID NO: 3491443 - RNA, 16 nt, Human
agauuuuuuaauaauu

SEQ ID NO: 3491444 - RNA, 17 nt, Human
agauuuuuuaauuguuu

SEQ ID NO: 3491445 - RNA, 23 nt, Human
agauuuuuuaauuguuuaaaaac

SEQ ID NO: 3491446 - RNA, 13 nt, Human
agauuuuuuauug

SEQ ID NO: 3491447 - RNA, 16 nt, Human
agauuuuuucagacuu

SEQ ID NO: 3491448 - RNA, 23 nt, Human
agcaaaaaaaaaaaaaagcaucu

SEQ ID NO: 3491449 - RNA, 23 nt, Human
agcaaaaaaaacccaugugguga

SEQ ID NO: 3491450 - RNA, 14 nt, Human
agcaaaaaagaguu

SEQ ID NO: 3491451 - RNA, 14 nt, Human
agcaaaaacaugua

SEQ ID NO: 3491452 - RNA, 22 nt, Human
agcaaaaaguggggcagagccu

SEQ ID NO: 3491453 - RNA, 16 nt, Human
agcaaaaauauaaaau

SEQ ID NO: 3491454 - RNA, 15 nt, Human
agcaaaaauauuuua

SEQ ID NO: 3491455 - RNA, 20 nt, Human
agcaaaaaugcuaauauuaa

SEQ ID NO: 3491456 - RNA, 17 nt, Human
agcaaaaccauugcuuc

SEQ ID NO: 3491457 - RNA, 22 nt, Human
agcaaaaccauugcuucacuac

SEQ ID NO: 3491458 - RNA, 12 nt, Human
agcaaaagaaaa

SEQ ID NO: 3491459 - RNA, 11 nt, Human
agcaaaaggca

SEQ ID NO: 3491460 - RNA, 15 nt, Human
agcaaaaucaagaga

SEQ ID NO: 3491461 - RNA, 20 nt, Human
agcaaaaucaagcaagccuc

SEQ ID NO: 3491462 - RNA, 15 nt, Human
agcaaaaucuaccag

SEQ ID NO: 3491463 - RNA, 20 nt, Human
agcaaaaugcauguaaucaa

SEQ ID NO: 3491464 - RNA, 14 nt, Human
agcaaaaugugaau

SEQ ID NO: 3491465 - RNA, 13 nt, Human
agcaaacagagga

SEQ ID NO: 3491466 - RNA, 15 nt, Human
agcaaaccaagagau

SEQ ID NO: 3491467 - RNA, 19 nt, Human
agcaaaccaagagauugcu

SEQ ID NO: 3491468 - RNA, 17 nt, Human
agcaaacccugucaaac

SEQ ID NO: 3491469 - RNA, 13 nt, Human
agcaaaccuguaa

SEQ ID NO: 3491470 - RNA, 19 nt, Human
agcaaacuaacuugacuuu

SEQ ID NO: 3491471 - RNA, 13 nt, Human
agcaaacucugcu

SEQ ID NO: 3491472 - RNA, 15 nt, Human
agcaaacucugcugu

SEQ ID NO: 3491473 - RNA, 13 nt, Human
agcaaacucuuuu

SEQ ID NO: 3491474 - RNA, 22 nt, Human
agcaaacugcaugcccagagac

SEQ ID NO: 3491475 - RNA, 18 nt, Human
agcaaagaggacucgcuu

SEQ ID NO: 3491476 - RNA, 12 nt, Human
agcaaagagugg

SEQ ID NO: 3491477 - RNA, 13 nt, Human
agcaaagcacaga

SEQ ID NO: 3491478 - RNA, 15 nt, Human
agcaaagcaccagcu

SEQ ID NO: 3491479 - RNA, 19 nt, Human
agcaaagcacccauuucaa

SEQ ID NO: 3491480 - RNA, 20 nt, Human
agcaaagcacccauuucaau

SEQ ID NO: 3491481 - RNA, 19 nt, Human
agcaaagccccaugcugga

SEQ ID NO: 3491482 - RNA, 21 nt, Human
agcaaagccccaugcuggagc

SEQ ID NO: 3491483 - RNA, 12 nt, Human
agcaaagccugu

SEQ ID NO: 3491484 - RNA, 20 nt, Human
agcaaagcggguuauaauga

SEQ ID NO: 3491485 - RNA, 21 nt, Human
agcaaaggagauuggaaggaa

SEQ ID NO: 3491486 - RNA, 19 nt, Human
agcaaaggcugagaacacu

SEQ ID NO: 3491487 - RNA, 20 nt, Human
agcaaaguagaucaugcaua

SEQ ID NO: 3491488 - RNA, 22 nt, Human
agcaaagucuaaaguuuacagu

SEQ ID NO: 3491489 - RNA, 15 nt, Human
agcaaauacuuagca

SEQ ID NO: 3491490 - RNA, 21 nt, Human
agcaaauaucauacuguucaa

SEQ ID NO: 3491491 - RNA, 23 nt, Human
agcaaaucaccacaaacuguaau

SEQ ID NO: 3491492 - RNA, 19 nt, Human
agcaaaucauuuguuuaaa

SEQ ID NO: 3491493 - RNA, 20 nt, Human
agcaaaucgaaugaaauuaa

SEQ ID NO: 3491494 - RNA, 22 nt, Human
agcaaaugcaaaaacucuuuga

SEQ ID NO: 3491495 - RNA, 20 nt, Human
agcaaaugucaugcugccuu

SEQ ID NO: 3491496 - RNA, 20 nt, Human
agcaaauguuacauagugua

SEQ ID NO: 3491497 - RNA, 18 nt, Human
agcaaauguuucugcagu

SEQ ID NO: 3491498 - RNA, 15 nt, Human
agcaaauuaauuggc

SEQ ID NO: 3491499 - RNA, 22 nt, Human
agcaaauuaauuggcagcagau

SEQ ID NO: 3491500 - RNA, 19 nt, Human
agcaaauucuguuuuucua

SEQ ID NO: 3491501 - RNA, 11 nt, Human
agcaaauugau

SEQ ID NO: 3491502 - RNA, 19 nt, Human
agcaaauuucaaaagacau

SEQ ID NO: 3491503 - RNA, 12 nt, Human
agcaaauuuggg

SEQ ID NO: 3491504 - RNA, 13 nt, Human
agcaacaaagaaa

SEQ ID NO: 3491505 - RNA, 12 nt, Human
agcaacaauaaa

SEQ ID NO: 3491506 - RNA, 14 nt, Human
agcaacaauuuuca

SEQ ID NO: 3491507 - RNA, 17 nt, Human
agcaacaauuuucagau

SEQ ID NO: 3491508 - RNA, 16 nt, Human
agcaacacaaagcuuu

SEQ ID NO: 3491509 - RNA, 21 nt, Human
agcaacacaaagcuuuugcau

SEQ ID NO: 3491510 - RNA, 14 nt, Human
agcaacacaagcug

SEQ ID NO: 3491511 - RNA, 17 nt, Human
agcaacacaagcuggaa

SEQ ID NO: 3491512 - RNA, 22 nt, Human
agcaacacagaggaauuuauac

SEQ ID NO: 3491513 - RNA, 13 nt, Human
agcaacagaaaaa

SEQ ID NO: 3491514 - RNA, 16 nt, Human
agcaacagaaaaaugg

SEQ ID NO: 3491515 - RNA, 23 nt, Human
agcaacagagugagacccugucu

SEQ ID NO: 3491516 - RNA, 14 nt, Human
agcaacaggaaaaa

SEQ ID NO: 3491517 - RNA, 22 nt, Human
agcaacaggaaucaagagcugc

SEQ ID NO: 3491518 - RNA, 18 nt, Human
agcaacagguuuuauaau

SEQ ID NO: 3491519 - RNA, 20 nt, Human
agcaacauuuuacccacaca

SEQ ID NO: 3491520 - RNA, 17 nt, Human
agcaaccagagcacugu

SEQ ID NO: 3491521 - RNA, 15 nt, Human
agcaaccccaggcug

SEQ ID NO: 3491522 - RNA, 21 nt, Human
agcaaccccuggaccccagcc

SEQ ID NO: 3491523 - RNA, 23 nt, Human
agcaaccccuggaccccagccuc

SEQ ID NO: 3491524 - RNA, 19 nt, Human
agcaaccgccucaaaaugu

SEQ ID NO: 3491525 - RNA, 18 nt, Human
agcaaccgguggauccuc

SEQ ID NO: 3491526 - RNA, 20 nt, Human
agcaaccguggcccuuccug

SEQ ID NO: 3491527 - RNA, 23 nt, Human
agcaaccguggcccuuccuggac

SEQ ID NO: 3491528 - RNA, 15 nt, Human
agcaaccucaguaau

SEQ ID NO: 3491529 - RNA, 18 nt, Human
agcaaccuggguccaaau

SEQ ID NO: 3491530 - RNA, 22 nt, Human
agcaaccuggguccaaauaaaa

SEQ ID NO: 3491531 - RNA, 15 nt, Human
agcaaccuguagagu

SEQ ID NO: 3491532 - RNA, 22 nt, Human
agcaaccuuucaccuuugugua

SEQ ID NO: 3491533 - RNA, 18 nt, Human
agcaacgaucacaaauga

SEQ ID NO: 3491534 - RNA, 21 nt, Human
agcaacgaucacaaaugacuu

SEQ ID NO: 3491535 - RNA, 14 nt, Human
agcaacgcaggccc

SEQ ID NO: 3491536 - RNA, 23 nt, Human
agcaacucuaagacuacagcaca

SEQ ID NO: 3491537 - RNA, 14 nt, Human
agcaacucuugauu

SEQ ID NO: 3491538 - RNA, 20 nt, Human
agcaacucuugauuauccau

SEQ ID NO: 3491539 - RNA, 23 nt, Human
agcaacugaauaaauaccucuua

SEQ ID NO: 3491540 - RNA, 15 nt, Human
agcaacuucuucucc

SEQ ID NO: 3491541 - RNA, 16 nt, Human
agcaacuucuucucca

SEQ ID NO: 3491542 - RNA, 18 nt, Human
agcaacuucuucuccauc

SEQ ID NO: 3491543 - RNA, 14 nt, Human
agcaacuuguccua

SEQ ID NO: 3491544 - RNA, 21 nt, Human
agcaacuugucuuuuucugga

SEQ ID NO: 3491545 - RNA, 16 nt, Human
agcaagaaaaaaaaau

SEQ ID NO: 3491546 - RNA, 19 nt, Human
agcaagaaaaaaaaaugcc

SEQ ID NO: 3491547 - RNA, 12 nt, Human
agcaagaaagaa

SEQ ID NO: 3491548 - RNA, 18 nt, Human
agcaagaagggaguucca

SEQ ID NO: 3491549 - RNA, 21 nt, Human
agcaagaauaaaaaagaaauc

SEQ ID NO: 3491550 - RNA, 14 nt, Human
agcaagacauuaua

SEQ ID NO: 3491551 - RNA, 22 nt, Human
agcaagacgcugugcugcccug

SEQ ID NO: 3491552 - RNA, 12 nt, Human
agcaagacucug

SEQ ID NO: 3491553 - RNA, 17 nt, Human
agcaagacuguuagccc

SEQ ID NO: 3491554 - RNA, 22 nt, Human
agcaagacuucucuuugccuca

SEQ ID NO: 3491555 - RNA, 23 nt, Human
agcaagacuucucuuugccucaa

SEQ ID NO: 3491556 - RNA, 23 nt, Human
agcaagagagaaccuaacuguau

SEQ ID NO: 3491557 - RNA, 23 nt, Human
agcaagagagcagcaaggucuug

SEQ ID NO: 3491558 - RNA, 19 nt, Human
agcaagaggccguggcugc

SEQ ID NO: 3491559 - RNA, 19 nt, Human
agcacuagccaaaccucac

SEQ ID NO: 3491560 - RNA, 14 nt, Human
agcacuauacagau

SEQ ID NO: 3491561 - RNA, 18 nt, Human
agcacuaugcuuuccuuc

SEQ ID NO: 3491562 - RNA, 14 nt, Human
agcacucacacagg

SEQ ID NO: 3491563 - RNA, 14 nt, Human
agcacucccaaguc

SEQ ID NO: 3491564 - RNA, 20 nt, Human
agcacuccucccugauguac

SEQ ID NO: 3491565 - RNA, 16 nt, Human
agcacuccugcuuaau

SEQ ID NO: 3491566 - RNA, 14 nt, Human
agcacucgugugca

SEQ ID NO: 3491567 - RNA, 10 nt, Human
agcacugaaa

SEQ ID NO: 3491568 - RNA, 11 nt, Human
agcacugaaaa

SEQ ID NO: 3491569 - RNA, 16 nt, Human
agcacugacuucuaag

SEQ ID NO: 3491570 - RNA, 19 nt, Human
agcacugacuucuaaguaa

SEQ ID NO: 3491571 - RNA, 12 nt, Human
agcacugagcaa

SEQ ID NO: 3491572 - RNA, 16 nt, Human
agcacugagcaaagca

SEQ ID NO: 3491573 - RNA, 14 nt, Human
agcacugaggaaga

SEQ ID NO: 3491574 - RNA, 14 nt, Human
agcacugccaggag

SEQ ID NO: 3491575 - RNA, 13 nt, Human
agcacugccugcu

SEQ ID NO: 3491576 - RNA, 12 nt, Human
agcacugcucca

SEQ ID NO: 3491577 - RNA, 19 nt, Human
agcacuggagugcagggag

SEQ ID NO: 3491578 - RNA, 13 nt, Human
agcacuggccugc

SEQ ID NO: 3491579 - RNA, 15 nt, Human
agcacuggccugcac

SEQ ID NO: 3491580 - RNA, 17 nt, Human
agcacuggccugcacgg

SEQ ID NO: 3491581 - RNA, 13 nt, Human
agcacuggcucuc

SEQ ID NO: 3491582 - RNA, 14 nt, Human
agcacuggcucucu

SEQ ID NO: 3491583 - RNA, 17 nt, Human
agcacuggcucucucca

SEQ ID NO: 3491584 - RNA, 18 nt, Human
acuguuagaacacuauuu

SEQ ID NO: 3491585 - RNA, 13 nt, Human
acuguuagaaugu

SEQ ID NO: 3491586 - RNA, 14 nt, Human
acuguuagaaugua

SEQ ID NO: 3491587 - RNA, 16 nt, Human
acuguuagcacuguug

SEQ ID NO: 3491588 - RNA, 13 nt, Human
acuguuaucauuu

SEQ ID NO: 3491589 - RNA, 19 nt, Human
acuguuauucuuugcacuu

SEQ ID NO: 3491590 - RNA, 21 nt, Human
acuguuauuuauaaucacuuu

SEQ ID NO: 3491591 - RNA, 16 nt, Human
acuguucaagagcaca

SEQ ID NO: 3491592 - RNA, 20 nt, Human
acuguucaaugguucugaaa

SEQ ID NO: 3491593 - RNA, 18 nt, Human
acuguucccaccugcugg

SEQ ID NO: 3491594 - RNA, 16 nt, Human
acuguucccccugugc

SEQ ID NO: 3491595 - RNA, 16 nt, Human
acuguucccucugcuc

SEQ ID NO: 3491596 - RNA, 19 nt, Human
acuguucccugagguggga

SEQ ID NO: 3491597 - RNA, 23 nt, Human
acuguucggaagggguuccucaa

SEQ ID NO: 3491598 - RNA, 13 nt, Human
acuguucuaaagc

SEQ ID NO: 3491599 - RNA, 18 nt, Human
acuguucuaaagcucuga

SEQ ID NO: 3491600 - RNA, 18 nt, Human
acuguucucccuucggug

SEQ ID NO: 3491601 - RNA, 14 nt, Human
acuguucucugccc

SEQ ID NO: 3491602 - RNA, 18 nt, Human
acuguucucugcccucca

SEQ ID NO: 3491603 - RNA, 20 nt, Human
acuguucucugcccuccaag

SEQ ID NO: 3491604 - RNA, 13 nt, Human
acuguucuugaau

SEQ ID NO: 3491605 - RNA, 16 nt, Human
acuguucuugcugcua

SEQ ID NO: 3491606 - RNA, 20 nt, Human
acuguucuugcugcuagaac

SEQ ID NO: 3491607 - RNA, 21 nt, Human
acuguucuugcugcuagaacu

SEQ ID NO: 3491608 - RNA, 23 nt, Human
acuguucuugcugcuagaacuuu

SEQ ID NO: 3491609 - RNA, 13 nt, Human
acuguugaaaauu

SEQ ID NO: 3491610 - RNA, 14 nt, Human
acuguugaaaauua

SEQ ID NO: 3491611 - RNA, 21 nt, Human
acuguugaaaauuauuuuaaa

SEQ ID NO: 3491612 - RNA, 16 nt, Human
acuguugauaauucuu

SEQ ID NO: 3491613 - RNA, 17 nt, Human
acuguugauaauucuua

SEQ ID NO: 3491614 - RNA, 20 nt, Human
acuguugauaauucuuauuu

SEQ ID NO: 3491615 - RNA, 15 nt, Human
acuguugauguacug

SEQ ID NO: 3491616 - RNA, 13 nt, Human
acuguugauguau

SEQ ID NO: 3491617 - RNA, 10 nt, Human
acuguugcac

SEQ ID NO: 3491618 - RNA, 13 nt, Human
acuguugcacgug

SEQ ID NO: 3491619 - RNA, 22 nt, Human
acuguugcacguguguuuuucu

SEQ ID NO: 3491620 - RNA, 12 nt, Human
acuguugcccag

SEQ ID NO: 3491621 - RNA, 14 nt, Human
acuguugcccaggc

SEQ ID NO: 3491622 - RNA, 12 nt, Human
acuguugcucaa

SEQ ID NO: 3491623 - RNA, 12 nt, Human
acuguuggaaug

SEQ ID NO: 3491624 - RNA, 15 nt, Human
acuguuguaagaauu

SEQ ID NO: 3491625 - RNA, 21 nt, Human
acuguuguaagaauucugauu

SEQ ID NO: 3491626 - RNA, 22 nt, Human
acuguuguaagaauucugauug

SEQ ID NO: 3491627 - RNA, 19 nt, Human
acuguuguagaagacaaaa

SEQ ID NO: 3491628 - RNA, 15 nt, Human
acuguugucccugca

SEQ ID NO: 3491629 - RNA, 16 nt, Human
acuguugugaccugaa

SEQ ID NO: 3491630 - RNA, 22 nt, Human
acuguuuaaucauaguuacugu

SEQ ID NO: 3491631 - RNA, 19 nt, Human
acuguuuagauuugccaua

SEQ ID NO: 3491632 - RNA, 21 nt, Human
acuguuuauauguguugaaaa

SEQ ID NO: 3491633 - RNA, 20 nt, Human
acuguuuauuacuuccauga

SEQ ID NO: 3491634 - RNA, 16 nt, Human
acuguuuauucaacaa

SEQ ID NO: 3491635 - RNA, 19 nt, Human
acuguuucaaacuuuacua

SEQ ID NO: 3491636 - RNA, 17 nt, Human
acuguuuccugggcacg

SEQ ID NO: 3491637 - RNA, 13 nt, Human
acuguuuccuuca

SEQ ID NO: 3491638 - RNA, 23 nt, Human
acuguuucucuugagcuggccuc

SEQ ID NO: 3491639 - RNA, 19 nt, Human
acuguuucuugcuuguacc

SEQ ID NO: 3491640 - RNA, 21 nt, Human
acuguuucuugcuuguaccuc

SEQ ID NO: 3491641 - RNA, 23 nt, Human
acuguuugauauaccaaauuaaa

SEQ ID NO: 3491642 - RNA, 22 nt, Human
acuguuuggacuuuuauuuugg

SEQ ID NO: 3491643 - RNA, 15 nt, Human
acuguuugucuucuc

SEQ ID NO: 3491644 - RNA, 12 nt, Human
acuguuuguuau

SEQ ID NO: 3491645 - RNA, 13 nt, Human
acuguuuucaaau

SEQ ID NO: 3491646 - RNA, 17 nt, Human
acuguuuuccaguucau

SEQ ID NO: 3491647 - RNA, 17 nt, Human
acuguuuucuaguguau

SEQ ID NO: 3491648 - RNA, 18 nt, Human
acuguuuucuaguguauc

SEQ ID NO: 3491649 - RNA, 20 nt, Human
acuguuuucuaguguaucaa

SEQ ID NO: 3491650 - RNA, 12 nt, Human
acuguuuugaau

SEQ ID NO: 3491651 - RNA, 13 nt, Human
acuguuuuuaccc

SEQ ID NO: 3491652 - RNA, 23 nt, Human
acuguuuuuacccauauccccuc

SEQ ID NO: 3491653 - RNA, 19 nt, Human
acuguuuuuccauaguuuu

SEQ ID NO: 3491654 - RNA, 19 nt, Human
acuguuuuucggacaguuu

SEQ ID NO: 3491655 - RNA, 18 nt, Human
acuguuuuuuccugagcu

SEQ ID NO: 3491656 - RNA, 19 nt, Human
acuuaaaaaaaaaaaaaag

SEQ ID NO: 3491657 - RNA, 21 nt, Human
acuuaaaaaaaaaaaaaagcu

SEQ ID NO: 3491658 - RNA, 15 nt, Human
acuuaaaaaaugucc

SEQ ID NO: 3491659 - RNA, 16 nt, Human
acuuaaaaaaugucca

SEQ ID NO: 3491660 - RNA, 20 nt, Human
acuuaaaaagucugcauuac

SEQ ID NO: 3491661 - RNA, 14 nt, Human
acuuaaaaaugguu

SEQ ID NO: 3491662 - RNA, 23 nt, Human
acugaaguuugauaaauaguguu

SEQ ID NO: 3491663 - RNA, 23 nt, Human
acugaauaaauuguacagccggc

SEQ ID NO: 3491664 - RNA, 17 nt, Human
acugaauaccacucugu

SEQ ID NO: 3491665 - RNA, 20 nt, Human
acugaauaccacucuguaau

SEQ ID NO: 3491666 - RNA, 13 nt, Human
acugaaucuguac

SEQ ID NO: 3491667 - RNA, 12 nt, Human
acugaaugaggu

SEQ ID NO: 3491668 - RNA, 16 nt, Human
acugaaugcucugugc

SEQ ID NO: 3491669 - RNA, 22 nt, Human
acugaauuaaugacagagccag

SEQ ID NO: 3491670 - RNA, 13 nt, Human
acugaauuaugaa

SEQ ID NO: 3491671 - RNA, 15 nt, Human
acugaauuaugaaac

SEQ ID NO: 3491672 - RNA, 20 nt, Human
acugaauuaugaaacuuuug

SEQ ID NO: 3491673 - RNA, 12 nt, Human
acugaauuccaa

SEQ ID NO: 3491674 - RNA, 12 nt, Human
acugaauuucuu

SEQ ID NO: 3491675 - RNA, 23 nt, Human
acugaauuucuuuugccguuauu

SEQ ID NO: 3491676 - RNA, 16 nt, Human
acugaauuuuuaugug

SEQ ID NO: 3491677 - RNA, 17 nt, Human
acugaauuuuuuuguaa

SEQ ID NO: 3491678 - RNA, 20 nt, Human
acugaauuuuuuuguaauaa

SEQ ID NO: 3491679 - RNA, 16 nt, Human
acugacaaaucaaguu

SEQ ID NO: 3491680 - RNA, 13 nt, Human
acugacacaaagg

SEQ ID NO: 3491681 - RNA, 13 nt, Human
acugacacaggaa

SEQ ID NO: 3491682 - RNA, 22 nt, Human
acugacacccauguuucucugg

SEQ ID NO: 3491683 - RNA, 20 nt, Human
acugacacucccacccaguc

SEQ ID NO: 3491684 - RNA, 16 nt, Human
acugacagauuuccau

SEQ ID NO: 3491685 - RNA, 21 nt, Human
acugacaugcccucccuucuc

SEQ ID NO: 3491686 - RNA, 18 nt, Human
acugacauguggggccag

SEQ ID NO: 3491687 - RNA, 22 nt, Human
acugacauguggggccagguca

SEQ ID NO: 3491688 - RNA, 18 nt, Human
acugacauuguuggccaa

SEQ ID NO: 3491689 - RNA, 22 nt, Human
acugacauuguuggccaaagcc

SEQ ID NO: 3491690 - RNA, 13 nt, Human
acugacauuucuu

SEQ ID NO: 3491691 - RNA, 21 nt, Human
acugaccaauauuguacaguu

SEQ ID NO: 3491692 - RNA, 15 nt, Human
acugaccagcagcuu

SEQ ID NO: 3491693 - RNA, 23 nt, Human
acugaccagccuccaugcugccu

SEQ ID NO: 3491694 - RNA, 20 nt, Human
acugacccacagccucugcc

SEQ ID NO: 3491695 - RNA, 17 nt, Human
acugacccuuccagaca

SEQ ID NO: 3491696 - RNA, 17 nt, Human
acugaccggaggcaaaa

SEQ ID NO: 3491697 - RNA, 17 nt, Human
acugaccugguccacag

SEQ ID NO: 3491698 - RNA, 19 nt, Human
acugaccuugaugagcugu

SEQ ID NO: 3491699 - RNA, 21 nt, Human
acugaccuuggagagacacag

SEQ ID NO: 3491700 - RNA, 15 nt, Human
acugaccuuguaaaa

SEQ ID NO: 3491701 - RNA, 20 nt, Human
acugacuauucuugauguaa

SEQ ID NO: 3491702 - RNA, 22 nt, Human
acugacuauucuugauguaaaa

SEQ ID NO: 3491703 - RNA, 14 nt, Human
acugacuccuuaga

SEQ ID NO: 3491704 - RNA, 18 nt, Human
acugacucuuaagaagac

SEQ ID NO: 3491705 - RNA, 22 nt, Human
acugacuucuaaguaaaaccac

SEQ ID NO: 3491706 - RNA, 15 nt, Human
acugacuuuauccuc

SEQ ID NO: 3491707 - RNA, 13 nt, Human
acugacuuugcuu

SEQ ID NO: 3491708 - RNA, 15 nt, Human
acugacuuugcuugc

SEQ ID NO: 3491709 - RNA, 15 nt, Human
acugagaaaaccugu

SEQ ID NO: 3491710 - RNA, 21 nt, Human
acugagaaauuuauaaacuuu

SEQ ID NO: 3491711 - RNA, 19 nt, Human
acugagaauguaagaacua

SEQ ID NO: 3491712 - RNA, 21 nt, Human
acugagaggacagagagaaau

SEQ ID NO: 3491713 - RNA, 21 nt, Human
acugagcacccucuggauucu

SEQ ID NO: 3491714 - RNA, 16 nt, Human
acugagcacuguuuuc

SEQ ID NO: 3491715 - RNA, 17 nt, Human
acugagcacuguuuucu

SEQ ID NO: 3491716 - RNA, 13 nt, Human
acugagcagacug

SEQ ID NO: 3491717 - RNA, 14 nt, Human
acugagcagacugg

SEQ ID NO: 3491718 - RNA, 23 nt, Human
acugagcagacuggugagcagac

SEQ ID NO: 3491719 - RNA, 14 nt, Human
acugagccccgcag

SEQ ID NO: 3491720 - RNA, 20 nt, Human
acugagccccgcagaccucc

SEQ ID NO: 3491721 - RNA, 14 nt, Human
acugagccuuguaa

SEQ ID NO: 3491722 - RNA, 17 nt, Human
acugagcuucucuguga

SEQ ID NO: 3491723 - RNA, 16 nt, Human
acugagcuuggaagcu

SEQ ID NO: 3491724 - RNA, 22 nt, Human
acugaggaagaacggggcucuu

SEQ ID NO: 3491725 - RNA, 18 nt, Human
acugaggaaugaugaagc

SEQ ID NO: 3491726 - RNA, 20 nt, Human
acugaggaauuuucuuugug

SEQ ID NO: 3491727 - RNA, 15 nt, Human
acugaggcagacagc

SEQ ID NO: 3491728 - RNA, 15 nt, Human
acuuuuaaacugugu

SEQ ID NO: 3491729 - RNA, 17 nt, Human
acuuuuaaacuguguac

SEQ ID NO: 3491730 - RNA, 20 nt, Human
acuuuuaaacuguguacaua

SEQ ID NO: 3491731 - RNA, 18 nt, Human
acuuuuaaggauaaauca

SEQ ID NO: 3491732 - RNA, 19 nt, Human
acuuuuaaggauaaaucau

SEQ ID NO: 3491733 - RNA, 17 nt, Human
acuuuuaauaaacuuuu

SEQ ID NO: 3491734 - RNA, 13 nt, Human
acuuuuacaagua

SEQ ID NO: 3491735 - RNA, 13 nt, Human
acuuuuagaaacu

SEQ ID NO: 3491736 - RNA, 12 nt, Human
acuuuuagaugu

SEQ ID NO: 3491737 - RNA, 16 nt, Human
acuuuuaguaaaguca

SEQ ID NO: 3491738 - RNA, 22 nt, Human
acuuuuauaaacuuuaccuuuu

SEQ ID NO: 3491739 - RNA, 16 nt, Human
acuuuuauaaagcaug

SEQ ID NO: 3491740 - RNA, 15 nt, Human
acuuuuauaaauuaa

SEQ ID NO: 3491741 - RNA, 17 nt, Human
acuuuuauaaauuaaau

SEQ ID NO: 3491742 - RNA, 18 nt, Human
acuuuuauaaauuaaaua

SEQ ID NO: 3491743 - RNA, 15 nt, Human
acuuuuaugagcuuc

SEQ ID NO: 3491744 - RNA, 19 nt, Human
acuuuuaugauguauauuu

SEQ ID NO: 3491745 - RNA, 18 nt, Human
acuuuuauuugcaacauu

SEQ ID NO: 3491746 - RNA, 18 nt, Human
acuuuuauuuuacacaga

SEQ ID NO: 3491747 - RNA, 20 nt, Human
acuuuuauuuuacacagaaa

SEQ ID NO: 3491748 - RNA, 22 nt, Human
acuuuuauuuuacacagaaaca

SEQ ID NO: 3491749 - RNA, 16 nt, Human
acuuuucaaguauuua

SEQ ID NO: 3491750 - RNA, 12 nt, Human
acuuuucaguga

SEQ ID NO: 3491751 - RNA, 18 nt, Human
acuuuucauaucauuucu

SEQ ID NO: 3491752 - RNA, 10 nt, Human
acuuuucauu

SEQ ID NO: 3491753 - RNA, 14 nt, Human
acuuuuccaguauu

SEQ ID NO: 3491754 - RNA, 16 nt, Human
acuuuuccaguauuuu

SEQ ID NO: 3491755 - RNA, 14 nt, Human
acuuuucccacucc

SEQ ID NO: 3491756 - RNA, 15 nt, Human
acuuuucccacucca

SEQ ID NO: 3491757 - RNA, 17 nt, Human
acuuuuccucccucagu

SEQ ID NO: 3491758 - RNA, 13 nt, Human
acuuuuccuuccc

SEQ ID NO: 3491759 - RNA, 14 nt, Human
acuuuucuuugaag

SEQ ID NO: 3491760 - RNA, 14 nt, Human
acuuuucuuugugg

SEQ ID NO: 3491761 - RNA, 21 nt, Human
acuuuugagugugugugugca

SEQ ID NO: 3491762 - RNA, 14 nt, Human
acuuuugcaaauaa

SEQ ID NO: 3491763 - RNA, 15 nt, Human
acuuuugcaaauaag

SEQ ID NO: 3491764 - RNA, 22 nt, Human
acuuuugcuguaauguuaauau

SEQ ID NO: 3491765 - RNA, 13 nt, Human
acuuuugcuuuaa

SEQ ID NO: 3491766 - RNA, 21 nt, Human
acuuuuggaaccaugccuucc

SEQ ID NO: 3491767 - RNA, 14 nt, Human
acuuuuggaaggua

SEQ ID NO: 3491768 - RNA, 14 nt, Human
acuuuuggaaucua

SEQ ID NO: 3491769 - RNA, 14 nt, Human
acuuuuguacaucu

SEQ ID NO: 3491770 - RNA, 20 nt, Human
acuuuuguacaucuggcuua

SEQ ID NO: 3491771 - RNA, 22 nt, Human
acuuuugugaauuaggcuguaa

SEQ ID NO: 3491772 - RNA, 14 nt, Human
acuuuugugugaaa

SEQ ID NO: 3491773 - RNA, 23 nt, Human
acuuuuguucuugguuuguaaau

SEQ ID NO: 3491774 - RNA, 18 nt, Human
acuuuuuaaauguaaaga

SEQ ID NO: 3491775 - RNA, 17 nt, Human
acuuuuuauauuuuaua

SEQ ID NO: 3491776 - RNA, 22 nt, Human
acuuuuuauggcacuaguauuu

SEQ ID NO: 3491777 - RNA, 14 nt, Human
acuuuuuauugccu

SEQ ID NO: 3491778 - RNA, 14 nt, Human
acuuuuucuuuugu

SEQ ID NO: 3491779 - RNA, 20 nt, Human
acuuuuugaacuaagaaacu

SEQ ID NO: 3491780 - RNA, 15 nt, Human
acuuuuugaggcaaa

SEQ ID NO: 3491781 - RNA, 19 nt, Human
acuuuuugaggcaaaagaa

SEQ ID NO: 3491782 - RNA, 13 nt, Human
acuuuuugcagcu

SEQ ID NO: 3491783 - RNA, 14 nt, Human
acuuuuugguggau

SEQ ID NO: 3491784 - RNA, 21 nt, Human
acuuuuugguggauguaaaua

SEQ ID NO: 3491785 - RNA, 18 nt, Human
acuuuuugugaagacggc

SEQ ID NO: 3491786 - RNA, 23 nt, Human
acuuuuugugaagacggcacggu

SEQ ID NO: 3491787 - RNA, 18 nt, Human
acuuuuuuaaauauuuuc

SEQ ID NO: 3491788 - RNA, 21 nt, Human
acuuuuuucuaguacacuuuu

SEQ ID NO: 3491789 - RNA, 16 nt, Human
acuuuuuugaaaucag

SEQ ID NO: 3491790 - RNA, 22 nt, Human
acuuuuuugaguggaugauguu

SEQ ID NO: 3491791 - RNA, 23 nt, Human
acuuuuuuggggauaugcuuagu

SEQ ID NO: 3491792 - RNA, 13 nt, Human
acuuuuuuuagua

SEQ ID NO: 3491793 - RNA, 16 nt, Human
acuuuuuuuugagaau

SEQ ID NO: 3491794 - RNA, 17 nt, Human
acuuuuuuuuguauguu

SEQ ID NO: 3491795 - RNA, 20 nt, Human
agaaaaaaaaaaagaaagaa

SEQ ID NO: 3491796 - RNA, 18 nt, Human
agaaaaaaaaaagaagaa

SEQ ID NO: 3491797 - RNA, 19 nt, Human
agaaaaaaaaaagaagaag

SEQ ID NO: 3491798 - RNA, 14 nt, Human
agaaaaaaaaagaa

SEQ ID NO: 3491799 - RNA, 19 nt, Human
agaaaaaaaaagaaaaaag

SEQ ID NO: 3491800 - RNA, 13 nt, Human
agaaaaaaaacac

SEQ ID NO: 3491801 - RNA, 14 nt, Human
agaaaaaaaagaaa

SEQ ID NO: 3491802 - RNA, 18 nt, Human
agaaaaaaaauagacuuu

SEQ ID NO: 3491803 - RNA, 22 nt, Human
agaaaaaaacauucuaucuacu

SEQ ID NO: 3491804 - RNA, 18 nt, Human
agaaaaaaaccacacaaa

SEQ ID NO: 3491805 - RNA, 21 nt, Human
agaaaaaaaguuugccagaag

SEQ ID NO: 3491806 - RNA, 14 nt, Human
agaaaaaaauaauu

SEQ ID NO: 3491807 - RNA, 16 nt, Human
agaaaaaaauacuauu

SEQ ID NO: 3491808 - RNA, 14 nt, Human
agaaaaaaaucuuc

SEQ ID NO: 3491809 - RNA, 21 nt, Human
agaaaaaaaucuucuccagau

SEQ ID NO: 3491810 - RNA, 18 nt, Human
agaaaaaaauguauuuua

SEQ ID NO: 3491811 - RNA, 20 nt, Human
agaaaaaaaugucaaaagua

SEQ ID NO: 3491812 - RNA, 14 nt, Human
agaaaaaaauugaa

SEQ ID NO: 3491813 - RNA, 10 nt, Human
agaaaaaaga

SEQ ID NO: 3491814 - RNA, 22 nt, Human
agaaaaaagaaugucagaaaaa

SEQ ID NO: 3491815 - RNA, 17 nt, Human
agaaaaaagagaaaaga

SEQ ID NO: 3491816 - RNA, 22 nt, Human
agaaaaaagguucuuuguguau

SEQ ID NO: 3491817 - RNA, 14 nt, Human
agaaaaaauaaaug

SEQ ID NO: 3491818 - RNA, 18 nt, Human
agaaaaaauacauuuuau

SEQ ID NO: 3491819 - RNA, 17 nt, Human
agaaaaaauauuuuccc

SEQ ID NO: 3491820 - RNA, 17 nt, Human
agaaaaaauauuuuccu

SEQ ID NO: 3491821 - RNA, 13 nt, Human
agaaaaacaggca

SEQ ID NO: 3491822 - RNA, 15 nt, Human
agaaaaacaggcacu

SEQ ID NO: 3491823 - RNA, 19 nt, Human
agaaaaaccagaggcagcu

SEQ ID NO: 3491824 - RNA, 13 nt, Human
agaaaaagaaaug

SEQ ID NO: 3491825 - RNA, 12 nt, Human
agaaaaagaaca

SEQ ID NO: 3491826 - RNA, 17 nt, Human
agaaaaagcaaaaggca

SEQ ID NO: 3491827 - RNA, 20 nt, Human
agaaaaagcuccuguccucc

SEQ ID NO: 3491828 - RNA, 17 nt, Human
agaaaaaggaugcacag

SEQ ID NO: 3491829 - RNA, 19 nt, Human
agaaaaauaaaaaucucuu

SEQ ID NO: 3491830 - RNA, 12 nt, Human
agaaaaauauuu

SEQ ID NO: 3491831 - RNA, 13 nt, Human
agaaaaauauuua

SEQ ID NO: 3491832 - RNA, 12 nt, Human
agaaaaaucagu

SEQ ID NO: 3491833 - RNA, 21 nt, Human
agaaaaaucauguuugcucuc

SEQ ID NO: 3491834 - RNA, 12 nt, Human
agaaaaaucuug

SEQ ID NO: 3491835 - RNA, 13 nt, Human
agaaaaaugcuuu

SEQ ID NO: 3491836 - RNA, 16 nt, Human
agaaaaaugugaauuu

SEQ ID NO: 3491837 - RNA, 19 nt, Human
agaaaaauguguauuuuaa

SEQ ID NO: 3491838 - RNA, 19 nt, Human
agaaaaauuuacauggcaa

SEQ ID NO: 3491839 - RNA, 16 nt, Human
agaaaaauuucacgau

SEQ ID NO: 3491840 - RNA, 16 nt, Human
agaaaacaagcaaguu

SEQ ID NO: 3491841 - RNA, 16 nt, Human
agaaaacaaggaugaa

SEQ ID NO: 3491842 - RNA, 13 nt, Human
agaaaacacuguu

SEQ ID NO: 3491843 - RNA, 14 nt, Human
agaaaacacuguua

SEQ ID NO: 3491844 - RNA, 23 nt, Human
agaaaacacuuaaaaugaucauu

SEQ ID NO: 3491845 - RNA, 12 nt, Human
agaaaacagaaa

SEQ ID NO: 3491846 - RNA, 14 nt, Human
agaaaacagaaaaa

SEQ ID NO: 3491847 - RNA, 22 nt, Human
agaaaacaggaaaaaaacuuuu

SEQ ID NO: 3491848 - RNA, 22 nt, Human
agaaaacaggcacugcccuggu

SEQ ID NO: 3491849 - RNA, 15 nt, Human
agaaaacaugccucu

SEQ ID NO: 3491850 - RNA, 17 nt, Human
agaaaaccaaaaugaua

SEQ ID NO: 3491851 - RNA, 21 nt, Human
agaaaaccagcucagcacugc

SEQ ID NO: 3491852 - RNA, 22 nt, Human
agaaaacccuugggccagaagu

SEQ ID NO: 3491853 - RNA, 20 nt, Human
agaaaacgguuaaaacuguc

SEQ ID NO: 3491854 - RNA, 19 nt, Human
agaaaacuagaauuucauu

SEQ ID NO: 3491855 - RNA, 19 nt, Human
agaaaacuuguauuaugug

SEQ ID NO: 3491856 - RNA, 20 nt, Human
agaaaacuuuaaaaaauauu

SEQ ID NO: 3491857 - RNA, 22 nt, Human
agaaaacuuuaaaaaauauuua

SEQ ID NO: 3491858 - RNA, 12 nt, Human
agaaaagaaaaa

SEQ ID NO: 3491859 - RNA, 17 nt, Human
agaaaagacaugaauau

SEQ ID NO: 3491860 - RNA, 14 nt, Human
agaaaagagaagaa

SEQ ID NO: 3491861 - RNA, 17 nt, Human
agaaaagagaagaagaa

SEQ ID NO: 3491862 - RNA, 20 nt, Human
agaaaagagaagaagaaaaa

SEQ ID NO: 3491863 - RNA, 19 nt, Human
agaaaagagauauuuuaaa

SEQ ID NO: 3491864 - RNA, 16 nt, Human
agaaaagauaaagaug

SEQ ID NO: 3491865 - RNA, 13 nt, Human
agaaaagaugaaa

SEQ ID NO: 3491866 - RNA, 19 nt, Human
agaaaagccuaaucacagu

SEQ ID NO: 3491867 - RNA, 15 nt, Human
agaaaaggaaaagaa

SEQ ID NO: 3491868 - RNA, 14 nt, Human
agaaaaggacagaa

SEQ ID NO: 3491869 - RNA, 19 nt, Human
agaaaaguagacaaucauu

SEQ ID NO: 3491870 - RNA, 15 nt, Human
agaaaaguauguucu

SEQ ID NO: 3491871 - RNA, 21 nt, Human
agaaaaguauguucuaaccuu

SEQ ID NO: 3491872 - RNA, 17 nt, Human
acccaucuaccccugga

SEQ ID NO: 3491873 - RNA, 13 nt, Human
acccaucugcacc

SEQ ID NO: 3491874 - RNA, 15 nt, Human
agaaagccuucuuuu

SEQ ID NO: 3491875 - RNA, 15 nt, Human
agaaagcugacuugg

SEQ ID NO: 3491876 - RNA, 13 nt, Human
agaaagcugccug

SEQ ID NO: 3491877 - RNA, 20 nt, Human
agaaaggaaaaccugaagac

SEQ ID NO: 3491878 - RNA, 14 nt, Human
agaaaggaaaagaa

SEQ ID NO: 3491879 - RNA, 21 nt, Human
agaaaggaaaccuuuucuugu

SEQ ID NO: 3491880 - RNA, 22 nt, Human
agaaaggaagcauuguaaaaua

SEQ ID NO: 3491881 - RNA, 19 nt, Human
agaaaggagagucuugcag

SEQ ID NO: 3491882 - RNA, 16 nt, Human
agaaaggauaaaguug

SEQ ID NO: 3491883 - RNA, 16 nt, Human
agaaaggccugcacac

SEQ ID NO: 3491884 - RNA, 16 nt, Human
agaaaggccuuuaaaa

SEQ ID NO: 3491885 - RNA, 18 nt, Human
agaaagggagcagagaag

SEQ ID NO: 3491886 - RNA, 17 nt, Human
agaaagggagggcucug

SEQ ID NO: 3491887 - RNA, 16 nt, Human
accccgucucuacuaa

SEQ ID NO: 3491888 - RNA, 21 nt, Human
accccguguccccggccucag

SEQ ID NO: 3491889 - RNA, 15 nt, Human
accccguuacagcuc

SEQ ID NO: 3491890 - RNA, 14 nt, Human
accccuaaacucca

SEQ ID NO: 3491891 - RNA, 16 nt, Human
accccuaaacuccagg

SEQ ID NO: 3491892 - RNA, 17 nt, Human
accccuaaacuccaggg

SEQ ID NO: 3491893 - RNA, 14 nt, Human
accccuaagagacu

SEQ ID NO: 3491894 - RNA, 16 nt, Human
accccuacaugaaaca

SEQ ID NO: 3491895 - RNA, 14 nt, Human
accccuaguucccu

SEQ ID NO: 3491896 - RNA, 21 nt, Human
accccuaguucccucugcuca

SEQ ID NO: 3491897 - RNA, 20 nt, Human
accccucacaggagcuuacu

SEQ ID NO: 3491898 - RNA, 16 nt, Human
accccucaccuugcaa

SEQ ID NO: 3491899 - RNA, 20 nt, Human
accccucaguugugcagcuu

SEQ ID NO: 3491900 - RNA, 16 nt, Human
accccuccaugugggc

SEQ ID NO: 3491901 - RNA, 19 nt, Human
accccuccaugugggcuag

SEQ ID NO: 3491902 - RNA, 12 nt, Human
accccucccagc

SEQ ID NO: 3491903 - RNA, 15 nt, Human
accccucccagcuga

SEQ ID NO: 3491904 - RNA, 12 nt, Human
accccuccccau

SEQ ID NO: 3491905 - RNA, 20 nt, Human
accccuccccuccaucccug

SEQ ID NO: 3491906 - RNA, 18 nt, Human
accccucccggcccugcc

SEQ ID NO: 3491907 - RNA, 18 nt, Human
accccucccucuguccac

SEQ ID NO: 3491908 - RNA, 16 nt, Human
accccucccuuucucc

SEQ ID NO: 3491909 - RNA, 19 nt, Human
accccucccuuucuccccu

SEQ ID NO: 3491910 - RNA, 23 nt, Human
accccucccuuucuccccugccc

SEQ ID NO: 3491911 - RNA, 14 nt, Human
accccuccucacug

SEQ ID NO: 3491912 - RNA, 18 nt, Human
accccuccucacuggcca

SEQ ID NO: 3491913 - RNA, 15 nt, Human
accccuccucccuuu

SEQ ID NO: 3491914 - RNA, 23 nt, Human
accccuccucccuuuuuccuugu

SEQ ID NO: 3491915 - RNA, 11 nt, Human
accccuccugg

SEQ ID NO: 3491916 - RNA, 12 nt, Human
accccuccuggg

SEQ ID NO: 3491917 - RNA, 15 nt, Human
accccuccuggggcc

SEQ ID NO: 3491918 - RNA, 21 nt, Human
accccuccuggggccaggccg

SEQ ID NO: 3491919 - RNA, 20 nt, Human
accccuccuuccuugaccag

SEQ ID NO: 3491920 - RNA, 13 nt, Human
accccucucugca

SEQ ID NO: 3491921 - RNA, 22 nt, Human
accccugcagauagcaccgguc

SEQ ID NO: 3491922 - RNA, 22 nt, Human
accccugcaguuccccuggaag

SEQ ID NO: 3491923 - RNA, 18 nt, Human
accccugccuccacccuc

SEQ ID NO: 3491924 - RNA, 20 nt, Human
accccugccuuugggagcag

SEQ ID NO: 3491925 - RNA, 14 nt, Human
accccuggacccca

SEQ ID NO: 3491926 - RNA, 15 nt, Human
accccuggaccccag

SEQ ID NO: 3491927 - RNA, 13 nt, Human
accccuggccucc

SEQ ID NO: 3491928 - RNA, 19 nt, Human
accccuggcuccaggccag

SEQ ID NO: 3491929 - RNA, 15 nt, Human
accccugggggcucu

SEQ ID NO: 3491930 - RNA, 16 nt, Human
accccuggugguucac

SEQ ID NO: 3491931 - RNA, 15 nt, Human
accccugguucucau

SEQ ID NO: 3491932 - RNA, 16 nt, Human
accccuguccucacug

SEQ ID NO: 3491933 - RNA, 18 nt, Human
accccuguccucacugcu

SEQ ID NO: 3491934 - RNA, 14 nt, Human
accccugugcuccg

SEQ ID NO: 3491935 - RNA, 22 nt, Human
accccugugcuccgugccucca

SEQ ID NO: 3491936 - RNA, 18 nt, Human
accccuguggagcccgca

SEQ ID NO: 3491937 - RNA, 19 nt, Human
accccuguggagcccgcac

SEQ ID NO: 3491938 - RNA, 18 nt, Human
accccuuaagcccuggcc

SEQ ID NO: 3491939 - RNA, 16 nt, Human
accccuuacuuagcau

SEQ ID NO: 3491940 - RNA, 15 nt, Human
accccuuagccuccc

SEQ ID NO: 3491941 - RNA, 16 nt, Human
accccuuccagaucac

SEQ ID NO: 3491942 - RNA, 18 nt, Human
accccuuccauguggaga

SEQ ID NO: 3491943 - RNA, 17 nt, Human
accccuucccauuccau

SEQ ID NO: 3491944 - RNA, 14 nt, Human
accccuuccccacu

SEQ ID NO: 3491945 - RNA, 15 nt, Human
accccuuccccacug

SEQ ID NO: 3491946 - RNA, 18 nt, Human
accccuuccccacugccu

SEQ ID NO: 3491947 - RNA, 23 nt, Human
accccuuccccacugccugccca

SEQ ID NO: 3491948 - RNA, 14 nt, Human
accccuucgcuccu

SEQ ID NO: 3491949 - RNA, 14 nt, Human
accccuucucugug

SEQ ID NO: 3491950 - RNA, 20 nt, Human
accccuucucugugacccac

SEQ ID NO: 3491951 - RNA, 16 nt, Human
accccuuucccacccc

SEQ ID NO: 3491952 - RNA, 19 nt, Human
accccuuucuagaccaaua

SEQ ID NO: 3491953 - RNA, 17 nt, Human
accccuuucuggcucuc

SEQ ID NO: 3491954 - RNA, 20 nt, Human
accccuuuucagcuucugcu

SEQ ID NO: 3491955 - RNA, 23 nt, Human
accccuuuucagcuucugcuggg

SEQ ID NO: 3491956 - RNA, 16 nt, Human
acccgaggcugagaau

SEQ ID NO: 3491957 - RNA, 15 nt, Human
acccgaggguugauu

SEQ ID NO: 3491958 - RNA, 23 nt, Human
acccgaggguugauuaaggcagu

SEQ ID NO: 3491959 - RNA, 18 nt, Human
acccgccuagcugcuguc

SEQ ID NO: 3491960 - RNA, 13 nt, Human
acccgccucuccc

SEQ ID NO: 3491961 - RNA, 16 nt, Human
acccgcuuucuugcug

SEQ ID NO: 3491962 - RNA, 12 nt, Human
acccggaggcca

SEQ ID NO: 3491963 - RNA, 15 nt, Human
acccggaggggccug

SEQ ID NO: 3491964 - RNA, 18 nt, Human
acccggcacccccugcag

SEQ ID NO: 3491965 - RNA, 20 nt, Human
acccggcacccccugcagcu

SEQ ID NO: 3491966 - RNA, 15 nt, Human
acccggccccugcug

SEQ ID NO: 3491967 - RNA, 21 nt, Human
acccggcgguccccuccgcca

SEQ ID NO: 3491968 - RNA, 14 nt, Human
acccggcugcagag

SEQ ID NO: 3491969 - RNA, 13 nt, Human
acccgggaagggg

SEQ ID NO: 3491970 - RNA, 19 nt, Human
acccgggaagggggcuggg

SEQ ID NO: 3491971 - RNA, 16 nt, Human
acccgguuucuuuuua

SEQ ID NO: 3491972 - RNA, 17 nt, Human
acccgugagcgccugug

SEQ ID NO: 3491973 - RNA, 21 nt, Human
acccgugccaaguccaggucc

SEQ ID NO: 3491974 - RNA, 22 nt, Human
acccgugccaaguccagguccu

SEQ ID NO: 3491975 - RNA, 23 nt, Human
acccgugccaaguccagguccug

SEQ ID NO: 3491976 - RNA, 21 nt, Human
acccguucaacuuuuccuuug

SEQ ID NO: 3491977 - RNA, 16 nt, Human
acccguucauggggga

SEQ ID NO: 3491978 - RNA, 12 nt, Human
acccguuccaaa

SEQ ID NO: 3491979 - RNA, 19 nt, Human
acccuaaaaagcagagcuu

SEQ ID NO: 3491980 - RNA, 15 nt, Human
acccuaaaucugagg

SEQ ID NO: 3491981 - RNA, 15 nt, Human
acccuaccccaccac

SEQ ID NO: 3491982 - RNA, 13 nt, Human
acccuaccugugc

SEQ ID NO: 3491983 - RNA, 13 nt, Human
acccuaccuguuc

SEQ ID NO: 3491984 - RNA, 16 nt, Human
acccuagccaaugucu

SEQ ID NO: 3491985 - RNA, 16 nt, Human
acccuagccauuccug

SEQ ID NO: 3491986 - RNA, 19 nt, Human
acccuagccauuccuggua

SEQ ID NO: 3491987 - RNA, 23 nt, Human
acccuagccauuccugguaccca

SEQ ID NO: 3491988 - RNA, 18 nt, Human
acccuagcccucucccuc

SEQ ID NO: 3491989 - RNA, 12 nt, Human
acccuagccuug

SEQ ID NO: 3491990 - RNA, 15 nt, Human
acccuagccuugcuu

SEQ ID NO: 3491991 - RNA, 21 nt, Human
acccuaggccucucaccucug

SEQ ID NO: 3491992 - RNA, 22 nt, Human
acccuagucccuuccccucccu

SEQ ID NO: 3491993 - RNA, 15 nt, Human
acccuauaucuauaa

SEQ ID NO: 3491994 - RNA, 23 nt, Human
acccuauauuuugcauaguacca

SEQ ID NO: 3491995 - RNA, 16 nt, Human
acccuaugggucuagg

SEQ ID NO: 3491996 - RNA, 14 nt, Human
acccuauugcugcu

SEQ ID NO: 3491997 - RNA, 19 nt, Human
acccuauugcugcuugagg

SEQ ID NO: 3491998 - RNA, 19 nt, Human
acccucacuggcucuccug

SEQ ID NO: 3491999 - RNA, 18 nt, Human
acccucagaaacacuggg

SEQ ID NO: 3492000 - RNA, 21 nt, Human
acccucagaaacacuggggcu

SEQ ID NO: 3492001 - RNA, 13 nt, Human
acccucagagccu

SEQ ID NO: 3492002 - RNA, 14 nt, Human
acccucagagccuc

SEQ ID NO: 3492003 - RNA, 15 nt, Human
acccucaggacaaug

SEQ ID NO: 3492004 - RNA, 14 nt, Human
acccucaggcaggu

SEQ ID NO: 3492005 - RNA, 20 nt, Human
acccucaggcauaggccugg

SEQ ID NO: 3492006 - RNA, 18 nt, Human
acccucagggcaaagcca

SEQ ID NO: 3492007 - RNA, 19 nt, Human
acccucagggcaaagccag

SEQ ID NO: 3492008 - RNA, 21 nt, Human
acccucagggcaaagccaggu

SEQ ID NO: 3492009 - RNA, 18 nt, Human
acccucauacacagaaac

SEQ ID NO: 3492010 - RNA, 23 nt, Human
acccucaucaccaacgucugugc

SEQ ID NO: 3492011 - RNA, 16 nt, Human
acccucaucuuucuuc

SEQ ID NO: 3492012 - RNA, 12 nt, Human
acccucaugcug

SEQ ID NO: 3492013 - RNA, 20 nt, Human
acccucaugcugugugacuc

SEQ ID NO: 3492014 - RNA, 23 nt, Human
acccuccaaauggagaagcugca

SEQ ID NO: 3492015 - RNA, 18 nt, Human
acccuccaccgcagaagg

SEQ ID NO: 3492016 - RNA, 12 nt, Human
acccuccaccuu

SEQ ID NO: 3492017 - RNA, 15 nt, Human
acccuccaccuucca

SEQ ID NO: 3492018 - RNA, 23 nt, Human
acccucccacccccuucucugcu

SEQ ID NO: 3492019 - RNA, 17 nt, Human
accucauugacaagaac

SEQ ID NO: 3492020 - RNA, 19 nt, Human
accuccaacagaacuaaau

SEQ ID NO: 3492021 - RNA, 11 nt, Human
accuccacagc

SEQ ID NO: 3492022 - RNA, 16 nt, Human
accuccacauccucca

SEQ ID NO: 3492023 - RNA, 16 nt, Human
accuccagcccgggag

SEQ ID NO: 3492024 - RNA, 13 nt, Human
accuccagccuga

SEQ ID NO: 3492025 - RNA, 17 nt, Human
accuccagcuuuccugu

SEQ ID NO: 3492026 - RNA, 14 nt, Human
accuccaggccugu

SEQ ID NO: 3492027 - RNA, 13 nt, Human
accuccaugacag

SEQ ID NO: 3492028 - RNA, 22 nt, Human
accuccauguggacuuaggaag

SEQ ID NO: 3492029 - RNA, 14 nt, Human
accucccaccuuug

SEQ ID NO: 3492030 - RNA, 15 nt, Human
accucccaccuuugg

SEQ ID NO: 3492031 - RNA, 16 nt, Human
accucccaccuuuggu

SEQ ID NO: 3492032 - RNA, 17 nt, Human
accucccagagguccag

SEQ ID NO: 3492033 - RNA, 20 nt, Human
accucccagagguccagccc

SEQ ID NO: 3492034 - RNA, 15 nt, Human
accucccagcccuau

SEQ ID NO: 3492035 - RNA, 22 nt, Human
accucccagcccuauggaugug

SEQ ID NO: 3492036 - RNA, 15 nt, Human
accucccauccuaau

SEQ ID NO: 3492037 - RNA, 11 nt, Human
accuccccacg

SEQ ID NO: 3492038 - RNA, 21 nt, Human
accuccccacgcccuccccuc

SEQ ID NO: 3492039 - RNA, 15 nt, Human
accuccccagccccu

SEQ ID NO: 3492040 - RNA, 19 nt, Human
accuccccagccccuagcc

SEQ ID NO: 3492041 - RNA, 16 nt, Human
accuccccagccugcg

SEQ ID NO: 3492042 - RNA, 19 nt, Human
accuccccaggccguggcu

SEQ ID NO: 3492043 - RNA, 20 nt, Human
accuccccaggccguggcug

SEQ ID NO: 3492044 - RNA, 16 nt, Human
accucccccacuccca

SEQ ID NO: 3492045 - RNA, 16 nt, Human
accuccccccacugca

SEQ ID NO: 3492046 - RNA, 17 nt, Human
accuccccccacugcag

SEQ ID NO: 3492047 - RNA, 20 nt, Human
accuccccugccuugcuguu

SEQ ID NO: 3492048 - RNA, 12 nt, Human
accuccccuugg

SEQ ID NO: 3492049 - RNA, 17 nt, Human
accucccuauacugcuu

SEQ ID NO: 3492050 - RNA, 15 nt, Human
accucccucccggca

SEQ ID NO: 3492051 - RNA, 22 nt, Human
accucccucuuguuuuguuugu

SEQ ID NO: 3492052 - RNA, 12 nt, Human
accucccugccc

SEQ ID NO: 3492053 - RNA, 15 nt, Human
accucccugcccagg

SEQ ID NO: 3492054 - RNA, 18 nt, Human
accucccugcccaggccg

SEQ ID NO: 3492055 - RNA, 21 nt, Human
accucccugcccaggccggcc

SEQ ID NO: 3492056 - RNA, 13 nt, Human
accucccugccuc

SEQ ID NO: 3492057 - RNA, 22 nt, Human
accucccuguucaaggccccug

SEQ ID NO: 3492058 - RNA, 16 nt, Human
accuccgccucccggg

SEQ ID NO: 3492059 - RNA, 20 nt, Human
accuccggccaggugccucc

SEQ ID NO: 3492060 - RNA, 15 nt, Human
accuccucagccuga

SEQ ID NO: 3492061 - RNA, 13 nt, Human
accuccucaggga

SEQ ID NO: 3492062 - RNA, 23 nt, Human
accuccucagggauggccguugg

SEQ ID NO: 3492063 - RNA, 15 nt, Human
accuccucccacugc

SEQ ID NO: 3492064 - RNA, 16 nt, Human
accuccucccacugcc

SEQ ID NO: 3492065 - RNA, 14 nt, Human
accuccucuccuga

SEQ ID NO: 3492066 - RNA, 18 nt, Human
accuccugacacccuucu

SEQ ID NO: 3492067 - RNA, 22 nt, Human
accuccugacacccuucuccca

SEQ ID NO: 3492068 - RNA, 13 nt, Human
accuccugagaaa

SEQ ID NO: 3492069 - RNA, 12 nt, Human
accuccugccca

SEQ ID NO: 3492070 - RNA, 20 nt, Human
accuccugcccaggagagcc

SEQ ID NO: 3492071 - RNA, 12 nt, Human
accuccugccuc

SEQ ID NO: 3492072 - RNA, 15 nt, Human
accuccugucucugg

SEQ ID NO: 3492073 - RNA, 14 nt, Human
accuccuguggaac

SEQ ID NO: 3492074 - RNA, 15 nt, Human
accuccuguggaacc

SEQ ID NO: 3492075 - RNA, 21 nt, Human
accuccuguggaacccagcag

SEQ ID NO: 3492076 - RNA, 14 nt, Human
accuccuucccucu

SEQ ID NO: 3492077 - RNA, 18 nt, Human
accuccuuucucuucucu

SEQ ID NO: 3492078 - RNA, 20 nt, Human
accuccuuucucuucucugu

SEQ ID NO: 3492079 - RNA, 17 nt, Human
accucgcccucuccuuu

SEQ ID NO: 3492080 - RNA, 18 nt, Human
accucgcuccaacuccaa

SEQ ID NO: 3492081 - RNA, 19 nt, Human
accucgcuccaacuccaac

SEQ ID NO: 3492082 - RNA, 14 nt, Human
accucgcuggacuc

SEQ ID NO: 3492083 - RNA, 16 nt, Human
accucgcuggacucuc

SEQ ID NO: 3492084 - RNA, 19 nt, Human
accucggugccuuccucuu

SEQ ID NO: 3492085 - RNA, 20 nt, Human
accucguccucccccugcca

SEQ ID NO: 3492086 - RNA, 21 nt, Human
accucguccucccccugccag

SEQ ID NO: 3492087 - RNA, 22 nt, Human
accucguccucccccugccagu

SEQ ID NO: 3492088 - RNA, 15 nt, Human
agaaaauauauguau

SEQ ID NO: 3492089 - RNA, 18 nt, Human
agaaaauauauucuuuca

SEQ ID NO: 3492090 - RNA, 22 nt, Human
agaaaauaucugaaaugugaua

SEQ ID NO: 3492091 - RNA, 22 nt, Human
agaaaauaugucccagaaaugu

SEQ ID NO: 3492092 - RNA, 23 nt, Human
agaaaaucaagcagguuagagaa

SEQ ID NO: 3492093 - RNA, 15 nt, Human
agaaaaucuuuauaa

SEQ ID NO: 3492094 - RNA, 21 nt, Human
agaaaaugaaaugcauauuug

SEQ ID NO: 3492095 - RNA, 16 nt, Human
agaaaaugauacagca

SEQ ID NO: 3492096 - RNA, 16 nt, Human
agaaaaugcuagaaga

SEQ ID NO: 3492097 - RNA, 22 nt, Human
agaaaauggaaccaggcuugga

SEQ ID NO: 3492098 - RNA, 15 nt, Human
agaaaauggacgugu

SEQ ID NO: 3492099 - RNA, 22 nt, Human
agaaaauggacguguuaugacu

SEQ ID NO: 3492100 - RNA, 18 nt, Human
agaaaauguuauuuaaca

SEQ ID NO: 3492101 - RNA, 19 nt, Human
agaaaauguuauuuaacag

SEQ ID NO: 3492102 - RNA, 17 nt, Human
agaaaauguugagaauc

SEQ ID NO: 3492103 - RNA, 18 nt, Human
agaaaauuaaacacaaag

SEQ ID NO: 3492104 - RNA, 13 nt, Human
agaaaauucaauu

SEQ ID NO: 3492105 - RNA, 17 nt, Human
agaaaauucaauuguaa

SEQ ID NO: 3492106 - RNA, 16 nt, Human
agaaaauuccuauaag

SEQ ID NO: 3492107 - RNA, 14 nt, Human
agaaaauucuccug

SEQ ID NO: 3492108 - RNA, 16 nt, Human
agaaaauucugugccu

SEQ ID NO: 3492109 - RNA, 17 nt, Human
agaaaauugaauuuaac

SEQ ID NO: 3492110 - RNA, 18 nt, Human
agaaaauugaauuuaaca

SEQ ID NO: 3492111 - RNA, 14 nt, Human
agaaaauugcugug

SEQ ID NO: 3492112 - RNA, 12 nt, Human
agaaacaaacuu

SEQ ID NO: 3492113 - RNA, 22 nt, Human
agaaacaaacuuuucaaggcuu

SEQ ID NO: 3492114 - RNA, 15 nt, Human
agaaacaacacugua

SEQ ID NO: 3492115 - RNA, 16 nt, Human
agaaacaacacuguag

SEQ ID NO: 3492116 - RNA, 17 nt, Human
agaaacaauaaagagau

SEQ ID NO: 3492117 - RNA, 17 nt, Human
agaaacacacugaggca

SEQ ID NO: 3492118 - RNA, 20 nt, Human
agaaacacacugaggcaggg

SEQ ID NO: 3492119 - RNA, 20 nt, Human
agaaacacauaauuaacacu

SEQ ID NO: 3492120 - RNA, 17 nt, Human
agaaacacccucacacu

SEQ ID NO: 3492121 - RNA, 23 nt, Human
agaaacacgaacuuuagcugcau

SEQ ID NO: 3492122 - RNA, 13 nt, Human
agaaacacucaag

SEQ ID NO: 3492123 - RNA, 15 nt, Human
agaaacacugaaaag

SEQ ID NO: 3492124 - RNA, 19 nt, Human
agaaacacugaaaagaagg

SEQ ID NO: 3492125 - RNA, 11 nt, Human
agaaacacugc

SEQ ID NO: 3492126 - RNA, 12 nt, Human
agaaacacugcc

SEQ ID NO: 3492127 - RNA, 14 nt, Human
agaaacacuugaac

SEQ ID NO: 3492128 - RNA, 12 nt, Human
agaaacagaaga

SEQ ID NO: 3492129 - RNA, 14 nt, Human
agaaacagagacag

SEQ ID NO: 3492130 - RNA, 16 nt, Human
agaaacagauaccaua

SEQ ID NO: 3492131 - RNA, 13 nt, Human
agaaacagccagc

SEQ ID NO: 3492132 - RNA, 13 nt, Human
agaaacaggaccg

SEQ ID NO: 3492133 - RNA, 12 nt, Human
agaaacagugag

SEQ ID NO: 3492134 - RNA, 13 nt, Human
agaaacagugagu

SEQ ID NO: 3492135 - RNA, 13 nt, Human
agaaacaguuaac

SEQ ID NO: 3492136 - RNA, 21 nt, Human
agaaacaguugguaacuuuug

SEQ ID NO: 3492137 - RNA, 22 nt, Human
agaaacaguugguaacuuuugu

SEQ ID NO: 3492138 - RNA, 16 nt, Human
agaaacauaaauaaaa

SEQ ID NO: 3492139 - RNA, 14 nt, Human
agaaacaugacacu

SEQ ID NO: 3492140 - RNA, 17 nt, Human
agaaacaugacacugac

SEQ ID NO: 3492141 - RNA, 15 nt, Human
agaaacauugaagau

SEQ ID NO: 3492142 - RNA, 13 nt, Human
agaaacauuggaa

SEQ ID NO: 3492143 - RNA, 15 nt, Human
agaaacauuuauauu

SEQ ID NO: 3492144 - RNA, 15 nt, Human
agaaaccagcuuccu

SEQ ID NO: 3492145 - RNA, 16 nt, Human
agaaaccagcuuccuu

SEQ ID NO: 3492146 - RNA, 20 nt, Human
agaaaccagcuuccuucaga

SEQ ID NO: 3492147 - RNA, 21 nt, Human
agaaaccagcuuccuucagag

SEQ ID NO: 3492148 - RNA, 17 nt, Human
agaaacccaagcuccuc

SEQ ID NO: 3492149 - RNA, 18 nt, Human
agaaacccaagcuccucc

SEQ ID NO: 3492150 - RNA, 20 nt, Human
agaaacccaagcuccuccuc

SEQ ID NO: 3492151 - RNA, 15 nt, Human
agaaacccagacuga

SEQ ID NO: 3492152 - RNA, 20 nt, Human
agaaaccuacagaauacuag

SEQ ID NO: 3492153 - RNA, 19 nt, Human
agaaaccuguaucuuucua

SEQ ID NO: 3492154 - RNA, 20 nt, Human
agaaaccuguaucuuucuau

SEQ ID NO: 3492155 - RNA, 15 nt, Human
agaaacgcauccagc

SEQ ID NO: 3492156 - RNA, 18 nt, Human
agaaacgcauccagcaag

SEQ ID NO: 3492157 - RNA, 21 nt, Human
agaaacgucuucuaaacuucc

SEQ ID NO: 3492158 - RNA, 22 nt, Human
agaaacucacccccaaggggca

SEQ ID NO: 3492159 - RNA, 23 nt, Human
agaaacucacccccaaggggcag

SEQ ID NO: 3492160 - RNA, 16 nt, Human
agaaacugagaccaaa

SEQ ID NO: 3492161 - RNA, 13 nt, Human
agaaacugaggaa

SEQ ID NO: 3492162 - RNA, 22 nt, Human
agaaacuggcaaagcagaaugu

SEQ ID NO: 3492163 - RNA, 22 nt, Human
agaaacugucuagcacuuccuu

SEQ ID NO: 3492164 - RNA, 21 nt, Human
agaaacuguucccaccugcug

SEQ ID NO: 3492165 - RNA, 16 nt, Human
agaaaugaacauucca

SEQ ID NO: 3492166 - RNA, 23 nt, Human
agaaaugaccaauauuauacuaa

SEQ ID NO: 3492167 - RNA, 14 nt, Human
agaaaugacuaauu

SEQ ID NO: 3492168 - RNA, 17 nt, Human
agaaaugacuaauuagg

SEQ ID NO: 3492169 - RNA, 20 nt, Human
agaaaugagaucaggcucug

SEQ ID NO: 3492170 - RNA, 16 nt, Human
agaaaugcaaaaaucu

SEQ ID NO: 3492171 - RNA, 19 nt, Human
agaaaugcacaaugucuug

SEQ ID NO: 3492172 - RNA, 18 nt, Human
agaaaugcauccauuccu

SEQ ID NO: 3492173 - RNA, 11 nt, Human
agaaaugccaa

SEQ ID NO: 3492174 - RNA, 21 nt, Human
agaaaugccaagcacuucuuu

SEQ ID NO: 3492175 - RNA, 13 nt, Human
agaaaugcugccu

SEQ ID NO: 3492176 - RNA, 20 nt, Human
agaaaugcugguuuuucagu

SEQ ID NO: 3492177 - RNA, 12 nt, Human
agaaaugcuuug

SEQ ID NO: 3492178 - RNA, 19 nt, Human
agaaauggugagauuguuu

SEQ ID NO: 3492179 - RNA, 17 nt, Human
agaaaugguuguauuag

SEQ ID NO: 3492180 - RNA, 13 nt, Human
agaaauguaaugc

SEQ ID NO: 3492181 - RNA, 20 nt, Human
agaaauguauaaacuuuaga

SEQ ID NO: 3492182 - RNA, 21 nt, Human
agaaaugucuuaauuuuugaa

SEQ ID NO: 3492183 - RNA, 21 nt, Human
agaaauguguagcugcaaaaa

SEQ ID NO: 3492184 - RNA, 22 nt, Human
agaaauguugagucuguacuaa

SEQ ID NO: 3492185 - RNA, 17 nt, Human
agaaauuaaguaucuga

SEQ ID NO: 3492186 - RNA, 18 nt, Human
agaaauuacacccaaaga

SEQ ID NO: 3492187 - RNA, 20 nt, Human
agaaauuacuaauuuuacuu

SEQ ID NO: 3492188 - RNA, 21 nt, Human
agaaauuagaaaaaaauuacu

SEQ ID NO: 3492189 - RNA, 19 nt, Human
agaaauuagggcucuaauu

SEQ ID NO: 3492190 - RNA, 23 nt, Human
agaaauuagggcucuaauuuccu

SEQ ID NO: 3492191 - RNA, 21 nt, Human
agaaauuaugugccagauuua

SEQ ID NO: 3492192 - RNA, 17 nt, Human
agaaauucccuggacca

SEQ ID NO: 3492193 - RNA, 23 nt, Human
agaaauucugucauagaaagugc

SEQ ID NO: 3492194 - RNA, 14 nt, Human
agaaauucuguuaa

SEQ ID NO: 3492195 - RNA, 22 nt, Human
agaaauucuguuaaaaucuauu

SEQ ID NO: 3492196 - RNA, 12 nt, Human
agaaauucuugu

SEQ ID NO: 3492197 - RNA, 15 nt, Human
agaaauugaauacuu

SEQ ID NO: 3492198 - RNA, 16 nt, Human
agaaauugaauacuuu

SEQ ID NO: 3492199 - RNA, 17 nt, Human
agaaauugaauacuuug

SEQ ID NO: 3492200 - RNA, 18 nt, Human
agaaauugaauacuuuga

SEQ ID NO: 3492201 - RNA, 14 nt, Human
agaaauugccuauc

SEQ ID NO: 3492202 - RNA, 22 nt, Human
agaaauuggaacagaauguuuu

SEQ ID NO: 3492203 - RNA, 16 nt, Human
agaaauugguaccuug

SEQ ID NO: 3492204 - RNA, 20 nt, Human
agaaauugguaccuugcaca

SEQ ID NO: 3492205 - RNA, 17 nt, Human
agaaauuguauauugua

SEQ ID NO: 3492206 - RNA, 20 nt, Human
agaaauuguauauuguaauu

SEQ ID NO: 3492207 - RNA, 18 nt, Human
agaaauuuaaaagacacu

SEQ ID NO: 3492208 - RNA, 24 nt, Human
agaaauuuaaacuauaagcaagaa

SEQ ID NO: 3492209 - RNA, 14 nt, Human
agaaauuucacaua

SEQ ID NO: 3492210 - RNA, 16 nt, Human
agaaauuuccagagaa

SEQ ID NO: 3492211 - RNA, 11 nt, Human
agaaauuuuca

SEQ ID NO: 3492212 - RNA, 14 nt, Human
agaaauuuuuauca

SEQ ID NO: 3492213 - RNA, 16 nt, Human
agaaauuuuuaucagu

SEQ ID NO: 3492214 - RNA, 14 nt, Human
agaaauuuuucaga

SEQ ID NO: 3492215 - RNA, 10 nt, Human
agaacaaaaa

SEQ ID NO: 3492216 - RNA, 20 nt, Human
agaacaaaaaaaucugcaga

SEQ ID NO: 3492217 - RNA, 21 nt, Human
agaacaaaaaaaucugcagaa

SEQ ID NO: 3492218 - RNA, 16 nt, Human
agaacaaagcuguuaa

SEQ ID NO: 3492219 - RNA, 14 nt, Human
agaacaaaggacag

SEQ ID NO: 3492220 - RNA, 21 nt, Human
agaacaaaggacagaguauga

SEQ ID NO: 3492221 - RNA, 22 nt, Human
agaacaaaggacagaguaugaa

SEQ ID NO: 3492222 - RNA, 16 nt, Human
agaacaaagugagaca

SEQ ID NO: 3492223 - RNA, 14 nt, Human
agaacaaauauuca

SEQ ID NO: 3492224 - RNA, 10 nt, Human
agaacaaggc

SEQ ID NO: 3492225 - RNA, 17 nt, Human
agaacaagguaguuuuu

SEQ ID NO: 3492226 - RNA, 19 nt, Human
agaacaauagguaaagcua

SEQ ID NO: 3492227 - RNA, 21 nt, Human
agaacaauauugacuuugucu

SEQ ID NO: 3492228 - RNA, 15 nt, Human
agaacaaugugcuau

SEQ ID NO: 3492229 - RNA, 11 nt, Human
agaacacaguu

SEQ ID NO: 3492230 - RNA, 17 nt, Human
agaacaccuaugcaaag

SEQ ID NO: 3492231 - RNA, 14 nt, Human
agaacacuaaccug

SEQ ID NO: 3492232 - RNA, 16 nt, Human
agaacacuaauucaua

SEQ ID NO: 3492233 - RNA, 14 nt, Human
agaacacuauuuuc

SEQ ID NO: 3492234 - RNA, 17 nt, Human
agaacacuauuuucaga

SEQ ID NO: 3492235 - RNA, 20 nt, Human
agaacacuauuuucagaauc

SEQ ID NO: 3492236 - RNA, 12 nt, Human
agaacacuuaug

SEQ ID NO: 3492237 - RNA, 15 nt, Human
agaacagaaaacaac

SEQ ID NO: 3492238 - RNA, 21 nt, Human
agaacagaaaacaacaaaaaa

SEQ ID NO: 3492239 - RNA, 20 nt, Human
agaacagacuggccugagga

SEQ ID NO: 3492240 - RNA, 16 nt, Human
agaacagauaaagauu

SEQ ID NO: 3492241 - RNA, 19 nt, Human
agaacagauaaucagugug

SEQ ID NO: 3492242 - RNA, 18 nt, Human
agaacagaucuccaaagc

SEQ ID NO: 3492243 - RNA, 19 nt, Human
agaacagcaggcccaccua

SEQ ID NO: 3492244 - RNA, 15 nt, Human
agaacagcauugucc

SEQ ID NO: 3492245 - RNA, 19 nt, Human
agaacagccgcuccugucu

SEQ ID NO: 3492246 - RNA, 22 nt, Human
agaacagccgcuccugucugcc

SEQ ID NO: 3492247 - RNA, 23 nt, Human
agaacagccgcuccugucugcca

SEQ ID NO: 3492248 - RNA, 12 nt, Human
agaacagcuguu

SEQ ID NO: 3492249 - RNA, 18 nt, Human
agaaucccuguguuaauu

SEQ ID NO: 3492250 - RNA, 15 nt, Human
agaaucccuguucau

SEQ ID NO: 3492251 - RNA, 16 nt, Human
agaaucccuguucauu

SEQ ID NO: 3492252 - RNA, 20 nt, Human
agaaucccuuaacaguugua

SEQ ID NO: 3492253 - RNA, 21 nt, Human
agaaucgaugggggaugcuuc

SEQ ID NO: 3492254 - RNA, 23 nt, Human
agaaucgaugggggaugcuucau

SEQ ID NO: 3492255 - RNA, 15 nt, Human
agaaucuaaagccag

SEQ ID NO: 3492256 - RNA, 22 nt, Human
agaaucuaacugguggacaugg

SEQ ID NO: 3492257 - RNA, 14 nt, Human
agaaucuauuuucu

SEQ ID NO: 3492258 - RNA, 16 nt, Human
agaaucuauuuucuau

SEQ ID NO: 3492259 - RNA, 13 nt, Human
agaaucugaaugu

SEQ ID NO: 3492260 - RNA, 13 nt, Human
agaaucuggagag

SEQ ID NO: 3492261 - RNA, 19 nt, Human
agaaucuuguuuugaaaau

SEQ ID NO: 3492262 - RNA, 14 nt, Human
agaaucuuuagaga

SEQ ID NO: 3492263 - RNA, 23 nt, Human
agaaucuuuagagaaguauacau

SEQ ID NO: 3492264 - RNA, 21 nt, Human
agaaucuuuauugagaaagag

SEQ ID NO: 3492265 - RNA, 24 nt, Human
agaaucuuuauugagaaagagcac

SEQ ID NO: 3492266 - RNA, 17 nt, Human
agaaugaaaauuguaug

SEQ ID NO: 3492267 - RNA, 16 nt, Human
agaaugaaagggccca

SEQ ID NO: 3492268 - RNA, 17 nt, Human
agaaugaaauguaugug

SEQ ID NO: 3492269 - RNA, 20 nt, Human
agaaugaaauugcugaaaga

SEQ ID NO: 3492270 - RNA, 22 nt, Human
agaaugaacaaagaccaauuuu

SEQ ID NO: 3492271 - RNA, 15 nt, Human
agaaugaacaaauug

SEQ ID NO: 3492272 - RNA, 16 nt, Human
agaaugaccuuguaau

SEQ ID NO: 3492273 - RNA, 20 nt, Human
agaaugaccuuguaauguaa

SEQ ID NO: 3492274 - RNA, 21 nt, Human
agaaugaccuuguaauguaac

SEQ ID NO: 3492275 - RNA, 22 nt, Human
agaaugaccuuguaauguaacu

SEQ ID NO: 3492276 - RNA, 22 nt, Human
agaaugagagacacacugaaga

SEQ ID NO: 3492277 - RNA, 16 nt, Human
agaaugagcacccauu

SEQ ID NO: 3492278 - RNA, 21 nt, Human
agaaugagccuacgcugaaga

SEQ ID NO: 3492279 - RNA, 16 nt, Human
agaaugaggaggaagg

SEQ ID NO: 3492280 - RNA, 17 nt, Human
agaaugaggaggaagga

SEQ ID NO: 3492281 - RNA, 12 nt, Human
agaaugaggcug

SEQ ID NO: 3492282 - RNA, 13 nt, Human
agaaugaugguuu

SEQ ID NO: 3492283 - RNA, 13 nt, Human
agaaugauuucau

SEQ ID NO: 3492284 - RNA, 20 nt, Human
agaaugcaaccaagucacac

SEQ ID NO: 3492285 - RNA, 16 nt, Human
agaaugcacaagaaug

SEQ ID NO: 3492286 - RNA, 17 nt, Human
agaaugcacaagaaugg

SEQ ID NO: 3492287 - RNA, 18 nt, Human
agaaugcacagauauacu

SEQ ID NO: 3492288 - RNA, 18 nt, Human
agaaugcaccauacucau

SEQ ID NO: 3492289 - RNA, 18 nt, Human
agaaugcaugcuuuccau

SEQ ID NO: 3492290 - RNA, 13 nt, Human
agaaugcauugau

SEQ ID NO: 3492291 - RNA, 18 nt, Human
agaaugccuugaagauau

SEQ ID NO: 3492292 - RNA, 18 nt, Human
agaaugcucuuuacuuca

SEQ ID NO: 3492293 - RNA, 13 nt, Human
agaaugcuguaca

SEQ ID NO: 3492294 - RNA, 22 nt, Human
agaauggcccaguccucuccca

SEQ ID NO: 3492295 - RNA, 17 nt, Human
agaauggggcugggccc

SEQ ID NO: 3492296 - RNA, 23 nt, Human
agaaugguccgugcuaaggacuu

SEQ ID NO: 3492297 - RNA, 19 nt, Human
agaauggugauuuuaaaug

SEQ ID NO: 3492298 - RNA, 20 nt, Human
agaauggugauuuuaaaugu

SEQ ID NO: 3492299 - RNA, 23 nt, Human
agaauguauauuaagguguggcu

SEQ ID NO: 3492300 - RNA, 22 nt, Human
agaauguaucugugaaguaguu

SEQ ID NO: 3492301 - RNA, 12 nt, Human
agaauguauugu

SEQ ID NO: 3492302 - RNA, 15 nt, Human
agaauguauuguacc

SEQ ID NO: 3492303 - RNA, 22 nt, Human
agaauguauuguaccuuuuaac

SEQ ID NO: 3492304 - RNA, 16 nt, Human
agaauguauuugcuga

SEQ ID NO: 3492305 - RNA, 15 nt, Human
agaaugucagauucc

SEQ ID NO: 3492306 - RNA, 13 nt, Human
agaaugucaguau

SEQ ID NO: 3492307 - RNA, 16 nt, Human
agaaugucaguaugug

SEQ ID NO: 3492308 - RNA, 19 nt, Human
agaaugucaguauguggaa

SEQ ID NO: 3492309 - RNA, 19 nt, Human
agaccuauuccuccugggc

SEQ ID NO: 3492310 - RNA, 14 nt, Human
agaccucagccaug

SEQ ID NO: 3492311 - RNA, 15 nt, Human
agaccucagccugug

SEQ ID NO: 3492312 - RNA, 17 nt, Human
agaccucagccugugcu

SEQ ID NO: 3492313 - RNA, 14 nt, Human
agaccucagggcac

SEQ ID NO: 3492314 - RNA, 20 nt, Human
agaccucagugccuuccugu

SEQ ID NO: 3492315 - RNA, 19 nt, Human
agaccucaucaggaugaac

SEQ ID NO: 3492316 - RNA, 20 nt, Human
agaccuccccagccccuagc

SEQ ID NO: 3492317 - RNA, 19 nt, Human
agaccucuauauuugcucu

SEQ ID NO: 3492318 - RNA, 15 nt, Human
agaccucuccuuccu

SEQ ID NO: 3492319 - RNA, 12 nt, Human
agaccucuggau

SEQ ID NO: 3492320 - RNA, 23 nt, Human
agaccucuggauuaggucucugu

SEQ ID NO: 3492321 - RNA, 17 nt, Human
agaccugacaagcacug

SEQ ID NO: 3492322 - RNA, 19 nt, Human
agaccugacaagcacugcu

SEQ ID NO: 3492323 - RNA, 14 nt, Human
agaccugacucagg

SEQ ID NO: 3492324 - RNA, 16 nt, Human
agaccugagaauguau

SEQ ID NO: 3492325 - RNA, 15 nt, Human
agaccugauccugga

SEQ ID NO: 3492326 - RNA, 18 nt, Human
agaccugauccuggaggc

SEQ ID NO: 3492327 - RNA, 13 nt, Human
agaccuggagccc

SEQ ID NO: 3492328 - RNA, 16 nt, Human
agaccuggagccccug

SEQ ID NO: 3492329 - RNA, 11 nt, Human
agaccuggcag

SEQ ID NO: 3492330 - RNA, 18 nt, Human
agaccuggcagcucugga

SEQ ID NO: 3492331 - RNA, 17 nt, Human
agaccuguccuccuggu

SEQ ID NO: 3492332 - RNA, 21 nt, Human
agaccuguugguuccaagccc

SEQ ID NO: 3492333 - RNA, 16 nt, Human
agaccuucaccaaaca

SEQ ID NO: 3492334 - RNA, 23 nt, Human
agaccuuggaucagaugaacucu

SEQ ID NO: 3492335 - RNA, 18 nt, Human
agaccuuguguguaugug

SEQ ID NO: 3492336 - RNA, 20 nt, Human
agaccuuguucacacucuca

SEQ ID NO: 3492337 - RNA, 20 nt, Human
agaccuuugaggauaucaaa

SEQ ID NO: 3492338 - RNA, 18 nt, Human
agaccuuuuucugcacua

SEQ ID NO: 3492339 - RNA, 20 nt, Human
agaccuuuuucugcacuaua

SEQ ID NO: 3492340 - RNA, 22 nt, Human
agaccuuuuuuuuuuuuccaau

SEQ ID NO: 3492341 - RNA, 15 nt, Human
agacgacagccccug

SEQ ID NO: 3492342 - RNA, 15 nt, Human
agacgagaggacgag

SEQ ID NO: 3492343 - RNA, 17 nt, Human
agacgaggcccucgggc

SEQ ID NO: 3492344 - RNA, 22 nt, Human
agacgaggcccucgggcccagc

SEQ ID NO: 3492345 - RNA, 14 nt, Human
agacgcauuucggu

SEQ ID NO: 3492346 - RNA, 20 nt, Human
agacgccggggacagaggcc

SEQ ID NO: 3492347 - RNA, 15 nt, Human
agacgccugaggaac

SEQ ID NO: 3492348 - RNA, 18 nt, Human
agacgccuuucuccucca

SEQ ID NO: 3492349 - RNA, 16 nt, Human
agacggcacccaccca

SEQ ID NO: 3492350 - RNA, 20 nt, Human
agacggcacggucuucccuc

SEQ ID NO: 3492351 - RNA, 21 nt, Human
agacgguguuuugccauguug

SEQ ID NO: 3492352 - RNA, 16 nt, Human
agacgguuuccaggga

SEQ ID NO: 3492353 - RNA, 19 nt, Human
agacgguuuccagggaggg

SEQ ID NO: 3492354 - RNA, 19 nt, Human
agacgugaugccaggacca

SEQ ID NO: 3492355 - RNA, 18 nt, Human
agacguggaaccucuguc

SEQ ID NO: 3492356 - RNA, 13 nt, Human
agacguguacaua

SEQ ID NO: 3492357 - RNA, 19 nt, Human
agacguguggcaauagugg

SEQ ID NO: 3492358 - RNA, 13 nt, Human
agacguuuauaaa

SEQ ID NO: 3492359 - RNA, 22 nt, Human
agacguuuuauaagcaucauua

SEQ ID NO: 3492360 - RNA, 16 nt, Human
agacuaaaaguugcau

SEQ ID NO: 3492361 - RNA, 13 nt, Human
agacuaaaugaaa

SEQ ID NO: 3492362 - RNA, 15 nt, Human
agacuaagccagcac

SEQ ID NO: 3492363 - RNA, 15 nt, Human
agacuaagcccuguc

SEQ ID NO: 3492364 - RNA, 16 nt, Human
agacuacacaggauga

SEQ ID NO: 3492365 - RNA, 23 nt, Human
agacuacaggcacacaccaccac

SEQ ID NO: 3492366 - RNA, 18 nt, Human
agacuacuauuuucuuuu

SEQ ID NO: 3492367 - RNA, 22 nt, Human
agacuacuguucagcuuuuauu

SEQ ID NO: 3492368 - RNA, 13 nt, Human
agacuagagaaac

SEQ ID NO: 3492369 - RNA, 14 nt, Human
agacuagagaaacc

SEQ ID NO: 3492370 - RNA, 13 nt, Human
agacuagauguag

SEQ ID NO: 3492371 - RNA, 16 nt, Human
agacuagauugccuuu

SEQ ID NO: 3492372 - RNA, 17 nt, Human
agacuagcaaucucuuc

SEQ ID NO: 3492373 - RNA, 12 nt, Human
agacuauauaca

SEQ ID NO: 3492374 - RNA, 18 nt, Human
agacuauauacaugugug

SEQ ID NO: 3492375 - RNA, 19 nt, Human
agacuauauauauaaaugu

SEQ ID NO: 3492376 - RNA, 21 nt, Human
agacuauauauauaaauguau

SEQ ID NO: 3492377 - RNA, 19 nt, Human
agacuaucuaaauguugaa

SEQ ID NO: 3492378 - RNA, 20 nt, Human
agacuaucuuacuauuucac

SEQ ID NO: 3492379 - RNA, 15 nt, Human
agacuaugaaaaugc

SEQ ID NO: 3492380 - RNA, 15 nt, Human
agacuauggagccug

SEQ ID NO: 3492381 - RNA, 21 nt, Human
agacuauucaaacagucucag

SEQ ID NO: 3492382 - RNA, 17 nt, Human
agacuauuuaacuugag

SEQ ID NO: 3492383 - RNA, 21 nt, Human
agacuauuuuuagauuuucuu

SEQ ID NO: 3492384 - RNA, 13 nt, Human
agacucaaaugcu

SEQ ID NO: 3492385 - RNA, 17 nt, Human
agacucaaauguucuaa

SEQ ID NO: 3492386 - RNA, 20 nt, Human
agacucaaauguucuaaguu

SEQ ID NO: 3492387 - RNA, 22 nt, Human
agacucaagguggucaguaaau

SEQ ID NO: 3492388 - RNA, 14 nt, Human
agacucaccucugc

SEQ ID NO: 3492389 - RNA, 18 nt, Human
agacucagagcucucucu

SEQ ID NO: 3492390 - RNA, 19 nt, Human
agacucaggccaagaaacg

SEQ ID NO: 3492391 - RNA, 12 nt, Human
agacucagggcc

SEQ ID NO: 3492392 - RNA, 12 nt, Human
agacucaguuug

SEQ ID NO: 3492393 - RNA, 17 nt, Human
agacucaguuugucaga

SEQ ID NO: 3492394 - RNA, 15 nt, Human
agacucauucuucug

SEQ ID NO: 3492395 - RNA, 17 nt, Human
agacucauucuucugua

SEQ ID NO: 3492396 - RNA, 18 nt, Human
agacucauucuucuguac

SEQ ID NO: 3492397 - RNA, 16 nt, Human
agacuccaaagaaaug

SEQ ID NO: 3492398 - RNA, 22 nt, Human
agacuccaaagaaauguaaggg

SEQ ID NO: 3492399 - RNA, 16 nt, Human
agacucccaagcugga

SEQ ID NO: 3492400 - RNA, 18 nt, Human
agacuccgucucaaggaa

SEQ ID NO: 3492401 - RNA, 11 nt, Human
agacuccucag

SEQ ID NO: 3492402 - RNA, 17 nt, Human
agacuccucaguucuug

SEQ ID NO: 3492403 - RNA, 15 nt, Human
agacuccugaggaca

SEQ ID NO: 3492404 - RNA, 20 nt, Human
agacuccugaggacagcugu

SEQ ID NO: 3492405 - RNA, 17 nt, Human
agacuccugcaggcagc

SEQ ID NO: 3492406 - RNA, 14 nt, Human
agacuccugcccug

SEQ ID NO: 3492407 - RNA, 17 nt, Human
agacucgacucugugcc

SEQ ID NO: 3492408 - RNA, 21 nt, Human
agacucgauagugguggugaa

SEQ ID NO: 3492409 - RNA, 19 nt, Human
agacucgccaacaugguga

SEQ ID NO: 3492410 - RNA, 15 nt, Human
agacucgcgacaaug

SEQ ID NO: 3492411 - RNA, 17 nt, Human
agacucuaagaaagaac

SEQ ID NO: 3492412 - RNA, 18 nt, Human
agacucuagacaagauau

SEQ ID NO: 3492413 - RNA, 17 nt, Human
agacucuaguauuuaug

SEQ ID NO: 3492414 - RNA, 15 nt, Human
agacucuauucucaa

SEQ ID NO: 3492415 - RNA, 20 nt, Human
agacucucgcaucuucccaa

SEQ ID NO: 3492416 - RNA, 14 nt, Human
agacucuggucuuc

SEQ ID NO: 3492417 - RNA, 20 nt, Human
agacucugucuaaaaaacaa

SEQ ID NO: 3492418 - RNA, 21 nt, Human
agacucugucuaaaaaacaaa

SEQ ID NO: 3492419 - RNA, 13 nt, Human
agacucugucuca

SEQ ID NO: 3492420 - RNA, 18 nt, Human
agacucugucucaaaaaa

SEQ ID NO: 3492421 - RNA, 18 nt, Human
agacucuugccuguuucc

SEQ ID NO: 3492422 - RNA, 16 nt, Human
agacucuuuggacacu

SEQ ID NO: 3492423 - RNA, 22 nt, Human
agacucuuuuuguaccugguga

SEQ ID NO: 3492424 - RNA, 23 nt, Human
agacugaaaauauauaagcucag

SEQ ID NO: 3492425 - RNA, 24 nt, Human
agacugaauagauaugaaagcuga

SEQ ID NO: 3492426 - RNA, 19 nt, Human
agacugacaaccucaucca

SEQ ID NO: 3492427 - RNA, 14 nt, Human
agacugacgccagg

SEQ ID NO: 3492428 - RNA, 16 nt, Human
agacugagcaccugcu

SEQ ID NO: 3492429 - RNA, 20 nt, Human
agacugaguacguugugcau

SEQ ID NO: 3492430 - RNA, 20 nt, Human
agacugcacccaggagggga

SEQ ID NO: 3492431 - RNA, 21 nt, Human
agacugcagguuggaccccag

SEQ ID NO: 3492432 - RNA, 17 nt, Human
agacugcauuauauuua

SEQ ID NO: 3492433 - RNA, 21 nt, Human
agacugcauuauauuuauuac

SEQ ID NO: 3492434 - RNA, 15 nt, Human
agacugccacaagga

SEQ ID NO: 3492435 - RNA, 11 nt, Human
agacugccagc

SEQ ID NO: 3492436 - RNA, 18 nt, Human
agacugccagcucuuccu

SEQ ID NO: 3492437 - RNA, 20 nt, Human
agacugccauauuaaauuuu

SEQ ID NO: 3492438 - RNA, 17 nt, Human
agacugcuccugagccc

SEQ ID NO: 3492439 - RNA, 15 nt, Human
agacugcugggacug

SEQ ID NO: 3492440 - RNA, 16 nt, Human
agacugcuguggccag

SEQ ID NO: 3492441 - RNA, 17 nt, Human
agacugcuguggccagg

SEQ ID NO: 3492442 - RNA, 18 nt, Human
agacugcuguggccagga

SEQ ID NO: 3492443 - RNA, 19 nt, Human
agacugcuuccaauuuucu

SEQ ID NO: 3492444 - RNA, 16 nt, Human
agacuggaaaaaauga

SEQ ID NO: 3492445 - RNA, 15 nt, Human
agacuggaacacuag

SEQ ID NO: 3492446 - RNA, 18 nt, Human
agacuggaacuugaacug

SEQ ID NO: 3492447 - RNA, 16 nt, Human
agacuggaagcacagc

SEQ ID NO: 3492448 - RNA, 14 nt, Human
agacuggaagcuaa

SEQ ID NO: 3492449 - RNA, 11 nt, Human
agacuggaagg

SEQ ID NO: 3492450 - RNA, 14 nt, Human
agacuggacagcuu

SEQ ID NO: 3492451 - RNA, 16 nt, Human
agacuggacagcuugu

SEQ ID NO: 3492452 - RNA, 15 nt, Human
agacuggagcaucug

SEQ ID NO: 3492453 - RNA, 16 nt, Human
agacuggauacugccc

SEQ ID NO: 3492454 - RNA, 18 nt, Human
agagaagugacagggaag

SEQ ID NO: 3492455 - RNA, 14 nt, Human
agagaagugccccu

SEQ ID NO: 3492456 - RNA, 15 nt, Human
agagaagugccccug

SEQ ID NO: 3492457 - RNA, 13 nt, Human
agagaauaaauug

SEQ ID NO: 3492458 - RNA, 16 nt, Human
agagaauauaacauga

SEQ ID NO: 3492459 - RNA, 22 nt, Human
agagaauauaacaugaaaugau

SEQ ID NO: 3492460 - RNA, 13 nt, Human
agagaauauuuua

SEQ ID NO: 3492461 - RNA, 15 nt, Human
agagaaucaacauuu

SEQ ID NO: 3492462 - RNA, 22 nt, Human
agagaaugaaauugcugaaaga

SEQ ID NO: 3492463 - RNA, 15 nt, Human
agagaaugagagaca

SEQ ID NO: 3492464 - RNA, 19 nt, Human
agagaaugcacagauauac

SEQ ID NO: 3492465 - RNA, 15 nt, Human
agagaauggaaaaca

SEQ ID NO: 3492466 - RNA, 14 nt, Human
agagaauguauuug

SEQ ID NO: 3492467 - RNA, 20 nt, Human
agagaauguuauagugaauu

SEQ ID NO: 3492468 - RNA, 22 nt, Human
agagaauguuauagugaauuau

SEQ ID NO: 3492469 - RNA, 18 nt, Human
acgcuugacaggacagca

SEQ ID NO: 3492470 - RNA, 21 nt, Human
acgcuugacaggacagcaugg

SEQ ID NO: 3492471 - RNA, 22 nt, Human
acgcuugcucuguuuguggggu

SEQ ID NO: 3492472 - RNA, 18 nt, Human
acgcuuuccugaauccaa

SEQ ID NO: 3492473 - RNA, 14 nt, Human
acgcuuugauucau

SEQ ID NO: 3492474 - RNA, 20 nt, Human
acgcuuuuaaugaaaaggaa

SEQ ID NO: 3492475 - RNA, 14 nt, Human
acgcuuuugugaug

SEQ ID NO: 3492476 - RNA, 17 nt, Human
acggaacguuggacuuu

SEQ ID NO: 3492477 - RNA, 14 nt, Human
acggaacucaaaua

SEQ ID NO: 3492478 - RNA, 16 nt, Human
acggaagagccuugcg

SEQ ID NO: 3492479 - RNA, 16 nt, Human
acggaaggguaaacaa

SEQ ID NO: 3492480 - RNA, 20 nt, Human
acggaaguuuucaaugaugg

SEQ ID NO: 3492481 - RNA, 15 nt, Human
acggacacccccucg

SEQ ID NO: 3492482 - RNA, 16 nt, Human
acggacacccccucgc

SEQ ID NO: 3492483 - RNA, 21 nt, Human
acggacaguuccagaagugug

SEQ ID NO: 3492484 - RNA, 19 nt, Human
acggacgaaccuugaaaac

SEQ ID NO: 3492485 - RNA, 16 nt, Human
acggacguuuccauca

SEQ ID NO: 3492486 - RNA, 14 nt, Human
acggagagaaaaaa

SEQ ID NO: 3492487 - RNA, 20 nt, Human
acggagcggauugcaaagca

SEQ ID NO: 3492488 - RNA, 23 nt, Human
acggaggcaaagcuggcucaccu

SEQ ID NO: 3492489 - RNA, 18 nt, Human
acggaggcauccuacccu

SEQ ID NO: 3492490 - RNA, 21 nt, Human
acggaggccugcgacccuggg

SEQ ID NO: 3492491 - RNA, 19 nt, Human
acggagucccaccuuggcu

SEQ ID NO: 3492492 - RNA, 23 nt, Human
acggagucccaccuuggcugcag

SEQ ID NO: 3492493 - RNA, 21 nt, Human
acggagucucacucugucacc

SEQ ID NO: 3492494 - RNA, 22 nt, Human
acggauccugcacugacucugg

SEQ ID NO: 3492495 - RNA, 17 nt, Human
acggaucugagaaucuu

SEQ ID NO: 3492496 - RNA, 22 nt, Human
acggaugccuuccccugggccc

SEQ ID NO: 3492497 - RNA, 13 nt, Human
acggcacccaccc

SEQ ID NO: 3492498 - RNA, 22 nt, Human
acggcacugagagagcgcagcc

SEQ ID NO: 3492499 - RNA, 16 nt, Human
acggccacacagcugc

SEQ ID NO: 3492500 - RNA, 18 nt, Human
acggccacacagcugccg

SEQ ID NO: 3492501 - RNA, 18 nt, Human
acggccagggagaagcuc

SEQ ID NO: 3492502 - RNA, 13 nt, Human
acggccccagcuu

SEQ ID NO: 3492503 - RNA, 18 nt, Human
acggccccagcuucucag

SEQ ID NO: 3492504 - RNA, 15 nt, Human
acggccugaugcucc

SEQ ID NO: 3492505 - RNA, 22 nt, Human
acggccugaugcucccuccccu

SEQ ID NO: 3492506 - RNA, 21 nt, Human
acggccuucaacugaaaagac

SEQ ID NO: 3492507 - RNA, 14 nt, Human
acggccuuucuagc

SEQ ID NO: 3492508 - RNA, 19 nt, Human
acggcguuguaccuguagg

SEQ ID NO: 3492509 - RNA, 15 nt, Human
acggcuaagaggcug

SEQ ID NO: 3492510 - RNA, 17 nt, Human
acggcuaagaggcugcu

SEQ ID NO: 3492511 - RNA, 18 nt, Human
acggcuaagaggcugcug

SEQ ID NO: 3492512 - RNA, 14 nt, Human
acggcucacugcag

SEQ ID NO: 3492513 - RNA, 15 nt, Human
acggcucacugcagc

SEQ ID NO: 3492514 - RNA, 17 nt, Human
acggcucacugcagccu

SEQ ID NO: 3492515 - RNA, 22 nt, Human
acggcuccacuaggacuucaaa

SEQ ID NO: 3492516 - RNA, 17 nt, Human
acggcucuagguggggc

SEQ ID NO: 3492517 - RNA, 18 nt, Human
acggcugcgcacuguguc

SEQ ID NO: 3492518 - RNA, 19 nt, Human
acgggaagcaaccucccaa

SEQ ID NO: 3492519 - RNA, 19 nt, Human
acgggacaucacagggugg

SEQ ID NO: 3492520 - RNA, 18 nt, Human
acgggcaugggcacuccc

SEQ ID NO: 3492521 - RNA, 16 nt, Human
acgggcccggguuggg

SEQ ID NO: 3492522 - RNA, 17 nt, Human
acgggcccggguugggu

SEQ ID NO: 3492523 - RNA, 20 nt, Human
acgggcccggguugggucac

SEQ ID NO: 3492524 - RNA, 14 nt, Human
acggggaggccaag

SEQ ID NO: 3492525 - RNA, 23 nt, Human
acggggaggccaagugcaggcug

SEQ ID NO: 3492526 - RNA, 14 nt, Human
acgggguccuucaa

SEQ ID NO: 3492527 - RNA, 15 nt, Human
acgggguuucaccau

SEQ ID NO: 3492528 - RNA, 14 nt, Human
acggguggggaaag

SEQ ID NO: 3492529 - RNA, 15 nt, Human
acggguuggggccgg

SEQ ID NO: 3492530 - RNA, 15 nt, Human
acggucagguuuaac

SEQ ID NO: 3492531 - RNA, 21 nt, Human
acggucccacacuggugacug

SEQ ID NO: 3492532 - RNA, 22 nt, Human
acggucggggcaucuggccugg

SEQ ID NO: 3492533 - RNA, 20 nt, Human
acggucuguucuugaagcag

SEQ ID NO: 3492534 - RNA, 16 nt, Human
acggugaaggugacag

SEQ ID NO: 3492535 - RNA, 19 nt, Human
acggugaauggcuuuguau

SEQ ID NO: 3492536 - RNA, 14 nt, Human
acggugcccaagcc

SEQ ID NO: 3492537 - RNA, 21 nt, Human
acggugccuuuuuucacggaa

SEQ ID NO: 3492538 - RNA, 15 nt, Human
acggugcuccaggca

SEQ ID NO: 3492539 - RNA, 20 nt, Human
acggugcugugagggagggg

SEQ ID NO: 3492540 - RNA, 19 nt, Human
acggugggcauuugugagg

SEQ ID NO: 3492541 - RNA, 17 nt, Human
acggugggccuugcugg

SEQ ID NO: 3492542 - RNA, 21 nt, Human
acgguggucggugggacccug

SEQ ID NO: 3492543 - RNA, 17 nt, Human
acgguguuuugccaugu

SEQ ID NO: 3492544 - RNA, 14 nt, Human
acgguuaacuguaa

SEQ ID NO: 3492545 - RNA, 17 nt, Human
acgguuccuacacagga

SEQ ID NO: 3492546 - RNA, 18 nt, Human
acgguuccuacacaggac

SEQ ID NO: 3492547 - RNA, 15 nt, Human
acgguuuuacugcag

SEQ ID NO: 3492548 - RNA, 17 nt, Human
acgguuuuacugcagcu

SEQ ID NO: 3492549 - RNA, 17 nt, Human
acguaagcacuguuuuu

SEQ ID NO: 3492550 - RNA, 13 nt, Human
acguacacacaca

SEQ ID NO: 3492551 - RNA, 13 nt, Human
acguacacauuuu

SEQ ID NO: 3492552 - RNA, 13 nt, Human
acguacauguuua

SEQ ID NO: 3492553 - RNA, 20 nt, Human
acguacguaucagcggcccc

SEQ ID NO: 3492554 - RNA, 20 nt, Human
acguacugcagccuccagag

SEQ ID NO: 3492555 - RNA, 14 nt, Human
acguacugucugau

SEQ ID NO: 3492556 - RNA, 13 nt, Human
acguauuuaauag

SEQ ID NO: 3492557 - RNA, 17 nt, Human
acgucaagucuccuucc

SEQ ID NO: 3492558 - RNA, 21 nt, Human
acgucacguguaguguccauu

SEQ ID NO: 3492559 - RNA, 17 nt, Human
acgucagacuuggcuca

SEQ ID NO: 3492560 - RNA, 18 nt, Human
acgucagacuuggcucag

SEQ ID NO: 3492561 - RNA, 15 nt, Human
acgucagauguuuaa

SEQ ID NO: 3492562 - RNA, 23 nt, Human
acguccaccaugggguccuacca

SEQ ID NO: 3492563 - RNA, 22 nt, Human
acgucccuccacguucaccccu

SEQ ID NO: 3492564 - RNA, 15 nt, Human
acguccugucagugc

SEQ ID NO: 3492565 - RNA, 23 nt, Human
acgucuagcuaugcuguaucugu

SEQ ID NO: 3492566 - RNA, 18 nt, Human
acgucuauuucaucagaa

SEQ ID NO: 3492567 - RNA, 14 nt, Human
acgucugacaggca

SEQ ID NO: 3492568 - RNA, 23 nt, Human
acgucugacaggcaaugcuggcu

SEQ ID NO: 3492569 - RNA, 22 nt, Human
acgucugggagaaauugacaga

SEQ ID NO: 3492570 - RNA, 19 nt, Human
acgucugucuucacagcuc

SEQ ID NO: 3492571 - RNA, 17 nt, Human
acgugaagauaccauaa

SEQ ID NO: 3492572 - RNA, 21 nt, Human
acgugaccggacuuuucugca

SEQ ID NO: 3492573 - RNA, 14 nt, Human
acgugagagugucu

SEQ ID NO: 3492574 - RNA, 14 nt, Human
acgugagccaggua

SEQ ID NO: 3492575 - RNA, 18 nt, Human
acgugauggucugagacu

SEQ ID NO: 3492576 - RNA, 21 nt, Human
acgugaugugcucaucagaaa

SEQ ID NO: 3492577 - RNA, 22 nt, Human
acgugauucaauucaacacucc

SEQ ID NO: 3492578 - RNA, 23 nt, Human
acgugcaacugacacucccaccc

SEQ ID NO: 3492579 - RNA, 15 nt, Human
acgugcauugugcuu

SEQ ID NO: 3492580 - RNA, 22 nt, Human
acgugcauugugcuucuuucuu

SEQ ID NO: 3492581 - RNA, 21 nt, Human
acgugccuuuugcaccccucc

SEQ ID NO: 3492582 - RNA, 22 nt, Human
acgugcgcugggcacuucccug

SEQ ID NO: 3492583 - RNA, 19 nt, Human
acguggagaaucacaggcu

SEQ ID NO: 3492584 - RNA, 15 nt, Human
acguggagagggaug

SEQ ID NO: 3492585 - RNA, 13 nt, Human
acguggaggagca

SEQ ID NO: 3492586 - RNA, 18 nt, Human
acguggaggagcagugca

SEQ ID NO: 3492587 - RNA, 14 nt, Human
acguggcaccuccu

SEQ ID NO: 3492588 - RNA, 13 nt, Human
acguggcacuggu

SEQ ID NO: 3492589 - RNA, 20 nt, Human
acguggccaagagaaacuuc

SEQ ID NO: 3492590 - RNA, 15 nt, Human
acguggcccagagaa

SEQ ID NO: 3492591 - RNA, 21 nt, Human
acguggcugcgugccccugcu

SEQ ID NO: 3492592 - RNA, 15 nt, Human
acguggcugcuucaa

SEQ ID NO: 3492593 - RNA, 18 nt, Human
acguggcugcuucaagga

SEQ ID NO: 3492594 - RNA, 15 nt, Human
acguggcuucugaug

SEQ ID NO: 3492595 - RNA, 20 nt, Human
acguggcuucugaugaaucu

SEQ ID NO: 3492596 - RNA, 18 nt, Human
acguggcuuuuagacaga

SEQ ID NO: 3492597 - RNA, 17 nt, Human
acgugggcauucaaaug

SEQ ID NO: 3492598 - RNA, 22 nt, Human
caguaagucucauagguuaaaa

SEQ ID NO: 3492599 - RNA, 14 nt, Human
caguaagucuuuuu

SEQ ID NO: 3492600 - RNA, 14 nt, Human
caguaauaaaacau

SEQ ID NO: 3492601 - RNA, 19 nt, Human
caguaauaacucuacccug

SEQ ID NO: 3492602 - RNA, 21 nt, Human
caguaauugguccgaucuuug

SEQ ID NO: 3492603 - RNA, 14 nt, Human
caguaauugugaaa

SEQ ID NO: 3492604 - RNA, 17 nt, Human
caguaauuguguuuaca

SEQ ID NO: 3492605 - RNA, 20 nt, Human
caguaauuguguuuacauuu

SEQ ID NO: 3492606 - RNA, 14 nt, Human
caguaauuuagaaa

SEQ ID NO: 3492607 - RNA, 15 nt, Human
caguacagcaugugc

SEQ ID NO: 3492608 - RNA, 16 nt, Human
caguacaggcagcaca

SEQ ID NO: 3492609 - RNA, 21 nt, Human
caguacauucucaguuuuucu

SEQ ID NO: 3492610 - RNA, 16 nt, Human
caguacauuuaaauuu

SEQ ID NO: 3492611 - RNA, 17 nt, Human
caguacauuuaaauuuu

SEQ ID NO: 3492612 - RNA, 23 nt, Human
caguaccauuuaauggggaggac

SEQ ID NO: 3492613 - RNA, 16 nt, Human
caguacccaccaccuu

SEQ ID NO: 3492614 - RNA, 19 nt, Human
caguacccaccugagcuuu

SEQ ID NO: 3492615 - RNA, 17 nt, Human
caguaccccauggagcu

SEQ ID NO: 3492616 - RNA, 15 nt, Human
caguacccucucagc

SEQ ID NO: 3492617 - RNA, 19 nt, Human
caguacccucucagcucca

SEQ ID NO: 3492618 - RNA, 22 nt, Human
caguaccuauaaaguaaagcua

SEQ ID NO: 3492619 - RNA, 20 nt, Human
caguaccuccugucucuggc

SEQ ID NO: 3492620 - RNA, 22 nt, Human
caguaccugagggucuguaggu

SEQ ID NO: 3492621 - RNA, 12 nt, Human
caguaccuggag

SEQ ID NO: 3492622 - RNA, 14 nt, Human
caguaccuggagga

SEQ ID NO: 3492623 - RNA, 15 nt, Human
caguaccuggaggag

SEQ ID NO: 3492624 - RNA, 21 nt, Human
caguaccuggaggaggagcag

SEQ ID NO: 3492625 - RNA, 23 nt, Human
caguaccuucaaacuagggccaa

SEQ ID NO: 3492626 - RNA, 15 nt, Human
caguaccuuugucac

SEQ ID NO: 3492627 - RNA, 16 nt, Human
caguaccuuugucaca

SEQ ID NO: 3492628 - RNA, 17 nt, Human
caguaccuuugucacaa

SEQ ID NO: 3492629 - RNA, 22 nt, Human
caguacuauucagguaacacua

SEQ ID NO: 3492630 - RNA, 24 nt, Human
caguacuucagcaagagagaaccu

SEQ ID NO: 3492631 - RNA, 13 nt, Human
caguacuugucau

SEQ ID NO: 3492632 - RNA, 21 nt, Human
caguacuugugaaacacagcu

SEQ ID NO: 3492633 - RNA, 22 nt, Human
caguacuugugaaacacagcug

SEQ ID NO: 3492634 - RNA, 16 nt, Human
caguacuuuggaggcc

SEQ ID NO: 3492635 - RNA, 19 nt, Human
caguacuuuggaggccccu

SEQ ID NO: 3492636 - RNA, 18 nt, Human
caguagaaauaauaugca

SEQ ID NO: 3492637 - RNA, 19 nt, Human
caguagacauuuuaacaag

SEQ ID NO: 3492638 - RNA, 21 nt, Human
caguagacauuuuaacaagaa

SEQ ID NO: 3492639 - RNA, 14 nt, Human
caguagagccagcu

SEQ ID NO: 3492640 - RNA, 16 nt, Human
caguagagccagcuug

SEQ ID NO: 3492641 - RNA, 21 nt, Human
ccuccccggcccuaccagcgc

SEQ ID NO: 3492642 - RNA, 13 nt, Human
ccuccccuaucca

SEQ ID NO: 3492643 - RNA, 15 nt, Human
ccuccccuauccacc

SEQ ID NO: 3492644 - RNA, 14 nt, Human
ccuccccucaagga

SEQ ID NO: 3492645 - RNA, 19 nt, Human
ccuccccucacagccucug

SEQ ID NO: 3492646 - RNA, 21 nt, Human
ccuccccucacagccucugac

SEQ ID NO: 3492647 - RNA, 14 nt, Human
ccuccccuccccug

SEQ ID NO: 3492648 - RNA, 15 nt, Human
ccuccccucccgucu

SEQ ID NO: 3492649 - RNA, 18 nt, Human
ccuccccuccuccuggac

SEQ ID NO: 3492650 - RNA, 15 nt, Human
ccuccccuccucugc

SEQ ID NO: 3492651 - RNA, 16 nt, Human
ccuccccucucugcac

SEQ ID NO: 3492652 - RNA, 16 nt, Human
ccuccccucucuugca

SEQ ID NO: 3492653 - RNA, 14 nt, Human
ccuccccugccacc

SEQ ID NO: 3492654 - RNA, 18 nt, Human
ccuccccugccagggcag

SEQ ID NO: 3492655 - RNA, 14 nt, Human
ccuccccugccauu

SEQ ID NO: 3492656 - RNA, 14 nt, Human
ccuccccugcccua

SEQ ID NO: 3492657 - RNA, 15 nt, Human
ccuccccugcccucg

SEQ ID NO: 3492658 - RNA, 16 nt, Human
ccuccccugcugaagg

SEQ ID NO: 3492659 - RNA, 20 nt, Human
ccuccccugcugcaggggcu

SEQ ID NO: 3492660 - RNA, 12 nt, Human
ccuccccuggag

SEQ ID NO: 3492661 - RNA, 13 nt, Human
ccuccccugggga

SEQ ID NO: 3492662 - RNA, 14 nt, Human
ccuccccuggggac

SEQ ID NO: 3492663 - RNA, 18 nt, Human
ccuccccuuaaaggggag

SEQ ID NO: 3492664 - RNA, 22 nt, Human
ccuccccuugccagcugcugag

SEQ ID NO: 3492665 - RNA, 13 nt, Human
ccuccccuugggc

SEQ ID NO: 3492666 - RNA, 24 nt, Human
ccuccccuugggcccacaccuccu

SEQ ID NO: 3492667 - RNA, 23 nt, Human
ccuccccuugggcggcugagagc

SEQ ID NO: 3492668 - RNA, 19 nt, Human
ccucccgaauagcugggac

SEQ ID NO: 3492669 - RNA, 20 nt, Human
ccucccgaauagcugggacu

SEQ ID NO: 3492670 - RNA, 20 nt, Human
ccucccgagcuccucuucca

SEQ ID NO: 3492671 - RNA, 17 nt, Human
ccucccgaguagcuggg

SEQ ID NO: 3492672 - RNA, 19 nt, Human
ccucccgaguagcugggac

SEQ ID NO: 3492673 - RNA, 15 nt, Human
ccucccggcccugcc

SEQ ID NO: 3492674 - RNA, 17 nt, Human
ccucccggcccugccug

SEQ ID NO: 3492675 - RNA, 13 nt, Human
ccucccggugccc

SEQ ID NO: 3492676 - RNA, 20 nt, Human
ccucccgucuacucauuccc

SEQ ID NO: 3492677 - RNA, 13 nt, Human
ccucccuaccuca

SEQ ID NO: 3492678 - RNA, 19 nt, Human
ccucccuaccucaaccugu

SEQ ID NO: 3492679 - RNA, 22 nt, Human
ccucccuaccucaaccuguaaa

SEQ ID NO: 3492680 - RNA, 15 nt, Human
ccucccuagccagca

SEQ ID NO: 3492681 - RNA, 18 nt, Human
ccucccuagugacccgga

SEQ ID NO: 3492682 - RNA, 17 nt, Human
ccucccucaaccucauc

SEQ ID NO: 3492683 - RNA, 22 nt, Human
ccucccucacccugagccccuu

SEQ ID NO: 3492684 - RNA, 20 nt, Human
ccucccucagccccucuugc

SEQ ID NO: 3492685 - RNA, 13 nt, Human
ccucccuccaccc

SEQ ID NO: 3492686 - RNA, 15 nt, Human
ccucccuccacccca

SEQ ID NO: 3492687 - RNA, 20 nt, Human
ccucccuccaccucccugca

SEQ ID NO: 3492688 - RNA, 15 nt, Human
ccucccuccccuugc

SEQ ID NO: 3492689 - RNA, 16 nt, Human
ccucccuccucugucc

SEQ ID NO: 3492690 - RNA, 13 nt, Human
ccucccucuccag

SEQ ID NO: 3492691 - RNA, 18 nt, Human
ccucccucucucuucugc

SEQ ID NO: 3492692 - RNA, 20 nt, Human
ccucccucucucuucugcuc

SEQ ID NO: 3492693 - RNA, 18 nt, Human
ccucccucugauuuuuca

SEQ ID NO: 3492694 - RNA, 22 nt, Human
ccucccugacccugcagagaug

SEQ ID NO: 3492695 - RNA, 16 nt, Human
ccucccugcaauaaaa

SEQ ID NO: 3492696 - RNA, 14 nt, Human
ccucccugcaucug

SEQ ID NO: 3492697 - RNA, 13 nt, Human
ccucccugcccag

SEQ ID NO: 3492698 - RNA, 14 nt, Human
ccucccugcccagg

SEQ ID NO: 3492699 - RNA, 15 nt, Human
ccucccugccucagg

SEQ ID NO: 3492700 - RNA, 12 nt, Human
ccucccugcugu

SEQ ID NO: 3492701 - RNA, 22 nt, Human
ccucccugcugucauugcuucu

SEQ ID NO: 3492702 - RNA, 23 nt, Human
ccucccugcuguccccucuugcc

SEQ ID NO: 3492703 - RNA, 12 nt, Human
ccucccuggcuc

SEQ ID NO: 3492704 - RNA, 20 nt, Human
ccucccuggcucccaugacc

SEQ ID NO: 3492705 - RNA, 15 nt, Human
ccucccuggcugccc

SEQ ID NO: 3492706 - RNA, 21 nt, Human
ccucccuggcugcccuggccc

SEQ ID NO: 3492707 - RNA, 23 nt, Human
ccucccuggcugcccuggcccug

SEQ ID NO: 3492708 - RNA, 10 nt, Human
ccucccuggg

SEQ ID NO: 3492709 - RNA, 20 nt, Human
ccucccuggugagagggccg

SEQ ID NO: 3492710 - RNA, 14 nt, Human
ccucccuguaacuu

SEQ ID NO: 3492711 - RNA, 19 nt, Human
ccucccuguucaaggcccc

SEQ ID NO: 3492712 - RNA, 20 nt, Human
ccucccuguuccccagagaa

SEQ ID NO: 3492713 - RNA, 21 nt, Human
ccucccuguugaagcucuggu

SEQ ID NO: 3492714 - RNA, 15 nt, Human
ccucccuuccgaccc

SEQ ID NO: 3492715 - RNA, 13 nt, Human
ccucccuuccuuu

SEQ ID NO: 3492716 - RNA, 15 nt, Human
ccucccuuccuuuuc

SEQ ID NO: 3492717 - RNA, 17 nt, Human
ccucccuuccuuuuccc

SEQ ID NO: 3492718 - RNA, 16 nt, Human
ccucccuucucccugg

SEQ ID NO: 3492719 - RNA, 16 nt, Human
ccucccuucugcuacu

SEQ ID NO: 3492720 - RNA, 13 nt, Human
ccucccuugccuu

SEQ ID NO: 3492721 - RNA, 22 nt, Human
ccucccuuggaaaccugcccug

SEQ ID NO: 3492722 - RNA, 15 nt, Human
ccucccuuucucccc

SEQ ID NO: 3492723 - RNA, 14 nt, Human
ccuccgagagggag

SEQ ID NO: 3492724 - RNA, 19 nt, Human
ccuccgagagggagagaga

SEQ ID NO: 3492725 - RNA, 21 nt, Human
ccuccgagccggggaguuucu

SEQ ID NO: 3492726 - RNA, 14 nt, Human
ccuccgaggccagu

SEQ ID NO: 3492727 - RNA, 21 nt, Human
ccuccgccaaugcacggccuc

SEQ ID NO: 3492728 - RNA, 15 nt, Human
ccuccgccauccacc

SEQ ID NO: 3492729 - RNA, 23 nt, Human
ccuccgccauucucaagcccugc

SEQ ID NO: 3492730 - RNA, 16 nt, Human
ccuccgcccugccacu

SEQ ID NO: 3492731 - RNA, 18 nt, Human
ccuccgccuucacauucc

SEQ ID NO: 3492732 - RNA, 18 nt, Human
ccuccgcggcgggcccug

SEQ ID NO: 3492733 - RNA, 14 nt, Human
ccuccgcuucccug

SEQ ID NO: 3492734 - RNA, 18 nt, Human
ccuccgggacccccagga

SEQ ID NO: 3492735 - RNA, 19 nt, Human
ccuccgggacccccaggac

SEQ ID NO: 3492736 - RNA, 19 nt, Human
ccuccgguugcauacugga

SEQ ID NO: 3492737 - RNA, 20 nt, Human
ccuccgucacuaccuggcug

SEQ ID NO: 3492738 - RNA, 15 nt, Human
ccuccguccccugcc

SEQ ID NO: 3492739 - RNA, 16 nt, Human
ccuccguugggcccca

SEQ ID NO: 3492740 - RNA, 16 nt, Human
ccuccuaaaaggccca

SEQ ID NO: 3492741 - RNA, 17 nt, Human
ccuccuaaaaggcccag

SEQ ID NO: 3492742 - RNA, 18 nt, Human
ccuccuaaaaggcccaga

SEQ ID NO: 3492743 - RNA, 12 nt, Human
ccuaaccccuuu

SEQ ID NO: 3492744 - RNA, 18 nt, Human
ccuaaccucgggccugcu

SEQ ID NO: 3492745 - RNA, 20 nt, Human
ccuaacgaaguauccuucag

SEQ ID NO: 3492746 - RNA, 15 nt, Human
ccuaacucauacugu

SEQ ID NO: 3492747 - RNA, 17 nt, Human
ccuaacucuucuuucau

SEQ ID NO: 3492748 - RNA, 16 nt, Human
ccuaacuguaucuuga

SEQ ID NO: 3492749 - RNA, 20 nt, Human
ccuaagaaauaugugagauu

SEQ ID NO: 3492750 - RNA, 15 nt, Human
ccuaagaauaaacau

SEQ ID NO: 3492751 - RNA, 14 nt, Human
ccuaagaaucagag

SEQ ID NO: 3492752 - RNA, 22 nt, Human
ccuaagagacugcguucugcaa

SEQ ID NO: 3492753 - RNA, 12 nt, Human
ccuaagaggcug

SEQ ID NO: 3492754 - RNA, 23 nt, Human
ccuaagcaaacccagugucagga

SEQ ID NO: 3492755 - RNA, 14 nt, Human
ccuaagcagaaagu

SEQ ID NO: 3492756 - RNA, 19 nt, Human
ccuaagcagaaagugccuu

SEQ ID NO: 3492757 - RNA, 13 nt, Human
ccuaagcaucuaa

SEQ ID NO: 3492758 - RNA, 21 nt, Human
ccuaagccaagggccucuugc

SEQ ID NO: 3492759 - RNA, 13 nt, Human
ccuaagccagccu

SEQ ID NO: 3492760 - RNA, 17 nt, Human
ccuaagccagccugguc

SEQ ID NO: 3492761 - RNA, 18 nt, Human
ccuaagccagcugccccc

SEQ ID NO: 3492762 - RNA, 15 nt, Human
ccuaagccuguggcu

SEQ ID NO: 3492763 - RNA, 19 nt, Human
ccuaagcuggagugcagug

SEQ ID NO: 3492764 - RNA, 22 nt, Human
ccuaaggaaaggaauuggcaug

SEQ ID NO: 3492765 - RNA, 13 nt, Human
ccuaaggaaccuu

SEQ ID NO: 3492766 - RNA, 17 nt, Human
ccuaaggacacacuaau

SEQ ID NO: 3492767 - RNA, 12 nt, Human
ccuaaggacuuc

SEQ ID NO: 3492768 - RNA, 17 nt, Human
ccuaaggacuucuuuaa

SEQ ID NO: 3492769 - RNA, 18 nt, Human
ccuaaggacuucuuuaau

SEQ ID NO: 3492770 - RNA, 22 nt, Human
ccuaaggaucucucaggagcac

SEQ ID NO: 3492771 - RNA, 22 nt, Human
ccuaaggcugcaagguuuaggc

SEQ ID NO: 3492772 - RNA, 19 nt, Human
ccuaagggcucaccguggc

SEQ ID NO: 3492773 - RNA, 13 nt, Human
ccuaaguauuaaa

SEQ ID NO: 3492774 - RNA, 18 nt, Human
ccuaaguauuaaaacauu

SEQ ID NO: 3492775 - RNA, 16 nt, Human
ccuaaguggcugcuga

SEQ ID NO: 3492776 - RNA, 17 nt, Human
ccuaagugucaccccgc

SEQ ID NO: 3492777 - RNA, 16 nt, Human
ccuaauaaaaagguga

SEQ ID NO: 3492778 - RNA, 18 nt, Human
ccuaauaaaacugaugug

SEQ ID NO: 3492779 - RNA, 19 nt, Human
ccuaauaaaacugauguga

SEQ ID NO: 3492780 - RNA, 20 nt, Human
ccuaauccaggcagauccag

SEQ ID NO: 3492781 - RNA, 12 nt, Human
ccuaaugaaagu

SEQ ID NO: 3492782 - RNA, 22 nt, Human
ccuaaugaaagugaugacauau

SEQ ID NO: 3492783 - RNA, 18 nt, Human
ccuaaugagaagucaaca

SEQ ID NO: 3492784 - RNA, 19 nt, Human
ccuaaugcuccuuguuccu

SEQ ID NO: 3492785 - RNA, 18 nt, Human
ccuaauguuuaugagcca

SEQ ID NO: 3492786 - RNA, 17 nt, Human
ccuaauuaauuucagua

SEQ ID NO: 3492787 - RNA, 14 nt, Human
ccuaauuagagcag

SEQ ID NO: 3492788 - RNA, 12 nt, Human
ccuaauucagcc

SEQ ID NO: 3492789 - RNA, 13 nt, Human
ccuaauuccacag

SEQ ID NO: 3492790 - RNA, 17 nt, Human
ccuaauucuaugccugu

SEQ ID NO: 3492791 - RNA, 14 nt, Human
ccuacaaaucagua

SEQ ID NO: 3492792 - RNA, 15 nt, Human
ccuacaaaucaguaa

SEQ ID NO: 3492793 - RNA, 14 nt, Human
ccuacaaggccuau

SEQ ID NO: 3492794 - RNA, 22 nt, Human
ccuacacacugucaugcuucau

SEQ ID NO: 3492795 - RNA, 17 nt, Human
ccuacacaggacagggg

SEQ ID NO: 3492796 - RNA, 21 nt, Human
ccuacaccauuaucuuggaaa

SEQ ID NO: 3492797 - RNA, 17 nt, Human
ccuacacccagacccca

SEQ ID NO: 3492798 - RNA, 13 nt, Human
ccuacagaaaaac

SEQ ID NO: 3492799 - RNA, 14 nt, Human
ccuacagaugaacu

SEQ ID NO: 3492800 - RNA, 19 nt, Human
ccuacagcacuacugggug

SEQ ID NO: 3492801 - RNA, 22 nt, Human
ccuacagcacuacuggguguca

SEQ ID NO: 3492802 - RNA, 13 nt, Human
ccuccugcccagg

SEQ ID NO: 3492803 - RNA, 19 nt, Human
ccuccugcccaguccccca

SEQ ID NO: 3492804 - RNA, 19 nt, Human
ccuccugccggcuccuugg

SEQ ID NO: 3492805 - RNA, 12 nt, Human
ccuccugccucc

SEQ ID NO: 3492806 - RNA, 12 nt, Human
ccuccugccucu

SEQ ID NO: 3492807 - RNA, 15 nt, Human
ccuccugcuacucug

SEQ ID NO: 3492808 - RNA, 11 nt, Human
ccuccugcuca

SEQ ID NO: 3492809 - RNA, 12 nt, Human
ccuccugcugca

SEQ ID NO: 3492810 - RNA, 17 nt, Human
ccuccugcugcagaggg

SEQ ID NO: 3492811 - RNA, 21 nt, Human
ccuccugcugcagaggggcag

SEQ ID NO: 3492812 - RNA, 14 nt, Human
ccuccugcugccag

SEQ ID NO: 3492813 - RNA, 16 nt, Human
ccuccugcugccagua

SEQ ID NO: 3492814 - RNA, 19 nt, Human
ccuccugcugccaguacca

SEQ ID NO: 3492815 - RNA, 13 nt, Human
ccuccugcugggc

SEQ ID NO: 3492816 - RNA, 12 nt, Human
ccuccugcuuug

SEQ ID NO: 3492817 - RNA, 20 nt, Human
ccuccuggaaccuugcuguc

SEQ ID NO: 3492818 - RNA, 18 nt, Human
ccuccuggccucagacug

SEQ ID NO: 3492819 - RNA, 19 nt, Human
ccuccuggccucagacugc

SEQ ID NO: 3492820 - RNA, 18 nt, Human
ccuccugggaucugcucg

SEQ ID NO: 3492821 - RNA, 20 nt, Human
ccuccugggauuggcuguga

SEQ ID NO: 3492822 - RNA, 14 nt, Human
ccuccugggccccu

SEQ ID NO: 3492823 - RNA, 14 nt, Human
ccuccuggggccag

SEQ ID NO: 3492824 - RNA, 15 nt, Human
ccuccuggggccagg

SEQ ID NO: 3492825 - RNA, 18 nt, Human
ccuccuggggccaggccg

SEQ ID NO: 3492826 - RNA, 22 nt, Human
ccuccuggggcgcgugaggccc

SEQ ID NO: 3492827 - RNA, 20 nt, Human
ccuccugguggguccagggg

SEQ ID NO: 3492828 - RNA, 16 nt, Human
ccuccugucuucccag

SEQ ID NO: 3492829 - RNA, 17 nt, Human
ccuccugucuucccagg

SEQ ID NO: 3492830 - RNA, 18 nt, Human
ccuccugucuucccaggg

SEQ ID NO: 3492831 - RNA, 21 nt, Human
ccuccugugcucagcccugag

SEQ ID NO: 3492832 - RNA, 18 nt, Human
ccuccuguguacuguguc

SEQ ID NO: 3492833 - RNA, 15 nt, Human
ccuccuguugcaccc

SEQ ID NO: 3492834 - RNA, 18 nt, Human
ccuccuuaucaaaggaca

SEQ ID NO: 3492835 - RNA, 20 nt, Human
ccuccuuaucaaaggacacc

SEQ ID NO: 3492836 - RNA, 12 nt, Human
ccuccuucagac

SEQ ID NO: 3492837 - RNA, 22 nt, Human
ccuccuucagacacccucaacc

SEQ ID NO: 3492838 - RNA, 18 nt, Human
ccuccuuccaccucccuc

SEQ ID NO: 3492839 - RNA, 16 nt, Human
ccuccuucucccuuuu

SEQ ID NO: 3492840 - RNA, 22 nt, Human
ccuccuucucugucucaugugu

SEQ ID NO: 3492841 - RNA, 19 nt, Human
ccuccuucugagcuccugu

SEQ ID NO: 3492842 - RNA, 17 nt, Human
ccuccuugccuccugug

SEQ ID NO: 3492843 - RNA, 20 nt, Human
ccuccuugccuccuguguaa

SEQ ID NO: 3492844 - RNA, 15 nt, Human
ccuccuuuccuccuc

SEQ ID NO: 3492845 - RNA, 12 nt, Human
ccuccuuucucc

SEQ ID NO: 3492846 - RNA, 14 nt, Human
ccuccuuucuccuc

SEQ ID NO: 3492847 - RNA, 22 nt, Human
ccuccuuucugugcccuacuca

SEQ ID NO: 3492848 - RNA, 20 nt, Human
ccuccuuugugaggaagccg

SEQ ID NO: 3492849 - RNA, 18 nt, Human
ccuccuuuuuauguugcc

SEQ ID NO: 3492850 - RNA, 16 nt, Human
ccucgaaacacagaaa

SEQ ID NO: 3492851 - RNA, 14 nt, Human
ccucgaacuccugg

SEQ ID NO: 3492852 - RNA, 16 nt, Human
ccucgaacuccuggca

SEQ ID NO: 3492853 - RNA, 16 nt, Human
ccucgaacuccugggc

SEQ ID NO: 3492854 - RNA, 22 nt, Human
ccucgaacuccugggcucaagc

SEQ ID NO: 3492855 - RNA, 15 nt, Human
ccucgaacuggcugc

SEQ ID NO: 3492856 - RNA, 16 nt, Human
ccucgaacuggcugca

SEQ ID NO: 3492857 - RNA, 13 nt, Human
ccucgaauuuugu

SEQ ID NO: 3492858 - RNA, 23 nt, Human
ccucgacacgugggcuccccucu

SEQ ID NO: 3492859 - RNA, 15 nt, Human
ccucgacaucacugu

SEQ ID NO: 3492860 - RNA, 17 nt, Human
ccucgagggcagggacu

SEQ ID NO: 3492861 - RNA, 18 nt, Human
ccucgaggugccuucuuc

SEQ ID NO: 3492862 - RNA, 13 nt, Human
ccucgaguacugu

SEQ ID NO: 3492863 - RNA, 21 nt, Human
ccucgaguacugugggcaauu

SEQ ID NO: 3492864 - RNA, 21 nt, Human
ccucgaugggagggauggccc

SEQ ID NO: 3492865 - RNA, 23 nt, Human
ccucgcaacccgugccaagucca

SEQ ID NO: 3492866 - RNA, 22 nt, Human
ccucgcaggccucccugccagu

SEQ ID NO: 3492867 - RNA, 12 nt, Human
ccucgcccaccg

SEQ ID NO: 3492868 - RNA, 13 nt, Human
ccucgcccaccgc

SEQ ID NO: 3492869 - RNA, 13 nt, Human
ccucgcccagucc

SEQ ID NO: 3492870 - RNA, 19 nt, Human
ccucgcccagucccagcag

SEQ ID NO: 3492871 - RNA, 20 nt, Human
ccucgcccagucccagcagc

SEQ ID NO: 3492872 - RNA, 12 nt, Human
ccucgcccuggg

SEQ ID NO: 3492873 - RNA, 13 nt, Human
ccucgcccugggu

SEQ ID NO: 3492874 - RNA, 15 nt, Human
ccucgcccuuucuua

SEQ ID NO: 3492875 - RNA, 19 nt, Human
ccucgccggaucugaggga

SEQ ID NO: 3492876 - RNA, 13 nt, Human
ccucgccugacaa

SEQ ID NO: 3492877 - RNA, 18 nt, Human
ccucgccuggccugaggu

SEQ ID NO: 3492878 - RNA, 17 nt, Human
ccucgcgcuugcuggcc

SEQ ID NO: 3492879 - RNA, 14 nt, Human
ccucgcuccaacuc

SEQ ID NO: 3492880 - RNA, 22 nt, Human
ccucgcuccccacucugcucug

SEQ ID NO: 3492881 - RNA, 23 nt, Human
ccucgcuccccacucugcucuga

SEQ ID NO: 3492882 - RNA, 19 nt, Human
ccucgcugccagcucugua

SEQ ID NO: 3492883 - RNA, 14 nt, Human
ccucgcuggccccc

SEQ ID NO: 3492884 - RNA, 23 nt, Human
ccucgcuggcccccacuggcugu

SEQ ID NO: 3492885 - RNA, 14 nt, Human
ccucgcuucuuuca

SEQ ID NO: 3492886 - RNA, 12 nt, Human
ccucgcuuggac

SEQ ID NO: 3492887 - RNA, 18 nt, Human
ccucggaaccgcucaccu

SEQ ID NO: 3492888 - RNA, 23 nt, Human
ccucggaaccgcucaccuagagc

SEQ ID NO: 3492889 - RNA, 20 nt, Human
caguuaagccuuuggaaaca

SEQ ID NO: 3492890 - RNA, 17 nt, Human
caguuaaggaauauaau

SEQ ID NO: 3492891 - RNA, 21 nt, Human
caguuaaggaccguggcccug

SEQ ID NO: 3492892 - RNA, 13 nt, Human
caguuaauuacau

SEQ ID NO: 3492893 - RNA, 12 nt, Human
caguuaauuuuu

SEQ ID NO: 3492894 - RNA, 13 nt, Human
caguuaauuuuuc

SEQ ID NO: 3492895 - RNA, 22 nt, Human
caguuacauaauucacucugag

SEQ ID NO: 3492896 - RNA, 19 nt, Human
caguuaccauuaaaccauc

SEQ ID NO: 3492897 - RNA, 23 nt, Human
caguuaccauuaaaccaucuccc

SEQ ID NO: 3492898 - RNA, 21 nt, Human
caguuacccacucggucccag

SEQ ID NO: 3492899 - RNA, 22 nt, Human
caguuacuaagaagaaaauugc

SEQ ID NO: 3492900 - RNA, 20 nt, Human
caguuacucagaauucucua

SEQ ID NO: 3492901 - RNA, 16 nt, Human
caguuacucagcccug

SEQ ID NO: 3492902 - RNA, 18 nt, Human
caguuacucagcccuggg

SEQ ID NO: 3492903 - RNA, 14 nt, Human
caguuacuuuuccu

SEQ ID NO: 3492904 - RNA, 16 nt, Human
caguuacuuuuccuug

SEQ ID NO: 3492905 - RNA, 15 nt, Human
caguuagagaugccu

SEQ ID NO: 3492906 - RNA, 16 nt, Human
caguuagcaaacuuug

SEQ ID NO: 3492907 - RNA, 17 nt, Human
caguuauaaaauuaaaa

SEQ ID NO: 3492908 - RNA, 19 nt, Human
caguuauaaaauuaaaagu

SEQ ID NO: 3492909 - RNA, 15 nt, Human
caguuauaagaagaa

SEQ ID NO: 3492910 - RNA, 21 nt, Human
caguuauaaguagcaggccaa

SEQ ID NO: 3492911 - RNA, 19 nt, Human
caguuauacaguuauaaaa

SEQ ID NO: 3492912 - RNA, 20 nt, Human
caguuauacaguuauaaaau

SEQ ID NO: 3492913 - RNA, 16 nt, Human
caguuauauuuugcag

SEQ ID NO: 3492914 - RNA, 18 nt, Human
caguuaugugaaugaucu

SEQ ID NO: 3492915 - RNA, 13 nt, Human
caguuaugugacc

SEQ ID NO: 3492916 - RNA, 15 nt, Human
caguuauuacaugua

SEQ ID NO: 3492917 - RNA, 21 nt, Human
caguuauucauucugugauca

SEQ ID NO: 3492918 - RNA, 18 nt, Human
caguuauugguggaaucu

SEQ ID NO: 3492919 - RNA, 23 nt, Human
caguucaaagucaugauguuuuu

SEQ ID NO: 3492920 - RNA, 22 nt, Human
caguucaccuauuucaaaaauu

SEQ ID NO: 3492921 - RNA, 23 nt, Human
caguucagaaucacuucugagaa

SEQ ID NO: 3492922 - RNA, 18 nt, Human
caguucagagcugcccuc

SEQ ID NO: 3492923 - RNA, 19 nt, Human
caguucagagcugcccucu

SEQ ID NO: 3492924 - RNA, 22 nt, Human
caguucagagcugcccucuccu

SEQ ID NO: 3492925 - RNA, 24 nt, Human
caguucagagcugcccucuccugg

SEQ ID NO: 3492926 - RNA, 23 nt, Human
caguucaggagucccaaggaaag

SEQ ID NO: 3492927 - RNA, 16 nt, Human
caguucaguaccugga

SEQ ID NO: 3492928 - RNA, 21 nt, Human
caguucaguggcagggcucag

SEQ ID NO: 3492929 - RNA, 23 nt, Human
caguucauauguaccauguacau

SEQ ID NO: 3492930 - RNA, 15 nt, Human
caguucauugcacuu

SEQ ID NO: 3492931 - RNA, 18 nt, Human
caguucauugcacuuuga

SEQ ID NO: 3492932 - RNA, 13 nt, Human
caguuccaagaaa

SEQ ID NO: 3492933 - RNA, 19 nt, Human
caguucccacauuaaagaa

SEQ ID NO: 3492934 - RNA, 13 nt, Human
caguucccagaau

SEQ ID NO: 3492935 - RNA, 19 nt, Human
caguucccccaaccucaga

SEQ ID NO: 3492936 - RNA, 21 nt, Human
caguuccccuggaagcagugc

SEQ ID NO: 3492937 - RNA, 15 nt, Human
caguucccuuggccu

SEQ ID NO: 3492938 - RNA, 17 nt, Human
caguucccuuggccuca

SEQ ID NO: 3492939 - RNA, 19 nt, Human
caguucccuuggccucaga

SEQ ID NO: 3492940 - RNA, 22 nt, Human
caguuccggauuggcuugugug

SEQ ID NO: 3492941 - RNA, 22 nt, Human
caguuccucccaggaagcccag

SEQ ID NO: 3492942 - RNA, 18 nt, Human
caguuccucuuugcaugg

SEQ ID NO: 3492943 - RNA, 14 nt, Human
caguuccugcagca

SEQ ID NO: 3492944 - RNA, 16 nt, Human
caguuccugcagcaga

SEQ ID NO: 3492945 - RNA, 21 nt, Human
caguuccugcagcagagccug

SEQ ID NO: 3492946 - RNA, 18 nt, Human
caguuccuguggcucccu

SEQ ID NO: 3492947 - RNA, 15 nt, Human
caguuccuuucaaug

SEQ ID NO: 3492948 - RNA, 21 nt, Human
caguucgcagccacccugagg

SEQ ID NO: 3492949 - RNA, 22 nt, Human
caguucgcagccacccugagga

SEQ ID NO: 3492950 - RNA, 18 nt, Human
caguucuaaccuccuaag

SEQ ID NO: 3492951 - RNA, 15 nt, Human
caguucuaggaaaau

SEQ ID NO: 3492952 - RNA, 20 nt, Human
caguucucauggguggcacu

SEQ ID NO: 3492953 - RNA, 22 nt, Human
caguucucuccuucuucccccc

SEQ ID NO: 3492954 - RNA, 13 nt, Human
caguucugaagaa

SEQ ID NO: 3492955 - RNA, 15 nt, Human
caguucugaagaaga

SEQ ID NO: 3492956 - RNA, 21 nt, Human
caguucugaauaugcugcuca

SEQ ID NO: 3492957 - RNA, 12 nt, Human
caguucugcaaa

SEQ ID NO: 3492958 - RNA, 13 nt, Human
caguucugcaaau

SEQ ID NO: 3492959 - RNA, 17 nt, Human
caguucugcaaauagaa

SEQ ID NO: 3492960 - RNA, 14 nt, Human
caguucugcuccuc

SEQ ID NO: 3492961 - RNA, 19 nt, Human
caguucugcuccucuccag

SEQ ID NO: 3492962 - RNA, 22 nt, Human
caguucuggauggugugccuuc

SEQ ID NO: 3492963 - RNA, 18 nt, Human
caguucugucauauguua

SEQ ID NO: 3492964 - RNA, 20 nt, Human
caguucuucgggaagagagg

SEQ ID NO: 3492965 - RNA, 18 nt, Human
caguucuuugggccagac

SEQ ID NO: 3492966 - RNA, 19 nt, Human
caguucuuugggccagaca

SEQ ID NO: 3492967 - RNA, 12 nt, Human
caguugaaaaac

SEQ ID NO: 3492968 - RNA, 21 nt, Human
caguugaaaagacuccaaaga

SEQ ID NO: 3492969 - RNA, 21 nt, Human
caguugaaugacaacagaagc

SEQ ID NO: 3492970 - RNA, 16 nt, Human
caguugacagcaggug

SEQ ID NO: 3492971 - RNA, 20 nt, Human
caguugagaaaauuugaaug

SEQ ID NO: 3492972 - RNA, 19 nt, Human
caguugagaggacacuccc

SEQ ID NO: 3492973 - RNA, 20 nt, Human
caguugagaggacacucccg

SEQ ID NO: 3492974 - RNA, 17 nt, Human
caguugauuuucuggau

SEQ ID NO: 3492975 - RNA, 16 nt, Human
caguugcacagcaucu

SEQ ID NO: 3492976 - RNA, 16 nt, Human
caguugcacuuggccu

SEQ ID NO: 3492977 - RNA, 19 nt, Human
caguugcacuuggccucug

SEQ ID NO: 3492978 - RNA, 16 nt, Human
caguugcauguaguaa

SEQ ID NO: 3492979 - RNA, 20 nt, Human
caguugcauguaguaacacu

SEQ ID NO: 3492980 - RNA, 21 nt, Human
caguugcauguaguaacacua

SEQ ID NO: 3492981 - RNA, 23 nt, Human
caguugcauguaguaacacuaau

SEQ ID NO: 3492982 - RNA, 16 nt, Human
caguugcccagccucu

SEQ ID NO: 3492983 - RNA, 22 nt, Human
caguugccuuuuaucccaaagu

SEQ ID NO: 3492984 - RNA, 22 nt, Human
caguugcgcguucugaaauauu

SEQ ID NO: 3492985 - RNA, 17 nt, Human
caguugcucaaaaagaa

SEQ ID NO: 3492986 - RNA, 19 nt, Human
caguugcucaaaaagaaau

SEQ ID NO: 3492987 - RNA, 19 nt, Human
caguugcugcuucaauuua

SEQ ID NO: 3492988 - RNA, 20 nt, Human
caguugcugguaaaaugaag

SEQ ID NO: 3492989 - RNA, 22 nt, Human
caguugcugguaaaaugaagaa

SEQ ID NO: 3492990 - RNA, 21 nt, Human
caguuggaaauaauaaaagau

SEQ ID NO: 3492991 - RNA, 18 nt, Human
caguuggaaauccaucca

SEQ ID NO: 3492992 - RNA, 15 nt, Human
caguuggacuuuuua

SEQ ID NO: 3492993 - RNA, 20 nt, Human
caguuggacuuuuuaaaaau

SEQ ID NO: 3492994 - RNA, 16 nt, Human
caguuggccagagagc

SEQ ID NO: 3492995 - RNA, 18 nt, Human
caguugggaaaauauguc

SEQ ID NO: 3492996 - RNA, 18 nt, Human
caguugggagcacuggag

SEQ ID NO: 3492997 - RNA, 16 nt, Human
caguuggguggaugcc

SEQ ID NO: 3492998 - RNA, 19 nt, Human
ccucuuuuuucguuuguuu

SEQ ID NO: 3492999 - RNA, 21 nt, Human
ccugaaaaaaaaccugagauu

SEQ ID NO: 3493000 - RNA, 17 nt, Human
ccugaaaacccagagag

SEQ ID NO: 3493001 - RNA, 12 nt, Human
ccugaaaauauc

SEQ ID NO: 3493002 - RNA, 22 nt, Human
ccugaaaauguuuuucugccag

SEQ ID NO: 3493003 - RNA, 19 nt, Human
ccugaaacgcuccuuugug

SEQ ID NO: 3493004 - RNA, 14 nt, Human
ccugaaacuauauu

SEQ ID NO: 3493005 - RNA, 19 nt, Human
ccugaaacuauauuuuguc

SEQ ID NO: 3493006 - RNA, 18 nt, Human
ccugaaagaggaaugaag

SEQ ID NO: 3493007 - RNA, 15 nt, Human
ccugaaauccugguu

SEQ ID NO: 3493008 - RNA, 17 nt, Human
ccugaaaugugugugau

SEQ ID NO: 3493009 - RNA, 18 nt, Human
ccugaaaugugugugaug

SEQ ID NO: 3493010 - RNA, 18 nt, Human
ccugaaauuccaaagucu

SEQ ID NO: 3493011 - RNA, 22 nt, Human
ccugaacagcauggcacucccu

SEQ ID NO: 3493012 - RNA, 20 nt, Human
ccugaacaggauauucucac

SEQ ID NO: 3493013 - RNA, 20 nt, Human
ccugaacauccuuccuuccc

SEQ ID NO: 3493014 - RNA, 21 nt, Human
ccugaacauccuuccuuccca

SEQ ID NO: 3493015 - RNA, 23 nt, Human
ccugaaccacaggagaggauggc

SEQ ID NO: 3493016 - RNA, 17 nt, Human
ccugaaccccagggcug

SEQ ID NO: 3493017 - RNA, 18 nt, Human
ccugaaccccagggcugu

SEQ ID NO: 3493018 - RNA, 19 nt, Human
ccugaacugggaccuuuag

SEQ ID NO: 3493019 - RNA, 16 nt, Human
ccugaagaaccagucc

SEQ ID NO: 3493020 - RNA, 16 nt, Human
ccugaagaacuauuuu

SEQ ID NO: 3493021 - RNA, 14 nt, Human
ccugaagacugagg

SEQ ID NO: 3493022 - RNA, 13 nt, Human
ccugaagagcauu

SEQ ID NO: 3493023 - RNA, 15 nt, Human
ccugaagccagccuu

SEQ ID NO: 3493024 - RNA, 18 nt, Human
ccugaagccagcugcccu

SEQ ID NO: 3493025 - RNA, 18 nt, Human
ccugaaggccccgcccag

SEQ ID NO: 3493026 - RNA, 22 nt, Human
ccugaaggggcgucuguucccc

SEQ ID NO: 3493027 - RNA, 16 nt, Human
ccugaagggguuuucu

SEQ ID NO: 3493028 - RNA, 17 nt, Human
ccugaagggguuuucuu

SEQ ID NO: 3493029 - RNA, 19 nt, Human
ccugaaguaagcaaagacu

SEQ ID NO: 3493030 - RNA, 12 nt, Human
ccugaaguauuu

SEQ ID NO: 3493031 - RNA, 19 nt, Human
ccugaagucacacagugag

SEQ ID NO: 3493032 - RNA, 12 nt, Human
ccucccagcuga

SEQ ID NO: 3493033 - RNA, 20 nt, Human
ccucccagcuuguaggagcu

SEQ ID NO: 3493034 - RNA, 17 nt, Human
ccucccaggaagcccag

SEQ ID NO: 3493035 - RNA, 20 nt, Human
ccucccaggaagcccaggag

SEQ ID NO: 3493036 - RNA, 21 nt, Human
ccucccaggaagcccaggagc

SEQ ID NO: 3493037 - RNA, 17 nt, Human
ccucccaggacucugac

SEQ ID NO: 3493038 - RNA, 14 nt, Human
ccucccagggccag

SEQ ID NO: 3493039 - RNA, 21 nt, Human
ccucccagggccagggcccug

SEQ ID NO: 3493040 - RNA, 21 nt, Human
ccucccaggguuuuaacuuug

SEQ ID NO: 3493041 - RNA, 17 nt, Human
ccucccaguaccuccug

SEQ ID NO: 3493042 - RNA, 16 nt, Human
ccucccagucaccuug

SEQ ID NO: 3493043 - RNA, 14 nt, Human
ccucccauccccug

SEQ ID NO: 3493044 - RNA, 17 nt, Human
ccucccauccccuggac

SEQ ID NO: 3493045 - RNA, 16 nt, Human
ccucccaugucacugc

SEQ ID NO: 3493046 - RNA, 18 nt, Human
ccucccaugucacugcag

SEQ ID NO: 3493047 - RNA, 18 nt, Human
ccucccauguucaagcga

SEQ ID NO: 3493048 - RNA, 21 nt, Human
ccuccccaaggcccccugccu

SEQ ID NO: 3493049 - RNA, 18 nt, Human
ccuccccacccuccuggc

SEQ ID NO: 3493050 - RNA, 13 nt, Human
ccuccccacgccc

SEQ ID NO: 3493051 - RNA, 15 nt, Human
ccuccccacgcccuc

SEQ ID NO: 3493052 - RNA, 17 nt, Human
ccuccccagcagguggg

SEQ ID NO: 3493053 - RNA, 14 nt, Human
ccuccccagccccu

SEQ ID NO: 3493054 - RNA, 22 nt, Human
ccuccccagccccuagcccagg

SEQ ID NO: 3493055 - RNA, 15 nt, Human
ccuccccagccugcg

SEQ ID NO: 3493056 - RNA, 12 nt, Human
ccuccccagcuc

SEQ ID NO: 3493057 - RNA, 20 nt, Human
ccuccccauuagagucagcc

SEQ ID NO: 3493058 - RNA, 13 nt, Human
ccucccccacuuu

SEQ ID NO: 3493059 - RNA, 19 nt, Human
ccucccccaucucccaccc

SEQ ID NO: 3493060 - RNA, 13 nt, Human
ccuccccccacug

SEQ ID NO: 3493061 - RNA, 15 nt, Human
ccuccccccacugca

SEQ ID NO: 3493062 - RNA, 18 nt, Human
ccuccccccacugcaggc

SEQ ID NO: 3493063 - RNA, 12 nt, Human
ccucccccuccu

SEQ ID NO: 3493064 - RNA, 15 nt, Human
ccucccccuccucuc

SEQ ID NO: 3493065 - RNA, 13 nt, Human
ccucccccugcca

SEQ ID NO: 3493066 - RNA, 14 nt, Human
ccucccccugccag

SEQ ID NO: 3493067 - RNA, 16 nt, Human
ccucccccugccagga

SEQ ID NO: 3493068 - RNA, 16 nt, Human
ccucccccuggcacug

SEQ ID NO: 3493069 - RNA, 17 nt, Human
ccuccccggcacccucu

SEQ ID NO: 3493070 - RNA, 20 nt, Human
ccuccccggcacccucuggc

SEQ ID NO: 3493071 - RNA, 15 nt, Human
ccuccccucacagcc

SEQ ID NO: 3493072 - RNA, 16 nt, Human
ccuccccucacagccu

SEQ ID NO: 3493073 - RNA, 16 nt, Human
ccuccccuccaucccu

SEQ ID NO: 3493074 - RNA, 12 nt, Human
ccuccccuccuc

SEQ ID NO: 3493075 - RNA, 13 nt, Human
ccuccccuccucu

SEQ ID NO: 3493076 - RNA, 17 nt, Human
ccuccccucuccuuccu

SEQ ID NO: 3493077 - RNA, 13 nt, Human
ccuccccucucuu

SEQ ID NO: 3493078 - RNA, 23 nt, Human
ccuccccucucuugcacccgccu

SEQ ID NO: 3493079 - RNA, 15 nt, Human
ccuccccugcccugg

SEQ ID NO: 3493080 - RNA, 13 nt, Human
ccuccccugcugc

SEQ ID NO: 3493081 - RNA, 14 nt, Human
ccuccccugcugca

SEQ ID NO: 3493082 - RNA, 16 nt, Human
ccuccccugcugcagg

SEQ ID NO: 3493083 - RNA, 14 nt, Human
ccuccccuggaggg

SEQ ID NO: 3493084 - RNA, 20 nt, Human
ccuccccuggggacagcaag

SEQ ID NO: 3493085 - RNA, 14 nt, Human
ccuccccuucccag

SEQ ID NO: 3493086 - RNA, 14 nt, Human
ccuccccuugccug

SEQ ID NO: 3493087 - RNA, 12 nt, Human
ccuccccuuggg

SEQ ID NO: 3493088 - RNA, 21 nt, Human
ccuccccuugggcccacaccu

SEQ ID NO: 3493089 - RNA, 17 nt, Human
ccucccgaauagcuggg

SEQ ID NO: 3493090 - RNA, 20 nt, Human
ccucccgaguagcugggacu

SEQ ID NO: 3493091 - RNA, 16 nt, Human
ccucccgccccuuccc

SEQ ID NO: 3493092 - RNA, 18 nt, Human
ccucccgccccuucccac

SEQ ID NO: 3493093 - RNA, 14 nt, Human
ccucccggcccugc

SEQ ID NO: 3493094 - RNA, 18 nt, Human
ccucccggcccugccugc

SEQ ID NO: 3493095 - RNA, 14 nt, Human
ccucccgggcccuc

SEQ ID NO: 3493096 - RNA, 19 nt, Human
ccucccgggcccucccuug

SEQ ID NO: 3493097 - RNA, 22 nt, Human
ccucccuacccuaaccaaguuc

SEQ ID NO: 3493098 - RNA, 21 nt, Human
ccucccuagccagcacuugua

SEQ ID NO: 3493099 - RNA, 14 nt, Human
ccucccucacccug

SEQ ID NO: 3493100 - RNA, 19 nt, Human
ccucccucacccugagccc

SEQ ID NO: 3493101 - RNA, 16 nt, Human
ccucccucagccccuc

SEQ ID NO: 3493102 - RNA, 17 nt, Human
ccucccuccaccccagg

SEQ ID NO: 3493103 - RNA, 20 nt, Human
ccucccuccaccccaggacg

SEQ ID NO: 3493104 - RNA, 10 nt, Human
ccucccuccc

SEQ ID NO: 3493105 - RNA, 17 nt, Human
ccucccuccccugcccu

SEQ ID NO: 3493106 - RNA, 19 nt, Human
ccucccucccggcauggga

SEQ ID NO: 3493107 - RNA, 14 nt, Human
ccucccucccucuc

SEQ ID NO: 3493108 - RNA, 15 nt, Human
ccucccucccucucc

SEQ ID NO: 3493109 - RNA, 13 nt, Human
ccucccuccucug

SEQ ID NO: 3493110 - RNA, 15 nt, Human
ccucccuccugccga

SEQ ID NO: 3493111 - RNA, 21 nt, Human
ccucccuccugccgacuccug

SEQ ID NO: 3493112 - RNA, 13 nt, Human
ccucccucuaauu

SEQ ID NO: 3493113 - RNA, 18 nt, Human
ccucccucuccagcaggc

SEQ ID NO: 3493114 - RNA, 22 nt, Human
ccucccucucguaagauuuccu

SEQ ID NO: 3493115 - RNA, 19 nt, Human
ccucccucugaccugcagg

SEQ ID NO: 3493116 - RNA, 21 nt, Human
ccucccucugaggcuguagga

SEQ ID NO: 3493117 - RNA, 14 nt, Human
ccucccucugcugu

SEQ ID NO: 3493118 - RNA, 21 nt, Human
ccucccucugcugucaccuug

SEQ ID NO: 3493119 - RNA, 13 nt, Human
ccucccucuuucc

SEQ ID NO: 3493120 - RNA, 20 nt, Human
ccucccugaaaauguuuuuc

SEQ ID NO: 3493121 - RNA, 13 nt, Human
ccucccugaacca

SEQ ID NO: 3493122 - RNA, 19 nt, Human
ccucccugaagccuuugca

SEQ ID NO: 3493123 - RNA, 22 nt, Human
ccucccugagcuagaacccucu

SEQ ID NO: 3493124 - RNA, 12 nt, Human
ccucccugcaau

SEQ ID NO: 3493125 - RNA, 13 nt, Human
ccucccugccccu

SEQ ID NO: 3493126 - RNA, 24 nt, Human
ccucccugccccucccuucaacca

SEQ ID NO: 3493127 - RNA, 14 nt, Human
ccucccugcuguca

SEQ ID NO: 3493128 - RNA, 15 nt, Human
ccucccugcuguccc

SEQ ID NO: 3493129 - RNA, 21 nt, Human
ccucccugcuguccccucuug

SEQ ID NO: 3493130 - RNA, 22 nt, Human
ccucccugcuguccccucuugc

SEQ ID NO: 3493131 - RNA, 12 nt, Human
ccucccuggagu

SEQ ID NO: 3493132 - RNA, 15 nt, Human
ccucccuggccuguu

SEQ ID NO: 3493133 - RNA, 14 nt, Human
ccucccuggcuccc

SEQ ID NO: 3493134 - RNA, 15 nt, Human
ccucccuggcuccca

SEQ ID NO: 3493135 - RNA, 17 nt, Human
ccucccuggcugcccug

SEQ ID NO: 3493136 - RNA, 18 nt, Human
ccucccuggcugcccugg

SEQ ID NO: 3493137 - RNA, 15 nt, Human
ccucccuggguucag

SEQ ID NO: 3493138 - RNA, 12 nt, Human
ccucccuguccu

SEQ ID NO: 3493139 - RNA, 14 nt, Human
ccucccuguccucc

SEQ ID NO: 3493140 - RNA, 23 nt, Human
ccucccuuccgacccucugggaa

SEQ ID NO: 3493141 - RNA, 21 nt, Human
ccucccuuccuuuucccugcu

SEQ ID NO: 3493142 - RNA, 16 nt, Human
ccucccuucuacugcu

SEQ ID NO: 3493143 - RNA, 17 nt, Human
ccucccuucuacugcuu

SEQ ID NO: 3493144 - RNA, 19 nt, Human
ccucccuucuacugcuucu

SEQ ID NO: 3493145 - RNA, 15 nt, Human
ccucccuucugcuac

SEQ ID NO: 3493146 - RNA, 19 nt, Human
ccucccuuggaaaccugcc

SEQ ID NO: 3493147 - RNA, 21 nt, Human
ccucccuuggaaaccugcccu

SEQ ID NO: 3493148 - RNA, 19 nt, Human
ccucccuuggguucugaua

SEQ ID NO: 3493149 - RNA, 14 nt, Human
ccucccuuucuccc

SEQ ID NO: 3493150 - RNA, 22 nt, Human
ccuccgacagcccccucugccg

SEQ ID NO: 3493151 - RNA, 16 nt, Human
ccuccgagagggagag

SEQ ID NO: 3493152 - RNA, 16 nt, Human
ccuccgauccuuccuc

SEQ ID NO: 3493153 - RNA, 13 nt, Human
ccuccgccucuug

SEQ ID NO: 3493154 - RNA, 18 nt, Human
caguuggguggaugccug

SEQ ID NO: 3493155 - RNA, 19 nt, Human
caguuggguggaugccugg

SEQ ID NO: 3493156 - RNA, 23 nt, Human
caguugguaagcuuccaggaaaa

SEQ ID NO: 3493157 - RNA, 19 nt, Human
caguuggucccccuuccau

SEQ ID NO: 3493158 - RNA, 16 nt, Human
caguugguguguuuuu

SEQ ID NO: 3493159 - RNA, 14 nt, Human
caguugguuguguc

SEQ ID NO: 3493160 - RNA, 20 nt, Human
caguugucccgauuguaacu

SEQ ID NO: 3493161 - RNA, 15 nt, Human
caguuguccuccuuc

SEQ ID NO: 3493162 - RNA, 11 nt, Human
caguugucucu

SEQ ID NO: 3493163 - RNA, 14 nt, Human
caguugucucugau

SEQ ID NO: 3493164 - RNA, 21 nt, Human
caguugucucugaugcagcuu

SEQ ID NO: 3493165 - RNA, 15 nt, Human
caguugucucuguuu

SEQ ID NO: 3493166 - RNA, 17 nt, Human
caguuguggugugagua

SEQ ID NO: 3493167 - RNA, 22 nt, Human
caguuguguuuguugcuggcuu

SEQ ID NO: 3493168 - RNA, 19 nt, Human
caguuguucuuuuuagaaa

SEQ ID NO: 3493169 - RNA, 18 nt, Human
caguuuaaaaaaauuggu

SEQ ID NO: 3493170 - RNA, 20 nt, Human
caguuuaaccugaugcaguc

SEQ ID NO: 3493171 - RNA, 20 nt, Human
caguuuaagagcagaacaga

SEQ ID NO: 3493172 - RNA, 16 nt, Human
caguuuaauccuucua

SEQ ID NO: 3493173 - RNA, 21 nt, Human
caguuuaauccuucuaguuuc

SEQ ID NO: 3493174 - RNA, 15 nt, Human
caguuuacugguuua

SEQ ID NO: 3493175 - RNA, 17 nt, Human
caguuuaucaugaagcc

SEQ ID NO: 3493176 - RNA, 15 nt, Human
caguuuaucauucaa

SEQ ID NO: 3493177 - RNA, 19 nt, Human
caguuuaucauucaagugu

SEQ ID NO: 3493178 - RNA, 14 nt, Human
ccuccucaccccca

SEQ ID NO: 3493179 - RNA, 15 nt, Human
ccuccucaccccguc

SEQ ID NO: 3493180 - RNA, 22 nt, Human
ccuccucaccucaugcccaccc

SEQ ID NO: 3493181 - RNA, 22 nt, Human
ccuccucaccucuggacuggcu

SEQ ID NO: 3493182 - RNA, 15 nt, Human
ccuccucacuggcca

SEQ ID NO: 3493183 - RNA, 20 nt, Human
ccuccucacuggccaucccu

SEQ ID NO: 3493184 - RNA, 13 nt, Human
ccuccucagccug

SEQ ID NO: 3493185 - RNA, 14 nt, Human
ccuccucagccuga

SEQ ID NO: 3493186 - RNA, 17 nt, Human
ccuccucaggcacacag

SEQ ID NO: 3493187 - RNA, 19 nt, Human
ccuccucaggcacacagcu

SEQ ID NO: 3493188 - RNA, 20 nt, Human
ccuccucaucccguguucuc

SEQ ID NO: 3493189 - RNA, 23 nt, Human
ccuccucaucugggggaguggaa

SEQ ID NO: 3493190 - RNA, 20 nt, Human
ccuccucauguacauacccu

SEQ ID NO: 3493191 - RNA, 16 nt, Human
ccuccuccacucuccc

SEQ ID NO: 3493192 - RNA, 12 nt, Human
ccuccuccaggg

SEQ ID NO: 3493193 - RNA, 13 nt, Human
ccuccuccaggga

SEQ ID NO: 3493194 - RNA, 14 nt, Human
ccuccuccagggac

SEQ ID NO: 3493195 - RNA, 15 nt, Human
ccuccuccagggaca

SEQ ID NO: 3493196 - RNA, 15 nt, Human
ccuccucccacugcc

SEQ ID NO: 3493197 - RNA, 22 nt, Human
ccuccucccacugcccacuggc

SEQ ID NO: 3493198 - RNA, 22 nt, Human
ccuccucccaugucacugcaga

SEQ ID NO: 3493199 - RNA, 18 nt, Human
ccuccucccuccugccga

SEQ ID NO: 3493200 - RNA, 13 nt, Human
ccuccucccugca

SEQ ID NO: 3493201 - RNA, 15 nt, Human
ccuccucccuguuau

SEQ ID NO: 3493202 - RNA, 19 nt, Human
ccuccucccuguuauuuuc

SEQ ID NO: 3493203 - RNA, 12 nt, Human
ccuccucccuua

SEQ ID NO: 3493204 - RNA, 16 nt, Human
ccuccucccuuagcuc

SEQ ID NO: 3493205 - RNA, 15 nt, Human
ccuccucccuuuuuc

SEQ ID NO: 3493206 - RNA, 22 nt, Human
ccuccucccuuuuuccuugucc

SEQ ID NO: 3493207 - RNA, 14 nt, Human
ccuccuccuggacu

SEQ ID NO: 3493208 - RNA, 21 nt, Human
ccuccuccuucccaaaggacu

SEQ ID NO: 3493209 - RNA, 13 nt, Human
ccuccuccuuccu

SEQ ID NO: 3493210 - RNA, 13 nt, Human
ccuccucucagug

SEQ ID NO: 3493211 - RNA, 13 nt, Human
ccuccucucccau

SEQ ID NO: 3493212 - RNA, 16 nt, Human
ccuccucucccauccc

SEQ ID NO: 3493213 - RNA, 15 nt, Human
ccuccucucugcccu

SEQ ID NO: 3493214 - RNA, 16 nt, Human
ccuccucucugcccua

SEQ ID NO: 3493215 - RNA, 12 nt, Human
ccuccucugaaa

SEQ ID NO: 3493216 - RNA, 18 nt, Human
ccuccucugaaacagcug

SEQ ID NO: 3493217 - RNA, 19 nt, Human
ccuccucugaaacagcugc

SEQ ID NO: 3493218 - RNA, 12 nt, Human
ccuccucugcca

SEQ ID NO: 3493219 - RNA, 14 nt, Human
ccuccucugccacc

SEQ ID NO: 3493220 - RNA, 20 nt, Human
ccuccucugccaccuccccu

SEQ ID NO: 3493221 - RNA, 21 nt, Human
ccuccucugccaccuccccua

SEQ ID NO: 3493222 - RNA, 14 nt, Human
ccuccucugcccgg

SEQ ID NO: 3493223 - RNA, 15 nt, Human
ccuccucugcccggg

SEQ ID NO: 3493224 - RNA, 16 nt, Human
ccuccucugcuugcca

SEQ ID NO: 3493225 - RNA, 12 nt, Human
ccuccucugucc

SEQ ID NO: 3493226 - RNA, 15 nt, Human
ccuccucuguccagg

SEQ ID NO: 3493227 - RNA, 14 nt, Human
ccuccucuucaccc

SEQ ID NO: 3493228 - RNA, 20 nt, Human
ccuccucuucaccccggcag

SEQ ID NO: 3493229 - RNA, 12 nt, Human
ccuccucuuucu

SEQ ID NO: 3493230 - RNA, 18 nt, Human
ccuccucuuucucucccc

SEQ ID NO: 3493231 - RNA, 21 nt, Human
ccuccugaaacuuacacacaa

SEQ ID NO: 3493232 - RNA, 15 nt, Human
ccuccugacacccuu

SEQ ID NO: 3493233 - RNA, 18 nt, Human
ccuccugaccugaggcuc

SEQ ID NO: 3493234 - RNA, 18 nt, Human
ccuccugaguagcuggga

SEQ ID NO: 3493235 - RNA, 14 nt, Human
ccuccugcccagga

SEQ ID NO: 3493236 - RNA, 13 nt, Human
ccuccugccucga

SEQ ID NO: 3493237 - RNA, 13 nt, Human
ccuccugccucua

SEQ ID NO: 3493238 - RNA, 18 nt, Human
ccuccugccucuacuggg

SEQ ID NO: 3493239 - RNA, 18 nt, Human
ccuccugcugcagagggg

SEQ ID NO: 3493240 - RNA, 21 nt, Human
ccuccuggaaccuugcugucc

SEQ ID NO: 3493241 - RNA, 13 nt, Human
ccuccuggacucc

SEQ ID NO: 3493242 - RNA, 15 nt, Human
ccuccuggccucaga

SEQ ID NO: 3493243 - RNA, 21 nt, Human
ccuccugggcccucucugcuc

SEQ ID NO: 3493244 - RNA, 17 nt, Human
ccuccuggugucacccc

SEQ ID NO: 3493245 - RNA, 19 nt, Human
ccuccuggugucaccccag

SEQ ID NO: 3493246 - RNA, 22 nt, Human
ccuccuggugucaccccagagc

SEQ ID NO: 3493247 - RNA, 19 nt, Human
ccuccugucuucccagggu

SEQ ID NO: 3493248 - RNA, 16 nt, Human
ccuccugugcucagcc

SEQ ID NO: 3493249 - RNA, 18 nt, Human
ccuccugugcucagcccu

SEQ ID NO: 3493250 - RNA, 19 nt, Human
ccuccuguggaacccagca

SEQ ID NO: 3493251 - RNA, 17 nt, Human
ccuccuguggccugcca

SEQ ID NO: 3493252 - RNA, 18 nt, Human
ccuccuguggggaaaggg

SEQ ID NO: 3493253 - RNA, 16 nt, Human
ccuccuguugcaccca

SEQ ID NO: 3493254 - RNA, 17 nt, Human
ccuccuguugcacccag

SEQ ID NO: 3493255 - RNA, 19 nt, Human
ccuccuguugcacccagcc

SEQ ID NO: 3493256 - RNA, 13 nt, Human
ccuccuucagaca

SEQ ID NO: 3493257 - RNA, 14 nt, Human
ccuccuucagacac

SEQ ID NO: 3493258 - RNA, 16 nt, Human
ccuccuuccaccuccc

SEQ ID NO: 3493259 - RNA, 19 nt, Human
ccuccuuccaccucccucc

SEQ ID NO: 3493260 - RNA, 14 nt, Human
ccuccuucccaaag

SEQ ID NO: 3493261 - RNA, 14 nt, Human
ccuccuucccagcu

SEQ ID NO: 3493262 - RNA, 16 nt, Human
ccuccuucccagcugc

SEQ ID NO: 3493263 - RNA, 18 nt, Human
ccuccuucccagcugccc

SEQ ID NO: 3493264 - RNA, 21 nt, Human
ccuccuucccagcugccccuc

SEQ ID NO: 3493265 - RNA, 20 nt, Human
ccuccuucccucucuggaga

SEQ ID NO: 3493266 - RNA, 23 nt, Human
ccuccuuccucuuuuccuuccca

SEQ ID NO: 3493267 - RNA, 17 nt, Human
ccuccuucucugucuca

SEQ ID NO: 3493268 - RNA, 17 nt, Human
ccuccuucugagcuccu

SEQ ID NO: 3493269 - RNA, 20 nt, Human
ccuccuucugagcuccuguc

SEQ ID NO: 3493270 - RNA, 14 nt, Human
ccuccuucugcugc

SEQ ID NO: 3493271 - RNA, 15 nt, Human
ccuccuugcucugca

SEQ ID NO: 3493272 - RNA, 18 nt, Human
ccuccuugcucugcaggc

SEQ ID NO: 3493273 - RNA, 16 nt, Human
ccuccuuggugauucc

SEQ ID NO: 3493274 - RNA, 15 nt, Human
ccuccuuggugccug

SEQ ID NO: 3493275 - RNA, 17 nt, Human
ccuccuuggugccuggc

SEQ ID NO: 3493276 - RNA, 20 nt, Human
ccuccuugucuuggcagccu

SEQ ID NO: 3493277 - RNA, 16 nt, Human
ccuccuuuacccucau

SEQ ID NO: 3493278 - RNA, 17 nt, Human
ccuccuuuacccucauc

SEQ ID NO: 3493279 - RNA, 19 nt, Human
ccuccuuucaucacacugg

SEQ ID NO: 3493280 - RNA, 20 nt, Human
ccuccuuucucuucucuguu

SEQ ID NO: 3493281 - RNA, 21 nt, Human
ccuccuuucucuucucuguuc

SEQ ID NO: 3493282 - RNA, 18 nt, Human
ccuccuuucugugcccua

SEQ ID NO: 3493283 - RNA, 23 nt, Human
ccuccuuugugaggaagccgcug

SEQ ID NO: 3493284 - RNA, 18 nt, Human
ccuccuuuucacaguucu

SEQ ID NO: 3493285 - RNA, 20 nt, Human
ccucgaaacacagaaaccuu

SEQ ID NO: 3493286 - RNA, 15 nt, Human
ccucgaacccacacu

SEQ ID NO: 3493287 - RNA, 21 nt, Human
ccucgaacccacacugcaaca

SEQ ID NO: 3493288 - RNA, 16 nt, Human
ccucgagcagaugaug

SEQ ID NO: 3493289 - RNA, 16 nt, Human
ccucgaggugccuucu

SEQ ID NO: 3493290 - RNA, 23 nt, Human
ccucgaggugccuucuucagggc

SEQ ID NO: 3493291 - RNA, 17 nt, Human
ccucgaguacugugggc

SEQ ID NO: 3493292 - RNA, 18 nt, Human
ccucgaguacugugggca

SEQ ID NO: 3493293 - RNA, 14 nt, Human
ccucgcaagcuggg

SEQ ID NO: 3493294 - RNA, 14 nt, Human
ccucgcagagaggc

SEQ ID NO: 3493295 - RNA, 23 nt, Human
ccucgcaggccucccugccagua

SEQ ID NO: 3493296 - RNA, 21 nt, Human
ccucgcccaccgcaugccccc

SEQ ID NO: 3493297 - RNA, 21 nt, Human
ccucgcccagcggcaucaggc

SEQ ID NO: 3493298 - RNA, 16 nt, Human
ccucgcccagucccag

SEQ ID NO: 3493299 - RNA, 14 nt, Human
ccucgcccucuccu

SEQ ID NO: 3493300 - RNA, 14 nt, Human
ccucgcccuggguc

SEQ ID NO: 3493301 - RNA, 12 nt, Human
ccucgccugugg

SEQ ID NO: 3493302 - RNA, 17 nt, Human
ccucgcuccccacucug

SEQ ID NO: 3493303 - RNA, 18 nt, Human
ccucgcuccccacucugc

SEQ ID NO: 3493304 - RNA, 15 nt, Human
ccucgcucuguuacc

SEQ ID NO: 3493305 - RNA, 19 nt, Human
ccucgcucuguuacccagg

SEQ ID NO: 3493306 - RNA, 21 nt, Human
ccucgcucuguuacccagggu

SEQ ID NO: 3493307 - RNA, 13 nt, Human
ccucgcugccagc

SEQ ID NO: 3493308 - RNA, 14 nt, Human
ccucgcugccagcu

SEQ ID NO: 3493309 - RNA, 12 nt, Human
ccucgcugcuuc

SEQ ID NO: 3493310 - RNA, 21 nt, Human
ccugagcgcuccugccgcaga

SEQ ID NO: 3493311 - RNA, 18 nt, Human
ccugagcuagaagcugga

SEQ ID NO: 3493312 - RNA, 14 nt, Human
ccugagcucagcgu

SEQ ID NO: 3493313 - RNA, 15 nt, Human
ccugagcuccccacc

SEQ ID NO: 3493314 - RNA, 14 nt, Human
ccugagcucugaua

SEQ ID NO: 3493315 - RNA, 15 nt, Human
ccugagcugaggcag

SEQ ID NO: 3493316 - RNA, 16 nt, Human
ccugagcugaggcagc

SEQ ID NO: 3493317 - RNA, 17 nt, Human
ccugagcugccauccag

SEQ ID NO: 3493318 - RNA, 15 nt, Human
ccugagcugggauga

SEQ ID NO: 3493319 - RNA, 17 nt, Human
ccugagcuuggccagaa

SEQ ID NO: 3493320 - RNA, 23 nt, Human
ccugagcuuuggacacacacagc

SEQ ID NO: 3493321 - RNA, 15 nt, Human
ccugagcuuuggacg

SEQ ID NO: 3493322 - RNA, 13 nt, Human
ccugaggaacugu

SEQ ID NO: 3493323 - RNA, 18 nt, Human
ccugaggaagaugggggc

SEQ ID NO: 3493324 - RNA, 21 nt, Human
cauaaucuucugccuucucau

SEQ ID NO: 3493325 - RNA, 20 nt, Human
cauaaugcuaauuuaaagag

SEQ ID NO: 3493326 - RNA, 22 nt, Human
cauaaugcuaauuuaaagagac

SEQ ID NO: 3493327 - RNA, 15 nt, Human
cauaaugcuacuguc

SEQ ID NO: 3493328 - RNA, 16 nt, Human
cauaaugcuacugucu

SEQ ID NO: 3493329 - RNA, 19 nt, Human
cauaaugggccacugaaau

SEQ ID NO: 3493330 - RNA, 21 nt, Human
cauaaugggccacugaaaucu

SEQ ID NO: 3493331 - RNA, 14 nt, Human
cauaaugggguccu

SEQ ID NO: 3493332 - RNA, 22 nt, Human
cauaaugggguccuggccaucc

SEQ ID NO: 3493333 - RNA, 15 nt, Human
cauaauguauaaaga

SEQ ID NO: 3493334 - RNA, 11 nt, Human
cauaaugugaa

SEQ ID NO: 3493335 - RNA, 15 nt, Human
cauaaugugaagugu

SEQ ID NO: 3493336 - RNA, 16 nt, Human
cauaaugugaaguguu

SEQ ID NO: 3493337 - RNA, 17 nt, Human
cauaaugugaaguguua

SEQ ID NO: 3493338 - RNA, 18 nt, Human
cauaauguuacauuauua

SEQ ID NO: 3493339 - RNA, 16 nt, Human
cauaauuaaagugucc

SEQ ID NO: 3493340 - RNA, 19 nt, Human
cauaauuagauccauuaau

SEQ ID NO: 3493341 - RNA, 21 nt, Human
cauaauucacucugaguguuu

SEQ ID NO: 3493342 - RNA, 16 nt, Human
cauaauuccuacagca

SEQ ID NO: 3493343 - RNA, 21 nt, Human
cauaauucuaaucuaacaaug

SEQ ID NO: 3493344 - RNA, 13 nt, Human
cauaauucuuauu

SEQ ID NO: 3493345 - RNA, 14 nt, Human
cauaauugaagugu

SEQ ID NO: 3493346 - RNA, 12 nt, Human
cauaauugcauu

SEQ ID NO: 3493347 - RNA, 19 nt, Human
cauaauugccaauugaaac

SEQ ID NO: 3493348 - RNA, 15 nt, Human
cauaauuuaaaaaua

SEQ ID NO: 3493349 - RNA, 20 nt, Human
cauaauuuaaaaauauauuu

SEQ ID NO: 3493350 - RNA, 19 nt, Human
cauaauuuaguuguuucua

SEQ ID NO: 3493351 - RNA, 22 nt, Human
cauaauuuaguuucauauaaag

SEQ ID NO: 3493352 - RNA, 13 nt, Human
cauaauuucagcu

SEQ ID NO: 3493353 - RNA, 21 nt, Human
cauaauuuguacauauguaaa

SEQ ID NO: 3493354 - RNA, 23 nt, Human
cauaauuuguacauauguaaaau

SEQ ID NO: 3493355 - RNA, 17 nt, Human
cauacaaacaagcauau

SEQ ID NO: 3493356 - RNA, 15 nt, Human
cauacaauuccaaac

SEQ ID NO: 3493357 - RNA, 14 nt, Human
cauacacacacaca

SEQ ID NO: 3493358 - RNA, 16 nt, Human
cauacacacacacaca

SEQ ID NO: 3493359 - RNA, 20 nt, Human
cauacacacacacacacagc

SEQ ID NO: 3493360 - RNA, 22 nt, Human
cauacacacacacacacagcca

SEQ ID NO: 3493361 - RNA, 13 nt, Human
cauacacacgcug

SEQ ID NO: 3493362 - RNA, 16 nt, Human
cauacacacgcugccu

SEQ ID NO: 3493363 - RNA, 17 nt, Human
cauacacacgcugccuu

SEQ ID NO: 3493364 - RNA, 18 nt, Human
cauacaccagcauuccuu

SEQ ID NO: 3493365 - RNA, 20 nt, Human
cauacaccagcauuccuuuu

SEQ ID NO: 3493366 - RNA, 22 nt, Human
cauacacccccaccuccugcaa

SEQ ID NO: 3493367 - RNA, 17 nt, Human
cauacacgaaagagaga

SEQ ID NO: 3493368 - RNA, 19 nt, Human
cauacacuaaccaaaucuc

SEQ ID NO: 3493369 - RNA, 21 nt, Human
cauacacuguauguuauagaa

SEQ ID NO: 3493370 - RNA, 18 nt, Human
cauacacuuguauaaaug

SEQ ID NO: 3493371 - RNA, 19 nt, Human
cauacacuuguauaaaugu

SEQ ID NO: 3493372 - RNA, 20 nt, Human
cauacacuuuguugcaagau

SEQ ID NO: 3493373 - RNA, 23 nt, Human
cauacagaauuacuguaacugau

SEQ ID NO: 3493374 - RNA, 11 nt, Human
cauacagagaa

SEQ ID NO: 3493375 - RNA, 12 nt, Human
cauacagagaag

SEQ ID NO: 3493376 - RNA, 17 nt, Human
cauacagagaagucaca

SEQ ID NO: 3493377 - RNA, 13 nt, Human
cauacaguuuuau

SEQ ID NO: 3493378 - RNA, 20 nt, Human
cauacaguuuuaugcucuuu

SEQ ID NO: 3493379 - RNA, 13 nt, Human
cauacauaaaaga

SEQ ID NO: 3493380 - RNA, 11 nt, Human
cauacauauuu

SEQ ID NO: 3493381 - RNA, 18 nt, Human
cauacauucuucaagauc

SEQ ID NO: 3493382 - RNA, 21 nt, Human
cauacauuuauaauguuugcu

SEQ ID NO: 3493383 - RNA, 16 nt, Human
cauacauuuucuaaga

SEQ ID NO: 3493384 - RNA, 13 nt, Human
cauaccacuuuug

SEQ ID NO: 3493385 - RNA, 14 nt, Human
cauaccacuuuugu

SEQ ID NO: 3493386 - RNA, 22 nt, Human
cauaccaggccgccccagccuc

SEQ ID NO: 3493387 - RNA, 18 nt, Human
cauaccauggaggaaggc

SEQ ID NO: 3493388 - RNA, 18 nt, Human
cauacccaaaccaggugg

SEQ ID NO: 3493389 - RNA, 15 nt, Human
cauacccccuccccc

SEQ ID NO: 3493390 - RNA, 19 nt, Human
cauacccgccuagcugcug

SEQ ID NO: 3493391 - RNA, 15 nt, Human
cauacccugaccugg

SEQ ID NO: 3493392 - RNA, 22 nt, Human
cauacccuggccgcccccugcc

SEQ ID NO: 3493393 - RNA, 17 nt, Human
cauaccuaaguacugua

SEQ ID NO: 3493394 - RNA, 15 nt, Human
cauaccuuccuuccc

SEQ ID NO: 3493395 - RNA, 18 nt, Human
cauaccuuccuucccugg

SEQ ID NO: 3493396 - RNA, 23 nt, Human
cauaccuuccuucccugggcugu

SEQ ID NO: 3493397 - RNA, 17 nt, Human
cauaccuuggccagcaa

SEQ ID NO: 3493398 - RNA, 21 nt, Human
cauaccuuucacagcuuuuau

SEQ ID NO: 3493399 - RNA, 22 nt, Human
cauaccuuuuauuuuuuuuaau

SEQ ID NO: 3493400 - RNA, 18 nt, Human
cauacgcaccacaucucu

SEQ ID NO: 3493401 - RNA, 15 nt, Human
cauacguacacauuu

SEQ ID NO: 3493402 - RNA, 18 nt, Human
cauacguacacauuuuau

SEQ ID NO: 3493403 - RNA, 14 nt, Human
cauacuaaccagca

SEQ ID NO: 3493404 - RNA, 22 nt, Human
cauacuacugaaacagauuuca

SEQ ID NO: 3493405 - RNA, 18 nt, Human
cauacuaucuacucuccu

SEQ ID NO: 3493406 - RNA, 15 nt, Human
cauacuaugaaauau

SEQ ID NO: 3493407 - RNA, 18 nt, Human
cauacuaugaaauaugua

SEQ ID NO: 3493408 - RNA, 19 nt, Human
cauacucagccugcugccc

SEQ ID NO: 3493409 - RNA, 17 nt, Human
cauacuccuaugcuuua

SEQ ID NO: 3493410 - RNA, 18 nt, Human
cauacuccuaugcuuuag

SEQ ID NO: 3493411 - RNA, 16 nt, Human
cauacucgagucugag

SEQ ID NO: 3493412 - RNA, 18 nt, Human
cauacucgagucugaggc

SEQ ID NO: 3493413 - RNA, 19 nt, Human
cauacucgagucugaggcc

SEQ ID NO: 3493414 - RNA, 17 nt, Human
cauacucuagauuuugu

SEQ ID NO: 3493415 - RNA, 23 nt, Human
cauacucuagauuuuguuuugcu

SEQ ID NO: 3493416 - RNA, 16 nt, Human
cauacucugucucccu

SEQ ID NO: 3493417 - RNA, 19 nt, Human
cauacugagccaaguauaa

SEQ ID NO: 3493418 - RNA, 19 nt, Human
cauacugagggaccaacug

SEQ ID NO: 3493419 - RNA, 13 nt, Human
cauacuggccucg

SEQ ID NO: 3493420 - RNA, 15 nt, Human
cauacuggccucgcc

SEQ ID NO: 3493421 - RNA, 19 nt, Human
cauacuggccucgccuggc

SEQ ID NO: 3493422 - RNA, 22 nt, Human
cauacuggccuggacuguuuuc

SEQ ID NO: 3493423 - RNA, 17 nt, Human
cauacuguaacauucag

SEQ ID NO: 3493424 - RNA, 22 nt, Human
cauacuuaccuagugaaacuuu

SEQ ID NO: 3493425 - RNA, 13 nt, Human
cauacuuaucucu

SEQ ID NO: 3493426 - RNA, 22 nt, Human
cauacuuaucucucugugcugu

SEQ ID NO: 3493427 - RNA, 15 nt, Human
cauacuucaaaagua

SEQ ID NO: 3493428 - RNA, 16 nt, Human
cauacuucaaaaguau

SEQ ID NO: 3493429 - RNA, 19 nt, Human
cauacuucaaaaguauuuu

SEQ ID NO: 3493430 - RNA, 22 nt, Human
cauacuugaagggccagagcca

SEQ ID NO: 3493431 - RNA, 17 nt, Human
cauacuuuaucaaugug

SEQ ID NO: 3493432 - RNA, 17 nt, Human
cauacuuucauccugac

SEQ ID NO: 3493433 - RNA, 22 nt, Human
cauacuuucauccugacucugc

SEQ ID NO: 3493434 - RNA, 14 nt, Human
cauacuuuguaaau

SEQ ID NO: 3493435 - RNA, 14 nt, Human
cauacuuugucuga

SEQ ID NO: 3493436 - RNA, 16 nt, Human
cauacuuuuuggguuu

SEQ ID NO: 3493437 - RNA, 18 nt, Human
cauacuuuuuggguuuau

SEQ ID NO: 3493438 - RNA, 11 nt, Human
cauagaaaaau

SEQ ID NO: 3493439 - RNA, 17 nt, Human
cauagaaacaugacacu

SEQ ID NO: 3493440 - RNA, 18 nt, Human
cauagaaacaugacacug

SEQ ID NO: 3493441 - RNA, 18 nt, Human
cauagaaaccacuagaaa

SEQ ID NO: 3493442 - RNA, 20 nt, Human
cauagaaacugucuagcacu

SEQ ID NO: 3493443 - RNA, 23 nt, Human
cauagaaaguaaauaaaaggacu

SEQ ID NO: 3493444 - RNA, 22 nt, Human
cauagaaauguagguccucaga

SEQ ID NO: 3493445 - RNA, 14 nt, Human
cauagaacugggua

SEQ ID NO: 3493446 - RNA, 15 nt, Human
cauagaacuggguaa

SEQ ID NO: 3493447 - RNA, 16 nt, Human
cauagaacuggguaaa

SEQ ID NO: 3493448 - RNA, 20 nt, Human
cauagaauaaaauuuuuaau

SEQ ID NO: 3493449 - RNA, 14 nt, Human
cauagaauagcaug

SEQ ID NO: 3493450 - RNA, 13 nt, Human
cauagacaugaaa

SEQ ID NO: 3493451 - RNA, 19 nt, Human
cauagagagcaagacgcug

SEQ ID NO: 3493452 - RNA, 19 nt, Human
cauagagagggagaagaag

SEQ ID NO: 3493453 - RNA, 22 nt, Human
cauagagagggagaagaaguca

SEQ ID NO: 3493454 - RNA, 17 nt, Human
cauagagaucauccuuu

SEQ ID NO: 3493455 - RNA, 12 nt, Human
cauagaggcuuc

SEQ ID NO: 3493456 - RNA, 21 nt, Human
cauagaggcuucuccgccagc

SEQ ID NO: 3493457 - RNA, 22 nt, Human
cauagaggcuucuccgccagcc

SEQ ID NO: 3493458 - RNA, 17 nt, Human
cauagaggugagggaag

SEQ ID NO: 3493459 - RNA, 15 nt, Human
cauagaguacacugc

SEQ ID NO: 3493460 - RNA, 17 nt, Human
cauagaguacacugccu

SEQ ID NO: 3493461 - RNA, 19 nt, Human
cauagaguacacugccugc

SEQ ID NO: 3493462 - RNA, 17 nt, Human
cauagaguccccccucc

SEQ ID NO: 3493463 - RNA, 14 nt, Human
cauagaguuuaaca

SEQ ID NO: 3493464 - RNA, 15 nt, Human
cauagaguuuaacac

SEQ ID NO: 3493465 - RNA, 15 nt, Human
aaaguuauuaaaauu

SEQ ID NO: 3493466 - RNA, 21 nt, Human
aaaguuauuaauauuuuaauu

SEQ ID NO: 3493467 - RNA, 20 nt, Human
aaaguuauuucccuuuagcu

SEQ ID NO: 3493468 - RNA, 21 nt, Human
ccugaaggaacauuccuuagu

SEQ ID NO: 3493469 - RNA, 19 nt, Human
ccugaaggccccgcccagg

SEQ ID NO: 3493470 - RNA, 20 nt, Human
ccugaaggccccgcccaggc

SEQ ID NO: 3493471 - RNA, 21 nt, Human
ccugaaggccccgcccaggcu

SEQ ID NO: 3493472 - RNA, 16 nt, Human
ccugaaggccugaggu

SEQ ID NO: 3493473 - RNA, 20 nt, Human
ccugaaggggccaugauggc

SEQ ID NO: 3493474 - RNA, 22 nt, Human
ccugaagucuuuguacagacaa

SEQ ID NO: 3493475 - RNA, 16 nt, Human
ccugaaucaugagccu

SEQ ID NO: 3493476 - RNA, 19 nt, Human
ccugaauccaaaagaaaaa

SEQ ID NO: 3493477 - RNA, 21 nt, Human
ccugaauccaaacuaauccau

SEQ ID NO: 3493478 - RNA, 19 nt, Human
ccugaaucccccuugccac

SEQ ID NO: 3493479 - RNA, 22 nt, Human
ccugaaucccccuugccacccc

SEQ ID NO: 3493480 - RNA, 20 nt, Human
ccugaaugguuccaugccug

SEQ ID NO: 3493481 - RNA, 21 nt, Human
ccugaaugguuccaugccuga

SEQ ID NO: 3493482 - RNA, 16 nt, Human
ccugacaacacucauu

SEQ ID NO: 3493483 - RNA, 14 nt, Human
ccugacaagcacug

SEQ ID NO: 3493484 - RNA, 19 nt, Human
ccugacaagcacugcuagg

SEQ ID NO: 3493485 - RNA, 20 nt, Human
ccugacaagcacugcuaggc

SEQ ID NO: 3493486 - RNA, 18 nt, Human
ccugacacccuucuccca

SEQ ID NO: 3493487 - RNA, 23 nt, Human
ccugacacccuucucccacucuc

SEQ ID NO: 3493488 - RNA, 13 nt, Human
ccugacacucccu

SEQ ID NO: 3493489 - RNA, 15 nt, Human
ccugacacuuuaauu

SEQ ID NO: 3493490 - RNA, 20 nt, Human
ccugacagaugucagccgag

SEQ ID NO: 3493491 - RNA, 14 nt, Human
ccugacagccagaa

SEQ ID NO: 3493492 - RNA, 18 nt, Human
ccugacagucuugugcuu

SEQ ID NO: 3493493 - RNA, 13 nt, Human
ccugacaucacag

SEQ ID NO: 3493494 - RNA, 19 nt, Human
ccugacaucacagcagccu

SEQ ID NO: 3493495 - RNA, 12 nt, Human
ccugaccacccu

SEQ ID NO: 3493496 - RNA, 15 nt, Human
ccugaccacccuccc

SEQ ID NO: 3493497 - RNA, 18 nt, Human
ccugaccacccuccccuc

SEQ ID NO: 3493498 - RNA, 20 nt, Human
ccugaccacccuccccucuc

SEQ ID NO: 3493499 - RNA, 18 nt, Human
ccugaccacucagagaca

SEQ ID NO: 3493500 - RNA, 20 nt, Human
ccugaccacucagagacaug

SEQ ID NO: 3493501 - RNA, 14 nt, Human
ccugaccagcuccc

SEQ ID NO: 3493502 - RNA, 20 nt, Human
ccugaccagcugcuccgagg

SEQ ID NO: 3493503 - RNA, 12 nt, Human
ccugaccaguug

SEQ ID NO: 3493504 - RNA, 16 nt, Human
ccugacccaggccgca

SEQ ID NO: 3493505 - RNA, 23 nt, Human
ccugaccccaaguuauccaccug

SEQ ID NO: 3493506 - RNA, 18 nt, Human
ccugaccccucauagccc

SEQ ID NO: 3493507 - RNA, 15 nt, Human
ccugaccccugcuca

SEQ ID NO: 3493508 - RNA, 12 nt, Human
ccugacccgucu

SEQ ID NO: 3493509 - RNA, 12 nt, Human
ccugaccuccca

SEQ ID NO: 3493510 - RNA, 12 nt, Human
ccugaccucuug

SEQ ID NO: 3493511 - RNA, 14 nt, Human
ccugaccucuugcu

SEQ ID NO: 3493512 - RNA, 14 nt, Human
ccugcgccugugau

SEQ ID NO: 3493513 - RNA, 17 nt, Human
ccugcggagugaagagg

SEQ ID NO: 3493514 - RNA, 18 nt, Human
ccugcggagugaagaggg

SEQ ID NO: 3493515 - RNA, 23 nt, Human
ccugcggagugaagaggggcagc

SEQ ID NO: 3493516 - RNA, 16 nt, Human
ccugcggccugcugga

SEQ ID NO: 3493517 - RNA, 21 nt, Human
ccugcggcugcugugugccuu

SEQ ID NO: 3493518 - RNA, 19 nt, Human
ccugcgggcuuuuccccgg

SEQ ID NO: 3493519 - RNA, 21 nt, Human
ccugcgggcuuuuccccgguc

SEQ ID NO: 3493520 - RNA, 24 nt, Human
ccugcggguggggcuuggggcuca

SEQ ID NO: 3493521 - RNA, 16 nt, Human
ccugcggucaaggcca

SEQ ID NO: 3493522 - RNA, 18 nt, Human
ccugcggucaaggccagc

SEQ ID NO: 3493523 - RNA, 13 nt, Human
ccugcguccuccu

SEQ ID NO: 3493524 - RNA, 17 nt, Human
ccugcguccuccucacc

SEQ ID NO: 3493525 - RNA, 15 nt, Human
ccugcguggggacag

SEQ ID NO: 3493526 - RNA, 19 nt, Human
ccugcguucuugugacaga

SEQ ID NO: 3493527 - RNA, 18 nt, Human
ccugcguugguccagagc

SEQ ID NO: 3493528 - RNA, 17 nt, Human
ccugcuaauuccccaga

SEQ ID NO: 3493529 - RNA, 21 nt, Human
ccugcuaauuccccagauugc

SEQ ID NO: 3493530 - RNA, 18 nt, Human
ccugcuacugccaaccuc

SEQ ID NO: 3493531 - RNA, 13 nt, Human
ccugcuagaaaug

SEQ ID NO: 3493532 - RNA, 14 nt, Human
ccugcuagaaaugg

SEQ ID NO: 3493533 - RNA, 18 nt, Human
ccugcuagacacauuuuu

SEQ ID NO: 3493534 - RNA, 13 nt, Human
ccugcuaggccag

SEQ ID NO: 3493535 - RNA, 14 nt, Human
ccugcuaggccaga

SEQ ID NO: 3493536 - RNA, 18 nt, Human
ccugcuaggccagagccc

SEQ ID NO: 3493537 - RNA, 19 nt, Human
ccugcucaaucccugagga

SEQ ID NO: 3493538 - RNA, 19 nt, Human
ccugcucacgucaaaugca

SEQ ID NO: 3493539 - RNA, 21 nt, Human
ccugcucagcagugagagcag

SEQ ID NO: 3493540 - RNA, 19 nt, Human
ccugcucagcccugcacca

SEQ ID NO: 3493541 - RNA, 17 nt, Human
ccugcucauuaugccac

SEQ ID NO: 3493542 - RNA, 19 nt, Human
ccugcuccacagccauccc

SEQ ID NO: 3493543 - RNA, 20 nt, Human
ccugcuccacagccauccca

SEQ ID NO: 3493544 - RNA, 13 nt, Human
ccugcuccacagu

SEQ ID NO: 3493545 - RNA, 14 nt, Human
ccugcuccacagug

SEQ ID NO: 3493546 - RNA, 15 nt, Human
ccugcuccacagugu

SEQ ID NO: 3493547 - RNA, 12 nt, Human
ccugcuccagac

SEQ ID NO: 3493548 - RNA, 13 nt, Human
ccugcucccagca

SEQ ID NO: 3493549 - RNA, 16 nt, Human
ccugcucccagcagcc

SEQ ID NO: 3493550 - RNA, 20 nt, Human
ccugcucccucucccccuua

SEQ ID NO: 3493551 - RNA, 16 nt, Human
ccugcuccucccuggc

SEQ ID NO: 3493552 - RNA, 20 nt, Human
ccugcuccucccuggcugcc

SEQ ID NO: 3493553 - RNA, 13 nt, Human
ccugcuccugcag

SEQ ID NO: 3493554 - RNA, 16 nt, Human
ccugcuccuucccuug

SEQ ID NO: 3493555 - RNA, 18 nt, Human
ccugcuccuucccuugcu

SEQ ID NO: 3493556 - RNA, 22 nt, Human
ccugcucuagugggacagccca

SEQ ID NO: 3493557 - RNA, 16 nt, Human
ccugcucuccucuugc

SEQ ID NO: 3493558 - RNA, 19 nt, Human
ccugcucuccucuugccac

SEQ ID NO: 3493559 - RNA, 15 nt, Human
ccugcucucuaccca

SEQ ID NO: 3493560 - RNA, 21 nt, Human
ccugcucucuacccagcccau

SEQ ID NO: 3493561 - RNA, 14 nt, Human
ccugcugaccugug

SEQ ID NO: 3493562 - RNA, 16 nt, Human
ccugcugaccugugca

SEQ ID NO: 3493563 - RNA, 12 nt, Human
ccugcugagcuc

SEQ ID NO: 3493564 - RNA, 22 nt, Human
ccugcugagcucugagaggccc

SEQ ID NO: 3493565 - RNA, 17 nt, Human
ccugcugagggaccagc

SEQ ID NO: 3493566 - RNA, 15 nt, Human
ccugcugagucccag

SEQ ID NO: 3493567 - RNA, 17 nt, Human
ccugcugcaccaaccca

SEQ ID NO: 3493568 - RNA, 23 nt, Human
ccugcugcagaggggcaggcccu

SEQ ID NO: 3493569 - RNA, 12 nt, Human
ccugcugcaggg

SEQ ID NO: 3493570 - RNA, 22 nt, Human
ccugcugcaguugccagucacc

SEQ ID NO: 3493571 - RNA, 10 nt, Human
ccugcugcau

SEQ ID NO: 3493572 - RNA, 20 nt, Human
ccugcugcaugcccucucag

SEQ ID NO: 3493573 - RNA, 21 nt, Human
ccugcugcaugcccucucagg

SEQ ID NO: 3493574 - RNA, 15 nt, Human
ccugcugcccaggcu

SEQ ID NO: 3493575 - RNA, 12 nt, Human
ccugcugcccuc

SEQ ID NO: 3493576 - RNA, 14 nt, Human
ccugcugcccuccc

SEQ ID NO: 3493577 - RNA, 16 nt, Human
ccugcugccuccccaa

SEQ ID NO: 3493578 - RNA, 21 nt, Human
ccugcugccuccccaacccug

SEQ ID NO: 3493579 - RNA, 14 nt, Human
ccugcugcucccuc

SEQ ID NO: 3493580 - RNA, 16 nt, Human
ccugcugcucccucag

SEQ ID NO: 3493581 - RNA, 16 nt, Human
ccugcugcuccuagga

SEQ ID NO: 3493582 - RNA, 17 nt, Human
ccugcugcuccuaggac

SEQ ID NO: 3493583 - RNA, 18 nt, Human
ccugcugcugacccagcc

SEQ ID NO: 3493584 - RNA, 14 nt, Human
ccugcugcugagaa

SEQ ID NO: 3493585 - RNA, 23 nt, Human
ccugcugcugagaaccuggccuu

SEQ ID NO: 3493586 - RNA, 24 nt, Human
ccugcugcugagaaccuggccuuc

SEQ ID NO: 3493587 - RNA, 15 nt, Human
ccugcugcugccugc

SEQ ID NO: 3493588 - RNA, 16 nt, Human
ccugcugcugccugcc

SEQ ID NO: 3493589 - RNA, 18 nt, Human
ccugcugcuggugcacag

SEQ ID NO: 3493590 - RNA, 17 nt, Human
ccugcugcugucugggu

SEQ ID NO: 3493591 - RNA, 15 nt, Human
ccugcugcuucucca

SEQ ID NO: 3493592 - RNA, 17 nt, Human
ccugcuggaagcccagc

SEQ ID NO: 3493593 - RNA, 22 nt, Human
ccugcuggaggccucaggugcu

SEQ ID NO: 3493594 - RNA, 21 nt, Human
ccugcuggaucucccagggcu

SEQ ID NO: 3493595 - RNA, 19 nt, Human
ccugcuggcacccaccgug

SEQ ID NO: 3493596 - RNA, 17 nt, Human
ccugcuggccccucacc

SEQ ID NO: 3493597 - RNA, 14 nt, Human
ccugcuggccgccu

SEQ ID NO: 3493598 - RNA, 15 nt, Human
ccugcuggccgccuc

SEQ ID NO: 3493599 - RNA, 16 nt, Human
ccugcuggccgccuca

SEQ ID NO: 3493600 - RNA, 13 nt, Human
ccugcuggcucuu

SEQ ID NO: 3493601 - RNA, 16 nt, Human
ccugcugggcucucca

SEQ ID NO: 3493602 - RNA, 20 nt, Human
ccugcugggcucuccaccuc

SEQ ID NO: 3493603 - RNA, 23 nt, Human
ccugcugggcucuccaccucagc

SEQ ID NO: 3493604 - RNA, 14 nt, Human
ccugcugggugugg

SEQ ID NO: 3493605 - RNA, 20 nt, Human
ccugcuggucacagccuccu

SEQ ID NO: 3493606 - RNA, 13 nt, Human
ccugcugguucag

SEQ ID NO: 3493607 - RNA, 21 nt, Human
ccugcuguaaauuuggcuucu

SEQ ID NO: 3493608 - RNA, 22 nt, Human
ccugcugucauugcuucuucug

SEQ ID NO: 3493609 - RNA, 21 nt, Human
ccugcuguuuaucccuuaaga

SEQ ID NO: 3493610 - RNA, 22 nt, Human
ccugcuuaaucuucaaagccuu

SEQ ID NO: 3493611 - RNA, 23 nt, Human
ccugcuuaaucuucaaagccuuc

SEQ ID NO: 3493612 - RNA, 21 nt, Human
ccugaggcugggcucccuucc

SEQ ID NO: 3493613 - RNA, 21 nt, Human
ccugagggaaaggccagcacu

SEQ ID NO: 3493614 - RNA, 16 nt, Human
ccugagggaggaccug

SEQ ID NO: 3493615 - RNA, 22 nt, Human
ccugagggaucuauacuugcuu

SEQ ID NO: 3493616 - RNA, 18 nt, Human
ccugagggccccucugcc

SEQ ID NO: 3493617 - RNA, 22 nt, Human
ccugagggccccucugcccagc

SEQ ID NO: 3493618 - RNA, 22 nt, Human
ccugagggcggggugucugucu

SEQ ID NO: 3493619 - RNA, 15 nt, Human
ccugaggggagacag

SEQ ID NO: 3493620 - RNA, 18 nt, Human
ccugaggggagacagagc

SEQ ID NO: 3493621 - RNA, 20 nt, Human
ccugaggggcagccugccuu

SEQ ID NO: 3493622 - RNA, 20 nt, Human
ccugaggggcaucugccccu

SEQ ID NO: 3493623 - RNA, 23 nt, Human
ccugaggggcaucugccccuccc

SEQ ID NO: 3493624 - RNA, 12 nt, Human
ccugaggggccu

SEQ ID NO: 3493625 - RNA, 16 nt, Human
ccugaggggccucuua

SEQ ID NO: 3493626 - RNA, 12 nt, Human
ccugagggucug

SEQ ID NO: 3493627 - RNA, 18 nt, Human
ccugagggucuguagguu

SEQ ID NO: 3493628 - RNA, 16 nt, Human
ccugaggguggagacu

SEQ ID NO: 3493629 - RNA, 12 nt, Human
ccugaggucugg

SEQ ID NO: 3493630 - RNA, 15 nt, Human
ccugaggucuggcug

SEQ ID NO: 3493631 - RNA, 17 nt, Human
ccugaggucuggcugcu

SEQ ID NO: 3493632 - RNA, 21 nt, Human
ccugaggugggcccaggacca

SEQ ID NO: 3493633 - RNA, 17 nt, Human
ccugaggugugggggcu

SEQ ID NO: 3493634 - RNA, 20 nt, Human
ccugaggugugggggcugca

SEQ ID NO: 3493635 - RNA, 21 nt, Human
ccugaggugugggggcugcag

SEQ ID NO: 3493636 - RNA, 14 nt, Human
ccugagguuacugg

SEQ ID NO: 3493637 - RNA, 21 nt, Human
ccugaguacuccacacugcac

SEQ ID NO: 3493638 - RNA, 20 nt, Human
ccugaguagaaaggccuuua

SEQ ID NO: 3493639 - RNA, 21 nt, Human
ccugaguagaaaggccuuuaa

SEQ ID NO: 3493640 - RNA, 19 nt, Human
ccugaguagcuggauuaca

SEQ ID NO: 3493641 - RNA, 20 nt, Human
ccugaguagcuggauuacag

SEQ ID NO: 3493642 - RNA, 14 nt, Human
ccugagucaccagg

SEQ ID NO: 3493643 - RNA, 23 nt, Human
ccugagucacccuaccugugccu

SEQ ID NO: 3493644 - RNA, 21 nt, Human
ccugagucagggcccagaggc

SEQ ID NO: 3493645 - RNA, 11 nt, Human
ccugaguccca

SEQ ID NO: 3493646 - RNA, 22 nt, Human
ccugagucgugaccugcuaggc

SEQ ID NO: 3493647 - RNA, 13 nt, Human
ccugagucugggc

SEQ ID NO: 3493648 - RNA, 16 nt, Human
ccugagucugggcagc

SEQ ID NO: 3493649 - RNA, 17 nt, Human
ccugagucugggcagcu

SEQ ID NO: 3493650 - RNA, 14 nt, Human
ccugagugcuugcu

SEQ ID NO: 3493651 - RNA, 18 nt, Human
ccugaguggaucuccaag

SEQ ID NO: 3493652 - RNA, 19 nt, Human
ccugaguggaucuccaagg

SEQ ID NO: 3493653 - RNA, 19 nt, Human
ccugaguuaggcuuucucu

SEQ ID NO: 3493654 - RNA, 20 nt, Human
ccugaguucauccaggccca

SEQ ID NO: 3493655 - RNA, 14 nt, Human
ccugaguuccuagc

SEQ ID NO: 3493656 - RNA, 18 nt, Human
ccugaguuccuagccacc

SEQ ID NO: 3493657 - RNA, 19 nt, Human
ccugaguuccuagccaccg

SEQ ID NO: 3493658 - RNA, 20 nt, Human
ccugaguuccuagccaccgc

SEQ ID NO: 3493659 - RNA, 13 nt, Human
ccugaguugaaga

SEQ ID NO: 3493660 - RNA, 18 nt, Human
ccugauaaagcacagcug

SEQ ID NO: 3493661 - RNA, 19 nt, Human
ccugauaacaaccuggaga

SEQ ID NO: 3493662 - RNA, 21 nt, Human
ccugauauagaucacauaaca

SEQ ID NO: 3493663 - RNA, 14 nt, Human
ccugauaugauuua

SEQ ID NO: 3493664 - RNA, 21 nt, Human
ccugauauuucccuccccugg

SEQ ID NO: 3493665 - RNA, 14 nt, Human
ccugaucccacucc

SEQ ID NO: 3493666 - RNA, 22 nt, Human
ccugaucccuuccaccugcucu

SEQ ID NO: 3493667 - RNA, 20 nt, Human
ccuggacacaggccugcucu

SEQ ID NO: 3493668 - RNA, 17 nt, Human
ccuggacagcugugccu

SEQ ID NO: 3493669 - RNA, 19 nt, Human
ccuggacagcugugccucg

SEQ ID NO: 3493670 - RNA, 21 nt, Human
ccuggacagcugugccucgcu

SEQ ID NO: 3493671 - RNA, 21 nt, Human
ccuggacauuugccuugcugg

SEQ ID NO: 3493672 - RNA, 15 nt, Human
ccuggaccaaagcug

SEQ ID NO: 3493673 - RNA, 13 nt, Human
ccuggaccccagc

SEQ ID NO: 3493674 - RNA, 17 nt, Human
ccuggaccccagccuca

SEQ ID NO: 3493675 - RNA, 24 nt, Human
ccuggaccccccuuucacaggcag

SEQ ID NO: 3493676 - RNA, 13 nt, Human
ccuggacccugug

SEQ ID NO: 3493677 - RNA, 13 nt, Human
ccuggaccugccu

SEQ ID NO: 3493678 - RNA, 14 nt, Human
ccuggaccugccuc

SEQ ID NO: 3493679 - RNA, 20 nt, Human
ccuggaccuuuuguuuucug

SEQ ID NO: 3493680 - RNA, 15 nt, Human
ccuggacucauugcu

SEQ ID NO: 3493681 - RNA, 16 nt, Human
ccuggacucauugcuu

SEQ ID NO: 3493682 - RNA, 21 nt, Human
ccuggacugagggggccugga

SEQ ID NO: 3493683 - RNA, 22 nt, Human
ccuggacugagggggccuggau

SEQ ID NO: 3493684 - RNA, 23 nt, Human
ccuggacugagggggccuggaug

SEQ ID NO: 3493685 - RNA, 14 nt, Human
ccuggacugggagg

SEQ ID NO: 3493686 - RNA, 19 nt, Human
ccuggacuuggccccugcc

SEQ ID NO: 3493687 - RNA, 16 nt, Human
ccuggacuuuccugca

SEQ ID NO: 3493688 - RNA, 11 nt, Human
ccuggagaagc

SEQ ID NO: 3493689 - RNA, 17 nt, Human
ccuggagaagcugaugc

SEQ ID NO: 3493690 - RNA, 16 nt, Human
ccuggagacccacccc

SEQ ID NO: 3493691 - RNA, 22 nt, Human
ccuggagacccaccccaccugc

SEQ ID NO: 3493692 - RNA, 23 nt, Human
ccuggagagccagaaccuggagg

SEQ ID NO: 3493693 - RNA, 21 nt, Human
ccuggagagcuagaaccugga

SEQ ID NO: 3493694 - RNA, 22 nt, Human
ccuggagagcuagaaccuggag

SEQ ID NO: 3493695 - RNA, 23 nt, Human
ccuggagaguucaauggcugcug

SEQ ID NO: 3493696 - RNA, 15 nt, Human
ccuggagauccuccu

SEQ ID NO: 3493697 - RNA, 17 nt, Human
ccuggagauccuccugc

SEQ ID NO: 3493698 - RNA, 18 nt, Human
ccuggagauccuccugca

SEQ ID NO: 3493699 - RNA, 19 nt, Human
ccuggagauccuccugcag

SEQ ID NO: 3493700 - RNA, 20 nt, Human
ccuggagcaaucacagauga

SEQ ID NO: 3493701 - RNA, 15 nt, Human
ccuggagcaggccuu

SEQ ID NO: 3493702 - RNA, 16 nt, Human
ccuggagccagacucu

SEQ ID NO: 3493703 - RNA, 22 nt, Human
ccuggagccagacucuggucuu

SEQ ID NO: 3493704 - RNA, 11 nt, Human
ccuggagcccc

SEQ ID NO: 3493705 - RNA, 17 nt, Human
ccuggagccccacugcc

SEQ ID NO: 3493706 - RNA, 18 nt, Human
ccuggagccccacugccc

SEQ ID NO: 3493707 - RNA, 12 nt, Human
ccuggagccccu

SEQ ID NO: 3493708 - RNA, 13 nt, Human
ccuggagccccug

SEQ ID NO: 3493709 - RNA, 14 nt, Human
ccuggagccccugg

SEQ ID NO: 3493710 - RNA, 14 nt, Human
ccuggagcccgagg

SEQ ID NO: 3493711 - RNA, 13 nt, Human
ccuggaggaccug

SEQ ID NO: 3493712 - RNA, 14 nt, Human
ccuggaggaccuga

SEQ ID NO: 3493713 - RNA, 15 nt, Human
ccuggaggaccugag

SEQ ID NO: 3493714 - RNA, 21 nt, Human
ccuggaggaccugagccugcc

SEQ ID NO: 3493715 - RNA, 15 nt, Human
ccuggaggagcagag

SEQ ID NO: 3493716 - RNA, 16 nt, Human
ccuggaggauuucauc

SEQ ID NO: 3493717 - RNA, 14 nt, Human
ccuggaggcacuga

SEQ ID NO: 3493718 - RNA, 22 nt, Human
ccuggaggcacugaagugcuua

SEQ ID NO: 3493719 - RNA, 18 nt, Human
ccuggaggcugccuccca

SEQ ID NO: 3493720 - RNA, 19 nt, Human
ccuggaggcugccucccaa

SEQ ID NO: 3493721 - RNA, 21 nt, Human
ccuggaggcugccucccaaca

SEQ ID NO: 3493722 - RNA, 22 nt, Human
ccuggagggaagaguggaggug

SEQ ID NO: 3493723 - RNA, 21 nt, Human
ccuggagggaaugaaccugga

SEQ ID NO: 3493724 - RNA, 21 nt, Human
ccuggagggcuagaaccuaga

SEQ ID NO: 3493725 - RNA, 22 nt, Human
ccuggagggcuagaaccuggag

SEQ ID NO: 3493726 - RNA, 22 nt, Human
ccuggagggggaauggcagcag

SEQ ID NO: 3493727 - RNA, 13 nt, Human
ccuggaggugcca

SEQ ID NO: 3493728 - RNA, 16 nt, Human
ccuggaggugccagca

SEQ ID NO: 3493729 - RNA, 23 nt, Human
ccuggagguggcugagccccugu

SEQ ID NO: 3493730 - RNA, 17 nt, Human
ccuggagguuccccagc

SEQ ID NO: 3493731 - RNA, 19 nt, Human
ccuggagugcccacccugg

SEQ ID NO: 3493732 - RNA, 15 nt, Human
ccuggaguuugggau

SEQ ID NO: 3493733 - RNA, 19 nt, Human
ccuggaucacgacgcugca

SEQ ID NO: 3493734 - RNA, 22 nt, Human
ccuggaucacgacgcugcagag

SEQ ID NO: 3493735 - RNA, 14 nt, Human
ccuggaucagcgug

SEQ ID NO: 3493736 - RNA, 16 nt, Human
ccuggaucagcguggc

SEQ ID NO: 3493737 - RNA, 21 nt, Human
ccuggauccaucaggccacuu

SEQ ID NO: 3493738 - RNA, 16 nt, Human
ccuggaucuaccagca

SEQ ID NO: 3493739 - RNA, 19 nt, Human
ccuggaucuccccacucua

SEQ ID NO: 3493740 - RNA, 14 nt, Human
ccuggaugcagccu

SEQ ID NO: 3493741 - RNA, 14 nt, Human
ccuggaugcccagg

SEQ ID NO: 3493742 - RNA, 19 nt, Human
ccuggaugcccccugugga

SEQ ID NO: 3493743 - RNA, 12 nt, Human
ccuggaugucug

SEQ ID NO: 3493744 - RNA, 14 nt, Human
ccuggauguugcug

SEQ ID NO: 3493745 - RNA, 14 nt, Human
ccuggauucauuuc

SEQ ID NO: 3493746 - RNA, 15 nt, Human
ccuggauucauuucc

SEQ ID NO: 3493747 - RNA, 14 nt, Human
ccuggauuucuggu

SEQ ID NO: 3493748 - RNA, 22 nt, Human
ccuggcaagcuagaaccuggag

SEQ ID NO: 3493749 - RNA, 15 nt, Human
ccuggcacacaucag

SEQ ID NO: 3493750 - RNA, 21 nt, Human
ccuggcacacaucaggaguuc

SEQ ID NO: 3493751 - RNA, 16 nt, Human
ccuggcacaggacuga

SEQ ID NO: 3493752 - RNA, 24 nt, Human
ccuggcacaggacugauucuggga

SEQ ID NO: 3493753 - RNA, 12 nt, Human
ccuggcacagug

SEQ ID NO: 3493754 - RNA, 19 nt, Human
ccuggcacagugucugggc

SEQ ID NO: 3493755 - RNA, 18 nt, Human
ccuggcacccggccccug

SEQ ID NO: 3493756 - RNA, 15 nt, Human
caucggcguggccca

SEQ ID NO: 3493757 - RNA, 13 nt, Human
caucgggcugagg

SEQ ID NO: 3493758 - RNA, 17 nt, Human
caucgguguccauuuau

SEQ ID NO: 3493759 - RNA, 18 nt, Human
caucgguguccauuuaua

SEQ ID NO: 3493760 - RNA, 21 nt, Human
caucguauaacacaauaugaa

SEQ ID NO: 3493761 - RNA, 18 nt, Human
caucuaaaaauauacaug

SEQ ID NO: 3493762 - RNA, 22 nt, Human
caucuaaacuuuaauauguauu

SEQ ID NO: 3493763 - RNA, 18 nt, Human
caucuaaauaccugcccu

SEQ ID NO: 3493764 - RNA, 15 nt, Human
caucuaaccucaucu

SEQ ID NO: 3493765 - RNA, 12 nt, Human
caucuaagccug

SEQ ID NO: 3493766 - RNA, 14 nt, Human
caucuaagcugcag

SEQ ID NO: 3493767 - RNA, 17 nt, Human
caucuaagcugcagcuu

SEQ ID NO: 3493768 - RNA, 14 nt, Human
caucuaauaaaaaa

SEQ ID NO: 3493769 - RNA, 14 nt, Human
caucuaauucugau

SEQ ID NO: 3493770 - RNA, 16 nt, Human
caucuacaaaacauua

SEQ ID NO: 3493771 - RNA, 23 nt, Human
caucuagaggcuuccuucauuuc

SEQ ID NO: 3493772 - RNA, 12 nt, Human
caucuagccagc

SEQ ID NO: 3493773 - RNA, 22 nt, Human
caucuagccagccccucuuccc

SEQ ID NO: 3493774 - RNA, 18 nt, Human
caucuaggggagccuuga

SEQ ID NO: 3493775 - RNA, 20 nt, Human
caucuaguuccccuguuuau

SEQ ID NO: 3493776 - RNA, 21 nt, Human
caucuaguuccccuguuuauu

SEQ ID NO: 3493777 - RNA, 14 nt, Human
caucuauaaauugu

SEQ ID NO: 3493778 - RNA, 17 nt, Human
caucuauagaaagcuau

SEQ ID NO: 3493779 - RNA, 16 nt, Human
caucuaucucaauccu

SEQ ID NO: 3493780 - RNA, 20 nt, Human
caucuaucucaucuaucuca

SEQ ID NO: 3493781 - RNA, 19 nt, Human
caucuaucuggugauuucu

SEQ ID NO: 3493782 - RNA, 13 nt, Human
caucuauuuugau

SEQ ID NO: 3493783 - RNA, 22 nt, Human
caucuauuuugaugcagcauuu

SEQ ID NO: 3493784 - RNA, 14 nt, Human
caucuauuuuggau

SEQ ID NO: 3493785 - RNA, 15 nt, Human
caucucaacaggccu

SEQ ID NO: 3493786 - RNA, 19 nt, Human
caucucaacaggccucagg

SEQ ID NO: 3493787 - RNA, 14 nt, Human
caucucaaccaucc

SEQ ID NO: 3493788 - RNA, 16 nt, Human
caucucaaccaucccc

SEQ ID NO: 3493789 - RNA, 17 nt, Human
caucucacacaugagca

SEQ ID NO: 3493790 - RNA, 19 nt, Human
caucucacacaugagcauc

SEQ ID NO: 3493791 - RNA, 19 nt, Human
caucucagcucacugcaac

SEQ ID NO: 3493792 - RNA, 14 nt, Human
caucucaggccacc

SEQ ID NO: 3493793 - RNA, 20 nt, Human
caucucaggccaccugcccc

SEQ ID NO: 3493794 - RNA, 15 nt, Human
caucucaggggccag

SEQ ID NO: 3493795 - RNA, 22 nt, Human
caucucagguuaagugugagua

SEQ ID NO: 3493796 - RNA, 22 nt, Human
caucucaguccucaaagcuuuu

SEQ ID NO: 3493797 - RNA, 21 nt, Human
caucucagugaagaauacuuc

SEQ ID NO: 3493798 - RNA, 22 nt, Human
caucucagugaagaauacuucu

SEQ ID NO: 3493799 - RNA, 22 nt, Human
caucucaugccccuggcuggga

SEQ ID NO: 3493800 - RNA, 19 nt, Human
caucucauuuaagggaaaa

SEQ ID NO: 3493801 - RNA, 20 nt, Human
caucucauuuaagggaaaaa

SEQ ID NO: 3493802 - RNA, 18 nt, Human
caucuccaagaaugcuga

SEQ ID NO: 3493803 - RNA, 23 nt, Human
caucuccaagaaugcugaaacca

SEQ ID NO: 3493804 - RNA, 20 nt, Human
caucuccaccugcucccagg

SEQ ID NO: 3493805 - RNA, 14 nt, Human
caucuccagggagu

SEQ ID NO: 3493806 - RNA, 19 nt, Human
caucuccagggaguccccu

SEQ ID NO: 3493807 - RNA, 22 nt, Human
caucuccagggaguccccuccc

SEQ ID NO: 3493808 - RNA, 17 nt, Human
caucuccaucuugaagg

SEQ ID NO: 3493809 - RNA, 21 nt, Human
caucucccaccuagcagcacc

SEQ ID NO: 3493810 - RNA, 15 nt, Human
caucuccccucagcu

SEQ ID NO: 3493811 - RNA, 17 nt, Human
caucuccccucagcucg

SEQ ID NO: 3493812 - RNA, 21 nt, Human
caucuccccucagcucggcuc

SEQ ID NO: 3493813 - RNA, 24 nt, Human
caucucccucgaacccacacugca

SEQ ID NO: 3493814 - RNA, 16 nt, Human
caucucccugccuggc

SEQ ID NO: 3493815 - RNA, 17 nt, Human
caucucccugccuggcc

SEQ ID NO: 3493816 - RNA, 19 nt, Human
caucucccugccuggcccc

SEQ ID NO: 3493817 - RNA, 21 nt, Human
caucucccugccuggccccca

SEQ ID NO: 3493818 - RNA, 12 nt, Human
caucucccugcu

SEQ ID NO: 3493819 - RNA, 14 nt, Human
caucucccuggugc

SEQ ID NO: 3493820 - RNA, 15 nt, Human
caucucccuggugcu

SEQ ID NO: 3493821 - RNA, 23 nt, Human
ccugaucccuuccaccugcucug

SEQ ID NO: 3493822 - RNA, 15 nt, Human
ccugaucucuuccug

SEQ ID NO: 3493823 - RNA, 17 nt, Human
ccugaucucuuccuguu

SEQ ID NO: 3493824 - RNA, 15 nt, Human
ccugaucugcccauc

SEQ ID NO: 3493825 - RNA, 15 nt, Human
ccugaugaaaauaaa

SEQ ID NO: 3493826 - RNA, 19 nt, Human
ccugaugaaaauaaagaau

SEQ ID NO: 3493827 - RNA, 21 nt, Human
ccugaugaaaauaaagaaugg

SEQ ID NO: 3493828 - RNA, 16 nt, Human
ccugaugacagagcga

SEQ ID NO: 3493829 - RNA, 19 nt, Human
ccugaugacccaggcugcc

SEQ ID NO: 3493830 - RNA, 15 nt, Human
ccugaugcagucacg

SEQ ID NO: 3493831 - RNA, 16 nt, Human
ccugaugcucccuccc

SEQ ID NO: 3493832 - RNA, 19 nt, Human
ccugaugcucccuccccug

SEQ ID NO: 3493833 - RNA, 21 nt, Human
ccugaugcugacauucaccug

SEQ ID NO: 3493834 - RNA, 13 nt, Human
ccugaugcugacu

SEQ ID NO: 3493835 - RNA, 21 nt, Human
ccugauggaaguaaagccuca

SEQ ID NO: 3493836 - RNA, 23 nt, Human
ccugauggcaggauggccuggcc

SEQ ID NO: 3493837 - RNA, 21 nt, Human
ccugaugguacaggaaagcuc

SEQ ID NO: 3493838 - RNA, 18 nt, Human
ccugauggucagcucccu

SEQ ID NO: 3493839 - RNA, 21 nt, Human
ccugauggucagcucccuucu

SEQ ID NO: 3493840 - RNA, 23 nt, Human
ccugauggucagcucccuucucu

SEQ ID NO: 3493841 - RNA, 13 nt, Human
ccugauuccucuc

SEQ ID NO: 3493842 - RNA, 17 nt, Human
ccugauugccaagcuca

SEQ ID NO: 3493843 - RNA, 13 nt, Human
ccugauuguaaac

SEQ ID NO: 3493844 - RNA, 17 nt, Human
ccugauugugucucuug

SEQ ID NO: 3493845 - RNA, 22 nt, Human
ccugauuuaauaugcaaagucu

SEQ ID NO: 3493846 - RNA, 19 nt, Human
ccugauuuaggagaagcca

SEQ ID NO: 3493847 - RNA, 21 nt, Human
ccugauuuaggagaagccagg

SEQ ID NO: 3493848 - RNA, 15 nt, Human
ccugauuucuccugc

SEQ ID NO: 3493849 - RNA, 17 nt, Human
ccugauuugcugggcag

SEQ ID NO: 3493850 - RNA, 22 nt, Human
ccugauuugcugggcaguuuuu

SEQ ID NO: 3493851 - RNA, 18 nt, Human
ccugauuugguacuuuug

SEQ ID NO: 3493852 - RNA, 16 nt, Human
ccugauuuuuuuuccu

SEQ ID NO: 3493853 - RNA, 15 nt, Human
ccugcaaaaaauacu

SEQ ID NO: 3493854 - RNA, 19 nt, Human
ccugcaaacgcugccugcc

SEQ ID NO: 3493855 - RNA, 22 nt, Human
ccugcaaacgcugccugcccac

SEQ ID NO: 3493856 - RNA, 22 nt, Human
ccugcaaacgcugccugcccgu

SEQ ID NO: 3493857 - RNA, 15 nt, Human
ccugcaaacucacug

SEQ ID NO: 3493858 - RNA, 16 nt, Human
ccugcaaacucacugc

SEQ ID NO: 3493859 - RNA, 17 nt, Human
ccugcaaacucacugcu

SEQ ID NO: 3493860 - RNA, 20 nt, Human
ccugcaaacucacugcucaa

SEQ ID NO: 3493861 - RNA, 14 nt, Human
ccugcaaagcccag

SEQ ID NO: 3493862 - RNA, 16 nt, Human
ccugcaaagcccagcu

SEQ ID NO: 3493863 - RNA, 22 nt, Human
ccugcaaccaaacucccaucag

SEQ ID NO: 3493864 - RNA, 22 nt, Human
ccugcaaccugauugugucucu

SEQ ID NO: 3493865 - RNA, 18 nt, Human
ccugcaacucaaggacuu

SEQ ID NO: 3493866 - RNA, 12 nt, Human
ccugcaacucau

SEQ ID NO: 3493867 - RNA, 14 nt, Human
ccugcaagaacaag

SEQ ID NO: 3493868 - RNA, 12 nt, Human
ccugcaaggacu

SEQ ID NO: 3493869 - RNA, 16 nt, Human
ccugcaaggcccacag

SEQ ID NO: 3493870 - RNA, 21 nt, Human
ccugcaaggcccacaggaggc

SEQ ID NO: 3493871 - RNA, 13 nt, Human
ccugcaauauuug

SEQ ID NO: 3493872 - RNA, 16 nt, Human
ccugcaauauuugaau

SEQ ID NO: 3493873 - RNA, 22 nt, Human
ccugcaaugaaagguacuauau

SEQ ID NO: 3493874 - RNA, 20 nt, Human
ccugcacaaagcccuuccau

SEQ ID NO: 3493875 - RNA, 15 nt, Human
ccugcacaagccagg

SEQ ID NO: 3493876 - RNA, 16 nt, Human
ccugcacaagccaggg

SEQ ID NO: 3493877 - RNA, 19 nt, Human
ccugcacaauaaaaauguu

SEQ ID NO: 3493878 - RNA, 12 nt, Human
ccugcacacaag

SEQ ID NO: 3493879 - RNA, 14 nt, Human
ccugcacagcaggc

SEQ ID NO: 3493880 - RNA, 21 nt, Human
ccugcacagugacuucugaga

SEQ ID NO: 3493881 - RNA, 12 nt, Human
ccugcaccagga

SEQ ID NO: 3493882 - RNA, 15 nt, Human
ccugcaccggggccu

SEQ ID NO: 3493883 - RNA, 14 nt, Human
ccugcaccuccccc

SEQ ID NO: 3493884 - RNA, 20 nt, Human
ccugcaccuccccccacugc

SEQ ID NO: 3493885 - RNA, 21 nt, Human
ccugcaccuccccccacugca

SEQ ID NO: 3493886 - RNA, 19 nt, Human
ccugcacggugggccuugc

SEQ ID NO: 3493887 - RNA, 22 nt, Human
ccugcacggugggccuugcugg

SEQ ID NO: 3493888 - RNA, 17 nt, Human
ccugcacuaacagagug

SEQ ID NO: 3493889 - RNA, 23 nt, Human
ccugcacuccucagggcagccuc

SEQ ID NO: 3493890 - RNA, 19 nt, Human
ccugcacucuuuaagggag

SEQ ID NO: 3493891 - RNA, 16 nt, Human
ccugcacugacucugg

SEQ ID NO: 3493892 - RNA, 17 nt, Human
ccugcacuggaguccag

SEQ ID NO: 3493893 - RNA, 20 nt, Human
ccugcacuggaguccagucu

SEQ ID NO: 3493894 - RNA, 21 nt, Human
ccugcacuggggagcccgucu

SEQ ID NO: 3493895 - RNA, 13 nt, Human
ccugcacuguaaa

SEQ ID NO: 3493896 - RNA, 20 nt, Human
ccugcacuguccugcuccac

SEQ ID NO: 3493897 - RNA, 21 nt, Human
ccugcacuguccugcuccaca

SEQ ID NO: 3493898 - RNA, 16 nt, Human
ccugcacuugcagacu

SEQ ID NO: 3493899 - RNA, 21 nt, Human
ccugcacuugggggcucagca

SEQ ID NO: 3493900 - RNA, 21 nt, Human
caucugggaacuugucacaga

SEQ ID NO: 3493901 - RNA, 18 nt, Human
caucugggaguccccuuu

SEQ ID NO: 3493902 - RNA, 20 nt, Human
caucugggccuuggccugga

SEQ ID NO: 3493903 - RNA, 16 nt, Human
caucugggcuccucca

SEQ ID NO: 3493904 - RNA, 21 nt, Human
caucuggggcccauacugguu

SEQ ID NO: 3493905 - RNA, 16 nt, Human
caucugggggagugga

SEQ ID NO: 3493906 - RNA, 18 nt, Human
caucugggggaguggaau

SEQ ID NO: 3493907 - RNA, 18 nt, Human
caucuggguagcuguaag

SEQ ID NO: 3493908 - RNA, 17 nt, Human
caucugguuaggauggc

SEQ ID NO: 3493909 - RNA, 14 nt, Human
caucugguuuucuc

SEQ ID NO: 3493910 - RNA, 15 nt, Human
caucugguuuucucu

SEQ ID NO: 3493911 - RNA, 19 nt, Human
caucuguaacucuaaaaga

SEQ ID NO: 3493912 - RNA, 15 nt, Human
caucuguacuugguc

SEQ ID NO: 3493913 - RNA, 20 nt, Human
caucuguauaaguaagaaaa

SEQ ID NO: 3493914 - RNA, 21 nt, Human
caucuguauaaguaagaaaau

SEQ ID NO: 3493915 - RNA, 18 nt, Human
caucuguauacccucugu

SEQ ID NO: 3493916 - RNA, 14 nt, Human
caucugucaacagg

SEQ ID NO: 3493917 - RNA, 12 nt, Human
caucuguccccc

SEQ ID NO: 3493918 - RNA, 16 nt, Human
caucugucccuccggg

SEQ ID NO: 3493919 - RNA, 19 nt, Human
caucugugaaaggaaagag

SEQ ID NO: 3493920 - RNA, 11 nt, Human
caucugugaau

SEQ ID NO: 3493921 - RNA, 13 nt, Human
caucugugaauaa

SEQ ID NO: 3493922 - RNA, 15 nt, Human
caucugugauucccu

SEQ ID NO: 3493923 - RNA, 11 nt, Human
caucugugcau

SEQ ID NO: 3493924 - RNA, 17 nt, Human
caucugugggcacgcug

SEQ ID NO: 3493925 - RNA, 11 nt, Human
caucuguuuuu

SEQ ID NO: 3493926 - RNA, 14 nt, Human
caucuuaaaaacaa

SEQ ID NO: 3493927 - RNA, 13 nt, Human
caucuuaaaagcu

SEQ ID NO: 3493928 - RNA, 16 nt, Human
caucuuaacucuuugc

SEQ ID NO: 3493929 - RNA, 14 nt, Human
caucuuacugaagg

SEQ ID NO: 3493930 - RNA, 22 nt, Human
caucuuacuguaccuguuccuu

SEQ ID NO: 3493931 - RNA, 19 nt, Human
caucuuaguauuugcauau

SEQ ID NO: 3493932 - RNA, 14 nt, Human
caucuuagugccug

SEQ ID NO: 3493933 - RNA, 19 nt, Human
caucuuauagcacuuugaa

SEQ ID NO: 3493934 - RNA, 20 nt, Human
caucuuauuuucauguauau

SEQ ID NO: 3493935 - RNA, 20 nt, Human
caucuucaguugucucugau

SEQ ID NO: 3493936 - RNA, 20 nt, Human
caucuuccagaagugugauu

SEQ ID NO: 3493937 - RNA, 16 nt, Human
caucuuccaggugggg

SEQ ID NO: 3493938 - RNA, 10 nt, Human
caucuuccca

SEQ ID NO: 3493939 - RNA, 21 nt, Human
caucuucccagcagggccacu

SEQ ID NO: 3493940 - RNA, 13 nt, Human
caucuucccgaga

SEQ ID NO: 3493941 - RNA, 13 nt, Human
caucuuccugugu

SEQ ID NO: 3493942 - RNA, 15 nt, Human
caucuucgggaccag

SEQ ID NO: 3493943 - RNA, 23 nt, Human
caucuucgucuucacucuuaggc

SEQ ID NO: 3493944 - RNA, 21 nt, Human
caucuucuaaacccaauccaa

SEQ ID NO: 3493945 - RNA, 13 nt, Human
caucuucucagcu

SEQ ID NO: 3493946 - RNA, 21 nt, Human
caucuucucagcucccauuuc

SEQ ID NO: 3493947 - RNA, 17 nt, Human
caucuucuccaucuggc

SEQ ID NO: 3493948 - RNA, 20 nt, Human
caucuucuguugcucucugu

SEQ ID NO: 3493949 - RNA, 15 nt, Human
caucuugacagagcc

SEQ ID NO: 3493950 - RNA, 23 nt, Human
caucuugaccaagcaggaagcuc

SEQ ID NO: 3493951 - RNA, 19 nt, Human
caucuugaucugcucagcc

SEQ ID NO: 3493952 - RNA, 20 nt, Human
caucuugaucugcucagccc

SEQ ID NO: 3493953 - RNA, 17 nt, Human
caucuugcauuaugcaa

SEQ ID NO: 3493954 - RNA, 18 nt, Human
caucuugcccgcucaggc

SEQ ID NO: 3493955 - RNA, 19 nt, Human
caucuugcccgcucaggcu

SEQ ID NO: 3493956 - RNA, 15 nt, Human
caucuugccuccagg

SEQ ID NO: 3493957 - RNA, 18 nt, Human
caucuugccuccaggugc

SEQ ID NO: 3493958 - RNA, 21 nt, Human
caucuugccuccaggugcaga

SEQ ID NO: 3493959 - RNA, 22 nt, Human
caucuugccuccaggugcagag

SEQ ID NO: 3493960 - RNA, 14 nt, Human
caucuugcuaccag

SEQ ID NO: 3493961 - RNA, 16 nt, Human
caucuugcuaccagua

SEQ ID NO: 3493962 - RNA, 22 nt, Human
caucuugcuaccaguauuuaga

SEQ ID NO: 3493963 - RNA, 15 nt, Human
caucuugcucugcug

SEQ ID NO: 3493964 - RNA, 17 nt, Human
caucuugcucugcugac

SEQ ID NO: 3493965 - RNA, 14 nt, Human
caucuugcuucccu

SEQ ID NO: 3493966 - RNA, 15 nt, Human
caucuuggggacauc

SEQ ID NO: 3493967 - RNA, 13 nt, Human
caucuugguaaau

SEQ ID NO: 3493968 - RNA, 23 nt, Human
caucuuguaauuuccagcuuucu

SEQ ID NO: 3493969 - RNA, 19 nt, Human
caucuuuaaacaguauuuc

SEQ ID NO: 3493970 - RNA, 10 nt, Human
caucuuuaag

SEQ ID NO: 3493971 - RNA, 17 nt, Human
caucuuuauugaaauuc

SEQ ID NO: 3493972 - RNA, 21 nt, Human
caucuuuauugaaauucuauu

SEQ ID NO: 3493973 - RNA, 12 nt, Human
caucuuucacau

SEQ ID NO: 3493974 - RNA, 17 nt, Human
caucuuucaucaaucau

SEQ ID NO: 3493975 - RNA, 21 nt, Human
caucuuucaucaaucauugua

SEQ ID NO: 3493976 - RNA, 14 nt, Human
caucuuucccuccu

SEQ ID NO: 3493977 - RNA, 16 nt, Human
caucuuucccuccuug

SEQ ID NO: 3493978 - RNA, 17 nt, Human
caucuuucccuccuugg

SEQ ID NO: 3493979 - RNA, 21 nt, Human
caucuuucccuccuuggugau

SEQ ID NO: 3493980 - RNA, 17 nt, Human
ccugccaccuggacccc

SEQ ID NO: 3493981 - RNA, 21 nt, Human
ccugccaccuggaccccugca

SEQ ID NO: 3493982 - RNA, 22 nt, Human
ccugccaccuggaccccugcau

SEQ ID NO: 3493983 - RNA, 17 nt, Human
ccugccaccugucuguc

SEQ ID NO: 3493984 - RNA, 12 nt, Human
ccugccacucac

SEQ ID NO: 3493985 - RNA, 17 nt, Human
ccugccacucacacagc

SEQ ID NO: 3493986 - RNA, 15 nt, Human
ccugccacucacuag

SEQ ID NO: 3493987 - RNA, 14 nt, Human
ccugccacucaggc

SEQ ID NO: 3493988 - RNA, 19 nt, Human
ccugccagacggcacccac

SEQ ID NO: 3493989 - RNA, 14 nt, Human
ccugccagagggga

SEQ ID NO: 3493990 - RNA, 18 nt, Human
ccugccagaggggaagga

SEQ ID NO: 3493991 - RNA, 13 nt, Human
ccugccagcaccc

SEQ ID NO: 3493992 - RNA, 12 nt, Human
ccugccagcccc

SEQ ID NO: 3493993 - RNA, 18 nt, Human
ccugccagccccacacag

SEQ ID NO: 3493994 - RNA, 16 nt, Human
ccugccagccccugcc

SEQ ID NO: 3493995 - RNA, 15 nt, Human
ccugccagccuggcu

SEQ ID NO: 3493996 - RNA, 23 nt, Human
ccugccagcugcacugaugcugc

SEQ ID NO: 3493997 - RNA, 14 nt, Human
ccugccaggaagcc

SEQ ID NO: 3493998 - RNA, 18 nt, Human
ccugccaggaagccagca

SEQ ID NO: 3493999 - RNA, 15 nt, Human
ccugccaggaggacc

SEQ ID NO: 3494000 - RNA, 13 nt, Human
ccugccaggcaca

SEQ ID NO: 3494001 - RNA, 15 nt, Human
ccugccaggcagggg

SEQ ID NO: 3494002 - RNA, 22 nt, Human
ccugccaggcaggggugggggu

SEQ ID NO: 3494003 - RNA, 14 nt, Human
ccugccagggacag

SEQ ID NO: 3494004 - RNA, 16 nt, Human
ccugccagggagacag

SEQ ID NO: 3494005 - RNA, 13 nt, Human
ccugccagggcag

SEQ ID NO: 3494006 - RNA, 15 nt, Human
ccugccaguccuagc

SEQ ID NO: 3494007 - RNA, 16 nt, Human
ccugccaguccuagcu

SEQ ID NO: 3494008 - RNA, 19 nt, Human
ccugccaguccuagcugca

SEQ ID NO: 3494009 - RNA, 20 nt, Human
ccugccaguccuagcugcac

SEQ ID NO: 3494010 - RNA, 20 nt, Human
ccugccaucauguuuacaga

SEQ ID NO: 3494011 - RNA, 18 nt, Human
ccugccaucuucccagca

SEQ ID NO: 3494012 - RNA, 16 nt, Human
ccugccaugcaagaac

SEQ ID NO: 3494013 - RNA, 21 nt, Human
ccugccauguaccuccccugc

SEQ ID NO: 3494014 - RNA, 22 nt, Human
ccugccauuguagcgucuuucu

SEQ ID NO: 3494015 - RNA, 14 nt, Human
ccugccauuuaaaa

SEQ ID NO: 3494016 - RNA, 23 nt, Human
ccugccauuugcacccuccgccu

SEQ ID NO: 3494017 - RNA, 16 nt, Human
ccugcccaagcccagg

SEQ ID NO: 3494018 - RNA, 14 nt, Human
ccugcccacacagg

SEQ ID NO: 3494019 - RNA, 22 nt, Human
ccugcccacacagguucacgug

SEQ ID NO: 3494020 - RNA, 14 nt, Human
ccugcccaccugcc

SEQ ID NO: 3494021 - RNA, 19 nt, Human
ccugcccaccugccuggcc

SEQ ID NO: 3494022 - RNA, 14 nt, Human
ccugcccaccuggc

SEQ ID NO: 3494023 - RNA, 20 nt, Human
ccugcccaccuggccucugc

SEQ ID NO: 3494024 - RNA, 19 nt, Human
ccugcccagaucagccaga

SEQ ID NO: 3494025 - RNA, 18 nt, Human
ccugcccagaucccagaa

SEQ ID NO: 3494026 - RNA, 20 nt, Human
ccugcccaggagagccagcc

SEQ ID NO: 3494027 - RNA, 14 nt, Human
ccugcccaggcccc

SEQ ID NO: 3494028 - RNA, 16 nt, Human
ccugcccaggccccug

SEQ ID NO: 3494029 - RNA, 22 nt, Human
ccugcccaggccccugccaccc

SEQ ID NO: 3494030 - RNA, 13 nt, Human
ccugcccaggccg

SEQ ID NO: 3494031 - RNA, 19 nt, Human
ccugcccagucccccaacc

SEQ ID NO: 3494032 - RNA, 22 nt, Human
ccugcccagugcacuugcugga

SEQ ID NO: 3494033 - RNA, 22 nt, Human
ccugcccaguugcacucaggug

SEQ ID NO: 3494034 - RNA, 16 nt, Human
ccugcccaugggagcu

SEQ ID NO: 3494035 - RNA, 22 nt, Human
ccugcccaugucgcgcucagca

SEQ ID NO: 3494036 - RNA, 15 nt, Human
ccugccccaacuccu

SEQ ID NO: 3494037 - RNA, 22 nt, Human
ccugccccaacuccuuccagcu

SEQ ID NO: 3494038 - RNA, 11 nt, Human
ccugccccaca

SEQ ID NO: 3494039 - RNA, 15 nt, Human
ccugccccagcccaa

SEQ ID NO: 3494040 - RNA, 17 nt, Human
ccugccccagcccaagu

SEQ ID NO: 3494041 - RNA, 12 nt, Human
ccugccccagcg

SEQ ID NO: 3494042 - RNA, 13 nt, Human
ccugccccagcgc

SEQ ID NO: 3494043 - RNA, 14 nt, Human
ccugccccaggccu

SEQ ID NO: 3494044 - RNA, 16 nt, Human
ccugccccaggccuga

SEQ ID NO: 3494045 - RNA, 16 nt, Human
ccugcccccaauccau

SEQ ID NO: 3494046 - RNA, 13 nt, Human
ccuuacuccugug

SEQ ID NO: 3494047 - RNA, 23 nt, Human
ccuuacugaccucaccuaggaag

SEQ ID NO: 3494048 - RNA, 12 nt, Human
ccuuacugcaga

SEQ ID NO: 3494049 - RNA, 18 nt, Human
ccuuacuggcuuaccucc

SEQ ID NO: 3494050 - RNA, 14 nt, Human
ccuuacuuagcaug

SEQ ID NO: 3494051 - RNA, 20 nt, Human
ccuuacuugcuucucuagcu

SEQ ID NO: 3494052 - RNA, 22 nt, Human
ccuuacuuuacugccugaauaa

SEQ ID NO: 3494053 - RNA, 19 nt, Human
ccuuacuuuguaugauauu

SEQ ID NO: 3494054 - RNA, 20 nt, Human
ccuuacuuuguaugauauuc

SEQ ID NO: 3494055 - RNA, 15 nt, Human
ccuuacuuuuuauau

SEQ ID NO: 3494056 - RNA, 20 nt, Human
ccuuagaacauuuuaauuca

SEQ ID NO: 3494057 - RNA, 20 nt, Human
ccuuagacagaggcccucaa

SEQ ID NO: 3494058 - RNA, 14 nt, Human
ccuuagacaguccc

SEQ ID NO: 3494059 - RNA, 19 nt, Human
ccuuagacagucccugcca

SEQ ID NO: 3494060 - RNA, 16 nt, Human
ccuuagaccaccaagc

SEQ ID NO: 3494061 - RNA, 16 nt, Human
ccuuagaccuuccaua

SEQ ID NO: 3494062 - RNA, 20 nt, Human
ccuuagacucuuuuccuucc

SEQ ID NO: 3494063 - RNA, 18 nt, Human
ccuuagagccaggcacac

SEQ ID NO: 3494064 - RNA, 20 nt, Human
ccuuagagguccucuggagc

SEQ ID NO: 3494065 - RNA, 20 nt, Human
ccuuagcacuaccacuccug

SEQ ID NO: 3494066 - RNA, 19 nt, Human
ccuuagcagggaaacagcu

SEQ ID NO: 3494067 - RNA, 16 nt, Human
ccuuagcauguuugcu

SEQ ID NO: 3494068 - RNA, 19 nt, Human
ccuuagcauguuugcugaa

SEQ ID NO: 3494069 - RNA, 10 nt, Human
ccuuagccag

SEQ ID NO: 3494070 - RNA, 15 nt, Human
ccuuagcccccaccc

SEQ ID NO: 3494071 - RNA, 18 nt, Human
ccuuagcccccacccacu

SEQ ID NO: 3494072 - RNA, 15 nt, Human
ccuuagccucccuga

SEQ ID NO: 3494073 - RNA, 21 nt, Human
ccuuagccuggaccucugaca

SEQ ID NO: 3494074 - RNA, 11 nt, Human
ccuuagcugcc

SEQ ID NO: 3494075 - RNA, 18 nt, Human
ccuuagcuuagaccucag

SEQ ID NO: 3494076 - RNA, 19 nt, Human
ccuuagcuuagaccucagc

SEQ ID NO: 3494077 - RNA, 20 nt, Human
ccuuagcuuagaccucagcc

SEQ ID NO: 3494078 - RNA, 16 nt, Human
ccuuagcuucaggaac

SEQ ID NO: 3494079 - RNA, 17 nt, Human
ccuuagcuucaggaacc

SEQ ID NO: 3494080 - RNA, 19 nt, Human
ccuuagcuucaggaaccuc

SEQ ID NO: 3494081 - RNA, 22 nt, Human
ccuuaggccacaugggagcagu

SEQ ID NO: 3494082 - RNA, 14 nt, Human
ccuuaggccuuccu

SEQ ID NO: 3494083 - RNA, 23 nt, Human
ccuuaggccuuccucucuccaga

SEQ ID NO: 3494084 - RNA, 20 nt, Human
ccuuagguuuuuuuccuucu

SEQ ID NO: 3494085 - RNA, 14 nt, Human
ccuuaguacugagu

SEQ ID NO: 3494086 - RNA, 22 nt, Human
ccuuagucccccaacucugagc

SEQ ID NO: 3494087 - RNA, 14 nt, Human
ccuuagucucaguu

SEQ ID NO: 3494088 - RNA, 19 nt, Human
ccuuagugggccagggcug

SEQ ID NO: 3494089 - RNA, 19 nt, Human
ccuuauaguuugggcuuca

SEQ ID NO: 3494090 - RNA, 13 nt, Human
ccuuaucaaagga

SEQ ID NO: 3494091 - RNA, 12 nt, Human
ccuuaucaagug

SEQ ID NO: 3494092 - RNA, 13 nt, Human
ccuuaucaagugu

SEQ ID NO: 3494093 - RNA, 17 nt, Human
ccuuaucaccagcugcc

SEQ ID NO: 3494094 - RNA, 20 nt, Human
ccuuaucaccagcugccucu

SEQ ID NO: 3494095 - RNA, 17 nt, Human
ccuuaucauucauucuu

SEQ ID NO: 3494096 - RNA, 17 nt, Human
ccuuauccucccuguaa

SEQ ID NO: 3494097 - RNA, 19 nt, Human
ccuuauccucccuguaacu

SEQ ID NO: 3494098 - RNA, 15 nt, Human
ccuuauccucugauc

SEQ ID NO: 3494099 - RNA, 16 nt, Human
ccuuauccuucaucuu

SEQ ID NO: 3494100 - RNA, 14 nt, Human
ccuuauccuuccuc

SEQ ID NO: 3494101 - RNA, 16 nt, Human
ccuuaucuccaagacc

SEQ ID NO: 3494102 - RNA, 22 nt, Human
ccuuaucuccaagaccagagau

SEQ ID NO: 3494103 - RNA, 21 nt, Human
ccuuaucugugcgugaaacac

SEQ ID NO: 3494104 - RNA, 17 nt, Human
ccuuaugacugccaaga

SEQ ID NO: 3494105 - RNA, 18 nt, Human
ccuuauggaacacucuga

SEQ ID NO: 3494106 - RNA, 20 nt, Human
ccuuauggaacacucugaga

SEQ ID NO: 3494107 - RNA, 22 nt, Human
ccuuauuacacggaaaacggug

SEQ ID NO: 3494108 - RNA, 16 nt, Human
ccuuauuagagugucu

SEQ ID NO: 3494109 - RNA, 21 nt, Human
ccuuauuagagugucuuucca

SEQ ID NO: 3494110 - RNA, 19 nt, Human
ccuuauugcuguccuggag

SEQ ID NO: 3494111 - RNA, 16 nt, Human
ccuuauuguacguuua

SEQ ID NO: 3494112 - RNA, 22 nt, Human
ccuuauuugcuaaucaaagcca

SEQ ID NO: 3494113 - RNA, 15 nt, Human
ccuuauuuuuuccca

SEQ ID NO: 3494114 - RNA, 14 nt, Human
ccuucaacaaggcu

SEQ ID NO: 3494115 - RNA, 19 nt, Human
ccuucaacaaggcuugcug

SEQ ID NO: 3494116 - RNA, 23 nt, Human
ccuucaacaaggcuugcugcaga

SEQ ID NO: 3494117 - RNA, 18 nt, Human
ccuucaagaaaacaggca

SEQ ID NO: 3494118 - RNA, 19 nt, Human
ccuucaagaacucugggcu

SEQ ID NO: 3494119 - RNA, 23 nt, Human
ccuucaagaucauguaccccaau

SEQ ID NO: 3494120 - RNA, 16 nt, Human
ccuucaagcucugagg

SEQ ID NO: 3494121 - RNA, 21 nt, Human
ccuucaagcucugagggaaag

SEQ ID NO: 3494122 - RNA, 14 nt, Human
ccuucaauuccugg

SEQ ID NO: 3494123 - RNA, 20 nt, Human
ccuucaauuccugggcccca

SEQ ID NO: 3494124 - RNA, 21 nt, Human
ccuucacauuccccuggggac

SEQ ID NO: 3494125 - RNA, 16 nt, Human
ccuucacauuuuuuau

SEQ ID NO: 3494126 - RNA, 14 nt, Human
ccuucaccucugaa

SEQ ID NO: 3494127 - RNA, 20 nt, Human
ccuucacuccggugugccug

SEQ ID NO: 3494128 - RNA, 14 nt, Human
ccuucacuuaggaa

SEQ ID NO: 3494129 - RNA, 10 nt, Human
ccuucagaca

SEQ ID NO: 3494130 - RNA, 13 nt, Human
ccuucagagagca

SEQ ID NO: 3494131 - RNA, 11 nt, Human
ccuucagaggc

SEQ ID NO: 3494132 - RNA, 13 nt, Human
ccuucagauccua

SEQ ID NO: 3494133 - RNA, 14 nt, Human
ccuucagauccuac

SEQ ID NO: 3494134 - RNA, 17 nt, Human
ccuucagcccccagccc

SEQ ID NO: 3494135 - RNA, 13 nt, Human
ccuucagcccuca

SEQ ID NO: 3494136 - RNA, 18 nt, Human
ccuucagcccucaccccu

SEQ ID NO: 3494137 - RNA, 12 nt, Human
ccuucagccuga

SEQ ID NO: 3494138 - RNA, 12 nt, Human
ccuucagcucca

SEQ ID NO: 3494139 - RNA, 23 nt, Human
ccuucaguacccucucagcucca

SEQ ID NO: 3494140 - RNA, 12 nt, Human
ccuucagugccc

SEQ ID NO: 3494141 - RNA, 15 nt, Human
ccuucagugcccacc

SEQ ID NO: 3494142 - RNA, 12 nt, Human
ccuucagugccu

SEQ ID NO: 3494143 - RNA, 17 nt, Human
ccuucaguuuuuguguu

SEQ ID NO: 3494144 - RNA, 18 nt, Human
ccuucauaucauccacac

SEQ ID NO: 3494145 - RNA, 23 nt, Human
ccuucauaugaaaggugccaugg

SEQ ID NO: 3494146 - RNA, 14 nt, Human
ccuucaucuccagg

SEQ ID NO: 3494147 - RNA, 13 nt, Human
ccuucaucuggaa

SEQ ID NO: 3494148 - RNA, 17 nt, Human
ccuucaucuuccugugu

SEQ ID NO: 3494149 - RNA, 18 nt, Human
ccuucaugacagccucca

SEQ ID NO: 3494150 - RNA, 23 nt, Human
ccuucauucugcaaguauacuag

SEQ ID NO: 3494151 - RNA, 21 nt, Human
ccuucauugauuuccuguguc

SEQ ID NO: 3494152 - RNA, 22 nt, Human
ccuucauugauuuccuguguca

SEQ ID NO: 3494153 - RNA, 14 nt, Human
ccuucauuuccucc

SEQ ID NO: 3494154 - RNA, 15 nt, Human
ccuucauuuccuccg

SEQ ID NO: 3494155 - RNA, 22 nt, Human
ccuucauuuggcauuccccacu

SEQ ID NO: 3494156 - RNA, 17 nt, Human
ccuuccaaauaauaaag

SEQ ID NO: 3494157 - RNA, 17 nt, Human
ccuuccaagagccugag

SEQ ID NO: 3494158 - RNA, 20 nt, Human
ccuuccaaugucuggagacc

SEQ ID NO: 3494159 - RNA, 17 nt, Human
ccuuccaccugcucugc

SEQ ID NO: 3494160 - RNA, 19 nt, Human
ccuuccaccugcucugcug

SEQ ID NO: 3494161 - RNA, 17 nt, Human
ccuuccacugagggcag

SEQ ID NO: 3494162 - RNA, 13 nt, Human
ccuuccacugccu

SEQ ID NO: 3494163 - RNA, 17 nt, Human
ccuuccacugccucugc

SEQ ID NO: 3494164 - RNA, 14 nt, Human
ccuuccagaaaaca

SEQ ID NO: 3494165 - RNA, 20 nt, Human
ccuuccagaucacugccaca

SEQ ID NO: 3494166 - RNA, 19 nt, Human
ccuuccagauccucucugg

SEQ ID NO: 3494167 - RNA, 16 nt, Human
ccuuccagcacccugc

SEQ ID NO: 3494168 - RNA, 23 nt, Human
ccuuccagcuagugacccacaug

SEQ ID NO: 3494169 - RNA, 12 nt, Human
ccuuccagcucc

SEQ ID NO: 3494170 - RNA, 16 nt, Human
ccuuccagcuccugua

SEQ ID NO: 3494171 - RNA, 14 nt, Human
ccuuccagcugcug

SEQ ID NO: 3494172 - RNA, 13 nt, Human
ccuuccaggccau

SEQ ID NO: 3494173 - RNA, 15 nt, Human
ccuuccagggguggg

SEQ ID NO: 3494174 - RNA, 15 nt, Human
ccuuccauaauuaug

SEQ ID NO: 3494175 - RNA, 18 nt, Human
ccuuccaugucgccucug

SEQ ID NO: 3494176 - RNA, 13 nt, Human
ccuuccauuccac

SEQ ID NO: 3494177 - RNA, 10 nt, Human
ccuucccaaa

SEQ ID NO: 3494178 - RNA, 18 nt, Human
ccuucccaaaggacucca

SEQ ID NO: 3494179 - RNA, 23 nt, Human
ccuucccaagugagucucucugg

SEQ ID NO: 3494180 - RNA, 16 nt, Human
ccuggcugcccuggcc

SEQ ID NO: 3494181 - RNA, 17 nt, Human
ccuggcugcccuggccc

SEQ ID NO: 3494182 - RNA, 19 nt, Human
ccuggcugcccuggcccug

SEQ ID NO: 3494183 - RNA, 13 nt, Human
ccuggcugcugcc

SEQ ID NO: 3494184 - RNA, 15 nt, Human
ccuggcugcugcccc

SEQ ID NO: 3494185 - RNA, 21 nt, Human
ccuggcugcugcccccacccc

SEQ ID NO: 3494186 - RNA, 17 nt, Human
ccuggcuggcugagggc

SEQ ID NO: 3494187 - RNA, 20 nt, Human
ccuggcuggcugagggcagu

SEQ ID NO: 3494188 - RNA, 21 nt, Human
ccuggcugggacguggcucag

SEQ ID NO: 3494189 - RNA, 22 nt, Human
ccuggcugggacguggcucagc

SEQ ID NO: 3494190 - RNA, 21 nt, Human
ccuggcuguucugugguuccu

SEQ ID NO: 3494191 - RNA, 22 nt, Human
cauggcugccaaugggagcuca

SEQ ID NO: 3494192 - RNA, 23 nt, Human
cauggcugggaacugcagaccug

SEQ ID NO: 3494193 - RNA, 17 nt, Human
cauggcuuaauguuuau

SEQ ID NO: 3494194 - RNA, 16 nt, Human
cauggcuuccuccucc

SEQ ID NO: 3494195 - RNA, 18 nt, Human
cauggcuuccuccucccu

SEQ ID NO: 3494196 - RNA, 15 nt, Human
cauggcuuccuccug

SEQ ID NO: 3494197 - RNA, 13 nt, Human
cauggcuucugaa

SEQ ID NO: 3494198 - RNA, 19 nt, Human
cauggcuucugaaccuguc

SEQ ID NO: 3494199 - RNA, 22 nt, Human
cauggcuucugaaccugucuuu

SEQ ID NO: 3494200 - RNA, 15 nt, Human
cauggcuugccacag

SEQ ID NO: 3494201 - RNA, 19 nt, Human
cauggcuugccacagcucu

SEQ ID NO: 3494202 - RNA, 22 nt, Human
cauggcuuucagaaaacgggaa

SEQ ID NO: 3494203 - RNA, 18 nt, Human
caugggaaagccaccucu

SEQ ID NO: 3494204 - RNA, 13 nt, Human
caugggaaaggag

SEQ ID NO: 3494205 - RNA, 22 nt, Human
caugggaaaggaggcaugccuc

SEQ ID NO: 3494206 - RNA, 18 nt, Human
caugggaaaggggaaguu

SEQ ID NO: 3494207 - RNA, 18 nt, Human
caugggaaaguauucucu

SEQ ID NO: 3494208 - RNA, 15 nt, Human
caugggaaugaaugu

SEQ ID NO: 3494209 - RNA, 16 nt, Human
caugggaaugaauguc

SEQ ID NO: 3494210 - RNA, 19 nt, Human
caugggaggccuuucccua

SEQ ID NO: 3494211 - RNA, 14 nt, Human
caugggaggcucac

SEQ ID NO: 3494212 - RNA, 20 nt, Human
caugggagggagcugagaag

SEQ ID NO: 3494213 - RNA, 18 nt, Human
caugggauacaaccuccc

SEQ ID NO: 3494214 - RNA, 21 nt, Human
caugggauacaaccucccucu

SEQ ID NO: 3494215 - RNA, 16 nt, Human
caugggcacugcuggg

SEQ ID NO: 3494216 - RNA, 17 nt, Human
caugggcccaggaaugc

SEQ ID NO: 3494217 - RNA, 16 nt, Human
caugggccccucugac

SEQ ID NO: 3494218 - RNA, 19 nt, Human
caugggccccucugacucc

SEQ ID NO: 3494219 - RNA, 15 nt, Human
caugggccuccugug

SEQ ID NO: 3494220 - RNA, 16 nt, Human
caugggccuccugugu

SEQ ID NO: 3494221 - RNA, 13 nt, Human
caugggccuggcc

SEQ ID NO: 3494222 - RNA, 13 nt, Human
caugggcucugac

SEQ ID NO: 3494223 - RNA, 13 nt, Human
caugggcucuuca

SEQ ID NO: 3494224 - RNA, 13 nt, Human
caugggcuucacu

SEQ ID NO: 3494225 - RNA, 14 nt, Human
caugggcuucacug

SEQ ID NO: 3494226 - RNA, 23 nt, Human
caugggcuucacuguauaaauag

SEQ ID NO: 3494227 - RNA, 18 nt, Human
cauggggaaaaaaaucau

SEQ ID NO: 3494228 - RNA, 20 nt, Human
cauggggaaaaaaaucaucu

SEQ ID NO: 3494229 - RNA, 21 nt, Human
cauggggaaaaaaaucaucua

SEQ ID NO: 3494230 - RNA, 18 nt, Human
cauggggaggaggagggu

SEQ ID NO: 3494231 - RNA, 23 nt, Human
cauggggagggauucugguucca

SEQ ID NO: 3494232 - RNA, 19 nt, Human
caugggggagggggcagaa

SEQ ID NO: 3494233 - RNA, 19 nt, Human
caugggggcagggcaugac

SEQ ID NO: 3494234 - RNA, 23 nt, Human
cauggggggagcacccugagggc

SEQ ID NO: 3494235 - RNA, 20 nt, Human
cauggggguauuauccauuc

SEQ ID NO: 3494236 - RNA, 15 nt, Human
caugggguaggagga

SEQ ID NO: 3494237 - RNA, 20 nt, Human
caugggguuggcugggccca

SEQ ID NO: 3494238 - RNA, 16 nt, Human
cauggguagccugggu

SEQ ID NO: 3494239 - RNA, 16 nt, Human
caugggucagugccca

SEQ ID NO: 3494240 - RNA, 19 nt, Human
caugggucgcccaugagag

SEQ ID NO: 3494241 - RNA, 19 nt, Human
caugggugaagggagagcc

SEQ ID NO: 3494242 - RNA, 22 nt, Human
caugggugaagggagagccagc

SEQ ID NO: 3494243 - RNA, 23 nt, Human
caugggugaagggagagccagcu

SEQ ID NO: 3494244 - RNA, 23 nt, Human
cauggguuauguguaugugccau

SEQ ID NO: 3494245 - RNA, 21 nt, Human
cauggguuuuguagguacuuu

SEQ ID NO: 3494246 - RNA, 15 nt, Human
caugguaccagcccu

SEQ ID NO: 3494247 - RNA, 16 nt, Human
caugguaccagcccug

SEQ ID NO: 3494248 - RNA, 17 nt, Human
cauggucaacccucagg

SEQ ID NO: 3494249 - RNA, 14 nt, Human
cauggucacacacu

SEQ ID NO: 3494250 - RNA, 17 nt, Human
cauggucacacacugau

SEQ ID NO: 3494251 - RNA, 21 nt, Human
cauggucacacacugaugcuu

SEQ ID NO: 3494252 - RNA, 14 nt, Human
cauggucacagaga

SEQ ID NO: 3494253 - RNA, 14 nt, Human
caugguccauucuc

SEQ ID NO: 3494254 - RNA, 16 nt, Human
cauggucccacauccc

SEQ ID NO: 3494255 - RNA, 18 nt, Human
cauggucccacaucccug

SEQ ID NO: 3494256 - RNA, 21 nt, Human
cauggucccacaucccugggc

SEQ ID NO: 3494257 - RNA, 16 nt, Human
cauggucugcccucug

SEQ ID NO: 3494258 - RNA, 16 nt, Human
cauggugaauuaauca

SEQ ID NO: 3494259 - RNA, 15 nt, Human
cauggugcugggaga

SEQ ID NO: 3494260 - RNA, 22 nt, Human
cauggugcugggagaggcagcc

SEQ ID NO: 3494261 - RNA, 12 nt, Human
caugguggcgca

SEQ ID NO: 3494262 - RNA, 20 nt, Human
caugguggcgcaagccugua

SEQ ID NO: 3494263 - RNA, 23 nt, Human
caugguggggucuccucaggacc

SEQ ID NO: 3494264 - RNA, 19 nt, Human
caugguggguucaggggac

SEQ ID NO: 3494265 - RNA, 15 nt, Human
caugguguaauaaga

SEQ ID NO: 3494266 - RNA, 16 nt, Human
caugguguaauaagac

SEQ ID NO: 3494267 - RNA, 22 nt, Human
cauggugugaaagucagaugcc

SEQ ID NO: 3494268 - RNA, 14 nt, Human
caugguguguuaca

SEQ ID NO: 3494269 - RNA, 13 nt, Human
caugguuaagagu

SEQ ID NO: 3494270 - RNA, 19 nt, Human
caugguuaagaguccaaga

SEQ ID NO: 3494271 - RNA, 16 nt, Human
caugguuugacucugg

SEQ ID NO: 3494272 - RNA, 16 nt, Human
caugguuuggagcuga

SEQ ID NO: 3494273 - RNA, 19 nt, Human
caugguuuugugccaucug

SEQ ID NO: 3494274 - RNA, 13 nt, Human
cauguaaaacaaa

SEQ ID NO: 3494275 - RNA, 15 nt, Human
cauguaaaacaaaaa

SEQ ID NO: 3494276 - RNA, 18 nt, Human
cauguaaaacaaaaaaca

SEQ ID NO: 3494277 - RNA, 19 nt, Human
cauguaaaacaaaaaacaa

SEQ ID NO: 3494278 - RNA, 15 nt, Human
cauguaaaacagaaa

SEQ ID NO: 3494279 - RNA, 18 nt, Human
cauguaaacaaaauuuag

SEQ ID NO: 3494280 - RNA, 15 nt, Human
cauguaaacugugca

SEQ ID NO: 3494281 - RNA, 16 nt, Human
cauguaaacugugcac

SEQ ID NO: 3494282 - RNA, 21 nt, Human
cauguaaagaaaugucuuaau

SEQ ID NO: 3494283 - RNA, 17 nt, Human
cauguaaagugucagaa

SEQ ID NO: 3494284 - RNA, 21 nt, Human
cauguaaauccccacugggac

SEQ ID NO: 3494285 - RNA, 16 nt, Human
cauguaaauuaccagu

SEQ ID NO: 3494286 - RNA, 15 nt, Human
cauguaacagaaagg

SEQ ID NO: 3494287 - RNA, 19 nt, Human
cauguaacgaaacacuuca

SEQ ID NO: 3494288 - RNA, 19 nt, Human
cauguaacgcaaguuccca

SEQ ID NO: 3494289 - RNA, 20 nt, Human
cauguaacgcaaguucccag

SEQ ID NO: 3494290 - RNA, 15 nt, Human
cauguaacugccuag

SEQ ID NO: 3494291 - RNA, 16 nt, Human
cauguaacugccuaga

SEQ ID NO: 3494292 - RNA, 20 nt, Human
cauguaacugccuagaaaca

SEQ ID NO: 3494293 - RNA, 18 nt, Human
cauguaagcugaaaauau

SEQ ID NO: 3494294 - RNA, 21 nt, Human
cauguaauaaaaaguauaugu

SEQ ID NO: 3494295 - RNA, 21 nt, Human
cauguaauuaaguacuaugua

SEQ ID NO: 3494296 - RNA, 23 nt, Human
cauguacaaaaucgauuggcuuu

SEQ ID NO: 3494297 - RNA, 13 nt, Human
cauguacagagaa

SEQ ID NO: 3494298 - RNA, 15 nt, Human
cauguacaguguucu

SEQ ID NO: 3494299 - RNA, 15 nt, Human
cauguacaugaagaa

SEQ ID NO: 3494300 - RNA, 17 nt, Human
cauguacauuuggaacu

SEQ ID NO: 3494301 - RNA, 13 nt, Human
cauguaccccaau

SEQ ID NO: 3494302 - RNA, 19 nt, Human
cauguaccuccccugccuu

SEQ ID NO: 3494303 - RNA, 20 nt, Human
cauguaccuccccugccuug

SEQ ID NO: 3494304 - RNA, 15 nt, Human
cauguacuaucuuau

SEQ ID NO: 3494305 - RNA, 21 nt, Human
cauguacuaucuuaucucaga

SEQ ID NO: 3494306 - RNA, 23 nt, Human
cauguacugagccuuguaauucu

SEQ ID NO: 3494307 - RNA, 15 nt, Human
cauguacugcauuau

SEQ ID NO: 3494308 - RNA, 16 nt, Human
cauguacugcauuauu

SEQ ID NO: 3494309 - RNA, 22 nt, Human
cauguacugcauuauuugagaa

SEQ ID NO: 3494310 - RNA, 23 nt, Human
cauguacugcauuauuugagaag

SEQ ID NO: 3494311 - RNA, 12 nt, Human
cauguagagaaa

SEQ ID NO: 3494312 - RNA, 16 nt, Human
cauguagagaaaagca

SEQ ID NO: 3494313 - RNA, 23 nt, Human
cauguagcaaucagauuuuccug

SEQ ID NO: 3494314 - RNA, 20 nt, Human
cauguagcaggacugaauug

SEQ ID NO: 3494315 - RNA, 15 nt, Human
cauguagcagugagu

SEQ ID NO: 3494316 - RNA, 19 nt, Human
cauguagcagugagucaua

SEQ ID NO: 3494317 - RNA, 20 nt, Human
cauguagcccccuggccucu

SEQ ID NO: 3494318 - RNA, 21 nt, Human
cauguagcccccuggccucug

SEQ ID NO: 3494319 - RNA, 22 nt, Human
cauguagcccccuggccucugu

SEQ ID NO: 3494320 - RNA, 14 nt, Human
cauguagcugaguu

SEQ ID NO: 3494321 - RNA, 16 nt, Human
cauguaguaacacuaa

SEQ ID NO: 3494322 - RNA, 20 nt, Human
cauguaguaucaaauauuag

SEQ ID NO: 3494323 - RNA, 17 nt, Human
cauguauaguugcuuuu

SEQ ID NO: 3494324 - RNA, 15 nt, Human
cauguaucauaauua

SEQ ID NO: 3494325 - RNA, 21 nt, Human
cauguaucccaacuccuauaa

SEQ ID NO: 3494326 - RNA, 23 nt, Human
cauguaucuaugcauuuucugga

SEQ ID NO: 3494327 - RNA, 22 nt, Human
cauguaugucagaagugcagaa

SEQ ID NO: 3494328 - RNA, 17 nt, Human
cauguaugucuuggaca

SEQ ID NO: 3494329 - RNA, 15 nt, Human
cauguauuauuucau

SEQ ID NO: 3494330 - RNA, 15 nt, Human
cauguauugugucuu

SEQ ID NO: 3494331 - RNA, 21 nt, Human
cauguauugugucuuuugcau

SEQ ID NO: 3494332 - RNA, 15 nt, Human
cauguauuuaucucu

SEQ ID NO: 3494333 - RNA, 23 nt, Human
cauguauuuaucucuauuuaaua

SEQ ID NO: 3494334 - RNA, 13 nt, Human
cucagauggcagc

SEQ ID NO: 3494335 - RNA, 16 nt, Human
cucagauggcagcuuu

SEQ ID NO: 3494336 - RNA, 17 nt, Human
cucagauggcagcuuuu

SEQ ID NO: 3494337 - RNA, 21 nt, Human
cucagauggcagcuuuuaaaa

SEQ ID NO: 3494338 - RNA, 17 nt, Human
cucagauuauuuuuccu

SEQ ID NO: 3494339 - RNA, 16 nt, Human
cucagauuccuuccca

SEQ ID NO: 3494340 - RNA, 17 nt, Human
cucagauuccuucccau

SEQ ID NO: 3494341 - RNA, 24 nt, Human
cucagauuccuucccauggaggga

SEQ ID NO: 3494342 - RNA, 17 nt, Human
cucagauuucugaggaa

SEQ ID NO: 3494343 - RNA, 17 nt, Human
cucagauuuuauuaugu

SEQ ID NO: 3494344 - RNA, 18 nt, Human
cucagauuuuauuaugua

SEQ ID NO: 3494345 - RNA, 15 nt, Human
cucagcaaccuguaa

SEQ ID NO: 3494346 - RNA, 18 nt, Human
cucagcaaggccaccucu

SEQ ID NO: 3494347 - RNA, 21 nt, Human
cucagcaaggccaccucuucc

SEQ ID NO: 3494348 - RNA, 14 nt, Human
cucagcacaaggcc

SEQ ID NO: 3494349 - RNA, 20 nt, Human
cucagcacaaggccaucugg

SEQ ID NO: 3494350 - RNA, 16 nt, Human
cucagcaccacucaag

SEQ ID NO: 3494351 - RNA, 17 nt, Human
cucagcaccacucaaga

SEQ ID NO: 3494352 - RNA, 18 nt, Human
cucagcacccccuucucu

SEQ ID NO: 3494353 - RNA, 15 nt, Human
cucagcaccccuucc

SEQ ID NO: 3494354 - RNA, 17 nt, Human
cucagcaccccuuccau

SEQ ID NO: 3494355 - RNA, 15 nt, Human
cucagcacugccugc

SEQ ID NO: 3494356 - RNA, 19 nt, Human
cucagcacugccugcuccc

SEQ ID NO: 3494357 - RNA, 12 nt, Human
cucagcacuugg

SEQ ID NO: 3494358 - RNA, 13 nt, Human
cucagcacuuggc

SEQ ID NO: 3494359 - RNA, 15 nt, Human
cucagcacuuggccc

SEQ ID NO: 3494360 - RNA, 17 nt, Human
cucagcagcccuccuca

SEQ ID NO: 3494361 - RNA, 18 nt, Human
cucagcagcgaccacccc

SEQ ID NO: 3494362 - RNA, 21 nt, Human
cucagcagcgaccaccccugc

SEQ ID NO: 3494363 - RNA, 12 nt, Human
cucagcauaccu

SEQ ID NO: 3494364 - RNA, 16 nt, Human
cucagcauauuuguau

SEQ ID NO: 3494365 - RNA, 18 nt, Human
cucagcauauuuguauag

SEQ ID NO: 3494366 - RNA, 20 nt, Human
cucagcaucaaaauauuuca

SEQ ID NO: 3494367 - RNA, 13 nt, Human
cucagcauccugg

SEQ ID NO: 3494368 - RNA, 21 nt, Human
cucagcauccuggcacccggc

SEQ ID NO: 3494369 - RNA, 20 nt, Human
cucagccaagcacaguggug

SEQ ID NO: 3494370 - RNA, 23 nt, Human
cucagccaagcacagugguggca

SEQ ID NO: 3494371 - RNA, 13 nt, Human
cucagccaagcuu

SEQ ID NO: 3494372 - RNA, 18 nt, Human
cucagccacccugaguug

SEQ ID NO: 3494373 - RNA, 16 nt, Human
cucagccagccccauc

SEQ ID NO: 3494374 - RNA, 11 nt, Human
cucagcccacc

SEQ ID NO: 3494375 - RNA, 17 nt, Human
cucagcccaccccccuc

SEQ ID NO: 3494376 - RNA, 18 nt, Human
cucagccccagcccagcc

SEQ ID NO: 3494377 - RNA, 19 nt, Human
cucagccccucuugccccc

SEQ ID NO: 3494378 - RNA, 20 nt, Human
cucagccccugauccuguga

SEQ ID NO: 3494379 - RNA, 18 nt, Human
cucagcccucacacaccc

SEQ ID NO: 3494380 - RNA, 21 nt, Human
cucagcccucccugccccucc

SEQ ID NO: 3494381 - RNA, 18 nt, Human
cucagcccugacuggugc

SEQ ID NO: 3494382 - RNA, 12 nt, Human
cucagcccugag

SEQ ID NO: 3494383 - RNA, 13 nt, Human
cucagcccugagg

SEQ ID NO: 3494384 - RNA, 16 nt, Human
cucagcccugaggaca

SEQ ID NO: 3494385 - RNA, 15 nt, Human
cucagcccugaggug

SEQ ID NO: 3494386 - RNA, 20 nt, Human
cucagcccugcaccaugcug

SEQ ID NO: 3494387 - RNA, 14 nt, Human
cucagcccuggagg

SEQ ID NO: 3494388 - RNA, 19 nt, Human
cucagcccuggaggugcca

SEQ ID NO: 3494389 - RNA, 15 nt, Human
cucagcccugggccc

SEQ ID NO: 3494390 - RNA, 19 nt, Human
cucagccucccgaauagcu

SEQ ID NO: 3494391 - RNA, 21 nt, Human
cucagccucccgaauagcugg

SEQ ID NO: 3494392 - RNA, 22 nt, Human
cucagccucccgaauagcuggg

SEQ ID NO: 3494393 - RNA, 17 nt, Human
cucagccuccucaucug

SEQ ID NO: 3494394 - RNA, 13 nt, Human
cucagccuccuga

SEQ ID NO: 3494395 - RNA, 14 nt, Human
cucagccuccugag

SEQ ID NO: 3494396 - RNA, 22 nt, Human
cucagccuccugaguagcugga

SEQ ID NO: 3494397 - RNA, 15 nt, Human
cucagccuccugugu

SEQ ID NO: 3494398 - RNA, 21 nt, Human
cucagccucuccccugccugc

SEQ ID NO: 3494399 - RNA, 19 nt, Human
cucagccugaaccccaggg

SEQ ID NO: 3494400 - RNA, 11 nt, Human
cucagccugca

SEQ ID NO: 3494401 - RNA, 16 nt, Human
cucagccugcugccca

SEQ ID NO: 3494402 - RNA, 19 nt, Human
cucagccugcugcccaggc

SEQ ID NO: 3494403 - RNA, 15 nt, Human
cucagccugggcgcu

SEQ ID NO: 3494404 - RNA, 21 nt, Human
cucagccugggcgcugguccu

SEQ ID NO: 3494405 - RNA, 12 nt, Human
cucagccuggug

SEQ ID NO: 3494406 - RNA, 16 nt, Human
cucagccuuacauuug

SEQ ID NO: 3494407 - RNA, 16 nt, Human
cucagccuucagacag

SEQ ID NO: 3494408 - RNA, 17 nt, Human
cucagccuucagacaga

SEQ ID NO: 3494409 - RNA, 19 nt, Human
cucagccuucagacagaga

SEQ ID NO: 3494410 - RNA, 19 nt, Human
cucagccuugccagagauc

SEQ ID NO: 3494411 - RNA, 15 nt, Human
cucagccuuggauaa

SEQ ID NO: 3494412 - RNA, 15 nt, Human
cucagcggggacagc

SEQ ID NO: 3494413 - RNA, 16 nt, Human
cucagcggggacagcu

SEQ ID NO: 3494414 - RNA, 23 nt, Human
cucagcguuuuuuuguuuuuaau

SEQ ID NO: 3494415 - RNA, 21 nt, Human
cucagcuacccacuauccuuc

SEQ ID NO: 3494416 - RNA, 13 nt, Human
cucagcucagcgc

SEQ ID NO: 3494417 - RNA, 15 nt, Human
cucagcucagcgcca

SEQ ID NO: 3494418 - RNA, 15 nt, Human
cucagcucccaaggc

SEQ ID NO: 3494419 - RNA, 13 nt, Human
cucagcucccaca

SEQ ID NO: 3494420 - RNA, 20 nt, Human
cucagcucccacaagccucu

SEQ ID NO: 3494421 - RNA, 22 nt, Human
cucagcucccacaagccucugc

SEQ ID NO: 3494422 - RNA, 17 nt, Human
cucagcucccauuucua

SEQ ID NO: 3494423 - RNA, 14 nt, Human
cucagcuccccaga

SEQ ID NO: 3494424 - RNA, 12 nt, Human
cucagcuccccc

SEQ ID NO: 3494425 - RNA, 17 nt, Human
cucagcucccccugucc

SEQ ID NO: 3494426 - RNA, 15 nt, Human
cucagcucggcucag

SEQ ID NO: 3494427 - RNA, 19 nt, Human
cuaugcauggugccccagg

SEQ ID NO: 3494428 - RNA, 15 nt, Human
cuaugcaugguuuca

SEQ ID NO: 3494429 - RNA, 21 nt, Human
cuaugcaugguuucagcacua

SEQ ID NO: 3494430 - RNA, 12 nt, Human
cuaugcauuuga

SEQ ID NO: 3494431 - RNA, 14 nt, Human
cuaugcauuugaaa

SEQ ID NO: 3494432 - RNA, 15 nt, Human
cuaugccaaagauca

SEQ ID NO: 3494433 - RNA, 22 nt, Human
cuaugccaaagaucacuuguug

SEQ ID NO: 3494434 - RNA, 19 nt, Human
cuaugccagcucaguccca

SEQ ID NO: 3494435 - RNA, 16 nt, Human
cuaugccucucuacag

SEQ ID NO: 3494436 - RNA, 19 nt, Human
cuaugcuauugacaauaaa

SEQ ID NO: 3494437 - RNA, 20 nt, Human
cuaugcuauugacaauaaaa

SEQ ID NO: 3494438 - RNA, 21 nt, Human
cuaugcuauugacaauaaaau

SEQ ID NO: 3494439 - RNA, 18 nt, Human
cuaugcugaguuugugcu

SEQ ID NO: 3494440 - RNA, 15 nt, Human
cuaugcugcuuuuau

SEQ ID NO: 3494441 - RNA, 15 nt, Human
cuaugcuguaucugu

SEQ ID NO: 3494442 - RNA, 17 nt, Human
cuauggaagcauauugu

SEQ ID NO: 3494443 - RNA, 14 nt, Human
cuauggacacaggg

SEQ ID NO: 3494444 - RNA, 19 nt, Human
cuauggagagcccugggac

SEQ ID NO: 3494445 - RNA, 21 nt, Human
cuauggagagcccugggaccg

SEQ ID NO: 3494446 - RNA, 10 nt, Human
cuauggaugu

SEQ ID NO: 3494447 - RNA, 23 nt, Human
cuauggcagaaaaaaugucugua

SEQ ID NO: 3494448 - RNA, 13 nt, Human
cuauggccugugg

SEQ ID NO: 3494449 - RNA, 17 nt, Human
cuauggcugaguucugg

SEQ ID NO: 3494450 - RNA, 23 nt, Human
cuaugggagagugucaaccagac

SEQ ID NO: 3494451 - RNA, 17 nt, Human
cuaugggagccccaggg

SEQ ID NO: 3494452 - RNA, 19 nt, Human
cuaugggagccccaggguc

SEQ ID NO: 3494453 - RNA, 23 nt, Human
cuauggggaagguuaucagugcu

SEQ ID NO: 3494454 - RNA, 15 nt, Human
cuauggggauggucc

SEQ ID NO: 3494455 - RNA, 18 nt, Human
cuauggggaugguccacu

SEQ ID NO: 3494456 - RNA, 19 nt, Human
cuaugggucuaggacacag

SEQ ID NO: 3494457 - RNA, 12 nt, Human
cuauggucaucu

SEQ ID NO: 3494458 - RNA, 17 nt, Human
cuauggucgggagacag

SEQ ID NO: 3494459 - RNA, 20 nt, Human
cuauggugagaugcagcugg

SEQ ID NO: 3494460 - RNA, 21 nt, Human
cuauggugagaugcagcugga

SEQ ID NO: 3494461 - RNA, 14 nt, Human
cuauggugccaaug

SEQ ID NO: 3494462 - RNA, 22 nt, Human
cuauguaaaugcaucuguccuc

SEQ ID NO: 3494463 - RNA, 16 nt, Human
cuauguacaauauuuu

SEQ ID NO: 3494464 - RNA, 19 nt, Human
cuauguacaauauuuuaag

SEQ ID NO: 3494465 - RNA, 17 nt, Human
cuauguacuaguacugu

SEQ ID NO: 3494466 - RNA, 18 nt, Human
cuauguacuaguacugug

SEQ ID NO: 3494467 - RNA, 19 nt, Human
cuauguacuaguacugugu

SEQ ID NO: 3494468 - RNA, 15 nt, Human
cuauguaggaaaaaa

SEQ ID NO: 3494469 - RNA, 20 nt, Human
cuauguaguccgugcugaca

SEQ ID NO: 3494470 - RNA, 18 nt, Human
cuauguagugccgcucuu

SEQ ID NO: 3494471 - RNA, 19 nt, Human
cuauguaucaaugaguaac

SEQ ID NO: 3494472 - RNA, 22 nt, Human
cuauguauggaauacaguguua

SEQ ID NO: 3494473 - RNA, 22 nt, Human
cuauguauuugcaguucaccug

SEQ ID NO: 3494474 - RNA, 14 nt, Human
cuaugucauuucau

SEQ ID NO: 3494475 - RNA, 16 nt, Human
cuaugucauuucauuu

SEQ ID NO: 3494476 - RNA, 23 nt, Human
cuaugucauuugcuggagcucug

SEQ ID NO: 3494477 - RNA, 13 nt, Human
cuaugucccuugc

SEQ ID NO: 3494478 - RNA, 22 nt, Human
cuauguccuaaggacacacuaa

SEQ ID NO: 3494479 - RNA, 16 nt, Human
cuauuugauguaauac

SEQ ID NO: 3494480 - RNA, 19 nt, Human
cuauuugauguaauacuuc

SEQ ID NO: 3494481 - RNA, 23 nt, Human
cuauuugccaugggcuucacugu

SEQ ID NO: 3494482 - RNA, 12 nt, Human
cuauuuggaauu

SEQ ID NO: 3494483 - RNA, 16 nt, Human
cuauuuggaauuuaua

SEQ ID NO: 3494484 - RNA, 14 nt, Human
cuauuuguaaaucu

SEQ ID NO: 3494485 - RNA, 19 nt, Human
cuauuuguaaaucugccac

SEQ ID NO: 3494486 - RNA, 17 nt, Human
cuauuugucuuucagga

SEQ ID NO: 3494487 - RNA, 13 nt, Human
cuauuuuaaaaua

SEQ ID NO: 3494488 - RNA, 11 nt, Human
cuauuuuaaga

SEQ ID NO: 3494489 - RNA, 22 nt, Human
cuauuuuaauaaacacucuuga

SEQ ID NO: 3494490 - RNA, 14 nt, Human
cuauuuuaaucuug

SEQ ID NO: 3494491 - RNA, 16 nt, Human
cuauuuuauuaugaag

SEQ ID NO: 3494492 - RNA, 12 nt, Human
cuauuuuauucc

SEQ ID NO: 3494493 - RNA, 23 nt, Human
cuauuuuauucuaaacagacuca

SEQ ID NO: 3494494 - RNA, 18 nt, Human
cuauuuucagaaucugaa

SEQ ID NO: 3494495 - RNA, 22 nt, Human
cuauuuucucugauacuuuuuu

SEQ ID NO: 3494496 - RNA, 17 nt, Human
cuauuuuuaaauaauuu

SEQ ID NO: 3494497 - RNA, 16 nt, Human
cuauuuuuacugccac

SEQ ID NO: 3494498 - RNA, 19 nt, Human
cuauuuuuacugccacucu

SEQ ID NO: 3494499 - RNA, 16 nt, Human
cuauuuuuauuuauau

SEQ ID NO: 3494500 - RNA, 18 nt, Human
cuauuuuuauuuauauuu

SEQ ID NO: 3494501 - RNA, 14 nt, Human
cuauuuuucccccu

SEQ ID NO: 3494502 - RNA, 22 nt, Human
cuauuuuugacauggaaaugaa

SEQ ID NO: 3494503 - RNA, 13 nt, Human
cuauuuuuggagg

SEQ ID NO: 3494504 - RNA, 14 nt, Human
cuauuuuuguaaag

SEQ ID NO: 3494505 - RNA, 20 nt, Human
cuauuuuuuauuuuacuuuu

SEQ ID NO: 3494506 - RNA, 19 nt, Human
cuauuuuuuuaaaaucacu

SEQ ID NO: 3494507 - RNA, 13 nt, Human
cuauuuuuuuaga

SEQ ID NO: 3494508 - RNA, 17 nt, Human
cuauuuuuuuagauuga

SEQ ID NO: 3494509 - RNA, 22 nt, Human
cuauuuuuuuagauugagaaau

SEQ ID NO: 3494510 - RNA, 21 nt, Human
cuauuuuuuuucuguuauaua

SEQ ID NO: 3494511 - RNA, 19 nt, Human
cucaaaaagcugccuggga

SEQ ID NO: 3494512 - RNA, 13 nt, Human
cucaaaacugcac

SEQ ID NO: 3494513 - RNA, 19 nt, Human
cucaaaagaacuuaccccc

SEQ ID NO: 3494514 - RNA, 20 nt, Human
cucaaaagagaaaaacaaaa

SEQ ID NO: 3494515 - RNA, 18 nt, Human
cucaaaauauuuguacau

SEQ ID NO: 3494516 - RNA, 16 nt, Human
cucaaacaacacuggu

SEQ ID NO: 3494517 - RNA, 17 nt, Human
cucaaacaacacuggug

SEQ ID NO: 3494518 - RNA, 13 nt, Human
cucaaacaaugac

SEQ ID NO: 3494519 - RNA, 21 nt, Human
cucaaacaaugacaaagcaga

SEQ ID NO: 3494520 - RNA, 15 nt, Human
cucaaacacaguuac

SEQ ID NO: 3494521 - RNA, 12 nt, Human
cucaaacacugc

SEQ ID NO: 3494522 - RNA, 13 nt, Human
cucaaacacugca

SEQ ID NO: 3494523 - RNA, 16 nt, Human
cucaaacacugcaggc

SEQ ID NO: 3494524 - RNA, 18 nt, Human
cucaaacacugcaggcau

SEQ ID NO: 3494525 - RNA, 12 nt, Human
cucaaaccccug

SEQ ID NO: 3494526 - RNA, 18 nt, Human
cucaaaccuccaaaagcc

SEQ ID NO: 3494527 - RNA, 15 nt, Human
cucaaaccuccucuu

SEQ ID NO: 3494528 - RNA, 22 nt, Human
cucaaacuaaaagacauuuguu

SEQ ID NO: 3494529 - RNA, 20 nt, Human
cucaaacucuugaccucagg

SEQ ID NO: 3494530 - RNA, 14 nt, Human
cucaaacuucuggc

SEQ ID NO: 3494531 - RNA, 20 nt, Human
cucaaacuuuuccccugucc

SEQ ID NO: 3494532 - RNA, 14 nt, Human
cucaaagaggcagu

SEQ ID NO: 3494533 - RNA, 19 nt, Human
cucaaagcaagcauucaga

SEQ ID NO: 3494534 - RNA, 20 nt, Human
cucaaagcaugggauuauua

SEQ ID NO: 3494535 - RNA, 22 nt, Human
cucaaagccccauuaacugcuu

SEQ ID NO: 3494536 - RNA, 13 nt, Human
cucaaaggccaga

SEQ ID NO: 3494537 - RNA, 22 nt, Human
cucaaaggccagaccugcagac

SEQ ID NO: 3494538 - RNA, 22 nt, Human
cucaaagguuuggaaggagcag

SEQ ID NO: 3494539 - RNA, 13 nt, Human
cucaaagucugca

SEQ ID NO: 3494540 - RNA, 18 nt, Human
cucaaaguuuugaaaagc

SEQ ID NO: 3494541 - RNA, 19 nt, Human
cucaaauaaaaagugcuuu

SEQ ID NO: 3494542 - RNA, 13 nt, Human
cucaaauaaaaua

SEQ ID NO: 3494543 - RNA, 23 nt, Human
cucaaauacgugggcauucaaau

SEQ ID NO: 3494544 - RNA, 20 nt, Human
cucaaaugaguaacauuugc

SEQ ID NO: 3494545 - RNA, 21 nt, Human
cucaaaugaguaacauuugcu

SEQ ID NO: 3494546 - RNA, 20 nt, Human
cucaaaugaugugccugcuu

SEQ ID NO: 3494547 - RNA, 16 nt, Human
cucaaaugcucagacc

SEQ ID NO: 3494548 - RNA, 21 nt, Human
cucaaauggggccagauccag

SEQ ID NO: 3494549 - RNA, 21 nt, Human
cucaaauguucuaaguuucua

SEQ ID NO: 3494550 - RNA, 16 nt, Human
cucaaauuaaucuuuc

SEQ ID NO: 3494551 - RNA, 23 nt, Human
cucaaauuaaucuuucuuuaccu

SEQ ID NO: 3494552 - RNA, 13 nt, Human
cucaaauuucuaa

SEQ ID NO: 3494553 - RNA, 17 nt, Human
cucaaauuucuaaaucu

SEQ ID NO: 3494554 - RNA, 13 nt, Human
cucaaauuuuuug

SEQ ID NO: 3494555 - RNA, 15 nt, Human
cucaacaaagcacag

SEQ ID NO: 3494556 - RNA, 20 nt, Human
cucaacaaggcaaaaacaaa

SEQ ID NO: 3494557 - RNA, 22 nt, Human
cucaacaagggagagaccucau

SEQ ID NO: 3494558 - RNA, 23 nt, Human
cucaacaagggagagaccucauc

SEQ ID NO: 3494559 - RNA, 16 nt, Human
cucaacaccaugauuc

SEQ ID NO: 3494560 - RNA, 23 nt, Human
cucaacaccaugauuccuuuaac

SEQ ID NO: 3494561 - RNA, 20 nt, Human
cucaacacccaacugucucg

SEQ ID NO: 3494562 - RNA, 13 nt, Human
cucaacacccagu

SEQ ID NO: 3494563 - RNA, 15 nt, Human
cucaacaggccucag

SEQ ID NO: 3494564 - RNA, 17 nt, Human
cucaacaggccucaggg

SEQ ID NO: 3494565 - RNA, 22 nt, Human
cucaacaggccucagggcuccu

SEQ ID NO: 3494566 - RNA, 20 nt, Human
cucaacauguuacugaccag

SEQ ID NO: 3494567 - RNA, 15 nt, Human
cucaaccauccccuc

SEQ ID NO: 3494568 - RNA, 18 nt, Human
cucaaccccaccacuucu

SEQ ID NO: 3494569 - RNA, 22 nt, Human
cucaacccccauuucuauuuau

SEQ ID NO: 3494570 - RNA, 23 nt, Human
cucaaccccuccccuccaucccu

SEQ ID NO: 3494571 - RNA, 20 nt, Human
cucaaccuaccaccccuucc

SEQ ID NO: 3494572 - RNA, 22 nt, Human
cucaaccuaccaccccuuccug

SEQ ID NO: 3494573 - RNA, 15 nt, Human
cucaaccuccugggc

SEQ ID NO: 3494574 - RNA, 14 nt, Human
cucaaccucuacag

SEQ ID NO: 3494575 - RNA, 13 nt, Human
cucaaccucuucu

SEQ ID NO: 3494576 - RNA, 19 nt, Human
cucaaccuguaaauuauuu

SEQ ID NO: 3494577 - RNA, 16 nt, Human
cucaaccuuaagaccu

SEQ ID NO: 3494578 - RNA, 15 nt, Human
cucaacguauuguuu

SEQ ID NO: 3494579 - RNA, 17 nt, Human
cucaacguuacauuuuu

SEQ ID NO: 3494580 - RNA, 14 nt, Human
cucaacucuccucc

SEQ ID NO: 3494581 - RNA, 18 nt, Human
cucaacucuccuccagag

SEQ ID NO: 3494582 - RNA, 20 nt, Human
cucaacucuccuccagaguc

SEQ ID NO: 3494583 - RNA, 14 nt, Human
cucaacucugcuga

SEQ ID NO: 3494584 - RNA, 13 nt, Human
cucaacugccuac

SEQ ID NO: 3494585 - RNA, 15 nt, Human
cucaacugccuacuc

SEQ ID NO: 3494586 - RNA, 23 nt, Human
cucaacugccuacuccaaaaugu

SEQ ID NO: 3494587 - RNA, 16 nt, Human
cucaacuuucuguugg

SEQ ID NO: 3494588 - RNA, 15 nt, Human
cucaagaaauuccca

SEQ ID NO: 3494589 - RNA, 20 nt, Human
cucaagaagacauggagacu

SEQ ID NO: 3494590 - RNA, 21 nt, Human
cucaagaagacauggagacuc

SEQ ID NO: 3494591 - RNA, 16 nt, Human
ccagucuccaccagga

SEQ ID NO: 3494592 - RNA, 23 nt, Human
ccagucuccaccaggaaccucuu

SEQ ID NO: 3494593 - RNA, 14 nt, Human
ccagucugaaguuu

SEQ ID NO: 3494594 - RNA, 16 nt, Human
ccagucugcugcccuc

SEQ ID NO: 3494595 - RNA, 18 nt, Human
ccagucugggcugccggg

SEQ ID NO: 3494596 - RNA, 12 nt, Human
ccagucugugga

SEQ ID NO: 3494597 - RNA, 21 nt, Human
ccagucuguggaucagagaug

SEQ ID NO: 3494598 - RNA, 16 nt, Human
ccagucuguuccccau

SEQ ID NO: 3494599 - RNA, 18 nt, Human
ccagucuuccaccuggaa

SEQ ID NO: 3494600 - RNA, 17 nt, Human
ccagucuuccugacacu

SEQ ID NO: 3494601 - RNA, 18 nt, Human
ccagucuuuaaaggccca

SEQ ID NO: 3494602 - RNA, 22 nt, Human
ccagucuuuaaaggcccagccc

SEQ ID NO: 3494603 - RNA, 23 nt, Human
ccagucuuuaaaggcccagcccc

SEQ ID NO: 3494604 - RNA, 15 nt, Human
ccagugaagauauuu

SEQ ID NO: 3494605 - RNA, 16 nt, Human
ccagugaauucuugaa

SEQ ID NO: 3494606 - RNA, 12 nt, Human
ccagugaauuuu

SEQ ID NO: 3494607 - RNA, 19 nt, Human
ccagugaauuuuugcaaua

SEQ ID NO: 3494608 - RNA, 20 nt, Human
ccagugaauuuuugcaauaa

SEQ ID NO: 3494609 - RNA, 22 nt, Human
ccagugaauuuuugcaauaaug

SEQ ID NO: 3494610 - RNA, 19 nt, Human
ccagugacacuucagagag

SEQ ID NO: 3494611 - RNA, 18 nt, Human
ccagugacagacaggcuc

SEQ ID NO: 3494612 - RNA, 19 nt, Human
ccagugacagacaggcucu

SEQ ID NO: 3494613 - RNA, 12 nt, Human
ccagugacagcu

SEQ ID NO: 3494614 - RNA, 16 nt, Human
ccagugaccaaccuuu

SEQ ID NO: 3494615 - RNA, 17 nt, Human
ccagugaccccugaccu

SEQ ID NO: 3494616 - RNA, 15 nt, Human
ccagugaccugagga

SEQ ID NO: 3494617 - RNA, 17 nt, Human
ccagugaccugaggaag

SEQ ID NO: 3494618 - RNA, 19 nt, Human
ccagugaccugaggaagcg

SEQ ID NO: 3494619 - RNA, 21 nt, Human
ccagugagaugcauucuuggu

SEQ ID NO: 3494620 - RNA, 20 nt, Human
ccagugagcacucccaaguc

SEQ ID NO: 3494621 - RNA, 14 nt, Human
ccagugaggcucug

SEQ ID NO: 3494622 - RNA, 17 nt, Human
ccagugaggcucugccc

SEQ ID NO: 3494623 - RNA, 23 nt, Human
cucagcuggaugauggucuucag

SEQ ID NO: 3494624 - RNA, 19 nt, Human
cucagcuguccugcagcaa

SEQ ID NO: 3494625 - RNA, 16 nt, Human
cucagcugucuguggc

SEQ ID NO: 3494626 - RNA, 19 nt, Human
cucagcuguucagauugga

SEQ ID NO: 3494627 - RNA, 22 nt, Human
cucagcuguucagauuggacau

SEQ ID NO: 3494628 - RNA, 22 nt, Human
cucagcuuccccaacacgcagg

SEQ ID NO: 3494629 - RNA, 14 nt, Human
cucagcuuccccag

SEQ ID NO: 3494630 - RNA, 18 nt, Human
cucagcuuccccaguagc

SEQ ID NO: 3494631 - RNA, 22 nt, Human
cucagcuuccuacccacaccuc

SEQ ID NO: 3494632 - RNA, 14 nt, Human
cucagcuuucuaag

SEQ ID NO: 3494633 - RNA, 13 nt, Human
cucagcuuugaga

SEQ ID NO: 3494634 - RNA, 22 nt, Human
cucagcuuugagaagccuucag

SEQ ID NO: 3494635 - RNA, 12 nt, Human
cucaggaaaacg

SEQ ID NO: 3494636 - RNA, 17 nt, Human
cucaggaaaacgggacc

SEQ ID NO: 3494637 - RNA, 15 nt, Human
cucaggaaagaauag

SEQ ID NO: 3494638 - RNA, 22 nt, Human
cucaggaaaugcugacccaugg

SEQ ID NO: 3494639 - RNA, 23 nt, Human
cucaggaaaugcugacccauggg

SEQ ID NO: 3494640 - RNA, 18 nt, Human
cucaggaaccgaggcagg

SEQ ID NO: 3494641 - RNA, 11 nt, Human
cuccauccuga

SEQ ID NO: 3494642 - RNA, 13 nt, Human
cuccauccugcug

SEQ ID NO: 3494643 - RNA, 19 nt, Human
cuccauccuuucugccucu

SEQ ID NO: 3494644 - RNA, 17 nt, Human
cuccaucuaaacugccc

SEQ ID NO: 3494645 - RNA, 14 nt, Human
cuccaucucaugua

SEQ ID NO: 3494646 - RNA, 22 nt, Human
cuccaucuccaagaaugcugaa

SEQ ID NO: 3494647 - RNA, 19 nt, Human
cuccaucucucauccucca

SEQ ID NO: 3494648 - RNA, 16 nt, Human
cuccaucuucuuugca

SEQ ID NO: 3494649 - RNA, 21 nt, Human
cuccaugagacacaucuccuc

SEQ ID NO: 3494650 - RNA, 13 nt, Human
cuccaugagcacc

SEQ ID NO: 3494651 - RNA, 18 nt, Human
cuccaugcuccucacugc

SEQ ID NO: 3494652 - RNA, 14 nt, Human
cuccaugcugccuc

SEQ ID NO: 3494653 - RNA, 17 nt, Human
cuccaugcugccuccag

SEQ ID NO: 3494654 - RNA, 21 nt, Human
cuccaugcuuagucacugccu

SEQ ID NO: 3494655 - RNA, 15 nt, Human
cuccauggcccugcc

SEQ ID NO: 3494656 - RNA, 20 nt, Human
cuccauggcccugccaugcu

SEQ ID NO: 3494657 - RNA, 16 nt, Human
cuccauggcuuccucc

SEQ ID NO: 3494658 - RNA, 17 nt, Human
cuccauggcuuccuccu

SEQ ID NO: 3494659 - RNA, 16 nt, Human
cuccauggugccucug

SEQ ID NO: 3494660 - RNA, 15 nt, Human
cuccaugugccucuu

SEQ ID NO: 3494661 - RNA, 21 nt, Human
cuccauguuggucaggcuggu

SEQ ID NO: 3494662 - RNA, 15 nt, Human
cuccauuaaagucug

SEQ ID NO: 3494663 - RNA, 17 nt, Human
cuccauucaauuucagg

SEQ ID NO: 3494664 - RNA, 15 nt, Human
cuccauuccagucuc

SEQ ID NO: 3494665 - RNA, 16 nt, Human
cuccauuccuggagcc

SEQ ID NO: 3494666 - RNA, 21 nt, Human
cuccauuccuggagcccgagg

SEQ ID NO: 3494667 - RNA, 13 nt, Human
cuccauucuauuu

SEQ ID NO: 3494668 - RNA, 17 nt, Human
cuccauugguguugaca

SEQ ID NO: 3494669 - RNA, 13 nt, Human
cuccauuuaauaa

SEQ ID NO: 3494670 - RNA, 22 nt, Human
cucccaaaagcuagaacacugc

SEQ ID NO: 3494671 - RNA, 18 nt, Human
cucccaaacgcccuuucc

SEQ ID NO: 3494672 - RNA, 21 nt, Human
cucccaaagugcugggauuaa

SEQ ID NO: 3494673 - RNA, 15 nt, Human
cucccaaaugagcca

SEQ ID NO: 3494674 - RNA, 14 nt, Human
cucccaacccuggc

SEQ ID NO: 3494675 - RNA, 14 nt, Human
cucccaacucaccc

SEQ ID NO: 3494676 - RNA, 16 nt, Human
cucccaacucacccca

SEQ ID NO: 3494677 - RNA, 23 nt, Human
cucccaagaacagcaggcccacc

SEQ ID NO: 3494678 - RNA, 21 nt, Human
cucccaagacuucauuguccc

SEQ ID NO: 3494679 - RNA, 17 nt, Human
cucccaagcuggcuggg

SEQ ID NO: 3494680 - RNA, 18 nt, Human
cucccaagcuggcugggg

SEQ ID NO: 3494681 - RNA, 18 nt, Human
cucccaaggcugcgucug

SEQ ID NO: 3494682 - RNA, 23 nt, Human
cucccaaggcugcgucuggaggg

SEQ ID NO: 3494683 - RNA, 18 nt, Human
cucccaagggauggugcc

SEQ ID NO: 3494684 - RNA, 21 nt, Human
cucccaagguuggagcccagg

SEQ ID NO: 3494685 - RNA, 15 nt, Human
cucccacaagccucu

SEQ ID NO: 3494686 - RNA, 15 nt, Human
cucccacacucccaa

SEQ ID NO: 3494687 - RNA, 15 nt, Human
cucccacacugcuag

SEQ ID NO: 3494688 - RNA, 23 nt, Human
cucccacagcgcuggccgggacc

SEQ ID NO: 3494689 - RNA, 15 nt, Human
cucccacaggcccuu

SEQ ID NO: 3494690 - RNA, 16 nt, Human
cucccacaggcccuuc

SEQ ID NO: 3494691 - RNA, 21 nt, Human
cucccacaggcccuuccucuc

SEQ ID NO: 3494692 - RNA, 14 nt, Human
cucccaccaggcua

SEQ ID NO: 3494693 - RNA, 12 nt, Human
cucccacccagu

SEQ ID NO: 3494694 - RNA, 12 nt, Human
cucccaccccac

SEQ ID NO: 3494695 - RNA, 22 nt, Human
cucccaccccacccccuucagu

SEQ ID NO: 3494696 - RNA, 14 nt, Human
cucccacccccagc

SEQ ID NO: 3494697 - RNA, 15 nt, Human
cucccacccccaucu

SEQ ID NO: 3494698 - RNA, 22 nt, Human
cucccacccccaucucucccuc

SEQ ID NO: 3494699 - RNA, 15 nt, Human
cucccacccgaugcu

SEQ ID NO: 3494700 - RNA, 21 nt, Human
cucccacccgaugcugcuuuc

SEQ ID NO: 3494701 - RNA, 23 nt, Human
cucccacccgaugcugcuuuccc

SEQ ID NO: 3494702 - RNA, 14 nt, Human
cucccacccucuuc

SEQ ID NO: 3494703 - RNA, 13 nt, Human
cucccacccugua

SEQ ID NO: 3494704 - RNA, 18 nt, Human
cucccacccuguaccuca

SEQ ID NO: 3494705 - RNA, 23 nt, Human
cucccacccuguaccucauccca

SEQ ID NO: 3494706 - RNA, 12 nt, Human
cucccaccucag

SEQ ID NO: 3494707 - RNA, 15 nt, Human
cucccaccuccugac

SEQ ID NO: 3494708 - RNA, 14 nt, Human
cucccaccucugug

SEQ ID NO: 3494709 - RNA, 17 nt, Human
cucccaccucugugacc

SEQ ID NO: 3494710 - RNA, 21 nt, Human
cucccaccucugugaccucag

SEQ ID NO: 3494711 - RNA, 20 nt, Human
cucccaccugacacaccagg

SEQ ID NO: 3494712 - RNA, 21 nt, Human
cucccaccugacacaccaggc

SEQ ID NO: 3494713 - RNA, 15 nt, Human
cucccaccuuuaauc

SEQ ID NO: 3494714 - RNA, 22 nt, Human
cucccacgggaccuggggcuuu

SEQ ID NO: 3494715 - RNA, 14 nt, Human
cucccacgugggag

SEQ ID NO: 3494716 - RNA, 21 nt, Human
cucccacgugggagacaagaa

SEQ ID NO: 3494717 - RNA, 15 nt, Human
cucccacugcccacu

SEQ ID NO: 3494718 - RNA, 17 nt, Human
cucccacugcccacugg

SEQ ID NO: 3494719 - RNA, 18 nt, Human
cucccacuucccugacac

SEQ ID NO: 3494720 - RNA, 17 nt, Human
cucccacuucugccaga

SEQ ID NO: 3494721 - RNA, 15 nt, Human
cucccacuuggccaa

SEQ ID NO: 3494722 - RNA, 12 nt, Human
cucccacuuugc

SEQ ID NO: 3494723 - RNA, 17 nt, Human
cucccagagcuggugga

SEQ ID NO: 3494724 - RNA, 15 nt, Human
cucccagagguccag

SEQ ID NO: 3494725 - RNA, 19 nt, Human
cucccagagguccagccca

SEQ ID NO: 3494726 - RNA, 21 nt, Human
cucccagagguccagcccauc

SEQ ID NO: 3494727 - RNA, 23 nt, Human
cucccagagguccagcccaucuc

SEQ ID NO: 3494728 - RNA, 11 nt, Human
cucccagccag

SEQ ID NO: 3494729 - RNA, 16 nt, Human
cucccagccaggcccu

SEQ ID NO: 3494730 - RNA, 19 nt, Human
cucccagcccuauggaugu

SEQ ID NO: 3494731 - RNA, 23 nt, Human
cucccagcugacaguccucucca

SEQ ID NO: 3494732 - RNA, 18 nt, Human
cucccagcuuguaggagc

SEQ ID NO: 3494733 - RNA, 19 nt, Human
cucccagcuuguaggagcu

SEQ ID NO: 3494734 - RNA, 15 nt, Human
cucccaggaccacag

SEQ ID NO: 3494735 - RNA, 20 nt, Human
cucccaggagccugcccagc

SEQ ID NO: 3494736 - RNA, 21 nt, Human
cucccaggagccugcccagcc

SEQ ID NO: 3494737 - RNA, 15 nt, Human
cucccaggcauuccc

SEQ ID NO: 3494738 - RNA, 21 nt, Human
cucccaggcauuccccaggag

SEQ ID NO: 3494739 - RNA, 21 nt, Human
cucccaggccaggcuccuucc

SEQ ID NO: 3494740 - RNA, 22 nt, Human
cucccaggccaggcuccuuccu

SEQ ID NO: 3494741 - RNA, 21 nt, Human
cucccaggccgagaagccagu

SEQ ID NO: 3494742 - RNA, 17 nt, Human
cucccaggcgccccuuc

SEQ ID NO: 3494743 - RNA, 13 nt, Human
cucccaggcucuc

SEQ ID NO: 3494744 - RNA, 19 nt, Human
cucccagggccagggcccu

SEQ ID NO: 3494745 - RNA, 22 nt, Human
cucccagggccagggcccugca

SEQ ID NO: 3494746 - RNA, 16 nt, Human
cucccaggggcucccu

SEQ ID NO: 3494747 - RNA, 13 nt, Human
cucccaggggucu

SEQ ID NO: 3494748 - RNA, 23 nt, Human
cucccaggggucucccuggcucc

SEQ ID NO: 3494749 - RNA, 22 nt, Human
cucccaggguuuuaacuuuguu

SEQ ID NO: 3494750 - RNA, 17 nt, Human
cucccaggugcagccag

SEQ ID NO: 3494751 - RNA, 17 nt, Human
cucccagucauuuaaua

SEQ ID NO: 3494752 - RNA, 20 nt, Human
cucccaguccccagcccuuc

SEQ ID NO: 3494753 - RNA, 16 nt, Human
cucccagucuacccag

SEQ ID NO: 3494754 - RNA, 18 nt, Human
cucccaguucucuaggga

SEQ ID NO: 3494755 - RNA, 17 nt, Human
cucccauaaccgcugau

SEQ ID NO: 3494756 - RNA, 20 nt, Human
cucccauaaccgcugauucu

SEQ ID NO: 3494757 - RNA, 22 nt, Human
cucccauccagggcccccaucu

SEQ ID NO: 3494758 - RNA, 16 nt, Human
cucccaucccccugcc

SEQ ID NO: 3494759 - RNA, 19 nt, Human
cucccaucccccugcccuc

SEQ ID NO: 3494760 - RNA, 24 nt, Human
cucccaucccccugcccucguggc

SEQ ID NO: 3494761 - RNA, 13 nt, Human
cucccauccugug

SEQ ID NO: 3494762 - RNA, 15 nt, Human
cucccauccugugug

SEQ ID NO: 3494763 - RNA, 19 nt, Human
cucccauccuguguguuaa

SEQ ID NO: 3494764 - RNA, 18 nt, Human
cucccaucugugaaagga

SEQ ID NO: 3494765 - RNA, 23 nt, Human
cucccaucugugaaaggaaagag

SEQ ID NO: 3494766 - RNA, 12 nt, Human
cucccaugaagc

SEQ ID NO: 3494767 - RNA, 15 nt, Human
cucccaugaagccuu

SEQ ID NO: 3494768 - RNA, 16 nt, Human
cucccaugaagccuuu

SEQ ID NO: 3494769 - RNA, 19 nt, Human
cucccaugaagccuuuuga

SEQ ID NO: 3494770 - RNA, 16 nt, Human
cucccaugaccauacu

SEQ ID NO: 3494771 - RNA, 14 nt, Human
cucccauggagccc

SEQ ID NO: 3494772 - RNA, 16 nt, Human
cucccauggagcccca

SEQ ID NO: 3494773 - RNA, 17 nt, Human
cucccauggagccccag

SEQ ID NO: 3494774 - RNA, 16 nt, Human
cucccaugucacugca

SEQ ID NO: 3494775 - RNA, 20 nt, Human
cucccauucacucuuccaga

SEQ ID NO: 3494776 - RNA, 14 nt, Human
cucccauuccugaa

SEQ ID NO: 3494777 - RNA, 19 nt, Human
cucccauugucccucugcc

SEQ ID NO: 3494778 - RNA, 22 nt, Human
cucccauugucccucugcccca

SEQ ID NO: 3494779 - RNA, 14 nt, Human
cucccauuucuacu

SEQ ID NO: 3494780 - RNA, 16 nt, Human
cucccauuucuacucu

SEQ ID NO: 3494781 - RNA, 20 nt, Human
cuccccaaaggcuuugcccu

SEQ ID NO: 3494782 - RNA, 22 nt, Human
cuccccaacccccauucucauc

SEQ ID NO: 3494783 - RNA, 23 nt, Human
cuccccaacccuagguucccugu

SEQ ID NO: 3494784 - RNA, 14 nt, Human
cuccccaacccugc

SEQ ID NO: 3494785 - RNA, 20 nt, Human
cuccccaacccugccccugc

SEQ ID NO: 3494786 - RNA, 23 nt, Human
cuccccaacugaccaccuuuguu

SEQ ID NO: 3494787 - RNA, 22 nt, Human
cuccccaaggcccccugccugc

SEQ ID NO: 3494788 - RNA, 23 nt, Human
cuccccaagugguuuccacaugc

SEQ ID NO: 3494789 - RNA, 21 nt, Human
cuccccaaugagacuugccuu

SEQ ID NO: 3494790 - RNA, 15 nt, Human
ccauggcuucccaga

SEQ ID NO: 3494791 - RNA, 21 nt, Human
ccaugggaagacgaggcccuc

SEQ ID NO: 3494792 - RNA, 11 nt, Human
ccaugggacca

SEQ ID NO: 3494793 - RNA, 11 nt, Human
ccaugggaggg

SEQ ID NO: 3494794 - RNA, 14 nt, Human
ccaugggagggagc

SEQ ID NO: 3494795 - RNA, 17 nt, Human
ccaugggagggagcuga

SEQ ID NO: 3494796 - RNA, 19 nt, Human
ccaugggauaaaugccauc

SEQ ID NO: 3494797 - RNA, 16 nt, Human
ccaugggauacaaccu

SEQ ID NO: 3494798 - RNA, 24 nt, Human
ccaugggauacaaccucccucuug

SEQ ID NO: 3494799 - RNA, 14 nt, Human
ccaugggcacugcu

SEQ ID NO: 3494800 - RNA, 16 nt, Human
ccaugggcagagccca

SEQ ID NO: 3494801 - RNA, 13 nt, Human
ccaugggcaggag

SEQ ID NO: 3494802 - RNA, 16 nt, Human
ccaugggcuucacugu

SEQ ID NO: 3494803 - RNA, 20 nt, Human
ccauggggagggauucuggu

SEQ ID NO: 3494804 - RNA, 14 nt, Human
ccaugggggcaggg

SEQ ID NO: 3494805 - RNA, 16 nt, Human
ccauggguagccuggg

SEQ ID NO: 3494806 - RNA, 14 nt, Human
ccaugguacccccu

SEQ ID NO: 3494807 - RNA, 20 nt, Human
ccauggugaauuaaucacuu

SEQ ID NO: 3494808 - RNA, 16 nt, Human
ccauggugccucugga

SEQ ID NO: 3494809 - RNA, 17 nt, Human
ccauggugcuaggaaga

SEQ ID NO: 3494810 - RNA, 19 nt, Human
ccauggugugaucgucuga

SEQ ID NO: 3494811 - RNA, 20 nt, Human
ccauguaaauaccagacugc

SEQ ID NO: 3494812 - RNA, 23 nt, Human
ccauguaaauccccacugggacc

SEQ ID NO: 3494813 - RNA, 15 nt, Human
ccauguaacagaaag

SEQ ID NO: 3494814 - RNA, 15 nt, Human
ccauguaagcacucu

SEQ ID NO: 3494815 - RNA, 20 nt, Human
ccauguaauggcaguuauau

SEQ ID NO: 3494816 - RNA, 13 nt, Human
ccauguaccuccc

SEQ ID NO: 3494817 - RNA, 17 nt, Human
ccauguaccuccccugc

SEQ ID NO: 3494818 - RNA, 15 nt, Human
ccauguagaaaauuu

SEQ ID NO: 3494819 - RNA, 19 nt, Human
ccauguagaagcugcaucu

SEQ ID NO: 3494820 - RNA, 14 nt, Human
ccauguagcccccu

SEQ ID NO: 3494821 - RNA, 20 nt, Human
ccauguagcccccuggccuc

SEQ ID NO: 3494822 - RNA, 15 nt, Human
ccauguaucuaccuc

SEQ ID NO: 3494823 - RNA, 18 nt, Human
ccauguauggccaggaag

SEQ ID NO: 3494824 - RNA, 23 nt, Human
ccauguauuuaucucuauuuaau

SEQ ID NO: 3494825 - RNA, 22 nt, Human
ccaugucaccggauccugggug

SEQ ID NO: 3494826 - RNA, 15 nt, Human
ccaugucacugcaga

SEQ ID NO: 3494827 - RNA, 18 nt, Human
ccaugucagcaaaaagca

SEQ ID NO: 3494828 - RNA, 20 nt, Human
ccauguccaaagaggcugcc

SEQ ID NO: 3494829 - RNA, 23 nt, Human
ccauguccaaagaggcugccccu

SEQ ID NO: 3494830 - RNA, 16 nt, Human
ccauguccccucccag

SEQ ID NO: 3494831 - RNA, 17 nt, Human
ccauguccuauguguga

SEQ ID NO: 3494832 - RNA, 15 nt, Human
ccauguccucagcau

SEQ ID NO: 3494833 - RNA, 18 nt, Human
ccaugucgcgcucagcau

SEQ ID NO: 3494834 - RNA, 13 nt, Human
ccaugucggccuc

SEQ ID NO: 3494835 - RNA, 15 nt, Human
ccaugucucgacuca

SEQ ID NO: 3494836 - RNA, 16 nt, Human
ccaugucucucagaau

SEQ ID NO: 3494837 - RNA, 15 nt, Human
ccaugucuucucccu

SEQ ID NO: 3494838 - RNA, 19 nt, Human
ccaugucuucucccuggaa

SEQ ID NO: 3494839 - RNA, 22 nt, Human
ccaugugacucuggcuuggccu

SEQ ID NO: 3494840 - RNA, 20 nt, Human
ccaugugagcugcugccaug

SEQ ID NO: 3494841 - RNA, 21 nt, Human
ccaugugagcugcugccauga

SEQ ID NO: 3494842 - RNA, 22 nt, Human
ccaugugagcugcugccaugaa

SEQ ID NO: 3494843 - RNA, 20 nt, Human
ccaugugauggacacuccag

SEQ ID NO: 3494844 - RNA, 19 nt, Human
ccaugugcauaguuucuuu

SEQ ID NO: 3494845 - RNA, 21 nt, Human
ccaugugcauaguuucuuuau

SEQ ID NO: 3494846 - RNA, 13 nt, Human
ccaugugccaggu

SEQ ID NO: 3494847 - RNA, 13 nt, Human
ccaugugcccagu

SEQ ID NO: 3494848 - RNA, 16 nt, Human
ccaugugccugaucca

SEQ ID NO: 3494849 - RNA, 18 nt, Human
ccaugugccugcaccagg

SEQ ID NO: 3494850 - RNA, 19 nt, Human
ccaugugccugcaccagga

SEQ ID NO: 3494851 - RNA, 12 nt, Human
ccauguggccac

SEQ ID NO: 3494852 - RNA, 18 nt, Human
ccaugugguggcacaggc

SEQ ID NO: 3494853 - RNA, 15 nt, Human
ccauguguggacuca

SEQ ID NO: 3494854 - RNA, 10 nt, Human
ccaugugugu

SEQ ID NO: 3494855 - RNA, 15 nt, Human
ccauguuaacaugac

SEQ ID NO: 3494856 - RNA, 20 nt, Human
ccauguuaaccccuccacuc

SEQ ID NO: 3494857 - RNA, 20 nt, Human
ccauguuaaguccucccuga

SEQ ID NO: 3494858 - RNA, 18 nt, Human
ccauguuaguuuuuacuu

SEQ ID NO: 3494859 - RNA, 18 nt, Human
ccauguuccaauaaacag

SEQ ID NO: 3494860 - RNA, 18 nt, Human
ccauguucugcccccagc

SEQ ID NO: 3494861 - RNA, 19 nt, Human
ccauguucugcccccagcc

SEQ ID NO: 3494862 - RNA, 20 nt, Human
ccauguuggccaggaugguc

SEQ ID NO: 3494863 - RNA, 16 nt, Human
ccauguuggccaggcu

SEQ ID NO: 3494864 - RNA, 21 nt, Human
ccauguuggccaggcugcucu

SEQ ID NO: 3494865 - RNA, 23 nt, Human
ccauguuggccaggcugcucuca

SEQ ID NO: 3494866 - RNA, 17 nt, Human
ccauguugugccucccu

SEQ ID NO: 3494867 - RNA, 20 nt, Human
ccauguugugccucccuggu

SEQ ID NO: 3494868 - RNA, 13 nt, Human
ccauguuucaaau

SEQ ID NO: 3494869 - RNA, 22 nt, Human
ccauuaaaacugaagucugaaa

SEQ ID NO: 3494870 - RNA, 12 nt, Human
ccauuaaaccau

SEQ ID NO: 3494871 - RNA, 16 nt, Human
ccauuaaagaauauga

SEQ ID NO: 3494872 - RNA, 14 nt, Human
ccauuaaagucaga

SEQ ID NO: 3494873 - RNA, 19 nt, Human
ccauuaaagucagaaguuu

SEQ ID NO: 3494874 - RNA, 22 nt, Human
ccauuaaccagaucuagucaau

SEQ ID NO: 3494875 - RNA, 17 nt, Human
ccauuaaucaguucauu

SEQ ID NO: 3494876 - RNA, 15 nt, Human
ccauuaauuuaaaug

SEQ ID NO: 3494877 - RNA, 23 nt, Human
ccauuagaagauauuagucuugg

SEQ ID NO: 3494878 - RNA, 16 nt, Human
ccauuagagucagccu

SEQ ID NO: 3494879 - RNA, 22 nt, Human
ccauuaggacaaucaguccccu

SEQ ID NO: 3494880 - RNA, 15 nt, Human
ccauuaggcuccuga

SEQ ID NO: 3494881 - RNA, 20 nt, Human
ccauuauaaccuuaauuuau

SEQ ID NO: 3494882 - RNA, 21 nt, Human
ccauuauuaucaaguagacua

SEQ ID NO: 3494883 - RNA, 16 nt, Human
ccauuauuuucuguca

SEQ ID NO: 3494884 - RNA, 19 nt, Human
ccauuauuuucugucagau

SEQ ID NO: 3494885 - RNA, 20 nt, Human
ccauucacaauaaaagcuua

SEQ ID NO: 3494886 - RNA, 19 nt, Human
ccauucacucuuccagaau

SEQ ID NO: 3494887 - RNA, 12 nt, Human
ccauucaggaac

SEQ ID NO: 3494888 - RNA, 14 nt, Human
ccauuccaaagcuu

SEQ ID NO: 3494889 - RNA, 16 nt, Human
ccauuccaaagcuuua

SEQ ID NO: 3494890 - RNA, 22 nt, Human
ccauuccaaagcuuuauuacca

SEQ ID NO: 3494891 - RNA, 13 nt, Human
ccauuccacaucc

SEQ ID NO: 3494892 - RNA, 21 nt, Human
ccauucccaagaaaugcuuug

SEQ ID NO: 3494893 - RNA, 15 nt, Human
ccauucccugccugg

SEQ ID NO: 3494894 - RNA, 13 nt, Human
ccauuccucaggg

SEQ ID NO: 3494895 - RNA, 16 nt, Human
ccauuccucagggaca

SEQ ID NO: 3494896 - RNA, 24 nt, Human
ccauuccugguacccagccaucug

SEQ ID NO: 3494897 - RNA, 21 nt, Human
ccauucguacauaauacugaa

SEQ ID NO: 3494898 - RNA, 17 nt, Human
ccauucuacuugcucug

SEQ ID NO: 3494899 - RNA, 20 nt, Human
ccauucuacuugcucuggac

SEQ ID NO: 3494900 - RNA, 17 nt, Human
ccauucucaagcccugc

SEQ ID NO: 3494901 - RNA, 19 nt, Human
ccauucucaccuauccaca

SEQ ID NO: 3494902 - RNA, 15 nt, Human
ccauucucaucugca

SEQ ID NO: 3494903 - RNA, 18 nt, Human
ccauucucaucugcaccc

SEQ ID NO: 3494904 - RNA, 13 nt, Human
ccauucuccacag

SEQ ID NO: 3494905 - RNA, 14 nt, Human
ccauucuccaccug

SEQ ID NO: 3494906 - RNA, 12 nt, Human
ccauucucccag

SEQ ID NO: 3494907 - RNA, 15 nt, Human
ccauucucccaggua

SEQ ID NO: 3494908 - RNA, 14 nt, Human
ccauucucucuccu

SEQ ID NO: 3494909 - RNA, 13 nt, Human
ccauucugacucg

SEQ ID NO: 3494910 - RNA, 15 nt, Human
ccauucugcccugug

SEQ ID NO: 3494911 - RNA, 22 nt, Human
ccauucugccgcccccuccuga

SEQ ID NO: 3494912 - RNA, 20 nt, Human
cucagguggggucacucugg

SEQ ID NO: 3494913 - RNA, 23 nt, Human
cucagguggggucacucuggcag

SEQ ID NO: 3494914 - RNA, 16 nt, Human
cucaggugucccugca

SEQ ID NO: 3494915 - RNA, 18 nt, Human
cucaggugucccugcacu

SEQ ID NO: 3494916 - RNA, 23 nt, Human
cucaggugucccugcacuugcag

SEQ ID NO: 3494917 - RNA, 20 nt, Human
cucagguugcugguugcugu

SEQ ID NO: 3494918 - RNA, 23 nt, Human
cucagguugcugguugcugugug

SEQ ID NO: 3494919 - RNA, 19 nt, Human
cucagguuguaguaaagaa

SEQ ID NO: 3494920 - RNA, 22 nt, Human
cucagguuguaguaaagaaauu

SEQ ID NO: 3494921 - RNA, 22 nt, Human
cucagguugucugaagucacug

SEQ ID NO: 3494922 - RNA, 15 nt, Human
cucagguuuguuuug

SEQ ID NO: 3494923 - RNA, 14 nt, Human
cucaguaaaaugaa

SEQ ID NO: 3494924 - RNA, 20 nt, Human
cucaguaaauguacaacugc

SEQ ID NO: 3494925 - RNA, 20 nt, Human
cucaguaaguaucuggagga

SEQ ID NO: 3494926 - RNA, 17 nt, Human
cucaguacuuuggaggc

SEQ ID NO: 3494927 - RNA, 18 nt, Human
cucaguagucagacugga

SEQ ID NO: 3494928 - RNA, 15 nt, Human
cucaguauauuuaaa

SEQ ID NO: 3494929 - RNA, 18 nt, Human
cucaguaugcugccccug

SEQ ID NO: 3494930 - RNA, 13 nt, Human
cucagucaguauu

SEQ ID NO: 3494931 - RNA, 14 nt, Human
cucagucaugcaua

SEQ ID NO: 3494932 - RNA, 16 nt, Human
cucaguccaugaagau

SEQ ID NO: 3494933 - RNA, 19 nt, Human
cucaguccauuuauauaug

SEQ ID NO: 3494934 - RNA, 17 nt, Human
cucaguccuccccucac

SEQ ID NO: 3494935 - RNA, 18 nt, Human
cucaguccuccccucaca

SEQ ID NO: 3494936 - RNA, 20 nt, Human
cucaguccuccccucacagc

SEQ ID NO: 3494937 - RNA, 21 nt, Human
cucaguccuccccucacagcc

SEQ ID NO: 3494938 - RNA, 14 nt, Human
cucagucucacauu

SEQ ID NO: 3494939 - RNA, 14 nt, Human
cucagucucaggag

SEQ ID NO: 3494940 - RNA, 15 nt, Human
cucagucucaggagc

SEQ ID NO: 3494941 - RNA, 15 nt, Human
cucagucucccuccc

SEQ ID NO: 3494942 - RNA, 16 nt, Human
cucagucucccucccu

SEQ ID NO: 3494943 - RNA, 12 nt, Human
cucagucucucu

SEQ ID NO: 3494944 - RNA, 16 nt, Human
cucagugaaguugcug

SEQ ID NO: 3494945 - RNA, 16 nt, Human
cucagugagcuggaga

SEQ ID NO: 3494946 - RNA, 15 nt, Human
cucagugcaaccucu

SEQ ID NO: 3494947 - RNA, 10 nt, Human
cucagugcag

SEQ ID NO: 3494948 - RNA, 17 nt, Human
cucagugcauuugugcu

SEQ ID NO: 3494949 - RNA, 22 nt, Human
cucagugcauuugugcuagaaa

SEQ ID NO: 3494950 - RNA, 22 nt, Human
ccauuguggucacaggaaguag

SEQ ID NO: 3494951 - RNA, 21 nt, Human
ccauuguucaggauucuaaua

SEQ ID NO: 3494952 - RNA, 12 nt, Human
ccauuguucuga

SEQ ID NO: 3494953 - RNA, 23 nt, Human
ccauuguuuaaaaaucuuaaugu

SEQ ID NO: 3494954 - RNA, 19 nt, Human
ccauuuaaauuuuuuuccu

SEQ ID NO: 3494955 - RNA, 23 nt, Human
ccauuuacuuaagacuuaaugag

SEQ ID NO: 3494956 - RNA, 14 nt, Human
ccauuuauagaaua

SEQ ID NO: 3494957 - RNA, 16 nt, Human
ccauuuauauaugaaa

SEQ ID NO: 3494958 - RNA, 12 nt, Human
ccauuuauuuau

SEQ ID NO: 3494959 - RNA, 13 nt, Human
ccauuucagagag

SEQ ID NO: 3494960 - RNA, 21 nt, Human
ccauuucaucuauuucugaga

SEQ ID NO: 3494961 - RNA, 19 nt, Human
ccauuuccucagcuuaucu

SEQ ID NO: 3494962 - RNA, 12 nt, Human
ccauuucuaauu

SEQ ID NO: 3494963 - RNA, 21 nt, Human
ccauuucuaccaaggcauauc

SEQ ID NO: 3494964 - RNA, 22 nt, Human
ccauuucuacucuuaaguuucu

SEQ ID NO: 3494965 - RNA, 23 nt, Human
ccauuucuagaacaucccugcca

SEQ ID NO: 3494966 - RNA, 12 nt, Human
ccauuucuauuu

SEQ ID NO: 3494967 - RNA, 13 nt, Human
ccauuucuauuua

SEQ ID NO: 3494968 - RNA, 17 nt, Human
ccauuucuauuuauuua

SEQ ID NO: 3494969 - RNA, 14 nt, Human
ccauuucucacuga

SEQ ID NO: 3494970 - RNA, 14 nt, Human
ccauuucuccagaa

SEQ ID NO: 3494971 - RNA, 11 nt, Human
ccauuucucuc

SEQ ID NO: 3494972 - RNA, 13 nt, Human
ccauuugaagugu

SEQ ID NO: 3494973 - RNA, 20 nt, Human
ccauuugaggauuuagaagu

SEQ ID NO: 3494974 - RNA, 21 nt, Human
ccauuugauaccccuggggaa

SEQ ID NO: 3494975 - RNA, 19 nt, Human
ccauuugcaauaacagcug

SEQ ID NO: 3494976 - RNA, 21 nt, Human
ccauuugcaauaacagcugca

SEQ ID NO: 3494977 - RNA, 20 nt, Human
ccauuugcagaguccugcac

SEQ ID NO: 3494978 - RNA, 19 nt, Human
ccauuugcucuucagaugc

SEQ ID NO: 3494979 - RNA, 22 nt, Human
ccauuugcucuucagaugccac

SEQ ID NO: 3494980 - RNA, 13 nt, Human
ccauuuggaaauc

SEQ ID NO: 3494981 - RNA, 23 nt, Human
ccauuuggauccuguguggagag

SEQ ID NO: 3494982 - RNA, 19 nt, Human
ccauuuggcagagcuucuu

SEQ ID NO: 3494983 - RNA, 17 nt, Human
ccauuugggcagagagg

SEQ ID NO: 3494984 - RNA, 13 nt, Human
ccauuuguaaaac

SEQ ID NO: 3494985 - RNA, 15 nt, Human
ccauuuguaauaaag

SEQ ID NO: 3494986 - RNA, 16 nt, Human
ccauuuguaauuaaau

SEQ ID NO: 3494987 - RNA, 15 nt, Human
ccauuuguucauauu

SEQ ID NO: 3494988 - RNA, 22 nt, Human
ccauuuucccccacuacugcag

SEQ ID NO: 3494989 - RNA, 14 nt, Human
ccauuuucugguuc

SEQ ID NO: 3494990 - RNA, 21 nt, Human
ccauuuugcaaaauuuccagu

SEQ ID NO: 3494991 - RNA, 20 nt, Human
ccauuuugggguacccacug

SEQ ID NO: 3494992 - RNA, 14 nt, Human
ccauuuugugaaug

SEQ ID NO: 3494993 - RNA, 22 nt, Human
ccauuuuguuauugacuaacag

SEQ ID NO: 3494994 - RNA, 16 nt, Human
ccauuuuucaaagcaa

SEQ ID NO: 3494995 - RNA, 17 nt, Human
ccauuuuucaaagcaau

SEQ ID NO: 3494996 - RNA, 18 nt, Human
ccauuuuuuaauuuacuu

SEQ ID NO: 3494997 - RNA, 12 nt, Human
ccauuuuuuccu

SEQ ID NO: 3494998 - RNA, 17 nt, Human
cccaaaacaaagucuuu

SEQ ID NO: 3494999 - RNA, 18 nt, Human
cccaaaacucuccucugc

SEQ ID NO: 3495000 - RNA, 23 nt, Human
cccaaaagaaacugacaugcccu

SEQ ID NO: 3495001 - RNA, 20 nt, Human
cccaaaauuagccaguaauc

SEQ ID NO: 3495002 - RNA, 16 nt, Human
cccaaacaccuuccag

SEQ ID NO: 3495003 - RNA, 22 nt, Human
cccaaacaccuuccagcuccug

SEQ ID NO: 3495004 - RNA, 22 nt, Human
cccaaaccaccagaagcccaga

SEQ ID NO: 3495005 - RNA, 12 nt, Human
cccaaaccucca

SEQ ID NO: 3495006 - RNA, 23 nt, Human
cccaaacgcccuuuccuccucag

SEQ ID NO: 3495007 - RNA, 12 nt, Human
cccaaagaagga

SEQ ID NO: 3495008 - RNA, 19 nt, Human
cccaaagagccuggagaag

SEQ ID NO: 3495009 - RNA, 12 nt, Human
cccaaagagcug

SEQ ID NO: 3495010 - RNA, 14 nt, Human
cccaaagccagaca

SEQ ID NO: 3495011 - RNA, 13 nt, Human
cccaaagcugagc

SEQ ID NO: 3495012 - RNA, 14 nt, Human
cccaaagcugagcc

SEQ ID NO: 3495013 - RNA, 15 nt, Human
cccaaagcuuuccug

SEQ ID NO: 3495014 - RNA, 19 nt, Human
cccaaaggacgcacugagc

SEQ ID NO: 3495015 - RNA, 16 nt, Human
cccaaagugcugggau

SEQ ID NO: 3495016 - RNA, 20 nt, Human
cccaaagugguauagaaaug

SEQ ID NO: 3495017 - RNA, 17 nt, Human
cccaaauaagaagggau

SEQ ID NO: 3495018 - RNA, 14 nt, Human
cccaaaucaauaca

SEQ ID NO: 3495019 - RNA, 15 nt, Human
cccaaauccgaaccu

SEQ ID NO: 3495020 - RNA, 23 nt, Human
cccaaauccgaaccuccucugug

SEQ ID NO: 3495021 - RNA, 14 nt, Human
cccaaaugcuggcu

SEQ ID NO: 3495022 - RNA, 18 nt, Human
cccaaauggaaaugggca

SEQ ID NO: 3495023 - RNA, 22 nt, Human
cccaaauggaaaugggcagagc

SEQ ID NO: 3495024 - RNA, 14 nt, Human
cccaaauggcccug

SEQ ID NO: 3495025 - RNA, 18 nt, Human
cccaaaugugugcccagc

SEQ ID NO: 3495026 - RNA, 23 nt, Human
cccaaauuagggcaauuggaaca

SEQ ID NO: 3495027 - RNA, 20 nt, Human
cccaaauuaucaagcuaaua

SEQ ID NO: 3495028 - RNA, 21 nt, Human
cccaaauuaucaagcuaauaa

SEQ ID NO: 3495029 - RNA, 13 nt, Human
cccaaauuuaauu

SEQ ID NO: 3495030 - RNA, 19 nt, Human
cccaacagaugcuuuucug

SEQ ID NO: 3495031 - RNA, 23 nt, Human
cccaacagcuggacccugaccag

SEQ ID NO: 3495032 - RNA, 12 nt, Human
cccaacagugug

SEQ ID NO: 3495033 - RNA, 14 nt, Human
cccaacagugugaa

SEQ ID NO: 3495034 - RNA, 15 nt, Human
cccaacagugugaag

SEQ ID NO: 3495035 - RNA, 19 nt, Human
cccaacagugugaaguuag

SEQ ID NO: 3495036 - RNA, 19 nt, Human
cccaacauauaaaauaaug

SEQ ID NO: 3495037 - RNA, 17 nt, Human
cccaaccagugccaagg

SEQ ID NO: 3495038 - RNA, 17 nt, Human
cccaaccauuuccucag

SEQ ID NO: 3495039 - RNA, 18 nt, Human
cccaaccauuuccucaga

SEQ ID NO: 3495040 - RNA, 13 nt, Human
cccaaccccugag

SEQ ID NO: 3495041 - RNA, 13 nt, Human
cccaacccgugga

SEQ ID NO: 3495042 - RNA, 17 nt, Human
cccaacccguggaggcu

SEQ ID NO: 3495043 - RNA, 18 nt, Human
cccaacccguggaggcug

SEQ ID NO: 3495044 - RNA, 20 nt, Human
cccaacccuaucuccugaca

SEQ ID NO: 3495045 - RNA, 17 nt, Human
cccaacccuucccucac

SEQ ID NO: 3495046 - RNA, 12 nt, Human
cccaaccucaga

SEQ ID NO: 3495047 - RNA, 14 nt, Human
cccaaccugcucuc

SEQ ID NO: 3495048 - RNA, 16 nt, Human
cccaaccugcucuccu

SEQ ID NO: 3495049 - RNA, 17 nt, Human
cccaaccugcucuccuc

SEQ ID NO: 3495050 - RNA, 21 nt, Human
cccaaccugcucuccucuugc

SEQ ID NO: 3495051 - RNA, 23 nt, Human
cccaaccugcucuccucuugcca

SEQ ID NO: 3495052 - RNA, 20 nt, Human
cccaaccuuucccucacccc

SEQ ID NO: 3495053 - RNA, 12 nt, Human
cccaacgcucca

SEQ ID NO: 3495054 - RNA, 14 nt, Human
cccaacgggaagca

SEQ ID NO: 3495055 - RNA, 16 nt, Human
cccaacucaccccagc

SEQ ID NO: 3495056 - RNA, 20 nt, Human
cccaacucaccccagcccca

SEQ ID NO: 3495057 - RNA, 16 nt, Human
cuccuuccugccaccu

SEQ ID NO: 3495058 - RNA, 16 nt, Human
cuccuuccuggccuga

SEQ ID NO: 3495059 - RNA, 13 nt, Human
cuccuuccugucu

SEQ ID NO: 3495060 - RNA, 14 nt, Human
cuccuuccugucuu

SEQ ID NO: 3495061 - RNA, 15 nt, Human
cuccuuccugugugu

SEQ ID NO: 3495062 - RNA, 14 nt, Human
cuccuuccuuaccc

SEQ ID NO: 3495063 - RNA, 19 nt, Human
cuccuuccuuacccaaacu

SEQ ID NO: 3495064 - RNA, 18 nt, Human
cuccuucguaucccgagu

SEQ ID NO: 3495065 - RNA, 14 nt, Human
cuccuucugagcuc

SEQ ID NO: 3495066 - RNA, 20 nt, Human
cuccuucugagcuccugucc

SEQ ID NO: 3495067 - RNA, 20 nt, Human
cuccuugaauaucuuucgau

SEQ ID NO: 3495068 - RNA, 19 nt, Human
cuccuugacuccuuguggu

SEQ ID NO: 3495069 - RNA, 20 nt, Human
cuccuugagagaccaggcaa

SEQ ID NO: 3495070 - RNA, 15 nt, Human
cuccuugauauuugu

SEQ ID NO: 3495071 - RNA, 17 nt, Human
cuccuugccuccugugu

SEQ ID NO: 3495072 - RNA, 13 nt, Human
cuccuugcucugc

SEQ ID NO: 3495073 - RNA, 17 nt, Human
cuccuugcuuguuacau

SEQ ID NO: 3495074 - RNA, 12 nt, Human
cuccuuggccua

SEQ ID NO: 3495075 - RNA, 17 nt, Human
cuccuuggccuagccca

SEQ ID NO: 3495076 - RNA, 22 nt, Human
cuccuuggccuagcccacccug

SEQ ID NO: 3495077 - RNA, 16 nt, Human
cuccuuggcuuaccug

SEQ ID NO: 3495078 - RNA, 19 nt, Human
cuccuuggcuuaccugacc

SEQ ID NO: 3495079 - RNA, 21 nt, Human
cuccuuggcuuaccugaccuc

SEQ ID NO: 3495080 - RNA, 20 nt, Human
cuccuugggaggaagcagaa

SEQ ID NO: 3495081 - RNA, 22 nt, Human
cuccuugggaggccccacuggg

SEQ ID NO: 3495082 - RNA, 13 nt, Human
cuccuugggcccu

SEQ ID NO: 3495083 - RNA, 19 nt, Human
cuccuugggcccuuugagu

SEQ ID NO: 3495084 - RNA, 21 nt, Human
cuccuuggugauuccgcagug

SEQ ID NO: 3495085 - RNA, 19 nt, Human
cuccuuggugccuggccug

SEQ ID NO: 3495086 - RNA, 17 nt, Human
cuccuugguuauauuuu

SEQ ID NO: 3495087 - RNA, 15 nt, Human
cuccuuguccaccca

SEQ ID NO: 3495088 - RNA, 16 nt, Human
cuccuuguccacccac

SEQ ID NO: 3495089 - RNA, 14 nt, Human
cuccuugugccaga

SEQ ID NO: 3495090 - RNA, 18 nt, Human
cuccuugugggccugggc

SEQ ID NO: 3495091 - RNA, 21 nt, Human
cuccuugugggccugggcucc

SEQ ID NO: 3495092 - RNA, 18 nt, Human
cuccuugugguuuauguc

SEQ ID NO: 3495093 - RNA, 13 nt, Human
cuccuuuaauugu

SEQ ID NO: 3495094 - RNA, 20 nt, Human
cuccuuuacccucaucuguc

SEQ ID NO: 3495095 - RNA, 17 nt, Human
cuccuuuagcgcccagu

SEQ ID NO: 3495096 - RNA, 18 nt, Human
cuccuuucaucacacugg

SEQ ID NO: 3495097 - RNA, 10 nt, Human
cuccuuucca

SEQ ID NO: 3495098 - RNA, 18 nt, Human
cuccuuuccauaaauccu

SEQ ID NO: 3495099 - RNA, 22 nt, Human
cuccuuuccccuuccuuuuaag

SEQ ID NO: 3495100 - RNA, 21 nt, Human
cuccuuucuccagccagcaau

SEQ ID NO: 3495101 - RNA, 16 nt, Human
cuccuuucucuucucu

SEQ ID NO: 3495102 - RNA, 14 nt, Human
cuccuuucuggcuu

SEQ ID NO: 3495103 - RNA, 13 nt, Human
cuccuuucuuuuu

SEQ ID NO: 3495104 - RNA, 19 nt, Human
cuccuuugaaaccugcucu

SEQ ID NO: 3495105 - RNA, 22 nt, Human
cuccuuugcacugagggccaca

SEQ ID NO: 3495106 - RNA, 23 nt, Human
cuccuuugcugaggccuccagcu

SEQ ID NO: 3495107 - RNA, 13 nt, Human
cuccuuuguacuu

SEQ ID NO: 3495108 - RNA, 14 nt, Human
cuccuuuguacuuu

SEQ ID NO: 3495109 - RNA, 18 nt, Human
cuccuuugugaggaagcc

SEQ ID NO: 3495110 - RNA, 12 nt, Human
cuccuuugugug

SEQ ID NO: 3495111 - RNA, 15 nt, Human
cuccuuugugugugu

SEQ ID NO: 3495112 - RNA, 16 nt, Human
cuccuuuguucccggc

SEQ ID NO: 3495113 - RNA, 24 nt, Human
cuccuuuucacaguucucuccuuc

SEQ ID NO: 3495114 - RNA, 17 nt, Human
cuccuuuuccagagcau

SEQ ID NO: 3495115 - RNA, 17 nt, Human
cuccuuuucuuuuguua

SEQ ID NO: 3495116 - RNA, 21 nt, Human
cuccuuuuucucccucuggau

SEQ ID NO: 3495117 - RNA, 20 nt, Human
cucgaaacacagaaaccuuu

SEQ ID NO: 3495118 - RNA, 15 nt, Human
cucgaacccacacug

SEQ ID NO: 3495119 - RNA, 21 nt, Human
cucgaacuauuuucaaagacu

SEQ ID NO: 3495120 - RNA, 14 nt, Human
cucgaacuccuggg

SEQ ID NO: 3495121 - RNA, 12 nt, Human
cucgaagcgcgc

SEQ ID NO: 3495122 - RNA, 13 nt, Human
cucgaagcgcgcc

SEQ ID NO: 3495123 - RNA, 20 nt, Human
cucgaagcgcgccacucgcu

SEQ ID NO: 3495124 - RNA, 13 nt, Human
cucgaaucucugu

SEQ ID NO: 3495125 - RNA, 16 nt, Human
cucgaaucucugugcc

SEQ ID NO: 3495126 - RNA, 14 nt, Human
cucgaaucugugug

SEQ ID NO: 3495127 - RNA, 23 nt, Human
cucgacguuuacaagcccccccu

SEQ ID NO: 3495128 - RNA, 13 nt, Human
cucgacucugugc

SEQ ID NO: 3495129 - RNA, 23 nt, Human
cucgagcaguccugccucagccu

SEQ ID NO: 3495130 - RNA, 15 nt, Human
cucgagcgcccugca

SEQ ID NO: 3495131 - RNA, 19 nt, Human
cucgagcgcccugcagacc

SEQ ID NO: 3495132 - RNA, 15 nt, Human
cucgagcuuggggca

SEQ ID NO: 3495133 - RNA, 23 nt, Human
cucgagggcagggaccacacccu

SEQ ID NO: 3495134 - RNA, 21 nt, Human
cucgaggugccuucuucaggg

SEQ ID NO: 3495135 - RNA, 22 nt, Human
cucgaguacugugggcaauuua

SEQ ID NO: 3495136 - RNA, 20 nt, Human
cucgauguggucacagcugu

SEQ ID NO: 3495137 - RNA, 19 nt, Human
cucgauuuuguaucugcag

SEQ ID NO: 3495138 - RNA, 20 nt, Human
cucgauuuuguaucugcagg

SEQ ID NO: 3495139 - RNA, 13 nt, Human
cucgcaagcuggg

SEQ ID NO: 3495140 - RNA, 14 nt, Human
cucgcaagcugggu

SEQ ID NO: 3495141 - RNA, 20 nt, Human
cucgcaccccccuguucuaa

SEQ ID NO: 3495142 - RNA, 21 nt, Human
cucgcaccccccuguucuaag

SEQ ID NO: 3495143 - RNA, 14 nt, Human
cucgcaccuuucca

SEQ ID NO: 3495144 - RNA, 17 nt, Human
cucgcacggccccgaag

SEQ ID NO: 3495145 - RNA, 14 nt, Human
cucgcagagaggcc

SEQ ID NO: 3495146 - RNA, 16 nt, Human
cucgcaucauugcaga

SEQ ID NO: 3495147 - RNA, 17 nt, Human
cucgcaucauugcagau

SEQ ID NO: 3495148 - RNA, 14 nt, Human
cucgcauugacaca

SEQ ID NO: 3495149 - RNA, 13 nt, Human
cucgccaugccgg

SEQ ID NO: 3495150 - RNA, 17 nt, Human
cucgccaugccgggggu

SEQ ID NO: 3495151 - RNA, 18 nt, Human
cucgcccaccgcaugccc

SEQ ID NO: 3495152 - RNA, 22 nt, Human
cuccaucacccucuuccuguga

SEQ ID NO: 3495153 - RNA, 18 nt, Human
cuccaucaguuagagcug

SEQ ID NO: 3495154 - RNA, 14 nt, Human
cuccaucccuggcc

SEQ ID NO: 3495155 - RNA, 16 nt, Human
cuccaucccuggcccc

SEQ ID NO: 3495156 - RNA, 20 nt, Human
cuccauccgugccucuuuuu

SEQ ID NO: 3495157 - RNA, 18 nt, Human
cuccauccuacccccugu

SEQ ID NO: 3495158 - RNA, 22 nt, Human
cuccauccuacccccugugccu

SEQ ID NO: 3495159 - RNA, 17 nt, Human
cuccauccuccuccuuc

SEQ ID NO: 3495160 - RNA, 16 nt, Human
cuccauccugaggcuc

SEQ ID NO: 3495161 - RNA, 18 nt, Human
cuccauccugaggcucca

SEQ ID NO: 3495162 - RNA, 21 nt, Human
cuccauccugaggcuccacuu

SEQ ID NO: 3495163 - RNA, 22 nt, Human
cuccauccuuucugccucucaa

SEQ ID NO: 3495164 - RNA, 20 nt, Human
cuccaucgcugucaucucag

SEQ ID NO: 3495165 - RNA, 18 nt, Human
cuccaucuaaacugcccc

SEQ ID NO: 3495166 - RNA, 23 nt, Human
cuccaucucauguaucaucugga

SEQ ID NO: 3495167 - RNA, 14 nt, Human
cuccaucuccacuc

SEQ ID NO: 3495168 - RNA, 16 nt, Human
cuccaucucucuggcc

SEQ ID NO: 3495169 - RNA, 18 nt, Human
cuccaucucucuggcccu

SEQ ID NO: 3495170 - RNA, 12 nt, Human
cuccaucuuauu

SEQ ID NO: 3495171 - RNA, 17 nt, Human
cuccaucuucuuugcag

SEQ ID NO: 3495172 - RNA, 16 nt, Human
cuccaugaauaucagu

SEQ ID NO: 3495173 - RNA, 13 nt, Human
cuccaugcugccu

SEQ ID NO: 3495174 - RNA, 16 nt, Human
cuccaugcugccucca

SEQ ID NO: 3495175 - RNA, 20 nt, Human
cuccaugcuuagucacugcc

SEQ ID NO: 3495176 - RNA, 19 nt, Human
cuccauggcuuccuccucc

SEQ ID NO: 3495177 - RNA, 20 nt, Human
cuccauggcuuccuccuccc

SEQ ID NO: 3495178 - RNA, 14 nt, Human
cuccauuaaagucu

SEQ ID NO: 3495179 - RNA, 16 nt, Human
cuccauuaaagucuga

SEQ ID NO: 3495180 - RNA, 21 nt, Human
cuccauucaauuucaggcucc

SEQ ID NO: 3495181 - RNA, 14 nt, Human
cuccauucuauuuu

SEQ ID NO: 3495182 - RNA, 18 nt, Human
cuccauuuaaacagaugu

SEQ ID NO: 3495183 - RNA, 20 nt, Human
cuccauuuaauaauuauaug

SEQ ID NO: 3495184 - RNA, 15 nt, Human
cuccauuuaguucuu

SEQ ID NO: 3495185 - RNA, 18 nt, Human
cuccauuugcucuucaga

SEQ ID NO: 3495186 - RNA, 21 nt, Human
cuccauuuuggugucuuucuc

SEQ ID NO: 3495187 - RNA, 16 nt, Human
cucccaaaagcuagaa

SEQ ID NO: 3495188 - RNA, 17 nt, Human
cucccaaagagcugccu

SEQ ID NO: 3495189 - RNA, 21 nt, Human
cucccaaagagcugccuaaga

SEQ ID NO: 3495190 - RNA, 18 nt, Human
cucccaaagugcugggau

SEQ ID NO: 3495191 - RNA, 16 nt, Human
cucccaacccuggcuu

SEQ ID NO: 3495192 - RNA, 17 nt, Human
cucccaagaacagcagg

SEQ ID NO: 3495193 - RNA, 18 nt, Human
cucccaagaacagcaggc

SEQ ID NO: 3495194 - RNA, 22 nt, Human
cucccaagcaccugggauuaca

SEQ ID NO: 3495195 - RNA, 15 nt, Human
cucccaagcuggcug

SEQ ID NO: 3495196 - RNA, 19 nt, Human
cucccaagcuggcuggggu

SEQ ID NO: 3495197 - RNA, 17 nt, Human
cucccaaggagaacaaa

SEQ ID NO: 3495198 - RNA, 18 nt, Human
cucccaaggagaacaaau

SEQ ID NO: 3495199 - RNA, 21 nt, Human
cucccaaggggcccaaauucu

SEQ ID NO: 3495200 - RNA, 22 nt, Human
cucccaaggggcccaaauucuu

SEQ ID NO: 3495201 - RNA, 18 nt, Human
cucccaagguuggagccc

SEQ ID NO: 3495202 - RNA, 22 nt, Human
cucccaaguagcugggauuaca

SEQ ID NO: 3495203 - RNA, 17 nt, Human
cucccaagucuacagag

SEQ ID NO: 3495204 - RNA, 19 nt, Human
cucccaaguuuccauagca

SEQ ID NO: 3495205 - RNA, 19 nt, Human
cucccaauuucagacuccc

SEQ ID NO: 3495206 - RNA, 21 nt, Human
cucccaauuucagacucccau

SEQ ID NO: 3495207 - RNA, 21 nt, Human
cucccacaagccucugcccag

SEQ ID NO: 3495208 - RNA, 23 nt, Human
cucccacaagccucugcccaggc

SEQ ID NO: 3495209 - RNA, 16 nt, Human
cucccacaagccugag

SEQ ID NO: 3495210 - RNA, 17 nt, Human
cucccacaagccugagg

SEQ ID NO: 3495211 - RNA, 14 nt, Human
cucccacacugcua

SEQ ID NO: 3495212 - RNA, 17 nt, Human
cucccacaggcagcuuu

SEQ ID NO: 3495213 - RNA, 18 nt, Human
cucccacaggcagcuuua

SEQ ID NO: 3495214 - RNA, 14 nt, Human
cucccacaggcccu

SEQ ID NO: 3495215 - RNA, 22 nt, Human
cucccacaugggcccaggccuc

SEQ ID NO: 3495216 - RNA, 23 nt, Human
cucccacaugggcccaggccuca

SEQ ID NO: 3495217 - RNA, 19 nt, Human
cucccaccacagcaggugu

SEQ ID NO: 3495218 - RNA, 13 nt, Human
cucccacccaccg

SEQ ID NO: 3495219 - RNA, 18 nt, Human
cucccacccagucucugc

SEQ ID NO: 3495220 - RNA, 22 nt, Human
cucccacccagucucugcucca

SEQ ID NO: 3495221 - RNA, 18 nt, Human
cucccaccccaugcauua

SEQ ID NO: 3495222 - RNA, 11 nt, Human
cucccaccccc

SEQ ID NO: 3495223 - RNA, 16 nt, Human
cucccacccccagccc

SEQ ID NO: 3495224 - RNA, 19 nt, Human
cucccacccccaucucucc

SEQ ID NO: 3495225 - RNA, 23 nt, Human
cucccacccccuucucugcucca

SEQ ID NO: 3495226 - RNA, 18 nt, Human
cucccacccgaugcugcu

SEQ ID NO: 3495227 - RNA, 20 nt, Human
cucccacccgaugcugcuuu

SEQ ID NO: 3495228 - RNA, 17 nt, Human
cucccacccggcugcag

SEQ ID NO: 3495229 - RNA, 15 nt, Human
cucccacccucuucc

SEQ ID NO: 3495230 - RNA, 21 nt, Human
cucccacccucuuccuacugg

SEQ ID NO: 3495231 - RNA, 13 nt, Human
cucccaccucagc

SEQ ID NO: 3495232 - RNA, 14 nt, Human
cucccaccucagcc

SEQ ID NO: 3495233 - RNA, 13 nt, Human
cucccaccuccag

SEQ ID NO: 3495234 - RNA, 16 nt, Human
cucccacucuccuagg

SEQ ID NO: 3495235 - RNA, 17 nt, Human
cucccacucuccuaggc

SEQ ID NO: 3495236 - RNA, 12 nt, Human
cucccacugccc

SEQ ID NO: 3495237 - RNA, 23 nt, Human
cucccacugggguccagggagca

SEQ ID NO: 3495238 - RNA, 15 nt, Human
cucccagaaucccag

SEQ ID NO: 3495239 - RNA, 20 nt, Human
cucccagaaucccagccggc

SEQ ID NO: 3495240 - RNA, 15 nt, Human
cucccagaccugccu

SEQ ID NO: 3495241 - RNA, 15 nt, Human
cucccagagcaccug

SEQ ID NO: 3495242 - RNA, 19 nt, Human
cucccagagcaccugcugu

SEQ ID NO: 3495243 - RNA, 22 nt, Human
cucccagaggagccaccaguuc

SEQ ID NO: 3495244 - RNA, 18 nt, Human
cucccagagguccagccc

SEQ ID NO: 3495245 - RNA, 21 nt, Human
cucccagaucagucagagccc

SEQ ID NO: 3495246 - RNA, 22 nt, Human
cucccagauuucagucuuuucc

SEQ ID NO: 3495247 - RNA, 21 nt, Human
cucccagcaacacaagcugga

SEQ ID NO: 3495248 - RNA, 19 nt, Human
cucccagcagcccuaagga

SEQ ID NO: 3495249 - RNA, 13 nt, Human
cucccagcaucgc

SEQ ID NO: 3495250 - RNA, 18 nt, Human
cucccagccccugccccu

SEQ ID NO: 3495251 - RNA, 19 nt, Human
cucccagccccugccccuc

SEQ ID NO: 3495252 - RNA, 16 nt, Human
cucccagcccuaugga

SEQ ID NO: 3495253 - RNA, 18 nt, Human
cucccagcucuagacaac

SEQ ID NO: 3495254 - RNA, 20 nt, Human
cucccagcucuagacaaccc

SEQ ID NO: 3495255 - RNA, 23 nt, Human
cucccagcucuagacaacccugc

SEQ ID NO: 3495256 - RNA, 16 nt, Human
cucccagcucugagga

SEQ ID NO: 3495257 - RNA, 20 nt, Human
cucccagcugacaguccucu

SEQ ID NO: 3495258 - RNA, 18 nt, Human
cucccaggaacugggcca

SEQ ID NO: 3495259 - RNA, 11 nt, Human
cucccaggaag

SEQ ID NO: 3495260 - RNA, 16 nt, Human
cucccaggagacaguu

SEQ ID NO: 3495261 - RNA, 19 nt, Human
cucccaggagccugcccag

SEQ ID NO: 3495262 - RNA, 15 nt, Human
cucccaggcaaggcu

SEQ ID NO: 3495263 - RNA, 22 nt, Human
cucccaggcaaggcuguggacc

SEQ ID NO: 3495264 - RNA, 19 nt, Human
cucccaggcauuccccagg

SEQ ID NO: 3495265 - RNA, 20 nt, Human
cucccaggcauuccccagga

SEQ ID NO: 3495266 - RNA, 22 nt, Human
cucccaggccaguaagggaaau

SEQ ID NO: 3495267 - RNA, 15 nt, Human
cucccaggccccaug

SEQ ID NO: 3495268 - RNA, 21 nt, Human
cucccaggccccaugaccucc

SEQ ID NO: 3495269 - RNA, 19 nt, Human
cucccaggcgccccuuccc

SEQ ID NO: 3495270 - RNA, 20 nt, Human
cucccaggcgccccuucccc

SEQ ID NO: 3495271 - RNA, 22 nt, Human
cucccaggcgccccuucccccu

SEQ ID NO: 3495272 - RNA, 20 nt, Human
cucccagggagcaagggcag

SEQ ID NO: 3495273 - RNA, 22 nt, Human
cucccagggagcaugagaggag

SEQ ID NO: 3495274 - RNA, 21 nt, Human
cucccagggccaugaacuuug

SEQ ID NO: 3495275 - RNA, 18 nt, Human
cucccaggggcucccucc

SEQ ID NO: 3495276 - RNA, 22 nt, Human
cucccaggggcucccuccgccc

SEQ ID NO: 3495277 - RNA, 19 nt, Human
cucccaggggcuggcuuca

SEQ ID NO: 3495278 - RNA, 16 nt, Human
cucccaggggucuccc

SEQ ID NO: 3495279 - RNA, 18 nt, Human
cucccaggggucucccug

SEQ ID NO: 3495280 - RNA, 22 nt, Human
cucccaggggucucccuggcuc

SEQ ID NO: 3495281 - RNA, 20 nt, Human
cucccaggguuuuaacuuug

SEQ ID NO: 3495282 - RNA, 17 nt, Human
cucccagguaccagcug

SEQ ID NO: 3495283 - RNA, 18 nt, Human
cucccagguaccagcugc

SEQ ID NO: 3495284 - RNA, 24 nt, Human
cucccagguaccagcugcgcuugc

SEQ ID NO: 3495285 - RNA, 21 nt, Human
cucccagguguuaacauucca

SEQ ID NO: 3495286 - RNA, 11 nt, Human
cucccaguccc

SEQ ID NO: 3495287 - RNA, 18 nt, Human
cucccagucuacccagag

SEQ ID NO: 3495288 - RNA, 17 nt, Human
cucccagugucuuccug

SEQ ID NO: 3495289 - RNA, 20 nt, Human
cucccaguucucuagggaag

SEQ ID NO: 3495290 - RNA, 21 nt, Human
cucccaguucucuagggaagg

SEQ ID NO: 3495291 - RNA, 23 nt, Human
cucccauagauacucucuucuuc

SEQ ID NO: 3495292 - RNA, 15 nt, Human
cucccaucaccucua

SEQ ID NO: 3495293 - RNA, 19 nt, Human
cucccaucaugcccggucc

SEQ ID NO: 3495294 - RNA, 23 nt, Human
cucccaucauuacccuucccugc

SEQ ID NO: 3495295 - RNA, 17 nt, Human
cucccaucccccugccc

SEQ ID NO: 3495296 - RNA, 14 nt, Human
cucccaucucacac

SEQ ID NO: 3495297 - RNA, 21 nt, Human
cucccaucucacacaugagca

SEQ ID NO: 3495298 - RNA, 11 nt, Human
cucccaucugg

SEQ ID NO: 3495299 - RNA, 22 nt, Human
cucgcccaccgcaugcccccuc

SEQ ID NO: 3495300 - RNA, 17 nt, Human
cucgccccuggcagaga

SEQ ID NO: 3495301 - RNA, 22 nt, Human
cucgcccgcccacuguccuggg

SEQ ID NO: 3495302 - RNA, 23 nt, Human
cucgcccgcccacuguccugggc

SEQ ID NO: 3495303 - RNA, 12 nt, Human
cucgcccugggu

SEQ ID NO: 3495304 - RNA, 16 nt, Human
cucgccgucugugaau

SEQ ID NO: 3495305 - RNA, 15 nt, Human
cucgccuucaucucc

SEQ ID NO: 3495306 - RNA, 17 nt, Human
cucgccuucccuccugc

SEQ ID NO: 3495307 - RNA, 13 nt, Human
cucgcgacaaugc

SEQ ID NO: 3495308 - RNA, 21 nt, Human
cucgcuccccacucugcucug

SEQ ID NO: 3495309 - RNA, 15 nt, Human
cucgcucccucccag

SEQ ID NO: 3495310 - RNA, 12 nt, Human
cucgcucuguca

SEQ ID NO: 3495311 - RNA, 22 nt, Human
cucgcucuguugcccaggcugg

SEQ ID NO: 3495312 - RNA, 22 nt, Human
cucgcugagggcagacuggggc

SEQ ID NO: 3495313 - RNA, 17 nt, Human
cucgcugaugcugggcu

SEQ ID NO: 3495314 - RNA, 15 nt, Human
cucgcuggcccccac

SEQ ID NO: 3495315 - RNA, 20 nt, Human
cucgcuggcccccacuggcu

SEQ ID NO: 3495316 - RNA, 18 nt, Human
cucgcuguccuuucuaga

SEQ ID NO: 3495317 - RNA, 15 nt, Human
cucgcuguugcugaa

SEQ ID NO: 3495318 - RNA, 20 nt, Human
cucgcuuguaaauaccagga

SEQ ID NO: 3495319 - RNA, 17 nt, Human
cucgcuuuguugcccag

SEQ ID NO: 3495320 - RNA, 23 nt, Human
cucggaaccgcucaccuagagcc

SEQ ID NO: 3495321 - RNA, 21 nt, Human
cucggaacugcaugcugcugg

SEQ ID NO: 3495322 - RNA, 20 nt, Human
cucggaaggcuggcugggca

SEQ ID NO: 3495323 - RNA, 21 nt, Human
cucggaccccacuccggcccu

SEQ ID NO: 3495324 - RNA, 16 nt, Human
cucggagccucauccg

SEQ ID NO: 3495325 - RNA, 17 nt, Human
cucggaggaagccccca

SEQ ID NO: 3495326 - RNA, 12 nt, Human
cucggaggcugc

SEQ ID NO: 3495327 - RNA, 13 nt, Human
cucggaggcugcc

SEQ ID NO: 3495328 - RNA, 17 nt, Human
cucggagggauuccccu

SEQ ID NO: 3495329 - RNA, 22 nt, Human
cucggauaguugcuauuuuugu

SEQ ID NO: 3495330 - RNA, 18 nt, Human
cucggaucaggcucccag

SEQ ID NO: 3495331 - RNA, 15 nt, Human
cucggauccccuucc

SEQ ID NO: 3495332 - RNA, 14 nt, Human
cucggaucucuccu

SEQ ID NO: 3495333 - RNA, 15 nt, Human
cucggccccucccac

SEQ ID NO: 3495334 - RNA, 11 nt, Human
cucggccugcc

SEQ ID NO: 3495335 - RNA, 17 nt, Human
cucggcuccugcugcac

SEQ ID NO: 3495336 - RNA, 18 nt, Human
cucggcuccuggacucau

SEQ ID NO: 3495337 - RNA, 13 nt, Human
cucggcuggcucc

SEQ ID NO: 3495338 - RNA, 14 nt, Human
cucggcuggcuccc

SEQ ID NO: 3495339 - RNA, 21 nt, Human
cucggcuggcuccccugcagc

SEQ ID NO: 3495340 - RNA, 23 nt, Human
cucggcuggcuccccugcagccc

SEQ ID NO: 3495341 - RNA, 17 nt, Human
cucggcuuuucucagcu

SEQ ID NO: 3495342 - RNA, 12 nt, Human
cucgggaaccuc

SEQ ID NO: 3495343 - RNA, 16 nt, Human
cucgggaaccucacuc

SEQ ID NO: 3495344 - RNA, 22 nt, Human
cuccccagcauuccagccccuc

SEQ ID NO: 3495345 - RNA, 21 nt, Human
cuccccagccccuagcccagg

SEQ ID NO: 3495346 - RNA, 13 nt, Human
cuccccagcccug

SEQ ID NO: 3495347 - RNA, 15 nt, Human
cuccccagcccuggc

SEQ ID NO: 3495348 - RNA, 17 nt, Human
cuccccaggccaggcca

SEQ ID NO: 3495349 - RNA, 20 nt, Human
cuccccagggaagcagcagc

SEQ ID NO: 3495350 - RNA, 11 nt, Human
cuccccagggg

SEQ ID NO: 3495351 - RNA, 23 nt, Human
cuccccagguccagcucuggagg

SEQ ID NO: 3495352 - RNA, 20 nt, Human
cuccccaugcaggugguguc

SEQ ID NO: 3495353 - RNA, 16 nt, Human
cuccccaugugccugc

SEQ ID NO: 3495354 - RNA, 20 nt, Human
cuccccaugugccugcacca

SEQ ID NO: 3495355 - RNA, 21 nt, Human
cuccccauuagagucagccuu

SEQ ID NO: 3495356 - RNA, 16 nt, Human
cuccccauuagcuuuc

SEQ ID NO: 3495357 - RNA, 17 nt, Human
cuccccauuucccaucu

SEQ ID NO: 3495358 - RNA, 16 nt, Human
cucccccaacagcugg

SEQ ID NO: 3495359 - RNA, 21 nt, Human
cucccccaacagcuggacccu

SEQ ID NO: 3495360 - RNA, 23 nt, Human
cucccccaacccccaccccacac

SEQ ID NO: 3495361 - RNA, 19 nt, Human
cucccccacccccucccca

SEQ ID NO: 3495362 - RNA, 20 nt, Human
cucccccagcaaagccccca

SEQ ID NO: 3495363 - RNA, 13 nt, Human
cucccccagccac

SEQ ID NO: 3495364 - RNA, 14 nt, Human
cucccccagccacu

SEQ ID NO: 3495365 - RNA, 20 nt, Human
cucccccagccccauccucu

SEQ ID NO: 3495366 - RNA, 22 nt, Human
cucccccaguuccucccaggaa

SEQ ID NO: 3495367 - RNA, 12 nt, Human
cucccccauccu

SEQ ID NO: 3495368 - RNA, 16 nt, Human
cucccccaucucccac

SEQ ID NO: 3495369 - RNA, 13 nt, Human
cucccccccgggg

SEQ ID NO: 3495370 - RNA, 18 nt, Human
cuccccccuccucugaaa

SEQ ID NO: 3495371 - RNA, 12 nt, Human
cucccccgccac

SEQ ID NO: 3495372 - RNA, 14 nt, Human
cucccccgccacuc

SEQ ID NO: 3495373 - RNA, 15 nt, Human
cucccccgccacucc

SEQ ID NO: 3495374 - RNA, 13 nt, Human
cucccccgggagg

SEQ ID NO: 3495375 - RNA, 22 nt, Human
cucccccuaaaccccuguccca

SEQ ID NO: 3495376 - RNA, 17 nt, Human
cucccccucccccuucu

SEQ ID NO: 3495377 - RNA, 15 nt, Human
cucccccuccuuccc

SEQ ID NO: 3495378 - RNA, 11 nt, Human
cucccccugcc

SEQ ID NO: 3495379 - RNA, 13 nt, Human
cucccccugccag

SEQ ID NO: 3495380 - RNA, 16 nt, Human
cucccccugccagugc

SEQ ID NO: 3495381 - RNA, 19 nt, Human
cucccccugccagugccuu

SEQ ID NO: 3495382 - RNA, 13 nt, Human
cucccccugggcu

SEQ ID NO: 3495383 - RNA, 23 nt, Human
cucccccugggcucugccccagc

SEQ ID NO: 3495384 - RNA, 11 nt, Human
cucccccuucu

SEQ ID NO: 3495385 - RNA, 15 nt, Human
cucccccuuuucccu

SEQ ID NO: 3495386 - RNA, 20 nt, Human
cuccccgcaguguuugugug

SEQ ID NO: 3495387 - RNA, 23 nt, Human
cuccccgccguacaguucuccag

SEQ ID NO: 3495388 - RNA, 15 nt, Human
cuccccgccuguucc

SEQ ID NO: 3495389 - RNA, 17 nt, Human
cuccccggcacccucug

SEQ ID NO: 3495390 - RNA, 13 nt, Human
cuccccggcccua

SEQ ID NO: 3495391 - RNA, 15 nt, Human
cuccccuaaugccug

SEQ ID NO: 3495392 - RNA, 17 nt, Human
cuccccuauccacccag

SEQ ID NO: 3495393 - RNA, 19 nt, Human
cuccccuauccacccagcc

SEQ ID NO: 3495394 - RNA, 13 nt, Human
cuccccucacagc

SEQ ID NO: 3495395 - RNA, 15 nt, Human
cuccccucacagccu

SEQ ID NO: 3495396 - RNA, 19 nt, Human
cuccccucacagccucuga

SEQ ID NO: 3495397 - RNA, 13 nt, Human
cuccccucagagu

SEQ ID NO: 3495398 - RNA, 16 nt, Human
cuccccucagagugca

SEQ ID NO: 3495399 - RNA, 15 nt, Human
cuccccuccaucccu

SEQ ID NO: 3495400 - RNA, 19 nt, Human
cuccccuccaucccuggcc

SEQ ID NO: 3495401 - RNA, 16 nt, Human
cuccccuccccaacug

SEQ ID NO: 3495402 - RNA, 14 nt, Human
cuccccucccuccu

SEQ ID NO: 3495403 - RNA, 24 nt, Human
cuccccuccggacuggugcccucc

SEQ ID NO: 3495404 - RNA, 12 nt, Human
cuccccuccucu

SEQ ID NO: 3495405 - RNA, 20 nt, Human
cuccccuccucugcuugcca

SEQ ID NO: 3495406 - RNA, 20 nt, Human
cuccccuccuugccuccugu

SEQ ID NO: 3495407 - RNA, 12 nt, Human
cuccccucucuu

SEQ ID NO: 3495408 - RNA, 14 nt, Human
cuccccucugcugg

SEQ ID NO: 3495409 - RNA, 16 nt, Human
cuccccucugcuggcc

SEQ ID NO: 3495410 - RNA, 15 nt, Human
cuccccucuuccucu

SEQ ID NO: 3495411 - RNA, 16 nt, Human
cuccccucuuccucuu

SEQ ID NO: 3495412 - RNA, 11 nt, Human
cuccccugagg

SEQ ID NO: 3495413 - RNA, 22 nt, Human
cuccccugaggcucagggaaag

SEQ ID NO: 3495414 - RNA, 18 nt, Human
cuccccugcacuguaaaa

SEQ ID NO: 3495415 - RNA, 21 nt, Human
cuccccugcacuguaaaaugu

SEQ ID NO: 3495416 - RNA, 21 nt, Human
cuccccugccagggcagggcc

SEQ ID NO: 3495417 - RNA, 14 nt, Human
cuccccugccauuu

SEQ ID NO: 3495418 - RNA, 13 nt, Human
cuccccugccccc

SEQ ID NO: 3495419 - RNA, 14 nt, Human
cuccccugccccca

SEQ ID NO: 3495420 - RNA, 20 nt, Human
cuccccugcccccaggacug

SEQ ID NO: 3495421 - RNA, 23 nt, Human
cuccccugcccccaggacugggc

SEQ ID NO: 3495422 - RNA, 13 nt, Human
cuccccugcccug

SEQ ID NO: 3495423 - RNA, 14 nt, Human
cuccccugccuugc

SEQ ID NO: 3495424 - RNA, 18 nt, Human
cuccccugcugcaggggc

SEQ ID NO: 3495425 - RNA, 13 nt, Human
cuccccugcuggg

SEQ ID NO: 3495426 - RNA, 23 nt, Human
cuccccugcuggguguggcgcag

SEQ ID NO: 3495427 - RNA, 22 nt, Human
cuccccuggaacugucucucau

SEQ ID NO: 3495428 - RNA, 14 nt, Human
cuccccugugccag

SEQ ID NO: 3495429 - RNA, 16 nt, Human
cuccccugugccagcc

SEQ ID NO: 3495430 - RNA, 22 nt, Human
cuccccuguuccccucucccuu

SEQ ID NO: 3495431 - RNA, 16 nt, Human
cuccccuucacuccca

SEQ ID NO: 3495432 - RNA, 19 nt, Human
cuccccuuccucacugccc

SEQ ID NO: 3495433 - RNA, 23 nt, Human
cuccccuugauuuaaacacacag

SEQ ID NO: 3495434 - RNA, 15 nt, Human
cuccccuugccagcu

SEQ ID NO: 3495435 - RNA, 16 nt, Human
cuccccuugccagcug

SEQ ID NO: 3495436 - RNA, 12 nt, Human
cuccccuugggc

SEQ ID NO: 3495437 - RNA, 20 nt, Human
cucccgaauagcugggacua

SEQ ID NO: 3495438 - RNA, 18 nt, Human
cucccgagcuccucuucc

SEQ ID NO: 3495439 - RNA, 16 nt, Human
cucccgaguagcuggg

SEQ ID NO: 3495440 - RNA, 17 nt, Human
cucccgaguagcuggga

SEQ ID NO: 3495441 - RNA, 21 nt, Human
cucccgccccccacacuuccc

SEQ ID NO: 3495442 - RNA, 22 nt, Human
cucccgccccccacacuucccu

SEQ ID NO: 3495443 - RNA, 23 nt, Human
cucccgccuccaaccccucgccc

SEQ ID NO: 3495444 - RNA, 11 nt, Human
cucccgcggug

SEQ ID NO: 3495445 - RNA, 15 nt, Human
cucccgcugcugcug

SEQ ID NO: 3495446 - RNA, 16 nt, Human
cucccgcugcugcugc

SEQ ID NO: 3495447 - RNA, 22 nt, Human
cucccggaauuccgucaccacg

SEQ ID NO: 3495448 - RNA, 15 nt, Human
cucccggagggcccu

SEQ ID NO: 3495449 - RNA, 16 nt, Human
cucccggcccugccug

SEQ ID NO: 3495450 - RNA, 18 nt, Human
cucccggcccugccugcu

SEQ ID NO: 3495451 - RNA, 16 nt, Human
cucccggcguggugga

SEQ ID NO: 3495452 - RNA, 20 nt, Human
cucccggcuaugggggcacu

SEQ ID NO: 3495453 - RNA, 16 nt, Human
cucccgggacucacug

SEQ ID NO: 3495454 - RNA, 16 nt, Human
cucccgggcccucccu

SEQ ID NO: 3495455 - RNA, 19 nt, Human
cucccgggcccucccuugg

SEQ ID NO: 3495456 - RNA, 15 nt, Human
cucccggggcagggc

SEQ ID NO: 3495457 - RNA, 16 nt, Human
cucccggggcagggca

SEQ ID NO: 3495458 - RNA, 18 nt, Human
cucccggggcagggcagc

SEQ ID NO: 3495459 - RNA, 17 nt, Human
cucuacugaaugucauu

SEQ ID NO: 3495460 - RNA, 19 nt, Human
cucuacugggaaggcuacu

SEQ ID NO: 3495461 - RNA, 20 nt, Human
cucuacuuagcaugucccua

SEQ ID NO: 3495462 - RNA, 13 nt, Human
cucuacuucagga

SEQ ID NO: 3495463 - RNA, 15 nt, Human
cucuacuuuccaggc

SEQ ID NO: 3495464 - RNA, 13 nt, Human
cucuacuuugagg

SEQ ID NO: 3495465 - RNA, 15 nt, Human
cucuagaauuuuaag

SEQ ID NO: 3495466 - RNA, 16 nt, Human
cucuagacacugccac

SEQ ID NO: 3495467 - RNA, 22 nt, Human
cucuagagcagacuacagcugg

SEQ ID NO: 3495468 - RNA, 23 nt, Human
cucuagaguagagguauaauugu

SEQ ID NO: 3495469 - RNA, 13 nt, Human
cucuagaguccaa

SEQ ID NO: 3495470 - RNA, 19 nt, Human
cucuagauaccuaaaacau

SEQ ID NO: 3495471 - RNA, 21 nt, Human
cucuagauaccuaaaacauaa

SEQ ID NO: 3495472 - RNA, 16 nt, Human
cucuagaugagcuggg

SEQ ID NO: 3495473 - RNA, 12 nt, Human
cucuagauucca

SEQ ID NO: 3495474 - RNA, 19 nt, Human
cucuagcagcaccuccugu

SEQ ID NO: 3495475 - RNA, 21 nt, Human
cucuagccggagugacagagu

SEQ ID NO: 3495476 - RNA, 11 nt, Human
cucuagcugaa

SEQ ID NO: 3495477 - RNA, 18 nt, Human
cucuagcuggugguuuca

SEQ ID NO: 3495478 - RNA, 17 nt, Human
cucuaggaaauauuuau

SEQ ID NO: 3495479 - RNA, 18 nt, Human
cucuagggaaggccaccu

SEQ ID NO: 3495480 - RNA, 19 nt, Human
cucuagggaaggccaccug

SEQ ID NO: 3495481 - RNA, 20 nt, Human
cucuagggaaggccaccugc

SEQ ID NO: 3495482 - RNA, 22 nt, Human
cucuagggaaggccaccugcag

SEQ ID NO: 3495483 - RNA, 18 nt, Human
cucuagggaccagaacca

SEQ ID NO: 3495484 - RNA, 16 nt, Human
cucuagggaccccucc

SEQ ID NO: 3495485 - RNA, 19 nt, Human
cucuagggaccccuccucc

SEQ ID NO: 3495486 - RNA, 17 nt, Human
cucuaggggucaggcuc

SEQ ID NO: 3495487 - RNA, 12 nt, Human
cucuagggucca

SEQ ID NO: 3495488 - RNA, 17 nt, Human
cucuaguaguuaaaaaa

SEQ ID NO: 3495489 - RNA, 16 nt, Human
ccccaggacugggcca

SEQ ID NO: 3495490 - RNA, 22 nt, Human
ccccaggacugggccacuucug

SEQ ID NO: 3495491 - RNA, 13 nt, Human
ccccaggaggcca

SEQ ID NO: 3495492 - RNA, 14 nt, Human
ccccaggcaggcug

SEQ ID NO: 3495493 - RNA, 12 nt, Human
ccccaggccagg

SEQ ID NO: 3495494 - RNA, 13 nt, Human
ccccaggccaggc

SEQ ID NO: 3495495 - RNA, 15 nt, Human
ccccaggccaggcca

SEQ ID NO: 3495496 - RNA, 22 nt, Human
ccccaggccaggccaccaggau

SEQ ID NO: 3495497 - RNA, 11 nt, Human
ccccaggccca

SEQ ID NO: 3495498 - RNA, 17 nt, Human
ccccaggcccacucagg

SEQ ID NO: 3495499 - RNA, 12 nt, Human
ccccaggcccca

SEQ ID NO: 3495500 - RNA, 18 nt, Human
ccccaggccccaggaagc

SEQ ID NO: 3495501 - RNA, 13 nt, Human
ccccaggccccga

SEQ ID NO: 3495502 - RNA, 23 nt, Human
ccccaggccugaaagaggcugag

SEQ ID NO: 3495503 - RNA, 15 nt, Human
ccccaggcucgugga

SEQ ID NO: 3495504 - RNA, 11 nt, Human
ccccagggcac

SEQ ID NO: 3495505 - RNA, 15 nt, Human
ccccagggcacagga

SEQ ID NO: 3495506 - RNA, 22 nt, Human
ccccagggcacaggagcuaccu

SEQ ID NO: 3495507 - RNA, 14 nt, Human
ccccagggcacccu

SEQ ID NO: 3495508 - RNA, 15 nt, Human
ccccagggcacccug

SEQ ID NO: 3495509 - RNA, 12 nt, Human
ccccagggcacu

SEQ ID NO: 3495510 - RNA, 22 nt, Human
ccccagggcagccagggagagc

SEQ ID NO: 3495511 - RNA, 13 nt, Human
cuccuucccucuc

SEQ ID NO: 3495512 - RNA, 17 nt, Human
cuccuucccucucugga

SEQ ID NO: 3495513 - RNA, 18 nt, Human
cuccuucccucucuggag

SEQ ID NO: 3495514 - RNA, 14 nt, Human
cuccuucccuuccu

SEQ ID NO: 3495515 - RNA, 21 nt, Human
cuccuuccugccaccugcugc

SEQ ID NO: 3495516 - RNA, 13 nt, Human
cuccuuccugccc

SEQ ID NO: 3495517 - RNA, 23 nt, Human
cuccuuccuggagcccagaggag

SEQ ID NO: 3495518 - RNA, 12 nt, Human
cuccuuccuggc

SEQ ID NO: 3495519 - RNA, 12 nt, Human
cuccuuccuguc

SEQ ID NO: 3495520 - RNA, 16 nt, Human
cuccuuccugucuucc

SEQ ID NO: 3495521 - RNA, 13 nt, Human
cuccuuccugugu

SEQ ID NO: 3495522 - RNA, 23 nt, Human
cuccuuccuuacccaaacuguuc

SEQ ID NO: 3495523 - RNA, 17 nt, Human
cuccuuccuugaccagc

SEQ ID NO: 3495524 - RNA, 19 nt, Human
cuccuucguaucccgaguc

SEQ ID NO: 3495525 - RNA, 22 nt, Human
cuccuucguaucccgagucugg

SEQ ID NO: 3495526 - RNA, 20 nt, Human
cuccuucucugucucaugug

SEQ ID NO: 3495527 - RNA, 23 nt, Human
cuccuucugagcuccuguccccu

SEQ ID NO: 3495528 - RNA, 15 nt, Human
cuccuucuguccuac

SEQ ID NO: 3495529 - RNA, 19 nt, Human
cuccuugaguguaugagua

SEQ ID NO: 3495530 - RNA, 18 nt, Human
cuccuugauaacagcuac

SEQ ID NO: 3495531 - RNA, 22 nt, Human
cuccuugauauuuguauuuauu

SEQ ID NO: 3495532 - RNA, 21 nt, Human
cuccuugauuuuagccuucuc

SEQ ID NO: 3495533 - RNA, 13 nt, Human
cuccuugcaguuc

SEQ ID NO: 3495534 - RNA, 18 nt, Human
cuccuugccuccugugua

SEQ ID NO: 3495535 - RNA, 17 nt, Human
cuccuugcucugcaggc

SEQ ID NO: 3495536 - RNA, 13 nt, Human
cuccuuggaaauc

SEQ ID NO: 3495537 - RNA, 10 nt, Human
cuccuuggcc

SEQ ID NO: 3495538 - RNA, 17 nt, Human
cuccuuggcuuaccuga

SEQ ID NO: 3495539 - RNA, 14 nt, Human
cuccuugggaggaa

SEQ ID NO: 3495540 - RNA, 19 nt, Human
cuccuugggaggaagcaga

SEQ ID NO: 3495541 - RNA, 23 nt, Human
cuccuugggaggaagcagaauaa

SEQ ID NO: 3495542 - RNA, 16 nt, Human
cuccuugggaggcccc

SEQ ID NO: 3495543 - RNA, 17 nt, Human
cuccuugggaggcccca

SEQ ID NO: 3495544 - RNA, 21 nt, Human
cuccuugggcacuuuuuaauu

SEQ ID NO: 3495545 - RNA, 12 nt, Human
cuccuugggccc

SEQ ID NO: 3495546 - RNA, 17 nt, Human
cuccuugggcccuuuga

SEQ ID NO: 3495547 - RNA, 14 nt, Human
cuccuuggugccug

SEQ ID NO: 3495548 - RNA, 16 nt, Human
cuccuuguaaagacug

SEQ ID NO: 3495549 - RNA, 19 nt, Human
cuccuugugggccugggcu

SEQ ID NO: 3495550 - RNA, 14 nt, Human
cuccuuguuccuag

SEQ ID NO: 3495551 - RNA, 15 nt, Human
cuccuuguuccuaga

SEQ ID NO: 3495552 - RNA, 15 nt, Human
cuccuuuacccucau

SEQ ID NO: 3495553 - RNA, 17 nt, Human
cuccuuuacccucaucu

SEQ ID NO: 3495554 - RNA, 17 nt, Human
cuccuuucacaaccuuc

SEQ ID NO: 3495555 - RNA, 16 nt, Human
cuccuuucugugcccu

SEQ ID NO: 3495556 - RNA, 17 nt, Human
cuccuuucugugcccua

SEQ ID NO: 3495557 - RNA, 14 nt, Human
cuccuuucuuucua

SEQ ID NO: 3495558 - RNA, 19 nt, Human
cuccuuucuuuuucuucuu

SEQ ID NO: 3495559 - RNA, 21 nt, Human
cuccuuucuuuuucuucuucc

SEQ ID NO: 3495560 - RNA, 15 nt, Human
cuccuuugcacugag

SEQ ID NO: 3495561 - RNA, 16 nt, Human
cuccuuugcacugagg

SEQ ID NO: 3495562 - RNA, 20 nt, Human
cuccuuugcacugagggcca

SEQ ID NO: 3495563 - RNA, 17 nt, Human
cuccuuuggccauucca

SEQ ID NO: 3495564 - RNA, 17 nt, Human
cuccuuuguacuuugug

SEQ ID NO: 3495565 - RNA, 20 nt, Human
cuccuuuguacuuugugcuu

SEQ ID NO: 3495566 - RNA, 13 nt, Human
cuccuuuguauau

SEQ ID NO: 3495567 - RNA, 17 nt, Human
cuccuuuguauucuguc

SEQ ID NO: 3495568 - RNA, 19 nt, Human
cuccuuuguauucugucuu

SEQ ID NO: 3495569 - RNA, 12 nt, Human
cuccuuuuaugu

SEQ ID NO: 3495570 - RNA, 15 nt, Human
cuccuuuuaugugua

SEQ ID NO: 3495571 - RNA, 13 nt, Human
cuccuuuucccaa

SEQ ID NO: 3495572 - RNA, 11 nt, Human
cuccuuuucuu

SEQ ID NO: 3495573 - RNA, 15 nt, Human
cuccuuuuucucccu

SEQ ID NO: 3495574 - RNA, 18 nt, Human
cuccuuuuucucccucug

SEQ ID NO: 3495575 - RNA, 19 nt, Human
cuccuuuuucucccucugg

SEQ ID NO: 3495576 - RNA, 17 nt, Human
cucgaacuccugaccuu

SEQ ID NO: 3495577 - RNA, 17 nt, Human
cucgaacuccugggcuc

SEQ ID NO: 3495578 - RNA, 13 nt, Human
cucgaacuggcug

SEQ ID NO: 3495579 - RNA, 12 nt, Human
cucgaauuuugu

SEQ ID NO: 3495580 - RNA, 21 nt, Human
cucgagacacagugaagcaaa

SEQ ID NO: 3495581 - RNA, 16 nt, Human
cucgagcaugccugga

SEQ ID NO: 3495582 - RNA, 17 nt, Human
cucgagcgcccugcaga

SEQ ID NO: 3495583 - RNA, 23 nt, Human
cucgagcgcccugcagacccugc

SEQ ID NO: 3495584 - RNA, 16 nt, Human
cucgaggacuguauuu

SEQ ID NO: 3495585 - RNA, 22 nt, Human
cucgaggacuguauuugugacu

SEQ ID NO: 3495586 - RNA, 14 nt, Human
cucgaggggugggc

SEQ ID NO: 3495587 - RNA, 16 nt, Human
cucgaggggugggcug

SEQ ID NO: 3495588 - RNA, 17 nt, Human
cucgaggggugggcugg

SEQ ID NO: 3495589 - RNA, 13 nt, Human
cucgaggugccuu

SEQ ID NO: 3495590 - RNA, 14 nt, Human
cucgaggugccuuc

SEQ ID NO: 3495591 - RNA, 15 nt, Human
cucgaggugccuucu

SEQ ID NO: 3495592 - RNA, 17 nt, Human
cucgaguacugugggca

SEQ ID NO: 3495593 - RNA, 18 nt, Human
cucgaguacugugggcaa

SEQ ID NO: 3495594 - RNA, 20 nt, Human
cucgaguuacagacaaagcg

SEQ ID NO: 3495595 - RNA, 14 nt, Human
cucgauccaaauug

SEQ ID NO: 3495596 - RNA, 24 nt, Human
cucgauguggucacagcuguauag

SEQ ID NO: 3495597 - RNA, 19 nt, Human
cucgauguguacucuaacu

SEQ ID NO: 3495598 - RNA, 14 nt, Human
cucgauuucuccag

SEQ ID NO: 3495599 - RNA, 14 nt, Human
cucgauuuuguauc

SEQ ID NO: 3495600 - RNA, 15 nt, Human
cucgauuuuguaucu

SEQ ID NO: 3495601 - RNA, 16 nt, Human
cucgauuuuguaucug

SEQ ID NO: 3495602 - RNA, 23 nt, Human
cucgcaaaaacguaucuccuaau

SEQ ID NO: 3495603 - RNA, 12 nt, Human
cucgcaggaaga

SEQ ID NO: 3495604 - RNA, 13 nt, Human
cucgcaggaagac

SEQ ID NO: 3495605 - RNA, 18 nt, Human
cucgcaggccucccugcc

SEQ ID NO: 3495606 - RNA, 18 nt, Human
cucgcauaggaccuuucc

SEQ ID NO: 3495607 - RNA, 14 nt, Human
cucgcaucauugca

SEQ ID NO: 3495608 - RNA, 21 nt, Human
cucgcauuugucaaugacagu

SEQ ID NO: 3495609 - RNA, 22 nt, Human
cucgcauuugucaaugacaguu

SEQ ID NO: 3495610 - RNA, 22 nt, Human
cucgccaagcaggacagugcuu

SEQ ID NO: 3495611 - RNA, 19 nt, Human
cucgccaccccuccuuccu

SEQ ID NO: 3495612 - RNA, 23 nt, Human
cucgcccaccgcaugcccccucg

SEQ ID NO: 3495613 - RNA, 16 nt, Human
cucgcccagucccagc

SEQ ID NO: 3495614 - RNA, 14 nt, Human
cucgcccgcccacu

SEQ ID NO: 3495615 - RNA, 15 nt, Human
cucgcccgcccacug

SEQ ID NO: 3495616 - RNA, 16 nt, Human
cucgcccgcccacugu

SEQ ID NO: 3495617 - RNA, 20 nt, Human
cucgcccgcccacuguccug

SEQ ID NO: 3495618 - RNA, 14 nt, Human
cucgcccggaaccc

SEQ ID NO: 3495619 - RNA, 15 nt, Human
cucgcccuccuuucu

SEQ ID NO: 3495620 - RNA, 17 nt, Human
cucgcccuccuuucugu

SEQ ID NO: 3495621 - RNA, 20 nt, Human
cucgcccugcgguagauggg

SEQ ID NO: 3495622 - RNA, 13 nt, Human
cucgcccuggguc

SEQ ID NO: 3495623 - RNA, 20 nt, Human
cucgccggacccucuaaccu

SEQ ID NO: 3495624 - RNA, 23 nt, Human
cucgccugacaaccacuggucug

SEQ ID NO: 3495625 - RNA, 16 nt, Human
cucgccuggccugagg

SEQ ID NO: 3495626 - RNA, 20 nt, Human
cucgccuggccugaggucuc

SEQ ID NO: 3495627 - RNA, 13 nt, Human
cucgccuucccuc

SEQ ID NO: 3495628 - RNA, 16 nt, Human
cucgccuucccuccug

SEQ ID NO: 3495629 - RNA, 20 nt, Human
cucgccuucccuccugcuuu

SEQ ID NO: 3495630 - RNA, 16 nt, Human
cucgcgcuugcuggcc

SEQ ID NO: 3495631 - RNA, 21 nt, Human
cucgcggccucuucucucaga

SEQ ID NO: 3495632 - RNA, 22 nt, Human
cucgcuagcaguggcaggcaga

SEQ ID NO: 3495633 - RNA, 17 nt, Human
cucgcuccaacuccaac

SEQ ID NO: 3495634 - RNA, 24 nt, Human
cucgcuccaacuccaacauccacu

SEQ ID NO: 3495635 - RNA, 22 nt, Human
cucuguauuugaaucagccuac

SEQ ID NO: 3495636 - RNA, 15 nt, Human
cucuguauuuuuucu

SEQ ID NO: 3495637 - RNA, 20 nt, Human
cucuguauuuuuucuugcau

SEQ ID NO: 3495638 - RNA, 13 nt, Human
cucugucaggccu

SEQ ID NO: 3495639 - RNA, 17 nt, Human
cucugucagucacagcc

SEQ ID NO: 3495640 - RNA, 19 nt, Human
cucugucagucacagccac

SEQ ID NO: 3495641 - RNA, 14 nt, Human
cucuguccagggcc

SEQ ID NO: 3495642 - RNA, 17 nt, Human
cucuguccauuuaucca

SEQ ID NO: 3495643 - RNA, 21 nt, Human
cucuguccauuuauccacagg

SEQ ID NO: 3495644 - RNA, 22 nt, Human
cucugucccacuuggcaucagc

SEQ ID NO: 3495645 - RNA, 14 nt, Human
cucuguccccagcc

SEQ ID NO: 3495646 - RNA, 16 nt, Human
cucuguccccagccug

SEQ ID NO: 3495647 - RNA, 21 nt, Human
cucuguccccuucucucaucu

SEQ ID NO: 3495648 - RNA, 11 nt, Human
cucuguccuga

SEQ ID NO: 3495649 - RNA, 22 nt, Human
cucuguccugaaggccugaggu

SEQ ID NO: 3495650 - RNA, 15 nt, Human
cucuguccugcuucu

SEQ ID NO: 3495651 - RNA, 14 nt, Human
cucuguccugggag

SEQ ID NO: 3495652 - RNA, 19 nt, Human
cucugucgcccagucugga

SEQ ID NO: 3495653 - RNA, 20 nt, Human
cucugucuaccaucucccuc

SEQ ID NO: 3495654 - RNA, 21 nt, Human
cucugucuaccaucucccucg

SEQ ID NO: 3495655 - RNA, 15 nt, Human
cucugucuagcaugc

SEQ ID NO: 3495656 - RNA, 20 nt, Human
cucugucuagcaugccaaca

SEQ ID NO: 3495657 - RNA, 23 nt, Human
cucugucucagacuuuuguacau

SEQ ID NO: 3495658 - RNA, 14 nt, Human
cucugucucaucca

SEQ ID NO: 3495659 - RNA, 14 nt, Human
cucugucucaugug

SEQ ID NO: 3495660 - RNA, 22 nt, Human
cucugucuccuaagcuggagug

SEQ ID NO: 3495661 - RNA, 13 nt, Human
cucugucucgagc

SEQ ID NO: 3495662 - RNA, 20 nt, Human
cucugucucgagcgcccugc

SEQ ID NO: 3495663 - RNA, 21 nt, Human
cucugucucgagcgcccugca

SEQ ID NO: 3495664 - RNA, 23 nt, Human
cucugucucgagcgcccugcaga

SEQ ID NO: 3495665 - RNA, 14 nt, Human
cucugucugcccuu

SEQ ID NO: 3495666 - RNA, 15 nt, Human
ccccagggccugagc

SEQ ID NO: 3495667 - RNA, 19 nt, Human
ccccagggccugagccugg

SEQ ID NO: 3495668 - RNA, 20 nt, Human
ccccaggggaaagaugagcu

SEQ ID NO: 3495669 - RNA, 22 nt, Human
ccccagggggucucacccaugc

SEQ ID NO: 3495670 - RNA, 17 nt, Human
ccccaggggucccagcc

SEQ ID NO: 3495671 - RNA, 19 nt, Human
ccccaggggucccagccac

SEQ ID NO: 3495672 - RNA, 19 nt, Human
ccccagggucuucccuacc

SEQ ID NO: 3495673 - RNA, 17 nt, Human
ccccagguccagcucug

SEQ ID NO: 3495674 - RNA, 22 nt, Human
ccccagguccagcucuggaggg

SEQ ID NO: 3495675 - RNA, 14 nt, Human
ccccaggugccagu

SEQ ID NO: 3495676 - RNA, 23 nt, Human
ccccagguggcugacccaguccc

SEQ ID NO: 3495677 - RNA, 17 nt, Human
ccccaguagcugggacc

SEQ ID NO: 3495678 - RNA, 14 nt, Human
ccccagucagccuc

SEQ ID NO: 3495679 - RNA, 21 nt, Human
ccccagucagccucucuccca

SEQ ID NO: 3495680 - RNA, 23 nt, Human
ccccagucagccucucucccagu

SEQ ID NO: 3495681 - RNA, 19 nt, Human
ccccaguccccaccccugc

SEQ ID NO: 3495682 - RNA, 14 nt, Human
ccccagugcccaca

SEQ ID NO: 3495683 - RNA, 15 nt, Human
ccccaguucugcucc

SEQ ID NO: 3495684 - RNA, 16 nt, Human
ccccaguucugcuccu

SEQ ID NO: 3495685 - RNA, 23 nt, Human
ccccaguuugcagaaaagcaccu

SEQ ID NO: 3495686 - RNA, 22 nt, Human
ccccauaauuuuuuuuuuccuu

SEQ ID NO: 3495687 - RNA, 12 nt, Human
ccccauagccac

SEQ ID NO: 3495688 - RNA, 14 nt, Human
ccccauauggucau

SEQ ID NO: 3495689 - RNA, 14 nt, Human
ccccaucagugcuc

SEQ ID NO: 3495690 - RNA, 14 nt, Human
ccccaucccaugcu

SEQ ID NO: 3495691 - RNA, 15 nt, Human
ccccauccuggccca

SEQ ID NO: 3495692 - RNA, 22 nt, Human
ccccaucgccagcugaugacuc

SEQ ID NO: 3495693 - RNA, 21 nt, Human
ccccaucucaugccccuggcu

SEQ ID NO: 3495694 - RNA, 13 nt, Human
ccccaucucccug

SEQ ID NO: 3495695 - RNA, 12 nt, Human
ccccaucucucc

SEQ ID NO: 3495696 - RNA, 16 nt, Human
ccccaucucucccucc

SEQ ID NO: 3495697 - RNA, 19 nt, Human
ccccaucucucccuccccu

SEQ ID NO: 3495698 - RNA, 24 nt, Human
ccccaucugcgggggcagugcuca

SEQ ID NO: 3495699 - RNA, 14 nt, Human
ccccaucugggucc

SEQ ID NO: 3495700 - RNA, 16 nt, Human
ccccaucuucacccag

SEQ ID NO: 3495701 - RNA, 18 nt, Human
ccccaucuucgggaccag

SEQ ID NO: 3495702 - RNA, 18 nt, Human
ccccaugaggaaggaaca

SEQ ID NO: 3495703 - RNA, 18 nt, Human
ccccaugccuguccagcc

SEQ ID NO: 3495704 - RNA, 24 nt, Human
ccccaugccuguccagccugggca

SEQ ID NO: 3495705 - RNA, 18 nt, Human
ccccaugccuguggcugc

SEQ ID NO: 3495706 - RNA, 13 nt, Human
ccccaugcuggcc

SEQ ID NO: 3495707 - RNA, 17 nt, Human
ccccaugcuuccuugcc

SEQ ID NO: 3495708 - RNA, 24 nt, Human
ccccaugcuuccuugccugaugac

SEQ ID NO: 3495709 - RNA, 17 nt, Human
ccccaugucucucagaa

SEQ ID NO: 3495710 - RNA, 14 nt, Human
ccccaugugccugc

SEQ ID NO: 3495711 - RNA, 18 nt, Human
ccccauguguccugguuc

SEQ ID NO: 3495712 - RNA, 19 nt, Human
ccccauguuguaaugcugc

SEQ ID NO: 3495713 - RNA, 20 nt, Human
ccccauguuguaaugcugca

SEQ ID NO: 3495714 - RNA, 23 nt, Human
ccccauguuguaaugcugcacuu

SEQ ID NO: 3495715 - RNA, 13 nt, Human
ccccauucccgca

SEQ ID NO: 3495716 - RNA, 22 nt, Human
ccccauucgcgcucugcucagu

SEQ ID NO: 3495717 - RNA, 21 nt, Human
ccccauucuuccuaguuuucu

SEQ ID NO: 3495718 - RNA, 21 nt, Human
ccccauucuuugcuugaacac

SEQ ID NO: 3495719 - RNA, 15 nt, Human
ccccauuguggucac

SEQ ID NO: 3495720 - RNA, 18 nt, Human
ccccauuuagguuucuga

SEQ ID NO: 3495721 - RNA, 14 nt, Human
ccccauuucugagg

SEQ ID NO: 3495722 - RNA, 24 nt, Human
cccccaaagauagacagguccuga

SEQ ID NO: 3495723 - RNA, 22 nt, Human
cccccaaagcagcccuuccccc

SEQ ID NO: 3495724 - RNA, 12 nt, Human
cccccaaagugg

SEQ ID NO: 3495725 - RNA, 21 nt, Human
cccccaacacugugcccuggu

SEQ ID NO: 3495726 - RNA, 20 nt, Human
cccccaacucugagcccaug

SEQ ID NO: 3495727 - RNA, 19 nt, Human
cccccaagcuguuuucuuc

SEQ ID NO: 3495728 - RNA, 19 nt, Human
cccccacacacacacacau

SEQ ID NO: 3495729 - RNA, 17 nt, Human
cccccacaccucaguuc

SEQ ID NO: 3495730 - RNA, 14 nt, Human
cccccacaccuggc

SEQ ID NO: 3495731 - RNA, 18 nt, Human
cccccacaccuggcccug

SEQ ID NO: 3495732 - RNA, 16 nt, Human
cccccacagugcuguc

SEQ ID NO: 3495733 - RNA, 16 nt, Human
cccccacauggugaug

SEQ ID NO: 3495734 - RNA, 24 nt, Human
cccccacccaagggccuggccuga

SEQ ID NO: 3495735 - RNA, 12 nt, Human
cccccacccccu

SEQ ID NO: 3495736 - RNA, 15 nt, Human
cccccaccccuuccc

SEQ ID NO: 3495737 - RNA, 18 nt, Human
cccccacccuguuccugc

SEQ ID NO: 3495738 - RNA, 12 nt, Human
cccccacccuuu

SEQ ID NO: 3495739 - RNA, 20 nt, Human
cccccaccucugcugccucc

SEQ ID NO: 3495740 - RNA, 20 nt, Human
cccccaccuggcucaccuug

SEQ ID NO: 3495741 - RNA, 14 nt, Human
cccccacuccagcu

SEQ ID NO: 3495742 - RNA, 14 nt, Human
cccccacucccuca

SEQ ID NO: 3495743 - RNA, 21 nt, Human
cccccacucucauuccccagg

SEQ ID NO: 3495744 - RNA, 22 nt, Human
cccccagaaccuguccuugcac

SEQ ID NO: 3495745 - RNA, 15 nt, Human
cccccagagccacag

SEQ ID NO: 3495746 - RNA, 16 nt, Human
cccccagagcccaggc

SEQ ID NO: 3495747 - RNA, 23 nt, Human
cccccagagcccaggcucggccu

SEQ ID NO: 3495748 - RNA, 20 nt, Human
cccccagccaugccagcugg

SEQ ID NO: 3495749 - RNA, 23 nt, Human
cccccagccaugccagcuggccu

SEQ ID NO: 3495750 - RNA, 14 nt, Human
cccccagcccaggg

SEQ ID NO: 3495751 - RNA, 12 nt, Human
cccccagcccca

SEQ ID NO: 3495752 - RNA, 14 nt, Human
cccccagcccugug

SEQ ID NO: 3495753 - RNA, 12 nt, Human
cccccagccuau

SEQ ID NO: 3495754 - RNA, 20 nt, Human
cccccagccuaugagcaucc

SEQ ID NO: 3495755 - RNA, 15 nt, Human
cccccagccugggcc

SEQ ID NO: 3495756 - RNA, 13 nt, Human
cccccagccuguc

SEQ ID NO: 3495757 - RNA, 12 nt, Human
cccccagcuccc

SEQ ID NO: 3495758 - RNA, 12 nt, Human
cccccagcucug

SEQ ID NO: 3495759 - RNA, 19 nt, Human
cccccagcuucacuucuga

SEQ ID NO: 3495760 - RNA, 18 nt, Human
cccccaggguccugggag

SEQ ID NO: 3495761 - RNA, 20 nt, Human
cccccagguuccgaagaaga

SEQ ID NO: 3495762 - RNA, 15 nt, Human
cccccaguccccacc

SEQ ID NO: 3495763 - RNA, 16 nt, Human
cccccaucauccucug

SEQ ID NO: 3495764 - RNA, 17 nt, Human
cccccauccuggcccau

SEQ ID NO: 3495765 - RNA, 16 nt, Human
cccccaucuucgggac

SEQ ID NO: 3495766 - RNA, 22 nt, Human
cccccauguuguaaugcugcac

SEQ ID NO: 3495767 - RNA, 20 nt, Human
cccccauucucaucugcacc

SEQ ID NO: 3495768 - RNA, 21 nt, Human
ccccccaagggaggcugcugc

SEQ ID NO: 3495769 - RNA, 17 nt, Human
ccccccacacuucccug

SEQ ID NO: 3495770 - RNA, 12 nt, Human
ccccccaccccu

SEQ ID NO: 3495771 - RNA, 13 nt, Human
ccccccaccccug

SEQ ID NO: 3495772 - RNA, 12 nt, Human
ccccccagccuc

SEQ ID NO: 3495773 - RNA, 13 nt, Human
ccccccagccucu

SEQ ID NO: 3495774 - RNA, 12 nt, Human
ccccccagcuca

SEQ ID NO: 3495775 - RNA, 13 nt, Human
cccccccuuccac

SEQ ID NO: 3495776 - RNA, 12 nt, Human
ccccccucccag

SEQ ID NO: 3495777 - RNA, 12 nt, Human
ccccccugucac

SEQ ID NO: 3495778 - RNA, 11 nt, Human
ccccccuucca

SEQ ID NO: 3495779 - RNA, 13 nt, Human
ccccccuuccacu

SEQ ID NO: 3495780 - RNA, 14 nt, Human
cucuucccuucaac

SEQ ID NO: 3495781 - RNA, 14 nt, Human
cucuucccuuuccc

SEQ ID NO: 3495782 - RNA, 22 nt, Human
cucuuccgaaaaauccucuucc

SEQ ID NO: 3495783 - RNA, 19 nt, Human
cucuuccggagauguagca

SEQ ID NO: 3495784 - RNA, 23 nt, Human
cucuuccggagauguagcaaaac

SEQ ID NO: 3495785 - RNA, 20 nt, Human
cucuuccuacccaaccacuc

SEQ ID NO: 3495786 - RNA, 19 nt, Human
cucuuccuacccugccucc

SEQ ID NO: 3495787 - RNA, 16 nt, Human
cucuuccuacuggucu

SEQ ID NO: 3495788 - RNA, 17 nt, Human
cucuuccuaucccaucc

SEQ ID NO: 3495789 - RNA, 20 nt, Human
cucuuccuaucccucuccua

SEQ ID NO: 3495790 - RNA, 12 nt, Human
cucuuccucuga

SEQ ID NO: 3495791 - RNA, 13 nt, Human
cucuuccucugag

SEQ ID NO: 3495792 - RNA, 14 nt, Human
cucuuccucuugac

SEQ ID NO: 3495793 - RNA, 17 nt, Human
cucuuccucuugacccu

SEQ ID NO: 3495794 - RNA, 19 nt, Human
cucuuccucuugacccugc

SEQ ID NO: 3495795 - RNA, 14 nt, Human
cucuuccugcaagg

SEQ ID NO: 3495796 - RNA, 14 nt, Human
cucuuccugccccu

SEQ ID NO: 3495797 - RNA, 16 nt, Human
cucuuccugccccucu

SEQ ID NO: 3495798 - RNA, 15 nt, Human
cucuuccuucccugc

SEQ ID NO: 3495799 - RNA, 16 nt, Human
cucuuccuuuuaucag

SEQ ID NO: 3495800 - RNA, 16 nt, Human
cucuucgaagccuugc

SEQ ID NO: 3495801 - RNA, 21 nt, Human
cucuucgcgcccgccccugca

SEQ ID NO: 3495802 - RNA, 14 nt, Human
cucuucuacucacu

SEQ ID NO: 3495803 - RNA, 21 nt, Human
cucuucuagaugauuuuuuga

SEQ ID NO: 3495804 - RNA, 15 nt, Human
cucuucucaagugcc

SEQ ID NO: 3495805 - RNA, 18 nt, Human
cucuucucauuacuuguu

SEQ ID NO: 3495806 - RNA, 12 nt, Human
cucuucucauuu

SEQ ID NO: 3495807 - RNA, 19 nt, Human
cucuucucauuucaccccu

SEQ ID NO: 3495808 - RNA, 14 nt, Human
cucuucuccacugg

SEQ ID NO: 3495809 - RNA, 12 nt, Human
cucuucuccagg

SEQ ID NO: 3495810 - RNA, 12 nt, Human
cucuucucccag

SEQ ID NO: 3495811 - RNA, 21 nt, Human
cucuucuccccuuccauuucu

SEQ ID NO: 3495812 - RNA, 16 nt, Human
cucuucuccuuucaca

SEQ ID NO: 3495813 - RNA, 13 nt, Human
cucuucucucaga

SEQ ID NO: 3495814 - RNA, 14 nt, Human
cucuucucucagac

SEQ ID NO: 3495815 - RNA, 14 nt, Human
cucuucucuccagc

SEQ ID NO: 3495816 - RNA, 22 nt, Human
cucuucucuccagcugacuaaa

SEQ ID NO: 3495817 - RNA, 17 nt, Human
cucuucucucugcucug

SEQ ID NO: 3495818 - RNA, 16 nt, Human
cucuucugaauaaagc

SEQ ID NO: 3495819 - RNA, 16 nt, Human
cucuucugacgugccu

SEQ ID NO: 3495820 - RNA, 15 nt, Human
cucuucugagcuauu

SEQ ID NO: 3495821 - RNA, 16 nt, Human
cucuucugcaucuugg

SEQ ID NO: 3495822 - RNA, 13 nt, Human
cucggagccucau

SEQ ID NO: 3495823 - RNA, 12 nt, Human
cucggaggcccc

SEQ ID NO: 3495824 - RNA, 15 nt, Human
cucggaggcugcccc

SEQ ID NO: 3495825 - RNA, 17 nt, Human
cucggaguaucugggaa

SEQ ID NO: 3495826 - RNA, 15 nt, Human
cucggaguucuucuu

SEQ ID NO: 3495827 - RNA, 18 nt, Human
cucggauaguugcuauuu

SEQ ID NO: 3495828 - RNA, 21 nt, Human
cucggcaacuaagcagucccu

SEQ ID NO: 3495829 - RNA, 16 nt, Human
cucggcccccuccauc

SEQ ID NO: 3495830 - RNA, 17 nt, Human
cucggcccccuccaucg

SEQ ID NO: 3495831 - RNA, 21 nt, Human
cucggccgucuucacucgccc

SEQ ID NO: 3495832 - RNA, 20 nt, Human
cucggccucccaaagugcug

SEQ ID NO: 3495833 - RNA, 13 nt, Human
cucggccugcccc

SEQ ID NO: 3495834 - RNA, 15 nt, Human
cucggccuggcuccu

SEQ ID NO: 3495835 - RNA, 22 nt, Human
cucggccuggucaggcccuggu

SEQ ID NO: 3495836 - RNA, 14 nt, Human
cucggcucacugca

SEQ ID NO: 3495837 - RNA, 13 nt, Human
cucggcucagcuc

SEQ ID NO: 3495838 - RNA, 22 nt, Human
cucggcucagugcaaccucugc

SEQ ID NO: 3495839 - RNA, 23 nt, Human
cucggcucagugcaaccucugcu

SEQ ID NO: 3495840 - RNA, 13 nt, Human
cucggcuccugcu

SEQ ID NO: 3495841 - RNA, 14 nt, Human
cucggcuccugcug

SEQ ID NO: 3495842 - RNA, 16 nt, Human
cucggcuccugcugca

SEQ ID NO: 3495843 - RNA, 17 nt, Human
cucggcuccuggacuca

SEQ ID NO: 3495844 - RNA, 22 nt, Human
cucggcuggcuccccugcagcc

SEQ ID NO: 3495845 - RNA, 13 nt, Human
cucgggcccaccu

SEQ ID NO: 3495846 - RNA, 17 nt, Human
cucgggcccaccuggcc

SEQ ID NO: 3495847 - RNA, 12 nt, Human
cucgggcccagc

SEQ ID NO: 3495848 - RNA, 14 nt, Human
cucgggcccagccc

SEQ ID NO: 3495849 - RNA, 16 nt, Human
cucgggcccagccccc

SEQ ID NO: 3495850 - RNA, 19 nt, Human
cucgggcgagucacugccu

SEQ ID NO: 3495851 - RNA, 21 nt, Human
cucgggcgagucacugccucu

SEQ ID NO: 3495852 - RNA, 22 nt, Human
cucgggcgagucacugccucuc

SEQ ID NO: 3495853 - RNA, 23 nt, Human
cucgggcugagaacccugcgugg

SEQ ID NO: 3495854 - RNA, 13 nt, Human
cucggggagccuu

SEQ ID NO: 3495855 - RNA, 16 nt, Human
cucggggauguguccu

SEQ ID NO: 3495856 - RNA, 16 nt, Human
cucggggugcacagga

SEQ ID NO: 3495857 - RNA, 17 nt, Human
cucggggugcacaggag

SEQ ID NO: 3495858 - RNA, 19 nt, Human
cucggggugcacaggaggg

SEQ ID NO: 3495859 - RNA, 14 nt, Human
cucggugggagcca

SEQ ID NO: 3495860 - RNA, 19 nt, Human
cucggugguaccaggucuc

SEQ ID NO: 3495861 - RNA, 16 nt, Human
cucgguguccccacca

SEQ ID NO: 3495862 - RNA, 15 nt, Human
cucgguuugccaaaa

SEQ ID NO: 3495863 - RNA, 13 nt, Human
cucguauagcaug

SEQ ID NO: 3495864 - RNA, 14 nt, Human
cucguauagcaugc

SEQ ID NO: 3495865 - RNA, 12 nt, Human
cucguccucccc

SEQ ID NO: 3495866 - RNA, 14 nt, Human
cucguccucccccu

SEQ ID NO: 3495867 - RNA, 15 nt, Human
cucguccucccccug

SEQ ID NO: 3495868 - RNA, 17 nt, Human
cucguccucccccugcc

SEQ ID NO: 3495869 - RNA, 18 nt, Human
cucguccucccccugcca

SEQ ID NO: 3495870 - RNA, 14 nt, Human
cucguccucguuug

SEQ ID NO: 3495871 - RNA, 19 nt, Human
cucguccucguuuguguuc

SEQ ID NO: 3495872 - RNA, 17 nt, Human
cucgucucuuuuacccu

SEQ ID NO: 3495873 - RNA, 14 nt, Human
cucgucuucauuaa

SEQ ID NO: 3495874 - RNA, 18 nt, Human
cucgugauuggcauauaa

SEQ ID NO: 3495875 - RNA, 16 nt, Human
cucgugcaucccugag

SEQ ID NO: 3495876 - RNA, 17 nt, Human
cucgugcaucccugaga

SEQ ID NO: 3495877 - RNA, 21 nt, Human
cucgugccaccccgagggcug

SEQ ID NO: 3495878 - RNA, 24 nt, Human
cucgugccagucgcgcugccugug

SEQ ID NO: 3495879 - RNA, 15 nt, Human
cucgugcuuuaagug

SEQ ID NO: 3495880 - RNA, 14 nt, Human
cucguggacaccug

SEQ ID NO: 3495881 - RNA, 12 nt, Human
cucguggccagc

SEQ ID NO: 3495882 - RNA, 17 nt, Human
cucguggccagcccggc

SEQ ID NO: 3495883 - RNA, 18 nt, Human
cucguggccuuccccagc

SEQ ID NO: 3495884 - RNA, 15 nt, Human
cucgugggagagcca

SEQ ID NO: 3495885 - RNA, 15 nt, Human
cucgugguaggacug

SEQ ID NO: 3495886 - RNA, 16 nt, Human
cucgugguaggacugu

SEQ ID NO: 3495887 - RNA, 17 nt, Human
cucgugguaggacugua

SEQ ID NO: 3495888 - RNA, 17 nt, Human
cucguguauccuggggc

SEQ ID NO: 3495889 - RNA, 14 nt, Human
cucguuccuuucuc

SEQ ID NO: 3495890 - RNA, 16 nt, Human
cucguucucccuggga

SEQ ID NO: 3495891 - RNA, 19 nt, Human
cucguuuguguucuguuuu

SEQ ID NO: 3495892 - RNA, 17 nt, Human
cucuaaaauagccacuu

SEQ ID NO: 3495893 - RNA, 21 nt, Human
cucuaaaauauuuaugaagaa

SEQ ID NO: 3495894 - RNA, 13 nt, Human
cucuaaaaucugc

SEQ ID NO: 3495895 - RNA, 15 nt, Human
cucuaaaauuauaaa

SEQ ID NO: 3495896 - RNA, 17 nt, Human
cucuaaagaccaaacuu

SEQ ID NO: 3495897 - RNA, 20 nt, Human
cucuaaagaccaaacuucac

SEQ ID NO: 3495898 - RNA, 18 nt, Human
cucuaaagcaauaauggu

SEQ ID NO: 3495899 - RNA, 23 nt, Human
cucuaaagcaauaauggucccau

SEQ ID NO: 3495900 - RNA, 14 nt, Human
cucuaacagcacca

SEQ ID NO: 3495901 - RNA, 22 nt, Human
cucuaacagcucaggaucucuu

SEQ ID NO: 3495902 - RNA, 14 nt, Human
cucuaacaggggcu

SEQ ID NO: 3495903 - RNA, 19 nt, Human
cucuaacaguggacaaagu

SEQ ID NO: 3495904 - RNA, 15 nt, Human
cucuaaccacacagc

SEQ ID NO: 3495905 - RNA, 14 nt, Human
cucuaaccucgccc

SEQ ID NO: 3495906 - RNA, 19 nt, Human
cucuaaccucgcccucucc

SEQ ID NO: 3495907 - RNA, 13 nt, Human
cucuaacgccuga

SEQ ID NO: 3495908 - RNA, 17 nt, Human
cucuaacgccugagccc

SEQ ID NO: 3495909 - RNA, 21 nt, Human
cucuaacuguauauuuguaug

SEQ ID NO: 3495910 - RNA, 12 nt, Human
cucuaagaaaga

SEQ ID NO: 3495911 - RNA, 16 nt, Human
cucuaagaucuuagau

SEQ ID NO: 3495912 - RNA, 15 nt, Human
cucuaagauguuaua

SEQ ID NO: 3495913 - RNA, 14 nt, Human
cucuaagcacacgg

SEQ ID NO: 3495914 - RNA, 18 nt, Human
cucuaagucauguauguu

SEQ ID NO: 3495915 - RNA, 15 nt, Human
cucuaauaauaaaua

SEQ ID NO: 3495916 - RNA, 15 nt, Human
cucuaauacauucca

SEQ ID NO: 3495917 - RNA, 22 nt, Human
cucuaaucugugcuguuucaaa

SEQ ID NO: 3495918 - RNA, 15 nt, Human
cucuaauguuugcau

SEQ ID NO: 3495919 - RNA, 17 nt, Human
cucuaauguuugcauau

SEQ ID NO: 3495920 - RNA, 17 nt, Human
cucuaauucacagugcu

SEQ ID NO: 3495921 - RNA, 22 nt, Human
cucuaauucuaaccagagcaag

SEQ ID NO: 3495922 - RNA, 18 nt, Human
cucuaauucuauuaaagu

SEQ ID NO: 3495923 - RNA, 17 nt, Human
cucuaauucuuccuuug

SEQ ID NO: 3495924 - RNA, 15 nt, Human
cucuacacucuugua

SEQ ID NO: 3495925 - RNA, 20 nt, Human
cucuacagagcuucccugac

SEQ ID NO: 3495926 - RNA, 13 nt, Human
cucuacagaggcc

SEQ ID NO: 3495927 - RNA, 20 nt, Human
cucuuuaagggcaugccuug

SEQ ID NO: 3495928 - RNA, 21 nt, Human
cucuuuaagggcaugccuugu

SEQ ID NO: 3495929 - RNA, 18 nt, Human
cucuuuagaguuagacug

SEQ ID NO: 3495930 - RNA, 19 nt, Human
cucuuuagaguuagacugu

SEQ ID NO: 3495931 - RNA, 17 nt, Human
cucuuuaugacuguuuu

SEQ ID NO: 3495932 - RNA, 21 nt, Human
cucuuuaugcuugcaaaaacu

SEQ ID NO: 3495933 - RNA, 12 nt, Human
cucuuucaaaac

SEQ ID NO: 3495934 - RNA, 22 nt, Human
cucuuucaagcagucgugccug

SEQ ID NO: 3495935 - RNA, 13 nt, Human
cucuuucagcucc

SEQ ID NO: 3495936 - RNA, 12 nt, Human
cucuuucaucca

SEQ ID NO: 3495937 - RNA, 20 nt, Human
cucuuucccacccagccugg

SEQ ID NO: 3495938 - RNA, 14 nt, Human
cucuuucccugguc

SEQ ID NO: 3495939 - RNA, 19 nt, Human
cucuuuccuauuucagugu

SEQ ID NO: 3495940 - RNA, 20 nt, Human
cucuuuccuuggcucccauu

SEQ ID NO: 3495941 - RNA, 19 nt, Human
cucuuucgucacccuugga

SEQ ID NO: 3495942 - RNA, 12 nt, Human
cucuuucucucc

SEQ ID NO: 3495943 - RNA, 13 nt, Human
cucuuucucuccc

SEQ ID NO: 3495944 - RNA, 16 nt, Human
cucuuucucugccagu

SEQ ID NO: 3495945 - RNA, 18 nt, Human
cucuuucucuuucuuccu

SEQ ID NO: 3495946 - RNA, 17 nt, Human
cucuuucuggccugccu

SEQ ID NO: 3495947 - RNA, 21 nt, Human
cucuuucuuauaauacucugu

SEQ ID NO: 3495948 - RNA, 23 nt, Human
cucuuucuuauaauacucuguug

SEQ ID NO: 3495949 - RNA, 17 nt, Human
cucuuucuuccuuuacu

SEQ ID NO: 3495950 - RNA, 12 nt, Human
cucuuugaauuu

SEQ ID NO: 3495951 - RNA, 10 nt, Human
cucuuugaga

SEQ ID NO: 3495952 - RNA, 11 nt, Human
cucuuugauua

SEQ ID NO: 3495953 - RNA, 13 nt, Human
cucuuugauuauu

SEQ ID NO: 3495954 - RNA, 12 nt, Human
cucuuugcacua

SEQ ID NO: 3495955 - RNA, 15 nt, Human
cucuuugcuuugcuu

SEQ ID NO: 3495956 - RNA, 16 nt, Human
cucuuugcuuugcuuu

SEQ ID NO: 3495957 - RNA, 12 nt, Human
cucuuuggaaaa

SEQ ID NO: 3495958 - RNA, 15 nt, Human
cucuuuggacacuca

SEQ ID NO: 3495959 - RNA, 19 nt, Human
cucuuuggggucagccagg

SEQ ID NO: 3495960 - RNA, 20 nt, Human
cucuuuggggucagccaggg

SEQ ID NO: 3495961 - RNA, 19 nt, Human
cucuuuggucuacacugug

SEQ ID NO: 3495962 - RNA, 21 nt, Human
cucuuuggucuacacugugcu

SEQ ID NO: 3495963 - RNA, 23 nt, Human
cucuuuggucuacacugugcuga

SEQ ID NO: 3495964 - RNA, 12 nt, Human
cucuuuguaaga

SEQ ID NO: 3495965 - RNA, 18 nt, Human
cucuuugucuaaaacaau

SEQ ID NO: 3495966 - RNA, 22 nt, Human
cucuuugucuaaaacaauaaaa

SEQ ID NO: 3495967 - RNA, 20 nt, Human
cucuuuguucuaaagaugga

SEQ ID NO: 3495968 - RNA, 16 nt, Human
cucuuuuaccugcugc

SEQ ID NO: 3495969 - RNA, 16 nt, Human
cucuuuuagauauugu

SEQ ID NO: 3495970 - RNA, 22 nt, Human
cucuuuuauauuuguaggagaa

SEQ ID NO: 3495971 - RNA, 22 nt, Human
cucuuuuaucuccugaaaaaag

SEQ ID NO: 3495972 - RNA, 20 nt, Human
cucuuuuccaaacacaggca

SEQ ID NO: 3495973 - RNA, 11 nt, Human
cucuuuuccua

SEQ ID NO: 3495974 - RNA, 23 nt, Human
cucuuuuccuacuuuuccuuccc

SEQ ID NO: 3495975 - RNA, 14 nt, Human
cucuuuucugcauc

SEQ ID NO: 3495976 - RNA, 21 nt, Human
cucuuuucuuacuccuccucu

SEQ ID NO: 3495977 - RNA, 22 nt, Human
cucuuuucuuacuccuccucuu

SEQ ID NO: 3495978 - RNA, 18 nt, Human
cucuuuuuagggccaggc

SEQ ID NO: 3495979 - RNA, 22 nt, Human
cucuuuuuagggccaggcaggu

SEQ ID NO: 3495980 - RNA, 12 nt, Human
cucuuuuuccaa

SEQ ID NO: 3495981 - RNA, 21 nt, Human
cucuuuuuccaacuuggcugc

SEQ ID NO: 3495982 - RNA, 19 nt, Human
cucuuuuugguuguccuca

SEQ ID NO: 3495983 - RNA, 13 nt, Human
cucuuuuuuaagu

SEQ ID NO: 3495984 - RNA, 15 nt, Human
cucuaggaaauauuu

SEQ ID NO: 3495985 - RNA, 16 nt, Human
cucuaggccucuccag

SEQ ID NO: 3495986 - RNA, 16 nt, Human
cucuaggcucugccuu

SEQ ID NO: 3495987 - RNA, 12 nt, Human
cucuaggcuggg

SEQ ID NO: 3495988 - RNA, 22 nt, Human
cucuagggagggacauggcccc

SEQ ID NO: 3495989 - RNA, 20 nt, Human
cucuaggggucaggcuccau

SEQ ID NO: 3495990 - RNA, 19 nt, Human
cucuaggguugcuggagcc

SEQ ID NO: 3495991 - RNA, 21 nt, Human
cucuaggguugcuggagccug

SEQ ID NO: 3495992 - RNA, 13 nt, Human
cucuagguggggc

SEQ ID NO: 3495993 - RNA, 15 nt, Human
cucuagguggggcgg

SEQ ID NO: 3495994 - RNA, 16 nt, Human
cucuaguacugugaau

SEQ ID NO: 3495995 - RNA, 15 nt, Human
cucuagucaaugaca

SEQ ID NO: 3495996 - RNA, 21 nt, Human
cucuagugcccuccacagccg

SEQ ID NO: 3495997 - RNA, 15 nt, Human
cucuagugcugugaa

SEQ ID NO: 3495998 - RNA, 19 nt, Human
cucuagugcugugaaaaaa

SEQ ID NO: 3495999 - RNA, 16 nt, Human
cucuagugggacagcc

SEQ ID NO: 3496000 - RNA, 19 nt, Human
cucuagugggacagcccag

SEQ ID NO: 3496001 - RNA, 13 nt, Human
cucuaguucuuug

SEQ ID NO: 3496002 - RNA, 18 nt, Human
cucuaguucuuuguucau

SEQ ID NO: 3496003 - RNA, 15 nt, Human
cucuaguuugauuaa

SEQ ID NO: 3496004 - RNA, 22 nt, Human
cucuauaagcaaauugcuuuuu

SEQ ID NO: 3496005 - RNA, 17 nt, Human
cucuauaauugccacug

SEQ ID NO: 3496006 - RNA, 15 nt, Human
cucuauacaucucuc

SEQ ID NO: 3496007 - RNA, 19 nt, Human
cucuauaccaauaaaguga

SEQ ID NO: 3496008 - RNA, 17 nt, Human
cucuauauaaaaacaaa

SEQ ID NO: 3496009 - RNA, 18 nt, Human
cucuauccucucuuccuc

SEQ ID NO: 3496010 - RNA, 16 nt, Human
cucuaucuugcucugu

SEQ ID NO: 3496011 - RNA, 18 nt, Human
cucuaucuugcucuguaa

SEQ ID NO: 3496012 - RNA, 13 nt, Human
cucuaugagucua

SEQ ID NO: 3496013 - RNA, 19 nt, Human
cucuaugagucuagauguu

SEQ ID NO: 3496014 - RNA, 17 nt, Human
cucuaugccagcucagu

SEQ ID NO: 3496015 - RNA, 16 nt, Human
cucuaugccccaaaua

SEQ ID NO: 3496016 - RNA, 14 nt, Human
cucuaugcuuucca

SEQ ID NO: 3496017 - RNA, 17 nt, Human
cucuauguaucaaaugu

SEQ ID NO: 3496018 - RNA, 19 nt, Human
cucuauguucuaagaagug

SEQ ID NO: 3496019 - RNA, 23 nt, Human
cucuauuaccacugaagauagaa

SEQ ID NO: 3496020 - RNA, 24 nt, Human
cucuauuagacuuuagaaauaaau

SEQ ID NO: 3496021 - RNA, 14 nt, Human
cucuauuaugaaug

SEQ ID NO: 3496022 - RNA, 21 nt, Human
cucuauuaugaaugugaagcc

SEQ ID NO: 3496023 - RNA, 23 nt, Human
cucuauuaugaaugugaagccuu

SEQ ID NO: 3496024 - RNA, 20 nt, Human
cucuauucgccacacaguau

SEQ ID NO: 3496025 - RNA, 13 nt, Human
cucuauucuuuaa

SEQ ID NO: 3496026 - RNA, 20 nt, Human
cucuauuguagcauuucuug

SEQ ID NO: 3496027 - RNA, 12 nt, Human
cucuauuuaaau

SEQ ID NO: 3496028 - RNA, 12 nt, Human
cucuauuuaaua

SEQ ID NO: 3496029 - RNA, 17 nt, Human
cucuauuuaauauuuau

SEQ ID NO: 3496030 - RNA, 18 nt, Human
cucuauuucccccuuucu

SEQ ID NO: 3496031 - RNA, 18 nt, Human
cucucaacaccaugauuc

SEQ ID NO: 3496032 - RNA, 22 nt, Human
cucucaacaccaugauuccuuu

SEQ ID NO: 3496033 - RNA, 17 nt, Human
cucucaacacccaguuu

SEQ ID NO: 3496034 - RNA, 14 nt, Human
cucucaaguaauau

SEQ ID NO: 3496035 - RNA, 18 nt, Human
cucucaauauucaauaaa

SEQ ID NO: 3496036 - RNA, 13 nt, Human
cucucaauuuuug

SEQ ID NO: 3496037 - RNA, 22 nt, Human
cucucaauuuuugguugaauaa

SEQ ID NO: 3496038 - RNA, 14 nt, Human
cucucacacacaua

SEQ ID NO: 3496039 - RNA, 20 nt, Human
cucucacacugguucucaau

SEQ ID NO: 3496040 - RNA, 14 nt, Human
cucucacagacagg

SEQ ID NO: 3496041 - RNA, 18 nt, Human
cucucacagacaggaccc

SEQ ID NO: 3496042 - RNA, 13 nt, Human
cucucaccucagc

SEQ ID NO: 3496043 - RNA, 18 nt, Human
cucucaccuugguuccug

SEQ ID NO: 3496044 - RNA, 23 nt, Human
cucucacggccacacagcugccg

SEQ ID NO: 3496045 - RNA, 14 nt, Human
cucucacuccccau

SEQ ID NO: 3496046 - RNA, 19 nt, Human
cucucacuccccaugccac

SEQ ID NO: 3496047 - RNA, 14 nt, Human
cucucacuccuuga

SEQ ID NO: 3496048 - RNA, 12 nt, Human
cucucacugucu

SEQ ID NO: 3496049 - RNA, 15 nt, Human
cucucagaggcccca

SEQ ID NO: 3496050 - RNA, 23 nt, Human
cucucagccaacgaguaauuuau

SEQ ID NO: 3496051 - RNA, 13 nt, Human
cucucagcccaga

SEQ ID NO: 3496052 - RNA, 18 nt, Human
cucucagcccagaagaaa

SEQ ID NO: 3496053 - RNA, 13 nt, Human
cucucagcccuca

SEQ ID NO: 3496054 - RNA, 15 nt, Human
cucucagcuccaggu

SEQ ID NO: 3496055 - RNA, 18 nt, Human
cucucaggagcacaggca

SEQ ID NO: 3496056 - RNA, 20 nt, Human
cucucaggagcacaggcagc

SEQ ID NO: 3496057 - RNA, 21 nt, Human
cucucaggcaugccuguguga

SEQ ID NO: 3496058 - RNA, 21 nt, Human
cucucaggccaaacucaccug

SEQ ID NO: 3496059 - RNA, 23 nt, Human
cucucaggccaaacucaccugcc

SEQ ID NO: 3496060 - RNA, 15 nt, Human
cucucaggccagcug

SEQ ID NO: 3496061 - RNA, 18 nt, Human
cucucaggccagcugcuu

SEQ ID NO: 3496062 - RNA, 21 nt, Human
cucucaggccagcugcuuggg

SEQ ID NO: 3496063 - RNA, 22 nt, Human
cucucaggccagcugcuugggc

SEQ ID NO: 3496064 - RNA, 21 nt, Human
cucucaggccggcagccccag

SEQ ID NO: 3496065 - RNA, 18 nt, Human
cucucagggccaggccuc

SEQ ID NO: 3496066 - RNA, 14 nt, Human
cucucagucucuga

SEQ ID NO: 3496067 - RNA, 18 nt, Human
cucucagucucugagcag

SEQ ID NO: 3496068 - RNA, 17 nt, Human
cucucagugcccuccag

SEQ ID NO: 3496069 - RNA, 22 nt, Human
cucucaguugcagcccugcugc

SEQ ID NO: 3496070 - RNA, 16 nt, Human
cucucaucaacugaau

SEQ ID NO: 3496071 - RNA, 18 nt, Human
cucucaucgccagacaac

SEQ ID NO: 3496072 - RNA, 15 nt, Human
cauucuaucuacuga

SEQ ID NO: 3496073 - RNA, 18 nt, Human
cauucuaucuacugauuu

SEQ ID NO: 3496074 - RNA, 19 nt, Human
cauucuauugccuucuuug

SEQ ID NO: 3496075 - RNA, 23 nt, Human
cauucuauugccuucuuugaaga

SEQ ID NO: 3496076 - RNA, 16 nt, Human
cauucuauuuuagaau

SEQ ID NO: 3496077 - RNA, 14 nt, Human
cauucucaagggac

SEQ ID NO: 3496078 - RNA, 16 nt, Human
cauucucaagggacgu

SEQ ID NO: 3496079 - RNA, 22 nt, Human
cauucucaagggacguccucca

SEQ ID NO: 3496080 - RNA, 13 nt, Human
cauucucaggcac

SEQ ID NO: 3496081 - RNA, 16 nt, Human
cauucucauaauuccu

SEQ ID NO: 3496082 - RNA, 18 nt, Human
cauucucauaauuccuac

SEQ ID NO: 3496083 - RNA, 13 nt, Human
cauucucaucugc

SEQ ID NO: 3496084 - RNA, 23 nt, Human
cauucucaucugcacccuucuuu

SEQ ID NO: 3496085 - RNA, 17 nt, Human
cauucucauuggaaauu

SEQ ID NO: 3496086 - RNA, 14 nt, Human
cauucuccacagca

SEQ ID NO: 3496087 - RNA, 14 nt, Human
cauucuccaccugc

SEQ ID NO: 3496088 - RNA, 17 nt, Human
cauucuccaccugccag

SEQ ID NO: 3496089 - RNA, 12 nt, Human
cauucucccagg

SEQ ID NO: 3496090 - RNA, 22 nt, Human
cauucuccugccuguagcagug

SEQ ID NO: 3496091 - RNA, 23 nt, Human
cauucuccugccuguagcaguga

SEQ ID NO: 3496092 - RNA, 16 nt, Human
cauucucgcuucccug

SEQ ID NO: 3496093 - RNA, 15 nt, Human
cauucucucuccugu

SEQ ID NO: 3496094 - RNA, 16 nt, Human
cauucucucuccugua

SEQ ID NO: 3496095 - RNA, 23 nt, Human
cauucucugucucauccaucauc

SEQ ID NO: 3496096 - RNA, 16 nt, Human
cauucugaaggagccc

SEQ ID NO: 3496097 - RNA, 15 nt, Human
cauucugaauuaauu

SEQ ID NO: 3496098 - RNA, 20 nt, Human
cauucugaauuaauuaauuu

SEQ ID NO: 3496099 - RNA, 23 nt, Human
cauucugaauuaauuaauuugga

SEQ ID NO: 3496100 - RNA, 16 nt, Human
cauucugaccauuuca

SEQ ID NO: 3496101 - RNA, 17 nt, Human
cauucugaccauuucag

SEQ ID NO: 3496102 - RNA, 15 nt, Human
cauucugacucauau

SEQ ID NO: 3496103 - RNA, 12 nt, Human
cauucugacucg

SEQ ID NO: 3496104 - RNA, 20 nt, Human
cauucugauuuggaaaaaga

SEQ ID NO: 3496105 - RNA, 15 nt, Human
cauucugcauugcua

SEQ ID NO: 3496106 - RNA, 20 nt, Human
cauucugcauugcuagauaa

SEQ ID NO: 3496107 - RNA, 22 nt, Human
cauucugccaggcccccaagcc

SEQ ID NO: 3496108 - RNA, 17 nt, Human
cauucugcccuguggga

SEQ ID NO: 3496109 - RNA, 21 nt, Human
cauucugccgcccccuccuga

SEQ ID NO: 3496110 - RNA, 17 nt, Human
cauucugccugcccagg

SEQ ID NO: 3496111 - RNA, 13 nt, Human
cauucuggaauaa

SEQ ID NO: 3496112 - RNA, 12 nt, Human
cauucuggucuc

SEQ ID NO: 3496113 - RNA, 22 nt, Human
cauucuggucucgucuuccguc

SEQ ID NO: 3496114 - RNA, 18 nt, Human
cauucuggucucucuauu

SEQ ID NO: 3496115 - RNA, 21 nt, Human
cauucugucgccuuagcaugu

SEQ ID NO: 3496116 - RNA, 17 nt, Human
cauucugugaucauuua

SEQ ID NO: 3496117 - RNA, 17 nt, Human
cauucuguuaaucauua

SEQ ID NO: 3496118 - RNA, 13 nt, Human
cauucuuaaaaaa

SEQ ID NO: 3496119 - RNA, 14 nt, Human
cauucuuagcucuu

SEQ ID NO: 3496120 - RNA, 14 nt, Human
cauucuuauaaaua

SEQ ID NO: 3496121 - RNA, 15 nt, Human
cauucuuauaaauau

SEQ ID NO: 3496122 - RNA, 16 nt, Human
cauucuuauaaauaug

SEQ ID NO: 3496123 - RNA, 22 nt, Human
cauucuuauaaauaugaagcuc

SEQ ID NO: 3496124 - RNA, 17 nt, Human
cauucuucaagauccca

SEQ ID NO: 3496125 - RNA, 18 nt, Human
cauucuuccuaguuuucu

SEQ ID NO: 3496126 - RNA, 19 nt, Human
cauucuucucuagcuggug

SEQ ID NO: 3496127 - RNA, 20 nt, Human
cauucuucucuagcuggugg

SEQ ID NO: 3496128 - RNA, 16 nt, Human
cauucuucucuguugu

SEQ ID NO: 3496129 - RNA, 19 nt, Human
cauucuucugaucacugaa

SEQ ID NO: 3496130 - RNA, 23 nt, Human
cauucuucuguacgucugacagg

SEQ ID NO: 3496131 - RNA, 17 nt, Human
ccuuccugccaccaguc

SEQ ID NO: 3496132 - RNA, 17 nt, Human
ccuuccugccaccugcu

SEQ ID NO: 3496133 - RNA, 16 nt, Human
ccuuccuggacagcug

SEQ ID NO: 3496134 - RNA, 19 nt, Human
ccuuccuggacagcugugc

SEQ ID NO: 3496135 - RNA, 20 nt, Human
ccuuccuggacagcugugcc

SEQ ID NO: 3496136 - RNA, 20 nt, Human
ccuuccuggagacugcccag

SEQ ID NO: 3496137 - RNA, 21 nt, Human
ccuuccuggagcccagaggag

SEQ ID NO: 3496138 - RNA, 13 nt, Human
ccuuccuggccug

SEQ ID NO: 3496139 - RNA, 13 nt, Human
ccuuccugucuuc

SEQ ID NO: 3496140 - RNA, 19 nt, Human
ccuuccugucuuccugcau

SEQ ID NO: 3496141 - RNA, 15 nt, Human
ccuuccuguucugaa

SEQ ID NO: 3496142 - RNA, 17 nt, Human
ccuuccuguuuuucaca

SEQ ID NO: 3496143 - RNA, 22 nt, Human
ccuuccuguuuuucacauuuuc

SEQ ID NO: 3496144 - RNA, 14 nt, Human
ccuuccuucccugg

SEQ ID NO: 3496145 - RNA, 13 nt, Human
ccuuccuuccugu

SEQ ID NO: 3496146 - RNA, 23 nt, Human
ccuuccuugaccagcagauccca

SEQ ID NO: 3496147 - RNA, 13 nt, Human
ccuuccuugaccu

SEQ ID NO: 3496148 - RNA, 14 nt, Human
ccuuccuugaccuu

SEQ ID NO: 3496149 - RNA, 18 nt, Human
ccuuccuuguagccuuuu

SEQ ID NO: 3496150 - RNA, 14 nt, Human
ccuuccuuucucca

SEQ ID NO: 3496151 - RNA, 17 nt, Human
ccuuccuuucuccagga

SEQ ID NO: 3496152 - RNA, 19 nt, Human
ccuuccuuuuacuuuucuu

SEQ ID NO: 3496153 - RNA, 23 nt, Human
ccuucgauacaccgggccuggag

SEQ ID NO: 3496154 - RNA, 20 nt, Human
ccuucgcgguggaaggcccg

SEQ ID NO: 3496155 - RNA, 13 nt, Human
ccuucgcuccugu

SEQ ID NO: 3496156 - RNA, 14 nt, Human
ccuucgcuccugug

SEQ ID NO: 3496157 - RNA, 16 nt, Human
ccuucgcuucuugccu

SEQ ID NO: 3496158 - RNA, 16 nt, Human
ccuucggccuccaucc

SEQ ID NO: 3496159 - RNA, 18 nt, Human
ccuucgggcgucugugug

SEQ ID NO: 3496160 - RNA, 14 nt, Human
ccuucgggcugugc

SEQ ID NO: 3496161 - RNA, 15 nt, Human
ccuucgguacccacc

SEQ ID NO: 3496162 - RNA, 17 nt, Human
ccuucgguacccaccac

SEQ ID NO: 3496163 - RNA, 19 nt, Human
ccuucgguggaagagcuca

SEQ ID NO: 3496164 - RNA, 17 nt, Human
ccuucgugaacaucccc

SEQ ID NO: 3496165 - RNA, 19 nt, Human
ccuucgugacaauguuuac

SEQ ID NO: 3496166 - RNA, 22 nt, Human
ccuucuaaucugcuaugcuuga

SEQ ID NO: 3496167 - RNA, 14 nt, Human
ccuucuacacucuc

SEQ ID NO: 3496168 - RNA, 15 nt, Human
ccuucuacacucucc

SEQ ID NO: 3496169 - RNA, 17 nt, Human
ccuucuacacucuccug

SEQ ID NO: 3496170 - RNA, 19 nt, Human
ccuucuacacucuccuggg

SEQ ID NO: 3496171 - RNA, 22 nt, Human
ccuucuacacucuccugggccc

SEQ ID NO: 3496172 - RNA, 15 nt, Human
ccuucuaccugccac

SEQ ID NO: 3496173 - RNA, 18 nt, Human
ccuucuaccugccacuca

SEQ ID NO: 3496174 - RNA, 20 nt, Human
ccuucuaccugccacucaca

SEQ ID NO: 3496175 - RNA, 22 nt, Human
ccuucuagucuuggccagccaa

SEQ ID NO: 3496176 - RNA, 19 nt, Human
ccuucuauagcaucacuua

SEQ ID NO: 3496177 - RNA, 15 nt, Human
ccuucuauucuagcc

SEQ ID NO: 3496178 - RNA, 14 nt, Human
ccuucuauuugggg

SEQ ID NO: 3496179 - RNA, 16 nt, Human
ccuucuauuuggggcu

SEQ ID NO: 3496180 - RNA, 15 nt, Human
ccuucucagaagcac

SEQ ID NO: 3496181 - RNA, 17 nt, Human
ccuucucaucacucccc

SEQ ID NO: 3496182 - RNA, 21 nt, Human
ccuucucaucacuccccucca

SEQ ID NO: 3496183 - RNA, 11 nt, Human
ccuucuccauc

SEQ ID NO: 3496184 - RNA, 16 nt, Human
ccuucuccauccacau

SEQ ID NO: 3496185 - RNA, 22 nt, Human
ccuucuccauccacaugggagc

SEQ ID NO: 3496186 - RNA, 22 nt, Human
ccuucuccaucucucuggcccu

SEQ ID NO: 3496187 - RNA, 19 nt, Human
ccuucuccauggcccugcc

SEQ ID NO: 3496188 - RNA, 18 nt, Human
ccuucucccacucuccua

SEQ ID NO: 3496189 - RNA, 14 nt, Human
ccuucuccccagcu

SEQ ID NO: 3496190 - RNA, 21 nt, Human
ccuucuccccagcucccagga

SEQ ID NO: 3496191 - RNA, 16 nt, Human
ccuucucccccccggg

SEQ ID NO: 3496192 - RNA, 17 nt, Human
ccuucuccccugcacug

SEQ ID NO: 3496193 - RNA, 22 nt, Human
ccuucuccccugcacuguaaaa

SEQ ID NO: 3496194 - RNA, 15 nt, Human
ccuucuccucuugua

SEQ ID NO: 3496195 - RNA, 16 nt, Human
ccuucuccucuuguaa

SEQ ID NO: 3496196 - RNA, 17 nt, Human
ccuucuccuuccaacug

SEQ ID NO: 3496197 - RNA, 19 nt, Human
ccuucuccuuccaacugcu

SEQ ID NO: 3496198 - RNA, 20 nt, Human
ccuucucuacacucuuguaa

SEQ ID NO: 3496199 - RNA, 16 nt, Human
ccuucucucaucucuu

SEQ ID NO: 3496200 - RNA, 21 nt, Human
ccuucucucaucucuuagcuc

SEQ ID NO: 3496201 - RNA, 16 nt, Human
ccuucucuccagcccc

SEQ ID NO: 3496202 - RNA, 18 nt, Human
ccuucucuccagccccug

SEQ ID NO: 3496203 - RNA, 19 nt, Human
ccuucucuccagccccugg

SEQ ID NO: 3496204 - RNA, 15 nt, Human
ccuucucuccucccc

SEQ ID NO: 3496205 - RNA, 20 nt, Human
ccuucucucucaauuuuugg

SEQ ID NO: 3496206 - RNA, 17 nt, Human
ccuucucugaacacagg

SEQ ID NO: 3496207 - RNA, 18 nt, Human
ccuucucugaacacaggc

SEQ ID NO: 3496208 - RNA, 20 nt, Human
ccuucucugaacacaggcag

SEQ ID NO: 3496209 - RNA, 14 nt, Human
ccuucucugaagga

SEQ ID NO: 3496210 - RNA, 18 nt, Human
ccuucucugcccauuccc

SEQ ID NO: 3496211 - RNA, 19 nt, Human
ccuucucugcccauucccc

SEQ ID NO: 3496212 - RNA, 21 nt, Human
ccuucucuguagggaacucug

SEQ ID NO: 3496213 - RNA, 17 nt, Human
ccuucucuguucauuuc

SEQ ID NO: 3496214 - RNA, 17 nt, Human
ccuucucuucacaguca

SEQ ID NO: 3496215 - RNA, 12 nt, Human
ccuucucuucca

SEQ ID NO: 3496216 - RNA, 14 nt, Human
ccuucucuuccagg

SEQ ID NO: 3496217 - RNA, 22 nt, Human
cauugcuguaggaucuaaggcu

SEQ ID NO: 3496218 - RNA, 14 nt, Human
cauugcugugaaca

SEQ ID NO: 3496219 - RNA, 17 nt, Human
cauugcuguuaugucug

SEQ ID NO: 3496220 - RNA, 20 nt, Human
cauugcuguuaugucuguuu

SEQ ID NO: 3496221 - RNA, 21 nt, Human
cauugcuguuguccaacuauu

SEQ ID NO: 3496222 - RNA, 22 nt, Human
cauugcuguuguccaacuauuu

SEQ ID NO: 3496223 - RNA, 21 nt, Human
cauugcuguugucccucugcu

SEQ ID NO: 3496224 - RNA, 14 nt, Human
cauugcuuaccuug

SEQ ID NO: 3496225 - RNA, 17 nt, Human
cauugcuuaccuugguu

SEQ ID NO: 3496226 - RNA, 15 nt, Human
cauugcuucacuacc

SEQ ID NO: 3496227 - RNA, 22 nt, Human
cauugcuugugccacacccucc

SEQ ID NO: 3496228 - RNA, 11 nt, Human
cauugcuuuac

SEQ ID NO: 3496229 - RNA, 17 nt, Human
cauugcuuuacugucaa

SEQ ID NO: 3496230 - RNA, 18 nt, Human
cauugcuuucugaaauua

SEQ ID NO: 3496231 - RNA, 18 nt, Human
cauugcuuugaagcaguu

SEQ ID NO: 3496232 - RNA, 15 nt, Human
cauugcuuuuauuuu

SEQ ID NO: 3496233 - RNA, 17 nt, Human
cauugcuuuuauuuuga

SEQ ID NO: 3496234 - RNA, 11 nt, Human
cauugcuuuuc

SEQ ID NO: 3496235 - RNA, 19 nt, Human
cauuggaaauuuagcauug

SEQ ID NO: 3496236 - RNA, 16 nt, Human
cauuggaaauuucacg

SEQ ID NO: 3496237 - RNA, 19 nt, Human
cauuggaaauuucacguca

SEQ ID NO: 3496238 - RNA, 20 nt, Human
cauuggaagagcagcaccuc

SEQ ID NO: 3496239 - RNA, 22 nt, Human
cauuggaagcagguuaaauguu

SEQ ID NO: 3496240 - RNA, 15 nt, Human
cauuggauucugaga

SEQ ID NO: 3496241 - RNA, 22 nt, Human
cauuggcuuuauccucuuuaga

SEQ ID NO: 3496242 - RNA, 23 nt, Human
cauugggaaggggacccccgccc

SEQ ID NO: 3496243 - RNA, 22 nt, Human
cauugggcagcgcccuuccucu

SEQ ID NO: 3496244 - RNA, 17 nt, Human
cauugggccauguuuaa

SEQ ID NO: 3496245 - RNA, 17 nt, Human
cauuggggcucccagcc

SEQ ID NO: 3496246 - RNA, 19 nt, Human
cauuggggcucccagccag

SEQ ID NO: 3496247 - RNA, 21 nt, Human
cauuggggcucccagccaggc

SEQ ID NO: 3496248 - RNA, 21 nt, Human
cauugggguuccgcacuuucc

SEQ ID NO: 3496249 - RNA, 19 nt, Human
cauugggucuauuccagcu

SEQ ID NO: 3496250 - RNA, 22 nt, Human
cauugggucuauuccagcucau

SEQ ID NO: 3496251 - RNA, 19 nt, Human
cauuggguggguaaauuca

SEQ ID NO: 3496252 - RNA, 14 nt, Human
cauugguccaagau

SEQ ID NO: 3496253 - RNA, 14 nt, Human
cauugguuaauuuu

SEQ ID NO: 3496254 - RNA, 22 nt, Human
cauugguucccuuugcuccacc

SEQ ID NO: 3496255 - RNA, 15 nt, Human
cauuguaaaauaauu

SEQ ID NO: 3496256 - RNA, 23 nt, Human
cauuguaaacaaacucuugaaga

SEQ ID NO: 3496257 - RNA, 16 nt, Human
cauuguaauguuacug

SEQ ID NO: 3496258 - RNA, 17 nt, Human
cauuguaauguuacuga

SEQ ID NO: 3496259 - RNA, 13 nt, Human
cauuguaauguug

SEQ ID NO: 3496260 - RNA, 19 nt, Human
cauuguacaguuuguuuac

SEQ ID NO: 3496261 - RNA, 15 nt, Human
cauuguacuaccugu

SEQ ID NO: 3496262 - RNA, 19 nt, Human
cauuguagagcuucuggca

SEQ ID NO: 3496263 - RNA, 19 nt, Human
cauuguagcgucuuucuuu

SEQ ID NO: 3496264 - RNA, 17 nt, Human
cauuguauauaugugug

SEQ ID NO: 3496265 - RNA, 20 nt, Human
cauuguauauauguguguuu

SEQ ID NO: 3496266 - RNA, 22 nt, Human
cauuguaugauguguugugaua

SEQ ID NO: 3496267 - RNA, 15 nt, Human
cauuguauguaucua

SEQ ID NO: 3496268 - RNA, 15 nt, Human
cauuguaugugguca

SEQ ID NO: 3496269 - RNA, 15 nt, Human
cauuguauuagaucu

SEQ ID NO: 3496270 - RNA, 21 nt, Human
cauuguccaauccuauguuuu

SEQ ID NO: 3496271 - RNA, 14 nt, Human
cauuguccagagcu

SEQ ID NO: 3496272 - RNA, 15 nt, Human
cauuguccagagcug

SEQ ID NO: 3496273 - RNA, 18 nt, Human
cauuguccagagcugcuu

SEQ ID NO: 3496274 - RNA, 15 nt, Human
cauugucccucugcc

SEQ ID NO: 3496275 - RNA, 20 nt, Human
cauugucccucuucacuccc

SEQ ID NO: 3496276 - RNA, 17 nt, Human
cauugucucguuuguga

SEQ ID NO: 3496277 - RNA, 23 nt, Human
cauugucuucggaaaccuuggug

SEQ ID NO: 3496278 - RNA, 17 nt, Human
cauugugaacugacagg

SEQ ID NO: 3496279 - RNA, 18 nt, Human
cauugugauuggccugua

SEQ ID NO: 3496280 - RNA, 13 nt, Human
cauugugcuucuu

SEQ ID NO: 3496281 - RNA, 13 nt, Human
cauuguggcuccu

SEQ ID NO: 3496282 - RNA, 21 nt, Human
cauugugggauguucagcacu

SEQ ID NO: 3496283 - RNA, 22 nt, Human
cauugugggauguucagcacug

SEQ ID NO: 3496284 - RNA, 22 nt, Human
cauugugguuauuuuuauacag

SEQ ID NO: 3496285 - RNA, 13 nt, Human
cgagggcagcugc

SEQ ID NO: 3496286 - RNA, 16 nt, Human
cgagggcagcugcuau

SEQ ID NO: 3496287 - RNA, 22 nt, Human
cgaggggccuuuguucuggggg

SEQ ID NO: 3496288 - RNA, 21 nt, Human
cgaggggcgggacccaggcac

SEQ ID NO: 3496289 - RNA, 20 nt, Human
cgaggggcucucagcucagc

SEQ ID NO: 3496290 - RNA, 15 nt, Human
cgagggggcugcucc

SEQ ID NO: 3496291 - RNA, 15 nt, Human
cgaggguccuggcuc

SEQ ID NO: 3496292 - RNA, 16 nt, Human
cgaggguccuggcucc

SEQ ID NO: 3496293 - RNA, 14 nt, Human
cgagguagaguuug

SEQ ID NO: 3496294 - RNA, 16 nt, Human
cgaggucaacagagaa

SEQ ID NO: 3496295 - RNA, 21 nt, Human
cgaggugccuucuucagggcc

SEQ ID NO: 3496296 - RNA, 14 nt, Human
cgaguaagauuaag

SEQ ID NO: 3496297 - RNA, 15 nt, Human
cgaguaauaugccug

SEQ ID NO: 3496298 - RNA, 14 nt, Human
cgaguacugugggc

SEQ ID NO: 3496299 - RNA, 17 nt, Human
cgaguacugugggcaau

SEQ ID NO: 3496300 - RNA, 22 nt, Human
cgaguacugugggcaauuuaga

SEQ ID NO: 3496301 - RNA, 16 nt, Human
cgaguagaaaauguga

SEQ ID NO: 3496302 - RNA, 15 nt, Human
cgaguagcugggacu

SEQ ID NO: 3496303 - RNA, 13 nt, Human
cgaguauguguuu

SEQ ID NO: 3496304 - RNA, 18 nt, Human
cgagucaccuuccaggac

SEQ ID NO: 3496305 - RNA, 18 nt, Human
cgagucacugccucuccc

SEQ ID NO: 3496306 - RNA, 22 nt, Human
cgagucacugccucucccuggc

SEQ ID NO: 3496307 - RNA, 17 nt, Human
cgagucauccagaaugu

SEQ ID NO: 3496308 - RNA, 14 nt, Human
cgaguccaagcugg

SEQ ID NO: 3496309 - RNA, 17 nt, Human
cgagucucuucuccacu

SEQ ID NO: 3496310 - RNA, 15 nt, Human
cgagucugggacaca

SEQ ID NO: 3496311 - RNA, 11 nt, Human
cgagugccagg

SEQ ID NO: 3496312 - RNA, 18 nt, Human
cgaguggagucugccacc

SEQ ID NO: 3496313 - RNA, 19 nt, Human
cgaguggagucugccaccc

SEQ ID NO: 3496314 - RNA, 20 nt, Human
cgaguggauagaugcccugc

SEQ ID NO: 3496315 - RNA, 22 nt, Human
cgagugugaagcuuccuuggcu

SEQ ID NO: 3496316 - RNA, 15 nt, Human
cgauaaggaagaaac

SEQ ID NO: 3496317 - RNA, 15 nt, Human
cgauaaucagagaaa

SEQ ID NO: 3496318 - RNA, 18 nt, Human
cgauacaccgggccugga

SEQ ID NO: 3496319 - RNA, 20 nt, Human
cgauacugcgacuuucugcc

SEQ ID NO: 3496320 - RNA, 22 nt, Human
cgauacugcgacuuucugccug

SEQ ID NO: 3496321 - RNA, 14 nt, Human
cgauagugguggug

SEQ ID NO: 3496322 - RNA, 14 nt, Human
cgaucacaaaugac

SEQ ID NO: 3496323 - RNA, 19 nt, Human
cgaucacaaaugacuuuau

SEQ ID NO: 3496324 - RNA, 24 nt, Human
cgaucacaacgugcauugugcuuc

SEQ ID NO: 3496325 - RNA, 23 nt, Human
cgaucauggcucacugcagccuc

SEQ ID NO: 3496326 - RNA, 15 nt, Human
cgauccaccugucuc

SEQ ID NO: 3496327 - RNA, 13 nt, Human
cgauccugccacc

SEQ ID NO: 3496328 - RNA, 19 nt, Human
cgaucggggcacugcaggg

SEQ ID NO: 3496329 - RNA, 17 nt, Human
cgaucucuccuggccua

SEQ ID NO: 3496330 - RNA, 20 nt, Human
cgaugaugcuuguaacaaga

SEQ ID NO: 3496331 - RNA, 16 nt, Human
cgaugauucaggugca

SEQ ID NO: 3496332 - RNA, 14 nt, Human
cgaugcccagagac

SEQ ID NO: 3496333 - RNA, 20 nt, Human
cgaugcuccagccaaccccu

SEQ ID NO: 3496334 - RNA, 21 nt, Human
cgaugggggaugcuucaugug

SEQ ID NO: 3496335 - RNA, 19 nt, Human
cgauguaugcagcuaucug

SEQ ID NO: 3496336 - RNA, 19 nt, Human
cgauguggaacugcugcca

SEQ ID NO: 3496337 - RNA, 17 nt, Human
cgauguggcccuggccu

SEQ ID NO: 3496338 - RNA, 17 nt, Human
cgauguuauuagauguu

SEQ ID NO: 3496339 - RNA, 15 nt, Human
cgauucauauugaau

SEQ ID NO: 3496340 - RNA, 17 nt, Human
cgauucccucucccagg

SEQ ID NO: 3496341 - RNA, 19 nt, Human
cgauucccucucccaggcc

SEQ ID NO: 3496342 - RNA, 12 nt, Human
cgauucuccugc

SEQ ID NO: 3496343 - RNA, 18 nt, Human
cgauucuccugccucagc

SEQ ID NO: 3496344 - RNA, 21 nt, Human
cgauugcaggagucccugcca

SEQ ID NO: 3496345 - RNA, 14 nt, Human
cgauuuaagguauu

SEQ ID NO: 3496346 - RNA, 15 nt, Human
cgauuuaauucucuu

SEQ ID NO: 3496347 - RNA, 17 nt, Human
cgauuucuguaaacucu

SEQ ID NO: 3496348 - RNA, 12 nt, Human
cgauuucuguuu

SEQ ID NO: 3496349 - RNA, 13 nt, Human
cgauuuugccugu

SEQ ID NO: 3496350 - RNA, 13 nt, Human
cgauuuuguaucu

SEQ ID NO: 3496351 - RNA, 18 nt, Human
cgauuuuguaucugcagg

SEQ ID NO: 3496352 - RNA, 20 nt, Human
cgcaaacccccuuugugcug

SEQ ID NO: 3496353 - RNA, 17 nt, Human
cgcaaccaagugugcua

SEQ ID NO: 3496354 - RNA, 20 nt, Human
cgcaagccuguaaucccagc

SEQ ID NO: 3496355 - RNA, 21 nt, Human
cgcaagccuguaaucccagcu

SEQ ID NO: 3496356 - RNA, 11 nt, Human
cgcaagcugag

SEQ ID NO: 3496357 - RNA, 18 nt, Human
cgcaagggaggcccagcg

SEQ ID NO: 3496358 - RNA, 15 nt, Human
cgcaagucugcagcc

SEQ ID NO: 3496359 - RNA, 18 nt, Human
cgcaaugugcccccagac

SEQ ID NO: 3496360 - RNA, 20 nt, Human
cgcaaugugcccccagacgc

SEQ ID NO: 3496361 - RNA, 16 nt, Human
cggccuccauccugag

SEQ ID NO: 3496362 - RNA, 17 nt, Human
cggccuccauccugagg

SEQ ID NO: 3496363 - RNA, 18 nt, Human
cggccuccauccugaggc

SEQ ID NO: 3496364 - RNA, 23 nt, Human
cggccuccauccugaggcuccac

SEQ ID NO: 3496365 - RNA, 21 nt, Human
cggccuccguccaggagccug

SEQ ID NO: 3496366 - RNA, 19 nt, Human
cggccuccuaaagugcugg

SEQ ID NO: 3496367 - RNA, 23 nt, Human
cggccuccucuucaccccggcag

SEQ ID NO: 3496368 - RNA, 21 nt, Human
cggccuccuucugagcuccug

SEQ ID NO: 3496369 - RNA, 13 nt, Human
cggccucuaaccc

SEQ ID NO: 3496370 - RNA, 17 nt, Human
cggccucuaaccccagg

SEQ ID NO: 3496371 - RNA, 14 nt, Human
cggccucucuggcc

SEQ ID NO: 3496372 - RNA, 16 nt, Human
cggccucucuggccuc

SEQ ID NO: 3496373 - RNA, 19 nt, Human
cggccucucuggccuccca

SEQ ID NO: 3496374 - RNA, 21 nt, Human
cggccucucuggccucccacc

SEQ ID NO: 3496375 - RNA, 13 nt, Human
cggccucugccuu

SEQ ID NO: 3496376 - RNA, 13 nt, Human
cggccucuucucu

SEQ ID NO: 3496377 - RNA, 15 nt, Human
cggccugaugcuccc

SEQ ID NO: 3496378 - RNA, 13 nt, Human
cggccugccagga

SEQ ID NO: 3496379 - RNA, 18 nt, Human
cggccugcucccagcagc

SEQ ID NO: 3496380 - RNA, 19 nt, Human
cggccugcucccagcagcc

SEQ ID NO: 3496381 - RNA, 12 nt, Human
cggccuguccuc

SEQ ID NO: 3496382 - RNA, 14 nt, Human
cggccuuucccacu

SEQ ID NO: 3496383 - RNA, 17 nt, Human
cggccuuuguugcucag

SEQ ID NO: 3496384 - RNA, 20 nt, Human
cggcgaccgcccuccgcgaa

SEQ ID NO: 3496385 - RNA, 13 nt, Human
cggcgcgguggcu

SEQ ID NO: 3496386 - RNA, 16 nt, Human
cggcgcuucccagcac

SEQ ID NO: 3496387 - RNA, 12 nt, Human
cggcggcgccgg

SEQ ID NO: 3496388 - RNA, 19 nt, Human
cggcggucccagcucccug

SEQ ID NO: 3496389 - RNA, 15 nt, Human
cggcguacaggcugg

SEQ ID NO: 3496390 - RNA, 17 nt, Human
cggcgucagccuccagc

SEQ ID NO: 3496391 - RNA, 23 nt, Human
cggcgucagccuccagccucugu

SEQ ID NO: 3496392 - RNA, 15 nt, Human
cggcuaagaggcugc

SEQ ID NO: 3496393 - RNA, 16 nt, Human
cggcuaagaggcugcu

SEQ ID NO: 3496394 - RNA, 13 nt, Human
cggcuacucagca

SEQ ID NO: 3496395 - RNA, 14 nt, Human
cggcuacucagcag

SEQ ID NO: 3496396 - RNA, 16 nt, Human
cggcuacucagcagcc

SEQ ID NO: 3496397 - RNA, 19 nt, Human
cggcuacucagcagcccuc

SEQ ID NO: 3496398 - RNA, 21 nt, Human
cggcuacucagcagcccuccu

SEQ ID NO: 3496399 - RNA, 14 nt, Human
cggcucacugcagc

SEQ ID NO: 3496400 - RNA, 13 nt, Human
cggcuccaggcuc

SEQ ID NO: 3496401 - RNA, 15 nt, Human
cggcuccaggcuccu

SEQ ID NO: 3496402 - RNA, 16 nt, Human
cggcuccaggcuccuu

SEQ ID NO: 3496403 - RNA, 19 nt, Human
cggcuccaguccccagaac

SEQ ID NO: 3496404 - RNA, 15 nt, Human
cggcuccccaugugu

SEQ ID NO: 3496405 - RNA, 17 nt, Human
cggcuccccaugugucc

SEQ ID NO: 3496406 - RNA, 14 nt, Human
cggcuccucaggga

SEQ ID NO: 3496407 - RNA, 23 nt, Human
cggcuccucucuaaccuccuuua

SEQ ID NO: 3496408 - RNA, 14 nt, Human
cggcuccugcugca

SEQ ID NO: 3496409 - RNA, 11 nt, Human
cggcuccuggu

SEQ ID NO: 3496410 - RNA, 23 nt, Human
cggcuccugugcuuucccugaac

SEQ ID NO: 3496411 - RNA, 16 nt, Human
cggcucggaggaagcc

SEQ ID NO: 3496412 - RNA, 23 nt, Human
cggcucucuauagcaccagggcu

SEQ ID NO: 3496413 - RNA, 15 nt, Human
cggcucugaagcaag

SEQ ID NO: 3496414 - RNA, 17 nt, Human
cggcucuggccuccaag

SEQ ID NO: 3496415 - RNA, 15 nt, Human
cggcucuguccccag

SEQ ID NO: 3496416 - RNA, 19 nt, Human
cggcucuguccccagccug

SEQ ID NO: 3496417 - RNA, 15 nt, Human
cggcugagagcccca

SEQ ID NO: 3496418 - RNA, 23 nt, Human
cggcugagucaugaucucccugc

SEQ ID NO: 3496419 - RNA, 22 nt, Human
cggcugcagcucacccagcccc

SEQ ID NO: 3496420 - RNA, 18 nt, Human
cggcuggaaaugcugggc

SEQ ID NO: 3496421 - RNA, 20 nt, Human
cggcuggaaaugcugggcug

SEQ ID NO: 3496422 - RNA, 14 nt, Human
cggcuggccuggcc

SEQ ID NO: 3496423 - RNA, 12 nt, Human
cggcugggagga

SEQ ID NO: 3496424 - RNA, 12 nt, Human
cggcugggcaca

SEQ ID NO: 3496425 - RNA, 20 nt, Human
cggcugggcacacgccuccc

SEQ ID NO: 3496426 - RNA, 23 nt, Human
cggcuggggucccagcagcugcc

SEQ ID NO: 3496427 - RNA, 14 nt, Human
cggcugugcucaga

SEQ ID NO: 3496428 - RNA, 13 nt, Human
cggcugugcuggg

SEQ ID NO: 3496429 - RNA, 11 nt, Human
cggcugugugu

SEQ ID NO: 3496430 - RNA, 22 nt, Human
cggcugugugugcacgcgugug

SEQ ID NO: 3496431 - RNA, 23 nt, Human
cggcuuagacuucgacucaggau

SEQ ID NO: 3496432 - RNA, 22 nt, Human
cgggaaaagcagcccuuggcca

SEQ ID NO: 3496433 - RNA, 15 nt, Human
cgggaacagacaaca

SEQ ID NO: 3496434 - RNA, 13 nt, Human
cgggaacaguguu

SEQ ID NO: 3496435 - RNA, 14 nt, Human
cgggaaccaagcag

SEQ ID NO: 3496436 - RNA, 17 nt, Human
cgggaaccuccccagcc

SEQ ID NO: 3496437 - RNA, 20 nt, Human
cgggaagagaggaguucaau

SEQ ID NO: 3496438 - RNA, 23 nt, Human
cgggaagcaucuuccagaagugu

SEQ ID NO: 3496439 - RNA, 16 nt, Human
cgggaagggggcuggg

SEQ ID NO: 3496440 - RNA, 19 nt, Human
cgggaagggggcugggaca

SEQ ID NO: 3496441 - RNA, 10 nt, Human
cgggaauauu

SEQ ID NO: 3496442 - RNA, 20 nt, Human
cgggaauuuucaucuaggau

SEQ ID NO: 3496443 - RNA, 19 nt, Human
cgggacaccuaggcuaggg

SEQ ID NO: 3496444 - RNA, 14 nt, Human
cgggacagaguagc

SEQ ID NO: 3496445 - RNA, 22 nt, Human
cgggacaucacagggugggccu

SEQ ID NO: 3496446 - RNA, 16 nt, Human
cgggaccacccugagc

SEQ ID NO: 3496447 - RNA, 18 nt, Human
cgggaccacccugagccg

SEQ ID NO: 3496448 - RNA, 18 nt, Human
cgggacguggcaccuccu

SEQ ID NO: 3496449 - RNA, 11 nt, Human
cgggacucugc

SEQ ID NO: 3496450 - RNA, 20 nt, Human
cgggagcagugucuuccaua

SEQ ID NO: 3496451 - RNA, 22 nt, Human
cgggagcaucucuugaggccag

SEQ ID NO: 3496452 - RNA, 22 nt, Human
cgggagccaugcgcccccuccg

SEQ ID NO: 3496453 - RNA, 18 nt, Human
cgggagccgcuggcagaa

SEQ ID NO: 3496454 - RNA, 21 nt, Human
cgggagccugaucaccugccc

SEQ ID NO: 3496455 - RNA, 22 nt, Human
cgggagccugaucaccugcccu

SEQ ID NO: 3496456 - RNA, 13 nt, Human
cgggaggcugaga

SEQ ID NO: 3496457 - RNA, 20 nt, Human
cgggaggcugagacaggaga

SEQ ID NO: 3496458 - RNA, 23 nt, Human
cgggaggcugagacaggagaauc

SEQ ID NO: 3496459 - RNA, 16 nt, Human
cgggaggcugaggcag

SEQ ID NO: 3496460 - RNA, 18 nt, Human
cgggaggcugaggcagga

SEQ ID NO: 3496461 - RNA, 20 nt, Human
cgggaggucgaggcaggagg

SEQ ID NO: 3496462 - RNA, 22 nt, Human
cgggaugggagccgggcaaacu

SEQ ID NO: 3496463 - RNA, 18 nt, Human
cgggaugguccuggggcu

SEQ ID NO: 3496464 - RNA, 15 nt, Human
cgggcaccagccagc

SEQ ID NO: 3496465 - RNA, 16 nt, Human
cgggcaccagccagcg

SEQ ID NO: 3496466 - RNA, 21 nt, Human
cgggcaccuauagucccagcu

SEQ ID NO: 3496467 - RNA, 22 nt, Human
cgggcacucagaagacacugau

SEQ ID NO: 3496468 - RNA, 16 nt, Human
cgggcagagggcugga

SEQ ID NO: 3496469 - RNA, 15 nt, Human
cgggcagcacagcaa

SEQ ID NO: 3496470 - RNA, 16 nt, Human
cgggcagccuggcucc

SEQ ID NO: 3496471 - RNA, 22 nt, Human
cgggcagccuggcucccaggac

SEQ ID NO: 3496472 - RNA, 15 nt, Human
cgggcaugggcacuc

SEQ ID NO: 3496473 - RNA, 21 nt, Human
cgggcaugguggcgcaagccu

SEQ ID NO: 3496474 - RNA, 15 nt, Human
cgggccaaggaccug

SEQ ID NO: 3496475 - RNA, 20 nt, Human
cgggccaaggacugccgacc

SEQ ID NO: 3496476 - RNA, 22 nt, Human
cgggccacuccuuccugcccca

SEQ ID NO: 3496477 - RNA, 20 nt, Human
cgggccagccaggcgggcuc

SEQ ID NO: 3496478 - RNA, 21 nt, Human
cgggccagccaggcgggcuca

SEQ ID NO: 3496479 - RNA, 23 nt, Human
cgggccagccaggcgggcucaag

SEQ ID NO: 3496480 - RNA, 13 nt, Human
cgggccagggcug

SEQ ID NO: 3496481 - RNA, 19 nt, Human
cgggcccaccuggccaccu

SEQ ID NO: 3496482 - RNA, 23 nt, Human
cgggcccagcccccacagugcug

SEQ ID NO: 3496483 - RNA, 13 nt, Human
cgggcccaggcca

SEQ ID NO: 3496484 - RNA, 19 nt, Human
cgggccccaccugcagcuc

SEQ ID NO: 3496485 - RNA, 12 nt, Human
cgggccccucau

SEQ ID NO: 3496486 - RNA, 22 nt, Human
cgggcccguugaggaugaggcc

SEQ ID NO: 3496487 - RNA, 21 nt, Human
cgggcccuucccacaggacau

SEQ ID NO: 3496488 - RNA, 20 nt, Human
cgggccuggagaacuagaga

SEQ ID NO: 3496489 - RNA, 13 nt, Human
cgggccuguacag

SEQ ID NO: 3496490 - RNA, 14 nt, Human
cgggccuguacagu

SEQ ID NO: 3496491 - RNA, 17 nt, Human
cgggccuguacagucug

SEQ ID NO: 3496492 - RNA, 17 nt, Human
cgggccuguccacaggc

SEQ ID NO: 3496493 - RNA, 17 nt, Human
cgggcgagucacugccu

SEQ ID NO: 3496494 - RNA, 16 nt, Human
cgggcgcacugccucu

SEQ ID NO: 3496495 - RNA, 19 nt, Human
cgggcucagcaaaagaugc

SEQ ID NO: 3496496 - RNA, 18 nt, Human
cgggcucagggaccacag

SEQ ID NO: 3496497 - RNA, 21 nt, Human
cgaggaggugucucaggcugc

SEQ ID NO: 3496498 - RNA, 22 nt, Human
cgaggaguaacaauacaaaugg

SEQ ID NO: 3496499 - RNA, 13 nt, Human
cgaggcagaggac

SEQ ID NO: 3496500 - RNA, 22 nt, Human
cgaggcagggucaggagagggg

SEQ ID NO: 3496501 - RNA, 11 nt, Human
cgaggccagua

SEQ ID NO: 3496502 - RNA, 13 nt, Human
cgaggcccgcaug

SEQ ID NO: 3496503 - RNA, 19 nt, Human
cgaggcccucgggcccagc

SEQ ID NO: 3496504 - RNA, 20 nt, Human
cgaggcccucgggcccagcc

SEQ ID NO: 3496505 - RNA, 13 nt, Human
cgccucaaaaugu

SEQ ID NO: 3496506 - RNA, 22 nt, Human
cgccuccaaccccucgcccagu

SEQ ID NO: 3496507 - RNA, 16 nt, Human
cgccuccaacccuagc

SEQ ID NO: 3496508 - RNA, 21 nt, Human
cgccuccauuuuuguuguuau

SEQ ID NO: 3496509 - RNA, 11 nt, Human
cgccucccagc

SEQ ID NO: 3496510 - RNA, 10 nt, Human
cgccuccccg

SEQ ID NO: 3496511 - RNA, 22 nt, Human
cgccuccccgaaacaggcuacu

SEQ ID NO: 3496512 - RNA, 22 nt, Human
ccaagaauauugcaaaauacau

SEQ ID NO: 3496513 - RNA, 23 nt, Human
ccaagaauauugcaaaauacaug

SEQ ID NO: 3496514 - RNA, 12 nt, Human
ccaagaaucuau

SEQ ID NO: 3496515 - RNA, 12 nt, Human
ccaagaaugcug

SEQ ID NO: 3496516 - RNA, 13 nt, Human
ccaagaaugcuga

SEQ ID NO: 3496517 - RNA, 11 nt, Human
ccaagaaugua

SEQ ID NO: 3496518 - RNA, 17 nt, Human
ccaagaauguacgucca

SEQ ID NO: 3496519 - RNA, 21 nt, Human
ccaagaauguacguccagccu

SEQ ID NO: 3496520 - RNA, 21 nt, Human
ccaagacagaugccccagagc

SEQ ID NO: 3496521 - RNA, 23 nt, Human
ccaagacagaugccccagagcug

SEQ ID NO: 3496522 - RNA, 16 nt, Human
ccaagacauugucaau

SEQ ID NO: 3496523 - RNA, 14 nt, Human
ccaagaccagacuc

SEQ ID NO: 3496524 - RNA, 15 nt, Human
ccaagaccuucuccu

SEQ ID NO: 3496525 - RNA, 17 nt, Human
ccaagacuccagcccug

SEQ ID NO: 3496526 - RNA, 14 nt, Human
ccaagacucuagag

SEQ ID NO: 3496527 - RNA, 21 nt, Human
ccaagacucuagaguccaagg

SEQ ID NO: 3496528 - RNA, 22 nt, Human
ccaagacucuagaguccaaggu

SEQ ID NO: 3496529 - RNA, 17 nt, Human
ccaagacugcuguggcc

SEQ ID NO: 3496530 - RNA, 18 nt, Human
ccaagacugcuguggcca

SEQ ID NO: 3496531 - RNA, 21 nt, Human
ccaagacugcuguggccagga

SEQ ID NO: 3496532 - RNA, 19 nt, Human
ccaagacuucauugucccu

SEQ ID NO: 3496533 - RNA, 20 nt, Human
ccaagacuuggcaacagaag

SEQ ID NO: 3496534 - RNA, 22 nt, Human
ccaagacuuggcaacagaagca

SEQ ID NO: 3496535 - RNA, 17 nt, Human
ccaagagaaacuuccua

SEQ ID NO: 3496536 - RNA, 13 nt, Human
ccaagagaacucg

SEQ ID NO: 3496537 - RNA, 24 nt, Human
ccaagagacuccuugagagaccag

SEQ ID NO: 3496538 - RNA, 13 nt, Human
ccaagagagaaag

SEQ ID NO: 3496539 - RNA, 20 nt, Human
ccaagagauugcuaauugcu

SEQ ID NO: 3496540 - RNA, 19 nt, Human
ccaagagcagaggcagcga

SEQ ID NO: 3496541 - RNA, 17 nt, Human
ccaagagcaucaugccu

SEQ ID NO: 3496542 - RNA, 12 nt, Human
ccaagagccuga

SEQ ID NO: 3496543 - RNA, 19 nt, Human
ccaagaggaaguucagauc

SEQ ID NO: 3496544 - RNA, 11 nt, Human
ccaagaggcug

SEQ ID NO: 3496545 - RNA, 12 nt, Human
ccaagaggcugc

SEQ ID NO: 3496546 - RNA, 13 nt, Human
ccaagaggcugca

SEQ ID NO: 3496547 - RNA, 14 nt, Human
ccaagaggcugcag

SEQ ID NO: 3496548 - RNA, 15 nt, Human
ccaagaggcugcagc

SEQ ID NO: 3496549 - RNA, 16 nt, Human
ccaagaggcugcagcc

SEQ ID NO: 3496550 - RNA, 12 nt, Human
ccaagaggcugg

SEQ ID NO: 3496551 - RNA, 13 nt, Human
ccaagaucuauaa

SEQ ID NO: 3496552 - RNA, 15 nt, Human
ccaagauggcccauc

SEQ ID NO: 3496553 - RNA, 18 nt, Human
ccaagauggcccauccug

SEQ ID NO: 3496554 - RNA, 22 nt, Human
ccaagaugggcaucuuuuguau

SEQ ID NO: 3496555 - RNA, 21 nt, Human
ccaagauucacaccugacucu

SEQ ID NO: 3496556 - RNA, 14 nt, Human
ccaagauucuagau

SEQ ID NO: 3496557 - RNA, 19 nt, Human
ccaagauuuaaaugccaua

SEQ ID NO: 3496558 - RNA, 14 nt, Human
ccaagcaaauguua

SEQ ID NO: 3496559 - RNA, 23 nt, Human
ccaagcaaccuggguccaaauaa

SEQ ID NO: 3496560 - RNA, 13 nt, Human
ccaagcacagcag

SEQ ID NO: 3496561 - RNA, 19 nt, Human
ccaagcacagugguggcag

SEQ ID NO: 3496562 - RNA, 17 nt, Human
ccaagcaggagacgaca

SEQ ID NO: 3496563 - RNA, 22 nt, Human
ccaagcaguugggacuacaggc

SEQ ID NO: 3496564 - RNA, 22 nt, Human
ccaagcauaccaacacgagcag

SEQ ID NO: 3496565 - RNA, 23 nt, Human
ccaagccaagggaaccugugucc

SEQ ID NO: 3496566 - RNA, 14 nt, Human
ccaagccccauccu

SEQ ID NO: 3496567 - RNA, 18 nt, Human
ccaagcccgacuugcugu

SEQ ID NO: 3496568 - RNA, 23 nt, Human
ccaagcccuggagccaacugcug

SEQ ID NO: 3496569 - RNA, 15 nt, Human
ccaagccguggcuuc

SEQ ID NO: 3496570 - RNA, 16 nt, Human
ccaagccguggcuucc

SEQ ID NO: 3496571 - RNA, 23 nt, Human
ccaagccguggcuucccgcucag

SEQ ID NO: 3496572 - RNA, 16 nt, Human
ccaagccuccacagcg

SEQ ID NO: 3496573 - RNA, 19 nt, Human
ccaagccuccacagcgagg

SEQ ID NO: 3496574 - RNA, 13 nt, Human
ccaagccugacca

SEQ ID NO: 3496575 - RNA, 19 nt, Human
ccaagccuuggcucuaccc

SEQ ID NO: 3496576 - RNA, 17 nt, Human
ccaagcgcccuggcccc

SEQ ID NO: 3496577 - RNA, 15 nt, Human
ccaagcuaucuaaag

SEQ ID NO: 3496578 - RNA, 17 nt, Human
ccaagcuauucaauucu

SEQ ID NO: 3496579 - RNA, 17 nt, Human
ccaagcuauuccuuucc

SEQ ID NO: 3496580 - RNA, 18 nt, Human
ccaagcucaaagcgugga

SEQ ID NO: 3496581 - RNA, 18 nt, Human
ccaagcucacaguuccuc

SEQ ID NO: 3496582 - RNA, 22 nt, Human
ccaagcucacaguuccucgccc

SEQ ID NO: 3496583 - RNA, 14 nt, Human
ccaagcuccaucuc

SEQ ID NO: 3496584 - RNA, 13 nt, Human
ccaagcucccagg

SEQ ID NO: 3496585 - RNA, 15 nt, Human
ccaagcucccaggca

SEQ ID NO: 3496586 - RNA, 13 nt, Human
ccaagcucccugc

SEQ ID NO: 3496587 - RNA, 15 nt, Human
ccaagcucccugccc

SEQ ID NO: 3496588 - RNA, 17 nt, Human
ccaagcucccugcccca

SEQ ID NO: 3496589 - RNA, 20 nt, Human
ccaagcuccuccucggaacc

SEQ ID NO: 3496590 - RNA, 18 nt, Human
ccaagcucuagugggaag

SEQ ID NO: 3496591 - RNA, 13 nt, Human
ccaagcucugcuc

SEQ ID NO: 3496592 - RNA, 14 nt, Human
ccaagcucugcucc

SEQ ID NO: 3496593 - RNA, 17 nt, Human
ccaagcugaggugccca

SEQ ID NO: 3496594 - RNA, 21 nt, Human
ccaagcugaggugcccaggag

SEQ ID NO: 3496595 - RNA, 15 nt, Human
ccaagcugaguuucc

SEQ ID NO: 3496596 - RNA, 16 nt, Human
ccaagcugaguuuccu

SEQ ID NO: 3496597 - RNA, 13 nt, Human
ccaagcugggccc

SEQ ID NO: 3496598 - RNA, 17 nt, Human
ccaagcugggccccagc

SEQ ID NO: 3496599 - RNA, 12 nt, Human
ccaagcuggucc

SEQ ID NO: 3496600 - RNA, 19 nt, Human
ccaagcuggucccacucag

SEQ ID NO: 3496601 - RNA, 20 nt, Human
ccaagcugugacccucaauu

SEQ ID NO: 3496602 - RNA, 17 nt, Human
ccaagcuguuuucuucu

SEQ ID NO: 3496603 - RNA, 18 nt, Human
ccaagcuguuuucuucua

SEQ ID NO: 3496604 - RNA, 22 nt, Human
ccaagcuuccauagcugcugcc

SEQ ID NO: 3496605 - RNA, 15 nt, Human
ccaagcuuguuauca

SEQ ID NO: 3496606 - RNA, 15 nt, Human
ccaagcuuuaaauua

SEQ ID NO: 3496607 - RNA, 14 nt, Human
ccaaggaaaacugc

SEQ ID NO: 3496608 - RNA, 22 nt, Human
ccaaggaccccucaccuugcaa

SEQ ID NO: 3496609 - RNA, 14 nt, Human
ccaaggaccugaga

SEQ ID NO: 3496610 - RNA, 14 nt, Human
ccaaggagaaacag

SEQ ID NO: 3496611 - RNA, 14 nt, Human
ccaaggagacacaa

SEQ ID NO: 3496612 - RNA, 12 nt, Human
ccaaggagcaca

SEQ ID NO: 3496613 - RNA, 13 nt, Human
ccaaggagcacag

SEQ ID NO: 3496614 - RNA, 14 nt, Human
ccaaggagcacagg

SEQ ID NO: 3496615 - RNA, 19 nt, Human
ccaaggagcacagguccca

SEQ ID NO: 3496616 - RNA, 15 nt, Human
ccaaggagcugagaa

SEQ ID NO: 3496617 - RNA, 13 nt, Human
ccaaggagcugcu

SEQ ID NO: 3496618 - RNA, 18 nt, Human
ccaaggaugccccguccc

SEQ ID NO: 3496619 - RNA, 16 nt, Human
ccaaggcaaggcaggu

SEQ ID NO: 3496620 - RNA, 22 nt, Human
ccaaggcaaggggugccuggga

SEQ ID NO: 3496621 - RNA, 21 nt, Human
ccaaggcagaggccugggcug

SEQ ID NO: 3496622 - RNA, 22 nt, Human
ccaaggcagaggccugggcugg

SEQ ID NO: 3496623 - RNA, 15 nt, Human
ccaaggccaaaggaa

SEQ ID NO: 3496624 - RNA, 17 nt, Human
ccaaggccaaaggaagc

SEQ ID NO: 3496625 - RNA, 13 nt, Human
ccaaggccagguu

SEQ ID NO: 3496626 - RNA, 17 nt, Human
ccaaggcccccugccug

SEQ ID NO: 3496627 - RNA, 21 nt, Human
ccaaggcccccugccugcccu

SEQ ID NO: 3496628 - RNA, 16 nt, Human
ccaaggccgaagcucu

SEQ ID NO: 3496629 - RNA, 18 nt, Human
ccaaggccgaagcucugg

SEQ ID NO: 3496630 - RNA, 21 nt, Human
ccaaggcggccccucccgccc

SEQ ID NO: 3496631 - RNA, 20 nt, Human
ccaaggcugcgucuggaggg

SEQ ID NO: 3496632 - RNA, 14 nt, Human
ccaaggcuggcagg

SEQ ID NO: 3496633 - RNA, 21 nt, Human
ccaagggaaagaaaaggaagg

SEQ ID NO: 3496634 - RNA, 24 nt, Human
ccaagggcaaaauucccagggaag

SEQ ID NO: 3496635 - RNA, 17 nt, Human
ccaagggcuucugcacc

SEQ ID NO: 3496636 - RNA, 19 nt, Human
ccaaggggaaucagaacuc

SEQ ID NO: 3496637 - RNA, 22 nt, Human
ccaaggggagucaccuucccuu

SEQ ID NO: 3496638 - RNA, 15 nt, Human
ccaaggggccugagc

SEQ ID NO: 3496639 - RNA, 16 nt, Human
ccaaggggccugagca

SEQ ID NO: 3496640 - RNA, 17 nt, Human
ccaaggggccugagcag

SEQ ID NO: 3496641 - RNA, 16 nt, Human
ccaaggucuaggugga

SEQ ID NO: 3496642 - RNA, 21 nt, Human
ccaaggucugagccacagcag

SEQ ID NO: 3496643 - RNA, 15 nt, Human
ccaagguggcacggu

SEQ ID NO: 3496644 - RNA, 18 nt, Human
ccaaggugggcugagccc

SEQ ID NO: 3496645 - RNA, 23 nt, Human
ccaagguggucugcucgggccca

SEQ ID NO: 3496646 - RNA, 15 nt, Human
ccaagguguccuaca

SEQ ID NO: 3496647 - RNA, 20 nt, Human
ccaagguguccuacagaaaa

SEQ ID NO: 3496648 - RNA, 22 nt, Human
ccaagguguccuacagaaaaac

SEQ ID NO: 3496649 - RNA, 16 nt, Human
ccaagguucuccaaca

SEQ ID NO: 3496650 - RNA, 23 nt, Human
cggggugaguccauucucccagg

SEQ ID NO: 3496651 - RNA, 16 nt, Human
cggggugcccacaggc

SEQ ID NO: 3496652 - RNA, 15 nt, Human
cggggugcuuccuug

SEQ ID NO: 3496653 - RNA, 16 nt, Human
cgggguggauuggauu

SEQ ID NO: 3496654 - RNA, 16 nt, Human
cgggguggccacagcg

SEQ ID NO: 3496655 - RNA, 16 nt, Human
cggggugggggcagca

SEQ ID NO: 3496656 - RNA, 20 nt, Human
cgggugaacaaagcagccac

SEQ ID NO: 3496657 - RNA, 21 nt, Human
cgggugaacaaagcagccacg

SEQ ID NO: 3496658 - RNA, 15 nt, Human
cgggugcucagggcu

SEQ ID NO: 3496659 - RNA, 18 nt, Human
cggguggaucaccugagg

SEQ ID NO: 3496660 - RNA, 18 nt, Human
cggguggcuagucagaga

SEQ ID NO: 3496661 - RNA, 18 nt, Human
cggguggcucugggaucc

SEQ ID NO: 3496662 - RNA, 20 nt, Human
cgggugggcggcacagccuu

SEQ ID NO: 3496663 - RNA, 12 nt, Human
cgggugggggug

SEQ ID NO: 3496664 - RNA, 12 nt, Human
cggguggucccc

SEQ ID NO: 3496665 - RNA, 17 nt, Human
cggguuagacagccaaa

SEQ ID NO: 3496666 - RNA, 17 nt, Human
cggguuauaaugaauga

SEQ ID NO: 3496667 - RNA, 23 nt, Human
cggguuuggcgggccaaggacug

SEQ ID NO: 3496668 - RNA, 20 nt, Human
cgguaaaacaccggagacua

SEQ ID NO: 3496669 - RNA, 13 nt, Human
cgguaacuguccu

SEQ ID NO: 3496670 - RNA, 17 nt, Human
cgguaacuguccugucc

SEQ ID NO: 3496671 - RNA, 22 nt, Human
cgguagccagcacacagggcag

SEQ ID NO: 3496672 - RNA, 18 nt, Human
cgguauccccccaucuug

SEQ ID NO: 3496673 - RNA, 20 nt, Human
cgguccacccaggagccccg

SEQ ID NO: 3496674 - RNA, 16 nt, Human
cggucccaccccuccc

SEQ ID NO: 3496675 - RNA, 20 nt, Human
cgguccccacuuuauugcca

SEQ ID NO: 3496676 - RNA, 21 nt, Human
cggucccuugagaccucagcc

SEQ ID NO: 3496677 - RNA, 24 nt, Human
cggucgcccuuugcugcauggcag

SEQ ID NO: 3496678 - RNA, 23 nt, Human
cggucgggggggacccuccaagg

SEQ ID NO: 3496679 - RNA, 11 nt, Human
cggucucaggc

SEQ ID NO: 3496680 - RNA, 15 nt, Human
cggucuccugacugg

SEQ ID NO: 3496681 - RNA, 16 nt, Human
cggucuccugacuggu

SEQ ID NO: 3496682 - RNA, 20 nt, Human
cggucugcaagucagaggau

SEQ ID NO: 3496683 - RNA, 13 nt, Human
cggucugugcccc

SEQ ID NO: 3496684 - RNA, 18 nt, Human
cggugaaggugacagcag

SEQ ID NO: 3496685 - RNA, 16 nt, Human
cggugaauggcuuugu

SEQ ID NO: 3496686 - RNA, 18 nt, Human
cggugaauggcuuuguau

SEQ ID NO: 3496687 - RNA, 20 nt, Human
cggugagaggggaacagacu

SEQ ID NO: 3496688 - RNA, 13 nt, Human
cggugcagucugg

SEQ ID NO: 3496689 - RNA, 17 nt, Human
cggugccaugaagggac

SEQ ID NO: 3496690 - RNA, 13 nt, Human
cggugcccacacc

SEQ ID NO: 3496691 - RNA, 19 nt, Human
cggugccuggguggggcug

SEQ ID NO: 3496692 - RNA, 18 nt, Human
cggugcuaucucccccag

SEQ ID NO: 3496693 - RNA, 20 nt, Human
cggugcuaucucccccagcc

SEQ ID NO: 3496694 - RNA, 22 nt, Human
cggugcuaucucccccagcccc

SEQ ID NO: 3496695 - RNA, 13 nt, Human
cggugcucagggg

SEQ ID NO: 3496696 - RNA, 21 nt, Human
cggugcuguccucagguggcc

SEQ ID NO: 3496697 - RNA, 15 nt, Human
cgguggaagagcuca

SEQ ID NO: 3496698 - RNA, 22 nt, Human
cgguggacuugaacuuuccugg

SEQ ID NO: 3496699 - RNA, 13 nt, Human
cgguggaggccag

SEQ ID NO: 3496700 - RNA, 11 nt, Human
cgguggccucu

SEQ ID NO: 3496701 - RNA, 15 nt, Human
cgguggcgggcaccu

SEQ ID NO: 3496702 - RNA, 13 nt, Human
cgguggcuaaagg

SEQ ID NO: 3496703 - RNA, 13 nt, Human
cgguggcugggca

SEQ ID NO: 3496704 - RNA, 19 nt, Human
cggugggcacccacccugg

SEQ ID NO: 3496705 - RNA, 14 nt, Human
cggugggcacuguu

SEQ ID NO: 3496706 - RNA, 19 nt, Human
cggugggcauuugugaggc

SEQ ID NO: 3496707 - RNA, 19 nt, Human
cggugggccuugcugggga

SEQ ID NO: 3496708 - RNA, 16 nt, Human
cggugggggggcagag

SEQ ID NO: 3496709 - RNA, 10 nt, Human
cggugggggu

SEQ ID NO: 3496710 - RNA, 18 nt, Human
cggugucuuguucuguca

SEQ ID NO: 3496711 - RNA, 15 nt, Human
cggugugcaccaggg

SEQ ID NO: 3496712 - RNA, 20 nt, Human
cggugugccugcagccccgc

SEQ ID NO: 3496713 - RNA, 13 nt, Human
cggugugggggcc

SEQ ID NO: 3496714 - RNA, 23 nt, Human
cggugugggggccccgucucagg

SEQ ID NO: 3496715 - RNA, 19 nt, Human
cgguuaacaaauaacaacu

SEQ ID NO: 3496716 - RNA, 21 nt, Human
cgguuauaaaaaaugguucag

SEQ ID NO: 3496717 - RNA, 18 nt, Human
cgguucaaaccugugaag

SEQ ID NO: 3496718 - RNA, 13 nt, Human
cgguucaccagcc

SEQ ID NO: 3496719 - RNA, 14 nt, Human
cgguucaccagccu

SEQ ID NO: 3496720 - RNA, 18 nt, Human
cgguuccacgucccccug

SEQ ID NO: 3496721 - RNA, 20 nt, Human
cgguuccacgucccccuggg

SEQ ID NO: 3496722 - RNA, 16 nt, Human
cgguuuccagggaggg

SEQ ID NO: 3496723 - RNA, 17 nt, Human
ccaccugcaucuggggc

SEQ ID NO: 3496724 - RNA, 20 nt, Human
ccaccugccacuaggcuggg

SEQ ID NO: 3496725 - RNA, 15 nt, Human
ccaccugcccaucac

SEQ ID NO: 3496726 - RNA, 16 nt, Human
ccaccugcccaucaca

SEQ ID NO: 3496727 - RNA, 23 nt, Human
ccaccugcccaucacaggguugg

SEQ ID NO: 3496728 - RNA, 20 nt, Human
ccaccugccugcgucuuccg

SEQ ID NO: 3496729 - RNA, 21 nt, Human
ccaccugccugcgucuuccgc

SEQ ID NO: 3496730 - RNA, 12 nt, Human
ccaccugccugg

SEQ ID NO: 3496731 - RNA, 20 nt, Human
ccaccugccuguugggccag

SEQ ID NO: 3496732 - RNA, 22 nt, Human
ccaccugcggugcuaucucccc

SEQ ID NO: 3496733 - RNA, 19 nt, Human
ccaccugcuagugugaauu

SEQ ID NO: 3496734 - RNA, 15 nt, Human
ccaccugcucccagg

SEQ ID NO: 3496735 - RNA, 12 nt, Human
ccaccuggaccc

SEQ ID NO: 3496736 - RNA, 17 nt, Human
ccaccuggaccccugca

SEQ ID NO: 3496737 - RNA, 19 nt, Human
ccaccuggaccccugcauu

SEQ ID NO: 3496738 - RNA, 12 nt, Human
ccaccuggcccc

SEQ ID NO: 3496739 - RNA, 22 nt, Human
ccaccuggccccaugucucuca

SEQ ID NO: 3496740 - RNA, 12 nt, Human
ccaccuggcccu

SEQ ID NO: 3496741 - RNA, 18 nt, Human
ccaccuggcccucucuga

SEQ ID NO: 3496742 - RNA, 12 nt, Human
ccaccuggcuca

SEQ ID NO: 3496743 - RNA, 22 nt, Human
ccaccuggcucucaccucuagg

SEQ ID NO: 3496744 - RNA, 22 nt, Human
ccaccugggcauauccaccacc

SEQ ID NO: 3496745 - RNA, 16 nt, Human
ccaccuggggcaguca

SEQ ID NO: 3496746 - RNA, 21 nt, Human
ccaccugguuccggaauccug

SEQ ID NO: 3496747 - RNA, 22 nt, Human
ccaccugucaaacaaagccaga

SEQ ID NO: 3496748 - RNA, 16 nt, Human
ccaccugucccaccuc

SEQ ID NO: 3496749 - RNA, 23 nt, Human
ccaccugucucagccucccagag

SEQ ID NO: 3496750 - RNA, 22 nt, Human
ccaccugucugucugucugucc

SEQ ID NO: 3496751 - RNA, 11 nt, Human
ccaccuguggg

SEQ ID NO: 3496752 - RNA, 12 nt, Human
ccaccugugggu

SEQ ID NO: 3496753 - RNA, 17 nt, Human
ccaccuucaauuccugg

SEQ ID NO: 3496754 - RNA, 13 nt, Human
ccaccuucacauu

SEQ ID NO: 3496755 - RNA, 12 nt, Human
ccaccuucccag

SEQ ID NO: 3496756 - RNA, 15 nt, Human
ccaccuucccagcuc

SEQ ID NO: 3496757 - RNA, 13 nt, Human
ccaccuuggcuca

SEQ ID NO: 3496758 - RNA, 16 nt, Human
ccaccuuggcucaagu

SEQ ID NO: 3496759 - RNA, 12 nt, Human
ccaccuuggcug

SEQ ID NO: 3496760 - RNA, 22 nt, Human
ccaccuuguuggagccugcagg

SEQ ID NO: 3496761 - RNA, 17 nt, Human
ccaccuuuauuaaaauc

SEQ ID NO: 3496762 - RNA, 20 nt, Human
ccaccuuuauuaaaaucuua

SEQ ID NO: 3496763 - RNA, 14 nt, Human
ccacgaaggagccc

SEQ ID NO: 3496764 - RNA, 18 nt, Human
ccacgaauuucugugccc

SEQ ID NO: 3496765 - RNA, 21 nt, Human
ccacgaauuucugugcccucc

SEQ ID NO: 3496766 - RNA, 16 nt, Human
ccacgacacugcagcc

SEQ ID NO: 3496767 - RNA, 12 nt, Human
ccacgagggcug

SEQ ID NO: 3496768 - RNA, 22 nt, Human
ccacgagggcuggcuggccuca

SEQ ID NO: 3496769 - RNA, 16 nt, Human
ccacgagggucaggac

SEQ ID NO: 3496770 - RNA, 15 nt, Human
ccacgauccugccac

SEQ ID NO: 3496771 - RNA, 23 nt, Human
ccacgauccugccacccuguagc

SEQ ID NO: 3496772 - RNA, 18 nt, Human
ccacgauguggcccuggc

SEQ ID NO: 3496773 - RNA, 20 nt, Human
ccacgauguggcccuggccu

SEQ ID NO: 3496774 - RNA, 20 nt, Human
ccacgauuuucuccagcuca

SEQ ID NO: 3496775 - RNA, 21 nt, Human
ccacgauuuucuccagcucag

SEQ ID NO: 3496776 - RNA, 15 nt, Human
ccacgcagccaggac

SEQ ID NO: 3496777 - RNA, 13 nt, Human
ccacgccacagcc

SEQ ID NO: 3496778 - RNA, 13 nt, Human
ccacgcccccacu

SEQ ID NO: 3496779 - RNA, 18 nt, Human
ccacgcccccacugguga

SEQ ID NO: 3496780 - RNA, 14 nt, Human
ccacgcccuccccu

SEQ ID NO: 3496781 - RNA, 17 nt, Human
ccacgcccuccccuccc

SEQ ID NO: 3496782 - RNA, 22 nt, Human
ccacgcccuccccuccccugcu

SEQ ID NO: 3496783 - RNA, 15 nt, Human
ccacgccuagccuca

SEQ ID NO: 3496784 - RNA, 18 nt, Human
ccacgcgggggccuugag

SEQ ID NO: 3496785 - RNA, 20 nt, Human
ccacgcgugccguggcacca

SEQ ID NO: 3496786 - RNA, 14 nt, Human
ccacgcuagggcgg

SEQ ID NO: 3496787 - RNA, 22 nt, Human
ccacgcuagggcggggcacaga

SEQ ID NO: 3496788 - RNA, 12 nt, Human
ccacgcuccagc

SEQ ID NO: 3496789 - RNA, 20 nt, Human
ccacgcugacuacagggccg

SEQ ID NO: 3496790 - RNA, 13 nt, Human
ccacgcuggagug

SEQ ID NO: 3496791 - RNA, 19 nt, Human
ccacgcuggagugcaguga

SEQ ID NO: 3496792 - RNA, 13 nt, Human
ccacgcuucucuu

SEQ ID NO: 3496793 - RNA, 15 nt, Human
ccacgcuucucuuug

SEQ ID NO: 3496794 - RNA, 18 nt, Human
ccacggacguuuccauca

SEQ ID NO: 3496795 - RNA, 16 nt, Human
cuaccaacuggaagca

SEQ ID NO: 3496796 - RNA, 18 nt, Human
cuaccaacuggaagcaca

SEQ ID NO: 3496797 - RNA, 20 nt, Human
cuaccaacuuguauccaggc

SEQ ID NO: 3496798 - RNA, 16 nt, Human
cuaccaacuuuacugu

SEQ ID NO: 3496799 - RNA, 23 nt, Human
cuaccaacuuucaagaacuuguu

SEQ ID NO: 3496800 - RNA, 20 nt, Human
cuaccaaggucuucuuaaua

SEQ ID NO: 3496801 - RNA, 13 nt, Human
cuaccaauauuag

SEQ ID NO: 3496802 - RNA, 13 nt, Human
cuaccaauauuua

SEQ ID NO: 3496803 - RNA, 15 nt, Human
cuaccaauauuuaau

SEQ ID NO: 3496804 - RNA, 21 nt, Human
cuaccaauauuuaaucuuuua

SEQ ID NO: 3496805 - RNA, 15 nt, Human
cuaccaaugcaugca

SEQ ID NO: 3496806 - RNA, 13 nt, Human
cuaccacaguguc

SEQ ID NO: 3496807 - RNA, 18 nt, Human
cuaccacaugccaagcac

SEQ ID NO: 3496808 - RNA, 13 nt, Human
cuaccaccagcug

SEQ ID NO: 3496809 - RNA, 14 nt, Human
cuaccaccagcugu

SEQ ID NO: 3496810 - RNA, 15 nt, Human
cuaccaccagcugug

SEQ ID NO: 3496811 - RNA, 16 nt, Human
cuaccaccagcugugu

SEQ ID NO: 3496812 - RNA, 18 nt, Human
cuaccaccccuuccuguc

SEQ ID NO: 3496813 - RNA, 14 nt, Human
cuaccaccucccca

SEQ ID NO: 3496814 - RNA, 15 nt, Human
cuaccaccuccccag

SEQ ID NO: 3496815 - RNA, 16 nt, Human
cuaccaccuccccagc

SEQ ID NO: 3496816 - RNA, 16 nt, Human
cuaccacucacaugac

SEQ ID NO: 3496817 - RNA, 12 nt, Human
cuaccacuccug

SEQ ID NO: 3496818 - RNA, 22 nt, Human
cuaccagcgcccgcugggcuga

SEQ ID NO: 3496819 - RNA, 22 nt, Human
cuaccaggucaaaauagugcca

SEQ ID NO: 3496820 - RNA, 15 nt, Human
cuaccagguguucua

SEQ ID NO: 3496821 - RNA, 18 nt, Human
cuaccagugcaggcuggc

SEQ ID NO: 3496822 - RNA, 14 nt, Human
cuaccaucagggac

SEQ ID NO: 3496823 - RNA, 19 nt, Human
cuaccaugaacagaaaaca

SEQ ID NO: 3496824 - RNA, 13 nt, Human
cuaccauuucaga

SEQ ID NO: 3496825 - RNA, 12 nt, Human
cuacccaaagga

SEQ ID NO: 3496826 - RNA, 13 nt, Human
cuacccaaccacu

SEQ ID NO: 3496827 - RNA, 15 nt, Human
cuacccaaccacuca

SEQ ID NO: 3496828 - RNA, 16 nt, Human
cuacccaaccacucaa

SEQ ID NO: 3496829 - RNA, 18 nt, Human
cuacccacaccucugcca

SEQ ID NO: 3496830 - RNA, 20 nt, Human
cuacccacaccucugccaga

SEQ ID NO: 3496831 - RNA, 23 nt, Human
cuacccacguucucacacccacc

SEQ ID NO: 3496832 - RNA, 15 nt, Human
cuacccagcccaucu

SEQ ID NO: 3496833 - RNA, 17 nt, Human
cuacccagcgagcccug

SEQ ID NO: 3496834 - RNA, 20 nt, Human
cuacccagcgagcccuggug

SEQ ID NO: 3496835 - RNA, 20 nt, Human
cuacccaggaggcugaggug

SEQ ID NO: 3496836 - RNA, 17 nt, Human
cuaccccaauuccuugu

SEQ ID NO: 3496837 - RNA, 19 nt, Human
cuacccccuccucucugcc

SEQ ID NO: 3496838 - RNA, 13 nt, Human
cuacccccugugc

SEQ ID NO: 3496839 - RNA, 15 nt, Human
cuaccccgcagacac

SEQ ID NO: 3496840 - RNA, 11 nt, Human
cuaccccuccc

SEQ ID NO: 3496841 - RNA, 17 nt, Human
cuaccccucccagcuga

SEQ ID NO: 3496842 - RNA, 21 nt, Human
cuaccccucccggcccugccu

SEQ ID NO: 3496843 - RNA, 14 nt, Human
cuaccccuggauga

SEQ ID NO: 3496844 - RNA, 12 nt, Human
cuaccccuggcu

SEQ ID NO: 3496845 - RNA, 15 nt, Human
cuacccgcagaguuc

SEQ ID NO: 3496846 - RNA, 17 nt, Human
cuacccgcaucuucugu

SEQ ID NO: 3496847 - RNA, 20 nt, Human
cuacccgggaagggggcugg

SEQ ID NO: 3496848 - RNA, 15 nt, Human
cuacccguuccaaaa

SEQ ID NO: 3496849 - RNA, 15 nt, Human
cuacccuaaccaagu

SEQ ID NO: 3496850 - RNA, 19 nt, Human
cuacccuagccauuccugg

SEQ ID NO: 3496851 - RNA, 16 nt, Human
cuacccucccaccccc

SEQ ID NO: 3496852 - RNA, 20 nt, Human
cuacccucccugcugucccc

SEQ ID NO: 3496853 - RNA, 17 nt, Human
cuacccucgggcccacc

SEQ ID NO: 3496854 - RNA, 19 nt, Human
cuacccucgggcccaccug

SEQ ID NO: 3496855 - RNA, 17 nt, Human
cuacccucuuagaaaaa

SEQ ID NO: 3496856 - RNA, 12 nt, Human
cuacccugagcu

SEQ ID NO: 3496857 - RNA, 13 nt, Human
cuacccugccucc

SEQ ID NO: 3496858 - RNA, 17 nt, Human
cuacccuggacuugccu

SEQ ID NO: 3496859 - RNA, 16 nt, Human
cuacccuuuuucucca

SEQ ID NO: 3496860 - RNA, 21 nt, Human
cuaccgacccaggguucccgc

SEQ ID NO: 3496861 - RNA, 23 nt, Human
cuaccgagucucuucuccacugg

SEQ ID NO: 3496862 - RNA, 13 nt, Human
cuaccgaguucaa

SEQ ID NO: 3496863 - RNA, 14 nt, Human
cuaccgaguucaag

SEQ ID NO: 3496864 - RNA, 22 nt, Human
cuaccucacuauucaaguauua

SEQ ID NO: 3496865 - RNA, 11 nt, Human
cuaccucagcc

SEQ ID NO: 3496866 - RNA, 12 nt, Human
cuaccucagccu

SEQ ID NO: 3496867 - RNA, 14 nt, Human
cuaccucagccuag

SEQ ID NO: 3496868 - RNA, 17 nt, Human
cuaccucaggcagcuca

SEQ ID NO: 3496869 - RNA, 14 nt, Human
cuaccucaggcagg

SEQ ID NO: 3496870 - RNA, 23 nt, Human
cuaccucaggcaggaagggcagg

SEQ ID NO: 3496871 - RNA, 13 nt, Human
cuaccucagguug

SEQ ID NO: 3496872 - RNA, 14 nt, Human
cuaccucagguugc

SEQ ID NO: 3496873 - RNA, 18 nt, Human
cuaccucagguugcuggu

SEQ ID NO: 3496874 - RNA, 19 nt, Human
cuaccucagguugcugguu

SEQ ID NO: 3496875 - RNA, 20 nt, Human
cuaccucagguugcugguug

SEQ ID NO: 3496876 - RNA, 15 nt, Human
cuaccucagucagua

SEQ ID NO: 3496877 - RNA, 23 nt, Human
cuaccucccuccccgucucauuc

SEQ ID NO: 3496878 - RNA, 14 nt, Human
cuaccuccucaggg

SEQ ID NO: 3496879 - RNA, 15 nt, Human
cuaccuccucaggga

SEQ ID NO: 3496880 - RNA, 13 nt, Human
cuaccucucuguc

SEQ ID NO: 3496881 - RNA, 14 nt, Human
cuaccugagcuaaa

SEQ ID NO: 3496882 - RNA, 16 nt, Human
cuaccugaggggccuc

SEQ ID NO: 3496883 - RNA, 23 nt, Human
cuaccugaggggccucuuauggg

SEQ ID NO: 3496884 - RNA, 15 nt, Human
cuaccugaucccacu

SEQ ID NO: 3496885 - RNA, 20 nt, Human
cuaccugauuggugcaaccc

SEQ ID NO: 3496886 - RNA, 14 nt, Human
cuaccugccacuca

SEQ ID NO: 3496887 - RNA, 15 nt, Human
cuaccugccacucac

SEQ ID NO: 3496888 - RNA, 21 nt, Human
cuaccugccccacuuguccuu

SEQ ID NO: 3496889 - RNA, 12 nt, Human
cuaccugcccuc

SEQ ID NO: 3496890 - RNA, 14 nt, Human
cuaccugcccugga

SEQ ID NO: 3496891 - RNA, 20 nt, Human
ccacucgggaggcugagaca

SEQ ID NO: 3496892 - RNA, 23 nt, Human
ccacucuaccagugcaggcuggc

SEQ ID NO: 3496893 - RNA, 20 nt, Human
ccacucuacccucccacccc

SEQ ID NO: 3496894 - RNA, 23 nt, Human
ccacucuaggggucaggcuccau

SEQ ID NO: 3496895 - RNA, 15 nt, Human
ccacucucagaggcc

SEQ ID NO: 3496896 - RNA, 16 nt, Human
ccacucucauucccca

SEQ ID NO: 3496897 - RNA, 14 nt, Human
ccacucuccccaca

SEQ ID NO: 3496898 - RNA, 17 nt, Human
ccacucuccccacacua

SEQ ID NO: 3496899 - RNA, 20 nt, Human
ccacucucccccacccccuc

SEQ ID NO: 3496900 - RNA, 21 nt, Human
ccacucuccuugcuacccaga

SEQ ID NO: 3496901 - RNA, 14 nt, Human
ccacucugccucug

SEQ ID NO: 3496902 - RNA, 21 nt, Human
ccacucugcucgccuuagcac

SEQ ID NO: 3496903 - RNA, 13 nt, Human
ccacucugcucug

SEQ ID NO: 3496904 - RNA, 19 nt, Human
ccacucugcuucucugacu

SEQ ID NO: 3496905 - RNA, 23 nt, Human
ccacucuggagcauuucucauca

SEQ ID NO: 3496906 - RNA, 15 nt, Human
ccacucuggcagcca

SEQ ID NO: 3496907 - RNA, 16 nt, Human
ccacucuggcagccac

SEQ ID NO: 3496908 - RNA, 17 nt, Human
ccacucuggcagccaca

SEQ ID NO: 3496909 - RNA, 11 nt, Human
ccacucuguaa

SEQ ID NO: 3496910 - RNA, 13 nt, Human
ccacucuguaauu

SEQ ID NO: 3496911 - RNA, 14 nt, Human
ccacucuguaauug

SEQ ID NO: 3496912 - RNA, 22 nt, Human
ccacucugugccugaccuugag

SEQ ID NO: 3496913 - RNA, 11 nt, Human
ccacucuucuc

SEQ ID NO: 3496914 - RNA, 15 nt, Human
ccacucuuucuuuca

SEQ ID NO: 3496915 - RNA, 14 nt, Human
ccacugaagaggag

SEQ ID NO: 3496916 - RNA, 14 nt, Human
ccacugaagcuggg

SEQ ID NO: 3496917 - RNA, 16 nt, Human
ccacugacagccuccc

SEQ ID NO: 3496918 - RNA, 13 nt, Human
ccacugaccagaa

SEQ ID NO: 3496919 - RNA, 16 nt, Human
ccacugacugcaggga

SEQ ID NO: 3496920 - RNA, 22 nt, Human
ccacugauagaugucuauucuu

SEQ ID NO: 3496921 - RNA, 17 nt, Human
ccacugaugcuguucuc

SEQ ID NO: 3496922 - RNA, 15 nt, Human
ccacugauggaaaca

SEQ ID NO: 3496923 - RNA, 18 nt, Human
ccacugcaaguccuuuug

SEQ ID NO: 3496924 - RNA, 22 nt, Human
ccacugcaaguccuuuuguaaa

SEQ ID NO: 3496925 - RNA, 14 nt, Human
ccacugcacagagc

SEQ ID NO: 3496926 - RNA, 22 nt, Human
ccacugcacccccuccugcugc

SEQ ID NO: 3496927 - RNA, 11 nt, Human
ccacugcacuc

SEQ ID NO: 3496928 - RNA, 14 nt, Human
ccacugcacuccag

SEQ ID NO: 3496929 - RNA, 13 nt, Human
ccacugccagcag

SEQ ID NO: 3496930 - RNA, 17 nt, Human
ccacugccagcagcagc

SEQ ID NO: 3496931 - RNA, 16 nt, Human
ccacugccauaaaaca

SEQ ID NO: 3496932 - RNA, 19 nt, Human
ccacugcccacccccucaa

SEQ ID NO: 3496933 - RNA, 15 nt, Human
ccacugcccacuggc

SEQ ID NO: 3496934 - RNA, 15 nt, Human
ccacugcccgagcug

SEQ ID NO: 3496935 - RNA, 13 nt, Human
ccacugcccucug

SEQ ID NO: 3496936 - RNA, 17 nt, Human
ccacugcccuucucauu

SEQ ID NO: 3496937 - RNA, 13 nt, Human
ccacugccucagg

SEQ ID NO: 3496938 - RNA, 14 nt, Human
ccacugccucaggu

SEQ ID NO: 3496939 - RNA, 16 nt, Human
ccacugccucagguuc

SEQ ID NO: 3496940 - RNA, 13 nt, Human
ccacugccucucc

SEQ ID NO: 3496941 - RNA, 17 nt, Human
ccacugccucucccucu

SEQ ID NO: 3496942 - RNA, 17 nt, Human
ccagcccugcuggggau

SEQ ID NO: 3496943 - RNA, 19 nt, Human
ccagcccugcuggggaucc

SEQ ID NO: 3496944 - RNA, 17 nt, Human
ccagcccuggcugaagg

SEQ ID NO: 3496945 - RNA, 18 nt, Human
ccagcccuggcugaagga

SEQ ID NO: 3496946 - RNA, 21 nt, Human
ccagcccuggcugaaggacug

SEQ ID NO: 3496947 - RNA, 15 nt, Human
ccagcccuggggcug

SEQ ID NO: 3496948 - RNA, 19 nt, Human
ccagcccuggggcugggcc

SEQ ID NO: 3496949 - RNA, 13 nt, Human
cuaauaauaaaua

SEQ ID NO: 3496950 - RNA, 14 nt, Human
cuaauaauaaauag

SEQ ID NO: 3496951 - RNA, 17 nt, Human
cuaauaauaaauaguuc

SEQ ID NO: 3496952 - RNA, 18 nt, Human
cuaauaaucauuggauuc

SEQ ID NO: 3496953 - RNA, 19 nt, Human
cuaauaaucuuguuucuga

SEQ ID NO: 3496954 - RNA, 20 nt, Human
cuaauaaugagcuauuaaaa

SEQ ID NO: 3496955 - RNA, 14 nt, Human
cuaauaauuucuaa

SEQ ID NO: 3496956 - RNA, 16 nt, Human
cuaauacauuaaagca

SEQ ID NO: 3496957 - RNA, 16 nt, Human
cuaauaccucugugug

SEQ ID NO: 3496958 - RNA, 17 nt, Human
cuaauaccucugugugc

SEQ ID NO: 3496959 - RNA, 20 nt, Human
cuaauagaacucaguuuuaa

SEQ ID NO: 3496960 - RNA, 18 nt, Human
cuaauagacuaaaugaaa

SEQ ID NO: 3496961 - RNA, 19 nt, Human
cuaauagcuacaucuacuu

SEQ ID NO: 3496962 - RNA, 22 nt, Human
cuaauagggcaauuaauuccuu

SEQ ID NO: 3496963 - RNA, 14 nt, Human
cuaauaguauaaac

SEQ ID NO: 3496964 - RNA, 17 nt, Human
cuaauauauaugaauaa

SEQ ID NO: 3496965 - RNA, 11 nt, Human
cuaauauauuu

SEQ ID NO: 3496966 - RNA, 17 nt, Human
cuaauauauuuaaaaau

SEQ ID NO: 3496967 - RNA, 21 nt, Human
cuaauaugaugacuguuuuua

SEQ ID NO: 3496968 - RNA, 18 nt, Human
cuaauauuaaaaauaugg

SEQ ID NO: 3496969 - RNA, 13 nt, Human
cuaauauuaaaag

SEQ ID NO: 3496970 - RNA, 16 nt, Human
cuaauauuaaaaguca

SEQ ID NO: 3496971 - RNA, 13 nt, Human
cuaaucaaagcca

SEQ ID NO: 3496972 - RNA, 20 nt, Human
cuaaucaaagccagggucuc

SEQ ID NO: 3496973 - RNA, 21 nt, Human
cuaaucagcauucucacuccu

SEQ ID NO: 3496974 - RNA, 12 nt, Human
cuaaucaguguc

SEQ ID NO: 3496975 - RNA, 13 nt, Human
cuaaucagugucu

SEQ ID NO: 3496976 - RNA, 16 nt, Human
cuaaucagugucucac

SEQ ID NO: 3496977 - RNA, 18 nt, Human
cuaaucagugucucacac

SEQ ID NO: 3496978 - RNA, 13 nt, Human
cuaauccaaccca

SEQ ID NO: 3496979 - RNA, 19 nt, Human
cuaaucccugggcauugcu

SEQ ID NO: 3496980 - RNA, 20 nt, Human
cuaaucuauggucgggagac

SEQ ID NO: 3496981 - RNA, 14 nt, Human
cuaaucuauugggu

SEQ ID NO: 3496982 - RNA, 18 nt, Human
cuaaucuauuggguucau

SEQ ID NO: 3496983 - RNA, 21 nt, Human
cuaaucuauuggguucauuau

SEQ ID NO: 3496984 - RNA, 22 nt, Human
cuaaucuauuggguucauuauu

SEQ ID NO: 3496985 - RNA, 18 nt, Human
cuaaucucauaccucuga

SEQ ID NO: 3496986 - RNA, 20 nt, Human
cuaaucucauaccucugacc

SEQ ID NO: 3496987 - RNA, 21 nt, Human
cuaaucucauaccucugacca

SEQ ID NO: 3496988 - RNA, 22 nt, Human
cuaaucucauaccucugaccaa

SEQ ID NO: 3496989 - RNA, 20 nt, Human
cuaaucugugcuguuucaaa

SEQ ID NO: 3496990 - RNA, 22 nt, Human
cuaaucuucagggcacugcugc

SEQ ID NO: 3496991 - RNA, 23 nt, Human
cuaaugaagggaaaggauauuuu

SEQ ID NO: 3496992 - RNA, 22 nt, Human
cuaaugaaugcauaaaauguua

SEQ ID NO: 3496993 - RNA, 22 nt, Human
cuaaugacaucaccacaguuua

SEQ ID NO: 3496994 - RNA, 15 nt, Human
cuaaugacauucaau

SEQ ID NO: 3496995 - RNA, 16 nt, Human
cuaaugagaagucaac

SEQ ID NO: 3496996 - RNA, 18 nt, Human
cuaaugccuuacucuucu

SEQ ID NO: 3496997 - RNA, 19 nt, Human
cuaaugcuccuuguuccua

SEQ ID NO: 3496998 - RNA, 23 nt, Human
cuaaugcugcagauuugggcugg

SEQ ID NO: 3496999 - RNA, 16 nt, Human
cuaauguaaaaugauu

SEQ ID NO: 3497000 - RNA, 19 nt, Human
cuaauguaauaacugugaa

SEQ ID NO: 3497001 - RNA, 21 nt, Human
cuaauguauuuuauuguaaca

SEQ ID NO: 3497002 - RNA, 21 nt, Human
cuaaugucuucauuucauugu

SEQ ID NO: 3497003 - RNA, 17 nt, Human
cuaauguuuaagcagaa

SEQ ID NO: 3497004 - RNA, 17 nt, Human
cuaauguuuaugagcca

SEQ ID NO: 3497005 - RNA, 16 nt, Human
cuaauuaaaaaguuaa

SEQ ID NO: 3497006 - RNA, 20 nt, Human
cuaauuaaaacacuuucaaa

SEQ ID NO: 3497007 - RNA, 18 nt, Human
cuaauuaaccuuacuaau

SEQ ID NO: 3497008 - RNA, 13 nt, Human
cuaauuaauaaag

SEQ ID NO: 3497009 - RNA, 14 nt, Human
cuaauuaauaaauu

SEQ ID NO: 3497010 - RNA, 13 nt, Human
cuaauuaauauau

SEQ ID NO: 3497011 - RNA, 18 nt, Human
cuaauuaauauauuaaaa

SEQ ID NO: 3497012 - RNA, 17 nt, Human
cuaauuaauuguaaucu

SEQ ID NO: 3497013 - RNA, 22 nt, Human
cuaauuacgauaaggaagaaac

SEQ ID NO: 3497014 - RNA, 20 nt, Human
cuaauuaggguacauuuaua

SEQ ID NO: 3497015 - RNA, 21 nt, Human
cuaauuauacuacuuuguuag

SEQ ID NO: 3497016 - RNA, 16 nt, Human
cuaauuauauaauauu

SEQ ID NO: 3497017 - RNA, 18 nt, Human
cuaauuauauaauauuuu

SEQ ID NO: 3497018 - RNA, 16 nt, Human
cuaauuauuuuaauua

SEQ ID NO: 3497019 - RNA, 22 nt, Human
cuaauuauuuuaauuagguuaa

SEQ ID NO: 3497020 - RNA, 18 nt, Human
cuaauucaaggaauuucu

SEQ ID NO: 3497021 - RNA, 15 nt, Human
cuaauucacagugcu

SEQ ID NO: 3497022 - RNA, 20 nt, Human
cuaauucagccauguacaga

SEQ ID NO: 3497023 - RNA, 15 nt, Human
cuaauuccacaccuu

SEQ ID NO: 3497024 - RNA, 17 nt, Human
cuaauuccacaccuuuu

SEQ ID NO: 3497025 - RNA, 16 nt, Human
cuaauuccacagcugc

SEQ ID NO: 3497026 - RNA, 17 nt, Human
cuaauucccauuuugca

SEQ ID NO: 3497027 - RNA, 24 nt, Human
cuaauucuaaccagagcaagcuuu

SEQ ID NO: 3497028 - RNA, 14 nt, Human
cuaauucuaaugug

SEQ ID NO: 3497029 - RNA, 20 nt, Human
cuaauucuauuaaagugcua

SEQ ID NO: 3497030 - RNA, 15 nt, Human
cuaauucuuccuuug

SEQ ID NO: 3497031 - RNA, 16 nt, Human
cuaauucuucuguccu

SEQ ID NO: 3497032 - RNA, 17 nt, Human
cuaauucuugcauauuu

SEQ ID NO: 3497033 - RNA, 13 nt, Human
cuaauucuuuaau

SEQ ID NO: 3497034 - RNA, 17 nt, Human
cuaauugacuuuagaaa

SEQ ID NO: 3497035 - RNA, 14 nt, Human
cuaauugcuguuga

SEQ ID NO: 3497036 - RNA, 15 nt, Human
cuaauugcuguugaa

SEQ ID NO: 3497037 - RNA, 16 nt, Human
cuaauugcuguugaaa

SEQ ID NO: 3497038 - RNA, 21 nt, Human
cuaauugcuguugaaagcaaa

SEQ ID NO: 3497039 - RNA, 24 nt, Human
cuaauugcuguugaaagcaaaaau

SEQ ID NO: 3497040 - RNA, 17 nt, Human
cuaauugggaguccagg

SEQ ID NO: 3497041 - RNA, 19 nt, Human
cuaauugguacuuuuaaaa

SEQ ID NO: 3497042 - RNA, 16 nt, Human
cuaauuguauaacagg

SEQ ID NO: 3497043 - RNA, 12 nt, Human
cuaauuuaaaaa

SEQ ID NO: 3497044 - RNA, 14 nt, Human
cuaauuuaaagaga

SEQ ID NO: 3497045 - RNA, 17 nt, Human
cuaauuuaacccagcuc

SEQ ID NO: 3497046 - RNA, 21 nt, Human
cuaauuuauccugaaauuuca

SEQ ID NO: 3497047 - RNA, 17 nt, Human
cuaauuuauucuaaauu

SEQ ID NO: 3497048 - RNA, 19 nt, Human
cuaauuucaaaaauauaac

SEQ ID NO: 3497049 - RNA, 18 nt, Human
cuaauuucaaaaugcuuu

SEQ ID NO: 3497050 - RNA, 19 nt, Human
cuaauuucaaaaugcuuuu

SEQ ID NO: 3497051 - RNA, 22 nt, Human
cuaauuucaaaaugcuuuuuau

SEQ ID NO: 3497052 - RNA, 15 nt, Human
cuaauuugauguuua

SEQ ID NO: 3497053 - RNA, 16 nt, Human
cuaauuugauguuuac

SEQ ID NO: 3497054 - RNA, 14 nt, Human
cuaauuugcugcug

SEQ ID NO: 3497055 - RNA, 22 nt, Human
cuaauuuguaggaaaaagcaag

SEQ ID NO: 3497056 - RNA, 19 nt, Human
cuaauuuguuuuggauaua

SEQ ID NO: 3497057 - RNA, 19 nt, Human
cuaauuuuacauguuuaua

SEQ ID NO: 3497058 - RNA, 19 nt, Human
cuaauuuucucaaaagcau

SEQ ID NO: 3497059 - RNA, 20 nt, Human
cuaauuuucucaaaagcauu

SEQ ID NO: 3497060 - RNA, 22 nt, Human
cuaauuuucucaaaagcauuua

SEQ ID NO: 3497061 - RNA, 12 nt, Human
cuaauuuuuaag

SEQ ID NO: 3497062 - RNA, 17 nt, Human
cuaauuuuuauuaauuu

SEQ ID NO: 3497063 - RNA, 22 nt, Human
cuaauuuuuauuaauuuuaguu

SEQ ID NO: 3497064 - RNA, 17 nt, Human
cuaauuuuuauucauaa

SEQ ID NO: 3497065 - RNA, 18 nt, Human
cuaauuuuuauuuuugcu

SEQ ID NO: 3497066 - RNA, 13 nt, Human
cuaauuuuuguau

SEQ ID NO: 3497067 - RNA, 23 nt, Human
cuaauuuuuguauuuuuaguaga

SEQ ID NO: 3497068 - RNA, 18 nt, Human
cuaauuuuuguauuuuuu

SEQ ID NO: 3497069 - RNA, 17 nt, Human
cuacaaaaacacagcaa

SEQ ID NO: 3497070 - RNA, 16 nt, Human
cuacaaaaauuaacug

SEQ ID NO: 3497071 - RNA, 20 nt, Human
cuacaaaaccugauguuaaa

SEQ ID NO: 3497072 - RNA, 18 nt, Human
cuacaaaauuugaaauuu

SEQ ID NO: 3497073 - RNA, 17 nt, Human
cuacaaacaaaauuucu

SEQ ID NO: 3497074 - RNA, 17 nt, Human
cuacaaagguuuaaaug

SEQ ID NO: 3497075 - RNA, 14 nt, Human
cuacaacagccuca

SEQ ID NO: 3497076 - RNA, 16 nt, Human
cuacaacagccucacu

SEQ ID NO: 3497077 - RNA, 13 nt, Human
cuacaaccaagcu

SEQ ID NO: 3497078 - RNA, 20 nt, Human
cuacaaccaagcucucugca

SEQ ID NO: 3497079 - RNA, 15 nt, Human
cuacaaccaauggaa

SEQ ID NO: 3497080 - RNA, 17 nt, Human
cuacaacuucagcagua

SEQ ID NO: 3497081 - RNA, 15 nt, Human
cuacaauacaucuga

SEQ ID NO: 3497082 - RNA, 12 nt, Human
cuacaauauaua

SEQ ID NO: 3497083 - RNA, 16 nt, Human
cuacaauaucuucaua

SEQ ID NO: 3497084 - RNA, 13 nt, Human
cuacacacugcau

SEQ ID NO: 3497085 - RNA, 21 nt, Human
cuacacagggauguacaaggc

SEQ ID NO: 3497086 - RNA, 12 nt, Human
cuaucuguauuc

SEQ ID NO: 3497087 - RNA, 18 nt, Human
cuaucugucugguggccc

SEQ ID NO: 3497088 - RNA, 12 nt, Human
cuaucugugcua

SEQ ID NO: 3497089 - RNA, 15 nt, Human
cuaucuuaauacuaa

SEQ ID NO: 3497090 - RNA, 13 nt, Human
cuaucuuaauuuu

SEQ ID NO: 3497091 - RNA, 14 nt, Human
cuaucuuaauuuug

SEQ ID NO: 3497092 - RNA, 21 nt, Human
cuaucuuagugguuccccacc

SEQ ID NO: 3497093 - RNA, 14 nt, Human
cuaucuucauguaa

SEQ ID NO: 3497094 - RNA, 13 nt, Human
cuaucuuccaaau

SEQ ID NO: 3497095 - RNA, 17 nt, Human
cuaucuugcucuguaau

SEQ ID NO: 3497096 - RNA, 14 nt, Human
cuaucuuugccacc

SEQ ID NO: 3497097 - RNA, 19 nt, Human
cuaucuuugccacccucau

SEQ ID NO: 3497098 - RNA, 21 nt, Human
cuaucuuugccacccucaugc

SEQ ID NO: 3497099 - RNA, 19 nt, Human
cuaucuuuuguuuccuuuu

SEQ ID NO: 3497100 - RNA, 17 nt, Human
cuaugaaaaugcuggcu

SEQ ID NO: 3497101 - RNA, 16 nt, Human
cuaugaacugaaggca

SEQ ID NO: 3497102 - RNA, 20 nt, Human
cuaugaagagcuagagaaau

SEQ ID NO: 3497103 - RNA, 13 nt, Human
ccagcccuggucu

SEQ ID NO: 3497104 - RNA, 20 nt, Human
ccagcccuggucucagcagc

SEQ ID NO: 3497105 - RNA, 18 nt, Human
ccagcccuguggaaggga

SEQ ID NO: 3497106 - RNA, 16 nt, Human
ccagcccuuagcaggg

SEQ ID NO: 3497107 - RNA, 17 nt, Human
ccagcccuuagcaggga

SEQ ID NO: 3497108 - RNA, 13 nt, Human
ccagcccuuccuc

SEQ ID NO: 3497109 - RNA, 18 nt, Human
ccagcccuuccucugcuc

SEQ ID NO: 3497110 - RNA, 20 nt, Human
ccagcccuuugggaggcuga

SEQ ID NO: 3497111 - RNA, 14 nt, Human
ccagccgacccccu

SEQ ID NO: 3497112 - RNA, 23 nt, Human
ccagccgacccccucucccugca

SEQ ID NO: 3497113 - RNA, 23 nt, Human
ccagccgagauagccaaggccaa

SEQ ID NO: 3497114 - RNA, 19 nt, Human
ccagccgccaucagcccaa

SEQ ID NO: 3497115 - RNA, 14 nt, Human
ccagccggcauggc

SEQ ID NO: 3497116 - RNA, 13 nt, Human
ccagccggccucu

SEQ ID NO: 3497117 - RNA, 20 nt, Human
ccagccggccucucuggccu

SEQ ID NO: 3497118 - RNA, 22 nt, Human
ccagccggccucucuggccucc

SEQ ID NO: 3497119 - RNA, 21 nt, Human
ccagccggggcgaguggcacg

SEQ ID NO: 3497120 - RNA, 20 nt, Human
ccagccgugagugcagaccc

SEQ ID NO: 3497121 - RNA, 19 nt, Human
ccagccgugaugcucaggc

SEQ ID NO: 3497122 - RNA, 23 nt, Human
ccagccgugaugcucaggcuuga

SEQ ID NO: 3497123 - RNA, 21 nt, Human
ccagccuaugagcauccugag

SEQ ID NO: 3497124 - RNA, 17 nt, Human
ccagccucaaauccagg

SEQ ID NO: 3497125 - RNA, 23 nt, Human
ccagccucaaauccaggacccug

SEQ ID NO: 3497126 - RNA, 14 nt, Human
ccagccucacccuu

SEQ ID NO: 3497127 - RNA, 21 nt, Human
ccagccucagcgcggcccucc

SEQ ID NO: 3497128 - RNA, 13 nt, Human
ccagccucccuga

SEQ ID NO: 3497129 - RNA, 21 nt, Human
ccagccuccgagagggagaga

SEQ ID NO: 3497130 - RNA, 11 nt, Human
ccagccuccuc

SEQ ID NO: 3497131 - RNA, 15 nt, Human
ccagccuccucugga

SEQ ID NO: 3497132 - RNA, 23 nt, Human
ccagccuccucuggacggcaggc

SEQ ID NO: 3497133 - RNA, 20 nt, Human
ccagccucuagggaccccuc

SEQ ID NO: 3497134 - RNA, 13 nt, Human
ccagccucucccc

SEQ ID NO: 3497135 - RNA, 14 nt, Human
ccagccucuccccu

SEQ ID NO: 3497136 - RNA, 19 nt, Human
ccagccucugagccccugg

SEQ ID NO: 3497137 - RNA, 21 nt, Human
ccagccucugagccccuggga

SEQ ID NO: 3497138 - RNA, 24 nt, Human
ccagccucugagccccugggacug

SEQ ID NO: 3497139 - RNA, 15 nt, Human
ccagccucuguuccc

SEQ ID NO: 3497140 - RNA, 19 nt, Human
ccagccugaacagaagcuc

SEQ ID NO: 3497141 - RNA, 17 nt, Human
ccagccugaccuuccuu

SEQ ID NO: 3497142 - RNA, 11 nt, Human
ccagccugagc

SEQ ID NO: 3497143 - RNA, 12 nt, Human
ccagccugagca

SEQ ID NO: 3497144 - RNA, 19 nt, Human
ccagccugagcgacaguga

SEQ ID NO: 3497145 - RNA, 13 nt, Human
ccagccugaggca

SEQ ID NO: 3497146 - RNA, 16 nt, Human
ccagccugccuggcag

SEQ ID NO: 3497147 - RNA, 18 nt, Human
ccagccugccuggcaggc

SEQ ID NO: 3497148 - RNA, 14 nt, Human
ccagccugcgccug

SEQ ID NO: 3497149 - RNA, 14 nt, Human
ccagccugcuagcu

SEQ ID NO: 3497150 - RNA, 15 nt, Human
ccagccugcuagcua

SEQ ID NO: 3497151 - RNA, 21 nt, Human
ccagccugcuagcuagcucaa

SEQ ID NO: 3497152 - RNA, 13 nt, Human
ccagccuggagau

SEQ ID NO: 3497153 - RNA, 20 nt, Human
ccagccuggagaugaaaucu

SEQ ID NO: 3497154 - RNA, 11 nt, Human
ccagccuggcc

SEQ ID NO: 3497155 - RNA, 12 nt, Human
ccagccuggcca

SEQ ID NO: 3497156 - RNA, 12 nt, Human
ccagccuggccc

SEQ ID NO: 3497157 - RNA, 13 nt, Human
ccagccuggccca

SEQ ID NO: 3497158 - RNA, 16 nt, Human
ccagccuggcccagcu

SEQ ID NO: 3497159 - RNA, 12 nt, Human
ccagccuggccu

SEQ ID NO: 3497160 - RNA, 15 nt, Human
ccagccuggccuccu

SEQ ID NO: 3497161 - RNA, 16 nt, Human
ccagccuggccuccug

SEQ ID NO: 3497162 - RNA, 19 nt, Human
ccagccuggccuccugccu

SEQ ID NO: 3497163 - RNA, 22 nt, Human
ccagccuggccuccugccucua

SEQ ID NO: 3497164 - RNA, 12 nt, Human
ccagccuggcuc

SEQ ID NO: 3497165 - RNA, 15 nt, Human
ccagccuggcuucug

SEQ ID NO: 3497166 - RNA, 17 nt, Human
ccagccuggcuucugga

SEQ ID NO: 3497167 - RNA, 19 nt, Human
ccagccuggcuucuggagc

SEQ ID NO: 3497168 - RNA, 20 nt, Human
ccagccuggcuucuggagcc

SEQ ID NO: 3497169 - RNA, 21 nt, Human
ccagccugggauaggggcaga

SEQ ID NO: 3497170 - RNA, 16 nt, Human
ccagccugggcagcca

SEQ ID NO: 3497171 - RNA, 21 nt, Human
ccagccugggcccaucucccu

SEQ ID NO: 3497172 - RNA, 23 nt, Human
ccagccugggcccaucucccugc

SEQ ID NO: 3497173 - RNA, 14 nt, Human
ccagccugggccua

SEQ ID NO: 3497174 - RNA, 16 nt, Human
ccagccugggcgacag

SEQ ID NO: 3497175 - RNA, 19 nt, Human
ccagccugggcgacagagc

SEQ ID NO: 3497176 - RNA, 17 nt, Human
ccagccuggggccuggc

SEQ ID NO: 3497177 - RNA, 18 nt, Human
ccagccuggggccuggca

SEQ ID NO: 3497178 - RNA, 23 nt, Human
ccagccugucccauggacacucc

SEQ ID NO: 3497179 - RNA, 20 nt, Human
ccagccuguuggacccgcuc

SEQ ID NO: 3497180 - RNA, 20 nt, Human
ccagccuuccucugcagcug

SEQ ID NO: 3497181 - RNA, 21 nt, Human
ccagccuuccucugcagcuga

SEQ ID NO: 3497182 - RNA, 19 nt, Human
ccagccuucuuccauccca

SEQ ID NO: 3497183 - RNA, 23 nt, Human
ccagccuugaccauucuccaccu

SEQ ID NO: 3497184 - RNA, 17 nt, Human
ccagccuugagcccugg

SEQ ID NO: 3497185 - RNA, 18 nt, Human
ccagccuugagcccuggc

SEQ ID NO: 3497186 - RNA, 19 nt, Human
ccagccuugagcccuggcu

SEQ ID NO: 3497187 - RNA, 18 nt, Human
ccagccuuggcaucuaga

SEQ ID NO: 3497188 - RNA, 20 nt, Human
ccagccuuucucccaggcca

SEQ ID NO: 3497189 - RNA, 20 nt, Human
ccagccuuugaucagguggg

SEQ ID NO: 3497190 - RNA, 15 nt, Human
ccagccuuuguuccc

SEQ ID NO: 3497191 - RNA, 15 nt, Human
ccagcgagcccuggu

SEQ ID NO: 3497192 - RNA, 21 nt, Human
ccagcgagcccugguggcagu

SEQ ID NO: 3497193 - RNA, 16 nt, Human
ccagcgaggaggcucc

SEQ ID NO: 3497194 - RNA, 19 nt, Human
ccagcgcccgcugggcuga

SEQ ID NO: 3497195 - RNA, 21 nt, Human
ccagcgccucccuccacccca

SEQ ID NO: 3497196 - RNA, 20 nt, Human
ccagcgcggacauccccugc

SEQ ID NO: 3497197 - RNA, 15 nt, Human
ccagcggacaguggc

SEQ ID NO: 3497198 - RNA, 19 nt, Human
ccagcggacaguggcagga

SEQ ID NO: 3497199 - RNA, 13 nt, Human
ccagcggccccuc

SEQ ID NO: 3497200 - RNA, 14 nt, Human
ccagcggccccucc

SEQ ID NO: 3497201 - RNA, 15 nt, Human
ccagcggccccuccc

SEQ ID NO: 3497202 - RNA, 17 nt, Human
ccagcgggaauggcagc

SEQ ID NO: 3497203 - RNA, 19 nt, Human
ccagcguauauauaagaaa

SEQ ID NO: 3497204 - RNA, 21 nt, Human
ccagcguauauauaagaaaga

SEQ ID NO: 3497205 - RNA, 23 nt, Human
ccagcgucagcugcucccuggca

SEQ ID NO: 3497206 - RNA, 22 nt, Human
ccagcgucccagucucuggcag

SEQ ID NO: 3497207 - RNA, 19 nt, Human
ccagcguccuccucuguga

SEQ ID NO: 3497208 - RNA, 13 nt, Human
ccagcuaagaacc

SEQ ID NO: 3497209 - RNA, 14 nt, Human
ccagcuaagaaccu

SEQ ID NO: 3497210 - RNA, 21 nt, Human
ccagcuaaggacauuucccag

SEQ ID NO: 3497211 - RNA, 23 nt, Human
ccagcuaaggacauuucccaggg

SEQ ID NO: 3497212 - RNA, 16 nt, Human
ccagcuaagggguggg

SEQ ID NO: 3497213 - RNA, 17 nt, Human
ccagcuaaucuguaggg

SEQ ID NO: 3497214 - RNA, 23 nt, Human
ccagcuaaucuguagggcuggac

SEQ ID NO: 3497215 - RNA, 16 nt, Human
ccagcuacccuuuuuc

SEQ ID NO: 3497216 - RNA, 22 nt, Human
ccagcuacccuuuuucuccagc

SEQ ID NO: 3497217 - RNA, 16 nt, Human
ccagcuacucagaagc

SEQ ID NO: 3497218 - RNA, 21 nt, Human
ccagcuacucagaagccugag

SEQ ID NO: 3497219 - RNA, 17 nt, Human
ccagcuacucaggaggc

SEQ ID NO: 3497220 - RNA, 20 nt, Human
ccagcuacucaggaggcuga

SEQ ID NO: 3497221 - RNA, 17 nt, Human
ccagcuacuuccuccuc

SEQ ID NO: 3497222 - RNA, 17 nt, Human
ccagcuacuugggaagc

SEQ ID NO: 3497223 - RNA, 16 nt, Human
ccagcuacuugggagg

SEQ ID NO: 3497224 - RNA, 17 nt, Human
ccagcuacuugggaggc

SEQ ID NO: 3497225 - RNA, 19 nt, Human
ccagcuacuugggaggcug

SEQ ID NO: 3497226 - RNA, 14 nt, Human
ccagcuagugaccc

SEQ ID NO: 3497227 - RNA, 18 nt, Human
ccagcuagugacccacau

SEQ ID NO: 3497228 - RNA, 21 nt, Human
ccagcuagugacccacaugcc

SEQ ID NO: 3497229 - RNA, 17 nt, Human
ccagcuauuuuuacuag

SEQ ID NO: 3497230 - RNA, 21 nt, Human
cuggcuguuuggacuuuguau

SEQ ID NO: 3497231 - RNA, 14 nt, Human
cuggcuuauuuuaa

SEQ ID NO: 3497232 - RNA, 22 nt, Human
cuggcuuauuuuaaugugauga

SEQ ID NO: 3497233 - RNA, 14 nt, Human
cuggcuucacagau

SEQ ID NO: 3497234 - RNA, 22 nt, Human
cuggcuucaggcaauucuccug

SEQ ID NO: 3497235 - RNA, 15 nt, Human
cuggcuuccagguau

SEQ ID NO: 3497236 - RNA, 20 nt, Human
cuggcuucccauccccagcg

SEQ ID NO: 3497237 - RNA, 21 nt, Human
cuggcuucccauccccagcga

SEQ ID NO: 3497238 - RNA, 16 nt, Human
cuggcuucgcaaaaug

SEQ ID NO: 3497239 - RNA, 16 nt, Human
cuggcuucuccuuugg

SEQ ID NO: 3497240 - RNA, 14 nt, Human
cuggcuucuggagc

SEQ ID NO: 3497241 - RNA, 15 nt, Human
cuggcuucuggagcc

SEQ ID NO: 3497242 - RNA, 12 nt, Human
cuggcuucuggc

SEQ ID NO: 3497243 - RNA, 23 nt, Human
cuggcuucuguggggccccucac

SEQ ID NO: 3497244 - RNA, 19 nt, Human
cuggcuugaauuggugaca

SEQ ID NO: 3497245 - RNA, 16 nt, Human
cuggcuuuaagccuuc

SEQ ID NO: 3497246 - RNA, 17 nt, Human
cuggcuuuaagccuuca

SEQ ID NO: 3497247 - RNA, 21 nt, Human
cuggcuuucauuuucucucag

SEQ ID NO: 3497248 - RNA, 16 nt, Human
cuggcuuugcccaacc

SEQ ID NO: 3497249 - RNA, 17 nt, Human
cuggcuuugcccaaccu

SEQ ID NO: 3497250 - RNA, 21 nt, Human
cuggcuuugcccaaccucagc

SEQ ID NO: 3497251 - RNA, 14 nt, Human
cuggcuuuggcuuc

SEQ ID NO: 3497252 - RNA, 19 nt, Human
cuggcuuugucccacagcu

SEQ ID NO: 3497253 - RNA, 22 nt, Human
cuggcuuuuauuaaugcacuuu

SEQ ID NO: 3497254 - RNA, 23 nt, Human
cuggcuuuuauuaaugcacuuuc

SEQ ID NO: 3497255 - RNA, 19 nt, Human
cuggcuuuucacugcuggc

SEQ ID NO: 3497256 - RNA, 20 nt, Human
cuggcuuuucuguuuccugu

SEQ ID NO: 3497257 - RNA, 15 nt, Human
cuggcuuuuuaacuc

SEQ ID NO: 3497258 - RNA, 17 nt, Human
cugggaaacacuccuug

SEQ ID NO: 3497259 - RNA, 22 nt, Human
cugggaaacacuccuugcauca

SEQ ID NO: 3497260 - RNA, 21 nt, Human
cugggaaaccccuucucugug

SEQ ID NO: 3497261 - RNA, 19 nt, Human
cugggaaagacauccauaa

SEQ ID NO: 3497262 - RNA, 16 nt, Human
cugggaaagccccugc

SEQ ID NO: 3497263 - RNA, 18 nt, Human
cugggaaauauucccuag

SEQ ID NO: 3497264 - RNA, 22 nt, Human
cugggaaaugagaaggcagcca

SEQ ID NO: 3497265 - RNA, 23 nt, Human
cugggaaauggcuugaagccaag

SEQ ID NO: 3497266 - RNA, 18 nt, Human
cugggaaccucccagagg

SEQ ID NO: 3497267 - RNA, 17 nt, Human
cugggaacucaccuggg

SEQ ID NO: 3497268 - RNA, 18 nt, Human
cugggaacucccaagaac

SEQ ID NO: 3497269 - RNA, 19 nt, Human
cugggaacucccaagaaca

SEQ ID NO: 3497270 - RNA, 21 nt, Human
cugggaacucccaagaacagc

SEQ ID NO: 3497271 - RNA, 19 nt, Human
cugggaacugcagaccugu

SEQ ID NO: 3497272 - RNA, 19 nt, Human
cugggaagacgccugagcu

SEQ ID NO: 3497273 - RNA, 17 nt, Human
cugggaagauaggcucu

SEQ ID NO: 3497274 - RNA, 13 nt, Human
cugggaaggccuc

SEQ ID NO: 3497275 - RNA, 13 nt, Human
cugggaagggaag

SEQ ID NO: 3497276 - RNA, 21 nt, Human
cugggaauguauaguauuuga

SEQ ID NO: 3497277 - RNA, 13 nt, Human
cugggaauguauu

SEQ ID NO: 3497278 - RNA, 22 nt, Human
cugggaauguauuauucugcag

SEQ ID NO: 3497279 - RNA, 18 nt, Human
cugggacaacugcuccca

SEQ ID NO: 3497280 - RNA, 22 nt, Human
cugggacaacugcucccaccuc

SEQ ID NO: 3497281 - RNA, 23 nt, Human
cugggacacuuaacagaugcaau

SEQ ID NO: 3497282 - RNA, 10 nt, Human
cugggacagg

SEQ ID NO: 3497283 - RNA, 17 nt, Human
cugggacagggagcagc

SEQ ID NO: 3497284 - RNA, 22 nt, Human
cugggacaguuuaucaugaagc

SEQ ID NO: 3497285 - RNA, 23 nt, Human
cugggacaguuuaucaugaagcc

SEQ ID NO: 3497286 - RNA, 14 nt, Human
cugggacaugggaa

SEQ ID NO: 3497287 - RNA, 22 nt, Human
cugggacaugggaaaggggaag

SEQ ID NO: 3497288 - RNA, 22 nt, Human
cugggaccacagguucaugcca

SEQ ID NO: 3497289 - RNA, 14 nt, Human
cugggaccacguga

SEQ ID NO: 3497290 - RNA, 14 nt, Human
cugggacccuuucc

SEQ ID NO: 3497291 - RNA, 23 nt, Human
cugggaccgcuacaccacucugg

SEQ ID NO: 3497292 - RNA, 14 nt, Human
cugggacgcucugc

SEQ ID NO: 3497293 - RNA, 21 nt, Human
cugggacguggcucagccagc

SEQ ID NO: 3497294 - RNA, 15 nt, Human
cugggacuacaggca

SEQ ID NO: 3497295 - RNA, 21 nt, Human
cugggacuacaggcacccacc

SEQ ID NO: 3497296 - RNA, 17 nt, Human
cugggacuacaggugug

SEQ ID NO: 3497297 - RNA, 15 nt, Human
cugggacucagccuu

SEQ ID NO: 3497298 - RNA, 17 nt, Human
cugggacucagccuuca

SEQ ID NO: 3497299 - RNA, 14 nt, Human
cugggacuuccuug

SEQ ID NO: 3497300 - RNA, 18 nt, Human
cugggacuuccuugcucu

SEQ ID NO: 3497301 - RNA, 20 nt, Human
cugggacuuccuugcucucc

SEQ ID NO: 3497302 - RNA, 21 nt, Human
cugggacuuccuugcucuccc

SEQ ID NO: 3497303 - RNA, 18 nt, Human
cugggacuugcaaaaagg

SEQ ID NO: 3497304 - RNA, 12 nt, Human
cugggagaaaau

SEQ ID NO: 3497305 - RNA, 15 nt, Human
cugggagaaaaucau

SEQ ID NO: 3497306 - RNA, 19 nt, Human
cugggagaaaaucaucaag

SEQ ID NO: 3497307 - RNA, 19 nt, Human
cugggagaaaucuggcuuc

SEQ ID NO: 3497308 - RNA, 20 nt, Human
cugggagaaaucuggcuucu

SEQ ID NO: 3497309 - RNA, 16 nt, Human
cugggagaaccucagg

SEQ ID NO: 3497310 - RNA, 12 nt, Human
cugggagaggau

SEQ ID NO: 3497311 - RNA, 17 nt, Human
cugggagaggcagagug

SEQ ID NO: 3497312 - RNA, 20 nt, Human
cugggagaggcagcccagga

SEQ ID NO: 3497313 - RNA, 23 nt, Human
cugggagaggcagcccaggaagu

SEQ ID NO: 3497314 - RNA, 19 nt, Human
cugggagauucaagggacc

SEQ ID NO: 3497315 - RNA, 22 nt, Human
cugggagcagcccgcugagugg

SEQ ID NO: 3497316 - RNA, 18 nt, Human
cugggagcccccagccug

SEQ ID NO: 3497317 - RNA, 20 nt, Human
cugggagcccccagccuguc

SEQ ID NO: 3497318 - RNA, 19 nt, Human
cugggagccuacccacccc

SEQ ID NO: 3497319 - RNA, 21 nt, Human
cugggagcuccacucugcuuc

SEQ ID NO: 3497320 - RNA, 15 nt, Human
cugggagcucugcag

SEQ ID NO: 3497321 - RNA, 12 nt, Human
cugggaggaacc

SEQ ID NO: 3497322 - RNA, 14 nt, Human
cugggaggagggag

SEQ ID NO: 3497323 - RNA, 15 nt, Human
cugggaggagggaga

SEQ ID NO: 3497324 - RNA, 19 nt, Human
cugggaggagggcaggcau

SEQ ID NO: 3497325 - RNA, 17 nt, Human
cugggaggcaagagggg

SEQ ID NO: 3497326 - RNA, 20 nt, Human
cugggaggcaagaggggugg

SEQ ID NO: 3497327 - RNA, 21 nt, Human
cugggaggcaagaggggugga

SEQ ID NO: 3497328 - RNA, 22 nt, Human
cugggaggcaagagggguggag

SEQ ID NO: 3497329 - RNA, 22 nt, Human
cugggaggcauggcccuggggu

SEQ ID NO: 3497330 - RNA, 20 nt, Human
cugggaggcccugagacagg

SEQ ID NO: 3497331 - RNA, 16 nt, Human
cugggaggcucuggag

SEQ ID NO: 3497332 - RNA, 20 nt, Human
cugggaggcucuggagccca

SEQ ID NO: 3497333 - RNA, 15 nt, Human
cugggagggcagcag

SEQ ID NO: 3497334 - RNA, 20 nt, Human
cugggagggcagcagggcua

SEQ ID NO: 3497335 - RNA, 22 nt, Human
cugggagggcagcagggcuacc

SEQ ID NO: 3497336 - RNA, 13 nt, Human
cugggagggccca

SEQ ID NO: 3497337 - RNA, 16 nt, Human
cugggaucugacugca

SEQ ID NO: 3497338 - RNA, 17 nt, Human
cugggaucugacugcac

SEQ ID NO: 3497339 - RNA, 15 nt, Human
cugggaucugguggu

SEQ ID NO: 3497340 - RNA, 17 nt, Human
cugggauggaggggagu

SEQ ID NO: 3497341 - RNA, 18 nt, Human
cugggauggugggcuuca

SEQ ID NO: 3497342 - RNA, 21 nt, Human
cugggauggugggcuucaggg

SEQ ID NO: 3497343 - RNA, 22 nt, Human
cugggauguggcugcagcagcg

SEQ ID NO: 3497344 - RNA, 14 nt, Human
cugggauguuucug

SEQ ID NO: 3497345 - RNA, 19 nt, Human
cugggauguuucugucaca

SEQ ID NO: 3497346 - RNA, 21 nt, Human
cugggauuacaagcgugagcc

SEQ ID NO: 3497347 - RNA, 21 nt, Human
cugggauuacaggcgugagcc

SEQ ID NO: 3497348 - RNA, 22 nt, Human
cugggauuacaggcgugagcca

SEQ ID NO: 3497349 - RNA, 20 nt, Human
cugggauuacaggcuccugc

SEQ ID NO: 3497350 - RNA, 23 nt, Human
cugggauuacaggcuccugccac

SEQ ID NO: 3497351 - RNA, 11 nt, Human
cugggauuagg

SEQ ID NO: 3497352 - RNA, 22 nt, Human
cugggauucaggaaaaggccug

SEQ ID NO: 3497353 - RNA, 17 nt, Human
cugggauucuacuuuaa

SEQ ID NO: 3497354 - RNA, 17 nt, Human
cugggauuggcugugaa

SEQ ID NO: 3497355 - RNA, 21 nt, Human
cugggauuggcugugaacuga

SEQ ID NO: 3497356 - RNA, 17 nt, Human
cugggauuuuaaacuag

SEQ ID NO: 3497357 - RNA, 22 nt, Human
cugggauuuuaaacuagaugac

SEQ ID NO: 3497358 - RNA, 15 nt, Human
cugggcaacagagca

SEQ ID NO: 3497359 - RNA, 15 nt, Human
cugggcaagcuggcg

SEQ ID NO: 3497360 - RNA, 22 nt, Human
cugggcaaggaaaaagaaaaua

SEQ ID NO: 3497361 - RNA, 16 nt, Human
cugggcacacgccucc

SEQ ID NO: 3497362 - RNA, 17 nt, Human
cugggcacacgccuccc

SEQ ID NO: 3497363 - RNA, 22 nt, Human
cugggcacacgccucccacugg

SEQ ID NO: 3497364 - RNA, 23 nt, Human
cugggcacacgccucccacuggg

SEQ ID NO: 3497365 - RNA, 14 nt, Human
cugggcacacgcug

SEQ ID NO: 3497366 - RNA, 16 nt, Human
cugggcacacgcugcu

SEQ ID NO: 3497367 - RNA, 20 nt, Human
cugggcacacgcugcucugc

SEQ ID NO: 3497368 - RNA, 22 nt, Human
cugggcacacgcugcucugccc

SEQ ID NO: 3497369 - RNA, 20 nt, Human
cugggcaccggggccucgga

SEQ ID NO: 3497370 - RNA, 16 nt, Human
cugggcaccuggggag

SEQ ID NO: 3497371 - RNA, 17 nt, Human
cugggcaccuggggagu

SEQ ID NO: 3497372 - RNA, 23 nt, Human
ccugcgucuuccgccccugccug

SEQ ID NO: 3497373 - RNA, 17 nt, Human
ccugcguggcugacccc

SEQ ID NO: 3497374 - RNA, 12 nt, Human
ccugcgugggga

SEQ ID NO: 3497375 - RNA, 17 nt, Human
ccugcguguucucagag

SEQ ID NO: 3497376 - RNA, 17 nt, Human
ccugcguugguccagag

SEQ ID NO: 3497377 - RNA, 14 nt, Human
ccugcuacaccuau

SEQ ID NO: 3497378 - RNA, 23 nt, Human
ccugcuacaccuauuaucccagc

SEQ ID NO: 3497379 - RNA, 13 nt, Human
ccugcuacugcca

SEQ ID NO: 3497380 - RNA, 23 nt, Human
ccugcuagaugagaauucagcug

SEQ ID NO: 3497381 - RNA, 19 nt, Human
ccugcuaggccagagccca

SEQ ID NO: 3497382 - RNA, 20 nt, Human
ccugcucagcccugcaccau

SEQ ID NO: 3497383 - RNA, 12 nt, Human
ccugcuccacag

SEQ ID NO: 3497384 - RNA, 21 nt, Human
ccugcuccagaauuuggaaau

SEQ ID NO: 3497385 - RNA, 13 nt, Human
ccugcuccagacc

SEQ ID NO: 3497386 - RNA, 16 nt, Human
ccugcuccagaccuga

SEQ ID NO: 3497387 - RNA, 22 nt, Human
ccugcuccagaccugauccugg

SEQ ID NO: 3497388 - RNA, 12 nt, Human
ccugcuccagcu

SEQ ID NO: 3497389 - RNA, 13 nt, Human
ccugcuccagcug

SEQ ID NO: 3497390 - RNA, 12 nt, Human
ccugcucccagg

SEQ ID NO: 3497391 - RNA, 20 nt, Human
ccugcucccauccugugugu

SEQ ID NO: 3497392 - RNA, 15 nt, Human
ccugcucccucccau

SEQ ID NO: 3497393 - RNA, 17 nt, Human
ccugcuccgcugcuccu

SEQ ID NO: 3497394 - RNA, 22 nt, Human
ccugcuccgcugcuccuuggcu

SEQ ID NO: 3497395 - RNA, 15 nt, Human
ccugcuccucccugg

SEQ ID NO: 3497396 - RNA, 17 nt, Human
ccugcuccucccuggcu

SEQ ID NO: 3497397 - RNA, 14 nt, Human
ccugcuccugcagc

SEQ ID NO: 3497398 - RNA, 16 nt, Human
ccugcuccugcagcau

SEQ ID NO: 3497399 - RNA, 18 nt, Human
ccugcucuagugggacag

SEQ ID NO: 3497400 - RNA, 22 nt, Human
ccugcucuccaagucucagugg

SEQ ID NO: 3497401 - RNA, 22 nt, Human
ccugcucuccgaccagacaccu

SEQ ID NO: 3497402 - RNA, 12 nt, Human
ccugcucuccuc

SEQ ID NO: 3497403 - RNA, 18 nt, Human
ccugcucuccucuugcca

SEQ ID NO: 3497404 - RNA, 19 nt, Human
ccugcucucuacccagccc

SEQ ID NO: 3497405 - RNA, 20 nt, Human
ccugcucucuacccagccca

SEQ ID NO: 3497406 - RNA, 12 nt, Human
ccugcucugcug

SEQ ID NO: 3497407 - RNA, 13 nt, Human
ccugcucugcuga

SEQ ID NO: 3497408 - RNA, 23 nt, Human
ccugcugaaugauuuccaaagag

SEQ ID NO: 3497409 - RNA, 18 nt, Human
ccugcugaccugugcaca

SEQ ID NO: 3497410 - RNA, 20 nt, Human
ccugcugagagacccaagga

SEQ ID NO: 3497411 - RNA, 20 nt, Human
ccugcugagccucacagcag

SEQ ID NO: 3497412 - RNA, 11 nt, Human
ccugcugagcu

SEQ ID NO: 3497413 - RNA, 13 nt, Human
ccugcugagcucu

SEQ ID NO: 3497414 - RNA, 15 nt, Human
ccugcugagcucuga

SEQ ID NO: 3497415 - RNA, 16 nt, Human
ccugcugagcucugag

SEQ ID NO: 3497416 - RNA, 20 nt, Human
ccugcugagcucugagaggc

SEQ ID NO: 3497417 - RNA, 19 nt, Human
ccugcugagggaccagcca

SEQ ID NO: 3497418 - RNA, 18 nt, Human
ccugcugagucccaggcu

SEQ ID NO: 3497419 - RNA, 19 nt, Human
ccugcugagucccaggcug

SEQ ID NO: 3497420 - RNA, 16 nt, Human
ccugcugcaccaaccc

SEQ ID NO: 3497421 - RNA, 19 nt, Human
ccugcugcaccaacccagc

SEQ ID NO: 3497422 - RNA, 23 nt, Human
ccugcugcaccaacccagccgcu

SEQ ID NO: 3497423 - RNA, 22 nt, Human
ccugcugcagaggggcaggccc

SEQ ID NO: 3497424 - RNA, 14 nt, Human
ccugcugcaggggc

SEQ ID NO: 3497425 - RNA, 20 nt, Human
ccugcugcaggggcucugga

SEQ ID NO: 3497426 - RNA, 21 nt, Human
ccugcugcaggggcucuggag

SEQ ID NO: 3497427 - RNA, 11 nt, Human
ccugcugcagu

SEQ ID NO: 3497428 - RNA, 12 nt, Human
ccugcugcaguu

SEQ ID NO: 3497429 - RNA, 16 nt, Human
ccugcugcaguugcca

SEQ ID NO: 3497430 - RNA, 17 nt, Human
ccugcugcaguugccag

SEQ ID NO: 3497431 - RNA, 19 nt, Human
ccugcugcaguugccaguc

SEQ ID NO: 3497432 - RNA, 20 nt, Human
ccugcugcaguugccaguca

SEQ ID NO: 3497433 - RNA, 21 nt, Human
ccugcugccaguaccagcccc

SEQ ID NO: 3497434 - RNA, 23 nt, Human
cuguccuggugguauuuucaaua

SEQ ID NO: 3497435 - RNA, 17 nt, Human
cuguccuguaacuguua

SEQ ID NO: 3497436 - RNA, 14 nt, Human
cuguccuguacauu

SEQ ID NO: 3497437 - RNA, 20 nt, Human
cuguccugucaucaucaugg

SEQ ID NO: 3497438 - RNA, 21 nt, Human
cuguccugucaucaucauggc

SEQ ID NO: 3497439 - RNA, 14 nt, Human
cuguccuguccugc

SEQ ID NO: 3497440 - RNA, 16 nt, Human
cuguccuguugauuaa

SEQ ID NO: 3497441 - RNA, 19 nt, Human
cuguccuuacccaucugca

SEQ ID NO: 3497442 - RNA, 17 nt, Human
cuguccuugaaggacua

SEQ ID NO: 3497443 - RNA, 19 nt, Human
cuguccuugaaugccauag

SEQ ID NO: 3497444 - RNA, 21 nt, Human
cuguccuuucuagagcacugc

SEQ ID NO: 3497445 - RNA, 22 nt, Human
cuguccuuucuagagcacugcc

SEQ ID NO: 3497446 - RNA, 23 nt, Human
cugucgaguucggcucugggugg

SEQ ID NO: 3497447 - RNA, 23 nt, Human
cugucgauuagacuggacagcuu

SEQ ID NO: 3497448 - RNA, 13 nt, Human
cugucgcccagug

SEQ ID NO: 3497449 - RNA, 19 nt, Human
cugucgccuuagcauguuu

SEQ ID NO: 3497450 - RNA, 15 nt, Human
cugucgcucucaguu

SEQ ID NO: 3497451 - RNA, 13 nt, Human
cugucgcugcuuc

SEQ ID NO: 3497452 - RNA, 15 nt, Human
cugucggaggaaaga

SEQ ID NO: 3497453 - RNA, 20 nt, Human
cugucggcgcugccccaucu

SEQ ID NO: 3497454 - RNA, 23 nt, Human
cugucggcgcugccccaucuccc

SEQ ID NO: 3497455 - RNA, 19 nt, Human
cugucgggcuuugugugaa

SEQ ID NO: 3497456 - RNA, 15 nt, Human
cugucguuaaaaaca

SEQ ID NO: 3497457 - RNA, 13 nt, Human
cugucuaaaaaac

SEQ ID NO: 3497458 - RNA, 14 nt, Human
cugucuaaaaaaca

SEQ ID NO: 3497459 - RNA, 15 nt, Human
cugucuaaccuguga

SEQ ID NO: 3497460 - RNA, 13 nt, Human
cugucuaacuuua

SEQ ID NO: 3497461 - RNA, 14 nt, Human
cugucuaccaucuc

SEQ ID NO: 3497462 - RNA, 18 nt, Human
cugucuagagagggaggc

SEQ ID NO: 3497463 - RNA, 16 nt, Human
cugucuagcacuuccu

SEQ ID NO: 3497464 - RNA, 17 nt, Human
cugucuagcacuuccuu

SEQ ID NO: 3497465 - RNA, 20 nt, Human
cugucuagcacuuccuugcc

SEQ ID NO: 3497466 - RNA, 15 nt, Human
cugucuagcaugcca

SEQ ID NO: 3497467 - RNA, 18 nt, Human
cugucuagcaugccaaca

SEQ ID NO: 3497468 - RNA, 21 nt, Human
cugucuagcaugccaacaaga

SEQ ID NO: 3497469 - RNA, 21 nt, Human
cugucuaggucaguacccacc

SEQ ID NO: 3497470 - RNA, 18 nt, Human
cugucuagucucuccugu

SEQ ID NO: 3497471 - RNA, 13 nt, Human
cugucuauucuag

SEQ ID NO: 3497472 - RNA, 19 nt, Human
cugucuauuucugcugaau

SEQ ID NO: 3497473 - RNA, 16 nt, Human
cugucucaaaaaaaga

SEQ ID NO: 3497474 - RNA, 18 nt, Human
cugucucaagagggcacu

SEQ ID NO: 3497475 - RNA, 19 nt, Human
cugucucaagagggcacug

SEQ ID NO: 3497476 - RNA, 20 nt, Human
cugucucaagcucuuccuua

SEQ ID NO: 3497477 - RNA, 17 nt, Human
cugucucaccuggacuu

SEQ ID NO: 3497478 - RNA, 13 nt, Human
cugucucagacuc

SEQ ID NO: 3497479 - RNA, 13 nt, Human
cugucucagccuc

SEQ ID NO: 3497480 - RNA, 17 nt, Human
cugucucagccucccag

SEQ ID NO: 3497481 - RNA, 17 nt, Human
cugucucaguuucacuu

SEQ ID NO: 3497482 - RNA, 20 nt, Human
cugucucauccaucaucaug

SEQ ID NO: 3497483 - RNA, 20 nt, Human
cugucucauccccagggguc

SEQ ID NO: 3497484 - RNA, 20 nt, Human
cugucucccuauaaugcugg

SEQ ID NO: 3497485 - RNA, 20 nt, Human
cugucuccucucucuguaau

SEQ ID NO: 3497486 - RNA, 22 nt, Human
cugucuccuuucaccccagggc

SEQ ID NO: 3497487 - RNA, 17 nt, Human
cugucucgagcgcccug

SEQ ID NO: 3497488 - RNA, 19 nt, Human
cugucucgagcgcccugca

SEQ ID NO: 3497489 - RNA, 22 nt, Human
cugucucgagcgcccugcagac

SEQ ID NO: 3497490 - RNA, 13 nt, Human
cugucucuccauc

SEQ ID NO: 3497491 - RNA, 21 nt, Human
cugucucucuucucagagugg

SEQ ID NO: 3497492 - RNA, 18 nt, Human
cugucucugccucccuca

SEQ ID NO: 3497493 - RNA, 12 nt, Human
cugucucugcuc

SEQ ID NO: 3497494 - RNA, 12 nt, Human
cugucucuucca

SEQ ID NO: 3497495 - RNA, 15 nt, Human
cugucucuuccauau

SEQ ID NO: 3497496 - RNA, 19 nt, Human
cugucugaaggacacuucc

SEQ ID NO: 3497497 - RNA, 17 nt, Human
cugucugaucugugcuu

SEQ ID NO: 3497498 - RNA, 21 nt, Human
cugucugaucugugcuuucca

SEQ ID NO: 3497499 - RNA, 20 nt, Human
cugucugccaaccuaaaacu

SEQ ID NO: 3497500 - RNA, 20 nt, Human
cugucugccagccagcagcc

SEQ ID NO: 3497501 - RNA, 13 nt, Human
cugucugccccag

SEQ ID NO: 3497502 - RNA, 19 nt, Human
cugucugccccagcccaga

SEQ ID NO: 3497503 - RNA, 14 nt, Human
cugucugccccgcc

SEQ ID NO: 3497504 - RNA, 17 nt, Human
cugucugcuccagcucu

SEQ ID NO: 3497505 - RNA, 19 nt, Human
cugucugcuccagcucugg

SEQ ID NO: 3497506 - RNA, 16 nt, Human
cugucuggccccccug

SEQ ID NO: 3497507 - RNA, 16 nt, Human
cugucugggugcuacu

SEQ ID NO: 3497508 - RNA, 21 nt, Human
cugucugggugcuacugggga

SEQ ID NO: 3497509 - RNA, 23 nt, Human
cugucugggugcuacuggggaaa

SEQ ID NO: 3497510 - RNA, 17 nt, Human
cugucuggguggcucac

SEQ ID NO: 3497511 - RNA, 23 nt, Human
cugucugguggccccguuucugg

SEQ ID NO: 3497512 - RNA, 16 nt, Human
cugucuguagagggcc

SEQ ID NO: 3497513 - RNA, 20 nt, Human
cugucuguagagggcccugg

SEQ ID NO: 3497514 - RNA, 20 nt, Human
cugucugucucuccaucugu

SEQ ID NO: 3497515 - RNA, 17 nt, Human
cugucugucugucccaa

SEQ ID NO: 3497516 - RNA, 20 nt, Human
ccuggccagaugcaccagcc

SEQ ID NO: 3497517 - RNA, 16 nt, Human
ccuggccagauggccc

SEQ ID NO: 3497518 - RNA, 19 nt, Human
ccuggccagauggcccgga

SEQ ID NO: 3497519 - RNA, 12 nt, Human
ccuggccaggag

SEQ ID NO: 3497520 - RNA, 15 nt, Human
ccuggccaggagcuc

SEQ ID NO: 3497521 - RNA, 20 nt, Human
ccuggccaggagcucuucag

SEQ ID NO: 3497522 - RNA, 21 nt, Human
ccuggccaggagcucuucagg

SEQ ID NO: 3497523 - RNA, 21 nt, Human
ccuggccaggcacccccugga

SEQ ID NO: 3497524 - RNA, 22 nt, Human
ccuggccaggcagaucugugcc

SEQ ID NO: 3497525 - RNA, 14 nt, Human
ccuggccagggccu

SEQ ID NO: 3497526 - RNA, 12 nt, Human
ccuggccagugc

SEQ ID NO: 3497527 - RNA, 14 nt, Human
ccuggccaucucug

SEQ ID NO: 3497528 - RNA, 22 nt, Human
ccuggcccaccccacccacuuc

SEQ ID NO: 3497529 - RNA, 13 nt, Human
ccuggcccagccu

SEQ ID NO: 3497530 - RNA, 15 nt, Human
ccuggcccagcggcc

SEQ ID NO: 3497531 - RNA, 21 nt, Human
ccuggcccagcggccccuccc

SEQ ID NO: 3497532 - RNA, 15 nt, Human
ccuggcccagcuccc

SEQ ID NO: 3497533 - RNA, 16 nt, Human
ccuggcccagcucccc

SEQ ID NO: 3497534 - RNA, 15 nt, Human
ccuggcccagggcau

SEQ ID NO: 3497535 - RNA, 13 nt, Human
ccuggcccauaga

SEQ ID NO: 3497536 - RNA, 22 nt, Human
ccuggcccauagaaacaugaca

SEQ ID NO: 3497537 - RNA, 23 nt, Human
ccuggcccauagaaacaugacac

SEQ ID NO: 3497538 - RNA, 15 nt, Human
ccuggcccaucaggg

SEQ ID NO: 3497539 - RNA, 17 nt, Human
ccuggcccaucagugua

SEQ ID NO: 3497540 - RNA, 20 nt, Human
ccuggcccaucaguguaccc

SEQ ID NO: 3497541 - RNA, 15 nt, Human
ccuggccccaugucu

SEQ ID NO: 3497542 - RNA, 21 nt, Human
ccuggccccaugucucucaga

SEQ ID NO: 3497543 - RNA, 23 nt, Human
ccuggcccccaaccucagggcuc

SEQ ID NO: 3497544 - RNA, 21 nt, Human
ccuggcccccacauggugaug

SEQ ID NO: 3497545 - RNA, 13 nt, Human
ccuggccccucuc

SEQ ID NO: 3497546 - RNA, 16 nt, Human
ccuggccccucucccu

SEQ ID NO: 3497547 - RNA, 13 nt, Human
ccuggcccucaag

SEQ ID NO: 3497548 - RNA, 12 nt, Human
ccuggcccucug

SEQ ID NO: 3497549 - RNA, 15 nt, Human
ccuggcccucugugu

SEQ ID NO: 3497550 - RNA, 13 nt, Human
ccuggcccugccc

SEQ ID NO: 3497551 - RNA, 17 nt, Human
ccuggcccugcuuccug

SEQ ID NO: 3497552 - RNA, 14 nt, Human
ccuggcccuggggc

SEQ ID NO: 3497553 - RNA, 15 nt, Human
ccuggcccuggggcc

SEQ ID NO: 3497554 - RNA, 12 nt, Human
ccuggcccuuac

SEQ ID NO: 3497555 - RNA, 15 nt, Human
ccuggccgcccccug

SEQ ID NO: 3497556 - RNA, 22 nt, Human
ccuggccgcccccugcccccca

SEQ ID NO: 3497557 - RNA, 19 nt, Human
ccuggccgcggagccugca

SEQ ID NO: 3497558 - RNA, 19 nt, Human
ccuggccggcaaccccagu

SEQ ID NO: 3497559 - RNA, 21 nt, Human
ccuggccggcaaccccaguuc

SEQ ID NO: 3497560 - RNA, 23 nt, Human
ccuggccggcaaccccaguucug

SEQ ID NO: 3497561 - RNA, 13 nt, Human
ccuggccggccag

SEQ ID NO: 3497562 - RNA, 23 nt, Human
ccuggccggugugggggccccgu

SEQ ID NO: 3497563 - RNA, 20 nt, Human
ccuggccuagaccagcagac

SEQ ID NO: 3497564 - RNA, 23 nt, Human
ccuggccuauccgcugccagccu

SEQ ID NO: 3497565 - RNA, 13 nt, Human
ccuggccucagac

SEQ ID NO: 3497566 - RNA, 20 nt, Human
ccuggccucagacugcaccc

SEQ ID NO: 3497567 - RNA, 13 nt, Human
ccuggccuccagg

SEQ ID NO: 3497568 - RNA, 18 nt, Human
ccuggccuccaggcccgu

SEQ ID NO: 3497569 - RNA, 15 nt, Human
ccuggccuccccugc

SEQ ID NO: 3497570 - RNA, 17 nt, Human
ccuggccuccccugcca

SEQ ID NO: 3497571 - RNA, 24 nt, Human
ccuggccuccggcgucagccucca

SEQ ID NO: 3497572 - RNA, 14 nt, Human
ccuggccuccugcc

SEQ ID NO: 3497573 - RNA, 18 nt, Human
ccuggccuccugccucua

SEQ ID NO: 3497574 - RNA, 12 nt, Human
ccuggccucugc

SEQ ID NO: 3497575 - RNA, 14 nt, Human
ccuggccucugugc

SEQ ID NO: 3497576 - RNA, 14 nt, Human
ccuggccugagcug

SEQ ID NO: 3497577 - RNA, 13 nt, Human
ccuggccugcugg

SEQ ID NO: 3497578 - RNA, 12 nt, Human
ccuggccuggca

SEQ ID NO: 3497579 - RNA, 15 nt, Human
ccuggccuggcacac

SEQ ID NO: 3497580 - RNA, 13 nt, Human
ccuggccuggccc

SEQ ID NO: 3497581 - RNA, 18 nt, Human
ccuggccuggcccugccc

SEQ ID NO: 3497582 - RNA, 20 nt, Human
ccuggccuggcccugcccug

SEQ ID NO: 3497583 - RNA, 17 nt, Human
ccuggccugucucggaa

SEQ ID NO: 3497584 - RNA, 17 nt, Human
ccuggccugucugugaa

SEQ ID NO: 3497585 - RNA, 16 nt, Human
ccuggccuuuccuggu

SEQ ID NO: 3497586 - RNA, 19 nt, Human
ccuggcgcaggugggcugg

SEQ ID NO: 3497587 - RNA, 17 nt, Human
ccuggcgggaugggcca

SEQ ID NO: 3497588 - RNA, 20 nt, Human
ccuggcgggaugggccaccg

SEQ ID NO: 3497589 - RNA, 21 nt, Human
ccuggcgggaugggccaccgc

SEQ ID NO: 3497590 - RNA, 12 nt, Human
ccuggcggggug

SEQ ID NO: 3497591 - RNA, 20 nt, Human
ccuggcuccaaacccucgag

SEQ ID NO: 3497592 - RNA, 21 nt, Human
ccuggcuccaaacccucgagg

SEQ ID NO: 3497593 - RNA, 16 nt, Human
ccuggcucccaggaca

SEQ ID NO: 3497594 - RNA, 11 nt, Human
ccuggcucccc

SEQ ID NO: 3497595 - RNA, 12 nt, Human
ccuggcucccuc

SEQ ID NO: 3497596 - RNA, 19 nt, Human
ccuggcucccucacucuca

SEQ ID NO: 3497597 - RNA, 15 nt, Human
ccuggcucccuccuc

SEQ ID NO: 3497598 - RNA, 18 nt, Human
ccuggcuccgcugugugg

SEQ ID NO: 3497599 - RNA, 18 nt, Human
cugugagacccccacacc

SEQ ID NO: 3497600 - RNA, 19 nt, Human
cugugagacccccacaccu

SEQ ID NO: 3497601 - RNA, 23 nt, Human
cugugagacccccacaccucagu

SEQ ID NO: 3497602 - RNA, 22 nt, Human
cugugagauggcuggcugguga

SEQ ID NO: 3497603 - RNA, 13 nt, Human
cugugagaugugu

SEQ ID NO: 3497604 - RNA, 15 nt, Human
cugugagcaagaagu

SEQ ID NO: 3497605 - RNA, 14 nt, Human
cugugagccagucu

SEQ ID NO: 3497606 - RNA, 14 nt, Human
cugugagccccugg

SEQ ID NO: 3497607 - RNA, 16 nt, Human
cugugagccccugguc

SEQ ID NO: 3497608 - RNA, 13 nt, Human
cugugagcugcac

SEQ ID NO: 3497609 - RNA, 18 nt, Human
cugugaggagccccaucu

SEQ ID NO: 3497610 - RNA, 14 nt, Human
cugugaggcagggg

SEQ ID NO: 3497611 - RNA, 15 nt, Human
cugugaggcuguccu

SEQ ID NO: 3497612 - RNA, 15 nt, Human
cugugaguaaauauu

SEQ ID NO: 3497613 - RNA, 23 nt, Human
cugugaguacuacaguccuccca

SEQ ID NO: 3497614 - RNA, 20 nt, Human
cugugagucuuugguucuaa

SEQ ID NO: 3497615 - RNA, 20 nt, Human
cugugaguguaagugugagu

SEQ ID NO: 3497616 - RNA, 21 nt, Human
cugugaguguaagugugagua

SEQ ID NO: 3497617 - RNA, 16 nt, Human
cugugaguucucccug

SEQ ID NO: 3497618 - RNA, 13 nt, Human
cugugaucauuua

SEQ ID NO: 3497619 - RNA, 19 nt, Human
cugugaucauuuauuuuaa

SEQ ID NO: 3497620 - RNA, 19 nt, Human
cugugauccacccaacccu

SEQ ID NO: 3497621 - RNA, 22 nt, Human
cugugaucugggucucuaaucu

SEQ ID NO: 3497622 - RNA, 15 nt, Human
cugugauggggcccu

SEQ ID NO: 3497623 - RNA, 16 nt, Human
cugugauggggcccug

SEQ ID NO: 3497624 - RNA, 20 nt, Human
cugugauggggcccugccuc

SEQ ID NO: 3497625 - RNA, 13 nt, Human
cugugauguuugu

SEQ ID NO: 3497626 - RNA, 16 nt, Human
cugugauucagaaaau

SEQ ID NO: 3497627 - RNA, 22 nt, Human
cugugauuccacuacaccuggc

SEQ ID NO: 3497628 - RNA, 22 nt, Human
cugugauugggcguagaagugg

SEQ ID NO: 3497629 - RNA, 22 nt, Human
cugugauuuuugguauuugaaa

SEQ ID NO: 3497630 - RNA, 19 nt, Human
cugugcaacggucuccuga

SEQ ID NO: 3497631 - RNA, 21 nt, Human
cugugcaauagacacauacau

SEQ ID NO: 3497632 - RNA, 11 nt, Human
cugugcacaca

SEQ ID NO: 3497633 - RNA, 21 nt, Human
cugugcacaccccacucccac

SEQ ID NO: 3497634 - RNA, 22 nt, Human
cugugcacaccccacucccaca

SEQ ID NO: 3497635 - RNA, 11 nt, Human
cugugcacagc

SEQ ID NO: 3497636 - RNA, 13 nt, Human
cugugcacagccc

SEQ ID NO: 3497637 - RNA, 20 nt, Human
cugugcacaucugugucuug

SEQ ID NO: 3497638 - RNA, 18 nt, Human
cugugcacgcaguggccu

SEQ ID NO: 3497639 - RNA, 15 nt, Human
cugugcacgguggac

SEQ ID NO: 3497640 - RNA, 14 nt, Human
cugugcagccccgc

SEQ ID NO: 3497641 - RNA, 22 nt, Human
cugugcagccccgccuccaggc

SEQ ID NO: 3497642 - RNA, 19 nt, Human
cugugcagccgcugagcga

SEQ ID NO: 3497643 - RNA, 17 nt, Human
cugugcagcgcagcugg

SEQ ID NO: 3497644 - RNA, 23 nt, Human
cugugcaguggcccccacagaaa

SEQ ID NO: 3497645 - RNA, 14 nt, Human
cugugcauggguga

SEQ ID NO: 3497646 - RNA, 17 nt, Human
cugugcaugggugaagg

SEQ ID NO: 3497647 - RNA, 17 nt, Human
cugugcaugguggcacc

SEQ ID NO: 3497648 - RNA, 16 nt, Human
cugugcauguaugucu

SEQ ID NO: 3497649 - RNA, 13 nt, Human
cugugccacccac

SEQ ID NO: 3497650 - RNA, 15 nt, Human
cugugccacccuggg

SEQ ID NO: 3497651 - RNA, 16 nt, Human
cugugccacccugggc

SEQ ID NO: 3497652 - RNA, 20 nt, Human
cugugccacccugggcucug

SEQ ID NO: 3497653 - RNA, 22 nt, Human
cugugccacccugggcucugug

SEQ ID NO: 3497654 - RNA, 20 nt, Human
cugugccagagccuggggcu

SEQ ID NO: 3497655 - RNA, 14 nt, Human
cugugccagcccag

SEQ ID NO: 3497656 - RNA, 14 nt, Human
cugugccaggugaa

SEQ ID NO: 3497657 - RNA, 20 nt, Human
cugugccaggugaggucagc

SEQ ID NO: 3497658 - RNA, 16 nt, Human
cugugccaugugccag

SEQ ID NO: 3497659 - RNA, 18 nt, Human
cugugcccacaucccagg

SEQ ID NO: 3497660 - RNA, 19 nt, Human
cugugcccacaucccaggc

SEQ ID NO: 3497661 - RNA, 18 nt, Human
cugugggcucccuuccuc

SEQ ID NO: 3497662 - RNA, 22 nt, Human
cugugggcugcacucugugccc

SEQ ID NO: 3497663 - RNA, 23 nt, Human
cugugggcugcacucugugccca

SEQ ID NO: 3497664 - RNA, 14 nt, Human
cuguggggaaaggg

SEQ ID NO: 3497665 - RNA, 21 nt, Human
cuguggggaucucaggggcug

SEQ ID NO: 3497666 - RNA, 17 nt, Human
cuguggggcugguagcu

SEQ ID NO: 3497667 - RNA, 22 nt, Human
cugugggggaagagcacagccc

SEQ ID NO: 3497668 - RNA, 21 nt, Human
cugugggggguaaucccugcu

SEQ ID NO: 3497669 - RNA, 23 nt, Human
cugugggggugagggucccaugu

SEQ ID NO: 3497670 - RNA, 16 nt, Human
cugugggguuuuguua

SEQ ID NO: 3497671 - RNA, 13 nt, Human
cugugggugaugg

SEQ ID NO: 3497672 - RNA, 19 nt, Human
cugugggugauggggaggg

SEQ ID NO: 3497673 - RNA, 18 nt, Human
cugugguaaaugccacac

SEQ ID NO: 3497674 - RNA, 22 nt, Human
cugugguccugaauucuuuccc

SEQ ID NO: 3497675 - RNA, 19 nt, Human
cuguggucggugccagagg

SEQ ID NO: 3497676 - RNA, 12 nt, Human
cuguggugacuu

SEQ ID NO: 3497677 - RNA, 20 nt, Human
cuguggugacuuuggauaau

SEQ ID NO: 3497678 - RNA, 15 nt, Human
cuguggugugucccc

SEQ ID NO: 3497679 - RNA, 22 nt, Human
cuguggugugucccccucuguc

SEQ ID NO: 3497680 - RNA, 18 nt, Human
cugugguucugagauggc

SEQ ID NO: 3497681 - RNA, 20 nt, Human
cugugguucugagauggcuc

SEQ ID NO: 3497682 - RNA, 19 nt, Human
cugugguuggcugggaaau

SEQ ID NO: 3497683 - RNA, 15 nt, Human
cugugguuucauguu

SEQ ID NO: 3497684 - RNA, 19 nt, Human
cugugguuuccaaggagcu

SEQ ID NO: 3497685 - RNA, 20 nt, Human
cugugguuuccaaggagcug

SEQ ID NO: 3497686 - RNA, 21 nt, Human
cugugguuuccaaggagcuga

SEQ ID NO: 3497687 - RNA, 18 nt, Human
cugugguuuuccccuccc

SEQ ID NO: 3497688 - RNA, 22 nt, Human
cugugguuuuccccucccuggg

SEQ ID NO: 3497689 - RNA, 23 nt, Human
cugugguuuuccccucccugggu

SEQ ID NO: 3497690 - RNA, 16 nt, Human
cuguguaaaaagagag

SEQ ID NO: 3497691 - RNA, 11 nt, Human
cuguguaaacu

SEQ ID NO: 3497692 - RNA, 14 nt, Human
cuguguaaaguuag

SEQ ID NO: 3497693 - RNA, 16 nt, Human
cuguguaacagcuccu

SEQ ID NO: 3497694 - RNA, 18 nt, Human
cuguguaacagcuccuug

SEQ ID NO: 3497695 - RNA, 19 nt, Human
cuguguaacagcuccuugg

SEQ ID NO: 3497696 - RNA, 19 nt, Human
cuguguaaucauuucuugg

SEQ ID NO: 3497697 - RNA, 14 nt, Human
cuguguacaaagaa

SEQ ID NO: 3497698 - RNA, 21 nt, Human
cuguguacagaauucugcuac

SEQ ID NO: 3497699 - RNA, 17 nt, Human
cuguguacauaacugaa

SEQ ID NO: 3497700 - RNA, 20 nt, Human
cuguguacauaacugaaaau

SEQ ID NO: 3497701 - RNA, 15 nt, Human
cuguguacugcaguu

SEQ ID NO: 3497702 - RNA, 23 nt, Human
cuguguagcugugaccugcugag

SEQ ID NO: 3497703 - RNA, 13 nt, Human
cuguguauauuau

SEQ ID NO: 3497704 - RNA, 15 nt, Human
cuguguauauuauuu

SEQ ID NO: 3497705 - RNA, 19 nt, Human
cuguguauauuauuuggca

SEQ ID NO: 3497706 - RNA, 20 nt, Human
cuguguauauuauuuggcag

SEQ ID NO: 3497707 - RNA, 19 nt, Human
cuguguauggaaaaaccau

SEQ ID NO: 3497708 - RNA, 15 nt, Human
cuguguauguacaua

SEQ ID NO: 3497709 - RNA, 15 nt, Human
cuguguauuccaaga

SEQ ID NO: 3497710 - RNA, 13 nt, Human
cuguguauuuaau

SEQ ID NO: 3497711 - RNA, 17 nt, Human
cugugucaauccagaug

SEQ ID NO: 3497712 - RNA, 14 nt, Human
cugugucacuacgu

SEQ ID NO: 3497713 - RNA, 17 nt, Human
cugugucacuggcugcc

SEQ ID NO: 3497714 - RNA, 22 nt, Human
cugugucacuggcugccuccac

SEQ ID NO: 3497715 - RNA, 19 nt, Human
cugugucagcauagaagua

SEQ ID NO: 3497716 - RNA, 20 nt, Human
cugugucagcauagaaguaa

SEQ ID NO: 3497717 - RNA, 19 nt, Human
cugugucagcgccuggccu

SEQ ID NO: 3497718 - RNA, 22 nt, Human
cugugucagguggggcagcuug

SEQ ID NO: 3497719 - RNA, 16 nt, Human
cugugucaguuuaugu

SEQ ID NO: 3497720 - RNA, 15 nt, Human
cugugucauaaacag

SEQ ID NO: 3497721 - RNA, 18 nt, Human
cuguguccaacuccagua

SEQ ID NO: 3497722 - RNA, 19 nt, Human
cuguguccaacuccaguac

SEQ ID NO: 3497723 - RNA, 13 nt, Human
cuguguccaugcg

SEQ ID NO: 3497724 - RNA, 22 nt, Human
cugugucccaugacccaccccu

SEQ ID NO: 3497725 - RNA, 23 nt, Human
cugugucccaugacccaccccug

SEQ ID NO: 3497726 - RNA, 15 nt, Human
cugugucccucucuc

SEQ ID NO: 3497727 - RNA, 19 nt, Human
cugugucccucucucugga

SEQ ID NO: 3497728 - RNA, 15 nt, Human
cuguguccggcccag

SEQ ID NO: 3497729 - RNA, 15 nt, Human
cuguguccuggugcu

SEQ ID NO: 3497730 - RNA, 18 nt, Human
cuguguccuugcaccugc

SEQ ID NO: 3497731 - RNA, 12 nt, Human
cugugucuaaac

SEQ ID NO: 3497732 - RNA, 14 nt, Human
cugugucuaaacug

SEQ ID NO: 3497733 - RNA, 17 nt, Human
cugugucuaagauucua

SEQ ID NO: 3497734 - RNA, 20 nt, Human
cugugucuaagauucuagau

SEQ ID NO: 3497735 - RNA, 21 nt, Human
cugugucuaagauucuagauc

SEQ ID NO: 3497736 - RNA, 18 nt, Human
cugugucugagagcaaag

SEQ ID NO: 3497737 - RNA, 19 nt, Human
cugugucugaguggcuuca

SEQ ID NO: 3497738 - RNA, 22 nt, Human
cugugucugcccaaugaauaau

SEQ ID NO: 3497739 - RNA, 19 nt, Human
cugugucuugcaauggcag

SEQ ID NO: 3497740 - RNA, 21 nt, Human
cugugucuugcaauggcagcc

SEQ ID NO: 3497741 - RNA, 21 nt, Human
cugugucuuuaaaugcugcuu

SEQ ID NO: 3497742 - RNA, 20 nt, Human
cugugucuuuuuucacuaca

SEQ ID NO: 3497743 - RNA, 13 nt, Human
cugugugaaaaug

SEQ ID NO: 3497744 - RNA, 20 nt, Human
cugugugaaacuuucauucc

SEQ ID NO: 3497745 - RNA, 13 nt, Human
cugugugaaugug

SEQ ID NO: 3497746 - RNA, 14 nt, Human
cugugugaaugugg

SEQ ID NO: 3497747 - RNA, 17 nt, Human
cugugugaaugugggca

SEQ ID NO: 3497748 - RNA, 18 nt, Human
cugugugcaagugugugc

SEQ ID NO: 3497749 - RNA, 13 nt, Human
cugugugcagguu

SEQ ID NO: 3497750 - RNA, 15 nt, Human
cugugugcgcucugu

SEQ ID NO: 3497751 - RNA, 14 nt, Human
cugugugcucagga

SEQ ID NO: 3497752 - RNA, 20 nt, Human
cugugugcucaggagcccug

SEQ ID NO: 3497753 - RNA, 23 nt, Human
cugugugcucaggagcccuggga

SEQ ID NO: 3497754 - RNA, 21 nt, Human
cugugugcugugguuccuggg

SEQ ID NO: 3497755 - RNA, 13 nt, Human
cugugugcuuuuu

SEQ ID NO: 3497756 - RNA, 23 nt, Human
cuguguggagagggaaugugaaa

SEQ ID NO: 3497757 - RNA, 15 nt, Human
cuguguggcagucug

SEQ ID NO: 3497758 - RNA, 19 nt, Human
cugugugggacuguacaca

SEQ ID NO: 3497759 - RNA, 16 nt, Human
cugugugucaguuuuc

SEQ ID NO: 3497760 - RNA, 23 nt, Human
cugugugucccaggcagggagac

SEQ ID NO: 3497761 - RNA, 19 nt, Human
cugugugugaccccuccug

SEQ ID NO: 3497762 - RNA, 18 nt, Human
cugugugugagugugaau

SEQ ID NO: 3497763 - RNA, 17 nt, Human
cugugugugaugugcau

SEQ ID NO: 3497764 - RNA, 11 nt, Human
cugugugugcc

SEQ ID NO: 3497765 - RNA, 18 nt, Human
cugugugugcccucuggg

SEQ ID NO: 3497766 - RNA, 23 nt, Human
cugugugugcccucugggcucug

SEQ ID NO: 3497767 - RNA, 18 nt, Human
cugugugugcgccuacag

SEQ ID NO: 3497768 - RNA, 20 nt, Human
cugugugugcgccuacagga

SEQ ID NO: 3497769 - RNA, 14 nt, Human
cugugugugugaau

SEQ ID NO: 3497770 - RNA, 17 nt, Human
cugugugugugaaugaa

SEQ ID NO: 3497771 - RNA, 21 nt, Human
cugugugugugugugugcgug

SEQ ID NO: 3497772 - RNA, 23 nt, Human
cugugugugugugugugcgugug

SEQ ID NO: 3497773 - RNA, 19 nt, Human
cuguguguuaagcucugcu

SEQ ID NO: 3497774 - RNA, 20 nt, Human
cuguguguuaagcucugcua

SEQ ID NO: 3497775 - RNA, 12 nt, Human
cuguguguuagu

SEQ ID NO: 3497776 - RNA, 19 nt, Human
cuguguguuaguucccaac

SEQ ID NO: 3497777 - RNA, 13 nt, Human
cuguguguuccug

SEQ ID NO: 3497778 - RNA, 20 nt, Human
cuguguguugccacaggaca

SEQ ID NO: 3497779 - RNA, 22 nt, Human
cuguguguugccacaggacaca

SEQ ID NO: 3497780 - RNA, 16 nt, Human
cuguguguuuaugugu

SEQ ID NO: 3497781 - RNA, 21 nt, Human
cuguguuaauuuaaguuuuga

SEQ ID NO: 3497782 - RNA, 22 nt, Human
cuguguuauuauagagcagaaa

SEQ ID NO: 3497783 - RNA, 17 nt, Human
cuguguucaaaaauaua

SEQ ID NO: 3497784 - RNA, 13 nt, Human
cuguguuccuggc

SEQ ID NO: 3497785 - RNA, 23 nt, Human
cuguguugcauuauucauuuagu

SEQ ID NO: 3497786 - RNA, 23 nt, Human
cuguguugccacaguagaacugu

SEQ ID NO: 3497787 - RNA, 20 nt, Human
cuguguugcgugucgugggu

SEQ ID NO: 3497788 - RNA, 19 nt, Human
cuguguuguauuaacaaaa

SEQ ID NO: 3497789 - RNA, 22 nt, Human
cuguguuguauuaacaaaaguu

SEQ ID NO: 3497790 - RNA, 14 nt, Human
cuguguugucucua

SEQ ID NO: 3497791 - RNA, 22 nt, Human
cuguguugucucuagagcaggg

SEQ ID NO: 3497792 - RNA, 21 nt, Human
cuguguuuaauuucuucaaaa

SEQ ID NO: 3497793 - RNA, 22 nt, Human
cuguguuuauauggaagaaagu

SEQ ID NO: 3497794 - RNA, 21 nt, Human
cuguguuuauucaaacugaaa

SEQ ID NO: 3497795 - RNA, 22 nt, Human
cuguguuugagcucugcagccc

SEQ ID NO: 3497796 - RNA, 23 nt, Human
cuguguuugcagccugcucuagu

SEQ ID NO: 3497797 - RNA, 14 nt, Human
cuguguuugcuccc

SEQ ID NO: 3497798 - RNA, 16 nt, Human
cuguguuuggcuuuca

SEQ ID NO: 3497799 - RNA, 23 nt, Human
cuguguuuggcuuucagggaggc

SEQ ID NO: 3497800 - RNA, 14 nt, Human
cuguguuuguuccu

SEQ ID NO: 3497801 - RNA, 13 nt, Human
cuguguuuuaaua

SEQ ID NO: 3497802 - RNA, 17 nt, Human
cuguguuuugaaagaau

SEQ ID NO: 3497803 - RNA, 15 nt, Human
cuguguuuuugaaau

SEQ ID NO: 3497804 - RNA, 23 nt, Human
cuuacagugagggcuauacaugg

SEQ ID NO: 3497805 - RNA, 17 nt, Human
cuuacauaaacaucagg

SEQ ID NO: 3497806 - RNA, 22 nt, Human
cuuacauuagcaguuugcuuug

SEQ ID NO: 3497807 - RNA, 21 nt, Human
cuuacauucucuaauaagaaa

SEQ ID NO: 3497808 - RNA, 23 nt, Human
cuuacauucucuaauaagaaaac

SEQ ID NO: 3497809 - RNA, 13 nt, Human
cuuacauuuguga

SEQ ID NO: 3497810 - RNA, 15 nt, Human
cuuaccaaaggauag

SEQ ID NO: 3497811 - RNA, 15 nt, Human
cuuaccaacuuucug

SEQ ID NO: 3497812 - RNA, 17 nt, Human
cuuaccaacuuucugua

SEQ ID NO: 3497813 - RNA, 13 nt, Human
cuuaccauuaaag

SEQ ID NO: 3497814 - RNA, 18 nt, Human
cuguguuuuugaaauauu

SEQ ID NO: 3497815 - RNA, 20 nt, Human
cuguuaaaagaugaaaauau

SEQ ID NO: 3497816 - RNA, 12 nt, Human
cuguuaaaaugc

SEQ ID NO: 3497817 - RNA, 14 nt, Human
cuguuaaacuguua

SEQ ID NO: 3497818 - RNA, 15 nt, Human
cuguuaaauacagga

SEQ ID NO: 3497819 - RNA, 16 nt, Human
cuguuaaauacaggaa

SEQ ID NO: 3497820 - RNA, 20 nt, Human
cuguuaaauugcuguguauc

SEQ ID NO: 3497821 - RNA, 13 nt, Human
cuguuaacugaau

SEQ ID NO: 3497822 - RNA, 14 nt, Human
cuguuaacugaaua

SEQ ID NO: 3497823 - RNA, 18 nt, Human
cuguuaacugaauaccac

SEQ ID NO: 3497824 - RNA, 19 nt, Human
cuguuaacuuauucaaaga

SEQ ID NO: 3497825 - RNA, 16 nt, Human
cuguuaauaguucagg

SEQ ID NO: 3497826 - RNA, 13 nt, Human
cuguuaauguauu

SEQ ID NO: 3497827 - RNA, 13 nt, Human
cuguuacaaaaug

SEQ ID NO: 3497828 - RNA, 17 nt, Human
cuguuacaaaauguaac

SEQ ID NO: 3497829 - RNA, 18 nt, Human
cuguuacaaaauguaacu

SEQ ID NO: 3497830 - RNA, 19 nt, Human
cuguuacaaaauguaacug

SEQ ID NO: 3497831 - RNA, 18 nt, Human
cuguuacacuuuuuggaa

SEQ ID NO: 3497832 - RNA, 15 nt, Human
cuguuacaguaaugu

SEQ ID NO: 3497833 - RNA, 21 nt, Human
cuguuacauaacaagaaaauc

SEQ ID NO: 3497834 - RNA, 19 nt, Human
cuguuaccaugucacugug

SEQ ID NO: 3497835 - RNA, 18 nt, Human
cuguuacccagagaauau

SEQ ID NO: 3497836 - RNA, 22 nt, Human
cuguuacccaggguggagugca

SEQ ID NO: 3497837 - RNA, 17 nt, Human
cuguuaccgccugucuc

SEQ ID NO: 3497838 - RNA, 20 nt, Human
cuguuaccugaucaaugaca

SEQ ID NO: 3497839 - RNA, 14 nt, Human
cuguuacugggccc

SEQ ID NO: 3497840 - RNA, 15 nt, Human
cuguuacugggcccu

SEQ ID NO: 3497841 - RNA, 13 nt, Human
cuguuacugucuu

SEQ ID NO: 3497842 - RNA, 15 nt, Human
cuguuacuuaccuaa

SEQ ID NO: 3497843 - RNA, 19 nt, Human
cuguuacuuaccuaaacag

SEQ ID NO: 3497844 - RNA, 15 nt, Human
cuguuagaacacuau

SEQ ID NO: 3497845 - RNA, 23 nt, Human
cuguuagaacacuauuuucagaa

SEQ ID NO: 3497846 - RNA, 13 nt, Human
cuguuagcacugu

SEQ ID NO: 3497847 - RNA, 17 nt, Human
cuguuagcacuguugau

SEQ ID NO: 3497848 - RNA, 18 nt, Human
cuguuagcacuguugaug

SEQ ID NO: 3497849 - RNA, 17 nt, Human
cuguuagccauguggcu

SEQ ID NO: 3497850 - RNA, 16 nt, Human
cuguuagcuguuauuu

SEQ ID NO: 3497851 - RNA, 14 nt, Human
cuguuagggccuug

SEQ ID NO: 3497852 - RNA, 15 nt, Human
cuguuagggccuugg

SEQ ID NO: 3497853 - RNA, 13 nt, Human
cuguuagucauuu

SEQ ID NO: 3497854 - RNA, 15 nt, Human
cuguuagucauuugc

SEQ ID NO: 3497855 - RNA, 14 nt, Human
cuguuauaacucug

SEQ ID NO: 3497856 - RNA, 13 nt, Human
cuguuauauaaau

SEQ ID NO: 3497857 - RNA, 14 nt, Human
cuguuauauaaaug

SEQ ID NO: 3497858 - RNA, 15 nt, Human
cuguuauauaaaugg

SEQ ID NO: 3497859 - RNA, 21 nt, Human
cuguuaucauuuuuuccuguu

SEQ ID NO: 3497860 - RNA, 13 nt, Human
cuguuauccaugg

SEQ ID NO: 3497861 - RNA, 17 nt, Human
cuguuauccuauuuaga

SEQ ID NO: 3497862 - RNA, 13 nt, Human
cuguuaugggcuu

SEQ ID NO: 3497863 - RNA, 17 nt, Human
cuguuaugucuguuuaa

SEQ ID NO: 3497864 - RNA, 21 nt, Human
cuguuaugucuguuuaagaaa

SEQ ID NO: 3497865 - RNA, 15 nt, Human
cuguuauucuuugca

SEQ ID NO: 3497866 - RNA, 16 nt, Human
cuguuauucuuugcac

SEQ ID NO: 3497867 - RNA, 14 nt, Human
cuguuauuuauaau

SEQ ID NO: 3497868 - RNA, 23 nt, Human
cuguucaagagcacacuuggccc

SEQ ID NO: 3497869 - RNA, 23 nt, Human
cuguucaauguuuuuaaaaaucu

SEQ ID NO: 3497870 - RNA, 15 nt, Human
cuguucacucacucu

SEQ ID NO: 3497871 - RNA, 16 nt, Human
cuguucacuuuuccuc

SEQ ID NO: 3497872 - RNA, 17 nt, Human
cuguucagcauucuuag

SEQ ID NO: 3497873 - RNA, 15 nt, Human
cuguucagcuccagc

SEQ ID NO: 3497874 - RNA, 19 nt, Human
cuguucagcuuuuauuccu

SEQ ID NO: 3497875 - RNA, 16 nt, Human
cuguucaguaauaaaa

SEQ ID NO: 3497876 - RNA, 12 nt, Human
cuguucaguuac

SEQ ID NO: 3497877 - RNA, 15 nt, Human
cuguucaguuacaga

SEQ ID NO: 3497878 - RNA, 17 nt, Human
cuguucaguuacagaaa

SEQ ID NO: 3497879 - RNA, 21 nt, Human
cuguucaguuacagaaagugg

SEQ ID NO: 3497880 - RNA, 21 nt, Human
cuguucauacacuaaccaaau

SEQ ID NO: 3497881 - RNA, 14 nt, Human
cuguucauggcaga

SEQ ID NO: 3497882 - RNA, 17 nt, Human
cuguucauuccuccagg

SEQ ID NO: 3497883 - RNA, 14 nt, Human
cuguucauuguaag

SEQ ID NO: 3497884 - RNA, 14 nt, Human
cuguucauuuccuc

SEQ ID NO: 3497885 - RNA, 17 nt, Human
cuguucauuuccucaaa

SEQ ID NO: 3497886 - RNA, 19 nt, Human
cuguucauuuguuauucuu

SEQ ID NO: 3497887 - RNA, 17 nt, Human
cuguuccaaauucaguu

SEQ ID NO: 3497888 - RNA, 20 nt, Human
cuguuccagugguaagcuau

SEQ ID NO: 3497889 - RNA, 18 nt, Human
cuguucccaaauuuucua

SEQ ID NO: 3497890 - RNA, 14 nt, Human
cuguucccaugaga

SEQ ID NO: 3497891 - RNA, 18 nt, Human
cuguucccauucuugcau

SEQ ID NO: 3497892 - RNA, 12 nt, Human
cuguuccccuca

SEQ ID NO: 3497893 - RNA, 22 nt, Human
cuguuccccucacuggaugaaa

SEQ ID NO: 3497894 - RNA, 18 nt, Human
cuguuccccucucccuuc

SEQ ID NO: 3497895 - RNA, 12 nt, Human
cuguuccugcug

SEQ ID NO: 3497896 - RNA, 13 nt, Human
cuguuccugcugc

SEQ ID NO: 3497897 - RNA, 14 nt, Human
cuguuccugcugcu

SEQ ID NO: 3497898 - RNA, 16 nt, Human
cuguuccuuagaccuu

SEQ ID NO: 3497899 - RNA, 15 nt, Human
cuguuccuucacauc

SEQ ID NO: 3497900 - RNA, 21 nt, Human
cuguuccuucacauccugugu

SEQ ID NO: 3497901 - RNA, 13 nt, Human
cuguuccuucccu

SEQ ID NO: 3497902 - RNA, 22 nt, Human
cuguuccuucccugugccuccu

SEQ ID NO: 3497903 - RNA, 18 nt, Human
cuguucggaagggguucc

SEQ ID NO: 3497904 - RNA, 22 nt, Human
cuguucggaagggguuccucaa

SEQ ID NO: 3497905 - RNA, 16 nt, Human
cuguucuaaagcucug

SEQ ID NO: 3497906 - RNA, 14 nt, Human
cucugcugaggguc

SEQ ID NO: 3497907 - RNA, 15 nt, Human
cucugcugccauggc

SEQ ID NO: 3497908 - RNA, 23 nt, Human
cucugcugccugcccgcacagca

SEQ ID NO: 3497909 - RNA, 15 nt, Human
cucugcugcuggcug

SEQ ID NO: 3497910 - RNA, 22 nt, Human
cucugcugcugucccucccccu

SEQ ID NO: 3497911 - RNA, 11 nt, Human
cucugcugcuu

SEQ ID NO: 3497912 - RNA, 18 nt, Human
cucugcuggcccagccaa

SEQ ID NO: 3497913 - RNA, 14 nt, Human
cucugcuggccgga

SEQ ID NO: 3497914 - RNA, 20 nt, Human
cucugcuggccgggcacagc

SEQ ID NO: 3497915 - RNA, 21 nt, Human
cucugcuggccgggcacagcu

SEQ ID NO: 3497916 - RNA, 14 nt, Human
cucugcuggccugg

SEQ ID NO: 3497917 - RNA, 11 nt, Human
cucugcugugg

SEQ ID NO: 3497918 - RNA, 13 nt, Human
cucugcuucagcu

SEQ ID NO: 3497919 - RNA, 18 nt, Human
cucugcuucuccaaggaa

SEQ ID NO: 3497920 - RNA, 17 nt, Human
cucugcuucucugacuu

SEQ ID NO: 3497921 - RNA, 21 nt, Human
cucugcuucucugacuucugc

SEQ ID NO: 3497922 - RNA, 12 nt, Human
cucugcuugcca

SEQ ID NO: 3497923 - RNA, 14 nt, Human
cucugcuugccauc

SEQ ID NO: 3497924 - RNA, 13 nt, Human
cucugcuugccga

SEQ ID NO: 3497925 - RNA, 18 nt, Human
cucugcuuucugauguug

SEQ ID NO: 3497926 - RNA, 19 nt, Human
cucugcuuugacugagcag

SEQ ID NO: 3497927 - RNA, 19 nt, Human
cucuggaaaaugugaccca

SEQ ID NO: 3497928 - RNA, 23 nt, Human
cucuggaaaggaggaaggagccu

SEQ ID NO: 3497929 - RNA, 21 nt, Human
cucuggaagagaggaaugccu

SEQ ID NO: 3497930 - RNA, 20 nt, Human
cucuggaauuugcaagucau

SEQ ID NO: 3497931 - RNA, 16 nt, Human
cucuggacaaagcguu

SEQ ID NO: 3497932 - RNA, 20 nt, Human
cucuggaccagccuguugga

SEQ ID NO: 3497933 - RNA, 18 nt, Human
cucuggacggcaggcuca

SEQ ID NO: 3497934 - RNA, 14 nt, Human
cucuggacucuaaa

SEQ ID NO: 3497935 - RNA, 16 nt, Human
cucuggacuggcuaga

SEQ ID NO: 3497936 - RNA, 20 nt, Human
cucuggagacagccccagag

SEQ ID NO: 3497937 - RNA, 24 nt, Human
cucuggagacagccccagagcagg

SEQ ID NO: 3497938 - RNA, 12 nt, Human
cucuggagagaa

SEQ ID NO: 3497939 - RNA, 15 nt, Human
cucuggagcauuucu

SEQ ID NO: 3497940 - RNA, 19 nt, Human
cucuggagccaaguccaga

SEQ ID NO: 3497941 - RNA, 22 nt, Human
cucuggagccaccugucccacc

SEQ ID NO: 3497942 - RNA, 13 nt, Human
cucuggagccagc

SEQ ID NO: 3497943 - RNA, 23 nt, Human
cucuggagccagccgagcaggag

SEQ ID NO: 3497944 - RNA, 13 nt, Human
cucuggaggccuc

SEQ ID NO: 3497945 - RNA, 15 nt, Human
cucuggaggccucug

SEQ ID NO: 3497946 - RNA, 22 nt, Human
cucuggaggccucugggccucc

SEQ ID NO: 3497947 - RNA, 14 nt, Human
cucuggaguggcca

SEQ ID NO: 3497948 - RNA, 21 nt, Human
cucuggaugauggauuccaca

SEQ ID NO: 3497949 - RNA, 13 nt, Human
cucuggauggcac

SEQ ID NO: 3497950 - RNA, 17 nt, Human
cucuggauuaggucucu

SEQ ID NO: 3497951 - RNA, 15 nt, Human
cucuggauucagccu

SEQ ID NO: 3497952 - RNA, 18 nt, Human
cucuggauucagccuucu

SEQ ID NO: 3497953 - RNA, 20 nt, Human
cucuggauucagccuucuuu

SEQ ID NO: 3497954 - RNA, 21 nt, Human
cucuggauucagccuucuuuu

SEQ ID NO: 3497955 - RNA, 16 nt, Human
cucuggcagcaccgcc

SEQ ID NO: 3497956 - RNA, 22 nt, Human
cucuggcagcaccgccucuucc

SEQ ID NO: 3497957 - RNA, 15 nt, Human
cucuggcagccacac

SEQ ID NO: 3497958 - RNA, 16 nt, Human
cucuggcagccacacu

SEQ ID NO: 3497959 - RNA, 13 nt, Human
cucuggccccaag

SEQ ID NO: 3497960 - RNA, 24 nt, Human
cucuggcccucuaccccugaucug

SEQ ID NO: 3497961 - RNA, 14 nt, Human
cucuggcccugccu

SEQ ID NO: 3497962 - RNA, 20 nt, Human
cucuggcccuggcccuuacu

SEQ ID NO: 3497963 - RNA, 18 nt, Human
cucuggccucagccgacu

SEQ ID NO: 3497964 - RNA, 14 nt, Human
cucuggccucccac

SEQ ID NO: 3497965 - RNA, 15 nt, Human
cucuggccucccacc

SEQ ID NO: 3497966 - RNA, 12 nt, Human
cucuggccuucg

SEQ ID NO: 3497967 - RNA, 22 nt, Human
cucuggccuucggccuccaucc

SEQ ID NO: 3497968 - RNA, 15 nt, Human
cucuggccuuuuccu

SEQ ID NO: 3497969 - RNA, 14 nt, Human
cucuggcguguggg

SEQ ID NO: 3497970 - RNA, 22 nt, Human
cucuggcucacagacuggagac

SEQ ID NO: 3497971 - RNA, 15 nt, Human
cucuggcugaacccu

SEQ ID NO: 3497972 - RNA, 19 nt, Human
cucuggcugacuaaauuug

SEQ ID NO: 3497973 - RNA, 21 nt, Human
cucuggcugguuuggaaugcu

SEQ ID NO: 3497974 - RNA, 22 nt, Human
cucuggcugguuuggaaugcuu

SEQ ID NO: 3497975 - RNA, 21 nt, Human
cucuggcuguaaggcucuaga

SEQ ID NO: 3497976 - RNA, 22 nt, Human
cucuggcuguaaggcucuagau

SEQ ID NO: 3497977 - RNA, 18 nt, Human
cucuggcuuccagguauc

SEQ ID NO: 3497978 - RNA, 20 nt, Human
cucuggcuuggccacagcca

SEQ ID NO: 3497979 - RNA, 20 nt, Human
cucugggaaaugagaaggca

SEQ ID NO: 3497980 - RNA, 13 nt, Human
cucugggaaccuc

SEQ ID NO: 3497981 - RNA, 20 nt, Human
cucugggaaccucccagagg

SEQ ID NO: 3497982 - RNA, 14 nt, Human
cucugggaacuucu

SEQ ID NO: 3497983 - RNA, 12 nt, Human
cucugggagaaa

SEQ ID NO: 3497984 - RNA, 14 nt, Human
cucugggagaaaau

SEQ ID NO: 3497985 - RNA, 15 nt, Human
cucugggcaggaccu

SEQ ID NO: 3497986 - RNA, 14 nt, Human
cucugggccacuug

SEQ ID NO: 3497987 - RNA, 18 nt, Human
cucugggccacuuggagu

SEQ ID NO: 3497988 - RNA, 20 nt, Human
cucugggccauucuccacag

SEQ ID NO: 3497989 - RNA, 16 nt, Human
cucugggcuauggaca

SEQ ID NO: 3497990 - RNA, 21 nt, Human
cucugggcuauggacacaggg

SEQ ID NO: 3497991 - RNA, 11 nt, Human
cucugggcucu

SEQ ID NO: 3497992 - RNA, 15 nt, Human
cucugggcucugagu

SEQ ID NO: 3497993 - RNA, 15 nt, Human
cucugggcuggauga

SEQ ID NO: 3497994 - RNA, 23 nt, Human
cucugggcuguaacguggcacug

SEQ ID NO: 3497995 - RNA, 14 nt, Human
cucuggggacuccg

SEQ ID NO: 3497996 - RNA, 20 nt, Human
cucuggggcaggcugcuuca

SEQ ID NO: 3497997 - RNA, 14 nt, Human
cucuggggcucuag

SEQ ID NO: 3497998 - RNA, 22 nt, Human
cucuggggcuguugaagucacc

SEQ ID NO: 3497999 - RNA, 16 nt, Human
cucugggggcugagga

SEQ ID NO: 3498000 - RNA, 16 nt, Human
cucugggggguggcca

SEQ ID NO: 3498001 - RNA, 17 nt, Human
cucugguaauauugacu

SEQ ID NO: 3498002 - RNA, 17 nt, Human
cucugguacaauuucuu

SEQ ID NO: 3498003 - RNA, 22 nt, Human
cucugguccggacacuccuaga

SEQ ID NO: 3498004 - RNA, 22 nt, Human
cucuggucugggugccccgucc

SEQ ID NO: 3498005 - RNA, 23 nt, Human
cucuggugagucaccacuucagg

SEQ ID NO: 3498006 - RNA, 23 nt, Human
cucuggugagucuuggcggcagc

SEQ ID NO: 3498007 - RNA, 16 nt, Human
cucuggugccuccaga

SEQ ID NO: 3498008 - RNA, 17 nt, Human
cucugguggcacaggag

SEQ ID NO: 3498009 - RNA, 21 nt, Human
cugacagaaggugccacuuua

SEQ ID NO: 3498010 - RNA, 18 nt, Human
cugacagaaucucugaau

SEQ ID NO: 3498011 - RNA, 12 nt, Human
cugacagacaca

SEQ ID NO: 3498012 - RNA, 12 nt, Human
cugacagaggag

SEQ ID NO: 3498013 - RNA, 13 nt, Human
cugacagaggggg

SEQ ID NO: 3498014 - RNA, 18 nt, Human
cugacagaugucagccga

SEQ ID NO: 3498015 - RNA, 16 nt, Human
cugacagccagaacuc

SEQ ID NO: 3498016 - RNA, 14 nt, Human
cugacagccuccca

SEQ ID NO: 3498017 - RNA, 12 nt, Human
cugacagcugcu

SEQ ID NO: 3498018 - RNA, 14 nt, Human
cugacagcugcucc

SEQ ID NO: 3498019 - RNA, 15 nt, Human
cugacagcugcuccu

SEQ ID NO: 3498020 - RNA, 19 nt, Human
cugacagcugcuccuagag

SEQ ID NO: 3498021 - RNA, 22 nt, Human
cugacagcugcuccuagaggga

SEQ ID NO: 3498022 - RNA, 16 nt, Human
cugacaggcaaugcug

SEQ ID NO: 3498023 - RNA, 21 nt, Human
cugacaggcaaugcuggcugu

SEQ ID NO: 3498024 - RNA, 12 nt, Human
cugacagggcca

SEQ ID NO: 3498025 - RNA, 17 nt, Human
cugacagggccagugca

SEQ ID NO: 3498026 - RNA, 21 nt, Human
cugacaggugaggucuguucc

SEQ ID NO: 3498027 - RNA, 17 nt, Human
cugacagucaugcaguc

SEQ ID NO: 3498028 - RNA, 17 nt, Human
cugacaguccucuccac

SEQ ID NO: 3498029 - RNA, 21 nt, Human
cugacaguccucuccaccuag

SEQ ID NO: 3498030 - RNA, 15 nt, Human
cugacaguuuuucug

SEQ ID NO: 3498031 - RNA, 13 nt, Human
cugacaucaaaaa

SEQ ID NO: 3498032 - RNA, 14 nt, Human
cugacaucacagca

SEQ ID NO: 3498033 - RNA, 15 nt, Human
cugacaucacagcag

SEQ ID NO: 3498034 - RNA, 16 nt, Human
cugacaucacagcagc

SEQ ID NO: 3498035 - RNA, 23 nt, Human
cugacaucacagcagccuccaac

SEQ ID NO: 3498036 - RNA, 14 nt, Human
cugacaucucugca

SEQ ID NO: 3498037 - RNA, 17 nt, Human
cugacaucuguguuuca

SEQ ID NO: 3498038 - RNA, 21 nt, Human
cugacaucuguguuucaagug

SEQ ID NO: 3498039 - RNA, 21 nt, Human
cugacaucuugaauccuucca

SEQ ID NO: 3498040 - RNA, 20 nt, Human
cugacaugauuccuuccugu

SEQ ID NO: 3498041 - RNA, 18 nt, Human
cugacauggcucuggacu

SEQ ID NO: 3498042 - RNA, 19 nt, Human
cugacauggcucuggacuc

SEQ ID NO: 3498043 - RNA, 18 nt, Human
cugacauuaacaguuuuc

SEQ ID NO: 3498044 - RNA, 16 nt, Human
cugacauucaccugcc

SEQ ID NO: 3498045 - RNA, 15 nt, Human
cugacauucugauuc

SEQ ID NO: 3498046 - RNA, 14 nt, Human
cugacauugccaaa

SEQ ID NO: 3498047 - RNA, 16 nt, Human
cugacauugccaaaaa

SEQ ID NO: 3498048 - RNA, 14 nt, Human
cugacauuggagcc

SEQ ID NO: 3498049 - RNA, 16 nt, Human
cugacauuggagccug

SEQ ID NO: 3498050 - RNA, 18 nt, Human
cugacauuuggaguguuc

SEQ ID NO: 3498051 - RNA, 21 nt, Human
cugacauuuggaguguucccc

SEQ ID NO: 3498052 - RNA, 15 nt, Human
cugaccaaacagcca

SEQ ID NO: 3498053 - RNA, 19 nt, Human
cugaccaacaguuccuuca

SEQ ID NO: 3498054 - RNA, 16 nt, Human
cugaccaacauggaga

SEQ ID NO: 3498055 - RNA, 14 nt, Human
cugaccaagagaga

SEQ ID NO: 3498056 - RNA, 19 nt, Human
cugaccaauauuguacagu

SEQ ID NO: 3498057 - RNA, 16 nt, Human
cugaccaauugugcug

SEQ ID NO: 3498058 - RNA, 12 nt, Human
cugaccacacuu

SEQ ID NO: 3498059 - RNA, 16 nt, Human
cugaccacacuuccug

SEQ ID NO: 3498060 - RNA, 17 nt, Human
cugaccacacuuccugu

SEQ ID NO: 3498061 - RNA, 18 nt, Human
cugaccacacuuccuguc

SEQ ID NO: 3498062 - RNA, 19 nt, Human
cugaccacacuuccugucc

SEQ ID NO: 3498063 - RNA, 16 nt, Human
cugaccacccuccccu

SEQ ID NO: 3498064 - RNA, 13 nt, Human
cugaccagaacua

SEQ ID NO: 3498065 - RNA, 16 nt, Human
cugaccagcagcgccu

SEQ ID NO: 3498066 - RNA, 20 nt, Human
cugaccagcagcgccuuucc

SEQ ID NO: 3498067 - RNA, 20 nt, Human
cugaccagccgugagcaugu

SEQ ID NO: 3498068 - RNA, 19 nt, Human
cugaccagcugcuccgagg

SEQ ID NO: 3498069 - RNA, 22 nt, Human
cugaccauauugugcuucacag

SEQ ID NO: 3498070 - RNA, 23 nt, Human
cugaccauccacucuacccuccc

SEQ ID NO: 3498071 - RNA, 15 nt, Human
cugaccaugcucauc

SEQ ID NO: 3498072 - RNA, 20 nt, Human
cugaccaugcucaucugcug

SEQ ID NO: 3498073 - RNA, 12 nt, Human
cugacccacugc

SEQ ID NO: 3498074 - RNA, 21 nt, Human
cugacccagccccuugagaaa

SEQ ID NO: 3498075 - RNA, 12 nt, Human
cugacccaggcc

SEQ ID NO: 3498076 - RNA, 14 nt, Human
cugacccaggccgc

SEQ ID NO: 3498077 - RNA, 17 nt, Human
cugacccaggccgcagc

SEQ ID NO: 3498078 - RNA, 19 nt, Human
cugacccaggccgcagcuc

SEQ ID NO: 3498079 - RNA, 23 nt, Human
cugacccaggccgcagcucuugc

SEQ ID NO: 3498080 - RNA, 11 nt, Human
cugacccaguc

SEQ ID NO: 3498081 - RNA, 15 nt, Human
cugacccagucccug

SEQ ID NO: 3498082 - RNA, 13 nt, Human
cugacccagugag

SEQ ID NO: 3498083 - RNA, 14 nt, Human
cugacccagugaga

SEQ ID NO: 3498084 - RNA, 13 nt, Human
cugacccagugcc

SEQ ID NO: 3498085 - RNA, 20 nt, Human
cugacccagugcccccacug

SEQ ID NO: 3498086 - RNA, 15 nt, Human
cugacccaugcugcc

SEQ ID NO: 3498087 - RNA, 16 nt, Human
cugacccaugcugccc

SEQ ID NO: 3498088 - RNA, 17 nt, Human
cugacccaugcugcccu

SEQ ID NO: 3498089 - RNA, 18 nt, Human
cugacccaugcugcccug

SEQ ID NO: 3498090 - RNA, 22 nt, Human
cugacccaugcugcccugugag

SEQ ID NO: 3498091 - RNA, 16 nt, Human
cugacccauugcuguu

SEQ ID NO: 3498092 - RNA, 21 nt, Human
cugaccccaaacaccuuccag

SEQ ID NO: 3498093 - RNA, 20 nt, Human
cugaccccucauagcccuca

SEQ ID NO: 3498094 - RNA, 16 nt, Human
cugaccccugcucagu

SEQ ID NO: 3498095 - RNA, 20 nt, Human
cugacccuacucccuugccc

SEQ ID NO: 3498096 - RNA, 17 nt, Human
cugacccuaugggucua

SEQ ID NO: 3498097 - RNA, 18 nt, Human
cugacccuccaccgcaga

SEQ ID NO: 3498098 - RNA, 14 nt, Human
cugacccuccuguu

SEQ ID NO: 3498099 - RNA, 13 nt, Human
cugacccugcaga

SEQ ID NO: 3498100 - RNA, 23 nt, Human
cugacccuuacagccucugacuu

SEQ ID NO: 3498101 - RNA, 15 nt, Human
cugacccuuccagac

SEQ ID NO: 3498102 - RNA, 11 nt, Human
cugaccucagc

SEQ ID NO: 3498103 - RNA, 12 nt, Human
cugaccucagca

SEQ ID NO: 3498104 - RNA, 15 nt, Human
cugaccuccacagcu

SEQ ID NO: 3498105 - RNA, 12 nt, Human
cugaccucccag

SEQ ID NO: 3498106 - RNA, 16 nt, Human
cugaccucccagcccu

SEQ ID NO: 3498107 - RNA, 18 nt, Human
cugaccucccccuccuuc

SEQ ID NO: 3498108 - RNA, 22 nt, Human
cugaccucccccuccuucccag

SEQ ID NO: 3498109 - RNA, 21 nt, Human
cugaccucccucuaauuuauc

SEQ ID NO: 3498110 - RNA, 19 nt, Human
cugaccuccgccauccacc

SEQ ID NO: 3498111 - RNA, 12 nt, Human
cugaccucuggu

SEQ ID NO: 3498112 - RNA, 21 nt, Human
cugaccucuugcugucucugc

SEQ ID NO: 3498113 - RNA, 18 nt, Human
cugaccugccucucacac

SEQ ID NO: 3498114 - RNA, 13 nt, Human
cugaccugcugac

SEQ ID NO: 3498115 - RNA, 17 nt, Human
cugaccuggcccccuca

SEQ ID NO: 3498116 - RNA, 21 nt, Human
cugaccugguccacagggcac

SEQ ID NO: 3498117 - RNA, 15 nt, Human
cugaccugucaugcc

SEQ ID NO: 3498118 - RNA, 17 nt, Human
cugaccugucaugcccc

SEQ ID NO: 3498119 - RNA, 17 nt, Human
cugaccugugagcccag

SEQ ID NO: 3498120 - RNA, 21 nt, Human
cugaccugugagcccagcugg

SEQ ID NO: 3498121 - RNA, 19 nt, Human
cugaccuuaaaugcaacca

SEQ ID NO: 3498122 - RNA, 18 nt, Human
cugaccuuccucgcagag

SEQ ID NO: 3498123 - RNA, 20 nt, Human
cugaccuuccucgcagagag

SEQ ID NO: 3498124 - RNA, 23 nt, Human
cugaccuuccucgcagagaggcc

SEQ ID NO: 3498125 - RNA, 16 nt, Human
cugaccuuccuuccug

SEQ ID NO: 3498126 - RNA, 17 nt, Human
cugaccuugaugagcug

SEQ ID NO: 3498127 - RNA, 19 nt, Human
cugaccuuggagagacaca

SEQ ID NO: 3498128 - RNA, 21 nt, Human
cugaccuuggagagacacagc

SEQ ID NO: 3498129 - RNA, 23 nt, Human
cugacgacuugagugcucaguag

SEQ ID NO: 3498130 - RNA, 14 nt, Human
cugacggacucaug

SEQ ID NO: 3498131 - RNA, 20 nt, Human
cugacggccagggagaagcu

SEQ ID NO: 3498132 - RNA, 13 nt, Human
cugacggcccugc

SEQ ID NO: 3498133 - RNA, 20 nt, Human
cugacggcgcccccagugug

SEQ ID NO: 3498134 - RNA, 16 nt, Human
cugacggugcagucug

SEQ ID NO: 3498135 - RNA, 23 nt, Human
cugacguagcugcaaaggacaga

SEQ ID NO: 3498136 - RNA, 21 nt, Human
cugacgucugaagcuugacuc

SEQ ID NO: 3498137 - RNA, 18 nt, Human
cugacgugccuuuugcac

SEQ ID NO: 3498138 - RNA, 20 nt, Human
cugacgugccuuuugcaccc

SEQ ID NO: 3498139 - RNA, 23 nt, Human
cugacgugccuuuugcaccccuc

SEQ ID NO: 3498140 - RNA, 14 nt, Human
cugacuaaacuuuu

SEQ ID NO: 3498141 - RNA, 12 nt, Human
cugacuaaauuu

SEQ ID NO: 3498142 - RNA, 13 nt, Human
cugacuaaauuug

SEQ ID NO: 3498143 - RNA, 15 nt, Human
cugacuacagggccg

SEQ ID NO: 3498144 - RNA, 16 nt, Human
cugacuacauuuuuuc

SEQ ID NO: 3498145 - RNA, 15 nt, Human
cugacuacuuugccu

SEQ ID NO: 3498146 - RNA, 15 nt, Human
cugacuaugacauaa

SEQ ID NO: 3498147 - RNA, 13 nt, Human
cugacucacaaga

SEQ ID NO: 3498148 - RNA, 15 nt, Human
cugacucaggcauca

SEQ ID NO: 3498149 - RNA, 21 nt, Human
cugacucagggcuccuggguu

SEQ ID NO: 3498150 - RNA, 20 nt, Human
cugacuccacgauccugcca

SEQ ID NO: 3498151 - RNA, 18 nt, Human
cugacucccaaagagcug

SEQ ID NO: 3498152 - RNA, 19 nt, Human
cugacucccaaagagcugc

SEQ ID NO: 3498153 - RNA, 18 nt, Human
cugacuccuaccugcccu

SEQ ID NO: 3498154 - RNA, 13 nt, Human
cugacuccugguc

SEQ ID NO: 3498155 - RNA, 14 nt, Human
cugacuccuggucc

SEQ ID NO: 3498156 - RNA, 15 nt, Human
cugacuccugguccu

SEQ ID NO: 3498157 - RNA, 16 nt, Human
cugacucgguuucucc

SEQ ID NO: 3498158 - RNA, 17 nt, Human
cugacucgguuucucca

SEQ ID NO: 3498159 - RNA, 16 nt, Human
cugacucucugugacc

SEQ ID NO: 3498160 - RNA, 18 nt, Human
cucugguuguuucuguuc

SEQ ID NO: 3498161 - RNA, 20 nt, Human
cucugguuuggggcgaggca

SEQ ID NO: 3498162 - RNA, 21 nt, Human
cucuguaaucucguuucaaaa

SEQ ID NO: 3498163 - RNA, 16 nt, Human
cucuguaauugcaaaa

SEQ ID NO: 3498164 - RNA, 21 nt, Human
cucuguacagagcccacgccc

SEQ ID NO: 3498165 - RNA, 11 nt, Human
cucuguacuuu

SEQ ID NO: 3498166 - RNA, 22 nt, Human
cucuguacuuuucauucucuuu

SEQ ID NO: 3498167 - RNA, 14 nt, Human
cucuguagaaauuc

SEQ ID NO: 3498168 - RNA, 18 nt, Human
cucuguauaaacauuaaa

SEQ ID NO: 3498169 - RNA, 23 nt, Human
cucuguauuuuuucuugcauuga

SEQ ID NO: 3498170 - RNA, 18 nt, Human
cucugucacugcaggcac

SEQ ID NO: 3498171 - RNA, 14 nt, Human
cucugucaggccuu

SEQ ID NO: 3498172 - RNA, 19 nt, Human
cucuguccaggcacugaga

SEQ ID NO: 3498173 - RNA, 17 nt, Human
cucugucccauucccug

SEQ ID NO: 3498174 - RNA, 12 nt, Human
cucuguccccag

SEQ ID NO: 3498175 - RNA, 14 nt, Human
cucuguccccuucu

SEQ ID NO: 3498176 - RNA, 23 nt, Human
cucuguccccuucucucaucucu

SEQ ID NO: 3498177 - RNA, 18 nt, Human
cucuguccugacuucagg

SEQ ID NO: 3498178 - RNA, 17 nt, Human
cucuguccugcuucuga

SEQ ID NO: 3498179 - RNA, 15 nt, Human
cucuguccugggagu

SEQ ID NO: 3498180 - RNA, 16 nt, Human
cucugucgagccuggg

SEQ ID NO: 3498181 - RNA, 22 nt, Human
cucugucgcccaggcuggagug

SEQ ID NO: 3498182 - RNA, 17 nt, Human
cucugucuaccaucucc

SEQ ID NO: 3498183 - RNA, 10 nt, Human
cucugucuca

SEQ ID NO: 3498184 - RNA, 22 nt, Human
cucugucucagacuuuuguaca

SEQ ID NO: 3498185 - RNA, 18 nt, Human
cucugucucauccuccug

SEQ ID NO: 3498186 - RNA, 16 nt, Human
cucugucucaugugug

SEQ ID NO: 3498187 - RNA, 22 nt, Human
cucugucugaguaagaaacaga

SEQ ID NO: 3498188 - RNA, 17 nt, Human
cucugucuggcaaugcc

SEQ ID NO: 3498189 - RNA, 13 nt, Human
cucugucuucugg

SEQ ID NO: 3498190 - RNA, 14 nt, Human
cucugucuucugga

SEQ ID NO: 3498191 - RNA, 18 nt, Human
cucugugaacccuaugag

SEQ ID NO: 3498192 - RNA, 18 nt, Human
cucugugaacgauuuaga

SEQ ID NO: 3498193 - RNA, 21 nt, Human
cucugugaacgauuuagaaag

SEQ ID NO: 3498194 - RNA, 18 nt, Human
cucugugaagcauucgag

SEQ ID NO: 3498195 - RNA, 15 nt, Human
cucugugaccugccc

SEQ ID NO: 3498196 - RNA, 23 nt, Human
cucugugaccugccccgcccagc

SEQ ID NO: 3498197 - RNA, 21 nt, Human
cucugugagaagguuuauugu

SEQ ID NO: 3498198 - RNA, 23 nt, Human
cucugugagaagguuuauuguua

SEQ ID NO: 3498199 - RNA, 18 nt, Human
cucugugagcaucacagu

SEQ ID NO: 3498200 - RNA, 22 nt, Human
cucugugagcaucacaguuuug

SEQ ID NO: 3498201 - RNA, 20 nt, Human
cucugugcacuuauuuauga

SEQ ID NO: 3498202 - RNA, 20 nt, Human
cucugugccagagccugggg

SEQ ID NO: 3498203 - RNA, 20 nt, Human
cucugugcccaugggcacug

SEQ ID NO: 3498204 - RNA, 20 nt, Human
cucugugcccccaucacccu

SEQ ID NO: 3498205 - RNA, 15 nt, Human
cucugugccuucuuu

SEQ ID NO: 3498206 - RNA, 19 nt, Human
cucugugcugacccuccug

SEQ ID NO: 3498207 - RNA, 18 nt, Human
cucugugcuguggaagca

SEQ ID NO: 3498208 - RNA, 13 nt, Human
cucugugcugugu

SEQ ID NO: 3498209 - RNA, 11 nt, Human
cucuguggaug

SEQ ID NO: 3498210 - RNA, 23 nt, Human
cucugugggcugcacucugugcc

SEQ ID NO: 3498211 - RNA, 14 nt, Human
cucuguggugucug

SEQ ID NO: 3498212 - RNA, 19 nt, Human
cucuguguauuugcuuuuu

SEQ ID NO: 3498213 - RNA, 16 nt, Human
cucugugucacuggcu

SEQ ID NO: 3498214 - RNA, 15 nt, Human
cucugugucaggugg

SEQ ID NO: 3498215 - RNA, 21 nt, Human
cucugugucagguggggcagc

SEQ ID NO: 3498216 - RNA, 14 nt, Human
cucuguguccuucc

SEQ ID NO: 3498217 - RNA, 17 nt, Human
cucuguguccuucccug

SEQ ID NO: 3498218 - RNA, 15 nt, Human
cucugugucuaagau

SEQ ID NO: 3498219 - RNA, 18 nt, Human
cucugugucuaagauucu

SEQ ID NO: 3498220 - RNA, 19 nt, Human
cucugugucuaagauucua

SEQ ID NO: 3498221 - RNA, 21 nt, Human
cucugugucugaguggcuuca

SEQ ID NO: 3498222 - RNA, 13 nt, Human
cucugugugcucc

SEQ ID NO: 3498223 - RNA, 20 nt, Human
cucuguuauguacuguacua

SEQ ID NO: 3498224 - RNA, 15 nt, Human
cucuguucaaagcug

SEQ ID NO: 3498225 - RNA, 17 nt, Human
cucuguucauuuccuca

SEQ ID NO: 3498226 - RNA, 16 nt, Human
cucuguuccaugucuc

SEQ ID NO: 3498227 - RNA, 14 nt, Human
cucuguuccuggcu

SEQ ID NO: 3498228 - RNA, 22 nt, Human
cucuguuccuggcucagccuca

SEQ ID NO: 3498229 - RNA, 19 nt, Human
cucuguucugcacacagca

SEQ ID NO: 3498230 - RNA, 20 nt, Human
cucuguucugcacacagcac

SEQ ID NO: 3498231 - RNA, 21 nt, Human
cucuguucugcacacagcacg

SEQ ID NO: 3498232 - RNA, 19 nt, Human
cucuguucuuccucagcca

SEQ ID NO: 3498233 - RNA, 19 nt, Human
cucuguugacuggcugugu

SEQ ID NO: 3498234 - RNA, 17 nt, Human
cucuguugcccaggcug

SEQ ID NO: 3498235 - RNA, 20 nt, Human
cucuguugcccaggcuggag

SEQ ID NO: 3498236 - RNA, 12 nt, Human
cucuguuguccu

SEQ ID NO: 3498237 - RNA, 21 nt, Human
cucuguugucguaaagauuug

SEQ ID NO: 3498238 - RNA, 14 nt, Human
cucuguuugugggg

SEQ ID NO: 3498239 - RNA, 20 nt, Human
cucuguuuuacaaguuggag

SEQ ID NO: 3498240 - RNA, 22 nt, Human
cucuguuuuacaaguuggaguc

SEQ ID NO: 3498241 - RNA, 16 nt, Human
cucuuaaaaaauaaaa

SEQ ID NO: 3498242 - RNA, 18 nt, Human
cucuuaaaaaauaaaaac

SEQ ID NO: 3498243 - RNA, 24 nt, Human
cucuuaaaacccaagugccuuagc

SEQ ID NO: 3498244 - RNA, 22 nt, Human
cucuuaaagaaaacccaccccg

SEQ ID NO: 3498245 - RNA, 12 nt, Human
cucuuaaaguug

SEQ ID NO: 3498246 - RNA, 13 nt, Human
cucuuaagaagac

SEQ ID NO: 3498247 - RNA, 13 nt, Human
cucuuaagccauc

SEQ ID NO: 3498248 - RNA, 20 nt, Human
cucuuaagccaucuugguaa

SEQ ID NO: 3498249 - RNA, 12 nt, Human
cucuuaaguuuc

SEQ ID NO: 3498250 - RNA, 14 nt, Human
cucuuaaguuucuc

SEQ ID NO: 3498251 - RNA, 19 nt, Human
cucuuaccaguauuuaacu

SEQ ID NO: 3498252 - RNA, 18 nt, Human
cucuuacgcccaacccuu

SEQ ID NO: 3498253 - RNA, 18 nt, Human
cucuuacuacacugagga

SEQ ID NO: 3498254 - RNA, 18 nt, Human
cucuuacucuuuccuauu

SEQ ID NO: 3498255 - RNA, 20 nt, Human
cucuuacucuuuccuauuuc

SEQ ID NO: 3498256 - RNA, 14 nt, Human
cucuuacugcuaac

SEQ ID NO: 3498257 - RNA, 22 nt, Human
cucuuacuuuccuuuccccagc

SEQ ID NO: 3498258 - RNA, 15 nt, Human
cucuuagaacauugu

SEQ ID NO: 3498259 - RNA, 22 nt, Human
cucuuagaagaauauuguauug

SEQ ID NO: 3498260 - RNA, 14 nt, Human
cucuuagauggauu

SEQ ID NO: 3498261 - RNA, 18 nt, Human
cucuuagcaaaaacaugu

SEQ ID NO: 3498262 - RNA, 22 nt, Human
cucuuauaucuaaaucugucca

SEQ ID NO: 3498263 - RNA, 15 nt, Human
cucuuaucucaguca

SEQ ID NO: 3498264 - RNA, 22 nt, Human
cucuuaucucagucaugcauaa

SEQ ID NO: 3498265 - RNA, 13 nt, Human
cucuuaugccauu

SEQ ID NO: 3498266 - RNA, 18 nt, Human
cucuuaugccauuuguuu

SEQ ID NO: 3498267 - RNA, 14 nt, Human
cucuuauuacaaag

SEQ ID NO: 3498268 - RNA, 16 nt, Human
cucuuauucaguaaaa

SEQ ID NO: 3498269 - RNA, 19 nt, Human
cucuuauugcccacgcugg

SEQ ID NO: 3498270 - RNA, 14 nt, Human
cucuuauugccuca

SEQ ID NO: 3498271 - RNA, 17 nt, Human
cucuucaaaaacuguuu

SEQ ID NO: 3498272 - RNA, 15 nt, Human
cucuucaaaugccug

SEQ ID NO: 3498273 - RNA, 16 nt, Human
cucuucaacugaccag

SEQ ID NO: 3498274 - RNA, 22 nt, Human
cucuucaccccggcaggcccug

SEQ ID NO: 3498275 - RNA, 11 nt, Human
cucuucagaaa

SEQ ID NO: 3498276 - RNA, 23 nt, Human
cucuucagacucucagcccagaa

SEQ ID NO: 3498277 - RNA, 13 nt, Human
cucuucagaggcc

SEQ ID NO: 3498278 - RNA, 18 nt, Human
cucuucagaucucuaacu

SEQ ID NO: 3498279 - RNA, 16 nt, Human
cucuucaggccucccu

SEQ ID NO: 3498280 - RNA, 18 nt, Human
cucuucaggccucccucu

SEQ ID NO: 3498281 - RNA, 13 nt, Human
cucuucagucucu

SEQ ID NO: 3498282 - RNA, 19 nt, Human
cucuucaguuaagccuuug

SEQ ID NO: 3498283 - RNA, 20 nt, Human
cucuucaguuaagccuuugg

SEQ ID NO: 3498284 - RNA, 13 nt, Human
cucuucauacuuu

SEQ ID NO: 3498285 - RNA, 19 nt, Human
cucuucauacuuuuuuuca

SEQ ID NO: 3498286 - RNA, 17 nt, Human
cucuucauauucagcuu

SEQ ID NO: 3498287 - RNA, 17 nt, Human
cucuuccacucuccuug

SEQ ID NO: 3498288 - RNA, 15 nt, Human
cucuuccaggcagcc

SEQ ID NO: 3498289 - RNA, 13 nt, Human
cucuuccaggcug

SEQ ID NO: 3498290 - RNA, 15 nt, Human
cucuuccaugcugug

SEQ ID NO: 3498291 - RNA, 16 nt, Human
cucuuccccagacgcc

SEQ ID NO: 3498292 - RNA, 14 nt, Human
cucuucccccaaga

SEQ ID NO: 3498293 - RNA, 15 nt, Human
cucuucccccaagau

SEQ ID NO: 3498294 - RNA, 15 nt, Human
cucuucccccaccac

SEQ ID NO: 3498295 - RNA, 18 nt, Human
cucuucccccucucccag

SEQ ID NO: 3498296 - RNA, 19 nt, Human
cucuucccccucucccagu

SEQ ID NO: 3498297 - RNA, 16 nt, Human
cucuucccccuuccaa

SEQ ID NO: 3498298 - RNA, 22 nt, Human
cucuucccugaacuuccugcuu

SEQ ID NO: 3498299 - RNA, 23 nt, Human
cucuucccugaacuuccugcuuc

SEQ ID NO: 3498300 - RNA, 16 nt, Human
cucuuccgacucuuuc

SEQ ID NO: 3498301 - RNA, 22 nt, Human
cucuuccuacccaaccacucaa

SEQ ID NO: 3498302 - RNA, 12 nt, Human
cucuuccuaucc

SEQ ID NO: 3498303 - RNA, 15 nt, Human
cucuuccuaucccau

SEQ ID NO: 3498304 - RNA, 16 nt, Human
cucuuccuauuuuugu

SEQ ID NO: 3498305 - RNA, 19 nt, Human
cucuuccuccaaggacaga

SEQ ID NO: 3498306 - RNA, 16 nt, Human
cucuuccuccugacac

SEQ ID NO: 3498307 - RNA, 18 nt, Human
cucuuccuccugacaccc

SEQ ID NO: 3498308 - RNA, 21 nt, Human
cucuuccuccugacaccccac

SEQ ID NO: 3498309 - RNA, 14 nt, Human
cccuaagccagccu

SEQ ID NO: 3498310 - RNA, 18 nt, Human
cccuaagccagcugcccc

SEQ ID NO: 3498311 - RNA, 18 nt, Human
cccuaaggcaugugugaa

SEQ ID NO: 3498312 - RNA, 20 nt, Human
cccuaaggcaugugugaaac

SEQ ID NO: 3498313 - RNA, 21 nt, Human
cccuaaggucauuaccacagg

SEQ ID NO: 3498314 - RNA, 12 nt, Human
cccuaaugccug

SEQ ID NO: 3498315 - RNA, 17 nt, Human
cccuaaugcgcaggcug

SEQ ID NO: 3498316 - RNA, 21 nt, Human
cccuaauucagccauguacag

SEQ ID NO: 3498317 - RNA, 17 nt, Human
cccuacacccagacccc

SEQ ID NO: 3498318 - RNA, 18 nt, Human
cccuacaccccuccccug

SEQ ID NO: 3498319 - RNA, 20 nt, Human
cccuacaguugaaaaacagc

SEQ ID NO: 3498320 - RNA, 14 nt, Human
cccuacauguauug

SEQ ID NO: 3498321 - RNA, 20 nt, Human
cccuaccaccuccccagccu

SEQ ID NO: 3498322 - RNA, 20 nt, Human
cccuaccagcgcccgcuggg

SEQ ID NO: 3498323 - RNA, 22 nt, Human
cccuaccagcgcccgcugggcu

SEQ ID NO: 3498324 - RNA, 16 nt, Human
cccuaccccuggcugu

SEQ ID NO: 3498325 - RNA, 13 nt, Human
cccuacccucuag

SEQ ID NO: 3498326 - RNA, 20 nt, Human
cccuaccucaaccuguaaau

SEQ ID NO: 3498327 - RNA, 23 nt, Human
cccuaccugauuggugcaacccu

SEQ ID NO: 3498328 - RNA, 16 nt, Human
cccuaccugccccacu

SEQ ID NO: 3498329 - RNA, 15 nt, Human
cccuacucccugcag

SEQ ID NO: 3498330 - RNA, 16 nt, Human
cccuacucccugcaga

SEQ ID NO: 3498331 - RNA, 22 nt, Human
cccuagacuuuaggcuuucagc

SEQ ID NO: 3498332 - RNA, 18 nt, Human
cccuagagccugccugga

SEQ ID NO: 3498333 - RNA, 13 nt, Human
cccuagauaguuu

SEQ ID NO: 3498334 - RNA, 19 nt, Human
cccuagcagcccacccugc

SEQ ID NO: 3498335 - RNA, 23 nt, Human
cccuagcagcccacccugcugcu

SEQ ID NO: 3498336 - RNA, 13 nt, Human
cccuagcagugaa

SEQ ID NO: 3498337 - RNA, 20 nt, Human
cccuagcccagcgcucugcc

SEQ ID NO: 3498338 - RNA, 13 nt, Human
cccuagcccagga

SEQ ID NO: 3498339 - RNA, 17 nt, Human
cccuagccgguuccugu

SEQ ID NO: 3498340 - RNA, 23 nt, Human
cccuagccgguuccugucccugc

SEQ ID NO: 3498341 - RNA, 11 nt, Human
cccuagccuug

SEQ ID NO: 3498342 - RNA, 20 nt, Human
cccuagcuccacacccucuc

SEQ ID NO: 3498343 - RNA, 22 nt, Human
cccuagcuuagagccucccuca

SEQ ID NO: 3498344 - RNA, 17 nt, Human
cccuagcuuuagacccu

SEQ ID NO: 3498345 - RNA, 19 nt, Human
cccuagcuuuagacccugg

SEQ ID NO: 3498346 - RNA, 23 nt, Human
cccuagcuuuauauauggacaug

SEQ ID NO: 3498347 - RNA, 17 nt, Human
cccuaggaacucagucc

SEQ ID NO: 3498348 - RNA, 16 nt, Human
cccuagggcugggugu

SEQ ID NO: 3498349 - RNA, 21 nt, Human
cccuaggucagcuugcugccc

SEQ ID NO: 3498350 - RNA, 12 nt, Human
cccuagguguuu

SEQ ID NO: 3498351 - RNA, 15 nt, Human
cccuagguguuuugu

SEQ ID NO: 3498352 - RNA, 12 nt, Human
cccuagguuccc

SEQ ID NO: 3498353 - RNA, 20 nt, Human
cccuaguaagugccuuccau

SEQ ID NO: 3498354 - RNA, 16 nt, Human
cccuagucccuucccc

SEQ ID NO: 3498355 - RNA, 21 nt, Human
cccuagugacccggaggccac

SEQ ID NO: 3498356 - RNA, 19 nt, Human
cccuauacuguaguauucu

SEQ ID NO: 3498357 - RNA, 19 nt, Human
cccuauaucuauaaacacu

SEQ ID NO: 3498358 - RNA, 23 nt, Human
cccuauauguaguauaaagaaaa

SEQ ID NO: 3498359 - RNA, 23 nt, Human
cccuaucuaacccucccauggca

SEQ ID NO: 3498360 - RNA, 13 nt, Human
cccuaucuccuga

SEQ ID NO: 3498361 - RNA, 17 nt, Human
cccuaucuccugacaga

SEQ ID NO: 3498362 - RNA, 16 nt, Human
cccuaucuuugccacc

SEQ ID NO: 3498363 - RNA, 23 nt, Human
cccuauuuaacagggucucuagu

SEQ ID NO: 3498364 - RNA, 16 nt, Human
cccuauuuccccaccc

SEQ ID NO: 3498365 - RNA, 20 nt, Human
cccuauuuuuuuucuguuau

SEQ ID NO: 3498366 - RNA, 21 nt, Human
cccuauuuuuuuucuguuaua

SEQ ID NO: 3498367 - RNA, 15 nt, Human
cccucaaaccuccuc

SEQ ID NO: 3498368 - RNA, 19 nt, Human
cccucaaaccuccucuucu

SEQ ID NO: 3498369 - RNA, 21 nt, Human
cccucaaaccuccucuucuga

SEQ ID NO: 3498370 - RNA, 24 nt, Human
cccucaaaccuccucuucugacgu

SEQ ID NO: 3498371 - RNA, 15 nt, Human
cccucaaagaggcag

SEQ ID NO: 3498372 - RNA, 17 nt, Human
cccucaacaagggagag

SEQ ID NO: 3498373 - RNA, 16 nt, Human
cccucaacaccucugc

SEQ ID NO: 3498374 - RNA, 16 nt, Human
cccucaaggccuccca

SEQ ID NO: 3498375 - RNA, 17 nt, Human
cccucaaggccucccac

SEQ ID NO: 3498376 - RNA, 12 nt, Human
cccucacagccu

SEQ ID NO: 3498377 - RNA, 17 nt, Human
cccucacagccucugac

SEQ ID NO: 3498378 - RNA, 21 nt, Human
cccucacccacuuuggccucc

SEQ ID NO: 3498379 - RNA, 15 nt, Human
cccucacccugagcc

SEQ ID NO: 3498380 - RNA, 18 nt, Human
cccucaccuugcaacaca

SEQ ID NO: 3498381 - RNA, 23 nt, Human
cccucaccuuggcaccagacacc

SEQ ID NO: 3498382 - RNA, 15 nt, Human
cccucacucucagga

SEQ ID NO: 3498383 - RNA, 14 nt, Human
cccucacucuggcc

SEQ ID NO: 3498384 - RNA, 18 nt, Human
cccucacugaaugccuca

SEQ ID NO: 3498385 - RNA, 19 nt, Human
cccucacuggcucuccugg

SEQ ID NO: 3498386 - RNA, 9 nt, Human
cccucagaa

SEQ ID NO: 3498387 - RNA, 20 nt, Human
cccucagaaaaugaguaaca

SEQ ID NO: 3498388 - RNA, 20 nt, Human
cccucagaaacacuggggcu

SEQ ID NO: 3498389 - RNA, 18 nt, Human
cccucagaacccuuggcu

SEQ ID NO: 3498390 - RNA, 16 nt, Human
cccucagacuggggca

SEQ ID NO: 3498391 - RNA, 14 nt, Human
cccucagauguccc

SEQ ID NO: 3498392 - RNA, 16 nt, Human
cccucagaugucccuu

SEQ ID NO: 3498393 - RNA, 19 nt, Human
cccucagcaccccuuccau

SEQ ID NO: 3498394 - RNA, 21 nt, Human
cccucagcaccccuuccaugu

SEQ ID NO: 3498395 - RNA, 19 nt, Human
cccucagccacacccaggc

SEQ ID NO: 3498396 - RNA, 13 nt, Human
cccucagccccuc

SEQ ID NO: 3498397 - RNA, 16 nt, Human
cccucagcucggcuca

SEQ ID NO: 3498398 - RNA, 21 nt, Human
cccucaggacccucgcuggcc

SEQ ID NO: 3498399 - RNA, 23 nt, Human
cccucaggacccucgcuggcccc

SEQ ID NO: 3498400 - RNA, 21 nt, Human
cccucaggcauaggccugggu

SEQ ID NO: 3498401 - RNA, 22 nt, Human
cccucagggaucuugcauuccc

SEQ ID NO: 3498402 - RNA, 18 nt, Human
cccucagggcaaagccag

SEQ ID NO: 3498403 - RNA, 19 nt, Human
cccucagggcaaagccagg

SEQ ID NO: 3498404 - RNA, 16 nt, Human
cccucagggucccugg

SEQ ID NO: 3498405 - RNA, 13 nt, Human
cccucaguugugc

SEQ ID NO: 3498406 - RNA, 14 nt, Human
cccucaguugugca

SEQ ID NO: 3498407 - RNA, 17 nt, Human
cccucaguugugcagcu

SEQ ID NO: 3498408 - RNA, 15 nt, Human
cccucauagcccuca

SEQ ID NO: 3498409 - RNA, 19 nt, Human
cccucaucaaggacacggg

SEQ ID NO: 3498410 - RNA, 14 nt, Human
cccucaucuguccc

SEQ ID NO: 3498411 - RNA, 17 nt, Human
cccucaugcugccaaua

SEQ ID NO: 3498412 - RNA, 16 nt, Human
cccucauggccccucu

SEQ ID NO: 3498413 - RNA, 17 nt, Human
cccucauggccccucug

SEQ ID NO: 3498414 - RNA, 23 nt, Human
cccucauuaaaauauugaaaucu

SEQ ID NO: 3498415 - RNA, 12 nt, Human
cccucauuaaug

SEQ ID NO: 3498416 - RNA, 19 nt, Human
cccucauuacggcuccucu

SEQ ID NO: 3498417 - RNA, 18 nt, Human
cccucauuacugggccuu

SEQ ID NO: 3498418 - RNA, 15 nt, Human
cccucauucaggaaa

SEQ ID NO: 3498419 - RNA, 15 nt, Human
cccuccaaaagcacu

SEQ ID NO: 3498420 - RNA, 23 nt, Human
cccuccaaauggagaagcugcag

SEQ ID NO: 3498421 - RNA, 17 nt, Human
cccuccacaccugcggc

SEQ ID NO: 3498422 - RNA, 15 nt, Human
cccuccacaucccug

SEQ ID NO: 3498423 - RNA, 23 nt, Human
cccuccacauuucccccuagccu

SEQ ID NO: 3498424 - RNA, 14 nt, Human
cccuccaccccagg

SEQ ID NO: 3498425 - RNA, 12 nt, Human
cccuccacccug

SEQ ID NO: 3498426 - RNA, 12 nt, Human
cccuccaccucc

SEQ ID NO: 3498427 - RNA, 14 nt, Human
cccuccaccucccu

SEQ ID NO: 3498428 - RNA, 19 nt, Human
cccuccaccucccugcaau

SEQ ID NO: 3498429 - RNA, 13 nt, Human
cccuccaccugcu

SEQ ID NO: 3498430 - RNA, 18 nt, Human
cccuccacguucaccccu

SEQ ID NO: 3498431 - RNA, 17 nt, Human
cccuccacuccuuccug

SEQ ID NO: 3498432 - RNA, 13 nt, Human
cccuccacugccc

SEQ ID NO: 3498433 - RNA, 15 nt, Human
cccuccacugcccuc

SEQ ID NO: 3498434 - RNA, 19 nt, Human
cccuccagaacacggcuca

SEQ ID NO: 3498435 - RNA, 13 nt, Human
cccuccagagaca

SEQ ID NO: 3498436 - RNA, 12 nt, Human
cccuccagccuu

SEQ ID NO: 3498437 - RNA, 20 nt, Human
cccuccagcuuguggagccc

SEQ ID NO: 3498438 - RNA, 12 nt, Human
cccuccaggagu

SEQ ID NO: 3498439 - RNA, 22 nt, Human
cccuccaucuguacuuggucca

SEQ ID NO: 3498440 - RNA, 17 nt, Human
cccuccaugugggcuag

SEQ ID NO: 3498441 - RNA, 21 nt, Human
cccucccaagcuggcuggggu

SEQ ID NO: 3498442 - RNA, 12 nt, Human
cccucccacccc

SEQ ID NO: 3498443 - RNA, 15 nt, Human
cccucccacccccag

SEQ ID NO: 3498444 - RNA, 13 nt, Human
cccucccaccucu

SEQ ID NO: 3498445 - RNA, 10 nt, Human
cccucccacu

SEQ ID NO: 3498446 - RNA, 15 nt, Human
cccucccacuuugcu

SEQ ID NO: 3498447 - RNA, 14 nt, Human
cccucccagcucug

SEQ ID NO: 3498448 - RNA, 17 nt, Human
cccucccagcugacagu

SEQ ID NO: 3498449 - RNA, 14 nt, Human
cccucccagggagc

SEQ ID NO: 3498450 - RNA, 17 nt, Human
cccucccaucugggagu

SEQ ID NO: 3498451 - RNA, 21 nt, Human
cccuccccaacugaccaccuu

SEQ ID NO: 3498452 - RNA, 15 nt, Human
cccucccccagccac

SEQ ID NO: 3498453 - RNA, 23 nt, Human
cccucccccagccaugccagcug

SEQ ID NO: 3498454 - RNA, 15 nt, Human
cccucccccccaugc

SEQ ID NO: 3498455 - RNA, 21 nt, Human
cccucccccgccacuccugaa

SEQ ID NO: 3498456 - RNA, 13 nt, Human
cccucccccgucc

SEQ ID NO: 3498457 - RNA, 13 nt, Human
cccucccccugag

SEQ ID NO: 3498458 - RNA, 14 nt, Human
cccucccccugccc

SEQ ID NO: 3498459 - RNA, 23 nt, Human
cucuuccuccugacaccccacuu

SEQ ID NO: 3498460 - RNA, 11 nt, Human
cucuuccucug

SEQ ID NO: 3498461 - RNA, 17 nt, Human
cucuuccucugaggcug

SEQ ID NO: 3498462 - RNA, 22 nt, Human
cucuuccucugaggcuggaucc

SEQ ID NO: 3498463 - RNA, 13 nt, Human
cucuuccucuucc

SEQ ID NO: 3498464 - RNA, 12 nt, Human
cucuuccucuug

SEQ ID NO: 3498465 - RNA, 23 nt, Human
cucuuccucuugacccugcaccc

SEQ ID NO: 3498466 - RNA, 13 nt, Human
cucuuccugcccc

SEQ ID NO: 3498467 - RNA, 18 nt, Human
cucuuccugccccucuuu

SEQ ID NO: 3498468 - RNA, 20 nt, Human
cucuuccugccccucuuucu

SEQ ID NO: 3498469 - RNA, 23 nt, Human
cucuuccugccccucuuucucuu

SEQ ID NO: 3498470 - RNA, 15 nt, Human
cucuuccuggacagg

SEQ ID NO: 3498471 - RNA, 19 nt, Human
cucuuccuggacaggccag

SEQ ID NO: 3498472 - RNA, 21 nt, Human
cucuuccuuacuuuuuauaua

SEQ ID NO: 3498473 - RNA, 19 nt, Human
cucuuccuucccugcugug

SEQ ID NO: 3498474 - RNA, 23 nt, Human
cucuuccuugaagaacugcaggc

SEQ ID NO: 3498475 - RNA, 18 nt, Human
cucuucgaagccuugccu

SEQ ID NO: 3498476 - RNA, 14 nt, Human
cucuucggcccuca

SEQ ID NO: 3498477 - RNA, 15 nt, Human
cucuucuagagccgu

SEQ ID NO: 3498478 - RNA, 17 nt, Human
cucuucuauuuuguaaa

SEQ ID NO: 3498479 - RNA, 19 nt, Human
cucuucuccacuggaugga

SEQ ID NO: 3498480 - RNA, 13 nt, Human
cucuucuccaggc

SEQ ID NO: 3498481 - RNA, 16 nt, Human
cucuucucccagaauc

SEQ ID NO: 3498482 - RNA, 17 nt, Human
cucuucucccagaaucc

SEQ ID NO: 3498483 - RNA, 21 nt, Human
cucuucucccagaaucccagc

SEQ ID NO: 3498484 - RNA, 22 nt, Human
cucuucucccagaaucccagcc

SEQ ID NO: 3498485 - RNA, 16 nt, Human
cucuucuccccagagu

SEQ ID NO: 3498486 - RNA, 14 nt, Human
cucuucuccccuuc

SEQ ID NO: 3498487 - RNA, 17 nt, Human
cucuucuccccuuccau

SEQ ID NO: 3498488 - RNA, 13 nt, Human
cucuucucuccag

SEQ ID NO: 3498489 - RNA, 15 nt, Human
cucuucucucugcuc

SEQ ID NO: 3498490 - RNA, 15 nt, Human
cucuucucuuccugu

SEQ ID NO: 3498491 - RNA, 20 nt, Human
cucuucugaauaaagcaauu

SEQ ID NO: 3498492 - RNA, 22 nt, Human
cucuucugacgugccuuuugca

SEQ ID NO: 3498493 - RNA, 18 nt, Human
cucuucugagcuauuuca

SEQ ID NO: 3498494 - RNA, 23 nt, Human
cucuucugagcuauuucaucuau

SEQ ID NO: 3498495 - RNA, 12 nt, Human
cucuucugcucc

SEQ ID NO: 3498496 - RNA, 19 nt, Human
cucuucugcuccacccuug

SEQ ID NO: 3498497 - RNA, 21 nt, Human
cucuucugcuccacccuuggc

SEQ ID NO: 3498498 - RNA, 21 nt, Human
cucuucugggagggcagcagg

SEQ ID NO: 3498499 - RNA, 19 nt, Human
cucuucuggggcaggcugg

SEQ ID NO: 3498500 - RNA, 23 nt, Human
cucuucuggggcaggcugggcca

SEQ ID NO: 3498501 - RNA, 19 nt, Human
cucuucuuaacuuaaauuu

SEQ ID NO: 3498502 - RNA, 22 nt, Human
cucuucuuaauguacauagugc

SEQ ID NO: 3498503 - RNA, 23 nt, Human
cucuucuuaauguacauagugcu

SEQ ID NO: 3498504 - RNA, 14 nt, Human
cucuucuucucaag

SEQ ID NO: 3498505 - RNA, 18 nt, Human
cucuucuugaacacucau

SEQ ID NO: 3498506 - RNA, 21 nt, Human
cucuucuuuauacuguaauuu

SEQ ID NO: 3498507 - RNA, 20 nt, Human
cucuucuuucagacuugcca

SEQ ID NO: 3498508 - RNA, 22 nt, Human
cucuucuuucagacuugccaug

SEQ ID NO: 3498509 - RNA, 23 nt, Human
cucuucuuuuaaaccauuuucuu

SEQ ID NO: 3498510 - RNA, 22 nt, Human
cucuucuuuuagcaguaaaaua

SEQ ID NO: 3498511 - RNA, 18 nt, Human
cucuugaacuccugaccu

SEQ ID NO: 3498512 - RNA, 19 nt, Human
cucuugaacugagcuugga

SEQ ID NO: 3498513 - RNA, 15 nt, Human
cucuugaccaggcug

SEQ ID NO: 3498514 - RNA, 19 nt, Human
cucuugaccaggcugccuc

SEQ ID NO: 3498515 - RNA, 18 nt, Human
cucuugacccugcacccu

SEQ ID NO: 3498516 - RNA, 13 nt, Human
cucuugaccucag

SEQ ID NO: 3498517 - RNA, 15 nt, Human
cucuugaccucaggu

SEQ ID NO: 3498518 - RNA, 16 nt, Human
cucuugaccucaggug

SEQ ID NO: 3498519 - RNA, 22 nt, Human
cucuugagcaguggcuggucca

SEQ ID NO: 3498520 - RNA, 18 nt, Human
cucuugagccuugaacuu

SEQ ID NO: 3498521 - RNA, 23 nt, Human
cucuugauaccccccucugucuu

SEQ ID NO: 3498522 - RNA, 13 nt, Human
cucuugaugccug

SEQ ID NO: 3498523 - RNA, 22 nt, Human
cucuugauucauaaugacuuaa

SEQ ID NO: 3498524 - RNA, 24 nt, Human
cucuugauucauaaugacuuaagc

SEQ ID NO: 3498525 - RNA, 13 nt, Human
cucuugcacccgc

SEQ ID NO: 3498526 - RNA, 15 nt, Human
cucuugcacccgccu

SEQ ID NO: 3498527 - RNA, 21 nt, Human
cucuugccaaccuguaauaaa

SEQ ID NO: 3498528 - RNA, 23 nt, Human
cucuugccaaccuguaauaaaua

SEQ ID NO: 3498529 - RNA, 17 nt, Human
cucuugccacugccucu

SEQ ID NO: 3498530 - RNA, 19 nt, Human
cucuugccacugccucuuc

SEQ ID NO: 3498531 - RNA, 20 nt, Human
cucuugccacugccucuucc

SEQ ID NO: 3498532 - RNA, 19 nt, Human
cucuugcccauccugacug

SEQ ID NO: 3498533 - RNA, 19 nt, Human
cucuugccccaacccccag

SEQ ID NO: 3498534 - RNA, 22 nt, Human
cucuugccccaacccccagcac

SEQ ID NO: 3498535 - RNA, 23 nt, Human
cucuugccccaacccccagcacc

SEQ ID NO: 3498536 - RNA, 13 nt, Human
cucuugcccccca

SEQ ID NO: 3498537 - RNA, 19 nt, Human
cucuugccccccaccccag

SEQ ID NO: 3498538 - RNA, 20 nt, Human
cucuugccccccaccccagc

SEQ ID NO: 3498539 - RNA, 22 nt, Human
cucuugccccccaccccagccu

SEQ ID NO: 3498540 - RNA, 16 nt, Human
cucuugcccuucccug

SEQ ID NO: 3498541 - RNA, 17 nt, Human
cucuugcccuucccugu

SEQ ID NO: 3498542 - RNA, 21 nt, Human
cucuugcccuucccugucccu

SEQ ID NO: 3498543 - RNA, 16 nt, Human
cucuugccgaggagcc

SEQ ID NO: 3498544 - RNA, 21 nt, Human
cucuugccgaggagccaggca

SEQ ID NO: 3498545 - RNA, 17 nt, Human
cucuugcggucccuucu

SEQ ID NO: 3498546 - RNA, 12 nt, Human
cucuugcucaaa

SEQ ID NO: 3498547 - RNA, 19 nt, Human
cucuugcucaaaaaucugu

SEQ ID NO: 3498548 - RNA, 14 nt, Human
cucuugcucuuucu

SEQ ID NO: 3498549 - RNA, 19 nt, Human
cucuugcugucucugcucg

SEQ ID NO: 3498550 - RNA, 18 nt, Human
cucuuggaccucugcucu

SEQ ID NO: 3498551 - RNA, 20 nt, Human
cucuuggaccucugcucuga

SEQ ID NO: 3498552 - RNA, 18 nt, Human
cucuuggagaagucucag

SEQ ID NO: 3498553 - RNA, 15 nt, Human
cucuuggagccugca

SEQ ID NO: 3498554 - RNA, 16 nt, Human
cucuuggccugaucag

SEQ ID NO: 3498555 - RNA, 14 nt, Human
cucuuggcuccacu

SEQ ID NO: 3498556 - RNA, 15 nt, Human
cucuuggcuggcuuc

SEQ ID NO: 3498557 - RNA, 12 nt, Human
cucuugggacau

SEQ ID NO: 3498558 - RNA, 22 nt, Human
cucuugggcaauauucucugua

SEQ ID NO: 3498559 - RNA, 21 nt, Human
cucuuggggacaugggucgcc

SEQ ID NO: 3498560 - RNA, 18 nt, Human
cucuugguccugcugcag

SEQ ID NO: 3498561 - RNA, 15 nt, Human
cucuuggucuuccca

SEQ ID NO: 3498562 - RNA, 22 nt, Human
cucuuguaaagacugguuuucu

SEQ ID NO: 3498563 - RNA, 18 nt, Human
cucuuguaaauaaagccc

SEQ ID NO: 3498564 - RNA, 19 nt, Human
cucuuguaaauaaagcccu

SEQ ID NO: 3498565 - RNA, 24 nt, Human
cucuuguaaauaaagcccugggau

SEQ ID NO: 3498566 - RNA, 12 nt, Human
cucuuguaagau

SEQ ID NO: 3498567 - RNA, 23 nt, Human
cucuuguaaugauauagccagaa

SEQ ID NO: 3498568 - RNA, 20 nt, Human
cucuuguauaagauccuaga

SEQ ID NO: 3498569 - RNA, 21 nt, Human
cucuuguauaagauccuagau

SEQ ID NO: 3498570 - RNA, 15 nt, Human
cucuuguauuaaacu

SEQ ID NO: 3498571 - RNA, 21 nt, Human
cucuugucccacgugucuucc

SEQ ID NO: 3498572 - RNA, 23 nt, Human
cucuugucccacgugucuuccac

SEQ ID NO: 3498573 - RNA, 14 nt, Human
cucuugugcuggau

SEQ ID NO: 3498574 - RNA, 23 nt, Human
cucuugugcuggauggagcccag

SEQ ID NO: 3498575 - RNA, 21 nt, Human
cucuuguugagccgugggcaa

SEQ ID NO: 3498576 - RNA, 17 nt, Human
cucuuguugaguucugu

SEQ ID NO: 3498577 - RNA, 16 nt, Human
cucuuguuuucaguuu

SEQ ID NO: 3498578 - RNA, 13 nt, Human
cucuuguuuuguu

SEQ ID NO: 3498579 - RNA, 20 nt, Human
cucuuguuuuguuugucucu

SEQ ID NO: 3498580 - RNA, 23 nt, Human
cucuuguuuuuauuaauuuauau

SEQ ID NO: 3498581 - RNA, 15 nt, Human
cucuuuaaaacaaaa

SEQ ID NO: 3498582 - RNA, 17 nt, Human
cucuuuaaaacaaaaca

SEQ ID NO: 3498583 - RNA, 20 nt, Human
cucuuuaaaaggaaagaaaa

SEQ ID NO: 3498584 - RNA, 21 nt, Human
cucuuuaacucaggacuccag

SEQ ID NO: 3498585 - RNA, 18 nt, Human
cucuuuaaugucacaggc

SEQ ID NO: 3498586 - RNA, 22 nt, Human
cucuuuaaugucacaggcaggu

SEQ ID NO: 3498587 - RNA, 17 nt, Human
cucuuuagaguuagacu

SEQ ID NO: 3498588 - RNA, 22 nt, Human
cucuuuauauggccucaagauc

SEQ ID NO: 3498589 - RNA, 13 nt, Human
cucuuuauuccua

SEQ ID NO: 3498590 - RNA, 22 nt, Human
cucuuuauuuuccccuaucauu

SEQ ID NO: 3498591 - RNA, 11 nt, Human
cucuuucaaag

SEQ ID NO: 3498592 - RNA, 15 nt, Human
cucuuucagaaaaca

SEQ ID NO: 3498593 - RNA, 21 nt, Human
cucuuucagaaaacagaaaaa

SEQ ID NO: 3498594 - RNA, 14 nt, Human
cucuuucagcuccu

SEQ ID NO: 3498595 - RNA, 15 nt, Human
cucuuucagcuccug

SEQ ID NO: 3498596 - RNA, 15 nt, Human
cucuuucccacccag

SEQ ID NO: 3498597 - RNA, 13 nt, Human
cucuuucccuccc

SEQ ID NO: 3498598 - RNA, 17 nt, Human
cucuuucccucccuucc

SEQ ID NO: 3498599 - RNA, 13 nt, Human
cucuuucccuggu

SEQ ID NO: 3498600 - RNA, 17 nt, Human
cucuuucccuuccaguu

SEQ ID NO: 3498601 - RNA, 20 nt, Human
cucuuuccuauuucaguguu

SEQ ID NO: 3498602 - RNA, 16 nt, Human
cucuuucgucacccuu

SEQ ID NO: 3498603 - RNA, 18 nt, Human
cucuuucuccuuagucuu

SEQ ID NO: 3498604 - RNA, 15 nt, Human
cucuuucucuccuuu

SEQ ID NO: 3498605 - RNA, 13 nt, Human
cucuuucucucuu

SEQ ID NO: 3498606 - RNA, 16 nt, Human
cucuuucucucuuccc

SEQ ID NO: 3498607 - RNA, 20 nt, Human
cugacucugaaaucugaaga

SEQ ID NO: 3498608 - RNA, 15 nt, Human
cugacucugcccccu

SEQ ID NO: 3498609 - RNA, 21 nt, Human
cugacucugcccccugcuggc

SEQ ID NO: 3498610 - RNA, 17 nt, Human
cugacugaggcaguuug

SEQ ID NO: 3498611 - RNA, 16 nt, Human
cugacugaugcuuuca

SEQ ID NO: 3498612 - RNA, 16 nt, Human
cugacugccaagccau

SEQ ID NO: 3498613 - RNA, 21 nt, Human
cugacuggauucauucucaua

SEQ ID NO: 3498614 - RNA, 18 nt, Human
cugacugggaccaggcac

SEQ ID NO: 3498615 - RNA, 14 nt, Human
cugacugggccagg

SEQ ID NO: 3498616 - RNA, 14 nt, Human
cugacugggggcag

SEQ ID NO: 3498617 - RNA, 17 nt, Human
cugacugggggcagaca

SEQ ID NO: 3498618 - RNA, 22 nt, Human
cugacuguccucuccccuccag

SEQ ID NO: 3498619 - RNA, 18 nt, Human
cugacuguuuucucuuga

SEQ ID NO: 3498620 - RNA, 20 nt, Human
cugacuuaagcaaaagaaaa

SEQ ID NO: 3498621 - RNA, 24 nt, Human
cugacuuaagcaaaagaaaaagau

SEQ ID NO: 3498622 - RNA, 14 nt, Human
cugacuucaggggc

SEQ ID NO: 3498623 - RNA, 18 nt, Human
cugacuucuaauaucauu

SEQ ID NO: 3498624 - RNA, 15 nt, Human
cugacuucugccugg

SEQ ID NO: 3498625 - RNA, 14 nt, Human
cugacuucuguuua

SEQ ID NO: 3498626 - RNA, 14 nt, Human
cugacuuggcuggu

SEQ ID NO: 3498627 - RNA, 15 nt, Human
cugacuuggcuggug

SEQ ID NO: 3498628 - RNA, 16 nt, Human
cugacuuggcuggugu

SEQ ID NO: 3498629 - RNA, 17 nt, Human
cugacuuggcuggugug

SEQ ID NO: 3498630 - RNA, 20 nt, Human
cugacuuggcugguguggua

SEQ ID NO: 3498631 - RNA, 21 nt, Human
cugacuuggggagauggaguu

SEQ ID NO: 3498632 - RNA, 20 nt, Human
cugacuuguuugucuuccau

SEQ ID NO: 3498633 - RNA, 15 nt, Human
cugacuuugcuugcu

SEQ ID NO: 3498634 - RNA, 17 nt, Human
cugacuuugcuugcuuu

SEQ ID NO: 3498635 - RNA, 18 nt, Human
cugacuuugcuugcuuug

SEQ ID NO: 3498636 - RNA, 22 nt, Human
cugagaaagacuauucaaacag

SEQ ID NO: 3498637 - RNA, 23 nt, Human
cugagaaagacuauucaaacagu

SEQ ID NO: 3498638 - RNA, 11 nt, Human
cugagaaauuu

SEQ ID NO: 3498639 - RNA, 22 nt, Human
cugagaacagaucuccaaagcu

SEQ ID NO: 3498640 - RNA, 23 nt, Human
cugagaacagaucuccaaagcuu

SEQ ID NO: 3498641 - RNA, 15 nt, Human
cugagaaccuggccu

SEQ ID NO: 3498642 - RNA, 20 nt, Human
cugagaaccuggccuucagu

SEQ ID NO: 3498643 - RNA, 13 nt, Human
cugagaacuccug

SEQ ID NO: 3498644 - RNA, 22 nt, Human
cugagaagagagaucaaaugga

SEQ ID NO: 3498645 - RNA, 18 nt, Human
cugagaagaggagcccuc

SEQ ID NO: 3498646 - RNA, 22 nt, Human
cugagaagaggagcccucaucu

SEQ ID NO: 3498647 - RNA, 17 nt, Human
cugagaagcugcuccag

SEQ ID NO: 3498648 - RNA, 18 nt, Human
cugagaaggggaggaccu

SEQ ID NO: 3498649 - RNA, 22 nt, Human
cugagaaggggaggaccucugg

SEQ ID NO: 3498650 - RNA, 23 nt, Human
cugagaaggggaggaccucuggg

SEQ ID NO: 3498651 - RNA, 23 nt, Human
cugagaagguuugguccagccug

SEQ ID NO: 3498652 - RNA, 17 nt, Human
cugagaauagaaggaaa

SEQ ID NO: 3498653 - RNA, 18 nt, Human
cugagaauagaaggaaac

SEQ ID NO: 3498654 - RNA, 20 nt, Human
cugagaauauaauacuguau

SEQ ID NO: 3498655 - RNA, 23 nt, Human
cugagaauauaauacuguauuug

SEQ ID NO: 3498656 - RNA, 14 nt, Human
cugagaaucuuuau

SEQ ID NO: 3498657 - RNA, 22 nt, Human
cugagaaucuuuauugagaaag

SEQ ID NO: 3498658 - RNA, 17 nt, Human
cugagaaugaacaaaga

SEQ ID NO: 3498659 - RNA, 17 nt, Human
cugagaauguaagaacu

SEQ ID NO: 3498660 - RNA, 15 nt, Human
cugagaauuccaagg

SEQ ID NO: 3498661 - RNA, 22 nt, Human
cugagaauuuaaaaauaagaaa

SEQ ID NO: 3498662 - RNA, 17 nt, Human
cugagacaaauggaggc

SEQ ID NO: 3498663 - RNA, 15 nt, Human
cugagacagcccggg

SEQ ID NO: 3498664 - RNA, 22 nt, Human
cugagaccaguugggagcacug

SEQ ID NO: 3498665 - RNA, 17 nt, Human
cugagacccaggacucc

SEQ ID NO: 3498666 - RNA, 21 nt, Human
cugagacccaggacuccuccc

SEQ ID NO: 3498667 - RNA, 13 nt, Human
cugagaccccugg

SEQ ID NO: 3498668 - RNA, 15 nt, Human
cugagaccccuggcc

SEQ ID NO: 3498669 - RNA, 13 nt, Human
cugagaccugaag

SEQ ID NO: 3498670 - RNA, 12 nt, Human
cugagacucaca

SEQ ID NO: 3498671 - RNA, 14 nt, Human
cugagacucagaca

SEQ ID NO: 3498672 - RNA, 16 nt, Human
cugagacuccagaccu

SEQ ID NO: 3498673 - RNA, 19 nt, Human
cugagacucgcgacaaugc

SEQ ID NO: 3498674 - RNA, 20 nt, Human
cugagacucgcgacaaugca

SEQ ID NO: 3498675 - RNA, 21 nt, Human
cugagacucgcgacaaugcaa

SEQ ID NO: 3498676 - RNA, 22 nt, Human
cugagacucgcgacaaugcaaa

SEQ ID NO: 3498677 - RNA, 15 nt, Human
cugagacugugcugu

SEQ ID NO: 3498678 - RNA, 12 nt, Human
cugagagaaaua

SEQ ID NO: 3498679 - RNA, 22 nt, Human
cugagagaggccauucuuuccc

SEQ ID NO: 3498680 - RNA, 13 nt, Human
cugagagaucugc

SEQ ID NO: 3498681 - RNA, 16 nt, Human
cugagagaucugcugu

SEQ ID NO: 3498682 - RNA, 11 nt, Human
cugagagcaaa

SEQ ID NO: 3498683 - RNA, 22 nt, Human
cugagagcauguuuuaucauua

SEQ ID NO: 3498684 - RNA, 17 nt, Human
cugagagccccagcuga

SEQ ID NO: 3498685 - RNA, 21 nt, Human
cugagaggacuuuucuuugug

SEQ ID NO: 3498686 - RNA, 22 nt, Human
cugagaggacuuuucuuugugg

SEQ ID NO: 3498687 - RNA, 15 nt, Human
cugagaggcaggcau

SEQ ID NO: 3498688 - RNA, 14 nt, Human
cugagaggcugucu

SEQ ID NO: 3498689 - RNA, 17 nt, Human
cugagaguagagucacu

SEQ ID NO: 3498690 - RNA, 20 nt, Human
cugagaguauuuaggcagau

SEQ ID NO: 3498691 - RNA, 14 nt, Human
cugagagucagcuc

SEQ ID NO: 3498692 - RNA, 15 nt, Human
cugagagucuagauu

SEQ ID NO: 3498693 - RNA, 17 nt, Human
cugagauacauacagaa

SEQ ID NO: 3498694 - RNA, 15 nt, Human
cugagauaugaacau

SEQ ID NO: 3498695 - RNA, 15 nt, Human
cugagauccuggacu

SEQ ID NO: 3498696 - RNA, 14 nt, Human
cugagaucgugccg

SEQ ID NO: 3498697 - RNA, 17 nt, Human
cugagaucucugcagga

SEQ ID NO: 3498698 - RNA, 18 nt, Human
cugagaucucugcaggaa

SEQ ID NO: 3498699 - RNA, 20 nt, Human
cugagaugccuggugagcau

SEQ ID NO: 3498700 - RNA, 15 nt, Human
cugagauggcccucu

SEQ ID NO: 3498701 - RNA, 16 nt, Human
cugagauggcucccag

SEQ ID NO: 3498702 - RNA, 17 nt, Human
cugagauggcucccagg

SEQ ID NO: 3498703 - RNA, 18 nt, Human
cugagauggcucccaggg

SEQ ID NO: 3498704 - RNA, 16 nt, Human
cugagaugugaacaca

SEQ ID NO: 3498705 - RNA, 19 nt, Human
cugagauuauuuuaaucua

SEQ ID NO: 3498706 - RNA, 14 nt, Human
cugagauuuauuaa

SEQ ID NO: 3498707 - RNA, 19 nt, Human
cugagauuucaucugcucu

SEQ ID NO: 3498708 - RNA, 20 nt, Human
cugagcaaauguggcuccug

SEQ ID NO: 3498709 - RNA, 24 nt, Human
cugagcaacagagugagacccugu

SEQ ID NO: 3498710 - RNA, 18 nt, Human
cugagcaagacccugucu

SEQ ID NO: 3498711 - RNA, 20 nt, Human
cugagcaagacccugucucu

SEQ ID NO: 3498712 - RNA, 15 nt, Human
cugagcaagagcugg

SEQ ID NO: 3498713 - RNA, 16 nt, Human
cugagcaagagcuggc

SEQ ID NO: 3498714 - RNA, 17 nt, Human
cugagcaaucugacccu

SEQ ID NO: 3498715 - RNA, 18 nt, Human
cugagcaaugucugugcu

SEQ ID NO: 3498716 - RNA, 19 nt, Human
cugagcacauucuggcuca

SEQ ID NO: 3498717 - RNA, 20 nt, Human
cugagcacccagcucugucu

SEQ ID NO: 3498718 - RNA, 14 nt, Human
cugagcacccucug

SEQ ID NO: 3498719 - RNA, 17 nt, Human
cugagcaccgugucaag

SEQ ID NO: 3498720 - RNA, 17 nt, Human
cugagcaccucccagcc

SEQ ID NO: 3498721 - RNA, 13 nt, Human
cugagcaccugcu

SEQ ID NO: 3498722 - RNA, 13 nt, Human
cugagcacugcca

SEQ ID NO: 3498723 - RNA, 14 nt, Human
cugagcacuggagu

SEQ ID NO: 3498724 - RNA, 16 nt, Human
cugagcacuguuuaua

SEQ ID NO: 3498725 - RNA, 17 nt, Human
cugagcagaaagaggcc

SEQ ID NO: 3498726 - RNA, 21 nt, Human
cugagcagacuggugagcaga

SEQ ID NO: 3498727 - RNA, 16 nt, Human
cugagcagcgagccug

SEQ ID NO: 3498728 - RNA, 16 nt, Human
cugagcaggaccucug

SEQ ID NO: 3498729 - RNA, 18 nt, Human
cugagcaggaccucugaa

SEQ ID NO: 3498730 - RNA, 16 nt, Human
cugagcaggauuuuaa

SEQ ID NO: 3498731 - RNA, 16 nt, Human
cugagcagggccgggg

SEQ ID NO: 3498732 - RNA, 17 nt, Human
cugagcagggccgggga

SEQ ID NO: 3498733 - RNA, 21 nt, Human
cugagcagggccggggaacug

SEQ ID NO: 3498734 - RNA, 12 nt, Human
cugagcaggugu

SEQ ID NO: 3498735 - RNA, 22 nt, Human
cugagcaguccuuggccugcua

SEQ ID NO: 3498736 - RNA, 19 nt, Human
cugagcauaaguccucuag

SEQ ID NO: 3498737 - RNA, 20 nt, Human
cugagcauacucaacaaaac

SEQ ID NO: 3498738 - RNA, 14 nt, Human
cugagccagauuuc

SEQ ID NO: 3498739 - RNA, 23 nt, Human
cugagccaggcuagcuggagccu

SEQ ID NO: 3498740 - RNA, 17 nt, Human
cugagccagggucucca

SEQ ID NO: 3498741 - RNA, 20 nt, Human
cugagccagggucuccagaa

SEQ ID NO: 3498742 - RNA, 22 nt, Human
cugagccagugcuuuaauggca

SEQ ID NO: 3498743 - RNA, 10 nt, Human
cugagcccac

SEQ ID NO: 3498744 - RNA, 12 nt, Human
cugagcccacug

SEQ ID NO: 3498745 - RNA, 13 nt, Human
cugagcccacugu

SEQ ID NO: 3498746 - RNA, 12 nt, Human
cugagcccaggg

SEQ ID NO: 3498747 - RNA, 14 nt, Human
cugagcccagggag

SEQ ID NO: 3498748 - RNA, 17 nt, Human
cugagcccagggaggcc

SEQ ID NO: 3498749 - RNA, 15 nt, Human
cugagcccccagcuu

SEQ ID NO: 3498750 - RNA, 17 nt, Human
cugagcccccagcuucc

SEQ ID NO: 3498751 - RNA, 22 nt, Human
cugagcccccagcuuccagcag

SEQ ID NO: 3498752 - RNA, 21 nt, Human
cugagccccgcagaccucccc

SEQ ID NO: 3498753 - RNA, 18 nt, Human
cugagccccgcccucuuc

SEQ ID NO: 3498754 - RNA, 22 nt, Human
cugagccccgcccucuuccuga

SEQ ID NO: 3498755 - RNA, 22 nt, Human
cugagccccuaccccacaccag

SEQ ID NO: 3498756 - RNA, 16 nt, Human
cccuccccgcccuuuu

SEQ ID NO: 3498757 - RNA, 14 nt, Human
cccuccccggcccu

SEQ ID NO: 3498758 - RNA, 21 nt, Human
cccuccccuaaugccugcgga

SEQ ID NO: 3498759 - RNA, 18 nt, Human
cccuccccuccaucccug

SEQ ID NO: 3498760 - RNA, 12 nt, Human
cccuccccuccc

SEQ ID NO: 3498761 - RNA, 24 nt, Human
cccuccccucucuugcacccgccu

SEQ ID NO: 3498762 - RNA, 15 nt, Human
cccuccccuggggac

SEQ ID NO: 3498763 - RNA, 23 nt, Human
cccuccccuugccugugccaggu

SEQ ID NO: 3498764 - RNA, 16 nt, Human
cccucccgccccuucc

SEQ ID NO: 3498765 - RNA, 16 nt, Human
cccucccuacccuaac

SEQ ID NO: 3498766 - RNA, 12 nt, Human
cccucccuaccu

SEQ ID NO: 3498767 - RNA, 14 nt, Human
cccucccuaccuca

SEQ ID NO: 3498768 - RNA, 20 nt, Human
cccucccuaccucaaccugu

SEQ ID NO: 3498769 - RNA, 14 nt, Human
cccucccuggagug

SEQ ID NO: 3498770 - RNA, 14 nt, Human
cccucccuggcucc

SEQ ID NO: 3498771 - RNA, 12 nt, Human
cccucccugggu

SEQ ID NO: 3498772 - RNA, 13 nt, Human
cccucccuggguu

SEQ ID NO: 3498773 - RNA, 19 nt, Human
cccucccuguuccccagag

SEQ ID NO: 3498774 - RNA, 12 nt, Human
cccucccuugga

SEQ ID NO: 3498775 - RNA, 14 nt, Human
cccucccuuucucc

SEQ ID NO: 3498776 - RNA, 16 nt, Human
cccucccuuucucccc

SEQ ID NO: 3498777 - RNA, 18 nt, Human
cccuccgccaggcgagau

SEQ ID NO: 3498778 - RNA, 14 nt, Human
cccuccgccauucu

SEQ ID NO: 3498779 - RNA, 13 nt, Human
cccuccgcccugc

SEQ ID NO: 3498780 - RNA, 14 nt, Human
cccuccgccuucac

SEQ ID NO: 3498781 - RNA, 17 nt, Human
cccuccgcucuguagug

SEQ ID NO: 3498782 - RNA, 17 nt, Human
cccuccgggucuuccua

SEQ ID NO: 3498783 - RNA, 13 nt, Human
cccuccuaaccua

SEQ ID NO: 3498784 - RNA, 18 nt, Human
cccuccuaccccucccag

SEQ ID NO: 3498785 - RNA, 21 nt, Human
cccuccuaccccucccagcug

SEQ ID NO: 3498786 - RNA, 17 nt, Human
cccuccuacccugcgcc

SEQ ID NO: 3498787 - RNA, 23 nt, Human
cccuccucaccucuggacuggcu

SEQ ID NO: 3498788 - RNA, 19 nt, Human
cccuccucacuggccaucc

SEQ ID NO: 3498789 - RNA, 13 nt, Human
cccuccuccacuc

SEQ ID NO: 3498790 - RNA, 20 nt, Human
cccuccucccuuuuuccuug

SEQ ID NO: 3498791 - RNA, 18 nt, Human
cccuccucuagcuguggg

SEQ ID NO: 3498792 - RNA, 13 nt, Human
cccuccucuccca

SEQ ID NO: 3498793 - RNA, 14 nt, Human
cccuccucucugcc

SEQ ID NO: 3498794 - RNA, 15 nt, Human
cccuccucucugccc

SEQ ID NO: 3498795 - RNA, 19 nt, Human
cccuccucugaaacagcug

SEQ ID NO: 3498796 - RNA, 20 nt, Human
cccuccucugaaacagcugc

SEQ ID NO: 3498797 - RNA, 11 nt, Human
cccuccucugc

SEQ ID NO: 3498798 - RNA, 22 nt, Human
cccuccucugcuugccaucccu

SEQ ID NO: 3498799 - RNA, 18 nt, Human
cccuccugaaacuuacac

SEQ ID NO: 3498800 - RNA, 11 nt, Human
cccuccugcug

SEQ ID NO: 3498801 - RNA, 16 nt, Human
cccuccuggccucaga

SEQ ID NO: 3498802 - RNA, 19 nt, Human
cccuccuggccucagacug

SEQ ID NO: 3498803 - RNA, 19 nt, Human
cccuccugggaucugcucg

SEQ ID NO: 3498804 - RNA, 16 nt, Human
cccuccuggggccagg

SEQ ID NO: 3498805 - RNA, 17 nt, Human
cccuccuggggccaggc

SEQ ID NO: 3498806 - RNA, 18 nt, Human
cccuccuggggccaggcc

SEQ ID NO: 3498807 - RNA, 21 nt, Human
cccuccuggugucaccccaga

SEQ ID NO: 3498808 - RNA, 21 nt, Human
cccuccugugcucagcccuga

SEQ ID NO: 3498809 - RNA, 19 nt, Human
cccuccugugcugggggaa

SEQ ID NO: 3498810 - RNA, 18 nt, Human
cccuccuguugcacccag

SEQ ID NO: 3498811 - RNA, 19 nt, Human
cccuccuguugcacccagc

SEQ ID NO: 3498812 - RNA, 21 nt, Human
cccuccuucccaagugagucu

SEQ ID NO: 3498813 - RNA, 13 nt, Human
cccuccuucccac

SEQ ID NO: 3498814 - RNA, 19 nt, Human
cccuccuucccacucuucu

SEQ ID NO: 3498815 - RNA, 17 nt, Human
cccuccuugccuccugu

SEQ ID NO: 3498816 - RNA, 23 nt, Human
cccuccuugcucugcaggcaccu

SEQ ID NO: 3498817 - RNA, 13 nt, Human
cccuccuuuccca

SEQ ID NO: 3498818 - RNA, 15 nt, Human
cccuccuuuuuaugu

SEQ ID NO: 3498819 - RNA, 22 nt, Human
cccucgaagcgcgccacucgcu

SEQ ID NO: 3498820 - RNA, 16 nt, Human
cccucgauauuuuuaa

SEQ ID NO: 3498821 - RNA, 13 nt, Human
cccucgcccaguc

SEQ ID NO: 3498822 - RNA, 18 nt, Human
cccucgcccagucccagc

SEQ ID NO: 3498823 - RNA, 22 nt, Human
cccucgcccagucccagcagcc

SEQ ID NO: 3498824 - RNA, 17 nt, Human
cccucgcugcuucugug

SEQ ID NO: 3498825 - RNA, 15 nt, Human
cccucgcuggccccc

SEQ ID NO: 3498826 - RNA, 19 nt, Human
cccucgcuggcccccacug

SEQ ID NO: 3498827 - RNA, 21 nt, Human
cccucgcuggcccccacuggc

SEQ ID NO: 3498828 - RNA, 19 nt, Human
cccucggaguucuucuuga

SEQ ID NO: 3498829 - RNA, 15 nt, Human
cccucgggcccaccu

SEQ ID NO: 3498830 - RNA, 13 nt, Human
cccucgggcccag

SEQ ID NO: 3498831 - RNA, 14 nt, Human
cccucgggcccagc

SEQ ID NO: 3498832 - RNA, 15 nt, Human
cccucgggcccagcc

SEQ ID NO: 3498833 - RNA, 17 nt, Human
cccucggggaugugucc

SEQ ID NO: 3498834 - RNA, 16 nt, Human
cccucggugggagcca

SEQ ID NO: 3498835 - RNA, 15 nt, Human
cccucgucuuuccca

SEQ ID NO: 3498836 - RNA, 13 nt, Human
cccucgugccagu

SEQ ID NO: 3498837 - RNA, 16 nt, Human
cccucguggacaccug

SEQ ID NO: 3498838 - RNA, 18 nt, Human
cccucguggacaccugcc

SEQ ID NO: 3498839 - RNA, 22 nt, Human
cccucguggacaccugcccugc

SEQ ID NO: 3498840 - RNA, 17 nt, Human
cccucguggccagcccg

SEQ ID NO: 3498841 - RNA, 20 nt, Human
cccucguggccagcccggcu

SEQ ID NO: 3498842 - RNA, 15 nt, Human
cccucuacagagcuu

SEQ ID NO: 3498843 - RNA, 20 nt, Human
cccucuacugggagccuacc

SEQ ID NO: 3498844 - RNA, 19 nt, Human
cccucuagaaauuuuucag

SEQ ID NO: 3498845 - RNA, 15 nt, Human
cccucuauuuagcau

SEQ ID NO: 3498846 - RNA, 12 nt, Human
cccucucagccc

SEQ ID NO: 3498847 - RNA, 14 nt, Human
cccucucagcccuc

SEQ ID NO: 3498848 - RNA, 22 nt, Human
cccucucaggcaugccugugug

SEQ ID NO: 3498849 - RNA, 21 nt, Human
cccucucaggugaccaaaauc

SEQ ID NO: 3498850 - RNA, 16 nt, Human
cccucucauuuagccu

SEQ ID NO: 3498851 - RNA, 13 nt, Human
cccucuccagcag

SEQ ID NO: 3498852 - RNA, 12 nt, Human
cccucucccacc

SEQ ID NO: 3498853 - RNA, 18 nt, Human
cccucucccacccucuuc

SEQ ID NO: 3498854 - RNA, 14 nt, Human
cccucucccaggcc

SEQ ID NO: 3498855 - RNA, 22 nt, Human
cccucuccccagggaagcagca

SEQ ID NO: 3498856 - RNA, 19 nt, Human
cccucuccccccccccucc

SEQ ID NO: 3498857 - RNA, 15 nt, Human
cccucuccccugccc

SEQ ID NO: 3498858 - RNA, 17 nt, Human
cccucucccucuaggcu

SEQ ID NO: 3498859 - RNA, 15 nt, Human
cccucucccugcaug

SEQ ID NO: 3498860 - RNA, 12 nt, Human
cccucuccugcc

SEQ ID NO: 3498861 - RNA, 15 nt, Human
cccucuccugggcag

SEQ ID NO: 3498862 - RNA, 23 nt, Human
cccucuccugggcagcugccucc

SEQ ID NO: 3498863 - RNA, 14 nt, Human
cccucuccuuccug

SEQ ID NO: 3498864 - RNA, 15 nt, Human
cccucuccuuccuua

SEQ ID NO: 3498865 - RNA, 18 nt, Human
cccucucucauacccucc

SEQ ID NO: 3498866 - RNA, 22 nt, Human
cccucucucauacccucccucc

SEQ ID NO: 3498867 - RNA, 13 nt, Human
cccucucuccucc

SEQ ID NO: 3498868 - RNA, 13 nt, Human
cccucucucugac

SEQ ID NO: 3498869 - RNA, 23 nt, Human
cccucucugaaggaggccaccuc

SEQ ID NO: 3498870 - RNA, 18 nt, Human
cccucucugcaucugacc

SEQ ID NO: 3498871 - RNA, 18 nt, Human
cccucucuugcacccgcc

SEQ ID NO: 3498872 - RNA, 15 nt, Human
cccucugaccugcac

SEQ ID NO: 3498873 - RNA, 15 nt, Human
cccucugcccacucc

SEQ ID NO: 3498874 - RNA, 18 nt, Human
cccucugcccacucccug

SEQ ID NO: 3498875 - RNA, 13 nt, Human
cccucugcccagc

SEQ ID NO: 3498876 - RNA, 16 nt, Human
cccucugcccagcuug

SEQ ID NO: 3498877 - RNA, 13 nt, Human
cccucugccccau

SEQ ID NO: 3498878 - RNA, 15 nt, Human
cccucugccccaucc

SEQ ID NO: 3498879 - RNA, 13 nt, Human
cccucugcccugc

SEQ ID NO: 3498880 - RNA, 14 nt, Human
cccucugccggcuc

SEQ ID NO: 3498881 - RNA, 14 nt, Human
cccucugcuggccg

SEQ ID NO: 3498882 - RNA, 16 nt, Human
cccucuggcccugccu

SEQ ID NO: 3498883 - RNA, 12 nt, Human
cccucuggccgc

SEQ ID NO: 3498884 - RNA, 12 nt, Human
cccucuggcucc

SEQ ID NO: 3498885 - RNA, 17 nt, Human
cccucuggcuccagcug

SEQ ID NO: 3498886 - RNA, 15 nt, Human
cccucugggaaccuc

SEQ ID NO: 3498887 - RNA, 16 nt, Human
cccucugggaaccucc

SEQ ID NO: 3498888 - RNA, 22 nt, Human
cccucugggaaccucccagagg

SEQ ID NO: 3498889 - RNA, 10 nt, Human
cccucugggc

SEQ ID NO: 3498890 - RNA, 13 nt, Human
cccucugggcacu

SEQ ID NO: 3498891 - RNA, 16 nt, Human
cccucuggggcuguuc

SEQ ID NO: 3498892 - RNA, 13 nt, Human
cccucuguccacc

SEQ ID NO: 3498893 - RNA, 24 nt, Human
cccucuguccaggcacugagauac

SEQ ID NO: 3498894 - RNA, 13 nt, Human
cccucuguccuga

SEQ ID NO: 3498895 - RNA, 14 nt, Human
cccucuguccugac

SEQ ID NO: 3498896 - RNA, 23 nt, Human
cccucuguucaguaacagggccu

SEQ ID NO: 3498897 - RNA, 11 nt, Human
cccucuuccau

SEQ ID NO: 3498898 - RNA, 13 nt, Human
cccucuuccauca

SEQ ID NO: 3498899 - RNA, 20 nt, Human
cccucuuccuacccugccuc

SEQ ID NO: 3498900 - RNA, 15 nt, Human
cccucuuccugacga

SEQ ID NO: 3498901 - RNA, 14 nt, Human
cccucuuccuguga

SEQ ID NO: 3498902 - RNA, 16 nt, Human
cccucuucucaagugc

SEQ ID NO: 3498903 - RNA, 20 nt, Human
cccucuucucaagugccuua

SEQ ID NO: 3498904 - RNA, 16 nt, Human
cccucuucuucucaag

SEQ ID NO: 3498905 - RNA, 22 nt, Human
cccucuugacccaucucccccu

SEQ ID NO: 3498906 - RNA, 18 nt, Human
cccucuugccccaacccc

SEQ ID NO: 3498907 - RNA, 22 nt, Human
cccucuugccccaacccccagc

SEQ ID NO: 3498908 - RNA, 17 nt, Human
cucuuucucucuucccu

SEQ ID NO: 3498909 - RNA, 14 nt, Human
cucuuucucuuucu

SEQ ID NO: 3498910 - RNA, 12 nt, Human
cucuuucugggc

SEQ ID NO: 3498911 - RNA, 11 nt, Human
cucuuucugua

SEQ ID NO: 3498912 - RNA, 13 nt, Human
cucuuucuguaua

SEQ ID NO: 3498913 - RNA, 15 nt, Human
cucuuucugucuucu

SEQ ID NO: 3498914 - RNA, 19 nt, Human
cucuuucuucuuccacaca

SEQ ID NO: 3498915 - RNA, 17 nt, Human
cucuuugaaugacaaag

SEQ ID NO: 3498916 - RNA, 20 nt, Human
cucuuugaauuuucuguguu

SEQ ID NO: 3498917 - RNA, 14 nt, Human
cucuuugagaaaua

SEQ ID NO: 3498918 - RNA, 15 nt, Human
cucuuugagauagaa

SEQ ID NO: 3498919 - RNA, 15 nt, Human
cccuggccuguucug

SEQ ID NO: 3498920 - RNA, 19 nt, Human
cccuggccuguucuguuuu

SEQ ID NO: 3498921 - RNA, 13 nt, Human
cccuggcuccagg

SEQ ID NO: 3498922 - RNA, 19 nt, Human
cccuggcucccacaggccc

SEQ ID NO: 3498923 - RNA, 23 nt, Human
cccuggcucccaugaccauacug

SEQ ID NO: 3498924 - RNA, 13 nt, Human
cccuggcucccuc

SEQ ID NO: 3498925 - RNA, 20 nt, Human
cccuggcucccuccuccagg

SEQ ID NO: 3498926 - RNA, 23 nt, Human
cccuggcucccuccuccaggccu

SEQ ID NO: 3498927 - RNA, 13 nt, Human
cccuggcucugcu

SEQ ID NO: 3498928 - RNA, 14 nt, Human
cccuggcugaagga

SEQ ID NO: 3498929 - RNA, 15 nt, Human
cccuggcugcccugg

SEQ ID NO: 3498930 - RNA, 18 nt, Human
cccuggcugcccuggccc

SEQ ID NO: 3498931 - RNA, 22 nt, Human
cccuggcugcccuggcccugag

SEQ ID NO: 3498932 - RNA, 14 nt, Human
cccuggcugccggc

SEQ ID NO: 3498933 - RNA, 14 nt, Human
cccuggcugcugcc

SEQ ID NO: 3498934 - RNA, 18 nt, Human
cccuggcugcugccccca

SEQ ID NO: 3498935 - RNA, 22 nt, Human
cccuggcugguaagggccaagu

SEQ ID NO: 3498936 - RNA, 22 nt, Human
cccuggcuguacugcucaggcu

SEQ ID NO: 3498937 - RNA, 19 nt, Human
cccuggcuuguaacuccac

SEQ ID NO: 3498938 - RNA, 10 nt, Human
cccuggcuuu

SEQ ID NO: 3498939 - RNA, 13 nt, Human
cccuggcuuuuca

SEQ ID NO: 3498940 - RNA, 18 nt, Human
cccuggcuuuucacugcu

SEQ ID NO: 3498941 - RNA, 19 nt, Human
cccuggcuuuucacugcug

SEQ ID NO: 3498942 - RNA, 15 nt, Human
cccugggaaggccuc

SEQ ID NO: 3498943 - RNA, 22 nt, Human
cccugggagaaucgcuccugca

SEQ ID NO: 3498944 - RNA, 13 nt, Human
cccugggccaggg

SEQ ID NO: 3498945 - RNA, 22 nt, Human
cccugggccagggucuguguga

SEQ ID NO: 3498946 - RNA, 20 nt, Human
cccugggccccaccaccuag

SEQ ID NO: 3498947 - RNA, 22 nt, Human
cccugggccccaccaccuaggc

SEQ ID NO: 3498948 - RNA, 11 nt, Human
cccugggccug

SEQ ID NO: 3498949 - RNA, 13 nt, Human
cccugggccugcu

SEQ ID NO: 3498950 - RNA, 17 nt, Human
cccugggccugcugcug

SEQ ID NO: 3498951 - RNA, 13 nt, Human
cccugggccuugg

SEQ ID NO: 3498952 - RNA, 17 nt, Human
cccugggcucugugggc

SEQ ID NO: 3498953 - RNA, 20 nt, Human
cccugggcucugugggcugc

SEQ ID NO: 3498954 - RNA, 15 nt, Human
cccugggcugugcua

SEQ ID NO: 3498955 - RNA, 19 nt, Human
cccuggggaaggagccagu

SEQ ID NO: 3498956 - RNA, 20 nt, Human
cugcaaguccuuuuguaaag

SEQ ID NO: 3498957 - RNA, 19 nt, Human
cugcaagugacaucucuuu

SEQ ID NO: 3498958 - RNA, 22 nt, Human
cugcaagugagcaaaccugccc

SEQ ID NO: 3498959 - RNA, 22 nt, Human
cugcaagugaggugugucacaa

SEQ ID NO: 3498960 - RNA, 15 nt, Human
cugcaauaaaauggg

SEQ ID NO: 3498961 - RNA, 14 nt, Human
cugcaauaacuucu

SEQ ID NO: 3498962 - RNA, 16 nt, Human
cugcaauaacuucuga

SEQ ID NO: 3498963 - RNA, 17 nt, Human
cugcaauaacuucugac

SEQ ID NO: 3498964 - RNA, 18 nt, Human
cugcaauaacuucugacc

SEQ ID NO: 3498965 - RNA, 19 nt, Human
cugcaauaacuucugaccu

SEQ ID NO: 3498966 - RNA, 19 nt, Human
cugcaauagagacuguaga

SEQ ID NO: 3498967 - RNA, 12 nt, Human
cugcaauauuug

SEQ ID NO: 3498968 - RNA, 16 nt, Human
cugcaauauuugaauu

SEQ ID NO: 3498969 - RNA, 18 nt, Human
cugcaauauuugaauuuu

SEQ ID NO: 3498970 - RNA, 19 nt, Human
cugcaaucauaugugaucu

SEQ ID NO: 3498971 - RNA, 16 nt, Human
cugcaauccugucuuu

SEQ ID NO: 3498972 - RNA, 20 nt, Human
cugcaauguaucccuucuca

SEQ ID NO: 3498973 - RNA, 16 nt, Human
cugcaauguuuuccuu

SEQ ID NO: 3498974 - RNA, 18 nt, Human
cugcaauucaaaaguucc

SEQ ID NO: 3498975 - RNA, 15 nt, Human
cugcaauuccccucu

SEQ ID NO: 3498976 - RNA, 16 nt, Human
cugcaauuccccucug

SEQ ID NO: 3498977 - RNA, 19 nt, Human
cugcaauucccuggauaga

SEQ ID NO: 3498978 - RNA, 15 nt, Human
cugcaauugcuuagg

SEQ ID NO: 3498979 - RNA, 16 nt, Human
cugcaauugcuuagga

SEQ ID NO: 3498980 - RNA, 20 nt, Human
cugcaauugcuuaggauguu

SEQ ID NO: 3498981 - RNA, 13 nt, Human
cugcacaaagccc

SEQ ID NO: 3498982 - RNA, 18 nt, Human
cugcacaaagcccuucca

SEQ ID NO: 3498983 - RNA, 20 nt, Human
cugcacaaagcccuuccaug

SEQ ID NO: 3498984 - RNA, 18 nt, Human
cugcacaagccagggugu

SEQ ID NO: 3498985 - RNA, 15 nt, Human
cugcacaagcugcac

SEQ ID NO: 3498986 - RNA, 18 nt, Human
cugcacaagcugcacccu

SEQ ID NO: 3498987 - RNA, 15 nt, Human
cugcacaauaaaaau

SEQ ID NO: 3498988 - RNA, 22 nt, Human
cugcacaauaaaaauguuuaac

SEQ ID NO: 3498989 - RNA, 16 nt, Human
cugcacaauaacuccu

SEQ ID NO: 3498990 - RNA, 21 nt, Human
cugcacaccuugaaucugccu

SEQ ID NO: 3498991 - RNA, 21 nt, Human
cugcacagagcucuccagcuc

SEQ ID NO: 3498992 - RNA, 23 nt, Human
cugcacagagcucuccagcucca

SEQ ID NO: 3498993 - RNA, 19 nt, Human
cugcacagcaggcugccag

SEQ ID NO: 3498994 - RNA, 20 nt, Human
cugcacagcaggcugccagu

SEQ ID NO: 3498995 - RNA, 21 nt, Human
cugcacagcaggcugccagug

SEQ ID NO: 3498996 - RNA, 13 nt, Human
cugcacagcggcc

SEQ ID NO: 3498997 - RNA, 19 nt, Human
cugcacagggcagcugggc

SEQ ID NO: 3498998 - RNA, 18 nt, Human
cugcacagugacuucuga

SEQ ID NO: 3498999 - RNA, 20 nt, Human
cugcacagugacuucugaga

SEQ ID NO: 3499000 - RNA, 21 nt, Human
cugcacagugacuucugagau

SEQ ID NO: 3499001 - RNA, 22 nt, Human
cugcacagugacuucugagauc

SEQ ID NO: 3499002 - RNA, 18 nt, Human
cugcacagugcaucucag

SEQ ID NO: 3499003 - RNA, 22 nt, Human
cugcacaucuguaaaucuacac

SEQ ID NO: 3499004 - RNA, 15 nt, Human
cugcacaugauuuca

SEQ ID NO: 3499005 - RNA, 21 nt, Human
cugcacaugucuuguacaugu

SEQ ID NO: 3499006 - RNA, 17 nt, Human
cugcaccaacccagccg

SEQ ID NO: 3499007 - RNA, 23 nt, Human
cugcaccaacccagccgcugccc

SEQ ID NO: 3499008 - RNA, 13 nt, Human
cugcaccaggaga

SEQ ID NO: 3499009 - RNA, 15 nt, Human
cugcaccaggagaca

SEQ ID NO: 3499010 - RNA, 17 nt, Human
cugcaccauugcugcuc

SEQ ID NO: 3499011 - RNA, 18 nt, Human
cugcaccauuuaaaaaca

SEQ ID NO: 3499012 - RNA, 18 nt, Human
cugcacccagaacagugg

SEQ ID NO: 3499013 - RNA, 11 nt, Human
cugcacccagg

SEQ ID NO: 3499014 - RNA, 14 nt, Human
cugcaccccccugg

SEQ ID NO: 3499015 - RNA, 17 nt, Human
cugcaccccccugggcu

SEQ ID NO: 3499016 - RNA, 18 nt, Human
cugcacccccuccugcug

SEQ ID NO: 3499017 - RNA, 20 nt, Human
cugcacccccuccugcugca

SEQ ID NO: 3499018 - RNA, 20 nt, Human
cugcaccccuucucuccucc

SEQ ID NO: 3499019 - RNA, 14 nt, Human
cugcacccucaggc

SEQ ID NO: 3499020 - RNA, 12 nt, Human
cugcacccucca

SEQ ID NO: 3499021 - RNA, 16 nt, Human
cugcacccuggggccu

SEQ ID NO: 3499022 - RNA, 17 nt, Human
cugcacccuucuuuucu

SEQ ID NO: 3499023 - RNA, 20 nt, Human
cugcacccuucuuuucucau

SEQ ID NO: 3499024 - RNA, 14 nt, Human
cugcaccggcuggc

SEQ ID NO: 3499025 - RNA, 15 nt, Human
cugcaccggcuggcc

SEQ ID NO: 3499026 - RNA, 23 nt, Human
cugcaccggcuggccuggccccu

SEQ ID NO: 3499027 - RNA, 15 nt, Human
cugcaccgggccaca

SEQ ID NO: 3499028 - RNA, 18 nt, Human
cugcaccggggccugggc

SEQ ID NO: 3499029 - RNA, 17 nt, Human
cugcaccguacugugga

SEQ ID NO: 3499030 - RNA, 18 nt, Human
cugcaccugccagccugg

SEQ ID NO: 3499031 - RNA, 15 nt, Human
cugcacggugaaugg

SEQ ID NO: 3499032 - RNA, 15 nt, Human
cugcacgugcgggug

SEQ ID NO: 3499033 - RNA, 19 nt, Human
cugcacuaaagccagccug

SEQ ID NO: 3499034 - RNA, 22 nt, Human
cugcacuaaagccagccugacc

SEQ ID NO: 3499035 - RNA, 18 nt, Human
cugcacuacuccucugca

SEQ ID NO: 3499036 - RNA, 19 nt, Human
cugcacuacuccucugcag

SEQ ID NO: 3499037 - RNA, 20 nt, Human
cugcacuacuccucugcagu

SEQ ID NO: 3499038 - RNA, 18 nt, Human
cugcacuauagccuaggu

SEQ ID NO: 3499039 - RNA, 23 nt, Human
cugcacuauagccuaggugacag

SEQ ID NO: 3499040 - RNA, 14 nt, Human
cugcacuccagccu

SEQ ID NO: 3499041 - RNA, 16 nt, Human
cugcacuccagccuga

SEQ ID NO: 3499042 - RNA, 17 nt, Human
cugcacuccagccugag

SEQ ID NO: 3499043 - RNA, 20 nt, Human
cugcacuccagccugagcga

SEQ ID NO: 3499044 - RNA, 20 nt, Human
cugcacuccagccuggguga

SEQ ID NO: 3499045 - RNA, 19 nt, Human
cugcacucccaccugacac

SEQ ID NO: 3499046 - RNA, 14 nt, Human
cugcacuccccugc

SEQ ID NO: 3499047 - RNA, 15 nt, Human
cugcacuccccugcu

SEQ ID NO: 3499048 - RNA, 15 nt, Human
cugcacuccucaggg

SEQ ID NO: 3499049 - RNA, 22 nt, Human
cugcacuccucagggcagccuc

SEQ ID NO: 3499050 - RNA, 15 nt, Human
cugcacucucauugu

SEQ ID NO: 3499051 - RNA, 14 nt, Human
cugcacucugugcc

SEQ ID NO: 3499052 - RNA, 20 nt, Human
cugcacucugugcccauggg

SEQ ID NO: 3499053 - RNA, 11 nt, Human
cugcacugaaa

SEQ ID NO: 3499054 - RNA, 20 nt, Human
cugcacugacccacagccuc

SEQ ID NO: 3499055 - RNA, 16 nt, Human
cugcacugacucugga

SEQ ID NO: 3499056 - RNA, 18 nt, Human
cugcacugagcagagucu

SEQ ID NO: 3499057 - RNA, 15 nt, Human
cugcacugaugcugc

SEQ ID NO: 3499058 - RNA, 17 nt, Human
cugcacugaugcugccc

SEQ ID NO: 3499059 - RNA, 16 nt, Human
cugcacuggggagccc

SEQ ID NO: 3499060 - RNA, 18 nt, Human
cugcacuguaaaaugugg

SEQ ID NO: 3499061 - RNA, 12 nt, Human
cugcacugucaa

SEQ ID NO: 3499062 - RNA, 21 nt, Human
cugcacuguccugcuccacag

SEQ ID NO: 3499063 - RNA, 13 nt, Human
cugcacuuacaau

SEQ ID NO: 3499064 - RNA, 21 nt, Human
cugcacuuacaaucccaccuu

SEQ ID NO: 3499065 - RNA, 22 nt, Human
cugcacuugcgguuccggcaug

SEQ ID NO: 3499066 - RNA, 14 nt, Human
cugcacuuugaugu

SEQ ID NO: 3499067 - RNA, 21 nt, Human
cugcacuuugaugucaugugu

SEQ ID NO: 3499068 - RNA, 22 nt, Human
cugcacuuugaugucauguguu

SEQ ID NO: 3499069 - RNA, 20 nt, Human
cugcagaaacccugagcaga

SEQ ID NO: 3499070 - RNA, 16 nt, Human
cugcagaaacuacuga

SEQ ID NO: 3499071 - RNA, 21 nt, Human
cugcagaaccggagagccagc

SEQ ID NO: 3499072 - RNA, 15 nt, Human
cugcagaagcaaggg

SEQ ID NO: 3499073 - RNA, 13 nt, Human
cugcagaaggaaa

SEQ ID NO: 3499074 - RNA, 14 nt, Human
cugcagaaggaaaa

SEQ ID NO: 3499075 - RNA, 19 nt, Human
cugcagaaggaaaaaugug

SEQ ID NO: 3499076 - RNA, 13 nt, Human
cugcagaaggcca

SEQ ID NO: 3499077 - RNA, 15 nt, Human
cugcagaccacgccc

SEQ ID NO: 3499078 - RNA, 14 nt, Human
cugcagacccugcc

SEQ ID NO: 3499079 - RNA, 16 nt, Human
cugcagacccugcccu

SEQ ID NO: 3499080 - RNA, 15 nt, Human
cugcagaccuguccu

SEQ ID NO: 3499081 - RNA, 14 nt, Human
cugcagagauuucu

SEQ ID NO: 3499082 - RNA, 23 nt, Human
cugcagagcagugggccuggcca

SEQ ID NO: 3499083 - RNA, 21 nt, Human
cugcagagcugcgggcugggu

SEQ ID NO: 3499084 - RNA, 11 nt, Human
cugcagaggcc

SEQ ID NO: 3499085 - RNA, 17 nt, Human
cugcagaggccagaggc

SEQ ID NO: 3499086 - RNA, 10 nt, Human
cugcagaggg

SEQ ID NO: 3499087 - RNA, 13 nt, Human
cugcagagggcac

SEQ ID NO: 3499088 - RNA, 21 nt, Human
cugcagaggggaaaccagugu

SEQ ID NO: 3499089 - RNA, 13 nt, Human
cugcagaggggca

SEQ ID NO: 3499090 - RNA, 20 nt, Human
cugcagaggggcuuucugga

SEQ ID NO: 3499091 - RNA, 22 nt, Human
cugcagaggggcuuucuggaga

SEQ ID NO: 3499092 - RNA, 23 nt, Human
cugcagaggggcuuucuggagag

SEQ ID NO: 3499093 - RNA, 16 nt, Human
cugcagaggucugugc

SEQ ID NO: 3499094 - RNA, 23 nt, Human
cugcagaggucugugcugaggcc

SEQ ID NO: 3499095 - RNA, 15 nt, Human
cugcagaguuuggau

SEQ ID NO: 3499096 - RNA, 20 nt, Human
cugcagauacuacugaccag

SEQ ID NO: 3499097 - RNA, 14 nt, Human
cugcagaugccacc

SEQ ID NO: 3499098 - RNA, 18 nt, Human
cugcagauugagaccuac

SEQ ID NO: 3499099 - RNA, 23 nt, Human
cugcagauuugggcuggaacaga

SEQ ID NO: 3499100 - RNA, 18 nt, Human
cugcagcaaucuuugaaa

SEQ ID NO: 3499101 - RNA, 19 nt, Human
cugcagcaccgaggggccu

SEQ ID NO: 3499102 - RNA, 14 nt, Human
cugcagcaccucca

SEQ ID NO: 3499103 - RNA, 15 nt, Human
cugcagcaccuccag

SEQ ID NO: 3499104 - RNA, 22 nt, Human
cugcagcacggacaauaaaccu

SEQ ID NO: 3499105 - RNA, 12 nt, Human
cugagccugccg

SEQ ID NO: 3499106 - RNA, 16 nt, Human
cugagccugccgagca

SEQ ID NO: 3499107 - RNA, 16 nt, Human
cugagccuggcuggca

SEQ ID NO: 3499108 - RNA, 14 nt, Human
cugagccuucugag

SEQ ID NO: 3499109 - RNA, 16 nt, Human
cugagcgacagugaga

SEQ ID NO: 3499110 - RNA, 15 nt, Human
cugagcgccaggaug

SEQ ID NO: 3499111 - RNA, 15 nt, Human
cugagcgccuccauc

SEQ ID NO: 3499112 - RNA, 15 nt, Human
cugagcgccuggguc

SEQ ID NO: 3499113 - RNA, 19 nt, Human
cugagcggaugcaucuggg

SEQ ID NO: 3499114 - RNA, 18 nt, Human
cugagcgggaggcagagu

SEQ ID NO: 3499115 - RNA, 22 nt, Human
cugagcggugggggaggagggu

SEQ ID NO: 3499116 - RNA, 23 nt, Human
cugagcgugcuuuccaaaaccca

SEQ ID NO: 3499117 - RNA, 15 nt, Human
cugagcuagaacccu

SEQ ID NO: 3499118 - RNA, 21 nt, Human
cugagcuauuucaucuauuuu

SEQ ID NO: 3499119 - RNA, 14 nt, Human
cugagcucacaagg

SEQ ID NO: 3499120 - RNA, 22 nt, Human
cugagcucacaaggcagcaagg

SEQ ID NO: 3499121 - RNA, 22 nt, Human
cugagcuccagcuccuuugggc

SEQ ID NO: 3499122 - RNA, 14 nt, Human
cugagcuccucugg

SEQ ID NO: 3499123 - RNA, 14 nt, Human
cugagcucugagag

SEQ ID NO: 3499124 - RNA, 18 nt, Human
cugagcucugagaggccc

SEQ ID NO: 3499125 - RNA, 17 nt, Human
cugagcucuuugcacua

SEQ ID NO: 3499126 - RNA, 16 nt, Human
cugagcugagccaggc

SEQ ID NO: 3499127 - RNA, 17 nt, Human
cugagcugagccaggcu

SEQ ID NO: 3499128 - RNA, 13 nt, Human
cugagcugaggca

SEQ ID NO: 3499129 - RNA, 18 nt, Human
cugagcugcccacagcag

SEQ ID NO: 3499130 - RNA, 21 nt, Human
cugagcugcccacagcaggcc

SEQ ID NO: 3499131 - RNA, 14 nt, Human
cugagcuggccucu

SEQ ID NO: 3499132 - RNA, 22 nt, Human
cugagcuggccucucacugccu

SEQ ID NO: 3499133 - RNA, 15 nt, Human
cugagcuucucugug

SEQ ID NO: 3499134 - RNA, 16 nt, Human
cugagcuucucuguga

SEQ ID NO: 3499135 - RNA, 21 nt, Human
cugagcuuggaagcuucuggu

SEQ ID NO: 3499136 - RNA, 15 nt, Human
cugagcuuggccaga

SEQ ID NO: 3499137 - RNA, 18 nt, Human
cugagcuuggccagaagg

SEQ ID NO: 3499138 - RNA, 21 nt, Human
cugagcuuuggacgcacacag

SEQ ID NO: 3499139 - RNA, 15 nt, Human
cugaggaaaggccag

SEQ ID NO: 3499140 - RNA, 16 nt, Human
cugaggaaaggccagc

SEQ ID NO: 3499141 - RNA, 19 nt, Human
cugaggaaaggccagcugg

SEQ ID NO: 3499142 - RNA, 20 nt, Human
cugaggaaaggccagcuggc

SEQ ID NO: 3499143 - RNA, 22 nt, Human
cugaggaacccuuacaguagga

SEQ ID NO: 3499144 - RNA, 23 nt, Human
cugaggaagaugggggcaagaag

SEQ ID NO: 3499145 - RNA, 19 nt, Human
cugaggaagcugggguuca

SEQ ID NO: 3499146 - RNA, 21 nt, Human
cugaggaaggaggggaagcug

SEQ ID NO: 3499147 - RNA, 22 nt, Human
cugaggaaggaggggaagcugc

SEQ ID NO: 3499148 - RNA, 23 nt, Human
cugaggaaggaggggaagcugca

SEQ ID NO: 3499149 - RNA, 19 nt, Human
cugaggaaucaacagggca

SEQ ID NO: 3499150 - RNA, 20 nt, Human
cugaggaauccagacccggc

SEQ ID NO: 3499151 - RNA, 14 nt, Human
cugaggacaaagug

SEQ ID NO: 3499152 - RNA, 20 nt, Human
cugaggacacuaaccacgcu

SEQ ID NO: 3499153 - RNA, 22 nt, Human
cugaggacacuaaccacgcugg

SEQ ID NO: 3499154 - RNA, 20 nt, Human
cugaggacagaugccuccuu

SEQ ID NO: 3499155 - RNA, 15 nt, Human
cugaggacagcuguc

SEQ ID NO: 3499156 - RNA, 19 nt, Human
cugaggacauggcuucuga

SEQ ID NO: 3499157 - RNA, 14 nt, Human
cugaggaggccucc

SEQ ID NO: 3499158 - RNA, 15 nt, Human
cugaggaggccucca

SEQ ID NO: 3499159 - RNA, 23 nt, Human
cugaggaggccuugggcucugcu

SEQ ID NO: 3499160 - RNA, 12 nt, Human
cugaggagucug

SEQ ID NO: 3499161 - RNA, 17 nt, Human
cugaggagucugagguc

SEQ ID NO: 3499162 - RNA, 18 nt, Human
cugaggagucugaggucc

SEQ ID NO: 3499163 - RNA, 20 nt, Human
cugaggagucugagguccug

SEQ ID NO: 3499164 - RNA, 15 nt, Human
cugaggagugaggaa

SEQ ID NO: 3499165 - RNA, 16 nt, Human
cugaggaucagaaagu

SEQ ID NO: 3499166 - RNA, 13 nt, Human
cugaggaugagcu

SEQ ID NO: 3499167 - RNA, 18 nt, Human
cugaggaugggucagagc

SEQ ID NO: 3499168 - RNA, 19 nt, Human
cugaggaugggucagagcu

SEQ ID NO: 3499169 - RNA, 20 nt, Human
cugaggaugggucagagcua

SEQ ID NO: 3499170 - RNA, 14 nt, Human
cugaggauuucaag

SEQ ID NO: 3499171 - RNA, 22 nt, Human
cugaggcagacagcagcucagg

SEQ ID NO: 3499172 - RNA, 24 nt, Human
cugaggcagcagugugaggccagg

SEQ ID NO: 3499173 - RNA, 15 nt, Human
cugaggcaggagaau

SEQ ID NO: 3499174 - RNA, 15 nt, Human
cugaggcaggaggau

SEQ ID NO: 3499175 - RNA, 17 nt, Human
cugaggcagguccccag

SEQ ID NO: 3499176 - RNA, 18 nt, Human
cugaggcagguccccaga

SEQ ID NO: 3499177 - RNA, 19 nt, Human
cugaggcagguccccagac

SEQ ID NO: 3499178 - RNA, 15 nt, Human
cugaggcauccagca

SEQ ID NO: 3499179 - RNA, 12 nt, Human
cugaggccagcc

SEQ ID NO: 3499180 - RNA, 15 nt, Human
cugaggccagccugg

SEQ ID NO: 3499181 - RNA, 18 nt, Human
cugaggccagccuggccu

SEQ ID NO: 3499182 - RNA, 20 nt, Human
cugaggccagccuggccucc

SEQ ID NO: 3499183 - RNA, 13 nt, Human
cugaggcccagag

SEQ ID NO: 3499184 - RNA, 14 nt, Human
cugaggcccagagg

SEQ ID NO: 3499185 - RNA, 18 nt, Human
cugaggcccagagggccu

SEQ ID NO: 3499186 - RNA, 23 nt, Human
cugaggcccagagggccugcaag

SEQ ID NO: 3499187 - RNA, 15 nt, Human
cugaggcccuucucu

SEQ ID NO: 3499188 - RNA, 22 nt, Human
cugaggcccuucucuccagccc

SEQ ID NO: 3499189 - RNA, 21 nt, Human
cugaggccuaaaaguaaacau

SEQ ID NO: 3499190 - RNA, 17 nt, Human
cugaggccuagacucug

SEQ ID NO: 3499191 - RNA, 21 nt, Human
cugaggccugagacccaggac

SEQ ID NO: 3499192 - RNA, 14 nt, Human
cugaggccugggcc

SEQ ID NO: 3499193 - RNA, 18 nt, Human
cugaggccuuaucauuca

SEQ ID NO: 3499194 - RNA, 22 nt, Human
cugaggcgagaagggcugcuuc

SEQ ID NO: 3499195 - RNA, 17 nt, Human
cugaggcgggagaauca

SEQ ID NO: 3499196 - RNA, 15 nt, Human
cugaggcuccacuug

SEQ ID NO: 3499197 - RNA, 22 nt, Human
cugaggcucugacccagugaga

SEQ ID NO: 3499198 - RNA, 16 nt, Human
cugaggcucuuucugg

SEQ ID NO: 3499199 - RNA, 14 nt, Human
cugaggcugaggca

SEQ ID NO: 3499200 - RNA, 18 nt, Human
cugaggcuggcacaggac

SEQ ID NO: 3499201 - RNA, 13 nt, Human
cugaggcugggcu

SEQ ID NO: 3499202 - RNA, 15 nt, Human
cugaggcugggcucc

SEQ ID NO: 3499203 - RNA, 17 nt, Human
cugaggcugggcucccu

SEQ ID NO: 3499204 - RNA, 20 nt, Human
cugaggcugggggagagccg

SEQ ID NO: 3499205 - RNA, 17 nt, Human
cugaggcuguggucaca

SEQ ID NO: 3499206 - RNA, 15 nt, Human
cugaggcuuuggauu

SEQ ID NO: 3499207 - RNA, 12 nt, Human
cccuguuauuuu

SEQ ID NO: 3499208 - RNA, 14 nt, Human
cccuguucacucua

SEQ ID NO: 3499209 - RNA, 22 nt, Human
cccuguucacucuacuuagcau

SEQ ID NO: 3499210 - RNA, 17 nt, Human
cccuguucagcuacucc

SEQ ID NO: 3499211 - RNA, 14 nt, Human
cccuguuccccaga

SEQ ID NO: 3499212 - RNA, 16 nt, Human
cccuguuccccagaga

SEQ ID NO: 3499213 - RNA, 20 nt, Human
cccuguuccugcugcugucu

SEQ ID NO: 3499214 - RNA, 14 nt, Human
cccuguuccuggag

SEQ ID NO: 3499215 - RNA, 14 nt, Human
cccuguucuggcag

SEQ ID NO: 3499216 - RNA, 12 nt, Human
cccuguucuucc

SEQ ID NO: 3499217 - RNA, 13 nt, Human
cccuguucuuccu

SEQ ID NO: 3499218 - RNA, 14 nt, Human
cccuguucuuccuc

SEQ ID NO: 3499219 - RNA, 21 nt, Human
cccuguucuuccuccagcugc

SEQ ID NO: 3499220 - RNA, 11 nt, Human
cccuguugcua

SEQ ID NO: 3499221 - RNA, 16 nt, Human
cccuguugugccacag

SEQ ID NO: 3499222 - RNA, 19 nt, Human
cccuguuuaauauuuaaac

SEQ ID NO: 3499223 - RNA, 19 nt, Human
cccuguuucagaggcucag

SEQ ID NO: 3499224 - RNA, 15 nt, Human
cccuguuuguuucug

SEQ ID NO: 3499225 - RNA, 16 nt, Human
cccuguuuguuucuga

SEQ ID NO: 3499226 - RNA, 16 nt, Human
cccuguuuucccccca

SEQ ID NO: 3499227 - RNA, 18 nt, Human
cccuguuuucugagcccg

SEQ ID NO: 3499228 - RNA, 22 nt, Human
cccuguuuucugagcccgggcu

SEQ ID NO: 3499229 - RNA, 14 nt, Human
cccuuaaaggggag

SEQ ID NO: 3499230 - RNA, 23 nt, Human
cccuuaagaaugaguuucuuaga

SEQ ID NO: 3499231 - RNA, 14 nt, Human
cccuuacacuuacu

SEQ ID NO: 3499232 - RNA, 17 nt, Human
cccuuaccacugcucug

SEQ ID NO: 3499233 - RNA, 22 nt, Human
cccuuaccccuuagccucccug

SEQ ID NO: 3499234 - RNA, 13 nt, Human
cccuuaccuuccc

SEQ ID NO: 3499235 - RNA, 14 nt, Human
cccuuacuuagcau

SEQ ID NO: 3499236 - RNA, 16 nt, Human
cccuuacuucuugccc

SEQ ID NO: 3499237 - RNA, 20 nt, Human
cccuuacuugcuucucuagc

SEQ ID NO: 3499238 - RNA, 12 nt, Human
cccuuagacaga

SEQ ID NO: 3499239 - RNA, 22 nt, Human
cccuuagacagaggcccucaag

SEQ ID NO: 3499240 - RNA, 14 nt, Human
cccuuagcccccac

SEQ ID NO: 3499241 - RNA, 22 nt, Human
cccuuagcccccacccacuucc

SEQ ID NO: 3499242 - RNA, 15 nt, Human
cccuuagucccccaa

SEQ ID NO: 3499243 - RNA, 13 nt, Human
cccuuauaaaauc

SEQ ID NO: 3499244 - RNA, 13 nt, Human
cccuuauccagga

SEQ ID NO: 3499245 - RNA, 15 nt, Human
cccuuauccaggacu

SEQ ID NO: 3499246 - RNA, 14 nt, Human
cccuuaucccugcu

SEQ ID NO: 3499247 - RNA, 16 nt, Human
cccuuauccucccugu

SEQ ID NO: 3499248 - RNA, 21 nt, Human
cccuuauccucccuguaacuu

SEQ ID NO: 3499249 - RNA, 20 nt, Human
cccuuauuacacggaaaacg

SEQ ID NO: 3499250 - RNA, 19 nt, Human
cccuuauugcuguccugga

SEQ ID NO: 3499251 - RNA, 12 nt, Human
cccuuauuuccu

SEQ ID NO: 3499252 - RNA, 22 nt, Human
cccuucaacguuucuucacuuu

SEQ ID NO: 3499253 - RNA, 13 nt, Human
cccuucacaaagc

SEQ ID NO: 3499254 - RNA, 18 nt, Human
cccuucacaaagcccaag

SEQ ID NO: 3499255 - RNA, 16 nt, Human
cccuucacaguguuuc

SEQ ID NO: 3499256 - RNA, 15 nt, Human
cccuucacauaguuu

SEQ ID NO: 3499257 - RNA, 17 nt, Human
cccuucacugccuuugc

SEQ ID NO: 3499258 - RNA, 22 nt, Human
cccuucacuucugaccacacuu

SEQ ID NO: 3499259 - RNA, 23 nt, Human
cccuucacuucugaccacacuuc

SEQ ID NO: 3499260 - RNA, 19 nt, Human
cccuucaguacccucucag

SEQ ID NO: 3499261 - RNA, 18 nt, Human
aaaugcaugauugcagaa

SEQ ID NO: 3499262 - RNA, 21 nt, Human
aaaugcaugauugcagaauug

SEQ ID NO: 3499263 - RNA, 12 nt, Human
aaaugcauugua

SEQ ID NO: 3499264 - RNA, 16 nt, Human
aaaugccaaauuaaaa

SEQ ID NO: 3499265 - RNA, 21 nt, Human
aaaugccauuuauuuauugau

SEQ ID NO: 3499266 - RNA, 15 nt, Human
aaaugcccagccccu

SEQ ID NO: 3499267 - RNA, 13 nt, Human
aaaugcccucuuc

SEQ ID NO: 3499268 - RNA, 15 nt, Human
aaaugccuaauaaac

SEQ ID NO: 3499269 - RNA, 18 nt, Human
aaaugccucaguguauuu

SEQ ID NO: 3499270 - RNA, 21 nt, Human
aaaugccuccaaaguauugua

SEQ ID NO: 3499271 - RNA, 15 nt, Human
aaaugccuuaaaaug

SEQ ID NO: 3499272 - RNA, 17 nt, Human
aaaugccuuaaaaugga

SEQ ID NO: 3499273 - RNA, 18 nt, Human
aaaugccuuaaaauggaa

SEQ ID NO: 3499274 - RNA, 17 nt, Human
aaaugccuuacuuugua

SEQ ID NO: 3499275 - RNA, 20 nt, Human
aaaugccuuacuuuguauga

SEQ ID NO: 3499276 - RNA, 17 nt, Human
aaaugccuuagaaaugu

SEQ ID NO: 3499277 - RNA, 14 nt, Human
aaaugccuuugaga

SEQ ID NO: 3499278 - RNA, 16 nt, Human
aaaugccuuugagaca

SEQ ID NO: 3499279 - RNA, 23 nt, Human
aaaugcgguuauaaaaaaugguu

SEQ ID NO: 3499280 - RNA, 23 nt, Human
aaaugcuaauauuaaaagucaca

SEQ ID NO: 3499281 - RNA, 20 nt, Human
aaaugcuagguuaauuccaa

SEQ ID NO: 3499282 - RNA, 21 nt, Human
aaaugcuaugucauuucaugu

SEQ ID NO: 3499283 - RNA, 22 nt, Human
aaaugcuaugucauuucauguc

SEQ ID NO: 3499284 - RNA, 14 nt, Human
aaaugcuauuuuuu

SEQ ID NO: 3499285 - RNA, 13 nt, Human
aaaugcucucuca

SEQ ID NO: 3499286 - RNA, 16 nt, Human
aaaugcucucucaaau

SEQ ID NO: 3499287 - RNA, 19 nt, Human
aaaugcucuuauuucauca

SEQ ID NO: 3499288 - RNA, 17 nt, Human
aaaugcugaaaauugcc

SEQ ID NO: 3499289 - RNA, 20 nt, Human
aaaugcugcgcccuucccca

SEQ ID NO: 3499290 - RNA, 19 nt, Human
aaaugcuucauuuguaugu

SEQ ID NO: 3499291 - RNA, 13 nt, Human
aaaugcuuugcuu

SEQ ID NO: 3499292 - RNA, 18 nt, Human
aaaugcuuuuuauuucug

SEQ ID NO: 3499293 - RNA, 20 nt, Human
aaaugcuuuuuauuucugca

SEQ ID NO: 3499294 - RNA, 13 nt, Human
aaauggaaacuau

SEQ ID NO: 3499295 - RNA, 14 nt, Human
aaauggaaauuuug

SEQ ID NO: 3499296 - RNA, 20 nt, Human
aaauggaacgcuaaugaaac

SEQ ID NO: 3499297 - RNA, 17 nt, Human
aaauggaaguggcaaua

SEQ ID NO: 3499298 - RNA, 17 nt, Human
aaauggaauacucuuau

SEQ ID NO: 3499299 - RNA, 16 nt, Human
aaauggacacugugcc

SEQ ID NO: 3499300 - RNA, 14 nt, Human
aaauggacguguua

SEQ ID NO: 3499301 - RNA, 20 nt, Human
aaauggacguguuaugacuc

SEQ ID NO: 3499302 - RNA, 21 nt, Human
aaauggacguguuaugacucc

SEQ ID NO: 3499303 - RNA, 19 nt, Human
aaauggacuguggugacuu

SEQ ID NO: 3499304 - RNA, 20 nt, Human
aaauggacuguggugacuuu

SEQ ID NO: 3499305 - RNA, 16 nt, Human
aaauggagaagcugca

SEQ ID NO: 3499306 - RNA, 23 nt, Human
aaauggaggaucucuaaagagca

SEQ ID NO: 3499307 - RNA, 22 nt, Human
aaauggagguccuucugcugga

SEQ ID NO: 3499308 - RNA, 23 nt, Human
aaauggagucauuugagucucuu

SEQ ID NO: 3499309 - RNA, 14 nt, Human
aaauggaguuggag

SEQ ID NO: 3499310 - RNA, 21 nt, Human
aaauggauacuacaucuuuaa

SEQ ID NO: 3499311 - RNA, 21 nt, Human
aaauggaugccuugaauaaua

SEQ ID NO: 3499312 - RNA, 15 nt, Human
aaauggcaacaaacu

SEQ ID NO: 3499313 - RNA, 21 nt, Human
aaauggcgucuggaaguccaa

SEQ ID NO: 3499314 - RNA, 16 nt, Human
aaauggcucagaugcc

SEQ ID NO: 3499315 - RNA, 22 nt, Human
aaauggcuucagaauuaaaacu

SEQ ID NO: 3499316 - RNA, 21 nt, Human
aaaugggaacauuuauuuuau

SEQ ID NO: 3499317 - RNA, 15 nt, Human
aaaugggacuucuuu

SEQ ID NO: 3499318 - RNA, 15 nt, Human
aaaugggcacuuaaa

SEQ ID NO: 3499319 - RNA, 17 nt, Human
aaauggggccagaucca

SEQ ID NO: 3499320 - RNA, 18 nt, Human
aaaugggggugcauuuga

SEQ ID NO: 3499321 - RNA, 16 nt, Human
aaaugguagcauuuua

SEQ ID NO: 3499322 - RNA, 20 nt, Human
aaaugguagcauuuuaaaca

SEQ ID NO: 3499323 - RNA, 18 nt, Human
aaauggucgcccaggaga

SEQ ID NO: 3499324 - RNA, 20 nt, Human
aaauggucucuaacauuucc

SEQ ID NO: 3499325 - RNA, 11 nt, Human
aaauggugccu

SEQ ID NO: 3499326 - RNA, 20 nt, Human
aaauggugguuguuucuucc

SEQ ID NO: 3499327 - RNA, 22 nt, Human
aaauggugguuguuucuuccaa

SEQ ID NO: 3499328 - RNA, 18 nt, Human
aaaugguguuuuaucuuc

SEQ ID NO: 3499329 - RNA, 11 nt, Human
aaaugguuaaa

SEQ ID NO: 3499330 - RNA, 23 nt, Human
aaaugguucagaauuaaacuuuu

SEQ ID NO: 3499331 - RNA, 20 nt, Human
aaaugguuguauuagauguu

SEQ ID NO: 3499332 - RNA, 22 nt, Human
aaaugguuguauuagauguucu

SEQ ID NO: 3499333 - RNA, 20 nt, Human
aaaugguuuggugcuuuuua

SEQ ID NO: 3499334 - RNA, 15 nt, Human
aaauguaaacauuuu

SEQ ID NO: 3499335 - RNA, 15 nt, Human
aaauguaaacugcca

SEQ ID NO: 3499336 - RNA, 17 nt, Human
aaauguaaauauucuau

SEQ ID NO: 3499337 - RNA, 11 nt, Human
aaauguaacug

SEQ ID NO: 3499338 - RNA, 21 nt, Human
aaauguaacuguccguaguau

SEQ ID NO: 3499339 - RNA, 23 nt, Human
aaauguaacugugccaguucuuu

SEQ ID NO: 3499340 - RNA, 14 nt, Human
aaauguaacuguua

SEQ ID NO: 3499341 - RNA, 18 nt, Human
aaauguaacuuuuguaag

SEQ ID NO: 3499342 - RNA, 14 nt, Human
aaauguaagaucgu

SEQ ID NO: 3499343 - RNA, 22 nt, Human
aaauguaagauuauagauucua

SEQ ID NO: 3499344 - RNA, 13 nt, Human
aaauguaauuuaa

SEQ ID NO: 3499345 - RNA, 18 nt, Human
aaauguaauuuaaaugaa

SEQ ID NO: 3499346 - RNA, 19 nt, Human
aaauguacaaaauaaaguu

SEQ ID NO: 3499347 - RNA, 21 nt, Human
aaauguacaaaauaaaguuac

SEQ ID NO: 3499348 - RNA, 19 nt, Human
aaauguacagacauauuua

SEQ ID NO: 3499349 - RNA, 14 nt, Human
aaauguacauguau

SEQ ID NO: 3499350 - RNA, 17 nt, Human
aaauguacauguauuaa

SEQ ID NO: 3499351 - RNA, 16 nt, Human
aaauguaccugaugua

SEQ ID NO: 3499352 - RNA, 15 nt, Human
cugcagguugggcca

SEQ ID NO: 3499353 - RNA, 20 nt, Human
cugcaguagucucugugcuu

SEQ ID NO: 3499354 - RNA, 17 nt, Human
cugcaguaugaaaauaa

SEQ ID NO: 3499355 - RNA, 19 nt, Human
cugcagucacuucguggga

SEQ ID NO: 3499356 - RNA, 21 nt, Human
cugcagucagucaugauggca

SEQ ID NO: 3499357 - RNA, 16 nt, Human
cugcagugaggcugug

SEQ ID NO: 3499358 - RNA, 14 nt, Human
cugcaguuaauuag

SEQ ID NO: 3499359 - RNA, 21 nt, Human
cugcaguuaauuagcauucug

SEQ ID NO: 3499360 - RNA, 15 nt, Human
cugcaguucgacucu

SEQ ID NO: 3499361 - RNA, 20 nt, Human
cugcaguucgacucugugcu

SEQ ID NO: 3499362 - RNA, 16 nt, Human
cugcaguuuugcuauc

SEQ ID NO: 3499363 - RNA, 20 nt, Human
cugcauaagugaaaaucuua

SEQ ID NO: 3499364 - RNA, 15 nt, Human
cugcauaauguuucu

SEQ ID NO: 3499365 - RNA, 22 nt, Human
cugcauaauucugaaguuauau

SEQ ID NO: 3499366 - RNA, 15 nt, Human
cugcauaccaaccug

SEQ ID NO: 3499367 - RNA, 16 nt, Human
cugcauaccaaccugg

SEQ ID NO: 3499368 - RNA, 20 nt, Human
cugcauaggaguuuggagga

SEQ ID NO: 3499369 - RNA, 22 nt, Human
cugcauaggaguuuggaggaag

SEQ ID NO: 3499370 - RNA, 23 nt, Human
cugcauaggaguuuggaggaagu

SEQ ID NO: 3499371 - RNA, 20 nt, Human
cugcaucagcugcugaaaca

SEQ ID NO: 3499372 - RNA, 12 nt, Human
cugcaucaucuu

SEQ ID NO: 3499373 - RNA, 22 nt, Human
cugcauccagagauucauuuuc

SEQ ID NO: 3499374 - RNA, 21 nt, Human
cugcauccauucuccugagga

SEQ ID NO: 3499375 - RNA, 15 nt, Human
cugcaucccagcacc

SEQ ID NO: 3499376 - RNA, 20 nt, Human
cugcaucccagcaccugccu

SEQ ID NO: 3499377 - RNA, 21 nt, Human
cugcaucccagcaccugccuc

SEQ ID NO: 3499378 - RNA, 15 nt, Human
cugcauccccuuggc

SEQ ID NO: 3499379 - RNA, 22 nt, Human
cugcauccccuuggcugugagg

SEQ ID NO: 3499380 - RNA, 18 nt, Human
cugcauccucuggagcca

SEQ ID NO: 3499381 - RNA, 16 nt, Human
cugcaucguuucaucu

SEQ ID NO: 3499382 - RNA, 22 nt, Human
cugcaucguuucaucuuccaac

SEQ ID NO: 3499383 - RNA, 20 nt, Human
cugcaucuagaggcuuccuu

SEQ ID NO: 3499384 - RNA, 21 nt, Human
cugcaucuagaggcuuccuuc

SEQ ID NO: 3499385 - RNA, 20 nt, Human
cugcaucugaccagcagcgc

SEQ ID NO: 3499386 - RNA, 21 nt, Human
cugcaucugggauucccacca

SEQ ID NO: 3499387 - RNA, 13 nt, Human
cugcaucuugggg

SEQ ID NO: 3499388 - RNA, 14 nt, Human
cugcaucuugggga

SEQ ID NO: 3499389 - RNA, 16 nt, Human
cugcaugauguuugcc

SEQ ID NO: 3499390 - RNA, 11 nt, Human
cugcaugcaga

SEQ ID NO: 3499391 - RNA, 16 nt, Human
cugcaugcccucucag

SEQ ID NO: 3499392 - RNA, 20 nt, Human
cugcaugcccucucaggccg

SEQ ID NO: 3499393 - RNA, 23 nt, Human
cugcaugcgagugcucauuucag

SEQ ID NO: 3499394 - RNA, 16 nt, Human
cugcaugcggcccagc

SEQ ID NO: 3499395 - RNA, 21 nt, Human
cugcaugcggcccagcccggc

SEQ ID NO: 3499396 - RNA, 18 nt, Human
cugcaugcugcuggacag

SEQ ID NO: 3499397 - RNA, 19 nt, Human
cugcauggaccuaacauuc

SEQ ID NO: 3499398 - RNA, 23 nt, Human
cugcauggcagggggcugcugcu

SEQ ID NO: 3499399 - RNA, 17 nt, Human
cugcauggcauccucca

SEQ ID NO: 3499400 - RNA, 22 nt, Human
cugcauggcauccuccagcccc

SEQ ID NO: 3499401 - RNA, 16 nt, Human
cugcaugggccagccc

SEQ ID NO: 3499402 - RNA, 18 nt, Human
cugcauguauaaaugaag

SEQ ID NO: 3499403 - RNA, 22 nt, Human
cugcauguggcuuuuuuaaaaa

SEQ ID NO: 3499404 - RNA, 14 nt, Human
cugcauuagaaaaa

SEQ ID NO: 3499405 - RNA, 17 nt, Human
cugcauuauucucuuuu

SEQ ID NO: 3499406 - RNA, 24 nt, Human
cugcauuauuugagaagcugcuca

SEQ ID NO: 3499407 - RNA, 20 nt, Human
cugcauucacccagacagcu

SEQ ID NO: 3499408 - RNA, 21 nt, Human
cugcauucacccagacagcuc

SEQ ID NO: 3499409 - RNA, 15 nt, Human
cugcauucauuuuua

SEQ ID NO: 3499410 - RNA, 16 nt, Human
cugcauucauuuuuau

SEQ ID NO: 3499411 - RNA, 22 nt, Human
cugcauucuucugaucacugaa

SEQ ID NO: 3499412 - RNA, 16 nt, Human
cugcauucuuucugua

SEQ ID NO: 3499413 - RNA, 22 nt, Human
cugcauugccugcggucaaggc

SEQ ID NO: 3499414 - RNA, 19 nt, Human
cugaggugcccaggagaag

SEQ ID NO: 3499415 - RNA, 22 nt, Human
cugaggugccugucccaccccc

SEQ ID NO: 3499416 - RNA, 13 nt, Human
cugaggugggagg

SEQ ID NO: 3499417 - RNA, 17 nt, Human
cugaggugggcccagga

SEQ ID NO: 3499418 - RNA, 20 nt, Human
cugaggugggcccaggacca

SEQ ID NO: 3499419 - RNA, 17 nt, Human
cugaggugugggggcug

SEQ ID NO: 3499420 - RNA, 18 nt, Human
cugaggugugggggcugc

SEQ ID NO: 3499421 - RNA, 22 nt, Human
cugaggugugggggcugcagca

SEQ ID NO: 3499422 - RNA, 14 nt, Human
cugagguuccucug

SEQ ID NO: 3499423 - RNA, 15 nt, Human
cugagguuccucugc

SEQ ID NO: 3499424 - RNA, 19 nt, Human
cugagguuccucugccugc

SEQ ID NO: 3499425 - RNA, 20 nt, Human
cugagguuccucugccugcc

SEQ ID NO: 3499426 - RNA, 23 nt, Human
cugagguuccucugccugccccg

SEQ ID NO: 3499427 - RNA, 14 nt, Human
cugagguuucaccc

SEQ ID NO: 3499428 - RNA, 21 nt, Human
cugagguuucacccuuaaccc

SEQ ID NO: 3499429 - RNA, 20 nt, Human
cugaguaagaaaugcugccc

SEQ ID NO: 3499430 - RNA, 17 nt, Human
cugaguacguugugcau

SEQ ID NO: 3499431 - RNA, 18 nt, Human
cugaguacguugugcauu

SEQ ID NO: 3499432 - RNA, 21 nt, Human
cugaguacguugugcauuugg

SEQ ID NO: 3499433 - RNA, 16 nt, Human
cugaguacuccacacu

SEQ ID NO: 3499434 - RNA, 23 nt, Human
cugaguacuccacacugcacaau

SEQ ID NO: 3499435 - RNA, 12 nt, Human
cugaguagaaag

SEQ ID NO: 3499436 - RNA, 18 nt, Human
cugaguagaugcgcagcc

SEQ ID NO: 3499437 - RNA, 17 nt, Human
cugaguagcucugccuu

SEQ ID NO: 3499438 - RNA, 18 nt, Human
cugaguagcucugccuuu

SEQ ID NO: 3499439 - RNA, 16 nt, Human
cugaguagggggagca

SEQ ID NO: 3499440 - RNA, 21 nt, Human
cugaguaucuccucgcaagcu

SEQ ID NO: 3499441 - RNA, 20 nt, Human
cugaguauguuaagcucuuu

SEQ ID NO: 3499442 - RNA, 22 nt, Human
cugaguauuaaaauguaugcau

SEQ ID NO: 3499443 - RNA, 21 nt, Human
cugaguauuaauaucugagga

SEQ ID NO: 3499444 - RNA, 15 nt, Human
cugagucaaguuguu

SEQ ID NO: 3499445 - RNA, 21 nt, Human
cugagucagagccaugucuuc

SEQ ID NO: 3499446 - RNA, 17 nt, Human
cugagucaggacuugaa

SEQ ID NO: 3499447 - RNA, 19 nt, Human
cugagucagggcccagagg

SEQ ID NO: 3499448 - RNA, 22 nt, Human
cugagucagggcccagaggcug

SEQ ID NO: 3499449 - RNA, 21 nt, Human
cugagucaugaucucccugcc

SEQ ID NO: 3499450 - RNA, 17 nt, Human
cugagucccaggagcug

SEQ ID NO: 3499451 - RNA, 20 nt, Human
cugagucccaggcugagccu

SEQ ID NO: 3499452 - RNA, 13 nt, Human
cugaguccgaccu

SEQ ID NO: 3499453 - RNA, 13 nt, Human
cugaguccuggcc

SEQ ID NO: 3499454 - RNA, 22 nt, Human
cugaguccuuaaacagggcauc

SEQ ID NO: 3499455 - RNA, 19 nt, Human
cugagucguacagaaagcu

SEQ ID NO: 3499456 - RNA, 23 nt, Human
cugagucguacagaaagcugccu

SEQ ID NO: 3499457 - RNA, 15 nt, Human
cugagucucccaagg

SEQ ID NO: 3499458 - RNA, 19 nt, Human
cugagucugaaggcugggu

SEQ ID NO: 3499459 - RNA, 22 nt, Human
cugagucugggcagcugucccu

SEQ ID NO: 3499460 - RNA, 20 nt, Human
cugagucuguucugguaauc

SEQ ID NO: 3499461 - RNA, 13 nt, Human
cugagugaaaaau

SEQ ID NO: 3499462 - RNA, 14 nt, Human
cugagugaaaaauc

SEQ ID NO: 3499463 - RNA, 15 nt, Human
cugagugaaccugua

SEQ ID NO: 3499464 - RNA, 18 nt, Human
cugagugaaccuguauaa

SEQ ID NO: 3499465 - RNA, 21 nt, Human
cugagugacucuauauagcug

SEQ ID NO: 3499466 - RNA, 16 nt, Human
cugagugcaggcccac

SEQ ID NO: 3499467 - RNA, 20 nt, Human
cugagugcaggcccacccug

SEQ ID NO: 3499468 - RNA, 16 nt, Human
cugagugccuggccaa

SEQ ID NO: 3499469 - RNA, 19 nt, Human
cugagugccuggccaaagg

SEQ ID NO: 3499470 - RNA, 20 nt, Human
cugagugccuucugugggga

SEQ ID NO: 3499471 - RNA, 23 nt, Human
cugaguggcuucacuccugcugu

SEQ ID NO: 3499472 - RNA, 13 nt, Human
cugagugggaagc

SEQ ID NO: 3499473 - RNA, 21 nt, Human
cugagugggaagcccauccug

SEQ ID NO: 3499474 - RNA, 15 nt, Human
cugaguuaugaugua

SEQ ID NO: 3499475 - RNA, 13 nt, Human
cugaguuccugag

SEQ ID NO: 3499476 - RNA, 14 nt, Human
cugaguugaagagg

SEQ ID NO: 3499477 - RNA, 20 nt, Human
cugaguugacuugacagaac

SEQ ID NO: 3499478 - RNA, 11 nt, Human
cugaguugcca

SEQ ID NO: 3499479 - RNA, 14 nt, Human
cugaguugccaaga

SEQ ID NO: 3499480 - RNA, 16 nt, Human
cugaguugccaagaca

SEQ ID NO: 3499481 - RNA, 21 nt, Human
cugaguugguguugacaugug

SEQ ID NO: 3499482 - RNA, 17 nt, Human
cugaguuuaccauuugu

SEQ ID NO: 3499483 - RNA, 18 nt, Human
cugaguuuaccauuugua

SEQ ID NO: 3499484 - RNA, 21 nt, Human
cugaguuuaccauuuguaaua

SEQ ID NO: 3499485 - RNA, 20 nt, Human
cugaguuucauucuccugcc

SEQ ID NO: 3499486 - RNA, 13 nt, Human
cugaguuugugcu

SEQ ID NO: 3499487 - RNA, 18 nt, Human
cugaguuugugcuggugu

SEQ ID NO: 3499488 - RNA, 11 nt, Human
cugaguuuucc

SEQ ID NO: 3499489 - RNA, 18 nt, Human
cugaguuuuccauggcag

SEQ ID NO: 3499490 - RNA, 20 nt, Human
cugaguuuuccauggcagga

SEQ ID NO: 3499491 - RNA, 17 nt, Human
cugaguuuuguguuugu

SEQ ID NO: 3499492 - RNA, 19 nt, Human
cugauaaaacaacagcucg

SEQ ID NO: 3499493 - RNA, 19 nt, Human
cugauaaaaccauguagaa

SEQ ID NO: 3499494 - RNA, 18 nt, Human
cccuugccaccccacccu

SEQ ID NO: 3499495 - RNA, 17 nt, Human
cccuugccacuuugcac

SEQ ID NO: 3499496 - RNA, 15 nt, Human
cccuugccagacaug

SEQ ID NO: 3499497 - RNA, 13 nt, Human
cccuugccagcug

SEQ ID NO: 3499498 - RNA, 12 nt, Human
cccuugcccagg

SEQ ID NO: 3499499 - RNA, 15 nt, Human
cccuugcccagggcu

SEQ ID NO: 3499500 - RNA, 20 nt, Human
cccuugcccagggcucagcc

SEQ ID NO: 3499501 - RNA, 22 nt, Human
cccuugcccagggcucagccug

SEQ ID NO: 3499502 - RNA, 19 nt, Human
cccuugcccaugcugggcu

SEQ ID NO: 3499503 - RNA, 13 nt, Human
cccuugcccugac

SEQ ID NO: 3499504 - RNA, 16 nt, Human
cccuugcccugaccuc

SEQ ID NO: 3499505 - RNA, 20 nt, Human
cccuugcccugaccucccag

SEQ ID NO: 3499506 - RNA, 17 nt, Human
cccuugccgucuaccug

SEQ ID NO: 3499507 - RNA, 20 nt, Human
cccuugccugugccagguga

SEQ ID NO: 3499508 - RNA, 20 nt, Human
cccuugccuuucgaggccug

SEQ ID NO: 3499509 - RNA, 19 nt, Human
cccuugcucuccccugccc

SEQ ID NO: 3499510 - RNA, 23 nt, Human
cccuugcuggccccagcccugcu

SEQ ID NO: 3499511 - RNA, 21 nt, Human
cccuugcuguaugcugaucau

SEQ ID NO: 3499512 - RNA, 18 nt, Human
cccuugcuugccugcagg

SEQ ID NO: 3499513 - RNA, 19 nt, Human
cccuugcuugccugcaggg

SEQ ID NO: 3499514 - RNA, 23 nt, Human
cccuugcuugccugcagggccau

SEQ ID NO: 3499515 - RNA, 19 nt, Human
cccuuggaaaccugcccug

SEQ ID NO: 3499516 - RNA, 16 nt, Human
cccuuggacuugagga

SEQ ID NO: 3499517 - RNA, 15 nt, Human
cccuuggaggccagc

SEQ ID NO: 3499518 - RNA, 18 nt, Human
cccuuggaggccagccag

SEQ ID NO: 3499519 - RNA, 17 nt, Human
cccuuggauuguccccg

SEQ ID NO: 3499520 - RNA, 12 nt, Human
cccuuggccuca

SEQ ID NO: 3499521 - RNA, 13 nt, Human
cccuuggccucag

SEQ ID NO: 3499522 - RNA, 14 nt, Human
cccuuggccucaga

SEQ ID NO: 3499523 - RNA, 19 nt, Human
cccuuggccugucucaucc

SEQ ID NO: 3499524 - RNA, 19 nt, Human
cccuugggccaccccuccu

SEQ ID NO: 3499525 - RNA, 21 nt, Human
cccuugggccagaaguaccag

SEQ ID NO: 3499526 - RNA, 16 nt, Human
cccuugggcucugaug

SEQ ID NO: 3499527 - RNA, 18 nt, Human
cccuuguagcuccucccc

SEQ ID NO: 3499528 - RNA, 21 nt, Human
cccuugugaaucaagggucag

SEQ ID NO: 3499529 - RNA, 20 nt, Human
cccuuguggucccaccccac

SEQ ID NO: 3499530 - RNA, 22 nt, Human
cccuuguggucccaccccacac

SEQ ID NO: 3499531 - RNA, 12 nt, Human
cccuuguuccag

SEQ ID NO: 3499532 - RNA, 13 nt, Human
cccuuuacccucu

SEQ ID NO: 3499533 - RNA, 20 nt, Human
cccuuucagaugucuucugc

SEQ ID NO: 3499534 - RNA, 20 nt, Human
cccuuucccaccccaaccug

SEQ ID NO: 3499535 - RNA, 22 nt, Human
cccuuuccccagcaucacuccc

SEQ ID NO: 3499536 - RNA, 14 nt, Human
cccuuucccgggcu

SEQ ID NO: 3499537 - RNA, 14 nt, Human
cccuuucccucgcu

SEQ ID NO: 3499538 - RNA, 9 nt, Human
cccuuuccu

SEQ ID NO: 3499539 - RNA, 14 nt, Human
cccuuuccuccuca

SEQ ID NO: 3499540 - RNA, 15 nt, Human
cccuuuccuguccca

SEQ ID NO: 3499541 - RNA, 16 nt, Human
cccuuucuagaccaau

SEQ ID NO: 3499542 - RNA, 22 nt, Human
cccuuucuaucguucucucuuu

SEQ ID NO: 3499543 - RNA, 12 nt, Human
cccuuucugugu

SEQ ID NO: 3499544 - RNA, 12 nt, Human
cccuuucuuccu

SEQ ID NO: 3499545 - RNA, 15 nt, Human
cccuuucuuggccag

SEQ ID NO: 3499546 - RNA, 17 nt, Human
cccuuucuuggccaguu

SEQ ID NO: 3499547 - RNA, 21 nt, Human
cccuuugcaucguccccuccc

SEQ ID NO: 3499548 - RNA, 17 nt, Human
cccuuugcugcauggca

SEQ ID NO: 3499549 - RNA, 13 nt, Human
cccuuugcugucc

SEQ ID NO: 3499550 - RNA, 23 nt, Human
cccuuugcugugaggcuguccug

SEQ ID NO: 3499551 - RNA, 16 nt, Human
cccuuugggaggcuga

SEQ ID NO: 3499552 - RNA, 17 nt, Human
cccuuugggcccaggga

SEQ ID NO: 3499553 - RNA, 16 nt, Human
cccuuugggcccugca

SEQ ID NO: 3499554 - RNA, 19 nt, Human
cccuuugggcccugcaugu

SEQ ID NO: 3499555 - RNA, 22 nt, Human
cccuuugggcccugcauguagu

SEQ ID NO: 3499556 - RNA, 20 nt, Human
cccuuuggggguugaauagg

SEQ ID NO: 3499557 - RNA, 21 nt, Human
cccuuuguccuccugcugcca

SEQ ID NO: 3499558 - RNA, 17 nt, Human
cccuuugucuuucaaac

SEQ ID NO: 3499559 - RNA, 15 nt, Human
cccuuugugcugugg

SEQ ID NO: 3499560 - RNA, 16 nt, Human
cccuuuuaaaguugau

SEQ ID NO: 3499561 - RNA, 15 nt, Human
cccuuuucagcuucu

SEQ ID NO: 3499562 - RNA, 18 nt, Human
cccuuuucagcuucugcu

SEQ ID NO: 3499563 - RNA, 9 nt, Human
cccuuuucc

SEQ ID NO: 3499564 - RNA, 16 nt, Human
cccuuuucuacaguua

SEQ ID NO: 3499565 - RNA, 13 nt, Human
cccuuuucuguuc

SEQ ID NO: 3499566 - RNA, 18 nt, Human
cccuuuucuuuucuaccc

SEQ ID NO: 3499567 - RNA, 22 nt, Human
cccuuuuucaauaacuggaaca

SEQ ID NO: 3499568 - RNA, 14 nt, Human
cccuuuuucaauga

SEQ ID NO: 3499569 - RNA, 19 nt, Human
cugcauugcuagauaaaag

SEQ ID NO: 3499570 - RNA, 22 nt, Human
cugcauuggaacuggaggcagg

SEQ ID NO: 3499571 - RNA, 23 nt, Human
cugcauuggaacuggaggcaggg

SEQ ID NO: 3499572 - RNA, 18 nt, Human
cugcauuuaaaagauaca

SEQ ID NO: 3499573 - RNA, 22 nt, Human
cugcauuuaaaagauacaguua

SEQ ID NO: 3499574 - RNA, 22 nt, Human
cugcauuuagggaguauucuaa

SEQ ID NO: 3499575 - RNA, 23 nt, Human
cugcauuuagggaguauucuaau

SEQ ID NO: 3499576 - RNA, 19 nt, Human
cugcauuuccucgcagccu

SEQ ID NO: 3499577 - RNA, 17 nt, Human
cugcauuucgguggcua

SEQ ID NO: 3499578 - RNA, 18 nt, Human
cugcauuucgguggcuag

SEQ ID NO: 3499579 - RNA, 9 nt, Human
cugcauuuu

SEQ ID NO: 3499580 - RNA, 17 nt, Human
cugcauuuucaccccac

SEQ ID NO: 3499581 - RNA, 20 nt, Human
cugcauuuucugaaacuaau

SEQ ID NO: 3499582 - RNA, 15 nt, Human
cugcauuuucugggu

SEQ ID NO: 3499583 - RNA, 21 nt, Human
cugcauuuugcuauuguaaau

SEQ ID NO: 3499584 - RNA, 15 nt, Human
cugcauuuuucugca

SEQ ID NO: 3499585 - RNA, 16 nt, Human
cugcauuuuucugcag

SEQ ID NO: 3499586 - RNA, 18 nt, Human
cugccaaaggaugugaua

SEQ ID NO: 3499587 - RNA, 19 nt, Human
cugccaaaggaugugauau

SEQ ID NO: 3499588 - RNA, 21 nt, Human
cugccaaagggaaauaucauu

SEQ ID NO: 3499589 - RNA, 23 nt, Human
cugccaaccauaccuuccuuccc

SEQ ID NO: 3499590 - RNA, 22 nt, Human
cugccaaccuaaaacucuuucg

SEQ ID NO: 3499591 - RNA, 14 nt, Human
cugccaaccucgcu

SEQ ID NO: 3499592 - RNA, 12 nt, Human
cugccaagagag

SEQ ID NO: 3499593 - RNA, 12 nt, Human
cugccaagccau

SEQ ID NO: 3499594 - RNA, 18 nt, Human
cugccaaggccagagugg

SEQ ID NO: 3499595 - RNA, 13 nt, Human
cugccaauauccu

SEQ ID NO: 3499596 - RNA, 14 nt, Human
cugccaauauccua

SEQ ID NO: 3499597 - RNA, 16 nt, Human
cugccaauauccuaau

SEQ ID NO: 3499598 - RNA, 19 nt, Human
cugccaaugggagcucaug

SEQ ID NO: 3499599 - RNA, 23 nt, Human
cugccacacaaacguauguaaau

SEQ ID NO: 3499600 - RNA, 15 nt, Human
cugccacaccugagc

SEQ ID NO: 3499601 - RNA, 16 nt, Human
cugccacaccugagcc

SEQ ID NO: 3499602 - RNA, 23 nt, Human
cugccacacgucugacccucucc

SEQ ID NO: 3499603 - RNA, 13 nt, Human
cugccacacucug

SEQ ID NO: 3499604 - RNA, 18 nt, Human
cugccacacucugacgca

SEQ ID NO: 3499605 - RNA, 22 nt, Human
cugccacacuucaggcucuucu

SEQ ID NO: 3499606 - RNA, 21 nt, Human
cugccacagccuccccugcca

SEQ ID NO: 3499607 - RNA, 18 nt, Human
cugccacauuagaacuuc

SEQ ID NO: 3499608 - RNA, 22 nt, Human
cugccaccaaaggccaggguca

SEQ ID NO: 3499609 - RNA, 18 nt, Human
cugccaccaccagaaagc

SEQ ID NO: 3499610 - RNA, 19 nt, Human
cugccaccacgcccggcua

SEQ ID NO: 3499611 - RNA, 22 nt, Human
cugccaccagagaccguccuca

SEQ ID NO: 3499612 - RNA, 14 nt, Human
cugccaccaggcca

SEQ ID NO: 3499613 - RNA, 17 nt, Human
cugccaccauccugcug

SEQ ID NO: 3499614 - RNA, 17 nt, Human
cugccacccaccucccu

SEQ ID NO: 3499615 - RNA, 19 nt, Human
cugccacccaccucccugc

SEQ ID NO: 3499616 - RNA, 23 nt, Human
cugccacccaccucccugccucc

SEQ ID NO: 3499617 - RNA, 20 nt, Human
cugccacccagccccagcca

SEQ ID NO: 3499618 - RNA, 16 nt, Human
cugccacccaggaucc

SEQ ID NO: 3499619 - RNA, 14 nt, Human
cugccacccugggg

SEQ ID NO: 3499620 - RNA, 20 nt, Human
cugccacccuggggagaaag

SEQ ID NO: 3499621 - RNA, 13 nt, Human
cugccaccucccc

SEQ ID NO: 3499622 - RNA, 17 nt, Human
cugccaccuccccccac

SEQ ID NO: 3499623 - RNA, 19 nt, Human
cugccaccuccccuugcca

SEQ ID NO: 3499624 - RNA, 13 nt, Human
cugccaccucccu

SEQ ID NO: 3499625 - RNA, 16 nt, Human
cugccaccucccugac

SEQ ID NO: 3499626 - RNA, 16 nt, Human
cugccaccuggacccc

SEQ ID NO: 3499627 - RNA, 15 nt, Human
cugccaccuggggca

SEQ ID NO: 3499628 - RNA, 16 nt, Human
cugccaccuggggcag

SEQ ID NO: 3499629 - RNA, 18 nt, Human
cugccaccuggggcaguc

SEQ ID NO: 3499630 - RNA, 16 nt, Human
cugccaccugucuguc

SEQ ID NO: 3499631 - RNA, 17 nt, Human
cugccaccugucugucu

SEQ ID NO: 3499632 - RNA, 15 nt, Human
cugccacuaggcugg

SEQ ID NO: 3499633 - RNA, 18 nt, Human
cugccacuaggcugggug

SEQ ID NO: 3499634 - RNA, 18 nt, Human
cugccacucacacagcca

SEQ ID NO: 3499635 - RNA, 20 nt, Human
cugccacucacacagccagg

SEQ ID NO: 3499636 - RNA, 16 nt, Human
cugccacucacuaggc

SEQ ID NO: 3499637 - RNA, 16 nt, Human
cugccacucaggccca

SEQ ID NO: 3499638 - RNA, 12 nt, Human
cugcccucgcac

SEQ ID NO: 3499639 - RNA, 20 nt, Human
cugcccucguggccagcccg

SEQ ID NO: 3499640 - RNA, 21 nt, Human
cugcccucguggccagcccgg

SEQ ID NO: 3499641 - RNA, 14 nt, Human
cugcccucuagagc

SEQ ID NO: 3499642 - RNA, 22 nt, Human
cugcccucucccaaaaaacuac

SEQ ID NO: 3499643 - RNA, 13 nt, Human
cugcccucuccug

SEQ ID NO: 3499644 - RNA, 14 nt, Human
cugcccucuccugg

SEQ ID NO: 3499645 - RNA, 15 nt, Human
cugcccucuccuggg

SEQ ID NO: 3499646 - RNA, 19 nt, Human
cugcccucuccugggcagc

SEQ ID NO: 3499647 - RNA, 20 nt, Human
cugcccucuccugggcagcu

SEQ ID NO: 3499648 - RNA, 17 nt, Human
cugcccucuccuuccuu

SEQ ID NO: 3499649 - RNA, 20 nt, Human
cugcccucugcauccucugg

SEQ ID NO: 3499650 - RNA, 11 nt, Human
cugcccugaga

SEQ ID NO: 3499651 - RNA, 14 nt, Human
cugcccugccaccu

SEQ ID NO: 3499652 - RNA, 21 nt, Human
cugcccugccaccugucuguc

SEQ ID NO: 3499653 - RNA, 13 nt, Human
cugcccugccacu

SEQ ID NO: 3499654 - RNA, 21 nt, Human
cugcccugcccaccuggccuc

SEQ ID NO: 3499655 - RNA, 14 nt, Human
cugcccugcccugc

SEQ ID NO: 3499656 - RNA, 13 nt, Human
cugcccugccuga

SEQ ID NO: 3499657 - RNA, 22 nt, Human
cugcccugcugccgccucccag

SEQ ID NO: 3499658 - RNA, 23 nt, Human
cugcccuggaacauccuuugcag

SEQ ID NO: 3499659 - RNA, 21 nt, Human
cugcccuggcugcugccccca

SEQ ID NO: 3499660 - RNA, 12 nt, Human
cugcccugggag

SEQ ID NO: 3499661 - RNA, 13 nt, Human
cugcccugggagg

SEQ ID NO: 3499662 - RNA, 19 nt, Human
cugcccugggauguccaca

SEQ ID NO: 3499663 - RNA, 21 nt, Human
cugcccugggauguccacaga

SEQ ID NO: 3499664 - RNA, 14 nt, Human
cugcccugguccag

SEQ ID NO: 3499665 - RNA, 21 nt, Human
cugcccugguccagggaagcu

SEQ ID NO: 3499666 - RNA, 12 nt, Human
cugcccuggugc

SEQ ID NO: 3499667 - RNA, 15 nt, Human
cugcccuggugcugc

SEQ ID NO: 3499668 - RNA, 17 nt, Human
cugcccuggugcugcca

SEQ ID NO: 3499669 - RNA, 17 nt, Human
cugcccugucaggaggc

SEQ ID NO: 3499670 - RNA, 13 nt, Human
cugcccugugagu

SEQ ID NO: 3499671 - RNA, 12 nt, Human
cugcccuguggg

SEQ ID NO: 3499672 - RNA, 16 nt, Human
cugcccugugggcccc

SEQ ID NO: 3499673 - RNA, 17 nt, Human
cugcccuuaccugccag

SEQ ID NO: 3499674 - RNA, 19 nt, Human
cugcccuuaccugccagga

SEQ ID NO: 3499675 - RNA, 21 nt, Human
cugcccuucaccccaguggcc

SEQ ID NO: 3499676 - RNA, 18 nt, Human
cugcccuugucccacuca

SEQ ID NO: 3499677 - RNA, 23 nt, Human
cugcccuugucccacucaagcca

SEQ ID NO: 3499678 - RNA, 20 nt, Human
cugcccuuguuuggggcagg

SEQ ID NO: 3499679 - RNA, 22 nt, Human
cugcccuuguuuggggcaggag

SEQ ID NO: 3499680 - RNA, 18 nt, Human
cugcccuuuguccuccug

SEQ ID NO: 3499681 - RNA, 20 nt, Human
cugcccuuuguccuccugcu

SEQ ID NO: 3499682 - RNA, 21 nt, Human
cugcccuuuuuucugccuccu

SEQ ID NO: 3499683 - RNA, 16 nt, Human
cugccgaccagagccc

SEQ ID NO: 3499684 - RNA, 16 nt, Human
cugccgaccgaggcug

SEQ ID NO: 3499685 - RNA, 19 nt, Human
cugccgaccucguccuccc

SEQ ID NO: 3499686 - RNA, 14 nt, Human
cugccgacuccugg

SEQ ID NO: 3499687 - RNA, 23 nt, Human
cugccgagaguccaucagccucc

SEQ ID NO: 3499688 - RNA, 14 nt, Human
cugccgagcaaccg

SEQ ID NO: 3499689 - RNA, 16 nt, Human
cugccgagcaaccgug

SEQ ID NO: 3499690 - RNA, 21 nt, Human
cugccgagcaaccguggcccu

SEQ ID NO: 3499691 - RNA, 14 nt, Human
cugccgcaccccag

SEQ ID NO: 3499692 - RNA, 15 nt, Human
cugccgcagagcugg

SEQ ID NO: 3499693 - RNA, 18 nt, Human
cugccgcagagcuggccg

SEQ ID NO: 3499694 - RNA, 14 nt, Human
cugccgcagcccug

SEQ ID NO: 3499695 - RNA, 17 nt, Human
cugccgcagcccugcag

SEQ ID NO: 3499696 - RNA, 19 nt, Human
cugccgcagcccugcagag

SEQ ID NO: 3499697 - RNA, 23 nt, Human
cugccgcagcccugcagagggca

SEQ ID NO: 3499698 - RNA, 16 nt, Human
cugccgccccacccag

SEQ ID NO: 3499699 - RNA, 20 nt, Human
cugccgccgcuagguagagu

SEQ ID NO: 3499700 - RNA, 16 nt, Human
cugccgccucccagcc

SEQ ID NO: 3499701 - RNA, 17 nt, Human
cugccgcuaccucccuc

SEQ ID NO: 3499702 - RNA, 21 nt, Human
cugccggacccggaggccgag

SEQ ID NO: 3499703 - RNA, 17 nt, Human
cugccggagaggaagag

SEQ ID NO: 3499704 - RNA, 23 nt, Human
cugccggagaggaagagacacuc

SEQ ID NO: 3499705 - RNA, 15 nt, Human
cugccggcccugggg

SEQ ID NO: 3499706 - RNA, 17 nt, Human
cugccggcucuggcucu

SEQ ID NO: 3499707 - RNA, 18 nt, Human
cugccgggcugagggccu

SEQ ID NO: 3499708 - RNA, 20 nt, Human
cugccggggcagcccccuca

SEQ ID NO: 3499709 - RNA, 20 nt, Human
cugccggguucuagucuccu

SEQ ID NO: 3499710 - RNA, 21 nt, Human
cugccggguucuagucuccuu

SEQ ID NO: 3499711 - RNA, 21 nt, Human
cugccgguaaacacgccugca

SEQ ID NO: 3499712 - RNA, 20 nt, Human
cugccgguuugaaaauaugc

SEQ ID NO: 3499713 - RNA, 20 nt, Human
cugccgucagugcugugcug

SEQ ID NO: 3499714 - RNA, 17 nt, Human
cugccgucucuggagcg

SEQ ID NO: 3499715 - RNA, 19 nt, Human
cugccgugccgccugcacu

SEQ ID NO: 3499716 - RNA, 20 nt, Human
cugccguggggccgccgccu

SEQ ID NO: 3499717 - RNA, 21 nt, Human
cugccguggggccgccgccuc

SEQ ID NO: 3499718 - RNA, 14 nt, Human
cugccuaaguggcu

SEQ ID NO: 3499719 - RNA, 16 nt, Human
cugccuaaguggcugc

SEQ ID NO: 3499720 - RNA, 19 nt, Human
cugccuaaguggcugcuga

SEQ ID NO: 3499721 - RNA, 20 nt, Human
cugccuacagaacuucagaa

SEQ ID NO: 3499722 - RNA, 15 nt, Human
cugccuacugcaucg

SEQ ID NO: 3499723 - RNA, 14 nt, Human
cugccuagaaacaa

SEQ ID NO: 3499724 - RNA, 15 nt, Human
cugccuagauucagg

SEQ ID NO: 3499725 - RNA, 19 nt, Human
cugccuagcacucacaugc

SEQ ID NO: 3499726 - RNA, 19 nt, Human
cugccuaggaauucccagc

SEQ ID NO: 3499727 - RNA, 21 nt, Human
cugccuaggauucacacccca

SEQ ID NO: 3499728 - RNA, 23 nt, Human
cugccuaggauucacaccccacc

SEQ ID NO: 3499729 - RNA, 16 nt, Human
cugccuaggcugaccu

SEQ ID NO: 3499730 - RNA, 15 nt, Human
cugccuauugcagcu

SEQ ID NO: 3499731 - RNA, 13 nt, Human
cugccuauuuuaa

SEQ ID NO: 3499732 - RNA, 15 nt, Human
cugccucacagcugg

SEQ ID NO: 3499733 - RNA, 23 nt, Human
cugccucacagcuggccgucacu

SEQ ID NO: 3499734 - RNA, 15 nt, Human
cugccucaccgcuuc

SEQ ID NO: 3499735 - RNA, 18 nt, Human
cugccucaccgcuucccu

SEQ ID NO: 3499736 - RNA, 19 nt, Human
cugccucagccucccaaag

SEQ ID NO: 3499737 - RNA, 18 nt, Human
cugccucagccucccaag

SEQ ID NO: 3499738 - RNA, 17 nt, Human
cugccucagccucccga

SEQ ID NO: 3499739 - RNA, 11 nt, Human
cugccucagga

SEQ ID NO: 3499740 - RNA, 12 nt, Human
cugccucaggac

SEQ ID NO: 3499741 - RNA, 14 nt, Human
cugccucaggacug

SEQ ID NO: 3499742 - RNA, 22 nt, Human
cugccucaggaggcaggaccuu

SEQ ID NO: 3499743 - RNA, 12 nt, Human
cugccucagguu

SEQ ID NO: 3499744 - RNA, 17 nt, Human
cugccucagguuccuau

SEQ ID NO: 3499745 - RNA, 16 nt, Human
cugccuccacccucug

SEQ ID NO: 3499746 - RNA, 13 nt, Human
cugccuccauccu

SEQ ID NO: 3499747 - RNA, 14 nt, Human
cugccuccauccua

SEQ ID NO: 3499748 - RNA, 12 nt, Human
cugccucccauc

SEQ ID NO: 3499749 - RNA, 15 nt, Human
cugccuccccaaccc

SEQ ID NO: 3499750 - RNA, 19 nt, Human
cugccuccccaacccugcc

SEQ ID NO: 3499751 - RNA, 14 nt, Human
cugccuccccuccu

SEQ ID NO: 3499752 - RNA, 17 nt, Human
cugccuccccuccucug

SEQ ID NO: 3499753 - RNA, 21 nt, Human
cugccucccgcccccuuggcu

SEQ ID NO: 3499754 - RNA, 14 nt, Human
cugccucccucacc

SEQ ID NO: 3499755 - RNA, 22 nt, Human
cugccucccucacccugagccc

SEQ ID NO: 3499756 - RNA, 17 nt, Human
cugccucccuguccacc

SEQ ID NO: 3499757 - RNA, 23 nt, Human
cugccucccuucaugcauggaaa

SEQ ID NO: 3499758 - RNA, 14 nt, Human
cugccucccuugac

SEQ ID NO: 3499759 - RNA, 15 nt, Human
cugccuccucguucc

SEQ ID NO: 3499760 - RNA, 17 nt, Human
cugccuccucguuccuu

SEQ ID NO: 3499761 - RNA, 13 nt, Human
cugccuccucuuc

SEQ ID NO: 3499762 - RNA, 14 nt, Human
cugccuccucuuca

SEQ ID NO: 3499763 - RNA, 13 nt, Human
cugccuccugccu

SEQ ID NO: 3499764 - RNA, 17 nt, Human
cugccuccugccugccc

SEQ ID NO: 3499765 - RNA, 15 nt, Human
cugccuccuggguuc

SEQ ID NO: 3499766 - RNA, 17 nt, Human
cugccuccuuugugagg

SEQ ID NO: 3499767 - RNA, 21 nt, Human
cugccuccuuugugaggaagc

SEQ ID NO: 3499768 - RNA, 23 nt, Human
cugccuccuuugugaggaagccg

SEQ ID NO: 3499769 - RNA, 19 nt, Human
cugccucgaaacacagaaa

SEQ ID NO: 3499770 - RNA, 17 nt, Human
cugccucgggaaccuca

SEQ ID NO: 3499771 - RNA, 19 nt, Human
cugccucuacugggaaggc

SEQ ID NO: 3499772 - RNA, 21 nt, Human
cugccucucacacacauagau

SEQ ID NO: 3499773 - RNA, 22 nt, Human
cugccucucaucaacugaauga

SEQ ID NO: 3499774 - RNA, 15 nt, Human
cugccucuccaggca

SEQ ID NO: 3499775 - RNA, 17 nt, Human
cugccucucccaggcag

SEQ ID NO: 3499776 - RNA, 20 nt, Human
cugccucucccaggcagggg

SEQ ID NO: 3499777 - RNA, 21 nt, Human
cugccucucccaggcaggggc

SEQ ID NO: 3499778 - RNA, 13 nt, Human
cugccucucccuc

SEQ ID NO: 3499779 - RNA, 15 nt, Human
cugccucucccucug

SEQ ID NO: 3499780 - RNA, 17 nt, Human
cugccucucccuggccc

SEQ ID NO: 3499781 - RNA, 21 nt, Human
cugccucucgcuccucaaccc

SEQ ID NO: 3499782 - RNA, 19 nt, Human
cugccucucugcagguccc

SEQ ID NO: 3499783 - RNA, 21 nt, Human
cugccacaccagucacaugac

SEQ ID NO: 3499784 - RNA, 22 nt, Human
cugccacacgucugacccucuc

SEQ ID NO: 3499785 - RNA, 21 nt, Human
cugccacacucuccaucaccc

SEQ ID NO: 3499786 - RNA, 16 nt, Human
cugccacauuagaacu

SEQ ID NO: 3499787 - RNA, 16 nt, Human
cugccaccacgcccgg

SEQ ID NO: 3499788 - RNA, 17 nt, Human
cugccaccaggccaccu

SEQ ID NO: 3499789 - RNA, 23 nt, Human
cugccaccaggccaccuccccag

SEQ ID NO: 3499790 - RNA, 14 nt, Human
cugccaccagucac

SEQ ID NO: 3499791 - RNA, 14 nt, Human
cugccaccauccug

SEQ ID NO: 3499792 - RNA, 19 nt, Human
cugccaccauccugcugcu

SEQ ID NO: 3499793 - RNA, 23 nt, Human
cugccacccagccccagccaggg

SEQ ID NO: 3499794 - RNA, 12 nt, Human
cugccacccagg

SEQ ID NO: 3499795 - RNA, 15 nt, Human
cugccacccuaccug

SEQ ID NO: 3499796 - RNA, 17 nt, Human
cugccacccugggccug

SEQ ID NO: 3499797 - RNA, 10 nt, Human
cugccaccuc

SEQ ID NO: 3499798 - RNA, 14 nt, Human
cugccaccuccccu

SEQ ID NO: 3499799 - RNA, 16 nt, Human
cugccaccuccugccu

SEQ ID NO: 3499800 - RNA, 16 nt, Human
cugccaccucuccauc

SEQ ID NO: 3499801 - RNA, 15 nt, Human
cugccaccugcugcu

SEQ ID NO: 3499802 - RNA, 13 nt, Human
cugccaccuggac

SEQ ID NO: 3499803 - RNA, 15 nt, Human
cugccaccuggaccc

SEQ ID NO: 3499804 - RNA, 22 nt, Human
cugccaccuggaccccugcauu

SEQ ID NO: 3499805 - RNA, 12 nt, Human
cugccaccuguc

SEQ ID NO: 3499806 - RNA, 13 nt, Human
cugccaccugucu

SEQ ID NO: 3499807 - RNA, 19 nt, Human
cugccacuaggcugggugc

SEQ ID NO: 3499808 - RNA, 23 nt, Human
cugccacucaggcccaaagccuc

SEQ ID NO: 3499809 - RNA, 18 nt, Human
cugccacugaggggggau

SEQ ID NO: 3499810 - RNA, 23 nt, Human
cugccacugaggggggauccagu

SEQ ID NO: 3499811 - RNA, 12 nt, Human
cugccacuuugc

SEQ ID NO: 3499812 - RNA, 22 nt, Human
cugccacuuugcacauuuugau

SEQ ID NO: 3499813 - RNA, 23 nt, Human
cugccacuuugguacauggccag

SEQ ID NO: 3499814 - RNA, 21 nt, Human
cugccagaagauccccucagg

SEQ ID NO: 3499815 - RNA, 23 nt, Human
cugccagaagauccccucaggac

SEQ ID NO: 3499816 - RNA, 13 nt, Human
cugccagagaagc

SEQ ID NO: 3499817 - RNA, 13 nt, Human
cugccagaugcug

SEQ ID NO: 3499818 - RNA, 16 nt, Human
cugccagaugcugaug

SEQ ID NO: 3499819 - RNA, 21 nt, Human
cugccagaugcugauguucag

SEQ ID NO: 3499820 - RNA, 15 nt, Human
cugccagcaacgcag

SEQ ID NO: 3499821 - RNA, 15 nt, Human
cugccagcagcagca

SEQ ID NO: 3499822 - RNA, 21 nt, Human
cugccagcagcagcaggugau

SEQ ID NO: 3499823 - RNA, 15 nt, Human
cugccagccagcagc

SEQ ID NO: 3499824 - RNA, 15 nt, Human
cugccagccccacac

SEQ ID NO: 3499825 - RNA, 19 nt, Human
cugccagccccacacagcu

SEQ ID NO: 3499826 - RNA, 12 nt, Human
cugccagccccu

SEQ ID NO: 3499827 - RNA, 17 nt, Human
cugccagccuugagccc

SEQ ID NO: 3499828 - RNA, 20 nt, Human
cugccagccuugagcccugg

SEQ ID NO: 3499829 - RNA, 22 nt, Human
cugccagccuugagcccuggcu

SEQ ID NO: 3499830 - RNA, 12 nt, Human
cugccagcucuu

SEQ ID NO: 3499831 - RNA, 16 nt, Human
cugccagcugcacuga

SEQ ID NO: 3499832 - RNA, 16 nt, Human
cugccaggaagccagc

SEQ ID NO: 3499833 - RNA, 18 nt, Human
cugccaggaggacccagg

SEQ ID NO: 3499834 - RNA, 13 nt, Human
cugccaggaggga

SEQ ID NO: 3499835 - RNA, 20 nt, Human
cugccaggagggacaaagga

SEQ ID NO: 3499836 - RNA, 21 nt, Human
cugccaggagggacaaaggag

SEQ ID NO: 3499837 - RNA, 18 nt, Human
cugccaggcacaggcagg

SEQ ID NO: 3499838 - RNA, 19 nt, Human
cugccaggcacaggcaggg

SEQ ID NO: 3499839 - RNA, 12 nt, Human
cugccaggcagg

SEQ ID NO: 3499840 - RNA, 13 nt, Human
cugccaggcaggg

SEQ ID NO: 3499841 - RNA, 11 nt, Human
cugccaggcau

SEQ ID NO: 3499842 - RNA, 15 nt, Human
cugccaggccagccu

SEQ ID NO: 3499843 - RNA, 17 nt, Human
cugccaggccagccucc

SEQ ID NO: 3499844 - RNA, 22 nt, Human
cugccaggccagccuccgagag

SEQ ID NO: 3499845 - RNA, 13 nt, Human
cugccaggccccc

SEQ ID NO: 3499846 - RNA, 14 nt, Human
cugccaggccccca

SEQ ID NO: 3499847 - RNA, 15 nt, Human
cugccaggcccccac

SEQ ID NO: 3499848 - RNA, 12 nt, Human
cugccagggaca

SEQ ID NO: 3499849 - RNA, 22 nt, Human
cugccagggacagagggggugg

SEQ ID NO: 3499850 - RNA, 23 nt, Human
cugccagggagacagagcucaca

SEQ ID NO: 3499851 - RNA, 13 nt, Human
cugccagggcagu

SEQ ID NO: 3499852 - RNA, 17 nt, Human
cugccagggcagugcua

SEQ ID NO: 3499853 - RNA, 16 nt, Human
cugccaguccuagcug

SEQ ID NO: 3499854 - RNA, 21 nt, Human
cugccaguccuagcugcacag

SEQ ID NO: 3499855 - RNA, 18 nt, Human
cugccagucucacugugg

SEQ ID NO: 3499856 - RNA, 13 nt, Human
cugccagugccug

SEQ ID NO: 3499857 - RNA, 17 nt, Human
cugccagugccuuaccu

SEQ ID NO: 3499858 - RNA, 18 nt, Human
cugccagugccuuaccuc

SEQ ID NO: 3499859 - RNA, 22 nt, Human
cugccagugccuuaccuccugc

SEQ ID NO: 3499860 - RNA, 23 nt, Human
cugccaguguccugagccccagg

SEQ ID NO: 3499861 - RNA, 15 nt, Human
cugccaguguggagu

SEQ ID NO: 3499862 - RNA, 22 nt, Human
cugccauaaaacauuaagaaaa

SEQ ID NO: 3499863 - RNA, 17 nt, Human
cugccauauauaacaga

SEQ ID NO: 3499864 - RNA, 14 nt, Human
cugccauauuaaau

SEQ ID NO: 3499865 - RNA, 20 nt, Human
cugccauauucuguuggcca

SEQ ID NO: 3499866 - RNA, 21 nt, Human
cugccauauucuguuggccag

SEQ ID NO: 3499867 - RNA, 17 nt, Human
cugccauccagggaugc

SEQ ID NO: 3499868 - RNA, 16 nt, Human
cugccauccagguuca

SEQ ID NO: 3499869 - RNA, 18 nt, Human
cugccauccagguucagc

SEQ ID NO: 3499870 - RNA, 21 nt, Human
cugccauccagguucagcuug

SEQ ID NO: 3499871 - RNA, 15 nt, Human
cugccauccucccaa

SEQ ID NO: 3499872 - RNA, 21 nt, Human
cugccauccuggcccagggca

SEQ ID NO: 3499873 - RNA, 22 nt, Human
cugccauccuggcccagggcau

SEQ ID NO: 3499874 - RNA, 19 nt, Human
cugccaucuuaguuuggau

SEQ ID NO: 3499875 - RNA, 16 nt, Human
cugccaucuucccagc

SEQ ID NO: 3499876 - RNA, 15 nt, Human
cugccaugaacugga

SEQ ID NO: 3499877 - RNA, 15 nt, Human
cugccaugcagggcc

SEQ ID NO: 3499878 - RNA, 16 nt, Human
cugccaugcagggccu

SEQ ID NO: 3499879 - RNA, 14 nt, Human
cugccaugccagga

SEQ ID NO: 3499880 - RNA, 17 nt, Human
cugccaugccaggaacc

SEQ ID NO: 3499881 - RNA, 18 nt, Human
cugccaugccaggaaccu

SEQ ID NO: 3499882 - RNA, 21 nt, Human
cugccaugccaggaaccuguc

SEQ ID NO: 3499883 - RNA, 17 nt, Human
cugccauggaacuguuu

SEQ ID NO: 3499884 - RNA, 20 nt, Human
cugccauggaacuguuuccu

SEQ ID NO: 3499885 - RNA, 22 nt, Human
cugccauggaacuguuuccuuc

SEQ ID NO: 3499886 - RNA, 17 nt, Human
cugccauggaggcacac

SEQ ID NO: 3499887 - RNA, 23 nt, Human
cugccauggcuagguagaaguga

SEQ ID NO: 3499888 - RNA, 18 nt, Human
cugccauguaccuccccu

SEQ ID NO: 3499889 - RNA, 20 nt, Human
cugccauguaccuccccugc

SEQ ID NO: 3499890 - RNA, 21 nt, Human
cugccauguaccuccccugcc

SEQ ID NO: 3499891 - RNA, 22 nt, Human
cugccauguaccuccccugccu

SEQ ID NO: 3499892 - RNA, 19 nt, Human
cugccauuauuuucuguca

SEQ ID NO: 3499893 - RNA, 20 nt, Human
cugccauuauuuucugucag

SEQ ID NO: 3499894 - RNA, 22 nt, Human
cugccauuauuuucugucagau

SEQ ID NO: 3499895 - RNA, 13 nt, Human
cugccauuucaug

SEQ ID NO: 3499896 - RNA, 15 nt, Human
cugccauuucugaga

SEQ ID NO: 3499897 - RNA, 21 nt, Human
cugccauuugauuuuucuaac

SEQ ID NO: 3499898 - RNA, 21 nt, Human
cugccauuugcacccuccgcc

SEQ ID NO: 3499899 - RNA, 13 nt, Human
cugcccaaagcag

SEQ ID NO: 3499900 - RNA, 23 nt, Human
cugcccaaagcagcacuuauaaa

SEQ ID NO: 3499901 - RNA, 14 nt, Human
cugcccaagcccag

SEQ ID NO: 3499902 - RNA, 16 nt, Human
cugcccaagcccaggc

SEQ ID NO: 3499903 - RNA, 20 nt, Human
cugcccacaccuccuggggc

SEQ ID NO: 3499904 - RNA, 15 nt, Human
cugcccacagcaggc

SEQ ID NO: 3499905 - RNA, 16 nt, Human
cugcccacccccucaa

SEQ ID NO: 3499906 - RNA, 21 nt, Human
cugcccaccucagccucccaa

SEQ ID NO: 3499907 - RNA, 15 nt, Human
cugcccaccugccgg

SEQ ID NO: 3499908 - RNA, 14 nt, Human
cugcccaccugccu

SEQ ID NO: 3499909 - RNA, 16 nt, Human
cugcccaccugccugg

SEQ ID NO: 3499910 - RNA, 17 nt, Human
cugcccaccugccuggc

SEQ ID NO: 3499911 - RNA, 20 nt, Human
cugcccaccugccuggccgg

SEQ ID NO: 3499912 - RNA, 13 nt, Human
cugcccaccuggc

SEQ ID NO: 3499913 - RNA, 15 nt, Human
cugcccaccuggccu

SEQ ID NO: 3499914 - RNA, 18 nt, Human
cugcccaccuggccucug

SEQ ID NO: 3499915 - RNA, 18 nt, Human
cugcccacucccugcaac

SEQ ID NO: 3499916 - RNA, 16 nt, Human
cugcccacuggccggc

SEQ ID NO: 3499917 - RNA, 18 nt, Human
cugcccagaccccucugg

SEQ ID NO: 3499918 - RNA, 18 nt, Human
cugcccagaguugcuggg

SEQ ID NO: 3499919 - RNA, 16 nt, Human
ccguccugccuguggc

SEQ ID NO: 3499920 - RNA, 15 nt, Human
ccgucuacagcuccc

SEQ ID NO: 3499921 - RNA, 14 nt, Human
ccgucuacauuuca

SEQ ID NO: 3499922 - RNA, 11 nt, Human
ccgucucaggu

SEQ ID NO: 3499923 - RNA, 13 nt, Human
ccgucuccugcgg

SEQ ID NO: 3499924 - RNA, 17 nt, Human
ccgucugggguucagcc

SEQ ID NO: 3499925 - RNA, 19 nt, Human
ccgucugggguucagcccc

SEQ ID NO: 3499926 - RNA, 21 nt, Human
ccgucugggguucagccccuc

SEQ ID NO: 3499927 - RNA, 23 nt, Human
ccgucugggguucagccccuccu

SEQ ID NO: 3499928 - RNA, 15 nt, Human
cugcgugccugugga

SEQ ID NO: 3499929 - RNA, 16 nt, Human
cugcguggcugacccc

SEQ ID NO: 3499930 - RNA, 17 nt, Human
cugcguggcugaccccc

SEQ ID NO: 3499931 - RNA, 15 nt, Human
cugcguggggacagg

SEQ ID NO: 3499932 - RNA, 19 nt, Human
cugcgugucaccugugcuu

SEQ ID NO: 3499933 - RNA, 19 nt, Human
cugcgugugggacccgccg

SEQ ID NO: 3499934 - RNA, 13 nt, Human
cugcguucugcaa

SEQ ID NO: 3499935 - RNA, 15 nt, Human
cugcuaaauaaaauu

SEQ ID NO: 3499936 - RNA, 18 nt, Human
cugcuaaaucuccuauuu

SEQ ID NO: 3499937 - RNA, 17 nt, Human
cugcuaaauugauguug

SEQ ID NO: 3499938 - RNA, 18 nt, Human
cugcuaaauugauguuga

SEQ ID NO: 3499939 - RNA, 22 nt, Human
cugcuaaauugauguugaugca

SEQ ID NO: 3499940 - RNA, 20 nt, Human
cugcuaacuuggagccccag

SEQ ID NO: 3499941 - RNA, 23 nt, Human
cugcuaacuuggagccccagugc

SEQ ID NO: 3499942 - RNA, 22 nt, Human
cugcuaaggauuagucccuggc

SEQ ID NO: 3499943 - RNA, 21 nt, Human
cugcuaaguauuucccagcac

SEQ ID NO: 3499944 - RNA, 15 nt, Human
cugcuaauauuuucc

SEQ ID NO: 3499945 - RNA, 18 nt, Human
cugcuaaucuucagggca

SEQ ID NO: 3499946 - RNA, 15 nt, Human
cugcuaauucuuugc

SEQ ID NO: 3499947 - RNA, 22 nt, Human
cugcuaauucuuugcaaaaauc

SEQ ID NO: 3499948 - RNA, 15 nt, Human
cugcuacaaagaaga

SEQ ID NO: 3499949 - RNA, 20 nt, Human
cugcuacaaagaagacaugu

SEQ ID NO: 3499950 - RNA, 16 nt, Human
cugcuacacauacagg

SEQ ID NO: 3499951 - RNA, 15 nt, Human
cugcuacagagcaga

SEQ ID NO: 3499952 - RNA, 20 nt, Human
cugcuacagcaauuucuaau

SEQ ID NO: 3499953 - RNA, 17 nt, Human
cugcuacccagaaauca

SEQ ID NO: 3499954 - RNA, 21 nt, Human
cugcuaccguugacuuccagg

SEQ ID NO: 3499955 - RNA, 14 nt, Human
cugcuaccucacug

SEQ ID NO: 3499956 - RNA, 18 nt, Human
cugcuaccucacuggggu

SEQ ID NO: 3499957 - RNA, 23 nt, Human
cugcuacucaaguagcauuuacu

SEQ ID NO: 3499958 - RNA, 21 nt, Human
cugcuacuuauauaauugcca

SEQ ID NO: 3499959 - RNA, 13 nt, Human
cugcuagaaaugg

SEQ ID NO: 3499960 - RNA, 12 nt, Human
cugcuagaacuu

SEQ ID NO: 3499961 - RNA, 14 nt, Human
cugcuagaacuuuu

SEQ ID NO: 3499962 - RNA, 21 nt, Human
cugcuagaacuuuuuuaaaua

SEQ ID NO: 3499963 - RNA, 22 nt, Human
cugcuagaacuuuuuuaaauaa

SEQ ID NO: 3499964 - RNA, 21 nt, Human
cugcuagcuagcucaacuagu

SEQ ID NO: 3499965 - RNA, 19 nt, Human
cugcuaggcgagugccagg

SEQ ID NO: 3499966 - RNA, 23 nt, Human
cugcuaggcgagugccaggacuc

SEQ ID NO: 3499967 - RNA, 15 nt, Human
cugcuaggugggcca

SEQ ID NO: 3499968 - RNA, 16 nt, Human
cugcuaggugggccag

SEQ ID NO: 3499969 - RNA, 20 nt, Human
cugcuaggugggccagcccc

SEQ ID NO: 3499970 - RNA, 16 nt, Human
cugcuaguguucuguc

SEQ ID NO: 3499971 - RNA, 22 nt, Human
cugcuaguguucuuucucuuuc

SEQ ID NO: 3499972 - RNA, 14 nt, Human
cugcuauagccugg

SEQ ID NO: 3499973 - RNA, 21 nt, Human
cugcuauccccaucucccugc

SEQ ID NO: 3499974 - RNA, 18 nt, Human
cugcuauuaggccagcaa

SEQ ID NO: 3499975 - RNA, 13 nt, Human
cugcuauuuccca

SEQ ID NO: 3499976 - RNA, 17 nt, Human
cugcuauuucccaagcu

SEQ ID NO: 3499977 - RNA, 15 nt, Human
cugcuauuuuacugu

SEQ ID NO: 3499978 - RNA, 14 nt, Human
cugcucacauaucu

SEQ ID NO: 3499979 - RNA, 19 nt, Human
cugcucacauaucugucau

SEQ ID NO: 3499980 - RNA, 15 nt, Human
cugcucaccgcccau

SEQ ID NO: 3499981 - RNA, 19 nt, Human
cugcucaccgcccaucagg

SEQ ID NO: 3499982 - RNA, 12 nt, Human
cugcucacuuua

SEQ ID NO: 3499983 - RNA, 18 nt, Human
cugcucagaacuugcugc

SEQ ID NO: 3499984 - RNA, 19 nt, Human
cugcucagaacuugcugcu

SEQ ID NO: 3499985 - RNA, 21 nt, Human
cugcucagcagugagagcaga

SEQ ID NO: 3499986 - RNA, 23 nt, Human
cugcucagcagugagagcagaug

SEQ ID NO: 3499987 - RNA, 11 nt, Human
cugcucagcca

SEQ ID NO: 3499988 - RNA, 15 nt, Human
cugcucagcccugga

SEQ ID NO: 3499989 - RNA, 17 nt, Human
cugcucagcccuggagg

SEQ ID NO: 3499990 - RNA, 16 nt, Human
cugcucaggcugcagc

SEQ ID NO: 3499991 - RNA, 20 nt, Human
cugcucaggcugcagcugga

SEQ ID NO: 3499992 - RNA, 18 nt, Human
cugcucaguaaagcacuu

SEQ ID NO: 3499993 - RNA, 15 nt, Human
cugcucauauuguga

SEQ ID NO: 3499994 - RNA, 19 nt, Human
cugcucauauugugauucu

SEQ ID NO: 3499995 - RNA, 12 nt, Human
cugcuccacagu

SEQ ID NO: 3499996 - RNA, 13 nt, Human
cugcuccacagug

SEQ ID NO: 3499997 - RNA, 16 nt, Human
cugcuccacaguguug

SEQ ID NO: 3499998 - RNA, 16 nt, Human
cugcuccaccacaucc

SEQ ID NO: 3499999 - RNA, 14 nt, Human
cugcuccacccuug

SEQ ID NO: 3500000 - RNA, 18 nt, Human
cugcuccacccuuggccu

SEQ ID NO: 3500001 - RNA, 18 nt, Human
cugcuccaccuuucagcc

SEQ ID NO: 3500002 - RNA, 13 nt, Human
cugcuccacgcgc

SEQ ID NO: 3500003 - RNA, 20 nt, Human
cugcuccacgcgcuucgacu

SEQ ID NO: 3500004 - RNA, 15 nt, Human
cugcuccagaccuga

SEQ ID NO: 3500005 - RNA, 14 nt, Human
cugcuccagcucug

SEQ ID NO: 3500006 - RNA, 14 nt, Human
cugcuccaggccug

SEQ ID NO: 3500007 - RNA, 21 nt, Human
cugcucccaaggggccugagc

SEQ ID NO: 3500008 - RNA, 16 nt, Human
cugcucccaccuccug

SEQ ID NO: 3500009 - RNA, 16 nt, Human
cugcucccaccuggcu

SEQ ID NO: 3500010 - RNA, 20 nt, Human
cugcucccaccuggcucugu

SEQ ID NO: 3500011 - RNA, 16 nt, Human
cugcucccagcagccc

SEQ ID NO: 3500012 - RNA, 17 nt, Human
cugcucccagcagcccu

SEQ ID NO: 3500013 - RNA, 18 nt, Human
cugcucccauccugugug

SEQ ID NO: 3500014 - RNA, 19 nt, Human
cugcucccauccugugugu

SEQ ID NO: 3500015 - RNA, 16 nt, Human
cugcuccccaggggag

SEQ ID NO: 3500016 - RNA, 13 nt, Human
cugcucccccacc

SEQ ID NO: 3500017 - RNA, 17 nt, Human
cugcucccccacccccu

SEQ ID NO: 3500018 - RNA, 23 nt, Human
cugcucccccacccccuccccag

SEQ ID NO: 3500019 - RNA, 19 nt, Human
cugcucccccuuuucccuc

SEQ ID NO: 3500020 - RNA, 21 nt, Human
cugcuccccucugcacggacc

SEQ ID NO: 3500021 - RNA, 17 nt, Human
cugcucccuaagccagc

SEQ ID NO: 3500022 - RNA, 19 nt, Human
cugcucccuaagccagccu

SEQ ID NO: 3500023 - RNA, 12 nt, Human
cugcucccucuc

SEQ ID NO: 3500024 - RNA, 17 nt, Human
cugcucccugaagccag

SEQ ID NO: 3500025 - RNA, 18 nt, Human
cugcucccugaagccagc

SEQ ID NO: 3500026 - RNA, 21 nt, Human
cugcucccugaagccagccuu

SEQ ID NO: 3500027 - RNA, 19 nt, Human
cugcucccuguagggucca

SEQ ID NO: 3500028 - RNA, 16 nt, Human
cugcuccgcugcuccu

SEQ ID NO: 3500029 - RNA, 21 nt, Human
cugcuccuagagggaggggcc

SEQ ID NO: 3500030 - RNA, 22 nt, Human
cugcuccuagagggaggggccu

SEQ ID NO: 3500031 - RNA, 14 nt, Human
cugcuccuccaggg

SEQ ID NO: 3500032 - RNA, 16 nt, Human
cugcuccuccagggcc

SEQ ID NO: 3500033 - RNA, 14 nt, Human
cugcuccucccugg

SEQ ID NO: 3500034 - RNA, 17 nt, Human
cugcuccucccuggcug

SEQ ID NO: 3500035 - RNA, 15 nt, Human
cugcuccucuccagg

SEQ ID NO: 3500036 - RNA, 17 nt, Human
cugcuccucuccaggca

SEQ ID NO: 3500037 - RNA, 19 nt, Human
cugcuccucuccccagcaa

SEQ ID NO: 3500038 - RNA, 20 nt, Human
cugcuccugagcccccagcu

SEQ ID NO: 3500039 - RNA, 16 nt, Human
cugcuccugcagcaug

SEQ ID NO: 3500040 - RNA, 13 nt, Human
cugcuccuggagc

SEQ ID NO: 3500041 - RNA, 17 nt, Human
cugcuccuuagcugcca

SEQ ID NO: 3500042 - RNA, 15 nt, Human
cugcuccuuccccau

SEQ ID NO: 3500043 - RNA, 23 nt, Human
cugcuccuuccccaucguugccc

SEQ ID NO: 3500044 - RNA, 14 nt, Human
cugcuccuucccuu

SEQ ID NO: 3500045 - RNA, 13 nt, Human
cugcuccuuggcu

SEQ ID NO: 3500046 - RNA, 20 nt, Human
cugcuccuuggcuuaccuga

SEQ ID NO: 3500047 - RNA, 14 nt, Human
cugcucgcccuccu

SEQ ID NO: 3500048 - RNA, 17 nt, Human
cugcucgcccuccuuuc

SEQ ID NO: 3500049 - RNA, 23 nt, Human
cugcucgcccuccuuucugugcc

SEQ ID NO: 3500050 - RNA, 13 nt, Human
cugcucgggccca

SEQ ID NO: 3500051 - RNA, 14 nt, Human
cugcucgggcccag

SEQ ID NO: 3500052 - RNA, 18 nt, Human
cugcucggggugcacagg

SEQ ID NO: 3500053 - RNA, 20 nt, Human
cugcucggggugcacaggag

SEQ ID NO: 3500054 - RNA, 21 nt, Human
cugcucggggugcacaggagg

SEQ ID NO: 3500055 - RNA, 22 nt, Human
cugcucguccccaagugaccua

SEQ ID NO: 3500056 - RNA, 12 nt, Human
cugcucuaacag

SEQ ID NO: 3500057 - RNA, 21 nt, Human
cugcucuagugggacagccca

SEQ ID NO: 3500058 - RNA, 20 nt, Human
cugcucucaaaccccugacc

SEQ ID NO: 3500059 - RNA, 23 nt, Human
cugcucucaaaccccugaccuca

SEQ ID NO: 3500060 - RNA, 22 nt, Human
cugcucucaccuugguuccugg

SEQ ID NO: 3500061 - RNA, 20 nt, Human
cugcucuccaagucucagug

SEQ ID NO: 3500062 - RNA, 18 nt, Human
cugcucuccucuucuacu

SEQ ID NO: 3500063 - RNA, 14 nt, Human
cugcucuccucuug

SEQ ID NO: 3500064 - RNA, 13 nt, Human
cugcucuccuucc

SEQ ID NO: 3500065 - RNA, 16 nt, Human
cugcucucuacccagc

SEQ ID NO: 3500066 - RNA, 20 nt, Human
cugcucucuacccagcccau

SEQ ID NO: 3500067 - RNA, 16 nt, Human
cugcucugaacacgaa

SEQ ID NO: 3500068 - RNA, 11 nt, Human
cugcucugacg

SEQ ID NO: 3500069 - RNA, 22 nt, Human
cugcucugagaauuguugagau

SEQ ID NO: 3500070 - RNA, 16 nt, Human
cugcucugagccacag

SEQ ID NO: 3500071 - RNA, 20 nt, Human
cugcucugaggcuuccagag

SEQ ID NO: 3500072 - RNA, 14 nt, Human
cugcccugcuguuu

SEQ ID NO: 3500073 - RNA, 17 nt, Human
cugcccuggaacauccu

SEQ ID NO: 3500074 - RNA, 14 nt, Human
cugcccuggcccug

SEQ ID NO: 3500075 - RNA, 18 nt, Human
cugcccuggcccugaggu

SEQ ID NO: 3500076 - RNA, 15 nt, Human
cugcccuggcuccag

SEQ ID NO: 3500077 - RNA, 16 nt, Human
cugcccuggcugcugc

SEQ ID NO: 3500078 - RNA, 15 nt, Human
ccuaaguucuuagau

SEQ ID NO: 3500079 - RNA, 20 nt, Human
ccuaauaaaaaggugaccau

SEQ ID NO: 3500080 - RNA, 22 nt, Human
ccuaauaaacauccuucaagaa

SEQ ID NO: 3500081 - RNA, 13 nt, Human
ccuaauaaagcug

SEQ ID NO: 3500082 - RNA, 20 nt, Human
ccuaauaauaucccacuggg

SEQ ID NO: 3500083 - RNA, 18 nt, Human
ccuaauacauuaaagcag

SEQ ID NO: 3500084 - RNA, 20 nt, Human
ccuaauacauuaaagcaguc

SEQ ID NO: 3500085 - RNA, 22 nt, Human
ccuaaucagaaauuuuuaucag

SEQ ID NO: 3500086 - RNA, 14 nt, Human
ccuaauccaggcag

SEQ ID NO: 3500087 - RNA, 18 nt, Human
ccuaauccaggcagaucc

SEQ ID NO: 3500088 - RNA, 21 nt, Human
ccuaaucccugggcauugcuu

SEQ ID NO: 3500089 - RNA, 20 nt, Human
ccuaaucuauggucgggaga

SEQ ID NO: 3500090 - RNA, 18 nt, Human
ccuaaucucauaccucug

SEQ ID NO: 3500091 - RNA, 19 nt, Human
ccuaaucucauaccucuga

SEQ ID NO: 3500092 - RNA, 21 nt, Human
ccuaaucucauaccucugacc

SEQ ID NO: 3500093 - RNA, 22 nt, Human
ccuaaugacaucaccacaguuu

SEQ ID NO: 3500094 - RNA, 15 nt, Human
ccuaauggugaugca

SEQ ID NO: 3500095 - RNA, 17 nt, Human
ccuaauguggcagcugu

SEQ ID NO: 3500096 - RNA, 16 nt, Human
ccuaauuaccagucuu

SEQ ID NO: 3500097 - RNA, 16 nt, Human
ccuaauuccacagcug

SEQ ID NO: 3500098 - RNA, 17 nt, Human
ccuaauuccacagcugc

SEQ ID NO: 3500099 - RNA, 15 nt, Human
ccuaauuucuccucc

SEQ ID NO: 3500100 - RNA, 18 nt, Human
ccuaauuucuccucccuu

SEQ ID NO: 3500101 - RNA, 20 nt, Human
ccuaauuucuccucccuucc

SEQ ID NO: 3500102 - RNA, 15 nt, Human
ccuacaagacacagu

SEQ ID NO: 3500103 - RNA, 17 nt, Human
ccuacaagagcagccug

SEQ ID NO: 3500104 - RNA, 19 nt, Human
ccuacaagagcagccugug

SEQ ID NO: 3500105 - RNA, 20 nt, Human
ccuacaagauuuagaaaaaa

SEQ ID NO: 3500106 - RNA, 16 nt, Human
ccuacaaguuuaagua

SEQ ID NO: 3500107 - RNA, 14 nt, Human
ccuacacacuguca

SEQ ID NO: 3500108 - RNA, 13 nt, Human
ccuacaccauucc

SEQ ID NO: 3500109 - RNA, 19 nt, Human
ccuacacccagaccccagg

SEQ ID NO: 3500110 - RNA, 17 nt, Human
ccuacagaaaaaccuug

SEQ ID NO: 3500111 - RNA, 21 nt, Human
ccuacagaauacuagccagag

SEQ ID NO: 3500112 - RNA, 13 nt, Human
ccuacagagcugu

SEQ ID NO: 3500113 - RNA, 17 nt, Human
ccuacagaggucucugc

SEQ ID NO: 3500114 - RNA, 15 nt, Human
ccuacagcacuacug

SEQ ID NO: 3500115 - RNA, 20 nt, Human
ccuacagcacuacugggugu

SEQ ID NO: 3500116 - RNA, 17 nt, Human
ccuacagcuuugauccc

SEQ ID NO: 3500117 - RNA, 18 nt, Human
ccuacaggagugagcacu

SEQ ID NO: 3500118 - RNA, 12 nt, Human
ccuacaggcuga

SEQ ID NO: 3500119 - RNA, 15 nt, Human
ccuacaguguacagu

SEQ ID NO: 3500120 - RNA, 16 nt, Human
ccuacaguguacaguc

SEQ ID NO: 3500121 - RNA, 20 nt, Human
ccuacaguguacagucuugu

SEQ ID NO: 3500122 - RNA, 15 nt, Human
ccuacaguuuuaacu

SEQ ID NO: 3500123 - RNA, 19 nt, Human
ccuacaguuuuaacugugg

SEQ ID NO: 3500124 - RNA, 17 nt, Human
ccuacauaucccuucca

SEQ ID NO: 3500125 - RNA, 14 nt, Human
ccuaccaaccucug

SEQ ID NO: 3500126 - RNA, 17 nt, Human
ccuaccaauagauuccc

SEQ ID NO: 3500127 - RNA, 19 nt, Human
ccuaccaauagauucccca

SEQ ID NO: 3500128 - RNA, 12 nt, Human
ccuaccaaugca

SEQ ID NO: 3500129 - RNA, 16 nt, Human
ccuaccaaugcaugca

SEQ ID NO: 3500130 - RNA, 13 nt, Human
ccuaccacagugu

SEQ ID NO: 3500131 - RNA, 15 nt, Human
ccuaccacagugucu

SEQ ID NO: 3500132 - RNA, 15 nt, Human
ccuaccaccacgccc

SEQ ID NO: 3500133 - RNA, 18 nt, Human
ccuaccaccuccccagcc

SEQ ID NO: 3500134 - RNA, 17 nt, Human
ccuaccagcgcccgcug

SEQ ID NO: 3500135 - RNA, 22 nt, Human
ccuaccagcgcccgcugggcug

SEQ ID NO: 3500136 - RNA, 13 nt, Human
ccuacccacaccu

SEQ ID NO: 3500137 - RNA, 19 nt, Human
ccuacccacaccucugcca

SEQ ID NO: 3500138 - RNA, 22 nt, Human
ccuacccagagauugcuucuca

SEQ ID NO: 3500139 - RNA, 14 nt, Human
ccuacccauccccg

SEQ ID NO: 3500140 - RNA, 19 nt, Human
ccuaccccaauuccuugua

SEQ ID NO: 3500141 - RNA, 11 nt, Human
ccuaccccaca

SEQ ID NO: 3500142 - RNA, 20 nt, Human
ccuaccccacaccaggccgu

SEQ ID NO: 3500143 - RNA, 13 nt, Human
ccuaccccaccac

SEQ ID NO: 3500144 - RNA, 20 nt, Human
ccuaccccgcagacaccuug

SEQ ID NO: 3500145 - RNA, 21 nt, Human
ccuaccccgcagacaccuugg

SEQ ID NO: 3500146 - RNA, 14 nt, Human
ccuaccccucccag

SEQ ID NO: 3500147 - RNA, 14 nt, Human
ccuaccccugacuu

SEQ ID NO: 3500148 - RNA, 16 nt, Human
ccuacccuaaccaagu

SEQ ID NO: 3500149 - RNA, 23 nt, Human
ccuacccucgggcccaccuggcc

SEQ ID NO: 3500150 - RNA, 15 nt, Human
ccuacccugccuccc

SEQ ID NO: 3500151 - RNA, 23 nt, Human
ccuacccugccucccuugacuuu

SEQ ID NO: 3500152 - RNA, 14 nt, Human
ccuacccuggacuu

SEQ ID NO: 3500153 - RNA, 17 nt, Human
ccuaccgaaaccuugcc

SEQ ID NO: 3500154 - RNA, 20 nt, Human
ccuaccgaaaccuugccuuu

SEQ ID NO: 3500155 - RNA, 22 nt, Human
ccuaccgagucucuucuccacu

SEQ ID NO: 3500156 - RNA, 21 nt, Human
ccuaccggcaauuuccggcca

SEQ ID NO: 3500157 - RNA, 20 nt, Human
ccuaccucaaccuguaaauu

SEQ ID NO: 3500158 - RNA, 22 nt, Human
ccuaccucaaccuguaaauuau

SEQ ID NO: 3500159 - RNA, 15 nt, Human
ccuaccucaggcagg

SEQ ID NO: 3500160 - RNA, 22 nt, Human
ccuaccucagguugcugguugc

SEQ ID NO: 3500161 - RNA, 13 nt, Human
ccuaccuccaaag

SEQ ID NO: 3500162 - RNA, 13 nt, Human
ccuaccugaugga

SEQ ID NO: 3500163 - RNA, 12 nt, Human
ccuaccugcucu

SEQ ID NO: 3500164 - RNA, 15 nt, Human
ccuaccugugccuga

SEQ ID NO: 3500165 - RNA, 21 nt, Human
ccuaccugugugguacucuga

SEQ ID NO: 3500166 - RNA, 13 nt, Human
ccuacgcugaaga

SEQ ID NO: 3500167 - RNA, 21 nt, Human
ccuacgucaaacaugaagugu

SEQ ID NO: 3500168 - RNA, 20 nt, Human
ccuacuagggaccuggggaa

SEQ ID NO: 3500169 - RNA, 16 nt, Human
ccuacuagucaccaga

SEQ ID NO: 3500170 - RNA, 16 nt, Human
ccuacuaucacugaac

SEQ ID NO: 3500171 - RNA, 23 nt, Human
ccuacucacacaggcauuuccug

SEQ ID NO: 3500172 - RNA, 20 nt, Human
ccuacuccugacuccuaccu

SEQ ID NO: 3500173 - RNA, 16 nt, Human
ccuacuccugucuucu

SEQ ID NO: 3500174 - RNA, 13 nt, Human
ccuacucuucucu

SEQ ID NO: 3500175 - RNA, 20 nt, Human
ccuacucuucucucugcucu

SEQ ID NO: 3500176 - RNA, 13 nt, Human
ccuacugaaugcu

SEQ ID NO: 3500177 - RNA, 13 nt, Human
ccuacuguucuaa

SEQ ID NO: 3500178 - RNA, 15 nt, Human
ccuacuguucuaaag

SEQ ID NO: 3500179 - RNA, 23 nt, Human
ccuacuguucuaaagcucugaca

SEQ ID NO: 3500180 - RNA, 17 nt, Human
ccuacuuccagguucug

SEQ ID NO: 3500181 - RNA, 13 nt, Human
ccuacuuccccuu

SEQ ID NO: 3500182 - RNA, 15 nt, Human
ccuacuuccugugac

SEQ ID NO: 3500183 - RNA, 19 nt, Human
ccuacuucuccagccuaga

SEQ ID NO: 3500184 - RNA, 22 nt, Human
ccuacuucuuuugcucuuagcu

SEQ ID NO: 3500185 - RNA, 15 nt, Human
ccuacuuugacuuuu

SEQ ID NO: 3500186 - RNA, 17 nt, Human
ccuagaaacaacacugu

SEQ ID NO: 3500187 - RNA, 15 nt, Human
ccuagaaauacaugg

SEQ ID NO: 3500188 - RNA, 21 nt, Human
ccuagaacacuaacucaccag

SEQ ID NO: 3500189 - RNA, 12 nt, Human
ccuagaagaagc

SEQ ID NO: 3500190 - RNA, 19 nt, Human
ccuagaccuaaacggcuca

SEQ ID NO: 3500191 - RNA, 20 nt, Human
ccuagacuuuaggcuuucag

SEQ ID NO: 3500192 - RNA, 18 nt, Human
ccuagagaacgcagcccu

SEQ ID NO: 3500193 - RNA, 16 nt, Human
ccuagagacagaagca

SEQ ID NO: 3500194 - RNA, 14 nt, Human
ccuagagccagacc

SEQ ID NO: 3500195 - RNA, 16 nt, Human
ccuagagggaggggcc

SEQ ID NO: 3500196 - RNA, 17 nt, Human
ccuagagggaggggccu

SEQ ID NO: 3500197 - RNA, 22 nt, Human
ccuagaguagaguggagggagg

SEQ ID NO: 3500198 - RNA, 17 nt, Human
ccuagauaaaaagaugg

SEQ ID NO: 3500199 - RNA, 21 nt, Human
ccuagauaugaauauauggca

SEQ ID NO: 3500200 - RNA, 20 nt, Human
ccuagauccacacacagagg

SEQ ID NO: 3500201 - RNA, 14 nt, Human
ccuagauccuaagg

SEQ ID NO: 3500202 - RNA, 16 nt, Human
ccuagauccuaagggu

SEQ ID NO: 3500203 - RNA, 22 nt, Human
ccuagauguauaacuaggagcu

SEQ ID NO: 3500204 - RNA, 11 nt, Human
ccuagauuaua

SEQ ID NO: 3500205 - RNA, 15 nt, Human
ccuagauuauaucaa

SEQ ID NO: 3500206 - RNA, 14 nt, Human
ccuagcaagcuggc

SEQ ID NO: 3500207 - RNA, 16 nt, Human
ccuagcaagcuggccu

SEQ ID NO: 3500208 - RNA, 13 nt, Human
ccuagcacagcag

SEQ ID NO: 3500209 - RNA, 18 nt, Human
ccuagcacaugcuucaau

SEQ ID NO: 3500210 - RNA, 12 nt, Human
ccuagcagugaa

SEQ ID NO: 3500211 - RNA, 16 nt, Human
ccuagcagugaacuau

SEQ ID NO: 3500212 - RNA, 19 nt, Human
ccuagcauacguacacauu

SEQ ID NO: 3500213 - RNA, 14 nt, Human
ccuagccauuccug

SEQ ID NO: 3500214 - RNA, 15 nt, Human
ccuagcccacccugc

SEQ ID NO: 3500215 - RNA, 17 nt, Human
ccuagcccacccugcug

SEQ ID NO: 3500216 - RNA, 13 nt, Human
ccuagcccagcgc

SEQ ID NO: 3500217 - RNA, 11 nt, Human
ccuagcccagg

SEQ ID NO: 3500218 - RNA, 14 nt, Human
cugcucccccuuuu

SEQ ID NO: 3500219 - RNA, 18 nt, Human
cugcucccccuuuucccu

SEQ ID NO: 3500220 - RNA, 19 nt, Human
cugcuccccuaaagccuca

SEQ ID NO: 3500221 - RNA, 17 nt, Human
cugcuccccucccuccu

SEQ ID NO: 3500222 - RNA, 13 nt, Human
cugcucccucaga

SEQ ID NO: 3500223 - RNA, 16 nt, Human
cugcucccucuccccc

SEQ ID NO: 3500224 - RNA, 20 nt, Human
cugcucccugaagccagccu

SEQ ID NO: 3500225 - RNA, 13 nt, Human
cugcucccuggca

SEQ ID NO: 3500226 - RNA, 15 nt, Human
cugcucccuggcauu

SEQ ID NO: 3500227 - RNA, 13 nt, Human
cugcuccucaugg

SEQ ID NO: 3500228 - RNA, 17 nt, Human
cugcuccuccagggcca

SEQ ID NO: 3500229 - RNA, 13 nt, Human
cugcuccucccug

SEQ ID NO: 3500230 - RNA, 20 nt, Human
cugcuccucccuggcugccc

SEQ ID NO: 3500231 - RNA, 13 nt, Human
cugcuccucucca

SEQ ID NO: 3500232 - RNA, 15 nt, Human
cugcuccugagcccc

SEQ ID NO: 3500233 - RNA, 16 nt, Human
cugcuccugagccccc

SEQ ID NO: 3500234 - RNA, 17 nt, Human
cugcuccugagccccca

SEQ ID NO: 3500235 - RNA, 14 nt, Human
cugcuccugcagca

SEQ ID NO: 3500236 - RNA, 16 nt, Human
cugcuccuucccuugc

SEQ ID NO: 3500237 - RNA, 17 nt, Human
cugcuccuucccuugcu

SEQ ID NO: 3500238 - RNA, 19 nt, Human
cugcuccuuggcuuaccug

SEQ ID NO: 3500239 - RNA, 14 nt, Human
cugcucgcucccug

SEQ ID NO: 3500240 - RNA, 16 nt, Human
cugcucgggcccaggc

SEQ ID NO: 3500241 - RNA, 19 nt, Human
cugcucgggcccaggccau

SEQ ID NO: 3500242 - RNA, 22 nt, Human
cugcucgggcccaggccaucuu

SEQ ID NO: 3500243 - RNA, 13 nt, Human
cugcucggggugc

SEQ ID NO: 3500244 - RNA, 17 nt, Human
cugcucggggugcacag

SEQ ID NO: 3500245 - RNA, 19 nt, Human
cugcucggggugcacagga

SEQ ID NO: 3500246 - RNA, 23 nt, Human
cugcucggggugcacaggagggg

SEQ ID NO: 3500247 - RNA, 13 nt, Human
cugcucuccagcc

SEQ ID NO: 3500248 - RNA, 11 nt, Human
cugcucuccuc

SEQ ID NO: 3500249 - RNA, 17 nt, Human
cugcucuccucuucuac

SEQ ID NO: 3500250 - RNA, 20 nt, Human
cugcucuccucuugccacug

SEQ ID NO: 3500251 - RNA, 21 nt, Human
cugcucuccucuugccacugc

SEQ ID NO: 3500252 - RNA, 12 nt, Human
cugcucuccuuc

SEQ ID NO: 3500253 - RNA, 19 nt, Human
cugcucuccuuccuggagc

SEQ ID NO: 3500254 - RNA, 17 nt, Human
cugcucucuacccagcc

SEQ ID NO: 3500255 - RNA, 24 nt, Human
cugcucucuuuuucuccaggguca

SEQ ID NO: 3500256 - RNA, 19 nt, Human
cugcucugaacacgaagcu

SEQ ID NO: 3500257 - RNA, 21 nt, Human
cugcucugaauuaguccuugc

SEQ ID NO: 3500258 - RNA, 13 nt, Human
cugcucugagcca

SEQ ID NO: 3500259 - RNA, 18 nt, Human
cugcucugaggcuuccag

SEQ ID NO: 3500260 - RNA, 19 nt, Human
cugcucugaggcuuccaga

SEQ ID NO: 3500261 - RNA, 21 nt, Human
cugcucugaggcuuccagaga

SEQ ID NO: 3500262 - RNA, 22 nt, Human
cugcucugaggcuuccagagag

SEQ ID NO: 3500263 - RNA, 13 nt, Human
cugcucugaugca

SEQ ID NO: 3500264 - RNA, 11 nt, Human
cugcucugccc

SEQ ID NO: 3500265 - RNA, 15 nt, Human
cugcucugccccagc

SEQ ID NO: 3500266 - RNA, 21 nt, Human
cugcucugcgugucaccugug

SEQ ID NO: 3500267 - RNA, 11 nt, Human
cugcucugcug

SEQ ID NO: 3500268 - RNA, 19 nt, Human
cugcucuggaauuugcaag

SEQ ID NO: 3500269 - RNA, 18 nt, Human
cugcucugguuguuucug

SEQ ID NO: 3500270 - RNA, 21 nt, Human
cugcucuuaugccauuuguuu

SEQ ID NO: 3500271 - RNA, 15 nt, Human
cugcucuucauccca

SEQ ID NO: 3500272 - RNA, 21 nt, Human
cugcucuucaucccauuccag

SEQ ID NO: 3500273 - RNA, 17 nt, Human
cugcucuuggcuggacc

SEQ ID NO: 3500274 - RNA, 19 nt, Human
cugcucuuggcuggaccca

SEQ ID NO: 3500275 - RNA, 13 nt, Human
cuggagcagaagg

SEQ ID NO: 3500276 - RNA, 13 nt, Human
cuggagcagacca

SEQ ID NO: 3500277 - RNA, 12 nt, Human
cuggagcagcca

SEQ ID NO: 3500278 - RNA, 17 nt, Human
cuggagcagccacccca

SEQ ID NO: 3500279 - RNA, 16 nt, Human
cuggagcaggccuugc

SEQ ID NO: 3500280 - RNA, 12 nt, Human
cuggagcaucug

SEQ ID NO: 3500281 - RNA, 16 nt, Human
cuggagcaucugacuc

SEQ ID NO: 3500282 - RNA, 22 nt, Human
cuggagcauuguguauagaacu

SEQ ID NO: 3500283 - RNA, 22 nt, Human
cuggagccaccugucccaccuc

SEQ ID NO: 3500284 - RNA, 15 nt, Human
cuggagccacuaacu

SEQ ID NO: 3500285 - RNA, 21 nt, Human
cuggagccagacucuggucuu

SEQ ID NO: 3500286 - RNA, 22 nt, Human
cuggagccagacucuggucuuc

SEQ ID NO: 3500287 - RNA, 14 nt, Human
cuggagccagccga

SEQ ID NO: 3500288 - RNA, 21 nt, Human
cuggagccaugggcacaaagg

SEQ ID NO: 3500289 - RNA, 17 nt, Human
cuggagcccacuguacu

SEQ ID NO: 3500290 - RNA, 20 nt, Human
cuggagcccacuguacuugc

SEQ ID NO: 3500291 - RNA, 21 nt, Human
cuggagcccacuguacuugcu

SEQ ID NO: 3500292 - RNA, 16 nt, Human
cuggagcccagaggag

SEQ ID NO: 3500293 - RNA, 17 nt, Human
cuggagcccagaggagg

SEQ ID NO: 3500294 - RNA, 12 nt, Human
cuggagccccac

SEQ ID NO: 3500295 - RNA, 14 nt, Human
cuggagccccuggg

SEQ ID NO: 3500296 - RNA, 18 nt, Human
cuggagccccuggguggg

SEQ ID NO: 3500297 - RNA, 17 nt, Human
cuggagccuggugcccu

SEQ ID NO: 3500298 - RNA, 13 nt, Human
cuggagccugugu

SEQ ID NO: 3500299 - RNA, 14 nt, Human
cuggagccugugua

SEQ ID NO: 3500300 - RNA, 16 nt, Human
cuggagccuguguaac

SEQ ID NO: 3500301 - RNA, 22 nt, Human
cuggagcuagaauuugauaugu

SEQ ID NO: 3500302 - RNA, 14 nt, Human
cuggagcucaucug

SEQ ID NO: 3500303 - RNA, 21 nt, Human
cuggagcucaucugcaaaagg

SEQ ID NO: 3500304 - RNA, 13 nt, Human
cuggagcuccugg

SEQ ID NO: 3500305 - RNA, 14 nt, Human
cuggagcuccuggg

SEQ ID NO: 3500306 - RNA, 18 nt, Human
cuggagcuccugggaagg

SEQ ID NO: 3500307 - RNA, 13 nt, Human
cuggagcucugcc

SEQ ID NO: 3500308 - RNA, 18 nt, Human
cuggagcuucauuuuggu

SEQ ID NO: 3500309 - RNA, 14 nt, Human
cuggaggaaaacug

SEQ ID NO: 3500310 - RNA, 17 nt, Human
cuggaggaaaacugaga

SEQ ID NO: 3500311 - RNA, 19 nt, Human
cuggaggaaaacugagacu

SEQ ID NO: 3500312 - RNA, 12 nt, Human
cuggaggaccug

SEQ ID NO: 3500313 - RNA, 16 nt, Human
cuggaggaccugagcc

SEQ ID NO: 3500314 - RNA, 18 nt, Human
cuggaggaccugagccug

SEQ ID NO: 3500315 - RNA, 20 nt, Human
cuggaggaccugagccugcc

SEQ ID NO: 3500316 - RNA, 22 nt, Human
cuggaggaccugagccugccga

SEQ ID NO: 3500317 - RNA, 13 nt, Human
cuggaggagagaa

SEQ ID NO: 3500318 - RNA, 15 nt, Human
cuggaggagcccagg

SEQ ID NO: 3500319 - RNA, 22 nt, Human
cuggaggauccccuccaagccu

SEQ ID NO: 3500320 - RNA, 17 nt, Human
cuggaggaugugggcag

SEQ ID NO: 3500321 - RNA, 13 nt, Human
cuggaggcagggc

SEQ ID NO: 3500322 - RNA, 15 nt, Human
cuggaggcagggccu

SEQ ID NO: 3500323 - RNA, 19 nt, Human
cuggaggcagggccuugcc

SEQ ID NO: 3500324 - RNA, 22 nt, Human
cuggaggcagggccuugcccag

SEQ ID NO: 3500325 - RNA, 14 nt, Human
cuggaggcccaggc

SEQ ID NO: 3500326 - RNA, 18 nt, Human
cuggaggcccaggcuggg

SEQ ID NO: 3500327 - RNA, 19 nt, Human
cuggaggcccaggcuggga

SEQ ID NO: 3500328 - RNA, 20 nt, Human
cuggaggccccuggagccag

SEQ ID NO: 3500329 - RNA, 21 nt, Human
cuggaggccccuggagccaga

SEQ ID NO: 3500330 - RNA, 13 nt, Human
cuggaggccucag

SEQ ID NO: 3500331 - RNA, 16 nt, Human
cuggaggccucaggug

SEQ ID NO: 3500332 - RNA, 18 nt, Human
cuggaggccucaggugcu

SEQ ID NO: 3500333 - RNA, 21 nt, Human
cuggaggccucaggugcuguc

SEQ ID NO: 3500334 - RNA, 16 nt, Human
cuggaggccucugggc

SEQ ID NO: 3500335 - RNA, 18 nt, Human
cuggaggccucugggccu

SEQ ID NO: 3500336 - RNA, 19 nt, Human
cuggaggccuuccagcugc

SEQ ID NO: 3500337 - RNA, 22 nt, Human
cuggaggccuuccagcugcugu

SEQ ID NO: 3500338 - RNA, 18 nt, Human
cuggaggcggugcggcag

SEQ ID NO: 3500339 - RNA, 18 nt, Human
cuggaggcucaaauuuug

SEQ ID NO: 3500340 - RNA, 23 nt, Human
cuggagggaagaguggaggugga

SEQ ID NO: 3500341 - RNA, 21 nt, Human
cuggagggaaugaaccuggag

SEQ ID NO: 3500342 - RNA, 19 nt, Human
cuggagggcuagaaccugg

SEQ ID NO: 3500343 - RNA, 22 nt, Human
cuggagggcuagaaucuggaga

SEQ ID NO: 3500344 - RNA, 20 nt, Human
cuggagggcuggaaucugga

SEQ ID NO: 3500345 - RNA, 14 nt, Human
cuggaggggccccu

SEQ ID NO: 3500346 - RNA, 23 nt, Human
cuggaggggccccugcuucucca

SEQ ID NO: 3500347 - RNA, 21 nt, Human
cuggaggggcuagaaccuaga

SEQ ID NO: 3500348 - RNA, 20 nt, Human
cuggagggggaauggcagca

SEQ ID NO: 3500349 - RNA, 16 nt, Human
cuggagggguguggcu

SEQ ID NO: 3500350 - RNA, 20 nt, Human
cuggagggguguggcuccuu

SEQ ID NO: 3500351 - RNA, 16 nt, Human
cuggagguaaggccuu

SEQ ID NO: 3500352 - RNA, 17 nt, Human
cuggagguacgaaaaga

SEQ ID NO: 3500353 - RNA, 16 nt, Human
cuggaggugggagcag

SEQ ID NO: 3500354 - RNA, 18 nt, Human
cuggaggugggagcagga

SEQ ID NO: 3500355 - RNA, 22 nt, Human
cuggaggugggagcaggagauu

SEQ ID NO: 3500356 - RNA, 18 nt, Human
cuggagguggggccugga

SEQ ID NO: 3500357 - RNA, 16 nt, Human
cuggagguggggcgag

SEQ ID NO: 3500358 - RNA, 20 nt, Human
cuggagguggggcgaggcag

SEQ ID NO: 3500359 - RNA, 15 nt, Human
cuggagguugauaac

SEQ ID NO: 3500360 - RNA, 19 nt, Human
cuggagguugauaacuuug

SEQ ID NO: 3500361 - RNA, 21 nt, Human
cuggagguugauaacuuugcu

SEQ ID NO: 3500362 - RNA, 15 nt, Human
cuggaguccagucuc

SEQ ID NO: 3500363 - RNA, 15 nt, Human
ccuccccgcaccccc

SEQ ID NO: 3500364 - RNA, 16 nt, Human
ccuccccgcccuuuuu

SEQ ID NO: 3500365 - RNA, 17 nt, Human
ccuccccgucucauucc

SEQ ID NO: 3500366 - RNA, 18 nt, Human
ccuccccuauccacccag

SEQ ID NO: 3500367 - RNA, 22 nt, Human
ccuccccuauccacccagccca

SEQ ID NO: 3500368 - RNA, 13 nt, Human
ccuccccucacag

SEQ ID NO: 3500369 - RNA, 13 nt, Human
ccuccccuccagc

SEQ ID NO: 3500370 - RNA, 14 nt, Human
ccuccccuccaucc

SEQ ID NO: 3500371 - RNA, 20 nt, Human
ccuccccuccaucccuggcc

SEQ ID NO: 3500372 - RNA, 16 nt, Human
ccuccccuccccugcu

SEQ ID NO: 3500373 - RNA, 19 nt, Human
ccuccccuccccugcugca

SEQ ID NO: 3500374 - RNA, 13 nt, Human
ccuccccucccgu

SEQ ID NO: 3500375 - RNA, 17 nt, Human
ccuccccuccucugcuu

SEQ ID NO: 3500376 - RNA, 20 nt, Human
ccuccccuccuugccuccug

SEQ ID NO: 3500377 - RNA, 17 nt, Human
ccuccccucucuugcac

SEQ ID NO: 3500378 - RNA, 21 nt, Human
ccuccccucucuugcacccgc

SEQ ID NO: 3500379 - RNA, 14 nt, Human
ccuccccugaggcu

SEQ ID NO: 3500380 - RNA, 17 nt, Human
ccuccccugccaccagg

SEQ ID NO: 3500381 - RNA, 13 nt, Human
ccuccccugccag

SEQ ID NO: 3500382 - RNA, 14 nt, Human
ccuccccugcccuc

SEQ ID NO: 3500383 - RNA, 22 nt, Human
ccuccccuggagggggaauggc

SEQ ID NO: 3500384 - RNA, 23 nt, Human
ccuccccuggggacagcaagggc

SEQ ID NO: 3500385 - RNA, 17 nt, Human
ccuccccuucccugcaa

SEQ ID NO: 3500386 - RNA, 13 nt, Human
ccuccccuugaau

SEQ ID NO: 3500387 - RNA, 14 nt, Human
ccuccccuugggcg

SEQ ID NO: 3500388 - RNA, 18 nt, Human
ccucccgaauagcuggga

SEQ ID NO: 3500389 - RNA, 14 nt, Human
ccucccgagcuccu

SEQ ID NO: 3500390 - RNA, 18 nt, Human
ccucccgaguagcuggga

SEQ ID NO: 3500391 - RNA, 15 nt, Human
ccucccgcaccccga

SEQ ID NO: 3500392 - RNA, 15 nt, Human
ccucccggcauggga

SEQ ID NO: 3500393 - RNA, 17 nt, Human
ccucccgggcccucccu

SEQ ID NO: 3500394 - RNA, 15 nt, Human
ccucccuaccucaac

SEQ ID NO: 3500395 - RNA, 16 nt, Human
ccucccuaccucaacc

SEQ ID NO: 3500396 - RNA, 11 nt, Human
ccucccucagc

SEQ ID NO: 3500397 - RNA, 15 nt, Human
ccucccucagccccu

SEQ ID NO: 3500398 - RNA, 19 nt, Human
ccucccuccaccccaggac

SEQ ID NO: 3500399 - RNA, 16 nt, Human
ccucccucccucuuuc

SEQ ID NO: 3500400 - RNA, 12 nt, Human
ccucccuccugc

SEQ ID NO: 3500401 - RNA, 13 nt, Human
ccucccucucucu

SEQ ID NO: 3500402 - RNA, 18 nt, Human
ccucccucugaccugcag

SEQ ID NO: 3500403 - RNA, 19 nt, Human
ccucccucugaggcuguag

SEQ ID NO: 3500404 - RNA, 15 nt, Human
ccucccugacccugc

SEQ ID NO: 3500405 - RNA, 14 nt, Human
ccucccugauguac

SEQ ID NO: 3500406 - RNA, 20 nt, Human
ccucccugcaucugaccagc

SEQ ID NO: 3500407 - RNA, 21 nt, Human
ccucccugcaucugaccagca

SEQ ID NO: 3500408 - RNA, 15 nt, Human
ccucccugcccaggc

SEQ ID NO: 3500409 - RNA, 21 nt, Human
ccucccugccccucccuucaa

SEQ ID NO: 3500410 - RNA, 12 nt, Human
ccucccugccuc

SEQ ID NO: 3500411 - RNA, 14 nt, Human
ccucccugccucca

SEQ ID NO: 3500412 - RNA, 14 nt, Human
ccucccugcugucc

SEQ ID NO: 3500413 - RNA, 19 nt, Human
ccucccugcuguccccucu

SEQ ID NO: 3500414 - RNA, 20 nt, Human
ccucccugcuguccccucuu

SEQ ID NO: 3500415 - RNA, 13 nt, Human
ccucccuggagug

SEQ ID NO: 3500416 - RNA, 14 nt, Human
ccucccuggccugu

SEQ ID NO: 3500417 - RNA, 13 nt, Human
ccucccuggcucc

SEQ ID NO: 3500418 - RNA, 14 nt, Human
ccucccuggcugcc

SEQ ID NO: 3500419 - RNA, 20 nt, Human
ccucccuggcugcccuggcc

SEQ ID NO: 3500420 - RNA, 22 nt, Human
ccucccuggcugcccuggcccu

SEQ ID NO: 3500421 - RNA, 12 nt, Human
ccucccuggguu

SEQ ID NO: 3500422 - RNA, 13 nt, Human
ccucccuggguuc

SEQ ID NO: 3500423 - RNA, 14 nt, Human
ccucccuggguuca

SEQ ID NO: 3500424 - RNA, 11 nt, Human
ccucccuguaa

SEQ ID NO: 3500425 - RNA, 11 nt, Human
ccucccugucc

SEQ ID NO: 3500426 - RNA, 14 nt, Human
ccucccuguccacc

SEQ ID NO: 3500427 - RNA, 18 nt, Human
ccucccuguuccccagag

SEQ ID NO: 3500428 - RNA, 23 nt, Human
ccucccuguugacgaagucucuu

SEQ ID NO: 3500429 - RNA, 13 nt, Human
ccucccuuagcuc

SEQ ID NO: 3500430 - RNA, 19 nt, Human
ccucccuuccgacccucug

SEQ ID NO: 3500431 - RNA, 20 nt, Human
ccucccuuccgacccucugg

SEQ ID NO: 3500432 - RNA, 21 nt, Human
ccucccuuccgacccucuggg

SEQ ID NO: 3500433 - RNA, 22 nt, Human
ccucccuuccgacccucuggga

SEQ ID NO: 3500434 - RNA, 10 nt, Human
ccucccuucu

SEQ ID NO: 3500435 - RNA, 21 nt, Human
ccucccuucuacugcuucuac

SEQ ID NO: 3500436 - RNA, 16 nt, Human
cuggauucauuuccug

SEQ ID NO: 3500437 - RNA, 19 nt, Human
cuggauucauuuccugccc

SEQ ID NO: 3500438 - RNA, 20 nt, Human
cuggauuggguuaugaauau

SEQ ID NO: 3500439 - RNA, 15 nt, Human
cuggauuuuuaccag

SEQ ID NO: 3500440 - RNA, 19 nt, Human
cuggcaaaaggaucuuugu

SEQ ID NO: 3500441 - RNA, 21 nt, Human
cuggcaaaaggaucuuugugg

SEQ ID NO: 3500442 - RNA, 16 nt, Human
cuggcaaacagggccu

SEQ ID NO: 3500443 - RNA, 17 nt, Human
cuggcaaacagggccuc

SEQ ID NO: 3500444 - RNA, 22 nt, Human
cuggcaaacaugaaaaaucggc

SEQ ID NO: 3500445 - RNA, 19 nt, Human
cuggcaaacuucagacuga

SEQ ID NO: 3500446 - RNA, 16 nt, Human
cuggcaaagcagaaug

SEQ ID NO: 3500447 - RNA, 19 nt, Human
cuggcaaagcagaauguga

SEQ ID NO: 3500448 - RNA, 20 nt, Human
cuggcaaagcuuuuagaaau

SEQ ID NO: 3500449 - RNA, 21 nt, Human
cuggcaaagguggcucuccag

SEQ ID NO: 3500450 - RNA, 16 nt, Human
cuggcaacacagaggc

SEQ ID NO: 3500451 - RNA, 17 nt, Human
cuggcaagaaaagaguu

SEQ ID NO: 3500452 - RNA, 16 nt, Human
cuggcaaggacacaga

SEQ ID NO: 3500453 - RNA, 20 nt, Human
cuggcaaggacuuuguacau

SEQ ID NO: 3500454 - RNA, 15 nt, Human
cuggcaauagugugu

SEQ ID NO: 3500455 - RNA, 21 nt, Human
cuggcaaugaaaaauucucag

SEQ ID NO: 3500456 - RNA, 21 nt, Human
cuggcaaugccacagcccugu

SEQ ID NO: 3500457 - RNA, 16 nt, Human
cuggcaaugguaguuu

SEQ ID NO: 3500458 - RNA, 22 nt, Human
cuggcaaugguaguuucugugg

SEQ ID NO: 3500459 - RNA, 21 nt, Human
cuggcacacaucaggaguuca

SEQ ID NO: 3500460 - RNA, 13 nt, Human
cuggcacagaggu

SEQ ID NO: 3500461 - RNA, 12 nt, Human
cuggcacagccu

SEQ ID NO: 3500462 - RNA, 15 nt, Human
cuggcacagccugca

SEQ ID NO: 3500463 - RNA, 23 nt, Human
cuggcacagccuggcuguggccu

SEQ ID NO: 3500464 - RNA, 18 nt, Human
cuggcacaggacugauuc

SEQ ID NO: 3500465 - RNA, 22 nt, Human
cuggcacaggacugauucuggg

SEQ ID NO: 3500466 - RNA, 12 nt, Human
cuggcacagucu

SEQ ID NO: 3500467 - RNA, 19 nt, Human
cuggcacagugucugggcu

SEQ ID NO: 3500468 - RNA, 14 nt, Human
cuggcacaucagaa

SEQ ID NO: 3500469 - RNA, 17 nt, Human
cuggcacauuuccccag

SEQ ID NO: 3500470 - RNA, 19 nt, Human
cuggcacccaccguggagg

SEQ ID NO: 3500471 - RNA, 19 nt, Human
cuggcacccggccccugcu

SEQ ID NO: 3500472 - RNA, 21 nt, Human
cuggcacccggccccugcugg

SEQ ID NO: 3500473 - RNA, 22 nt, Human
cuggcacccggccccugcuggu

SEQ ID NO: 3500474 - RNA, 16 nt, Human
cuggcacugcugugcu

SEQ ID NO: 3500475 - RNA, 20 nt, Human
cuggcacugcuuccagugag

SEQ ID NO: 3500476 - RNA, 17 nt, Human
cuggcacuggaccccag

SEQ ID NO: 3500477 - RNA, 14 nt, Human
cuggcacuuggaga

SEQ ID NO: 3500478 - RNA, 23 nt, Human
cuggcagaaagcaaaugugaccu

SEQ ID NO: 3500479 - RNA, 13 nt, Human
cuggcagaacuga

SEQ ID NO: 3500480 - RNA, 19 nt, Human
cuggcagaacugagcuccu

SEQ ID NO: 3500481 - RNA, 23 nt, Human
cuggcagaaugcuagcucugagc

SEQ ID NO: 3500482 - RNA, 14 nt, Human
cuggcagagaugcc

SEQ ID NO: 3500483 - RNA, 17 nt, Human
cuggcagaguugaagac

SEQ ID NO: 3500484 - RNA, 18 nt, Human
cuggcagaguugaagaca

SEQ ID NO: 3500485 - RNA, 19 nt, Human
cuggcagcaccgccucuuc

SEQ ID NO: 3500486 - RNA, 14 nt, Human
cuggcagccacacu

SEQ ID NO: 3500487 - RNA, 15 nt, Human
cuggcagccacacuu

SEQ ID NO: 3500488 - RNA, 13 nt, Human
cuggcagcccaga

SEQ ID NO: 3500489 - RNA, 22 nt, Human
cuggcagcccagagacuuugua

SEQ ID NO: 3500490 - RNA, 13 nt, Human
cuggcagccccag

SEQ ID NO: 3500491 - RNA, 15 nt, Human
cuggcagccccagca

SEQ ID NO: 3500492 - RNA, 22 nt, Human
cuggcagccgugccuucagcuc

SEQ ID NO: 3500493 - RNA, 14 nt, Human
cuggcagccuccca

SEQ ID NO: 3500494 - RNA, 13 nt, Human
cuggcagcucagc

SEQ ID NO: 3500495 - RNA, 23 nt, Human
cuggcagcucuccagucaggagg

SEQ ID NO: 3500496 - RNA, 12 nt, Human
cuggcagcucug

SEQ ID NO: 3500497 - RNA, 17 nt, Human
cuggcagcucuggacag

SEQ ID NO: 3500498 - RNA, 20 nt, Human
cuggcaggaugacccugcga

SEQ ID NO: 3500499 - RNA, 24 nt, Human
cuggcaggcaggcucccagggaca

SEQ ID NO: 3500500 - RNA, 13 nt, Human
cuggcaggcaggg

SEQ ID NO: 3500501 - RNA, 22 nt, Human
cuggcagggaggucaggcccug

SEQ ID NO: 3500502 - RNA, 23 nt, Human
cuggcagggaggucaggcccugg

SEQ ID NO: 3500503 - RNA, 17 nt, Human
cuggcagggugggaugg

SEQ ID NO: 3500504 - RNA, 12 nt, Human
cuggcagguccu

SEQ ID NO: 3500505 - RNA, 20 nt, Human
cuggcaguuuauauuuaacu

SEQ ID NO: 3500506 - RNA, 15 nt, Human
cuggcauagagcagc

SEQ ID NO: 3500507 - RNA, 18 nt, Human
cuggcaucgcaccauucu

SEQ ID NO: 3500508 - RNA, 14 nt, Human
ccuccucucacucc

SEQ ID NO: 3500509 - RNA, 21 nt, Human
ccuccucucacuccccagccu

SEQ ID NO: 3500510 - RNA, 15 nt, Human
ccuccucuccaccau

SEQ ID NO: 3500511 - RNA, 14 nt, Human
ccuccucucccauc

SEQ ID NO: 3500512 - RNA, 13 nt, Human
ccuccucucugcc

SEQ ID NO: 3500513 - RNA, 15 nt, Human
ccuccucugaaacag

SEQ ID NO: 3500514 - RNA, 21 nt, Human
ccuccucugaaacagcugccu

SEQ ID NO: 3500515 - RNA, 23 nt, Human
ccuccucugaaacagcugccuua

SEQ ID NO: 3500516 - RNA, 18 nt, Human
ccuccucugacuugggga

SEQ ID NO: 3500517 - RNA, 21 nt, Human
ccuccucugcacucccaccug

SEQ ID NO: 3500518 - RNA, 13 nt, Human
ccuccucugccac

SEQ ID NO: 3500519 - RNA, 11 nt, Human
ccuccucugcu

SEQ ID NO: 3500520 - RNA, 22 nt, Human
ccuccucuggacggcaggcuca

SEQ ID NO: 3500521 - RNA, 17 nt, Human
ccuccucugucugcccu

SEQ ID NO: 3500522 - RNA, 11 nt, Human
ccuccucugug

SEQ ID NO: 3500523 - RNA, 12 nt, Human
ccuccucuguga

SEQ ID NO: 3500524 - RNA, 13 nt, Human
ccuccucugugaa

SEQ ID NO: 3500525 - RNA, 22 nt, Human
ccuccucuucaccccggcaggc

SEQ ID NO: 3500526 - RNA, 20 nt, Human
ccuccugaaacuuacacaca

SEQ ID NO: 3500527 - RNA, 22 nt, Human
ccuccugaaccgcacagcucag

SEQ ID NO: 3500528 - RNA, 15 nt, Human
ccuccugacacccca

SEQ ID NO: 3500529 - RNA, 17 nt, Human
ccuccugacaccccacu

SEQ ID NO: 3500530 - RNA, 19 nt, Human
ccuccugacacccuucucc

SEQ ID NO: 3500531 - RNA, 21 nt, Human
ccuccugacccauugcuguug

SEQ ID NO: 3500532 - RNA, 16 nt, Human
ccuccugaccugaggc

SEQ ID NO: 3500533 - RNA, 19 nt, Human
ccuccugagggaggaccug

SEQ ID NO: 3500534 - RNA, 22 nt, Human
ccuccugaguugaagucaugcu

SEQ ID NO: 3500535 - RNA, 19 nt, Human
ccuccugcagaccacgccc

SEQ ID NO: 3500536 - RNA, 15 nt, Human
ccuccugcccaggag

SEQ ID NO: 3500537 - RNA, 16 nt, Human
ccuccugcccaggaga

SEQ ID NO: 3500538 - RNA, 19 nt, Human
ccuccugcccaggagagcc

SEQ ID NO: 3500539 - RNA, 21 nt, Human
ccuccugcccaggagagccag

SEQ ID NO: 3500540 - RNA, 23 nt, Human
ccuccugcccaggagagccagcc

SEQ ID NO: 3500541 - RNA, 17 nt, Human
ccuccugcccagucccc

SEQ ID NO: 3500542 - RNA, 18 nt, Human
ccuccugcgcgcaugugc

SEQ ID NO: 3500543 - RNA, 20 nt, Human
ccuccugcgcgcaugugcgc

SEQ ID NO: 3500544 - RNA, 11 nt, Human
ccuccugcugc

SEQ ID NO: 3500545 - RNA, 18 nt, Human
ccuccuggaaccuugcug

SEQ ID NO: 3500546 - RNA, 22 nt, Human
ccuccuggaaccuugcuguccu

SEQ ID NO: 3500547 - RNA, 21 nt, Human
ccuccuggacauuuuuucagu

SEQ ID NO: 3500548 - RNA, 15 nt, Human
ccuccuggcccaggu

SEQ ID NO: 3500549 - RNA, 21 nt, Human
ccuccuggccucagacugcac

SEQ ID NO: 3500550 - RNA, 17 nt, Human
ccuccugggaaugaagc

SEQ ID NO: 3500551 - RNA, 17 nt, Human
ccuccugggaucugcuc

SEQ ID NO: 3500552 - RNA, 13 nt, Human
ccuccugggcuaa

SEQ ID NO: 3500553 - RNA, 10 nt, Human
ccuccugggg

SEQ ID NO: 3500554 - RNA, 12 nt, Human
ccuccuggggcc

SEQ ID NO: 3500555 - RNA, 13 nt, Human
ccuccuggggcca

SEQ ID NO: 3500556 - RNA, 21 nt, Human
ccuccuggggccaggccgggc

SEQ ID NO: 3500557 - RNA, 21 nt, Human
ccuccugguggguccaggggc

SEQ ID NO: 3500558 - RNA, 18 nt, Human
ccuccuggugucacccca

SEQ ID NO: 3500559 - RNA, 22 nt, Human
ccuccuguaaaugguguacaua

SEQ ID NO: 3500560 - RNA, 15 nt, Human
ccuccugucucuggc

SEQ ID NO: 3500561 - RNA, 14 nt, Human
ccuccugugcucag

SEQ ID NO: 3500562 - RNA, 15 nt, Human
ccuccugugcucagc

SEQ ID NO: 3500563 - RNA, 17 nt, Human
ccuccugugcucagccc

SEQ ID NO: 3500564 - RNA, 19 nt, Human
ccuccugugcucagcccug

SEQ ID NO: 3500565 - RNA, 20 nt, Human
ccuccuguggaacccagcag

SEQ ID NO: 3500566 - RNA, 14 nt, Human
ccuccuguggccug

SEQ ID NO: 3500567 - RNA, 18 nt, Human
ccuccuguggccugccag

SEQ ID NO: 3500568 - RNA, 12 nt, Human
ccuccugugggg

SEQ ID NO: 3500569 - RNA, 17 nt, Human
ccuccuguguagcuggg

SEQ ID NO: 3500570 - RNA, 13 nt, Human
ccuccugugugug

SEQ ID NO: 3500571 - RNA, 22 nt, Human
ccuccugugugugcgccuacag

SEQ ID NO: 3500572 - RNA, 23 nt, Human
ccuccugugugugcgccuacagg

SEQ ID NO: 3500573 - RNA, 21 nt, Human
ccuccuguugcacccagcccu

SEQ ID NO: 3500574 - RNA, 22 nt, Human
ccuccuguugcacccagcccug

SEQ ID NO: 3500575 - RNA, 23 nt, Human
ccuccuguugggagagggcgcag

SEQ ID NO: 3500576 - RNA, 17 nt, Human
ccuccuucaauuccaua

SEQ ID NO: 3500577 - RNA, 15 nt, Human
ccuccuucagacacc

SEQ ID NO: 3500578 - RNA, 23 nt, Human
ccuccuucauaugaaaggugcca

SEQ ID NO: 3500579 - RNA, 17 nt, Human
ccuccuuccaccucccu

SEQ ID NO: 3500580 - RNA, 12 nt, Human
ccuccuucccac

SEQ ID NO: 3500581 - RNA, 14 nt, Human
ccuccuuccuugac

SEQ ID NO: 3500582 - RNA, 15 nt, Human
ccuccuuccuugacc

SEQ ID NO: 3500583 - RNA, 18 nt, Human
ccuccuuccuugaccagc

SEQ ID NO: 3500584 - RNA, 20 nt, Human
ccuccuuccuugaccagcag

SEQ ID NO: 3500585 - RNA, 15 nt, Human
ccuccuucucccuuu

SEQ ID NO: 3500586 - RNA, 17 nt, Human
ccuccuucucccuuuuu

SEQ ID NO: 3500587 - RNA, 23 nt, Human
ccuccuucucugucucaugugug

SEQ ID NO: 3500588 - RNA, 22 nt, Human
ccuccuucugagcuccuguccc

SEQ ID NO: 3500589 - RNA, 14 nt, Human
ccuccuugccuccu

SEQ ID NO: 3500590 - RNA, 17 nt, Human
ccuccuugcuuguuaca

SEQ ID NO: 3500591 - RNA, 12 nt, Human
ccuccuugggca

SEQ ID NO: 3500592 - RNA, 15 nt, Human
ccuccuuguccaccc

SEQ ID NO: 3500593 - RNA, 16 nt, Human
ccuccuuguccaccca

SEQ ID NO: 3500594 - RNA, 19 nt, Human
ccuccuuuacccucaucug

SEQ ID NO: 3500595 - RNA, 13 nt, Human
cuggcccccacau

SEQ ID NO: 3500596 - RNA, 13 nt, Human
cuggcccccacug

SEQ ID NO: 3500597 - RNA, 15 nt, Human
cuggcccccagcugu

SEQ ID NO: 3500598 - RNA, 17 nt, Human
cuggcccccucccugga

SEQ ID NO: 3500599 - RNA, 18 nt, Human
cuggcccccucccuggau

SEQ ID NO: 3500600 - RNA, 14 nt, Human
cuggccccgccgcc

SEQ ID NO: 3500601 - RNA, 16 nt, Human
cuggccccgccgccug

SEQ ID NO: 3500602 - RNA, 22 nt, Human
cuggccccgccgccugguacuc

SEQ ID NO: 3500603 - RNA, 18 nt, Human
cuggccccggaucagagc

SEQ ID NO: 3500604 - RNA, 20 nt, Human
cuggccccuagaaucagccu

SEQ ID NO: 3500605 - RNA, 22 nt, Human
cuggccccucaccugggcaccu

SEQ ID NO: 3500606 - RNA, 17 nt, Human
cuggccccucagggucc

SEQ ID NO: 3500607 - RNA, 18 nt, Human
cuggccccucaggguccc

SEQ ID NO: 3500608 - RNA, 24 nt, Human
cuggccccucgccuguggagcuca

SEQ ID NO: 3500609 - RNA, 13 nt, Human
cuggccccucucc

SEQ ID NO: 3500610 - RNA, 15 nt, Human
cuggccccucucccu

SEQ ID NO: 3500611 - RNA, 24 nt, Human
cuggccccucucccuugggcucug

SEQ ID NO: 3500612 - RNA, 12 nt, Human
cuggccccuggg

SEQ ID NO: 3500613 - RNA, 17 nt, Human
cuggccccuuugggccc

SEQ ID NO: 3500614 - RNA, 20 nt, Human
cuggccccuuugggcccugc

SEQ ID NO: 3500615 - RNA, 18 nt, Human
cuggcccgucauguuccu

SEQ ID NO: 3500616 - RNA, 13 nt, Human
cuggcccuagacu

SEQ ID NO: 3500617 - RNA, 16 nt, Human
cuggcccucaaggccu

SEQ ID NO: 3500618 - RNA, 19 nt, Human
cuggcccucaaggccuccc

SEQ ID NO: 3500619 - RNA, 21 nt, Human
cuggcccucaaggccucccac

SEQ ID NO: 3500620 - RNA, 22 nt, Human
cuggcccucaaggccucccaca

SEQ ID NO: 3500621 - RNA, 19 nt, Human
cuggcccucgacacucacc

SEQ ID NO: 3500622 - RNA, 23 nt, Human
cuggcccucucugaaggaggcca

SEQ ID NO: 3500623 - RNA, 14 nt, Human
cuggcccucugugu

SEQ ID NO: 3500624 - RNA, 16 nt, Human
cuggcccucuucuuac

SEQ ID NO: 3500625 - RNA, 13 nt, Human
cuggcccugcccu

SEQ ID NO: 3500626 - RNA, 16 nt, Human
cuggcccugcccugag

SEQ ID NO: 3500627 - RNA, 17 nt, Human
cuggcccugcccugagg

SEQ ID NO: 3500628 - RNA, 15 nt, Human
cuggcccugcccugg

SEQ ID NO: 3500629 - RNA, 13 nt, Human
cuggcccugcuuc

SEQ ID NO: 3500630 - RNA, 21 nt, Human
cuggcccugcuuccugcuugc

SEQ ID NO: 3500631 - RNA, 12 nt, Human
cuggcccuggcu

SEQ ID NO: 3500632 - RNA, 11 nt, Human
cuggcccuggg

SEQ ID NO: 3500633 - RNA, 21 nt, Human
cuggcccugggagaaucgcuc

SEQ ID NO: 3500634 - RNA, 19 nt, Human
cuggcccuuacuugcuucu

SEQ ID NO: 3500635 - RNA, 12 nt, Human
cuggcccuuccu

SEQ ID NO: 3500636 - RNA, 17 nt, Human
cuggccgaggguccugg

SEQ ID NO: 3500637 - RNA, 21 nt, Human
cuggccgaggguccuggcucc

SEQ ID NO: 3500638 - RNA, 21 nt, Human
cuggccgcccccagcccccuc

SEQ ID NO: 3500639 - RNA, 22 nt, Human
cuggccgcccccugccccccag

SEQ ID NO: 3500640 - RNA, 19 nt, Human
cuggccgccucacccccuc

SEQ ID NO: 3500641 - RNA, 22 nt, Human
cuggccgcguuuagaccaagga

SEQ ID NO: 3500642 - RNA, 14 nt, Human
cuggccggccagcc

SEQ ID NO: 3500643 - RNA, 13 nt, Human
cuggccgggagcc

SEQ ID NO: 3500644 - RNA, 20 nt, Human
cuggccgggcacagcugugg

SEQ ID NO: 3500645 - RNA, 20 nt, Human
cuggccggucugcaagucag

SEQ ID NO: 3500646 - RNA, 23 nt, Human
cuggccguugauguuggcuggga

SEQ ID NO: 3500647 - RNA, 17 nt, Human
cuggccuagcauacgua

SEQ ID NO: 3500648 - RNA, 23 nt, Human
cuggccuagcauacguacacauu

SEQ ID NO: 3500649 - RNA, 23 nt, Human
cuggccuaggagauaucugaggg

SEQ ID NO: 3500650 - RNA, 17 nt, Human
cuggccuagucccuucc

SEQ ID NO: 3500651 - RNA, 23 nt, Human
cuggccucaagugauucuccugc

SEQ ID NO: 3500652 - RNA, 15 nt, Human
auuuauugguuuugc

SEQ ID NO: 3500653 - RNA, 18 nt, Human
auuuauuguauuuuagua

SEQ ID NO: 3500654 - RNA, 20 nt, Human
auuuauuguuuauuuaucag

SEQ ID NO: 3500655 - RNA, 16 nt, Human
auuuauuuaaaauagc

SEQ ID NO: 3500656 - RNA, 14 nt, Human
auuuauuuaaagca

SEQ ID NO: 3500657 - RNA, 20 nt, Human
auuuauuuaaagcauugcuu

SEQ ID NO: 3500658 - RNA, 14 nt, Human
auuuauuuaaauuu

SEQ ID NO: 3500659 - RNA, 13 nt, Human
auuuauuuaauaa

SEQ ID NO: 3500660 - RNA, 16 nt, Human
auuuauuuaauaacaa

SEQ ID NO: 3500661 - RNA, 20 nt, Human
auuuauuuaauaacaauugu

SEQ ID NO: 3500662 - RNA, 18 nt, Human
auuuauuuacaaauguuu

SEQ ID NO: 3500663 - RNA, 17 nt, Human
auuuauuuacugcuagu

SEQ ID NO: 3500664 - RNA, 16 nt, Human
auuuauuuauguacuu

SEQ ID NO: 3500665 - RNA, 18 nt, Human
auuuauuuauguacuuuu

SEQ ID NO: 3500666 - RNA, 13 nt, Human
auuuauuuauuau

SEQ ID NO: 3500667 - RNA, 14 nt, Human
auuuauuuauuauu

SEQ ID NO: 3500668 - RNA, 14 nt, Human
auuuauuuauuuaa

SEQ ID NO: 3500669 - RNA, 14 nt, Human
auuuauuuauuuau

SEQ ID NO: 3500670 - RNA, 13 nt, Human
auuuauuuccuag

SEQ ID NO: 3500671 - RNA, 20 nt, Human
auuuauuuuaauaauguuuc

SEQ ID NO: 3500672 - RNA, 21 nt, Human
auuuauuuuaauaauguuuca

SEQ ID NO: 3500673 - RNA, 16 nt, Human
auuuauuuuaugagaa

SEQ ID NO: 3500674 - RNA, 17 nt, Human
auuuauuuuaugagaaa

SEQ ID NO: 3500675 - RNA, 15 nt, Human
auuuauuuuccuaaa

SEQ ID NO: 3500676 - RNA, 17 nt, Human
auuuauuuuccuaaaga

SEQ ID NO: 3500677 - RNA, 19 nt, Human
auuuauuuuccuaaagaga

SEQ ID NO: 3500678 - RNA, 15 nt, Human
auuuauuuuguaauu

SEQ ID NO: 3500679 - RNA, 16 nt, Human
auuuauuuuguaauua

SEQ ID NO: 3500680 - RNA, 22 nt, Human
auuuauuuuguaugaaauauau

SEQ ID NO: 3500681 - RNA, 18 nt, Human
auuuauuuuucaguucca

SEQ ID NO: 3500682 - RNA, 22 nt, Human
auuuauuuuucaguuccaagaa

SEQ ID NO: 3500683 - RNA, 21 nt, Human
auuuauuuuucucaugaaucu

SEQ ID NO: 3500684 - RNA, 19 nt, Human
auuuauuuuuuacauuauu

SEQ ID NO: 3500685 - RNA, 22 nt, Human
auuuauuuuuucuuuucuuuac

SEQ ID NO: 3500686 - RNA, 18 nt, Human
auuuauuuuuuuuaaaga

SEQ ID NO: 3500687 - RNA, 21 nt, Human
auuuauuuuuuuuaauuguau

SEQ ID NO: 3500688 - RNA, 23 nt, Human
auuuauuuuuuuuaauuguauuu

SEQ ID NO: 3500689 - RNA, 12 nt, Human
auuucaaaaauu

SEQ ID NO: 3500690 - RNA, 17 nt, Human
auuucaaaaauuuggaa

SEQ ID NO: 3500691 - RNA, 20 nt, Human
auuucaaaaauuuggaauuc

SEQ ID NO: 3500692 - RNA, 14 nt, Human
auuucaaaacucau

SEQ ID NO: 3500693 - RNA, 20 nt, Human
auacaguuuuccuaaaugua

SEQ ID NO: 3500694 - RNA, 20 nt, Human
auacauaaaagaaauaaacc

SEQ ID NO: 3500695 - RNA, 22 nt, Human
auacauaacuaaauuugauacu

SEQ ID NO: 3500696 - RNA, 24 nt, Human
auacauaacuaaauuugauacuua

SEQ ID NO: 3500697 - RNA, 21 nt, Human
auacauaagcggcguaaguuu

SEQ ID NO: 3500698 - RNA, 15 nt, Human
auacauacaccagca

SEQ ID NO: 3500699 - RNA, 19 nt, Human
auacauacacuuguauaaa

SEQ ID NO: 3500700 - RNA, 20 nt, Human
auacauacggucagguuuaa

SEQ ID NO: 3500701 - RNA, 18 nt, Human
auacauagggauaugcgu

SEQ ID NO: 3500702 - RNA, 14 nt, Human
auacauauggaugu

SEQ ID NO: 3500703 - RNA, 18 nt, Human
auacauauguagacuaua

SEQ ID NO: 3500704 - RNA, 21 nt, Human
auacauauguagacuauauac

SEQ ID NO: 3500705 - RNA, 14 nt, Human
auacauauuuccaa

SEQ ID NO: 3500706 - RNA, 14 nt, Human
auacaucaguuauu

SEQ ID NO: 3500707 - RNA, 15 nt, Human
auacaucucucccca

SEQ ID NO: 3500708 - RNA, 16 nt, Human
auacaucucuccccaa

SEQ ID NO: 3500709 - RNA, 17 nt, Human
auacaugaaaauuuuaa

SEQ ID NO: 3500710 - RNA, 18 nt, Human
auacaugaagcuucaugc

SEQ ID NO: 3500711 - RNA, 16 nt, Human
auacaugacucagcau

SEQ ID NO: 3500712 - RNA, 20 nt, Human
auacaugcauauaaugaaua

SEQ ID NO: 3500713 - RNA, 17 nt, Human
auacaugccacaucaaa

SEQ ID NO: 3500714 - RNA, 13 nt, Human
auacaugcugcua

SEQ ID NO: 3500715 - RNA, 14 nt, Human
auacauggauaaca

SEQ ID NO: 3500716 - RNA, 21 nt, Human
auacaugucacauuuagcugu

SEQ ID NO: 3500717 - RNA, 16 nt, Human
auacaugugauacauu

SEQ ID NO: 3500718 - RNA, 18 nt, Human
auacaugugauacauuuu

SEQ ID NO: 3500719 - RNA, 12 nt, Human
auacaugugugu

SEQ ID NO: 3500720 - RNA, 13 nt, Human
auacaugugugua

SEQ ID NO: 3500721 - RNA, 14 nt, Human
auacauguguguau

SEQ ID NO: 3500722 - RNA, 18 nt, Human
auacauguguguauauau

SEQ ID NO: 3500723 - RNA, 22 nt, Human
auacauguguguauauaugugu

SEQ ID NO: 3500724 - RNA, 16 nt, Human
auacauguuuauguaa

SEQ ID NO: 3500725 - RNA, 19 nt, Human
auacauguuuauguaaaca

SEQ ID NO: 3500726 - RNA, 21 nt, Human
auacauguuuauguaaacaaa

SEQ ID NO: 3500727 - RNA, 16 nt, Human
auacauuaaagcaguc

SEQ ID NO: 3500728 - RNA, 13 nt, Human
auacauuaguaaa

SEQ ID NO: 3500729 - RNA, 18 nt, Human
auacauuaguaaaugucu

SEQ ID NO: 3500730 - RNA, 17 nt, Human
auacauuauauuucuau

SEQ ID NO: 3500731 - RNA, 20 nt, Human
auacauucaaauuugucugg

SEQ ID NO: 3500732 - RNA, 17 nt, Human
auacauugaauuagaaa

SEQ ID NO: 3500733 - RNA, 22 nt, Human
auacauuguacgaagaguauuu

SEQ ID NO: 3500734 - RNA, 20 nt, Human
auacauuguauauaugugua

SEQ ID NO: 3500735 - RNA, 21 nt, Human
auacauuuaaaacauuaaaau

SEQ ID NO: 3500736 - RNA, 21 nt, Human
auacauuuauaauguuugcua

SEQ ID NO: 3500737 - RNA, 22 nt, Human
auacauuucuccuuugauaaaa

SEQ ID NO: 3500738 - RNA, 19 nt, Human
auacauuugaggggaaaac

SEQ ID NO: 3500739 - RNA, 14 nt, Human
auacauuuguaugu

SEQ ID NO: 3500740 - RNA, 17 nt, Human
auacauuuguauguugu

SEQ ID NO: 3500741 - RNA, 16 nt, Human
auaccaaaauguugcu

SEQ ID NO: 3500742 - RNA, 14 nt, Human
auaccaauaaagug

SEQ ID NO: 3500743 - RNA, 19 nt, Human
auaccaaugaaaaaaugua

SEQ ID NO: 3500744 - RNA, 20 nt, Human
auaccaaugcuuuuaucaaa

SEQ ID NO: 3500745 - RNA, 15 nt, Human
auaccacaucaaaua

SEQ ID NO: 3500746 - RNA, 14 nt, Human
auaccacucuguaa

SEQ ID NO: 3500747 - RNA, 15 nt, Human
auaccagacugcagg

SEQ ID NO: 3500748 - RNA, 19 nt, Human
auaccagccaguaaauggg

SEQ ID NO: 3500749 - RNA, 23 nt, Human
auaccagcuacuccggaggcuga

SEQ ID NO: 3500750 - RNA, 19 nt, Human
auaccagcuuguaugcaau

SEQ ID NO: 3500751 - RNA, 20 nt, Human
auaccagugaaccaaagaga

SEQ ID NO: 3500752 - RNA, 17 nt, Human
auaccauacucauuucu

SEQ ID NO: 3500753 - RNA, 19 nt, Human
auaccauacucauuucuaa

SEQ ID NO: 3500754 - RNA, 11 nt, Human
auaccaucagc

SEQ ID NO: 3500755 - RNA, 17 nt, Human
auaccaucagcaaagaa

SEQ ID NO: 3500756 - RNA, 19 nt, Human
auaccauuaaaacugcuuu

SEQ ID NO: 3500757 - RNA, 13 nt, Human
auaccauuuccgu

SEQ ID NO: 3500758 - RNA, 18 nt, Human
auacccaaauccucucca

SEQ ID NO: 3500759 - RNA, 12 nt, Human
auacccaccccc

SEQ ID NO: 3500760 - RNA, 17 nt, Human
auacccccccaugcagu

SEQ ID NO: 3500761 - RNA, 17 nt, Human
auacccccugcaaagcc

SEQ ID NO: 3500762 - RNA, 22 nt, Human
auacccccugcaaagcccagcu

SEQ ID NO: 3500763 - RNA, 14 nt, Human
auacccugcccuug

SEQ ID NO: 3500764 - RNA, 22 nt, Human
auacccuuggaaauacuguaug

SEQ ID NO: 3500765 - RNA, 14 nt, Human
auaccuaaguacug

SEQ ID NO: 3500766 - RNA, 17 nt, Human
auaccuaaguacuguaa

SEQ ID NO: 3500767 - RNA, 15 nt, Human
auaccuacauguauu

SEQ ID NO: 3500768 - RNA, 14 nt, Human
auaccuauaaugug

SEQ ID NO: 3500769 - RNA, 15 nt, Human
auaccuauaaugugu

SEQ ID NO: 3500770 - RNA, 21 nt, Human
auaccucaggaaagaauagaa

SEQ ID NO: 3500771 - RNA, 13 nt, Human
auaccucauguuu

SEQ ID NO: 3500772 - RNA, 17 nt, Human
auaccucauguuuauga

SEQ ID NO: 3500773 - RNA, 20 nt, Human
auaccucauguuuaugaaaa

SEQ ID NO: 3500774 - RNA, 14 nt, Human
auaccucuaauagu

SEQ ID NO: 3500775 - RNA, 15 nt, Human
auaccucugaccaac

SEQ ID NO: 3500776 - RNA, 13 nt, Human
auaccucugugug

SEQ ID NO: 3500777 - RNA, 17 nt, Human
auaccucugugugcucc

SEQ ID NO: 3500778 - RNA, 20 nt, Human
auaccucuuagcugagugga

SEQ ID NO: 3500779 - RNA, 18 nt, Human
auaccugggcauacuaau

SEQ ID NO: 3500780 - RNA, 14 nt, Human
auaccugucaauac

SEQ ID NO: 3500781 - RNA, 15 nt, Human
auaccugucccccug

SEQ ID NO: 3500782 - RNA, 16 nt, Human
auaccugucccccuga

SEQ ID NO: 3500783 - RNA, 18 nt, Human
auaccugucccccugaca

SEQ ID NO: 3500784 - RNA, 15 nt, Human
auaccuguuuaaauu

SEQ ID NO: 3500785 - RNA, 13 nt, Human
auaccuuaaaauu

SEQ ID NO: 3500786 - RNA, 21 nt, Human
auaccuuaaaauuugaaacau

SEQ ID NO: 3500787 - RNA, 20 nt, Human
auaccuucgggguacaaguc

SEQ ID NO: 3500788 - RNA, 13 nt, Human
auaccuucuuauu

SEQ ID NO: 3500789 - RNA, 14 nt, Human
auaccuugcuuauu

SEQ ID NO: 3500790 - RNA, 20 nt, Human
auaccuuugcuacuacuaug

SEQ ID NO: 3500791 - RNA, 17 nt, Human
auacgacuuuauuuucu

SEQ ID NO: 3500792 - RNA, 20 nt, Human
auacgagagcagaggucucc

SEQ ID NO: 3500793 - RNA, 23 nt, Human
auacgcaacauaauuaaauuuug

SEQ ID NO: 3500794 - RNA, 20 nt, Human
auacgcuacuauaaagagaa

SEQ ID NO: 3500795 - RNA, 15 nt, Human
auacgcuuuucuuug

SEQ ID NO: 3500796 - RNA, 15 nt, Human
auacggcuccccagu

SEQ ID NO: 3500797 - RNA, 19 nt, Human
auuucccaacacaaagauu

SEQ ID NO: 3500798 - RNA, 12 nt, Human
auuucccaggac

SEQ ID NO: 3500799 - RNA, 14 nt, Human
auuucccaggaccc

SEQ ID NO: 3500800 - RNA, 16 nt, Human
auuucccaggacccug

SEQ ID NO: 3500801 - RNA, 15 nt, Human
auuucccaggguuaa

SEQ ID NO: 3500802 - RNA, 21 nt, Human
auuucccauccccugugggaa

SEQ ID NO: 3500803 - RNA, 14 nt, Human
auuucccaucugca

SEQ ID NO: 3500804 - RNA, 18 nt, Human
auuucccaugauuucaug

SEQ ID NO: 3500805 - RNA, 15 nt, Human
auuuccccagaccug

SEQ ID NO: 3500806 - RNA, 15 nt, Human
auuuccccagggcac

SEQ ID NO: 3500807 - RNA, 21 nt, Human
auuuccccaggggaaaaugaa

SEQ ID NO: 3500808 - RNA, 17 nt, Human
auuuccccccuccgccu

SEQ ID NO: 3500809 - RNA, 23 nt, Human
auuuccccccuccgccuccagga

SEQ ID NO: 3500810 - RNA, 17 nt, Human
auuucccccuuucuucc

SEQ ID NO: 3500811 - RNA, 17 nt, Human
auuuccccuaaucuuuu

SEQ ID NO: 3500812 - RNA, 23 nt, Human
auuuccccucugcacccagaaca

SEQ ID NO: 3500813 - RNA, 15 nt, Human
auuuccccuuuugca

SEQ ID NO: 3500814 - RNA, 16 nt, Human
auuuccccuuuugcau

SEQ ID NO: 3500815 - RNA, 21 nt, Human
auuuccccuuuugcauucucc

SEQ ID NO: 3500816 - RNA, 15 nt, Human
auuucccguggcccc

SEQ ID NO: 3500817 - RNA, 16 nt, Human
auuucccguggcccca

SEQ ID NO: 3500818 - RNA, 18 nt, Human
auuucccguggccccagc

SEQ ID NO: 3500819 - RNA, 18 nt, Human
auuucccuaaaauacauu

SEQ ID NO: 3500820 - RNA, 20 nt, Human
auuucccuaaaauacauuua

SEQ ID NO: 3500821 - RNA, 17 nt, Human
auuucccuacauuaaac

SEQ ID NO: 3500822 - RNA, 23 nt, Human
auuucccugaaggaaccaaagcg

SEQ ID NO: 3500823 - RNA, 18 nt, Human
auuucccugacuccucua

SEQ ID NO: 3500824 - RNA, 12 nt, Human
auuucccuucuu

SEQ ID NO: 3500825 - RNA, 13 nt, Human
auuucccuucuug

SEQ ID NO: 3500826 - RNA, 16 nt, Human
auuucccuucuugcau

SEQ ID NO: 3500827 - RNA, 20 nt, Human
auuucccuuuagcuguguua

SEQ ID NO: 3500828 - RNA, 21 nt, Human
auuucccuuuagcuguguuau

SEQ ID NO: 3500829 - RNA, 23 nt, Human
auuucccuuuagcuguguuauua

SEQ ID NO: 3500830 - RNA, 22 nt, Human
auuuccgcacuucagaauucca

SEQ ID NO: 3500831 - RNA, 18 nt, Human
auuuccguaauucuuauu

SEQ ID NO: 3500832 - RNA, 16 nt, Human
auuuccguuaaaauac

SEQ ID NO: 3500833 - RNA, 17 nt, Human
auuuccguuaaaauacc

SEQ ID NO: 3500834 - RNA, 15 nt, Human
auuuccuaugaugua

SEQ ID NO: 3500835 - RNA, 22 nt, Human
auuuccucaacguugcucccca

SEQ ID NO: 3500836 - RNA, 19 nt, Human
auuuccucagcuuaucucu

SEQ ID NO: 3500837 - RNA, 21 nt, Human
auuuccucaugugaucacaau

SEQ ID NO: 3500838 - RNA, 22 nt, Human
auuuccucaugugaucacaauu

SEQ ID NO: 3500839 - RNA, 19 nt, Human
auuuccucccucugccccu

SEQ ID NO: 3500840 - RNA, 11 nt, Human
auuuccucuau

SEQ ID NO: 3500841 - RNA, 17 nt, Human
auuuccuggugugaagg

SEQ ID NO: 3500842 - RNA, 16 nt, Human
auuuccuguuggauuu

SEQ ID NO: 3500843 - RNA, 22 nt, Human
auuuccuguuggauuuguuuaa

SEQ ID NO: 3500844 - RNA, 15 nt, Human
auuuccuugugcaaa

SEQ ID NO: 3500845 - RNA, 13 nt, Human
auuuccuuuaugu

SEQ ID NO: 3500846 - RNA, 20 nt, Human
auuuccuuuaugugaauuuu

SEQ ID NO: 3500847 - RNA, 21 nt, Human
auuucgccguugaagaggaag

SEQ ID NO: 3500848 - RNA, 14 nt, Human
auugcuaaauguaa

SEQ ID NO: 3500849 - RNA, 15 nt, Human
auugcuaauugcugu

SEQ ID NO: 3500850 - RNA, 20 nt, Human
auugcuacuguccuacccac

SEQ ID NO: 3500851 - RNA, 22 nt, Human
auugcuacuguccuacccaccc

SEQ ID NO: 3500852 - RNA, 14 nt, Human
auugcuaguauuug

SEQ ID NO: 3500853 - RNA, 16 nt, Human
auugcuaguauuugaa

SEQ ID NO: 3500854 - RNA, 18 nt, Human
auugcuaguauuugaauu

SEQ ID NO: 3500855 - RNA, 20 nt, Human
auugcuaguauuugaauuaa

SEQ ID NO: 3500856 - RNA, 18 nt, Human
auugcuauguuacuauuu

SEQ ID NO: 3500857 - RNA, 22 nt, Human
auugcuauguuuugacauuuuu

SEQ ID NO: 3500858 - RNA, 17 nt, Human
auugcucacaguuauua

SEQ ID NO: 3500859 - RNA, 19 nt, Human
auugcucccuaagacugug

SEQ ID NO: 3500860 - RNA, 12 nt, Human
auugcugaaauu

SEQ ID NO: 3500861 - RNA, 22 nt, Human
auugcugaagggcauucuuucc

SEQ ID NO: 3500862 - RNA, 18 nt, Human
auugcugauggugcaaug

SEQ ID NO: 3500863 - RNA, 23 nt, Human
auugcugauggugcaaugaccuu

SEQ ID NO: 3500864 - RNA, 13 nt, Human
auugcugauuuua

SEQ ID NO: 3500865 - RNA, 17 nt, Human
auugcugauuuuaaugg

SEQ ID NO: 3500866 - RNA, 18 nt, Human
auugcugcuccuuagcug

SEQ ID NO: 3500867 - RNA, 20 nt, Human
auugcugcuccuuagcugcc

SEQ ID NO: 3500868 - RNA, 15 nt, Human
auugcugcugguaau

SEQ ID NO: 3500869 - RNA, 20 nt, Human
auugcuggcaaagacagaag

SEQ ID NO: 3500870 - RNA, 22 nt, Human
auugcuggcaaagacagaagcc

SEQ ID NO: 3500871 - RNA, 18 nt, Human
auugcuggucuuguaaga

SEQ ID NO: 3500872 - RNA, 19 nt, Human
auugcuggucuuguaagag

SEQ ID NO: 3500873 - RNA, 14 nt, Human
auugcugguucuau

SEQ ID NO: 3500874 - RNA, 22 nt, Human
auugcugguucuauuuaaugga

SEQ ID NO: 3500875 - RNA, 23 nt, Human
auugcugucaaguuccuuugggu

SEQ ID NO: 3500876 - RNA, 22 nt, Human
auugcuguccuugaaugccaua

SEQ ID NO: 3500877 - RNA, 15 nt, Human
auugcugucugcagc

SEQ ID NO: 3500878 - RNA, 21 nt, Human
auugcuguguccaacuccagu

SEQ ID NO: 3500879 - RNA, 22 nt, Human
auugcuguguccaacuccagua

SEQ ID NO: 3500880 - RNA, 23 nt, Human
auugcuguguccaacuccaguac

SEQ ID NO: 3500881 - RNA, 19 nt, Human
auugcugugugucccaggc

SEQ ID NO: 3500882 - RNA, 23 nt, Human
auugcuguuaugucuguuuaaga

SEQ ID NO: 3500883 - RNA, 21 nt, Human
auugcuguugaaagcaaaaau

SEQ ID NO: 3500884 - RNA, 23 nt, Human
auugcuguugaaagcaaaaaugc

SEQ ID NO: 3500885 - RNA, 16 nt, Human
auugcuuaaaauagca

SEQ ID NO: 3500886 - RNA, 13 nt, Human
auugcuuacauuu

SEQ ID NO: 3500887 - RNA, 19 nt, Human
auugcuuacauuuuuacaa

SEQ ID NO: 3500888 - RNA, 21 nt, Human
auugcuuacauuuuuacaaua

SEQ ID NO: 3500889 - RNA, 23 nt, Human
auugcuuauuuauuguauucugg

SEQ ID NO: 3500890 - RNA, 22 nt, Human
auugcuucuucuccuaugugua

SEQ ID NO: 3500891 - RNA, 23 nt, Human
auugcuucuucuccuauguguaa

SEQ ID NO: 3500892 - RNA, 13 nt, Human
auugcuucuucug

SEQ ID NO: 3500893 - RNA, 14 nt, Human
auugcuucuucuga

SEQ ID NO: 3500894 - RNA, 18 nt, Human
auugcuugagcccaggag

SEQ ID NO: 3500895 - RNA, 14 nt, Human
auugcuugagcuca

SEQ ID NO: 3500896 - RNA, 18 nt, Human
auugcuugagcucaggag

SEQ ID NO: 3500897 - RNA, 15 nt, Human
auugcuuuauaaaua

SEQ ID NO: 3500898 - RNA, 13 nt, Human
auugcuuucugaa

SEQ ID NO: 3500899 - RNA, 14 nt, Human
auugcuuucuuuca

SEQ ID NO: 3500900 - RNA, 10 nt, Human
auugcuuuga

SEQ ID NO: 3500901 - RNA, 23 nt, Human
auugcuuugaagcaguuguguca

SEQ ID NO: 3500902 - RNA, 18 nt, Human
auugcuuuuaaaacuacu

SEQ ID NO: 3500903 - RNA, 17 nt, Human
auugcuuuuaaaauuuu

SEQ ID NO: 3500904 - RNA, 15 nt, Human
auugcuuuuuuguau

SEQ ID NO: 3500905 - RNA, 18 nt, Human
auuggaacuggaggcagg

SEQ ID NO: 3500906 - RNA, 14 nt, Human
auuggaagaaauuc

SEQ ID NO: 3500907 - RNA, 19 nt, Human
auuggaagcagguuaaaug

SEQ ID NO: 3500908 - RNA, 21 nt, Human
auuggaagcagguuaaauguu

SEQ ID NO: 3500909 - RNA, 17 nt, Human
auuggaaggagacacag

SEQ ID NO: 3500910 - RNA, 19 nt, Human
auuggaaggagacacagau

SEQ ID NO: 3500911 - RNA, 20 nt, Human
auuggaaggagacacagaug

SEQ ID NO: 3500912 - RNA, 14 nt, Human
auuggaaucugaua

SEQ ID NO: 3500913 - RNA, 17 nt, Human
auuggaaugcacucaga

SEQ ID NO: 3500914 - RNA, 12 nt, Human
auuggaauuaac

SEQ ID NO: 3500915 - RNA, 15 nt, Human
auuggaauuaaccug

SEQ ID NO: 3500916 - RNA, 22 nt, Human
auuggacauagauauuuucaca

SEQ ID NO: 3500917 - RNA, 14 nt, Human
auuggacccuucca

SEQ ID NO: 3500918 - RNA, 21 nt, Human
auuggagagggcucugugcug

SEQ ID NO: 3500919 - RNA, 17 nt, Human
auuggagauagggaaag

SEQ ID NO: 3500920 - RNA, 21 nt, Human
auuggagcggugggcacuguu

SEQ ID NO: 3500921 - RNA, 19 nt, Human
auuggagcucgugggacag

SEQ ID NO: 3500922 - RNA, 23 nt, Human
auuggaggaaagcaaccggugga

SEQ ID NO: 3500923 - RNA, 20 nt, Human
auuggaguuggaguagaaug

SEQ ID NO: 3500924 - RNA, 21 nt, Human
auuggaguuggaguagaaugu

SEQ ID NO: 3500925 - RNA, 20 nt, Human
auuggauacagcaguagaca

SEQ ID NO: 3500926 - RNA, 22 nt, Human
auuggauuauuuaauaacauua

SEQ ID NO: 3500927 - RNA, 14 nt, Human
auuggauuuccuaa

SEQ ID NO: 3500928 - RNA, 16 nt, Human
auuggauuugucuuug

SEQ ID NO: 3500929 - RNA, 22 nt, Human
auuggauuuuauguugacauuu

SEQ ID NO: 3500930 - RNA, 13 nt, Human
auuggcaaaacua

SEQ ID NO: 3500931 - RNA, 20 nt, Human
auuggcaccuaauccaggca

SEQ ID NO: 3500932 - RNA, 12 nt, Human
auuggcagcaga

SEQ ID NO: 3500933 - RNA, 13 nt, Human
auuggcagcagau

SEQ ID NO: 3500934 - RNA, 15 nt, Human
auuggcagcagauuu

SEQ ID NO: 3500935 - RNA, 19 nt, Human
auuggcagcaggugcugcu

SEQ ID NO: 3500936 - RNA, 23 nt, Human
auuggcauggaaauuuaaagcag

SEQ ID NO: 3500937 - RNA, 18 nt, Human
auuggcauggauuucugu

SEQ ID NO: 3500938 - RNA, 12 nt, Human
auuggccuguag

SEQ ID NO: 3500939 - RNA, 19 nt, Human
auuggcuagagguucaaag

SEQ ID NO: 3500940 - RNA, 19 nt, Human
auagaaagugccagaaagu

SEQ ID NO: 3500941 - RNA, 18 nt, Human
auagaaaguguucuguua

SEQ ID NO: 3500942 - RNA, 19 nt, Human
auagaaaguguucuguuac

SEQ ID NO: 3500943 - RNA, 22 nt, Human
auagaaaguguucuguuacaaa

SEQ ID NO: 3500944 - RNA, 23 nt, Human
auagaaaguguucuguuacaaaa

SEQ ID NO: 3500945 - RNA, 23 nt, Human
auagaaaguugcaaggcaaaugu

SEQ ID NO: 3500946 - RNA, 14 nt, Human
auagaaauauauac

SEQ ID NO: 3500947 - RNA, 17 nt, Human
auagaaaugccaagcac

SEQ ID NO: 3500948 - RNA, 19 nt, Human
auagaaaugccaagcacuu

SEQ ID NO: 3500949 - RNA, 12 nt, Human
auagaaauggaa

SEQ ID NO: 3500950 - RNA, 23 nt, Human
auagaaauggaaauuuugcuauc

SEQ ID NO: 3500951 - RNA, 16 nt, Human
auagaaauuuuguaag

SEQ ID NO: 3500952 - RNA, 18 nt, Human
auagaaauuuuguaagaa

SEQ ID NO: 3500953 - RNA, 14 nt, Human
auagaacaacauau

SEQ ID NO: 3500954 - RNA, 13 nt, Human
auagaacagugcu

SEQ ID NO: 3500955 - RNA, 20 nt, Human
auagaaccucuuugucuaca

SEQ ID NO: 3500956 - RNA, 21 nt, Human
auagaacucaguuuuaacuag

SEQ ID NO: 3500957 - RNA, 19 nt, Human
auagaacuggguaaaugca

SEQ ID NO: 3500958 - RNA, 14 nt, Human
auagaagaaaaaag

SEQ ID NO: 3500959 - RNA, 19 nt, Human
auagaagaacugcaaaggu

SEQ ID NO: 3500960 - RNA, 12 nt, Human
auagaagaaugc

SEQ ID NO: 3500961 - RNA, 16 nt, Human
auagaagaaugcaugc

SEQ ID NO: 3500962 - RNA, 17 nt, Human
auagaaggaaacuagcu

SEQ ID NO: 3500963 - RNA, 18 nt, Human
auagaaggaaacuagcuu

SEQ ID NO: 3500964 - RNA, 15 nt, Human
auagaaggaggagag

SEQ ID NO: 3500965 - RNA, 13 nt, Human
auagaaggcaggu

SEQ ID NO: 3500966 - RNA, 13 nt, Human
auagaaguaaaaa

SEQ ID NO: 3500967 - RNA, 14 nt, Human
auagaagucuucau

SEQ ID NO: 3500968 - RNA, 15 nt, Human
auagaagucuucaug

SEQ ID NO: 3500969 - RNA, 17 nt, Human
auagaagucuucaugaa

SEQ ID NO: 3500970 - RNA, 14 nt, Human
auagaaguuuagau

SEQ ID NO: 3500971 - RNA, 23 nt, Human
auagaaguuuguccauuuguaaa

SEQ ID NO: 3500972 - RNA, 18 nt, Human
auagaauaaaauauaauu

SEQ ID NO: 3500973 - RNA, 18 nt, Human
auagaauaaaggcaguuu

SEQ ID NO: 3500974 - RNA, 22 nt, Human
auagaauaaaggcaguuuucua

SEQ ID NO: 3500975 - RNA, 19 nt, Human
auagaauauaauuaucgga

SEQ ID NO: 3500976 - RNA, 19 nt, Human
auagaauguaaaugucuca

SEQ ID NO: 3500977 - RNA, 16 nt, Human
auagaauuaacacaug

SEQ ID NO: 3500978 - RNA, 15 nt, Human
auagaauuagcuuuu

SEQ ID NO: 3500979 - RNA, 22 nt, Human
auagaauuauaacuggaaagaa

SEQ ID NO: 3500980 - RNA, 22 nt, Human
auagaauugacauugaaaucua

SEQ ID NO: 3500981 - RNA, 19 nt, Human
auagaauuuuuaauguuuu

SEQ ID NO: 3500982 - RNA, 17 nt, Human
auagacaaauagaaaau

SEQ ID NO: 3500983 - RNA, 19 nt, Human
auagacaaauagaaaaugg

SEQ ID NO: 3500984 - RNA, 16 nt, Human
auagacaauuuauuau

SEQ ID NO: 3500985 - RNA, 23 nt, Human
auagacaauuuauuauggcacau

SEQ ID NO: 3500986 - RNA, 20 nt, Human
auagacaauuugcacaucuu

SEQ ID NO: 3500987 - RNA, 14 nt, Human
auagacagaagaaa

SEQ ID NO: 3500988 - RNA, 17 nt, Human
auagacagaagaaacaa

SEQ ID NO: 3500989 - RNA, 14 nt, Human
auagacaguuugua

SEQ ID NO: 3500990 - RNA, 21 nt, Human
auagacaguuuguaaauguua

SEQ ID NO: 3500991 - RNA, 13 nt, Human
auagacaugaaag

SEQ ID NO: 3500992 - RNA, 15 nt, Human
auagacccucucaag

SEQ ID NO: 3500993 - RNA, 17 nt, Human
auagaccuuuucauuug

SEQ ID NO: 3500994 - RNA, 22 nt, Human
auagaccuuuuuuuuuuuucca

SEQ ID NO: 3500995 - RNA, 17 nt, Human
auagacuagagaaaccg

SEQ ID NO: 3500996 - RNA, 21 nt, Human
auagacugccgugcauuagca

SEQ ID NO: 3500997 - RNA, 18 nt, Human
auagacuggaaaaaauga

SEQ ID NO: 3500998 - RNA, 22 nt, Human
auagagaaggaaagcuuuggca

SEQ ID NO: 3500999 - RNA, 17 nt, Human
auagagaauguuccaga

SEQ ID NO: 3501000 - RNA, 14 nt, Human
auagagacgggacu

SEQ ID NO: 3501001 - RNA, 17 nt, Human
auuucggauuuuuucca

SEQ ID NO: 3501002 - RNA, 16 nt, Human
auuucgugacuuuuuu

SEQ ID NO: 3501003 - RNA, 14 nt, Human
auuucuaaaaaaca

SEQ ID NO: 3501004 - RNA, 21 nt, Human
auuucuaaaaaacagaggcca

SEQ ID NO: 3501005 - RNA, 17 nt, Human
auuucuaaaauauaaga

SEQ ID NO: 3501006 - RNA, 21 nt, Human
auuucuaaagauaauauuacu

SEQ ID NO: 3501007 - RNA, 12 nt, Human
auuucuaaaucu

SEQ ID NO: 3501008 - RNA, 15 nt, Human
auuucuaacucugau

SEQ ID NO: 3501009 - RNA, 16 nt, Human
auuucuaacucugaug

SEQ ID NO: 3501010 - RNA, 18 nt, Human
auuucuaacucugaugua

SEQ ID NO: 3501011 - RNA, 19 nt, Human
auuucuaacucugauguaa

SEQ ID NO: 3501012 - RNA, 21 nt, Human
auuucuaagucaaacacuugu

SEQ ID NO: 3501013 - RNA, 14 nt, Human
auuucuaauuaugu

SEQ ID NO: 3501014 - RNA, 15 nt, Human
auuucuaauuaugua

SEQ ID NO: 3501015 - RNA, 19 nt, Human
auuucuacacagugggaac

SEQ ID NO: 3501016 - RNA, 20 nt, Human
auuucuaccaaggcauauca

SEQ ID NO: 3501017 - RNA, 21 nt, Human
auuucuacucuuaaguuucuc

SEQ ID NO: 3501018 - RNA, 16 nt, Human
auuucuacugucaaau

SEQ ID NO: 3501019 - RNA, 17 nt, Human
auuucuacugugacuga

SEQ ID NO: 3501020 - RNA, 23 nt, Human
auuucuagccugcacuuugaugu

SEQ ID NO: 3501021 - RNA, 18 nt, Human
auuucuagcuuaucuacu

SEQ ID NO: 3501022 - RNA, 21 nt, Human
auuucuagcuuaucuacuucc

SEQ ID NO: 3501023 - RNA, 16 nt, Human
auuucuagcuuuuuaa

SEQ ID NO: 3501024 - RNA, 22 nt, Human
auuucuaggaagaauuuuaaaa

SEQ ID NO: 3501025 - RNA, 20 nt, Human
auuucuaggacugaauuaug

SEQ ID NO: 3501026 - RNA, 15 nt, Human
auuucuaguuauuua

SEQ ID NO: 3501027 - RNA, 15 nt, Human
auuucuauauuuuca

SEQ ID NO: 3501028 - RNA, 18 nt, Human
auuucuauauuuucauuc

SEQ ID NO: 3501029 - RNA, 20 nt, Human
auuucuaugaaauauuaugu

SEQ ID NO: 3501030 - RNA, 11 nt, Human
auuucuauuaa

SEQ ID NO: 3501031 - RNA, 22 nt, Human
auuucuauuauuaauugcaaaa

SEQ ID NO: 3501032 - RNA, 12 nt, Human
auuucuauuuau

SEQ ID NO: 3501033 - RNA, 18 nt, Human
auuucuauuucuccucca

SEQ ID NO: 3501034 - RNA, 20 nt, Human
auuucucaacaaagcacagu

SEQ ID NO: 3501035 - RNA, 14 nt, Human
auuucucacugaga

SEQ ID NO: 3501036 - RNA, 18 nt, Human
auuucucagacuuuggaa

SEQ ID NO: 3501037 - RNA, 15 nt, Human
auuucucauguugaa

SEQ ID NO: 3501038 - RNA, 15 nt, Human
auuucucauugacuu

SEQ ID NO: 3501039 - RNA, 17 nt, Human
auuucucauugacuuuu

SEQ ID NO: 3501040 - RNA, 17 nt, Human
auuucuccucccuuccu

SEQ ID NO: 3501041 - RNA, 20 nt, Human
auuucuccugcguguucuca

SEQ ID NO: 3501042 - RNA, 11 nt, Human
auuucuccuuu

SEQ ID NO: 3501043 - RNA, 17 nt, Human
auuucucucaucuguua

SEQ ID NO: 3501044 - RNA, 13 nt, Human
auuucucucucca

SEQ ID NO: 3501045 - RNA, 18 nt, Human
auuucucucuccagucuu

SEQ ID NO: 3501046 - RNA, 22 nt, Human
auuucucucuccagucuuccac

SEQ ID NO: 3501047 - RNA, 19 nt, Human
auuucucugauuugcaaaa

SEQ ID NO: 3501048 - RNA, 15 nt, Human
auuucucuguuccau

SEQ ID NO: 3501049 - RNA, 20 nt, Human
auuucucuuacugcaaaugu

SEQ ID NO: 3501050 - RNA, 16 nt, Human
auuucucuuucuuuac

SEQ ID NO: 3501051 - RNA, 18 nt, Human
auuucucuuucuuuacaa

SEQ ID NO: 3501052 - RNA, 20 nt, Human
auuucugaaaugaccucaag

SEQ ID NO: 3501053 - RNA, 18 nt, Human
auuucugauauagaauug

SEQ ID NO: 3501054 - RNA, 18 nt, Human
auuucugcauauguugaa

SEQ ID NO: 3501055 - RNA, 16 nt, Human
auuucugccauuucau

SEQ ID NO: 3501056 - RNA, 17 nt, Human
auuucugccauuucaug

SEQ ID NO: 3501057 - RNA, 19 nt, Human
auuucugccauuucauguc

SEQ ID NO: 3501058 - RNA, 13 nt, Human
auuucugccuccc

SEQ ID NO: 3501059 - RNA, 16 nt, Human
auuucugccuccccuu

SEQ ID NO: 3501060 - RNA, 16 nt, Human
auuucugcuuucuuug

SEQ ID NO: 3501061 - RNA, 16 nt, Human
auuucugggucuuuug

SEQ ID NO: 3501062 - RNA, 16 nt, Human
auuucuguaaauacca

SEQ ID NO: 3501063 - RNA, 17 nt, Human
auuucuguaaauaccau

SEQ ID NO: 3501064 - RNA, 19 nt, Human
auuucugucacaguaaaaa

SEQ ID NO: 3501065 - RNA, 15 nt, Human
auuucugucagaaug

SEQ ID NO: 3501066 - RNA, 21 nt, Human
auuucugucauucaaaugggu

SEQ ID NO: 3501067 - RNA, 13 nt, Human
auuucuguucagc

SEQ ID NO: 3501068 - RNA, 12 nt, Human
auuucuguuuag

SEQ ID NO: 3501069 - RNA, 15 nt, Human
auuucuguuucucau

SEQ ID NO: 3501070 - RNA, 22 nt, Human
auuucuuaauuauuauaaaaau

SEQ ID NO: 3501071 - RNA, 13 nt, Human
auuucuuacaggc

SEQ ID NO: 3501072 - RNA, 15 nt, Human
auuucuuaucaccac

SEQ ID NO: 3501073 - RNA, 19 nt, Human
auuucuuaucaccacagua

SEQ ID NO: 3501074 - RNA, 16 nt, Human
auuucuuaugugacau

SEQ ID NO: 3501075 - RNA, 17 nt, Human
auuucuuaugugacauu

SEQ ID NO: 3501076 - RNA, 16 nt, Human
auuucuucaaaaugua

SEQ ID NO: 3501077 - RNA, 17 nt, Human
auuucuucaaaauguau

SEQ ID NO: 3501078 - RNA, 20 nt, Human
auuucuucaaaauguauaua

SEQ ID NO: 3501079 - RNA, 22 nt, Human
auuucuucaaaauguauauauu

SEQ ID NO: 3501080 - RNA, 21 nt, Human
auuucuucaaauccuuccaaa

SEQ ID NO: 3501081 - RNA, 20 nt, Human
auuucuugguaagaagccgg

SEQ ID NO: 3501082 - RNA, 13 nt, Human
auuucuugugccu

SEQ ID NO: 3501083 - RNA, 11 nt, Human
auuucuuuaua

SEQ ID NO: 3501084 - RNA, 16 nt, Human
auuucuuuauauuuau

SEQ ID NO: 3501085 - RNA, 14 nt, Human
auuucuuuccagag

SEQ ID NO: 3501086 - RNA, 16 nt, Human
auuucuuugaaaaaaa

SEQ ID NO: 3501087 - RNA, 15 nt, Human
auuucuuugccuguu

SEQ ID NO: 3501088 - RNA, 19 nt, Human
auuucuuugccuguucagu

SEQ ID NO: 3501089 - RNA, 23 nt, Human
auuucuuugccuguucaguuaca

SEQ ID NO: 3501090 - RNA, 21 nt, Human
auuucuuugcuguaagauguc

SEQ ID NO: 3501091 - RNA, 15 nt, Human
auuugaaaaauauaa

SEQ ID NO: 3501092 - RNA, 19 nt, Human
auuugaaaacagaaauugg

SEQ ID NO: 3501093 - RNA, 17 nt, Human
auuugaaaauaauuguu

SEQ ID NO: 3501094 - RNA, 15 nt, Human
auuugaaaauuuuga

SEQ ID NO: 3501095 - RNA, 18 nt, Human
auuugaaacacuuugcau

SEQ ID NO: 3501096 - RNA, 13 nt, Human
auuugaaacauug

SEQ ID NO: 3501097 - RNA, 13 nt, Human
auuugaaagugcc

SEQ ID NO: 3501098 - RNA, 17 nt, Human
auuugaaagugccuuug

SEQ ID NO: 3501099 - RNA, 22 nt, Human
auuugaaagugccuuugcagcu

SEQ ID NO: 3501100 - RNA, 14 nt, Human
auuugaaauauuga

SEQ ID NO: 3501101 - RNA, 19 nt, Human
auuugaacaaugaaguuga

SEQ ID NO: 3501102 - RNA, 22 nt, Human
auuugaacacuggcuaaagaua

SEQ ID NO: 3501103 - RNA, 17 nt, Human
auuugaaccaaaacauu

SEQ ID NO: 3501104 - RNA, 20 nt, Human
auuugaaccaaaacauuccg

SEQ ID NO: 3501105 - RNA, 14 nt, Human
auuugaaccaauaa

SEQ ID NO: 3501106 - RNA, 16 nt, Human
auuugaagacuucaaa

SEQ ID NO: 3501107 - RNA, 17 nt, Human
auuugaagacuucaaaa

SEQ ID NO: 3501108 - RNA, 16 nt, Human
auuugaagcaaagcac

SEQ ID NO: 3501109 - RNA, 14 nt, Human
auuugaagggucuu

SEQ ID NO: 3501110 - RNA, 23 nt, Human
auuugaaggucugcaagaaccug

SEQ ID NO: 3501111 - RNA, 17 nt, Human
auuugaaggucuugauu

SEQ ID NO: 3501112 - RNA, 15 nt, Human
auuugaaucuugucu

SEQ ID NO: 3501113 - RNA, 20 nt, Human
auuugaaucuugucucaaug

SEQ ID NO: 3501114 - RNA, 13 nt, Human
auuugaaugaaaa

SEQ ID NO: 3501115 - RNA, 15 nt, Human
auuugaaugaaaaau

SEQ ID NO: 3501116 - RNA, 20 nt, Human
auuugaaugauuuuucuuua

SEQ ID NO: 3501117 - RNA, 22 nt, Human
auuugaaugauuuuucuuuaca

SEQ ID NO: 3501118 - RNA, 12 nt, Human
auuugaaugcau

SEQ ID NO: 3501119 - RNA, 18 nt, Human
auuugaaugcauuuuguu

SEQ ID NO: 3501120 - RNA, 18 nt, Human
auuugaauggguccauuu

SEQ ID NO: 3501121 - RNA, 20 nt, Human
auuugaauguaugcuucaua

SEQ ID NO: 3501122 - RNA, 13 nt, Human
auuugaauguuaa

SEQ ID NO: 3501123 - RNA, 15 nt, Human
auuugaauuaaaacu

SEQ ID NO: 3501124 - RNA, 17 nt, Human
auuugaauuaaaacuuc

SEQ ID NO: 3501125 - RNA, 23 nt, Human
auuugaauuaucagcaaagaaaa

SEQ ID NO: 3501126 - RNA, 17 nt, Human
auuugacauagucuggc

SEQ ID NO: 3501127 - RNA, 21 nt, Human
auuugacauagucuggcugua

SEQ ID NO: 3501128 - RNA, 11 nt, Human
auuugaccucc

SEQ ID NO: 3501129 - RNA, 22 nt, Human
auuugaccuccucccuguuauu

SEQ ID NO: 3501130 - RNA, 17 nt, Human
auuugacuaauuuuaca

SEQ ID NO: 3501131 - RNA, 19 nt, Human
auuugacuguuuuuaccca

SEQ ID NO: 3501132 - RNA, 21 nt, Human
auuugacuugcaugaagagaa

SEQ ID NO: 3501133 - RNA, 18 nt, Human
auuugacuuucugucugu

SEQ ID NO: 3501134 - RNA, 16 nt, Human
auuugacuuuucugua

SEQ ID NO: 3501135 - RNA, 22 nt, Human
auuugacuuuucuguaauucag

SEQ ID NO: 3501136 - RNA, 18 nt, Human
auuugagaagcugcucaa

SEQ ID NO: 3501137 - RNA, 20 nt, Human
auuugagaagcugcucaacu

SEQ ID NO: 3501138 - RNA, 21 nt, Human
auuugagaauauaaaaaacuu

SEQ ID NO: 3501139 - RNA, 13 nt, Human
auuugagacauuc

SEQ ID NO: 3501140 - RNA, 14 nt, Human
auuugagacuauuu

SEQ ID NO: 3501141 - RNA, 21 nt, Human
auuugagauguauuucaacuu

SEQ ID NO: 3501142 - RNA, 12 nt, Human
auuugagauuuu

SEQ ID NO: 3501143 - RNA, 22 nt, Human
auuugaggacaaccauuccaga

SEQ ID NO: 3501144 - RNA, 23 nt, Human
auuugaggaguguuaagauugca

SEQ ID NO: 3501145 - RNA, 23 nt, Human
auuugaggauuuagaagugucau

SEQ ID NO: 3501146 - RNA, 17 nt, Human
auuugaggggaaaacac

SEQ ID NO: 3501147 - RNA, 22 nt, Human
auuugaggggaaaacaccauaa

SEQ ID NO: 3501148 - RNA, 23 nt, Human
auuugaggucuguucuuuccaaa

SEQ ID NO: 3501149 - RNA, 13 nt, Human
auuugagucucuu

SEQ ID NO: 3501150 - RNA, 19 nt, Human
auuugaguguuuuaagaua

SEQ ID NO: 3501151 - RNA, 16 nt, Human
auagagacuugggaau

SEQ ID NO: 3501152 - RNA, 19 nt, Human
auagagaugagcuuucuuu

SEQ ID NO: 3501153 - RNA, 22 nt, Human
auagagauuugucuaauugcau

SEQ ID NO: 3501154 - RNA, 15 nt, Human
auagagcaaaauuga

SEQ ID NO: 3501155 - RNA, 17 nt, Human
auagagcaaaauugaug

SEQ ID NO: 3501156 - RNA, 20 nt, Human
auagagccggguguccccaa

SEQ ID NO: 3501157 - RNA, 13 nt, Human
auagagccugagg

SEQ ID NO: 3501158 - RNA, 22 nt, Human
auagagcuagcuaaucucuaca

SEQ ID NO: 3501159 - RNA, 18 nt, Human
auagagcuuuuaaaaaug

SEQ ID NO: 3501160 - RNA, 19 nt, Human
auagaggcuagcuucugcu

SEQ ID NO: 3501161 - RNA, 18 nt, Human
auagaggcuucuccgcca

SEQ ID NO: 3501162 - RNA, 19 nt, Human
auagagguauauuggaaga

SEQ ID NO: 3501163 - RNA, 14 nt, Human
auagaguacacugc

SEQ ID NO: 3501164 - RNA, 22 nt, Human
auagaguugggacaauugcuua

SEQ ID NO: 3501165 - RNA, 17 nt, Human
auagauaacucuuugga

SEQ ID NO: 3501166 - RNA, 13 nt, Human
auagauacaaaug

SEQ ID NO: 3501167 - RNA, 13 nt, Human
auagauauaauga

SEQ ID NO: 3501168 - RNA, 20 nt, Human
auagauauaaugaacaaaau

SEQ ID NO: 3501169 - RNA, 19 nt, Human
auagaucaaagucaaaaau

SEQ ID NO: 3501170 - RNA, 21 nt, Human
auagaucacauaacagaaugc

SEQ ID NO: 3501171 - RNA, 15 nt, Human
auagaucccccagac

SEQ ID NO: 3501172 - RNA, 19 nt, Human
auagaucuccagcgucagc

SEQ ID NO: 3501173 - RNA, 19 nt, Human
auagaugcaagauauuuau

SEQ ID NO: 3501174 - RNA, 14 nt, Human
auagaugcccugcu

SEQ ID NO: 3501175 - RNA, 20 nt, Human
auagaugcuggcccagggcc

SEQ ID NO: 3501176 - RNA, 23 nt, Human
auagaugcuggcccagggcccag

SEQ ID NO: 3501177 - RNA, 13 nt, Human
auagaugggaaug

SEQ ID NO: 3501178 - RNA, 22 nt, Human
auagaugggggaaagcaaagca

SEQ ID NO: 3501179 - RNA, 23 nt, Human
auagaugggucuggcugagcuga

SEQ ID NO: 3501180 - RNA, 22 nt, Human
auagauguagauaaacucagaa

SEQ ID NO: 3501181 - RNA, 16 nt, Human
auagaugucuuuuaua

SEQ ID NO: 3501182 - RNA, 20 nt, Human
auagaugucuuuuauagugg

SEQ ID NO: 3501183 - RNA, 17 nt, Human
auagaugucuuuuccca

SEQ ID NO: 3501184 - RNA, 13 nt, Human
auagaugugugga

SEQ ID NO: 3501185 - RNA, 17 nt, Human
auagauuaauggcacug

SEQ ID NO: 3501186 - RNA, 18 nt, Human
auagauuaauggcacuga

SEQ ID NO: 3501187 - RNA, 13 nt, Human
auagauuagaaaa

SEQ ID NO: 3501188 - RNA, 14 nt, Human
auagauuagaaaaa

SEQ ID NO: 3501189 - RNA, 18 nt, Human
auagauucaccuguaaaa

SEQ ID NO: 3501190 - RNA, 19 nt, Human
auagauucaccuguaaaac

SEQ ID NO: 3501191 - RNA, 23 nt, Human
auagauucaccuguaaaacuuua

SEQ ID NO: 3501192 - RNA, 13 nt, Human
auagauucuaaag

SEQ ID NO: 3501193 - RNA, 18 nt, Human
auagauucuaaagauucu

SEQ ID NO: 3501194 - RNA, 17 nt, Human
auagauugcucaaauca

SEQ ID NO: 3501195 - RNA, 20 nt, Human
auagauuguccuuuugcaaa

SEQ ID NO: 3501196 - RNA, 13 nt, Human
auagauugugaau

SEQ ID NO: 3501197 - RNA, 15 nt, Human
auagauugugaauaa

SEQ ID NO: 3501198 - RNA, 21 nt, Human
auagauuuauuuuucaguucc

SEQ ID NO: 3501199 - RNA, 22 nt, Human
auagauuuauuuuucaguucca

SEQ ID NO: 3501200 - RNA, 13 nt, Human
auagcaaagaauu

SEQ ID NO: 3501201 - RNA, 15 nt, Human
auagcaacaggaaaa

SEQ ID NO: 3501202 - RNA, 15 nt, Human
auagcaacaugcuuc

SEQ ID NO: 3501203 - RNA, 17 nt, Human
auagcaagauugcuuaa

SEQ ID NO: 3501204 - RNA, 13 nt, Human
auagcaagugaau

SEQ ID NO: 3501205 - RNA, 22 nt, Human
auagcaauccauguuaguuuuu

SEQ ID NO: 3501206 - RNA, 17 nt, Human
auagcacagacccugcc

SEQ ID NO: 3501207 - RNA, 15 nt, Human
auagcacugagcaaa

SEQ ID NO: 3501208 - RNA, 11 nt, Human
auagcacuuuc

SEQ ID NO: 3501209 - RNA, 18 nt, Human
auagcacuuucauugcca

SEQ ID NO: 3501210 - RNA, 12 nt, Human
auagcacuuuga

SEQ ID NO: 3501211 - RNA, 19 nt, Human
auagcagaucuguuuugug

SEQ ID NO: 3501212 - RNA, 19 nt, Human
auagcagccaguucaaaaa

SEQ ID NO: 3501213 - RNA, 15 nt, Human
auagcagcuuauuca

SEQ ID NO: 3501214 - RNA, 18 nt, Human
auagcagcuuauucacaa

SEQ ID NO: 3501215 - RNA, 22 nt, Human
auagcaguauauguuaauuugu

SEQ ID NO: 3501216 - RNA, 13 nt, Human
auagcaugaaaua

SEQ ID NO: 3501217 - RNA, 15 nt, Human
auagcaugaaauaaa

SEQ ID NO: 3501218 - RNA, 16 nt, Human
auagcaugaaauaaaa

SEQ ID NO: 3501219 - RNA, 15 nt, Human
auagcauguauugug

SEQ ID NO: 3501220 - RNA, 16 nt, Human
auagcauugugaacug

SEQ ID NO: 3501221 - RNA, 21 nt, Human
auagcauuuuugauuuaugca

SEQ ID NO: 3501222 - RNA, 21 nt, Human
auagccaaggccaaaggaagc

SEQ ID NO: 3501223 - RNA, 23 nt, Human
auagccacauuuggaauacuuuu

SEQ ID NO: 3501224 - RNA, 13 nt, Human
auagccacuaacc

SEQ ID NO: 3501225 - RNA, 21 nt, Human
auagccauugaucauaaacug

SEQ ID NO: 3501226 - RNA, 13 nt, Human
auagcccacuuac

SEQ ID NO: 3501227 - RNA, 15 nt, Human
auagcccacuuacau

SEQ ID NO: 3501228 - RNA, 17 nt, Human
auagcccagacacagaa

SEQ ID NO: 3501229 - RNA, 13 nt, Human
auuuugaaauugu

SEQ ID NO: 3501230 - RNA, 15 nt, Human
auuuugaaauuguuu

SEQ ID NO: 3501231 - RNA, 22 nt, Human
auuuugaaccugaugaaaauaa

SEQ ID NO: 3501232 - RNA, 15 nt, Human
auuuugaagcuaauu

SEQ ID NO: 3501233 - RNA, 21 nt, Human
auuuugaagcuaauuauuuua

SEQ ID NO: 3501234 - RNA, 19 nt, Human
auuuugaagugcuguuuau

SEQ ID NO: 3501235 - RNA, 14 nt, Human
auuuugaaguuuac

SEQ ID NO: 3501236 - RNA, 19 nt, Human
auuuugaaguuuacauuuu

SEQ ID NO: 3501237 - RNA, 13 nt, Human
auuuugaaucaau

SEQ ID NO: 3501238 - RNA, 15 nt, Human
auuuugaaucaauaa

SEQ ID NO: 3501239 - RNA, 19 nt, Human
auuuugacacuauaucugu

SEQ ID NO: 3501240 - RNA, 24 nt, Human
auuuugacaguuauuuugauaaca

SEQ ID NO: 3501241 - RNA, 17 nt, Human
auuuugaccuacucuca

SEQ ID NO: 3501242 - RNA, 18 nt, Human
auuuugaccuacucucau

SEQ ID NO: 3501243 - RNA, 15 nt, Human
auuuugagaacaaag

SEQ ID NO: 3501244 - RNA, 21 nt, Human
auuuugagcugaaaugcugca

SEQ ID NO: 3501245 - RNA, 13 nt, Human
auuuugagugacu

SEQ ID NO: 3501246 - RNA, 23 nt, Human
auuuugagugacucgaggguugg

SEQ ID NO: 3501247 - RNA, 20 nt, Human
auuuugauauaaucuuucaa

SEQ ID NO: 3501248 - RNA, 13 nt, Human
auuuugaucuuca

SEQ ID NO: 3501249 - RNA, 16 nt, Human
auuuugaucuucaaca

SEQ ID NO: 3501250 - RNA, 24 nt, Human
auuuugaugcagcauuugauaaug

SEQ ID NO: 3501251 - RNA, 17 nt, Human
auuuugauguaaagaug

SEQ ID NO: 3501252 - RNA, 18 nt, Human
auuuugauguaaagaugu

SEQ ID NO: 3501253 - RNA, 15 nt, Human
auuuugauguuuuaa

SEQ ID NO: 3501254 - RNA, 16 nt, Human
auuuugauuauuguau

SEQ ID NO: 3501255 - RNA, 18 nt, Human
auuuugauuauuguauuu

SEQ ID NO: 3501256 - RNA, 18 nt, Human
auuuugcaaaauuuccag

SEQ ID NO: 3501257 - RNA, 19 nt, Human
auuuugcaaaauuuccagu

SEQ ID NO: 3501258 - RNA, 21 nt, Human
auuuugcaaagauuuaaucug

SEQ ID NO: 3501259 - RNA, 14 nt, Human
auuuugcaaauaua

SEQ ID NO: 3501260 - RNA, 18 nt, Human
auuuugcaaggugcauuu

SEQ ID NO: 3501261 - RNA, 12 nt, Human
auuuugcauaaa

SEQ ID NO: 3501262 - RNA, 19 nt, Human
auuuugcauaauaaaugcu

SEQ ID NO: 3501263 - RNA, 20 nt, Human
auuuugcauauccuuuuagu

SEQ ID NO: 3501264 - RNA, 19 nt, Human
auuuugccaagggcauaaa

SEQ ID NO: 3501265 - RNA, 23 nt, Human
auuuugcccuugacaaagucaag

SEQ ID NO: 3501266 - RNA, 22 nt, Human
auuuugccuaauacauuaaagc

SEQ ID NO: 3501267 - RNA, 13 nt, Human
auuuugccugugu

SEQ ID NO: 3501268 - RNA, 12 nt, Human
auuuugcuguau

SEQ ID NO: 3501269 - RNA, 16 nt, Human
auuuugcuuuaauuuu

SEQ ID NO: 3501270 - RNA, 20 nt, Human
auuuugcuuugugauuuuug

SEQ ID NO: 3501271 - RNA, 20 nt, Human
auuuuggaaaauaaauuauu

SEQ ID NO: 3501272 - RNA, 17 nt, Human
auuuuggaagauuuuca

SEQ ID NO: 3501273 - RNA, 14 nt, Human
auuuuggaauuugc

SEQ ID NO: 3501274 - RNA, 18 nt, Human
auuuuggagagauaggaa

SEQ ID NO: 3501275 - RNA, 20 nt, Human
auuuuggagagauaggaagg

SEQ ID NO: 3501276 - RNA, 20 nt, Human
auuuuggagauuauaauaaa

SEQ ID NO: 3501277 - RNA, 22 nt, Human
auuuuggcgaaucucaaaauua

SEQ ID NO: 3501278 - RNA, 19 nt, Human
auuuuggcgcuauuacaaa

SEQ ID NO: 3501279 - RNA, 21 nt, Human
auuuugggacaauuguuuuaa

SEQ ID NO: 3501280 - RNA, 22 nt, Human
auuuugggacaauuguuuuaau

SEQ ID NO: 3501281 - RNA, 14 nt, Human
auuuugggcaugug

SEQ ID NO: 3501282 - RNA, 21 nt, Human
auuuugggguacccacugcuc

SEQ ID NO: 3501283 - RNA, 14 nt, Human
auuuuggggucucu

SEQ ID NO: 3501284 - RNA, 15 nt, Human
auuuugguacuuuua

SEQ ID NO: 3501285 - RNA, 20 nt, Human
auuuugguauuacacuguau

SEQ ID NO: 3501286 - RNA, 14 nt, Human
auuuuggugagaaa

SEQ ID NO: 3501287 - RNA, 20 nt, Human
auuuugguuguauucuuuga

SEQ ID NO: 3501288 - RNA, 22 nt, Human
auuuugguuuuguuccccuccu

SEQ ID NO: 3501289 - RNA, 18 nt, Human
auuuuguaacgaagacac

SEQ ID NO: 3501290 - RNA, 19 nt, Human
auuuuguaacgaagacaca

SEQ ID NO: 3501291 - RNA, 17 nt, Human
auuuuguaagaaggcaa

SEQ ID NO: 3501292 - RNA, 19 nt, Human
auuuuguaauaauaaagaa

SEQ ID NO: 3501293 - RNA, 22 nt, Human
auuuuguaauaauaaagaauag

SEQ ID NO: 3501294 - RNA, 21 nt, Human
auuuuguaauuauugugauuu

SEQ ID NO: 3501295 - RNA, 12 nt, Human
auuuuguaauuu

SEQ ID NO: 3501296 - RNA, 18 nt, Human
auuuuguaauuuucuuga

SEQ ID NO: 3501297 - RNA, 17 nt, Human
auuuuguauaauuguau

SEQ ID NO: 3501298 - RNA, 20 nt, Human
auuuuguauaauuguaucgu

SEQ ID NO: 3501299 - RNA, 14 nt, Human
auuuuguauauauc

SEQ ID NO: 3501300 - RNA, 18 nt, Human
auuuuguauauuuguauu

SEQ ID NO: 3501301 - RNA, 15 nt, Human
auuuuguaucugcag

SEQ ID NO: 3501302 - RNA, 21 nt, Human
auuuuguaucugcaggcagac

SEQ ID NO: 3501303 - RNA, 12 nt, Human
auuuuguaugca

SEQ ID NO: 3501304 - RNA, 15 nt, Human
auuuuguauguuaaa

SEQ ID NO: 3501305 - RNA, 17 nt, Human
auuuuguauugugguau

SEQ ID NO: 3501306 - RNA, 12 nt, Human
auuuuguauuuu

SEQ ID NO: 3501307 - RNA, 15 nt, Human
auuuuguauuuucca

SEQ ID NO: 3501308 - RNA, 20 nt, Human
auuuugucaccagaacacaa

SEQ ID NO: 3501309 - RNA, 12 nt, Human
auuuugucuaaa

SEQ ID NO: 3501310 - RNA, 20 nt, Human
auuuugucugcuuaguaucu

SEQ ID NO: 3501311 - RNA, 12 nt, Human
auuuugucuuua

SEQ ID NO: 3501312 - RNA, 19 nt, Human
auuuugugaaacagacuug

SEQ ID NO: 3501313 - RNA, 22 nt, Human
auuuugugaaacagacuuguau

SEQ ID NO: 3501314 - RNA, 18 nt, Human
auuuugugaagugaagga

SEQ ID NO: 3501315 - RNA, 13 nt, Human
auuuugugaaugg

SEQ ID NO: 3501316 - RNA, 19 nt, Human
auuuugugaguuuguuucu

SEQ ID NO: 3501317 - RNA, 21 nt, Human
auuuuguggaggcagugucau

SEQ ID NO: 3501318 - RNA, 20 nt, Human
auuuugugggaauuuaagag

SEQ ID NO: 3501319 - RNA, 23 nt, Human
auuuugugguuuucgagauuauc

SEQ ID NO: 3501320 - RNA, 20 nt, Human
auuuuguguaaaaaaaccac

SEQ ID NO: 3501321 - RNA, 13 nt, Human
auuuugugugacc

SEQ ID NO: 3501322 - RNA, 18 nt, Human
auuuugugugaccaacug

SEQ ID NO: 3501323 - RNA, 18 nt, Human
auuuuguguuuauucuug

SEQ ID NO: 3501324 - RNA, 20 nt, Human
auuuuguguuuauucuugau

SEQ ID NO: 3501325 - RNA, 16 nt, Human
auuuuguucauacaua

SEQ ID NO: 3501326 - RNA, 18 nt, Human
auuuuguucauacauauu

SEQ ID NO: 3501327 - RNA, 16 nt, Human
auuuuguucuuacaca

SEQ ID NO: 3501328 - RNA, 19 nt, Human
auuuuguugcuguuuugau

SEQ ID NO: 3501329 - RNA, 15 nt, Human
auuuuguuggcauag

SEQ ID NO: 3501330 - RNA, 19 nt, Human
auuuuguuguaaaaagaaa

SEQ ID NO: 3501331 - RNA, 17 nt, Human
auuuuguuuaaaaaauc

SEQ ID NO: 3501332 - RNA, 16 nt, Human
auuuuguuucagugca

SEQ ID NO: 3501333 - RNA, 15 nt, Human
auuuuguuucuguac

SEQ ID NO: 3501334 - RNA, 17 nt, Human
auuuuguuugguauugu

SEQ ID NO: 3501335 - RNA, 14 nt, Human
auuuuguuuugcuu

SEQ ID NO: 3501336 - RNA, 21 nt, Human
auuuuguuuuugucuuaaaaa

SEQ ID NO: 3501337 - RNA, 14 nt, Human
auuuuuaaaaaaua

SEQ ID NO: 3501338 - RNA, 16 nt, Human
auuuuuaaaaaaugaa

SEQ ID NO: 3501339 - RNA, 20 nt, Human
auuuuuaaagaaaaguuuug

SEQ ID NO: 3501340 - RNA, 15 nt, Human
auuuuuaaagauaga

SEQ ID NO: 3501341 - RNA, 12 nt, Human
auuuuuaaauaa

SEQ ID NO: 3501342 - RNA, 20 nt, Human
auuuuuaaaugcaguuacaa

SEQ ID NO: 3501343 - RNA, 19 nt, Human
auuuuuaaauguaaaacau

SEQ ID NO: 3501344 - RNA, 18 nt, Human
auuuuuaagauaauaaua

SEQ ID NO: 3501345 - RNA, 20 nt, Human
auuuuuaagauaauaauaua

SEQ ID NO: 3501346 - RNA, 22 nt, Human
auuuuuaagauaauaauauaug

SEQ ID NO: 3501347 - RNA, 18 nt, Human
auuuuuaagugcugcauu

SEQ ID NO: 3501348 - RNA, 16 nt, Human
auuuuuaaucaugaaa

SEQ ID NO: 3501349 - RNA, 18 nt, Human
auuuuuaauuaaaaacua

SEQ ID NO: 3501350 - RNA, 16 nt, Human
auauaugcauauauau

SEQ ID NO: 3501351 - RNA, 14 nt, Human
auauaugccuuuuu

SEQ ID NO: 3501352 - RNA, 18 nt, Human
auauaugccuuuuuccua

SEQ ID NO: 3501353 - RNA, 15 nt, Human
auauauggaagagga

SEQ ID NO: 3501354 - RNA, 12 nt, Human
auauauggacau

SEQ ID NO: 3501355 - RNA, 19 nt, Human
auauauggcagaguuguaa

SEQ ID NO: 3501356 - RNA, 20 nt, Human
auauauggcagaguuguaaa

SEQ ID NO: 3501357 - RNA, 22 nt, Human
auauauggcagaguuguaaaua

SEQ ID NO: 3501358 - RNA, 17 nt, Human
auauauggcauuugcag

SEQ ID NO: 3501359 - RNA, 20 nt, Human
auauauggggaugguaguuu

SEQ ID NO: 3501360 - RNA, 18 nt, Human
auauauggucuaauguuu

SEQ ID NO: 3501361 - RNA, 19 nt, Human
auauauggucuaauguuua

SEQ ID NO: 3501362 - RNA, 20 nt, Human
auauauggucuaauguuuaa

SEQ ID NO: 3501363 - RNA, 20 nt, Human
auauauguauaugcaauaua

SEQ ID NO: 3501364 - RNA, 11 nt, Human
auauauguaug

SEQ ID NO: 3501365 - RNA, 19 nt, Human
auauauguauguaaaaaug

SEQ ID NO: 3501366 - RNA, 12 nt, Human
auauauguauuu

SEQ ID NO: 3501367 - RNA, 18 nt, Human
auauaugugaggauguau

SEQ ID NO: 3501368 - RNA, 12 nt, Human
auauauguguau

SEQ ID NO: 3501369 - RNA, 13 nt, Human
auauauguguaug

SEQ ID NO: 3501370 - RNA, 15 nt, Human
auauauguguaugua

SEQ ID NO: 3501371 - RNA, 21 nt, Human
auauauguguguuuaaauaaa

SEQ ID NO: 3501372 - RNA, 14 nt, Human
auauauuauacuug

SEQ ID NO: 3501373 - RNA, 18 nt, Human
auaugaacccuuuguuuc

SEQ ID NO: 3501374 - RNA, 19 nt, Human
auaugaacccuuuguuucu

SEQ ID NO: 3501375 - RNA, 14 nt, Human
auaugaacuuaaca

SEQ ID NO: 3501376 - RNA, 22 nt, Human
auaugaauacagggcaugcauu

SEQ ID NO: 3501377 - RNA, 17 nt, Human
auaugacaaauguuucu

SEQ ID NO: 3501378 - RNA, 14 nt, Human
auaugacagcuguc

SEQ ID NO: 3501379 - RNA, 19 nt, Human
auaugacauucaugccugg

SEQ ID NO: 3501380 - RNA, 16 nt, Human
auaugacggaagaaca

SEQ ID NO: 3501381 - RNA, 18 nt, Human
auaugacggaagaacaua

SEQ ID NO: 3501382 - RNA, 23 nt, Human
auaugacggaagaacauagaacu

SEQ ID NO: 3501383 - RNA, 13 nt, Human
auaugacucacau

SEQ ID NO: 3501384 - RNA, 22 nt, Human
auaugacuguuuuucggacagu

SEQ ID NO: 3501385 - RNA, 13 nt, Human
auaugagaagaau

SEQ ID NO: 3501386 - RNA, 23 nt, Human
auaugagaaggugccucaagaau

SEQ ID NO: 3501387 - RNA, 21 nt, Human
auaugagcuuccuucugugaa

SEQ ID NO: 3501388 - RNA, 20 nt, Human
auaugagcuuuauguaauaa

SEQ ID NO: 3501389 - RNA, 16 nt, Human
auaugaguauacaaua

SEQ ID NO: 3501390 - RNA, 17 nt, Human
auaugaguauacaauau

SEQ ID NO: 3501391 - RNA, 20 nt, Human
auaugaguguggaagccgga

SEQ ID NO: 3501392 - RNA, 17 nt, Human
auaugaguuucauagcu

SEQ ID NO: 3501393 - RNA, 19 nt, Human
auaugaguuucauagcuaa

SEQ ID NO: 3501394 - RNA, 21 nt, Human
auaugaguuucauagcuaaga

SEQ ID NO: 3501395 - RNA, 20 nt, Human
auaugauagcgggaaaagga

SEQ ID NO: 3501396 - RNA, 15 nt, Human
auaugauauugcaua

SEQ ID NO: 3501397 - RNA, 16 nt, Human
auaugauauugcauau

SEQ ID NO: 3501398 - RNA, 11 nt, Human
auaugauuaaa

SEQ ID NO: 3501399 - RNA, 17 nt, Human
auaugauuaaaaauauc

SEQ ID NO: 3501400 - RNA, 21 nt, Human
auaugauuaguaaagaaauga

SEQ ID NO: 3501401 - RNA, 22 nt, Human
auaugauucaaaugucuauaaa

SEQ ID NO: 3501402 - RNA, 14 nt, Human
auaugauuguuucu

SEQ ID NO: 3501403 - RNA, 22 nt, Human
auaugauuguuucucaaaucuu

SEQ ID NO: 3501404 - RNA, 15 nt, Human
auaugauuuaaaaca

SEQ ID NO: 3501405 - RNA, 13 nt, Human
auaugauuuauag

SEQ ID NO: 3501406 - RNA, 17 nt, Human
auaugauuucacuagaa

SEQ ID NO: 3501407 - RNA, 22 nt, Human
auaugauuuuauuugacaaaau

SEQ ID NO: 3501408 - RNA, 16 nt, Human
auaugauuuuuuaaaa

SEQ ID NO: 3501409 - RNA, 22 nt, Human
auaugauuuuuuaaaagaaauu

SEQ ID NO: 3501410 - RNA, 20 nt, Human
auaugcaaacaggguaacua

SEQ ID NO: 3501411 - RNA, 23 nt, Human
auaugcaaagcacugacuucuaa

SEQ ID NO: 3501412 - RNA, 19 nt, Human
auaugcacacagugcuuuc

SEQ ID NO: 3501413 - RNA, 15 nt, Human
auaugcaccuugugu

SEQ ID NO: 3501414 - RNA, 20 nt, Human
auaugcaccuugugucugua

SEQ ID NO: 3501415 - RNA, 19 nt, Human
auaugcacuaagucucuuu

SEQ ID NO: 3501416 - RNA, 13 nt, Human
auaugcacuuaua

SEQ ID NO: 3501417 - RNA, 14 nt, Human
auaugcacuuauaa

SEQ ID NO: 3501418 - RNA, 18 nt, Human
auaugcagaaauagacaa

SEQ ID NO: 3501419 - RNA, 22 nt, Human
auaugcauauauauaugugugu

SEQ ID NO: 3501420 - RNA, 21 nt, Human
auaugcuaccaccagcugugu

SEQ ID NO: 3501421 - RNA, 14 nt, Human
auaugcuauuucua

SEQ ID NO: 3501422 - RNA, 18 nt, Human
auaugcuauuucuauauu

SEQ ID NO: 3501423 - RNA, 17 nt, Human
auaugcucugcauguua

SEQ ID NO: 3501424 - RNA, 16 nt, Human
auaugcuuaaaauaag

SEQ ID NO: 3501425 - RNA, 19 nt, Human
auaugcuuaaaauaagcag

SEQ ID NO: 3501426 - RNA, 13 nt, Human
auaugcuuaguaa

SEQ ID NO: 3501427 - RNA, 14 nt, Human
auaugcuuauacac

SEQ ID NO: 3501428 - RNA, 21 nt, Human
auaugcuuauacacuuacacu

SEQ ID NO: 3501429 - RNA, 15 nt, Human
auaugcuucuuuaaa

SEQ ID NO: 3501430 - RNA, 19 nt, Human
auaugcuuuauuaauguuu

SEQ ID NO: 3501431 - RNA, 18 nt, Human
auauggaaauauauauua

SEQ ID NO: 3501432 - RNA, 19 nt, Human
auauggaacuuacauuguu

SEQ ID NO: 3501433 - RNA, 18 nt, Human
auauggaacuucuaauau

SEQ ID NO: 3501434 - RNA, 15 nt, Human
auauggaagaaagua

SEQ ID NO: 3501435 - RNA, 15 nt, Human
auauggacaagaggu

SEQ ID NO: 3501436 - RNA, 16 nt, Human
auauggacaagaggua

SEQ ID NO: 3501437 - RNA, 20 nt, Human
auauggacacuuaauacuac

SEQ ID NO: 3501438 - RNA, 18 nt, Human
auauggaugauucagaaa

SEQ ID NO: 3501439 - RNA, 17 nt, Human
auauggauuuguuacag

SEQ ID NO: 3501440 - RNA, 22 nt, Human
auauggauuuucuauuguuacu

SEQ ID NO: 3501441 - RNA, 23 nt, Human
auauggauuuucuauuguuacuc

SEQ ID NO: 3501442 - RNA, 16 nt, Human
auauggcaaaaauggc

SEQ ID NO: 3501443 - RNA, 18 nt, Human
auauggcagaguuguaaa

SEQ ID NO: 3501444 - RNA, 15 nt, Human
auauggcuauaaaua

SEQ ID NO: 3501445 - RNA, 14 nt, Human
auaugggacugagc

SEQ ID NO: 3501446 - RNA, 14 nt, Human
auaugggagaaaua

SEQ ID NO: 3501447 - RNA, 16 nt, Human
auauggggaauauauu

SEQ ID NO: 3501448 - RNA, 16 nt, Human
auauggggaugcagca

SEQ ID NO: 3501449 - RNA, 20 nt, Human
auauggggaugcagcauuau

SEQ ID NO: 3501450 - RNA, 19 nt, Human
auauggggaugguaguuuu

SEQ ID NO: 3501451 - RNA, 20 nt, Human
auaugggggccuggauucau

SEQ ID NO: 3501452 - RNA, 23 nt, Human
auauggggggccaacaccaggga

SEQ ID NO: 3501453 - RNA, 17 nt, Human
auauggguucuuuuuug

SEQ ID NO: 3501454 - RNA, 22 nt, Human
auauggguugcauuuggucaag

SEQ ID NO: 3501455 - RNA, 15 nt, Human
auaugguauauauac

SEQ ID NO: 3501456 - RNA, 22 nt, Human
auauggucuaccaguuugcuga

SEQ ID NO: 3501457 - RNA, 16 nt, Human
auauguaaaauaaaau

SEQ ID NO: 3501458 - RNA, 20 nt, Human
auauguaaaauaaaauuaug

SEQ ID NO: 3501459 - RNA, 22 nt, Human
auauguaaaugguaugucauuc

SEQ ID NO: 3501460 - RNA, 17 nt, Human
auauguaacaagccacc

SEQ ID NO: 3501461 - RNA, 16 nt, Human
auauguacaguuaucu

SEQ ID NO: 3501462 - RNA, 14 nt, Human
auauguacauaaau

SEQ ID NO: 3501463 - RNA, 15 nt, Human
auauguacauaaauu

SEQ ID NO: 3501464 - RNA, 14 nt, Human
auauguaccaugua

SEQ ID NO: 3501465 - RNA, 17 nt, Human
auauguacuugucaaag

SEQ ID NO: 3501466 - RNA, 13 nt, Human
auauguagacuau

SEQ ID NO: 3501467 - RNA, 20 nt, Human
auauguagacuauauacaug

SEQ ID NO: 3501468 - RNA, 19 nt, Human
auauguagccuuuacuguu

SEQ ID NO: 3501469 - RNA, 19 nt, Human
auauguaguauaaagaaaa

SEQ ID NO: 3501470 - RNA, 13 nt, Human
auauguauguaaa

SEQ ID NO: 3501471 - RNA, 17 nt, Human
auauguauguguuuaga

SEQ ID NO: 3501472 - RNA, 19 nt, Human
auauguauguguuuagaau

SEQ ID NO: 3501473 - RNA, 22 nt, Human
auauguauguguuuagaauuga

SEQ ID NO: 3501474 - RNA, 21 nt, Human
auauguauuaacacuacucaa

SEQ ID NO: 3501475 - RNA, 22 nt, Human
auauguauuauuuauaauuccu

SEQ ID NO: 3501476 - RNA, 13 nt, Human
auauguauucuuu

SEQ ID NO: 3501477 - RNA, 17 nt, Human
auauguauuuuauguau

SEQ ID NO: 3501478 - RNA, 17 nt, Human
auauguauuuuuauaua

SEQ ID NO: 3501479 - RNA, 14 nt, Human
auaugucaagccau

SEQ ID NO: 3501480 - RNA, 22 nt, Human
auaugucaagugcugugcaagg

SEQ ID NO: 3501481 - RNA, 18 nt, Human
auaugucagugcugaugu

SEQ ID NO: 3501482 - RNA, 20 nt, Human
auauguccucuuuuguuguu

SEQ ID NO: 3501483 - RNA, 11 nt, Human
auauguccugg

SEQ ID NO: 3501484 - RNA, 13 nt, Human
auaugugaacagu

SEQ ID NO: 3501485 - RNA, 21 nt, Human
auaugugaauccucuucuuua

SEQ ID NO: 3501486 - RNA, 21 nt, Human
auaugugagauuuuuuauugc

SEQ ID NO: 3501487 - RNA, 16 nt, Human
auaugugccacauuuu

SEQ ID NO: 3501488 - RNA, 18 nt, Human
auaugugcuggaauucua

SEQ ID NO: 3501489 - RNA, 18 nt, Human
auaugugcuugccucagu

SEQ ID NO: 3501490 - RNA, 20 nt, Human
auauguguauauauacauac

SEQ ID NO: 3501491 - RNA, 21 nt, Human
auauguguauauauacauaca

SEQ ID NO: 3501492 - RNA, 20 nt, Human
auauguguguguauguuugc

SEQ ID NO: 3501493 - RNA, 17 nt, Human
auauguguuuuucacau

SEQ ID NO: 3501494 - RNA, 19 nt, Human
auauguguuuuucacauuu

SEQ ID NO: 3501495 - RNA, 20 nt, Human
auauguuaaccucaguguca

SEQ ID NO: 3501496 - RNA, 23 nt, Human
auauguuaagcagcuaaauuuuc

SEQ ID NO: 3501497 - RNA, 17 nt, Human
auauguugaauacuuuu

SEQ ID NO: 3501498 - RNA, 16 nt, Human
auauguuguaauauuu

SEQ ID NO: 3501499 - RNA, 21 nt, Human
auauguuguaauauuucuuca

SEQ ID NO: 3501500 - RNA, 15 nt, Human
auauguuuaaaagua

SEQ ID NO: 3501501 - RNA, 17 nt, Human
auauguuuaccuuuuaa

SEQ ID NO: 3501502 - RNA, 20 nt, Human
auauguuuaccuuuuaauua

SEQ ID NO: 3501503 - RNA, 22 nt, Human
auauguuuaccuuuuaauuaau

SEQ ID NO: 3501504 - RNA, 13 nt, Human
auauguuucaaac

SEQ ID NO: 3501505 - RNA, 16 nt, Human
auauguuucaaacuuu

SEQ ID NO: 3501506 - RNA, 17 nt, Human
auauguuucaaacuuug

SEQ ID NO: 3501507 - RNA, 21 nt, Human
auauguuucacacaaacaagg

SEQ ID NO: 3501508 - RNA, 20 nt, Human
auauguuuccuuguuuauca

SEQ ID NO: 3501509 - RNA, 22 nt, Human
auauguuuuaaauauagaauuu

SEQ ID NO: 3501510 - RNA, 14 nt, Human
auauguuuuuuaga

SEQ ID NO: 3501511 - RNA, 15 nt, Human
auauuaaaaagucuu

SEQ ID NO: 3501512 - RNA, 17 nt, Human
auauuaaaaagucuuuu

SEQ ID NO: 3501513 - RNA, 20 nt, Human
auuuuuuuuuaagcucugag

SEQ ID NO: 3501514 - RNA, 21 nt, Human
auuuuuuuuuaagcucugagc

SEQ ID NO: 3501515 - RNA, 19 nt, Human
auuuuuuuuucauacacuu

SEQ ID NO: 3501516 - RNA, 15 nt, Human
auuuggaaaggaaug

SEQ ID NO: 3501517 - RNA, 22 nt, Human
auuuggaaauaaagucagaugg

SEQ ID NO: 3501518 - RNA, 12 nt, Human
auuuggaaaucc

SEQ ID NO: 3501519 - RNA, 22 nt, Human
auuuggaauaaaaauuccagaa

SEQ ID NO: 3501520 - RNA, 13 nt, Human
auuuggaauacuu

SEQ ID NO: 3501521 - RNA, 15 nt, Human
auuuggaauacuuuu

SEQ ID NO: 3501522 - RNA, 14 nt, Human
auuuggaccauuuu

SEQ ID NO: 3501523 - RNA, 20 nt, Human
caaaagguucacuaaagcag

SEQ ID NO: 3501524 - RNA, 15 nt, Human
caaaaguaaugccuc

SEQ ID NO: 3501525 - RNA, 18 nt, Human
caaaaguagaacuuugua

SEQ ID NO: 3501526 - RNA, 20 nt, Human
caaaaguagaacuuuguaua

SEQ ID NO: 3501527 - RNA, 21 nt, Human
caaaaguagaacuuuguauag

SEQ ID NO: 3501528 - RNA, 22 nt, Human
caaaaguagaacuuuguauagu

SEQ ID NO: 3501529 - RNA, 18 nt, Human
caaaaguaucgggggcug

SEQ ID NO: 3501530 - RNA, 22 nt, Human
caaaaguaucgggggcuggggc

SEQ ID NO: 3501531 - RNA, 16 nt, Human
caaaaguauuuuccug

SEQ ID NO: 3501532 - RNA, 17 nt, Human
caaaaguauuuuccugu

SEQ ID NO: 3501533 - RNA, 13 nt, Human
caaaaguggucag

SEQ ID NO: 3501534 - RNA, 16 nt, Human
caaaaguuauuaaaau

SEQ ID NO: 3501535 - RNA, 18 nt, Human
caaaaguuccaagagucu

SEQ ID NO: 3501536 - RNA, 23 nt, Human
caaaaguuccaagagucuaaaga

SEQ ID NO: 3501537 - RNA, 18 nt, Human
caaaaguucugacuugac

SEQ ID NO: 3501538 - RNA, 14 nt, Human
caaaaguuucucuu

SEQ ID NO: 3501539 - RNA, 18 nt, Human
caaaaguuuguuugcuua

SEQ ID NO: 3501540 - RNA, 11 nt, Human
caaaauaaaaa

SEQ ID NO: 3501541 - RNA, 15 nt, Human
caaaauaaaaaccaa

SEQ ID NO: 3501542 - RNA, 15 nt, Human
caaaauaaaaacuau

SEQ ID NO: 3501543 - RNA, 21 nt, Human
caaaauaaaaagugacacagc

SEQ ID NO: 3501544 - RNA, 17 nt, Human
caaaauaaaacaaaggg

SEQ ID NO: 3501545 - RNA, 14 nt, Human
caaaauaaaacaua

SEQ ID NO: 3501546 - RNA, 15 nt, Human
caaaauaaaacauag

SEQ ID NO: 3501547 - RNA, 17 nt, Human
caaaauaaaacauagca

SEQ ID NO: 3501548 - RNA, 20 nt, Human
caaaauaaaacuuuuuaaaa

SEQ ID NO: 3501549 - RNA, 14 nt, Human
caaaauaaaucagu

SEQ ID NO: 3501550 - RNA, 14 nt, Human
caaaauaaauguug

SEQ ID NO: 3501551 - RNA, 13 nt, Human
caaaauaaauugg

SEQ ID NO: 3501552 - RNA, 14 nt, Human
caaaauaagaaaag

SEQ ID NO: 3501553 - RNA, 18 nt, Human
caaaauaagaaaagaugu

SEQ ID NO: 3501554 - RNA, 14 nt, Human
caaaauaaugucuu

SEQ ID NO: 3501555 - RNA, 13 nt, Human
caaaauacaugaa

SEQ ID NO: 3501556 - RNA, 20 nt, Human
caaaauacauucuuuuugcu

SEQ ID NO: 3501557 - RNA, 14 nt, Human
caaaauagaaaagu

SEQ ID NO: 3501558 - RNA, 13 nt, Human
caaaauagaaagu

SEQ ID NO: 3501559 - RNA, 13 nt, Human
caaaauagaagcu

SEQ ID NO: 3501560 - RNA, 13 nt, Human
caaaauagagaau

SEQ ID NO: 3501561 - RNA, 15 nt, Human
caaaauagcauuugu

SEQ ID NO: 3501562 - RNA, 13 nt, Human
caaaauagggacu

SEQ ID NO: 3501563 - RNA, 18 nt, Human
caaaauaggguauauuuu

SEQ ID NO: 3501564 - RNA, 16 nt, Human
caaaauagugccacua

SEQ ID NO: 3501565 - RNA, 13 nt, Human
caaaauauaaagc

SEQ ID NO: 3501566 - RNA, 18 nt, Human
caaaauauacaaaacuuu

SEQ ID NO: 3501567 - RNA, 12 nt, Human
caaaauauuuaa

SEQ ID NO: 3501568 - RNA, 13 nt, Human
caaaauauuuaaa

SEQ ID NO: 3501569 - RNA, 14 nt, Human
caaaauauuuaaaa

SEQ ID NO: 3501570 - RNA, 17 nt, Human
caaaauauuuaaaaaug

SEQ ID NO: 3501571 - RNA, 20 nt, Human
caaaauauuuaaaaaugucu

SEQ ID NO: 3501572 - RNA, 17 nt, Human
caaaauauuuguacaua

SEQ ID NO: 3501573 - RNA, 17 nt, Human
caaaaucacuuccauag

SEQ ID NO: 3501574 - RNA, 12 nt, Human
caaaaucaguuu

SEQ ID NO: 3501575 - RNA, 22 nt, Human
caaaaucauuuuauaugucaaa

SEQ ID NO: 3501576 - RNA, 16 nt, Human
caaaauccccuucuca

SEQ ID NO: 3501577 - RNA, 18 nt, Human
caaaauccugacuauuau

SEQ ID NO: 3501578 - RNA, 18 nt, Human
caaaauccuuccaaagaa

SEQ ID NO: 3501579 - RNA, 19 nt, Human
caaaauccuuccaaagaau

SEQ ID NO: 3501580 - RNA, 16 nt, Human
caaaauccuugcuuau

SEQ ID NO: 3501581 - RNA, 18 nt, Human
caaaaucgauuggcuuua

SEQ ID NO: 3501582 - RNA, 23 nt, Human
caaaaucucuccacuuucagcug

SEQ ID NO: 3501583 - RNA, 16 nt, Human
caaaaucuguucuaac

SEQ ID NO: 3501584 - RNA, 22 nt, Human
caaaaucuugaucaguuaagaa

SEQ ID NO: 3501585 - RNA, 22 nt, Human
caaaaugaaacgcaaccaccac

SEQ ID NO: 3501586 - RNA, 18 nt, Human
caaaaugacaucuuuuua

SEQ ID NO: 3501587 - RNA, 23 nt, Human
caaaaugacaucuuuuuaaagcu

SEQ ID NO: 3501588 - RNA, 22 nt, Human
caaaaugagagggcaguguuuc

SEQ ID NO: 3501589 - RNA, 21 nt, Human
caaaaugagcccuguccugcc

SEQ ID NO: 3501590 - RNA, 17 nt, Human
caaaaugaggaauguau

SEQ ID NO: 3501591 - RNA, 20 nt, Human
caaaaugauggacccaaugc

SEQ ID NO: 3501592 - RNA, 20 nt, Human
caaaaugcuuuuuauuucug

SEQ ID NO: 3501593 - RNA, 19 nt, Human
caaaauggauacauaaaga

SEQ ID NO: 3501594 - RNA, 16 nt, Human
caaaauguaacuguua

SEQ ID NO: 3501595 - RNA, 23 nt, Human
caaaauguaggcuuaguuugugu

SEQ ID NO: 3501596 - RNA, 16 nt, Human
caaaauguauauauuu

SEQ ID NO: 3501597 - RNA, 12 nt, Human
caaaaugugagu

SEQ ID NO: 3501598 - RNA, 20 nt, Human
caaaauguuaucuucucaag

SEQ ID NO: 3501599 - RNA, 18 nt, Human
caaaauguuauuucccua

SEQ ID NO: 3501600 - RNA, 22 nt, Human
caaaauguugaaauaugauguu

SEQ ID NO: 3501601 - RNA, 15 nt, Human
caaaauuaaaucugu

SEQ ID NO: 3501602 - RNA, 20 nt, Human
caaaauuaagguguuugaaa

SEQ ID NO: 3501603 - RNA, 23 nt, Human
caaaauuagccaguaauccugua

SEQ ID NO: 3501604 - RNA, 21 nt, Human
caaaauuauaggagacuugua

SEQ ID NO: 3501605 - RNA, 17 nt, Human
caaaauucaaagcaugg

SEQ ID NO: 3501606 - RNA, 19 nt, Human
caaaauucauuucuaauua

SEQ ID NO: 3501607 - RNA, 13 nt, Human
caaaauucccagg

SEQ ID NO: 3501608 - RNA, 21 nt, Human
caaaauucgaccugauuuaca

SEQ ID NO: 3501609 - RNA, 22 nt, Human
caaaauugauguguuuauuuau

SEQ ID NO: 3501610 - RNA, 17 nt, Human
caaaauugcaaaucuug

SEQ ID NO: 3501611 - RNA, 16 nt, Human
caaaauuguuacaaau

SEQ ID NO: 3501612 - RNA, 19 nt, Human
caaaauuuauuuuauaaga

SEQ ID NO: 3501613 - RNA, 23 nt, Human
caaaauuuauuuuauaagaaaaa

SEQ ID NO: 3501614 - RNA, 14 nt, Human
caaaauuugaaauu

SEQ ID NO: 3501615 - RNA, 13 nt, Human
caaaauuugacua

SEQ ID NO: 3501616 - RNA, 23 nt, Human
caaaauuugacuaauuuuacaug

SEQ ID NO: 3501617 - RNA, 19 nt, Human
caaaauuugaugccaggac

SEQ ID NO: 3501618 - RNA, 14 nt, Human
caaaauuuuaaaaa

SEQ ID NO: 3501619 - RNA, 14 nt, Human
caaaauuuuauucc

SEQ ID NO: 3501620 - RNA, 18 nt, Human
caaaauuuuauuccuaua

SEQ ID NO: 3501621 - RNA, 19 nt, Human
caaaauuuuauuuugugcu

SEQ ID NO: 3501622 - RNA, 20 nt, Human
caaaauuuucucauuuucuu

SEQ ID NO: 3501623 - RNA, 18 nt, Human
caaaauuuuucaacccca

SEQ ID NO: 3501624 - RNA, 22 nt, Human
caaaauuuuuucucuaggaaau

SEQ ID NO: 3501625 - RNA, 16 nt, Human
caaacaaaaagguucu

SEQ ID NO: 3501626 - RNA, 17 nt, Human
caaacaaauaugcaaaa

SEQ ID NO: 3501627 - RNA, 16 nt, Human
caaacaagcauauaaa

SEQ ID NO: 3501628 - RNA, 20 nt, Human
caaacaagcauauaaaaugg

SEQ ID NO: 3501629 - RNA, 24 nt, Human
caaacaauaguaauucucaggcca

SEQ ID NO: 3501630 - RNA, 21 nt, Human
caaacaaucucuuaaauuggg

SEQ ID NO: 3501631 - RNA, 17 nt, Human
caaacaaugacaaagca

SEQ ID NO: 3501632 - RNA, 22 nt, Human
caaacaauggaaacugaaugcu

SEQ ID NO: 3501633 - RNA, 14 nt, Human
caaacacaagguca

SEQ ID NO: 3501634 - RNA, 20 nt, Human
caaacacaaggucauggcca

SEQ ID NO: 3501635 - RNA, 13 nt, Human
caaacacauuaag

SEQ ID NO: 3501636 - RNA, 16 nt, Human
caaacacauuguuauu

SEQ ID NO: 3501637 - RNA, 15 nt, Human
caaacaccuggacuu

SEQ ID NO: 3501638 - RNA, 13 nt, Human
caaacagaacagg

SEQ ID NO: 3501639 - RNA, 17 nt, Human
caaacagaacaggguca

SEQ ID NO: 3501640 - RNA, 11 nt, Human
caaacagcaaa

SEQ ID NO: 3501641 - RNA, 20 nt, Human
caaacagcaaaccaagagau

SEQ ID NO: 3501642 - RNA, 14 nt, Human
caaacaguagguug

SEQ ID NO: 3501643 - RNA, 17 nt, Human
caaacagucucccuucc

SEQ ID NO: 3501644 - RNA, 21 nt, Human
caaacaucacucugcugcuua

SEQ ID NO: 3501645 - RNA, 18 nt, Human
caaacauccuaucaacaa

SEQ ID NO: 3501646 - RNA, 14 nt, Human
caaacaugaagugu

SEQ ID NO: 3501647 - RNA, 15 nt, Human
caaacaugagaugug

SEQ ID NO: 3501648 - RNA, 23 nt, Human
caaacaugagauguguggacugu

SEQ ID NO: 3501649 - RNA, 14 nt, Human
caaacauguauuua

SEQ ID NO: 3501650 - RNA, 18 nt, Human
caaacaugugguuaaugc

SEQ ID NO: 3501651 - RNA, 14 nt, Human
caaacauuaauguu

SEQ ID NO: 3501652 - RNA, 15 nt, Human
caaacauuaauguug

SEQ ID NO: 3501653 - RNA, 15 nt, Human
caaacauuaguacuu

SEQ ID NO: 3501654 - RNA, 17 nt, Human
caaacauuguguugaca

SEQ ID NO: 3501655 - RNA, 14 nt, Human
caaacauuucaaag

SEQ ID NO: 3501656 - RNA, 18 nt, Human
caaacauuuucuggccag

SEQ ID NO: 3501657 - RNA, 14 nt, Human
caaaccaaauaaaa

SEQ ID NO: 3501658 - RNA, 17 nt, Human
caaaccaaauuuuaauu

SEQ ID NO: 3501659 - RNA, 20 nt, Human
caaaccaacaggcuaccaac

SEQ ID NO: 3501660 - RNA, 17 nt, Human
caaaccaagucggaaca

SEQ ID NO: 3501661 - RNA, 16 nt, Human
auuuuuaagugcugca

SEQ ID NO: 3501662 - RNA, 14 nt, Human
auuuuuaagugguu

SEQ ID NO: 3501663 - RNA, 18 nt, Human
auuuuuaauauauacuau

SEQ ID NO: 3501664 - RNA, 14 nt, Human
auuuuuaaucauga

SEQ ID NO: 3501665 - RNA, 15 nt, Human
auuuuuaaucaugaa

SEQ ID NO: 3501666 - RNA, 17 nt, Human
auuuuuaaucaugaaau

SEQ ID NO: 3501667 - RNA, 15 nt, Human
auuuuuaauuaaaaa

SEQ ID NO: 3501668 - RNA, 17 nt, Human
auuuuuacaauguaauu

SEQ ID NO: 3501669 - RNA, 18 nt, Human
auuuuuacaauguaauua

SEQ ID NO: 3501670 - RNA, 14 nt, Human
auuuuuacagaauu

SEQ ID NO: 3501671 - RNA, 17 nt, Human
auuuuuacaucuaaacu

SEQ ID NO: 3501672 - RNA, 21 nt, Human
auuuuuacauuuaaaccuuuu

SEQ ID NO: 3501673 - RNA, 11 nt, Human
auuuuuaccag

SEQ ID NO: 3501674 - RNA, 17 nt, Human
auuuuuacccuaauguc

SEQ ID NO: 3501675 - RNA, 21 nt, Human
auuuuuacguuugaagacauu

SEQ ID NO: 3501676 - RNA, 14 nt, Human
auuuuuacugccac

SEQ ID NO: 3501677 - RNA, 23 nt, Human
auuuuuagaauaagaauuugcau

SEQ ID NO: 3501678 - RNA, 21 nt, Human
auuuuuagaauuaaaaaagca

SEQ ID NO: 3501679 - RNA, 20 nt, Human
auuuuuagaugguuacacug

SEQ ID NO: 3501680 - RNA, 23 nt, Human
auuuuuagaugguuacacuguua

SEQ ID NO: 3501681 - RNA, 22 nt, Human
auuuuuagccugugucauugcc

SEQ ID NO: 3501682 - RNA, 17 nt, Human
auuuuuaggacaugaaa

SEQ ID NO: 3501683 - RNA, 16 nt, Human
auuuuuaguaaagaca

SEQ ID NO: 3501684 - RNA, 16 nt, Human
auuuuuauacaguagu

SEQ ID NO: 3501685 - RNA, 14 nt, Human
auuuuuauauagcu

SEQ ID NO: 3501686 - RNA, 18 nt, Human
auuuuuauauuaguugcu

SEQ ID NO: 3501687 - RNA, 20 nt, Human
auuuuuauauuaguugcuuu

SEQ ID NO: 3501688 - RNA, 16 nt, Human
auuuuuauauuuacua

SEQ ID NO: 3501689 - RNA, 16 nt, Human
auuuuuauauuugaaa

SEQ ID NO: 3501690 - RNA, 20 nt, Human
auuuuuaucaguuacacaug

SEQ ID NO: 3501691 - RNA, 12 nt, Human
auuuuuauccau

SEQ ID NO: 3501692 - RNA, 16 nt, Human
auuuuuaucuauauaa

SEQ ID NO: 3501693 - RNA, 17 nt, Human
auuuuuaugaugaugaa

SEQ ID NO: 3501694 - RNA, 15 nt, Human
auuuuuauggaauuu

SEQ ID NO: 3501695 - RNA, 16 nt, Human
auuuuuauuaaauuau

SEQ ID NO: 3501696 - RNA, 14 nt, Human
auuuuuauuaugca

SEQ ID NO: 3501697 - RNA, 13 nt, Human
auuuuuauuauua

SEQ ID NO: 3501698 - RNA, 15 nt, Human
auuuuuauuauuugu

SEQ ID NO: 3501699 - RNA, 12 nt, Human
auuuuuauucau

SEQ ID NO: 3501700 - RNA, 14 nt, Human
auuuuuauucauaa

SEQ ID NO: 3501701 - RNA, 12 nt, Human
auuuuuauuguu

SEQ ID NO: 3501702 - RNA, 18 nt, Human
auuuuuauuuuugcugag

SEQ ID NO: 3501703 - RNA, 15 nt, Human
auuuuucaaagcaau

SEQ ID NO: 3501704 - RNA, 22 nt, Human
auuuuucaaccccacccuguuu

SEQ ID NO: 3501705 - RNA, 23 nt, Human
auuuuucaaccccacccuguuug

SEQ ID NO: 3501706 - RNA, 13 nt, Human
auuuuucaacuuu

SEQ ID NO: 3501707 - RNA, 15 nt, Human
auuuuucaaggaagg

SEQ ID NO: 3501708 - RNA, 17 nt, Human
auuuuucaauaaagcau

SEQ ID NO: 3501709 - RNA, 22 nt, Human
auuuuucaauauauugaacuuu

SEQ ID NO: 3501710 - RNA, 18 nt, Human
auuuuucacauaucuagu

SEQ ID NO: 3501711 - RNA, 21 nt, Human
auuuuucacauaucuaguaug

SEQ ID NO: 3501712 - RNA, 22 nt, Human
auuuuucacucuaagucaugua

SEQ ID NO: 3501713 - RNA, 19 nt, Human
auuuuucaugauuuugaaa

SEQ ID NO: 3501714 - RNA, 19 nt, Human
auuuuucccaggcaaauaa

SEQ ID NO: 3501715 - RNA, 17 nt, Human
auuuuuccguuugcuuu

SEQ ID NO: 3501716 - RNA, 23 nt, Human
auuuuuccuaugcuauugacaau

SEQ ID NO: 3501717 - RNA, 16 nt, Human
auuuuucuaaacguaa

SEQ ID NO: 3501718 - RNA, 17 nt, Human
auuuuucuaaccuugaa

SEQ ID NO: 3501719 - RNA, 18 nt, Human
auuuuucuacugcucuuu

SEQ ID NO: 3501720 - RNA, 21 nt, Human
caaauguucuaaguuucuaag

SEQ ID NO: 3501721 - RNA, 23 nt, Human
caaauguucuaaguuucuaagau

SEQ ID NO: 3501722 - RNA, 16 nt, Human
caaauguuuaaacauu

SEQ ID NO: 3501723 - RNA, 17 nt, Human
caaauguuuacagggag

SEQ ID NO: 3501724 - RNA, 19 nt, Human
caaauguuucuaagguaac

SEQ ID NO: 3501725 - RNA, 15 nt, Human
caaauguuuugacau

SEQ ID NO: 3501726 - RNA, 13 nt, Human
caaauuaaaaaaa

SEQ ID NO: 3501727 - RNA, 21 nt, Human
caaauuaaaaaagauaaacac

SEQ ID NO: 3501728 - RNA, 19 nt, Human
caaauuaaaaagauucuuu

SEQ ID NO: 3501729 - RNA, 22 nt, Human
caaauuaaggguuaagaaaaga

SEQ ID NO: 3501730 - RNA, 15 nt, Human
caaauuaauuggcag

SEQ ID NO: 3501731 - RNA, 18 nt, Human
caaauuaauuggcagcag

SEQ ID NO: 3501732 - RNA, 19 nt, Human
caaauuaauuggcagcaga

SEQ ID NO: 3501733 - RNA, 16 nt, Human
caaauuacucuuucuc

SEQ ID NO: 3501734 - RNA, 19 nt, Human
caaauuacucuuucuccau

SEQ ID NO: 3501735 - RNA, 11 nt, Human
caaauuagaaa

SEQ ID NO: 3501736 - RNA, 19 nt, Human
caaauuagaaaauguuauu

SEQ ID NO: 3501737 - RNA, 14 nt, Human
caaauuagggcaau

SEQ ID NO: 3501738 - RNA, 21 nt, Human
caaauuagggcaauuggaaca

SEQ ID NO: 3501739 - RNA, 14 nt, Human
caaauuaguuauau

SEQ ID NO: 3501740 - RNA, 13 nt, Human
caaauuauaaaaa

SEQ ID NO: 3501741 - RNA, 18 nt, Human
caaauuauaauguauuca

SEQ ID NO: 3501742 - RNA, 20 nt, Human
caaauuauaauguauucaua

SEQ ID NO: 3501743 - RNA, 20 nt, Human
caaauuaucaagcuaauaaa

SEQ ID NO: 3501744 - RNA, 14 nt, Human
caaauuaucuuaaa

SEQ ID NO: 3501745 - RNA, 19 nt, Human
caaauuaucuugauacauu

SEQ ID NO: 3501746 - RNA, 21 nt, Human
caaauuaugcuaagaauuuuu

SEQ ID NO: 3501747 - RNA, 14 nt, Human
caaauuauuugugu

SEQ ID NO: 3501748 - RNA, 20 nt, Human
caaauucaguuucauaaaag

SEQ ID NO: 3501749 - RNA, 15 nt, Human
caaauucugucucug

SEQ ID NO: 3501750 - RNA, 15 nt, Human
caaauucuguuucuu

SEQ ID NO: 3501751 - RNA, 15 nt, Human
caaauucuucugaac

SEQ ID NO: 3501752 - RNA, 23 nt, Human
caaauugagacagugcacaugaa

SEQ ID NO: 3501753 - RNA, 19 nt, Human
caaauugagagaauggaaa

SEQ ID NO: 3501754 - RNA, 22 nt, Human
caaauugcacagaaguccugua

SEQ ID NO: 3501755 - RNA, 19 nt, Human
caaauugccuucauuuuau

SEQ ID NO: 3501756 - RNA, 22 nt, Human
caaauugcuccuaagcuucaaa

SEQ ID NO: 3501757 - RNA, 19 nt, Human
caaauugcuugaaagaaaa

SEQ ID NO: 3501758 - RNA, 13 nt, Human
caaauuggagaaa

SEQ ID NO: 3501759 - RNA, 21 nt, Human
caaauuggagcuucauggcag

SEQ ID NO: 3501760 - RNA, 21 nt, Human
caaauuguaagcaugcacaaa

SEQ ID NO: 3501761 - RNA, 16 nt, Human
caaauuguaauuaaua

SEQ ID NO: 3501762 - RNA, 21 nt, Human
caaauugucaccugcuucucu

SEQ ID NO: 3501763 - RNA, 19 nt, Human
caaauugugcuucucccca

SEQ ID NO: 3501764 - RNA, 14 nt, Human
caaauuguggagcc

SEQ ID NO: 3501765 - RNA, 15 nt, Human
caaauuuaaaacaaa

SEQ ID NO: 3501766 - RNA, 13 nt, Human
caaauuuaacagg

SEQ ID NO: 3501767 - RNA, 14 nt, Human
caaauuuacagaga

SEQ ID NO: 3501768 - RNA, 13 nt, Human
caaauuuaucaaa

SEQ ID NO: 3501769 - RNA, 15 nt, Human
caaauuuauuuccaa

SEQ ID NO: 3501770 - RNA, 21 nt, Human
caaauuuauuuuuuucuuuug

SEQ ID NO: 3501771 - RNA, 16 nt, Human
caaauuucaaaagaca

SEQ ID NO: 3501772 - RNA, 11 nt, Human
caaauuucaca

SEQ ID NO: 3501773 - RNA, 17 nt, Human
caaauuucaugaccagu

SEQ ID NO: 3501774 - RNA, 19 nt, Human
caaauuucucuguuccaua

SEQ ID NO: 3501775 - RNA, 15 nt, Human
caaauuuguaaacuu

SEQ ID NO: 3501776 - RNA, 22 nt, Human
caaauuugucuugccuuauuaa

SEQ ID NO: 3501777 - RNA, 17 nt, Human
caaauuuuaauuuuugc

SEQ ID NO: 3501778 - RNA, 15 nt, Human
caaauuuuaucugcc

SEQ ID NO: 3501779 - RNA, 15 nt, Human
caaauuuuauuugua

SEQ ID NO: 3501780 - RNA, 15 nt, Human
caaauuuuggccaaa

SEQ ID NO: 3501781 - RNA, 20 nt, Human
caaauuuuucucaguuugua

SEQ ID NO: 3501782 - RNA, 20 nt, Human
caaauuuuucugcuuuaaaa

SEQ ID NO: 3501783 - RNA, 14 nt, Human
caacaaaauacauu

SEQ ID NO: 3501784 - RNA, 17 nt, Human
caacaaacugcacauga

SEQ ID NO: 3501785 - RNA, 21 nt, Human
caacaaacugcacaugauuuc

SEQ ID NO: 3501786 - RNA, 22 nt, Human
caacaaacugcacaugauuuca

SEQ ID NO: 3501787 - RNA, 12 nt, Human
caacaaagaaau

SEQ ID NO: 3501788 - RNA, 19 nt, Human
caacaaagccaacagucaa

SEQ ID NO: 3501789 - RNA, 22 nt, Human
caacaaaggauuaauugcugca

SEQ ID NO: 3501790 - RNA, 18 nt, Human
caacaaaggcaaguuaag

SEQ ID NO: 3501791 - RNA, 22 nt, Human
caacaaauauucacuggccccu

SEQ ID NO: 3501792 - RNA, 21 nt, Human
caacaaauuagguuuuguaca

SEQ ID NO: 3501793 - RNA, 16 nt, Human
caacaacaauugguaa

SEQ ID NO: 3501794 - RNA, 14 nt, Human
caacaacauccaug

SEQ ID NO: 3501795 - RNA, 20 nt, Human
caacaagaagggacugagag

SEQ ID NO: 3501796 - RNA, 14 nt, Human
caacaagaaugcau

SEQ ID NO: 3501797 - RNA, 15 nt, Human
caacaagaguuuauu

SEQ ID NO: 3501798 - RNA, 19 nt, Human
caacaaggcuugcugcaga

SEQ ID NO: 3501799 - RNA, 18 nt, Human
caacaagggcaguggagg

SEQ ID NO: 3501800 - RNA, 19 nt, Human
caacaagguuauaugaaua

SEQ ID NO: 3501801 - RNA, 13 nt, Human
caacaauaaaaua

SEQ ID NO: 3501802 - RNA, 15 nt, Human
caacaauaaaauuuu

SEQ ID NO: 3501803 - RNA, 13 nt, Human
caacaauaacacu

SEQ ID NO: 3501804 - RNA, 18 nt, Human
caacaauccuagugcuuu

SEQ ID NO: 3501805 - RNA, 23 nt, Human
caacaauucucccgggacucugc

SEQ ID NO: 3501806 - RNA, 19 nt, Human
caaaagccuuguguauauu

SEQ ID NO: 3501807 - RNA, 20 nt, Human
caaaagccuuguguauauuu

SEQ ID NO: 3501808 - RNA, 22 nt, Human
caaaagccuuguguauauuugu

SEQ ID NO: 3501809 - RNA, 23 nt, Human
caaaagccuuguguauauuugua

SEQ ID NO: 3501810 - RNA, 21 nt, Human
caaaagcugaacacauuucuu

SEQ ID NO: 3501811 - RNA, 14 nt, Human
caaaagcugcucag

SEQ ID NO: 3501812 - RNA, 18 nt, Human
caaaagcuuacaaauacu

SEQ ID NO: 3501813 - RNA, 17 nt, Human
caaaagcuucaaauuaa

SEQ ID NO: 3501814 - RNA, 11 nt, Human
caaaaggaaaa

SEQ ID NO: 3501815 - RNA, 21 nt, Human
caaaaggaucuuuguggccaa

SEQ ID NO: 3501816 - RNA, 20 nt, Human
caaaaggcaguggggcuggg

SEQ ID NO: 3501817 - RNA, 17 nt, Human
caaaaggcauuucccac

SEQ ID NO: 3501818 - RNA, 21 nt, Human
caaaaggcauuucccacccug

SEQ ID NO: 3501819 - RNA, 15 nt, Human
caaaaggcuugcaga

SEQ ID NO: 3501820 - RNA, 19 nt, Human
caaaaggcuugcagaacuu

SEQ ID NO: 3501821 - RNA, 24 nt, Human
caaaagggggauucccugauggaa

SEQ ID NO: 3501822 - RNA, 11 nt, Human
caaaaggguca

SEQ ID NO: 3501823 - RNA, 20 nt, Human
caaaaggguuuaaacugauu

SEQ ID NO: 3501824 - RNA, 21 nt, Human
caaaagguauuuuaaucacca

SEQ ID NO: 3501825 - RNA, 18 nt, Human
caaaaggugccugugagg

SEQ ID NO: 3501826 - RNA, 17 nt, Human
caaaaguaaugccucug

SEQ ID NO: 3501827 - RNA, 22 nt, Human
caaaaguaaugccucugucuag

SEQ ID NO: 3501828 - RNA, 14 nt, Human
caaaaguagaacuu

SEQ ID NO: 3501829 - RNA, 19 nt, Human
caaaaguagaacuuuguau

SEQ ID NO: 3501830 - RNA, 14 nt, Human
caaaaguauuuucc

SEQ ID NO: 3501831 - RNA, 19 nt, Human
caaaagucaaaaggugccu

SEQ ID NO: 3501832 - RNA, 15 nt, Human
caaaagugcuuugga

SEQ ID NO: 3501833 - RNA, 20 nt, Human
caaaaguggccucuuugucu

SEQ ID NO: 3501834 - RNA, 14 nt, Human
caaaaguuccaaga

SEQ ID NO: 3501835 - RNA, 17 nt, Human
caaaaguucugacuuga

SEQ ID NO: 3501836 - RNA, 18 nt, Human
caaaaguuggacuaaaug

SEQ ID NO: 3501837 - RNA, 19 nt, Human
caaaaguuggacuaaaugc

SEQ ID NO: 3501838 - RNA, 21 nt, Human
caaaaguuggacuaaaugccu

SEQ ID NO: 3501839 - RNA, 18 nt, Human
caaaaguuucauccuuuu

SEQ ID NO: 3501840 - RNA, 12 nt, Human
caaaauaaaaac

SEQ ID NO: 3501841 - RNA, 19 nt, Human
caaaauaaaaagugacaca

SEQ ID NO: 3501842 - RNA, 13 nt, Human
caaaauaaaacaa

SEQ ID NO: 3501843 - RNA, 14 nt, Human
caaaauaaaacaaa

SEQ ID NO: 3501844 - RNA, 19 nt, Human
caaaauaaaguuacauugc

SEQ ID NO: 3501845 - RNA, 23 nt, Human
caaaauaaaguuacauugcuggu

SEQ ID NO: 3501846 - RNA, 14 nt, Human
caaaauaaauugaa

SEQ ID NO: 3501847 - RNA, 18 nt, Human
caaaauaaauugaaauau

SEQ ID NO: 3501848 - RNA, 16 nt, Human
caaaauaagaaaagau

SEQ ID NO: 3501849 - RNA, 22 nt, Human
caaaauaagaaaagauguagau

SEQ ID NO: 3501850 - RNA, 16 nt, Human
caaaauaaugucuugu

SEQ ID NO: 3501851 - RNA, 18 nt, Human
caaaauaaugucuuguua

SEQ ID NO: 3501852 - RNA, 21 nt, Human
caaaauaaugucuuguuaaua

SEQ ID NO: 3501853 - RNA, 11 nt, Human
caaaauaauuc

SEQ ID NO: 3501854 - RNA, 18 nt, Human
caaaauaauuuuaagaaa

SEQ ID NO: 3501855 - RNA, 22 nt, Human
caaaauaauuuuaagaaaucaa

SEQ ID NO: 3501856 - RNA, 21 nt, Human
caaaauacuugucuguuuuaa

SEQ ID NO: 3501857 - RNA, 12 nt, Human
caaaauagaaaa

SEQ ID NO: 3501858 - RNA, 22 nt, Human
caaaauagaaaguugcaaggca

SEQ ID NO: 3501859 - RNA, 17 nt, Human
caaaauaggguauauuu

SEQ ID NO: 3501860 - RNA, 20 nt, Human
caaaauauauuuuguuuaca

SEQ ID NO: 3501861 - RNA, 19 nt, Human
caaaauauguugaugaaaa

SEQ ID NO: 3501862 - RNA, 16 nt, Human
caaaauauguuuaaaa

SEQ ID NO: 3501863 - RNA, 18 nt, Human
caaaauauugagcagaau

SEQ ID NO: 3501864 - RNA, 19 nt, Human
caaaauauuuaaaaauguc

SEQ ID NO: 3501865 - RNA, 12 nt, Human
caaaauauuuuc

SEQ ID NO: 3501866 - RNA, 13 nt, Human
caaaauauuuuua

SEQ ID NO: 3501867 - RNA, 17 nt, Human
caaaauauuuuuauaga

SEQ ID NO: 3501868 - RNA, 16 nt, Human
caaaaucaauuaaaau

SEQ ID NO: 3501869 - RNA, 23 nt, Human
caaaaucauggaaugguuauaaa

SEQ ID NO: 3501870 - RNA, 20 nt, Human
caaaauccuugcuuaugaca

SEQ ID NO: 3501871 - RNA, 22 nt, Human
caaaaucucuccacuuucagcu

SEQ ID NO: 3501872 - RNA, 16 nt, Human
caaaaucuugaucagu

SEQ ID NO: 3501873 - RNA, 18 nt, Human
caaaaucuugaucaguua

SEQ ID NO: 3501874 - RNA, 14 nt, Human
caaaaugacaauga

SEQ ID NO: 3501875 - RNA, 20 nt, Human
caaaaugaggaauguauaug

SEQ ID NO: 3501876 - RNA, 18 nt, Human
caaaaugcuuuuuauuuc

SEQ ID NO: 3501877 - RNA, 14 nt, Human
caaaauggaacgcu

SEQ ID NO: 3501878 - RNA, 16 nt, Human
caaaauggaauaaaag

SEQ ID NO: 3501879 - RNA, 16 nt, Human
caaaauggacauggug

SEQ ID NO: 3501880 - RNA, 20 nt, Human
caaaaugggagaucuucuca

SEQ ID NO: 3501881 - RNA, 18 nt, Human
caaaauguaacuguuacc

SEQ ID NO: 3501882 - RNA, 18 nt, Human
caaaauguagaauauuca

SEQ ID NO: 3501883 - RNA, 18 nt, Human
caaaauguauauauuuag

SEQ ID NO: 3501884 - RNA, 21 nt, Human
caaaaugugagugguugaaua

SEQ ID NO: 3501885 - RNA, 19 nt, Human
caaaauguuaucuucucaa

SEQ ID NO: 3501886 - RNA, 22 nt, Human
caaaauguuaucuucucaaguu

SEQ ID NO: 3501887 - RNA, 17 nt, Human
caaaauguuauuucccu

SEQ ID NO: 3501888 - RNA, 19 nt, Human
aucagucauaacuaaauaa

SEQ ID NO: 3501889 - RNA, 21 nt, Human
aucaguccuagaauguuucau

SEQ ID NO: 3501890 - RNA, 20 nt, Human
aucagucuauccacagagag

SEQ ID NO: 3501891 - RNA, 21 nt, Human
aucaguggacagucugcucua

SEQ ID NO: 3501892 - RNA, 18 nt, Human
aucaguggauuucccauc

SEQ ID NO: 3501893 - RNA, 13 nt, Human
aucagugugcccc

SEQ ID NO: 3501894 - RNA, 20 nt, Human
aucagugugucuaaauuuga

SEQ ID NO: 3501895 - RNA, 19 nt, Human
aucaguguuaaaaaauuuu

SEQ ID NO: 3501896 - RNA, 10 nt, Human
aucaguguug

SEQ ID NO: 3501897 - RNA, 14 nt, Human
aucaguguuuaugu

SEQ ID NO: 3501898 - RNA, 18 nt, Human
aucaguguuuuaaauucu

SEQ ID NO: 3501899 - RNA, 22 nt, Human
aucaguuaagaaauuucacaua

SEQ ID NO: 3501900 - RNA, 22 nt, Human
aucaguuacccacucgguccca

SEQ ID NO: 3501901 - RNA, 18 nt, Human
aucaguuacuaagaagaa

SEQ ID NO: 3501902 - RNA, 16 nt, Human
aucaguuacucagccc

SEQ ID NO: 3501903 - RNA, 17 nt, Human
aucaguucauuagaaau

SEQ ID NO: 3501904 - RNA, 14 nt, Human
aucaguuccuuugu

SEQ ID NO: 3501905 - RNA, 18 nt, Human
aucaguugcaauaauacu

SEQ ID NO: 3501906 - RNA, 20 nt, Human
aucaguuuaaaagcacgaca

SEQ ID NO: 3501907 - RNA, 10 nt, Human
aucaguuuga

SEQ ID NO: 3501908 - RNA, 17 nt, Human
aucaguuuuauccacag

SEQ ID NO: 3501909 - RNA, 14 nt, Human
aucauaaaaucaaa

SEQ ID NO: 3501910 - RNA, 18 nt, Human
aucauaaguauuuggaau

SEQ ID NO: 3501911 - RNA, 15 nt, Human
aucauaagugaauuu

SEQ ID NO: 3501912 - RNA, 16 nt, Human
aucauaagugaauuua

SEQ ID NO: 3501913 - RNA, 18 nt, Human
aucauaagugaauuuaua

SEQ ID NO: 3501914 - RNA, 14 nt, Human
aucauaauuaccaa

SEQ ID NO: 3501915 - RNA, 18 nt, Human
aucauaauuaccaaguga

SEQ ID NO: 3501916 - RNA, 17 nt, Human
aucauacacuuccuucu

SEQ ID NO: 3501917 - RNA, 12 nt, Human
aucauagaaaug

SEQ ID NO: 3501918 - RNA, 20 nt, Human
aucauagauuucugauuuua

SEQ ID NO: 3501919 - RNA, 23 nt, Human
aucauagauuucugauuuuaugu

SEQ ID NO: 3501920 - RNA, 22 nt, Human
aucauaggcaccuuuuacugug

SEQ ID NO: 3501921 - RNA, 19 nt, Human
aucauauaaauagaaugua

SEQ ID NO: 3501922 - RNA, 23 nt, Human
aucauauaaauagaauguaaaug

SEQ ID NO: 3501923 - RNA, 24 nt, Human
aucauauaaauagaauguaaaugu

SEQ ID NO: 3501924 - RNA, 21 nt, Human
aucauaugauucugcuuuuac

SEQ ID NO: 3501925 - RNA, 13 nt, Human
aucauauugauga

SEQ ID NO: 3501926 - RNA, 14 nt, Human
aucauauugaugaa

SEQ ID NO: 3501927 - RNA, 18 nt, Human
aucauauugaugaaaaga

SEQ ID NO: 3501928 - RNA, 14 nt, Human
aucaucaagaaggg

SEQ ID NO: 3501929 - RNA, 21 nt, Human
aucaucaagaagggcugcaug

SEQ ID NO: 3501930 - RNA, 21 nt, Human
aucaucaaguaauacaaacua

SEQ ID NO: 3501931 - RNA, 17 nt, Human
aucaucacguauguuau

SEQ ID NO: 3501932 - RNA, 20 nt, Human
aucaucagcauaccuuuauu

SEQ ID NO: 3501933 - RNA, 14 nt, Human
aucaucaggacccu

SEQ ID NO: 3501934 - RNA, 20 nt, Human
aucaucaugcagcucaacuu

SEQ ID NO: 3501935 - RNA, 14 nt, Human
aucaucauuauuau

SEQ ID NO: 3501936 - RNA, 23 nt, Human
aucauccacugugccaugugcca

SEQ ID NO: 3501937 - RNA, 23 nt, Human
aucaucccaucuaagcugcagcu

SEQ ID NO: 3501938 - RNA, 15 nt, Human
aucaucccuuucccu

SEQ ID NO: 3501939 - RNA, 12 nt, Human
aucauccuacug

SEQ ID NO: 3501940 - RNA, 13 nt, Human
aucauccuuucca

SEQ ID NO: 3501941 - RNA, 13 nt, Human
aucaucgccagag

SEQ ID NO: 3501942 - RNA, 15 nt, Human
aucaucgccagaggu

SEQ ID NO: 3501943 - RNA, 22 nt, Human
aucaucgccagaggugcuucac

SEQ ID NO: 3501944 - RNA, 21 nt, Human
aucaucuaccuagauuuaaua

SEQ ID NO: 3501945 - RNA, 19 nt, Human
aucaucuauagaaagcuau

SEQ ID NO: 3501946 - RNA, 23 nt, Human
aucaucuccugccuuccuccugg

SEQ ID NO: 3501947 - RNA, 13 nt, Human
aucaucugccgug

SEQ ID NO: 3501948 - RNA, 14 nt, Human
aucaucuguaagcu

SEQ ID NO: 3501949 - RNA, 15 nt, Human
aucaucuuugugaag

SEQ ID NO: 3501950 - RNA, 17 nt, Human
caaaugacaugcacuga

SEQ ID NO: 3501951 - RNA, 18 nt, Human
caaaugacaugcacugac

SEQ ID NO: 3501952 - RNA, 21 nt, Human
caaaugacaugcacugacccu

SEQ ID NO: 3501953 - RNA, 18 nt, Human
caaaugacccaaagacca

SEQ ID NO: 3501954 - RNA, 13 nt, Human
caaaugacuuuau

SEQ ID NO: 3501955 - RNA, 15 nt, Human
caaaugacuuuauua

SEQ ID NO: 3501956 - RNA, 22 nt, Human
caaaugagggucuugguuccag

SEQ ID NO: 3501957 - RNA, 17 nt, Human
caaaugaugugccugcu

SEQ ID NO: 3501958 - RNA, 21 nt, Human
caaaugaugugccugcuucag

SEQ ID NO: 3501959 - RNA, 12 nt, Human
caaaugauugcu

SEQ ID NO: 3501960 - RNA, 23 nt, Human
caaaugauugcuuuuaaaauuuu

SEQ ID NO: 3501961 - RNA, 21 nt, Human
caaaugcaaaaacucuuugag

SEQ ID NO: 3501962 - RNA, 19 nt, Human
caaaugcagggauugcugc

SEQ ID NO: 3501963 - RNA, 23 nt, Human
caaaugcagggauugcugccacu

SEQ ID NO: 3501964 - RNA, 22 nt, Human
caaaugcaucuuugauguguug

SEQ ID NO: 3501965 - RNA, 19 nt, Human
caaaugcaugcuucuucuc

SEQ ID NO: 3501966 - RNA, 18 nt, Human
caaaugcauggugcaguu

SEQ ID NO: 3501967 - RNA, 16 nt, Human
caaaugccagggcccg

SEQ ID NO: 3501968 - RNA, 15 nt, Human
caaaugcuaauguca

SEQ ID NO: 3501969 - RNA, 21 nt, Human
caaaugcuagaaaaauuguua

SEQ ID NO: 3501970 - RNA, 21 nt, Human
caaaugcugacccaugcaaua

SEQ ID NO: 3501971 - RNA, 18 nt, Human
caaaugcugcgcccuucc

SEQ ID NO: 3501972 - RNA, 17 nt, Human
caaaugcuuggcuucuc

SEQ ID NO: 3501973 - RNA, 21 nt, Human
caaauggaaaggagaggaaag

SEQ ID NO: 3501974 - RNA, 14 nt, Human
caaauggaggaaua

SEQ ID NO: 3501975 - RNA, 21 nt, Human
caaauggaguuggaguucauu

SEQ ID NO: 3501976 - RNA, 17 nt, Human
caaauggauauauuuuc

SEQ ID NO: 3501977 - RNA, 19 nt, Human
caaauggauuccuguuuca

SEQ ID NO: 3501978 - RNA, 21 nt, Human
caaauggcgucuggaagucca

SEQ ID NO: 3501979 - RNA, 16 nt, Human
caaauggggccagauc

SEQ ID NO: 3501980 - RNA, 15 nt, Human
caaaugguacaaaac

SEQ ID NO: 3501981 - RNA, 20 nt, Human
caaauggugguuguuucuuc

SEQ ID NO: 3501982 - RNA, 14 nt, Human
caaauguaaacauu

SEQ ID NO: 3501983 - RNA, 12 nt, Human
caaauguaaagu

SEQ ID NO: 3501984 - RNA, 19 nt, Human
caaauguaacuauguuuua

SEQ ID NO: 3501985 - RNA, 18 nt, Human
caaaugucaucagaacuu

SEQ ID NO: 3501986 - RNA, 16 nt, Human
caaaugucaugcugcc

SEQ ID NO: 3501987 - RNA, 15 nt, Human
caaaugucuuccugg

SEQ ID NO: 3501988 - RNA, 17 nt, Human
caaaugucuuccuggau

SEQ ID NO: 3501989 - RNA, 11 nt, Human
caaaugugaag

SEQ ID NO: 3501990 - RNA, 14 nt, Human
caaaugugaagaug

SEQ ID NO: 3501991 - RNA, 17 nt, Human
caaaugugaagaugcau

SEQ ID NO: 3501992 - RNA, 15 nt, Human
caaauguggcuccug

SEQ ID NO: 3501993 - RNA, 16 nt, Human
caaaugugugcccagc

SEQ ID NO: 3501994 - RNA, 17 nt, Human
caaaugugugcccagcu

SEQ ID NO: 3501995 - RNA, 15 nt, Human
caaauguuaaaaugu

SEQ ID NO: 3501996 - RNA, 16 nt, Human
caaauguuaaaaugug

SEQ ID NO: 3501997 - RNA, 18 nt, Human
caaauguuaaaauguguu

SEQ ID NO: 3501998 - RNA, 13 nt, Human
caaauguuaugca

SEQ ID NO: 3501999 - RNA, 14 nt, Human
caaauguucaucaa

SEQ ID NO: 3502000 - RNA, 18 nt, Human
caaauguucaucaaugaa

SEQ ID NO: 3502001 - RNA, 21 nt, Human
caaauguucaucaaugaauga

SEQ ID NO: 3502002 - RNA, 14 nt, Human
caaauguucuaagu

SEQ ID NO: 3502003 - RNA, 10 nt, Human
caaauguuga

SEQ ID NO: 3502004 - RNA, 19 nt, Human
caaauguuuaaucauauaa

SEQ ID NO: 3502005 - RNA, 23 nt, Human
caaauguuuauuaagcaucagaa

SEQ ID NO: 3502006 - RNA, 14 nt, Human
caaauguuuauuuu

SEQ ID NO: 3502007 - RNA, 19 nt, Human
caaauuaaaaaaaaauugu

SEQ ID NO: 3502008 - RNA, 16 nt, Human
caaauuaaaaaagaua

SEQ ID NO: 3502009 - RNA, 20 nt, Human
caaauuaaaaaagauaaaca

SEQ ID NO: 3502010 - RNA, 18 nt, Human
caaauuaaaaagauucuu

SEQ ID NO: 3502011 - RNA, 15 nt, Human
caaauuaauaaucuu

SEQ ID NO: 3502012 - RNA, 17 nt, Human
caaauuaauaaucuuau

SEQ ID NO: 3502013 - RNA, 15 nt, Human
caaauuaaucuuucu

SEQ ID NO: 3502014 - RNA, 12 nt, Human
caaauuaauugu

SEQ ID NO: 3502015 - RNA, 19 nt, Human
caaauuaauugugugaacu

SEQ ID NO: 3502016 - RNA, 21 nt, Human
caaauuacuuugugaauagaa

SEQ ID NO: 3502017 - RNA, 13 nt, Human
caaauuagaaaau

SEQ ID NO: 3502018 - RNA, 15 nt, Human
caaauuagaagacau

SEQ ID NO: 3502019 - RNA, 18 nt, Human
caaauuagguuuuguaca

SEQ ID NO: 3502020 - RNA, 21 nt, Human
caaauuagguuuuguacaauu

SEQ ID NO: 3502021 - RNA, 17 nt, Human
caaauuauaauguauuc

SEQ ID NO: 3502022 - RNA, 17 nt, Human
caaauuaucaagcuaau

SEQ ID NO: 3502023 - RNA, 21 nt, Human
caaauuaucaagcuaauaaaa

SEQ ID NO: 3502024 - RNA, 13 nt, Human
caaauuaucuuga

SEQ ID NO: 3502025 - RNA, 12 nt, Human
caaauuauuugu

SEQ ID NO: 3502026 - RNA, 17 nt, Human
caaauuauuuguguaau

SEQ ID NO: 3502027 - RNA, 18 nt, Human
caaauuauuuguguaaua

SEQ ID NO: 3502028 - RNA, 14 nt, Human
caaauucaaauaaa

SEQ ID NO: 3502029 - RNA, 17 nt, Human
caaauucaguuucauaa

SEQ ID NO: 3502030 - RNA, 23 nt, Human
caaauucauggcaugcuuaaauu

SEQ ID NO: 3502031 - RNA, 18 nt, Human
caaauucccuccucccuu

SEQ ID NO: 3502032 - RNA, 21 nt, Human
caaauucucaaccuaccaccc

SEQ ID NO: 3502033 - RNA, 22 nt, Human
caaauucucaaccuaccacccc

SEQ ID NO: 3502034 - RNA, 16 nt, Human
caaauucugaauauuu

SEQ ID NO: 3502035 - RNA, 14 nt, Human
caaauucuguuucu

SEQ ID NO: 3502036 - RNA, 14 nt, Human
caaauucuuuugaa

SEQ ID NO: 3502037 - RNA, 16 nt, Human
caaauucuuuugaauu

SEQ ID NO: 3502038 - RNA, 17 nt, Human
caaauucuuuugaauug

SEQ ID NO: 3502039 - RNA, 18 nt, Human
caaauucuuuugaauugu

SEQ ID NO: 3502040 - RNA, 23 nt, Human
caaauucuuuugaauuguuacau

SEQ ID NO: 3502041 - RNA, 20 nt, Human
caaauugcuuacuuuggaau

SEQ ID NO: 3502042 - RNA, 17 nt, Human
caaauugcuugaaagaa

SEQ ID NO: 3502043 - RNA, 22 nt, Human
caaauugcuuuuuuccaaaaca

SEQ ID NO: 3502044 - RNA, 19 nt, Human
caaauuggacuuucaaaau

SEQ ID NO: 3502045 - RNA, 15 nt, Human
caaauuggagcaggg

SEQ ID NO: 3502046 - RNA, 18 nt, Human
caaauuguaauuaauaau

SEQ ID NO: 3502047 - RNA, 19 nt, Human
caaauuguaucuagugcag

SEQ ID NO: 3502048 - RNA, 22 nt, Human
caaauuguaucuagugcagcug

SEQ ID NO: 3502049 - RNA, 18 nt, Human
caaauugugcaguacuuu

SEQ ID NO: 3502050 - RNA, 14 nt, Human
caaauugugcuucu

SEQ ID NO: 3502051 - RNA, 21 nt, Human
caaauugugcuucuccccaga

SEQ ID NO: 3502052 - RNA, 14 nt, Human
caaauuuaaaacaa

SEQ ID NO: 3502053 - RNA, 15 nt, Human
caaauuuacagagac

SEQ ID NO: 3502054 - RNA, 14 nt, Human
caaauuuauaauuu

SEQ ID NO: 3502055 - RNA, 16 nt, Human
caaauuuauaauuuua

SEQ ID NO: 3502056 - RNA, 19 nt, Human
caaauuuaucaaagcauag

SEQ ID NO: 3502057 - RNA, 14 nt, Human
caaauuuauuucca

SEQ ID NO: 3502058 - RNA, 22 nt, Human
caaauuucuaaaucuccaaaau

SEQ ID NO: 3502059 - RNA, 19 nt, Human
caaauuugaaaauaauugu

SEQ ID NO: 3502060 - RNA, 14 nt, Human
caaauuugauugau

SEQ ID NO: 3502061 - RNA, 17 nt, Human
caaauuugauugauuug

SEQ ID NO: 3502062 - RNA, 19 nt, Human
caaauuuugaguugccaca

SEQ ID NO: 3502063 - RNA, 21 nt, Human
caaauuuuggcgaaucucaaa

SEQ ID NO: 3502064 - RNA, 15 nt, Human
caaauuuuucugcuu

SEQ ID NO: 3502065 - RNA, 17 nt, Human
caaauuuuuuaaaagag

SEQ ID NO: 3502066 - RNA, 19 nt, Human
caaauuuuuuaaaagagac

SEQ ID NO: 3502067 - RNA, 23 nt, Human
caaauuuuuugacuuuuuuugua

SEQ ID NO: 3502068 - RNA, 10 nt, Human
caacaaaaaa

SEQ ID NO: 3502069 - RNA, 17 nt, Human
caacaaaaagcuucccc

SEQ ID NO: 3502070 - RNA, 10 nt, Human
caacaaaaau

SEQ ID NO: 3502071 - RNA, 22 nt, Human
caacaaaagaagcccggcuccu

SEQ ID NO: 3502072 - RNA, 23 nt, Human
caacaaaccuguuucugcagcca

SEQ ID NO: 3502073 - RNA, 20 nt, Human
caacaaagaaacaaagaugu

SEQ ID NO: 3502074 - RNA, 14 nt, Human
caacaaagaacacu

SEQ ID NO: 3502075 - RNA, 17 nt, Human
caacaaagcacaguguu

SEQ ID NO: 3502076 - RNA, 16 nt, Human
caacaaagcuguugau

SEQ ID NO: 3502077 - RNA, 19 nt, Human
caacaaauuagguuuugua

SEQ ID NO: 3502078 - RNA, 13 nt, Human
caacaacauccau

SEQ ID NO: 3502079 - RNA, 21 nt, Human
caacaacauguauaauauuuu

SEQ ID NO: 3502080 - RNA, 22 nt, Human
caacaacauguauaauauuuuu

SEQ ID NO: 3502081 - RNA, 21 nt, Human
caacaagaagggacugagaga

SEQ ID NO: 3502082 - RNA, 18 nt, Human
caacaagaauaaaggcag

SEQ ID NO: 3502083 - RNA, 12 nt, Human
caacaagaaugc

SEQ ID NO: 3502084 - RNA, 16 nt, Human
caacaagaaugcauug

SEQ ID NO: 3502085 - RNA, 14 nt, Human
caacaagagcgaaa

SEQ ID NO: 3502086 - RNA, 18 nt, Human
caaggaaaaaauaacaau

SEQ ID NO: 3502087 - RNA, 15 nt, Human
caaggaaaaacaggu

SEQ ID NO: 3502088 - RNA, 14 nt, Human
caaggaaaacugca

SEQ ID NO: 3502089 - RNA, 22 nt, Human
caaggaaaccgccuaguuuacu

SEQ ID NO: 3502090 - RNA, 20 nt, Human
caaggaaagccccagcacua

SEQ ID NO: 3502091 - RNA, 13 nt, Human
caaggaaaggcac

SEQ ID NO: 3502092 - RNA, 18 nt, Human
caaggaagaaauuaacuu

SEQ ID NO: 3502093 - RNA, 16 nt, Human
caaggaagauauacau

SEQ ID NO: 3502094 - RNA, 16 nt, Human
caaggaagccacagcu

SEQ ID NO: 3502095 - RNA, 16 nt, Human
caaccccuucgcuccu

SEQ ID NO: 3502096 - RNA, 15 nt, Human
aucggagccuccucu

SEQ ID NO: 3502097 - RNA, 23 nt, Human
aucggaggcuugucagagcuggg

SEQ ID NO: 3502098 - RNA, 21 nt, Human
aucggccuccucuucaccccg

SEQ ID NO: 3502099 - RNA, 19 nt, Human
aucggcugcauugaagauc

SEQ ID NO: 3502100 - RNA, 21 nt, Human
aucgggaacaguguuucccau

SEQ ID NO: 3502101 - RNA, 16 nt, Human
aucgggagcagugucu

SEQ ID NO: 3502102 - RNA, 21 nt, Human
aucgggagcagugucuuccau

SEQ ID NO: 3502103 - RNA, 16 nt, Human
aucggggagccgggag

SEQ ID NO: 3502104 - RNA, 18 nt, Human
aucggggagccgggagcc

SEQ ID NO: 3502105 - RNA, 14 nt, Human
aucggggccagagg

SEQ ID NO: 3502106 - RNA, 23 nt, Human
aucgguuaacaaauaacaacuuu

SEQ ID NO: 3502107 - RNA, 13 nt, Human
aucguaaaauuaa

SEQ ID NO: 3502108 - RNA, 18 nt, Human
aucguaauguacagaugg

SEQ ID NO: 3502109 - RNA, 14 nt, Human
aucguauagcugua

SEQ ID NO: 3502110 - RNA, 16 nt, Human
aucguauucaccuuca

SEQ ID NO: 3502111 - RNA, 13 nt, Human
aucguccagggag

SEQ ID NO: 3502112 - RNA, 15 nt, Human
aucguccccuccccc

SEQ ID NO: 3502113 - RNA, 15 nt, Human
aucgugacaacacuu

SEQ ID NO: 3502114 - RNA, 21 nt, Human
aucgugacgcugaauaaaugu

SEQ ID NO: 3502115 - RNA, 12 nt, Human
aucguggagaca

SEQ ID NO: 3502116 - RNA, 22 nt, Human
aucguuaguaucuaacauguau

SEQ ID NO: 3502117 - RNA, 15 nt, Human
aucguuaucacugug

SEQ ID NO: 3502118 - RNA, 14 nt, Human
aucguuaugugugu

SEQ ID NO: 3502119 - RNA, 21 nt, Human
aucguuauguguguauaugua

SEQ ID NO: 3502120 - RNA, 20 nt, Human
aucguugcaaccacugcaau

SEQ ID NO: 3502121 - RNA, 14 nt, Human
aucguuuauuucac

SEQ ID NO: 3502122 - RNA, 14 nt, Human
aucguuuucuuaaa

SEQ ID NO: 3502123 - RNA, 18 nt, Human
aucguuuucuuaaagugc

SEQ ID NO: 3502124 - RNA, 18 nt, Human
aucuaaaaauaacuguaa

SEQ ID NO: 3502125 - RNA, 13 nt, Human
aucuaaaaauaua

SEQ ID NO: 3502126 - RNA, 16 nt, Human
aucuaaaaauauacau

SEQ ID NO: 3502127 - RNA, 17 nt, Human
aucuaaaaauauacaug

SEQ ID NO: 3502128 - RNA, 15 nt, Human
aucuaaacugccccc

SEQ ID NO: 3502129 - RNA, 18 nt, Human
aucuaaacuuuaauaugu

SEQ ID NO: 3502130 - RNA, 16 nt, Human
aucuaaaguuauauuu

SEQ ID NO: 3502131 - RNA, 16 nt, Human
aucuaaauaaaaugcu

SEQ ID NO: 3502132 - RNA, 13 nt, Human
aucuaaaucuauu

SEQ ID NO: 3502133 - RNA, 15 nt, Human
aucuaaaucuauuua

SEQ ID NO: 3502134 - RNA, 14 nt, Human
aucuaaaugaugag

SEQ ID NO: 3502135 - RNA, 18 nt, Human
aucuaaauggaaccacuc

SEQ ID NO: 3502136 - RNA, 16 nt, Human
aucuaacaauggaaga

SEQ ID NO: 3502137 - RNA, 14 nt, Human
aucuaaccucaucu

SEQ ID NO: 3502138 - RNA, 15 nt, Human
aucuaaccucaucuu

SEQ ID NO: 3502139 - RNA, 18 nt, Human
aucuaaccucaucuucuu

SEQ ID NO: 3502140 - RNA, 19 nt, Human
aucuaagaauacagcuuuc

SEQ ID NO: 3502141 - RNA, 20 nt, Human
aucuaagaauacagcuuucu

SEQ ID NO: 3502142 - RNA, 20 nt, Human
aucuaaggaugucacagggc

SEQ ID NO: 3502143 - RNA, 13 nt, Human
aucuaagugauau

SEQ ID NO: 3502144 - RNA, 15 nt, Human
aucuaagugauauaa

SEQ ID NO: 3502145 - RNA, 21 nt, Human
aucuaauagcggguuacuuuc

SEQ ID NO: 3502146 - RNA, 18 nt, Human
aucuaauauauaugaaua

SEQ ID NO: 3502147 - RNA, 16 nt, Human
aucuaauauggccaca

SEQ ID NO: 3502148 - RNA, 18 nt, Human
aucuaauauguaacaagc

SEQ ID NO: 3502149 - RNA, 20 nt, Human
aucuaauauguaacaagcca

SEQ ID NO: 3502150 - RNA, 15 nt, Human
aucuaauucugauuc

SEQ ID NO: 3502151 - RNA, 14 nt, Human
aucuaauuuauaaa

SEQ ID NO: 3502152 - RNA, 23 nt, Human
aucuaauuuauaaaaagguguuu

SEQ ID NO: 3502153 - RNA, 14 nt, Human
aucuacaaucucuu

SEQ ID NO: 3502154 - RNA, 23 nt, Human
aucuacaaucucuuuuuguuugc

SEQ ID NO: 3502155 - RNA, 14 nt, Human
aucuacccaaagga

SEQ ID NO: 3502156 - RNA, 21 nt, Human
aucuacccaaaggauacugua

SEQ ID NO: 3502157 - RNA, 14 nt, Human
aucuaccccagacu

SEQ ID NO: 3502158 - RNA, 15 nt, Human
aucuaccuagauuua

SEQ ID NO: 3502159 - RNA, 18 nt, Human
aucuaccuggagggaaga

SEQ ID NO: 3502160 - RNA, 16 nt, Human
aucuaccuuuucucuu

SEQ ID NO: 3502161 - RNA, 19 nt, Human
aucuacuaauuccacaccu

SEQ ID NO: 3502162 - RNA, 13 nt, Human
aucuacucccaag

SEQ ID NO: 3502163 - RNA, 18 nt, Human
aucuacugcauuuaggga

SEQ ID NO: 3502164 - RNA, 19 nt, Human
aucuacuucuguaauugug

SEQ ID NO: 3502165 - RNA, 16 nt, Human
aucuacuuuaauaaau

SEQ ID NO: 3502166 - RNA, 20 nt, Human
aucuagaagaaaugaaauuu

SEQ ID NO: 3502167 - RNA, 22 nt, Human
aucuagaagaaaugaaauuuua

SEQ ID NO: 3502168 - RNA, 19 nt, Human
aucuagaagagucuauugu

SEQ ID NO: 3502169 - RNA, 17 nt, Human
aucuagacaauauacaa

SEQ ID NO: 3502170 - RNA, 18 nt, Human
aucuagauacuguaucau

SEQ ID NO: 3502171 - RNA, 16 nt, Human
aucuagauaucgacuu

SEQ ID NO: 3502172 - RNA, 14 nt, Human
aucuagauguaaau

SEQ ID NO: 3502173 - RNA, 15 nt, Human
aucuagauguaaauu

SEQ ID NO: 3502174 - RNA, 22 nt, Human
aucuagcaaucacaacacuggc

SEQ ID NO: 3502175 - RNA, 19 nt, Human
aucuagccagccccucuuc

SEQ ID NO: 3502176 - RNA, 21 nt, Human
aucuagccagccccucuuccc

SEQ ID NO: 3502177 - RNA, 17 nt, Human
aucuagcgcaauugaag

SEQ ID NO: 3502178 - RNA, 15 nt, Human
aucuagcuaguaaua

SEQ ID NO: 3502179 - RNA, 16 nt, Human
aucuaggaaaauauuu

SEQ ID NO: 3502180 - RNA, 22 nt, Human
aucuaggaaaauauuuugaucu

SEQ ID NO: 3502181 - RNA, 16 nt, Human
aucuaggaaaauuauu

SEQ ID NO: 3502182 - RNA, 18 nt, Human
aucuaggaagacuuugga

SEQ ID NO: 3502183 - RNA, 18 nt, Human
aucuaggcaacauaguau

SEQ ID NO: 3502184 - RNA, 18 nt, Human
aucuagguggaguugaaa

SEQ ID NO: 3502185 - RNA, 15 nt, Human
aucuagguuuaugac

SEQ ID NO: 3502186 - RNA, 18 nt, Human
aucuaguaauauauuuaa

SEQ ID NO: 3502187 - RNA, 15 nt, Human
aucuaguaguuguuc

SEQ ID NO: 3502188 - RNA, 15 nt, Human
aucuaguaugaaauu

SEQ ID NO: 3502189 - RNA, 17 nt, Human
aucuaguaugaaauuau

SEQ ID NO: 3502190 - RNA, 19 nt, Human
aucuaguaugaaauuauau

SEQ ID NO: 3502191 - RNA, 13 nt, Human
aucuagugcagcu

SEQ ID NO: 3502192 - RNA, 15 nt, Human
aucuagugcagcuga

SEQ ID NO: 3502193 - RNA, 21 nt, Human
aucuagugcagcugauuuuaa

SEQ ID NO: 3502194 - RNA, 16 nt, Human
aucuaguuuacagaaa

SEQ ID NO: 3502195 - RNA, 11 nt, Human
aucuauaaaau

SEQ ID NO: 3502196 - RNA, 13 nt, Human
aucuauaaacacu

SEQ ID NO: 3502197 - RNA, 14 nt, Human
aucuauaaacacug

SEQ ID NO: 3502198 - RNA, 15 nt, Human
aucuauaaacacugu

SEQ ID NO: 3502199 - RNA, 21 nt, Human
aucuauaaagcgauauacaga

SEQ ID NO: 3502200 - RNA, 15 nt, Human
aucuauacuugcuuu

SEQ ID NO: 3502201 - RNA, 15 nt, Human
aucuauagaaagugu

SEQ ID NO: 3502202 - RNA, 17 nt, Human
aucuauagaaaguguuc

SEQ ID NO: 3502203 - RNA, 22 nt, Human
aucuauagaaaguguucuguua

SEQ ID NO: 3502204 - RNA, 16 nt, Human
aucuauagaacugaau

SEQ ID NO: 3502205 - RNA, 21 nt, Human
aucuauaggaagauugaaccu

SEQ ID NO: 3502206 - RNA, 11 nt, Human
aucuauauaaa

SEQ ID NO: 3502207 - RNA, 12 nt, Human
aucuauauaaaa

SEQ ID NO: 3502208 - RNA, 13 nt, Human
aucuauauaaaau

SEQ ID NO: 3502209 - RNA, 16 nt, Human
aucuauauguacuugu

SEQ ID NO: 3502210 - RNA, 22 nt, Human
aucuauauguacuugucaaaga

SEQ ID NO: 3502211 - RNA, 15 nt, Human
aucuauauuuaacaa

SEQ ID NO: 3502212 - RNA, 21 nt, Human
aucuauauuuuacauaaauuu

SEQ ID NO: 3502213 - RNA, 17 nt, Human
aucuaucaauagucaag

SEQ ID NO: 3502214 - RNA, 14 nt, Human
aucuaucagaguau

SEQ ID NO: 3502215 - RNA, 16 nt, Human
aucuaucuaguucuaa

SEQ ID NO: 3502216 - RNA, 23 nt, Human
aucuaucuggugauuucuagcuc

SEQ ID NO: 3502217 - RNA, 13 nt, Human
aucuaucugugcu

SEQ ID NO: 3502218 - RNA, 15 nt, Human
aucuaugaaguauau

SEQ ID NO: 3502219 - RNA, 19 nt, Human
aucuaugaaguauauaaug

SEQ ID NO: 3502220 - RNA, 20 nt, Human
aucuaugaaguauauaaugg

SEQ ID NO: 3502221 - RNA, 18 nt, Human
aucuaugcauuuucugga

SEQ ID NO: 3502222 - RNA, 21 nt, Human
aucuaugccaaagaucacuug

SEQ ID NO: 3502223 - RNA, 17 nt, Human
aucuauggucgggagac

SEQ ID NO: 3502224 - RNA, 20 nt, Human
aucuauguuucaucuuguuu

SEQ ID NO: 3502225 - RNA, 14 nt, Human
aucuauguuuuacc

SEQ ID NO: 3502226 - RNA, 14 nt, Human
aucuauuaauauau

SEQ ID NO: 3502227 - RNA, 14 nt, Human
aucuauuauacugu

SEQ ID NO: 3502228 - RNA, 17 nt, Human
aucuauuauacuguauu

SEQ ID NO: 3502229 - RNA, 17 nt, Human
aucuauucagacaagca

SEQ ID NO: 3502230 - RNA, 18 nt, Human
aucuauucugagaaaaca

SEQ ID NO: 3502231 - RNA, 13 nt, Human
aucuauucugugu

SEQ ID NO: 3502232 - RNA, 16 nt, Human
aucuauuggguucauu

SEQ ID NO: 3502233 - RNA, 15 nt, Human
aucuauuguaagaua

SEQ ID NO: 3502234 - RNA, 14 nt, Human
aucuauuuauugga

SEQ ID NO: 3502235 - RNA, 15 nt, Human
aucuauuucugagaa

SEQ ID NO: 3502236 - RNA, 20 nt, Human
aucuauuuguauauauacau

SEQ ID NO: 3502237 - RNA, 18 nt, Human
aucuauuuucuauguacu

SEQ ID NO: 3502238 - RNA, 20 nt, Human
aucuauuuucuauguacuag

SEQ ID NO: 3502239 - RNA, 16 nt, Human
aucuauuuugaugcag

SEQ ID NO: 3502240 - RNA, 14 nt, Human
aucuauuuuggauu

SEQ ID NO: 3502241 - RNA, 21 nt, Human
caaguuguuugagaaauuaag

SEQ ID NO: 3502242 - RNA, 22 nt, Human
caaguuuaucaguaaauaacug

SEQ ID NO: 3502243 - RNA, 16 nt, Human
caaguuucauccagaa

SEQ ID NO: 3502244 - RNA, 16 nt, Human
caaguuuccauagcaa

SEQ ID NO: 3502245 - RNA, 17 nt, Human
caaguuuccauagcaac

SEQ ID NO: 3502246 - RNA, 20 nt, Human
caaguuuccauagcaacagg

SEQ ID NO: 3502247 - RNA, 22 nt, Human
caaguuucuagcuagaaauaug

SEQ ID NO: 3502248 - RNA, 17 nt, Human
caaguuuguaucaggug

SEQ ID NO: 3502249 - RNA, 18 nt, Human
caaguuuucccugaaguu

SEQ ID NO: 3502250 - RNA, 22 nt, Human
caaguuuugugaaauuuuucau

SEQ ID NO: 3502251 - RNA, 13 nt, Human
caaguuuugugua

SEQ ID NO: 3502252 - RNA, 17 nt, Human
caaccccuucgcuccug

SEQ ID NO: 3502253 - RNA, 21 nt, Human
caacccgucuggcccaccagg

SEQ ID NO: 3502254 - RNA, 17 nt, Human
caacccgugccaagucc

SEQ ID NO: 3502255 - RNA, 19 nt, Human
caacccuagguucccuguu

SEQ ID NO: 3502256 - RNA, 19 nt, Human
caacccuaucuccugacag

SEQ ID NO: 3502257 - RNA, 13 nt, Human
caacccucagagc

SEQ ID NO: 3502258 - RNA, 13 nt, Human
caacccucagggc

SEQ ID NO: 3502259 - RNA, 21 nt, Human
caacccucccucagccccucu

SEQ ID NO: 3502260 - RNA, 22 nt, Human
caacccucccucagccccucuu

SEQ ID NO: 3502261 - RNA, 15 nt, Human
caacccuccuaucac

SEQ ID NO: 3502262 - RNA, 19 nt, Human
caacccuccuaucaccucc

SEQ ID NO: 3502263 - RNA, 14 nt, Human
caacccugccccug

SEQ ID NO: 3502264 - RNA, 15 nt, Human
caacccugccccugc

SEQ ID NO: 3502265 - RNA, 13 nt, Human
caacccuggagag

SEQ ID NO: 3502266 - RNA, 17 nt, Human
caacccuggcacccagg

SEQ ID NO: 3502267 - RNA, 16 nt, Human
caacccuggggaagga

SEQ ID NO: 3502268 - RNA, 22 nt, Human
caacccuggggaaggagccagu

SEQ ID NO: 3502269 - RNA, 23 nt, Human
caacccuggggaaggagccaguu

SEQ ID NO: 3502270 - RNA, 15 nt, Human
caacccuguuuccug

SEQ ID NO: 3502271 - RNA, 11 nt, Human
caacccuuccc

SEQ ID NO: 3502272 - RNA, 19 nt, Human
caacccuuccugaaacuuc

SEQ ID NO: 3502273 - RNA, 23 nt, Human
caacccuucuccucuuguaaaua

SEQ ID NO: 3502274 - RNA, 23 nt, Human
caaccgagagaaugcugaccuga

SEQ ID NO: 3502275 - RNA, 14 nt, Human
caaccgaugcucca

SEQ ID NO: 3502276 - RNA, 22 nt, Human
caaccgaugcuccagccaaccc

SEQ ID NO: 3502277 - RNA, 22 nt, Human
caaccgccacacacacaggagc

SEQ ID NO: 3502278 - RNA, 21 nt, Human
caaccgggaugggagccgggc

SEQ ID NO: 3502279 - RNA, 19 nt, Human
caaccggggagcccccgcc

SEQ ID NO: 3502280 - RNA, 20 nt, Human
caaccggggagcccccgccc

SEQ ID NO: 3502281 - RNA, 19 nt, Human
caaccguggcccuuccugg

SEQ ID NO: 3502282 - RNA, 23 nt, Human
caaccguggcccuuccuggacag

SEQ ID NO: 3502283 - RNA, 13 nt, Human
caaccuaaaacuc

SEQ ID NO: 3502284 - RNA, 15 nt, Human
caaccuaaaacucuu

SEQ ID NO: 3502285 - RNA, 16 nt, Human
caaccuaaccuguguc

SEQ ID NO: 3502286 - RNA, 20 nt, Human
caaccuaccaccccuuccug

SEQ ID NO: 3502287 - RNA, 20 nt, Human
caaccuccaccuccuggguu

SEQ ID NO: 3502288 - RNA, 12 nt, Human
caaccuccugug

SEQ ID NO: 3502289 - RNA, 18 nt, Human
caaccucggcuccuggac

SEQ ID NO: 3502290 - RNA, 20 nt, Human
caaccucuaccuccuggguu

SEQ ID NO: 3502291 - RNA, 13 nt, Human
caaccucucacuc

SEQ ID NO: 3502292 - RNA, 20 nt, Human
caaccucugccucccagguu

SEQ ID NO: 3502293 - RNA, 20 nt, Human
caaccucugccuccuggguu

SEQ ID NO: 3502294 - RNA, 20 nt, Human
caaccucugcuucccagguu

SEQ ID NO: 3502295 - RNA, 16 nt, Human
caaccucuuccuccug

SEQ ID NO: 3502296 - RNA, 17 nt, Human
caaccucuucuggcuca

SEQ ID NO: 3502297 - RNA, 13 nt, Human
caaccugaaccua

SEQ ID NO: 3502298 - RNA, 15 nt, Human
caaccugaccaacau

SEQ ID NO: 3502299 - RNA, 21 nt, Human
caaccugaccaacauggagaa

SEQ ID NO: 3502300 - RNA, 23 nt, Human
caaccugaccaacauggagaaac

SEQ ID NO: 3502301 - RNA, 19 nt, Human
caaccugauugugucucuu

SEQ ID NO: 3502302 - RNA, 21 nt, Human
caaccugcucuccucuugcca

SEQ ID NO: 3502303 - RNA, 20 nt, Human
caaccuggggggcaguggug

SEQ ID NO: 3502304 - RNA, 16 nt, Human
caaccuggguccaaau

SEQ ID NO: 3502305 - RNA, 16 nt, Human
caaccuguaaauuauu

SEQ ID NO: 3502306 - RNA, 15 nt, Human
caaccuguaagacug

SEQ ID NO: 3502307 - RNA, 17 nt, Human
caaccuguaauaaauau

SEQ ID NO: 3502308 - RNA, 21 nt, Human
caaccuguaauaaauaugagu

SEQ ID NO: 3502309 - RNA, 18 nt, Human
caaccuguagaguggcca

SEQ ID NO: 3502310 - RNA, 17 nt, Human
caaccuuagauguucua

SEQ ID NO: 3502311 - RNA, 19 nt, Human
caaccuucgccaccugggu

SEQ ID NO: 3502312 - RNA, 19 nt, Human
caaccuucuguggcucaca

SEQ ID NO: 3502313 - RNA, 14 nt, Human
caaccuuggcuugg

SEQ ID NO: 3502314 - RNA, 15 nt, Human
caaccuuucccucac

SEQ ID NO: 3502315 - RNA, 13 nt, Human
caacgaaaagcac

SEQ ID NO: 3502316 - RNA, 20 nt, Human
caacgaagaaaaaaaauaac

SEQ ID NO: 3502317 - RNA, 12 nt, Human
caacgaccaggg

SEQ ID NO: 3502318 - RNA, 19 nt, Human
caacgaccagggccgagga

SEQ ID NO: 3502319 - RNA, 17 nt, Human
caacgagccuuuucacc

SEQ ID NO: 3502320 - RNA, 12 nt, Human
caacgaggaagc

SEQ ID NO: 3502321 - RNA, 16 nt, Human
caacgaucacaaauga

SEQ ID NO: 3502322 - RNA, 14 nt, Human
caacgcacaggaaa

SEQ ID NO: 3502323 - RNA, 12 nt, Human
caacgcagcccu

SEQ ID NO: 3502324 - RNA, 18 nt, Human
caacgcagcccugcuuug

SEQ ID NO: 3502325 - RNA, 20 nt, Human
caacggaaagugcugucuua

SEQ ID NO: 3502326 - RNA, 14 nt, Human
caacggcaagacag

SEQ ID NO: 3502327 - RNA, 18 nt, Human
caacggcccugcagccag

SEQ ID NO: 3502328 - RNA, 23 nt, Human
caacggucuccugacuggugcug

SEQ ID NO: 3502329 - RNA, 13 nt, Human
caacguggcccag

SEQ ID NO: 3502330 - RNA, 19 nt, Human
caacguggcccagagaagc

SEQ ID NO: 3502331 - RNA, 20 nt, Human
caacguggcccagagaagcc

SEQ ID NO: 3502332 - RNA, 21 nt, Human
caacguggcccagagaagcca

SEQ ID NO: 3502333 - RNA, 23 nt, Human
caacguggcuuuuuuuuuuuccc

SEQ ID NO: 3502334 - RNA, 22 nt, Human
caacguuacucagggcuccucc

SEQ ID NO: 3502335 - RNA, 23 nt, Human
caacguuuacaccgacuagccag

SEQ ID NO: 3502336 - RNA, 22 nt, Human
caacuaaaaugugucuugcugu

SEQ ID NO: 3502337 - RNA, 18 nt, Human
caacuaaaguuguacuuu

SEQ ID NO: 3502338 - RNA, 20 nt, Human
caacuaaaguuguacuuuaa

SEQ ID NO: 3502339 - RNA, 22 nt, Human
caacuaacaagaaacucacccc

SEQ ID NO: 3502340 - RNA, 15 nt, Human
caacuacuaauagaa

SEQ ID NO: 3502341 - RNA, 19 nt, Human
caacuacuaccuguaauga

SEQ ID NO: 3502342 - RNA, 13 nt, Human
caacuacuauuca

SEQ ID NO: 3502343 - RNA, 16 nt, Human
caacuagacauucugu

SEQ ID NO: 3502344 - RNA, 21 nt, Human
caacuagugggguuuccuggc

SEQ ID NO: 3502345 - RNA, 19 nt, Human
caacuauauuaucaugcaa

SEQ ID NO: 3502346 - RNA, 19 nt, Human
caacuauccugacuucuaa

SEQ ID NO: 3502347 - RNA, 13 nt, Human
caacucaccccag

SEQ ID NO: 3502348 - RNA, 22 nt, Human
caacucacuccuuuuaaagaaa

SEQ ID NO: 3502349 - RNA, 14 nt, Human
caacucauugcauc

SEQ ID NO: 3502350 - RNA, 13 nt, Human
caacuccagcaac

SEQ ID NO: 3502351 - RNA, 17 nt, Human
caacuccaguagcuugg

SEQ ID NO: 3502352 - RNA, 19 nt, Human
caacucccugccccccagc

SEQ ID NO: 3502353 - RNA, 21 nt, Human
caacucccugccccccagccc

SEQ ID NO: 3502354 - RNA, 19 nt, Human
caacuccuaguucuagaaa

SEQ ID NO: 3502355 - RNA, 21 nt, Human
caacuccuggaagcugugucc

SEQ ID NO: 3502356 - RNA, 17 nt, Human
caacuccuuccagcuag

SEQ ID NO: 3502357 - RNA, 19 nt, Human
caacucgcuuuaggucagc

SEQ ID NO: 3502358 - RNA, 19 nt, Human
caacucguauagcaugcau

SEQ ID NO: 3502359 - RNA, 13 nt, Human
caacucuagcugg

SEQ ID NO: 3502360 - RNA, 14 nt, Human
caacucuccuccag

SEQ ID NO: 3502361 - RNA, 20 nt, Human
caacucuccuccagagucag

SEQ ID NO: 3502362 - RNA, 14 nt, Human
caacucugagccca

SEQ ID NO: 3502363 - RNA, 21 nt, Human
caacucuucccccucucccag

SEQ ID NO: 3502364 - RNA, 16 nt, Human
caacucuugauuaucc

SEQ ID NO: 3502365 - RNA, 15 nt, Human
caacucuuugagaaa

SEQ ID NO: 3502366 - RNA, 16 nt, Human
caacucuuugagaaac

SEQ ID NO: 3502367 - RNA, 22 nt, Human
caacugaaaguguuuccuucau

SEQ ID NO: 3502368 - RNA, 14 nt, Human
caacugaacaaaaa

SEQ ID NO: 3502369 - RNA, 16 nt, Human
caacugaacaaaaaaa

SEQ ID NO: 3502370 - RNA, 17 nt, Human
caacugaacaaaaaaau

SEQ ID NO: 3502371 - RNA, 18 nt, Human
caacugaauaaauaccuc

SEQ ID NO: 3502372 - RNA, 13 nt, Human
caacugacacucc

SEQ ID NO: 3502373 - RNA, 14 nt, Human
caacugacacuccc

SEQ ID NO: 3502374 - RNA, 16 nt, Human
caacugaggcagacag

SEQ ID NO: 3502375 - RNA, 21 nt, Human
caacugaggcagacagcagcu

SEQ ID NO: 3502376 - RNA, 23 nt, Human
caacugcaaagaaagugggaggu

SEQ ID NO: 3502377 - RNA, 19 nt, Human
caacugcaauaacuucuga

SEQ ID NO: 3502378 - RNA, 14 nt, Human
caacugccuacucc

SEQ ID NO: 3502379 - RNA, 23 nt, Human
caacugccucgaaacacagaaac

SEQ ID NO: 3502380 - RNA, 11 nt, Human
caacugcuccc

SEQ ID NO: 3502381 - RNA, 22 nt, Human
caacugcucccaccuccugaca

SEQ ID NO: 3502382 - RNA, 17 nt, Human
caacugcugaugcucau

SEQ ID NO: 3502383 - RNA, 13 nt, Human
caacugcugcccc

SEQ ID NO: 3502384 - RNA, 23 nt, Human
caacugggguggguggggcagug

SEQ ID NO: 3502385 - RNA, 14 nt, Human
cacuugauucauaa

SEQ ID NO: 3502386 - RNA, 13 nt, Human
cacuugcagacuc

SEQ ID NO: 3502387 - RNA, 14 nt, Human
cacuugcagacucu

SEQ ID NO: 3502388 - RNA, 24 nt, Human
cacuugcagacucuacagaggcca

SEQ ID NO: 3502389 - RNA, 12 nt, Human
cacuugcauuuc

SEQ ID NO: 3502390 - RNA, 16 nt, Human
cacuugccaaaaucca

SEQ ID NO: 3502391 - RNA, 20 nt, Human
cacuugccauuccaaaauau

SEQ ID NO: 3502392 - RNA, 18 nt, Human
cacuugccccuguuaccu

SEQ ID NO: 3502393 - RNA, 13 nt, Human
cacuugcccugcu

SEQ ID NO: 3502394 - RNA, 13 nt, Human
cacuugccucuuc

SEQ ID NO: 3502395 - RNA, 17 nt, Human
cacuuggacucuugcuc

SEQ ID NO: 3502396 - RNA, 12 nt, Human
cacuuggagcca

SEQ ID NO: 3502397 - RNA, 22 nt, Human
cacuuggaguuugcauucuuau

SEQ ID NO: 3502398 - RNA, 11 nt, Human
cacuuggccaa

SEQ ID NO: 3502399 - RNA, 16 nt, Human
cacuuggccucuggau

SEQ ID NO: 3502400 - RNA, 20 nt, Human
cacuugggggcucagcaagg

SEQ ID NO: 3502401 - RNA, 19 nt, Human
cacuuggguccaggccuac

SEQ ID NO: 3502402 - RNA, 22 nt, Human
cacuuggguccaggccuacucc

SEQ ID NO: 3502403 - RNA, 15 nt, Human
cacuugguaauugua

SEQ ID NO: 3502404 - RNA, 19 nt, Human
cacuugguaauuguacuaa

SEQ ID NO: 3502405 - RNA, 15 nt, Human
cacuuggucugugag

SEQ ID NO: 3502406 - RNA, 15 nt, Human
cacuuggugcuggga

SEQ ID NO: 3502407 - RNA, 16 nt, Human
cacuugguuggguccu

SEQ ID NO: 3502408 - RNA, 12 nt, Human
cacuuguacaaa

SEQ ID NO: 3502409 - RNA, 17 nt, Human
cacuuguagauuugauu

SEQ ID NO: 3502410 - RNA, 13 nt, Human
cacuuguauauac

SEQ ID NO: 3502411 - RNA, 21 nt, Human
cacuuguauauacgcaucuau

SEQ ID NO: 3502412 - RNA, 19 nt, Human
cacuuguauccucugguuc

SEQ ID NO: 3502413 - RNA, 18 nt, Human
cacuugucauuguuauau

SEQ ID NO: 3502414 - RNA, 20 nt, Human
cacuuguccuuagccuggac

SEQ ID NO: 3502415 - RNA, 22 nt, Human
cacuuguccuuagccuggaccu

SEQ ID NO: 3502416 - RNA, 17 nt, Human
cacuugucggcuccagu

SEQ ID NO: 3502417 - RNA, 14 nt, Human
cacuugugacuuuu

SEQ ID NO: 3502418 - RNA, 17 nt, Human
cacuugugauuauuuau

SEQ ID NO: 3502419 - RNA, 22 nt, Human
cacuugugcacccucuauccca

SEQ ID NO: 3502420 - RNA, 16 nt, Human
cacuugugcuuugcuc

SEQ ID NO: 3502421 - RNA, 18 nt, Human
cacuugugcuuugcucuu

SEQ ID NO: 3502422 - RNA, 19 nt, Human
cacuugugcuuugcucuug

SEQ ID NO: 3502423 - RNA, 22 nt, Human
cacuuguggguuuuuguuuugu

SEQ ID NO: 3502424 - RNA, 23 nt, Human
cacuugugugugggcugugagug

SEQ ID NO: 3502425 - RNA, 18 nt, Human
cacuuguguuaugaagca

SEQ ID NO: 3502426 - RNA, 22 nt, Human
cacuuguguuuugcaagccaga

SEQ ID NO: 3502427 - RNA, 12 nt, Human
cacuuuaauggg

SEQ ID NO: 3502428 - RNA, 20 nt, Human
cacuuuaauuaccaaccugu

SEQ ID NO: 3502429 - RNA, 20 nt, Human
cacuuuaauucucaugugau

SEQ ID NO: 3502430 - RNA, 22 nt, Human
cacuuuacacaauagaauuaua

SEQ ID NO: 3502431 - RNA, 17 nt, Human
cacuuuacccaccuaga

SEQ ID NO: 3502432 - RNA, 18 nt, Human
cacuuuagaauaugccuu

SEQ ID NO: 3502433 - RNA, 21 nt, Human
cacuuuagaugcugaugauuu

SEQ ID NO: 3502434 - RNA, 18 nt, Human
cacuuuauaagucauugu

SEQ ID NO: 3502435 - RNA, 20 nt, Human
cacuuuauaagucauuguau

SEQ ID NO: 3502436 - RNA, 17 nt, Human
cacuuuauuuacuucgu

SEQ ID NO: 3502437 - RNA, 11 nt, Human
cacuuucagcu

SEQ ID NO: 3502438 - RNA, 16 nt, Human
cacuuucagcugucuu

SEQ ID NO: 3502439 - RNA, 20 nt, Human
cacuuucauugccagugucu

SEQ ID NO: 3502440 - RNA, 22 nt, Human
cacuuucauugccagugucuuu

SEQ ID NO: 3502441 - RNA, 14 nt, Human
cacuuucauuuuug

SEQ ID NO: 3502442 - RNA, 19 nt, Human
cacuuuccacuucuuccuu

SEQ ID NO: 3502443 - RNA, 13 nt, Human
cacuuucccaccc

SEQ ID NO: 3502444 - RNA, 15 nt, Human
cacuuuccuccuggc

SEQ ID NO: 3502445 - RNA, 17 nt, Human
cacuuucuagccagagg

SEQ ID NO: 3502446 - RNA, 23 nt, Human
cacuuucuuuuuuuucuauuuca

SEQ ID NO: 3502447 - RNA, 22 nt, Human
cacuuugaaauaccucauguuu

SEQ ID NO: 3502448 - RNA, 17 nt, Human
cacuuugaaauguguuu

SEQ ID NO: 3502449 - RNA, 20 nt, Human
cacuuugaaauguguuucug

SEQ ID NO: 3502450 - RNA, 18 nt, Human
cacuuugagccugggaaa

SEQ ID NO: 3502451 - RNA, 13 nt, Human
cacuuugauguca

SEQ ID NO: 3502452 - RNA, 14 nt, Human
cacuuugcacagcu

SEQ ID NO: 3502453 - RNA, 20 nt, Human
cacuuugcacgacgcccucu

SEQ ID NO: 3502454 - RNA, 16 nt, Human
cacuuugccuccugug

SEQ ID NO: 3502455 - RNA, 17 nt, Human
cacuuugccuccugugu

SEQ ID NO: 3502456 - RNA, 12 nt, Human
cacuuugcucug

SEQ ID NO: 3502457 - RNA, 13 nt, Human
cacuuugcucugg

SEQ ID NO: 3502458 - RNA, 12 nt, Human
cacuuugcuuua

SEQ ID NO: 3502459 - RNA, 17 nt, Human
cacuuugcuuuaauaua

SEQ ID NO: 3502460 - RNA, 18 nt, Human
cacuuugcuuuaauauaa

SEQ ID NO: 3502461 - RNA, 12 nt, Human
cacuuugggagg

SEQ ID NO: 3502462 - RNA, 16 nt, Human
cacuuugggaggccaa

SEQ ID NO: 3502463 - RNA, 19 nt, Human
cacuuugggaggccaagga

SEQ ID NO: 3502464 - RNA, 13 nt, Human
cacuuuguaaauu

SEQ ID NO: 3502465 - RNA, 16 nt, Human
cacuuuguucuggcuc

SEQ ID NO: 3502466 - RNA, 23 nt, Human
cacuuuguucuggcucuuccagg

SEQ ID NO: 3502467 - RNA, 20 nt, Human
aaaaucaacuuuuuauugcc

SEQ ID NO: 3502468 - RNA, 23 nt, Human
aaaaucaacuuuuuauugccuuc

SEQ ID NO: 3502469 - RNA, 18 nt, Human
aaaaucaauaugcagaau

SEQ ID NO: 3502470 - RNA, 23 nt, Human
aaaaucacacuguaaauaugaau

SEQ ID NO: 3502471 - RNA, 16 nt, Human
aaaaucacuaacauua

SEQ ID NO: 3502472 - RNA, 20 nt, Human
aaaaucacuuucauaaucuu

SEQ ID NO: 3502473 - RNA, 19 nt, Human
aaaaucagccaauuauguu

SEQ ID NO: 3502474 - RNA, 21 nt, Human
aaaaucagccaauuauguuaa

SEQ ID NO: 3502475 - RNA, 24 nt, Human
aaaaucagccaauuauguuaaacu

SEQ ID NO: 3502476 - RNA, 13 nt, Human
aaaaucagccugc

SEQ ID NO: 3502477 - RNA, 17 nt, Human
aaaaucagccugcucca

SEQ ID NO: 3502478 - RNA, 19 nt, Human
aaaaucagguauuaaucuu

SEQ ID NO: 3502479 - RNA, 21 nt, Human
aaaaucagguggcuuuugcgg

SEQ ID NO: 3502480 - RNA, 14 nt, Human
aaaaucauauugcu

SEQ ID NO: 3502481 - RNA, 23 nt, Human
aaaaucaucaagaagggcugcau

SEQ ID NO: 3502482 - RNA, 13 nt, Human
aaaaucaucagaa

SEQ ID NO: 3502483 - RNA, 15 nt, Human
aaaaucaucagaaag

SEQ ID NO: 3502484 - RNA, 16 nt, Human
aaaaucaucuauuuug

SEQ ID NO: 3502485 - RNA, 19 nt, Human
aaaaucaucuauuuugaug

SEQ ID NO: 3502486 - RNA, 17 nt, Human
aaaaucaugccaguauu

SEQ ID NO: 3502487 - RNA, 22 nt, Human
aaaaucauggaaugguuauaaa

SEQ ID NO: 3502488 - RNA, 22 nt, Human
aaaaucauugauugucagcuac

SEQ ID NO: 3502489 - RNA, 10 nt, Human
aaaaucauuu

SEQ ID NO: 3502490 - RNA, 21 nt, Human
aaaaucauuucugcaucagcu

SEQ ID NO: 3502491 - RNA, 20 nt, Human
aaaaucauuuuauaugucaa

SEQ ID NO: 3502492 - RNA, 15 nt, Human
aaaauccaaaaagaa

SEQ ID NO: 3502493 - RNA, 19 nt, Human
aaaauccaaauauuguuaa

SEQ ID NO: 3502494 - RNA, 19 nt, Human
aaaauccauacauuugugu

SEQ ID NO: 3502495 - RNA, 14 nt, Human
aaaauccaugaaca

SEQ ID NO: 3502496 - RNA, 14 nt, Human
aaaauccuucuaau

SEQ ID NO: 3502497 - RNA, 23 nt, Human
aaaaucuaauauuaaaaauaugg

SEQ ID NO: 3502498 - RNA, 21 nt, Human
aaaaucuacacuccagugaga

SEQ ID NO: 3502499 - RNA, 14 nt, Human
aaaaucuauucugu

SEQ ID NO: 3502500 - RNA, 20 nt, Human
aaaaucuauuuuguaacuuu

SEQ ID NO: 3502501 - RNA, 16 nt, Human
aaaaucucaaauuucu

SEQ ID NO: 3502502 - RNA, 18 nt, Human
aaaaucucaaauuucuaa

SEQ ID NO: 3502503 - RNA, 19 nt, Human
aaaaucucaaauuucuaaa

SEQ ID NO: 3502504 - RNA, 16 nt, Human
aaaaucucaaauuugg

SEQ ID NO: 3502505 - RNA, 16 nt, Human
aaaaucucaauauuuc

SEQ ID NO: 3502506 - RNA, 17 nt, Human
aaaaucucaauauuuca

SEQ ID NO: 3502507 - RNA, 21 nt, Human
aaaaucucccauuuuggaauu

SEQ ID NO: 3502508 - RNA, 15 nt, Human
aaaaucucuccacuu

SEQ ID NO: 3502509 - RNA, 22 nt, Human
aaaaucucuccacuuucagcug

SEQ ID NO: 3502510 - RNA, 22 nt, Human
aaaaucugaagauuguuuaucu

SEQ ID NO: 3502511 - RNA, 21 nt, Human
aaaaucugagggaaauguuuu

SEQ ID NO: 3502512 - RNA, 19 nt, Human
aaaaucugcagaaggaaaa

SEQ ID NO: 3502513 - RNA, 17 nt, Human
aaaaucugcuguuaacu

SEQ ID NO: 3502514 - RNA, 20 nt, Human
aaaaucugucacguagaacu

SEQ ID NO: 3502515 - RNA, 12 nt, Human
aaaaucugucca

SEQ ID NO: 3502516 - RNA, 17 nt, Human
aaaaucuuaauacuguu

SEQ ID NO: 3502517 - RNA, 18 nt, Human
aaaaucuuaauacuguua

SEQ ID NO: 3502518 - RNA, 16 nt, Human
aaaaucuuauuaaagu

SEQ ID NO: 3502519 - RNA, 22 nt, Human
aaaaucuuauuaaaguuucaaa

SEQ ID NO: 3502520 - RNA, 15 nt, Human
aaaaucuucauggaa

SEQ ID NO: 3502521 - RNA, 18 nt, Human
aaaaucuugaucaguuaa

SEQ ID NO: 3502522 - RNA, 11 nt, Human
aaaaucuuguc

SEQ ID NO: 3502523 - RNA, 12 nt, Human
aaaaucuuguca

SEQ ID NO: 3502524 - RNA, 19 nt, Human
aaaaucuugucauguguau

SEQ ID NO: 3502525 - RNA, 19 nt, Human
aaaaucuugugcuagaaua

SEQ ID NO: 3502526 - RNA, 22 nt, Human
aaaaucuuucuuucuuagaaau

SEQ ID NO: 3502527 - RNA, 23 nt, Human
aaaaucuuucuuucuuagaaauu

SEQ ID NO: 3502528 - RNA, 12 nt, Human
aaaaugaaaaau

SEQ ID NO: 3502529 - RNA, 19 nt, Human
auuauuaaguaacuuauuu

SEQ ID NO: 3502530 - RNA, 21 nt, Human
auuauuaaguaacuuauuuau

SEQ ID NO: 3502531 - RNA, 14 nt, Human
auuauuaaugaaaa

SEQ ID NO: 3502532 - RNA, 16 nt, Human
auuauuaauuuaugca

SEQ ID NO: 3502533 - RNA, 13 nt, Human
auuauuacagugu

SEQ ID NO: 3502534 - RNA, 20 nt, Human
auuauuaccuuacagaaguu

SEQ ID NO: 3502535 - RNA, 21 nt, Human
auuauuacuguugauaauucu

SEQ ID NO: 3502536 - RNA, 13 nt, Human
auuauuacuguuu

SEQ ID NO: 3502537 - RNA, 21 nt, Human
auuauuacuuauuuuugacag

SEQ ID NO: 3502538 - RNA, 15 nt, Human
auuauuacuuuugcu

SEQ ID NO: 3502539 - RNA, 21 nt, Human
auuauuaguaagaaaacauca

SEQ ID NO: 3502540 - RNA, 22 nt, Human
auuauuaguuuacaucauuuuu

SEQ ID NO: 3502541 - RNA, 22 nt, Human
auuauuaguuuugauuuaaugu

SEQ ID NO: 3502542 - RNA, 13 nt, Human
auuauuauaaaaa

SEQ ID NO: 3502543 - RNA, 20 nt, Human
auuauuauaagcauugaaau

SEQ ID NO: 3502544 - RNA, 22 nt, Human
auuauuaucaggggagaaaaau

SEQ ID NO: 3502545 - RNA, 14 nt, Human
auuauuaucuuuaa

SEQ ID NO: 3502546 - RNA, 17 nt, Human
auuauuauuaaaaauau

SEQ ID NO: 3502547 - RNA, 16 nt, Human
auuauuauucuucaua

SEQ ID NO: 3502548 - RNA, 15 nt, Human
auuauuauuuguguu

SEQ ID NO: 3502549 - RNA, 18 nt, Human
auuauucaccauguaaaa

SEQ ID NO: 3502550 - RNA, 20 nt, Human
auuauucaccauguaaaaca

SEQ ID NO: 3502551 - RNA, 19 nt, Human
auuauucacugauuugaca

SEQ ID NO: 3502552 - RNA, 15 nt, Human
auuauucaggcuuua

SEQ ID NO: 3502553 - RNA, 15 nt, Human
auuauucaguuaaga

SEQ ID NO: 3502554 - RNA, 14 nt, Human
auuauucauuuaaa

SEQ ID NO: 3502555 - RNA, 12 nt, Human
auuauucccucu

SEQ ID NO: 3502556 - RNA, 12 nt, Human
auuauucucugc

SEQ ID NO: 3502557 - RNA, 13 nt, Human
auuauucugcagc

SEQ ID NO: 3502558 - RNA, 12 nt, Human
auuauucuugua

SEQ ID NO: 3502559 - RNA, 13 nt, Human
auuauucuuguag

SEQ ID NO: 3502560 - RNA, 12 nt, Human
auuauugaaauu

SEQ ID NO: 3502561 - RNA, 14 nt, Human
auuauugacacuga

SEQ ID NO: 3502562 - RNA, 18 nt, Human
auuauugacacugaacuu

SEQ ID NO: 3502563 - RNA, 21 nt, Human
auuauugaguuccaguugaag

SEQ ID NO: 3502564 - RNA, 15 nt, Human
auuauugauauauau

SEQ ID NO: 3502565 - RNA, 17 nt, Human
auuauugauguuuucau

SEQ ID NO: 3502566 - RNA, 12 nt, Human
auuauugcauua

SEQ ID NO: 3502567 - RNA, 13 nt, Human
auuauugcuguug

SEQ ID NO: 3502568 - RNA, 15 nt, Human
auuauugcuguugcu

SEQ ID NO: 3502569 - RNA, 11 nt, Human
auuauugcuua

SEQ ID NO: 3502570 - RNA, 20 nt, Human
auuauuggaauauaauuguu

SEQ ID NO: 3502571 - RNA, 13 nt, Human
auuauuguauuua

SEQ ID NO: 3502572 - RNA, 19 nt, Human
auuauuguuuauauuuuca

SEQ ID NO: 3502573 - RNA, 14 nt, Human
auuauuuaagacua

SEQ ID NO: 3502574 - RNA, 13 nt, Human
auuauuuaauaaa

SEQ ID NO: 3502575 - RNA, 13 nt, Human
auuauuuaauaac

SEQ ID NO: 3502576 - RNA, 14 nt, Human
auuauuuaauaaca

SEQ ID NO: 3502577 - RNA, 21 nt, Human
auuauuuaauaacauuaccuu

SEQ ID NO: 3502578 - RNA, 12 nt, Human
auuauuuauaau

SEQ ID NO: 3502579 - RNA, 13 nt, Human
auuauuuauaugg

SEQ ID NO: 3502580 - RNA, 22 nt, Human
auuauuuauauggggaauauau

SEQ ID NO: 3502581 - RNA, 12 nt, Human
auuauuuaugua

SEQ ID NO: 3502582 - RNA, 13 nt, Human
auuauuuauguau

SEQ ID NO: 3502583 - RNA, 14 nt, Human
auuauuuauguaug

SEQ ID NO: 3502584 - RNA, 23 nt, Human
auuauuuauuaaaugcccagccc

SEQ ID NO: 3502585 - RNA, 16 nt, Human
auuauuucuaggaaga

SEQ ID NO: 3502586 - RNA, 15 nt, Human
auuauuucugucaca

SEQ ID NO: 3502587 - RNA, 13 nt, Human
auuauuugagaag

SEQ ID NO: 3502588 - RNA, 18 nt, Human
auuauuugauuauuuaag

SEQ ID NO: 3502589 - RNA, 19 nt, Human
auuauuugauuauuuaaga

SEQ ID NO: 3502590 - RNA, 22 nt, Human
auuauuugauuauuuaagacua

SEQ ID NO: 3502591 - RNA, 13 nt, Human
auuauuugcaguc

SEQ ID NO: 3502592 - RNA, 11 nt, Human
auuauuugcau

SEQ ID NO: 3502593 - RNA, 13 nt, Human
auuauuugcaugu

SEQ ID NO: 3502594 - RNA, 14 nt, Human
auuauuugcauguu

SEQ ID NO: 3502595 - RNA, 19 nt, Human
auuauuugcauguuauguu

SEQ ID NO: 3502596 - RNA, 18 nt, Human
auuauuuggcaguuuggu

SEQ ID NO: 3502597 - RNA, 23 nt, Human
auuauuuggcaguuugguauuug

SEQ ID NO: 3502598 - RNA, 21 nt, Human
auuauuugggagggaaaaggg

SEQ ID NO: 3502599 - RNA, 17 nt, Human
auuauuuguaagauauu

SEQ ID NO: 3502600 - RNA, 17 nt, Human
auuauuugucaaauugu

SEQ ID NO: 3502601 - RNA, 18 nt, Human
auuauuuguguaauagaa

SEQ ID NO: 3502602 - RNA, 14 nt, Human
auuauuuguuuucc

SEQ ID NO: 3502603 - RNA, 13 nt, Human
auuauuuuaaaag

SEQ ID NO: 3502604 - RNA, 14 nt, Human
auuauuuuaaaaga

SEQ ID NO: 3502605 - RNA, 13 nt, Human
auuauuuuaaaca

SEQ ID NO: 3502606 - RNA, 17 nt, Human
auuauuuuaaauuauaa

SEQ ID NO: 3502607 - RNA, 18 nt, Human
auuauuuuaaauuauaag

SEQ ID NO: 3502608 - RNA, 20 nt, Human
auuauuuuaaauuauaagga

SEQ ID NO: 3502609 - RNA, 22 nt, Human
auuauuuuaaauuauaaggacu

SEQ ID NO: 3502610 - RNA, 23 nt, Human
auuauuuuaaauuauaaggacug

SEQ ID NO: 3502611 - RNA, 16 nt, Human
auuauuuuauguugca

SEQ ID NO: 3502612 - RNA, 14 nt, Human
auuauuuuauuaug

SEQ ID NO: 3502613 - RNA, 15 nt, Human
auuauuuuauuauga

SEQ ID NO: 3502614 - RNA, 22 nt, Human
auuauuuuauuaugaaacuugu

SEQ ID NO: 3502615 - RNA, 17 nt, Human
auuauuuucauuacaau

SEQ ID NO: 3502616 - RNA, 19 nt, Human
auuauuuucauuacaaugg

SEQ ID NO: 3502617 - RNA, 22 nt, Human
auuauuuucugucagaugagaa

SEQ ID NO: 3502618 - RNA, 12 nt, Human
auuauuuugaug

SEQ ID NO: 3502619 - RNA, 13 nt, Human
auuauuuugauua

SEQ ID NO: 3502620 - RNA, 15 nt, Human
auuauuuuggaaagu

SEQ ID NO: 3502621 - RNA, 14 nt, Human
auuauuuugggguc

SEQ ID NO: 3502622 - RNA, 16 nt, Human
auuauuuuggggucuc

SEQ ID NO: 3502623 - RNA, 17 nt, Human
auuauuuuggggucucu

SEQ ID NO: 3502624 - RNA, 16 nt, Human
auuauuuuguucauac

SEQ ID NO: 3502625 - RNA, 14 nt, Human
auuauuuuuauaau

SEQ ID NO: 3502626 - RNA, 19 nt, Human
auuauuuuuccacuuuguu

SEQ ID NO: 3502627 - RNA, 22 nt, Human
auuauuuuuccacuuuguucuu

SEQ ID NO: 3502628 - RNA, 19 nt, Human
auuauuuuuucagaccgaa

SEQ ID NO: 3502629 - RNA, 21 nt, Human
cagagcuggcaucuaucuggu

SEQ ID NO: 3502630 - RNA, 13 nt, Human
cagagcuggcucu

SEQ ID NO: 3502631 - RNA, 17 nt, Human
cagagcuggcucugagc

SEQ ID NO: 3502632 - RNA, 14 nt, Human
cagagcugggaggg

SEQ ID NO: 3502633 - RNA, 12 nt, Human
cagagcuggugc

SEQ ID NO: 3502634 - RNA, 20 nt, Human
cagagcuggugcggcuggcc

SEQ ID NO: 3502635 - RNA, 19 nt, Human
cagagcuguuuauggccuc

SEQ ID NO: 3502636 - RNA, 13 nt, Human
cagagcuucccug

SEQ ID NO: 3502637 - RNA, 14 nt, Human
cagagcuucccuga

SEQ ID NO: 3502638 - RNA, 16 nt, Human
cagagcuuggacugga

SEQ ID NO: 3502639 - RNA, 14 nt, Human
cagagcuuuucaga

SEQ ID NO: 3502640 - RNA, 14 nt, Human
cagaggaaaucugu

SEQ ID NO: 3502641 - RNA, 20 nt, Human
cagaggaaggggccagaggc

SEQ ID NO: 3502642 - RNA, 16 nt, Human
cagaggaauccuggca

SEQ ID NO: 3502643 - RNA, 17 nt, Human
cagaggaauuuauaccu

SEQ ID NO: 3502644 - RNA, 17 nt, Human
cagaggacacagagaag

SEQ ID NO: 3502645 - RNA, 23 nt, Human
cagaggacaccuguacuggagag

SEQ ID NO: 3502646 - RNA, 22 nt, Human
cagaggacaguauuugugggga

SEQ ID NO: 3502647 - RNA, 16 nt, Human
cagaggaccagggccu

SEQ ID NO: 3502648 - RNA, 21 nt, Human
cagaggaccuguauuuaagca

SEQ ID NO: 3502649 - RNA, 21 nt, Human
cagaggacucccaacccuggc

SEQ ID NO: 3502650 - RNA, 20 nt, Human
cagaggagagauagccugug

SEQ ID NO: 3502651 - RNA, 22 nt, Human
cagaggagagauagccuguggc

SEQ ID NO: 3502652 - RNA, 23 nt, Human
cagaggagagauagccuguggcc

SEQ ID NO: 3502653 - RNA, 20 nt, Human
cagaggagagucccagagca

SEQ ID NO: 3502654 - RNA, 14 nt, Human
cagaggagggcagc

SEQ ID NO: 3502655 - RNA, 13 nt, Human
cagaggaggggcc

SEQ ID NO: 3502656 - RNA, 19 nt, Human
cagaggaggggccgcugcc

SEQ ID NO: 3502657 - RNA, 17 nt, Human
cagaggaugagcucuac

SEQ ID NO: 3502658 - RNA, 21 nt, Human
cagaggaugagcucuacccag

SEQ ID NO: 3502659 - RNA, 18 nt, Human
cagaggauggccaguguc

SEQ ID NO: 3502660 - RNA, 19 nt, Human
cagaggauggccagugucu

SEQ ID NO: 3502661 - RNA, 21 nt, Human
cagaggauugcugccccauca

SEQ ID NO: 3502662 - RNA, 16 nt, Human
cagaggcacagccggg

SEQ ID NO: 3502663 - RNA, 21 nt, Human
cagaggcacagccggggccug

SEQ ID NO: 3502664 - RNA, 17 nt, Human
cagaggcagaacccugg

SEQ ID NO: 3502665 - RNA, 18 nt, Human
cagaggcagaacccuggu

SEQ ID NO: 3502666 - RNA, 11 nt, Human
cagaggcagcc

SEQ ID NO: 3502667 - RNA, 12 nt, Human
cagaggcagccc

SEQ ID NO: 3502668 - RNA, 17 nt, Human
cagaggcaguaccuggg

SEQ ID NO: 3502669 - RNA, 18 nt, Human
cagaggccaacacugugg

SEQ ID NO: 3502670 - RNA, 20 nt, Human
cagaggccagaggcccccag

SEQ ID NO: 3502671 - RNA, 16 nt, Human
cagaggccaugggccu

SEQ ID NO: 3502672 - RNA, 19 nt, Human
cagaggccaugggccuccu

SEQ ID NO: 3502673 - RNA, 11 nt, Human
cagaggcccca

SEQ ID NO: 3502674 - RNA, 22 nt, Human
cagaggcccccagcccagggcu

SEQ ID NO: 3502675 - RNA, 20 nt, Human
cagaagcacugggaucacag

SEQ ID NO: 3502676 - RNA, 14 nt, Human
cagaagcaggauag

SEQ ID NO: 3502677 - RNA, 13 nt, Human
cagaagcauuugu

SEQ ID NO: 3502678 - RNA, 21 nt, Human
cagaagcauuuguauuuugug

SEQ ID NO: 3502679 - RNA, 12 nt, Human
cagaagcccaga

SEQ ID NO: 3502680 - RNA, 16 nt, Human
cagaagccuauuguaa

SEQ ID NO: 3502681 - RNA, 18 nt, Human
cagaagccuccccagcuc

SEQ ID NO: 3502682 - RNA, 22 nt, Human
cagaagccuccccagcucaccc

SEQ ID NO: 3502683 - RNA, 14 nt, Human
cagaagccucuggc

SEQ ID NO: 3502684 - RNA, 19 nt, Human
cagaagccugaggcuggga

SEQ ID NO: 3502685 - RNA, 18 nt, Human
cagaagccugaugcugac

SEQ ID NO: 3502686 - RNA, 19 nt, Human
cagaagccugggggccugg

SEQ ID NO: 3502687 - RNA, 16 nt, Human
cagaagcucccccagc

SEQ ID NO: 3502688 - RNA, 19 nt, Human
cagaagcucccccagcaaa

SEQ ID NO: 3502689 - RNA, 23 nt, Human
cagaagcucccccagcaaagccc

SEQ ID NO: 3502690 - RNA, 15 nt, Human
cagaagcucucgaug

SEQ ID NO: 3502691 - RNA, 19 nt, Human
cagaagcugagcaccaggg

SEQ ID NO: 3502692 - RNA, 12 nt, Human
cagaagcuucca

SEQ ID NO: 3502693 - RNA, 18 nt, Human
cagaaggaagacuucauc

SEQ ID NO: 3502694 - RNA, 11 nt, Human
cagaaggaagg

SEQ ID NO: 3502695 - RNA, 17 nt, Human
cagaaggaucuucaucu

SEQ ID NO: 3502696 - RNA, 17 nt, Human
cagaaggaugaaugagg

SEQ ID NO: 3502697 - RNA, 13 nt, Human
cagaaggcaggga

SEQ ID NO: 3502698 - RNA, 12 nt, Human
cagaaggcuccu

SEQ ID NO: 3502699 - RNA, 15 nt, Human
cagaaggcuccugcc

SEQ ID NO: 3502700 - RNA, 16 nt, Human
cagaaggcuccugccc

SEQ ID NO: 3502701 - RNA, 12 nt, Human
cagaaggcucuu

SEQ ID NO: 3502702 - RNA, 16 nt, Human
cagaagggaaacaguc

SEQ ID NO: 3502703 - RNA, 10 nt, Human
cagaagggag

SEQ ID NO: 3502704 - RNA, 13 nt, Human
cagaagggagcag

SEQ ID NO: 3502705 - RNA, 20 nt, Human
cagaagggagcuggcuccag

SEQ ID NO: 3502706 - RNA, 13 nt, Human
cagaagggagggc

SEQ ID NO: 3502707 - RNA, 21 nt, Human
cagaagggagggcagagcugg

SEQ ID NO: 3502708 - RNA, 16 nt, Human
cagaaggggacugcca

SEQ ID NO: 3502709 - RNA, 14 nt, Human
cagaaggggguggu

SEQ ID NO: 3502710 - RNA, 20 nt, Human
cagaaggggguggugucucc

SEQ ID NO: 3502711 - RNA, 16 nt, Human
cagaagguugugauga

SEQ ID NO: 3502712 - RNA, 15 nt, Human
cagaaguaagccuca

SEQ ID NO: 3502713 - RNA, 15 nt, Human
cagaaguaccagacu

SEQ ID NO: 3502714 - RNA, 16 nt, Human
cagaaguaccagacua

SEQ ID NO: 3502715 - RNA, 16 nt, Human
cagaaguagcuuugca

SEQ ID NO: 3502716 - RNA, 22 nt, Human
cagaaguaggggaagaauaauu

SEQ ID NO: 3502717 - RNA, 17 nt, Human
cagaagucaaggcuuag

SEQ ID NO: 3502718 - RNA, 18 nt, Human
cagaagucaaggcuuaga

SEQ ID NO: 3502719 - RNA, 19 nt, Human
cagaagucaugaagcccaa

SEQ ID NO: 3502720 - RNA, 12 nt, Human
cagaaguccugu

SEQ ID NO: 3502721 - RNA, 19 nt, Human
cagaaguccuguaugucug

SEQ ID NO: 3502722 - RNA, 20 nt, Human
cagaaguccuguaugucugu

SEQ ID NO: 3502723 - RNA, 15 nt, Human
cagaagucuccucaa

SEQ ID NO: 3502724 - RNA, 17 nt, Human
cagaagucuuucagcaa

SEQ ID NO: 3502725 - RNA, 13 nt, Human
cagaagugaaaau

SEQ ID NO: 3502726 - RNA, 20 nt, Human
cagaagugagcuuugcugcu

SEQ ID NO: 3502727 - RNA, 18 nt, Human
cagaagugcccuuccugc

SEQ ID NO: 3502728 - RNA, 20 nt, Human
cagaagugcccuuccugcug

SEQ ID NO: 3502729 - RNA, 21 nt, Human
cagaagugcccuuccugcugc

SEQ ID NO: 3502730 - RNA, 16 nt, Human
cagaaguggagcuggg

SEQ ID NO: 3502731 - RNA, 14 nt, Human
cagaaguuucugcc

SEQ ID NO: 3502732 - RNA, 19 nt, Human
cagaaguuucugccgcagc

SEQ ID NO: 3502733 - RNA, 21 nt, Human
cagaaguuucugccgcagccc

SEQ ID NO: 3502734 - RNA, 22 nt, Human
cagaaguuucugccgcagcccu

SEQ ID NO: 3502735 - RNA, 21 nt, Human
cagaauaaacuggcagcucag

SEQ ID NO: 3502736 - RNA, 13 nt, Human
cagaauaaagcaa

SEQ ID NO: 3502737 - RNA, 15 nt, Human
cagaauaaagcaauu

SEQ ID NO: 3502738 - RNA, 21 nt, Human
cagaauaaagcaauuuuccuu

SEQ ID NO: 3502739 - RNA, 22 nt, Human
cagaauaaagcaauuuuccuug

SEQ ID NO: 3502740 - RNA, 15 nt, Human
cagaauaaguuauug

SEQ ID NO: 3502741 - RNA, 17 nt, Human
cagaauaaguuauugca

SEQ ID NO: 3502742 - RNA, 19 nt, Human
cagaauaaguuauugcagu

SEQ ID NO: 3502743 - RNA, 15 nt, Human
cagaauaauguucua

SEQ ID NO: 3502744 - RNA, 14 nt, Human
cagaauacacuuaa

SEQ ID NO: 3502745 - RNA, 23 nt, Human
cagaauacaguaagcugcucuau

SEQ ID NO: 3502746 - RNA, 15 nt, Human
cagaauacauacaaa

SEQ ID NO: 3502747 - RNA, 20 nt, Human
cagaauacuagccagagcuc

SEQ ID NO: 3502748 - RNA, 15 nt, Human
cagaauagccacauu

SEQ ID NO: 3502749 - RNA, 17 nt, Human
cagaauaucacagaaaa

SEQ ID NO: 3502750 - RNA, 15 nt, Human
cagaauaucugggau

SEQ ID NO: 3502751 - RNA, 13 nt, Human
cagaauaugucag

SEQ ID NO: 3502752 - RNA, 13 nt, Human
cagaauauguuuc

SEQ ID NO: 3502753 - RNA, 20 nt, Human
cagaauauguuucaaacuuu

SEQ ID NO: 3502754 - RNA, 22 nt, Human
cagaauauuagugaccucagcu

SEQ ID NO: 3502755 - RNA, 13 nt, Human
cagaaucaaagca

SEQ ID NO: 3502756 - RNA, 20 nt, Human
cagaaucaaagcaaugcauu

SEQ ID NO: 3502757 - RNA, 23 nt, Human
cagaaucaaagcaaugcauuuug

SEQ ID NO: 3502758 - RNA, 18 nt, Human
cagaaucagcacagauaa

SEQ ID NO: 3502759 - RNA, 13 nt, Human
cagaaucccagcc

SEQ ID NO: 3502760 - RNA, 18 nt, Human
cagaaucccuuaacaguu

SEQ ID NO: 3502761 - RNA, 21 nt, Human
cagaauccuggcccucugugu

SEQ ID NO: 3502762 - RNA, 21 nt, Human
cagaaucgcuccaccuugcag

SEQ ID NO: 3502763 - RNA, 23 nt, Human
cagaaucuaacugguggacaugg

SEQ ID NO: 3502764 - RNA, 14 nt, Human
cagaaucugaaugu

SEQ ID NO: 3502765 - RNA, 18 nt, Human
cagaaucugaauguaauu

SEQ ID NO: 3502766 - RNA, 16 nt, Human
cagaaucuguaugauu

SEQ ID NO: 3502767 - RNA, 18 nt, Human
cagaaucuguaugauucu

SEQ ID NO: 3502768 - RNA, 21 nt, Human
cagaaucuuuccuuccucuca

SEQ ID NO: 3502769 - RNA, 18 nt, Human
cagaaugaggaauaauaa

SEQ ID NO: 3502770 - RNA, 17 nt, Human
cagaaugcuagcucuga

SEQ ID NO: 3502771 - RNA, 21 nt, Human
cagaaugcuagcucugagcca

SEQ ID NO: 3502772 - RNA, 16 nt, Human
cagaaugcuguacauc

SEQ ID NO: 3502773 - RNA, 15 nt, Human
cagaauggaagagag

SEQ ID NO: 3502774 - RNA, 19 nt, Human
cagaauguaagugggccca

SEQ ID NO: 3502775 - RNA, 22 nt, Human
cagaauguaagugggcccaccc

SEQ ID NO: 3502776 - RNA, 23 nt, Human
cagaauguaagugggcccacccg

SEQ ID NO: 3502777 - RNA, 14 nt, Human
cagaauguauauua

SEQ ID NO: 3502778 - RNA, 21 nt, Human
cagaaugugauaaggaaauca

SEQ ID NO: 3502779 - RNA, 17 nt, Human
cagaauguuuuuaaaau

SEQ ID NO: 3502780 - RNA, 23 nt, Human
cagaauuaaacuuuuaauucauu

SEQ ID NO: 3502781 - RNA, 22 nt, Human
cagaauuacuguaacugauuac

SEQ ID NO: 3502782 - RNA, 23 nt, Human
cagaauuacuguaacugauuaca

SEQ ID NO: 3502783 - RNA, 15 nt, Human
cagaauuccuuuucu

SEQ ID NO: 3502784 - RNA, 18 nt, Human
auuauuuuuuuaaaauuu

SEQ ID NO: 3502785 - RNA, 22 nt, Human
auuauuuuuuuaaaauuuugua

SEQ ID NO: 3502786 - RNA, 12 nt, Human
auucaaaaaguc

SEQ ID NO: 3502787 - RNA, 14 nt, Human
auucaaaaaguguu

SEQ ID NO: 3502788 - RNA, 21 nt, Human
auucaaaaguuccaagagucu

SEQ ID NO: 3502789 - RNA, 14 nt, Human
auucaaaauauuua

SEQ ID NO: 3502790 - RNA, 21 nt, Human
auucaaaauugacauugcuuu

SEQ ID NO: 3502791 - RNA, 15 nt, Human
auucaaaccuaaguu

SEQ ID NO: 3502792 - RNA, 19 nt, Human
auucaaacuggggccucca

SEQ ID NO: 3502793 - RNA, 22 nt, Human
auucaaacuggggccuccagaa

SEQ ID NO: 3502794 - RNA, 17 nt, Human
auucaaagcucuauuaa

SEQ ID NO: 3502795 - RNA, 17 nt, Human
auucaaaguugccuaaa

SEQ ID NO: 3502796 - RNA, 20 nt, Human
auucaaaguugccuaaaucc

SEQ ID NO: 3502797 - RNA, 16 nt, Human
auucaaaugucuauaa

SEQ ID NO: 3502798 - RNA, 18 nt, Human
auucaacagcaaguguga

SEQ ID NO: 3502799 - RNA, 22 nt, Human
auucaaccacuguaaaaugaaa

SEQ ID NO: 3502800 - RNA, 13 nt, Human
auucaacuaaaaa

SEQ ID NO: 3502801 - RNA, 16 nt, Human
auucaacuuuccaaau

SEQ ID NO: 3502802 - RNA, 13 nt, Human
auucaacuuugua

SEQ ID NO: 3502803 - RNA, 15 nt, Human
auucaacuuuguaaa

SEQ ID NO: 3502804 - RNA, 22 nt, Human
auucaagaaagccagucuuaac

SEQ ID NO: 3502805 - RNA, 19 nt, Human
auucaaggaauuucuuaac

SEQ ID NO: 3502806 - RNA, 22 nt, Human
auucaaggaauuucuuaacuuc

SEQ ID NO: 3502807 - RNA, 19 nt, Human
auucaagguaaaauucuaa

SEQ ID NO: 3502808 - RNA, 20 nt, Human
auucaaguauuagggguaau

SEQ ID NO: 3502809 - RNA, 21 nt, Human
auucaaguguaaaauauuuug

SEQ ID NO: 3502810 - RNA, 21 nt, Human
auucaauaaaaaaaagaaaug

SEQ ID NO: 3502811 - RNA, 14 nt, Human
auucaauaaaguau

SEQ ID NO: 3502812 - RNA, 22 nt, Human
auucaauaaaguauuuaauuag

SEQ ID NO: 3502813 - RNA, 13 nt, Human
auucaauaaauug

SEQ ID NO: 3502814 - RNA, 13 nt, Human
auucaauauugaa

SEQ ID NO: 3502815 - RNA, 14 nt, Human
auucaauauugaau

SEQ ID NO: 3502816 - RNA, 21 nt, Human
auucaauauugaauuuuuccu

SEQ ID NO: 3502817 - RNA, 15 nt, Human
auucaauauugacau

SEQ ID NO: 3502818 - RNA, 16 nt, Human
auucaauauugacauu

SEQ ID NO: 3502819 - RNA, 20 nt, Human
cagccccaaaacucuccucu

SEQ ID NO: 3502820 - RNA, 15 nt, Human
cagccccacagccca

SEQ ID NO: 3502821 - RNA, 14 nt, Human
cagccccacccagg

SEQ ID NO: 3502822 - RNA, 15 nt, Human
cagccccacccagga

SEQ ID NO: 3502823 - RNA, 16 nt, Human
cagccccacccaggag

SEQ ID NO: 3502824 - RNA, 21 nt, Human
cagccccacccaggagggagg

SEQ ID NO: 3502825 - RNA, 14 nt, Human
cagccccaccccag

SEQ ID NO: 3502826 - RNA, 18 nt, Human
cagccccaccccagggca

SEQ ID NO: 3502827 - RNA, 20 nt, Human
cagccccaccccagggcagc

SEQ ID NO: 3502828 - RNA, 23 nt, Human
cagccccaccccagggcagccag

SEQ ID NO: 3502829 - RNA, 15 nt, Human
cagccccacccuggc

SEQ ID NO: 3502830 - RNA, 17 nt, Human
cagccccacccuggccu

SEQ ID NO: 3502831 - RNA, 14 nt, Human
cagccccacccugu

SEQ ID NO: 3502832 - RNA, 15 nt, Human
cagccccacuccucu

SEQ ID NO: 3502833 - RNA, 23 nt, Human
cagagaugucaucagagcuccuc

SEQ ID NO: 3502834 - RNA, 16 nt, Human
cagagauucccaagcc

SEQ ID NO: 3502835 - RNA, 15 nt, Human
cagagauugcuucuc

SEQ ID NO: 3502836 - RNA, 21 nt, Human
cagagauuucucauugacuuu

SEQ ID NO: 3502837 - RNA, 16 nt, Human
cagagcaaaauaauuu

SEQ ID NO: 3502838 - RNA, 18 nt, Human
cagagcaaccccuggacc

SEQ ID NO: 3502839 - RNA, 21 nt, Human
cagagcaaccccuggacccca

SEQ ID NO: 3502840 - RNA, 22 nt, Human
cagagcaaccccuggaccccag

SEQ ID NO: 3502841 - RNA, 16 nt, Human
cagagcaacgaccagg

SEQ ID NO: 3502842 - RNA, 17 nt, Human
cagagcaagaccccauc

SEQ ID NO: 3502843 - RNA, 20 nt, Human
cagagcaagacucugucuca

SEQ ID NO: 3502844 - RNA, 17 nt, Human
cagagcaagucugcagg

SEQ ID NO: 3502845 - RNA, 18 nt, Human
cagagcaccugcugucug

SEQ ID NO: 3502846 - RNA, 21 nt, Human
cagagcaccugcugucugggu

SEQ ID NO: 3502847 - RNA, 16 nt, Human
cagagcaccuuagaca

SEQ ID NO: 3502848 - RNA, 23 nt, Human
cagagcaccuuagacagucccug

SEQ ID NO: 3502849 - RNA, 20 nt, Human
cagagcaccuuugcacagga

SEQ ID NO: 3502850 - RNA, 22 nt, Human
cagagcaccuuugcacaggaug

SEQ ID NO: 3502851 - RNA, 13 nt, Human
cagagcacugcuc

SEQ ID NO: 3502852 - RNA, 12 nt, Human
cagagcagagac

SEQ ID NO: 3502853 - RNA, 13 nt, Human
cagagcagagacc

SEQ ID NO: 3502854 - RNA, 21 nt, Human
cagagcagagaccaucccuga

SEQ ID NO: 3502855 - RNA, 14 nt, Human
cagagcagaugcag

SEQ ID NO: 3502856 - RNA, 21 nt, Human
cagagcagaugcagagagcca

SEQ ID NO: 3502857 - RNA, 13 nt, Human
cagagcaggaccu

SEQ ID NO: 3502858 - RNA, 19 nt, Human
cagagcaggaccucccuuc

SEQ ID NO: 3502859 - RNA, 22 nt, Human
cagagcaggaccucccuuccga

SEQ ID NO: 3502860 - RNA, 14 nt, Human
cagagcaggacugc

SEQ ID NO: 3502861 - RNA, 17 nt, Human
cagagcaggaggccccu

SEQ ID NO: 3502862 - RNA, 18 nt, Human
cagagcaggaggccccug

SEQ ID NO: 3502863 - RNA, 20 nt, Human
cagagcagugggccuggcca

SEQ ID NO: 3502864 - RNA, 21 nt, Human
cagagcagugggccuggccag

SEQ ID NO: 3502865 - RNA, 19 nt, Human
cagagcauuacgugagcca

SEQ ID NO: 3502866 - RNA, 20 nt, Human
cagagcauuacgugagccag

SEQ ID NO: 3502867 - RNA, 20 nt, Human
cagagcauuccagucaggcu

SEQ ID NO: 3502868 - RNA, 15 nt, Human
cagagcauuuaagag

SEQ ID NO: 3502869 - RNA, 21 nt, Human
cagagcauuuccaacaccaca

SEQ ID NO: 3502870 - RNA, 12 nt, Human
cagagccacagu

SEQ ID NO: 3502871 - RNA, 14 nt, Human
cagagccaggaaga

SEQ ID NO: 3502872 - RNA, 21 nt, Human
cagagccaggaagauccccca

SEQ ID NO: 3502873 - RNA, 13 nt, Human
cagagccaggaga

SEQ ID NO: 3502874 - RNA, 18 nt, Human
cagagccaugucuucucc

SEQ ID NO: 3502875 - RNA, 21 nt, Human
cagagccaugucuucucccug

SEQ ID NO: 3502876 - RNA, 17 nt, Human
cagagcccaccuuggcu

SEQ ID NO: 3502877 - RNA, 19 nt, Human
cagagcccacuccaucugg

SEQ ID NO: 3502878 - RNA, 20 nt, Human
cagagcccagacccuggagg

SEQ ID NO: 3502879 - RNA, 11 nt, Human
cagagcccagc

SEQ ID NO: 3502880 - RNA, 19 nt, Human
cagagcccaggcucggccu

SEQ ID NO: 3502881 - RNA, 23 nt, Human
cagagcccaggcucggccugccc

SEQ ID NO: 3502882 - RNA, 16 nt, Human
cagagccccacagccc

SEQ ID NO: 3502883 - RNA, 17 nt, Human
cagagccccuccuccag

SEQ ID NO: 3502884 - RNA, 10 nt, Human
cagagcccug

SEQ ID NO: 3502885 - RNA, 23 nt, Human
cagagccggggugggguggcugc

SEQ ID NO: 3502886 - RNA, 23 nt, Human
cagagccguaaaaacugaaguuc

SEQ ID NO: 3502887 - RNA, 12 nt, Human
cagagccugcag

SEQ ID NO: 3502888 - RNA, 14 nt, Human
cagagccugcaguu

SEQ ID NO: 3502889 - RNA, 14 nt, Human
cagagccugcccca

SEQ ID NO: 3502890 - RNA, 15 nt, Human
cagagccugccccag

SEQ ID NO: 3502891 - RNA, 17 nt, Human
cagagccuggcugccca

SEQ ID NO: 3502892 - RNA, 13 nt, Human
cagagccuggggc

SEQ ID NO: 3502893 - RNA, 14 nt, Human
cagagccuggggcu

SEQ ID NO: 3502894 - RNA, 13 nt, Human
cagagccuucuca

SEQ ID NO: 3502895 - RNA, 21 nt, Human
cagagccuucucagaagcaca

SEQ ID NO: 3502896 - RNA, 19 nt, Human
cagagccuuuggaugacca

SEQ ID NO: 3502897 - RNA, 16 nt, Human
cagagcgacagagcag

SEQ ID NO: 3502898 - RNA, 15 nt, Human
cagagcgagacucca

SEQ ID NO: 3502899 - RNA, 15 nt, Human
cagagcgccccuccc

SEQ ID NO: 3502900 - RNA, 20 nt, Human
cagagcgccgugaguucuca

SEQ ID NO: 3502901 - RNA, 18 nt, Human
cagagcgcgccccuagcc

SEQ ID NO: 3502902 - RNA, 19 nt, Human
cagagcgcgccccuagccg

SEQ ID NO: 3502903 - RNA, 17 nt, Human
cagagcggaggcugugu

SEQ ID NO: 3502904 - RNA, 22 nt, Human
cagagcgugagcugagcaggcc

SEQ ID NO: 3502905 - RNA, 19 nt, Human
cagagcuaaacuccuuccu

SEQ ID NO: 3502906 - RNA, 20 nt, Human
cagagcuaaacuccuuccug

SEQ ID NO: 3502907 - RNA, 20 nt, Human
cagagcuaagggugggugcu

SEQ ID NO: 3502908 - RNA, 22 nt, Human
cagagcuaagggugggugcuca

SEQ ID NO: 3502909 - RNA, 16 nt, Human
cagagcuacuugggcc

SEQ ID NO: 3502910 - RNA, 19 nt, Human
cagagcucccucugcccca

SEQ ID NO: 3502911 - RNA, 13 nt, Human
cagagcuccucug

SEQ ID NO: 3502912 - RNA, 14 nt, Human
cagagcucuccagc

SEQ ID NO: 3502913 - RNA, 15 nt, Human
cagagcucuccagcu

SEQ ID NO: 3502914 - RNA, 12 nt, Human
cagagcugaaga

SEQ ID NO: 3502915 - RNA, 16 nt, Human
cagagcugaagaguug

SEQ ID NO: 3502916 - RNA, 14 nt, Human
cagagcugacacag

SEQ ID NO: 3502917 - RNA, 19 nt, Human
cagagcugauggagaagga

SEQ ID NO: 3502918 - RNA, 22 nt, Human
cagagcugauggagaaggaagg

SEQ ID NO: 3502919 - RNA, 18 nt, Human
cagagcugccaccugccu

SEQ ID NO: 3502920 - RNA, 13 nt, Human
cagagcugccagu

SEQ ID NO: 3502921 - RNA, 9 nt, Human
cagagcugg

SEQ ID NO: 3502922 - RNA, 23 nt, Human
cagagcuggaccaguggugccuu

SEQ ID NO: 3502923 - RNA, 17 nt, Human
cagagcuggagaugagg

SEQ ID NO: 3502924 - RNA, 22 nt, Human
cagagcuggagaugaggccaga

SEQ ID NO: 3502925 - RNA, 13 nt, Human
cagagcuggguga

SEQ ID NO: 3502926 - RNA, 18 nt, Human
cagagcuggugcggcugg

SEQ ID NO: 3502927 - RNA, 19 nt, Human
cagagcuggugcggcuggc

SEQ ID NO: 3502928 - RNA, 21 nt, Human
cagagcuggugcggcuggcca

SEQ ID NO: 3502929 - RNA, 22 nt, Human
cagagcuggugcggcuggccau

SEQ ID NO: 3502930 - RNA, 23 nt, Human
cagagcuggugcggcuggccaug

SEQ ID NO: 3502931 - RNA, 18 nt, Human
cagagcugguggacccag

SEQ ID NO: 3502932 - RNA, 22 nt, Human
cagagcuguggacuuuguucac

SEQ ID NO: 3502933 - RNA, 20 nt, Human
cagagcuguuuauggccuca

SEQ ID NO: 3502934 - RNA, 18 nt, Human
cagagcuucccugacuca

SEQ ID NO: 3502935 - RNA, 23 nt, Human
cagagcuucuuccaggugcccag

SEQ ID NO: 3502936 - RNA, 15 nt, Human
cagagcuuggacugg

SEQ ID NO: 3502937 - RNA, 17 nt, Human
cagaggaaagcaaagga

SEQ ID NO: 3502938 - RNA, 18 nt, Human
cagaggaaaucuguaaca

SEQ ID NO: 3502939 - RNA, 19 nt, Human
cagaggaacuguccagaga

SEQ ID NO: 3502940 - RNA, 21 nt, Human
cagaggaacuguccagagagc

SEQ ID NO: 3502941 - RNA, 22 nt, Human
cagaggaacuguccagagagca

SEQ ID NO: 3502942 - RNA, 13 nt, Human
cagaggaaggaga

SEQ ID NO: 3502943 - RNA, 19 nt, Human
cagaggaaggggccagagg

SEQ ID NO: 3502944 - RNA, 21 nt, Human
cagaggaaggggccagaggcu

SEQ ID NO: 3502945 - RNA, 18 nt, Human
cagaggaaucacucuugu

SEQ ID NO: 3502946 - RNA, 23 nt, Human
cagaggaaucacucuuguggaug

SEQ ID NO: 3502947 - RNA, 17 nt, Human
cagaggaauccuggcag

SEQ ID NO: 3502948 - RNA, 20 nt, Human
cagaggaauccuggcagccc

SEQ ID NO: 3502949 - RNA, 21 nt, Human
cagaggaauccuggcagccca

SEQ ID NO: 3502950 - RNA, 23 nt, Human
cagaggaauccuggcagcccaga

SEQ ID NO: 3502951 - RNA, 15 nt, Human
cagaggacacagaga

SEQ ID NO: 3502952 - RNA, 13 nt, Human
cagaggacagauc

SEQ ID NO: 3502953 - RNA, 23 nt, Human
cagaggacagaucaauggcgcag

SEQ ID NO: 3502954 - RNA, 16 nt, Human
cagaggaccagcacac

SEQ ID NO: 3502955 - RNA, 15 nt, Human
cagaggaccagggcc

SEQ ID NO: 3502956 - RNA, 20 nt, Human
cagaggaccuguauuuaagc

SEQ ID NO: 3502957 - RNA, 22 nt, Human
cagaggaccuguauuuaagcaa

SEQ ID NO: 3502958 - RNA, 22 nt, Human
cagaggacucacuugcccacac

SEQ ID NO: 3502959 - RNA, 19 nt, Human
cagaggacucccaacccug

SEQ ID NO: 3502960 - RNA, 21 nt, Human
cagaggacugugaugcccugc

SEQ ID NO: 3502961 - RNA, 21 nt, Human
cagaggagaacuugcugccuc

SEQ ID NO: 3502962 - RNA, 18 nt, Human
cagccgagccgggccugg

SEQ ID NO: 3502963 - RNA, 19 nt, Human
cagccgauucaccugagca

SEQ ID NO: 3502964 - RNA, 16 nt, Human
cagccgcagccucccu

SEQ ID NO: 3502965 - RNA, 19 nt, Human
cagccgcagccucccucug

SEQ ID NO: 3502966 - RNA, 17 nt, Human
cagccgccauugccacc

SEQ ID NO: 3502967 - RNA, 18 nt, Human
cagccgccauugccacca

SEQ ID NO: 3502968 - RNA, 21 nt, Human
cagccgccauugccaccagga

SEQ ID NO: 3502969 - RNA, 23 nt, Human
cagccgccauugccaccaggaga

SEQ ID NO: 3502970 - RNA, 13 nt, Human
cagccgccuucac

SEQ ID NO: 3502971 - RNA, 18 nt, Human
cagccgccuucacagcag

SEQ ID NO: 3502972 - RNA, 20 nt, Human
cagccgccuucacagcaguc

SEQ ID NO: 3502973 - RNA, 14 nt, Human
cagccgccuuccuu

SEQ ID NO: 3502974 - RNA, 15 nt, Human
cagccgccuuccuug

SEQ ID NO: 3502975 - RNA, 18 nt, Human
cagccgccuuccuugacc

SEQ ID NO: 3502976 - RNA, 23 nt, Human
cagccgccuuccuugaccuuccu

SEQ ID NO: 3502977 - RNA, 17 nt, Human
cagccgcgcaucagacu

SEQ ID NO: 3502978 - RNA, 13 nt, Human
cagccgcuccaga

SEQ ID NO: 3502979 - RNA, 14 nt, Human
cagccgcuccagag

SEQ ID NO: 3502980 - RNA, 18 nt, Human
cagccgcuccagagucag

SEQ ID NO: 3502981 - RNA, 17 nt, Human
cagccgcuccugucugc

SEQ ID NO: 3502982 - RNA, 18 nt, Human
cagccgcuccugucugcc

SEQ ID NO: 3502983 - RNA, 20 nt, Human
cagccgcuccugucugccag

SEQ ID NO: 3502984 - RNA, 23 nt, Human
cagccgcucggaggccccaaagg

SEQ ID NO: 3502985 - RNA, 16 nt, Human
cagccgcucuccugcc

SEQ ID NO: 3502986 - RNA, 20 nt, Human
cagccgcugagcgaggagau

SEQ ID NO: 3502987 - RNA, 16 nt, Human
cagccgcugcccggcg

SEQ ID NO: 3502988 - RNA, 18 nt, Human
cagccgcuucugacugcu

SEQ ID NO: 3502989 - RNA, 11 nt, Human
cagccgcuugg

SEQ ID NO: 3502990 - RNA, 23 nt, Human
cagccgcuuggcgaugccagcca

SEQ ID NO: 3502991 - RNA, 16 nt, Human
auugacaaaauguuau

SEQ ID NO: 3502992 - RNA, 17 nt, Human
auugacaaaauguuauu

SEQ ID NO: 3502993 - RNA, 22 nt, Human
auugacaaaauguuauuucccu

SEQ ID NO: 3502994 - RNA, 14 nt, Human
auugacaaacucuc

SEQ ID NO: 3502995 - RNA, 13 nt, Human
auugacaaaucug

SEQ ID NO: 3502996 - RNA, 18 nt, Human
auugacaaaucuguguau

SEQ ID NO: 3502997 - RNA, 21 nt, Human
auugacaaaucuguguauauu

SEQ ID NO: 3502998 - RNA, 17 nt, Human
auugacaacaguuacau

SEQ ID NO: 3502999 - RNA, 19 nt, Human
auugacaaccgagaagguu

SEQ ID NO: 3503000 - RNA, 14 nt, Human
auugacaaguuuaa

SEQ ID NO: 3503001 - RNA, 16 nt, Human
auugacaauaaaauau

SEQ ID NO: 3503002 - RNA, 17 nt, Human
auugacaauaaaauauu

SEQ ID NO: 3503003 - RNA, 19 nt, Human
auugacacauccgccuuuu

SEQ ID NO: 3503004 - RNA, 14 nt, Human
auugacacugaacu

SEQ ID NO: 3503005 - RNA, 15 nt, Human
auugacacugaacuu

SEQ ID NO: 3503006 - RNA, 15 nt, Human
auugacacuuaaaaa

SEQ ID NO: 3503007 - RNA, 17 nt, Human
auugacacuuaaaaaug

SEQ ID NO: 3503008 - RNA, 13 nt, Human
auugacagaagcu

SEQ ID NO: 3503009 - RNA, 21 nt, Human
auugacagaucaagcugugag

SEQ ID NO: 3503010 - RNA, 18 nt, Human
auugacaggauuauugga

SEQ ID NO: 3503011 - RNA, 20 nt, Human
auugacaguaacuugguuau

SEQ ID NO: 3503012 - RNA, 18 nt, Human
auugacaucagcaucacc

SEQ ID NO: 3503013 - RNA, 14 nt, Human
auugacauguacag

SEQ ID NO: 3503014 - RNA, 17 nt, Human
auugacauguacagaga

SEQ ID NO: 3503015 - RNA, 23 nt, Human
auugacauguacagagaacuaac

SEQ ID NO: 3503016 - RNA, 22 nt, Human
auugacauugaaaucuaggaaa

SEQ ID NO: 3503017 - RNA, 21 nt, Human
auugacauugcuuuacuguca

SEQ ID NO: 3503018 - RNA, 21 nt, Human
auugacccacaagaaaugaaa

SEQ ID NO: 3503019 - RNA, 17 nt, Human
auugaccgcgacuaauu

SEQ ID NO: 3503020 - RNA, 23 nt, Human
auugaccgcgacuaauuucaaaa

SEQ ID NO: 3503021 - RNA, 17 nt, Human
auugaccugaggcccuu

SEQ ID NO: 3503022 - RNA, 21 nt, Human
auugacgacaagugcugaaca

SEQ ID NO: 3503023 - RNA, 15 nt, Human
auugacgguuuuuua

SEQ ID NO: 3503024 - RNA, 15 nt, Human
auugacgucuagcua

SEQ ID NO: 3503025 - RNA, 22 nt, Human
auugacucaaaucuccaguauu

SEQ ID NO: 3503026 - RNA, 23 nt, Human
auugacucuggguccuuccugaa

SEQ ID NO: 3503027 - RNA, 16 nt, Human
auugacucuugaguug

SEQ ID NO: 3503028 - RNA, 16 nt, Human
auugacuucgacugug

SEQ ID NO: 3503029 - RNA, 14 nt, Human
auugacuuguauau

SEQ ID NO: 3503030 - RNA, 19 nt, Human
auugacuuucaguaaacau

SEQ ID NO: 3503031 - RNA, 16 nt, Human
auugagaaagaaacua

SEQ ID NO: 3503032 - RNA, 12 nt, Human
auugagaaagag

SEQ ID NO: 3503033 - RNA, 19 nt, Human
auugagaagcguauguuuu

SEQ ID NO: 3503034 - RNA, 16 nt, Human
auugagaaggagagaa

SEQ ID NO: 3503035 - RNA, 17 nt, Human
auugagaaggagagaaa

SEQ ID NO: 3503036 - RNA, 21 nt, Human
auugagaauuuuaaauuauaa

SEQ ID NO: 3503037 - RNA, 18 nt, Human
auugagacaaaaauuauc

SEQ ID NO: 3503038 - RNA, 14 nt, Human
auugagacagugca

SEQ ID NO: 3503039 - RNA, 17 nt, Human
auugagaccgugaagau

SEQ ID NO: 3503040 - RNA, 19 nt, Human
auugagagagauguguaau

SEQ ID NO: 3503041 - RNA, 16 nt, Human
auugagaguuuugucu

SEQ ID NO: 3503042 - RNA, 22 nt, Human
auugagauacuuuuucuuuugu

SEQ ID NO: 3503043 - RNA, 18 nt, Human
auugagcagaauucauuc

SEQ ID NO: 3503044 - RNA, 21 nt, Human
auugagcagaauucauucaua

SEQ ID NO: 3503045 - RNA, 14 nt, Human
auugagcuugcaug

SEQ ID NO: 3503046 - RNA, 17 nt, Human
auugaggccaagaauau

SEQ ID NO: 3503047 - RNA, 21 nt, Human
auugaggccaagaauauugca

SEQ ID NO: 3503048 - RNA, 21 nt, Human
auugaggcuugguuccuuccc

SEQ ID NO: 3503049 - RNA, 17 nt, Human
auugaggggauuaauau

SEQ ID NO: 3503050 - RNA, 14 nt, Human
auugagguaaguuu

SEQ ID NO: 3503051 - RNA, 16 nt, Human
auugagguaaguuuuu

SEQ ID NO: 3503052 - RNA, 21 nt, Human
auugaguauccuuucaguguu

SEQ ID NO: 3503053 - RNA, 23 nt, Human
auugaguauuguuuaaaauguaa

SEQ ID NO: 3503054 - RNA, 15 nt, Human
auugagucaaauggu

SEQ ID NO: 3503055 - RNA, 17 nt, Human
auugaguuccaguugaa

SEQ ID NO: 3503056 - RNA, 17 nt, Human
auugaguucuuccugua

SEQ ID NO: 3503057 - RNA, 20 nt, Human
auugaguuuguagguaaaau

SEQ ID NO: 3503058 - RNA, 15 nt, Human
auugaguuuucagug

SEQ ID NO: 3503059 - RNA, 16 nt, Human
auugaguuuucagugg

SEQ ID NO: 3503060 - RNA, 21 nt, Human
auugauaagaaccuuuugagu

SEQ ID NO: 3503061 - RNA, 12 nt, Human
auugauaaguuc

SEQ ID NO: 3503062 - RNA, 15 nt, Human
auugauaaguucaua

SEQ ID NO: 3503063 - RNA, 18 nt, Human
auugauaaguucauacau

SEQ ID NO: 3503064 - RNA, 19 nt, Human
auugauaaguucauacauu

SEQ ID NO: 3503065 - RNA, 21 nt, Human
auugauaaguucauacauugu

SEQ ID NO: 3503066 - RNA, 22 nt, Human
auugauaaguucauacauugua

SEQ ID NO: 3503067 - RNA, 16 nt, Human
auugauaauugcauuc

SEQ ID NO: 3503068 - RNA, 13 nt, Human
auugauagaauaa

SEQ ID NO: 3503069 - RNA, 18 nt, Human
auugauagaguguuauca

SEQ ID NO: 3503070 - RNA, 19 nt, Human
auugauauaaauaaaacau

SEQ ID NO: 3503071 - RNA, 15 nt, Human
auugauaugaaaaau

SEQ ID NO: 3503072 - RNA, 14 nt, Human
auugauauucuaag

SEQ ID NO: 3503073 - RNA, 16 nt, Human
auugauauucuaagaa

SEQ ID NO: 3503074 - RNA, 23 nt, Human
auugauauucuaagaaauaucug

SEQ ID NO: 3503075 - RNA, 15 nt, Human
auugauauugugaac

SEQ ID NO: 3503076 - RNA, 18 nt, Human
auugauauuugugcauuu

SEQ ID NO: 3503077 - RNA, 19 nt, Human
auugaucauuuucccccca

SEQ ID NO: 3503078 - RNA, 16 nt, Human
auugauccagaaagaa

SEQ ID NO: 3503079 - RNA, 18 nt, Human
auugaugaaaagauuuaa

SEQ ID NO: 3503080 - RNA, 22 nt, Human
auugaugaaaagauuuaagcac

SEQ ID NO: 3503081 - RNA, 14 nt, Human
auugaugauccauu

SEQ ID NO: 3503082 - RNA, 18 nt, Human
auugaugggauuugguca

SEQ ID NO: 3503083 - RNA, 16 nt, Human
auugauggggaaggag

SEQ ID NO: 3503084 - RNA, 22 nt, Human
auugauguacagucugucauga

SEQ ID NO: 3503085 - RNA, 21 nt, Human
auugauguggcccuggcugcc

SEQ ID NO: 3503086 - RNA, 14 nt, Human
auugauguugaugc

SEQ ID NO: 3503087 - RNA, 18 nt, Human
auugauguugaugcaauc

SEQ ID NO: 3503088 - RNA, 13 nt, Human
auugauuccuuuu

SEQ ID NO: 3503089 - RNA, 13 nt, Human
auugauugcugug

SEQ ID NO: 3503090 - RNA, 15 nt, Human
auugauugcuguguc

SEQ ID NO: 3503091 - RNA, 15 nt, Human
auugauuguauauag

SEQ ID NO: 3503092 - RNA, 21 nt, Human
auugauuuaagcuuuccuguu

SEQ ID NO: 3503093 - RNA, 13 nt, Human
auugauuucaaga

SEQ ID NO: 3503094 - RNA, 17 nt, Human
auugauuuccuguguca

SEQ ID NO: 3503095 - RNA, 21 nt, Human
auugauuucugccuuccuugc

SEQ ID NO: 3503096 - RNA, 12 nt, Human
auugauuucuuu

SEQ ID NO: 3503097 - RNA, 15 nt, Human
auugauuugauuuuu

SEQ ID NO: 3503098 - RNA, 12 nt, Human
auugauuugcau

SEQ ID NO: 3503099 - RNA, 16 nt, Human
auugauuugcauugaa

SEQ ID NO: 3503100 - RNA, 16 nt, Human
auugauuuuaaaaugu

SEQ ID NO: 3503101 - RNA, 13 nt, Human
auugauuuugaac

SEQ ID NO: 3503102 - RNA, 16 nt, Human
auugcaaaauacauga

SEQ ID NO: 3503103 - RNA, 15 nt, Human
auugcaaaauagcau

SEQ ID NO: 3503104 - RNA, 17 nt, Human
auugcaaaucuugaaau

SEQ ID NO: 3503105 - RNA, 19 nt, Human
auugcaaaucuugaaauua

SEQ ID NO: 3503106 - RNA, 14 nt, Human
auugcaacaaaaua

SEQ ID NO: 3503107 - RNA, 14 nt, Human
cagccuggagcccu

SEQ ID NO: 3503108 - RNA, 19 nt, Human
cagccuggagcccuggaga

SEQ ID NO: 3503109 - RNA, 12 nt, Human
cagccuggaggc

SEQ ID NO: 3503110 - RNA, 13 nt, Human
cagccuggaggcc

SEQ ID NO: 3503111 - RNA, 12 nt, Human
cagccuggaugc

SEQ ID NO: 3503112 - RNA, 10 nt, Human
cagccuggca

SEQ ID NO: 3503113 - RNA, 21 nt, Human
cagccuggcacagggcagugg

SEQ ID NO: 3503114 - RNA, 18 nt, Human
cagccuggccaacauggu

SEQ ID NO: 3503115 - RNA, 15 nt, Human
cagccuggccagaca

SEQ ID NO: 3503116 - RNA, 18 nt, Human
cagccuggccagacacag

SEQ ID NO: 3503117 - RNA, 11 nt, Human
cagccuggccc

SEQ ID NO: 3503118 - RNA, 12 nt, Human
cagccuggccca

SEQ ID NO: 3503119 - RNA, 20 nt, Human
cagccuggcccaccccaccc

SEQ ID NO: 3503120 - RNA, 14 nt, Human
cagccuggcccagc

SEQ ID NO: 3503121 - RNA, 20 nt, Human
cagccuggcccagcuccccc

SEQ ID NO: 3503122 - RNA, 11 nt, Human
cagccuggccu

SEQ ID NO: 3503123 - RNA, 15 nt, Human
cagccuggccuccug

SEQ ID NO: 3503124 - RNA, 16 nt, Human
cagccuggccuccugc

SEQ ID NO: 3503125 - RNA, 23 nt, Human
cagccuggcgaaaccccaucucu

SEQ ID NO: 3503126 - RNA, 20 nt, Human
cagccuggcucccaggacac

SEQ ID NO: 3503127 - RNA, 21 nt, Human
cagccuggcucccaggacacg

SEQ ID NO: 3503128 - RNA, 15 nt, Human
cagccuggcuccccu

SEQ ID NO: 3503129 - RNA, 20 nt, Human
cagccuggcugggacuggga

SEQ ID NO: 3503130 - RNA, 16 nt, Human
cagccuggcuucugga

SEQ ID NO: 3503131 - RNA, 17 nt, Human
cagccuggcuucuggag

SEQ ID NO: 3503132 - RNA, 20 nt, Human
cagccuggcuucuggagccc

SEQ ID NO: 3503133 - RNA, 21 nt, Human
cagccuggcuucuggagcccu

SEQ ID NO: 3503134 - RNA, 11 nt, Human
cagccugggac

SEQ ID NO: 3503135 - RNA, 21 nt, Human
cagccugggauaggggcagag

SEQ ID NO: 3503136 - RNA, 21 nt, Human
cagccugggcccaucucccug

SEQ ID NO: 3503137 - RNA, 22 nt, Human
cagccugggcccaucucccugc

SEQ ID NO: 3503138 - RNA, 16 nt, Human
cagccugggccccagc

SEQ ID NO: 3503139 - RNA, 12 nt, Human
cagccugggccu

SEQ ID NO: 3503140 - RNA, 16 nt, Human
cagccugggccuaugg

SEQ ID NO: 3503141 - RNA, 18 nt, Human
cagccugggccuauggag

SEQ ID NO: 3503142 - RNA, 21 nt, Human
cagccugggccuauggagagc

SEQ ID NO: 3503143 - RNA, 22 nt, Human
cagccugggccuauggagagcc

SEQ ID NO: 3503144 - RNA, 23 nt, Human
cagccugggccuauggagagccc

SEQ ID NO: 3503145 - RNA, 11 nt, Human
cagccugggcg

SEQ ID NO: 3503146 - RNA, 15 nt, Human
cagccugggcgacag

SEQ ID NO: 3503147 - RNA, 18 nt, Human
cagccuggggcuggccuc

SEQ ID NO: 3503148 - RNA, 15 nt, Human
cagccuggggucugg

SEQ ID NO: 3503149 - RNA, 19 nt, Human
cagccuggggucuggaguu

SEQ ID NO: 3503150 - RNA, 23 nt, Human
cagccuggucgccuuccaccucu

SEQ ID NO: 3503151 - RNA, 18 nt, Human
aaacacugccuuuuuauu

SEQ ID NO: 3503152 - RNA, 14 nt, Human
aaacacugcgcuuu

SEQ ID NO: 3503153 - RNA, 21 nt, Human
aaacacugggagaaaugaaaa

SEQ ID NO: 3503154 - RNA, 13 nt, Human
aaacacuguggaa

SEQ ID NO: 3503155 - RNA, 16 nt, Human
aaacacuguucucugc

SEQ ID NO: 3503156 - RNA, 18 nt, Human
aaacacuucauugaaaau

SEQ ID NO: 3503157 - RNA, 24 nt, Human
aaacacuugcggauauucuggacu

SEQ ID NO: 3503158 - RNA, 16 nt, Human
aaacacuugugacuuu

SEQ ID NO: 3503159 - RNA, 14 nt, Human
aaacacuuucucuu

SEQ ID NO: 3503160 - RNA, 13 nt, Human
aaacacuuuuuug

SEQ ID NO: 3503161 - RNA, 19 nt, Human
aaacagaaacaaaaacacu

SEQ ID NO: 3503162 - RNA, 14 nt, Human
aaacagaaauggaa

SEQ ID NO: 3503163 - RNA, 14 nt, Human
aaacagaaauuggu

SEQ ID NO: 3503164 - RNA, 15 nt, Human
aaacagaaauuggua

SEQ ID NO: 3503165 - RNA, 22 nt, Human
aaacagacaaaaacagccucac

SEQ ID NO: 3503166 - RNA, 22 nt, Human
aaacagaccuaaugcuccuugu

SEQ ID NO: 3503167 - RNA, 13 nt, Human
aaacagacuauuu

SEQ ID NO: 3503168 - RNA, 14 nt, Human
aaacagacucaggu

SEQ ID NO: 3503169 - RNA, 15 nt, Human
aaacagagacaggcc

SEQ ID NO: 3503170 - RNA, 22 nt, Human
aaacagagacaggcccaagaga

SEQ ID NO: 3503171 - RNA, 16 nt, Human
aaacagaggaccagca

SEQ ID NO: 3503172 - RNA, 13 nt, Human
aaacagauaccau

SEQ ID NO: 3503173 - RNA, 18 nt, Human
aaacagaugugaauauuc

SEQ ID NO: 3503174 - RNA, 14 nt, Human
aaacagauuuuuac

SEQ ID NO: 3503175 - RNA, 14 nt, Human
aaacagcaaaccaa

SEQ ID NO: 3503176 - RNA, 19 nt, Human
aaacagcaaaccaagagau

SEQ ID NO: 3503177 - RNA, 23 nt, Human
aaacagcaaaccaagagauugcu

SEQ ID NO: 3503178 - RNA, 17 nt, Human
aaacagcauugcuuucu

SEQ ID NO: 3503179 - RNA, 15 nt, Human
aaacagccucacaga

SEQ ID NO: 3503180 - RNA, 17 nt, Human
aaacagcuaaugggaca

SEQ ID NO: 3503181 - RNA, 20 nt, Human
aaacagcugcauuagaaaaa

SEQ ID NO: 3503182 - RNA, 15 nt, Human
aaacagcugccuuag

SEQ ID NO: 3503183 - RNA, 22 nt, Human
aaacagcugccuuagcuucagg

SEQ ID NO: 3503184 - RNA, 16 nt, Human
aaacagcugucucuaa

SEQ ID NO: 3503185 - RNA, 22 nt, Human
aaacagcuucaugccuuuguaa

SEQ ID NO: 3503186 - RNA, 19 nt, Human
aaacagcuuucaagugccu

SEQ ID NO: 3503187 - RNA, 14 nt, Human
aaacaggaaaaaaa

SEQ ID NO: 3503188 - RNA, 15 nt, Human
aaacaggaaaaaaac

SEQ ID NO: 3503189 - RNA, 18 nt, Human
aaacaggaaaaaaacuuu

SEQ ID NO: 3503190 - RNA, 17 nt, Human
aaacaggagacaggaag

SEQ ID NO: 3503191 - RNA, 15 nt, Human
aaacaggcacuuggc

SEQ ID NO: 3503192 - RNA, 15 nt, Human
aaacaggcccagcau

SEQ ID NO: 3503193 - RNA, 17 nt, Human
aaacagggcaucuccag

SEQ ID NO: 3503194 - RNA, 22 nt, Human
aaacaggucaaugaaugaaacu

SEQ ID NO: 3503195 - RNA, 18 nt, Human
aaacagguugggauggga

SEQ ID NO: 3503196 - RNA, 17 nt, Human
aaacaguauuuauuuug

SEQ ID NO: 3503197 - RNA, 19 nt, Human
aaacaguauuuauuuugua

SEQ ID NO: 3503198 - RNA, 17 nt, Human
aaacaguguguaaacaa

SEQ ID NO: 3503199 - RNA, 13 nt, Human
aaacaguguuuug

SEQ ID NO: 3503200 - RNA, 17 nt, Human
aaacaguugcacagcau

SEQ ID NO: 3503201 - RNA, 16 nt, Human
aaacaguugguaacuu

SEQ ID NO: 3503202 - RNA, 18 nt, Human
aaacaguugguaacuuuu

SEQ ID NO: 3503203 - RNA, 19 nt, Human
aaacaguugguaacuuuug

SEQ ID NO: 3503204 - RNA, 22 nt, Human
aaacaguugguaacuuuuguga

SEQ ID NO: 3503205 - RNA, 22 nt, Human
aaacaguuuuuauuaaaacaug

SEQ ID NO: 3503206 - RNA, 14 nt, Human
aaacauaaauaaaa

SEQ ID NO: 3503207 - RNA, 16 nt, Human
aaacauaagagagccu

SEQ ID NO: 3503208 - RNA, 20 nt, Human
aaacauaaucuucugccuuc

SEQ ID NO: 3503209 - RNA, 19 nt, Human
aaacauauauaacaaugcu

SEQ ID NO: 3503210 - RNA, 19 nt, Human
aaacauauccaaguuugaa

SEQ ID NO: 3503211 - RNA, 23 nt, Human
aaacauaucucuuaucuuacgaa

SEQ ID NO: 3503212 - RNA, 14 nt, Human
aaacaucacacaca

SEQ ID NO: 3503213 - RNA, 18 nt, Human
aaacaucauuccuuuuua

SEQ ID NO: 3503214 - RNA, 20 nt, Human
aaacaucauuccuuuuuauu

SEQ ID NO: 3503215 - RNA, 17 nt, Human
aaacauccaauauuuuc

SEQ ID NO: 3503216 - RNA, 18 nt, Human
aaacauccuacaagacac

SEQ ID NO: 3503217 - RNA, 17 nt, Human
aaacauccucuuccaua

SEQ ID NO: 3503218 - RNA, 18 nt, Human
aaacauccuucaagaacu

SEQ ID NO: 3503219 - RNA, 20 nt, Human
aaacaucuauucucuccaaa

SEQ ID NO: 3503220 - RNA, 13 nt, Human
aaacaucucagag

SEQ ID NO: 3503221 - RNA, 13 nt, Human
aaacaugacacug

SEQ ID NO: 3503222 - RNA, 19 nt, Human
aaacaugacucuuuauugu

SEQ ID NO: 3503223 - RNA, 23 nt, Human
aaacaugagguucucucuacugg

SEQ ID NO: 3503224 - RNA, 16 nt, Human
aaacaugcagaacaaa

SEQ ID NO: 3503225 - RNA, 22 nt, Human
aaacaugcuacacacugcaugu

SEQ ID NO: 3503226 - RNA, 15 nt, Human
aaacaugcuguacau

SEQ ID NO: 3503227 - RNA, 22 nt, Human
aaacaugcuguacauacuuuuu

SEQ ID NO: 3503228 - RNA, 16 nt, Human
aaacauggguuuaguu

SEQ ID NO: 3503229 - RNA, 15 nt, Human
aaacaugguuacaau

SEQ ID NO: 3503230 - RNA, 13 nt, Human
aaacauguaugug

SEQ ID NO: 3503231 - RNA, 22 nt, Human
aaacaugucuccuauccugguu

SEQ ID NO: 3503232 - RNA, 20 nt, Human
aaacaugugguuacacagug

SEQ ID NO: 3503233 - RNA, 17 nt, Human
aaacauguuagaagcaa

SEQ ID NO: 3503234 - RNA, 20 nt, Human
aaacauguugccaaaauggu

SEQ ID NO: 3503235 - RNA, 17 nt, Human
aaacauuaaaaauggaa

SEQ ID NO: 3503236 - RNA, 15 nt, Human
aaacauuaaaugucu

SEQ ID NO: 3503237 - RNA, 16 nt, Human
aaacauuaaaugucuu

SEQ ID NO: 3503238 - RNA, 14 nt, Human
aaacauuaagaaaa

SEQ ID NO: 3503239 - RNA, 18 nt, Human
aaacauuaagaaaaucau

SEQ ID NO: 3503240 - RNA, 20 nt, Human
aaacauuaagauugaggccu

SEQ ID NO: 3503241 - RNA, 22 nt, Human
aaacauuaauagcagccuuucu

SEQ ID NO: 3503242 - RNA, 14 nt, Human
aaacauuaauguug

SEQ ID NO: 3503243 - RNA, 19 nt, Human
aaacauuaauguugauuuc

SEQ ID NO: 3503244 - RNA, 22 nt, Human
aaacauuaauguugauuucuag

SEQ ID NO: 3503245 - RNA, 17 nt, Human
aaacauuaguacuuuau

SEQ ID NO: 3503246 - RNA, 24 nt, Human
aaacauuaguacuuuauagaagaa

SEQ ID NO: 3503247 - RNA, 22 nt, Human
aaacauuaguucuauuucuauc

SEQ ID NO: 3503248 - RNA, 20 nt, Human
aaacauuauagauuuucaug

SEQ ID NO: 3503249 - RNA, 18 nt, Human
aaacauuauuaaguaacu

SEQ ID NO: 3503250 - RNA, 21 nt, Human
aaacauuccguuuacauuuua

SEQ ID NO: 3503251 - RNA, 15 nt, Human
caggaaggggcugga

SEQ ID NO: 3503252 - RNA, 22 nt, Human
caggaagggucaaaacauuuua

SEQ ID NO: 3503253 - RNA, 17 nt, Human
caggaaguacuggagaa

SEQ ID NO: 3503254 - RNA, 18 nt, Human
caggaaguacuggagaaa

SEQ ID NO: 3503255 - RNA, 20 nt, Human
caggaaguacuggagaaaau

SEQ ID NO: 3503256 - RNA, 15 nt, Human
caggaaguacuucca

SEQ ID NO: 3503257 - RNA, 15 nt, Human
caggaaguagcacag

SEQ ID NO: 3503258 - RNA, 18 nt, Human
caggaaguagcacaggcu

SEQ ID NO: 3503259 - RNA, 19 nt, Human
caggaauauugucauccuu

SEQ ID NO: 3503260 - RNA, 23 nt, Human
caggaaucaagagcugcccuccu

SEQ ID NO: 3503261 - RNA, 15 nt, Human
caggaaucuuaaggu

SEQ ID NO: 3503262 - RNA, 21 nt, Human
caggaaugccaaggagacauc

SEQ ID NO: 3503263 - RNA, 17 nt, Human
caggaauggagccugca

SEQ ID NO: 3503264 - RNA, 13 nt, Human
caggaaugggcug

SEQ ID NO: 3503265 - RNA, 17 nt, Human
caggaauguguggccug

SEQ ID NO: 3503266 - RNA, 19 nt, Human
caggaauguuaaagucagu

SEQ ID NO: 3503267 - RNA, 21 nt, Human
caggaauucuuggagaaaaug

SEQ ID NO: 3503268 - RNA, 15 nt, Human
caggaauuugggacc

SEQ ID NO: 3503269 - RNA, 18 nt, Human
caggacaacgaggaagcc

SEQ ID NO: 3503270 - RNA, 12 nt, Human
caggacacaggc

SEQ ID NO: 3503271 - RNA, 16 nt, Human
caggacacaggccugu

SEQ ID NO: 3503272 - RNA, 17 nt, Human
caggacacaggccugug

SEQ ID NO: 3503273 - RNA, 20 nt, Human
caggacacaggccuguguag

SEQ ID NO: 3503274 - RNA, 22 nt, Human
caggacacaggccuguguagcu

SEQ ID NO: 3503275 - RNA, 14 nt, Human
caggacaccacacc

SEQ ID NO: 3503276 - RNA, 23 nt, Human
caggacaccacacccagccucag

SEQ ID NO: 3503277 - RNA, 14 nt, Human
caggacagaugcca

SEQ ID NO: 3503278 - RNA, 17 nt, Human
caggacagaugccacac

SEQ ID NO: 3503279 - RNA, 19 nt, Human
caggacagcauggugcaug

SEQ ID NO: 3503280 - RNA, 23 nt, Human
caggacagcauggugcaugccgc

SEQ ID NO: 3503281 - RNA, 23 nt, Human
caggacagcccuucuuuccacag

SEQ ID NO: 3503282 - RNA, 24 nt, Human
caggacagcccuucuuuccacaga

SEQ ID NO: 3503283 - RNA, 12 nt, Human
caggacaggacc

SEQ ID NO: 3503284 - RNA, 13 nt, Human
caggacaggacca

SEQ ID NO: 3503285 - RNA, 22 nt, Human
caggacaggcugcggccccucc

SEQ ID NO: 3503286 - RNA, 15 nt, Human
caggacagggguucc

SEQ ID NO: 3503287 - RNA, 15 nt, Human
caggacaugcaauaa

SEQ ID NO: 3503288 - RNA, 19 nt, Human
caggacaugcaauaaaauu

SEQ ID NO: 3503289 - RNA, 21 nt, Human
caggacaugcaauaaaauuua

SEQ ID NO: 3503290 - RNA, 20 nt, Human
caggacaugcgguagccagc

SEQ ID NO: 3503291 - RNA, 23 nt, Human
caggacaugcgguagccagcaca

SEQ ID NO: 3503292 - RNA, 16 nt, Human
caggacaugcugaagc

SEQ ID NO: 3503293 - RNA, 13 nt, Human
caggaccaagcca

SEQ ID NO: 3503294 - RNA, 12 nt, Human
caggaccacagg

SEQ ID NO: 3503295 - RNA, 14 nt, Human
caggaccacaggcu

SEQ ID NO: 3503296 - RNA, 21 nt, Human
caggaccacaggcucaggcag

SEQ ID NO: 3503297 - RNA, 21 nt, Human
caggaccagcccacgcugacu

SEQ ID NO: 3503298 - RNA, 15 nt, Human
caggaccagcucagg

SEQ ID NO: 3503299 - RNA, 19 nt, Human
caggaccagcucaggacag

SEQ ID NO: 3503300 - RNA, 13 nt, Human
caggaccagcugg

SEQ ID NO: 3503301 - RNA, 18 nt, Human
caggaccaggcaauguga

SEQ ID NO: 3503302 - RNA, 22 nt, Human
caggaccaggguuggcaccuuc

SEQ ID NO: 3503303 - RNA, 21 nt, Human
caggaccagucaaccugggca

SEQ ID NO: 3503304 - RNA, 18 nt, Human
caggaccagucccagagc

SEQ ID NO: 3503305 - RNA, 20 nt, Human
caggaccagucccagagcag

SEQ ID NO: 3503306 - RNA, 15 nt, Human
caggaccccagcucu

SEQ ID NO: 3503307 - RNA, 15 nt, Human
caggacccccuuccc

SEQ ID NO: 3503308 - RNA, 15 nt, Human
caggaccccugcagu

SEQ ID NO: 3503309 - RNA, 13 nt, Human
caggaccccuggg

SEQ ID NO: 3503310 - RNA, 18 nt, Human
caggacccucgcuggccc

SEQ ID NO: 3503311 - RNA, 16 nt, Human
caggacccugccaggc

SEQ ID NO: 3503312 - RNA, 13 nt, Human
caggacccuggac

SEQ ID NO: 3503313 - RNA, 18 nt, Human
caggacccuggacccagc

SEQ ID NO: 3503314 - RNA, 21 nt, Human
caggaccuaggauaucuucuc

SEQ ID NO: 3503315 - RNA, 22 nt, Human
caggaccuaggauaucuucucc

SEQ ID NO: 3503316 - RNA, 16 nt, Human
caggaccucaggugag

SEQ ID NO: 3503317 - RNA, 19 nt, Human
caggaccuccaagccacug

SEQ ID NO: 3503318 - RNA, 20 nt, Human
caggaccuccaagccacuga

SEQ ID NO: 3503319 - RNA, 17 nt, Human
caggaccucccuuccga

SEQ ID NO: 3503320 - RNA, 19 nt, Human
caggaccucccuuccgacc

SEQ ID NO: 3503321 - RNA, 22 nt, Human
caggaccucccuuccgacccuc

SEQ ID NO: 3503322 - RNA, 14 nt, Human
caggaccuggcugc

SEQ ID NO: 3503323 - RNA, 18 nt, Human
caggaccuggcugccaua

SEQ ID NO: 3503324 - RNA, 17 nt, Human
caggaccuguggccaag

SEQ ID NO: 3503325 - RNA, 23 nt, Human
caggacgacuguuuucccaacac

SEQ ID NO: 3503326 - RNA, 18 nt, Human
caggacgccacucauuuc

SEQ ID NO: 3503327 - RNA, 19 nt, Human
caggacgccacucauuuca

SEQ ID NO: 3503328 - RNA, 21 nt, Human
caggacgccacucauuucauc

SEQ ID NO: 3503329 - RNA, 16 nt, Human
caggacggggccggcc

SEQ ID NO: 3503330 - RNA, 19 nt, Human
caggacggggccggccagg

SEQ ID NO: 3503331 - RNA, 23 nt, Human
caggacggggccggccagguggg

SEQ ID NO: 3503332 - RNA, 20 nt, Human
caggacuaacacucagaagc

SEQ ID NO: 3503333 - RNA, 21 nt, Human
caggacuaacacucagaagcc

SEQ ID NO: 3503334 - RNA, 22 nt, Human
caggacuaacacucagaagccu

SEQ ID NO: 3503335 - RNA, 23 nt, Human
caggacuaacacucagaagccug

SEQ ID NO: 3503336 - RNA, 18 nt, Human
caggacucagaagccucu

SEQ ID NO: 3503337 - RNA, 20 nt, Human
caggacucagaagccucugg

SEQ ID NO: 3503338 - RNA, 18 nt, Human
caggacucagcuccccag

SEQ ID NO: 3503339 - RNA, 20 nt, Human
caggacucagcuccccagag

SEQ ID NO: 3503340 - RNA, 17 nt, Human
caggacuccagcccauu

SEQ ID NO: 3503341 - RNA, 16 nt, Human
caggacuccaggccca

SEQ ID NO: 3503342 - RNA, 19 nt, Human
caggacuccaggcccaagg

SEQ ID NO: 3503343 - RNA, 16 nt, Human
caggacuccccaggcc

SEQ ID NO: 3503344 - RNA, 17 nt, Human
caggacuccccaggcca

SEQ ID NO: 3503345 - RNA, 13 nt, Human
caggacucccucc

SEQ ID NO: 3503346 - RNA, 17 nt, Human
auugugucuuuugcaug

SEQ ID NO: 3503347 - RNA, 19 nt, Human
auuguguggauucuuuaaa

SEQ ID NO: 3503348 - RNA, 22 nt, Human
auugugugugcagacuucagga

SEQ ID NO: 3503349 - RNA, 17 nt, Human
auuguguuauuuuacua

SEQ ID NO: 3503350 - RNA, 17 nt, Human
auuguguugacauuaag

SEQ ID NO: 3503351 - RNA, 20 nt, Human
auuguguugacauuaagaau

SEQ ID NO: 3503352 - RNA, 12 nt, Human
auuguguuuaca

SEQ ID NO: 3503353 - RNA, 14 nt, Human
auuguguuuacauu

SEQ ID NO: 3503354 - RNA, 16 nt, Human
auuguguuugucauua

SEQ ID NO: 3503355 - RNA, 21 nt, Human
auuguuaagucuaaauauuuc

SEQ ID NO: 3503356 - RNA, 16 nt, Human
auuguuaauuucaguc

SEQ ID NO: 3503357 - RNA, 18 nt, Human
auuguuaauuucaguccu

SEQ ID NO: 3503358 - RNA, 17 nt, Human
auuguuacacauuaagu

SEQ ID NO: 3503359 - RNA, 20 nt, Human
auuguuacauuauguggaaa

SEQ ID NO: 3503360 - RNA, 15 nt, Human
auuguuacuccauau

SEQ ID NO: 3503361 - RNA, 16 nt, Human
auuguuagucucuuga

SEQ ID NO: 3503362 - RNA, 15 nt, Human
auuguuaguuucuga

SEQ ID NO: 3503363 - RNA, 13 nt, Human
auuguuauuuaua

SEQ ID NO: 3503364 - RNA, 19 nt, Human
auuguucaaacaauaucau

SEQ ID NO: 3503365 - RNA, 20 nt, Human
auuguucauuuugagcugaa

SEQ ID NO: 3503366 - RNA, 16 nt, Human
auuguuccaagacauu

SEQ ID NO: 3503367 - RNA, 16 nt, Human
auuguucccagugaca

SEQ ID NO: 3503368 - RNA, 13 nt, Human
auuguuccuaagu

SEQ ID NO: 3503369 - RNA, 16 nt, Human
auuguuccuaaguucu

SEQ ID NO: 3503370 - RNA, 21 nt, Human
auuguuccuuggagaaaugaa

SEQ ID NO: 3503371 - RNA, 17 nt, Human
auuguucucagaauccc

SEQ ID NO: 3503372 - RNA, 19 nt, Human
auuguugaaaaaguuuguu

SEQ ID NO: 3503373 - RNA, 15 nt, Human
auuguugaaauuuug

SEQ ID NO: 3503374 - RNA, 16 nt, Human
auuguugaaauuuugc

SEQ ID NO: 3503375 - RNA, 17 nt, Human
auuguugaaucuauuuc

SEQ ID NO: 3503376 - RNA, 20 nt, Human
auuguugacaacugugacug

SEQ ID NO: 3503377 - RNA, 21 nt, Human
auuguugacaguucugaagaa

SEQ ID NO: 3503378 - RNA, 22 nt, Human
auuguugacaguucugaagaau

SEQ ID NO: 3503379 - RNA, 23 nt, Human
auuguugagguggucugaauguu

SEQ ID NO: 3503380 - RNA, 20 nt, Human
auuguugguaauuauuuugg

SEQ ID NO: 3503381 - RNA, 13 nt, Human
auuguuguccuuu

SEQ ID NO: 3503382 - RNA, 16 nt, Human
auuguuguccuuuuca

SEQ ID NO: 3503383 - RNA, 19 nt, Human
auuguuguuucuuucuagu

SEQ ID NO: 3503384 - RNA, 20 nt, Human
auuguuguuucuuucuagug

SEQ ID NO: 3503385 - RNA, 17 nt, Human
auuguuguuuguaugua

SEQ ID NO: 3503386 - RNA, 21 nt, Human
auuguuguuuguauguauaau

SEQ ID NO: 3503387 - RNA, 15 nt, Human
auuguuuaaaaucau

SEQ ID NO: 3503388 - RNA, 17 nt, Human
auuguuuaaaauguaau

SEQ ID NO: 3503389 - RNA, 19 nt, Human
auuguuuaucuagauguaa

SEQ ID NO: 3503390 - RNA, 22 nt, Human
auuguuuaucuagauguaaauu

SEQ ID NO: 3503391 - RNA, 17 nt, Human
auuguuuauuuaucagu

SEQ ID NO: 3503392 - RNA, 19 nt, Human
auuguuuauuuaucaguga

SEQ ID NO: 3503393 - RNA, 22 nt, Human
auuguuucauugcgaaucuuuu

SEQ ID NO: 3503394 - RNA, 21 nt, Human
cagccauaggcccuuucagug

SEQ ID NO: 3503395 - RNA, 19 nt, Human
cagccaucaccuuagacca

SEQ ID NO: 3503396 - RNA, 21 nt, Human
cagccaucaccuuagaccacc

SEQ ID NO: 3503397 - RNA, 18 nt, Human
cagccaucauaggaaggg

SEQ ID NO: 3503398 - RNA, 23 nt, Human
cagccauccagggggcaagagga

SEQ ID NO: 3503399 - RNA, 17 nt, Human
cagccaucccagccuug

SEQ ID NO: 3503400 - RNA, 19 nt, Human
cagccaucucaugagggga

SEQ ID NO: 3503401 - RNA, 13 nt, Human
cagccaucugccc

SEQ ID NO: 3503402 - RNA, 17 nt, Human
cagccaucugcccaggg

SEQ ID NO: 3503403 - RNA, 19 nt, Human
cagccaucugcccaggggu

SEQ ID NO: 3503404 - RNA, 21 nt, Human
cagccaucugcccaggggugc

SEQ ID NO: 3503405 - RNA, 18 nt, Human
cagccaugaggaguugcu

SEQ ID NO: 3503406 - RNA, 22 nt, Human
cagccaugaggaguugcuguuu

SEQ ID NO: 3503407 - RNA, 18 nt, Human
cagccaugccagcuggcc

SEQ ID NO: 3503408 - RNA, 21 nt, Human
cagccaugccagcuggccuuu

SEQ ID NO: 3503409 - RNA, 21 nt, Human
cagccaugcccgcauuagcuc

SEQ ID NO: 3503410 - RNA, 20 nt, Human
cagccauuaccauggagaca

SEQ ID NO: 3503411 - RNA, 19 nt, Human
cagccauucacugccccca

SEQ ID NO: 3503412 - RNA, 17 nt, Human
cagccauugcacccagc

SEQ ID NO: 3503413 - RNA, 22 nt, Human
cagccauuggcuauuuaaaacu

SEQ ID NO: 3503414 - RNA, 19 nt, Human
cagcccaaaccaccagaag

SEQ ID NO: 3503415 - RNA, 17 nt, Human
cagcccaaagaaggaaa

SEQ ID NO: 3503416 - RNA, 22 nt, Human
cagcccaaaggggacaggccuc

SEQ ID NO: 3503417 - RNA, 13 nt, Human
cagcccaauccag

SEQ ID NO: 3503418 - RNA, 16 nt, Human
cagcccaauccaggua

SEQ ID NO: 3503419 - RNA, 23 nt, Human
cagcccaauccagguacgcacag

SEQ ID NO: 3503420 - RNA, 16 nt, Human
cagcccaaucccugau

SEQ ID NO: 3503421 - RNA, 19 nt, Human
cagcccacauagugauggu

SEQ ID NO: 3503422 - RNA, 12 nt, Human
cagcccaccccc

SEQ ID NO: 3503423 - RNA, 17 nt, Human
cagcccacccccggcag

SEQ ID NO: 3503424 - RNA, 18 nt, Human
cagcccacccccggcagc

SEQ ID NO: 3503425 - RNA, 22 nt, Human
cagcccacccccggcagcagcc

SEQ ID NO: 3503426 - RNA, 12 nt, Human
cagcccacccuc

SEQ ID NO: 3503427 - RNA, 15 nt, Human
cagcccacccuccug

SEQ ID NO: 3503428 - RNA, 17 nt, Human
cagcccacccuccuguc

SEQ ID NO: 3503429 - RNA, 21 nt, Human
cagcccacccuccugucuucc

SEQ ID NO: 3503430 - RNA, 24 nt, Human
cagcccacccuccugucuucccag

SEQ ID NO: 3503431 - RNA, 12 nt, Human
cagcccacccug

SEQ ID NO: 3503432 - RNA, 15 nt, Human
cagcccacgcugacu

SEQ ID NO: 3503433 - RNA, 22 nt, Human
cagcccacgcugacuacagggc

SEQ ID NO: 3503434 - RNA, 20 nt, Human
cagcccacguccugucagug

SEQ ID NO: 3503435 - RNA, 18 nt, Human
cagcccacuucugccaua

SEQ ID NO: 3503436 - RNA, 20 nt, Human
cagcccagaagugcagaacu

SEQ ID NO: 3503437 - RNA, 12 nt, Human
cagcccagagac

SEQ ID NO: 3503438 - RNA, 13 nt, Human
cagcccagagaca

SEQ ID NO: 3503439 - RNA, 14 nt, Human
cagcccagagccug

SEQ ID NO: 3503440 - RNA, 15 nt, Human
cagcccagagccugg

SEQ ID NO: 3503441 - RNA, 18 nt, Human
cagcccagagccuggcug

SEQ ID NO: 3503442 - RNA, 22 nt, Human
cagcccagaggccgagagcuau

SEQ ID NO: 3503443 - RNA, 15 nt, Human
cagcccagccacgga

SEQ ID NO: 3503444 - RNA, 17 nt, Human
cagcccagcccagcugg

SEQ ID NO: 3503445 - RNA, 11 nt, Human
cagcccagcug

SEQ ID NO: 3503446 - RNA, 17 nt, Human
cagcccagcugcucugc

SEQ ID NO: 3503447 - RNA, 22 nt, Human
cagcccaggaagucucaucugg

SEQ ID NO: 3503448 - RNA, 22 nt, Human
cagcccaggauacuggcacaga

SEQ ID NO: 3503449 - RNA, 23 nt, Human
cagcccaggccgggguggagcau

SEQ ID NO: 3503450 - RNA, 13 nt, Human
cagcccaggccuc

SEQ ID NO: 3503451 - RNA, 20 nt, Human
cagcccaggccuccagcuca

SEQ ID NO: 3503452 - RNA, 16 nt, Human
cagcccagggcuccug

SEQ ID NO: 3503453 - RNA, 17 nt, Human
cagcccagggcuccugc

SEQ ID NO: 3503454 - RNA, 21 nt, Human
cagcccagggcuccugcacuu

SEQ ID NO: 3503455 - RNA, 18 nt, Human
cagcccaggguuccccca

SEQ ID NO: 3503456 - RNA, 19 nt, Human
cagcccauccauaguaacu

SEQ ID NO: 3503457 - RNA, 17 nt, Human
cagcccaucucggagca

SEQ ID NO: 3503458 - RNA, 16 nt, Human
cagcccaucuugccuc

SEQ ID NO: 3503459 - RNA, 21 nt, Human
cagcccaugcccaccugccca

SEQ ID NO: 3503460 - RNA, 22 nt, Human
cagcccauggagauugaccugg

SEQ ID NO: 3503461 - RNA, 17 nt, Human
cagcccauuucuccaga

SEQ ID NO: 3503462 - RNA, 22 nt, Human
cagcccauuugggcagagaggc

SEQ ID NO: 3503463 - RNA, 16 nt, Human
cagccccacaccaggg

SEQ ID NO: 3503464 - RNA, 23 nt, Human
cagccccacaccagggccagccu

SEQ ID NO: 3503465 - RNA, 14 nt, Human
cagccccacagccc

SEQ ID NO: 3503466 - RNA, 22 nt, Human
cagccccaccccagggcagcca

SEQ ID NO: 3503467 - RNA, 16 nt, Human
cagccccacuccucug

SEQ ID NO: 3503468 - RNA, 21 nt, Human
cagccccacuccucugcugac

SEQ ID NO: 3503469 - RNA, 12 nt, Human
cagccccacugc

SEQ ID NO: 3503470 - RNA, 14 nt, Human
cagccccacugcca

SEQ ID NO: 3503471 - RNA, 13 nt, Human
cagccccagccca

SEQ ID NO: 3503472 - RNA, 15 nt, Human
cagccccagcccagc

SEQ ID NO: 3503473 - RNA, 12 nt, Human
cagccccagccu

SEQ ID NO: 3503474 - RNA, 16 nt, Human
cagccccagccugcua

SEQ ID NO: 3503475 - RNA, 14 nt, Human
cagccccagugccc

SEQ ID NO: 3503476 - RNA, 15 nt, Human
cagccccagugccca

SEQ ID NO: 3503477 - RNA, 18 nt, Human
cagccccagugcccacag

SEQ ID NO: 3503478 - RNA, 12 nt, Human
cagccccauccu

SEQ ID NO: 3503479 - RNA, 16 nt, Human
cagccccauccucugu

SEQ ID NO: 3503480 - RNA, 17 nt, Human
cagccccaucugugcau

SEQ ID NO: 3503481 - RNA, 17 nt, Human
cagccccauucugccug

SEQ ID NO: 3503482 - RNA, 23 nt, Human
cagccccauucugccugcccagg

SEQ ID NO: 3503483 - RNA, 24 nt, Human
cagccccauucugccugcccaggc

SEQ ID NO: 3503484 - RNA, 19 nt, Human
cagcccccacagugcuguc

SEQ ID NO: 3503485 - RNA, 20 nt, Human
cagcccccacagugcugucu

SEQ ID NO: 3503486 - RNA, 21 nt, Human
cagcccccacugccuuugacc

SEQ ID NO: 3503487 - RNA, 14 nt, Human
cagcccccagcccc

SEQ ID NO: 3503488 - RNA, 15 nt, Human
cagcccccagccccu

SEQ ID NO: 3503489 - RNA, 17 nt, Human
cagcccccuaagagagc

SEQ ID NO: 3503490 - RNA, 12 nt, Human
cagcccccucac

SEQ ID NO: 3503491 - RNA, 14 nt, Human
cagcccccugacca

SEQ ID NO: 3503492 - RNA, 16 nt, Human
cagcccccugaccacu

SEQ ID NO: 3503493 - RNA, 16 nt, Human
cagcccccugcuucag

SEQ ID NO: 3503494 - RNA, 20 nt, Human
cagcccccugcuucaguccc

SEQ ID NO: 3503495 - RNA, 15 nt, Human
cagcccccuuugggc

SEQ ID NO: 3503496 - RNA, 19 nt, Human
cagcccccuuugggcccag

SEQ ID NO: 3503497 - RNA, 20 nt, Human
cagccccgacuccagccagc

SEQ ID NO: 3503498 - RNA, 18 nt, Human
cagccccgccuccaggcc

SEQ ID NO: 3503499 - RNA, 21 nt, Human
cagccccgcgaccauguggcc

SEQ ID NO: 3503500 - RNA, 18 nt, Human
auuuaacuggugcacuuu

SEQ ID NO: 3503501 - RNA, 21 nt, Human
auuuaacuggugcacuuugua

SEQ ID NO: 3503502 - RNA, 20 nt, Human
auuuaacuuaacauucugua

SEQ ID NO: 3503503 - RNA, 11 nt, Human
auuuaacuucu

SEQ ID NO: 3503504 - RNA, 19 nt, Human
auuuaacuugagcuuuaaa

SEQ ID NO: 3503505 - RNA, 23 nt, Human
auuuaacuugaggguaauaaacu

SEQ ID NO: 3503506 - RNA, 17 nt, Human
auuuaacuuguuuccaa

SEQ ID NO: 3503507 - RNA, 20 nt, Human
auuuaacuuguuuccaaugu

SEQ ID NO: 3503508 - RNA, 21 nt, Human
auuuaacuuuuaguaaaguca

SEQ ID NO: 3503509 - RNA, 23 nt, Human
auuuaacuuuuaguaaagucaag

SEQ ID NO: 3503510 - RNA, 16 nt, Human
auuuaagacacugaaa

SEQ ID NO: 3503511 - RNA, 22 nt, Human
auuuaagcaaauacuuagcaaa

SEQ ID NO: 3503512 - RNA, 12 nt, Human
auuuaagcauug

SEQ ID NO: 3503513 - RNA, 17 nt, Human
auuuaagccuaaagauu

SEQ ID NO: 3503514 - RNA, 22 nt, Human
auuuaaggagauguaagagcuu

SEQ ID NO: 3503515 - RNA, 15 nt, Human
auuuaagggaaaaau

SEQ ID NO: 3503516 - RNA, 16 nt, Human
auuuaagggaaaaaua

SEQ ID NO: 3503517 - RNA, 16 nt, Human
auuuaagggaaagaaa

SEQ ID NO: 3503518 - RNA, 22 nt, Human
auuuaaggucuguuugcuguug

SEQ ID NO: 3503519 - RNA, 15 nt, Human
auuuaaguauucaag

SEQ ID NO: 3503520 - RNA, 20 nt, Human
auuuaaguggggcaaaaccu

SEQ ID NO: 3503521 - RNA, 18 nt, Human
auuuaaguguuggaaaaa

SEQ ID NO: 3503522 - RNA, 22 nt, Human
auuuaaguguuggaaaaaauuu

SEQ ID NO: 3503523 - RNA, 16 nt, Human
auuuaauaacaauugu

SEQ ID NO: 3503524 - RNA, 13 nt, Human
auuuaauaacauu

SEQ ID NO: 3503525 - RNA, 18 nt, Human
auuuaauaacauuaccuu

SEQ ID NO: 3503526 - RNA, 19 nt, Human
auuuaauaacauuaccuua

SEQ ID NO: 3503527 - RNA, 16 nt, Human
auuuaauaauauacuu

SEQ ID NO: 3503528 - RNA, 13 nt, Human
auuuaauaauuau

SEQ ID NO: 3503529 - RNA, 15 nt, Human
auuuaauaauuauau

SEQ ID NO: 3503530 - RNA, 19 nt, Human
auuuaauaccagauaccuu

SEQ ID NO: 3503531 - RNA, 22 nt, Human
auuuaauagguuuggacaaaau

SEQ ID NO: 3503532 - RNA, 16 nt, Human
auuuaauauagcuauu

SEQ ID NO: 3503533 - RNA, 15 nt, Human
auuuaauaucuucag

SEQ ID NO: 3503534 - RNA, 13 nt, Human
auuuaauauuaca

SEQ ID NO: 3503535 - RNA, 15 nt, Human
auuuaauauuuacuc

SEQ ID NO: 3503536 - RNA, 13 nt, Human
auuuaauauuuau

SEQ ID NO: 3503537 - RNA, 14 nt, Human
auuuaaucuuuuau

SEQ ID NO: 3503538 - RNA, 19 nt, Human
auuuaugggccccuggcac

SEQ ID NO: 3503539 - RNA, 16 nt, Human
auuuauggguggauuu

SEQ ID NO: 3503540 - RNA, 19 nt, Human
auuuaugguaaucauauua

SEQ ID NO: 3503541 - RNA, 23 nt, Human
auuuauguaaacugcauuagaaa

SEQ ID NO: 3503542 - RNA, 14 nt, Human
auuuauguagaugu

SEQ ID NO: 3503543 - RNA, 21 nt, Human
auuuauguagaugugcauuuu

SEQ ID NO: 3503544 - RNA, 17 nt, Human
auuuauguauugugcaa

SEQ ID NO: 3503545 - RNA, 22 nt, Human
auuuauguauugugcaaugugu

SEQ ID NO: 3503546 - RNA, 15 nt, Human
auuuauguguauaug

SEQ ID NO: 3503547 - RNA, 13 nt, Human
auuuauguuugca

SEQ ID NO: 3503548 - RNA, 12 nt, Human
auuuauuaaaga

SEQ ID NO: 3503549 - RNA, 14 nt, Human
auuuauuaaagaaa

SEQ ID NO: 3503550 - RNA, 17 nt, Human
auuuauuaaagaaaaaa

SEQ ID NO: 3503551 - RNA, 21 nt, Human
auuuauuaaauuuuuuuguau

SEQ ID NO: 3503552 - RNA, 17 nt, Human
auuuauuaacuuaauaa

SEQ ID NO: 3503553 - RNA, 21 nt, Human
auuuauuaacuuaauaaucaa

SEQ ID NO: 3503554 - RNA, 21 nt, Human
auuuauuaagauggauucuca

SEQ ID NO: 3503555 - RNA, 23 nt, Human
auuuauuaagauggauucucaga

SEQ ID NO: 3503556 - RNA, 20 nt, Human
auuuauuaagguuacagauu

SEQ ID NO: 3503557 - RNA, 16 nt, Human
auuuauuaauugcuuu

SEQ ID NO: 3503558 - RNA, 17 nt, Human
auuuauuaauugcuuug

SEQ ID NO: 3503559 - RNA, 23 nt, Human
auuuauuaugcuuuauuggaaaa

SEQ ID NO: 3503560 - RNA, 16 nt, Human
auuuauuauggcacau

SEQ ID NO: 3503561 - RNA, 15 nt, Human
auuuauuauugaaau

SEQ ID NO: 3503562 - RNA, 16 nt, Human
auuuauuauugaaauu

SEQ ID NO: 3503563 - RNA, 19 nt, Human
auuuauuauuuauuuauua

SEQ ID NO: 3503564 - RNA, 21 nt, Human
auuuauuauuuucaccuguuu

SEQ ID NO: 3503565 - RNA, 14 nt, Human
auuuauucaagaaa

SEQ ID NO: 3503566 - RNA, 21 nt, Human
auuuauucaauaaaguauuua

SEQ ID NO: 3503567 - RNA, 19 nt, Human
auuuauucaauuccucugg

SEQ ID NO: 3503568 - RNA, 20 nt, Human
auuuauucagcuucauuugu

SEQ ID NO: 3503569 - RNA, 21 nt, Human
auuuauucauuauuugucaaa

SEQ ID NO: 3503570 - RNA, 23 nt, Human
auuuauuccauauucauguaaac

SEQ ID NO: 3503571 - RNA, 21 nt, Human
auuuauucugggaauguauag

SEQ ID NO: 3503572 - RNA, 19 nt, Human
auuuauugacucuugaguu

SEQ ID NO: 3503573 - RNA, 22 nt, Human
auuuauugacucuugaguuguu

SEQ ID NO: 3503574 - RNA, 21 nt, Human
auuuauugaggaaaaauaugu

SEQ ID NO: 3503575 - RNA, 23 nt, Human
auuuauugauuccuuuuuucaaa

SEQ ID NO: 3503576 - RNA, 16 nt, Human
auuuauugcacauugu

SEQ ID NO: 3503577 - RNA, 17 nt, Human
auuuauugcacauuguu

SEQ ID NO: 3503578 - RNA, 20 nt, Human
auuuauugcacauuguucaa

SEQ ID NO: 3503579 - RNA, 20 nt, Human
auuuauugcuugauacuuuu

SEQ ID NO: 3503580 - RNA, 14 nt, Human
auuuauugcuuuau

SEQ ID NO: 3503581 - RNA, 23 nt, Human
auuuauuggccccccgaccuugu

SEQ ID NO: 3503582 - RNA, 14 nt, Human
auuuauuggcuuuu

SEQ ID NO: 3503583 - RNA, 18 nt, Human
auuuauuggcuuuucuga

SEQ ID NO: 3503584 - RNA, 14 nt, Human
auuuauugguuuug

SEQ ID NO: 3503585 - RNA, 17 nt, Human
auuuauuguuuauguaa

SEQ ID NO: 3503586 - RNA, 19 nt, Human
auuuauuguuuauguaaau

SEQ ID NO: 3503587 - RNA, 21 nt, Human
auuuauuguuuauguaaaugu

SEQ ID NO: 3503588 - RNA, 13 nt, Human
auuuauuuaaaag

SEQ ID NO: 3503589 - RNA, 14 nt, Human
auuuauuuaaaaga

SEQ ID NO: 3503590 - RNA, 17 nt, Human
auuuauuuaauguuaug

SEQ ID NO: 3503591 - RNA, 15 nt, Human
auuuauuuacaaaug

SEQ ID NO: 3503592 - RNA, 13 nt, Human
auuuauuuacaga

SEQ ID NO: 3503593 - RNA, 14 nt, Human
auuuauuucaucau

SEQ ID NO: 3503594 - RNA, 18 nt, Human
auuuauuuccuaguucug

SEQ ID NO: 3503595 - RNA, 12 nt, Human
auuuauuuccuc

SEQ ID NO: 3503596 - RNA, 17 nt, Human
auuuauuuccucccucu

SEQ ID NO: 3503597 - RNA, 20 nt, Human
auuuauuucuuuuuugccaa

SEQ ID NO: 3503598 - RNA, 13 nt, Human
auuuauuugcuuc

SEQ ID NO: 3503599 - RNA, 22 nt, Human
auuuauuuuaaaaaaugaaaau

SEQ ID NO: 3503600 - RNA, 14 nt, Human
auuuauuuuaagca

SEQ ID NO: 3503601 - RNA, 17 nt, Human
auuuauuuuaauaaugu

SEQ ID NO: 3503602 - RNA, 13 nt, Human
auuuauuuuauga

SEQ ID NO: 3503603 - RNA, 18 nt, Human
auuuauuuuaugagaaau

SEQ ID NO: 3503604 - RNA, 12 nt, Human
auuuauuuuauu

SEQ ID NO: 3503605 - RNA, 16 nt, Human
auuuauuuuccuaaag

SEQ ID NO: 3503606 - RNA, 20 nt, Human
auuuauuuuccuccccagca

SEQ ID NO: 3503607 - RNA, 13 nt, Human
auuuauuuugaca

SEQ ID NO: 3503608 - RNA, 14 nt, Human
auuuauuuugacau

SEQ ID NO: 3503609 - RNA, 21 nt, Human
auuuauuuugacauaaaguug

SEQ ID NO: 3503610 - RNA, 14 nt, Human
auuuauuuuguaau

SEQ ID NO: 3503611 - RNA, 19 nt, Human
auuuauuuuuaagaaagaa

SEQ ID NO: 3503612 - RNA, 20 nt, Human
auuuauuuuuaagaaagaaa

SEQ ID NO: 3503613 - RNA, 18 nt, Human
auuuauuuuuacaagaag

SEQ ID NO: 3503614 - RNA, 17 nt, Human
auuuauuuuugcauggc

SEQ ID NO: 3503615 - RNA, 19 nt, Human
auuucaaaaaaauaaaaua

SEQ ID NO: 3503616 - RNA, 20 nt, Human
auuucaaaaaaauaaaauaa

SEQ ID NO: 3503617 - RNA, 17 nt, Human
auuucaaaaauauaacu

SEQ ID NO: 3503618 - RNA, 16 nt, Human
auuucaaaaauuugga

SEQ ID NO: 3503619 - RNA, 14 nt, Human
auuucaaaagacau

SEQ ID NO: 3503620 - RNA, 16 nt, Human
auuucaaaagacaugu

SEQ ID NO: 3503621 - RNA, 13 nt, Human
auuucaaaauaua

SEQ ID NO: 3503622 - RNA, 15 nt, Human
auuucaaaaugauuu

SEQ ID NO: 3503623 - RNA, 21 nt, Human
auuucaaaaugcuuuuuauua

SEQ ID NO: 3503624 - RNA, 19 nt, Human
auuucaaaguuuuguugua

SEQ ID NO: 3503625 - RNA, 17 nt, Human
auuucaaauuggagcuu

SEQ ID NO: 3503626 - RNA, 23 nt, Human
auuucaacaaguagcuaaagucu

SEQ ID NO: 3503627 - RNA, 19 nt, Human
auuucaagaaaaaauaaau

SEQ ID NO: 3503628 - RNA, 21 nt, Human
auuucaagaaaaaauaaaugg

SEQ ID NO: 3503629 - RNA, 23 nt, Human
auuucaagaaaaaauaaauggaa

SEQ ID NO: 3503630 - RNA, 15 nt, Human
auuucaagagauuua

SEQ ID NO: 3503631 - RNA, 19 nt, Human
auuucaagagauuuaauua

SEQ ID NO: 3503632 - RNA, 22 nt, Human
auuucaagcuuauuuuggagag

SEQ ID NO: 3503633 - RNA, 12 nt, Human
auuucaagguuc

SEQ ID NO: 3503634 - RNA, 14 nt, Human
auuucaagguucua

SEQ ID NO: 3503635 - RNA, 17 nt, Human
auuucaaguacacugaa

SEQ ID NO: 3503636 - RNA, 22 nt, Human
auuucaaguuccaaguugcuaa

SEQ ID NO: 3503637 - RNA, 22 nt, Human
auuucaaucccacguacuuaua

SEQ ID NO: 3503638 - RNA, 23 nt, Human
auuucaauguaauuaaacuguua

SEQ ID NO: 3503639 - RNA, 22 nt, Human
auuucaauguguauaaauuguc

SEQ ID NO: 3503640 - RNA, 21 nt, Human
auuucaauuuccaagagcuga

SEQ ID NO: 3503641 - RNA, 13 nt, Human
auuucacaaauau

SEQ ID NO: 3503642 - RNA, 14 nt, Human
auuucacaaauauu

SEQ ID NO: 3503643 - RNA, 15 nt, Human
auuucacaaauauua

SEQ ID NO: 3503644 - RNA, 14 nt, Human
auuucacaggcuaa

SEQ ID NO: 3503645 - RNA, 17 nt, Human
auuucacaguguguggu

SEQ ID NO: 3503646 - RNA, 13 nt, Human
auuucacauuaau

SEQ ID NO: 3503647 - RNA, 15 nt, Human
auuucaccuguaaac

SEQ ID NO: 3503648 - RNA, 16 nt, Human
auuucacgauucauuu

SEQ ID NO: 3503649 - RNA, 18 nt, Human
auuucacuacuagauuga

SEQ ID NO: 3503650 - RNA, 22 nt, Human
auuucacuauuuuuauuuauau

SEQ ID NO: 3503651 - RNA, 14 nt, Human
auuucacucuccuu

SEQ ID NO: 3503652 - RNA, 23 nt, Human
auuucacuugaguggagguuuau

SEQ ID NO: 3503653 - RNA, 19 nt, Human
auuucacuugaugauacaa

SEQ ID NO: 3503654 - RNA, 18 nt, Human
auuucacuuuagaugcug

SEQ ID NO: 3503655 - RNA, 18 nt, Human
auuucagaaaaugaaaaa

SEQ ID NO: 3503656 - RNA, 12 nt, Human
auuucagacucc

SEQ ID NO: 3503657 - RNA, 18 nt, Human
auuucagacucccauucc

SEQ ID NO: 3503658 - RNA, 19 nt, Human
auuucagagagaaucaaga

SEQ ID NO: 3503659 - RNA, 19 nt, Human
cagccccgugggguuccuc

SEQ ID NO: 3503660 - RNA, 14 nt, Human
cagccccuacugcu

SEQ ID NO: 3503661 - RNA, 15 nt, Human
cagccccuacugcug

SEQ ID NO: 3503662 - RNA, 20 nt, Human
cagccccuagaaacccaagc

SEQ ID NO: 3503663 - RNA, 13 nt, Human
cagccccucccac

SEQ ID NO: 3503664 - RNA, 15 nt, Human
cagccccucccacca

SEQ ID NO: 3503665 - RNA, 22 nt, Human
cagccccucccaccacagcagg

SEQ ID NO: 3503666 - RNA, 14 nt, Human
cagccccuccccca

SEQ ID NO: 3503667 - RNA, 16 nt, Human
cagccccuccucugcc

SEQ ID NO: 3503668 - RNA, 21 nt, Human
cagccccuccucugccaccuc

SEQ ID NO: 3503669 - RNA, 23 nt, Human
cagccccuccucugccaccuccc

SEQ ID NO: 3503670 - RNA, 11 nt, Human
cagccccucuu

SEQ ID NO: 3503671 - RNA, 15 nt, Human
cagccccucuugccc

SEQ ID NO: 3503672 - RNA, 14 nt, Human
cagccccugauccu

SEQ ID NO: 3503673 - RNA, 17 nt, Human
cagccccugccccagcc

SEQ ID NO: 3503674 - RNA, 18 nt, Human
cagccccuggaugcagcc

SEQ ID NO: 3503675 - RNA, 23 nt, Human
cagccccuggaugcagccucaca

SEQ ID NO: 3503676 - RNA, 21 nt, Human
cagccccuggccccaggaccu

SEQ ID NO: 3503677 - RNA, 20 nt, Human
cagccccuguauggcacugg

SEQ ID NO: 3503678 - RNA, 17 nt, Human
cagccccuuagacagag

SEQ ID NO: 3503679 - RNA, 21 nt, Human
cagccccuuagacagaggccc

SEQ ID NO: 3503680 - RNA, 15 nt, Human
cagccccuucucaga

SEQ ID NO: 3503681 - RNA, 16 nt, Human
cagccccuucucagaa

SEQ ID NO: 3503682 - RNA, 16 nt, Human
caggggcccacaggga

SEQ ID NO: 3503683 - RNA, 19 nt, Human
caggggccccuccagcuug

SEQ ID NO: 3503684 - RNA, 20 nt, Human
caggggccccuccagcuugu

SEQ ID NO: 3503685 - RNA, 16 nt, Human
caggggcccugcagcu

SEQ ID NO: 3503686 - RNA, 15 nt, Human
caggggcccuggagc

SEQ ID NO: 3503687 - RNA, 20 nt, Human
caggggcccuggagcagcca

SEQ ID NO: 3503688 - RNA, 16 nt, Human
caggggccugcccagu

SEQ ID NO: 3503689 - RNA, 18 nt, Human
caggggcguguggcucac

SEQ ID NO: 3503690 - RNA, 17 nt, Human
caggggcuacaagaggg

SEQ ID NO: 3503691 - RNA, 14 nt, Human
caggggcucccucc

SEQ ID NO: 3503692 - RNA, 14 nt, Human
caggggcucuggag

SEQ ID NO: 3503693 - RNA, 13 nt, Human
caggggcugcagu

SEQ ID NO: 3503694 - RNA, 12 nt, Human
caggggcugccc

SEQ ID NO: 3503695 - RNA, 13 nt, Human
caggggcugcuuc

SEQ ID NO: 3503696 - RNA, 18 nt, Human
caggggcugcuuccuccu

SEQ ID NO: 3503697 - RNA, 13 nt, Human
caggggcuggcuu

SEQ ID NO: 3503698 - RNA, 15 nt, Human
caggggcuggugggc

SEQ ID NO: 3503699 - RNA, 15 nt, Human
caggggcuuccuggu

SEQ ID NO: 3503700 - RNA, 16 nt, Human
caggggcuugacuuuu

SEQ ID NO: 3503701 - RNA, 15 nt, Human
cagggggaagaagca

SEQ ID NO: 3503702 - RNA, 19 nt, Human
cagggggaagguggggucc

SEQ ID NO: 3503703 - RNA, 19 nt, Human
cagggggagcugggccugg

SEQ ID NO: 3503704 - RNA, 22 nt, Human
cagggggaugccacuccucccu

SEQ ID NO: 3503705 - RNA, 20 nt, Human
cagggggcccaccagagcug

SEQ ID NO: 3503706 - RNA, 12 nt, Human
cagggggcugcu

SEQ ID NO: 3503707 - RNA, 18 nt, Human
cagggggcugcugcuggg

SEQ ID NO: 3503708 - RNA, 12 nt, Human
cagggggcuucc

SEQ ID NO: 3503709 - RNA, 15 nt, Human
caggggggugaggag

SEQ ID NO: 3503710 - RNA, 18 nt, Human
caggggggugaggagcug

SEQ ID NO: 3503711 - RNA, 22 nt, Human
cagcucugccgucucuggagcg

SEQ ID NO: 3503712 - RNA, 23 nt, Human
cagcucugcuugccgaaacugga

SEQ ID NO: 3503713 - RNA, 18 nt, Human
cagcucuggacagcccca

SEQ ID NO: 3503714 - RNA, 16 nt, Human
cagcucuggagggggu

SEQ ID NO: 3503715 - RNA, 14 nt, Human
cagcucuggcaugg

SEQ ID NO: 3503716 - RNA, 15 nt, Human
cagcucugggagagg

SEQ ID NO: 3503717 - RNA, 23 nt, Human
cagcucugggccauucuccacag

SEQ ID NO: 3503718 - RNA, 13 nt, Human
cagcucuggucca

SEQ ID NO: 3503719 - RNA, 22 nt, Human
cagcucugguccauagagagca

SEQ ID NO: 3503720 - RNA, 17 nt, Human
cagcucuguguugccau

SEQ ID NO: 3503721 - RNA, 22 nt, Human
cagcucuguucuuccucagcca

SEQ ID NO: 3503722 - RNA, 18 nt, Human
cagcucuucaucugccca

SEQ ID NO: 3503723 - RNA, 22 nt, Human
cagcucuuccuagcuggagagg

SEQ ID NO: 3503724 - RNA, 17 nt, Human
cagcucuucuccaggcu

SEQ ID NO: 3503725 - RNA, 18 nt, Human
cagcucuucuccaggcug

SEQ ID NO: 3503726 - RNA, 17 nt, Human
cagcucuugcccuuccc

SEQ ID NO: 3503727 - RNA, 20 nt, Human
cagcucuugcuaaucagugu

SEQ ID NO: 3503728 - RNA, 23 nt, Human
cagcucuugcuaaucagugucuc

SEQ ID NO: 3503729 - RNA, 17 nt, Human
cagcucuuggcuccacu

SEQ ID NO: 3503730 - RNA, 18 nt, Human
cagcucuuggcuccacug

SEQ ID NO: 3503731 - RNA, 13 nt, Human
cagcucuuuccuc

SEQ ID NO: 3503732 - RNA, 22 nt, Human
cagcugaaauaugcuggcugga

SEQ ID NO: 3503733 - RNA, 17 nt, Human
cagcugaaugccuccug

SEQ ID NO: 3503734 - RNA, 21 nt, Human
cagcugacaucuugaauccuu

SEQ ID NO: 3503735 - RNA, 17 nt, Human
cagcugaccauggaaga

SEQ ID NO: 3503736 - RNA, 16 nt, Human
cagcugacuuucaaag

SEQ ID NO: 3503737 - RNA, 21 nt, Human
cagcugacuuuucuguccgag

SEQ ID NO: 3503738 - RNA, 14 nt, Human
cagcugagcagggc

SEQ ID NO: 3503739 - RNA, 15 nt, Human
cagcugagcagggcc

SEQ ID NO: 3503740 - RNA, 16 nt, Human
cagcugagcgccagga

SEQ ID NO: 3503741 - RNA, 21 nt, Human
cagcugaggcugggggagagc

SEQ ID NO: 3503742 - RNA, 18 nt, Human
cagcugagugaaaaaucu

SEQ ID NO: 3503743 - RNA, 23 nt, Human
cagcugagugaaaaaucugugga

SEQ ID NO: 3503744 - RNA, 13 nt, Human
cagcugaugacuc

SEQ ID NO: 3503745 - RNA, 12 nt, Human
cagcugauuuua

SEQ ID NO: 3503746 - RNA, 21 nt, Human
cagcugauuuuaacaauaacu

SEQ ID NO: 3503747 - RNA, 15 nt, Human
cagcugcaaaguguu

SEQ ID NO: 3503748 - RNA, 19 nt, Human
cagcugcaagguacucugg

SEQ ID NO: 3503749 - RNA, 16 nt, Human
cagcugcaccagagca

SEQ ID NO: 3503750 - RNA, 16 nt, Human
cagcugcaccccuucc

SEQ ID NO: 3503751 - RNA, 17 nt, Human
cagcugcaccugccagc

SEQ ID NO: 3503752 - RNA, 17 nt, Human
cagcugcagcugggcug

SEQ ID NO: 3503753 - RNA, 15 nt, Human
cagcugccagagaag

SEQ ID NO: 3503754 - RNA, 15 nt, Human
cagcugccagugucc

SEQ ID NO: 3503755 - RNA, 18 nt, Human
cagcugcccccagagcca

SEQ ID NO: 3503756 - RNA, 20 nt, Human
cagcugcccccagagccaca

SEQ ID NO: 3503757 - RNA, 21 nt, Human
cagcugcccccagagccacag

SEQ ID NO: 3503758 - RNA, 12 nt, Human
cagcugccccgg

SEQ ID NO: 3503759 - RNA, 17 nt, Human
cagcugccccggccccu

SEQ ID NO: 3503760 - RNA, 19 nt, Human
cagcugccccggccccucc

SEQ ID NO: 3503761 - RNA, 12 nt, Human
cagcugccccuc

SEQ ID NO: 3503762 - RNA, 15 nt, Human
cagcugccccucccu

SEQ ID NO: 3503763 - RNA, 10 nt, Human
cagcugccuc

SEQ ID NO: 3503764 - RNA, 14 nt, Human
cagcugccuccccu

SEQ ID NO: 3503765 - RNA, 18 nt, Human
cagcugccuccccuccuc

SEQ ID NO: 3503766 - RNA, 20 nt, Human
cagcugccuccccuccucug

SEQ ID NO: 3503767 - RNA, 21 nt, Human
cagcugccuccccuccucugc

SEQ ID NO: 3503768 - RNA, 22 nt, Human
cagcugccuccccuccucugcu

SEQ ID NO: 3503769 - RNA, 13 nt, Human
cagcugccuggga

SEQ ID NO: 3503770 - RNA, 15 nt, Human
cagcugccugggauc

SEQ ID NO: 3503771 - RNA, 19 nt, Human
cagcugccuuagcuucagg

SEQ ID NO: 3503772 - RNA, 21 nt, Human
cagcugccuuagcuucaggaa

SEQ ID NO: 3503773 - RNA, 23 nt, Human
cagcugccuuagcuucaggaacc

SEQ ID NO: 3503774 - RNA, 18 nt, Human
cagcugcgguccacccag

SEQ ID NO: 3503775 - RNA, 19 nt, Human
cagcugcgguccacccagg

SEQ ID NO: 3503776 - RNA, 21 nt, Human
cagcugcgguccacccaggag

SEQ ID NO: 3503777 - RNA, 23 nt, Human
cagcugcgguccacccaggagcc

SEQ ID NO: 3503778 - RNA, 24 nt, Human
cagcugcgguccacccaggagccc

SEQ ID NO: 3503779 - RNA, 23 nt, Human
cagcugcuauccccaucucccug

SEQ ID NO: 3503780 - RNA, 20 nt, Human
cagcugcuauuuauuuuccu

SEQ ID NO: 3503781 - RNA, 22 nt, Human
cagcugcuauuuauuuuccuaa

SEQ ID NO: 3503782 - RNA, 13 nt, Human
cagcugcuccccu

SEQ ID NO: 3503783 - RNA, 20 nt, Human
cagcugcuccccucccuccu

SEQ ID NO: 3503784 - RNA, 21 nt, Human
cagcugcuccccucccuccuc

SEQ ID NO: 3503785 - RNA, 19 nt, Human
cagcugcuccuagagggag

SEQ ID NO: 3503786 - RNA, 14 nt, Human
cagcugcucugccc

SEQ ID NO: 3503787 - RNA, 17 nt, Human
cagcugcucugcccaga

SEQ ID NO: 3503788 - RNA, 18 nt, Human
cagcugcucugcccagag

SEQ ID NO: 3503789 - RNA, 22 nt, Human
cagcugcucugcccagagcugg

SEQ ID NO: 3503790 - RNA, 20 nt, Human
cagcugcugaaacaacaaau

SEQ ID NO: 3503791 - RNA, 12 nt, Human
cagcugcugaga

SEQ ID NO: 3503792 - RNA, 19 nt, Human
cagcugcugagauccugga

SEQ ID NO: 3503793 - RNA, 14 nt, Human
cagcugcugagccg

SEQ ID NO: 3503794 - RNA, 18 nt, Human
cagcugcugagccgcaga

SEQ ID NO: 3503795 - RNA, 13 nt, Human
cagcugcuugggc

SEQ ID NO: 3503796 - RNA, 14 nt, Human
cagcugcuugggcu

SEQ ID NO: 3503797 - RNA, 16 nt, Human
cagcugcuugggcuuc

SEQ ID NO: 3503798 - RNA, 22 nt, Human
cagcugcuugggcuucauccuc

SEQ ID NO: 3503799 - RNA, 22 nt, Human
cagcugcuugugucccuccugg

SEQ ID NO: 3503800 - RNA, 22 nt, Human
cagcugcuuuugucuaugggac

SEQ ID NO: 3503801 - RNA, 22 nt, Human
cagcuggaaaagggucuuggga

SEQ ID NO: 3503802 - RNA, 13 nt, Human
cagcuggacagag

SEQ ID NO: 3503803 - RNA, 16 nt, Human
cagcuggacagagggg

SEQ ID NO: 3503804 - RNA, 18 nt, Human
cagcuggacucugcaucc

SEQ ID NO: 3503805 - RNA, 19 nt, Human
cagcuggacucugcauccc

SEQ ID NO: 3503806 - RNA, 15 nt, Human
cagcuggaggcaggg

SEQ ID NO: 3503807 - RNA, 23 nt, Human
cagcuggaugagaauuugagugc

SEQ ID NO: 3503808 - RNA, 21 nt, Human
cagcuggaugagacuuccaaa

SEQ ID NO: 3503809 - RNA, 18 nt, Human
cagcuggaugauggucuu

SEQ ID NO: 3503810 - RNA, 19 nt, Human
cagcuggauuggguuauga

SEQ ID NO: 3503811 - RNA, 17 nt, Human
cagcuggcccgugacag

SEQ ID NO: 3503812 - RNA, 19 nt, Human
cagcuggccgggagccuga

SEQ ID NO: 3503813 - RNA, 14 nt, Human
cagcuggccuggac

SEQ ID NO: 3503814 - RNA, 20 nt, Human
cagcugggaucugacugcac

SEQ ID NO: 3503815 - RNA, 21 nt, Human
cagcugggcccaacccugucu

SEQ ID NO: 3503816 - RNA, 11 nt, Human
cagcugggcuc

SEQ ID NO: 3503817 - RNA, 15 nt, Human
cagcugggcucugca

SEQ ID NO: 3503818 - RNA, 20 nt, Human
cagcuggggccaggcugggu

SEQ ID NO: 3503819 - RNA, 22 nt, Human
cagcuggggccaggcugggucg

SEQ ID NO: 3503820 - RNA, 21 nt, Human
cagcuggggcguggggagggc

SEQ ID NO: 3503821 - RNA, 17 nt, Human
cagcuggggugcaggga

SEQ ID NO: 3503822 - RNA, 21 nt, Human
cagcugggguggggaccucag

SEQ ID NO: 3503823 - RNA, 15 nt, Human
cagcugggucaggca

SEQ ID NO: 3503824 - RNA, 19 nt, Human
cagcuggguggcacugcca

SEQ ID NO: 3503825 - RNA, 20 nt, Human
cagcuggguggcacugccau

SEQ ID NO: 3503826 - RNA, 21 nt, Human
auuuugaguaucucggaccuu

SEQ ID NO: 3503827 - RNA, 14 nt, Human
auuuugagugacuc

SEQ ID NO: 3503828 - RNA, 15 nt, Human
auuuugauaauaaau

SEQ ID NO: 3503829 - RNA, 14 nt, Human
auuuugauaguggg

SEQ ID NO: 3503830 - RNA, 18 nt, Human
auuuugauccaagcuggu

SEQ ID NO: 3503831 - RNA, 17 nt, Human
auuuugaucuucaacaa

SEQ ID NO: 3503832 - RNA, 12 nt, Human
auuuugaugcag

SEQ ID NO: 3503833 - RNA, 17 nt, Human
auuuugaugcagcauuu

SEQ ID NO: 3503834 - RNA, 20 nt, Human
auuuugaugcagcauuugau

SEQ ID NO: 3503835 - RNA, 21 nt, Human
auuuugaugugacaauaauau

SEQ ID NO: 3503836 - RNA, 17 nt, Human
auuuugauguuuuaagg

SEQ ID NO: 3503837 - RNA, 22 nt, Human
auuuugauuauuguauuuauuc

SEQ ID NO: 3503838 - RNA, 13 nt, Human
auuuugcaaauau

SEQ ID NO: 3503839 - RNA, 21 nt, Human
auuuugcaaucccuuaauauc

SEQ ID NO: 3503840 - RNA, 15 nt, Human
auuuugcauaauaaa

SEQ ID NO: 3503841 - RNA, 14 nt, Human
auuuugcauucaaa

SEQ ID NO: 3503842 - RNA, 15 nt, Human
auuuugcauucaaau

SEQ ID NO: 3503843 - RNA, 16 nt, Human
auuuugccauuuagcg

SEQ ID NO: 3503844 - RNA, 21 nt, Human
auuuugccucuuuucucugug

SEQ ID NO: 3503845 - RNA, 18 nt, Human
auuuugcgucagagaaau

SEQ ID NO: 3503846 - RNA, 23 nt, Human
auuuugcuaaguaaaucucuucu

SEQ ID NO: 3503847 - RNA, 17 nt, Human
auuuugcuauuguaaau

SEQ ID NO: 3503848 - RNA, 19 nt, Human
auuuugcuauuguaaauau

SEQ ID NO: 3503849 - RNA, 14 nt, Human
auuuugcuggaaua

SEQ ID NO: 3503850 - RNA, 20 nt, Human
auuuugcuguagaagauggc

SEQ ID NO: 3503851 - RNA, 12 nt, Human
auuuugcuuugu

SEQ ID NO: 3503852 - RNA, 20 nt, Human
auuuuggaagauuuucaguc

SEQ ID NO: 3503853 - RNA, 14 nt, Human
auuuuggagaaauu

SEQ ID NO: 3503854 - RNA, 18 nt, Human
auuuuggagauuauaaua

SEQ ID NO: 3503855 - RNA, 21 nt, Human
auuuuggcgcuauuacaaaua

SEQ ID NO: 3503856 - RNA, 15 nt, Human
auuuugggaaucuuu

SEQ ID NO: 3503857 - RNA, 23 nt, Human
auuuuggggaaggguuugaauug

SEQ ID NO: 3503858 - RNA, 20 nt, Human
auuuugggguuguguuguca

SEQ ID NO: 3503859 - RNA, 22 nt, Human
auuuugguaaaauacuucuuga

SEQ ID NO: 3503860 - RNA, 14 nt, Human
auuuugguuguauu

SEQ ID NO: 3503861 - RNA, 16 nt, Human
auuuugguuguauucu

SEQ ID NO: 3503862 - RNA, 17 nt, Human
auuuugguuguauucuu

SEQ ID NO: 3503863 - RNA, 21 nt, Human
auuuugguuguauucuuugau

SEQ ID NO: 3503864 - RNA, 21 nt, Human
auuuugguuuuguuccccucc

SEQ ID NO: 3503865 - RNA, 17 nt, Human
auuuuguaaaauguauu

SEQ ID NO: 3503866 - RNA, 18 nt, Human
auuuuguaaaauguauua

SEQ ID NO: 3503867 - RNA, 21 nt, Human
auuuuguaaaauguauuaugu

SEQ ID NO: 3503868 - RNA, 20 nt, Human
auuuuguaaacucaaaauau

SEQ ID NO: 3503869 - RNA, 19 nt, Human
caggggggugaggagcugg

SEQ ID NO: 3503870 - RNA, 20 nt, Human
cagggggguugugaggccug

SEQ ID NO: 3503871 - RNA, 17 nt, Human
caggggucacugaggcc

SEQ ID NO: 3503872 - RNA, 20 nt, Human
caggggucccagccaccccg

SEQ ID NO: 3503873 - RNA, 21 nt, Human
caggggucgucaccaccucuc

SEQ ID NO: 3503874 - RNA, 21 nt, Human
caggggucugagcuccagcuc

SEQ ID NO: 3503875 - RNA, 16 nt, Human
caggggugacacagac

SEQ ID NO: 3503876 - RNA, 17 nt, Human
caggggugacacagacu

SEQ ID NO: 3503877 - RNA, 19 nt, Human
caggggugacacagacuca

SEQ ID NO: 3503878 - RNA, 20 nt, Human
caggggugauuucagagagg

SEQ ID NO: 3503879 - RNA, 13 nt, Human
caggggugccccc

SEQ ID NO: 3503880 - RNA, 20 nt, Human
caggggugcccccuccucuc

SEQ ID NO: 3503881 - RNA, 13 nt, Human
cagggguggagga

SEQ ID NO: 3503882 - RNA, 17 nt, Human
cagggguggaggagagc

SEQ ID NO: 3503883 - RNA, 12 nt, Human
cagggguggggg

SEQ ID NO: 3503884 - RNA, 21 nt, Human
caggguaacuaacuaaaacaa

SEQ ID NO: 3503885 - RNA, 16 nt, Human
caggguagcagguacc

SEQ ID NO: 3503886 - RNA, 16 nt, Human
caggguagcccgccug

SEQ ID NO: 3503887 - RNA, 21 nt, Human
caggguagcccgccugccagu

SEQ ID NO: 3503888 - RNA, 19 nt, Human
caggguauugcuugccacu

SEQ ID NO: 3503889 - RNA, 23 nt, Human
cagggucaaaguguuuucucuga

SEQ ID NO: 3503890 - RNA, 19 nt, Human
cagggucccacagccacgu

SEQ ID NO: 3503891 - RNA, 13 nt, Human
cagggucccucug

SEQ ID NO: 3503892 - RNA, 15 nt, Human
cagggucccucugug

SEQ ID NO: 3503893 - RNA, 14 nt, Human
cagggucccuggug

SEQ ID NO: 3503894 - RNA, 15 nt, Human
cagggucccuggugg

SEQ ID NO: 3503895 - RNA, 18 nt, Human
cagggucccugguggcag

SEQ ID NO: 3503896 - RNA, 20 nt, Human
caggguccucuucugggccu

SEQ ID NO: 3503897 - RNA, 13 nt, Human
caggguccugcua

SEQ ID NO: 3503898 - RNA, 13 nt, Human
caggguccuggga

SEQ ID NO: 3503899 - RNA, 21 nt, Human
cagggucucacuauguugccc

SEQ ID NO: 3503900 - RNA, 22 nt, Human
cagggucucacuauguugccca

SEQ ID NO: 3503901 - RNA, 15 nt, Human
cagggucucacucug

SEQ ID NO: 3503902 - RNA, 16 nt, Human
cagggucucacucugu

SEQ ID NO: 3503903 - RNA, 21 nt, Human
cagggucucacucugucgccc

SEQ ID NO: 3503904 - RNA, 22 nt, Human
cagggucucacucugucgccca

SEQ ID NO: 3503905 - RNA, 18 nt, Human
cagggucuccagaaagcc

SEQ ID NO: 3503906 - RNA, 23 nt, Human
cagggucucuagugcugugaaaa

SEQ ID NO: 3503907 - RNA, 15 nt, Human
cagggucucucccuc

SEQ ID NO: 3503908 - RNA, 21 nt, Human
cagggucucucccucaggugu

SEQ ID NO: 3503909 - RNA, 15 nt, Human
cagggucucugcugc

SEQ ID NO: 3503910 - RNA, 13 nt, Human
cagggucugcucu

SEQ ID NO: 3503911 - RNA, 15 nt, Human
cagggucugggcagg

SEQ ID NO: 3503912 - RNA, 13 nt, Human
cagggucuucccu

SEQ ID NO: 3503913 - RNA, 22 nt, Human
cagggucuucccuaccucaggc

SEQ ID NO: 3503914 - RNA, 17 nt, Human
cagggucuuuucaucug

SEQ ID NO: 3503915 - RNA, 14 nt, Human
cagggugagagcug

SEQ ID NO: 3503916 - RNA, 22 nt, Human
cagggugagagcugcucuggaa

SEQ ID NO: 3503917 - RNA, 18 nt, Human
cagggugagcccaugugg

SEQ ID NO: 3503918 - RNA, 16 nt, Human
cagggugaugccaggu

SEQ ID NO: 3503919 - RNA, 20 nt, Human
caggguggagugcaguggug

SEQ ID NO: 3503920 - RNA, 22 nt, Human
caggguggccacaccucuaucc

SEQ ID NO: 3503921 - RNA, 23 nt, Human
cagggugggccucggccccuccc

SEQ ID NO: 3503922 - RNA, 18 nt, Human
caggguggugcugggacu

SEQ ID NO: 3503923 - RNA, 18 nt, Human
caggguguggcccugcca

SEQ ID NO: 3503924 - RNA, 13 nt, Human
cagggugugugcu

SEQ ID NO: 3503925 - RNA, 20 nt, Human
caggguguugucagcaucuu

SEQ ID NO: 3503926 - RNA, 15 nt, Human
caggguucccccagc

SEQ ID NO: 3503927 - RNA, 17 nt, Human
caggguucccccagccc

SEQ ID NO: 3503928 - RNA, 19 nt, Human
caggguucccgcggggcug

SEQ ID NO: 3503929 - RNA, 21 nt, Human
caggguucccgcggggcuguc

SEQ ID NO: 3503930 - RNA, 21 nt, Human
caggguucuccucuccccucu

SEQ ID NO: 3503931 - RNA, 15 nt, Human
caggguuggccccug

SEQ ID NO: 3503932 - RNA, 21 nt, Human
caggguuggccccugcccggc

SEQ ID NO: 3503933 - RNA, 20 nt, Human
caggguugggcccagaucug

SEQ ID NO: 3503934 - RNA, 20 nt, Human
caggguuucgagaagcugcu

SEQ ID NO: 3503935 - RNA, 20 nt, Human
caggguuuggcugugucuaa

SEQ ID NO: 3503936 - RNA, 13 nt, Human
caggguuuuuacc

SEQ ID NO: 3503937 - RNA, 20 nt, Human
cagguaaaacagggccacau

SEQ ID NO: 3503938 - RNA, 23 nt, Human
cagguaaaacagggccacauaga

SEQ ID NO: 3503939 - RNA, 22 nt, Human
cagguaaagggcaaauaaugau

SEQ ID NO: 3503940 - RNA, 15 nt, Human
cagguaauacaaacu

SEQ ID NO: 3503941 - RNA, 17 nt, Human
cagguaaucgaccugcc

SEQ ID NO: 3503942 - RNA, 14 nt, Human
cagguacagagaag

SEQ ID NO: 3503943 - RNA, 13 nt, Human
cagguaccagcug

SEQ ID NO: 3503944 - RNA, 19 nt, Human
cagguaccagcugcgcuug

SEQ ID NO: 3503945 - RNA, 21 nt, Human
cagguacccuucucgcuuuug

SEQ ID NO: 3503946 - RNA, 23 nt, Human
cagguaccuugaccuuuguacag

SEQ ID NO: 3503947 - RNA, 22 nt, Human
cagguacgcacagacagguuuu

SEQ ID NO: 3503948 - RNA, 19 nt, Human
cagguagaacacaagguca

SEQ ID NO: 3503949 - RNA, 21 nt, Human
cagguagaacgccagggaccc

SEQ ID NO: 3503950 - RNA, 23 nt, Human
cagguagaauuaucuaauuuaua

SEQ ID NO: 3503951 - RNA, 16 nt, Human
cagguagcugccccug

SEQ ID NO: 3503952 - RNA, 20 nt, Human
cagguagcugccccuggcuc

SEQ ID NO: 3503953 - RNA, 22 nt, Human
cagguagcugccccuggcucug

SEQ ID NO: 3503954 - RNA, 19 nt, Human
cagguagcugggauuacag

SEQ ID NO: 3503955 - RNA, 13 nt, Human
cagguagggggga

SEQ ID NO: 3503956 - RNA, 14 nt, Human
cagguauaccucac

SEQ ID NO: 3503957 - RNA, 15 nt, Human
cagguaucuccagga

SEQ ID NO: 3503958 - RNA, 18 nt, Human
cagguaucuccaggauug

SEQ ID NO: 3503959 - RNA, 20 nt, Human
cagguauguugccuuuaugg

SEQ ID NO: 3503960 - RNA, 20 nt, Human
cagguauuuuguuucuuuua

SEQ ID NO: 3503961 - RNA, 12 nt, Human
caggucaacaga

SEQ ID NO: 3503962 - RNA, 23 nt, Human
caggucaacagaaugaaaaauga

SEQ ID NO: 3503963 - RNA, 20 nt, Human
caggucaggaguucgagacc

SEQ ID NO: 3503964 - RNA, 17 nt, Human
caggucaggggugacac

SEQ ID NO: 3503965 - RNA, 20 nt, Human
caggucaggggugacacaga

SEQ ID NO: 3503966 - RNA, 17 nt, Human
cagguccaaugagcuuu

SEQ ID NO: 3503967 - RNA, 19 nt, Human
cagguccaaugagcuuucu

SEQ ID NO: 3503968 - RNA, 15 nt, Human
cagguccagaugugc

SEQ ID NO: 3503969 - RNA, 23 nt, Human
cagguccagcucuggaggggagg

SEQ ID NO: 3503970 - RNA, 13 nt, Human
cagguccaggcug

SEQ ID NO: 3503971 - RNA, 23 nt, Human
caggucccaccuccagcccggga

SEQ ID NO: 3503972 - RNA, 13 nt, Human
cagguccccagac

SEQ ID NO: 3503973 - RNA, 18 nt, Human
cagguccccagcuuuggc

SEQ ID NO: 3503974 - RNA, 16 nt, Human
caggucccccugcagc

SEQ ID NO: 3503975 - RNA, 17 nt, Human
caggucccccugcagcu

SEQ ID NO: 3503976 - RNA, 12 nt, Human
cagguccccuca

SEQ ID NO: 3503977 - RNA, 15 nt, Human
caggucccuaauaaa

SEQ ID NO: 3503978 - RNA, 17 nt, Human
caggucccuaauaaagc

SEQ ID NO: 3503979 - RNA, 20 nt, Human
caggucccuaauaaagcugu

SEQ ID NO: 3503980 - RNA, 14 nt, Human
caggucccucucau

SEQ ID NO: 3503981 - RNA, 20 nt, Human
cagguccucagagaauuucu

SEQ ID NO: 3503982 - RNA, 21 nt, Human
cagguccugcagucuggcuga

SEQ ID NO: 3503983 - RNA, 20 nt, Human
cagguccugguggggcagcu

SEQ ID NO: 3503984 - RNA, 23 nt, Human
cagguccugguggggcagcuccu

SEQ ID NO: 3503985 - RNA, 13 nt, Human
caggucgggcuca

SEQ ID NO: 3503986 - RNA, 17 nt, Human
caggucgggcucagcuc

SEQ ID NO: 3503987 - RNA, 18 nt, Human
caggucgggcucagcucu

SEQ ID NO: 3503988 - RNA, 19 nt, Human
caggucgggcucagcucug

SEQ ID NO: 3503989 - RNA, 13 nt, Human
caggucucccacg

SEQ ID NO: 3503990 - RNA, 13 nt, Human
caggucucccggg

SEQ ID NO: 3503991 - RNA, 19 nt, Human
caggucuugaacuccuggc

SEQ ID NO: 3503992 - RNA, 13 nt, Human
caggucuuuccua

SEQ ID NO: 3503993 - RNA, 13 nt, Human
caggugaaaaugu

SEQ ID NO: 3503994 - RNA, 17 nt, Human
caggugaaaggaaauua

SEQ ID NO: 3503995 - RNA, 18 nt, Human
caggugaaggaggcucca

SEQ ID NO: 3503996 - RNA, 23 nt, Human
caggugaaggaggcuccaggcag

SEQ ID NO: 3503997 - RNA, 20 nt, Human
caggugacagugagguccug

SEQ ID NO: 3503998 - RNA, 18 nt, Human
caggugacaugugaaacc

SEQ ID NO: 3503999 - RNA, 19 nt, Human
caggugacugucuggggag

SEQ ID NO: 3504000 - RNA, 21 nt, Human
caggugagaagcagaggaagg

SEQ ID NO: 3504001 - RNA, 21 nt, Human
caggugagcaaccaguuggcu

SEQ ID NO: 3504002 - RNA, 15 nt, Human
caggugagcccaugg

SEQ ID NO: 3504003 - RNA, 17 nt, Human
caggugagcccauggcc

SEQ ID NO: 3504004 - RNA, 20 nt, Human
caggugagcccauggcccuc

SEQ ID NO: 3504005 - RNA, 20 nt, Human
caggugaguccuagagcuac

SEQ ID NO: 3504006 - RNA, 21 nt, Human
caggugauccacccaccucag

SEQ ID NO: 3504007 - RNA, 20 nt, Human
caggugauuggaccaggcca

SEQ ID NO: 3504008 - RNA, 21 nt, Human
caggugcacaagcuccaagcu

SEQ ID NO: 3504009 - RNA, 12 nt, Human
caggugcagagg

SEQ ID NO: 3504010 - RNA, 13 nt, Human
caggugcagaggu

SEQ ID NO: 3504011 - RNA, 15 nt, Human
caggugcagccagag

SEQ ID NO: 3504012 - RNA, 19 nt, Human
caggugcagccagaggcac

SEQ ID NO: 3504013 - RNA, 23 nt, Human
caggugcagcccccacugccuuu

SEQ ID NO: 3504014 - RNA, 15 nt, Human
caggugcaguggcuc

SEQ ID NO: 3504015 - RNA, 16 nt, Human
caggugccagccugag

SEQ ID NO: 3504016 - RNA, 14 nt, Human
caggugccuccagg

SEQ ID NO: 3504017 - RNA, 17 nt, Human
caggugccuccaggugu

SEQ ID NO: 3504018 - RNA, 17 nt, Human
caggugccuuucaaauu

SEQ ID NO: 3504019 - RNA, 23 nt, Human
caggugcuccccugacagucccu

SEQ ID NO: 3504020 - RNA, 13 nt, Human
caggugcugcuac

SEQ ID NO: 3504021 - RNA, 19 nt, Human
caggugcugcuacccuccc

SEQ ID NO: 3504022 - RNA, 22 nt, Human
caggugcugcuacccucccugc

SEQ ID NO: 3504023 - RNA, 15 nt, Human
caggugcuggagcac

SEQ ID NO: 3504024 - RNA, 21 nt, Human
caggugcuggagcacugggcu

SEQ ID NO: 3504025 - RNA, 22 nt, Human
caggugcuggagcacugggcuc

SEQ ID NO: 3504026 - RNA, 15 nt, Human
caggugcuggucccg

SEQ ID NO: 3504027 - RNA, 18 nt, Human
cagguggaaggcagacag

SEQ ID NO: 3504028 - RNA, 20 nt, Human
cagguggagguggcaucccc

SEQ ID NO: 3504029 - RNA, 15 nt, Human
cagguggccaugccu

SEQ ID NO: 3504030 - RNA, 15 nt, Human
cagguggcccuacug

SEQ ID NO: 3504031 - RNA, 20 nt, Human
cagguggcugacccaguccc

SEQ ID NO: 3504032 - RNA, 22 nt, Human
cagguggcugacccagucccug

SEQ ID NO: 3504033 - RNA, 16 nt, Human
caggugggcccucuga

SEQ ID NO: 3504034 - RNA, 17 nt, Human
caggugggcguggucac

SEQ ID NO: 3504035 - RNA, 19 nt, Human
caggugggcuucccagugg

SEQ ID NO: 3504036 - RNA, 23 nt, Human
cagguggggagacugggcugagg

SEQ ID NO: 3504037 - RNA, 21 nt, Human
cagguggggucacucuggcag

SEQ ID NO: 3504038 - RNA, 22 nt, Human
cagguggggucacucuggcagc

SEQ ID NO: 3504039 - RNA, 22 nt, Human
caggugggucccggcucugugg

SEQ ID NO: 3504040 - RNA, 19 nt, Human
caggugguggcacugagcc

SEQ ID NO: 3504041 - RNA, 20 nt, Human
caggugguggcacugagccc

SEQ ID NO: 3504042 - RNA, 18 nt, Human
cagguggugucacugucc

SEQ ID NO: 3504043 - RNA, 19 nt, Human
cagguggugucacuguccc

SEQ ID NO: 3504044 - RNA, 13 nt, Human
caggugguuuuua

SEQ ID NO: 3504045 - RNA, 19 nt, Human
cagguguccccagcccacu

SEQ ID NO: 3504046 - RNA, 19 nt, Human
caggugucccugcacuugc

SEQ ID NO: 3504047 - RNA, 21 nt, Human
caggugugagccaccacgccc

SEQ ID NO: 3504048 - RNA, 16 nt, Human
caggugugagucacca

SEQ ID NO: 3504049 - RNA, 20 nt, Human
caggugugagucaccaagcc

SEQ ID NO: 3504050 - RNA, 21 nt, Human
caggugugagucaccaagccc

SEQ ID NO: 3504051 - RNA, 23 nt, Human
caggugugagucaccaagcccag

SEQ ID NO: 3504052 - RNA, 23 nt, Human
caggugugcacguggcauguggc

SEQ ID NO: 3504053 - RNA, 18 nt, Human
caggugugccgacagaag

SEQ ID NO: 3504054 - RNA, 20 nt, Human
caggugugguguaauuuaua

SEQ ID NO: 3504055 - RNA, 20 nt, Human
cagguguguccaccugggca

SEQ ID NO: 3504056 - RNA, 18 nt, Human
cagguguuaacauuccaa

SEQ ID NO: 3504057 - RNA, 21 nt, Human
cagguguuuuuuaugaagugc

SEQ ID NO: 3504058 - RNA, 15 nt, Human
cagguuaaauguuuu

SEQ ID NO: 3504059 - RNA, 11 nt, Human
cagguuacaac

SEQ ID NO: 3504060 - RNA, 12 nt, Human
cagguuacaaca

SEQ ID NO: 3504061 - RNA, 16 nt, Human
cagguuauaacagugu

SEQ ID NO: 3504062 - RNA, 17 nt, Human
cagguuauaacaguguu

SEQ ID NO: 3504063 - RNA, 16 nt, Human
cagguuaucugggcau

SEQ ID NO: 3504064 - RNA, 22 nt, Human
cagguuauugcaauaaaguaua

SEQ ID NO: 3504065 - RNA, 14 nt, Human
cagguuauuuuagu

SEQ ID NO: 3504066 - RNA, 21 nt, Human
cagguuauuuuaguuucuguu

SEQ ID NO: 3504067 - RNA, 16 nt, Human
cagguucaacccacag

SEQ ID NO: 3504068 - RNA, 22 nt, Human
cagguucaagcgauucuccugc

SEQ ID NO: 3504069 - RNA, 20 nt, Human
cagguucacaggcgaggccu

SEQ ID NO: 3504070 - RNA, 22 nt, Human
cagguucauggauuacuucucu

SEQ ID NO: 3504071 - RNA, 14 nt, Human
cagguuccaucccg

SEQ ID NO: 3504072 - RNA, 17 nt, Human
cagguucccaagcucag

SEQ ID NO: 3504073 - RNA, 21 nt, Human
cagguucuauuuggaauuuau

SEQ ID NO: 3504074 - RNA, 23 nt, Human
cagguucugguuagcucagcccc

SEQ ID NO: 3504075 - RNA, 21 nt, Human
cagguucuuguuggugcacag

SEQ ID NO: 3504076 - RNA, 16 nt, Human
cagguugaagccaugu

SEQ ID NO: 3504077 - RNA, 17 nt, Human
cagguugcugguugcug

SEQ ID NO: 3504078 - RNA, 20 nt, Human
cagguugcugguugcugugu

SEQ ID NO: 3504079 - RNA, 22 nt, Human
cagguugcugguugcugugugg

SEQ ID NO: 3504080 - RNA, 13 nt, Human
cagguuggacccc

SEQ ID NO: 3504081 - RNA, 17 nt, Human
cagguuggcucugccag

SEQ ID NO: 3504082 - RNA, 18 nt, Human
cagguuggcucugccagu

SEQ ID NO: 3504083 - RNA, 23 nt, Human
cagguuggcucugccaguccugu

SEQ ID NO: 3504084 - RNA, 14 nt, Human
cagguugguggggg

SEQ ID NO: 3504085 - RNA, 18 nt, Human
cagguuguaguaaagaaa

SEQ ID NO: 3504086 - RNA, 22 nt, Human
cagguugucugaagucacugca

SEQ ID NO: 3504087 - RNA, 23 nt, Human
cagguugucugaagucacugcac

SEQ ID NO: 3504088 - RNA, 20 nt, Human
cagguuguuagaaaaaugga

SEQ ID NO: 3504089 - RNA, 16 nt, Human
cagguuguuggugacu

SEQ ID NO: 3504090 - RNA, 18 nt, Human
cagguuuaacauuugccu

SEQ ID NO: 3504091 - RNA, 22 nt, Human
cagguuucuaagcauaaaagau

SEQ ID NO: 3504092 - RNA, 18 nt, Human
cagguuugggaccccugg

SEQ ID NO: 3504093 - RNA, 17 nt, Human
cagguuugucaucagau

SEQ ID NO: 3504094 - RNA, 14 nt, Human
cagguuuguuacau

SEQ ID NO: 3504095 - RNA, 20 nt, Human
cagguuuucacauaaaugca

SEQ ID NO: 3504096 - RNA, 12 nt, Human
cagguuuuccug

SEQ ID NO: 3504097 - RNA, 18 nt, Human
cagguuuucuuuuaagaa

SEQ ID NO: 3504098 - RNA, 15 nt, Human
cagguuuuucaauua

SEQ ID NO: 3504099 - RNA, 19 nt, Human
cagguuuuucaauuaaacg

SEQ ID NO: 3504100 - RNA, 12 nt, Human
cagguuuuuccc

SEQ ID NO: 3504101 - RNA, 13 nt, Human
cagguuuuuccuu

SEQ ID NO: 3504102 - RNA, 15 nt, Human
cagguuuuuccuuuu

SEQ ID NO: 3504103 - RNA, 23 nt, Human
cagguuuuuggucugacccacug

SEQ ID NO: 3504104 - RNA, 21 nt, Human
caguaaaaaaugguguuuuau

SEQ ID NO: 3504105 - RNA, 20 nt, Human
caguaaaauagcugagggaa

SEQ ID NO: 3504106 - RNA, 12 nt, Human
caguaaacacug

SEQ ID NO: 3504107 - RNA, 14 nt, Human
caguaaacacugug

SEQ ID NO: 3504108 - RNA, 15 nt, Human
caguaaacacugugu

SEQ ID NO: 3504109 - RNA, 23 nt, Human
caguaaacgggaacaugcccccu

SEQ ID NO: 3504110 - RNA, 23 nt, Human
caguaaagaacaucccuccuggg

SEQ ID NO: 3504111 - RNA, 14 nt, Human
caguaaagagaaac

SEQ ID NO: 3504112 - RNA, 19 nt, Human
auuuuuauauuaguugcuu

SEQ ID NO: 3504113 - RNA, 14 nt, Human
auuuuuauauuuaa

SEQ ID NO: 3504114 - RNA, 15 nt, Human
auuuuuauauuuagu

SEQ ID NO: 3504115 - RNA, 15 nt, Human
auuuuuauauuugaa

SEQ ID NO: 3504116 - RNA, 18 nt, Human
auuuuuauccaaucuugu

SEQ ID NO: 3504117 - RNA, 19 nt, Human
auuuuuaucuauauaaaau

SEQ ID NO: 3504118 - RNA, 12 nt, Human
auuuuuaucuuu

SEQ ID NO: 3504119 - RNA, 15 nt, Human
auuuuuaucuuucgu

SEQ ID NO: 3504120 - RNA, 14 nt, Human
auuuuuauggaauu

SEQ ID NO: 3504121 - RNA, 15 nt, Human
auuuuuaugugugau

SEQ ID NO: 3504122 - RNA, 18 nt, Human
auuuuuauuacccuucuu

SEQ ID NO: 3504123 - RNA, 22 nt, Human
auuuuuauuaugcauaacugac

SEQ ID NO: 3504124 - RNA, 13 nt, Human
auuuuuauuuaug

SEQ ID NO: 3504125 - RNA, 14 nt, Human
auuuuuauuucuuu

SEQ ID NO: 3504126 - RNA, 21 nt, Human
auuuuuauuuuugcugagacu

SEQ ID NO: 3504127 - RNA, 20 nt, Human
auuuuucaacaaauaucuug

SEQ ID NO: 3504128 - RNA, 17 nt, Human
auuuuucaacuuugaau

SEQ ID NO: 3504129 - RNA, 21 nt, Human
auuuuucaauaaagcauuuau

SEQ ID NO: 3504130 - RNA, 20 nt, Human
auuuuucaauagcacauaug

SEQ ID NO: 3504131 - RNA, 22 nt, Human
auuuuucaauagcacauaugga

SEQ ID NO: 3504132 - RNA, 14 nt, Human
auuuuucaauauau

SEQ ID NO: 3504133 - RNA, 20 nt, Human
auuuuucaauauauugaacu

SEQ ID NO: 3504134 - RNA, 15 nt, Human
auuuuucacauaucu

SEQ ID NO: 3504135 - RNA, 15 nt, Human
auuuuucacuucaaa

SEQ ID NO: 3504136 - RNA, 17 nt, Human
auuuuucagagaauaga

SEQ ID NO: 3504137 - RNA, 14 nt, Human
auuuuucagaugcu

SEQ ID NO: 3504138 - RNA, 15 nt, Human
auuuuucagaugcuu

SEQ ID NO: 3504139 - RNA, 18 nt, Human
auuuuucagaugcuucug

SEQ ID NO: 3504140 - RNA, 18 nt, Human
auuuuucagcucucugua

SEQ ID NO: 3504141 - RNA, 12 nt, Human
auuuuucauauu

SEQ ID NO: 3504142 - RNA, 21 nt, Human
auuuuuccaacuacuaauaga

SEQ ID NO: 3504143 - RNA, 20 nt, Human
auuuuuccuccacugaacua

SEQ ID NO: 3504144 - RNA, 22 nt, Human
auuuuucggaggccccacugau

SEQ ID NO: 3504145 - RNA, 12 nt, Human
auuuuucuaaaa

SEQ ID NO: 3504146 - RNA, 17 nt, Human
auuuuucuaaaaaaaga

SEQ ID NO: 3504147 - RNA, 18 nt, Human
auuuuucuaaccuugaau

SEQ ID NO: 3504148 - RNA, 19 nt, Human
auuuuucucaguuuguaua

SEQ ID NO: 3504149 - RNA, 15 nt, Human
auuuuucucuccugu

SEQ ID NO: 3504150 - RNA, 19 nt, Human
auuuuucucuccuguccuc

SEQ ID NO: 3504151 - RNA, 13 nt, Human
auuuuucugcaga

SEQ ID NO: 3504152 - RNA, 15 nt, Human
auuuuucuuauuuca

SEQ ID NO: 3504153 - RNA, 19 nt, Human
auuuuucuuauuucauuuc

SEQ ID NO: 3504154 - RNA, 20 nt, Human
auuuuucuuauuucauuucu

SEQ ID NO: 3504155 - RNA, 15 nt, Human
auuuuucuuccagga

SEQ ID NO: 3504156 - RNA, 15 nt, Human
auuuuucuuuaacug

SEQ ID NO: 3504157 - RNA, 14 nt, Human
auuuuucuuuacaa

SEQ ID NO: 3504158 - RNA, 18 nt, Human
auuuuugaaacugcauuu

SEQ ID NO: 3504159 - RNA, 12 nt, Human
auuuuugacaga

SEQ ID NO: 3504160 - RNA, 18 nt, Human
auuuuugagcccuuguuu

SEQ ID NO: 3504161 - RNA, 19 nt, Human
auuuuugcaauaccaagua

SEQ ID NO: 3504162 - RNA, 14 nt, Human
auuuuugcaggagc

SEQ ID NO: 3504163 - RNA, 18 nt, Human
auuuuugccauacaucag

SEQ ID NO: 3504164 - RNA, 15 nt, Human
auuuuugccuucauu

SEQ ID NO: 3504165 - RNA, 17 nt, Human
auuuuuggagguuuauu

SEQ ID NO: 3504166 - RNA, 19 nt, Human
auuuuuggagguuuauuac

SEQ ID NO: 3504167 - RNA, 15 nt, Human
auuuuuggauugaca

SEQ ID NO: 3504168 - RNA, 22 nt, Human
auuuuuggugggugaaaggaau

SEQ ID NO: 3504169 - RNA, 19 nt, Human
auuuuugguugaauaaacu

SEQ ID NO: 3504170 - RNA, 18 nt, Human
auuuuuguaaaguuuccg

SEQ ID NO: 3504171 - RNA, 12 nt, Human
auuuuuguaaau

SEQ ID NO: 3504172 - RNA, 19 nt, Human
auuuuuguaaauguguaca

SEQ ID NO: 3504173 - RNA, 20 nt, Human
auuuuuguacaguuugcugu

SEQ ID NO: 3504174 - RNA, 20 nt, Human
auuuuuguagcacugacaga

SEQ ID NO: 3504175 - RNA, 13 nt, Human
caguagagccagc

SEQ ID NO: 3504176 - RNA, 15 nt, Human
caguagagccagcuu

SEQ ID NO: 3504177 - RNA, 15 nt, Human
caguagauugcagaa

SEQ ID NO: 3504178 - RNA, 16 nt, Human
caguagauugcagaaa

SEQ ID NO: 3504179 - RNA, 18 nt, Human
caguagauuuuccaaaug

SEQ ID NO: 3504180 - RNA, 13 nt, Human
caguagauuuucu

SEQ ID NO: 3504181 - RNA, 23 nt, Human
caguagcacaaguuauuuaaauc

SEQ ID NO: 3504182 - RNA, 18 nt, Human
caguagcaguagaugcau

SEQ ID NO: 3504183 - RNA, 14 nt, Human
caguagcugggacc

SEQ ID NO: 3504184 - RNA, 23 nt, Human
caguaggacaaggugcaggcagg

SEQ ID NO: 3504185 - RNA, 15 nt, Human
caguaggagcccagc

SEQ ID NO: 3504186 - RNA, 17 nt, Human
caguaggauaagccacu

SEQ ID NO: 3504187 - RNA, 12 nt, Human
caguaggggagg

SEQ ID NO: 3504188 - RNA, 20 nt, Human
caguagguuauuuagcuugg

SEQ ID NO: 3504189 - RNA, 16 nt, Human
caguagugagaagaau

SEQ ID NO: 3504190 - RNA, 14 nt, Human
caguaguucacaua

SEQ ID NO: 3504191 - RNA, 18 nt, Human
caguaguucucaaagugu

SEQ ID NO: 3504192 - RNA, 15 nt, Human
caguaguuugcauuu

SEQ ID NO: 3504193 - RNA, 18 nt, Human
caguauaaaauuacagug

SEQ ID NO: 3504194 - RNA, 13 nt, Human
caguauaaagaau

SEQ ID NO: 3504195 - RNA, 20 nt, Human
caguauaaccagcugaaguu

SEQ ID NO: 3504196 - RNA, 17 nt, Human
caguauaauuaacaugu

SEQ ID NO: 3504197 - RNA, 21 nt, Human
caguauaauuaacauguuaaa

SEQ ID NO: 3504198 - RNA, 19 nt, Human
caguauaauucuguacuga

SEQ ID NO: 3504199 - RNA, 23 nt, Human
caguauauguuaauuuguguguu

SEQ ID NO: 3504200 - RNA, 13 nt, Human
caguauauuuaua

SEQ ID NO: 3504201 - RNA, 17 nt, Human
caguauauuuuauuuca

SEQ ID NO: 3504202 - RNA, 20 nt, Human
caguauauuuuauuucaaug

SEQ ID NO: 3504203 - RNA, 13 nt, Human
caguaucaugccc

SEQ ID NO: 3504204 - RNA, 16 nt, Human
caguauccacuuugca

SEQ ID NO: 3504205 - RNA, 24 nt, Human
caguauccaugcucuugaccuugu

SEQ ID NO: 3504206 - RNA, 19 nt, Human
caguaucggcacuguacaa

SEQ ID NO: 3504207 - RNA, 20 nt, Human
caguaucggcacuguacaaa

SEQ ID NO: 3504208 - RNA, 21 nt, Human
caguaucuauauauguguaug

SEQ ID NO: 3504209 - RNA, 15 nt, Human
caguaucucagggcc

SEQ ID NO: 3504210 - RNA, 14 nt, Human
caguaucucuucag

SEQ ID NO: 3504211 - RNA, 13 nt, Human
caguaugaaaaua

SEQ ID NO: 3504212 - RNA, 20 nt, Human
caguaugagucaaugugcag

SEQ ID NO: 3504213 - RNA, 15 nt, Human
caguaugauuuauaa

SEQ ID NO: 3504214 - RNA, 17 nt, Human
caguaugcuugcucuaa

SEQ ID NO: 3504215 - RNA, 23 nt, Human
caguauggggguuguaaauuggc

SEQ ID NO: 3504216 - RNA, 17 nt, Human
caguauguauucuuuug

SEQ ID NO: 3504217 - RNA, 19 nt, Human
caguaugugggauauugaa

SEQ ID NO: 3504218 - RNA, 18 nt, Human
caguauguugucaaagag

SEQ ID NO: 3504219 - RNA, 16 nt, Human
caguauguuuuacacu

SEQ ID NO: 3504220 - RNA, 18 nt, Human
caguauguuuuacacugu

SEQ ID NO: 3504221 - RNA, 20 nt, Human
caguauuaauacuaaaauau

SEQ ID NO: 3504222 - RNA, 22 nt, Human
caguauuaauacuaaaauaugu

SEQ ID NO: 3504223 - RNA, 18 nt, Human
caguauuacuucugcuac

SEQ ID NO: 3504224 - RNA, 12 nt, Human
caguauuaugua

SEQ ID NO: 3504225 - RNA, 15 nt, Human
caguauucuagguag

SEQ ID NO: 3504226 - RNA, 19 nt, Human
caguauucuugucaaaaaa

SEQ ID NO: 3504227 - RNA, 12 nt, Human
caguauugaagc

SEQ ID NO: 3504228 - RNA, 15 nt, Human
caguauugaagcauu

SEQ ID NO: 3504229 - RNA, 16 nt, Human
caguauugaagcauuu

SEQ ID NO: 3504230 - RNA, 20 nt, Human
caguauugaagcauuuuaua

SEQ ID NO: 3504231 - RNA, 15 nt, Human
caguauugcucaccc

SEQ ID NO: 3504232 - RNA, 21 nt, Human
caguauugcucacccagugcc

SEQ ID NO: 3504233 - RNA, 13 nt, Human
caguauuguacaa

SEQ ID NO: 3504234 - RNA, 17 nt, Human
caguauuguacaaagua

SEQ ID NO: 3504235 - RNA, 18 nt, Human
caguauuguacaaaguau

SEQ ID NO: 3504236 - RNA, 13 nt, Human
caguauuuaacua

SEQ ID NO: 3504237 - RNA, 16 nt, Human
caguauuuaacuucug

SEQ ID NO: 3504238 - RNA, 11 nt, Human
caguauuucag

SEQ ID NO: 3504239 - RNA, 15 nt, Human
caguauuucagacug

SEQ ID NO: 3504240 - RNA, 14 nt, Human
caguauuuguaauu

SEQ ID NO: 3504241 - RNA, 23 nt, Human
caguauuuguaauuaaaagcaaa

SEQ ID NO: 3504242 - RNA, 14 nt, Human
caguauuuuggaga

SEQ ID NO: 3504243 - RNA, 19 nt, Human
cagucaaaacagagaugug

SEQ ID NO: 3504244 - RNA, 16 nt, Human
cagucaaccugggcaa

SEQ ID NO: 3504245 - RNA, 21 nt, Human
cagucaaccugggcaaagccu

SEQ ID NO: 3504246 - RNA, 13 nt, Human
cagucaagaagaa

SEQ ID NO: 3504247 - RNA, 20 nt, Human
cagucaagaagaaaaagguu

SEQ ID NO: 3504248 - RNA, 16 nt, Human
cagucaagcuguugaa

SEQ ID NO: 3504249 - RNA, 17 nt, Human
cagucaaggaguggcuu

SEQ ID NO: 3504250 - RNA, 13 nt, Human
cagucacagccac

SEQ ID NO: 3504251 - RNA, 14 nt, Human
cagucacagccacc

SEQ ID NO: 3504252 - RNA, 17 nt, Human
cagucaccccggccacc

SEQ ID NO: 3504253 - RNA, 20 nt, Human
cagucaccccggccaccugc

SEQ ID NO: 3504254 - RNA, 12 nt, Human
cagucacugcuc

SEQ ID NO: 3504255 - RNA, 23 nt, Human
cagucacuggagguugaagccaa

SEQ ID NO: 3504256 - RNA, 21 nt, Human
cagucacugucccucaaauga

SEQ ID NO: 3504257 - RNA, 22 nt, Human
cagucacuucggccagagcuga

SEQ ID NO: 3504258 - RNA, 14 nt, Human
caaggauccugagc

SEQ ID NO: 3504259 - RNA, 16 nt, Human
caaggauccugagcca

SEQ ID NO: 3504260 - RNA, 15 nt, Human
caaggauugaaaauu

SEQ ID NO: 3504261 - RNA, 19 nt, Human
caaggauugcuacuguccu

SEQ ID NO: 3504262 - RNA, 17 nt, Human
caaggcaaggcugucaa

SEQ ID NO: 3504263 - RNA, 20 nt, Human
caaggcaaggggugccuggg

SEQ ID NO: 3504264 - RNA, 13 nt, Human
caaggcaccugca

SEQ ID NO: 3504265 - RNA, 19 nt, Human
caaggcaccugcagguugg

SEQ ID NO: 3504266 - RNA, 12 nt, Human
caaggcacugcc

SEQ ID NO: 3504267 - RNA, 14 nt, Human
caaggcacugccug

SEQ ID NO: 3504268 - RNA, 20 nt, Human
caaggcacuugagggggaag

SEQ ID NO: 3504269 - RNA, 13 nt, Human
caaggcaggugcc

SEQ ID NO: 3504270 - RNA, 15 nt, Human
caaggcaggugccuc

SEQ ID NO: 3504271 - RNA, 17 nt, Human
caaggcaggugccucca

SEQ ID NO: 3504272 - RNA, 18 nt, Human
caaggcaggugccuccag

SEQ ID NO: 3504273 - RNA, 19 nt, Human
caaggcaggugccuccagg

SEQ ID NO: 3504274 - RNA, 16 nt, Human
caaggccaaaggaagc

SEQ ID NO: 3504275 - RNA, 20 nt, Human
caaggccaaaggaagcacau

SEQ ID NO: 3504276 - RNA, 20 nt, Human
caaggccaccucuuccuggc

SEQ ID NO: 3504277 - RNA, 21 nt, Human
caaggccaccucuuccuggcc

SEQ ID NO: 3504278 - RNA, 19 nt, Human
caaggccagcaagguggag

SEQ ID NO: 3504279 - RNA, 17 nt, Human
caaggccccagagacuc

SEQ ID NO: 3504280 - RNA, 21 nt, Human
caaggccccagagacucagag

SEQ ID NO: 3504281 - RNA, 22 nt, Human
caaggcccccgggccgacggag

SEQ ID NO: 3504282 - RNA, 20 nt, Human
caaggcccccugccugcccu

SEQ ID NO: 3504283 - RNA, 13 nt, Human
caaggcccgagca

SEQ ID NO: 3504284 - RNA, 16 nt, Human
caaggcccgagcagcu

SEQ ID NO: 3504285 - RNA, 17 nt, Human
caaggcccugcugccca

SEQ ID NO: 3504286 - RNA, 17 nt, Human
caaggccgaagcucugg

SEQ ID NO: 3504287 - RNA, 20 nt, Human
caaggccgcuguucacccac

SEQ ID NO: 3504288 - RNA, 16 nt, Human
caaggccucccacagu

SEQ ID NO: 3504289 - RNA, 18 nt, Human
caaggccucccacaguga

SEQ ID NO: 3504290 - RNA, 16 nt, Human
caaggccugucccugg

SEQ ID NO: 3504291 - RNA, 22 nt, Human
caaggccuuauuggaaagcagu

SEQ ID NO: 3504292 - RNA, 15 nt, Human
caaggcggccccucc

SEQ ID NO: 3504293 - RNA, 19 nt, Human
caaggcguccgcgcgccag

SEQ ID NO: 3504294 - RNA, 22 nt, Human
caaggcguccgcgcgccagcac

SEQ ID NO: 3504295 - RNA, 16 nt, Human
caaggcgugaggaugg

SEQ ID NO: 3504296 - RNA, 21 nt, Human
caaggcugaccaagagagaaa

SEQ ID NO: 3504297 - RNA, 17 nt, Human
caaggcugcagugagcc

SEQ ID NO: 3504298 - RNA, 18 nt, Human
caaggcugcgguuuguug

SEQ ID NO: 3504299 - RNA, 14 nt, Human
caaggcugcgucug

SEQ ID NO: 3504300 - RNA, 16 nt, Human
caaggcugcuuagaau

SEQ ID NO: 3504301 - RNA, 15 nt, Human
caaggcugugcaucu

SEQ ID NO: 3504302 - RNA, 18 nt, Human
caaggcugugcucccugg

SEQ ID NO: 3504303 - RNA, 14 nt, Human
caaggcuguugcau

SEQ ID NO: 3504304 - RNA, 15 nt, Human
caaggcuuagacccu

SEQ ID NO: 3504305 - RNA, 18 nt, Human
caaggcuuagacccucau

SEQ ID NO: 3504306 - RNA, 18 nt, Human
caaggcuuauauucaacc

SEQ ID NO: 3504307 - RNA, 15 nt, Human
caaggcuugcugcag

SEQ ID NO: 3504308 - RNA, 21 nt, Human
caagggaaaggggugcuuuua

SEQ ID NO: 3504309 - RNA, 19 nt, Human
caagggacaaggacacgcg

SEQ ID NO: 3504310 - RNA, 14 nt, Human
caagggagagaccu

SEQ ID NO: 3504311 - RNA, 15 nt, Human
caagggagagaccuc

SEQ ID NO: 3504312 - RNA, 19 nt, Human
caagggagagaccucauca

SEQ ID NO: 3504313 - RNA, 20 nt, Human
caagggagagaccucaucag

SEQ ID NO: 3504314 - RNA, 15 nt, Human
caagggaggcccagc

SEQ ID NO: 3504315 - RNA, 16 nt, Human
caagggaggcccagcg

SEQ ID NO: 3504316 - RNA, 21 nt, Human
caagggaucugguccuaccca

SEQ ID NO: 3504317 - RNA, 22 nt, Human
caagggaugaauuguaaaagca

SEQ ID NO: 3504318 - RNA, 17 nt, Human
caauuugucauuuugaa

SEQ ID NO: 3504319 - RNA, 18 nt, Human
caauuuguuugugcuucu

SEQ ID NO: 3504320 - RNA, 13 nt, Human
caauuuuaaagac

SEQ ID NO: 3504321 - RNA, 20 nt, Human
caauuuuaacacacauaaag

SEQ ID NO: 3504322 - RNA, 18 nt, Human
caauuuuaauuuaguaaa

SEQ ID NO: 3504323 - RNA, 23 nt, Human
caauuuuaauuuaguaaauguua

SEQ ID NO: 3504324 - RNA, 21 nt, Human
caauuuuaucccucaccugua

SEQ ID NO: 3504325 - RNA, 12 nt, Human
caauuuucaggu

SEQ ID NO: 3504326 - RNA, 11 nt, Human
caauuuuccuu

SEQ ID NO: 3504327 - RNA, 13 nt, Human
caauuuuccuuga

SEQ ID NO: 3504328 - RNA, 14 nt, Human
caauuuuccuugaa

SEQ ID NO: 3504329 - RNA, 19 nt, Human
caauuuuccuugaagccga

SEQ ID NO: 3504330 - RNA, 14 nt, Human
caauuuuguuucug

SEQ ID NO: 3504331 - RNA, 12 nt, Human
caauuuuuaaug

SEQ ID NO: 3504332 - RNA, 13 nt, Human
caauuuuuauauu

SEQ ID NO: 3504333 - RNA, 11 nt, Human
caauuuuucca

SEQ ID NO: 3504334 - RNA, 22 nt, Human
caauuuuucuuauuucauuucu

SEQ ID NO: 3504335 - RNA, 15 nt, Human
caauuuuugccuuca

SEQ ID NO: 3504336 - RNA, 21 nt, Human
caauuuuuuaucaugcauguc

SEQ ID NO: 3504337 - RNA, 18 nt, Human
caauuuuuuguucuucag

SEQ ID NO: 3504338 - RNA, 20 nt, Human
caauuuuuuuuauuaguauu

SEQ ID NO: 3504339 - RNA, 22 nt, Human
cacaaaaaaaguugaaggccuu

SEQ ID NO: 3504340 - RNA, 22 nt, Human
cacaaaaagauaccuuaaaauu

SEQ ID NO: 3504341 - RNA, 14 nt, Human
cacaaaaauguuga

SEQ ID NO: 3504342 - RNA, 16 nt, Human
cacaaaaauguugaac

SEQ ID NO: 3504343 - RNA, 19 nt, Human
cacaaaaauguugaaccaa

SEQ ID NO: 3504344 - RNA, 22 nt, Human
cacaaaacaaaugccacacauc

SEQ ID NO: 3504345 - RNA, 13 nt, Human
cacaaaacagccu

SEQ ID NO: 3504346 - RNA, 22 nt, Human
cacaaaacuccgcccccagccu

SEQ ID NO: 3504347 - RNA, 14 nt, Human
cacaaaagccucuc

SEQ ID NO: 3504348 - RNA, 15 nt, Human
cacaaaauauacaaa

SEQ ID NO: 3504349 - RNA, 13 nt, Human
cacaaaauucaaa

SEQ ID NO: 3504350 - RNA, 20 nt, Human
cacaaaauucgaccugauuu

SEQ ID NO: 3504351 - RNA, 14 nt, Human
cacaaacaaacaag

SEQ ID NO: 3504352 - RNA, 18 nt, Human
cacaaacaaacaagcuag

SEQ ID NO: 3504353 - RNA, 16 nt, Human
cacaaacacaagguca

SEQ ID NO: 3504354 - RNA, 21 nt, Human
cacaaacacauuguuauuuuc

SEQ ID NO: 3504355 - RNA, 12 nt, Human
cacaaacauuuu

SEQ ID NO: 3504356 - RNA, 13 nt, Human
cacaaacauuuuu

SEQ ID NO: 3504357 - RNA, 15 nt, Human
cacaaacauuuuuca

SEQ ID NO: 3504358 - RNA, 18 nt, Human
cacaaaccacaacugaca

SEQ ID NO: 3504359 - RNA, 19 nt, Human
cacaaaccacaacugacac

SEQ ID NO: 3504360 - RNA, 15 nt, Human
cacaaaccugccugg

SEQ ID NO: 3504361 - RNA, 17 nt, Human
cacaaacgggcucagca

SEQ ID NO: 3504362 - RNA, 22 nt, Human
cacaaacguauguaaauguaua

SEQ ID NO: 3504363 - RNA, 22 nt, Human
cacaaacugcuuccuuucuuga

SEQ ID NO: 3504364 - RNA, 12 nt, Human
cacaaacuguaa

SEQ ID NO: 3504365 - RNA, 13 nt, Human
cacaaacuguaaa

SEQ ID NO: 3504366 - RNA, 14 nt, Human
cacaaacuguaaau

SEQ ID NO: 3504367 - RNA, 15 nt, Human
cacaaacuguaaaua

SEQ ID NO: 3504368 - RNA, 23 nt, Human
cacaaacuguaaauaaaaagaaa

SEQ ID NO: 3504369 - RNA, 19 nt, Human
cacaaacuuuuauacucuu

SEQ ID NO: 3504370 - RNA, 18 nt, Human
cacaaagagaaaaagaaa

SEQ ID NO: 3504371 - RNA, 15 nt, Human
cacaaagaguucugg

SEQ ID NO: 3504372 - RNA, 22 nt, Human
cacaaagcacaguuugaacaaa

SEQ ID NO: 3504373 - RNA, 15 nt, Human
cacaaagcagauccu

SEQ ID NO: 3504374 - RNA, 20 nt, Human
cacaaaggcaaaggguccag

SEQ ID NO: 3504375 - RNA, 13 nt, Human
cacaaagggccca

SEQ ID NO: 3504376 - RNA, 15 nt, Human
cacaaagggcccaga

SEQ ID NO: 3504377 - RNA, 17 nt, Human
cacaaauauuaaaaagu

SEQ ID NO: 3504378 - RNA, 13 nt, Human
cacaaaugacuuu

SEQ ID NO: 3504379 - RNA, 14 nt, Human
cacaaauuaguuau

SEQ ID NO: 3504380 - RNA, 20 nt, Human
cacaaauuaugcuaagaauu

SEQ ID NO: 3504381 - RNA, 22 nt, Human
cacaacaaaaauuugaaccaaa

SEQ ID NO: 3504382 - RNA, 11 nt, Human
cacaacagauu

SEQ ID NO: 3504383 - RNA, 19 nt, Human
cacaacauuugcagauguu

SEQ ID NO: 3504384 - RNA, 23 nt, Human
cacaaccaccguuacaaguauac

SEQ ID NO: 3504385 - RNA, 20 nt, Human
cacaacccaucuaccccugg

SEQ ID NO: 3504386 - RNA, 14 nt, Human
cacaacccccagcu

SEQ ID NO: 3504387 - RNA, 17 nt, Human
cacaacccuguuuuaua

SEQ ID NO: 3504388 - RNA, 15 nt, Human
cacaaccugcaucuu

SEQ ID NO: 3504389 - RNA, 17 nt, Human
cacaaccuucuguggcu

SEQ ID NO: 3504390 - RNA, 18 nt, Human
cacaaccuucuguggcuc

SEQ ID NO: 3504391 - RNA, 19 nt, Human
cacaaccuucuguggcuca

SEQ ID NO: 3504392 - RNA, 16 nt, Human
cacaacgugcaacuga

SEQ ID NO: 3504393 - RNA, 19 nt, Human
cacaacgugcauugugcuu

SEQ ID NO: 3504394 - RNA, 22 nt, Human
cacaacucacuccuuuuaaaga

SEQ ID NO: 3504395 - RNA, 12 nt, Human
cacaacugacac

SEQ ID NO: 3504396 - RNA, 13 nt, Human
cacaacugacaca

SEQ ID NO: 3504397 - RNA, 20 nt, Human
cacaacugcaauaacuucug

SEQ ID NO: 3504398 - RNA, 21 nt, Human
cacaacugcaauaacuucuga

SEQ ID NO: 3504399 - RNA, 19 nt, Human
cacaacugugugauuaaaa

SEQ ID NO: 3504400 - RNA, 13 nt, Human
cacaacuuaaaaa

SEQ ID NO: 3504401 - RNA, 17 nt, Human
cacaacuuaguguaaua

SEQ ID NO: 3504402 - RNA, 12 nt, Human
cacaacuuguuu

SEQ ID NO: 3504403 - RNA, 21 nt, Human
caauaaaaugugauuuuucug

SEQ ID NO: 3504404 - RNA, 22 nt, Human
caauaaaaugugauuuuucuga

SEQ ID NO: 3504405 - RNA, 13 nt, Human
caauaaaauuaua

SEQ ID NO: 3504406 - RNA, 20 nt, Human
caauaaaauuuuuuuggucu

SEQ ID NO: 3504407 - RNA, 19 nt, Human
caauaaaauuuuuuuucau

SEQ ID NO: 3504408 - RNA, 21 nt, Human
caauaaacaacagcugaagca

SEQ ID NO: 3504409 - RNA, 19 nt, Human
caauaaaccaaugaacgaa

SEQ ID NO: 3504410 - RNA, 13 nt, Human
caauaaaccaggu

SEQ ID NO: 3504411 - RNA, 23 nt, Human
caauaaaccagguuuagacagua

SEQ ID NO: 3504412 - RNA, 23 nt, Human
caauaaaccuccgccaaugcacg

SEQ ID NO: 3504413 - RNA, 16 nt, Human
caauaaacgauuuaau

SEQ ID NO: 3504414 - RNA, 12 nt, Human
caauaaagaaaa

SEQ ID NO: 3504415 - RNA, 22 nt, Human
caauaaagaguuagaaugaaaa

SEQ ID NO: 3504416 - RNA, 15 nt, Human
caauaaagcugcuga

SEQ ID NO: 3504417 - RNA, 23 nt, Human
caauaaagcugcugagaaucuag

SEQ ID NO: 3504418 - RNA, 16 nt, Human
caauaaaguauaaugu

SEQ ID NO: 3504419 - RNA, 20 nt, Human
caauaaaguauaauguuuau

SEQ ID NO: 3504420 - RNA, 12 nt, Human
caauaaaguauc

SEQ ID NO: 3504421 - RNA, 14 nt, Human
caauaaagugaccc

SEQ ID NO: 3504422 - RNA, 13 nt, Human
caauaaaguuuga

SEQ ID NO: 3504423 - RNA, 14 nt, Human
caauaaaguuugau

SEQ ID NO: 3504424 - RNA, 13 nt, Human
caauaaauagaca

SEQ ID NO: 3504425 - RNA, 17 nt, Human
caauaaauagacacgca

SEQ ID NO: 3504426 - RNA, 18 nt, Human
caauaaaucugacccagu

SEQ ID NO: 3504427 - RNA, 20 nt, Human
caauaaaucugacccagugc

SEQ ID NO: 3504428 - RNA, 12 nt, Human
caauaaaugaau

SEQ ID NO: 3504429 - RNA, 15 nt, Human
caauaaauggcugua

SEQ ID NO: 3504430 - RNA, 14 nt, Human
caauaaauuuugaa

SEQ ID NO: 3504431 - RNA, 16 nt, Human
caauaaauuuugaaaa

SEQ ID NO: 3504432 - RNA, 17 nt, Human
caauaaauuuugaaaag

SEQ ID NO: 3504433 - RNA, 22 nt, Human
caauaaauuuugaaaaguaaua

SEQ ID NO: 3504434 - RNA, 13 nt, Human
caauaacagcugc

SEQ ID NO: 3504435 - RNA, 21 nt, Human
caauaacuacuguguuccugg

SEQ ID NO: 3504436 - RNA, 16 nt, Human
caauaacuucugaccu

SEQ ID NO: 3504437 - RNA, 18 nt, Human
caauaagaacaaauacaa

SEQ ID NO: 3504438 - RNA, 19 nt, Human
caauaagcaucaaacucuu

SEQ ID NO: 3504439 - RNA, 17 nt, Human
caauaaggucaaugcca

SEQ ID NO: 3504440 - RNA, 21 nt, Human
caauaagugugugguagaaac

SEQ ID NO: 3504441 - RNA, 24 nt, Human
caauaauaaaaaauauucuuguca

SEQ ID NO: 3504442 - RNA, 18 nt, Human
caauaauaauaccucccu

SEQ ID NO: 3504443 - RNA, 17 nt, Human
caauaauauauuuucug

SEQ ID NO: 3504444 - RNA, 23 nt, Human
caauaauauuguuguauaauuuc

SEQ ID NO: 3504445 - RNA, 13 nt, Human
caauaaugcagua

SEQ ID NO: 3504446 - RNA, 23 nt, Human
caauaaugcaguaugguacauuu

SEQ ID NO: 3504447 - RNA, 23 nt, Human
caauaauggaaaaaaaaaaaaga

SEQ ID NO: 3504448 - RNA, 17 nt, Human
caauaauggucccaucc

SEQ ID NO: 3504449 - RNA, 19 nt, Human
caauaauggucccauccag

SEQ ID NO: 3504450 - RNA, 20 nt, Human
caauaauggucccauccagg

SEQ ID NO: 3504451 - RNA, 13 nt, Human
caauacaaaugga

SEQ ID NO: 3504452 - RNA, 16 nt, Human
caauacaaguuucauc

SEQ ID NO: 3504453 - RNA, 21 nt, Human
caauacaaguuucauccagaa

SEQ ID NO: 3504454 - RNA, 13 nt, Human
caauacagauaua

SEQ ID NO: 3504455 - RNA, 16 nt, Human
caauacagauauauuu

SEQ ID NO: 3504456 - RNA, 17 nt, Human
caauacaguacaggcag

SEQ ID NO: 3504457 - RNA, 18 nt, Human
caauacaguacaggcagc

SEQ ID NO: 3504458 - RNA, 23 nt, Human
caauacaucccuuaccugggaaa

SEQ ID NO: 3504459 - RNA, 14 nt, Human
caauaccccaugga

SEQ ID NO: 3504460 - RNA, 17 nt, Human
caauaccugaaugcucu

SEQ ID NO: 3504461 - RNA, 17 nt, Human
caauacuagucacccca

SEQ ID NO: 3504462 - RNA, 16 nt, Human
caauagacacauacau

SEQ ID NO: 3504463 - RNA, 15 nt, Human
caauagagacuguag

SEQ ID NO: 3504464 - RNA, 16 nt, Human
caauagagacuguaga

SEQ ID NO: 3504465 - RNA, 16 nt, Human
caauagaucuccagcg

SEQ ID NO: 3504466 - RNA, 19 nt, Human
caauagauugcucaaauca

SEQ ID NO: 3504467 - RNA, 19 nt, Human
caauagcaacguagcuucu

SEQ ID NO: 3504468 - RNA, 17 nt, Human
caauagcacauauggaa

SEQ ID NO: 3504469 - RNA, 20 nt, Human
caauagcacuuucauugcca

SEQ ID NO: 3504470 - RNA, 21 nt, Human
caauagcacuuucauugccag

SEQ ID NO: 3504471 - RNA, 19 nt, Human
caauagcagacaguguuuu

SEQ ID NO: 3504472 - RNA, 21 nt, Human
caauagcccaggauauauuuu

SEQ ID NO: 3504473 - RNA, 23 nt, Human
caauagccgauaucagaauuugu

SEQ ID NO: 3504474 - RNA, 16 nt, Human
caauagcguguguaga

SEQ ID NO: 3504475 - RNA, 15 nt, Human
caauaggaaaaacug

SEQ ID NO: 3504476 - RNA, 16 nt, Human
caauaggaaaaacuga

SEQ ID NO: 3504477 - RNA, 15 nt, Human
caauagguaaagcua

SEQ ID NO: 3504478 - RNA, 17 nt, Human
caauagucaaauugugu

SEQ ID NO: 3504479 - RNA, 19 nt, Human
caauagucaaauuguguga

SEQ ID NO: 3504480 - RNA, 22 nt, Human
caauaguguccuaugcaauaaa

SEQ ID NO: 3504481 - RNA, 15 nt, Human
caauaguguguucug

SEQ ID NO: 3504482 - RNA, 17 nt, Human
caauaguguguucugau

SEQ ID NO: 3504483 - RNA, 23 nt, Human
caauaguguguucugauuagaaa

SEQ ID NO: 3504484 - RNA, 22 nt, Human
caauaguucaaggaacuugaaa

SEQ ID NO: 3504485 - RNA, 22 nt, Human
caauauaaaacuguacuucacu

SEQ ID NO: 3504486 - RNA, 14 nt, Human
caauauaagagcuu

SEQ ID NO: 3504487 - RNA, 20 nt, Human
caauauagaaaaauaaaaau

SEQ ID NO: 3504488 - RNA, 16 nt, Human
cacacuuccaccagcc

SEQ ID NO: 3504489 - RNA, 14 nt, Human
cacacuucucagga

SEQ ID NO: 3504490 - RNA, 23 nt, Human
cacacuucucaggacacaggccu

SEQ ID NO: 3504491 - RNA, 22 nt, Human
cacacuucugugagacccccac

SEQ ID NO: 3504492 - RNA, 21 nt, Human
cacacuugacaucaacugcau

SEQ ID NO: 3504493 - RNA, 21 nt, Human
cacacuuggcccaaguggcag

SEQ ID NO: 3504494 - RNA, 22 nt, Human
cacacuuguaggauaagugaaa

SEQ ID NO: 3504495 - RNA, 17 nt, Human
cacacuugucggcucca

SEQ ID NO: 3504496 - RNA, 23 nt, Human
cacacuugucggcuccagucccc

SEQ ID NO: 3504497 - RNA, 16 nt, Human
cacacuuguuccagcu

SEQ ID NO: 3504498 - RNA, 19 nt, Human
cacacuuguuccagcucuu

SEQ ID NO: 3504499 - RNA, 15 nt, Human
cacacuuuggcccag

SEQ ID NO: 3504500 - RNA, 14 nt, Human
cacagaaaacuaga

SEQ ID NO: 3504501 - RNA, 13 nt, Human
cacagaaaagcau

SEQ ID NO: 3504502 - RNA, 14 nt, Human
cacagaaaagcaua

SEQ ID NO: 3504503 - RNA, 15 nt, Human
cacagaaaauauacu

SEQ ID NO: 3504504 - RNA, 16 nt, Human
cacagaaacacugccu

SEQ ID NO: 3504505 - RNA, 19 nt, Human
cacagaaacacugccuuuu

SEQ ID NO: 3504506 - RNA, 20 nt, Human
cacagaaacacugccuuuuu

SEQ ID NO: 3504507 - RNA, 22 nt, Human
cacagaaagacugagcucaagg

SEQ ID NO: 3504508 - RNA, 12 nt, Human
cacagaaagccu

SEQ ID NO: 3504509 - RNA, 18 nt, Human
cacagaaagccuaucaaa

SEQ ID NO: 3504510 - RNA, 12 nt, Human
cacagaaauaua

SEQ ID NO: 3504511 - RNA, 13 nt, Human
cacagaaauauau

SEQ ID NO: 3504512 - RNA, 14 nt, Human
cacagaaaugcugc

SEQ ID NO: 3504513 - RNA, 19 nt, Human
cacagaaaugcugcuggcc

SEQ ID NO: 3504514 - RNA, 22 nt, Human
cacagaaaugcugcuggccaaa

SEQ ID NO: 3504515 - RNA, 20 nt, Human
cacagaagacuucccagcuu

SEQ ID NO: 3504516 - RNA, 13 nt, Human
cacagaagaugaa

SEQ ID NO: 3504517 - RNA, 16 nt, Human
cacagaagccaggagc

SEQ ID NO: 3504518 - RNA, 19 nt, Human
cacagaaggggacugccac

SEQ ID NO: 3504519 - RNA, 19 nt, Human
cacagaagugcuuucuucu

SEQ ID NO: 3504520 - RNA, 13 nt, Human
cacagacacacac

SEQ ID NO: 3504521 - RNA, 18 nt, Human
cacagacacacacacgca

SEQ ID NO: 3504522 - RNA, 22 nt, Human
cacagacacuaacgaaauauca

SEQ ID NO: 3504523 - RNA, 15 nt, Human
cacagacaggacccc

SEQ ID NO: 3504524 - RNA, 21 nt, Human
cacagacagguuuucacauaa

SEQ ID NO: 3504525 - RNA, 19 nt, Human
cacagacauacuaaccagc

SEQ ID NO: 3504526 - RNA, 20 nt, Human
cacagacauucugccaggcc

SEQ ID NO: 3504527 - RNA, 14 nt, Human
cacagacccugccc

SEQ ID NO: 3504528 - RNA, 16 nt, Human
cacagaccuggagccc

SEQ ID NO: 3504529 - RNA, 22 nt, Human
cacagaccuggagccccugggu

SEQ ID NO: 3504530 - RNA, 23 nt, Human
cacagaccuggagccccugggug

SEQ ID NO: 3504531 - RNA, 19 nt, Human
cacagacgccuuacuggca

SEQ ID NO: 3504532 - RNA, 23 nt, Human
cacagacggaaggguaaacaaua

SEQ ID NO: 3504533 - RNA, 20 nt, Human
cacagacuggagacaaugca

SEQ ID NO: 3504534 - RNA, 23 nt, Human
cacagacuguugucccugcacuc

SEQ ID NO: 3504535 - RNA, 22 nt, Human
cacagagaagacaaaauuagca

SEQ ID NO: 3504536 - RNA, 16 nt, Human
cacagagacauuccuc

SEQ ID NO: 3504537 - RNA, 14 nt, Human
cacagagacccccg

SEQ ID NO: 3504538 - RNA, 18 nt, Human
cacagagagggagagcag

SEQ ID NO: 3504539 - RNA, 10 nt, Human
cacagagagu

SEQ ID NO: 3504540 - RNA, 12 nt, Human
cacagagagucc

SEQ ID NO: 3504541 - RNA, 17 nt, Human
cacagagauucugaacu

SEQ ID NO: 3504542 - RNA, 21 nt, Human
cacagagcacuagguucaauu

SEQ ID NO: 3504543 - RNA, 20 nt, Human
cacagagccaaauugguaga

SEQ ID NO: 3504544 - RNA, 14 nt, Human
cacagagcggggac

SEQ ID NO: 3504545 - RNA, 13 nt, Human
cacagaggaagag

SEQ ID NO: 3504546 - RNA, 19 nt, Human
cacagaggacacagagaag

SEQ ID NO: 3504547 - RNA, 19 nt, Human
caccaacccaucagaagga

SEQ ID NO: 3504548 - RNA, 16 nt, Human
caccaacccucagggc

SEQ ID NO: 3504549 - RNA, 15 nt, Human
caccaacuuacaaaa

SEQ ID NO: 3504550 - RNA, 22 nt, Human
caccaagacuuguuuuaugcuc

SEQ ID NO: 3504551 - RNA, 13 nt, Human
caccaagcacagc

SEQ ID NO: 3504552 - RNA, 15 nt, Human
caccaagcacagcag

SEQ ID NO: 3504553 - RNA, 17 nt, Human
caccaagcacagcagcc

SEQ ID NO: 3504554 - RNA, 23 nt, Human
caccaagcccacaggugucccca

SEQ ID NO: 3504555 - RNA, 16 nt, Human
caccaagccuggucag

SEQ ID NO: 3504556 - RNA, 13 nt, Human
caccaagccuuga

SEQ ID NO: 3504557 - RNA, 15 nt, Human
caccaagcucacagu

SEQ ID NO: 3504558 - RNA, 19 nt, Human
caccaagcucacaguuccu

SEQ ID NO: 3504559 - RNA, 13 nt, Human
caccaagcugcug

SEQ ID NO: 3504560 - RNA, 14 nt, Human
caccaagcugugcc

SEQ ID NO: 3504561 - RNA, 18 nt, Human
caccaagcugugccaccc

SEQ ID NO: 3504562 - RNA, 20 nt, Human
caccaagcugugccacccug

SEQ ID NO: 3504563 - RNA, 11 nt, Human
caccaaggaaa

SEQ ID NO: 3504564 - RNA, 12 nt, Human
caccaaggaaac

SEQ ID NO: 3504565 - RNA, 19 nt, Human
caccaagggcgcaagagua

SEQ ID NO: 3504566 - RNA, 21 nt, Human
caccaaggucuucagccauca

SEQ ID NO: 3504567 - RNA, 22 nt, Human
caccaagugcggguccggcagc

SEQ ID NO: 3504568 - RNA, 22 nt, Human
caccaauguacccaccgggcca

SEQ ID NO: 3504569 - RNA, 23 nt, Human
caccaauguuucaagaggagccc

SEQ ID NO: 3504570 - RNA, 18 nt, Human
caccaauugauuuuaaac

SEQ ID NO: 3504571 - RNA, 12 nt, Human
caccacaaaaua

SEQ ID NO: 3504572 - RNA, 12 nt, Human
caccacacacaa

SEQ ID NO: 3504573 - RNA, 13 nt, Human
caccacacacaac

SEQ ID NO: 3504574 - RNA, 16 nt, Human
caccacacaucccagc

SEQ ID NO: 3504575 - RNA, 19 nt, Human
caccacacccagcccacuu

SEQ ID NO: 3504576 - RNA, 19 nt, Human
caccacacugauccagccc

SEQ ID NO: 3504577 - RNA, 16 nt, Human
caccacagacacacac

SEQ ID NO: 3504578 - RNA, 21 nt, Human
caccacagacacacacacgca

SEQ ID NO: 3504579 - RNA, 17 nt, Human
caccacagccagcaccu

SEQ ID NO: 3504580 - RNA, 17 nt, Human
caccacaguaaguuccu

SEQ ID NO: 3504581 - RNA, 18 nt, Human
caccacaugugcacaugc

SEQ ID NO: 3504582 - RNA, 21 nt, Human
caccaccaaaugccaagaaaa

SEQ ID NO: 3504583 - RNA, 13 nt, Human
caccaccacaccc

SEQ ID NO: 3504584 - RNA, 14 nt, Human
caccaccaccccua

SEQ ID NO: 3504585 - RNA, 18 nt, Human
caccaccacgguggucac

SEQ ID NO: 3504586 - RNA, 13 nt, Human
caccaccacuggc

SEQ ID NO: 3504587 - RNA, 15 nt, Human
caccaccacuggcca

SEQ ID NO: 3504588 - RNA, 16 nt, Human
caccaccccaacaaac

SEQ ID NO: 3504589 - RNA, 14 nt, Human
caccaccccccacu

SEQ ID NO: 3504590 - RNA, 22 nt, Human
caccacccuagucccuuccccu

SEQ ID NO: 3504591 - RNA, 13 nt, Human
caccaccucagag

SEQ ID NO: 3504592 - RNA, 13 nt, Human
caccaccucugug

SEQ ID NO: 3504593 - RNA, 14 nt, Human
caccaccucugugg

SEQ ID NO: 3504594 - RNA, 13 nt, Human
caccaccuuccca

SEQ ID NO: 3504595 - RNA, 16 nt, Human
caccaccuucccagcu

SEQ ID NO: 3504596 - RNA, 18 nt, Human
caccaccuucuucuccua

SEQ ID NO: 3504597 - RNA, 20 nt, Human
caccacgauguggcccuggc

SEQ ID NO: 3504598 - RNA, 19 nt, Human
caccacgcuggggucuggg

SEQ ID NO: 3504599 - RNA, 22 nt, Human
caccacggaccaaagggagucu

SEQ ID NO: 3504600 - RNA, 17 nt, Human
caccacgguagugccug

SEQ ID NO: 3504601 - RNA, 15 nt, Human
caccacuagccucag

SEQ ID NO: 3504602 - RNA, 13 nt, Human
caccacuauaaaa

SEQ ID NO: 3504603 - RNA, 14 nt, Human
caccacuccauucc

SEQ ID NO: 3504604 - RNA, 13 nt, Human
caccacucuggca

SEQ ID NO: 3504605 - RNA, 14 nt, Human
caccacucuggcag

SEQ ID NO: 3504606 - RNA, 18 nt, Human
caccacucuggcagccac

SEQ ID NO: 3504607 - RNA, 21 nt, Human
caccacucuggcagccacacu

SEQ ID NO: 3504608 - RNA, 18 nt, Human
caccacugcacuccagcc

SEQ ID NO: 3504609 - RNA, 23 nt, Human
caccacugcccccugcugccaug

SEQ ID NO: 3504610 - RNA, 14 nt, Human
caccacuggccacc

SEQ ID NO: 3504611 - RNA, 20 nt, Human
caccacuggccaccaggcug

SEQ ID NO: 3504612 - RNA, 21 nt, Human
caccacuggccaccaggcugg

SEQ ID NO: 3504613 - RNA, 12 nt, Human
caccagaauaaa

SEQ ID NO: 3504614 - RNA, 18 nt, Human
caccagaauugugcaaau

SEQ ID NO: 3504615 - RNA, 16 nt, Human
caccagacggggcugg

SEQ ID NO: 3504616 - RNA, 11 nt, Human
caccagagacc

SEQ ID NO: 3504617 - RNA, 21 nt, Human
caccagagagggacugacacc

SEQ ID NO: 3504618 - RNA, 20 nt, Human
caccagagcaaccucucacu

SEQ ID NO: 3504619 - RNA, 18 nt, Human
caccagagcagaugcaga

SEQ ID NO: 3504620 - RNA, 18 nt, Human
caccagagcccaccuugg

SEQ ID NO: 3504621 - RNA, 20 nt, Human
caccagaggcugcagaaggc

SEQ ID NO: 3504622 - RNA, 16 nt, Human
caccagauagcagagg

SEQ ID NO: 3504623 - RNA, 14 nt, Human
caccagaugagaau

SEQ ID NO: 3504624 - RNA, 11 nt, Human
caccagcacca

SEQ ID NO: 3504625 - RNA, 15 nt, Human
caccagcagccugga

SEQ ID NO: 3504626 - RNA, 16 nt, Human
caccagccaggcucug

SEQ ID NO: 3504627 - RNA, 19 nt, Human
caccagccaggcucugugc

SEQ ID NO: 3504628 - RNA, 18 nt, Human
caccagccccacugccag

SEQ ID NO: 3504629 - RNA, 20 nt, Human
caccagccccacugccagca

SEQ ID NO: 3504630 - RNA, 22 nt, Human
caccagccccacugccagcagc

SEQ ID NO: 3504631 - RNA, 15 nt, Human
caccagccccugccc

SEQ ID NO: 3504632 - RNA, 16 nt, Human
caccagccccugcccc

SEQ ID NO: 3504633 - RNA, 17 nt, Human
caccagccccugcccca

SEQ ID NO: 3504634 - RNA, 16 nt, Human
caccagcccggccugc

SEQ ID NO: 3504635 - RNA, 17 nt, Human
caccagcccggccugcu

SEQ ID NO: 3504636 - RNA, 21 nt, Human
caccagcccuuagcagggaaa

SEQ ID NO: 3504637 - RNA, 14 nt, Human
caccagccugcacu

SEQ ID NO: 3504638 - RNA, 20 nt, Human
caccagccuuucucccaggc

SEQ ID NO: 3504639 - RNA, 17 nt, Human
caccagcuccucccuug

SEQ ID NO: 3504640 - RNA, 22 nt, Human
caccagcucugccgucucugga

SEQ ID NO: 3504641 - RNA, 11 nt, Human
caccagcugca

SEQ ID NO: 3504642 - RNA, 17 nt, Human
caccagcugcaaagugu

SEQ ID NO: 3504643 - RNA, 12 nt, Human
caccagcugccu

SEQ ID NO: 3504644 - RNA, 22 nt, Human
caccagcuguucugucccuugg

SEQ ID NO: 3504645 - RNA, 11 nt, Human
caccaggaagg

SEQ ID NO: 3504646 - RNA, 14 nt, Human
caccaggagacaga

SEQ ID NO: 3504647 - RNA, 17 nt, Human
caccaggagucccuggu

SEQ ID NO: 3504648 - RNA, 22 nt, Human
caccaggcaccucacagaaaug

SEQ ID NO: 3504649 - RNA, 19 nt, Human
caccaggcacgaacccacc

SEQ ID NO: 3504650 - RNA, 14 nt, Human
caccaggcagccuc

SEQ ID NO: 3504651 - RNA, 18 nt, Human
caccaggcagccucuggg

SEQ ID NO: 3504652 - RNA, 13 nt, Human
caccaggccaccu

SEQ ID NO: 3504653 - RNA, 14 nt, Human
caccaggccaccuc

SEQ ID NO: 3504654 - RNA, 19 nt, Human
caccaggccaccuccccag

SEQ ID NO: 3504655 - RNA, 22 nt, Human
caccaggccaccuccccagcau

SEQ ID NO: 3504656 - RNA, 16 nt, Human
caccaggccguccucc

SEQ ID NO: 3504657 - RNA, 17 nt, Human
caccaggcuggcgcagc

SEQ ID NO: 3504658 - RNA, 20 nt, Human
caccaggcuggcgcagccaa

SEQ ID NO: 3504659 - RNA, 13 nt, Human
caccagggaagaa

SEQ ID NO: 3504660 - RNA, 16 nt, Human
caccagggaugguacu

SEQ ID NO: 3504661 - RNA, 18 nt, Human
caccagggcaucucuggg

SEQ ID NO: 3504662 - RNA, 20 nt, Human
caccagggcaucucugggcu

SEQ ID NO: 3504663 - RNA, 22 nt, Human
caccagggcaucucugggcugg

SEQ ID NO: 3504664 - RNA, 14 nt, Human
caccagggccagcc

SEQ ID NO: 3504665 - RNA, 18 nt, Human
caccaggggcaggcacag

SEQ ID NO: 3504666 - RNA, 19 nt, Human
caccaggggcaggcacagc

SEQ ID NO: 3504667 - RNA, 19 nt, Human
caccaggguugaccccaga

SEQ ID NO: 3504668 - RNA, 23 nt, Human
caccaggguuuaguuugcauuua

SEQ ID NO: 3504669 - RNA, 16 nt, Human
caccagguagaacaca

SEQ ID NO: 3504670 - RNA, 23 nt, Human
caccagucacaugaccugaucac

SEQ ID NO: 3504671 - RNA, 14 nt, Human
caccagucccuguc

SEQ ID NO: 3504672 - RNA, 20 nt, Human
caccagugaaugaaagucuu

SEQ ID NO: 3504673 - RNA, 14 nt, Human
caccagugccucuc

SEQ ID NO: 3504674 - RNA, 23 nt, Human
caccaguguguggcuuucagagc

SEQ ID NO: 3504675 - RNA, 16 nt, Human
caccauaagcuacugc

SEQ ID NO: 3504676 - RNA, 20 nt, Human
caccauaagcuacugccauc

SEQ ID NO: 3504677 - RNA, 21 nt, Human
caccauaagcuacugccaucc

SEQ ID NO: 3504678 - RNA, 18 nt, Human
caccauaggucaccuuua

SEQ ID NO: 3504679 - RNA, 14 nt, Human
caccauaugaauug

SEQ ID NO: 3504680 - RNA, 19 nt, Human
caccauaugaauuguacag

SEQ ID NO: 3504681 - RNA, 21 nt, Human
caccauauucagugcuguggc

SEQ ID NO: 3504682 - RNA, 14 nt, Human
caccaucaagccac

SEQ ID NO: 3504683 - RNA, 17 nt, Human
caccaucaagccaccaa

SEQ ID NO: 3504684 - RNA, 15 nt, Human
caccaucaugucugg

SEQ ID NO: 3504685 - RNA, 16 nt, Human
caccaucugcugucuu

SEQ ID NO: 3504686 - RNA, 23 nt, Human
caccaucuuaagagaugccucau

SEQ ID NO: 3504687 - RNA, 17 nt, Human
caccaugauuccuuuaa

SEQ ID NO: 3504688 - RNA, 17 nt, Human
augcaaccaagucacac

SEQ ID NO: 3504689 - RNA, 21 nt, Human
augcaaccaagucacacgcuu

SEQ ID NO: 3504690 - RNA, 15 nt, Human
augcaaccauuugaa

SEQ ID NO: 3504691 - RNA, 18 nt, Human
augcaagagugauugcag

SEQ ID NO: 3504692 - RNA, 18 nt, Human
caccccuguccucacugc

SEQ ID NO: 3504693 - RNA, 13 nt, Human
caccccugugcuc

SEQ ID NO: 3504694 - RNA, 17 nt, Human
caccccugugcuccgug

SEQ ID NO: 3504695 - RNA, 18 nt, Human
caccccuuauccaggacu

SEQ ID NO: 3504696 - RNA, 11 nt, Human
caccccuuccc

SEQ ID NO: 3504697 - RNA, 12 nt, Human
caccccuucccc

SEQ ID NO: 3504698 - RNA, 13 nt, Human
cacaccuccacag

SEQ ID NO: 3504699 - RNA, 14 nt, Human
cacaccucccugaa

SEQ ID NO: 3504700 - RNA, 22 nt, Human
cacaccuccucccacugcccac

SEQ ID NO: 3504701 - RNA, 12 nt, Human
cacaccuccucu

SEQ ID NO: 3504702 - RNA, 13 nt, Human
cacaccuccuggg

SEQ ID NO: 3504703 - RNA, 12 nt, Human
cacaccuggccc

SEQ ID NO: 3504704 - RNA, 16 nt, Human
cacaccuguaguccca

SEQ ID NO: 3504705 - RNA, 22 nt, Human
cacaccuuuuauugacacagaa

SEQ ID NO: 3504706 - RNA, 23 nt, Human
cacaccuuuuauugacacagaaa

SEQ ID NO: 3504707 - RNA, 15 nt, Human
cacacgcacacacac

SEQ ID NO: 3504708 - RNA, 21 nt, Human
cacacgcacgcacacacacaa

SEQ ID NO: 3504709 - RNA, 20 nt, Human
cacacgcaggaacucccagc

SEQ ID NO: 3504710 - RNA, 20 nt, Human
cacacgccucccacuggggu

SEQ ID NO: 3504711 - RNA, 18 nt, Human
cacacgcgcgcacacaca

SEQ ID NO: 3504712 - RNA, 21 nt, Human
cacacgcgcgcgcacacacac

SEQ ID NO: 3504713 - RNA, 14 nt, Human
cacacgcuuuugaa

SEQ ID NO: 3504714 - RNA, 21 nt, Human
cacacggaggcaucugcaccc

SEQ ID NO: 3504715 - RNA, 19 nt, Human
cacacguaaugaaacuugg

SEQ ID NO: 3504716 - RNA, 20 nt, Human
cacacguaaugaaacuugga

SEQ ID NO: 3504717 - RNA, 20 nt, Human
cacacgucugacccucucca

SEQ ID NO: 3504718 - RNA, 16 nt, Human
cacacgugcaauuugu

SEQ ID NO: 3504719 - RNA, 21 nt, Human
cacacuaaccuggguucccuu

SEQ ID NO: 3504720 - RNA, 14 nt, Human
cacacuacaccaca

SEQ ID NO: 3504721 - RNA, 17 nt, Human
cacacuacaccacacac

SEQ ID NO: 3504722 - RNA, 22 nt, Human
cacacuacaccacacacaacag

SEQ ID NO: 3504723 - RNA, 16 nt, Human
cacacuaccgaaugug

SEQ ID NO: 3504724 - RNA, 18 nt, Human
cacacuaucauaguuaac

SEQ ID NO: 3504725 - RNA, 19 nt, Human
cacacuauuaccaugagaa

SEQ ID NO: 3504726 - RNA, 20 nt, Human
cacacuauuaccaugagaag

SEQ ID NO: 3504727 - RNA, 19 nt, Human
cacacucaaaucaagaaac

SEQ ID NO: 3504728 - RNA, 17 nt, Human
cacacucagcacccccu

SEQ ID NO: 3504729 - RNA, 20 nt, Human
cacacucagcacccccuucu

SEQ ID NO: 3504730 - RNA, 22 nt, Human
cacacucagcacccccuucucu

SEQ ID NO: 3504731 - RNA, 22 nt, Human
cacacuccaagauauggacaca

SEQ ID NO: 3504732 - RNA, 14 nt, Human
cacacuccagcugg

SEQ ID NO: 3504733 - RNA, 15 nt, Human
cacacuccaucagcu

SEQ ID NO: 3504734 - RNA, 16 nt, Human
cacacucgcccgccca

SEQ ID NO: 3504735 - RNA, 19 nt, Human
cacacucugccagcaaaga

SEQ ID NO: 3504736 - RNA, 13 nt, Human
cacacugaagaag

SEQ ID NO: 3504737 - RNA, 14 nt, Human
cacacugaagaagc

SEQ ID NO: 3504738 - RNA, 13 nt, Human
cacacugaggcag

SEQ ID NO: 3504739 - RNA, 16 nt, Human
cacacugaggcaggga

SEQ ID NO: 3504740 - RNA, 14 nt, Human
cacacugaugcuua

SEQ ID NO: 3504741 - RNA, 18 nt, Human
cacacugaugcuuagaug

SEQ ID NO: 3504742 - RNA, 19 nt, Human
cacacuggacuccggcccu

SEQ ID NO: 3504743 - RNA, 20 nt, Human
cacacuggacuccggcccuc

SEQ ID NO: 3504744 - RNA, 19 nt, Human
cacacuggcucacccaguc

SEQ ID NO: 3504745 - RNA, 22 nt, Human
cacacuggggugccgccugccc

SEQ ID NO: 3504746 - RNA, 16 nt, Human
cacacugguacuuaga

SEQ ID NO: 3504747 - RNA, 23 nt, Human
cacacugguguggauuaaccugc

SEQ ID NO: 3504748 - RNA, 20 nt, Human
cacacugguucucaaugaaa

SEQ ID NO: 3504749 - RNA, 15 nt, Human
cacacuguaaauaug

SEQ ID NO: 3504750 - RNA, 15 nt, Human
cacacugugcuuucu

SEQ ID NO: 3504751 - RNA, 16 nt, Human
cacacuguguccuggu

SEQ ID NO: 3504752 - RNA, 16 nt, Human
cacacuuacuuuuucu

SEQ ID NO: 3504753 - RNA, 14 nt, Human
cacacuucaggcuc

SEQ ID NO: 3504754 - RNA, 21 nt, Human
cacacuucaggcucuucuccu

SEQ ID NO: 3504755 - RNA, 13 nt, Human
cacacuucccugg

SEQ ID NO: 3504756 - RNA, 15 nt, Human
cacacuucccuggcg

SEQ ID NO: 3504757 - RNA, 14 nt, Human
cacacuuccugucc

SEQ ID NO: 3504758 - RNA, 15 nt, Human
cacacuucugugaga

SEQ ID NO: 3504759 - RNA, 17 nt, Human
cacacuugagaggauga

SEQ ID NO: 3504760 - RNA, 13 nt, Human
cacacuugugugu

SEQ ID NO: 3504761 - RNA, 17 nt, Human
cacacuuguuccagcuc

SEQ ID NO: 3504762 - RNA, 20 nt, Human
cacacuuguuccagcucuuu

SEQ ID NO: 3504763 - RNA, 19 nt, Human
cacacuuuggcccagggug

SEQ ID NO: 3504764 - RNA, 17 nt, Human
cacacuuugguaccaga

SEQ ID NO: 3504765 - RNA, 14 nt, Human
cacagaaaauaagg

SEQ ID NO: 3504766 - RNA, 17 nt, Human
cacagaaaauaaggcac

SEQ ID NO: 3504767 - RNA, 23 nt, Human
cacagaaaauaaggcacccaucu

SEQ ID NO: 3504768 - RNA, 13 nt, Human
cacagaaaauaua

SEQ ID NO: 3504769 - RNA, 19 nt, Human
cacagaaaauauacuguaa

SEQ ID NO: 3504770 - RNA, 21 nt, Human
cacagaaaauauacuguaaag

SEQ ID NO: 3504771 - RNA, 20 nt, Human
cacagaaaauggaagacagc

SEQ ID NO: 3504772 - RNA, 11 nt, Human
cacagaaacac

SEQ ID NO: 3504773 - RNA, 17 nt, Human
cacagaaacacugccuu

SEQ ID NO: 3504774 - RNA, 18 nt, Human
cacagaaacacugccuuu

SEQ ID NO: 3504775 - RNA, 19 nt, Human
cacagaaaccucuacuaaa

SEQ ID NO: 3504776 - RNA, 13 nt, Human
cacagaaagagag

SEQ ID NO: 3504777 - RNA, 15 nt, Human
cacagaaagagagca

SEQ ID NO: 3504778 - RNA, 18 nt, Human
cacagaaauauauauaca

SEQ ID NO: 3504779 - RNA, 19 nt, Human
cacagaaauauauauacau

SEQ ID NO: 3504780 - RNA, 20 nt, Human
cacagaaaugcugcuggcca

SEQ ID NO: 3504781 - RNA, 19 nt, Human
cacagaagacuucccagcu

SEQ ID NO: 3504782 - RNA, 14 nt, Human
cacagaagccagga

SEQ ID NO: 3504783 - RNA, 23 nt, Human
cacagaagccaggagcaaauguu

SEQ ID NO: 3504784 - RNA, 23 nt, Human
cacagaaggggacugccaccucc

SEQ ID NO: 3504785 - RNA, 15 nt, Human
cacagaaguagcucu

SEQ ID NO: 3504786 - RNA, 16 nt, Human
cacagaauauuuuuau

SEQ ID NO: 3504787 - RNA, 18 nt, Human
cacagaauauuuuuauau

SEQ ID NO: 3504788 - RNA, 14 nt, Human
cacagacacacaca

SEQ ID NO: 3504789 - RNA, 22 nt, Human
cacagacacacacacgcacgca

SEQ ID NO: 3504790 - RNA, 17 nt, Human
cacagacaggaccccug

SEQ ID NO: 3504791 - RNA, 13 nt, Human
cacagacagguuu

SEQ ID NO: 3504792 - RNA, 22 nt, Human
cacagacagguuuucacauaaa

SEQ ID NO: 3504793 - RNA, 21 nt, Human
cacagacccugcccugugggc

SEQ ID NO: 3504794 - RNA, 20 nt, Human
cacagaccuggagccccugg

SEQ ID NO: 3504795 - RNA, 21 nt, Human
cacagaccuggagccccuggg

SEQ ID NO: 3504796 - RNA, 16 nt, Human
cacagacgucccucca

SEQ ID NO: 3504797 - RNA, 15 nt, Human
cacagacucauccug

SEQ ID NO: 3504798 - RNA, 16 nt, Human
cacagacucauccuga

SEQ ID NO: 3504799 - RNA, 19 nt, Human
cacagacugguuuugcaac

SEQ ID NO: 3504800 - RNA, 22 nt, Human
cacagacuguugucccugcacu

SEQ ID NO: 3504801 - RNA, 20 nt, Human
cacagacuuuagcuuucuga

SEQ ID NO: 3504802 - RNA, 23 nt, Human
cacagagaacuagugguggcucu

SEQ ID NO: 3504803 - RNA, 23 nt, Human
cacagagagggagagcagagaaa

SEQ ID NO: 3504804 - RNA, 14 nt, Human
cacagagcucucca

SEQ ID NO: 3504805 - RNA, 17 nt, Human
cacagagcucuccagcu

SEQ ID NO: 3504806 - RNA, 21 nt, Human
cacagagcucuccagcuccaa

SEQ ID NO: 3504807 - RNA, 21 nt, Human
cacagaggcagcccgcacacc

SEQ ID NO: 3504808 - RNA, 18 nt, Human
cacagaggcuucuucaga

SEQ ID NO: 3504809 - RNA, 17 nt, Human
cacagagucaaggccug

SEQ ID NO: 3504810 - RNA, 20 nt, Human
cacagagucaaggccugcuc

SEQ ID NO: 3504811 - RNA, 21 nt, Human
cacagagucaaggccugcucc

SEQ ID NO: 3504812 - RNA, 21 nt, Human
cacagaguguagccagguccc

SEQ ID NO: 3504813 - RNA, 23 nt, Human
cacagauauacuuuguggaccaa

SEQ ID NO: 3504814 - RNA, 14 nt, Human
cacagaucacagcu

SEQ ID NO: 3504815 - RNA, 17 nt, Human
cacagaugaaacacaaa

SEQ ID NO: 3504816 - RNA, 20 nt, Human
cacagaugggugcuuggagg

SEQ ID NO: 3504817 - RNA, 23 nt, Human
cacagaugggugcuuggaggaag

SEQ ID NO: 3504818 - RNA, 22 nt, Human
cacagaugugggcuuugauuuc

SEQ ID NO: 3504819 - RNA, 13 nt, Human
cacagauuggcca

SEQ ID NO: 3504820 - RNA, 22 nt, Human
cacagauuguuucuauacaaau

SEQ ID NO: 3504821 - RNA, 13 nt, Human
cacagauuuuaau

SEQ ID NO: 3504822 - RNA, 16 nt, Human
cacagauuuuaauugu

SEQ ID NO: 3504823 - RNA, 20 nt, Human
cacagcaacgaucacaaaug

SEQ ID NO: 3504824 - RNA, 22 nt, Human
cacagcaacgaucacaaaugac

SEQ ID NO: 3504825 - RNA, 16 nt, Human
cacagcaaggaggcug

SEQ ID NO: 3504826 - RNA, 22 nt, Human
cacagcaaggaggcuggcuggg

SEQ ID NO: 3504827 - RNA, 23 nt, Human
cacagcaaggaggcuggcugggg

SEQ ID NO: 3504828 - RNA, 15 nt, Human
cacagcaaggcaccu

SEQ ID NO: 3504829 - RNA, 15 nt, Human
cacagcacacucagc

SEQ ID NO: 3504830 - RNA, 23 nt, Human
cacagcacaugcuggccagccug

SEQ ID NO: 3504831 - RNA, 16 nt, Human
cacagcaccagaaugu

SEQ ID NO: 3504832 - RNA, 19 nt, Human
cacagcaccagaauguaua

SEQ ID NO: 3504833 - RNA, 15 nt, Human
cacagcagcauuuuu

SEQ ID NO: 3504834 - RNA, 13 nt, Human
cacagcaggcugc

SEQ ID NO: 3504835 - RNA, 21 nt, Human
cacagcaggcugccagugccu

SEQ ID NO: 3504836 - RNA, 13 nt, Human
auggccagcagca

SEQ ID NO: 3504837 - RNA, 13 nt, Human
auggccagccccu

SEQ ID NO: 3504838 - RNA, 14 nt, Human
auggccagcuggag

SEQ ID NO: 3504839 - RNA, 21 nt, Human
auggccaggaaguagcacagg

SEQ ID NO: 3504840 - RNA, 23 nt, Human
auggccaggaaguagcacaggcu

SEQ ID NO: 3504841 - RNA, 18 nt, Human
auggccaggauccucucc

SEQ ID NO: 3504842 - RNA, 19 nt, Human
auggcccauucuacuugcu

SEQ ID NO: 3504843 - RNA, 11 nt, Human
auggccccucu

SEQ ID NO: 3504844 - RNA, 13 nt, Human
auggcccugggcg

SEQ ID NO: 3504845 - RNA, 18 nt, Human
auggcccuucccacugga

SEQ ID NO: 3504846 - RNA, 14 nt, Human
auggccguggaugc

SEQ ID NO: 3504847 - RNA, 21 nt, Human
auggccucaagaucaaugaaa

SEQ ID NO: 3504848 - RNA, 14 nt, Human
auggccucagcugc

SEQ ID NO: 3504849 - RNA, 15 nt, Human
auggccucagcugcc

SEQ ID NO: 3504850 - RNA, 18 nt, Human
auggccucagcugccuca

SEQ ID NO: 3504851 - RNA, 13 nt, Human
auggccucaugug

SEQ ID NO: 3504852 - RNA, 13 nt, Human
auggccuccuccc

SEQ ID NO: 3504853 - RNA, 18 nt, Human
auggccucuucagaucuc

SEQ ID NO: 3504854 - RNA, 18 nt, Human
auggccugcaaacuggga

SEQ ID NO: 3504855 - RNA, 19 nt, Human
auggccugccuugaagcca

SEQ ID NO: 3504856 - RNA, 13 nt, Human
auggccuuugcuu

SEQ ID NO: 3504857 - RNA, 19 nt, Human
auggcgauucccauugaaa

SEQ ID NO: 3504858 - RNA, 17 nt, Human
auggcgcagugccucug

SEQ ID NO: 3504859 - RNA, 15 nt, Human
auggcgggugggggu

SEQ ID NO: 3504860 - RNA, 21 nt, Human
auggcguagagggugcugccc

SEQ ID NO: 3504861 - RNA, 22 nt, Human
auggcguccguggguugcuaac

SEQ ID NO: 3504862 - RNA, 24 nt, Human
auggcguccguggguugcuaacug

SEQ ID NO: 3504863 - RNA, 20 nt, Human
auggcgugucccucucggaa

SEQ ID NO: 3504864 - RNA, 18 nt, Human
auggcuaauguacugcau

SEQ ID NO: 3504865 - RNA, 20 nt, Human
auggcuaguaucaaaagaaa

SEQ ID NO: 3504866 - RNA, 21 nt, Human
auggcuauaggugcuacaaaa

SEQ ID NO: 3504867 - RNA, 19 nt, Human
auggcuauguuuuuaaugu

SEQ ID NO: 3504868 - RNA, 22 nt, Human
auggcuauuaacaauuaauugu

SEQ ID NO: 3504869 - RNA, 13 nt, Human
auggcuauuuuau

SEQ ID NO: 3504870 - RNA, 18 nt, Human
auggcucacuaugaaucu

SEQ ID NO: 3504871 - RNA, 19 nt, Human
auggcucacugcagccucg

SEQ ID NO: 3504872 - RNA, 15 nt, Human
auggcucagaggggg

SEQ ID NO: 3504873 - RNA, 23 nt, Human
auggcuccccuuuuucuuccuca

SEQ ID NO: 3504874 - RNA, 17 nt, Human
auggcucuggacucuaa

SEQ ID NO: 3504875 - RNA, 19 nt, Human
auggcucuggacucuaaag

SEQ ID NO: 3504876 - RNA, 15 nt, Human
auggcugcaguccuc

SEQ ID NO: 3504877 - RNA, 22 nt, Human
auggcugcugaagcugccugcu

SEQ ID NO: 3504878 - RNA, 15 nt, Human
auggcugcuguugcu

SEQ ID NO: 3504879 - RNA, 18 nt, Human
auggcuggagugauucug

SEQ ID NO: 3504880 - RNA, 16 nt, Human
auggcuggccacugca

SEQ ID NO: 3504881 - RNA, 21 nt, Human
auggcugggaacugcagaccu

SEQ ID NO: 3504882 - RNA, 23 nt, Human
auggcugggaacugcagaccugu

SEQ ID NO: 3504883 - RNA, 20 nt, Human
auggcugucucaaaccaagc

SEQ ID NO: 3504884 - RNA, 14 nt, Human
auggcugugaggau

SEQ ID NO: 3504885 - RNA, 18 nt, Human
auggcugugccucugccu

SEQ ID NO: 3504886 - RNA, 21 nt, Human
auggcuguguuugcagccugc

SEQ ID NO: 3504887 - RNA, 23 nt, Human
auggcuuccuggcaauagucaaa

SEQ ID NO: 3504888 - RNA, 18 nt, Human
auggcuuuauuuuuuuga

SEQ ID NO: 3504889 - RNA, 21 nt, Human
auggcuuucagaaaacgggaa

SEQ ID NO: 3504890 - RNA, 19 nt, Human
auggcuuuguauagaaccu

SEQ ID NO: 3504891 - RNA, 16 nt, Human
auggcuuuugugcauu

SEQ ID NO: 3504892 - RNA, 14 nt, Human
augggaaaagagau

SEQ ID NO: 3504893 - RNA, 18 nt, Human
augggaaacuuccaagac

SEQ ID NO: 3504894 - RNA, 14 nt, Human
augggaaagcauug

SEQ ID NO: 3504895 - RNA, 18 nt, Human
augggaaagccaccucuc

SEQ ID NO: 3504896 - RNA, 23 nt, Human
augggaaagccaccucucccuca

SEQ ID NO: 3504897 - RNA, 23 nt, Human
augggaaaggaggcaugccucug

SEQ ID NO: 3504898 - RNA, 17 nt, Human
augggaagacgaggccc

SEQ ID NO: 3504899 - RNA, 19 nt, Human
augggaagacgaggcccuc

SEQ ID NO: 3504900 - RNA, 16 nt, Human
augggaauaauugcuu

SEQ ID NO: 3504901 - RNA, 22 nt, Human
augggaauauaauauugucucu

SEQ ID NO: 3504902 - RNA, 13 nt, Human
cacgcacgcacac

SEQ ID NO: 3504903 - RNA, 15 nt, Human
cacgcacgcacacac

SEQ ID NO: 3504904 - RNA, 16 nt, Human
cacgcacgcacacaca

SEQ ID NO: 3504905 - RNA, 20 nt, Human
cacgcaggaacucccagcaa

SEQ ID NO: 3504906 - RNA, 20 nt, Human
cacgcaggagcacacccagc

SEQ ID NO: 3504907 - RNA, 13 nt, Human
cacgccacagccc

SEQ ID NO: 3504908 - RNA, 14 nt, Human
cacgccacagcccu

SEQ ID NO: 3504909 - RNA, 13 nt, Human
cacgccacugcac

SEQ ID NO: 3504910 - RNA, 15 nt, Human
cacgccacugcacua

SEQ ID NO: 3504911 - RNA, 22 nt, Human
cacgccagauucuuuccugagg

SEQ ID NO: 3504912 - RNA, 13 nt, Human
cacgcccccacug

SEQ ID NO: 3504913 - RNA, 21 nt, Human
cacgcccguccugccuguggc

SEQ ID NO: 3504914 - RNA, 16 nt, Human
cacgcccuccccuccc

SEQ ID NO: 3504915 - RNA, 20 nt, Human
cacgcccuccccuccccugc

SEQ ID NO: 3504916 - RNA, 21 nt, Human
cacgccuaugaucccagcacu

SEQ ID NO: 3504917 - RNA, 13 nt, Human
cacgccucccacu

SEQ ID NO: 3504918 - RNA, 18 nt, Human
cacgccucccacuggggu

SEQ ID NO: 3504919 - RNA, 22 nt, Human
cacgccucccacugggguccag

SEQ ID NO: 3504920 - RNA, 21 nt, Human
cacgccucucccuaggagaag

SEQ ID NO: 3504921 - RNA, 18 nt, Human
cacgccuguaaucccagc

SEQ ID NO: 3504922 - RNA, 19 nt, Human
cacgccuguaaucccagca

SEQ ID NO: 3504923 - RNA, 20 nt, Human
cacgccuguaaucccagcac

SEQ ID NO: 3504924 - RNA, 22 nt, Human
cacgccuguaaucccagcacuu

SEQ ID NO: 3504925 - RNA, 20 nt, Human
cacgccuguaauccuagcac

SEQ ID NO: 3504926 - RNA, 15 nt, Human
cacgccuuccccuca

SEQ ID NO: 3504927 - RNA, 21 nt, Human
cacgcgccccccucccagagg

SEQ ID NO: 3504928 - RNA, 15 nt, Human
cacgcgcgcacacac

SEQ ID NO: 3504929 - RNA, 15 nt, Human
cacgcgugcacacac

SEQ ID NO: 3504930 - RNA, 23 nt, Human
cacgcgugcacacaccagagccc

SEQ ID NO: 3504931 - RNA, 14 nt, Human
cacgcuccagcugc

SEQ ID NO: 3504932 - RNA, 16 nt, Human
cacgcuccccgccugu

SEQ ID NO: 3504933 - RNA, 21 nt, Human
cacgcuccuuucugaucuuca

SEQ ID NO: 3504934 - RNA, 22 nt, Human
cacgcugccuucgguacccacc

SEQ ID NO: 3504935 - RNA, 17 nt, Human
cacgcuggaccuugaac

SEQ ID NO: 3504936 - RNA, 18 nt, Human
cacgcuggagugcaguga

SEQ ID NO: 3504937 - RNA, 14 nt, Human
cacgcuggggaaga

SEQ ID NO: 3504938 - RNA, 18 nt, Human
cacgcuggguccuaauua

SEQ ID NO: 3504939 - RNA, 18 nt, Human
cacgcugucuccagaccc

SEQ ID NO: 3504940 - RNA, 13 nt, Human
cacgcuguucuaa

SEQ ID NO: 3504941 - RNA, 14 nt, Human
cacgcuucacagug

SEQ ID NO: 3504942 - RNA, 14 nt, Human
cacgcuucuccgga

SEQ ID NO: 3504943 - RNA, 16 nt, Human
cacggaagagccuugc

SEQ ID NO: 3504944 - RNA, 14 nt, Human
cacggaaguuuuca

SEQ ID NO: 3504945 - RNA, 17 nt, Human
cacggacaauaaaccuc

SEQ ID NO: 3504946 - RNA, 19 nt, Human
cacggacaauaaaccuccg

SEQ ID NO: 3504947 - RNA, 23 nt, Human
cacggacgcuggcuccccaaagg

SEQ ID NO: 3504948 - RNA, 15 nt, Human
cacggagccacuccu

SEQ ID NO: 3504949 - RNA, 17 nt, Human
cacggagccacuccucu

SEQ ID NO: 3504950 - RNA, 18 nt, Human
cacggagccacuccucug

SEQ ID NO: 3504951 - RNA, 23 nt, Human
cacggagccacuccucugacuca

SEQ ID NO: 3504952 - RNA, 19 nt, Human
cacggagcccagcccuccc

SEQ ID NO: 3504953 - RNA, 20 nt, Human
cacggagggugacgggggug

SEQ ID NO: 3504954 - RNA, 23 nt, Human
cacggagucguggggugugcugg

SEQ ID NO: 3504955 - RNA, 13 nt, Human
cacggcagccaca

SEQ ID NO: 3504956 - RNA, 23 nt, Human
cacggcaggacaacgaggaagcc

SEQ ID NO: 3504957 - RNA, 17 nt, Human
cacggccacacagcugc

SEQ ID NO: 3504958 - RNA, 20 nt, Human
cacggccacacagcugccgg

SEQ ID NO: 3504959 - RNA, 13 nt, Human
cacggccacauca

SEQ ID NO: 3504960 - RNA, 12 nt, Human
cacggccaggcc

SEQ ID NO: 3504961 - RNA, 15 nt, Human
cacggccaggccaga

SEQ ID NO: 3504962 - RNA, 17 nt, Human
cacggccaggccagagg

SEQ ID NO: 3504963 - RNA, 15 nt, Human
cacggccgcuccagg

SEQ ID NO: 3504964 - RNA, 14 nt, Human
cacggccuccuuuc

SEQ ID NO: 3504965 - RNA, 15 nt, Human
cacggcguuguaccu

SEQ ID NO: 3504966 - RNA, 16 nt, Human
cacggcuaagaggcug

SEQ ID NO: 3504967 - RNA, 15 nt, Human
cacggcucacugcag

SEQ ID NO: 3504968 - RNA, 16 nt, Human
cacggcucacugcagc

SEQ ID NO: 3504969 - RNA, 20 nt, Human
cacggcucacugcagccuca

SEQ ID NO: 3504970 - RNA, 20 nt, Human
cacggcucuagguggggcgg

SEQ ID NO: 3504971 - RNA, 13 nt, Human
cacggcugcugag

SEQ ID NO: 3504972 - RNA, 14 nt, Human
cacgggcagccugg

SEQ ID NO: 3504973 - RNA, 18 nt, Human
cacgggccuguccacagg

SEQ ID NO: 3504974 - RNA, 15 nt, Human
cacgggggccaagga

SEQ ID NO: 3504975 - RNA, 23 nt, Human
cacggugaauggcuuuguauaga

SEQ ID NO: 3504976 - RNA, 16 nt, Human
cacggugggccuugcu

SEQ ID NO: 3504977 - RNA, 18 nt, Human
cacgguuugaagccugga

SEQ ID NO: 3504978 - RNA, 19 nt, Human
cacgguuugaagccuggaa

SEQ ID NO: 3504979 - RNA, 20 nt, Human
cacgguuugaagccuggaac

SEQ ID NO: 3504980 - RNA, 16 nt, Human
augggguccuggccau

SEQ ID NO: 3504981 - RNA, 17 nt, Human
augggguccuggccauc

SEQ ID NO: 3504982 - RNA, 19 nt, Human
auggggucucucacagaca

SEQ ID NO: 3504983 - RNA, 20 nt, Human
auggggucucucacagacag

SEQ ID NO: 3504984 - RNA, 16 nt, Human
auggggucuguaaaau

SEQ ID NO: 3504985 - RNA, 15 nt, Human
auggggugggccucu

SEQ ID NO: 3504986 - RNA, 21 nt, Human
augggguuggcugggcccaga

SEQ ID NO: 3504987 - RNA, 14 nt, Human
auggguagcuucug

SEQ ID NO: 3504988 - RNA, 15 nt, Human
auggguagcuucuga

SEQ ID NO: 3504989 - RNA, 22 nt, Human
auggguagggcucugacaaagc

SEQ ID NO: 3504990 - RNA, 16 nt, Human
auggguaggguaaauc

SEQ ID NO: 3504991 - RNA, 17 nt, Human
auggguaggguaaauca

SEQ ID NO: 3504992 - RNA, 16 nt, Human
auggguaucaaacagc

SEQ ID NO: 3504993 - RNA, 19 nt, Human
auggguccaggauuccucu

SEQ ID NO: 3504994 - RNA, 15 nt, Human
augggucgcccauga

SEQ ID NO: 3504995 - RNA, 14 nt, Human
augggugaaggcug

SEQ ID NO: 3504996 - RNA, 15 nt, Human
augggugaaggcugg

SEQ ID NO: 3504997 - RNA, 17 nt, Human
augggugaaggcuggca

SEQ ID NO: 3504998 - RNA, 20 nt, Human
augggugcuuggaggaagga

SEQ ID NO: 3504999 - RNA, 23 nt, Human
augggugcuuggaggaaggaaac

SEQ ID NO: 3505000 - RNA, 13 nt, Human
auggguggaaagg

SEQ ID NO: 3505001 - RNA, 22 nt, Human
auggguuuuucccuguacagua

SEQ ID NO: 3505002 - RNA, 16 nt, Human
augguaaaauugcaug

SEQ ID NO: 3505003 - RNA, 13 nt, Human
augguaauaagca

SEQ ID NO: 3505004 - RNA, 22 nt, Human
augguacaaccuuuauucuuuu

SEQ ID NO: 3505005 - RNA, 19 nt, Human
augguacauuuuucaacuu

SEQ ID NO: 3505006 - RNA, 17 nt, Human
augguaccaaucaugaa

SEQ ID NO: 3505007 - RNA, 16 nt, Human
augguaccagaugcag

SEQ ID NO: 3505008 - RNA, 15 nt, Human
augguacccccuucu

SEQ ID NO: 3505009 - RNA, 21 nt, Human
augguacugacuuugcuugcu

SEQ ID NO: 3505010 - RNA, 13 nt, Human
augguagaccuuu

SEQ ID NO: 3505011 - RNA, 16 nt, Human
augguagucuaaccaa

SEQ ID NO: 3505012 - RNA, 21 nt, Human
augguagucuaaccaaaugca

SEQ ID NO: 3505013 - RNA, 17 nt, Human
augguaguuuuuucauc

SEQ ID NO: 3505014 - RNA, 18 nt, Human
augguaguuuuuucaucu

SEQ ID NO: 3505015 - RNA, 19 nt, Human
augguauagcaaauguuuu

SEQ ID NO: 3505016 - RNA, 16 nt, Human
augguauauauacaua

SEQ ID NO: 3505017 - RNA, 19 nt, Human
augguauauauacauauau

SEQ ID NO: 3505018 - RNA, 18 nt, Human
augguaucaaaauuacau

SEQ ID NO: 3505019 - RNA, 21 nt, Human
augguaucaaaauuacauaua

SEQ ID NO: 3505020 - RNA, 23 nt, Human
augguaucaauaaauagaccauu

SEQ ID NO: 3505021 - RNA, 14 nt, Human
augguauccagaau

SEQ ID NO: 3505022 - RNA, 18 nt, Human
augguaugcacaauucca

SEQ ID NO: 3505023 - RNA, 19 nt, Human
augguaugcacaauuccau

SEQ ID NO: 3505024 - RNA, 14 nt, Human
auggucacacacug

SEQ ID NO: 3505025 - RNA, 18 nt, Human
auggucacacacugaugc

SEQ ID NO: 3505026 - RNA, 20 nt, Human
auggucacacacugaugcuu

SEQ ID NO: 3505027 - RNA, 18 nt, Human
auggucagacacaaacaa

SEQ ID NO: 3505028 - RNA, 12 nt, Human
auggucagcucc

SEQ ID NO: 3505029 - RNA, 22 nt, Human
auggucaucuuuuucucuaaaa

SEQ ID NO: 3505030 - RNA, 20 nt, Human
augguccaauuaguuuccuu

SEQ ID NO: 3505031 - RNA, 16 nt, Human
augguccaggagaagg

SEQ ID NO: 3505032 - RNA, 18 nt, Human
augguccaggagaaggcc

SEQ ID NO: 3505033 - RNA, 19 nt, Human
auggucccacaucccuggg

SEQ ID NO: 3505034 - RNA, 20 nt, Human
auggucccacaucccugggc

SEQ ID NO: 3505035 - RNA, 14 nt, Human
auggucccauccag

SEQ ID NO: 3505036 - RNA, 20 nt, Human
auggucccauccaggcaguc

SEQ ID NO: 3505037 - RNA, 15 nt, Human
augguccgguguccu

SEQ ID NO: 3505038 - RNA, 21 nt, Human
augguccgugcuaaggacuug

SEQ ID NO: 3505039 - RNA, 14 nt, Human
auggucgcccagga

SEQ ID NO: 3505040 - RNA, 14 nt, Human
auggucucagaaac

SEQ ID NO: 3505041 - RNA, 18 nt, Human
auggucucagaaaccaaa

SEQ ID NO: 3505042 - RNA, 16 nt, Human
auggucuuacagcagg

SEQ ID NO: 3505043 - RNA, 17 nt, Human
auggucuuacagcaggc

SEQ ID NO: 3505044 - RNA, 14 nt, Human
auggugaaaaugua

SEQ ID NO: 3505045 - RNA, 17 nt, Human
auggugaaaauguacug

SEQ ID NO: 3505046 - RNA, 17 nt, Human
auggugaaauuuauuag

SEQ ID NO: 3505047 - RNA, 23 nt, Human
auggugacuuuugaaaagaggug

SEQ ID NO: 3505048 - RNA, 21 nt, Human
auggugagagaagccugugcc

SEQ ID NO: 3505049 - RNA, 17 nt, Human
auggugaugaaauguaa

SEQ ID NO: 3505050 - RNA, 12 nt, Human
auggugcaauga

SEQ ID NO: 3505051 - RNA, 16 nt, Human
auggugcaaugaccuu

SEQ ID NO: 3505052 - RNA, 18 nt, Human
auggugcaguugacagca

SEQ ID NO: 3505053 - RNA, 20 nt, Human
auggugccccaggaccagcu

SEQ ID NO: 3505054 - RNA, 16 nt, Human
auggugccuaguauug

SEQ ID NO: 3505055 - RNA, 12 nt, Human
auggugccucug

SEQ ID NO: 3505056 - RNA, 15 nt, Human
auggugccugagagg

SEQ ID NO: 3505057 - RNA, 20 nt, Human
auggugccugagaggcaggc

SEQ ID NO: 3505058 - RNA, 21 nt, Human
auggugccugagaggcaggca

SEQ ID NO: 3505059 - RNA, 13 nt, Human
auggugcugagaa

SEQ ID NO: 3505060 - RNA, 14 nt, Human
auggugcugagaag

SEQ ID NO: 3505061 - RNA, 16 nt, Human
auggugcugagaagcu

SEQ ID NO: 3505062 - RNA, 13 nt, Human
auggugcugggag

SEQ ID NO: 3505063 - RNA, 15 nt, Human
caccgaaaacguggc

SEQ ID NO: 3505064 - RNA, 21 nt, Human
caccgaaaacguggcugcuuc

SEQ ID NO: 3505065 - RNA, 15 nt, Human
caccgaagcccagag

SEQ ID NO: 3505066 - RNA, 21 nt, Human
caccgaagcccagagggucug

SEQ ID NO: 3505067 - RNA, 17 nt, Human
caccgagggcgaccccg

SEQ ID NO: 3505068 - RNA, 13 nt, Human
caccgaggggccu

SEQ ID NO: 3505069 - RNA, 12 nt, Human
caccgagugggg

SEQ ID NO: 3505070 - RNA, 14 nt, Human
caccgcagaaggaa

SEQ ID NO: 3505071 - RNA, 12 nt, Human
caccgcagacag

SEQ ID NO: 3505072 - RNA, 18 nt, Human
caccgcagacaggaccag

SEQ ID NO: 3505073 - RNA, 21 nt, Human
caccgcagacaggaccaggga

SEQ ID NO: 3505074 - RNA, 22 nt, Human
caccgcaugcccccucgugcca

SEQ ID NO: 3505075 - RNA, 13 nt, Human
caccgcccgucug

SEQ ID NO: 3505076 - RNA, 22 nt, Human
caccgccgacuuuguacccccc

SEQ ID NO: 3505077 - RNA, 18 nt, Human
caccgccggccagcuggg

SEQ ID NO: 3505078 - RNA, 17 nt, Human
caccgccuccuacagcc

SEQ ID NO: 3505079 - RNA, 23 nt, Human
caccgccuugcccagccuggaug

SEQ ID NO: 3505080 - RNA, 21 nt, Human
caccgcggcgcuucccagcac

SEQ ID NO: 3505081 - RNA, 13 nt, Human
caccgcuccccag

SEQ ID NO: 3505082 - RNA, 19 nt, Human
caccgcugcuccacgcgcu

SEQ ID NO: 3505083 - RNA, 17 nt, Human
caccggaccagccuggc

SEQ ID NO: 3505084 - RNA, 22 nt, Human
caccggagcuuucaaagaagga

SEQ ID NO: 3505085 - RNA, 16 nt, Human
caccggcucucaccug

SEQ ID NO: 3505086 - RNA, 14 nt, Human
caccggcuggccug

SEQ ID NO: 3505087 - RNA, 20 nt, Human
caccggcuggccuggccccu

SEQ ID NO: 3505088 - RNA, 22 nt, Human
caccgggcacucagaagacacu

SEQ ID NO: 3505089 - RNA, 13 nt, Human
caccgggccugga

SEQ ID NO: 3505090 - RNA, 20 nt, Human
caccggggacaggccgcagc

SEQ ID NO: 3505091 - RNA, 15 nt, Human
caccggggccucgga

SEQ ID NO: 3505092 - RNA, 14 nt, Human
caccggggccuggg

SEQ ID NO: 3505093 - RNA, 21 nt, Human
caccggggccugggcaggagg

SEQ ID NO: 3505094 - RNA, 15 nt, Human
caccgguccagcugg

SEQ ID NO: 3505095 - RNA, 16 nt, Human
caccgguccagcuggc

SEQ ID NO: 3505096 - RNA, 18 nt, Human
caccgguccagcuggccu

SEQ ID NO: 3505097 - RNA, 19 nt, Human
caccgguugcuucugggaa

SEQ ID NO: 3505098 - RNA, 18 nt, Human
caccguccgcccugcucc

SEQ ID NO: 3505099 - RNA, 15 nt, Human
caccguggaccuucc

SEQ ID NO: 3505100 - RNA, 16 nt, Human
caccguggaccuuccu

SEQ ID NO: 3505101 - RNA, 17 nt, Human
caccguggaccuuccug

SEQ ID NO: 3505102 - RNA, 17 nt, Human
caccguggaggaggaag

SEQ ID NO: 3505103 - RNA, 15 nt, Human
caccguggcuaagag

SEQ ID NO: 3505104 - RNA, 19 nt, Human
caccgugucaagcugcucu

SEQ ID NO: 3505105 - RNA, 14 nt, Human
caccguucauucag

SEQ ID NO: 3505106 - RNA, 13 nt, Human
caccguucugugc

SEQ ID NO: 3505107 - RNA, 21 nt, Human
caccguuggggauuggggaag

SEQ ID NO: 3505108 - RNA, 13 nt, Human
caccuaaagaaaa

SEQ ID NO: 3505109 - RNA, 18 nt, Human
caccuaagggacauguuu

SEQ ID NO: 3505110 - RNA, 15 nt, Human
caccuaagucucugu

SEQ ID NO: 3505111 - RNA, 17 nt, Human
caccuaagucucuguga

SEQ ID NO: 3505112 - RNA, 20 nt, Human
caccuaauccaggcagaucc

SEQ ID NO: 3505113 - RNA, 14 nt, Human
caccuaauguuuau

SEQ ID NO: 3505114 - RNA, 20 nt, Human
caccuaauguuuaugagcca

SEQ ID NO: 3505115 - RNA, 17 nt, Human
caccuaccaucagggac

SEQ ID NO: 3505116 - RNA, 18 nt, Human
caccuaccgaguucaagu

SEQ ID NO: 3505117 - RNA, 12 nt, Human
caccuacugagu

SEQ ID NO: 3505118 - RNA, 17 nt, Human
caccuagagccagacca

SEQ ID NO: 3505119 - RNA, 13 nt, Human
caccuagcugaau

SEQ ID NO: 3505120 - RNA, 21 nt, Human
caccuagcugaauguuuuucu

SEQ ID NO: 3505121 - RNA, 17 nt, Human
caccuaggaagccucag

SEQ ID NO: 3505122 - RNA, 15 nt, Human
caccuaguccaguga

SEQ ID NO: 3505123 - RNA, 14 nt, Human
caccuaguggcugu

SEQ ID NO: 3505124 - RNA, 15 nt, Human
caccuaguggcuguc

SEQ ID NO: 3505125 - RNA, 13 nt, Human
auguaaaaugauu

SEQ ID NO: 3505126 - RNA, 17 nt, Human
auguaaaauguugaaua

SEQ ID NO: 3505127 - RNA, 16 nt, Human
auguaaacagugccug

SEQ ID NO: 3505128 - RNA, 19 nt, Human
auguaaacuguuucuuuaa

SEQ ID NO: 3505129 - RNA, 20 nt, Human
auguaaacuguuucuuuaaa

SEQ ID NO: 3505130 - RNA, 14 nt, Human
auguaaagaaaugu

SEQ ID NO: 3505131 - RNA, 19 nt, Human
auguaaagaacauaaauaa

SEQ ID NO: 3505132 - RNA, 19 nt, Human
auguaaagacaaaaaacua

SEQ ID NO: 3505133 - RNA, 14 nt, Human
auguaaagauauuu

SEQ ID NO: 3505134 - RNA, 14 nt, Human
auguaaagcuuguc

SEQ ID NO: 3505135 - RNA, 18 nt, Human
auguaaaguauguaaaca

SEQ ID NO: 3505136 - RNA, 21 nt, Human
auguaaauaaccccauucuuu

SEQ ID NO: 3505137 - RNA, 22 nt, Human
auguaaauaaccccauucuuug

SEQ ID NO: 3505138 - RNA, 23 nt, Human
auguaaauaaccccauucuuugc

SEQ ID NO: 3505139 - RNA, 16 nt, Human
auguaaauaauucuuu

SEQ ID NO: 3505140 - RNA, 19 nt, Human
auguaaauauuuuaaagaa

SEQ ID NO: 3505141 - RNA, 21 nt, Human
auguaaauauuuuaaagaauu

SEQ ID NO: 3505142 - RNA, 23 nt, Human
auguaaaucccauuauucaaagu

SEQ ID NO: 3505143 - RNA, 23 nt, Human
auguaaaugucucacugagcacu

SEQ ID NO: 3505144 - RNA, 12 nt, Human
auguaaaugugc

SEQ ID NO: 3505145 - RNA, 20 nt, Human
auguaaauuaccaguaaagu

SEQ ID NO: 3505146 - RNA, 18 nt, Human
auguaaauugacuguacu

SEQ ID NO: 3505147 - RNA, 12 nt, Human
auguaaauuugu

SEQ ID NO: 3505148 - RNA, 13 nt, Human
auguaaauuugua

SEQ ID NO: 3505149 - RNA, 14 nt, Human
auguaaauuuguac

SEQ ID NO: 3505150 - RNA, 19 nt, Human
auguaaauuuguacuauuu

SEQ ID NO: 3505151 - RNA, 13 nt, Human
auguaacagucug

SEQ ID NO: 3505152 - RNA, 17 nt, Human
auguaacugccuagaaa

SEQ ID NO: 3505153 - RNA, 18 nt, Human
auguaacugccuagaaac

SEQ ID NO: 3505154 - RNA, 14 nt, Human
auguaacugcucuu

SEQ ID NO: 3505155 - RNA, 14 nt, Human
auguaacuuuugua

SEQ ID NO: 3505156 - RNA, 16 nt, Human
auguaagagcuuuaca

SEQ ID NO: 3505157 - RNA, 19 nt, Human
auguaagagcuuuacaaaa

SEQ ID NO: 3505158 - RNA, 17 nt, Human
auguaagauuauagauu

SEQ ID NO: 3505159 - RNA, 21 nt, Human
auguaagauuauagauucuaa

SEQ ID NO: 3505160 - RNA, 22 nt, Human
auguaagauuauagauucuaaa

SEQ ID NO: 3505161 - RNA, 15 nt, Human
auguaagcauacuuu

SEQ ID NO: 3505162 - RNA, 20 nt, Human
auguaaggaaugcuuggaau

SEQ ID NO: 3505163 - RNA, 14 nt, Human
auguaagggaaacu

SEQ ID NO: 3505164 - RNA, 13 nt, Human
auguaagguauau

SEQ ID NO: 3505165 - RNA, 14 nt, Human
auguaauaauguga

SEQ ID NO: 3505166 - RNA, 12 nt, Human
auguaauacuuc

SEQ ID NO: 3505167 - RNA, 17 nt, Human
auguaaugaaguaaagc

SEQ ID NO: 3505168 - RNA, 22 nt, Human
auguaaugaaguaaagccauua

SEQ ID NO: 3505169 - RNA, 18 nt, Human
auguaaugcgauuuuauu

SEQ ID NO: 3505170 - RNA, 21 nt, Human
auguaaugcgauuuuauuacu

SEQ ID NO: 3505171 - RNA, 16 nt, Human
auguaauggcaguuau

SEQ ID NO: 3505172 - RNA, 18 nt, Human
auguaauggcaguuauau

SEQ ID NO: 3505173 - RNA, 21 nt, Human
auguaaugugugguggccuca

SEQ ID NO: 3505174 - RNA, 22 nt, Human
auguaaugugugguggccucag

SEQ ID NO: 3505175 - RNA, 23 nt, Human
auguaauguuuucuuugcaaagu

SEQ ID NO: 3505176 - RNA, 15 nt, Human
auguaauuauuuaug

SEQ ID NO: 3505177 - RNA, 11 nt, Human
auguaauuguu

SEQ ID NO: 3505178 - RNA, 17 nt, Human
auguaauuuaaaugaaa

SEQ ID NO: 3505179 - RNA, 21 nt, Human
auguaauuucaggaggaauac

SEQ ID NO: 3505180 - RNA, 17 nt, Human
auguaauuuuguguaag

SEQ ID NO: 3505181 - RNA, 21 nt, Human
auguacaaaauaaaguuacau

SEQ ID NO: 3505182 - RNA, 20 nt, Human
auguacaauaagaacuucua

SEQ ID NO: 3505183 - RNA, 14 nt, Human
auguacaauauuuu

SEQ ID NO: 3505184 - RNA, 20 nt, Human
auguacaauauuuuaagcau

SEQ ID NO: 3505185 - RNA, 21 nt, Human
auguacaauauuuuaagcauu

SEQ ID NO: 3505186 - RNA, 23 nt, Human
auguacagagaacuaacacuauu

SEQ ID NO: 3505187 - RNA, 14 nt, Human
auguacagauucuu

SEQ ID NO: 3505188 - RNA, 15 nt, Human
auguacagauucuuu

SEQ ID NO: 3505189 - RNA, 16 nt, Human
auguacagucugucau

SEQ ID NO: 3505190 - RNA, 15 nt, Human
auguacaugagaagg

SEQ ID NO: 3505191 - RNA, 13 nt, Human
auguacauguauu

SEQ ID NO: 3505192 - RNA, 18 nt, Human
auguaccauuugcauggc

SEQ ID NO: 3505193 - RNA, 22 nt, Human
auguaccauuugcauggcucca

SEQ ID NO: 3505194 - RNA, 20 nt, Human
auguacccaccgggccacuc

SEQ ID NO: 3505195 - RNA, 18 nt, Human
auguacccucugaaauac

SEQ ID NO: 3505196 - RNA, 17 nt, Human
auguaccuccccugccu

SEQ ID NO: 3505197 - RNA, 15 nt, Human
auguaccucuuuuag

SEQ ID NO: 3505198 - RNA, 20 nt, Human
auguacgaugagaaauucaa

SEQ ID NO: 3505199 - RNA, 20 nt, Human
auguacuaggauacugcugc

SEQ ID NO: 3505200 - RNA, 17 nt, Human
auguacuaguacugugu

SEQ ID NO: 3505201 - RNA, 15 nt, Human
auguacuaguguucu

SEQ ID NO: 3505202 - RNA, 22 nt, Human
auguacuaguguucuguuuguu

SEQ ID NO: 3505203 - RNA, 17 nt, Human
auguacuccucuuuaca

SEQ ID NO: 3505204 - RNA, 14 nt, Human
auguacugagauuu

SEQ ID NO: 3505205 - RNA, 18 nt, Human
auguacugagccuuguaa

SEQ ID NO: 3505206 - RNA, 16 nt, Human
auguacugauugagaa

SEQ ID NO: 3505207 - RNA, 18 nt, Human
auguacugauugagaagu

SEQ ID NO: 3505208 - RNA, 16 nt, Human
auguacugauuucagu

SEQ ID NO: 3505209 - RNA, 13 nt, Human
auguacugcauua

SEQ ID NO: 3505210 - RNA, 12 nt, Human
auguacuguacu

SEQ ID NO: 3505211 - RNA, 18 nt, Human
auguacuugucaaagaag

SEQ ID NO: 3505212 - RNA, 19 nt, Human
auguacuugucaaagaagg

SEQ ID NO: 3505213 - RNA, 15 nt, Human
auguacuuuuuagua

SEQ ID NO: 3505214 - RNA, 14 nt, Human
auguagaaaauuug

SEQ ID NO: 3505215 - RNA, 19 nt, Human
auguagacuauauacaugu

SEQ ID NO: 3505216 - RNA, 20 nt, Human
auguagacuauauacaugug

SEQ ID NO: 3505217 - RNA, 12 nt, Human
auguagaggaga

SEQ ID NO: 3505218 - RNA, 19 nt, Human
auguagauaaacucagaaa

SEQ ID NO: 3505219 - RNA, 23 nt, Human
auguagauauugugaaguacaua

SEQ ID NO: 3505220 - RNA, 13 nt, Human
auguagauauuug

SEQ ID NO: 3505221 - RNA, 18 nt, Human
auguagauguaugcacac

SEQ ID NO: 3505222 - RNA, 21 nt, Human
auguagcaaaauacaugacau

SEQ ID NO: 3505223 - RNA, 15 nt, Human
cacuccuuccugccc

SEQ ID NO: 3505224 - RNA, 16 nt, Human
cacucgcccgcccacu

SEQ ID NO: 3505225 - RNA, 18 nt, Human
cacucgcccgcccacugu

SEQ ID NO: 3505226 - RNA, 22 nt, Human
cacucgcccgcccacuguccug

SEQ ID NO: 3505227 - RNA, 20 nt, Human
cacucgcuagcaguggcagg

SEQ ID NO: 3505228 - RNA, 13 nt, Human
cacucgcuucccc

SEQ ID NO: 3505229 - RNA, 16 nt, Human
cacucgcuucccccau

SEQ ID NO: 3505230 - RNA, 20 nt, Human
cacucgcuucccccauagcc

SEQ ID NO: 3505231 - RNA, 14 nt, Human
cacucggucccagu

SEQ ID NO: 3505232 - RNA, 13 nt, Human
cacucgucucccc

SEQ ID NO: 3505233 - RNA, 17 nt, Human
cacucgugcaucccuga

SEQ ID NO: 3505234 - RNA, 22 nt, Human
cacucgugugcaacagacaagu

SEQ ID NO: 3505235 - RNA, 13 nt, Human
cacucuaaagcaa

SEQ ID NO: 3505236 - RNA, 16 nt, Human
cacucuaacuguauau

SEQ ID NO: 3505237 - RNA, 21 nt, Human
cacucuaagauguuauauuuu

SEQ ID NO: 3505238 - RNA, 18 nt, Human
cacucuaagucauguaug

SEQ ID NO: 3505239 - RNA, 22 nt, Human
cacucuaagucauguauguuuc

SEQ ID NO: 3505240 - RNA, 17 nt, Human
cacucuacccuauacaa

SEQ ID NO: 3505241 - RNA, 19 nt, Human
cacucuacccucccacccc

SEQ ID NO: 3505242 - RNA, 15 nt, Human
cacucuagccugggc

SEQ ID NO: 3505243 - RNA, 22 nt, Human
cacucuaggggucaggcuccau

SEQ ID NO: 3505244 - RNA, 14 nt, Human
cacucucagaggcc

SEQ ID NO: 3505245 - RNA, 17 nt, Human
cacucucagaggcccca

SEQ ID NO: 3505246 - RNA, 13 nt, Human
cacucuccaucac

SEQ ID NO: 3505247 - RNA, 21 nt, Human
cacucuccccacacuaaccug

SEQ ID NO: 3505248 - RNA, 20 nt, Human
cacucucccccacccccucc

SEQ ID NO: 3505249 - RNA, 15 nt, Human
cacucuccugggccc

SEQ ID NO: 3505250 - RNA, 20 nt, Human
cacucuccugggccccuccc

SEQ ID NO: 3505251 - RNA, 21 nt, Human
cacucuccuugcuacccagaa

SEQ ID NO: 3505252 - RNA, 20 nt, Human
cacucucugaagaugaucau

SEQ ID NO: 3505253 - RNA, 23 nt, Human
cacucucugaagaugaucauuug

SEQ ID NO: 3505254 - RNA, 14 nt, Human
cacucucuggaagc

SEQ ID NO: 3505255 - RNA, 23 nt, Human
cacucugagacucgcgacaaugc

SEQ ID NO: 3505256 - RNA, 23 nt, Human
cacucugaguuuaccauuuguaa

SEQ ID NO: 3505257 - RNA, 16 nt, Human
cacucugauagaauua

SEQ ID NO: 3505258 - RNA, 15 nt, Human
cacucugcagacugc

SEQ ID NO: 3505259 - RNA, 17 nt, Human
cacucugccagcaaaga

SEQ ID NO: 3505260 - RNA, 15 nt, Human
cacucugccagggca

SEQ ID NO: 3505261 - RNA, 17 nt, Human
cacucugcuaccuugcc

SEQ ID NO: 3505262 - RNA, 12 nt, Human
cacucugcucug

SEQ ID NO: 3505263 - RNA, 14 nt, Human
cacucugcugcuua

SEQ ID NO: 3505264 - RNA, 15 nt, Human
cacucugcuucucug

SEQ ID NO: 3505265 - RNA, 17 nt, Human
cacucugcuucucugac

SEQ ID NO: 3505266 - RNA, 22 nt, Human
cacucuggcagcaccgccucuu

SEQ ID NO: 3505267 - RNA, 15 nt, Human
cacucuggcagccac

SEQ ID NO: 3505268 - RNA, 16 nt, Human
cacucuggcagccaca

SEQ ID NO: 3505269 - RNA, 15 nt, Human
auguugagagguucu

SEQ ID NO: 3505270 - RNA, 20 nt, Human
auguugagggaacagacagg

SEQ ID NO: 3505271 - RNA, 15 nt, Human
auguugauuucuagu

SEQ ID NO: 3505272 - RNA, 17 nt, Human
auguugauuuuuacugu

SEQ ID NO: 3505273 - RNA, 22 nt, Human
auguugcacacccacucagcuc

SEQ ID NO: 3505274 - RNA, 15 nt, Human
auguugcauagaaua

SEQ ID NO: 3505275 - RNA, 22 nt, Human
auguugccaaaaugguggccug

SEQ ID NO: 3505276 - RNA, 22 nt, Human
auguugccauccuaccgucuuu

SEQ ID NO: 3505277 - RNA, 18 nt, Human
auguugccauguguuuua

SEQ ID NO: 3505278 - RNA, 17 nt, Human
auguugcccaggcaggu

SEQ ID NO: 3505279 - RNA, 20 nt, Human
auguugcccuguugcugccu

SEQ ID NO: 3505280 - RNA, 15 nt, Human
cacuucuuccuuucu

SEQ ID NO: 3505281 - RNA, 21 nt, Human
cacuucuuucccuuccuccau

SEQ ID NO: 3505282 - RNA, 14 nt, Human
cacuugaaaccuuu

SEQ ID NO: 3505283 - RNA, 21 nt, Human
cacuugaaaccuuuuuuuauc

SEQ ID NO: 3505284 - RNA, 17 nt, Human
cacuugaaauucuuuca

SEQ ID NO: 3505285 - RNA, 21 nt, Human
cacuugaaccauaguuacugu

SEQ ID NO: 3505286 - RNA, 21 nt, Human
cacuugaacccgggaggcaga

SEQ ID NO: 3505287 - RNA, 15 nt, Human
cacuugaauccuagg

SEQ ID NO: 3505288 - RNA, 19 nt, Human
cacuugacaucaacugcau

SEQ ID NO: 3505289 - RNA, 15 nt, Human
cacuugagaugauuu

SEQ ID NO: 3505290 - RNA, 12 nt, Human
cacuugcaaccu

SEQ ID NO: 3505291 - RNA, 12 nt, Human
cacuugcauguc

SEQ ID NO: 3505292 - RNA, 12 nt, Human
cacuugccucuu

SEQ ID NO: 3505293 - RNA, 14 nt, Human
cacuugccucuucc

SEQ ID NO: 3505294 - RNA, 15 nt, Human
cacuugcuacccuga

SEQ ID NO: 3505295 - RNA, 20 nt, Human
cacuugcugcacucuugcac

SEQ ID NO: 3505296 - RNA, 14 nt, Human
cacuuggcagccuu

SEQ ID NO: 3505297 - RNA, 14 nt, Human
cacuuggcagcgcg

SEQ ID NO: 3505298 - RNA, 19 nt, Human
cacuuggcccaaguggcag

SEQ ID NO: 3505299 - RNA, 23 nt, Human
cacuuggcugcauaaauguggua

SEQ ID NO: 3505300 - RNA, 19 nt, Human
cacuuggggagauuugcca

SEQ ID NO: 3505301 - RNA, 22 nt, Human
cacuuggggcaccuugcuccuc

SEQ ID NO: 3505302 - RNA, 17 nt, Human
cacuugggggcucagca

SEQ ID NO: 3505303 - RNA, 15 nt, Human
cacuuggucugccag

SEQ ID NO: 3505304 - RNA, 16 nt, Human
cacuuggucugccagg

SEQ ID NO: 3505305 - RNA, 18 nt, Human
cacuuggucugccaggcc

SEQ ID NO: 3505306 - RNA, 17 nt, Human
cacuuggucugugagau

SEQ ID NO: 3505307 - RNA, 18 nt, Human
cacuuggucugugagaug

SEQ ID NO: 3505308 - RNA, 20 nt, Human
cacuuguaauuuuguaucuu

SEQ ID NO: 3505309 - RNA, 15 nt, Human
cacuuguagauuuga

SEQ ID NO: 3505310 - RNA, 14 nt, Human
cacuuguaggauaa

SEQ ID NO: 3505311 - RNA, 23 nt, Human
cacuuguaggauaagugaaaugg

SEQ ID NO: 3505312 - RNA, 20 nt, Human
cacuugucacugacacaaag

SEQ ID NO: 3505313 - RNA, 16 nt, Human
cacuugucaggagugu

SEQ ID NO: 3505314 - RNA, 22 nt, Human
cacuugucaggaguguguguga

SEQ ID NO: 3505315 - RNA, 15 nt, Human
cacuuguccagcuga

SEQ ID NO: 3505316 - RNA, 23 nt, Human
cacuuguccagcugagcgccagg

SEQ ID NO: 3505317 - RNA, 20 nt, Human
cacuuguccccaaauccgaa

SEQ ID NO: 3505318 - RNA, 23 nt, Human
cacuuguccccaaauccgaaccu

SEQ ID NO: 3505319 - RNA, 21 nt, Human
cacuugucggcuccagucccc

SEQ ID NO: 3505320 - RNA, 16 nt, Human
cacuugucucauuuua

SEQ ID NO: 3505321 - RNA, 18 nt, Human
cacuugugacuuuugcuu

SEQ ID NO: 3505322 - RNA, 19 nt, Human
cacuugugugugggcugug

SEQ ID NO: 3505323 - RNA, 21 nt, Human
cacuugugugugggcugugag

SEQ ID NO: 3505324 - RNA, 17 nt, Human
cacuuguguuuugcaag

SEQ ID NO: 3505325 - RNA, 18 nt, Human
cacuuguuccagcucuuu

SEQ ID NO: 3505326 - RNA, 14 nt, Human
cacuuguuguuuua

SEQ ID NO: 3505327 - RNA, 19 nt, Human
cacuuuaaaauaucuacau

SEQ ID NO: 3505328 - RNA, 21 nt, Human
cacuuuacaauguucauccca

SEQ ID NO: 3505329 - RNA, 15 nt, Human
cacuuuauuuacuuc

SEQ ID NO: 3505330 - RNA, 12 nt, Human
cacuuucaaaac

SEQ ID NO: 3505331 - RNA, 21 nt, Human
cacuuucaaucuucaauccuu

SEQ ID NO: 3505332 - RNA, 18 nt, Human
cacuuucagcugucuuuu

SEQ ID NO: 3505333 - RNA, 14 nt, Human
cacuuucaggaaca

SEQ ID NO: 3505334 - RNA, 14 nt, Human
cacuuucauugcca

SEQ ID NO: 3505335 - RNA, 17 nt, Human
cacuuucauugccagug

SEQ ID NO: 3505336 - RNA, 14 nt, Human
cacuuuccaaguca

SEQ ID NO: 3505337 - RNA, 12 nt, Human
cacuuuccacuu

SEQ ID NO: 3505338 - RNA, 22 nt, Human
cacuuuccacuucuuccuuucu

SEQ ID NO: 3505339 - RNA, 23 nt, Human
cacuuucuacaaugugaacuuua

SEQ ID NO: 3505340 - RNA, 22 nt, Human
cacuuucuagccagaggagaga

SEQ ID NO: 3505341 - RNA, 12 nt, Human
cacuuugaaaua

SEQ ID NO: 3505342 - RNA, 18 nt, Human
cacuuugaaauaccucau

SEQ ID NO: 3505343 - RNA, 15 nt, Human
cacuuugaaaugugu

SEQ ID NO: 3505344 - RNA, 18 nt, Human
cacuuugaagucuauaaa

SEQ ID NO: 3505345 - RNA, 17 nt, Human
cacuuugagccugggaa

SEQ ID NO: 3505346 - RNA, 19 nt, Human
cacuuugagccugggaaau

SEQ ID NO: 3505347 - RNA, 13 nt, Human
cacuuugcacauu

SEQ ID NO: 3505348 - RNA, 14 nt, Human
cacuuugcacauuu

SEQ ID NO: 3505349 - RNA, 15 nt, Human
cacuuugcacauuuu

SEQ ID NO: 3505350 - RNA, 19 nt, Human
cacuuugcacgacgcccuc

SEQ ID NO: 3505351 - RNA, 19 nt, Human
cacuuugcucuggguggaa

SEQ ID NO: 3505352 - RNA, 19 nt, Human
cacuuugcuuuaauauaaa

SEQ ID NO: 3505353 - RNA, 20 nt, Human
cacuuugcuuuaauauaaau

SEQ ID NO: 3505354 - RNA, 23 nt, Human
cacuuuggcuuauaauucuuuca

SEQ ID NO: 3505355 - RNA, 14 nt, Human
cacuuugggaggcc

SEQ ID NO: 3505356 - RNA, 23 nt, Human
cacuuugggaggccaaggagggc

SEQ ID NO: 3505357 - RNA, 14 nt, Human
cacuuuguugcaag

SEQ ID NO: 3505358 - RNA, 22 nt, Human
cacuuuguugcaagaugugaau

SEQ ID NO: 3505359 - RNA, 13 nt, Human
cacuuuucaguga

SEQ ID NO: 3505360 - RNA, 16 nt, Human
cacuuuuccaguauuu

SEQ ID NO: 3505361 - RNA, 21 nt, Human
cacuuuuucuuuacaaacaaa

SEQ ID NO: 3505362 - RNA, 16 nt, Human
cacuuuuugaacuaag

SEQ ID NO: 3505363 - RNA, 14 nt, Human
cacuuuuugcagcu

SEQ ID NO: 3505364 - RNA, 18 nt, Human
cacuuuuugcagcuuucu

SEQ ID NO: 3505365 - RNA, 22 nt, Human
cacuuuuuuggggguaaaaaau

SEQ ID NO: 3505366 - RNA, 11 nt, Human
cagaaaaaagg

SEQ ID NO: 3505367 - RNA, 16 nt, Human
cagaaaaacaauaaga

SEQ ID NO: 3505368 - RNA, 22 nt, Human
cagaaaaacaaugguaacauuu

SEQ ID NO: 3505369 - RNA, 22 nt, Human
cagaaaaaccaacaucuacaaa

SEQ ID NO: 3505370 - RNA, 15 nt, Human
cagaaaaaccuuggg

SEQ ID NO: 3505371 - RNA, 19 nt, Human
cagaaaaacguguugccuu

SEQ ID NO: 3505372 - RNA, 13 nt, Human
cagaaaacaaaac

SEQ ID NO: 3505373 - RNA, 15 nt, Human
cagaaaacaaaacug

SEQ ID NO: 3505374 - RNA, 14 nt, Human
cagaaaacaacaaa

SEQ ID NO: 3505375 - RNA, 16 nt, Human
cagaaaacaacaaaaa

SEQ ID NO: 3505376 - RNA, 13 nt, Human
cagaaaacagaaa

SEQ ID NO: 3505377 - RNA, 17 nt, Human
cagaaaacagaaaaaaa

SEQ ID NO: 3505378 - RNA, 12 nt, Human
cagaaaacauug

SEQ ID NO: 3505379 - RNA, 16 nt, Human
cagaaaacauuguucc

SEQ ID NO: 3505380 - RNA, 19 nt, Human
cagaaaacccuugggccag

SEQ ID NO: 3505381 - RNA, 23 nt, Human
cagaaaacccuugggccagaagu

SEQ ID NO: 3505382 - RNA, 16 nt, Human
cagaaaacgggaagcg

SEQ ID NO: 3505383 - RNA, 15 nt, Human
cagaaaacuuuaaaa

SEQ ID NO: 3505384 - RNA, 23 nt, Human
cagaaaagaaagcuacagaagaa

SEQ ID NO: 3505385 - RNA, 14 nt, Human
cagaaaaggacaga

SEQ ID NO: 3505386 - RNA, 17 nt, Human
cagaaaaguugaauuuu

SEQ ID NO: 3505387 - RNA, 20 nt, Human
cagaaaaguugaauuuuaca

SEQ ID NO: 3505388 - RNA, 23 nt, Human
cagaaaauaaggcacccaucugu

SEQ ID NO: 3505389 - RNA, 14 nt, Human
cagaaaauauguau

SEQ ID NO: 3505390 - RNA, 20 nt, Human
cagaaaauauguauuaacac

SEQ ID NO: 3505391 - RNA, 14 nt, Human
cagaaaaugaaaaa

SEQ ID NO: 3505392 - RNA, 19 nt, Human
cagaaaaugaacacagcag

SEQ ID NO: 3505393 - RNA, 18 nt, Human
cagaaaauguugagaauc

SEQ ID NO: 3505394 - RNA, 14 nt, Human
cagaaaauucugug

SEQ ID NO: 3505395 - RNA, 23 nt, Human
cagaaaauucugugccuuguuuu

SEQ ID NO: 3505396 - RNA, 16 nt, Human
cagaaaauugcacaau

SEQ ID NO: 3505397 - RNA, 15 nt, Human
cagaaacacccacag

SEQ ID NO: 3505398 - RNA, 17 nt, Human
cagaaacacccacaggc

SEQ ID NO: 3505399 - RNA, 21 nt, Human
cagaaacacccucacacuggg

SEQ ID NO: 3505400 - RNA, 14 nt, Human
cagaaacacugccu

SEQ ID NO: 3505401 - RNA, 15 nt, Human
cagaaacacugccuu

SEQ ID NO: 3505402 - RNA, 15 nt, Human
cagaaacagugaguu

SEQ ID NO: 3505403 - RNA, 17 nt, Human
cagaaacaucaguuacu

SEQ ID NO: 3505404 - RNA, 19 nt, Human
cagaaacaucaguuacucu

SEQ ID NO: 3505405 - RNA, 14 nt, Human
cagaaaccaguuau

SEQ ID NO: 3505406 - RNA, 16 nt, Human
cagaaacccugagcag

SEQ ID NO: 3505407 - RNA, 22 nt, Human
cagaaaccuauccucacugccc

SEQ ID NO: 3505408 - RNA, 18 nt, Human
cagaaaccuuccugcuga

SEQ ID NO: 3505409 - RNA, 17 nt, Human
cagaaacgccacauccc

SEQ ID NO: 3505410 - RNA, 19 nt, Human
cagaaacuguucccaccug

SEQ ID NO: 3505411 - RNA, 16 nt, Human
cagaaacuuguucuuc

SEQ ID NO: 3505412 - RNA, 18 nt, Human
cagaaacuuguucuucca

SEQ ID NO: 3505413 - RNA, 13 nt, Human
auguuuuguaaga

SEQ ID NO: 3505414 - RNA, 20 nt, Human
auguuuuguauacaaauaua

SEQ ID NO: 3505415 - RNA, 14 nt, Human
auguuuugugacua

SEQ ID NO: 3505416 - RNA, 19 nt, Human
auguuuugugacuauauag

SEQ ID NO: 3505417 - RNA, 22 nt, Human
auguuuugugcauuuguaaaug

SEQ ID NO: 3505418 - RNA, 18 nt, Human
auguuuugugggaacaga

SEQ ID NO: 3505419 - RNA, 14 nt, Human
auguuuuguuucug

SEQ ID NO: 3505420 - RNA, 23 nt, Human
auguuuuuaaaaguuucaaugug

SEQ ID NO: 3505421 - RNA, 16 nt, Human
auguuuuuaaaaucuu

SEQ ID NO: 3505422 - RNA, 16 nt, Human
auguuuuuaaauauau

SEQ ID NO: 3505423 - RNA, 15 nt, Human
auguuuuuaauaaaa

SEQ ID NO: 3505424 - RNA, 19 nt, Human
auguuuuuaauaaaagaaa

SEQ ID NO: 3505425 - RNA, 14 nt, Human
auguuuuuaaugua

SEQ ID NO: 3505426 - RNA, 18 nt, Human
auguuuuuauacaaaaua

SEQ ID NO: 3505427 - RNA, 16 nt, Human
auguuuuuaugauauc

SEQ ID NO: 3505428 - RNA, 16 nt, Human
auguuuuucaguucaa

SEQ ID NO: 3505429 - RNA, 17 nt, Human
auguuuuucaguucaaa

SEQ ID NO: 3505430 - RNA, 22 nt, Human
auguuuuucaguucaaagucau

SEQ ID NO: 3505431 - RNA, 15 nt, Human
auguuuuucaugaaa

SEQ ID NO: 3505432 - RNA, 14 nt, Human
auguuuuucuaaag

SEQ ID NO: 3505433 - RNA, 17 nt, Human
auguuuuugaaacagaa

SEQ ID NO: 3505434 - RNA, 12 nt, Human
auguuuuugaag

SEQ ID NO: 3505435 - RNA, 15 nt, Human
auguuuuugaaggca

SEQ ID NO: 3505436 - RNA, 22 nt, Human
auguuuuugaucaaaaacuauu

SEQ ID NO: 3505437 - RNA, 18 nt, Human
auguuuuuguacucugca

SEQ ID NO: 3505438 - RNA, 17 nt, Human
auguuuuuguguauuug

SEQ ID NO: 3505439 - RNA, 22 nt, Human
auguuuuuuaaaauauuuaucu

SEQ ID NO: 3505440 - RNA, 16 nt, Human
auguuuuuuauuaugc

SEQ ID NO: 3505441 - RNA, 12 nt, Human
auguuuuuugcc

SEQ ID NO: 3505442 - RNA, 12 nt, Human
auuaaaaaacaa

SEQ ID NO: 3505443 - RNA, 13 nt, Human
auuaaaaaagaua

SEQ ID NO: 3505444 - RNA, 20 nt, Human
auuaaaaaaucaguuguaca

SEQ ID NO: 3505445 - RNA, 16 nt, Human
cagaaguuaguuugua

SEQ ID NO: 3505446 - RNA, 18 nt, Human
cagaaguuaguuuguaua

SEQ ID NO: 3505447 - RNA, 14 nt, Human
cagaaguuuaaaua

SEQ ID NO: 3505448 - RNA, 15 nt, Human
cagaaguuucucagc

SEQ ID NO: 3505449 - RNA, 19 nt, Human
cagaaguuucucagcuccc

SEQ ID NO: 3505450 - RNA, 22 nt, Human
cagaaguuugagaucagccugg

SEQ ID NO: 3505451 - RNA, 16 nt, Human
cagaaguuugcacuau

SEQ ID NO: 3505452 - RNA, 18 nt, Human
cagaaguuugcacuaucu

SEQ ID NO: 3505453 - RNA, 19 nt, Human
cagaaguuugucaagucaa

SEQ ID NO: 3505454 - RNA, 16 nt, Human
cagaauaaagcaauuu

SEQ ID NO: 3505455 - RNA, 23 nt, Human
cagaauaaagcaauuuuccuuga

SEQ ID NO: 3505456 - RNA, 18 nt, Human
cagaauaaggcaggcauu

SEQ ID NO: 3505457 - RNA, 20 nt, Human
cagaauaaggcaggcauuga

SEQ ID NO: 3505458 - RNA, 23 nt, Human
cagaauaaguuauugcaguuuau

SEQ ID NO: 3505459 - RNA, 14 nt, Human
cagaauaaugaaug

SEQ ID NO: 3505460 - RNA, 18 nt, Human
cagaauaauguucuauug

SEQ ID NO: 3505461 - RNA, 15 nt, Human
cagaauacugaugga

SEQ ID NO: 3505462 - RNA, 19 nt, Human
cagaauagauagcacugaa

SEQ ID NO: 3505463 - RNA, 22 nt, Human
cagaauagccacauuuggaaua

SEQ ID NO: 3505464 - RNA, 12 nt, Human
cagaauaucugg

SEQ ID NO: 3505465 - RNA, 12 nt, Human
cagaauauguuu

SEQ ID NO: 3505466 - RNA, 18 nt, Human
cagaauauguuucaaacu

SEQ ID NO: 3505467 - RNA, 13 nt, Human
cagaauauugcuu

SEQ ID NO: 3505468 - RNA, 13 nt, Human
cagaauauuuuua

SEQ ID NO: 3505469 - RNA, 21 nt, Human
cagaauauuuuuauauuuccu

SEQ ID NO: 3505470 - RNA, 21 nt, Human
cagaaucauaugauucugcuu

SEQ ID NO: 3505471 - RNA, 20 nt, Human
cagaaucauugcuuaugaca

SEQ ID NO: 3505472 - RNA, 20 nt, Human
cagaaucccucuacauggac

SEQ ID NO: 3505473 - RNA, 15 nt, Human
cagaauccuggcccu

SEQ ID NO: 3505474 - RNA, 23 nt, Human
cagaaucgcuccaccuugcagcu

SEQ ID NO: 3505475 - RNA, 15 nt, Human
cagaaucuaaagcca

SEQ ID NO: 3505476 - RNA, 17 nt, Human
cagaaucucaaauaacu

SEQ ID NO: 3505477 - RNA, 15 nt, Human
cagaaucugaaugua

SEQ ID NO: 3505478 - RNA, 12 nt, Human
cagaaucuguau

SEQ ID NO: 3505479 - RNA, 13 nt, Human
cagaaucuuuguu

SEQ ID NO: 3505480 - RNA, 12 nt, Human
cagaaugaaaaa

SEQ ID NO: 3505481 - RNA, 13 nt, Human
cagaaugaaaaau

SEQ ID NO: 3505482 - RNA, 14 nt, Human
cagaaugaaaaaug

SEQ ID NO: 3505483 - RNA, 16 nt, Human
cagaaugaaaaaugaa

SEQ ID NO: 3505484 - RNA, 17 nt, Human
cagaaugaaaaaugaaa

SEQ ID NO: 3505485 - RNA, 18 nt, Human
cagaaugaaaaaugaaag

SEQ ID NO: 3505486 - RNA, 21 nt, Human
cagaaugaaaaaugaaagaug

SEQ ID NO: 3505487 - RNA, 23 nt, Human
cagaaugaaaaaugaaagaugau

SEQ ID NO: 3505488 - RNA, 18 nt, Human
cagaauggggugcaugaa

SEQ ID NO: 3505489 - RNA, 13 nt, Human
cagaauguaagug

SEQ ID NO: 3505490 - RNA, 18 nt, Human
cagaauguaagugggccc

SEQ ID NO: 3505491 - RNA, 14 nt, Human
cagaauguaucugu

SEQ ID NO: 3505492 - RNA, 12 nt, Human
cagaaugucaga

SEQ ID NO: 3505493 - RNA, 22 nt, Human
cagaaugucagauuccuuuccc

SEQ ID NO: 3505494 - RNA, 21 nt, Human
cagaaugucauuuugguacuu

SEQ ID NO: 3505495 - RNA, 14 nt, Human
cagaaugugauuuc

SEQ ID NO: 3505496 - RNA, 16 nt, Human
cagaauguuuuacugu

SEQ ID NO: 3505497 - RNA, 20 nt, Human
cagaauguuuuacugugaaa

SEQ ID NO: 3505498 - RNA, 15 nt, Human
cagaauuaaacuuuu

SEQ ID NO: 3505499 - RNA, 16 nt, Human
cagaauuaaacuuuua

SEQ ID NO: 3505500 - RNA, 14 nt, Human
cagaauuacuguaa

SEQ ID NO: 3505501 - RNA, 20 nt, Human
cagaauuaugauggaagaca

SEQ ID NO: 3505502 - RNA, 13 nt, Human
cagaauuauuuuu

SEQ ID NO: 3505503 - RNA, 14 nt, Human
cagaauucauucau

SEQ ID NO: 3505504 - RNA, 22 nt, Human
cagaauucauucauacuuaaaa

SEQ ID NO: 3505505 - RNA, 11 nt, Human
cagaauucuca

SEQ ID NO: 3505506 - RNA, 13 nt, Human
cagaauucugcua

SEQ ID NO: 3505507 - RNA, 15 nt, Human
cagaauugaaacacu

SEQ ID NO: 3505508 - RNA, 13 nt, Human
cagaauuggaaaa

SEQ ID NO: 3505509 - RNA, 17 nt, Human
cagaauuggaaaagacu

SEQ ID NO: 3505510 - RNA, 23 nt, Human
cagaauuggauacauacaccagc

SEQ ID NO: 3505511 - RNA, 19 nt, Human
cagaauugugcaaauggaa

SEQ ID NO: 3505512 - RNA, 16 nt, Human
cagaauugugucugca

SEQ ID NO: 3505513 - RNA, 18 nt, Human
cagaauugugucugcagg

SEQ ID NO: 3505514 - RNA, 20 nt, Human
cagaauuuuauacuuucccu

SEQ ID NO: 3505515 - RNA, 21 nt, Human
cagaauuuuauacuuucccua

SEQ ID NO: 3505516 - RNA, 16 nt, Human
cagaauuuuggaagau

SEQ ID NO: 3505517 - RNA, 18 nt, Human
cagaauuuuuuuuguugu

SEQ ID NO: 3505518 - RNA, 18 nt, Human
cagacaaaaacagccuca

SEQ ID NO: 3505519 - RNA, 20 nt, Human
cagacaaaagcgcuuuuccu

SEQ ID NO: 3505520 - RNA, 12 nt, Human
cagacaaagcgu

SEQ ID NO: 3505521 - RNA, 22 nt, Human
cagacaaagcgugguggacaug

SEQ ID NO: 3505522 - RNA, 20 nt, Human
cagacaacaaaccuguuucu

SEQ ID NO: 3505523 - RNA, 17 nt, Human
cagacaacacguuacua

SEQ ID NO: 3505524 - RNA, 16 nt, Human
cagacaacagaaguca

SEQ ID NO: 3505525 - RNA, 17 nt, Human
cagacaacagaagucau

SEQ ID NO: 3505526 - RNA, 22 nt, Human
cagacaagauuuuuuaauuguu

SEQ ID NO: 3505527 - RNA, 15 nt, Human
cagacaagcuguuga

SEQ ID NO: 3505528 - RNA, 21 nt, Human
cagacaagugacuguaucugu

SEQ ID NO: 3505529 - RNA, 18 nt, Human
cagacaauaaacccucag

SEQ ID NO: 3505530 - RNA, 20 nt, Human
cagacaauaaacccucagag

SEQ ID NO: 3505531 - RNA, 22 nt, Human
cagacaauaaacccucagagcc

SEQ ID NO: 3505532 - RNA, 22 nt, Human
cagacaauaugugagugccuuu

SEQ ID NO: 3505533 - RNA, 13 nt, Human
cagacacacacac

SEQ ID NO: 3505534 - RNA, 14 nt, Human
cagacacacacaca

SEQ ID NO: 3505535 - RNA, 16 nt, Human
cagacacacacacgca

SEQ ID NO: 3505536 - RNA, 14 nt, Human
cagacacaggcccg

SEQ ID NO: 3505537 - RNA, 17 nt, Human
cagacacagggacuuga

SEQ ID NO: 3505538 - RNA, 18 nt, Human
cagacacagggacuugaa

SEQ ID NO: 3505539 - RNA, 21 nt, Human
cagacacauguccaagaagcc

SEQ ID NO: 3505540 - RNA, 23 nt, Human
cagacacauguccaagaagccca

SEQ ID NO: 3505541 - RNA, 13 nt, Human
cagacacccaccc

SEQ ID NO: 3505542 - RNA, 14 nt, Human
cagacacccaggac

SEQ ID NO: 3505543 - RNA, 14 nt, Human
cagacacccucaac

SEQ ID NO: 3505544 - RNA, 15 nt, Human
cagacacccucaacc

SEQ ID NO: 3505545 - RNA, 21 nt, Human
cagacacccucaaccucuucu

SEQ ID NO: 3505546 - RNA, 15 nt, Human
cagacaccgccacau

SEQ ID NO: 3505547 - RNA, 22 nt, Human
cagacaccuugacagggcacac

SEQ ID NO: 3505548 - RNA, 19 nt, Human
cagacacuaacgaaauauc

SEQ ID NO: 3505549 - RNA, 12 nt, Human
cagacacuaagu

SEQ ID NO: 3505550 - RNA, 16 nt, Human
cagacacucugcucug

SEQ ID NO: 3505551 - RNA, 14 nt, Human
cagacacuuuggaa

SEQ ID NO: 3505552 - RNA, 20 nt, Human
cagacagaacuugaaugugu

SEQ ID NO: 3505553 - RNA, 15 nt, Human
cagacagacacacac

SEQ ID NO: 3505554 - RNA, 13 nt, Human
cagacagagccag

SEQ ID NO: 3505555 - RNA, 16 nt, Human
cagacagagccaggag

SEQ ID NO: 3505556 - RNA, 23 nt, Human
cagacagagccaggagaagcuca

SEQ ID NO: 3505557 - RNA, 14 nt, Human
cagacagaggauga

SEQ ID NO: 3505558 - RNA, 11 nt, Human
cagacagauga

SEQ ID NO: 3505559 - RNA, 22 nt, Human
caucucugggcuggaugagcuc

SEQ ID NO: 3505560 - RNA, 23 nt, Human
caucucugggcuggaugagcucc

SEQ ID NO: 3505561 - RNA, 18 nt, Human
caucucuguacuuugcuu

SEQ ID NO: 3505562 - RNA, 20 nt, Human
caucucugucccauucccug

SEQ ID NO: 3505563 - RNA, 21 nt, Human
caucucugucccauucccugg

SEQ ID NO: 3505564 - RNA, 23 nt, Human
caucucugucccauucccuggga

SEQ ID NO: 3505565 - RNA, 18 nt, Human
caucucuuagcuccccuc

SEQ ID NO: 3505566 - RNA, 13 nt, Human
caucucuuugaau

SEQ ID NO: 3505567 - RNA, 19 nt, Human
caucucuuugaauuuucug

SEQ ID NO: 3505568 - RNA, 14 nt, Human
caucugaaagccac

SEQ ID NO: 3505569 - RNA, 15 nt, Human
caucugaagagcaga

SEQ ID NO: 3505570 - RNA, 19 nt, Human
caucugaaggggcaaauuc

SEQ ID NO: 3505571 - RNA, 19 nt, Human
caucugaauuugcccuggg

SEQ ID NO: 3505572 - RNA, 15 nt, Human
caucugacacaaaaa

SEQ ID NO: 3505573 - RNA, 17 nt, Human
caucugaccagcagcgc

SEQ ID NO: 3505574 - RNA, 17 nt, Human
caucugacuaugacaua

SEQ ID NO: 3505575 - RNA, 18 nt, Human
caucugacucacaagaag

SEQ ID NO: 3505576 - RNA, 23 nt, Human
caucugagaaaagcuuugaaccc

SEQ ID NO: 3505577 - RNA, 15 nt, Human
caucugagcaagagc

SEQ ID NO: 3505578 - RNA, 18 nt, Human
caucugagcaagagcugg

SEQ ID NO: 3505579 - RNA, 16 nt, Human
caucugaggcauccag

SEQ ID NO: 3505580 - RNA, 17 nt, Human
caucugaggcauccagc

SEQ ID NO: 3505581 - RNA, 15 nt, Human
caucugagguuuuau

SEQ ID NO: 3505582 - RNA, 18 nt, Human
caucugaugccgugaucc

SEQ ID NO: 3505583 - RNA, 13 nt, Human
caucugauuugca

SEQ ID NO: 3505584 - RNA, 15 nt, Human
caucugauuugcaua

SEQ ID NO: 3505585 - RNA, 17 nt, Human
caucugcaccccuucuc

SEQ ID NO: 3505586 - RNA, 16 nt, Human
caucugcacccuucuu

SEQ ID NO: 3505587 - RNA, 22 nt, Human
caucugcacccuucuuuucuca

SEQ ID NO: 3505588 - RNA, 18 nt, Human
caucugcauugcccaguc

SEQ ID NO: 3505589 - RNA, 20 nt, Human
caucugcauuuucaccccac

SEQ ID NO: 3505590 - RNA, 13 nt, Human
caucugcccaggg

SEQ ID NO: 3505591 - RNA, 23 nt, Human
caucugcccaggggugcccccuc

SEQ ID NO: 3505592 - RNA, 16 nt, Human
caucugccccacaguc

SEQ ID NO: 3505593 - RNA, 22 nt, Human
caucugcgugacaauaaaacau

SEQ ID NO: 3505594 - RNA, 23 nt, Human
caucugcgugacaauaaaacauu

SEQ ID NO: 3505595 - RNA, 11 nt, Human
caucugcuccu

SEQ ID NO: 3505596 - RNA, 16 nt, Human
caucugcucuccuucc

SEQ ID NO: 3505597 - RNA, 18 nt, Human
caucugcucuccuuccug

SEQ ID NO: 3505598 - RNA, 12 nt, Human
caucugcugucu

SEQ ID NO: 3505599 - RNA, 16 nt, Human
caucuggaaaauaaaa

SEQ ID NO: 3505600 - RNA, 19 nt, Human
caucuggaaccaucagaaa

SEQ ID NO: 3505601 - RNA, 14 nt, Human
caucuggaagauca

SEQ ID NO: 3505602 - RNA, 21 nt, Human
caucuggaaggggaucccacc

SEQ ID NO: 3505603 - RNA, 22 nt, Human
caucuggaaguuaaagugaggc

SEQ ID NO: 3505604 - RNA, 16 nt, Human
caucuggaaucuggag

SEQ ID NO: 3505605 - RNA, 21 nt, Human
caucuggaaucuggagaccag

SEQ ID NO: 3505606 - RNA, 23 nt, Human
caguacacugucagcagggacug

SEQ ID NO: 3505607 - RNA, 17 nt, Human
caguacagugguucuac

SEQ ID NO: 3505608 - RNA, 14 nt, Human
caguacaugggaaa

SEQ ID NO: 3505609 - RNA, 16 nt, Human
caguacauuuaauuga

SEQ ID NO: 3505610 - RNA, 14 nt, Human
caguaccaucugaa

SEQ ID NO: 3505611 - RNA, 14 nt, Human
caguacccaccuga

SEQ ID NO: 3505612 - RNA, 15 nt, Human
caguacccaccugag

SEQ ID NO: 3505613 - RNA, 16 nt, Human
caguacccucucagcu

SEQ ID NO: 3505614 - RNA, 20 nt, Human
caguacccucucagcuccag

SEQ ID NO: 3505615 - RNA, 12 nt, Human
caguaccuccug

SEQ ID NO: 3505616 - RNA, 23 nt, Human
caguaccugagggucuguagguu

SEQ ID NO: 3505617 - RNA, 13 nt, Human
caguaccuggagg

SEQ ID NO: 3505618 - RNA, 18 nt, Human
caguacuucagcaagaga

SEQ ID NO: 3505619 - RNA, 19 nt, Human
caguacuucagcaagagag

SEQ ID NO: 3505620 - RNA, 12 nt, Human
caguacuuguca

SEQ ID NO: 3505621 - RNA, 22 nt, Human
caguagaacuccaggcccuccu

SEQ ID NO: 3505622 - RNA, 12 nt, Human
caguagaacugu

SEQ ID NO: 3505623 - RNA, 12 nt, Human
caguagacauuu

SEQ ID NO: 3505624 - RNA, 15 nt, Human
caguagacauuuuaa

SEQ ID NO: 3505625 - RNA, 16 nt, Human
caguagacauuuuaac

SEQ ID NO: 3505626 - RNA, 20 nt, Human
caguagacauuuuaacaaga

SEQ ID NO: 3505627 - RNA, 20 nt, Human
caguagaccuuguuacuucu

SEQ ID NO: 3505628 - RNA, 12 nt, Human
caguagagccag

SEQ ID NO: 3505629 - RNA, 16 nt, Human
caguagagucaucucc

SEQ ID NO: 3505630 - RNA, 23 nt, Human
caguagauuuucuuuaaaagaau

SEQ ID NO: 3505631 - RNA, 21 nt, Human
caguagcacaaguuauuuaaa

SEQ ID NO: 3505632 - RNA, 18 nt, Human
caguagcuuaagaaaaaa

SEQ ID NO: 3505633 - RNA, 22 nt, Human
caguaggagcccagcucugaaa

SEQ ID NO: 3505634 - RNA, 19 nt, Human
caguaggggcuuauaauaa

SEQ ID NO: 3505635 - RNA, 22 nt, Human
caguaggggcuuauaauaaagg

SEQ ID NO: 3505636 - RNA, 22 nt, Human
caguaggugcccagaauaaguu

SEQ ID NO: 3505637 - RNA, 15 nt, Human
caguagguuggcagu

SEQ ID NO: 3505638 - RNA, 23 nt, Human
caguagucucugugcuuugacuc

SEQ ID NO: 3505639 - RNA, 23 nt, Human
caguagucuugaugaccaaaguc

SEQ ID NO: 3505640 - RNA, 18 nt, Human
caguaguuuaaaaguucu

SEQ ID NO: 3505641 - RNA, 22 nt, Human
caguauaaaauuacaguggauu

SEQ ID NO: 3505642 - RNA, 17 nt, Human
caguauaaagaauagga

SEQ ID NO: 3505643 - RNA, 15 nt, Human
caguauaauuaacau

SEQ ID NO: 3505644 - RNA, 12 nt, Human
caguauaauucu

SEQ ID NO: 3505645 - RNA, 14 nt, Human
caguauacaguccu

SEQ ID NO: 3505646 - RNA, 12 nt, Human
caguauagaaua

SEQ ID NO: 3505647 - RNA, 14 nt, Human
caguaucaggccug

SEQ ID NO: 3505648 - RNA, 20 nt, Human
caguaucaugcccugugcaa

SEQ ID NO: 3505649 - RNA, 16 nt, Human
caguaucccacaucca

SEQ ID NO: 3505650 - RNA, 14 nt, Human
caguaucggcacug

SEQ ID NO: 3505651 - RNA, 16 nt, Human
caguaucggcacugua

SEQ ID NO: 3505652 - RNA, 16 nt, Human
caguaucuauauaugu

SEQ ID NO: 3505653 - RNA, 19 nt, Human
caguaucuauauaugugua

SEQ ID NO: 3505654 - RNA, 20 nt, Human
caguaucuauauauguguau

SEQ ID NO: 3505655 - RNA, 22 nt, Human
caguaucuauauauguguaugu

SEQ ID NO: 3505656 - RNA, 16 nt, Human
caguaucucaaacaau

SEQ ID NO: 3505657 - RNA, 16 nt, Human
caguaucucuucaguc

SEQ ID NO: 3505658 - RNA, 17 nt, Human
caguaucucuucagucu

SEQ ID NO: 3505659 - RNA, 19 nt, Human
caguaucucuucagucucu

SEQ ID NO: 3505660 - RNA, 18 nt, Human
caguaucuugaagacuuu

SEQ ID NO: 3505661 - RNA, 21 nt, Human
caguaucuugaagacuuuucu

SEQ ID NO: 3505662 - RNA, 14 nt, Human
caguaugaaaauaa

SEQ ID NO: 3505663 - RNA, 19 nt, Human
caguaugaauuauucaauu

SEQ ID NO: 3505664 - RNA, 21 nt, Human
caguauggguuagggaaaaca

SEQ ID NO: 3505665 - RNA, 15 nt, Human
caguaugguacauuu

SEQ ID NO: 3505666 - RNA, 17 nt, Human
caguaugguacauuuuu

SEQ ID NO: 3505667 - RNA, 21 nt, Human
caguauggucuaacacuggca

SEQ ID NO: 3505668 - RNA, 16 nt, Human
caguaugucccauagg

SEQ ID NO: 3505669 - RNA, 12 nt, Human
caguauguggaa

SEQ ID NO: 3505670 - RNA, 17 nt, Human
caguauguuuuacacug

SEQ ID NO: 3505671 - RNA, 20 nt, Human
caguauguuuuacacuguac

SEQ ID NO: 3505672 - RNA, 20 nt, Human
caguauuaaaggggggaggg

SEQ ID NO: 3505673 - RNA, 13 nt, Human
caguauuauaugu

SEQ ID NO: 3505674 - RNA, 15 nt, Human
caguauuauauguac

SEQ ID NO: 3505675 - RNA, 21 nt, Human
caguauucuagguagugcccu

SEQ ID NO: 3505676 - RNA, 20 nt, Human
caguauuguuuugguuugcu

SEQ ID NO: 3505677 - RNA, 14 nt, Human
caguauuuaacuaa

SEQ ID NO: 3505678 - RNA, 17 nt, Human
caguauuuaacuaauua

SEQ ID NO: 3505679 - RNA, 17 nt, Human
caguauuuagaagccaa

SEQ ID NO: 3505680 - RNA, 17 nt, Human
caguauuuauuuuguaa

SEQ ID NO: 3505681 - RNA, 15 nt, Human
caguauuucauugcc

SEQ ID NO: 3505682 - RNA, 12 nt, Human
caguauuuguaa

SEQ ID NO: 3505683 - RNA, 18 nt, Human
caguauuuguaauuaaaa

SEQ ID NO: 3505684 - RNA, 16 nt, Human
caguauuuguggggag

SEQ ID NO: 3505685 - RNA, 15 nt, Human
caguauuuuagugga

SEQ ID NO: 3505686 - RNA, 17 nt, Human
caguauuuuggagaaau

SEQ ID NO: 3505687 - RNA, 19 nt, Human
caguauuuugguucuuagu

SEQ ID NO: 3505688 - RNA, 14 nt, Human
caguauuuuguguc

SEQ ID NO: 3505689 - RNA, 13 nt, Human
caguauuuuuaaa

SEQ ID NO: 3505690 - RNA, 15 nt, Human
caguauuuuuaaagg

SEQ ID NO: 3505691 - RNA, 17 nt, Human
caguauuuuuaaaggca

SEQ ID NO: 3505692 - RNA, 19 nt, Human
caguauuuuuaaaggcauu

SEQ ID NO: 3505693 - RNA, 20 nt, Human
caguauuuuugcugcuucug

SEQ ID NO: 3505694 - RNA, 22 nt, Human
caguauuuuuguuguguucugu

SEQ ID NO: 3505695 - RNA, 17 nt, Human
caguauuuuuuuuuuua

SEQ ID NO: 3505696 - RNA, 15 nt, Human
cagucaaaacagaga

SEQ ID NO: 3505697 - RNA, 15 nt, Human
cagucaaaauaauuc

SEQ ID NO: 3505698 - RNA, 16 nt, Human
cagucaacaaacuauu

SEQ ID NO: 3505699 - RNA, 15 nt, Human
cagucaaccugggca

SEQ ID NO: 3505700 - RNA, 22 nt, Human
cagucaaccugggcaaagccua

SEQ ID NO: 3505701 - RNA, 22 nt, Human
cagucaagcuguugaagucuca

SEQ ID NO: 3505702 - RNA, 14 nt, Human
cagucaauuacaug

SEQ ID NO: 3505703 - RNA, 16 nt, Human
cagucacaaauuucuc

SEQ ID NO: 3505704 - RNA, 17 nt, Human
cagucuuaugcuuccag

SEQ ID NO: 3505705 - RNA, 17 nt, Human
cagucuuccacaaagaa

SEQ ID NO: 3505706 - RNA, 18 nt, Human
cagucuuccacaaagaaa

SEQ ID NO: 3505707 - RNA, 18 nt, Human
cagucuuccaccuggaag

SEQ ID NO: 3505708 - RNA, 21 nt, Human
cagucuuccauuugcaaggga

SEQ ID NO: 3505709 - RNA, 13 nt, Human
cagucuuccugac

SEQ ID NO: 3505710 - RNA, 15 nt, Human
cagucuugaauuucu

SEQ ID NO: 3505711 - RNA, 22 nt, Human
cagucuugaauuucuaaaaaac

SEQ ID NO: 3505712 - RNA, 23 nt, Human
cagucuugaauuucuaaaaaaca

SEQ ID NO: 3505713 - RNA, 16 nt, Human
cagucuuggcucacug

SEQ ID NO: 3505714 - RNA, 19 nt, Human
cagucuuuaaaggcccagc

SEQ ID NO: 3505715 - RNA, 21 nt, Human
cagucuuuaaaggcccagccc

SEQ ID NO: 3505716 - RNA, 22 nt, Human
cagucuuuaaaggcccagcccc

SEQ ID NO: 3505717 - RNA, 18 nt, Human
cagucuuucaugugugcc

SEQ ID NO: 3505718 - RNA, 14 nt, Human
cagucuuuuucugu

SEQ ID NO: 3505719 - RNA, 18 nt, Human
cagucuuuuucuguugua

SEQ ID NO: 3505720 - RNA, 19 nt, Human
cagucuuuuucuguuguaa

SEQ ID NO: 3505721 - RNA, 18 nt, Human
cagugaaaacaagugcug

SEQ ID NO: 3505722 - RNA, 20 nt, Human
cagugaaaacaagugcuggc

SEQ ID NO: 3505723 - RNA, 21 nt, Human
cagugaaaacaagugcuggca

SEQ ID NO: 3505724 - RNA, 12 nt, Human
cagugaaaaugu

SEQ ID NO: 3505725 - RNA, 18 nt, Human
cagugaaaauguaagcug

SEQ ID NO: 3505726 - RNA, 21 nt, Human
cagugaaaauguaagcuguuu

SEQ ID NO: 3505727 - RNA, 14 nt, Human
cagugaaccaaaga

SEQ ID NO: 3505728 - RNA, 20 nt, Human
cagugaaccaaagagacugg

SEQ ID NO: 3505729 - RNA, 21 nt, Human
cagugaaccaaagagacugga

SEQ ID NO: 3505730 - RNA, 23 nt, Human
cagugaaccaaagagacuggagc

SEQ ID NO: 3505731 - RNA, 14 nt, Human
cagugaagaaagcc

SEQ ID NO: 3505732 - RNA, 14 nt, Human
cagugaagacagaa

SEQ ID NO: 3505733 - RNA, 15 nt, Human
cagugaagacuauga

SEQ ID NO: 3505734 - RNA, 18 nt, Human
cagugaaguugcugcuuc

SEQ ID NO: 3505735 - RNA, 23 nt, Human
cagugaaguugcugcuucuccca

SEQ ID NO: 3505736 - RNA, 21 nt, Human
cagugaauuugcacuguuuaa

SEQ ID NO: 3505737 - RNA, 17 nt, Human
cagugaauuuuugcaau

SEQ ID NO: 3505738 - RNA, 18 nt, Human
cagugaauuuuugcaaua

SEQ ID NO: 3505739 - RNA, 20 nt, Human
cagugaauuuuugcaauaau

SEQ ID NO: 3505740 - RNA, 21 nt, Human
cagugaauuuuugcaauaaug

SEQ ID NO: 3505741 - RNA, 22 nt, Human
cagugaauuuuugcaauaaugc

SEQ ID NO: 3505742 - RNA, 23 nt, Human
cagugaauuuuugcaauaaugca

SEQ ID NO: 3505743 - RNA, 17 nt, Human
cagugacacgucucgcc

SEQ ID NO: 3505744 - RNA, 16 nt, Human
cagugacacuucagag

SEQ ID NO: 3505745 - RNA, 17 nt, Human
cagugacacuucagaga

SEQ ID NO: 3505746 - RNA, 13 nt, Human
cagugacccuggc

SEQ ID NO: 3505747 - RNA, 14 nt, Human
cagugaccugagga

SEQ ID NO: 3505748 - RNA, 18 nt, Human
cagugaccugaggaagcg

SEQ ID NO: 3505749 - RNA, 19 nt, Human
cagugaccugaggaagcgu

SEQ ID NO: 3505750 - RNA, 20 nt, Human
cagugaccuggaaggcccag

SEQ ID NO: 3505751 - RNA, 23 nt, Human
cagugaccuggaaggcccagcac

SEQ ID NO: 3505752 - RNA, 17 nt, Human
cagugacuccaggagag

SEQ ID NO: 3505753 - RNA, 21 nt, Human
cagugacuccaggagaggagc

SEQ ID NO: 3505754 - RNA, 21 nt, Human
cagugacucgggcuccugugc

SEQ ID NO: 3505755 - RNA, 20 nt, Human
cagugacuguggccaugguc

SEQ ID NO: 3505756 - RNA, 16 nt, Human
cagugacuucugagau

SEQ ID NO: 3505757 - RNA, 23 nt, Human
cagugagagaguggcuggggcau

SEQ ID NO: 3505758 - RNA, 23 nt, Human
cagugagccaagaucgcgccacu

SEQ ID NO: 3505759 - RNA, 13 nt, Human
cagugagccacuc

SEQ ID NO: 3505760 - RNA, 13 nt, Human
cagugagcugaga

SEQ ID NO: 3505761 - RNA, 14 nt, Human
cagugagcuggaga

SEQ ID NO: 3505762 - RNA, 18 nt, Human
cagugaggcucugcccuu

SEQ ID NO: 3505763 - RNA, 18 nt, Human
cagugagguccugggggc

SEQ ID NO: 3505764 - RNA, 21 nt, Human
cagugagguccugggggccug

SEQ ID NO: 3505765 - RNA, 23 nt, Human
cagugagguccugggggccugac

SEQ ID NO: 3505766 - RNA, 17 nt, Human
cagugagucucuucaga

SEQ ID NO: 3505767 - RNA, 17 nt, Human
cagugagugagccuggc

SEQ ID NO: 3505768 - RNA, 18 nt, Human
cagugagugagccuggcu

SEQ ID NO: 3505769 - RNA, 20 nt, Human
cagugagugagccuggcucu

SEQ ID NO: 3505770 - RNA, 18 nt, Human
cagugaguuacagcgaga

SEQ ID NO: 3505771 - RNA, 21 nt, Human
caugaccuccagcuuuccugu

SEQ ID NO: 3505772 - RNA, 14 nt, Human
caugaccugugacc

SEQ ID NO: 3505773 - RNA, 17 nt, Human
caugaccugugaccagc

SEQ ID NO: 3505774 - RNA, 17 nt, Human
caugacucggggguggg

SEQ ID NO: 3505775 - RNA, 19 nt, Human
caugacucuuuauugucug

SEQ ID NO: 3505776 - RNA, 22 nt, Human
caugacuugagaaacaaauaau

SEQ ID NO: 3505777 - RNA, 21 nt, Human
caugacuuguagcauauucuu

SEQ ID NO: 3505778 - RNA, 18 nt, Human
caugagaaauacaaaaau

SEQ ID NO: 3505779 - RNA, 12 nt, Human
caugagaaauua

SEQ ID NO: 3505780 - RNA, 16 nt, Human
caugagaacaaacaga

SEQ ID NO: 3505781 - RNA, 12 nt, Human
caugagaacaga

SEQ ID NO: 3505782 - RNA, 23 nt, Human
caugagaacagacuggccugagg

SEQ ID NO: 3505783 - RNA, 14 nt, Human
caugagaagagggc

SEQ ID NO: 3505784 - RNA, 16 nt, Human
caugagaagagggccu

SEQ ID NO: 3505785 - RNA, 18 nt, Human
caugagaagagggccugu

SEQ ID NO: 3505786 - RNA, 20 nt, Human
caugagaauaagagaaagaa

SEQ ID NO: 3505787 - RNA, 14 nt, Human
caugagacacaucu

SEQ ID NO: 3505788 - RNA, 19 nt, Human
caugagacacaucuccucc

SEQ ID NO: 3505789 - RNA, 17 nt, Human
caugagaccacuguuau

SEQ ID NO: 3505790 - RNA, 15 nt, Human
caugagacucagugc

SEQ ID NO: 3505791 - RNA, 17 nt, Human
caugagacucagugcag

SEQ ID NO: 3505792 - RNA, 18 nt, Human
caugagagcgcagcccgc

SEQ ID NO: 3505793 - RNA, 17 nt, Human
caugagaggcucugugc

SEQ ID NO: 3505794 - RNA, 20 nt, Human
caugagaucuaggugaggau

SEQ ID NO: 3505795 - RNA, 12 nt, Human
caugagaugugu

SEQ ID NO: 3505796 - RNA, 14 nt, Human
caugagaugugugg

SEQ ID NO: 3505797 - RNA, 15 nt, Human
caugagaugugugga

SEQ ID NO: 3505798 - RNA, 23 nt, Human
caugagauguguggacuguggca

SEQ ID NO: 3505799 - RNA, 16 nt, Human
caugagcaccccaagg

SEQ ID NO: 3505800 - RNA, 17 nt, Human
caugagcaucaggccag

SEQ ID NO: 3505801 - RNA, 20 nt, Human
caugagcaucaggccaggcc

SEQ ID NO: 3505802 - RNA, 20 nt, Human
caugagcauuggauacagca

SEQ ID NO: 3505803 - RNA, 16 nt, Human
caugagccgcccaagg

SEQ ID NO: 3505804 - RNA, 17 nt, Human
caugagccgcccaaggc

SEQ ID NO: 3505805 - RNA, 12 nt, Human
caugagccucag

SEQ ID NO: 3505806 - RNA, 17 nt, Human
caugagccucagcaucc

SEQ ID NO: 3505807 - RNA, 20 nt, Human
caugagccucagcauccugg

SEQ ID NO: 3505808 - RNA, 22 nt, Human
caugagccucagcauccuggca

SEQ ID NO: 3505809 - RNA, 22 nt, Human
caugagccugcuggaagcccag

SEQ ID NO: 3505810 - RNA, 13 nt, Human
caugagcuccaga

SEQ ID NO: 3505811 - RNA, 15 nt, Human
caugagcuccagacc

SEQ ID NO: 3505812 - RNA, 16 nt, Human
caugagcuccagaccc

SEQ ID NO: 3505813 - RNA, 19 nt, Human
caugagcuccagaccccca

SEQ ID NO: 3505814 - RNA, 21 nt, Human
caugaggaaagcaguugaaau

SEQ ID NO: 3505815 - RNA, 16 nt, Human
caugaggaacaaggca

SEQ ID NO: 3505816 - RNA, 18 nt, Human
caugaggaacuguagaug

SEQ ID NO: 3505817 - RNA, 22 nt, Human
caugaggaggggccccccugcc

SEQ ID NO: 3505818 - RNA, 15 nt, Human
caugaggaguugcug

SEQ ID NO: 3505819 - RNA, 22 nt, Human
caugaggccacugcugcuucuc

SEQ ID NO: 3505820 - RNA, 21 nt, Human
caugaggccucaguggacuuu

SEQ ID NO: 3505821 - RNA, 18 nt, Human
caugagggaucacagggc

SEQ ID NO: 3505822 - RNA, 20 nt, Human
caugagggaucacagggccc

SEQ ID NO: 3505823 - RNA, 22 nt, Human
caugagggguuccuccccucca

SEQ ID NO: 3505824 - RNA, 16 nt, Human
caugagguacugagag

SEQ ID NO: 3505825 - RNA, 14 nt, Human
caugagguaucuaa

SEQ ID NO: 3505826 - RNA, 23 nt, Human
caugaguagugggcuaugcagga

SEQ ID NO: 3505827 - RNA, 18 nt, Human
caugagucacuacgccug

SEQ ID NO: 3505828 - RNA, 17 nt, Human
caugagucccaguggga

SEQ ID NO: 3505829 - RNA, 18 nt, Human
caugaguccuugaaaaua

SEQ ID NO: 3505830 - RNA, 20 nt, Human
caugaguccuugaaaauauu

SEQ ID NO: 3505831 - RNA, 14 nt, Human
caugagugaauaaa

SEQ ID NO: 3505832 - RNA, 14 nt, Human
caugagugcgugcu

SEQ ID NO: 3505833 - RNA, 18 nt, Human
caugagugcgugcucagu

SEQ ID NO: 3505834 - RNA, 16 nt, Human
caugaguuaucaugaa

SEQ ID NO: 3505835 - RNA, 18 nt, Human
caugaguuccagaaagua

SEQ ID NO: 3505836 - RNA, 20 nt, Human
caugaguuccagaaaguaaa

SEQ ID NO: 3505837 - RNA, 21 nt, Human
caugaguuggggucuggcagc

SEQ ID NO: 3505838 - RNA, 22 nt, Human
caugaguuuuuucucuugggcu

SEQ ID NO: 3505839 - RNA, 14 nt, Human
caugauaugucagg

SEQ ID NO: 3505840 - RNA, 22 nt, Human
caugaucccuguguugucucua

SEQ ID NO: 3505841 - RNA, 13 nt, Human
caugauccugagu

SEQ ID NO: 3505842 - RNA, 15 nt, Human
caugaucucccugcc

SEQ ID NO: 3505843 - RNA, 16 nt, Human
caugaucucccugccg

SEQ ID NO: 3505844 - RNA, 17 nt, Human
caugaucucccugccgc

SEQ ID NO: 3505845 - RNA, 20 nt, Human
caugaucucccugccgccuc

SEQ ID NO: 3505846 - RNA, 21 nt, Human
caugaucuugugacauauuau

SEQ ID NO: 3505847 - RNA, 19 nt, Human
caauaaacauuucauuucc

SEQ ID NO: 3505848 - RNA, 16 nt, Human
caauaaaccaaugaac

SEQ ID NO: 3505849 - RNA, 20 nt, Human
caauaaacccucagagccuc

SEQ ID NO: 3505850 - RNA, 18 nt, Human
caauaaacgauuuaauuc

SEQ ID NO: 3505851 - RNA, 21 nt, Human
caauaaacgauuuaauucucu

SEQ ID NO: 3505852 - RNA, 18 nt, Human
caauaaacgcauuaucag

SEQ ID NO: 3505853 - RNA, 11 nt, Human
caauaaagcaa

SEQ ID NO: 3505854 - RNA, 17 nt, Human
caauaaagcaauaagaa

SEQ ID NO: 3505855 - RNA, 11 nt, Human
caauaaaguau

SEQ ID NO: 3505856 - RNA, 16 nt, Human
caauaaaguaucuaca

SEQ ID NO: 3505857 - RNA, 16 nt, Human
caauaaaguauuuaau

SEQ ID NO: 3505858 - RNA, 22 nt, Human
caauaaaguauuuaauuagugc

SEQ ID NO: 3505859 - RNA, 18 nt, Human
caauaaaguuugaucuuc

SEQ ID NO: 3505860 - RNA, 21 nt, Human
caauaaaguuugaucuuccuc

SEQ ID NO: 3505861 - RNA, 23 nt, Human
caauaaaguuugaucuuccucug

SEQ ID NO: 3505862 - RNA, 16 nt, Human
caauaaauagaccauu

SEQ ID NO: 3505863 - RNA, 18 nt, Human
caauaaaugguauagcaa

SEQ ID NO: 3505864 - RNA, 14 nt, Human
caauaaauguauuc

SEQ ID NO: 3505865 - RNA, 16 nt, Human
caauaaaugucuguug

SEQ ID NO: 3505866 - RNA, 17 nt, Human
caauaaaugugcuuaug

SEQ ID NO: 3505867 - RNA, 11 nt, Human
caauaaauuuu

SEQ ID NO: 3505868 - RNA, 15 nt, Human
caauaaauuuugaaa

SEQ ID NO: 3505869 - RNA, 14 nt, Human
caauaacacuaaaa

SEQ ID NO: 3505870 - RNA, 12 nt, Human
caauaacagcug

SEQ ID NO: 3505871 - RNA, 23 nt, Human
caauaacguuuaagccaaaacaa

SEQ ID NO: 3505872 - RNA, 19 nt, Human
caauaacuacuguguuccu

SEQ ID NO: 3505873 - RNA, 16 nt, Human
caauaacuccucccag

SEQ ID NO: 3505874 - RNA, 17 nt, Human
caauaacuccucccagg

SEQ ID NO: 3505875 - RNA, 18 nt, Human
caauaagcaucaaacucu

SEQ ID NO: 3505876 - RNA, 18 nt, Human
caauaaggucaaugccag

SEQ ID NO: 3505877 - RNA, 14 nt, Human
caauaauauauuuu

SEQ ID NO: 3505878 - RNA, 11 nt, Human
caauaaugcag

SEQ ID NO: 3505879 - RNA, 17 nt, Human
caauaaugcaguauggu

SEQ ID NO: 3505880 - RNA, 14 nt, Human
caauaauuucaggu

SEQ ID NO: 3505881 - RNA, 22 nt, Human
caauaauuucagguuuuguaaa

SEQ ID NO: 3505882 - RNA, 18 nt, Human
caauaauuuguggugauu

SEQ ID NO: 3505883 - RNA, 13 nt, Human
caauaauuuucua

SEQ ID NO: 3505884 - RNA, 14 nt, Human
caauaauuuucuac

SEQ ID NO: 3505885 - RNA, 15 nt, Human
caauacaaauggauu

SEQ ID NO: 3505886 - RNA, 17 nt, Human
caauacacuaguuguuu

SEQ ID NO: 3505887 - RNA, 23 nt, Human
caauacaucugagguccugugau

SEQ ID NO: 3505888 - RNA, 20 nt, Human
caauacccaaauccucucca

SEQ ID NO: 3505889 - RNA, 23 nt, Human
caauacccaaauccucuccagcu

SEQ ID NO: 3505890 - RNA, 15 nt, Human
caauaccucgagcca

SEQ ID NO: 3505891 - RNA, 19 nt, Human
caauaccugaaugcucugu

SEQ ID NO: 3505892 - RNA, 21 nt, Human
caauacguuugauaauaguuu

SEQ ID NO: 3505893 - RNA, 12 nt, Human
caauagaaacaa

SEQ ID NO: 3505894 - RNA, 22 nt, Human
caauagagacuguagauugcuu

SEQ ID NO: 3505895 - RNA, 19 nt, Human
caauagauauuuaccuuuu

SEQ ID NO: 3505896 - RNA, 20 nt, Human
caauagcaccccuacucaca

SEQ ID NO: 3505897 - RNA, 23 nt, Human
caauagcacuuucauugccagug

SEQ ID NO: 3505898 - RNA, 18 nt, Human
caauagccacuaaccuug

SEQ ID NO: 3505899 - RNA, 24 nt, Human
caauagccacuaaccuugccuggu

SEQ ID NO: 3505900 - RNA, 23 nt, Human
caauagcuuuacccucaggcaua

SEQ ID NO: 3505901 - RNA, 12 nt, Human
caauaggaaaaa

SEQ ID NO: 3505902 - RNA, 17 nt, Human
caauaggaaaaacugau

SEQ ID NO: 3505903 - RNA, 21 nt, Human
caauaggaaaaacugauuuuu

SEQ ID NO: 3505904 - RNA, 18 nt, Human
caauaggaaugcuaacag

SEQ ID NO: 3505905 - RNA, 14 nt, Human
caauagugucaucc

SEQ ID NO: 3505906 - RNA, 20 nt, Human
caauauaaaacuguacuuca

SEQ ID NO: 3505907 - RNA, 19 nt, Human
caauauaaccaauguuuaa

SEQ ID NO: 3505908 - RNA, 20 nt, Human
caauauaaccaauguuuaaa

SEQ ID NO: 3505909 - RNA, 15 nt, Human
caauauaauguuuuu

SEQ ID NO: 3505910 - RNA, 12 nt, Human
caauauagaaac

SEQ ID NO: 3505911 - RNA, 12 nt, Human
caauauagcaag

SEQ ID NO: 3505912 - RNA, 17 nt, Human
caauauauaaaaauaua

SEQ ID NO: 3505913 - RNA, 20 nt, Human
caauauauagcuggcaagaa

SEQ ID NO: 3505914 - RNA, 15 nt, Human
caauauauugaacuu

SEQ ID NO: 3505915 - RNA, 22 nt, Human
caauauauuuuguaugcaagca

SEQ ID NO: 3505916 - RNA, 13 nt, Human
caauaucagugcu

SEQ ID NO: 3505917 - RNA, 13 nt, Human
caauauccucgcu

SEQ ID NO: 3505918 - RNA, 19 nt, Human
caauauccucgcucccggg

SEQ ID NO: 3505919 - RNA, 13 nt, Human
caauauccuuugc

SEQ ID NO: 3505920 - RNA, 20 nt, Human
caauauccuuugccucaagg

SEQ ID NO: 3505921 - RNA, 17 nt, Human
caauaucuaauauauau

SEQ ID NO: 3505922 - RNA, 13 nt, Human
caauaucugaagc

SEQ ID NO: 3505923 - RNA, 23 nt, Human
caauaucuucguuaguaaucugu

SEQ ID NO: 3505924 - RNA, 16 nt, Human
caauaucuugcuugaa

SEQ ID NO: 3505925 - RNA, 19 nt, Human
caauaucuugcuugaacuu

SEQ ID NO: 3505926 - RNA, 13 nt, Human
caauaugaaguua

SEQ ID NO: 3505927 - RNA, 22 nt, Human
caauaugaaguuacuuucuuaa

SEQ ID NO: 3505928 - RNA, 15 nt, Human
caauaugcaguucug

SEQ ID NO: 3505929 - RNA, 18 nt, Human
caauaugggggccuuuug

SEQ ID NO: 3505930 - RNA, 16 nt, Human
caauauguauuaauau

SEQ ID NO: 3505931 - RNA, 13 nt, Human
caauauguauugu

SEQ ID NO: 3505932 - RNA, 16 nt, Human
caauaugugagugccu

SEQ ID NO: 3505933 - RNA, 20 nt, Human
caauaugugagugccuuuug

SEQ ID NO: 3505934 - RNA, 17 nt, Human
caauauguguuuacuuu

SEQ ID NO: 3505935 - RNA, 22 nt, Human
caauauuaaauacagacacuaa

SEQ ID NO: 3505936 - RNA, 17 nt, Human
caauauuaaugccuuua

SEQ ID NO: 3505937 - RNA, 22 nt, Human
caauauuauaauuuuuuucaau

SEQ ID NO: 3505938 - RNA, 21 nt, Human
caauauuauacuaagaaaaga

SEQ ID NO: 3505939 - RNA, 23 nt, Human
caauauuauacuaagaaaagaua

SEQ ID NO: 3505940 - RNA, 14 nt, Human
caauauucaauaaa

SEQ ID NO: 3505941 - RNA, 17 nt, Human
caauauucaauaaagcu

SEQ ID NO: 3505942 - RNA, 13 nt, Human
caauauuccugaa

SEQ ID NO: 3505943 - RNA, 15 nt, Human
caauauucucuguac

SEQ ID NO: 3505944 - RNA, 17 nt, Human
caauauucucuguacau

SEQ ID NO: 3505945 - RNA, 18 nt, Human
caauauucucuguacaua

SEQ ID NO: 3505946 - RNA, 14 nt, Human
caauauugaauuuu

SEQ ID NO: 3505947 - RNA, 18 nt, Human
caauauugaauuuuuccu

SEQ ID NO: 3505948 - RNA, 16 nt, Human
caauauugacauuugu

SEQ ID NO: 3505949 - RNA, 17 nt, Human
caauauugacauuugua

SEQ ID NO: 3505950 - RNA, 16 nt, Human
caauauugacuuuguc

SEQ ID NO: 3505951 - RNA, 16 nt, Human
caauauugauugggaa

SEQ ID NO: 3505952 - RNA, 23 nt, Human
caauauugauugggaaaacauuu

SEQ ID NO: 3505953 - RNA, 14 nt, Human
caauauuguacagu

SEQ ID NO: 3505954 - RNA, 15 nt, Human
caauauuguacaguu

SEQ ID NO: 3505955 - RNA, 17 nt, Human
caauauuguacaguuuu

SEQ ID NO: 3505956 - RNA, 12 nt, Human
caauauuguaua

SEQ ID NO: 3505957 - RNA, 19 nt, Human
caauauuguauauuuuuau

SEQ ID NO: 3505958 - RNA, 13 nt, Human
caauauuuaaaca

SEQ ID NO: 3505959 - RNA, 14 nt, Human
caauauuuaaacau

SEQ ID NO: 3505960 - RNA, 16 nt, Human
caauauuuaaggagau

SEQ ID NO: 3505961 - RNA, 19 nt, Human
caauauuuaaggagaugua

SEQ ID NO: 3505962 - RNA, 19 nt, Human
caauauuuauuauuuucac

SEQ ID NO: 3505963 - RNA, 14 nt, Human
caauauuuauugua

SEQ ID NO: 3505964 - RNA, 22 nt, Human
caauauuucagauaaucacaau

SEQ ID NO: 3505965 - RNA, 21 nt, Human
caauauuucugcuuucuuuga

SEQ ID NO: 3505966 - RNA, 23 nt, Human
caauauuucugcuuucuuugauu

SEQ ID NO: 3505967 - RNA, 19 nt, Human
caauauuugaauuuuaaau

SEQ ID NO: 3505968 - RNA, 14 nt, Human
caauauuuguagaa

SEQ ID NO: 3505969 - RNA, 19 nt, Human
caauauuugugugcuaaac

SEQ ID NO: 3505970 - RNA, 16 nt, Human
caauauuuguuacugu

SEQ ID NO: 3505971 - RNA, 21 nt, Human
caauauuuuaugguuauguuu

SEQ ID NO: 3505972 - RNA, 16 nt, Human
caauauuuucuuuaau

SEQ ID NO: 3505973 - RNA, 19 nt, Human
caaucaaucuugcauguaa

SEQ ID NO: 3505974 - RNA, 21 nt, Human
caaucagagaccaggcccugg

SEQ ID NO: 3505975 - RNA, 14 nt, Human
caaucagcacugaa

SEQ ID NO: 3505976 - RNA, 15 nt, Human
caaucagcuccuucc

SEQ ID NO: 3505977 - RNA, 17 nt, Human
caaucaguccccuccca

SEQ ID NO: 3505978 - RNA, 20 nt, Human
cauaaauaugcagugauaug

SEQ ID NO: 3505979 - RNA, 16 nt, Human
cauaaauccuugauga

SEQ ID NO: 3505980 - RNA, 14 nt, Human
cauaaaucugugaa

SEQ ID NO: 3505981 - RNA, 16 nt, Human
cauaaaucugugaacu

SEQ ID NO: 3505982 - RNA, 14 nt, Human
cauaaaugaggaaa

SEQ ID NO: 3505983 - RNA, 15 nt, Human
cauaaaugcagccca

SEQ ID NO: 3505984 - RNA, 22 nt, Human
cauaaauuauuugauuauuuaa

SEQ ID NO: 3505985 - RNA, 16 nt, Human
cauaaauucaacuuug

SEQ ID NO: 3505986 - RNA, 15 nt, Human
cauaacaacuucaua

SEQ ID NO: 3505987 - RNA, 14 nt, Human
cauaacaauuccuc

SEQ ID NO: 3505988 - RNA, 17 nt, Human
cauaacaauuccucuac

SEQ ID NO: 3505989 - RNA, 22 nt, Human
cauaacaggguaaauuauucag

SEQ ID NO: 3505990 - RNA, 15 nt, Human
cauaacauccagagc

SEQ ID NO: 3505991 - RNA, 15 nt, Human
cauaaccacugcuuc

SEQ ID NO: 3505992 - RNA, 14 nt, Human
caugugucccagaa

SEQ ID NO: 3505993 - RNA, 21 nt, Human
caugugucccagaagaugacu

SEQ ID NO: 3505994 - RNA, 13 nt, Human
caugugugcgugu

SEQ ID NO: 3505995 - RNA, 17 nt, Human
caugugugcucuucuuc

SEQ ID NO: 3505996 - RNA, 18 nt, Human
caugugugcucuucuucu

SEQ ID NO: 3505997 - RNA, 13 nt, Human
cauguguggaagu

SEQ ID NO: 3505998 - RNA, 14 nt, Human
cauguguggacuca

SEQ ID NO: 3505999 - RNA, 13 nt, Human
cauguguguauau

SEQ ID NO: 3506000 - RNA, 16 nt, Human
cauguguguauauaug

SEQ ID NO: 3506001 - RNA, 19 nt, Human
cauguguguauauaugugu

SEQ ID NO: 3506002 - RNA, 16 nt, Human
cauguguuaaguauuu

SEQ ID NO: 3506003 - RNA, 15 nt, Human
cauguguuauguuuu

SEQ ID NO: 3506004 - RNA, 14 nt, Human
cauguguuccaagg

SEQ ID NO: 3506005 - RNA, 20 nt, Human
cauguguuuuaauuccaaua

SEQ ID NO: 3506006 - RNA, 13 nt, Human
cauguuaaaccau

SEQ ID NO: 3506007 - RNA, 19 nt, Human
cauguuaaguccucccuga

SEQ ID NO: 3506008 - RNA, 22 nt, Human
cauguuaauccuagcugugugc

SEQ ID NO: 3506009 - RNA, 18 nt, Human
cauguuaauugauagaau

SEQ ID NO: 3506010 - RNA, 16 nt, Human
cauguuacauaagaua

SEQ ID NO: 3506011 - RNA, 17 nt, Human
cauguuaccuccuauaa

SEQ ID NO: 3506012 - RNA, 17 nt, Human
cauguuacugaccagca

SEQ ID NO: 3506013 - RNA, 21 nt, Human
cauguuacuggauaaauuguu

SEQ ID NO: 3506014 - RNA, 13 nt, Human
cauguuagccagg

SEQ ID NO: 3506015 - RNA, 18 nt, Human
cauguuaggaaaauuuca

SEQ ID NO: 3506016 - RNA, 17 nt, Human
cauguuaguaauaccuc

SEQ ID NO: 3506017 - RNA, 19 nt, Human
cauguuaguaauaccucua

SEQ ID NO: 3506018 - RNA, 21 nt, Human
cauguuaguuaccuuauaguu

SEQ ID NO: 3506019 - RNA, 14 nt, Human
cauguuauauauuu

SEQ ID NO: 3506020 - RNA, 22 nt, Human
cauguuauauauuuuuuguagg

SEQ ID NO: 3506021 - RNA, 14 nt, Human
cauguuaugauaaa

SEQ ID NO: 3506022 - RNA, 13 nt, Human
cauguuauguuua

SEQ ID NO: 3506023 - RNA, 14 nt, Human
cauguuauuuguaa

SEQ ID NO: 3506024 - RNA, 22 nt, Human
cauguucacaccgcugcacuca

SEQ ID NO: 3506025 - RNA, 12 nt, Human
cauguuccuuca

SEQ ID NO: 3506026 - RNA, 23 nt, Human
cauguuccuucaagaucauguac

SEQ ID NO: 3506027 - RNA, 20 nt, Human
cauguucugcccccagccca

SEQ ID NO: 3506028 - RNA, 14 nt, Human
cauguucugcuuuc

SEQ ID NO: 3506029 - RNA, 16 nt, Human
cauguucuugcaguca

SEQ ID NO: 3506030 - RNA, 17 nt, Human
cauguugaucauguacu

SEQ ID NO: 3506031 - RNA, 22 nt, Human
cauguugcacacccacucagcu

SEQ ID NO: 3506032 - RNA, 22 nt, Human
cauguugcccccgugagccaau

SEQ ID NO: 3506033 - RNA, 16 nt, Human
cauguugcugaggagu

SEQ ID NO: 3506034 - RNA, 13 nt, Human
cauguugcugcca

SEQ ID NO: 3506035 - RNA, 18 nt, Human
cauguugcuguuuccagu

SEQ ID NO: 3506036 - RNA, 13 nt, Human
cauguuggccagg

SEQ ID NO: 3506037 - RNA, 15 nt, Human
cauguuggccaggcu

SEQ ID NO: 3506038 - RNA, 22 nt, Human
cauguuggccaggcugcucuca

SEQ ID NO: 3506039 - RNA, 21 nt, Human
cauguugggaaacuuggcucg

SEQ ID NO: 3506040 - RNA, 17 nt, Human
cauguuggucaggcugg

SEQ ID NO: 3506041 - RNA, 22 nt, Human
cauguugguugcacuuuguagu

SEQ ID NO: 3506042 - RNA, 19 nt, Human
cauguuguaaugcugcacu

SEQ ID NO: 3506043 - RNA, 23 nt, Human
cauguuguagauacaaucagcug

SEQ ID NO: 3506044 - RNA, 19 nt, Human
cauguugugccucccuggu

SEQ ID NO: 3506045 - RNA, 14 nt, Human
cauguuguuaaaau

SEQ ID NO: 3506046 - RNA, 15 nt, Human
cauguuuaugagaaa

SEQ ID NO: 3506047 - RNA, 12 nt, Human
cauguuuauuac

SEQ ID NO: 3506048 - RNA, 22 nt, Human
cauguuuauuacaguauaauua

SEQ ID NO: 3506049 - RNA, 19 nt, Human
cauguuuauuuuucuuguc

SEQ ID NO: 3506050 - RNA, 13 nt, Human
cauguuucauguu

SEQ ID NO: 3506051 - RNA, 16 nt, Human
cauguuucauguuuug

SEQ ID NO: 3506052 - RNA, 17 nt, Human
cauguuucauguuuugu

SEQ ID NO: 3506053 - RNA, 12 nt, Human
cauguuuccagc

SEQ ID NO: 3506054 - RNA, 15 nt, Human
cauguuuccagcauu

SEQ ID NO: 3506055 - RNA, 16 nt, Human
cauguuuccagcauuc

SEQ ID NO: 3506056 - RNA, 18 nt, Human
cauguuugagcucagacc

SEQ ID NO: 3506057 - RNA, 20 nt, Human
cauguuugcaccuuucuagu

SEQ ID NO: 3506058 - RNA, 14 nt, Human
cauguuugccuaga

SEQ ID NO: 3506059 - RNA, 14 nt, Human
cauguuuggaagac

SEQ ID NO: 3506060 - RNA, 20 nt, Human
cauguuuggugcauagaacu

SEQ ID NO: 3506061 - RNA, 13 nt, Human
cauguuuguaaaa

SEQ ID NO: 3506062 - RNA, 14 nt, Human
cauguuugugauug

SEQ ID NO: 3506063 - RNA, 13 nt, Human
cauguuuuaacaa

SEQ ID NO: 3506064 - RNA, 17 nt, Human
cauguuuucaacugcca

SEQ ID NO: 3506065 - RNA, 15 nt, Human
cauguuuuccauugu

SEQ ID NO: 3506066 - RNA, 17 nt, Human
cauguuuuccauuguuu

SEQ ID NO: 3506067 - RNA, 21 nt, Human
cauguuuuccauuguuugaaa

SEQ ID NO: 3506068 - RNA, 17 nt, Human
cauguuuugauaaagua

SEQ ID NO: 3506069 - RNA, 12 nt, Human
cauguuuuguau

SEQ ID NO: 3506070 - RNA, 13 nt, Human
cauguuuuguaua

SEQ ID NO: 3506071 - RNA, 15 nt, Human
cauguuuuguauaca

SEQ ID NO: 3506072 - RNA, 15 nt, Human
cauguuuugugacua

SEQ ID NO: 3506073 - RNA, 18 nt, Human
cauguuuuucuucucccu

SEQ ID NO: 3506074 - RNA, 19 nt, Human
cauguuuuucuucucccuc

SEQ ID NO: 3506075 - RNA, 22 nt, Human
cauuaaaaaaaaaaaaaaaagu

SEQ ID NO: 3506076 - RNA, 22 nt, Human
cauuaaaaaugcauauacuuua

SEQ ID NO: 3506077 - RNA, 14 nt, Human
cauuaaaaauggaa

SEQ ID NO: 3506078 - RNA, 22 nt, Human
cauuaaaacaauauuguuucua

SEQ ID NO: 3506079 - RNA, 19 nt, Human
cauuaaaacugaagucuga

SEQ ID NO: 3506080 - RNA, 14 nt, Human
cauuaaaacugcuu

SEQ ID NO: 3506081 - RNA, 23 nt, Human
cauuaaaacuuaaccgcaucaga

SEQ ID NO: 3506082 - RNA, 15 nt, Human
cauuaaacaugacuc

SEQ ID NO: 3506083 - RNA, 19 nt, Human
cauuaaaccaucucccugg

SEQ ID NO: 3506084 - RNA, 22 nt, Human
cauuaaaccugucuccacugug

SEQ ID NO: 3506085 - RNA, 13 nt, Human
cauuaaacuuuuu

SEQ ID NO: 3506086 - RNA, 11 nt, Human
cauuaaagaag

SEQ ID NO: 3506087 - RNA, 22 nt, Human
cauuaaagcauuuacuuugaau

SEQ ID NO: 3506088 - RNA, 18 nt, Human
cauuaaaggcuucucucu

SEQ ID NO: 3506089 - RNA, 21 nt, Human
cauuaaaggcuucucucucac

SEQ ID NO: 3506090 - RNA, 24 nt, Human
cauuaaaggcuucucucucaccag

SEQ ID NO: 3506091 - RNA, 13 nt, Human
cauuaaagucuga

SEQ ID NO: 3506092 - RNA, 17 nt, Human
cauuaaagucugaauca

SEQ ID NO: 3506093 - RNA, 18 nt, Human
cauuaaaugacucuuccc

SEQ ID NO: 3506094 - RNA, 20 nt, Human
cauuaaauuacagaaauuua

SEQ ID NO: 3506095 - RNA, 13 nt, Human
cauuaaauucaca

SEQ ID NO: 3506096 - RNA, 17 nt, Human
cauuaaauucacaaacu

SEQ ID NO: 3506097 - RNA, 13 nt, Human
cauuaacacaaag

SEQ ID NO: 3506098 - RNA, 21 nt, Human
cauuaacaguuuuccaugaaa

SEQ ID NO: 3506099 - RNA, 16 nt, Human
cauuaaccgaugcuuu

SEQ ID NO: 3506100 - RNA, 18 nt, Human
cauuaacucauuagacug

SEQ ID NO: 3506101 - RNA, 17 nt, Human
cauuaagaaaaucauau

SEQ ID NO: 3506102 - RNA, 21 nt, Human
cauuaagaauguugguuuacu

SEQ ID NO: 3506103 - RNA, 17 nt, Human
cauuaaggccacaucca

SEQ ID NO: 3506104 - RNA, 14 nt, Human
cauuaaguaaucaa

SEQ ID NO: 3506105 - RNA, 14 nt, Human
cauuaauaauaaau

SEQ ID NO: 3506106 - RNA, 17 nt, Human
cauuaauagcagccuuu

SEQ ID NO: 3506107 - RNA, 22 nt, Human
cauuaaucaaucaucuguguga

SEQ ID NO: 3506108 - RNA, 22 nt, Human
cauuaauccacauguuucagag

SEQ ID NO: 3506109 - RNA, 21 nt, Human
cauuaaugccugcuuuuugga

SEQ ID NO: 3506110 - RNA, 22 nt, Human
cauuaaugccugcuuuuuggaa

SEQ ID NO: 3506111 - RNA, 13 nt, Human
cauuaauguguug

SEQ ID NO: 3506112 - RNA, 21 nt, Human
cauuaauguuaauucagcacu

SEQ ID NO: 3506113 - RNA, 14 nt, Human
cauuaauguugauu

SEQ ID NO: 3506114 - RNA, 21 nt, Human
cauuaauuauuauugcuguug

SEQ ID NO: 3506115 - RNA, 12 nt, Human
cauuaauuuaaa

SEQ ID NO: 3506116 - RNA, 16 nt, Human
cauuaauuuuuuuuca

SEQ ID NO: 3506117 - RNA, 21 nt, Human
cauuacaagccuggaaaaaaa

SEQ ID NO: 3506118 - RNA, 23 nt, Human
cauuacaaucgagacugcaaugu

SEQ ID NO: 3506119 - RNA, 13 nt, Human
cauuacagagagg

SEQ ID NO: 3506120 - RNA, 20 nt, Human
cauuacagagaggagaaaca

SEQ ID NO: 3506121 - RNA, 21 nt, Human
cauuacagugggugccccccu

SEQ ID NO: 3506122 - RNA, 21 nt, Human
cauuacauuccuugauaaugu

SEQ ID NO: 3506123 - RNA, 19 nt, Human
cauuacauuguuuaaagaa

SEQ ID NO: 3506124 - RNA, 16 nt, Human
cauuaccacucaggca

SEQ ID NO: 3506125 - RNA, 18 nt, Human
cauuaccagacgguucac

SEQ ID NO: 3506126 - RNA, 20 nt, Human
cauuaccagacgguucacca

SEQ ID NO: 3506127 - RNA, 18 nt, Human
cauuaccgcguuguaaaa

SEQ ID NO: 3506128 - RNA, 22 nt, Human
cauuaccgcguuguaaaauaua

SEQ ID NO: 3506129 - RNA, 17 nt, Human
cauuaccuuacugugga

SEQ ID NO: 3506130 - RNA, 19 nt, Human
cauuaccuuuuaccagcuu

SEQ ID NO: 3506131 - RNA, 15 nt, Human
cauuacuauaagaac

SEQ ID NO: 3506132 - RNA, 14 nt, Human
cauuacucuuguaa

SEQ ID NO: 3506133 - RNA, 20 nt, Human
caaucaguccccucccaucu

SEQ ID NO: 3506134 - RNA, 14 nt, Human
caaucauaugugau

SEQ ID NO: 3506135 - RNA, 15 nt, Human
caaucauugcugaaa

SEQ ID NO: 3506136 - RNA, 16 nt, Human
caaucauugcugaaaa

SEQ ID NO: 3506137 - RNA, 16 nt, Human
cauuguucaauuagaa

SEQ ID NO: 3506138 - RNA, 18 nt, Human
cauuguucaauuagaaua

SEQ ID NO: 3506139 - RNA, 20 nt, Human
cauuguucuuauucuggcau

SEQ ID NO: 3506140 - RNA, 13 nt, Human
cauuguugagcua

SEQ ID NO: 3506141 - RNA, 20 nt, Human
cauuguugagcuauugcugu

SEQ ID NO: 3506142 - RNA, 17 nt, Human
cauuguuggacauuugg

SEQ ID NO: 3506143 - RNA, 19 nt, Human
cauuguuguuuuuuuaaua

SEQ ID NO: 3506144 - RNA, 12 nt, Human
cauuguuuaaaa

SEQ ID NO: 3506145 - RNA, 12 nt, Human
cauuguuucugu

SEQ ID NO: 3506146 - RNA, 14 nt, Human
cauuguuugaaaca

SEQ ID NO: 3506147 - RNA, 18 nt, Human
cauuguuugaaacaaaga

SEQ ID NO: 3506148 - RNA, 20 nt, Human
cauuguuugaaacaaagaag

SEQ ID NO: 3506149 - RNA, 21 nt, Human
cauuguuugaaacaaagaagg

SEQ ID NO: 3506150 - RNA, 22 nt, Human
cauuguuugaaacaaagaaggu

SEQ ID NO: 3506151 - RNA, 19 nt, Human
cauuguuugcuuauuguuc

SEQ ID NO: 3506152 - RNA, 17 nt, Human
cauuguuuggagacauu

SEQ ID NO: 3506153 - RNA, 22 nt, Human
cauuguuugucugucuucauag

SEQ ID NO: 3506154 - RNA, 16 nt, Human
cauuguuuuaaaaaga

SEQ ID NO: 3506155 - RNA, 17 nt, Human
cauuguuuuaaaaagaa

SEQ ID NO: 3506156 - RNA, 16 nt, Human
cauuguuuugaauauu

SEQ ID NO: 3506157 - RNA, 18 nt, Human
cauuuaaaacagacacug

SEQ ID NO: 3506158 - RNA, 23 nt, Human
cauuuaaaacagacacuggcaug

SEQ ID NO: 3506159 - RNA, 21 nt, Human
cauuuaaaacauuaaaauaua

SEQ ID NO: 3506160 - RNA, 12 nt, Human
cauuuaaaagau

SEQ ID NO: 3506161 - RNA, 21 nt, Human
cauuuaaaagauacaguuacu

SEQ ID NO: 3506162 - RNA, 15 nt, Human
cauuuaaaauugcua

SEQ ID NO: 3506163 - RNA, 13 nt, Human
cauuuaaacagau

SEQ ID NO: 3506164 - RNA, 14 nt, Human
cauuuaaacagaug

SEQ ID NO: 3506165 - RNA, 18 nt, Human
cauuuaaagcauugcugu

SEQ ID NO: 3506166 - RNA, 19 nt, Human
cauuuaaagcuuauuaaaa

SEQ ID NO: 3506167 - RNA, 16 nt, Human
cauuuaaauguguaca

SEQ ID NO: 3506168 - RNA, 12 nt, Human
cauuuaaauuuu

SEQ ID NO: 3506169 - RNA, 18 nt, Human
cauuuaaauuuuuuuccu

SEQ ID NO: 3506170 - RNA, 23 nt, Human
cauuuaaccccccuguacacaac

SEQ ID NO: 3506171 - RNA, 18 nt, Human
cauuuaagaauugccagu

SEQ ID NO: 3506172 - RNA, 17 nt, Human
cauuuaagagacaguca

SEQ ID NO: 3506173 - RNA, 14 nt, Human
cauuuaagggaaaa

SEQ ID NO: 3506174 - RNA, 16 nt, Human
cauuuaagggaaaaau

SEQ ID NO: 3506175 - RNA, 19 nt, Human
cauuuaagggaaaaauaua

SEQ ID NO: 3506176 - RNA, 20 nt, Human
cauuuaagggaaagaaaaug

SEQ ID NO: 3506177 - RNA, 12 nt, Human
cauuuaauaaua

SEQ ID NO: 3506178 - RNA, 13 nt, Human
cauuuaauaauau

SEQ ID NO: 3506179 - RNA, 12 nt, Human
cauuuaauaauu

SEQ ID NO: 3506180 - RNA, 16 nt, Human
cauuuaauaauuauau

SEQ ID NO: 3506181 - RNA, 20 nt, Human
cauuuaauguagccauggga

SEQ ID NO: 3506182 - RNA, 22 nt, Human
cauuuaauguagccaugggacc

SEQ ID NO: 3506183 - RNA, 19 nt, Human
cauuuaauuuagugaucuu

SEQ ID NO: 3506184 - RNA, 15 nt, Human
cauuuacaaacugaa

SEQ ID NO: 3506185 - RNA, 19 nt, Human
cauuuacaaacugaagagu

SEQ ID NO: 3506186 - RNA, 12 nt, Human
cauuuacacuuu

SEQ ID NO: 3506187 - RNA, 12 nt, Human
cauuuacaugua

SEQ ID NO: 3506188 - RNA, 19 nt, Human
cauuuacuaaacauaugau

SEQ ID NO: 3506189 - RNA, 18 nt, Human
cauuuacucuaaaaacug

SEQ ID NO: 3506190 - RNA, 13 nt, Human
cauuuacuuaaga

SEQ ID NO: 3506191 - RNA, 19 nt, Human
cacagacccugcccugugg

SEQ ID NO: 3506192 - RNA, 20 nt, Human
cacagacccugcccuguggg

SEQ ID NO: 3506193 - RNA, 22 nt, Human
cacagacccugcccugugggcc

SEQ ID NO: 3506194 - RNA, 24 nt, Human
cacagaccuggagccccugggugg

SEQ ID NO: 3506195 - RNA, 23 nt, Human
cacagacuauugacaucagcauc

SEQ ID NO: 3506196 - RNA, 13 nt, Human
cacagacuauuuu

SEQ ID NO: 3506197 - RNA, 14 nt, Human
cacagacuauuuuu

SEQ ID NO: 3506198 - RNA, 18 nt, Human
cacagacucaaaugcuca

SEQ ID NO: 3506199 - RNA, 22 nt, Human
cacagacucauccugaacagca

SEQ ID NO: 3506200 - RNA, 21 nt, Human
cacagagaaaguacuucucca

SEQ ID NO: 3506201 - RNA, 15 nt, Human
cacagagaagacaaa

SEQ ID NO: 3506202 - RNA, 13 nt, Human
cacagagaagcug

SEQ ID NO: 3506203 - RNA, 14 nt, Human
cacagagaagcugg

SEQ ID NO: 3506204 - RNA, 15 nt, Human
cacagagaagcuggg

SEQ ID NO: 3506205 - RNA, 21 nt, Human
cacagagacauuccuccgagc

SEQ ID NO: 3506206 - RNA, 22 nt, Human
cacagagacccccggaacaagc

SEQ ID NO: 3506207 - RNA, 12 nt, Human
cacagagagaaa

SEQ ID NO: 3506208 - RNA, 18 nt, Human
cacagagagacagacuug

SEQ ID NO: 3506209 - RNA, 20 nt, Human
cacagagagacagacuugag

SEQ ID NO: 3506210 - RNA, 22 nt, Human
cacagagagacagacuugagaa

SEQ ID NO: 3506211 - RNA, 19 nt, Human
cacagagagggagagcaga

SEQ ID NO: 3506212 - RNA, 22 nt, Human
cacagagagggggccaccuccc

SEQ ID NO: 3506213 - RNA, 16 nt, Human
cacagagagucccacu

SEQ ID NO: 3506214 - RNA, 13 nt, Human
cacagagcgggga

SEQ ID NO: 3506215 - RNA, 18 nt, Human
cacagagcucuccagcuc

SEQ ID NO: 3506216 - RNA, 21 nt, Human
cacagagcuuuggucugugug

SEQ ID NO: 3506217 - RNA, 22 nt, Human
cacagagcuuuggucugugugu

SEQ ID NO: 3506218 - RNA, 16 nt, Human
cacagaggaagagcag

SEQ ID NO: 3506219 - RNA, 13 nt, Human
cacagaggcugcc

SEQ ID NO: 3506220 - RNA, 16 nt, Human
cacagagggcgugugc

SEQ ID NO: 3506221 - RNA, 16 nt, Human
cacagaguaagacauu

SEQ ID NO: 3506222 - RNA, 15 nt, Human
cacagagucaaggcc

SEQ ID NO: 3506223 - RNA, 18 nt, Human
cacagaguggucuuucug

SEQ ID NO: 3506224 - RNA, 19 nt, Human
cacagagugugcuggagga

SEQ ID NO: 3506225 - RNA, 22 nt, Human
cacagaguuguuacauuuuuaa

SEQ ID NO: 3506226 - RNA, 18 nt, Human
cacagauagaccuuuuuu

SEQ ID NO: 3506227 - RNA, 18 nt, Human
cacagaucacagcuucag

SEQ ID NO: 3506228 - RNA, 19 nt, Human
cacagaucacagcuucagc

SEQ ID NO: 3506229 - RNA, 13 nt, Human
cacagaugcucca

SEQ ID NO: 3506230 - RNA, 17 nt, Human
cacagauggauuugccu

SEQ ID NO: 3506231 - RNA, 14 nt, Human
cacagauggccagc

SEQ ID NO: 3506232 - RNA, 14 nt, Human
cacagaugggugcu

SEQ ID NO: 3506233 - RNA, 23 nt, Human
cacagauguucgguuuuuuuccu

SEQ ID NO: 3506234 - RNA, 14 nt, Human
cacagauuguuucu

SEQ ID NO: 3506235 - RNA, 15 nt, Human
cacagauuguuucua

SEQ ID NO: 3506236 - RNA, 16 nt, Human
cacagauuugagcuca

SEQ ID NO: 3506237 - RNA, 17 nt, Human
cacagauuugagcucag

SEQ ID NO: 3506238 - RNA, 18 nt, Human
cacagauuugagcucagc

SEQ ID NO: 3506239 - RNA, 14 nt, Human
cacagauuuuaauu

SEQ ID NO: 3506240 - RNA, 15 nt, Human
cacagauuuuaauug

SEQ ID NO: 3506241 - RNA, 17 nt, Human
cacagcaaccccaggcu

SEQ ID NO: 3506242 - RNA, 18 nt, Human
cacagcaaccccaggcug

SEQ ID NO: 3506243 - RNA, 14 nt, Human
cacagcacaaauua

SEQ ID NO: 3506244 - RNA, 16 nt, Human
cacagcacaaauuagu

SEQ ID NO: 3506245 - RNA, 18 nt, Human
cacagcacaaauuaguua

SEQ ID NO: 3506246 - RNA, 14 nt, Human
cacagcacaugcug

SEQ ID NO: 3506247 - RNA, 20 nt, Human
cacagcacaugcuggccagc

SEQ ID NO: 3506248 - RNA, 21 nt, Human
cacagcacuugaguaaaauac

SEQ ID NO: 3506249 - RNA, 12 nt, Human
cacagcagcauu

SEQ ID NO: 3506250 - RNA, 14 nt, Human
cacagcagcauuuu

SEQ ID NO: 3506251 - RNA, 21 nt, Human
cacagcagccuccaacacaag

SEQ ID NO: 3506252 - RNA, 12 nt, Human
cacagcagccug

SEQ ID NO: 3506253 - RNA, 19 nt, Human
cacagcagcugaacagcca

SEQ ID NO: 3506254 - RNA, 19 nt, Human
cacagcagcuucaccagag

SEQ ID NO: 3506255 - RNA, 21 nt, Human
cacagcagcuucaccagagca

SEQ ID NO: 3506256 - RNA, 22 nt, Human
cacagcagcuucaccagagcau

SEQ ID NO: 3506257 - RNA, 15 nt, Human
cacagcaggcugcca

SEQ ID NO: 3506258 - RNA, 17 nt, Human
cacagcaggcugccagu

SEQ ID NO: 3506259 - RNA, 16 nt, Human
cacagcagugagacug

SEQ ID NO: 3506260 - RNA, 19 nt, Human
cacagcaucucagcucauc

SEQ ID NO: 3506261 - RNA, 13 nt, Human
cacagcaugugua

SEQ ID NO: 3506262 - RNA, 14 nt, Human
cacagcauuucaag

SEQ ID NO: 3506263 - RNA, 14 nt, Human
cacagccaaggacu

SEQ ID NO: 3506264 - RNA, 12 nt, Human
cacagccacaca

SEQ ID NO: 3506265 - RNA, 13 nt, Human
cacagccacacac

SEQ ID NO: 3506266 - RNA, 14 nt, Human
cacagccacacaca

SEQ ID NO: 3506267 - RNA, 20 nt, Human
cacagccacacacacagaaa

SEQ ID NO: 3506268 - RNA, 23 nt, Human
cacagccacacacacagaaaaua

SEQ ID NO: 3506269 - RNA, 13 nt, Human
cacagccagaacc

SEQ ID NO: 3506270 - RNA, 19 nt, Human
cacagccagaaccccgagc

SEQ ID NO: 3506271 - RNA, 18 nt, Human
cacagccagacuggcaca

SEQ ID NO: 3506272 - RNA, 20 nt, Human
cacagccagcaccuggcauc

SEQ ID NO: 3506273 - RNA, 22 nt, Human
cacagccagggggaugccacuc

SEQ ID NO: 3506274 - RNA, 20 nt, Human
cacagccaggugccuuggag

SEQ ID NO: 3506275 - RNA, 19 nt, Human
cacagccaucccagccuug

SEQ ID NO: 3506276 - RNA, 14 nt, Human
cacagcccacgucc

SEQ ID NO: 3506277 - RNA, 12 nt, Human
cacagcccagcc

SEQ ID NO: 3506278 - RNA, 23 nt, Human
cacagcccagccacggacgcugg

SEQ ID NO: 3506279 - RNA, 15 nt, Human
cacagcccagcuugg

SEQ ID NO: 3506280 - RNA, 15 nt, Human
cacagcccgcaugca

SEQ ID NO: 3506281 - RNA, 11 nt, Human
cacagcccucc

SEQ ID NO: 3506282 - RNA, 21 nt, Human
caugaagaggaugcugugaaa

SEQ ID NO: 3506283 - RNA, 19 nt, Human
caugaagauguagaggaga

SEQ ID NO: 3506284 - RNA, 21 nt, Human
caugaagccacgggugccaga

SEQ ID NO: 3506285 - RNA, 13 nt, Human
caugaagccuuuu

SEQ ID NO: 3506286 - RNA, 16 nt, Human
caugaagccuuuugaa

SEQ ID NO: 3506287 - RNA, 13 nt, Human
caugaaggaaacu

SEQ ID NO: 3506288 - RNA, 14 nt, Human
caugaaggagugaa

SEQ ID NO: 3506289 - RNA, 20 nt, Human
caugaagguaaauaaaaaga

SEQ ID NO: 3506290 - RNA, 22 nt, Human
caugaagguaaauaaaaagaaa

SEQ ID NO: 3506291 - RNA, 15 nt, Human
caugaagguuucuga

SEQ ID NO: 3506292 - RNA, 15 nt, Human
caugaaguaauaugc

SEQ ID NO: 3506293 - RNA, 14 nt, Human
caugaaguauuuuu

SEQ ID NO: 3506294 - RNA, 21 nt, Human
caugaaguauuuuuucaguau

SEQ ID NO: 3506295 - RNA, 16 nt, Human
caugaauccaguccag

SEQ ID NO: 3506296 - RNA, 15 nt, Human
caugaaucgcuucuc

SEQ ID NO: 3506297 - RNA, 17 nt, Human
caugaaucuuuguuuca

SEQ ID NO: 3506298 - RNA, 22 nt, Human
caugaaugguauggaacucucu

SEQ ID NO: 3506299 - RNA, 17 nt, Human
caugaauguaaauuugu

SEQ ID NO: 3506300 - RNA, 22 nt, Human
caugaauguaaauuuguacuau

SEQ ID NO: 3506301 - RNA, 13 nt, Human
caugaauguauca

SEQ ID NO: 3506302 - RNA, 21 nt, Human
caugaauuaccuggauguucu

SEQ ID NO: 3506303 - RNA, 16 nt, Human
caugaauuaguuuuau

SEQ ID NO: 3506304 - RNA, 20 nt, Human
caugaauuauuacaguguuu

SEQ ID NO: 3506305 - RNA, 18 nt, Human
caugaauucuuaugcuua

SEQ ID NO: 3506306 - RNA, 15 nt, Human
caugaauuuuacaug

SEQ ID NO: 3506307 - RNA, 18 nt, Human
caugaauuuuagcuuuug

SEQ ID NO: 3506308 - RNA, 16 nt, Human
caugacaacuucuaau

SEQ ID NO: 3506309 - RNA, 21 nt, Human
caugacaacuuugccagcuuu

SEQ ID NO: 3506310 - RNA, 14 nt, Human
caugacacgaauau

SEQ ID NO: 3506311 - RNA, 23 nt, Human
caugacacgaauauugcugaugg

SEQ ID NO: 3506312 - RNA, 15 nt, Human
caugacagaaaauau

SEQ ID NO: 3506313 - RNA, 19 nt, Human
caugacagaaaauauguau

SEQ ID NO: 3506314 - RNA, 13 nt, Human
caugacagccugc

SEQ ID NO: 3506315 - RNA, 14 nt, Human
caugacagccugca

SEQ ID NO: 3506316 - RNA, 18 nt, Human
caugacagccugcagcag

SEQ ID NO: 3506317 - RNA, 20 nt, Human
caugacagccugcagcagga

SEQ ID NO: 3506318 - RNA, 19 nt, Human
caugacauguuauauauuu

SEQ ID NO: 3506319 - RNA, 17 nt, Human
caugacauuuaccagca

SEQ ID NO: 3506320 - RNA, 17 nt, Human
caugaccacauagcaug

SEQ ID NO: 3506321 - RNA, 18 nt, Human
caugaccagaagggaaac

SEQ ID NO: 3506322 - RNA, 12 nt, Human
caugaccagcaa

SEQ ID NO: 3506323 - RNA, 15 nt, Human
caugaccagcaaaua

SEQ ID NO: 3506324 - RNA, 18 nt, Human
caugaccauacugaggga

SEQ ID NO: 3506325 - RNA, 13 nt, Human
caugacccacccc

SEQ ID NO: 3506326 - RNA, 17 nt, Human
caugacccaccccugug

SEQ ID NO: 3506327 - RNA, 19 nt, Human
caugacccaggcugggcaa

SEQ ID NO: 3506328 - RNA, 14 nt, Human
caugaccuccagcu

SEQ ID NO: 3506329 - RNA, 15 nt, Human
caugaccuccagcuu

SEQ ID NO: 3506330 - RNA, 22 nt, Human
caugaccuccagcuuuccugua

SEQ ID NO: 3506331 - RNA, 20 nt, Human
caugaccuuauccuuccucu

SEQ ID NO: 3506332 - RNA, 14 nt, Human
caugacuauggaua

SEQ ID NO: 3506333 - RNA, 18 nt, Human
caugacucuugacucuug

SEQ ID NO: 3506334 - RNA, 18 nt, Human
caugacucuuuauugucu

SEQ ID NO: 3506335 - RNA, 23 nt, Human
caugacugcauuuuacuguacag

SEQ ID NO: 3506336 - RNA, 12 nt, Human
caugacugcuug

SEQ ID NO: 3506337 - RNA, 14 nt, Human
caugacugcuugcc

SEQ ID NO: 3506338 - RNA, 16 nt, Human
caugacugcuugcccu

SEQ ID NO: 3506339 - RNA, 15 nt, Human
caugacuuuuccaug

SEQ ID NO: 3506340 - RNA, 13 nt, Human
caugagaaauaca

SEQ ID NO: 3506341 - RNA, 22 nt, Human
caugagaaauacaaaaauacuc

SEQ ID NO: 3506342 - RNA, 15 nt, Human
caugagaagagggcc

SEQ ID NO: 3506343 - RNA, 19 nt, Human
caugagaccacuguuauca

SEQ ID NO: 3506344 - RNA, 22 nt, Human
caugagacccuggugccuggcu

SEQ ID NO: 3506345 - RNA, 19 nt, Human
caugagacucagugcagau

SEQ ID NO: 3506346 - RNA, 14 nt, Human
caugagaggaggca

SEQ ID NO: 3506347 - RNA, 16 nt, Human
caugagaggaggcagc

SEQ ID NO: 3506348 - RNA, 21 nt, Human
caugagaggaggcagcaggac

SEQ ID NO: 3506349 - RNA, 18 nt, Human
caugagauaauaugcaga

SEQ ID NO: 3506350 - RNA, 22 nt, Human
caugagaugauacauccaaagc

SEQ ID NO: 3506351 - RNA, 13 nt, Human
caugagcaucagg

SEQ ID NO: 3506352 - RNA, 15 nt, Human
caugagcaucaggcc

SEQ ID NO: 3506353 - RNA, 16 nt, Human
caugagcaucaggcca

SEQ ID NO: 3506354 - RNA, 23 nt, Human
caugagcaucaggccaggcccuc

SEQ ID NO: 3506355 - RNA, 16 nt, Human
cauuugugcuagaaau

SEQ ID NO: 3506356 - RNA, 20 nt, Human
cauuugugcuagaaauuuuc

SEQ ID NO: 3506357 - RNA, 21 nt, Human
cauuugugcuagaaauuuuca

SEQ ID NO: 3506358 - RNA, 23 nt, Human
cauuuguggguuuuuauuuccua

SEQ ID NO: 3506359 - RNA, 19 nt, Human
cauuuguguacacagucag

SEQ ID NO: 3506360 - RNA, 14 nt, Human
cauuugugucaaug

SEQ ID NO: 3506361 - RNA, 15 nt, Human
cauuugugucaaugg

SEQ ID NO: 3506362 - RNA, 22 nt, Human
cauuugugugugugcaagugug

SEQ ID NO: 3506363 - RNA, 16 nt, Human
cauuuguguugaagag

SEQ ID NO: 3506364 - RNA, 20 nt, Human
cauuuguguugaagagguuu

SEQ ID NO: 3506365 - RNA, 13 nt, Human
cauuuguuaaaau

SEQ ID NO: 3506366 - RNA, 18 nt, Human
cauuuguuaaaauuauca

SEQ ID NO: 3506367 - RNA, 17 nt, Human
cauuuguugguuuauca

SEQ ID NO: 3506368 - RNA, 17 nt, Human
cauuuguuuauguaauu

SEQ ID NO: 3506369 - RNA, 22 nt, Human
cauuuguuucuuucucugagga

SEQ ID NO: 3506370 - RNA, 17 nt, Human
cauuuguuugaacugau

SEQ ID NO: 3506371 - RNA, 22 nt, Human
cauuuguuugaacugauaaaga

SEQ ID NO: 3506372 - RNA, 16 nt, Human
cauuuguuuguuuucc

SEQ ID NO: 3506373 - RNA, 18 nt, Human
cauuuguuuguuuuccuu

SEQ ID NO: 3506374 - RNA, 17 nt, Human
cauuuguuuuguuuaca

SEQ ID NO: 3506375 - RNA, 13 nt, Human
cauuuuaaaaagu

SEQ ID NO: 3506376 - RNA, 16 nt, Human
cauuuuaaacaaaaua

SEQ ID NO: 3506377 - RNA, 15 nt, Human
cauuuuaaauaaaag

SEQ ID NO: 3506378 - RNA, 18 nt, Human
cauuuuaacaagaagaug

SEQ ID NO: 3506379 - RNA, 11 nt, Human
cauuuuaacau

SEQ ID NO: 3506380 - RNA, 14 nt, Human
cauuuuaauuuuaa

SEQ ID NO: 3506381 - RNA, 15 nt, Human
cauuuuaauuuuaaa

SEQ ID NO: 3506382 - RNA, 22 nt, Human
cauuuuacaguuacuuuuccuu

SEQ ID NO: 3506383 - RNA, 18 nt, Human
cauuuuacauuaaauuuu

SEQ ID NO: 3506384 - RNA, 22 nt, Human
cauuuuacuguacagauugcug

SEQ ID NO: 3506385 - RNA, 15 nt, Human
cauuuuagacaguaa

SEQ ID NO: 3506386 - RNA, 23 nt, Human
cauuuuaggaaaaaaaaaagcau

SEQ ID NO: 3506387 - RNA, 17 nt, Human
cauuuuagucacuuuuu

SEQ ID NO: 3506388 - RNA, 22 nt, Human
cauuuuauaaagugcuugugua

SEQ ID NO: 3506389 - RNA, 23 nt, Human
cauuuuauaaagugcuuguguaa

SEQ ID NO: 3506390 - RNA, 17 nt, Human
cauuuuauaaaucgcuu

SEQ ID NO: 3506391 - RNA, 18 nt, Human
cauuuuauaaaucgcuuu

SEQ ID NO: 3506392 - RNA, 21 nt, Human
cauuuuauaaaucgcuuuuga

SEQ ID NO: 3506393 - RNA, 16 nt, Human
cauuuuauaugucaaa

SEQ ID NO: 3506394 - RNA, 15 nt, Human
cauuuuauauuagaa

SEQ ID NO: 3506395 - RNA, 13 nt, Human
cauuuuauauuga

SEQ ID NO: 3506396 - RNA, 16 nt, Human
cauuuuauauugaaaa

SEQ ID NO: 3506397 - RNA, 19 nt, Human
cauuuuauuuuauuaugca

SEQ ID NO: 3506398 - RNA, 23 nt, Human
cauuuuauuuuauuaugcaugaa

SEQ ID NO: 3506399 - RNA, 16 nt, Human
cauuuucaccccaccc

SEQ ID NO: 3506400 - RNA, 14 nt, Human
cauuuucagacugc

SEQ ID NO: 3506401 - RNA, 19 nt, Human
cauuuuccauauccuggug

SEQ ID NO: 3506402 - RNA, 17 nt, Human
cauuuuccccccacucu

SEQ ID NO: 3506403 - RNA, 20 nt, Human
cauuuuccccccacucuccc

SEQ ID NO: 3506404 - RNA, 17 nt, Human
cauuuuccuacaggcag

SEQ ID NO: 3506405 - RNA, 17 nt, Human
cauuuucuaagaaacau

SEQ ID NO: 3506406 - RNA, 23 nt, Human
cauuuucuaagaaacauuuauau

SEQ ID NO: 3506407 - RNA, 18 nt, Human
cauuuucuagauacaaua

SEQ ID NO: 3506408 - RNA, 20 nt, Human
cauuuucuagauacaauaaa

SEQ ID NO: 3506409 - RNA, 12 nt, Human
cauuuucucccu

SEQ ID NO: 3506410 - RNA, 13 nt, Human
cauuuucucccug

SEQ ID NO: 3506411 - RNA, 16 nt, Human
cauuuucucuuagaaa

SEQ ID NO: 3506412 - RNA, 14 nt, Human
cauuuucugcaagc

SEQ ID NO: 3506413 - RNA, 15 nt, Human
cauuuucugcaagcc

SEQ ID NO: 3506414 - RNA, 22 nt, Human
cauuuucuucagagagcuaaau

SEQ ID NO: 3506415 - RNA, 17 nt, Human
cauuuucuuuuuuaacc

SEQ ID NO: 3506416 - RNA, 20 nt, Human
cauuuugaaauuguuccuug

SEQ ID NO: 3506417 - RNA, 15 nt, Human
cauuuugaagcuaau

SEQ ID NO: 3506418 - RNA, 14 nt, Human
cauuuugaccuacu

SEQ ID NO: 3506419 - RNA, 21 nt, Human
cauuuugagcugaaaugcugc

SEQ ID NO: 3506420 - RNA, 23 nt, Human
cauuuugagcugaaaugcugcau

SEQ ID NO: 3506421 - RNA, 22 nt, Human
cauuuugcagcagugagucucu

SEQ ID NO: 3506422 - RNA, 15 nt, Human
cauuuugcauucaaa

SEQ ID NO: 3506423 - RNA, 13 nt, Human
cauuuugccaaaa

SEQ ID NO: 3506424 - RNA, 18 nt, Human
cauuuugcuuuaauuuua

SEQ ID NO: 3506425 - RNA, 20 nt, Human
cauuuuggagaguuuccuga

SEQ ID NO: 3506426 - RNA, 11 nt, Human
cauuauuauua

SEQ ID NO: 3506427 - RNA, 14 nt, Human
cauuauucaaaguu

SEQ ID NO: 3506428 - RNA, 21 nt, Human
cauuauucaaaguugccuaaa

SEQ ID NO: 3506429 - RNA, 14 nt, Human
cauuauucauuuag

SEQ ID NO: 3506430 - RNA, 24 nt, Human
cauuauucucugcuauauauaaaa

SEQ ID NO: 3506431 - RNA, 15 nt, Human
cauuauucucuuuua

SEQ ID NO: 3506432 - RNA, 14 nt, Human
cauuauuggaauua

SEQ ID NO: 3506433 - RNA, 17 nt, Human
cauuauuggaauuaacc

SEQ ID NO: 3506434 - RNA, 18 nt, Human
cauuauuggaauuaaccu

SEQ ID NO: 3506435 - RNA, 22 nt, Human
cauuauuggaauuaaccuggug

SEQ ID NO: 3506436 - RNA, 14 nt, Human
cauuauuuauaugg

SEQ ID NO: 3506437 - RNA, 15 nt, Human
cauuauuuauguauu

SEQ ID NO: 3506438 - RNA, 22 nt, Human
cauuauuuauguauugugcaau

SEQ ID NO: 3506439 - RNA, 13 nt, Human
cauuauuuauuaa

SEQ ID NO: 3506440 - RNA, 17 nt, Human
cauuauuuauuaaauuu

SEQ ID NO: 3506441 - RNA, 13 nt, Human
cauuauuucuagu

SEQ ID NO: 3506442 - RNA, 20 nt, Human
cauuauuugagaagcugcuc

SEQ ID NO: 3506443 - RNA, 14 nt, Human
cauuauuugcaugu

SEQ ID NO: 3506444 - RNA, 11 nt, Human
cauuauuuuau

SEQ ID NO: 3506445 - RNA, 14 nt, Human
cauuauuuuauuau

SEQ ID NO: 3506446 - RNA, 16 nt, Human
cauuauuuuauuauga

SEQ ID NO: 3506447 - RNA, 14 nt, Human
cauuauuuuccaga

SEQ ID NO: 3506448 - RNA, 22 nt, Human
cauuauuuuuccacuuuguucu

SEQ ID NO: 3506449 - RNA, 16 nt, Human
cauucaaaaguugaaa

SEQ ID NO: 3506450 - RNA, 23 nt, Human
cauucaaaugggugauauccuga

SEQ ID NO: 3506451 - RNA, 14 nt, Human
cauucaaauuuguc

SEQ ID NO: 3506452 - RNA, 17 nt, Human
cauucaagucagcucuu

SEQ ID NO: 3506453 - RNA, 23 nt, Human
cauucaaguguaaaauauuuuga

SEQ ID NO: 3506454 - RNA, 16 nt, Human
cauucaauacaagugu

SEQ ID NO: 3506455 - RNA, 21 nt, Human
cauucaauuucaggcucccca

SEQ ID NO: 3506456 - RNA, 14 nt, Human
cauucacccagaca

SEQ ID NO: 3506457 - RNA, 13 nt, Human
cauucaccugccc

SEQ ID NO: 3506458 - RNA, 19 nt, Human
cauucacuucacugugcug

SEQ ID NO: 3506459 - RNA, 14 nt, Human
cauucacuucauaa

SEQ ID NO: 3506460 - RNA, 12 nt, Human
cauucagaaaug

SEQ ID NO: 3506461 - RNA, 20 nt, Human
cauucagaaauguugagucu

SEQ ID NO: 3506462 - RNA, 13 nt, Human
cauucagagucag

SEQ ID NO: 3506463 - RNA, 22 nt, Human
cauucagagucagccaggacca

SEQ ID NO: 3506464 - RNA, 20 nt, Human
cauucagauaugauucaaau

SEQ ID NO: 3506465 - RNA, 16 nt, Human
cauucagaucacugaa

SEQ ID NO: 3506466 - RNA, 17 nt, Human
cauucagaucacugaau

SEQ ID NO: 3506467 - RNA, 21 nt, Human
cauucagaucacugaauuuau

SEQ ID NO: 3506468 - RNA, 20 nt, Human
cauucagcagcaaauuuuca

SEQ ID NO: 3506469 - RNA, 12 nt, Human
cauucaggaacc

SEQ ID NO: 3506470 - RNA, 19 nt, Human
cauucaggaaccuggacca

SEQ ID NO: 3506471 - RNA, 17 nt, Human
cauucaggacugcuggu

SEQ ID NO: 3506472 - RNA, 18 nt, Human
cauucaguauauaaaaua

SEQ ID NO: 3506473 - RNA, 22 nt, Human
cauucauacuuaaaaauuuauu

SEQ ID NO: 3506474 - RNA, 18 nt, Human
cauucauauuacaauauu

SEQ ID NO: 3506475 - RNA, 21 nt, Human
cauucauuagucauguuuauc

SEQ ID NO: 3506476 - RNA, 14 nt, Human
cauucauuuuauau

SEQ ID NO: 3506477 - RNA, 23 nt, Human
cauuccaaaggggaccccuauga

SEQ ID NO: 3506478 - RNA, 18 nt, Human
cauuccaacaaaggguuu

SEQ ID NO: 3506479 - RNA, 23 nt, Human
cauuccaacagcucaagucuucc

SEQ ID NO: 3506480 - RNA, 18 nt, Human
cauuccaagacucuagag

SEQ ID NO: 3506481 - RNA, 14 nt, Human
cauuccaagccuga

SEQ ID NO: 3506482 - RNA, 16 nt, Human
cauuccaugugcccag

SEQ ID NO: 3506483 - RNA, 14 nt, Human
cauuccauugccua

SEQ ID NO: 3506484 - RNA, 18 nt, Human
cauucccagcucuacccu

SEQ ID NO: 3506485 - RNA, 20 nt, Human
cauuccccaggaggccagcc

SEQ ID NO: 3506486 - RNA, 17 nt, Human
cauuccccagguggcug

SEQ ID NO: 3506487 - RNA, 15 nt, Human
cauucccccagugcg

SEQ ID NO: 3506488 - RNA, 16 nt, Human
cauucccgcaguggga

SEQ ID NO: 3506489 - RNA, 22 nt, Human
cauucccgcagugggagcaaac

SEQ ID NO: 3506490 - RNA, 20 nt, Human
cauuccgcagcccccacccc

SEQ ID NO: 3506491 - RNA, 16 nt, Human
cauuccguugucugug

SEQ ID NO: 3506492 - RNA, 14 nt, Human
cauuccuaaaaugc

SEQ ID NO: 3506493 - RNA, 18 nt, Human
cauuccuaaacuaucuuu

SEQ ID NO: 3506494 - RNA, 20 nt, Human
cauuccuaacacagcaugug

SEQ ID NO: 3506495 - RNA, 23 nt, Human
cauuccucaccuuuucccgggga

SEQ ID NO: 3506496 - RNA, 18 nt, Human
cauuccucaugaauguaa

SEQ ID NO: 3506497 - RNA, 12 nt, Human
cauuccuccagg

SEQ ID NO: 3506498 - RNA, 13 nt, Human
cauuccuccaggu

SEQ ID NO: 3506499 - RNA, 13 nt, Human
cauuccugaagaa

SEQ ID NO: 3506500 - RNA, 15 nt, Human
cauuccugccugucu

SEQ ID NO: 3506501 - RNA, 17 nt, Human
cauuccuggaaaccaca

SEQ ID NO: 3506502 - RNA, 21 nt, Human
cauuccugggaaauauucccu

SEQ ID NO: 3506503 - RNA, 18 nt, Human
cauuccugguacccagcc

SEQ ID NO: 3506504 - RNA, 21 nt, Human
cauuccugguacccagccauc

SEQ ID NO: 3506505 - RNA, 23 nt, Human
cauuccugguacccagccaucug

SEQ ID NO: 3506506 - RNA, 13 nt, Human
cauuccuguauuc

SEQ ID NO: 3506507 - RNA, 16 nt, Human
cauuccuucuuugaua

SEQ ID NO: 3506508 - RNA, 18 nt, Human
cauuccuucuuugauaau

SEQ ID NO: 3506509 - RNA, 19 nt, Human
cauuccuucuuugauaaug

SEQ ID NO: 3506510 - RNA, 20 nt, Human
cauuccuugauaauguugug

SEQ ID NO: 3506511 - RNA, 18 nt, Human
cauuccuuuuuauuuaua

SEQ ID NO: 3506512 - RNA, 16 nt, Human
cauucgaucucauuca

SEQ ID NO: 3506513 - RNA, 16 nt, Human
cauucgcgcucugcuc

SEQ ID NO: 3506514 - RNA, 14 nt, Human
cauucguucugugg

SEQ ID NO: 3506515 - RNA, 21 nt, Human
cauucguuguguuuuuuaaga

SEQ ID NO: 3506516 - RNA, 13 nt, Human
cauucuaaugaug

SEQ ID NO: 3506517 - RNA, 17 nt, Human
cauucuacacagagcag

SEQ ID NO: 3506518 - RNA, 11 nt, Human
cauucuacuug

SEQ ID NO: 3506519 - RNA, 12 nt, Human
cauucuacuugc

SEQ ID NO: 3506520 - RNA, 14 nt, Human
cauucuacuugcuc

SEQ ID NO: 3506521 - RNA, 17 nt, Human
cauucuacuugcucugg

SEQ ID NO: 3506522 - RNA, 22 nt, Human
cauucuacuugcucuggaccug

SEQ ID NO: 3506523 - RNA, 17 nt, Human
cauucuaggcucacugc

SEQ ID NO: 3506524 - RNA, 23 nt, Human
cauucuagguaggggcccacuuc

SEQ ID NO: 3506525 - RNA, 15 nt, Human
cauucuaucaagccc

SEQ ID NO: 3506526 - RNA, 16 nt, Human
cauucuauugccuucu

SEQ ID NO: 3506527 - RNA, 14 nt, Human
cauucuauuguuaa

SEQ ID NO: 3506528 - RNA, 13 nt, Human
cauucucacuccu

SEQ ID NO: 3506529 - RNA, 14 nt, Human
cauucucacuccua

SEQ ID NO: 3506530 - RNA, 16 nt, Human
cauucucacuccuacc

SEQ ID NO: 3506531 - RNA, 17 nt, Human
cauucucacuccuaccu

SEQ ID NO: 3506532 - RNA, 13 nt, Human
cauucucaguuuu

SEQ ID NO: 3506533 - RNA, 18 nt, Human
cauucucaguuuuucuua

SEQ ID NO: 3506534 - RNA, 23 nt, Human
cauucucauaauuccuacagcac

SEQ ID NO: 3506535 - RNA, 17 nt, Human
cauucucaucugcaccc

SEQ ID NO: 3506536 - RNA, 20 nt, Human
cauucucaucugcacccuuc

SEQ ID NO: 3506537 - RNA, 19 nt, Human
cauucucauggagaaguua

SEQ ID NO: 3506538 - RNA, 13 nt, Human
cauucucauugaa

SEQ ID NO: 3506539 - RNA, 15 nt, Human
cauucucauuggaaa

SEQ ID NO: 3506540 - RNA, 13 nt, Human
cauucuccaccug

SEQ ID NO: 3506541 - RNA, 18 nt, Human
cauucuccaccugccagg

SEQ ID NO: 3506542 - RNA, 17 nt, Human
cauucuccauuuguuau

SEQ ID NO: 3506543 - RNA, 15 nt, Human
cauucucccagguac

SEQ ID NO: 3506544 - RNA, 23 nt, Human
cauucucccagguaccagcugcg

SEQ ID NO: 3506545 - RNA, 22 nt, Human
cauucuccccaguguaugucuu

SEQ ID NO: 3506546 - RNA, 21 nt, Human
cauucuccuaucaccugucuu

SEQ ID NO: 3506547 - RNA, 13 nt, Human
cauucuccugccu

SEQ ID NO: 3506548 - RNA, 16 nt, Human
cauucuccuuguguua

SEQ ID NO: 3506549 - RNA, 15 nt, Human
cauucuccuuguugu

SEQ ID NO: 3506550 - RNA, 16 nt, Human
cauucucucuccuguc

SEQ ID NO: 3506551 - RNA, 20 nt, Human
cauucucucuccuguccaac

SEQ ID NO: 3506552 - RNA, 13 nt, Human
cauucucugaaga

SEQ ID NO: 3506553 - RNA, 14 nt, Human
cauucucugucuca

SEQ ID NO: 3506554 - RNA, 11 nt, Human
cauucugaaug

SEQ ID NO: 3506555 - RNA, 15 nt, Human
cauucugaaugcuuc

SEQ ID NO: 3506556 - RNA, 18 nt, Human
cauucugaaugcuucuaa

SEQ ID NO: 3506557 - RNA, 23 nt, Human
cauucugacucgguuucuccaaa

SEQ ID NO: 3506558 - RNA, 22 nt, Human
cauucugauucgaaugacacug

SEQ ID NO: 3506559 - RNA, 11 nt, Human
cauucugcaag

SEQ ID NO: 3506560 - RNA, 19 nt, Human
cauucugcauugcuagaua

SEQ ID NO: 3506561 - RNA, 21 nt, Human
cauucugcauugcuagauaaa

SEQ ID NO: 3506562 - RNA, 17 nt, Human
cauucugccucucuagg

SEQ ID NO: 3506563 - RNA, 15 nt, Human
cauucugccugccca

SEQ ID NO: 3506564 - RNA, 20 nt, Human
cauucugcuuucaucuuggu

SEQ ID NO: 3506565 - RNA, 16 nt, Human
cauucuggaagugacu

SEQ ID NO: 3506566 - RNA, 17 nt, Human
cauucuggucucgucuu

SEQ ID NO: 3506567 - RNA, 16 nt, Human
cauucugugaucauuu

SEQ ID NO: 3506568 - RNA, 12 nt, Human
cauucuuacuaa

SEQ ID NO: 3506569 - RNA, 18 nt, Human
cauucuuacuaaaaagua

SEQ ID NO: 3506570 - RNA, 22 nt, Human
cauucuuacuaaaaaguauaaa

SEQ ID NO: 3506571 - RNA, 22 nt, Human
caccauuauaaugaauuuagug

SEQ ID NO: 3506572 - RNA, 21 nt, Human
cauuguaaaugugcuuuuaaa

SEQ ID NO: 3506573 - RNA, 21 nt, Human
cauuguaagcguauggcuuua

SEQ ID NO: 3506574 - RNA, 18 nt, Human
cauuguaauguuacugau

SEQ ID NO: 3506575 - RNA, 13 nt, Human
cauuguacaguuu

SEQ ID NO: 3506576 - RNA, 14 nt, Human
cauuguacaguuug

SEQ ID NO: 3506577 - RNA, 20 nt, Human
cauuguacaguuuguuuaca

SEQ ID NO: 3506578 - RNA, 20 nt, Human
cauuguacgaagaguauuuu

SEQ ID NO: 3506579 - RNA, 16 nt, Human
cauuguagagcuucug

SEQ ID NO: 3506580 - RNA, 15 nt, Human
cauuguagugcuuug

SEQ ID NO: 3506581 - RNA, 14 nt, Human
cauuguauauaugu

SEQ ID NO: 3506582 - RNA, 16 nt, Human
cauuguauauaugugu

SEQ ID NO: 3506583 - RNA, 18 nt, Human
cauuguaucugucuuucc

SEQ ID NO: 3506584 - RNA, 15 nt, Human
cauuguaugaugugu

SEQ ID NO: 3506585 - RNA, 17 nt, Human
cauuguaugauguguug

SEQ ID NO: 3506586 - RNA, 16 nt, Human
cauuguauguaucuau

SEQ ID NO: 3506587 - RNA, 20 nt, Human
cacccucguggacaccugcc

SEQ ID NO: 3506588 - RNA, 16 nt, Human
cacccucuaaauggga

SEQ ID NO: 3506589 - RNA, 14 nt, Human
cacccucuauccca

SEQ ID NO: 3506590 - RNA, 16 nt, Human
cacccucuaucccaau

SEQ ID NO: 3506591 - RNA, 18 nt, Human
cacccucugagcuuugca

SEQ ID NO: 3506592 - RNA, 13 nt, Human
cacccucuguacc

SEQ ID NO: 3506593 - RNA, 21 nt, Human
cacccucuuccuacuggucuc

SEQ ID NO: 3506594 - RNA, 14 nt, Human
cacccucuuccugu

SEQ ID NO: 3506595 - RNA, 15 nt, Human
cacccucuuccugug

SEQ ID NO: 3506596 - RNA, 14 nt, Human
cacccugagccggc

SEQ ID NO: 3506597 - RNA, 22 nt, Human
cacccugaggagucugaggucc

SEQ ID NO: 3506598 - RNA, 19 nt, Human
cacccugaggccucuggaa

SEQ ID NO: 3506599 - RNA, 11 nt, Human
cacccugaggg

SEQ ID NO: 3506600 - RNA, 11 nt, Human
cacccugcaag

SEQ ID NO: 3506601 - RNA, 18 nt, Human
cacccugccuuaucuugc

SEQ ID NO: 3506602 - RNA, 16 nt, Human
cacccugcugagucug

SEQ ID NO: 3506603 - RNA, 16 nt, Human
cacccugcuuggccca

SEQ ID NO: 3506604 - RNA, 18 nt, Human
cacccugcuuggcccagg

SEQ ID NO: 3506605 - RNA, 15 nt, Human
cacccuggauuugca

SEQ ID NO: 3506606 - RNA, 21 nt, Human
cacccugggcccugggcugga

SEQ ID NO: 3506607 - RNA, 22 nt, Human
cacccugggcucugugggcugc

SEQ ID NO: 3506608 - RNA, 16 nt, Human
cacccuguaccucauc

SEQ ID NO: 3506609 - RNA, 22 nt, Human
cacccuguaccucaucccauga

SEQ ID NO: 3506610 - RNA, 23 nt, Human
cacccuguacuguucugugucuu

SEQ ID NO: 3506611 - RNA, 18 nt, Human
cacccugucccccagcuc

SEQ ID NO: 3506612 - RNA, 22 nt, Human
cacccugucccccagcucuggu

SEQ ID NO: 3506613 - RNA, 17 nt, Human
cacccugucuaaaaaac

SEQ ID NO: 3506614 - RNA, 14 nt, Human
cacccugucugccc

SEQ ID NO: 3506615 - RNA, 18 nt, Human
cacccugugauggggccc

SEQ ID NO: 3506616 - RNA, 22 nt, Human
cacccugugauggggcccugcc

SEQ ID NO: 3506617 - RNA, 23 nt, Human
cacccugugauggggcccugccu

SEQ ID NO: 3506618 - RNA, 15 nt, Human
cacccugugcagaag

SEQ ID NO: 3506619 - RNA, 15 nt, Human
cacccuguggcccug

SEQ ID NO: 3506620 - RNA, 20 nt, Human
cacccuguggcccuggcucu

SEQ ID NO: 3506621 - RNA, 16 nt, Human
cacccuguuccugcug

SEQ ID NO: 3506622 - RNA, 19 nt, Human
cacccuguuuggauuuuua

SEQ ID NO: 3506623 - RNA, 20 nt, Human
cacccuuaacccaaggagca

SEQ ID NO: 3506624 - RNA, 14 nt, Human
cacccuuagaaaau

SEQ ID NO: 3506625 - RNA, 15 nt, Human
cacccuuagaaaaug

SEQ ID NO: 3506626 - RNA, 19 nt, Human
cacccuuagaaaauguguc

SEQ ID NO: 3506627 - RNA, 22 nt, Human
cacccuucacauacccuccccc

SEQ ID NO: 3506628 - RNA, 22 nt, Human
cacccuuccccuccuucucccu

SEQ ID NO: 3506629 - RNA, 13 nt, Human
cacccuuccuucu

SEQ ID NO: 3506630 - RNA, 21 nt, Human
cacccuucucccacucuccua

SEQ ID NO: 3506631 - RNA, 15 nt, Human
cacccuucuuuccuc

SEQ ID NO: 3506632 - RNA, 12 nt, Human
cacccuugccca

SEQ ID NO: 3506633 - RNA, 14 nt, Human
cacccuuggacuug

SEQ ID NO: 3506634 - RNA, 16 nt, Human
cacccuuggagcucug

SEQ ID NO: 3506635 - RNA, 19 nt, Human
cacccuuggaggcugucuu

SEQ ID NO: 3506636 - RNA, 20 nt, Human
cacccuuggaggcugucuuc

SEQ ID NO: 3506637 - RNA, 21 nt, Human
cacccuuggaggcugucuucu

SEQ ID NO: 3506638 - RNA, 15 nt, Human
cacccuuuuccagcu

SEQ ID NO: 3506639 - RNA, 14 nt, Human
caccgaaaaacuaa

SEQ ID NO: 3506640 - RNA, 18 nt, Human
caccgaaaacguggcugc

SEQ ID NO: 3506641 - RNA, 22 nt, Human
caccgaaaacguggcugcuuca

SEQ ID NO: 3506642 - RNA, 14 nt, Human
caccgaagcccaga

SEQ ID NO: 3506643 - RNA, 22 nt, Human
caccgaaguggacuggccccug

SEQ ID NO: 3506644 - RNA, 18 nt, Human
caccgacgcgucuccugu

SEQ ID NO: 3506645 - RNA, 21 nt, Human
caccgagaguagccgagagcc

SEQ ID NO: 3506646 - RNA, 16 nt, Human
caccgaggggccuuug

SEQ ID NO: 3506647 - RNA, 13 nt, Human
caccgcagaagga

SEQ ID NO: 3506648 - RNA, 15 nt, Human
caccgcagaaggaag

SEQ ID NO: 3506649 - RNA, 14 nt, Human
caccgcagacagga

SEQ ID NO: 3506650 - RNA, 19 nt, Human
caccgcaugcccccucgug

SEQ ID NO: 3506651 - RNA, 21 nt, Human
caccgccacaauaaagaucgc

SEQ ID NO: 3506652 - RNA, 14 nt, Human
caccgcccaucagg

SEQ ID NO: 3506653 - RNA, 14 nt, Human
caccgccccuggcc

SEQ ID NO: 3506654 - RNA, 15 nt, Human
caccgccccuggccg

SEQ ID NO: 3506655 - RNA, 13 nt, Human
caccgccucuucc

SEQ ID NO: 3506656 - RNA, 17 nt, Human
caccgccucuucccgcc

SEQ ID NO: 3506657 - RNA, 15 nt, Human
caccgccuugcccag

SEQ ID NO: 3506658 - RNA, 18 nt, Human
caccgcuccccagcccag

SEQ ID NO: 3506659 - RNA, 20 nt, Human
caccgcuccccagcccaggg

SEQ ID NO: 3506660 - RNA, 12 nt, Human
caccgcugccua

SEQ ID NO: 3506661 - RNA, 13 nt, Human
caccgcugccuaa

SEQ ID NO: 3506662 - RNA, 19 nt, Human
caccgcugccuaaguggcu

SEQ ID NO: 3506663 - RNA, 22 nt, Human
caccgcuuccggcuccugugcu

SEQ ID NO: 3506664 - RNA, 18 nt, Human
caccgcuucugccuuuuc

SEQ ID NO: 3506665 - RNA, 19 nt, Human
caccgcuuuuguucucgca

SEQ ID NO: 3506666 - RNA, 18 nt, Human
caccggccgauggagaca

SEQ ID NO: 3506667 - RNA, 12 nt, Human
caccggcgcgcu

SEQ ID NO: 3506668 - RNA, 21 nt, Human
caccggcucucaccuggcccu

SEQ ID NO: 3506669 - RNA, 17 nt, Human
caccggcuggccuggcc

SEQ ID NO: 3506670 - RNA, 15 nt, Human
caccgggcacucaga

SEQ ID NO: 3506671 - RNA, 14 nt, Human
caccgggcagggcc

SEQ ID NO: 3506672 - RNA, 23 nt, Human
caccgggccacuccuuccugccc

SEQ ID NO: 3506673 - RNA, 18 nt, Human
caccgguugcuucuggga

SEQ ID NO: 3506674 - RNA, 21 nt, Human
caccgguugcuucugggaagg

SEQ ID NO: 3506675 - RNA, 19 nt, Human
caccguaaagugagcaugc

SEQ ID NO: 3506676 - RNA, 16 nt, Human
caccguccccucccag

SEQ ID NO: 3506677 - RNA, 14 nt, Human
caccguccgcccug

SEQ ID NO: 3506678 - RNA, 16 nt, Human
caccguccgcccugcu

SEQ ID NO: 3506679 - RNA, 24 nt, Human
caccgugcccagcccuaaacauca

SEQ ID NO: 3506680 - RNA, 15 nt, Human
caccgugccuggcca

SEQ ID NO: 3506681 - RNA, 15 nt, Human
caccgugggcaggga

SEQ ID NO: 3506682 - RNA, 16 nt, Human
caccguguaaaccaaa

SEQ ID NO: 3506683 - RNA, 18 nt, Human
caccguguaaaccaaagc

SEQ ID NO: 3506684 - RNA, 20 nt, Human
caccgugucaagcugcucug

SEQ ID NO: 3506685 - RNA, 13 nt, Human
caccguugucuca

SEQ ID NO: 3506686 - RNA, 14 nt, Human
caccguugucucau

SEQ ID NO: 3506687 - RNA, 19 nt, Human
caccguugucucaugccag

SEQ ID NO: 3506688 - RNA, 17 nt, Human
caccuaaagcagccagc

SEQ ID NO: 3506689 - RNA, 20 nt, Human
caccuaaagguguauuuaaa

SEQ ID NO: 3506690 - RNA, 21 nt, Human
caccuaaagguguauuuaaac

SEQ ID NO: 3506691 - RNA, 13 nt, Human
caccuaagggaca

SEQ ID NO: 3506692 - RNA, 19 nt, Human
caccuaagggacauguuuu

SEQ ID NO: 3506693 - RNA, 16 nt, Human
caccuaagucucugug

SEQ ID NO: 3506694 - RNA, 17 nt, Human
caccuaauccaggcaga

SEQ ID NO: 3506695 - RNA, 21 nt, Human
caccuaauccaggcagaucca

SEQ ID NO: 3506696 - RNA, 21 nt, Human
caccuaauguuuaugagccag

SEQ ID NO: 3506697 - RNA, 13 nt, Human
caccuacagugua

SEQ ID NO: 3506698 - RNA, 17 nt, Human
caccuacaguguacagu

SEQ ID NO: 3506699 - RNA, 18 nt, Human
caccuacauguuauucua

SEQ ID NO: 3506700 - RNA, 16 nt, Human
caccuaccccugacuu

SEQ ID NO: 3506701 - RNA, 20 nt, Human
caccuacuacaucgcccucc

SEQ ID NO: 3506702 - RNA, 17 nt, Human
caccuacucacacaggc

SEQ ID NO: 3506703 - RNA, 18 nt, Human
caccuacucacacaggca

SEQ ID NO: 3506704 - RNA, 17 nt, Human
caccuagaaacuuguua

SEQ ID NO: 3506705 - RNA, 23 nt, Human
caccuagaacacuaacucaccag

SEQ ID NO: 3506706 - RNA, 20 nt, Human
caccuagcaauuccaucacc

SEQ ID NO: 3506707 - RNA, 15 nt, Human
caccuagcugugcaa

SEQ ID NO: 3506708 - RNA, 18 nt, Human
caccuaggaagccucaga

SEQ ID NO: 3506709 - RNA, 17 nt, Human
caccuaggccacuccuc

SEQ ID NO: 3506710 - RNA, 18 nt, Human
caccuaggccacuccucc

SEQ ID NO: 3506711 - RNA, 19 nt, Human
caccuaggccacuccucca

SEQ ID NO: 3506712 - RNA, 18 nt, Human
caccuaggcuaggguggg

SEQ ID NO: 3506713 - RNA, 19 nt, Human
caccuaggcuagggugggg

SEQ ID NO: 3506714 - RNA, 17 nt, Human
caccuaguggcugucca

SEQ ID NO: 3506715 - RNA, 14 nt, Human
caccuauaaaacag

SEQ ID NO: 3506716 - RNA, 19 nt, Human
caccuauaaaacaggucaa

SEQ ID NO: 3506717 - RNA, 18 nt, Human
ccagagaagccccuuccc

SEQ ID NO: 3506718 - RNA, 19 nt, Human
ccagagaagugacagggaa

SEQ ID NO: 3506719 - RNA, 22 nt, Human
ccagagaagugacagggaagcu

SEQ ID NO: 3506720 - RNA, 16 nt, Human
ccagagaauucuuaga

SEQ ID NO: 3506721 - RNA, 16 nt, Human
ccagagacacaagccu

SEQ ID NO: 3506722 - RNA, 19 nt, Human
ccagagacacagcccccac

SEQ ID NO: 3506723 - RNA, 12 nt, Human
ccagagacccag

SEQ ID NO: 3506724 - RNA, 14 nt, Human
ccagagacccagcg

SEQ ID NO: 3506725 - RNA, 21 nt, Human
ccagagacccagcggacacac

SEQ ID NO: 3506726 - RNA, 18 nt, Human
ccagagaccguccucacc

SEQ ID NO: 3506727 - RNA, 16 nt, Human
ccagagacuuuguaga

SEQ ID NO: 3506728 - RNA, 17 nt, Human
ccagagagaagagcccc

SEQ ID NO: 3506729 - RNA, 19 nt, Human
ccagagagaagagccccac

SEQ ID NO: 3506730 - RNA, 23 nt, Human
ccagagagaagagccccacucuc

SEQ ID NO: 3506731 - RNA, 20 nt, Human
ccagagagagaagugccccu

SEQ ID NO: 3506732 - RNA, 22 nt, Human
ccagagagagaagugccccugc

SEQ ID NO: 3506733 - RNA, 21 nt, Human
ccagagagcaacucugagauc

SEQ ID NO: 3506734 - RNA, 19 nt, Human
ccagagagggacugacacc

SEQ ID NO: 3506735 - RNA, 23 nt, Human
ccagagaggguggugaccucugc

SEQ ID NO: 3506736 - RNA, 14 nt, Human
ccagagaguccugu

SEQ ID NO: 3506737 - RNA, 15 nt, Human
ccagagaguggcucc

SEQ ID NO: 3506738 - RNA, 18 nt, Human
ccagagaguggcuccucc

SEQ ID NO: 3506739 - RNA, 22 nt, Human
ccagagaguggcuccucccggu

SEQ ID NO: 3506740 - RNA, 20 nt, Human
ccagagaugccuccaccgcu

SEQ ID NO: 3506741 - RNA, 21 nt, Human
ccagagaugggacugggaggg

SEQ ID NO: 3506742 - RNA, 23 nt, Human
ccagagaugggacugggagggcc

SEQ ID NO: 3506743 - RNA, 12 nt, Human
ccagagauguca

SEQ ID NO: 3506744 - RNA, 13 nt, Human
ccagagcaaaaua

SEQ ID NO: 3506745 - RNA, 16 nt, Human
ccagagcaaccucuca

SEQ ID NO: 3506746 - RNA, 19 nt, Human
ccagagcaaccucucacuc

SEQ ID NO: 3506747 - RNA, 21 nt, Human
ccagagcaaccucucacuccc

SEQ ID NO: 3506748 - RNA, 16 nt, Human
ccagagcaagcuuuuu

SEQ ID NO: 3506749 - RNA, 14 nt, Human
ccagagcacuguau

SEQ ID NO: 3506750 - RNA, 22 nt, Human
ccagagcagaugcagagagcca

SEQ ID NO: 3506751 - RNA, 23 nt, Human
ccagagcagaugcagagagccau

SEQ ID NO: 3506752 - RNA, 14 nt, Human
ccagagcaggaggc

SEQ ID NO: 3506753 - RNA, 15 nt, Human
ccagagcaggaggcc

SEQ ID NO: 3506754 - RNA, 19 nt, Human
ccagagcaggaggccccug

SEQ ID NO: 3506755 - RNA, 23 nt, Human
ccagagcaggaggccccuggccc

SEQ ID NO: 3506756 - RNA, 12 nt, Human
ccagagcagggu

SEQ ID NO: 3506757 - RNA, 20 nt, Human
ccagagcauuacgugagcca

SEQ ID NO: 3506758 - RNA, 22 nt, Human
ccagagcauuacgugagccagg

SEQ ID NO: 3506759 - RNA, 23 nt, Human
ccagagcauuacgugagccaggu

SEQ ID NO: 3506760 - RNA, 19 nt, Human
ccagagcauuccagucagg

SEQ ID NO: 3506761 - RNA, 23 nt, Human
ccagagcauuccagucaggcucu

SEQ ID NO: 3506762 - RNA, 13 nt, Human
ccagagccaaggg

SEQ ID NO: 3506763 - RNA, 14 nt, Human
ccagagccacacau

SEQ ID NO: 3506764 - RNA, 16 nt, Human
ccagagccacacaugg

SEQ ID NO: 3506765 - RNA, 15 nt, Human
ccagagccacaguuc

SEQ ID NO: 3506766 - RNA, 13 nt, Human
ccagagccaugga

SEQ ID NO: 3506767 - RNA, 16 nt, Human
ccagagcccaccuugg

SEQ ID NO: 3506768 - RNA, 22 nt, Human
ccagagcccaccuuggcucaag

SEQ ID NO: 3506769 - RNA, 13 nt, Human
ccagagcccagcu

SEQ ID NO: 3506770 - RNA, 15 nt, Human
ccagagcccagcucc

SEQ ID NO: 3506771 - RNA, 16 nt, Human
ccagagcccagcucca

SEQ ID NO: 3506772 - RNA, 14 nt, Human
ccagagcccaggcu

SEQ ID NO: 3506773 - RNA, 18 nt, Human
ccagagccccacacggag

SEQ ID NO: 3506774 - RNA, 16 nt, Human
ccagagccccacagcc

SEQ ID NO: 3506775 - RNA, 17 nt, Human
ccagagccccacagccc

SEQ ID NO: 3506776 - RNA, 18 nt, Human
ccagagccuggggcucua

SEQ ID NO: 3506777 - RNA, 20 nt, Human
ccagagccuggggcucuaac

SEQ ID NO: 3506778 - RNA, 19 nt, Human
ccagagcggaggcugugug

SEQ ID NO: 3506779 - RNA, 20 nt, Human
ccagagcuacccgcagaguu

SEQ ID NO: 3506780 - RNA, 12 nt, Human
ccagagcuccuc

SEQ ID NO: 3506781 - RNA, 15 nt, Human
ccagagcuccuccuu

SEQ ID NO: 3506782 - RNA, 13 nt, Human
ccagagcucugga

SEQ ID NO: 3506783 - RNA, 11 nt, Human
ccagagcugcc

SEQ ID NO: 3506784 - RNA, 23 nt, Human
ccagagcugcuuccccgucaccu

SEQ ID NO: 3506785 - RNA, 14 nt, Human
ccagagcugggagg

SEQ ID NO: 3506786 - RNA, 23 nt, Human
ccagagcuguuuauggccucagc

SEQ ID NO: 3506787 - RNA, 14 nt, Human
ccagaggaacuguc

SEQ ID NO: 3506788 - RNA, 19 nt, Human
ccagaggaacuguccagag

SEQ ID NO: 3506789 - RNA, 18 nt, Human
ccagaggaauccuggcag

SEQ ID NO: 3506790 - RNA, 19 nt, Human
ccagaggaauccuggcagc

SEQ ID NO: 3506791 - RNA, 13 nt, Human
ccagaggagacau

SEQ ID NO: 3506792 - RNA, 19 nt, Human
cacucaaggcggugcuuga

SEQ ID NO: 3506793 - RNA, 22 nt, Human
cacucaaugcagccagaccuau

SEQ ID NO: 3506794 - RNA, 16 nt, Human
cacucacacagccagg

SEQ ID NO: 3506795 - RNA, 13 nt, Human
cacucacacagga

SEQ ID NO: 3506796 - RNA, 14 nt, Human
cacucacacaggac

SEQ ID NO: 3506797 - RNA, 19 nt, Human
cacucacagaccuggagcc

SEQ ID NO: 3506798 - RNA, 23 nt, Human
cacucacagaccuggagccccug

SEQ ID NO: 3506799 - RNA, 15 nt, Human
cacucacagagucaa

SEQ ID NO: 3506800 - RNA, 22 nt, Human
cacucacagagucaaggccugc

SEQ ID NO: 3506801 - RNA, 19 nt, Human
cacucacauuuauucugcu

SEQ ID NO: 3506802 - RNA, 20 nt, Human
cacucacauuuauucugcuc

SEQ ID NO: 3506803 - RNA, 21 nt, Human
cacucaccaguguccccucca

SEQ ID NO: 3506804 - RNA, 16 nt, Human
cacucacccaugugcc

SEQ ID NO: 3506805 - RNA, 21 nt, Human
cacucacccaugugccaaggu

SEQ ID NO: 3506806 - RNA, 22 nt, Human
cacucacccaugugccaaggug

SEQ ID NO: 3506807 - RNA, 17 nt, Human
cacucagaagacacuga

SEQ ID NO: 3506808 - RNA, 19 nt, Human
cacucagaagacacugaug

SEQ ID NO: 3506809 - RNA, 22 nt, Human
cacucagaagacacugaugggc

SEQ ID NO: 3506810 - RNA, 22 nt, Human
cacucagaagccugggggccug

SEQ ID NO: 3506811 - RNA, 16 nt, Human
cacucagagacaugca

SEQ ID NO: 3506812 - RNA, 18 nt, Human
cacucagagacaugcaga

SEQ ID NO: 3506813 - RNA, 12 nt, Human
cacucagagcag

SEQ ID NO: 3506814 - RNA, 17 nt, Human
cacucagagcagucugu

SEQ ID NO: 3506815 - RNA, 21 nt, Human
cacucagagcagucugugacu

SEQ ID NO: 3506816 - RNA, 13 nt, Human
cacucagcaccac

SEQ ID NO: 3506817 - RNA, 16 nt, Human
cacucagcaccacuca

SEQ ID NO: 3506818 - RNA, 18 nt, Human
cacucagcaccacucaag

SEQ ID NO: 3506819 - RNA, 21 nt, Human
cacucagcacccccuucucug

SEQ ID NO: 3506820 - RNA, 16 nt, Human
cacucagccacccuga

SEQ ID NO: 3506821 - RNA, 18 nt, Human
cacucagccacccugagu

SEQ ID NO: 3506822 - RNA, 22 nt, Human
cacucagccccuaggaguauau

SEQ ID NO: 3506823 - RNA, 12 nt, Human
cacucagcuguu

SEQ ID NO: 3506824 - RNA, 21 nt, Human
cacucagcuguucagauugga

SEQ ID NO: 3506825 - RNA, 19 nt, Human
cacucaggaggcugaggca

SEQ ID NO: 3506826 - RNA, 21 nt, Human
cacucaggaggcugaggcagg

SEQ ID NO: 3506827 - RNA, 19 nt, Human
cacucaggccaacaagcca

SEQ ID NO: 3506828 - RNA, 16 nt, Human
cacucaggccugcgag

SEQ ID NO: 3506829 - RNA, 13 nt, Human
cacucaggcugga

SEQ ID NO: 3506830 - RNA, 16 nt, Human
cacucaggucuguuuu

SEQ ID NO: 3506831 - RNA, 16 nt, Human
cacucaguccauagca

SEQ ID NO: 3506832 - RNA, 14 nt, Human
cacucaugcugaaa

SEQ ID NO: 3506833 - RNA, 15 nt, Human
cacucauuccuguag

SEQ ID NO: 3506834 - RNA, 19 nt, Human
cacucauugaccugaggcc

SEQ ID NO: 3506835 - RNA, 20 nt, Human
cacucauugaccugaggccc

SEQ ID NO: 3506836 - RNA, 16 nt, Human
cacucauugcugagcc

SEQ ID NO: 3506837 - RNA, 19 nt, Human
cacucauugcugagccucu

SEQ ID NO: 3506838 - RNA, 13 nt, Human
cacucauuucauc

SEQ ID NO: 3506839 - RNA, 17 nt, Human
cacucauuucaucucau

SEQ ID NO: 3506840 - RNA, 21 nt, Human
cacuccaaccuaaccuguguc

SEQ ID NO: 3506841 - RNA, 15 nt, Human
cacuccaagccagca

SEQ ID NO: 3506842 - RNA, 16 nt, Human
cacuccaagcccagcc

SEQ ID NO: 3506843 - RNA, 21 nt, Human
cacuccaagcccagcccaugg

SEQ ID NO: 3506844 - RNA, 23 nt, Human
cacuccaauaggugcugagugua

SEQ ID NO: 3506845 - RNA, 21 nt, Human
cacuccaaugucugcugagga

SEQ ID NO: 3506846 - RNA, 18 nt, Human
cacuccaauuaaggauuu

SEQ ID NO: 3506847 - RNA, 14 nt, Human
cacuccaccaccca

SEQ ID NO: 3506848 - RNA, 12 nt, Human
cacuccacccuc

SEQ ID NO: 3506849 - RNA, 18 nt, Human
cacuccacccuccaccuu

SEQ ID NO: 3506850 - RNA, 14 nt, Human
cacuccagaccccu

SEQ ID NO: 3506851 - RNA, 17 nt, Human
cacuccagaccccuggc

SEQ ID NO: 3506852 - RNA, 13 nt, Human
cacuccagccuga

SEQ ID NO: 3506853 - RNA, 15 nt, Human
cacuccagccugagc

SEQ ID NO: 3506854 - RNA, 21 nt, Human
cacuccagccugagcaacaga

SEQ ID NO: 3506855 - RNA, 14 nt, Human
cacuccagccuggg

SEQ ID NO: 3506856 - RNA, 15 nt, Human
cacuccagccugggc

SEQ ID NO: 3506857 - RNA, 16 nt, Human
cacuccagccugggcg

SEQ ID NO: 3506858 - RNA, 23 nt, Human
cacuccagccugggcgacagagc

SEQ ID NO: 3506859 - RNA, 15 nt, Human
cacuccagccugggu

SEQ ID NO: 3506860 - RNA, 13 nt, Human
cacuccagcuccu

SEQ ID NO: 3506861 - RNA, 22 nt, Human
aaacuguuagcacuguugaugu

SEQ ID NO: 3506862 - RNA, 21 nt, Human
aaacuguucccaccugcugga

SEQ ID NO: 3506863 - RNA, 19 nt, Human
aaacuguuggaauggauuu

SEQ ID NO: 3506864 - RNA, 14 nt, Human
aaacuguuugaaaa

SEQ ID NO: 3506865 - RNA, 16 nt, Human
aaacuuaaauguuauu

SEQ ID NO: 3506866 - RNA, 17 nt, Human
aaacuuaacauauuuac

SEQ ID NO: 3506867 - RNA, 14 nt, Human
aaacuuaagaaaca

SEQ ID NO: 3506868 - RNA, 14 nt, Human
aaacuuaaucuaaa

SEQ ID NO: 3506869 - RNA, 16 nt, Human
aaacuuaauuuaauau

SEQ ID NO: 3506870 - RNA, 20 nt, Human
aaacuuaccuaagugacauu

SEQ ID NO: 3506871 - RNA, 15 nt, Human
aaacuuacuauuuug

SEQ ID NO: 3506872 - RNA, 17 nt, Human
aaacuuagugacaaaau

SEQ ID NO: 3506873 - RNA, 16 nt, Human
aaacuuaguuugugaa

SEQ ID NO: 3506874 - RNA, 16 nt, Human
aaacuuaucuuacaaa

SEQ ID NO: 3506875 - RNA, 12 nt, Human
aaacuuaugaau

SEQ ID NO: 3506876 - RNA, 14 nt, Human
aaacuuaugaaugu

SEQ ID NO: 3506877 - RNA, 23 nt, Human
aaacuuauuuuuuucugauugua

SEQ ID NO: 3506878 - RNA, 12 nt, Human
aaacuucagaag

SEQ ID NO: 3506879 - RNA, 22 nt, Human
aaacuucaguuucacagaaaau

SEQ ID NO: 3506880 - RNA, 16 nt, Human
aaacuucauguaauuu

SEQ ID NO: 3506881 - RNA, 17 nt, Human
aaacuucauucucguga

SEQ ID NO: 3506882 - RNA, 22 nt, Human
aaacuuccagugcaacacugaa

SEQ ID NO: 3506883 - RNA, 23 nt, Human
aaacuuccaugaggccaaacguu

SEQ ID NO: 3506884 - RNA, 17 nt, Human
aaacuucguuuaaugaa

SEQ ID NO: 3506885 - RNA, 15 nt, Human
aaacuucuuaaauau

SEQ ID NO: 3506886 - RNA, 13 nt, Human
aaacuugaaaaua

SEQ ID NO: 3506887 - RNA, 14 nt, Human
aaacuugaaaauau

SEQ ID NO: 3506888 - RNA, 19 nt, Human
aaacuugaauucauagaaa

SEQ ID NO: 3506889 - RNA, 19 nt, Human
aaacuugcaucacuuaacg

SEQ ID NO: 3506890 - RNA, 12 nt, Human
aaacuugggcac

SEQ ID NO: 3506891 - RNA, 23 nt, Human
aaacuuggugacuugauccacua

SEQ ID NO: 3506892 - RNA, 16 nt, Human
aaacuuguauuaugug

SEQ ID NO: 3506893 - RNA, 15 nt, Human
aaacuuguuagaaau

SEQ ID NO: 3506894 - RNA, 14 nt, Human
aaacuuguuauugu

SEQ ID NO: 3506895 - RNA, 18 nt, Human
aaacuuguuauugugaau

SEQ ID NO: 3506896 - RNA, 19 nt, Human
aaacuuguuauugugaaug

SEQ ID NO: 3506897 - RNA, 22 nt, Human
aaacuuguuauugugaaugauu

SEQ ID NO: 3506898 - RNA, 16 nt, Human
aaacuuguucuuccaa

SEQ ID NO: 3506899 - RNA, 15 nt, Human
aaacuuguugaauuu

SEQ ID NO: 3506900 - RNA, 19 nt, Human
aaacuuguuugcugugaac

SEQ ID NO: 3506901 - RNA, 20 nt, Human
aaacuuuaaaaaauauuuau

SEQ ID NO: 3506902 - RNA, 18 nt, Human
aaacuuuaauauguauuu

SEQ ID NO: 3506903 - RNA, 20 nt, Human
aaacuuuacccaaaaacuaa

SEQ ID NO: 3506904 - RNA, 14 nt, Human
aaacuuuaccuuuu

SEQ ID NO: 3506905 - RNA, 17 nt, Human
aaacuuuaccuuuuuua

SEQ ID NO: 3506906 - RNA, 18 nt, Human
aaacuuuacuaagaugac

SEQ ID NO: 3506907 - RNA, 21 nt, Human
aaacuuuacuaagaugacauu

SEQ ID NO: 3506908 - RNA, 12 nt, Human
aaacuuuacuau

SEQ ID NO: 3506909 - RNA, 18 nt, Human
aaacuuuacuauggcccu

SEQ ID NO: 3506910 - RNA, 19 nt, Human
aaacuuuaggguaaaaauu

SEQ ID NO: 3506911 - RNA, 16 nt, Human
aaacuuuauacauuag

SEQ ID NO: 3506912 - RNA, 23 nt, Human
aaacuuuauacauuaguaaaugu

SEQ ID NO: 3506913 - RNA, 15 nt, Human
aaacuuuaucacuua

SEQ ID NO: 3506914 - RNA, 15 nt, Human
aaacuuuauuuuaua

SEQ ID NO: 3506915 - RNA, 21 nt, Human
aaacuuuauuuuauauaauaa

SEQ ID NO: 3506916 - RNA, 19 nt, Human
aaacuuucuuaauauuuuu

SEQ ID NO: 3506917 - RNA, 13 nt, Human
aaacuuugaaaua

SEQ ID NO: 3506918 - RNA, 22 nt, Human
aaacuuugagaucuaaaaauaa

SEQ ID NO: 3506919 - RNA, 13 nt, Human
aaacuuuuaacug

SEQ ID NO: 3506920 - RNA, 12 nt, Human
aaacuuuucuca

SEQ ID NO: 3506921 - RNA, 11 nt, Human
aaacuuuucug

SEQ ID NO: 3506922 - RNA, 13 nt, Human
aaacuuuucugcu

SEQ ID NO: 3506923 - RNA, 17 nt, Human
aaacuuuuuuauuuaaa

SEQ ID NO: 3506924 - RNA, 13 nt, Human
aaacuuuuuuuca

SEQ ID NO: 3506925 - RNA, 15 nt, Human
aaacuuuuuuucaau

SEQ ID NO: 3506926 - RNA, 18 nt, Human
aaacuuuuuuucaaugug

SEQ ID NO: 3506927 - RNA, 15 nt, Human
aaacuuuuuuucugu

SEQ ID NO: 3506928 - RNA, 9 nt, Human
aaagaaaaa

SEQ ID NO: 3506929 - RNA, 19 nt, Human
aaagaaaaaaaaaagaaga

SEQ ID NO: 3506930 - RNA, 16 nt, Human
aaagaaaaaaauguca

SEQ ID NO: 3506931 - RNA, 12 nt, Human
aaagaaaauaaa

SEQ ID NO: 3506932 - RNA, 21 nt, Human
aaagaaaauaaaaaaaagaaa

SEQ ID NO: 3506933 - RNA, 18 nt, Human
aaagaaaaugauacagca

SEQ ID NO: 3506934 - RNA, 13 nt, Human
aaagaaaauuaca

SEQ ID NO: 3506935 - RNA, 12 nt, Human
aaagaaaauuga

SEQ ID NO: 3506936 - RNA, 15 nt, Human
aaagaaaccacuucu

SEQ ID NO: 3506937 - RNA, 14 nt, Human
aaagaaagaaggaa

SEQ ID NO: 3506938 - RNA, 12 nt, Human
aaagaaagagag

SEQ ID NO: 3506939 - RNA, 16 nt, Human
aaagaaagagagaaaa

SEQ ID NO: 3506940 - RNA, 16 nt, Human
aaagaaagaggaaaag

SEQ ID NO: 3506941 - RNA, 13 nt, Human
aaagaaaguguau

SEQ ID NO: 3506942 - RNA, 13 nt, Human
aaagaaauaaacc

SEQ ID NO: 3506943 - RNA, 14 nt, Human
aaagaaauaaccac

SEQ ID NO: 3506944 - RNA, 21 nt, Human
aaagaaauaaccacugcaagu

SEQ ID NO: 3506945 - RNA, 12 nt, Human
aaagaaauaauu

SEQ ID NO: 3506946 - RNA, 16 nt, Human
aaagaaaucauguuau

SEQ ID NO: 3506947 - RNA, 23 nt, Human
aaagaaauccauaucuuaaagaa

SEQ ID NO: 3506948 - RNA, 20 nt, Human
aaagaaauccggagaagcug

SEQ ID NO: 3506949 - RNA, 21 nt, Human
aaagaaaucuauagaaagugu

SEQ ID NO: 3506950 - RNA, 14 nt, Human
aaagaaaugaacau

SEQ ID NO: 3506951 - RNA, 16 nt, Human
aaagaaaugaacauuc

SEQ ID NO: 3506952 - RNA, 14 nt, Human
aaagaaaugcaaaa

SEQ ID NO: 3506953 - RNA, 15 nt, Human
aaagaaaugcacaau

SEQ ID NO: 3506954 - RNA, 22 nt, Human
aaagaaauuagggcucuaauuu

SEQ ID NO: 3506955 - RNA, 17 nt, Human
aaagaaauuuacuauau

SEQ ID NO: 3506956 - RNA, 15 nt, Human
aaagaacaguaaaca

SEQ ID NO: 3506957 - RNA, 18 nt, Human
aaagaacauggacuugua

SEQ ID NO: 3506958 - RNA, 21 nt, Human
aaagaacauggacuuguauau

SEQ ID NO: 3506959 - RNA, 18 nt, Human
ccagccaaacccugucug

SEQ ID NO: 3506960 - RNA, 18 nt, Human
ccagccaaccccugugga

SEQ ID NO: 3506961 - RNA, 17 nt, Human
ccagccaacucugggaa

SEQ ID NO: 3506962 - RNA, 22 nt, Human
ccagccaacuuuugcauguuuu

SEQ ID NO: 3506963 - RNA, 19 nt, Human
ccagccacacuugaaccua

SEQ ID NO: 3506964 - RNA, 13 nt, Human
ccagccaccccgg

SEQ ID NO: 3506965 - RNA, 14 nt, Human
ccagccacguggag

SEQ ID NO: 3506966 - RNA, 22 nt, Human
ccagccacucgggaggcugaga

SEQ ID NO: 3506967 - RNA, 11 nt, Human
ccagccacucu

SEQ ID NO: 3506968 - RNA, 23 nt, Human
ccagccagaacguggcucugcug

SEQ ID NO: 3506969 - RNA, 18 nt, Human
ccagccagauccucuugg

SEQ ID NO: 3506970 - RNA, 14 nt, Human
ccagccagcagcag

SEQ ID NO: 3506971 - RNA, 16 nt, Human
ccagccagcagccagc

SEQ ID NO: 3506972 - RNA, 23 nt, Human
ccagccagcagccagcucucagc

SEQ ID NO: 3506973 - RNA, 14 nt, Human
ccagccagccacuc

SEQ ID NO: 3506974 - RNA, 13 nt, Human
ccagccagcgccu

SEQ ID NO: 3506975 - RNA, 17 nt, Human
ccagccagcgccucccu

SEQ ID NO: 3506976 - RNA, 20 nt, Human
ccagccagcgccucccucca

SEQ ID NO: 3506977 - RNA, 22 nt, Human
ccagccagcgccucccuccacc

SEQ ID NO: 3506978 - RNA, 18 nt, Human
ccagccaggcccagccga

SEQ ID NO: 3506979 - RNA, 17 nt, Human
ccagccaggccccaggc

SEQ ID NO: 3506980 - RNA, 13 nt, Human
ccagccaggcccu

SEQ ID NO: 3506981 - RNA, 19 nt, Human
ccagccaggcucugugcug

SEQ ID NO: 3506982 - RNA, 19 nt, Human
ccagccagggcucaaucuc

SEQ ID NO: 3506983 - RNA, 14 nt, Human
ccagccagggcugc

SEQ ID NO: 3506984 - RNA, 23 nt, Human
ccagccagugaccugaggaagcg

SEQ ID NO: 3506985 - RNA, 22 nt, Human
ccagccauacuuaucucucugu

SEQ ID NO: 3506986 - RNA, 20 nt, Human
ccagccaucaagagacugag

SEQ ID NO: 3506987 - RNA, 23 nt, Human
ccagccaucaccuuagaccacca

SEQ ID NO: 3506988 - RNA, 16 nt, Human
ccagccaucugcccag

SEQ ID NO: 3506989 - RNA, 19 nt, Human
ccagccaucugcccagggg

SEQ ID NO: 3506990 - RNA, 17 nt, Human
ccagccaugccagcugg

SEQ ID NO: 3506991 - RNA, 16 nt, Human
ccagccaugucugcau

SEQ ID NO: 3506992 - RNA, 23 nt, Human
ccagcccaaaggggacaggccuc

SEQ ID NO: 3506993 - RNA, 18 nt, Human
ccagcccaauccagguac

SEQ ID NO: 3506994 - RNA, 17 nt, Human
ccagcccacccccggca

SEQ ID NO: 3506995 - RNA, 18 nt, Human
ccagcccacccuccuguc

SEQ ID NO: 3506996 - RNA, 22 nt, Human
ccagcccacccuccugucuucc

SEQ ID NO: 3506997 - RNA, 12 nt, Human
ccagcccacugg

SEQ ID NO: 3506998 - RNA, 14 nt, Human
ccagcccagagaca

SEQ ID NO: 3506999 - RNA, 14 nt, Human
ccagcccagcccag

SEQ ID NO: 3507000 - RNA, 16 nt, Human
ccagcccagccccacu

SEQ ID NO: 3507001 - RNA, 12 nt, Human
ccagcccagcug

SEQ ID NO: 3507002 - RNA, 14 nt, Human
ccagcccagcugcu

SEQ ID NO: 3507003 - RNA, 17 nt, Human
ccagcccagcugcucug

SEQ ID NO: 3507004 - RNA, 19 nt, Human
ccagcccagcugcucugcc

SEQ ID NO: 3507005 - RNA, 23 nt, Human
ccagcccagcugcucugcccaga

SEQ ID NO: 3507006 - RNA, 19 nt, Human
ccagcccagggcuccugca

SEQ ID NO: 3507007 - RNA, 16 nt, Human
ccacuccugcucugcu

SEQ ID NO: 3507008 - RNA, 18 nt, Human
ccacucgcuucccccaua

SEQ ID NO: 3507009 - RNA, 23 nt, Human
ccacucgggaggcugagacagga

SEQ ID NO: 3507010 - RNA, 15 nt, Human
ccacucuaaagcaaa

SEQ ID NO: 3507011 - RNA, 19 nt, Human
ccacucuaccagugcaggc

SEQ ID NO: 3507012 - RNA, 22 nt, Human
cacugugacacacuacaccaca

SEQ ID NO: 3507013 - RNA, 23 nt, Human
cacugugacccccagcuccggcc

SEQ ID NO: 3507014 - RNA, 20 nt, Human
cacugugcacaucugugucu

SEQ ID NO: 3507015 - RNA, 22 nt, Human
cacugugcacaucugugucuug

SEQ ID NO: 3507016 - RNA, 16 nt, Human
cacugugccaugugcc

SEQ ID NO: 3507017 - RNA, 17 nt, Human
cacugugcccagcccgg

SEQ ID NO: 3507018 - RNA, 22 nt, Human
cacugugcccagcccggaccuu

SEQ ID NO: 3507019 - RNA, 17 nt, Human
cacugugcccuggugga

SEQ ID NO: 3507020 - RNA, 20 nt, Human
cacugugccucagagaccag

SEQ ID NO: 3507021 - RNA, 22 nt, Human
cacugugccuuugcaaaucagu

SEQ ID NO: 3507022 - RNA, 19 nt, Human
cacugugcuaauaacagug

SEQ ID NO: 3507023 - RNA, 21 nt, Human
cacugugcuaauaacagugca

SEQ ID NO: 3507024 - RNA, 15 nt, Human
cacugugcucagggc

SEQ ID NO: 3507025 - RNA, 20 nt, Human
cacugugcugagucugaagg

SEQ ID NO: 3507026 - RNA, 21 nt, Human
cacugugcugagucugaaggc

SEQ ID NO: 3507027 - RNA, 20 nt, Human
cacugugcuguuguuaugau

SEQ ID NO: 3507028 - RNA, 21 nt, Human
cacugugcuguuguuaugaug

SEQ ID NO: 3507029 - RNA, 23 nt, Human
cacugugcuguuguuaugaugug

SEQ ID NO: 3507030 - RNA, 17 nt, Human
cacugugcuuucuauug

SEQ ID NO: 3507031 - RNA, 23 nt, Human
cacugugcuuucuauuguacaga

SEQ ID NO: 3507032 - RNA, 23 nt, Human
cacuguggaacuaauaaauacau

SEQ ID NO: 3507033 - RNA, 12 nt, Human
cacuguggccuu

SEQ ID NO: 3507034 - RNA, 24 nt, Human
cacuguggguagacacacaugaag

SEQ ID NO: 3507035 - RNA, 19 nt, Human
cacugugguaaaugccaca

SEQ ID NO: 3507036 - RNA, 15 nt, Human
cacuguggugucugu

SEQ ID NO: 3507037 - RNA, 17 nt, Human
cacuguguauauuugau

SEQ ID NO: 3507038 - RNA, 12 nt, Human
cacuguguccug

SEQ ID NO: 3507039 - RNA, 17 nt, Human
cacuguguccuggugcu

SEQ ID NO: 3507040 - RNA, 17 nt, Human
cacuguguuccuuccgc

SEQ ID NO: 3507041 - RNA, 14 nt, Human
cacuguuauuuuca

SEQ ID NO: 3507042 - RNA, 16 nt, Human
cacuguucaugcuggc

SEQ ID NO: 3507043 - RNA, 17 nt, Human
cacuguucaugcuggcg

SEQ ID NO: 3507044 - RNA, 20 nt, Human
cacuguucccucugcuccug

SEQ ID NO: 3507045 - RNA, 22 nt, Human
cacuguucucugcccuccaaga

SEQ ID NO: 3507046 - RNA, 16 nt, Human
cacuguugaaaauuau

SEQ ID NO: 3507047 - RNA, 18 nt, Human
cacuguugaaaauuauuu

SEQ ID NO: 3507048 - RNA, 21 nt, Human
cacuguugaaaauuauuuuaa

SEQ ID NO: 3507049 - RNA, 13 nt, Human
cacuguugaauuu

SEQ ID NO: 3507050 - RNA, 18 nt, Human
cacuguugcccaggcugg

SEQ ID NO: 3507051 - RNA, 23 nt, Human
cacuguugcccaggcuggcgugc

SEQ ID NO: 3507052 - RNA, 16 nt, Human
cacuguuuaaucauag

SEQ ID NO: 3507053 - RNA, 20 nt, Human
cacuguuuagaacacacaca

SEQ ID NO: 3507054 - RNA, 20 nt, Human
cacuguuuagauuugccaua

SEQ ID NO: 3507055 - RNA, 19 nt, Human
cacuguuuauacacugugu

SEQ ID NO: 3507056 - RNA, 19 nt, Human
cacuguuucaaacuuuacu

SEQ ID NO: 3507057 - RNA, 22 nt, Human
cacuguuucacuacucagcaug

SEQ ID NO: 3507058 - RNA, 12 nt, Human
cacuguuucucu

SEQ ID NO: 3507059 - RNA, 18 nt, Human
cacuguuucucuugagcu

SEQ ID NO: 3507060 - RNA, 20 nt, Human
cacuguuucucuugagcugg

SEQ ID NO: 3507061 - RNA, 21 nt, Human
cacuguuucucuugagcuggc

SEQ ID NO: 3507062 - RNA, 15 nt, Human
cacuguuucuugcuu

SEQ ID NO: 3507063 - RNA, 24 nt, Human
cacuguuucuugcuuguaccucug

SEQ ID NO: 3507064 - RNA, 16 nt, Human
cacuguuuucuagugu

SEQ ID NO: 3507065 - RNA, 19 nt, Human
cacuguuuuuccauaguuu

SEQ ID NO: 3507066 - RNA, 16 nt, Human
cacuuaaaaaaugucc

SEQ ID NO: 3507067 - RNA, 13 nt, Human
cacuuaagagaau

SEQ ID NO: 3507068 - RNA, 22 nt, Human
cacuuaagagaauauuuuaagu

SEQ ID NO: 3507069 - RNA, 17 nt, Human
cacuuaaguuagccucc

SEQ ID NO: 3507070 - RNA, 12 nt, Human
cacuuaauguau

SEQ ID NO: 3507071 - RNA, 13 nt, Human
cacuuaauucugu

SEQ ID NO: 3507072 - RNA, 15 nt, Human
cacuuaauucuguuc

SEQ ID NO: 3507073 - RNA, 18 nt, Human
cacuuacacuuuaugcac

SEQ ID NO: 3507074 - RNA, 19 nt, Human
cacuuacagauaggccuuc

SEQ ID NO: 3507075 - RNA, 13 nt, Human
cacuuacauauau

SEQ ID NO: 3507076 - RNA, 14 nt, Human
cacuuacauuuaca

SEQ ID NO: 3507077 - RNA, 18 nt, Human
cacuuaccucucuguguu

SEQ ID NO: 3507078 - RNA, 21 nt, Human
cacuuaccugaguugaagagg

SEQ ID NO: 3507079 - RNA, 13 nt, Human
cacuuaccuucaa

SEQ ID NO: 3507080 - RNA, 15 nt, Human
cacuuaccuucaaua

SEQ ID NO: 3507081 - RNA, 18 nt, Human
cacuuaccuucaauaaag

SEQ ID NO: 3507082 - RNA, 15 nt, Human
cacuuacugguagga

SEQ ID NO: 3507083 - RNA, 17 nt, Human
cacuuacuguaagacau

SEQ ID NO: 3507084 - RNA, 19 nt, Human
cacuuacuguaagacauua

SEQ ID NO: 3507085 - RNA, 18 nt, Human
cacuuacuguuguccuau

SEQ ID NO: 3507086 - RNA, 17 nt, Human
cacuuacuuacccucac

SEQ ID NO: 3507087 - RNA, 21 nt, Human
cacuuacuuuuucuggucucu

SEQ ID NO: 3507088 - RNA, 17 nt, Human
cacuuagaaauugcauu

SEQ ID NO: 3507089 - RNA, 20 nt, Human
cacuuagaaauugcauuucc

SEQ ID NO: 3507090 - RNA, 21 nt, Human
cacuuagcuggagaugucucu

SEQ ID NO: 3507091 - RNA, 19 nt, Human
cacuuaucauuagaaucuu

SEQ ID NO: 3507092 - RNA, 19 nt, Human
cacuuauguuauacaauac

SEQ ID NO: 3507093 - RNA, 13 nt, Human
cacuuauugcuuu

SEQ ID NO: 3507094 - RNA, 14 nt, Human
cacuuauuucauaa

SEQ ID NO: 3507095 - RNA, 11 nt, Human
cacuucaaacu

SEQ ID NO: 3507096 - RNA, 14 nt, Human
cacuucaaacuacu

SEQ ID NO: 3507097 - RNA, 18 nt, Human
cacuucaaauucaaauaa

SEQ ID NO: 3507098 - RNA, 21 nt, Human
cacuucaagugaccaccagga

SEQ ID NO: 3507099 - RNA, 18 nt, Human
cacuucaauaauugucca

SEQ ID NO: 3507100 - RNA, 15 nt, Human
cacuucacagagugu

SEQ ID NO: 3507101 - RNA, 19 nt, Human
cacuucacagagugugcug

SEQ ID NO: 3507102 - RNA, 12 nt, Human
cacuucacugug

SEQ ID NO: 3507103 - RNA, 13 nt, Human
cacuucacugugc

SEQ ID NO: 3507104 - RNA, 15 nt, Human
cacuucagagagcug

SEQ ID NO: 3507105 - RNA, 14 nt, Human
cacuucaggcucuu

SEQ ID NO: 3507106 - RNA, 15 nt, Human
cacuucaggcucuuc

SEQ ID NO: 3507107 - RNA, 21 nt, Human
cacuucagggcagauuuuagu

SEQ ID NO: 3507108 - RNA, 22 nt, Human
cacuucagggcagauuuuaguu

SEQ ID NO: 3507109 - RNA, 18 nt, Human
cacuucaucuucucagcu

SEQ ID NO: 3507110 - RNA, 19 nt, Human
cacuucauguaaaguguca

SEQ ID NO: 3507111 - RNA, 12 nt, Human
cacuucccugcu

SEQ ID NO: 3507112 - RNA, 13 nt, Human
cacuucccuggcg

SEQ ID NO: 3507113 - RNA, 13 nt, Human
cacuucccugggc

SEQ ID NO: 3507114 - RNA, 19 nt, Human
cacuucccugggcaaauga

SEQ ID NO: 3507115 - RNA, 21 nt, Human
cacuuccucucgcggcccuca

SEQ ID NO: 3507116 - RNA, 11 nt, Human
cacuuccugcc

SEQ ID NO: 3507117 - RNA, 13 nt, Human
cacuuccugccua

SEQ ID NO: 3507118 - RNA, 12 nt, Human
cacuuccugucc

SEQ ID NO: 3507119 - RNA, 24 nt, Human
cacuuccuguuugggccccucucc

SEQ ID NO: 3507120 - RNA, 12 nt, Human
cacuuccuugcc

SEQ ID NO: 3507121 - RNA, 21 nt, Human
cacuucggccaggucacacga

SEQ ID NO: 3507122 - RNA, 23 nt, Human
cacuucgggaggucgaggcagga

SEQ ID NO: 3507123 - RNA, 20 nt, Human
cacuucguucgcagagcuuu

SEQ ID NO: 3507124 - RNA, 19 nt, Human
cacuucucaggacacaggc

SEQ ID NO: 3507125 - RNA, 18 nt, Human
cacuucucaucacacaca

SEQ ID NO: 3507126 - RNA, 19 nt, Human
cacuucucaucacacacau

SEQ ID NO: 3507127 - RNA, 21 nt, Human
cacuucucaucacacacaugg

SEQ ID NO: 3507128 - RNA, 21 nt, Human
cacuucucuuaaacuugugaa

SEQ ID NO: 3507129 - RNA, 13 nt, Human
cacuucucuuccu

SEQ ID NO: 3507130 - RNA, 11 nt, Human
cacuucugcac

SEQ ID NO: 3507131 - RNA, 22 nt, Human
cacuucugccauauucuguugg

SEQ ID NO: 3507132 - RNA, 22 nt, Human
cacuucuggauauagcuaggug

SEQ ID NO: 3507133 - RNA, 18 nt, Human
cacuucuggguggggcag

SEQ ID NO: 3507134 - RNA, 19 nt, Human
cacuucuuacaauaauucu

SEQ ID NO: 3507135 - RNA, 12 nt, Human
cacuucuucugu

SEQ ID NO: 3507136 - RNA, 15 nt, Human
cacuucuucugucca

SEQ ID NO: 3507137 - RNA, 20 nt, Human
cacuucuucuguccaagcag

SEQ ID NO: 3507138 - RNA, 23 nt, Human
cacuucuucuuggucuuauuuau

SEQ ID NO: 3507139 - RNA, 18 nt, Human
cacuucuuguuccccacu

SEQ ID NO: 3507140 - RNA, 23 nt, Human
cacuugaacccgggaggcagagg

SEQ ID NO: 3507141 - RNA, 19 nt, Human
cacuugaagccaucuaaag

SEQ ID NO: 3507142 - RNA, 20 nt, Human
cacuugagaauuacccuuuu

SEQ ID NO: 3507143 - RNA, 13 nt, Human
cacuugaguccag

SEQ ID NO: 3507144 - RNA, 23 nt, Human
cacuugaguggagguuuauaguu

SEQ ID NO: 3507145 - RNA, 15 nt, Human
cacuugauucauaaa

SEQ ID NO: 3507146 - RNA, 14 nt, Human
cacuugauuccuug

SEQ ID NO: 3507147 - RNA, 22 nt, Human
cacuugcagacucuacagaggc

SEQ ID NO: 3507148 - RNA, 14 nt, Human
cacuugcccugcuc

SEQ ID NO: 3507149 - RNA, 17 nt, Human
cacuugcccugcucccu

SEQ ID NO: 3507150 - RNA, 22 nt, Human
cacuugccgcgucgcccuccca

SEQ ID NO: 3507151 - RNA, 20 nt, Human
cagaaacaccuagaucagaa

SEQ ID NO: 3507152 - RNA, 12 nt, Human
cagaaacacugc

SEQ ID NO: 3507153 - RNA, 18 nt, Human
cagaaacacugccuuuuu

SEQ ID NO: 3507154 - RNA, 19 nt, Human
cagaaacacugccuuuuua

SEQ ID NO: 3507155 - RNA, 18 nt, Human
cagaaacaggugcaucug

SEQ ID NO: 3507156 - RNA, 22 nt, Human
cagaaacaucaguuacucugaa

SEQ ID NO: 3507157 - RNA, 23 nt, Human
cagaaacaucaguuacucugaag

SEQ ID NO: 3507158 - RNA, 12 nt, Human
cagaaacuagaa

SEQ ID NO: 3507159 - RNA, 20 nt, Human
cagaaagacugagcucaagg

SEQ ID NO: 3507160 - RNA, 19 nt, Human
cagaaagauggaugugcuu

SEQ ID NO: 3507161 - RNA, 21 nt, Human
cagaaagauggaugugcuuug

SEQ ID NO: 3507162 - RNA, 18 nt, Human
cagaaagcagaacaguga

SEQ ID NO: 3507163 - RNA, 15 nt, Human
cagaaagcagaggcu

SEQ ID NO: 3507164 - RNA, 23 nt, Human
cagaaagcaguugagacaagaaa

SEQ ID NO: 3507165 - RNA, 22 nt, Human
cagaaagccccacccaggccag

SEQ ID NO: 3507166 - RNA, 12 nt, Human
cagaaaggagac

SEQ ID NO: 3507167 - RNA, 15 nt, Human
cagaaaggcuuuuua

SEQ ID NO: 3507168 - RNA, 15 nt, Human
cagaaagggagggcu

SEQ ID NO: 3507169 - RNA, 22 nt, Human
cagaaagggagggcucugaggc

SEQ ID NO: 3507170 - RNA, 23 nt, Human
cagaaagggagggcucugaggcg

SEQ ID NO: 3507171 - RNA, 22 nt, Human
cagaaagggcaacaauaaaaua

SEQ ID NO: 3507172 - RNA, 16 nt, Human
cagaaagguucugccc

SEQ ID NO: 3507173 - RNA, 17 nt, Human
cagaaagguucugcccg

SEQ ID NO: 3507174 - RNA, 20 nt, Human
cagaaaguaauuucuucuca

SEQ ID NO: 3507175 - RNA, 20 nt, Human
ccacucuaccagugcaggcu

SEQ ID NO: 3507176 - RNA, 18 nt, Human
ccacucuacccucccacc

SEQ ID NO: 3507177 - RNA, 19 nt, Human
ccacucuacccucccaccc

SEQ ID NO: 3507178 - RNA, 21 nt, Human
ccacucuacccucccaccccc

SEQ ID NO: 3507179 - RNA, 11 nt, Human
ccacucucaga

SEQ ID NO: 3507180 - RNA, 17 nt, Human
ccacucucauuccccag

SEQ ID NO: 3507181 - RNA, 19 nt, Human
ccacucucauuccccaggu

SEQ ID NO: 3507182 - RNA, 12 nt, Human
ccacucucccca

SEQ ID NO: 3507183 - RNA, 16 nt, Human
ccacucuccccacacu

SEQ ID NO: 3507184 - RNA, 14 nt, Human
ccacucuccuaggc

SEQ ID NO: 3507185 - RNA, 13 nt, Human
ccacucucuuccc

SEQ ID NO: 3507186 - RNA, 14 nt, Human
ccacucucuucccu

SEQ ID NO: 3507187 - RNA, 15 nt, Human
ccacucucuucccuu

SEQ ID NO: 3507188 - RNA, 23 nt, Human
ccacucugcucugaugcaucaga

SEQ ID NO: 3507189 - RNA, 17 nt, Human
ccacucugcuucucuga

SEQ ID NO: 3507190 - RNA, 20 nt, Human
ccacucugcuucucugacuu

SEQ ID NO: 3507191 - RNA, 18 nt, Human
ccacucuggauucagccu

SEQ ID NO: 3507192 - RNA, 19 nt, Human
ccacucuggauucagccuu

SEQ ID NO: 3507193 - RNA, 20 nt, Human
ccacucuggauucagccuuc

SEQ ID NO: 3507194 - RNA, 12 nt, Human
ccacucuggcag

SEQ ID NO: 3507195 - RNA, 14 nt, Human
ccacucuggcagcc

SEQ ID NO: 3507196 - RNA, 18 nt, Human
ccacucuggcagccacac

SEQ ID NO: 3507197 - RNA, 22 nt, Human
ccacucuggcagccacacuucu

SEQ ID NO: 3507198 - RNA, 12 nt, Human
ccacucuguaau

SEQ ID NO: 3507199 - RNA, 11 nt, Human
ccacucugugc

SEQ ID NO: 3507200 - RNA, 19 nt, Human
ccacugaaaaaauauaugu

SEQ ID NO: 3507201 - RNA, 10 nt, Human
ccacugaaga

SEQ ID NO: 3507202 - RNA, 12 nt, Human
ccacugaagagg

SEQ ID NO: 3507203 - RNA, 19 nt, Human
ccacugaagauagaagaaa

SEQ ID NO: 3507204 - RNA, 18 nt, Human
ccacugaagcccauuucu

SEQ ID NO: 3507205 - RNA, 19 nt, Human
ccacugacagccucccacc

SEQ ID NO: 3507206 - RNA, 17 nt, Human
ccacugacugcagggac

SEQ ID NO: 3507207 - RNA, 19 nt, Human
ccacugagagaucugcugu

SEQ ID NO: 3507208 - RNA, 11 nt, Human
ccacugagcuc

SEQ ID NO: 3507209 - RNA, 16 nt, Human
ccacugaugcuguucu

SEQ ID NO: 3507210 - RNA, 23 nt, Human
ccacugcaaguccuuuuguaaag

SEQ ID NO: 3507211 - RNA, 23 nt, Human
ccacugcacagagcucuccagcu

SEQ ID NO: 3507212 - RNA, 11 nt, Human
ccacugcaccc

SEQ ID NO: 3507213 - RNA, 17 nt, Human
ccacugcacccccuccu

SEQ ID NO: 3507214 - RNA, 20 nt, Human
ccacugcacccccuccugcu

SEQ ID NO: 3507215 - RNA, 21 nt, Human
ccacugcacccccuccugcug

SEQ ID NO: 3507216 - RNA, 14 nt, Human
ccacugcaccgggc

SEQ ID NO: 3507217 - RNA, 17 nt, Human
ccacugcaccgggccac

SEQ ID NO: 3507218 - RNA, 19 nt, Human
ccacugcacuauagccuag

SEQ ID NO: 3507219 - RNA, 20 nt, Human
ccacugcacuauagccuagg

SEQ ID NO: 3507220 - RNA, 15 nt, Human
ccacugcacuccagc

SEQ ID NO: 3507221 - RNA, 18 nt, Human
ccacugcacuccagccug

SEQ ID NO: 3507222 - RNA, 19 nt, Human
ccacugcacuccagccugg

SEQ ID NO: 3507223 - RNA, 20 nt, Human
ccacugcacuccagccuggg

SEQ ID NO: 3507224 - RNA, 20 nt, Human
ccacugcacucuagccggag

SEQ ID NO: 3507225 - RNA, 18 nt, Human
ccacugcagaagacagua

SEQ ID NO: 3507226 - RNA, 14 nt, Human
ccacugcaggcccc

SEQ ID NO: 3507227 - RNA, 17 nt, Human
ccacugcaggccccgcu

SEQ ID NO: 3507228 - RNA, 19 nt, Human
ccacugcauaccaaccugg

SEQ ID NO: 3507229 - RNA, 21 nt, Human
ccacugcaucguuucaucuuc

SEQ ID NO: 3507230 - RNA, 23 nt, Human
ccacugcaucguuucaucuucca

SEQ ID NO: 3507231 - RNA, 15 nt, Human
ccacugccagcagca

SEQ ID NO: 3507232 - RNA, 16 nt, Human
ccacugccagcagcag

SEQ ID NO: 3507233 - RNA, 15 nt, Human
ccacugcccaccccc

SEQ ID NO: 3507234 - RNA, 16 nt, Human
ccacugcccacccccu

SEQ ID NO: 3507235 - RNA, 17 nt, Human
ccacugcccacuggccg

SEQ ID NO: 3507236 - RNA, 18 nt, Human
ccacugcccgagcuggug

SEQ ID NO: 3507237 - RNA, 22 nt, Human
ccacugcccgagcuggugcauu

SEQ ID NO: 3507238 - RNA, 14 nt, Human
ccacugccuacugc

SEQ ID NO: 3507239 - RNA, 16 nt, Human
ccacugccuacugcau

SEQ ID NO: 3507240 - RNA, 19 nt, Human
ccacugccucagguuccua

SEQ ID NO: 3507241 - RNA, 17 nt, Human
ccacugccucugccuua

SEQ ID NO: 3507242 - RNA, 20 nt, Human
ccacugccucuggaauugcu

SEQ ID NO: 3507243 - RNA, 12 nt, Human
ccacugccugcc

SEQ ID NO: 3507244 - RNA, 17 nt, Human
ccacugccugcccaccc

SEQ ID NO: 3507245 - RNA, 14 nt, Human
ccacugccuucgcu

SEQ ID NO: 3507246 - RNA, 16 nt, Human
ccacugcgaccacaag

SEQ ID NO: 3507247 - RNA, 24 nt, Human
ccacugcucccuaagccagccugg

SEQ ID NO: 3507248 - RNA, 11 nt, Human
ccacugcucug

SEQ ID NO: 3507249 - RNA, 20 nt, Human
ccacugcugauauuuucucu

SEQ ID NO: 3507250 - RNA, 14 nt, Human
ccacugcuuaccua

SEQ ID NO: 3507251 - RNA, 13 nt, Human
ccacuggccacca

SEQ ID NO: 3507252 - RNA, 16 nt, Human
ccacuggccaccaggc

SEQ ID NO: 3507253 - RNA, 19 nt, Human
ccacuggccaccaggcugg

SEQ ID NO: 3507254 - RNA, 20 nt, Human
ccacuggccaccaggcuggc

SEQ ID NO: 3507255 - RNA, 16 nt, Human
ccacuggcuggacaaa

SEQ ID NO: 3507256 - RNA, 23 nt, Human
ccacuggcuggacaaacugcacc

SEQ ID NO: 3507257 - RNA, 15 nt, Human
ccacuggcugugggc

SEQ ID NO: 3507258 - RNA, 18 nt, Human
ccacuggcugugggcucc

SEQ ID NO: 3507259 - RNA, 20 nt, Human
ccacuggcugugggcucccu

SEQ ID NO: 3507260 - RNA, 17 nt, Human
ccacugggaccaacccu

SEQ ID NO: 3507261 - RNA, 11 nt, Human
ccacugggagg

SEQ ID NO: 3507262 - RNA, 12 nt, Human
ccacuggggaaa

SEQ ID NO: 3507263 - RNA, 22 nt, Human
ccacuggggaaauaacagcugu

SEQ ID NO: 3507264 - RNA, 15 nt, Human
ccacuggggcucaga

SEQ ID NO: 3507265 - RNA, 18 nt, Human
ccacuguacuugcucuug

SEQ ID NO: 3507266 - RNA, 19 nt, Human
ccacugucacuguuucucu

SEQ ID NO: 3507267 - RNA, 12 nt, Human
ccacuguccugg

SEQ ID NO: 3507268 - RNA, 15 nt, Human
ccacuguccugggcc

SEQ ID NO: 3507269 - RNA, 20 nt, Human
ccacuguccugggccugcag

SEQ ID NO: 3507270 - RNA, 21 nt, Human
ccacuguccugggccugcaga

SEQ ID NO: 3507271 - RNA, 15 nt, Human
ccacugugccaugug

SEQ ID NO: 3507272 - RNA, 16 nt, Human
ccacugugccaugugc

SEQ ID NO: 3507273 - RNA, 19 nt, Human
ccacugugccucagagacc

SEQ ID NO: 3507274 - RNA, 22 nt, Human
ccacugugccucagagaccagg

SEQ ID NO: 3507275 - RNA, 20 nt, Human
ccacugugccuuugcaaauc

SEQ ID NO: 3507276 - RNA, 12 nt, Human
ccacuguguaua

SEQ ID NO: 3507277 - RNA, 13 nt, Human
ccacuguguuccu

SEQ ID NO: 3507278 - RNA, 22 nt, Human
ccacuguuucucuugagcuggc

SEQ ID NO: 3507279 - RNA, 15 nt, Human
ccacuguuucuugcu

SEQ ID NO: 3507280 - RNA, 20 nt, Human
ccacuguuucuugcuuguac

SEQ ID NO: 3507281 - RNA, 17 nt, Human
ccacuuaaaaaaugucc

SEQ ID NO: 3507282 - RNA, 16 nt, Human
ccacuuaaaaauuaaa

SEQ ID NO: 3507283 - RNA, 13 nt, Human
ccacuuaaaaugu

SEQ ID NO: 3507284 - RNA, 15 nt, Human
ccacuuauagccucu

SEQ ID NO: 3507285 - RNA, 22 nt, Human
ccacuuauuccccauucuuccu

SEQ ID NO: 3507286 - RNA, 17 nt, Human
ccacuucaagugaccac

SEQ ID NO: 3507287 - RNA, 20 nt, Human
ccacuucaaugcacauggug

SEQ ID NO: 3507288 - RNA, 21 nt, Human
ccacuuccaggggaaccugcc

SEQ ID NO: 3507289 - RNA, 23 nt, Human
ccacuucccagguaagcaggagg

SEQ ID NO: 3507290 - RNA, 17 nt, Human
ccacuucccugacacug

SEQ ID NO: 3507291 - RNA, 18 nt, Human
ccacuucggccaggucac

SEQ ID NO: 3507292 - RNA, 14 nt, Human
ccacuucucaucac

SEQ ID NO: 3507293 - RNA, 19 nt, Human
ccacuucucaucacacaca

SEQ ID NO: 3507294 - RNA, 16 nt, Human
ccacuucugacagccu

SEQ ID NO: 3507295 - RNA, 18 nt, Human
ccacuucugacagccuca

SEQ ID NO: 3507296 - RNA, 17 nt, Human
ccauuuccccagggcac

SEQ ID NO: 3507297 - RNA, 13 nt, Human
ccauuuccugaga

SEQ ID NO: 3507298 - RNA, 17 nt, Human
ccauuuccuuaugcugu

SEQ ID NO: 3507299 - RNA, 22 nt, Human
ccauuucgugagccccaucuuc

SEQ ID NO: 3507300 - RNA, 19 nt, Human
ccauuucuaaaggccucuu

SEQ ID NO: 3507301 - RNA, 21 nt, Human
ccauuucuaaaggccucuucc

SEQ ID NO: 3507302 - RNA, 18 nt, Human
ccauuucuacucucccau

SEQ ID NO: 3507303 - RNA, 14 nt, Human
ccauuucuauuuau

SEQ ID NO: 3507304 - RNA, 16 nt, Human
ccauuucucacugaga

SEQ ID NO: 3507305 - RNA, 13 nt, Human
ccauuucuccaga

SEQ ID NO: 3507306 - RNA, 13 nt, Human
ccauuucuccguu

SEQ ID NO: 3507307 - RNA, 14 nt, Human
ccauuucugccuuu

SEQ ID NO: 3507308 - RNA, 12 nt, Human
ccauuugauacc

SEQ ID NO: 3507309 - RNA, 20 nt, Human
ccauuugcaauaacagcugc

SEQ ID NO: 3507310 - RNA, 22 nt, Human
ccauuugcaauaacagcugcaa

SEQ ID NO: 3507311 - RNA, 15 nt, Human
ccauuugcauuuguu

SEQ ID NO: 3507312 - RNA, 22 nt, Human
ccauuugcauuuguuuauguaa

SEQ ID NO: 3507313 - RNA, 22 nt, Human
ccauuugccaauuuuccuacuc

SEQ ID NO: 3507314 - RNA, 18 nt, Human
ccauuugcuacuguacau

SEQ ID NO: 3507315 - RNA, 16 nt, Human
ccauuugcuuuuucac

SEQ ID NO: 3507316 - RNA, 18 nt, Human
ccauuuggagggccuggg

SEQ ID NO: 3507317 - RNA, 16 nt, Human
ccauuuggcaucccug

SEQ ID NO: 3507318 - RNA, 19 nt, Human
ccauuuggcaucccugggc

SEQ ID NO: 3507319 - RNA, 13 nt, Human
ccauuuguaauuu

SEQ ID NO: 3507320 - RNA, 14 nt, Human
ccauuuguaauuug

SEQ ID NO: 3507321 - RNA, 13 nt, Human
ccauuuguacuga

SEQ ID NO: 3507322 - RNA, 15 nt, Human
ccauuugucccaagu

SEQ ID NO: 3507323 - RNA, 15 nt, Human
ccauuuguuaauauc

SEQ ID NO: 3507324 - RNA, 13 nt, Human
ccauuuguuuauu

SEQ ID NO: 3507325 - RNA, 22 nt, Human
ccauuuuaaaguuaguaucuuu

SEQ ID NO: 3507326 - RNA, 20 nt, Human
ccauuuuaagucccugucac

SEQ ID NO: 3507327 - RNA, 23 nt, Human
ccauuuuaagucccugucaccuc

SEQ ID NO: 3507328 - RNA, 14 nt, Human
ccauuuuaauuuua

SEQ ID NO: 3507329 - RNA, 21 nt, Human
ccauuuuaauuuuaaagugca

SEQ ID NO: 3507330 - RNA, 22 nt, Human
ccauuuuccuacaggcagucuc

SEQ ID NO: 3507331 - RNA, 23 nt, Human
ccauuuuccuacaggcagucucu

SEQ ID NO: 3507332 - RNA, 23 nt, Human
ccauuuucuuauugcgcugcuac

SEQ ID NO: 3507333 - RNA, 14 nt, Human
ccauuuugcaaaau

SEQ ID NO: 3507334 - RNA, 19 nt, Human
ccauuuuggugucuuucuc

SEQ ID NO: 3507335 - RNA, 20 nt, Human
ccauuuuggugucuuucucu

SEQ ID NO: 3507336 - RNA, 21 nt, Human
ccauuuuggugucuuucucuu

SEQ ID NO: 3507337 - RNA, 22 nt, Human
ccauuuuggugucuuucucuuu

SEQ ID NO: 3507338 - RNA, 16 nt, Human
ccauuuugugaagccc

SEQ ID NO: 3507339 - RNA, 19 nt, Human
ccauuuugugaagcccugu

SEQ ID NO: 3507340 - RNA, 18 nt, Human
ccauuuuguuauugacua

SEQ ID NO: 3507341 - RNA, 23 nt, Human
ccauuuuguuauugacuaacagg

SEQ ID NO: 3507342 - RNA, 15 nt, Human
ccauuuuuacuguua

SEQ ID NO: 3507343 - RNA, 21 nt, Human
ccauuuuuauuucaaaauaua

SEQ ID NO: 3507344 - RNA, 18 nt, Human
ccauuuuucaaagcaauu

SEQ ID NO: 3507345 - RNA, 12 nt, Human
ccauuuuuccuu

SEQ ID NO: 3507346 - RNA, 19 nt, Human
ccauuuuucuuccaggaug

SEQ ID NO: 3507347 - RNA, 19 nt, Human
ccauuuuuuaaggaaacaa

SEQ ID NO: 3507348 - RNA, 20 nt, Human
ccauuuuuuauauuucaagu

SEQ ID NO: 3507349 - RNA, 14 nt, Human
cccaaaaccacagc

SEQ ID NO: 3507350 - RNA, 21 nt, Human
cccaaaaccacagcccuguca

SEQ ID NO: 3507351 - RNA, 20 nt, Human
cccaaaacucuccucugcug

SEQ ID NO: 3507352 - RNA, 18 nt, Human
cccaaaauuuauuuuaua

SEQ ID NO: 3507353 - RNA, 17 nt, Human
cccaaacaaauaugcaa

SEQ ID NO: 3507354 - RNA, 13 nt, Human
cccaaacccuagg

SEQ ID NO: 3507355 - RNA, 12 nt, Human
cccaaaccugga

SEQ ID NO: 3507356 - RNA, 22 nt, Human
cccaaacuguucaagaaauaau

SEQ ID NO: 3507357 - RNA, 21 nt, Human
cccaaagcaagcaagaggccg

SEQ ID NO: 3507358 - RNA, 16 nt, Human
cccaaagcugagccug

SEQ ID NO: 3507359 - RNA, 18 nt, Human
cccaaagcugagccugca

SEQ ID NO: 3507360 - RNA, 16 nt, Human
cccaaagcuuuccugc

SEQ ID NO: 3507361 - RNA, 14 nt, Human
cccaaaggacucca

SEQ ID NO: 3507362 - RNA, 18 nt, Human
cccaaaggacuccaccca

SEQ ID NO: 3507363 - RNA, 18 nt, Human
cccaaaggggacaggccu

SEQ ID NO: 3507364 - RNA, 15 nt, Human
cccaaagugcugaga

SEQ ID NO: 3507365 - RNA, 18 nt, Human
cccaaauaacuucagucc

SEQ ID NO: 3507366 - RNA, 18 nt, Human
cccaaauccgaaccuccu

SEQ ID NO: 3507367 - RNA, 16 nt, Human
cccaaaucucuuccac

SEQ ID NO: 3507368 - RNA, 14 nt, Human
cccaaaugagccau

SEQ ID NO: 3507369 - RNA, 23 nt, Human
cccaaauggaaaugggcagagca

SEQ ID NO: 3507370 - RNA, 18 nt, Human
cccaacacaaggugggca

SEQ ID NO: 3507371 - RNA, 16 nt, Human
cccaacaccagccccu

SEQ ID NO: 3507372 - RNA, 13 nt, Human
cccaacacgggua

SEQ ID NO: 3507373 - RNA, 12 nt, Human
cccaacacugug

SEQ ID NO: 3507374 - RNA, 19 nt, Human
cccaacacugugcccuggu

SEQ ID NO: 3507375 - RNA, 20 nt, Human
cccaacacugugcccuggug

SEQ ID NO: 3507376 - RNA, 19 nt, Human
cccaacagcgacauagccc

SEQ ID NO: 3507377 - RNA, 15 nt, Human
cccaacagcuggacc

SEQ ID NO: 3507378 - RNA, 17 nt, Human
cccaacaggaggacaau

SEQ ID NO: 3507379 - RNA, 18 nt, Human
cccaacaggaggacaauu

SEQ ID NO: 3507380 - RNA, 16 nt, Human
cccaacagugugaagu

SEQ ID NO: 3507381 - RNA, 20 nt, Human
cccaaccaggcaccucuucc

SEQ ID NO: 3507382 - RNA, 12 nt, Human
aaagcugccagc

SEQ ID NO: 3507383 - RNA, 13 nt, Human
aaagcugccagcc

SEQ ID NO: 3507384 - RNA, 24 nt, Human
aaagcugcccacuguuucucuuga

SEQ ID NO: 3507385 - RNA, 15 nt, Human
aaagcugccuguagu

SEQ ID NO: 3507386 - RNA, 15 nt, Human
aaagcugcuaaaucu

SEQ ID NO: 3507387 - RNA, 18 nt, Human
aaagcugcuaaaucuccu

SEQ ID NO: 3507388 - RNA, 14 nt, Human
aaagcugcugugau

SEQ ID NO: 3507389 - RNA, 18 nt, Human
aaagcugguuuaauguuu

SEQ ID NO: 3507390 - RNA, 17 nt, Human
aaagcuguauuuugaaa

SEQ ID NO: 3507391 - RNA, 15 nt, Human
aaagcuguuaaacug

SEQ ID NO: 3507392 - RNA, 18 nt, Human
aaagcuguuaaacuguua

SEQ ID NO: 3507393 - RNA, 14 nt, Human
aaagcuguuccuug

SEQ ID NO: 3507394 - RNA, 14 nt, Human
aaagcuguucuucc

SEQ ID NO: 3507395 - RNA, 16 nt, Human
aaagcuguucuuccug

SEQ ID NO: 3507396 - RNA, 17 nt, Human
aaagcuguucuuccugg

SEQ ID NO: 3507397 - RNA, 15 nt, Human
aaagcuuaaaacuuu

SEQ ID NO: 3507398 - RNA, 11 nt, Human
aaagcuucccc

SEQ ID NO: 3507399 - RNA, 20 nt, Human
aaagcuucuuaauuaauuug

SEQ ID NO: 3507400 - RNA, 20 nt, Human
aaagcuuggauuaaauacau

SEQ ID NO: 3507401 - RNA, 20 nt, Human
aaagcuuuaugauuuucaua

SEQ ID NO: 3507402 - RNA, 18 nt, Human
aaagcuuuauuaccagug

SEQ ID NO: 3507403 - RNA, 23 nt, Human
aaagcuuucaugucccagaacuu

SEQ ID NO: 3507404 - RNA, 14 nt, Human
aaagcuuuccugcc

SEQ ID NO: 3507405 - RNA, 22 nt, Human
aaagcuuuccugccccaggccu

SEQ ID NO: 3507406 - RNA, 14 nt, Human
aaagcuuuccugga

SEQ ID NO: 3507407 - RNA, 12 nt, Human
aaagcuuucugc

SEQ ID NO: 3507408 - RNA, 20 nt, Human
aaagcuuuguuuguucuugu

SEQ ID NO: 3507409 - RNA, 14 nt, Human
aaagcuuuuaugag

SEQ ID NO: 3507410 - RNA, 14 nt, Human
aaagcuuuugcaua

SEQ ID NO: 3507411 - RNA, 17 nt, Human
aaagcuuuuuccuccug

SEQ ID NO: 3507412 - RNA, 12 nt, Human
aaaggaaaaaaa

SEQ ID NO: 3507413 - RNA, 15 nt, Human
aaaggaaaaaaagac

SEQ ID NO: 3507414 - RNA, 16 nt, Human
aaaggaaaaaaagacu

SEQ ID NO: 3507415 - RNA, 12 nt, Human
aaaggaaaagaa

SEQ ID NO: 3507416 - RNA, 13 nt, Human
aaaggaaaagaaa

SEQ ID NO: 3507417 - RNA, 17 nt, Human
aaaggaaaagaaaaaaa

SEQ ID NO: 3507418 - RNA, 13 nt, Human
aaaggaaaagaca

SEQ ID NO: 3507419 - RNA, 11 nt, Human
aaaggaaagag

SEQ ID NO: 3507420 - RNA, 22 nt, Human
aaaggaaagagggagguaagga

SEQ ID NO: 3507421 - RNA, 15 nt, Human
aaaggaaagcugugu

SEQ ID NO: 3507422 - RNA, 18 nt, Human
aaaggaaagcuguguuua

SEQ ID NO: 3507423 - RNA, 17 nt, Human
aaaggaaaucucacccc

SEQ ID NO: 3507424 - RNA, 13 nt, Human
aaaggaagacuag

SEQ ID NO: 3507425 - RNA, 15 nt, Human
aaaggaagcacucug

SEQ ID NO: 3507426 - RNA, 22 nt, Human
aaaggaagcauuguaaaauaau

SEQ ID NO: 3507427 - RNA, 12 nt, Human
aaaggaagccaa

SEQ ID NO: 3507428 - RNA, 14 nt, Human
aaaggaagccaaag

SEQ ID NO: 3507429 - RNA, 13 nt, Human
aaaggaagcuuuc

SEQ ID NO: 3507430 - RNA, 20 nt, Human
aaaggaagguucugguguga

SEQ ID NO: 3507431 - RNA, 19 nt, Human
aaaggaaugcaaagaugaa

SEQ ID NO: 3507432 - RNA, 15 nt, Human
aaaggacaauuucaa

SEQ ID NO: 3507433 - RNA, 19 nt, Human
aaaggacagaguaugaaca

SEQ ID NO: 3507434 - RNA, 17 nt, Human
aaaggacaggcagaaag

SEQ ID NO: 3507435 - RNA, 14 nt, Human
aaaggacauuaugu

SEQ ID NO: 3507436 - RNA, 15 nt, Human
aaaggacauuaugug

SEQ ID NO: 3507437 - RNA, 16 nt, Human
aaaggacucugggguu

SEQ ID NO: 3507438 - RNA, 13 nt, Human
aaaggacuguaau

SEQ ID NO: 3507439 - RNA, 13 nt, Human
aaaggacugugau

SEQ ID NO: 3507440 - RNA, 19 nt, Human
aaaggagacaaguuccaug

SEQ ID NO: 3507441 - RNA, 19 nt, Human
aaaggagacuguguuuggu

SEQ ID NO: 3507442 - RNA, 16 nt, Human
ccagcuggggcguggg

SEQ ID NO: 3507443 - RNA, 19 nt, Human
ccagcuggggcguggggag

SEQ ID NO: 3507444 - RNA, 16 nt, Human
ccagcugggucaggca

SEQ ID NO: 3507445 - RNA, 18 nt, Human
ccagcugggucaggcagg

SEQ ID NO: 3507446 - RNA, 16 nt, Human
ccagcuggguuggaaa

SEQ ID NO: 3507447 - RNA, 15 nt, Human
ccagcugucaagggc

SEQ ID NO: 3507448 - RNA, 19 nt, Human
ccagcuguccccccacucc

SEQ ID NO: 3507449 - RNA, 15 nt, Human
ccagcugugagccuu

SEQ ID NO: 3507450 - RNA, 16 nt, Human
ccagcugugagccuug

SEQ ID NO: 3507451 - RNA, 18 nt, Human
ccagcugugagccuuggc

SEQ ID NO: 3507452 - RNA, 20 nt, Human
ccagcugugcucuggacagg

SEQ ID NO: 3507453 - RNA, 15 nt, Human
ccagcugugcuuaug

SEQ ID NO: 3507454 - RNA, 22 nt, Human
ccagcuguggguacagagaggu

SEQ ID NO: 3507455 - RNA, 17 nt, Human
ccagcuguucagcuggu

SEQ ID NO: 3507456 - RNA, 19 nt, Human
ccagcuucacuucugacuc

SEQ ID NO: 3507457 - RNA, 19 nt, Human
ccagcuucauguggcuucc

SEQ ID NO: 3507458 - RNA, 13 nt, Human
ccagcuuccagca

SEQ ID NO: 3507459 - RNA, 16 nt, Human
ccagcuuccagcagga

SEQ ID NO: 3507460 - RNA, 13 nt, Human
ccagcuucccgag

SEQ ID NO: 3507461 - RNA, 13 nt, Human
ccagcuuccuuca

SEQ ID NO: 3507462 - RNA, 15 nt, Human
ccagcuucuccaggc

SEQ ID NO: 3507463 - RNA, 16 nt, Human
ccagcuucuccaggcu

SEQ ID NO: 3507464 - RNA, 17 nt, Human
ccagcuucuccaggcuc

SEQ ID NO: 3507465 - RNA, 21 nt, Human
ccagcuucugguacucuccua

SEQ ID NO: 3507466 - RNA, 18 nt, Human
ccagcuugaaaccuucac

SEQ ID NO: 3507467 - RNA, 17 nt, Human
ccagcuugcgaauaaca

SEQ ID NO: 3507468 - RNA, 23 nt, Human
ccagcuugcucuucagugggaga

SEQ ID NO: 3507469 - RNA, 18 nt, Human
ccagcuugggcccagcug

SEQ ID NO: 3507470 - RNA, 19 nt, Human
ccagcuugggcccagcugg

SEQ ID NO: 3507471 - RNA, 21 nt, Human
ccagcuugggcccagcugggc

SEQ ID NO: 3507472 - RNA, 16 nt, Human
ccagcuuguaggagcu

SEQ ID NO: 3507473 - RNA, 15 nt, Human
ccagcuuguuauuua

SEQ ID NO: 3507474 - RNA, 19 nt, Human
ccagcuuguuuacaugcuu

SEQ ID NO: 3507475 - RNA, 21 nt, Human
ccagcuuguuuacaugcuuau

SEQ ID NO: 3507476 - RNA, 18 nt, Human
ccagcuuucuccccgcua

SEQ ID NO: 3507477 - RNA, 20 nt, Human
ccagcuuugcuaccaaagca

SEQ ID NO: 3507478 - RNA, 13 nt, Human
ccagcuuuuccca

SEQ ID NO: 3507479 - RNA, 13 nt, Human
ccaggaaaaagga

SEQ ID NO: 3507480 - RNA, 20 nt, Human
ccaggaaacuccacaucugc

SEQ ID NO: 3507481 - RNA, 22 nt, Human
ccaggaaacuccacaucugccu

SEQ ID NO: 3507482 - RNA, 23 nt, Human
ccaggaaacuccacaucugccuu

SEQ ID NO: 3507483 - RNA, 17 nt, Human
ccaggaaacucuugcua

SEQ ID NO: 3507484 - RNA, 23 nt, Human
ccaggaaaggcuccaggagcagc

SEQ ID NO: 3507485 - RNA, 12 nt, Human
ccaggaagccag

SEQ ID NO: 3507486 - RNA, 15 nt, Human
ccaggaagccgugcc

SEQ ID NO: 3507487 - RNA, 15 nt, Human
ccaggaagucucauc

SEQ ID NO: 3507488 - RNA, 20 nt, Human
ccaggaauauugucauccuu

SEQ ID NO: 3507489 - RNA, 20 nt, Human
ccaggaauggagccugcacg

SEQ ID NO: 3507490 - RNA, 14 nt, Human
ccaggaauuuccca

SEQ ID NO: 3507491 - RNA, 17 nt, Human
ccaggaauuucccagga

SEQ ID NO: 3507492 - RNA, 20 nt, Human
ccaggaauuugggacccugc

SEQ ID NO: 3507493 - RNA, 19 nt, Human
ccaggacaccacacccagc

SEQ ID NO: 3507494 - RNA, 18 nt, Human
ccaggacaccgggcaggg

SEQ ID NO: 3507495 - RNA, 20 nt, Human
ccaggacaggagaugcugug

SEQ ID NO: 3507496 - RNA, 15 nt, Human
ccaggacaggaucca

SEQ ID NO: 3507497 - RNA, 17 nt, Human
ccaggacaggauccagg

SEQ ID NO: 3507498 - RNA, 13 nt, Human
ccaggacaggccc

SEQ ID NO: 3507499 - RNA, 14 nt, Human
ccaggacaggcccg

SEQ ID NO: 3507500 - RNA, 20 nt, Human
ccaggacaggcugcggcccc

SEQ ID NO: 3507501 - RNA, 16 nt, Human
ccaggaccacaggcuc

SEQ ID NO: 3507502 - RNA, 18 nt, Human
ccaggaccacaggcucag

SEQ ID NO: 3507503 - RNA, 14 nt, Human
ccaggaccagcuca

SEQ ID NO: 3507504 - RNA, 16 nt, Human
ccaggaccagcugggg

SEQ ID NO: 3507505 - RNA, 14 nt, Human
ccaggacccugaag

SEQ ID NO: 3507506 - RNA, 16 nt, Human
ccaggacccugaaggg

SEQ ID NO: 3507507 - RNA, 18 nt, Human
ccaggacccugaaggggc

SEQ ID NO: 3507508 - RNA, 16 nt, Human
ccaggacccugccagg

SEQ ID NO: 3507509 - RNA, 17 nt, Human
ccaggacccugccaggc

SEQ ID NO: 3507510 - RNA, 18 nt, Human
ccaggacccugccaggca

SEQ ID NO: 3507511 - RNA, 19 nt, Human
ccaggacccuggacccagc

SEQ ID NO: 3507512 - RNA, 16 nt, Human
ccaggacgccacucau

SEQ ID NO: 3507513 - RNA, 22 nt, Human
ccaggacgccacucauuucauc

SEQ ID NO: 3507514 - RNA, 23 nt, Human
ccaggacgccacucauuucaucu

SEQ ID NO: 3507515 - RNA, 20 nt, Human
ccaggacgcuucugaaugcu

SEQ ID NO: 3507516 - RNA, 21 nt, Human
ccaggacggggccggccaggu

SEQ ID NO: 3507517 - RNA, 18 nt, Human
ccaggacuauagcccagg

SEQ ID NO: 3507518 - RNA, 20 nt, Human
ccaggacuauauuugggccu

SEQ ID NO: 3507519 - RNA, 21 nt, Human
ccaggacuauauuugggccug

SEQ ID NO: 3507520 - RNA, 16 nt, Human
ccaggacucccuccuc

SEQ ID NO: 3507521 - RNA, 18 nt, Human
ccaggacucccuccucac

SEQ ID NO: 3507522 - RNA, 22 nt, Human
ccaggacucugaccccagcauu

SEQ ID NO: 3507523 - RNA, 17 nt, Human
ccaggacucugcagccu

SEQ ID NO: 3507524 - RNA, 20 nt, Human
ccaggacucugcagccucag

SEQ ID NO: 3507525 - RNA, 22 nt, Human
ccaggacucugcagccucagag

SEQ ID NO: 3507526 - RNA, 13 nt, Human
ccaggacugagcc

SEQ ID NO: 3507527 - RNA, 16 nt, Human
ccaggacuguuucaaa

SEQ ID NO: 3507528 - RNA, 21 nt, Human
ccaggagaaccacuacaugca

SEQ ID NO: 3507529 - RNA, 23 nt, Human
ccaggagaaccacuacaugcagc

SEQ ID NO: 3507530 - RNA, 20 nt, Human
ccaggagaagaaagagguga

SEQ ID NO: 3507531 - RNA, 13 nt, Human
ccaggagaagcuc

SEQ ID NO: 3507532 - RNA, 18 nt, Human
ccaggagaagcucagcug

SEQ ID NO: 3507533 - RNA, 23 nt, Human
ccaggagaauaaaagaaauuccu

SEQ ID NO: 3507534 - RNA, 12 nt, Human
ccaggagagaga

SEQ ID NO: 3507535 - RNA, 17 nt, Human
ccaggagagagaaagcc

SEQ ID NO: 3507536 - RNA, 21 nt, Human
ccaggagagagaaagccaggc

SEQ ID NO: 3507537 - RNA, 20 nt, Human
ccaggagagccagcccuccc

SEQ ID NO: 3507538 - RNA, 21 nt, Human
ccaggagagcuuagggucuca

SEQ ID NO: 3507539 - RNA, 16 nt, Human
ccaggagcacggcucu

SEQ ID NO: 3507540 - RNA, 12 nt, Human
ccaggagcagcc

SEQ ID NO: 3507541 - RNA, 16 nt, Human
ccaggagcagccacau

SEQ ID NO: 3507542 - RNA, 11 nt, Human
ccaggagccca

SEQ ID NO: 3507543 - RNA, 13 nt, Human
ccaggagcccauu

SEQ ID NO: 3507544 - RNA, 16 nt, Human
ccaggagccccgaggc

SEQ ID NO: 3507545 - RNA, 16 nt, Human
ccaggagccugcccag

SEQ ID NO: 3507546 - RNA, 18 nt, Human
ccaggagcuccagugucc

SEQ ID NO: 3507547 - RNA, 17 nt, Human
cagacccccaccccuuc

SEQ ID NO: 3507548 - RNA, 23 nt, Human
cagacccccaccccuuccccacu

SEQ ID NO: 3507549 - RNA, 13 nt, Human
cagacccccacuc

SEQ ID NO: 3507550 - RNA, 16 nt, Human
cagacccccacucuca

SEQ ID NO: 3507551 - RNA, 20 nt, Human
cagacccccucuagaaauuu

SEQ ID NO: 3507552 - RNA, 17 nt, Human
cagaccccucuggccag

SEQ ID NO: 3507553 - RNA, 21 nt, Human
cagaccccucuggccaggaug

SEQ ID NO: 3507554 - RNA, 13 nt, Human
cagaccccuggcu

SEQ ID NO: 3507555 - RNA, 14 nt, Human
cagaccccuggcuu

SEQ ID NO: 3507556 - RNA, 13 nt, Human
cagaccccuuggc

SEQ ID NO: 3507557 - RNA, 14 nt, Human
cagacccggcugcg

SEQ ID NO: 3507558 - RNA, 16 nt, Human
cagacccugcccugug

SEQ ID NO: 3507559 - RNA, 17 nt, Human
cagacccugcccugugg

SEQ ID NO: 3507560 - RNA, 13 nt, Human
cagacccuggagg

SEQ ID NO: 3507561 - RNA, 18 nt, Human
cagaccuaaugcuccuug

SEQ ID NO: 3507562 - RNA, 14 nt, Human
cagaccuccccagc

SEQ ID NO: 3507563 - RNA, 18 nt, Human
cagaccuccccagccccu

SEQ ID NO: 3507564 - RNA, 12 nt, Human
cagaccugagcu

SEQ ID NO: 3507565 - RNA, 22 nt, Human
cagaccugagcuccccaccacc

SEQ ID NO: 3507566 - RNA, 22 nt, Human
cagaccugauccuggaggccca

SEQ ID NO: 3507567 - RNA, 23 nt, Human
cagaccugauccuggaggcccag

SEQ ID NO: 3507568 - RNA, 13 nt, Human
cagaccugccucu

SEQ ID NO: 3507569 - RNA, 16 nt, Human
cagaccugccucuucc

SEQ ID NO: 3507570 - RNA, 17 nt, Human
cagaccuggagccccug

SEQ ID NO: 3507571 - RNA, 22 nt, Human
cagaccuggagccccugggugg

SEQ ID NO: 3507572 - RNA, 12 nt, Human
cagaccuguccu

SEQ ID NO: 3507573 - RNA, 13 nt, Human
cagaccuuuuauc

SEQ ID NO: 3507574 - RNA, 15 nt, Human
cagaccuuuuuuagg

SEQ ID NO: 3507575 - RNA, 17 nt, Human
cagacgcacgugggucu

SEQ ID NO: 3507576 - RNA, 14 nt, Human
cagacgccuggcug

SEQ ID NO: 3507577 - RNA, 16 nt, Human
cagacgccuggcugcu

SEQ ID NO: 3507578 - RNA, 17 nt, Human
cagacgccuggcugcug

SEQ ID NO: 3507579 - RNA, 21 nt, Human
cagacgcucauucagcaucug

SEQ ID NO: 3507580 - RNA, 19 nt, Human
cagacggaaggguaaacaa

SEQ ID NO: 3507581 - RNA, 20 nt, Human
cagacggaaggguaaacaau

SEQ ID NO: 3507582 - RNA, 17 nt, Human
cagacguaggggagggg

SEQ ID NO: 3507583 - RNA, 21 nt, Human
cagacuaagccagcaccggac

SEQ ID NO: 3507584 - RNA, 23 nt, Human
cagacuaagccagcaccggacca

SEQ ID NO: 3507585 - RNA, 14 nt, Human
cagacuacacagga

SEQ ID NO: 3507586 - RNA, 21 nt, Human
cagacuacagcuggggugcag

SEQ ID NO: 3507587 - RNA, 20 nt, Human
cccaggccaucuuccaggug

SEQ ID NO: 3507588 - RNA, 17 nt, Human
cccaggccccaugaccu

SEQ ID NO: 3507589 - RNA, 21 nt, Human
cccaggccccaugaccuccag

SEQ ID NO: 3507590 - RNA, 22 nt, Human
cccaggccccgaggacccagac

SEQ ID NO: 3507591 - RNA, 23 nt, Human
cccaggccccgaggacccagacc

SEQ ID NO: 3507592 - RNA, 12 nt, Human
cccaggccccug

SEQ ID NO: 3507593 - RNA, 21 nt, Human
cccaggccccugccacccugg

SEQ ID NO: 3507594 - RNA, 16 nt, Human
cccaggccccuggagg

SEQ ID NO: 3507595 - RNA, 13 nt, Human
cccaggccgcagc

SEQ ID NO: 3507596 - RNA, 21 nt, Human
cccaggccggccagccucacc

SEQ ID NO: 3507597 - RNA, 14 nt, Human
cagauccagggaca

SEQ ID NO: 3507598 - RNA, 20 nt, Human
cagaucccacuuuugccaga

SEQ ID NO: 3507599 - RNA, 22 nt, Human
cagaucccagcuucggcauuug

SEQ ID NO: 3507600 - RNA, 18 nt, Human
cagaucccaggccccugg

SEQ ID NO: 3507601 - RNA, 21 nt, Human
cagaucccaggccccuggagg

SEQ ID NO: 3507602 - RNA, 15 nt, Human
cagauccccaagccu

SEQ ID NO: 3507603 - RNA, 19 nt, Human
cagauccccaagccuggca

SEQ ID NO: 3507604 - RNA, 16 nt, Human
cagauccucacaacca

SEQ ID NO: 3507605 - RNA, 14 nt, Human
cagauccucuuggu

SEQ ID NO: 3507606 - RNA, 23 nt, Human
cagauccuggguacugaaagccu

SEQ ID NO: 3507607 - RNA, 23 nt, Human
cagaucucccacaugccaggggc

SEQ ID NO: 3507608 - RNA, 14 nt, Human
cagaucuccuggca

SEQ ID NO: 3507609 - RNA, 22 nt, Human
cagaucugacaugauuccuucc

SEQ ID NO: 3507610 - RNA, 23 nt, Human
cagaucugacaugauuccuuccu

SEQ ID NO: 3507611 - RNA, 24 nt, Human
cagaucugacaugauuccuuccug

SEQ ID NO: 3507612 - RNA, 23 nt, Human
cagaucugauuuguaacccacug

SEQ ID NO: 3507613 - RNA, 17 nt, Human
cagaucugccuaaggac

SEQ ID NO: 3507614 - RNA, 20 nt, Human
cagaucugccuaaggacuuc

SEQ ID NO: 3507615 - RNA, 19 nt, Human
cagaucuggaaccucagcc

SEQ ID NO: 3507616 - RNA, 16 nt, Human
cagaucuggaauguga

SEQ ID NO: 3507617 - RNA, 23 nt, Human
cagaucuggggcagcacccuaua

SEQ ID NO: 3507618 - RNA, 18 nt, Human
cagaucugucugauagga

SEQ ID NO: 3507619 - RNA, 12 nt, Human
cagaucugugcc

SEQ ID NO: 3507620 - RNA, 15 nt, Human
cagaucugugcccca

SEQ ID NO: 3507621 - RNA, 23 nt, Human
cagaucuguuuugugguuuggaa

SEQ ID NO: 3507622 - RNA, 14 nt, Human
cagaucuuggacuc

SEQ ID NO: 3507623 - RNA, 15 nt, Human
cagaucuuggacuca

SEQ ID NO: 3507624 - RNA, 18 nt, Human
cagaucuuucuccuugaa

SEQ ID NO: 3507625 - RNA, 14 nt, Human
cagaugaaaauuug

SEQ ID NO: 3507626 - RNA, 20 nt, Human
cagaugaacucuuagaaaug

SEQ ID NO: 3507627 - RNA, 22 nt, Human
cagaugaacucuuucuggccug

SEQ ID NO: 3507628 - RNA, 23 nt, Human
cagaugaacucuuucuggccugc

SEQ ID NO: 3507629 - RNA, 14 nt, Human
cagaugaauaaacu

SEQ ID NO: 3507630 - RNA, 14 nt, Human
cagaugaccccucc

SEQ ID NO: 3507631 - RNA, 21 nt, Human
cagaugagaacaaagcuguua

SEQ ID NO: 3507632 - RNA, 16 nt, Human
cagaugagcagaagcu

SEQ ID NO: 3507633 - RNA, 16 nt, Human
cagaugaggcuuucca

SEQ ID NO: 3507634 - RNA, 18 nt, Human
cagaugaucaacucuucg

SEQ ID NO: 3507635 - RNA, 14 nt, Human
cagaugauccauga

SEQ ID NO: 3507636 - RNA, 19 nt, Human
cagaugaugagaauuucua

SEQ ID NO: 3507637 - RNA, 17 nt, Human
cagaugcaaagaggcaa

SEQ ID NO: 3507638 - RNA, 13 nt, Human
cagaugcaccagc

SEQ ID NO: 3507639 - RNA, 13 nt, Human
cagaugcagcucu

SEQ ID NO: 3507640 - RNA, 13 nt, Human
cagaugcagggca

SEQ ID NO: 3507641 - RNA, 18 nt, Human
cagaugccacuucuaaga

SEQ ID NO: 3507642 - RNA, 18 nt, Human
cagaugccagagcaaagg

SEQ ID NO: 3507643 - RNA, 15 nt, Human
cagaugccccagagc

SEQ ID NO: 3507644 - RNA, 12 nt, Human
cagaugcccgag

SEQ ID NO: 3507645 - RNA, 12 nt, Human
cagaugccuggg

SEQ ID NO: 3507646 - RNA, 13 nt, Human
cagaugcguccca

SEQ ID NO: 3507647 - RNA, 22 nt, Human
cagaugcgucccaagauguuga

SEQ ID NO: 3507648 - RNA, 11 nt, Human
cagaugcucaa

SEQ ID NO: 3507649 - RNA, 15 nt, Human
cagaugcuccaagau

SEQ ID NO: 3507650 - RNA, 19 nt, Human
cagaugcuccaagauucua

SEQ ID NO: 3507651 - RNA, 20 nt, Human
cagaugcuccaagauucuag

SEQ ID NO: 3507652 - RNA, 22 nt, Human
cagaugcuccaagauucuagau

SEQ ID NO: 3507653 - RNA, 23 nt, Human
cagaugcuccaagauucuagaug

SEQ ID NO: 3507654 - RNA, 12 nt, Human
cagaugcucuga

SEQ ID NO: 3507655 - RNA, 13 nt, Human
cagaugcugaugu

SEQ ID NO: 3507656 - RNA, 14 nt, Human
cagaugcugauguu

SEQ ID NO: 3507657 - RNA, 16 nt, Human
cagaugcugauguuca

SEQ ID NO: 3507658 - RNA, 18 nt, Human
cagaugcuggucaugugu

SEQ ID NO: 3507659 - RNA, 12 nt, Human
cagaugcuucug

SEQ ID NO: 3507660 - RNA, 13 nt, Human
cagaugcuucugg

SEQ ID NO: 3507661 - RNA, 17 nt, Human
cagaugcuucugggaga

SEQ ID NO: 3507662 - RNA, 14 nt, Human
cagaugcuuuccug

SEQ ID NO: 3507663 - RNA, 21 nt, Human
cagaugcuuuccugcacauua

SEQ ID NO: 3507664 - RNA, 21 nt, Human
cagauggaaaauucauuuuuu

SEQ ID NO: 3507665 - RNA, 20 nt, Human
cagauggaaccgcaggaagc

SEQ ID NO: 3507666 - RNA, 21 nt, Human
cagauggaaccgcaggaagcu

SEQ ID NO: 3507667 - RNA, 18 nt, Human
cagauggacuccagccug

SEQ ID NO: 3507668 - RNA, 22 nt, Human
cagauggauuugccugugccac

SEQ ID NO: 3507669 - RNA, 16 nt, Human
cagauggcauguguuu

SEQ ID NO: 3507670 - RNA, 22 nt, Human
cagauggcauguguuuacuuua

SEQ ID NO: 3507671 - RNA, 20 nt, Human
cagaugggaggaaagagagc

SEQ ID NO: 3507672 - RNA, 15 nt, Human
cagauggggccucug

SEQ ID NO: 3507673 - RNA, 22 nt, Human
cagaugguuuuauaaucugauu

SEQ ID NO: 3507674 - RNA, 12 nt, Human
cagauguaaugu

SEQ ID NO: 3507675 - RNA, 13 nt, Human
cagauguaauguu

SEQ ID NO: 3507676 - RNA, 22 nt, Human
cagaugucuucugccuguuaua

SEQ ID NO: 3507677 - RNA, 16 nt, Human
cagaugugacuguaua

SEQ ID NO: 3507678 - RNA, 20 nt, Human
cagaugugcuauaaucuguu

SEQ ID NO: 3507679 - RNA, 12 nt, Human
cagauguggcua

SEQ ID NO: 3507680 - RNA, 20 nt, Human
cagauguggcuacugacaua

SEQ ID NO: 3507681 - RNA, 20 nt, Human
cagaugugguaacuguuaaa

SEQ ID NO: 3507682 - RNA, 14 nt, Human
cagauguuuaaaac

SEQ ID NO: 3507683 - RNA, 15 nt, Human
cagauguuuccagac

SEQ ID NO: 3507684 - RNA, 23 nt, Human
cagauguuuccagacuuccuuga

SEQ ID NO: 3507685 - RNA, 14 nt, Human
cagauuaaacuuca

SEQ ID NO: 3507686 - RNA, 21 nt, Human
cagauuacugcuuuaaucaga

SEQ ID NO: 3507687 - RNA, 22 nt, Human
cagauuaucuauuugugugugu

SEQ ID NO: 3507688 - RNA, 19 nt, Human
cagauuaugagacacagga

SEQ ID NO: 3507689 - RNA, 21 nt, Human
cagauuaugagacacaggaug

SEQ ID NO: 3507690 - RNA, 12 nt, Human
cagauuauucac

SEQ ID NO: 3507691 - RNA, 23 nt, Human
cagauuauucacugauuugacau

SEQ ID NO: 3507692 - RNA, 18 nt, Human
cagauuauuuuggaaagu

SEQ ID NO: 3507693 - RNA, 14 nt, Human
cagauucaggcauu

SEQ ID NO: 3507694 - RNA, 15 nt, Human
cagauucaggcauuu

SEQ ID NO: 3507695 - RNA, 17 nt, Human
cagauucagucuugccu

SEQ ID NO: 3507696 - RNA, 21 nt, Human
cagauuccaggcgaugugcaa

SEQ ID NO: 3507697 - RNA, 21 nt, Human
cagauucccagagcaaaauaa

SEQ ID NO: 3507698 - RNA, 16 nt, Human
cagauuccccuguguc

SEQ ID NO: 3507699 - RNA, 20 nt, Human
cagauucuaggaccuguguc

SEQ ID NO: 3507700 - RNA, 22 nt, Human
cagauucuuuccugaggcuggg

SEQ ID NO: 3507701 - RNA, 18 nt, Human
cagauucuuuuaugugau

SEQ ID NO: 3507702 - RNA, 20 nt, Human
cagauugcaacaggcugggc

SEQ ID NO: 3507703 - RNA, 21 nt, Human
cagauugcaacaggcugggcu

SEQ ID NO: 3507704 - RNA, 18 nt, Human
cagauugcaugugacucu

SEQ ID NO: 3507705 - RNA, 21 nt, Human
cagauugcaugugacucugaa

SEQ ID NO: 3507706 - RNA, 16 nt, Human
cagauugccuguuucu

SEQ ID NO: 3507707 - RNA, 19 nt, Human
cagauugcugaauggaguu

SEQ ID NO: 3507708 - RNA, 15 nt, Human
cagauuggaaggaga

SEQ ID NO: 3507709 - RNA, 22 nt, Human
cagauuggaaggagacacagau

SEQ ID NO: 3507710 - RNA, 23 nt, Human
cagauuggaaggagacacagaug

SEQ ID NO: 3507711 - RNA, 21 nt, Human
cagauuggcucacacugagaa

SEQ ID NO: 3507712 - RNA, 21 nt, Human
cagauuguaucaugugcuaga

SEQ ID NO: 3507713 - RNA, 15 nt, Human
cagauugucuuaauu

SEQ ID NO: 3507714 - RNA, 15 nt, Human
cagauuucacucucc

SEQ ID NO: 3507715 - RNA, 20 nt, Human
cagauuucacucuccuuggu

SEQ ID NO: 3507716 - RNA, 21 nt, Human
cagauuucagucuuuuccugu

SEQ ID NO: 3507717 - RNA, 16 nt, Human
cagauuucauaccuca

SEQ ID NO: 3507718 - RNA, 14 nt, Human
cagauuuccagccu

SEQ ID NO: 3507719 - RNA, 24 nt, Human
cagauuuccagucuccaccaggaa

SEQ ID NO: 3507720 - RNA, 21 nt, Human
cagauuugaagacaaaaauac

SEQ ID NO: 3507721 - RNA, 23 nt, Human
cagauuugaagacaaaaauacuc

SEQ ID NO: 3507722 - RNA, 13 nt, Human
cagauuugagcuc

SEQ ID NO: 3507723 - RNA, 14 nt, Human
cagauuugagcuca

SEQ ID NO: 3507724 - RNA, 20 nt, Human
cagauuugcuaauuuauccu

SEQ ID NO: 3507725 - RNA, 19 nt, Human
cagauuuggaaagacugga

SEQ ID NO: 3507726 - RNA, 14 nt, Human
cagauuugggcugg

SEQ ID NO: 3507727 - RNA, 18 nt, Human
cagauuugggcuggaaca

SEQ ID NO: 3507728 - RNA, 24 nt, Human
cagauuugucuuuuuguuguaaaa

SEQ ID NO: 3507729 - RNA, 24 nt, Human
cagauuugugaacucagccaagca

SEQ ID NO: 3507730 - RNA, 23 nt, Human
ccaucuuuuuaaccucuguucag

SEQ ID NO: 3507731 - RNA, 21 nt, Human
ccaugaaaacguuuuauugug

SEQ ID NO: 3507732 - RNA, 22 nt, Human
ccaugaacagaaaacauucuga

SEQ ID NO: 3507733 - RNA, 12 nt, Human
ccaugaagacag

SEQ ID NO: 3507734 - RNA, 14 nt, Human
ccaugaagacagga

SEQ ID NO: 3507735 - RNA, 15 nt, Human
ccaugaagccacagc

SEQ ID NO: 3507736 - RNA, 16 nt, Human
ccaugaagccacagcc

SEQ ID NO: 3507737 - RNA, 19 nt, Human
ccaugaaucgcuucucuuu

SEQ ID NO: 3507738 - RNA, 18 nt, Human
ccaugaauguaucaggaa

SEQ ID NO: 3507739 - RNA, 22 nt, Human
ccaugacaacuucuaauugcca

SEQ ID NO: 3507740 - RNA, 21 nt, Human
ccaugacaggccugaagauau

SEQ ID NO: 3507741 - RNA, 17 nt, Human
ccaugacccaccccugu

SEQ ID NO: 3507742 - RNA, 18 nt, Human
ccaugacccaccccugug

SEQ ID NO: 3507743 - RNA, 18 nt, Human
ccaugacccugccucucc

SEQ ID NO: 3507744 - RNA, 21 nt, Human
ccaugacccugccucucccag

SEQ ID NO: 3507745 - RNA, 20 nt, Human
ccaugaccuccagcuuuccu

SEQ ID NO: 3507746 - RNA, 13 nt, Human
ccaugacugcuug

SEQ ID NO: 3507747 - RNA, 19 nt, Human
ccaugacugcuugcccuaa

SEQ ID NO: 3507748 - RNA, 22 nt, Human
ccaugacugcuugcccuaagca

SEQ ID NO: 3507749 - RNA, 18 nt, Human
ccaugacuugagaaacaa

SEQ ID NO: 3507750 - RNA, 13 nt, Human
cccaggccuccag

SEQ ID NO: 3507751 - RNA, 20 nt, Human
cccaggccuccagcucagca

SEQ ID NO: 3507752 - RNA, 18 nt, Human
cccaggccuccuacagcu

SEQ ID NO: 3507753 - RNA, 18 nt, Human
cccaggcgccccuucccc

SEQ ID NO: 3507754 - RNA, 13 nt, Human
cccaggcgggagc

SEQ ID NO: 3507755 - RNA, 23 nt, Human
cccaggcuccgcccuuagucccc

SEQ ID NO: 3507756 - RNA, 17 nt, Human
cccaggcucguggacug

SEQ ID NO: 3507757 - RNA, 22 nt, Human
cccaggcucguggacugagugg

SEQ ID NO: 3507758 - RNA, 11 nt, Human
cccaggcugga

SEQ ID NO: 3507759 - RNA, 20 nt, Human
cccaggcuggccagccccac

SEQ ID NO: 3507760 - RNA, 23 nt, Human
cccaggcuggccagccccacagc

SEQ ID NO: 3507761 - RNA, 18 nt, Human
cccaggcuggcgugcagu

SEQ ID NO: 3507762 - RNA, 20 nt, Human
cccaggcuggcgugcagugg

SEQ ID NO: 3507763 - RNA, 12 nt, Human
cccaggcuggga

SEQ ID NO: 3507764 - RNA, 14 nt, Human
cccaggcugggaac

SEQ ID NO: 3507765 - RNA, 13 nt, Human
cccaggcugggca

SEQ ID NO: 3507766 - RNA, 22 nt, Human
cccaggcugugcagcgcagcug

SEQ ID NO: 3507767 - RNA, 23 nt, Human
cccaggcugugcagcgcagcugg

SEQ ID NO: 3507768 - RNA, 20 nt, Human
cccaggcuuagucacugaga

SEQ ID NO: 3507769 - RNA, 17 nt, Human
cccagggaagcagcagc

SEQ ID NO: 3507770 - RNA, 20 nt, Human
cccagggacaccagccaggc

SEQ ID NO: 3507771 - RNA, 18 nt, Human
cccagggagaggccauga

SEQ ID NO: 3507772 - RNA, 15 nt, Human
cccagggagcggaaa

SEQ ID NO: 3507773 - RNA, 22 nt, Human
cccagggagcggaaagcagcuc

SEQ ID NO: 3507774 - RNA, 18 nt, Human
cccagggaggccgaagcu

SEQ ID NO: 3507775 - RNA, 13 nt, Human
cccagggcacagg

SEQ ID NO: 3507776 - RNA, 18 nt, Human
cccagggcagccagggag

SEQ ID NO: 3507777 - RNA, 19 nt, Human
cccagggcaucuugcuggc

SEQ ID NO: 3507778 - RNA, 13 nt, Human
cccagggcccaga

SEQ ID NO: 3507779 - RNA, 17 nt, Human
cccagggcccagagccc

SEQ ID NO: 3507780 - RNA, 20 nt, Human
cccagggcccagagcccagc

SEQ ID NO: 3507781 - RNA, 19 nt, Human
cccagggccugagccuggc

SEQ ID NO: 3507782 - RNA, 21 nt, Human
cccagggcuacccucccccag

SEQ ID NO: 3507783 - RNA, 15 nt, Human
cccagggcucagccu

SEQ ID NO: 3507784 - RNA, 16 nt, Human
cccagggcucagccug

SEQ ID NO: 3507785 - RNA, 20 nt, Human
cccagggcucagccuggugg

SEQ ID NO: 3507786 - RNA, 15 nt, Human
cccagggcuccugca

SEQ ID NO: 3507787 - RNA, 16 nt, Human
cccagggcucugcccc

SEQ ID NO: 3507788 - RNA, 14 nt, Human
cccagggcugggag

SEQ ID NO: 3507789 - RNA, 13 nt, Human
cccaggggagagg

SEQ ID NO: 3507790 - RNA, 21 nt, Human
cccaggggagagggucuggag

SEQ ID NO: 3507791 - RNA, 23 nt, Human
cccaggggagagggucuggagaa

SEQ ID NO: 3507792 - RNA, 16 nt, Human
cccaggggcagcccca

SEQ ID NO: 3507793 - RNA, 23 nt, Human
cccaggggcauguauuggccugg

SEQ ID NO: 3507794 - RNA, 14 nt, Human
cccaggggcucccu

SEQ ID NO: 3507795 - RNA, 16 nt, Human
cccaggggcucccucc

SEQ ID NO: 3507796 - RNA, 21 nt, Human
cccaggggcuggcuucaggag

SEQ ID NO: 3507797 - RNA, 22 nt, Human
cccagggggucucacccaugca

SEQ ID NO: 3507798 - RNA, 15 nt, Human
cccaggggucccagc

SEQ ID NO: 3507799 - RNA, 16 nt, Human
cccaggggucccagcc

SEQ ID NO: 3507800 - RNA, 21 nt, Human
cccaggggugcccccuccucu

SEQ ID NO: 3507801 - RNA, 13 nt, Human
cccaggguagccc

SEQ ID NO: 3507802 - RNA, 16 nt, Human
cccaggguagcccgcc

SEQ ID NO: 3507803 - RNA, 21 nt, Human
cccaggguagcccgccugcca

SEQ ID NO: 3507804 - RNA, 22 nt, Human
cccaggguagcccgccugccag

SEQ ID NO: 3507805 - RNA, 23 nt, Human
cccaggguagcccgccugccagu

SEQ ID NO: 3507806 - RNA, 16 nt, Human
cccaggguccugggag

SEQ ID NO: 3507807 - RNA, 17 nt, Human
cccaggguccugggagg

SEQ ID NO: 3507808 - RNA, 18 nt, Human
cccagggucuucccuacc

SEQ ID NO: 3507809 - RNA, 19 nt, Human
cccagggugagguggcaug

SEQ ID NO: 3507810 - RNA, 13 nt, Human
cccaggguggcca

SEQ ID NO: 3507811 - RNA, 14 nt, Human
cccaggguggccac

SEQ ID NO: 3507812 - RNA, 14 nt, Human
cccaggguucccgc

SEQ ID NO: 3507813 - RNA, 19 nt, Human
cccagguaagcaggaggag

SEQ ID NO: 3507814 - RNA, 15 nt, Human
cccagguaccagcug

SEQ ID NO: 3507815 - RNA, 17 nt, Human
cccagguccagcucugg

SEQ ID NO: 3507816 - RNA, 20 nt, Human
cccagguccucugauaccca

SEQ ID NO: 3507817 - RNA, 16 nt, Human
cccaggugauauuuuu

SEQ ID NO: 3507818 - RNA, 20 nt, Human
cccaggugcagccagaggca

SEQ ID NO: 3507819 - RNA, 22 nt, Human
cccaggugcuaggaacacuccu

SEQ ID NO: 3507820 - RNA, 21 nt, Human
cccagguggaaggcagacagc

SEQ ID NO: 3507821 - RNA, 22 nt, Human
cccagguggcugacccaguccc

SEQ ID NO: 3507822 - RNA, 14 nt, Human
cccagguggcugug

SEQ ID NO: 3507823 - RNA, 21 nt, Human
cccagguguuaacauuccaag

SEQ ID NO: 3507824 - RNA, 18 nt, Human
cccagguuggagugcagu

SEQ ID NO: 3507825 - RNA, 14 nt, Human
cccagguuggcucu

SEQ ID NO: 3507826 - RNA, 18 nt, Human
cccagguuggcucugcca

SEQ ID NO: 3507827 - RNA, 13 nt, Human
cccagguuucuau

SEQ ID NO: 3507828 - RNA, 13 nt, Human
cccagguuucugg

SEQ ID NO: 3507829 - RNA, 13 nt, Human
cccaguaaaauug

SEQ ID NO: 3507830 - RNA, 17 nt, Human
cccaguaaaauugccau

SEQ ID NO: 3507831 - RNA, 15 nt, Human
cccaguaacucaucu

SEQ ID NO: 3507832 - RNA, 18 nt, Human
cccaguacaccccaccuc

SEQ ID NO: 3507833 - RNA, 14 nt, Human
cccaguaccuccug

SEQ ID NO: 3507834 - RNA, 21 nt, Human
cccaguaucucuucagucucu

SEQ ID NO: 3507835 - RNA, 17 nt, Human
cccagucagccucucuc

SEQ ID NO: 3507836 - RNA, 19 nt, Human
cccagucagccucucuccc

SEQ ID NO: 3507837 - RNA, 20 nt, Human
cccagucagccucucuccca

SEQ ID NO: 3507838 - RNA, 21 nt, Human
cccagucagccucucucccag

SEQ ID NO: 3507839 - RNA, 17 nt, Human
cccagucccagcagcca

SEQ ID NO: 3507840 - RNA, 19 nt, Human
cccagucccagcagccagc

SEQ ID NO: 3507841 - RNA, 23 nt, Human
cccaguccccaccccugccccca

SEQ ID NO: 3507842 - RNA, 12 nt, Human
cccagucccugg

SEQ ID NO: 3507843 - RNA, 16 nt, Human
cccagucccuggggga

SEQ ID NO: 3507844 - RNA, 15 nt, Human
cccaguccucuccca

SEQ ID NO: 3507845 - RNA, 13 nt, Human
cccaguccuggcc

SEQ ID NO: 3507846 - RNA, 14 nt, Human
cccaguccuggccu

SEQ ID NO: 3507847 - RNA, 20 nt, Human
cccaguccuggccuggcuuc

SEQ ID NO: 3507848 - RNA, 22 nt, Human
cccaguccuggccuggcuucuc

SEQ ID NO: 3507849 - RNA, 17 nt, Human
cccaguccuuccaccuc

SEQ ID NO: 3507850 - RNA, 13 nt, Human
cccagucgcccuu

SEQ ID NO: 3507851 - RNA, 15 nt, Human
cccagucuacccaga

SEQ ID NO: 3507852 - RNA, 16 nt, Human
cccagucucugcucca

SEQ ID NO: 3507853 - RNA, 10 nt, Human
cccagucugg

SEQ ID NO: 3507854 - RNA, 18 nt, Human
cccagucuggaaugcagu

SEQ ID NO: 3507855 - RNA, 15 nt, Human
cccagugaaaacuag

SEQ ID NO: 3507856 - RNA, 19 nt, Human
cccagugacacuucagaga

SEQ ID NO: 3507857 - RNA, 15 nt, Human
cccagugcagaaugu

SEQ ID NO: 3507858 - RNA, 12 nt, Human
cccagugcaugg

SEQ ID NO: 3507859 - RNA, 19 nt, Human
cccagugcaugguggccag

SEQ ID NO: 3507860 - RNA, 19 nt, Human
cccagugcccccacugacc

SEQ ID NO: 3507861 - RNA, 16 nt, Human
cccagugcccuggggc

SEQ ID NO: 3507862 - RNA, 17 nt, Human
cccagugcccuggggcu

SEQ ID NO: 3507863 - RNA, 17 nt, Human
cccagugccgagaagga

SEQ ID NO: 3507864 - RNA, 16 nt, Human
cccaguggcagggcac

SEQ ID NO: 3507865 - RNA, 22 nt, Human
cccaguggcagggcacagggcc

SEQ ID NO: 3507866 - RNA, 21 nt, Human
cccaguggccucaacccuccc

SEQ ID NO: 3507867 - RNA, 16 nt, Human
cccaguggcugcugcc

SEQ ID NO: 3507868 - RNA, 17 nt, Human
cccaguggcugcugccc

SEQ ID NO: 3507869 - RNA, 15 nt, Human
cccagugggaggcgc

SEQ ID NO: 3507870 - RNA, 20 nt, Human
cccagugggaggcgcgagcc

SEQ ID NO: 3507871 - RNA, 20 nt, Human
cccagugggaggggcaggcu

SEQ ID NO: 3507872 - RNA, 20 nt, Human
cccagugguuccuaauccuc

SEQ ID NO: 3507873 - RNA, 16 nt, Human
cccaguguuguuugua

SEQ ID NO: 3507874 - RNA, 17 nt, Human
cagcagaaggggguggu

SEQ ID NO: 3507875 - RNA, 18 nt, Human
cagcagacagagccagga

SEQ ID NO: 3507876 - RNA, 20 nt, Human
cagcagacagagccaggaga

SEQ ID NO: 3507877 - RNA, 21 nt, Human
cagcagacagagccaggagaa

SEQ ID NO: 3507878 - RNA, 17 nt, Human
cagcagacucagcucug

SEQ ID NO: 3507879 - RNA, 18 nt, Human
cagcagacucagcucuga

SEQ ID NO: 3507880 - RNA, 21 nt, Human
cagcagacucagcucugacau

SEQ ID NO: 3507881 - RNA, 18 nt, Human
cagcagacugaucaggac

SEQ ID NO: 3507882 - RNA, 23 nt, Human
cagcagagagguuugcaguccca

SEQ ID NO: 3507883 - RNA, 21 nt, Human
cagcagaucccagcucacguc

SEQ ID NO: 3507884 - RNA, 17 nt, Human
cagcagaugcuguuuaa

SEQ ID NO: 3507885 - RNA, 15 nt, Human
cagcagauuggaagg

SEQ ID NO: 3507886 - RNA, 15 nt, Human
cagcagcaagaaaaa

SEQ ID NO: 3507887 - RNA, 22 nt, Human
cagcagcaagaaaaaaaaaugc

SEQ ID NO: 3507888 - RNA, 22 nt, Human
cagcagcaccugcccuaccugc

SEQ ID NO: 3507889 - RNA, 13 nt, Human
cagcagcagcagg

SEQ ID NO: 3507890 - RNA, 14 nt, Human
cagcagcagcccug

SEQ ID NO: 3507891 - RNA, 13 nt, Human
cagcagcagguga

SEQ ID NO: 3507892 - RNA, 22 nt, Human
cagcagcaucucuaccuucucc

SEQ ID NO: 3507893 - RNA, 10 nt, Human
cagcagccag

SEQ ID NO: 3507894 - RNA, 12 nt, Human
cagcagccagcc

SEQ ID NO: 3507895 - RNA, 23 nt, Human
cagcagccagccaaacacacaga

SEQ ID NO: 3507896 - RNA, 15 nt, Human
cagcagccagcccug

SEQ ID NO: 3507897 - RNA, 17 nt, Human
cagcagccagcccugcc

SEQ ID NO: 3507898 - RNA, 20 nt, Human
cagcagccagcccugccugg

SEQ ID NO: 3507899 - RNA, 23 nt, Human
cagcagccagcccugccuggagg

SEQ ID NO: 3507900 - RNA, 14 nt, Human
cagcagccagcucu

SEQ ID NO: 3507901 - RNA, 18 nt, Human
cagcagccagcucucagc

SEQ ID NO: 3507902 - RNA, 21 nt, Human
cagcagccaucauaggaaggg

SEQ ID NO: 3507903 - RNA, 18 nt, Human
cagcagcccaagcuuccc

SEQ ID NO: 3507904 - RNA, 14 nt, Human
aaaggugauaucca

SEQ ID NO: 3507905 - RNA, 21 nt, Human
aaaggugccugugaggcaggg

SEQ ID NO: 3507906 - RNA, 18 nt, Human
aaagguggugaggcaaua

SEQ ID NO: 3507907 - RNA, 13 nt, Human
aaagguguauuua

SEQ ID NO: 3507908 - RNA, 12 nt, Human
aaaggugucuuc

SEQ ID NO: 3507909 - RNA, 16 nt, Human
aaaggugucuuccucc

SEQ ID NO: 3507910 - RNA, 18 nt, Human
aaaggugucuuccuccca

SEQ ID NO: 3507911 - RNA, 19 nt, Human
aaaggugugagacugggaa

SEQ ID NO: 3507912 - RNA, 14 nt, Human
aaagguguuguccc

SEQ ID NO: 3507913 - RNA, 14 nt, Human
aaagguucuucauc

SEQ ID NO: 3507914 - RNA, 16 nt, Human
aaagguucuuugugua

SEQ ID NO: 3507915 - RNA, 16 nt, Human
aaagguugaauaauau

SEQ ID NO: 3507916 - RNA, 17 nt, Human
aaagguugaauaauaua

SEQ ID NO: 3507917 - RNA, 19 nt, Human
aaagguuguuuugaaacug

SEQ ID NO: 3507918 - RNA, 13 nt, Human
aaagguuuaaaug

SEQ ID NO: 3507919 - RNA, 14 nt, Human
aaagguuuaaauga

SEQ ID NO: 3507920 - RNA, 21 nt, Human
aaagguuuaaaugaacaagag

SEQ ID NO: 3507921 - RNA, 18 nt, Human
aaagguuuaugaaaaaga

SEQ ID NO: 3507922 - RNA, 19 nt, Human
aaagguuuaugaaaaagaa

SEQ ID NO: 3507923 - RNA, 21 nt, Human
aaagguuuggaaggagcagaa

SEQ ID NO: 3507924 - RNA, 21 nt, Human
aaaguaaaccacaaaaaaaua

SEQ ID NO: 3507925 - RNA, 23 nt, Human
aaaguaaagcuaaaaugauuuua

SEQ ID NO: 3507926 - RNA, 15 nt, Human
aaaguaacucauuug

SEQ ID NO: 3507927 - RNA, 18 nt, Human
aaaguaacucauuuguua

SEQ ID NO: 3507928 - RNA, 19 nt, Human
aaaguaagcccuugaagau

SEQ ID NO: 3507929 - RNA, 14 nt, Human
aaaguaaggugcag

SEQ ID NO: 3507930 - RNA, 22 nt, Human
aaaguaauuuggaaauuagguu

SEQ ID NO: 3507931 - RNA, 19 nt, Human
aaaguacaaccauagagga

SEQ ID NO: 3507932 - RNA, 17 nt, Human
aaaguacacucugcugu

SEQ ID NO: 3507933 - RNA, 13 nt, Human
aaaguacagaauu

SEQ ID NO: 3507934 - RNA, 15 nt, Human
aaaguacagaauuug

SEQ ID NO: 3507935 - RNA, 12 nt, Human
aaaguacauuua

SEQ ID NO: 3507936 - RNA, 11 nt, Human
aaaguacugua

SEQ ID NO: 3507937 - RNA, 19 nt, Human
aaaguacuucuccacccug

SEQ ID NO: 3507938 - RNA, 21 nt, Human
aaaguacuucuccacccugcu

SEQ ID NO: 3507939 - RNA, 23 nt, Human
aaaguacuucuccacccugcucu

SEQ ID NO: 3507940 - RNA, 16 nt, Human
aaaguacuuguaguuc

SEQ ID NO: 3507941 - RNA, 18 nt, Human
aaaguagaacuuuguaua

SEQ ID NO: 3507942 - RNA, 21 nt, Human
aaaguagaacuuuguauaguu

SEQ ID NO: 3507943 - RNA, 22 nt, Human
aaaguagaagucuuagauguau

SEQ ID NO: 3507944 - RNA, 20 nt, Human
aaaguagacaaucauuguuu

SEQ ID NO: 3507945 - RNA, 12 nt, Human
aaaguaguacuu

SEQ ID NO: 3507946 - RNA, 20 nt, Human
aaaguauaauguuuauuaaa

SEQ ID NO: 3507947 - RNA, 22 nt, Human
aaaguauaauguuuauuaaaug

SEQ ID NO: 3507948 - RNA, 22 nt, Human
aaaguauauauauauauuauau

SEQ ID NO: 3507949 - RNA, 14 nt, Human
aaaguauauauuua

SEQ ID NO: 3507950 - RNA, 23 nt, Human
aaaguauauauuuauuuaagcuu

SEQ ID NO: 3507951 - RNA, 14 nt, Human
aaaguaucauggaa

SEQ ID NO: 3507952 - RNA, 21 nt, Human
aaaguauccugcuucugauau

SEQ ID NO: 3507953 - RNA, 15 nt, Human
aaaguaucgggggcu

SEQ ID NO: 3507954 - RNA, 20 nt, Human
aaaguaucgggggcuggggc

SEQ ID NO: 3507955 - RNA, 18 nt, Human
aaaguaugcauuauuaaa

SEQ ID NO: 3507956 - RNA, 19 nt, Human
aaaguaugguauugaaacu

SEQ ID NO: 3507957 - RNA, 20 nt, Human
aaaguauguaaaguauguaa

SEQ ID NO: 3507958 - RNA, 16 nt, Human
aaaguauguauuauuu

SEQ ID NO: 3507959 - RNA, 17 nt, Human
aaaguauguuagugcaa

SEQ ID NO: 3507960 - RNA, 19 nt, Human
aaaguauguucuaaccuuu

SEQ ID NO: 3507961 - RNA, 18 nt, Human
aaaguauuaagcauauau

SEQ ID NO: 3507962 - RNA, 16 nt, Human
aaaguauucuuuuucu

SEQ ID NO: 3507963 - RNA, 19 nt, Human
aaaguauuuaauuagugcu

SEQ ID NO: 3507964 - RNA, 10 nt, Human
aaaguauuuu

SEQ ID NO: 3507965 - RNA, 19 nt, Human
aaaguauuuuauucuuauu

SEQ ID NO: 3507966 - RNA, 14 nt, Human
aaaguauuuugaag

SEQ ID NO: 3507967 - RNA, 21 nt, Human
aaaguauuuugaaguuuacau

SEQ ID NO: 3507968 - RNA, 22 nt, Human
aaaguauuuugaaguuuacauu

SEQ ID NO: 3507969 - RNA, 18 nt, Human
aaagucaaaaggugccug

SEQ ID NO: 3507970 - RNA, 13 nt, Human
aaagucagagaca

SEQ ID NO: 3507971 - RNA, 15 nt, Human
aaagucaugauguuu

SEQ ID NO: 3507972 - RNA, 16 nt, Human
aaagucauuaaagaca

SEQ ID NO: 3507973 - RNA, 14 nt, Human
aaagucauuggcuu

SEQ ID NO: 3507974 - RNA, 18 nt, Human
aaaguccuuuuuuuccau

SEQ ID NO: 3507975 - RNA, 16 nt, Human
aaagucuaaaguuuac

SEQ ID NO: 3507976 - RNA, 22 nt, Human
aaagucuaaaguuuacaguaaa

SEQ ID NO: 3507977 - RNA, 12 nt, Human
aaagucuccagc

SEQ ID NO: 3507978 - RNA, 15 nt, Human
aaagucucuaauucu

SEQ ID NO: 3507979 - RNA, 18 nt, Human
aaagucucuaauucuauu

SEQ ID NO: 3507980 - RNA, 12 nt, Human
aaagucucuauu

SEQ ID NO: 3507981 - RNA, 20 nt, Human
aaagucucuggaauuugaaa

SEQ ID NO: 3507982 - RNA, 22 nt, Human
aaagucucuggaauuugaaaca

SEQ ID NO: 3507983 - RNA, 11 nt, Human
aaagucugcaa

SEQ ID NO: 3507984 - RNA, 13 nt, Human
aaagucuugcugu

SEQ ID NO: 3507985 - RNA, 23 nt, Human
aaagucuugcuguggucucuuug

SEQ ID NO: 3507986 - RNA, 23 nt, Human
aaagucuugugacuagugcugaa

SEQ ID NO: 3507987 - RNA, 14 nt, Human
aaagugaauaaacu

SEQ ID NO: 3507988 - RNA, 15 nt, Human
aaagugaauaaacuu

SEQ ID NO: 3507989 - RNA, 15 nt, Human
aaagugaauuugaau

SEQ ID NO: 3507990 - RNA, 20 nt, Human
aaagugaauuugaaugaaaa

SEQ ID NO: 3507991 - RNA, 22 nt, Human
aaagugaauuugaaugaaaaau

SEQ ID NO: 3507992 - RNA, 19 nt, Human
aaagugagaaaacugugac

SEQ ID NO: 3507993 - RNA, 23 nt, Human
aaagugagacuuugaggguguau

SEQ ID NO: 3507994 - RNA, 14 nt, Human
aaagugagagcacg

SEQ ID NO: 3507995 - RNA, 19 nt, Human
aaagugaggccacugaaga

SEQ ID NO: 3507996 - RNA, 20 nt, Human
aaagugagggccgagugaga

SEQ ID NO: 3507997 - RNA, 21 nt, Human
aaagugaugggcuuucucuuu

SEQ ID NO: 3507998 - RNA, 12 nt, Human
aaagugauuucu

SEQ ID NO: 3507999 - RNA, 13 nt, Human
aaagugcacaccu

SEQ ID NO: 3508000 - RNA, 18 nt, Human
aaagugcauauuuaucca

SEQ ID NO: 3508001 - RNA, 19 nt, Human
aaagugccaguauuuuaaa

SEQ ID NO: 3508002 - RNA, 14 nt, Human
aaagugccuuucag

SEQ ID NO: 3508003 - RNA, 19 nt, Human
aaagugccuuucaggaucu

SEQ ID NO: 3508004 - RNA, 20 nt, Human
aaagugccuuucaggaucua

SEQ ID NO: 3508005 - RNA, 17 nt, Human
aaagugcuaagguucua

SEQ ID NO: 3508006 - RNA, 18 nt, Human
aaagugcuaagguucuaa

SEQ ID NO: 3508007 - RNA, 20 nt, Human
aaagugcuaagguucuaagg

SEQ ID NO: 3508008 - RNA, 23 nt, Human
aaagugcuaagguucuaaggccu

SEQ ID NO: 3508009 - RNA, 20 nt, Human
aaagugcugcagggcuuuaa

SEQ ID NO: 3508010 - RNA, 22 nt, Human
aaagugcugcagggcuuuaaaa

SEQ ID NO: 3508011 - RNA, 15 nt, Human
aaagugcuuguguaa

SEQ ID NO: 3508012 - RNA, 16 nt, Human
aaagugcuuguguaau

SEQ ID NO: 3508013 - RNA, 21 nt, Human
aaagugcuuuccagaauaaua

SEQ ID NO: 3508014 - RNA, 14 nt, Human
aaaguggaaggaaa

SEQ ID NO: 3508015 - RNA, 18 nt, Human
aaaguggaauuucuuguu

SEQ ID NO: 3508016 - RNA, 19 nt, Human
aaaguggaauuucuuguuu

SEQ ID NO: 3508017 - RNA, 19 nt, Human
aaaguggcaagaccaaaau

SEQ ID NO: 3508018 - RNA, 18 nt, Human
cccacauccaacuccagc

SEQ ID NO: 3508019 - RNA, 13 nt, Human
cccacaucccagg

SEQ ID NO: 3508020 - RNA, 14 nt, Human
cccacaucccaggc

SEQ ID NO: 3508021 - RNA, 23 nt, Human
cccacaucccugggccugcugcu

SEQ ID NO: 3508022 - RNA, 17 nt, Human
cccacauguguccaucc

SEQ ID NO: 3508023 - RNA, 18 nt, Human
cccacauguguccauccc

SEQ ID NO: 3508024 - RNA, 14 nt, Human
cccacauuaaagaa

SEQ ID NO: 3508025 - RNA, 20 nt, Human
cccacauuggaagagcagca

SEQ ID NO: 3508026 - RNA, 14 nt, Human
cccacauuggaccc

SEQ ID NO: 3508027 - RNA, 23 nt, Human
cccacauuugugccgacacuguu

SEQ ID NO: 3508028 - RNA, 21 nt, Human
cccaccaacaucccauugccc

SEQ ID NO: 3508029 - RNA, 11 nt, Human
cccaccacaca

SEQ ID NO: 3508030 - RNA, 13 nt, Human
cccaccacacauc

SEQ ID NO: 3508031 - RNA, 12 nt, Human
cccaccacagca

SEQ ID NO: 3508032 - RNA, 13 nt, Human
cccaccacagcag

SEQ ID NO: 3508033 - RNA, 18 nt, Human
cccaccaccccagcugcu

SEQ ID NO: 3508034 - RNA, 14 nt, Human
cccaccagugccuc

SEQ ID NO: 3508035 - RNA, 16 nt, Human
cccaccagugccucuc

SEQ ID NO: 3508036 - RNA, 23 nt, Human
cccaccagugccucucccugcug

SEQ ID NO: 3508037 - RNA, 12 nt, Human
cccaccaucugc

SEQ ID NO: 3508038 - RNA, 16 nt, Human
cccacccaagcuuggc

SEQ ID NO: 3508039 - RNA, 18 nt, Human
cccacccaagggccuggc

SEQ ID NO: 3508040 - RNA, 22 nt, Human
cccacccaagggccuggccuga

SEQ ID NO: 3508041 - RNA, 22 nt, Human
cccacccacaauccuauucucg

SEQ ID NO: 3508042 - RNA, 14 nt, Human
cccacccacaugug

SEQ ID NO: 3508043 - RNA, 15 nt, Human
cccacccacauguga

SEQ ID NO: 3508044 - RNA, 12 nt, Human
cccacccaggag

SEQ ID NO: 3508045 - RNA, 20 nt, Human
cccacccagucucugcucca

SEQ ID NO: 3508046 - RNA, 19 nt, Human
cccaccccaaccugcucuc

SEQ ID NO: 3508047 - RNA, 12 nt, Human
cccaccccacac

SEQ ID NO: 3508048 - RNA, 15 nt, Human
cccaccccacccccu

SEQ ID NO: 3508049 - RNA, 17 nt, Human
cccaccccauggccggc

SEQ ID NO: 3508050 - RNA, 17 nt, Human
cccaccccauucccgca

SEQ ID NO: 3508051 - RNA, 14 nt, Human
cccacccccggcag

SEQ ID NO: 3508052 - RNA, 12 nt, Human
cccacccccuca

SEQ ID NO: 3508053 - RNA, 16 nt, Human
cccacccccugcccug

SEQ ID NO: 3508054 - RNA, 19 nt, Human
cccacccccugcccugcac

SEQ ID NO: 3508055 - RNA, 19 nt, Human
cccacccccuucagugccc

SEQ ID NO: 3508056 - RNA, 23 nt, Human
cccacccccuucagugcccacca

SEQ ID NO: 3508057 - RNA, 19 nt, Human
cccacccccuucucugcuc

SEQ ID NO: 3508058 - RNA, 13 nt, Human
cccaccccgggga

SEQ ID NO: 3508059 - RNA, 14 nt, Human
cccaccccggggac

SEQ ID NO: 3508060 - RNA, 17 nt, Human
cccaccccggggacccu

SEQ ID NO: 3508061 - RNA, 18 nt, Human
cccaccccggggacccug

SEQ ID NO: 3508062 - RNA, 12 nt, Human
cccaccccugca

SEQ ID NO: 3508063 - RNA, 15 nt, Human
cccaccccugcacag

SEQ ID NO: 3508064 - RNA, 16 nt, Human
cccaccccugccccca

SEQ ID NO: 3508065 - RNA, 15 nt, Human
cccaccccuggaaga

SEQ ID NO: 3508066 - RNA, 22 nt, Human
cccaccccugggggcucucaug

SEQ ID NO: 3508067 - RNA, 12 nt, Human
cccaccccugug

SEQ ID NO: 3508068 - RNA, 15 nt, Human
cccaccccuucccca

SEQ ID NO: 3508069 - RNA, 16 nt, Human
cccacccgaugcugcu

SEQ ID NO: 3508070 - RNA, 16 nt, Human
cccacccucagcaccc

SEQ ID NO: 3508071 - RNA, 17 nt, Human
cccacccucagcacccc

SEQ ID NO: 3508072 - RNA, 18 nt, Human
cccacccucccuggagug

SEQ ID NO: 3508073 - RNA, 13 nt, Human
cccacccuccugg

SEQ ID NO: 3508074 - RNA, 21 nt, Human
cccacccucggggaugugucc

SEQ ID NO: 3508075 - RNA, 13 nt, Human
cccacccucuucc

SEQ ID NO: 3508076 - RNA, 14 nt, Human
cccacccugcugcc

SEQ ID NO: 3508077 - RNA, 15 nt, Human
cccacccugcugcug

SEQ ID NO: 3508078 - RNA, 13 nt, Human
cccacccuggccu

SEQ ID NO: 3508079 - RNA, 14 nt, Human
cccacccugggacc

SEQ ID NO: 3508080 - RNA, 14 nt, Human
cccacccugggccc

SEQ ID NO: 3508081 - RNA, 15 nt, Human
cccacccugggcucu

SEQ ID NO: 3508082 - RNA, 18 nt, Human
cccacccuggugggccaa

SEQ ID NO: 3508083 - RNA, 12 nt, Human
cccacccuguuc

SEQ ID NO: 3508084 - RNA, 16 nt, Human
cccacccuguuccugc

SEQ ID NO: 3508085 - RNA, 19 nt, Human
cccacccuguuccugcugc

SEQ ID NO: 3508086 - RNA, 20 nt, Human
cccaccgcagacaggaccag

SEQ ID NO: 3508087 - RNA, 17 nt, Human
cccaccgggccacuccu

SEQ ID NO: 3508088 - RNA, 18 nt, Human
cccaccgggccacuccuu

SEQ ID NO: 3508089 - RNA, 15 nt, Human
cccaccguccgcccu

SEQ ID NO: 3508090 - RNA, 21 nt, Human
cccaccguccgcccugcuccu

SEQ ID NO: 3508091 - RNA, 23 nt, Human
cccaccguccgcccugcuccucc

SEQ ID NO: 3508092 - RNA, 17 nt, Human
cccaccguugucucaug

SEQ ID NO: 3508093 - RNA, 14 nt, Human
cccaccuaccuuca

SEQ ID NO: 3508094 - RNA, 20 nt, Human
cccaccuaccuucaaagcug

SEQ ID NO: 3508095 - RNA, 21 nt, Human
cccaccuagaacacuaacuca

SEQ ID NO: 3508096 - RNA, 16 nt, Human
cccaccuaugugccaa

SEQ ID NO: 3508097 - RNA, 21 nt, Human
cccaccucaaaugggucuggg

SEQ ID NO: 3508098 - RNA, 15 nt, Human
cccaccucagccucc

SEQ ID NO: 3508099 - RNA, 17 nt, Human
cccaccucagccucccg

SEQ ID NO: 3508100 - RNA, 17 nt, Human
cccaccucagccuccug

SEQ ID NO: 3508101 - RNA, 14 nt, Human
cccaccuccagccc

SEQ ID NO: 3508102 - RNA, 10 nt, Human
cccaccuccc

SEQ ID NO: 3508103 - RNA, 15 nt, Human
ccccuccaauccugc

SEQ ID NO: 3508104 - RNA, 17 nt, Human
ccccuccaauccugccc

SEQ ID NO: 3508105 - RNA, 11 nt, Human
ccccuccagcu

SEQ ID NO: 3508106 - RNA, 12 nt, Human
ccccuccaugug

SEQ ID NO: 3508107 - RNA, 21 nt, Human
ccccucccacacccaaagcug

SEQ ID NO: 3508108 - RNA, 16 nt, Human
ccccucccaccacagc

SEQ ID NO: 3508109 - RNA, 12 nt, Human
ccccucccaccc

SEQ ID NO: 3508110 - RNA, 17 nt, Human
ccccucccacccccagc

SEQ ID NO: 3508111 - RNA, 14 nt, Human
ccccucccagaggc

SEQ ID NO: 3508112 - RNA, 13 nt, Human
ccccucccaggga

SEQ ID NO: 3508113 - RNA, 14 nt, Human
ccccucccagggcc

SEQ ID NO: 3508114 - RNA, 14 nt, Human
ccccucccaucugg

SEQ ID NO: 3508115 - RNA, 11 nt, Human
ccccucccauu

SEQ ID NO: 3508116 - RNA, 15 nt, Human
ccccuccccagggga

SEQ ID NO: 3508117 - RNA, 21 nt, Human
ccccuccccaugcagguggug

SEQ ID NO: 3508118 - RNA, 15 nt, Human
ccccucccccaaccc

SEQ ID NO: 3508119 - RNA, 13 nt, Human
ccccuccccugcu

SEQ ID NO: 3508120 - RNA, 17 nt, Human
ccccucccgccccuucc

SEQ ID NO: 3508121 - RNA, 14 nt, Human
ccccucccucucca

SEQ ID NO: 3508122 - RNA, 13 nt, Human
ccccucccucugu

SEQ ID NO: 3508123 - RNA, 14 nt, Human
ccccucccucuguc

SEQ ID NO: 3508124 - RNA, 12 nt, Human
ccccucccuggc

SEQ ID NO: 3508125 - RNA, 17 nt, Human
ccccucccuggccuguu

SEQ ID NO: 3508126 - RNA, 12 nt, Human
ccccucccuuuc

SEQ ID NO: 3508127 - RNA, 15 nt, Human
ccccucccuuucucc

SEQ ID NO: 3508128 - RNA, 23 nt, Human
ccccuccuaccccucccagcuga

SEQ ID NO: 3508129 - RNA, 12 nt, Human
ccccuccucacu

SEQ ID NO: 3508130 - RNA, 12 nt, Human
ccccuccuccac

SEQ ID NO: 3508131 - RNA, 18 nt, Human
ccccuccuccuggacucc

SEQ ID NO: 3508132 - RNA, 21 nt, Human
ccccuccucuagcuguggggg

SEQ ID NO: 3508133 - RNA, 11 nt, Human
ccccuccucuc

SEQ ID NO: 3508134 - RNA, 13 nt, Human
ccccuccucuccc

SEQ ID NO: 3508135 - RNA, 13 nt, Human
ccccuccucucug

SEQ ID NO: 3508136 - RNA, 17 nt, Human
ccccuccucucugcccu

SEQ ID NO: 3508137 - RNA, 13 nt, Human
ccccuccugcugc

SEQ ID NO: 3508138 - RNA, 11 nt, Human
ccccuccuggg

SEQ ID NO: 3508139 - RNA, 20 nt, Human
ccccuccuucccagcugccc

SEQ ID NO: 3508140 - RNA, 12 nt, Human
ccccuccuucuc

SEQ ID NO: 3508141 - RNA, 15 nt, Human
ccccuccuugggcac

SEQ ID NO: 3508142 - RNA, 22 nt, Human
ccccucgcccagucccagcagc

SEQ ID NO: 3508143 - RNA, 23 nt, Human
ccccucgcccagucccagcagcc

SEQ ID NO: 3508144 - RNA, 15 nt, Human
ccccucgugccaguc

SEQ ID NO: 3508145 - RNA, 15 nt, Human
ccccucucagcccuc

SEQ ID NO: 3508146 - RNA, 16 nt, Human
ccccucucaggagcca

SEQ ID NO: 3508147 - RNA, 20 nt, Human
ccccucuccaggcgccggcg

SEQ ID NO: 3508148 - RNA, 14 nt, Human
ccccucucccugca

SEQ ID NO: 3508149 - RNA, 18 nt, Human
ccccucucccugcauggc

SEQ ID NO: 3508150 - RNA, 12 nt, Human
ccccucucccuu

SEQ ID NO: 3508151 - RNA, 19 nt, Human
ccccucuccuuccugugug

SEQ ID NO: 3508152 - RNA, 12 nt, Human
ccccucucuccu

SEQ ID NO: 3508153 - RNA, 11 nt, Human
ccccucucugg

SEQ ID NO: 3508154 - RNA, 20 nt, Human
ccccucugaaaguuguacau

SEQ ID NO: 3508155 - RNA, 19 nt, Human
ccccucugcacccagaaca

SEQ ID NO: 3508156 - RNA, 15 nt, Human
ccccucugcccagcu

SEQ ID NO: 3508157 - RNA, 17 nt, Human
ccccucugcccagcuug

SEQ ID NO: 3508158 - RNA, 13 nt, Human
ccccucugcccug

SEQ ID NO: 3508159 - RNA, 14 nt, Human
ccccucugcccugc

SEQ ID NO: 3508160 - RNA, 15 nt, Human
ccccucugcccugcg

SEQ ID NO: 3508161 - RNA, 20 nt, Human
ccccucugcccugcggguca

SEQ ID NO: 3508162 - RNA, 23 nt, Human
ccccucugcccugcgggucacag

SEQ ID NO: 3508163 - RNA, 13 nt, Human
ccccucuggccag

SEQ ID NO: 3508164 - RNA, 16 nt, Human
ccccucuggcuccagc

SEQ ID NO: 3508165 - RNA, 12 nt, Human
ccccucuucccu

SEQ ID NO: 3508166 - RNA, 15 nt, Human
cccagcauucucagg

SEQ ID NO: 3508167 - RNA, 18 nt, Human
cccagcauugcugguucu

SEQ ID NO: 3508168 - RNA, 20 nt, Human
cccagcauuuuacugauuca

SEQ ID NO: 3508169 - RNA, 14 nt, Human
cccagccacucccc

SEQ ID NO: 3508170 - RNA, 17 nt, Human
cccagccagaguuccug

SEQ ID NO: 3508171 - RNA, 18 nt, Human
cccagccagaguuccugc

SEQ ID NO: 3508172 - RNA, 20 nt, Human
cccagccagcaguucagagc

SEQ ID NO: 3508173 - RNA, 11 nt, Human
cccagccagcg

SEQ ID NO: 3508174 - RNA, 23 nt, Human
cccagccagcgucggucugugcc

SEQ ID NO: 3508175 - RNA, 13 nt, Human
cccagccaggccc

SEQ ID NO: 3508176 - RNA, 14 nt, Human
cccagccaggcccu

SEQ ID NO: 3508177 - RNA, 21 nt, Human
cccagccagggcucaaucucu

SEQ ID NO: 3508178 - RNA, 15 nt, Human
cccagccaucugccc

SEQ ID NO: 3508179 - RNA, 16 nt, Human
cccagccaucugccca

SEQ ID NO: 3508180 - RNA, 20 nt, Human
cccagccaucugcccagggg

SEQ ID NO: 3508181 - RNA, 22 nt, Human
cccagccaugccagcuggccuu

SEQ ID NO: 3508182 - RNA, 13 nt, Human
cccagcccaaagg

SEQ ID NO: 3508183 - RNA, 19 nt, Human
cccagcccaauccagguac

SEQ ID NO: 3508184 - RNA, 15 nt, Human
cccagcccacccccg

SEQ ID NO: 3508185 - RNA, 15 nt, Human
cccagcccacccucc

SEQ ID NO: 3508186 - RNA, 17 nt, Human
cccagcccacuucugcc

SEQ ID NO: 3508187 - RNA, 12 nt, Human
cccagcccagag

SEQ ID NO: 3508188 - RNA, 14 nt, Human
cccagcccagagac

SEQ ID NO: 3508189 - RNA, 20 nt, Human
cccagcccagauuccccugu

SEQ ID NO: 3508190 - RNA, 16 nt, Human
cccagcccagcuggug

SEQ ID NO: 3508191 - RNA, 13 nt, Human
cccagcccaucuu

SEQ ID NO: 3508192 - RNA, 22 nt, Human
cccagcccauucucucuccugu

SEQ ID NO: 3508193 - RNA, 23 nt, Human
cccagccccaaaacucuccucug

SEQ ID NO: 3508194 - RNA, 13 nt, Human
cccagccccaaug

SEQ ID NO: 3508195 - RNA, 16 nt, Human
cccagccccacuccuc

SEQ ID NO: 3508196 - RNA, 12 nt, Human
cccagccccagc

SEQ ID NO: 3508197 - RNA, 18 nt, Human
cccagccccauccucugu

SEQ ID NO: 3508198 - RNA, 19 nt, Human
cccagccccauccucugua

SEQ ID NO: 3508199 - RNA, 12 nt, Human
cccagcccccac

SEQ ID NO: 3508200 - RNA, 24 nt, Human
cccagcccccacagugcugucuga

SEQ ID NO: 3508201 - RNA, 15 nt, Human
cccagcccccuuugg

SEQ ID NO: 3508202 - RNA, 17 nt, Human
cccagccccgacuccag

SEQ ID NO: 3508203 - RNA, 18 nt, Human
cccagccccgacuccagc

SEQ ID NO: 3508204 - RNA, 19 nt, Human
cccagccccgacuccagcc

SEQ ID NO: 3508205 - RNA, 15 nt, Human
cccagccccggggug

SEQ ID NO: 3508206 - RNA, 20 nt, Human
cccagccccgguggcugggc

SEQ ID NO: 3508207 - RNA, 11 nt, Human
cccagccccua

SEQ ID NO: 3508208 - RNA, 18 nt, Human
cccagccccuagcccagg

SEQ ID NO: 3508209 - RNA, 16 nt, Human
cccagccccugccccu

SEQ ID NO: 3508210 - RNA, 14 nt, Human
cccagcccggcucc

SEQ ID NO: 3508211 - RNA, 18 nt, Human
cccagcccuauggaugug

SEQ ID NO: 3508212 - RNA, 15 nt, Human
cccagcccucauccc

SEQ ID NO: 3508213 - RNA, 16 nt, Human
cccagcccucaucccg

SEQ ID NO: 3508214 - RNA, 22 nt, Human
cccagcccugcagcaaggagga

SEQ ID NO: 3508215 - RNA, 11 nt, Human
cccagcccugg

SEQ ID NO: 3508216 - RNA, 12 nt, Human
cccagcccuggc

SEQ ID NO: 3508217 - RNA, 21 nt, Human
cccagcccuggucucagcagc

SEQ ID NO: 3508218 - RNA, 22 nt, Human
cccagcccuuugggaggcugag

SEQ ID NO: 3508219 - RNA, 22 nt, Human
cccagccgacccccucucccug

SEQ ID NO: 3508220 - RNA, 14 nt, Human
cccagccgcucgga

SEQ ID NO: 3508221 - RNA, 14 nt, Human
cccagccgcugccc

SEQ ID NO: 3508222 - RNA, 23 nt, Human
cccagccgcuuggcgaugccagc

SEQ ID NO: 3508223 - RNA, 20 nt, Human
cccagccggccucucuggcc

SEQ ID NO: 3508224 - RNA, 22 nt, Human
cccagccggccucucuggccuc

SEQ ID NO: 3508225 - RNA, 15 nt, Human
cccagccuaugagca

SEQ ID NO: 3508226 - RNA, 13 nt, Human
cccagccucagcg

SEQ ID NO: 3508227 - RNA, 16 nt, Human
cccagccucaguccuc

SEQ ID NO: 3508228 - RNA, 15 nt, Human
cccagccucuaggga

SEQ ID NO: 3508229 - RNA, 21 nt, Human
cccagccucucuuccuauccc

SEQ ID NO: 3508230 - RNA, 13 nt, Human
cccagccucuuuc

SEQ ID NO: 3508231 - RNA, 16 nt, Human
cccagccucuuucccu

SEQ ID NO: 3508232 - RNA, 23 nt, Human
cccagccugcgccugcugcaugc

SEQ ID NO: 3508233 - RNA, 11 nt, Human
cccagccugcu

SEQ ID NO: 3508234 - RNA, 14 nt, Human
cccagccugcuagc

SEQ ID NO: 3508235 - RNA, 15 nt, Human
cccagccugcuagcu

SEQ ID NO: 3508236 - RNA, 20 nt, Human
cccagccuggccacgcagcc

SEQ ID NO: 3508237 - RNA, 13 nt, Human
cccagccugggcc

SEQ ID NO: 3508238 - RNA, 15 nt, Human
cccagccugggccca

SEQ ID NO: 3508239 - RNA, 23 nt, Human
cccagccugggcccaucucccug

SEQ ID NO: 3508240 - RNA, 14 nt, Human
cccagccugggccu

SEQ ID NO: 3508241 - RNA, 10 nt, Human
cccagccugu

SEQ ID NO: 3508242 - RNA, 17 nt, Human
cccagcgagcccuggug

SEQ ID NO: 3508243 - RNA, 23 nt, Human
cccagcgagcccugguggcagug

SEQ ID NO: 3508244 - RNA, 21 nt, Human
cccagcgcugacgugucagga

SEQ ID NO: 3508245 - RNA, 15 nt, Human
cccagcggacacacg

SEQ ID NO: 3508246 - RNA, 16 nt, Human
cccagcggcaucaggc

SEQ ID NO: 3508247 - RNA, 18 nt, Human
cccagcggccccucccac

SEQ ID NO: 3508248 - RNA, 19 nt, Human
cccagcggccccucccaca

SEQ ID NO: 3508249 - RNA, 17 nt, Human
cccagcggcuggugcag

SEQ ID NO: 3508250 - RNA, 16 nt, Human
cccagcuaagaaccug

SEQ ID NO: 3508251 - RNA, 18 nt, Human
cccagcuaaucuguaggg

SEQ ID NO: 3508252 - RNA, 22 nt, Human
cccagcuacccuuuuucuccag

SEQ ID NO: 3508253 - RNA, 14 nt, Human
cccagcuaccucaa

SEQ ID NO: 3508254 - RNA, 17 nt, Human
cccagcuacucagaagc

SEQ ID NO: 3508255 - RNA, 21 nt, Human
cccagcuacucagaagccuga

SEQ ID NO: 3508256 - RNA, 15 nt, Human
cccagcuacucagga

SEQ ID NO: 3508257 - RNA, 22 nt, Human
cccagcuacucgggaggcugag

SEQ ID NO: 3508258 - RNA, 16 nt, Human
cccagcuacuugggaa

SEQ ID NO: 3508259 - RNA, 18 nt, Human
cccagcuacuugggaagc

SEQ ID NO: 3508260 - RNA, 19 nt, Human
cccagcuacuugggaagcu

SEQ ID NO: 3508261 - RNA, 18 nt, Human
cccagcuacuugggaggc

SEQ ID NO: 3508262 - RNA, 23 nt, Human
cccagcuacuugggaggcugagg

SEQ ID NO: 3508263 - RNA, 18 nt, Human
cccagcuaggaagagcag

SEQ ID NO: 3508264 - RNA, 23 nt, Human
cccagcuaggaagagcaggacuc

SEQ ID NO: 3508265 - RNA, 12 nt, Human
cccagcucagca

SEQ ID NO: 3508266 - RNA, 17 nt, Human
cccagcucaggggcagc

SEQ ID NO: 3508267 - RNA, 18 nt, Human
cccagcucagucuucccu

SEQ ID NO: 3508268 - RNA, 14 nt, Human
cccagcuccacccc

SEQ ID NO: 3508269 - RNA, 11 nt, Human
cccagcuccag

SEQ ID NO: 3508270 - RNA, 17 nt, Human
cccagcuccagggccag

SEQ ID NO: 3508271 - RNA, 18 nt, Human
cccagcuccagggccaga

SEQ ID NO: 3508272 - RNA, 14 nt, Human
cccagcucccagga

SEQ ID NO: 3508273 - RNA, 14 nt, Human
cccagcucuagaca

SEQ ID NO: 3508274 - RNA, 23 nt, Human
cccagcucuagacaacccugcaa

SEQ ID NO: 3508275 - RNA, 12 nt, Human
cccagcucuccc

SEQ ID NO: 3508276 - RNA, 11 nt, Human
cccgcuugccu

SEQ ID NO: 3508277 - RNA, 22 nt, Human
cccgcuugccucggcuccugcu

SEQ ID NO: 3508278 - RNA, 15 nt, Human
cccgcuuguccagcg

SEQ ID NO: 3508279 - RNA, 19 nt, Human
cccggaauuccgucaccac

SEQ ID NO: 3508280 - RNA, 23 nt, Human
cccggagaagugugccuucucuc

SEQ ID NO: 3508281 - RNA, 20 nt, Human
cccggagcuaacacuggccc

SEQ ID NO: 3508282 - RNA, 22 nt, Human
cccggagcugccccucucuggg

SEQ ID NO: 3508283 - RNA, 15 nt, Human
cccggaggaaaucug

SEQ ID NO: 3508284 - RNA, 22 nt, Human
cccggaggaaaucugcagaggg

SEQ ID NO: 3508285 - RNA, 16 nt, Human
cccggauucugggagg

SEQ ID NO: 3508286 - RNA, 17 nt, Human
cccggcacccucuggcc

SEQ ID NO: 3508287 - RNA, 14 nt, Human
cccggcaggcccug

SEQ ID NO: 3508288 - RNA, 15 nt, Human
cccggcaggcccugc

SEQ ID NO: 3508289 - RNA, 18 nt, Human
cccggcaggcccugcagu

SEQ ID NO: 3508290 - RNA, 19 nt, Human
cccggcaggcccugcagug

SEQ ID NO: 3508291 - RNA, 20 nt, Human
cccggcaugagacucagugc

SEQ ID NO: 3508292 - RNA, 23 nt, Human
cccggcaugagacucagugcaga

SEQ ID NO: 3508293 - RNA, 13 nt, Human
cccggccaccucu

SEQ ID NO: 3508294 - RNA, 15 nt, Human
cccggccaccucugc

SEQ ID NO: 3508295 - RNA, 16 nt, Human
cccggccccagccaga

SEQ ID NO: 3508296 - RNA, 15 nt, Human
cccggcccccugccc

SEQ ID NO: 3508297 - RNA, 13 nt, Human
cccggcccccugg

SEQ ID NO: 3508298 - RNA, 21 nt, Human
cccggcccccuggucucuggu

SEQ ID NO: 3508299 - RNA, 16 nt, Human
cccggccccugcuggu

SEQ ID NO: 3508300 - RNA, 18 nt, Human
cccggccgccgcccugcu

SEQ ID NO: 3508301 - RNA, 18 nt, Human
cccggccucagcaccccu

SEQ ID NO: 3508302 - RNA, 15 nt, Human
cccggcgcccucugu

SEQ ID NO: 3508303 - RNA, 16 nt, Human
cccggcgcccucuguc

SEQ ID NO: 3508304 - RNA, 18 nt, Human
cccggcgcccucuguccu

SEQ ID NO: 3508305 - RNA, 19 nt, Human
cccggcgcgguggcucacg

SEQ ID NO: 3508306 - RNA, 22 nt, Human
cccggcgcgguggcucacgccu

SEQ ID NO: 3508307 - RNA, 11 nt, Human
cccggcuccag

SEQ ID NO: 3508308 - RNA, 13 nt, Human
cccggcuccaggc

SEQ ID NO: 3508309 - RNA, 13 nt, Human
cccggcuccuggu

SEQ ID NO: 3508310 - RNA, 17 nt, Human
cccggcugguuuuguaa

SEQ ID NO: 3508311 - RNA, 18 nt, Human
cccggcuuuggugcgggg

SEQ ID NO: 3508312 - RNA, 15 nt, Human
cccccuccugcugca

SEQ ID NO: 3508313 - RNA, 19 nt, Human
cccccuccuucccagcugc

SEQ ID NO: 3508314 - RNA, 17 nt, Human
cccccucucaggagcca

SEQ ID NO: 3508315 - RNA, 13 nt, Human
cccccucugcccu

SEQ ID NO: 3508316 - RNA, 21 nt, Human
cccccugcaaagcccagcuug

SEQ ID NO: 3508317 - RNA, 12 nt, Human
cccccugcagcu

SEQ ID NO: 3508318 - RNA, 23 nt, Human
cccccugcagcuuguagccagcc

SEQ ID NO: 3508319 - RNA, 13 nt, Human
cccccugcccucc

SEQ ID NO: 3508320 - RNA, 22 nt, Human
cccccugcccucguggccagcc

SEQ ID NO: 3508321 - RNA, 12 nt, Human
cccccugcccug

SEQ ID NO: 3508322 - RNA, 14 nt, Human
cccccugcccugca

SEQ ID NO: 3508323 - RNA, 15 nt, Human
cccccugcuggcucu

SEQ ID NO: 3508324 - RNA, 20 nt, Human
cccccugcuggcucuucugc

SEQ ID NO: 3508325 - RNA, 19 nt, Human
cccccuggccucugugccu

SEQ ID NO: 3508326 - RNA, 22 nt, Human
cccccuggccucugugccuucu

SEQ ID NO: 3508327 - RNA, 19 nt, Human
cccccuggggcuucuccug

SEQ ID NO: 3508328 - RNA, 20 nt, Human
cccccuggggcuucuccuga

SEQ ID NO: 3508329 - RNA, 23 nt, Human
cccccugguggacaguccuggga

SEQ ID NO: 3508330 - RNA, 20 nt, Human
cccccuguacacaacucacu

SEQ ID NO: 3508331 - RNA, 12 nt, Human
cagcucucccuc

SEQ ID NO: 3508332 - RNA, 18 nt, Human
cagcucucccucuggccc

SEQ ID NO: 3508333 - RNA, 21 nt, Human
cagcucucccucuggcccugc

SEQ ID NO: 3508334 - RNA, 23 nt, Human
cagcucucccucuggcccugccu

SEQ ID NO: 3508335 - RNA, 14 nt, Human
cagcucucugcccu

SEQ ID NO: 3508336 - RNA, 15 nt, Human
cagcucucugcccug

SEQ ID NO: 3508337 - RNA, 21 nt, Human
cagcucucugcccuguguacu

SEQ ID NO: 3508338 - RNA, 20 nt, Human
cagcucugacauucugauuc

SEQ ID NO: 3508339 - RNA, 11 nt, Human
cagcucugacu

SEQ ID NO: 3508340 - RNA, 15 nt, Human
cagcucugcaagaau

SEQ ID NO: 3508341 - RNA, 19 nt, Human
cagcucugccgucucugga

SEQ ID NO: 3508342 - RNA, 22 nt, Human
cagcucugcuugccgaaacugg

SEQ ID NO: 3508343 - RNA, 23 nt, Human
cagcucuggacagccccacccug

SEQ ID NO: 3508344 - RNA, 14 nt, Human
cagcucuggagggg

SEQ ID NO: 3508345 - RNA, 18 nt, Human
cagcucuggcauggcuag

SEQ ID NO: 3508346 - RNA, 20 nt, Human
cagcucuggcucacagacug

SEQ ID NO: 3508347 - RNA, 14 nt, Human
cagcucuggcuucc

SEQ ID NO: 3508348 - RNA, 16 nt, Human
cagcucuguccuggga

SEQ ID NO: 3508349 - RNA, 18 nt, Human
cagcucuguccugggagu

SEQ ID NO: 3508350 - RNA, 21 nt, Human
cagcucuguguugccaugugu

SEQ ID NO: 3508351 - RNA, 13 nt, Human
cagcucuucaucu

SEQ ID NO: 3508352 - RNA, 14 nt, Human
cagcucuucaucug

SEQ ID NO: 3508353 - RNA, 12 nt, Human
cagcucuuccug

SEQ ID NO: 3508354 - RNA, 13 nt, Human
cagcucuuccugg

SEQ ID NO: 3508355 - RNA, 23 nt, Human
cagcucuuccuggacaggccagg

SEQ ID NO: 3508356 - RNA, 14 nt, Human
cagcucuucuccag

SEQ ID NO: 3508357 - RNA, 23 nt, Human
cagcucuucuccaggcuguaucc

SEQ ID NO: 3508358 - RNA, 23 nt, Human
cagcucuucugccggcccugggg

SEQ ID NO: 3508359 - RNA, 16 nt, Human
cagcucuugcccuucc

SEQ ID NO: 3508360 - RNA, 20 nt, Human
cagcucuugcccuucccugu

SEQ ID NO: 3508361 - RNA, 21 nt, Human
cagcucuugcccuucccuguc

SEQ ID NO: 3508362 - RNA, 23 nt, Human
cagcucuugcccuucccuguccc

SEQ ID NO: 3508363 - RNA, 14 nt, Human
cagcucuugcuaau

SEQ ID NO: 3508364 - RNA, 16 nt, Human
cagcucuuggcuccac

SEQ ID NO: 3508365 - RNA, 14 nt, Human
cagcucuuuccucc

SEQ ID NO: 3508366 - RNA, 16 nt, Human
cagcucuuuccuccuu

SEQ ID NO: 3508367 - RNA, 17 nt, Human
cagcucuuuccuccuuc

SEQ ID NO: 3508368 - RNA, 22 nt, Human
cagcucuuugaaauagucugug

SEQ ID NO: 3508369 - RNA, 15 nt, Human
cagcugaaauacuga

SEQ ID NO: 3508370 - RNA, 13 nt, Human
cagcugaaauuga

SEQ ID NO: 3508371 - RNA, 17 nt, Human
cagcugaaauugaaaag

SEQ ID NO: 3508372 - RNA, 14 nt, Human
cagcugaaccuggg

SEQ ID NO: 3508373 - RNA, 20 nt, Human
cagcugaaugccuccugugg

SEQ ID NO: 3508374 - RNA, 16 nt, Human
cagcugaauuaucuau

SEQ ID NO: 3508375 - RNA, 16 nt, Human
cagcugacaguccucu

SEQ ID NO: 3508376 - RNA, 18 nt, Human
cagcugacaguccucucc

SEQ ID NO: 3508377 - RNA, 13 nt, Human
cagcugacuaaac

SEQ ID NO: 3508378 - RNA, 14 nt, Human
cagcugagcgccag

SEQ ID NO: 3508379 - RNA, 15 nt, Human
cagcugauacaaauu

SEQ ID NO: 3508380 - RNA, 23 nt, Human
cagcugauacaaauugcagacug

SEQ ID NO: 3508381 - RNA, 20 nt, Human
cagcugauacuucauuuaaa

SEQ ID NO: 3508382 - RNA, 22 nt, Human
cagcugaugacucaagauuccc

SEQ ID NO: 3508383 - RNA, 20 nt, Human
cagcugauguuggaagagaa

SEQ ID NO: 3508384 - RNA, 18 nt, Human
cagcugauuuuaacaaua

SEQ ID NO: 3508385 - RNA, 20 nt, Human
cagcugcaagguacucuggu

SEQ ID NO: 3508386 - RNA, 22 nt, Human
cagcugcaagguacucugguga

SEQ ID NO: 3508387 - RNA, 14 nt, Human
cagcugcaccagag

SEQ ID NO: 3508388 - RNA, 19 nt, Human
cagcugcaccagagcaacc

SEQ ID NO: 3508389 - RNA, 17 nt, Human
cagcugcaccccuuccu

SEQ ID NO: 3508390 - RNA, 18 nt, Human
cagcugcacugaugcugc

SEQ ID NO: 3508391 - RNA, 12 nt, Human
cagcugccaccu

SEQ ID NO: 3508392 - RNA, 19 nt, Human
cagcugccaggagcacggc

SEQ ID NO: 3508393 - RNA, 16 nt, Human
cagcugcccccagagc

SEQ ID NO: 3508394 - RNA, 20 nt, Human
cagcugcccccgcucauggg

SEQ ID NO: 3508395 - RNA, 15 nt, Human
cagcugcccuauggg

SEQ ID NO: 3508396 - RNA, 21 nt, Human
cagcugcccuuccgcagugug

SEQ ID NO: 3508397 - RNA, 17 nt, Human
cagcugccgaccagagc

SEQ ID NO: 3508398 - RNA, 22 nt, Human
cagcugccggucgcccuuugcu

SEQ ID NO: 3508399 - RNA, 16 nt, Human
cagcugccuccccucc

SEQ ID NO: 3508400 - RNA, 21 nt, Human
cagcugccucugccacugacu

SEQ ID NO: 3508401 - RNA, 20 nt, Human
cagcugccuuagcuucagga

SEQ ID NO: 3508402 - RNA, 15 nt, Human
cagcugcgcgggcuu

SEQ ID NO: 3508403 - RNA, 22 nt, Human
cagcugcgguccacccaggagc

SEQ ID NO: 3508404 - RNA, 16 nt, Human
cagcugcuauccccau

SEQ ID NO: 3508405 - RNA, 18 nt, Human
cagcugcuauccccaucu

SEQ ID NO: 3508406 - RNA, 15 nt, Human
cagcugcuccccucc

SEQ ID NO: 3508407 - RNA, 16 nt, Human
cagcugcuccccuccc

SEQ ID NO: 3508408 - RNA, 18 nt, Human
cagcugcuccccucccuc

SEQ ID NO: 3508409 - RNA, 12 nt, Human
cagcugcucugc

SEQ ID NO: 3508410 - RNA, 20 nt, Human
cagcugcucugcccagagcu

SEQ ID NO: 3508411 - RNA, 21 nt, Human
cagcugcucugcccagagcug

SEQ ID NO: 3508412 - RNA, 21 nt, Human
cagcugcugaaacaacaaaua

SEQ ID NO: 3508413 - RNA, 21 nt, Human
cagcugcugagauccuggacu

SEQ ID NO: 3508414 - RNA, 14 nt, Human
cagcugcuggagac

SEQ ID NO: 3508415 - RNA, 15 nt, Human
cagcugcuggagacu

SEQ ID NO: 3508416 - RNA, 13 nt, Human
cagcugcugucuu

SEQ ID NO: 3508417 - RNA, 15 nt, Human
cagcugcuugggcuu

SEQ ID NO: 3508418 - RNA, 19 nt, Human
cagcugcuugggcuucauc

SEQ ID NO: 3508419 - RNA, 16 nt, Human
cagcugcuuguguccc

SEQ ID NO: 3508420 - RNA, 15 nt, Human
cagcugcuuucuucu

SEQ ID NO: 3508421 - RNA, 14 nt, Human
cagcugcuuuguua

SEQ ID NO: 3508422 - RNA, 23 nt, Human
cagcugcuuuugucuaugggacu

SEQ ID NO: 3508423 - RNA, 17 nt, Human
cagcuggaauuaugcug

SEQ ID NO: 3508424 - RNA, 23 nt, Human
cagcuggacucugcaucccagca

SEQ ID NO: 3508425 - RNA, 16 nt, Human
cagcuggagaagaccc

SEQ ID NO: 3508426 - RNA, 14 nt, Human
cagcuggcagcaga

SEQ ID NO: 3508427 - RNA, 18 nt, Human
cagcuggcccgugacaga

SEQ ID NO: 3508428 - RNA, 19 nt, Human
cagcuggcccgugacagac

SEQ ID NO: 3508429 - RNA, 17 nt, Human
cagcuggccgucacuug

SEQ ID NO: 3508430 - RNA, 15 nt, Human
cagcuggccuggaca

SEQ ID NO: 3508431 - RNA, 16 nt, Human
cagcuggccuggacag

SEQ ID NO: 3508432 - RNA, 17 nt, Human
cagcuggccuggacagu

SEQ ID NO: 3508433 - RNA, 12 nt, Human
cagcuggcucua

SEQ ID NO: 3508434 - RNA, 16 nt, Human
cagcuggcucuacuuc

SEQ ID NO: 3508435 - RNA, 15 nt, Human
cagcugggagaaggg

SEQ ID NO: 3508436 - RNA, 19 nt, Human
cagcugggaucugacugca

SEQ ID NO: 3508437 - RNA, 22 nt, Human
cagcugggaucugacugcacgu

SEQ ID NO: 3508438 - RNA, 14 nt, Human
cagcugggcccaac

SEQ ID NO: 3508439 - RNA, 17 nt, Human
cagcugggcccaacccu

SEQ ID NO: 3508440 - RNA, 15 nt, Human
cagcugggcucugcc

SEQ ID NO: 3508441 - RNA, 12 nt, Human
cagcugggcugu

SEQ ID NO: 3508442 - RNA, 14 nt, Human
cagcugggcugugg

SEQ ID NO: 3508443 - RNA, 21 nt, Human
cagcuggggccaggcuggguc

SEQ ID NO: 3508444 - RNA, 19 nt, Human
cagcuggggcguggggagg

SEQ ID NO: 3508445 - RNA, 16 nt, Human
cagcuggggugcaggg

SEQ ID NO: 3508446 - RNA, 23 nt, Human
cagcuggggugcagggauguggg

SEQ ID NO: 3508447 - RNA, 22 nt, Human
cagcugggguggggaccucagg

SEQ ID NO: 3508448 - RNA, 18 nt, Human
cagcugggucaggcaggg

SEQ ID NO: 3508449 - RNA, 17 nt, Human
cagcuggguggcacugc

SEQ ID NO: 3508450 - RNA, 18 nt, Human
cagcuggguggcacugcc

SEQ ID NO: 3508451 - RNA, 21 nt, Human
cagcuggguggcacugccaug

SEQ ID NO: 3508452 - RNA, 18 nt, Human
cagcuggugcccugcuuu

SEQ ID NO: 3508453 - RNA, 19 nt, Human
cagcuggugguaucugagu

SEQ ID NO: 3508454 - RNA, 14 nt, Human
cagcugguguagcu

SEQ ID NO: 3508455 - RNA, 19 nt, Human
cagcuguaagaagagacug

SEQ ID NO: 3508456 - RNA, 19 nt, Human
ccccuucuccccugcacug

SEQ ID NO: 3508457 - RNA, 13 nt, Human
ccccuucucucau

SEQ ID NO: 3508458 - RNA, 21 nt, Human
ccccuucucucccugccagag

SEQ ID NO: 3508459 - RNA, 14 nt, Human
ccccuucucuccuc

SEQ ID NO: 3508460 - RNA, 15 nt, Human
ccccuucucuccucc

SEQ ID NO: 3508461 - RNA, 12 nt, Human
ccccuucucugc

SEQ ID NO: 3508462 - RNA, 13 nt, Human
ccccuucucugcu

SEQ ID NO: 3508463 - RNA, 22 nt, Human
ccccuucucugcuccaccacau

SEQ ID NO: 3508464 - RNA, 17 nt, Human
ccccuucugacccaugc

SEQ ID NO: 3508465 - RNA, 14 nt, Human
ccccuucugcucag

SEQ ID NO: 3508466 - RNA, 21 nt, Human
ccccuucugcucagcucuggg

SEQ ID NO: 3508467 - RNA, 23 nt, Human
ccccuucugggcaucuguucugg

SEQ ID NO: 3508468 - RNA, 23 nt, Human
ccccuugacaacuggcaggcagg

SEQ ID NO: 3508469 - RNA, 16 nt, Human
ccccuugccagcugcu

SEQ ID NO: 3508470 - RNA, 20 nt, Human
ccccuugcccagggcucagc

SEQ ID NO: 3508471 - RNA, 18 nt, Human
ccccuugggcccacaccu

SEQ ID NO: 3508472 - RNA, 13 nt, Human
ccccuugggcggc

SEQ ID NO: 3508473 - RNA, 18 nt, Human
ccccuuguccuuucccuu

SEQ ID NO: 3508474 - RNA, 18 nt, Human
ccccuuucccgggcuguc

SEQ ID NO: 3508475 - RNA, 13 nt, Human
ccccuuugggccc

SEQ ID NO: 3508476 - RNA, 18 nt, Human
ccccuuugggcccaggga

SEQ ID NO: 3508477 - RNA, 14 nt, Human
ccccuuugggcccu

SEQ ID NO: 3508478 - RNA, 17 nt, Human
ccccuuugggcccugca

SEQ ID NO: 3508479 - RNA, 19 nt, Human
ccccuuugggcccugcaug

SEQ ID NO: 3508480 - RNA, 13 nt, Human
ccccuuugugcug

SEQ ID NO: 3508481 - RNA, 15 nt, Human
ccccuuugugcugug

SEQ ID NO: 3508482 - RNA, 19 nt, Human
ccccuuuucagcuucugcu

SEQ ID NO: 3508483 - RNA, 22 nt, Human
ccccuuuucagcuucugcuggg

SEQ ID NO: 3508484 - RNA, 19 nt, Human
ccccuuuucuuuucuaccc

SEQ ID NO: 3508485 - RNA, 20 nt, Human
ccccuuuucuuuucuacccu

SEQ ID NO: 3508486 - RNA, 18 nt, Human
ccccuuuuuacuccccuu

SEQ ID NO: 3508487 - RNA, 22 nt, Human
cccgaaagaggcacccuuccau

SEQ ID NO: 3508488 - RNA, 18 nt, Human
cccgaagggcccccacau

SEQ ID NO: 3508489 - RNA, 23 nt, Human
cccgaagguuauggucaauccca

SEQ ID NO: 3508490 - RNA, 16 nt, Human
cccgaauagcugggac

SEQ ID NO: 3508491 - RNA, 17 nt, Human
cccgaauagcugggacu

SEQ ID NO: 3508492 - RNA, 15 nt, Human
cccgacagccuggca

SEQ ID NO: 3508493 - RNA, 17 nt, Human
cccgacuccagccagcg

SEQ ID NO: 3508494 - RNA, 20 nt, Human
cccgacuccagccagcgccu

SEQ ID NO: 3508495 - RNA, 12 nt, Human
cccgagcagcug

SEQ ID NO: 3508496 - RNA, 15 nt, Human
cccgagcagcugagc

SEQ ID NO: 3508497 - RNA, 19 nt, Human
cccgagcagcugagcaggg

SEQ ID NO: 3508498 - RNA, 15 nt, Human
cccgagccuggcucc

SEQ ID NO: 3508499 - RNA, 11 nt, Human
cccgagcuggg

SEQ ID NO: 3508500 - RNA, 20 nt, Human
cccgagcugggggccaugag

SEQ ID NO: 3508501 - RNA, 18 nt, Human
caggaaggggguccaccc

SEQ ID NO: 3508502 - RNA, 23 nt, Human
caggaaggggguccacccagcaa

SEQ ID NO: 3508503 - RNA, 12 nt, Human
caggaaguacug

SEQ ID NO: 3508504 - RNA, 16 nt, Human
caggaaguacuggaga

SEQ ID NO: 3508505 - RNA, 19 nt, Human
caggaaguacuuccaccuc

SEQ ID NO: 3508506 - RNA, 15 nt, Human
caggaaguagaggag

SEQ ID NO: 3508507 - RNA, 20 nt, Human
caggaaguagcacaggcuga

SEQ ID NO: 3508508 - RNA, 22 nt, Human
caggaaguagcacaggcugagu

SEQ ID NO: 3508509 - RNA, 12 nt, Human
caggaauaaggc

SEQ ID NO: 3508510 - RNA, 17 nt, Human
caggaauauuuuccaaa

SEQ ID NO: 3508511 - RNA, 18 nt, Human
caggaaucaagagcugcc

SEQ ID NO: 3508512 - RNA, 20 nt, Human
caggaaugaagccuuagcca

SEQ ID NO: 3508513 - RNA, 14 nt, Human
caggaaugaucucu

SEQ ID NO: 3508514 - RNA, 23 nt, Human
caggaauggagccugcacgguga

SEQ ID NO: 3508515 - RNA, 17 nt, Human
caggaauguguggcaga

SEQ ID NO: 3508516 - RNA, 23 nt, Human
caggaauguguggccugcacagu

SEQ ID NO: 3508517 - RNA, 18 nt, Human
caggaauguuaaagucag

SEQ ID NO: 3508518 - RNA, 17 nt, Human
caggaauuucccaggac

SEQ ID NO: 3508519 - RNA, 18 nt, Human
caggaauuucccaggacc

SEQ ID NO: 3508520 - RNA, 19 nt, Human
caggaauuugggacccugc

SEQ ID NO: 3508521 - RNA, 20 nt, Human
caggaauuugggacccugcu

SEQ ID NO: 3508522 - RNA, 17 nt, Human
caggacaaugucugaac

SEQ ID NO: 3508523 - RNA, 13 nt, Human
caggacacaggcc

SEQ ID NO: 3508524 - RNA, 22 nt, Human
caggacaccacacccagccuca

SEQ ID NO: 3508525 - RNA, 15 nt, Human
caggacacggggcag

SEQ ID NO: 3508526 - RNA, 13 nt, Human
caggacagaugcc

SEQ ID NO: 3508527 - RNA, 13 nt, Human
caggacaggcccg

SEQ ID NO: 3508528 - RNA, 18 nt, Human
caggacaggcugcggccc

SEQ ID NO: 3508529 - RNA, 21 nt, Human
caggacagugcuucagccuga

SEQ ID NO: 3508530 - RNA, 14 nt, Human
caggacauuucucu

SEQ ID NO: 3508531 - RNA, 18 nt, Human
caggacauuucucuaaga

SEQ ID NO: 3508532 - RNA, 16 nt, Human
caggaccacaaaaaug

SEQ ID NO: 3508533 - RNA, 15 nt, Human
caggaccacaggcuc

SEQ ID NO: 3508534 - RNA, 19 nt, Human
caggaccacaggcucaggc

SEQ ID NO: 3508535 - RNA, 15 nt, Human
caggaccagaagcuc

SEQ ID NO: 3508536 - RNA, 10 nt, Human
caggaccagc

SEQ ID NO: 3508537 - RNA, 15 nt, Human
caggaccagcccacg

SEQ ID NO: 3508538 - RNA, 17 nt, Human
caggaccagcccacgcu

SEQ ID NO: 3508539 - RNA, 17 nt, Human
caggaccagcucaggac

SEQ ID NO: 3508540 - RNA, 20 nt, Human
caggaccagcucaggacaga

SEQ ID NO: 3508541 - RNA, 12 nt, Human
caggaccagcug

SEQ ID NO: 3508542 - RNA, 15 nt, Human
caggaccagcugggg

SEQ ID NO: 3508543 - RNA, 23 nt, Human
caggaccagcuggggcgugggga

SEQ ID NO: 3508544 - RNA, 19 nt, Human
caggaccagucccagagca

SEQ ID NO: 3508545 - RNA, 16 nt, Human
caggaccaugggacca

SEQ ID NO: 3508546 - RNA, 20 nt, Human
caggacccaccaugucugcc

SEQ ID NO: 3508547 - RNA, 13 nt, Human
caggacccagagg

SEQ ID NO: 3508548 - RNA, 14 nt, Human
caggacccccuucc

SEQ ID NO: 3508549 - RNA, 20 nt, Human
caggaccccugcaguucccc

SEQ ID NO: 3508550 - RNA, 12 nt, Human
caggacccucgc

SEQ ID NO: 3508551 - RNA, 13 nt, Human
caggacccucgcc

SEQ ID NO: 3508552 - RNA, 16 nt, Human
caggacccucgccgga

SEQ ID NO: 3508553 - RNA, 20 nt, Human
caggacccucgcuggccccc

SEQ ID NO: 3508554 - RNA, 21 nt, Human
caggacccucgcuggccccca

SEQ ID NO: 3508555 - RNA, 13 nt, Human
caggacccugaag

SEQ ID NO: 3508556 - RNA, 15 nt, Human
caggacccugaaggg

SEQ ID NO: 3508557 - RNA, 17 nt, Human
caggacccugaaggggc

SEQ ID NO: 3508558 - RNA, 17 nt, Human
caggacccugccaggca

SEQ ID NO: 3508559 - RNA, 22 nt, Human
caggacccuggacccagccaga

SEQ ID NO: 3508560 - RNA, 22 nt, Human
caggaccucagaguccaggccc

SEQ ID NO: 3508561 - RNA, 17 nt, Human
caggaccuccaagccac

SEQ ID NO: 3508562 - RNA, 17 nt, Human
caggaccucgugccacc

SEQ ID NO: 3508563 - RNA, 18 nt, Human
caggaccucgugccaccc

SEQ ID NO: 3508564 - RNA, 14 nt, Human
caggaccugccugu

SEQ ID NO: 3508565 - RNA, 15 nt, Human
caggaccugccugua

SEQ ID NO: 3508566 - RNA, 16 nt, Human
caggaccuggcugcca

SEQ ID NO: 3508567 - RNA, 20 nt, Human
caggaccugggaccuccccu

SEQ ID NO: 3508568 - RNA, 22 nt, Human
caggaccuucgggcugugcccg

SEQ ID NO: 3508569 - RNA, 20 nt, Human
caggaccuuuugaaguaguu

SEQ ID NO: 3508570 - RNA, 14 nt, Human
caggacgagaugac

SEQ ID NO: 3508571 - RNA, 16 nt, Human
caggacgccacucauu

SEQ ID NO: 3508572 - RNA, 17 nt, Human
caggacgccacucauuu

SEQ ID NO: 3508573 - RNA, 14 nt, Human
caggacgcuucuga

SEQ ID NO: 3508574 - RNA, 20 nt, Human
caggacggggccggccaggu

SEQ ID NO: 3508575 - RNA, 22 nt, Human
caggacggggccggccaggugg

SEQ ID NO: 3508576 - RNA, 18 nt, Human
caggacuauagcccaggu

SEQ ID NO: 3508577 - RNA, 16 nt, Human
caggacucagaagccu

SEQ ID NO: 3508578 - RNA, 17 nt, Human
caggacucagcucccca

SEQ ID NO: 3508579 - RNA, 21 nt, Human
caggacucagcuccccagagu

SEQ ID NO: 3508580 - RNA, 15 nt, Human
caggacuccccaggc

SEQ ID NO: 3508581 - RNA, 18 nt, Human
caggacuccccaggccag

SEQ ID NO: 3508582 - RNA, 16 nt, Human
caggacucccuccuca

SEQ ID NO: 3508583 - RNA, 23 nt, Human
caggacucccuccucaccucugg

SEQ ID NO: 3508584 - RNA, 11 nt, Human
caggacucugc

SEQ ID NO: 3508585 - RNA, 13 nt, Human
caggacucugcag

SEQ ID NO: 3508586 - RNA, 16 nt, Human
caggacucugcagccu

SEQ ID NO: 3508587 - RNA, 21 nt, Human
caggacucugcagccucagag

SEQ ID NO: 3508588 - RNA, 20 nt, Human
caggacucugcccagaccac

SEQ ID NO: 3508589 - RNA, 18 nt, Human
caggacugaauugucccc

SEQ ID NO: 3508590 - RNA, 14 nt, Human
caggacugagcccc

SEQ ID NO: 3508591 - RNA, 18 nt, Human
caggacugagccccgcag

SEQ ID NO: 3508592 - RNA, 18 nt, Human
caggacugggagccccca

SEQ ID NO: 3508593 - RNA, 21 nt, Human
caggacugggagcccccagcc

SEQ ID NO: 3508594 - RNA, 12 nt, Human
caggacugggcc

SEQ ID NO: 3508595 - RNA, 20 nt, Human
caggacugggccacuucugg

SEQ ID NO: 3508596 - RNA, 19 nt, Human
caggacuuaacggcuccag

SEQ ID NO: 3508597 - RNA, 15 nt, Human
caggacuuccccgga

SEQ ID NO: 3508598 - RNA, 23 nt, Human
caggacuuggucugauuucagga

SEQ ID NO: 3508599 - RNA, 20 nt, Human
caggagaacucauguuauuu

SEQ ID NO: 3508600 - RNA, 12 nt, Human
caggagaagaaa

SEQ ID NO: 3508601 - RNA, 20 nt, Human
ccggacuuucggaguugggg

SEQ ID NO: 3508602 - RNA, 23 nt, Human
ccggacuuucggaguuggggguc

SEQ ID NO: 3508603 - RNA, 14 nt, Human
ccggagagccagcu

SEQ ID NO: 3508604 - RNA, 12 nt, Human
ccggagaggaag

SEQ ID NO: 3508605 - RNA, 18 nt, Human
ccggagaggccucgaccc

SEQ ID NO: 3508606 - RNA, 14 nt, Human
ccggagauguagca

SEQ ID NO: 3508607 - RNA, 17 nt, Human
ccggagauguagcaaaa

SEQ ID NO: 3508608 - RNA, 17 nt, Human
ccggagcuaacacuggc

SEQ ID NO: 3508609 - RNA, 19 nt, Human
ccggagcugccccucucug

SEQ ID NO: 3508610 - RNA, 22 nt, Human
ccggagcugccccucucugggc

SEQ ID NO: 3508611 - RNA, 21 nt, Human
ccggagcuuucaaagaaggaa

SEQ ID NO: 3508612 - RNA, 18 nt, Human
ccggaggguguuuaugua

SEQ ID NO: 3508613 - RNA, 16 nt, Human
ccggaucugagggaga

SEQ ID NO: 3508614 - RNA, 14 nt, Human
ccggaugugcuuuu

SEQ ID NO: 3508615 - RNA, 23 nt, Human
ccggcaauaaaagcccaggagcc

SEQ ID NO: 3508616 - RNA, 19 nt, Human
ccggcacagaugcuccagg

SEQ ID NO: 3508617 - RNA, 20 nt, Human
ccggcacccccugcagcuug

SEQ ID NO: 3508618 - RNA, 15 nt, Human
ccggcacuccaugcu

SEQ ID NO: 3508619 - RNA, 16 nt, Human
ccggcagcagccccca

SEQ ID NO: 3508620 - RNA, 15 nt, Human
ccggcagccccagcc

SEQ ID NO: 3508621 - RNA, 16 nt, Human
ccggcagccccagccu

SEQ ID NO: 3508622 - RNA, 20 nt, Human
ccggcagccccagccugcua

SEQ ID NO: 3508623 - RNA, 12 nt, Human
ccggcaggcccu

SEQ ID NO: 3508624 - RNA, 16 nt, Human
ccggcaggcccugcag

SEQ ID NO: 3508625 - RNA, 20 nt, Human
ccggcaggcccugcaguguu

SEQ ID NO: 3508626 - RNA, 21 nt, Human
ccggcaggcccugcaguguuc

SEQ ID NO: 3508627 - RNA, 21 nt, Human
ccggcagggcgggcagagggc

SEQ ID NO: 3508628 - RNA, 17 nt, Human
ccggcauggacaaugga

SEQ ID NO: 3508629 - RNA, 14 nt, Human
ccggcauggcuggg

SEQ ID NO: 3508630 - RNA, 14 nt, Human
ccggcaugggaaag

SEQ ID NO: 3508631 - RNA, 15 nt, Human
ccggccaauggaaac

SEQ ID NO: 3508632 - RNA, 12 nt, Human
ccggccaccucu

SEQ ID NO: 3508633 - RNA, 15 nt, Human
ccggccaccucugcg

SEQ ID NO: 3508634 - RNA, 16 nt, Human
ccggccaccugcggug

SEQ ID NO: 3508635 - RNA, 11 nt, Human
ccggccagcca

SEQ ID NO: 3508636 - RNA, 11 nt, Human
ccggccagccc

SEQ ID NO: 3508637 - RNA, 19 nt, Human
ccggccagcugggaucuga

SEQ ID NO: 3508638 - RNA, 13 nt, Human
ccggccaggccac

SEQ ID NO: 3508639 - RNA, 17 nt, Human
ccggccaggugccuccu

SEQ ID NO: 3508640 - RNA, 15 nt, Human
ccggccaggugggcg

SEQ ID NO: 3508641 - RNA, 17 nt, Human
ccggccccagccagagu

SEQ ID NO: 3508642 - RNA, 13 nt, Human
ccggcccccuggu

SEQ ID NO: 3508643 - RNA, 15 nt, Human
ccggcccccuggucu

SEQ ID NO: 3508644 - RNA, 20 nt, Human
ccggcccccuggucucuggu

SEQ ID NO: 3508645 - RNA, 17 nt, Human
ccggccccucccccuga

SEQ ID NO: 3508646 - RNA, 17 nt, Human
ccggcccgcgccacagg

SEQ ID NO: 3508647 - RNA, 19 nt, Human
ccggcccugggcucggagg

SEQ ID NO: 3508648 - RNA, 24 nt, Human
ccggcccugggcucggaggcugcc

SEQ ID NO: 3508649 - RNA, 13 nt, Human
ccggcccuggggc

SEQ ID NO: 3508650 - RNA, 15 nt, Human
ccggcccugugugca

SEQ ID NO: 3508651 - RNA, 17 nt, Human
ccggcccugugugcagg

SEQ ID NO: 3508652 - RNA, 17 nt, Human
ccggccgcuccaccagc

SEQ ID NO: 3508653 - RNA, 21 nt, Human
ccggccugaugacagagcgag

SEQ ID NO: 3508654 - RNA, 15 nt, Human
ccggccugccaggag

SEQ ID NO: 3508655 - RNA, 18 nt, Human
ccggccugccaggaggac

SEQ ID NO: 3508656 - RNA, 17 nt, Human
ccggcgagcccugugga

SEQ ID NO: 3508657 - RNA, 16 nt, Human
ccggcgggcgggccgg

SEQ ID NO: 3508658 - RNA, 13 nt, Human
ccggcgucagccu

SEQ ID NO: 3508659 - RNA, 15 nt, Human
ccggcgucagccucc

SEQ ID NO: 3508660 - RNA, 17 nt, Human
ccggcgucagccuccag

SEQ ID NO: 3508661 - RNA, 20 nt, Human
ccggcgucagccuccagccu

SEQ ID NO: 3508662 - RNA, 23 nt, Human
ccggcgucagccuccagccucug

SEQ ID NO: 3508663 - RNA, 16 nt, Human
ccggcgugguggaaga

SEQ ID NO: 3508664 - RNA, 22 nt, Human
ccggcgugguggaagaggggac

SEQ ID NO: 3508665 - RNA, 23 nt, Human
ccggcuaugggggcacugaggac

SEQ ID NO: 3508666 - RNA, 19 nt, Human
ccggcucccaccgaggcgc

SEQ ID NO: 3508667 - RNA, 14 nt, Human
ccggcucccagccu

SEQ ID NO: 3508668 - RNA, 16 nt, Human
ccggcucuggcucucc

SEQ ID NO: 3508669 - RNA, 17 nt, Human
ccggcucuggcucuccc

SEQ ID NO: 3508670 - RNA, 14 nt, Human
ccggcucuuuccuu

SEQ ID NO: 3508671 - RNA, 15 nt, Human
ccggcugcagaggcc

SEQ ID NO: 3508672 - RNA, 12 nt, Human
ccggcugcccuu

SEQ ID NO: 3508673 - RNA, 22 nt, Human
ccggcugcuuuucccuaagcca

SEQ ID NO: 3508674 - RNA, 12 nt, Human
ccggcuggccug

SEQ ID NO: 3508675 - RNA, 17 nt, Human
ccggcuggccuggcccc

SEQ ID NO: 3508676 - RNA, 18 nt, Human
ccggcuggccuggccccu

SEQ ID NO: 3508677 - RNA, 23 nt, Human
ccggcugguuuuguaagaugcug

SEQ ID NO: 3508678 - RNA, 15 nt, Human
ccggcugugcuggga

SEQ ID NO: 3508679 - RNA, 15 nt, Human
ccggcuuccuuuccc

SEQ ID NO: 3508680 - RNA, 23 nt, Human
ccggcuuccuuucccaagccuuc

SEQ ID NO: 3508681 - RNA, 17 nt, Human
ccggcuugccacacccc

SEQ ID NO: 3508682 - RNA, 15 nt, Human
ccggcuuucaggagc

SEQ ID NO: 3508683 - RNA, 18 nt, Human
ccgggaaccuccccagcc

SEQ ID NO: 3508684 - RNA, 20 nt, Human
ccgggaaccuccccagccug

SEQ ID NO: 3508685 - RNA, 21 nt, Human
ccgggaaccuccccagccugc

SEQ ID NO: 3508686 - RNA, 17 nt, Human
ccgggaagccacccucc

SEQ ID NO: 3508687 - RNA, 15 nt, Human
ccgggacccccagga

SEQ ID NO: 3508688 - RNA, 15 nt, Human
ccgggaccccgagcc

SEQ ID NO: 3508689 - RNA, 20 nt, Human
ccgggacucacuggcagccc

SEQ ID NO: 3508690 - RNA, 22 nt, Human
ccgggacucacuggcagcccca

SEQ ID NO: 3508691 - RNA, 23 nt, Human
ccgggagccuaggaccacucagc

SEQ ID NO: 3508692 - RNA, 22 nt, Human
ccgggaggcagagguugcagug

SEQ ID NO: 3508693 - RNA, 16 nt, Human
ccgggaugggagccgg

SEQ ID NO: 3508694 - RNA, 22 nt, Human
ccgggcacucagaagacacuga

SEQ ID NO: 3508695 - RNA, 20 nt, Human
ccgggcagggcucccacaga

SEQ ID NO: 3508696 - RNA, 13 nt, Human
ccgggccacuccu

SEQ ID NO: 3508697 - RNA, 19 nt, Human
ccgggccacuccuuccugc

SEQ ID NO: 3508698 - RNA, 21 nt, Human
ccgggccacuccuuccugccc

SEQ ID NO: 3508699 - RNA, 14 nt, Human
ccgggccagggcug

SEQ ID NO: 3508700 - RNA, 15 nt, Human
ccgggccagggcugc

SEQ ID NO: 3508701 - RNA, 14 nt, Human
ccgggccccugggc

SEQ ID NO: 3508702 - RNA, 16 nt, Human
ccgggccccugggcuu

SEQ ID NO: 3508703 - RNA, 15 nt, Human
cccugccccccagcc

SEQ ID NO: 3508704 - RNA, 20 nt, Human
cccugccccccagcccuccu

SEQ ID NO: 3508705 - RNA, 17 nt, Human
cccugcccccugcagga

SEQ ID NO: 3508706 - RNA, 23 nt, Human
cccugccccucccuucaaccauu

SEQ ID NO: 3508707 - RNA, 19 nt, Human
cccugccccuccucucccu

SEQ ID NO: 3508708 - RNA, 12 nt, Human
cccugccccugc

SEQ ID NO: 3508709 - RNA, 17 nt, Human
cccugcccggcugcgga

SEQ ID NO: 3508710 - RNA, 17 nt, Human
cccugcccguguacaua

SEQ ID NO: 3508711 - RNA, 20 nt, Human
cccugcccguucuugaaaug

SEQ ID NO: 3508712 - RNA, 16 nt, Human
cccugcccuagcucca

SEQ ID NO: 3508713 - RNA, 11 nt, Human
cccugcccucu

SEQ ID NO: 3508714 - RNA, 15 nt, Human
cccugcccuggucca

SEQ ID NO: 3508715 - RNA, 11 nt, Human
cccugcccugu

SEQ ID NO: 3508716 - RNA, 20 nt, Human
cccugccgucaccaccaccc

SEQ ID NO: 3508717 - RNA, 12 nt, Human
cccugccuccac

SEQ ID NO: 3508718 - RNA, 17 nt, Human
cccugccuccugccggc

SEQ ID NO: 3508719 - RNA, 16 nt, Human
cccugccuccuuugug

SEQ ID NO: 3508720 - RNA, 20 nt, Human
cccugccucucccaggcagg

SEQ ID NO: 3508721 - RNA, 21 nt, Human
cccugccucuccgccccugag

SEQ ID NO: 3508722 - RNA, 13 nt, Human
cccugccucucug

SEQ ID NO: 3508723 - RNA, 16 nt, Human
cccugccucucugcag

SEQ ID NO: 3508724 - RNA, 22 nt, Human
cccugccucucugcaggucccu

SEQ ID NO: 3508725 - RNA, 13 nt, Human
cccugccugaggg

SEQ ID NO: 3508726 - RNA, 22 nt, Human
cccugccugagggccccucugc

SEQ ID NO: 3508727 - RNA, 15 nt, Human
cccugccugccgucu

SEQ ID NO: 3508728 - RNA, 14 nt, Human
cccugccuggagga

SEQ ID NO: 3508729 - RNA, 16 nt, Human
cccugccuggaggacc

SEQ ID NO: 3508730 - RNA, 17 nt, Human
cccugccuggaggaccu

SEQ ID NO: 3508731 - RNA, 18 nt, Human
cccugccuggaggaccug

SEQ ID NO: 3508732 - RNA, 19 nt, Human
cccugccuggaggaccuga

SEQ ID NO: 3508733 - RNA, 21 nt, Human
cccugccuggaggaccugagc

SEQ ID NO: 3508734 - RNA, 22 nt, Human
cccugccuggaggaccugagcc

SEQ ID NO: 3508735 - RNA, 21 nt, Human
cccugccuggcccccaaccuc

SEQ ID NO: 3508736 - RNA, 17 nt, Human
cccugcgaaggggcccu

SEQ ID NO: 3508737 - RNA, 21 nt, Human
cccugcgaaggggcccugguc

SEQ ID NO: 3508738 - RNA, 22 nt, Human
cccugcgccugugaugcugggc

SEQ ID NO: 3508739 - RNA, 18 nt, Human
cccugcgccuuuccuuuu

SEQ ID NO: 3508740 - RNA, 16 nt, Human
cccugcgcucucuuug

SEQ ID NO: 3508741 - RNA, 19 nt, Human
cccugcuccagaagauagc

SEQ ID NO: 3508742 - RNA, 17 nt, Human
cccugcucccacagaac

SEQ ID NO: 3508743 - RNA, 17 nt, Human
cccugcucccucccauc

SEQ ID NO: 3508744 - RNA, 18 nt, Human
cccugcuccucccuggcu

SEQ ID NO: 3508745 - RNA, 21 nt, Human
cccugcuccucccuggcugcc

SEQ ID NO: 3508746 - RNA, 21 nt, Human
ccuaaauccauuuggaaaucu

SEQ ID NO: 3508747 - RNA, 13 nt, Human
ccuaaauuuaaaa

SEQ ID NO: 3508748 - RNA, 13 nt, Human
ccuaaauuuaaug

SEQ ID NO: 3508749 - RNA, 19 nt, Human
ccuaaauuuaaugcugccu

SEQ ID NO: 3508750 - RNA, 22 nt, Human
ccuaaauuuuccuguccucuuu

SEQ ID NO: 3508751 - RNA, 22 nt, Human
ccuaacaacauuguagccucaa

SEQ ID NO: 3508752 - RNA, 18 nt, Human
ccuaacacagcaugugua

SEQ ID NO: 3508753 - RNA, 17 nt, Human
ccuaacauucgaucuca

SEQ ID NO: 3508754 - RNA, 14 nt, Human
ccuaaccccuucca

SEQ ID NO: 3508755 - RNA, 15 nt, Human
ccuaaccccuuuccu

SEQ ID NO: 3508756 - RNA, 13 nt, Human
ccuaacccuuugu

SEQ ID NO: 3508757 - RNA, 13 nt, Human
ccuaaccugccga

SEQ ID NO: 3508758 - RNA, 16 nt, Human
ccuaacugaagagaca

SEQ ID NO: 3508759 - RNA, 11 nt, Human
ccuaacuguau

SEQ ID NO: 3508760 - RNA, 14 nt, Human
ccuaacuuuucaau

SEQ ID NO: 3508761 - RNA, 15 nt, Human
ccuaagaaauaugug

SEQ ID NO: 3508762 - RNA, 19 nt, Human
ccuaagaaauaugugagau

SEQ ID NO: 3508763 - RNA, 17 nt, Human
ccuaagaaucuuuagag

SEQ ID NO: 3508764 - RNA, 20 nt, Human
ccuaagaccggcggccauga

SEQ ID NO: 3508765 - RNA, 18 nt, Human
ccuaagaguugagcucuc

SEQ ID NO: 3508766 - RNA, 21 nt, Human
ccuaagauauacuuguuuuug

SEQ ID NO: 3508767 - RNA, 16 nt, Human
ccuaagcaucuaaguu

SEQ ID NO: 3508768 - RNA, 16 nt, Human
ccuaagccagccuggu

SEQ ID NO: 3508769 - RNA, 16 nt, Human
ccuaagccagcugccc

SEQ ID NO: 3508770 - RNA, 19 nt, Human
ccuaagccuguggcugugg

SEQ ID NO: 3508771 - RNA, 18 nt, Human
ccuaagcuggagugcagu

SEQ ID NO: 3508772 - RNA, 13 nt, Human
ccuaaggacacac

SEQ ID NO: 3508773 - RNA, 14 nt, Human
ccuaaggacacacu

SEQ ID NO: 3508774 - RNA, 15 nt, Human
ccuaaggacacacua

SEQ ID NO: 3508775 - RNA, 11 nt, Human
ccuaaggacuu

SEQ ID NO: 3508776 - RNA, 16 nt, Human
ccuaaggacuucuuua

SEQ ID NO: 3508777 - RNA, 16 nt, Human
ccuaaggaucucucag

SEQ ID NO: 3508778 - RNA, 23 nt, Human
ccuaaggcacccacaaauaaaug

SEQ ID NO: 3508779 - RNA, 23 nt, Human
ccuaagggacauguuuugauaaa

SEQ ID NO: 3508780 - RNA, 18 nt, Human
ccuaagggauccugccug

SEQ ID NO: 3508781 - RNA, 21 nt, Human
ccuaagggucgaaagcucuag

SEQ ID NO: 3508782 - RNA, 14 nt, Human
ccuaaguacuguaa

SEQ ID NO: 3508783 - RNA, 13 nt, Human
ccuaagucucugu

SEQ ID NO: 3508784 - RNA, 15 nt, Human
ccuaagucucuguga

SEQ ID NO: 3508785 - RNA, 20 nt, Human
ccuaaguuucaguugauuuu

SEQ ID NO: 3508786 - RNA, 15 nt, Human
ccuaauaaaaaggug

SEQ ID NO: 3508787 - RNA, 14 nt, Human
ccuaauaaaacuga

SEQ ID NO: 3508788 - RNA, 16 nt, Human
ccuaauaaaacugaug

SEQ ID NO: 3508789 - RNA, 22 nt, Human
ccuaauaaaacugaugugaaac

SEQ ID NO: 3508790 - RNA, 14 nt, Human
ccuaauaaagcugu

SEQ ID NO: 3508791 - RNA, 16 nt, Human
ccuaauaaaguucugu

SEQ ID NO: 3508792 - RNA, 19 nt, Human
ccuaauaauaucccacugg

SEQ ID NO: 3508793 - RNA, 16 nt, Human
ccuaauacauuaaagc

SEQ ID NO: 3508794 - RNA, 17 nt, Human
ccuaauaucaaaugcag

SEQ ID NO: 3508795 - RNA, 18 nt, Human
ccuaaucacucagagcag

SEQ ID NO: 3508796 - RNA, 17 nt, Human
ccuaaucaggcugaggu

SEQ ID NO: 3508797 - RNA, 21 nt, Human
ccuaauccaggcagauccagg

SEQ ID NO: 3508798 - RNA, 16 nt, Human
ccuaauccccuucucc

SEQ ID NO: 3508799 - RNA, 22 nt, Human
ccuaaucccugggcauugcuuu

SEQ ID NO: 3508800 - RNA, 14 nt, Human
ccuaaucucauacc

SEQ ID NO: 3508801 - RNA, 14 nt, Human
ccuaaucuucugaa

SEQ ID NO: 3508802 - RNA, 20 nt, Human
ccuaaugcgcaggcuggccc

SEQ ID NO: 3508803 - RNA, 21 nt, Human
ccuaaugcgcaggcuggcccu

SEQ ID NO: 3508804 - RNA, 16 nt, Human
ccuaaugcuccuuguu

SEQ ID NO: 3508805 - RNA, 17 nt, Human
ccuaaugucuucauaaa

SEQ ID NO: 3508806 - RNA, 12 nt, Human
ccuaauguguuu

SEQ ID NO: 3508807 - RNA, 13 nt, Human
ccuaauguguuua

SEQ ID NO: 3508808 - RNA, 23 nt, Human
ccuaauuagagcagaugaccccu

SEQ ID NO: 3508809 - RNA, 16 nt, Human
ccuaauucaauucaaa

SEQ ID NO: 3508810 - RNA, 15 nt, Human
ccuaauuccacagcu

SEQ ID NO: 3508811 - RNA, 18 nt, Human
ccuaauucgaugaaggcu

SEQ ID NO: 3508812 - RNA, 14 nt, Human
ccuaauuucuccuc

SEQ ID NO: 3508813 - RNA, 16 nt, Human
ccuaauuucuccuccc

SEQ ID NO: 3508814 - RNA, 17 nt, Human
ccuaauuucuccucccu

SEQ ID NO: 3508815 - RNA, 23 nt, Human
ccuaauuucuccucccuuccuuu

SEQ ID NO: 3508816 - RNA, 18 nt, Human
ccuacaagagcagccugu

SEQ ID NO: 3508817 - RNA, 21 nt, Human
ccuacaagagcagccuguggc

SEQ ID NO: 3508818 - RNA, 18 nt, Human
ccuacaagauuuagaaaa

SEQ ID NO: 3508819 - RNA, 19 nt, Human
ccuacaagauuuagaaaaa

SEQ ID NO: 3508820 - RNA, 13 nt, Human
ccuacaaggccua

SEQ ID NO: 3508821 - RNA, 23 nt, Human
ccuacacaggacagggguuccuu

SEQ ID NO: 3508822 - RNA, 21 nt, Human
ccuacagaaaaaccuuggguu

SEQ ID NO: 3508823 - RNA, 23 nt, Human
ccuacagaggucucugccggcuc

SEQ ID NO: 3508824 - RNA, 12 nt, Human
ccuacagcacua

SEQ ID NO: 3508825 - RNA, 18 nt, Human
ccuacagcacuacugggu

SEQ ID NO: 3508826 - RNA, 21 nt, Human
ccuacagcacuacuggguguc

SEQ ID NO: 3508827 - RNA, 15 nt, Human
ccuacaggcagucuc

SEQ ID NO: 3508828 - RNA, 18 nt, Human
ccuacagggggucuggcu

SEQ ID NO: 3508829 - RNA, 19 nt, Human
ccuacagggggucuggcug

SEQ ID NO: 3508830 - RNA, 21 nt, Human
ccuacagggggucuggcuggu

SEQ ID NO: 3508831 - RNA, 20 nt, Human
ccuacaguuuuaacugugga

SEQ ID NO: 3508832 - RNA, 19 nt, Human
ccuacaugaaacagaaaca

SEQ ID NO: 3508833 - RNA, 17 nt, Human
ccuacaugcuuugugaa

SEQ ID NO: 3508834 - RNA, 22 nt, Human
ccuacauguauuuguuugcaua

SEQ ID NO: 3508835 - RNA, 15 nt, Human
ccuaccaaccucuga

SEQ ID NO: 3508836 - RNA, 15 nt, Human
ccuaccaaugcaugc

SEQ ID NO: 3508837 - RNA, 14 nt, Human
ccuaccacaguguc

SEQ ID NO: 3508838 - RNA, 17 nt, Human
ccuaccaccccuuccug

SEQ ID NO: 3508839 - RNA, 18 nt, Human
ccuaccaccccuuccugu

SEQ ID NO: 3508840 - RNA, 20 nt, Human
ccuaccacccgguccccacu

SEQ ID NO: 3508841 - RNA, 13 nt, Human
ccuaccacugucu

SEQ ID NO: 3508842 - RNA, 16 nt, Human
ccuaccagcgcccgcu

SEQ ID NO: 3508843 - RNA, 19 nt, Human
ccuaccagcgcccgcuggg

SEQ ID NO: 3508844 - RNA, 22 nt, Human
ccuaccaucagggacaggauga

SEQ ID NO: 3508845 - RNA, 19 nt, Human
ccuacccauccccgcagug

SEQ ID NO: 3508846 - RNA, 17 nt, Human
ccuaccccaauuccuug

SEQ ID NO: 3508847 - RNA, 18 nt, Human
ccuaccccaauuccuugu

SEQ ID NO: 3508848 - RNA, 19 nt, Human
ccuaccccacaccaggccg

SEQ ID NO: 3508849 - RNA, 21 nt, Human
ccuaccccacaccaggccguc

SEQ ID NO: 3508850 - RNA, 13 nt, Human
ccuaccccuggcu

SEQ ID NO: 3508851 - RNA, 18 nt, Human
ccuacccuaaccaaguuc

SEQ ID NO: 3508852 - RNA, 14 nt, Human
ccuacccucgggcc

SEQ ID NO: 3508853 - RNA, 18 nt, Human
ccuacccucgggcccacc

SEQ ID NO: 3508854 - RNA, 19 nt, Human
ccuacccucgggcccaccu

SEQ ID NO: 3508855 - RNA, 16 nt, Human
ccuaccgagucucuuc

SEQ ID NO: 3508856 - RNA, 17 nt, Human
ccuaccgagucucuucu

SEQ ID NO: 3508857 - RNA, 20 nt, Human
ccuaccgagucucuucucca

SEQ ID NO: 3508858 - RNA, 21 nt, Human
ccuaccgagucucuucuccac

SEQ ID NO: 3508859 - RNA, 23 nt, Human
ccuaccgagucucuucuccacug

SEQ ID NO: 3508860 - RNA, 20 nt, Human
ccuaccggcaauuuccggcc

SEQ ID NO: 3508861 - RNA, 19 nt, Human
ccuaccuaacccagaaaau

SEQ ID NO: 3508862 - RNA, 13 nt, Human
ccuaccucagccu

SEQ ID NO: 3508863 - RNA, 21 nt, Human
ccuaccucagccuagacccuc

SEQ ID NO: 3508864 - RNA, 12 nt, Human
ccuaccucaggu

SEQ ID NO: 3508865 - RNA, 14 nt, Human
ccuaccucagguug

SEQ ID NO: 3508866 - RNA, 14 nt, Human
ccuaccugcccugg

SEQ ID NO: 3508867 - RNA, 14 nt, Human
ccuaccugugccug

SEQ ID NO: 3508868 - RNA, 22 nt, Human
cccuggcuuuucacugcuggcu

SEQ ID NO: 3508869 - RNA, 14 nt, Human
cccugggagacaga

SEQ ID NO: 3508870 - RNA, 15 nt, Human
cccugggaggcucug

SEQ ID NO: 3508871 - RNA, 16 nt, Human
cccugggaggcucugg

SEQ ID NO: 3508872 - RNA, 17 nt, Human
cccugggaggcucugga

SEQ ID NO: 3508873 - RNA, 23 nt, Human
cccugggagggacaugcuuagca

SEQ ID NO: 3508874 - RNA, 20 nt, Human
cccugggaucugguggucag

SEQ ID NO: 3508875 - RNA, 15 nt, Human
cccugggauguccac

SEQ ID NO: 3508876 - RNA, 12 nt, Human
cccugggccagg

SEQ ID NO: 3508877 - RNA, 13 nt, Human
cccugggcccugg

SEQ ID NO: 3508878 - RNA, 14 nt, Human
cccugggccugcug

SEQ ID NO: 3508879 - RNA, 15 nt, Human
cccugggccugcugc

SEQ ID NO: 3508880 - RNA, 16 nt, Human
cccugggccugcugcu

SEQ ID NO: 3508881 - RNA, 17 nt, Human
cccugggcucggaggcu

SEQ ID NO: 3508882 - RNA, 13 nt, Human
cccugggcucugc

SEQ ID NO: 3508883 - RNA, 14 nt, Human
cccugggcucugug

SEQ ID NO: 3508884 - RNA, 21 nt, Human
cccugggcuuggccugcugug

SEQ ID NO: 3508885 - RNA, 22 nt, Human
cccugggcuuggccugcuguga

SEQ ID NO: 3508886 - RNA, 19 nt, Human
cccuggggacagcaagggc

SEQ ID NO: 3508887 - RNA, 12 nt, Human
cccuggggccug

SEQ ID NO: 3508888 - RNA, 20 nt, Human
cccuggggccugacugcuca

SEQ ID NO: 3508889 - RNA, 21 nt, Human
cccuggggccugacugcucag

SEQ ID NO: 3508890 - RNA, 23 nt, Human
cccuggggccuggaccugccucc

SEQ ID NO: 3508891 - RNA, 13 nt, Human
aaaaaaaaaccaa

SEQ ID NO: 3508892 - RNA, 10 nt, Human
aaaaaaaaga

SEQ ID NO: 3508893 - RNA, 11 nt, Human
aaaaaaaagcu

SEQ ID NO: 3508894 - RNA, 13 nt, Human
aaaaaaaauuacu

SEQ ID NO: 3508895 - RNA, 13 nt, Human
aaaaaaacauucu

SEQ ID NO: 3508896 - RNA, 11 nt, Human
aaaaaaaccac

SEQ ID NO: 3508897 - RNA, 11 nt, Human
aaaaaaacuuu

SEQ ID NO: 3508898 - RNA, 10 nt, Human
aaaaaaagaa

SEQ ID NO: 3508899 - RNA, 13 nt, Human
aaaaaaagaaaau

SEQ ID NO: 3508900 - RNA, 12 nt, Human
aaaaaaagauga

SEQ ID NO: 3508901 - RNA, 12 nt, Human
aaaaaaagcaug

SEQ ID NO: 3508902 - RNA, 13 nt, Human
aaaaaaagcaugu

SEQ ID NO: 3508903 - RNA, 12 nt, Human
aaaaaaaguauu

SEQ ID NO: 3508904 - RNA, 13 nt, Human
aaaaaaauacuug

SEQ ID NO: 3508905 - RNA, 12 nt, Human
aaaaaaaugaca

SEQ ID NO: 3508906 - RNA, 11 nt, Human
aaaaaaaugcc

SEQ ID NO: 3508907 - RNA, 13 nt, Human
aaaaaaauguauu

SEQ ID NO: 3508908 - RNA, 15 nt, Human
aaaaaacagaggcca

SEQ ID NO: 3508909 - RNA, 10 nt, Human
aaaaaagaaa

SEQ ID NO: 3508910 - RNA, 12 nt, Human
aaaaaagaaaug

SEQ ID NO: 3508911 - RNA, 12 nt, Human
aaaaaagaaugu

SEQ ID NO: 3508912 - RNA, 14 nt, Human
aaaaaagaauguca

SEQ ID NO: 3508913 - RNA, 12 nt, Human
aaaaaagaggaa

SEQ ID NO: 3508914 - RNA, 13 nt, Human
aaaaaagcugaau

SEQ ID NO: 3508915 - RNA, 19 nt, Human
aaaaaagcuuuaugauuuu

SEQ ID NO: 3508916 - RNA, 11 nt, Human
aaaaaaggaaa

SEQ ID NO: 3508917 - RNA, 16 nt, Human
aaaaaagucaccaaau

SEQ ID NO: 3508918 - RNA, 13 nt, Human
aaaaaagucagag

SEQ ID NO: 3508919 - RNA, 13 nt, Human
aaaaaaguuauau

SEQ ID NO: 3508920 - RNA, 17 nt, Human
agacacaggcccggcuc

SEQ ID NO: 3508921 - RNA, 21 nt, Human
agacacaggcccggcuccagg

SEQ ID NO: 3508922 - RNA, 22 nt, Human
agacacaggcccggcuccaggc

SEQ ID NO: 3508923 - RNA, 16 nt, Human
agacacagggacuuga

SEQ ID NO: 3508924 - RNA, 20 nt, Human
agacacagggacuugaaguu

SEQ ID NO: 3508925 - RNA, 21 nt, Human
agacacagucauacugucacu

SEQ ID NO: 3508926 - RNA, 19 nt, Human
agacacaucgcacugugga

SEQ ID NO: 3508927 - RNA, 14 nt, Human
agacacaugccagg

SEQ ID NO: 3508928 - RNA, 21 nt, Human
agacacaugccagggccaugu

SEQ ID NO: 3508929 - RNA, 16 nt, Human
agacacauguccaaga

SEQ ID NO: 3508930 - RNA, 24 nt, Human
agacacauguccaagaagcccagg

SEQ ID NO: 3508931 - RNA, 15 nt, Human
agacaccaaaguucu

SEQ ID NO: 3508932 - RNA, 16 nt, Human
agacaccaaaguucua

SEQ ID NO: 3508933 - RNA, 21 nt, Human
agacaccaucuuuugugagau

SEQ ID NO: 3508934 - RNA, 15 nt, Human
agacacccaggacuu

SEQ ID NO: 3508935 - RNA, 14 nt, Human
agacacccuggcag

SEQ ID NO: 3508936 - RNA, 12 nt, Human
agacaccucaga

SEQ ID NO: 3508937 - RNA, 15 nt, Human
agacaccucagagcc

SEQ ID NO: 3508938 - RNA, 16 nt, Human
agacaccugcaccucc

SEQ ID NO: 3508939 - RNA, 17 nt, Human
agacaccugcaccuccc

SEQ ID NO: 3508940 - RNA, 20 nt, Human
agacaccugcaccucccccc

SEQ ID NO: 3508941 - RNA, 17 nt, Human
agacaccuugacagggc

SEQ ID NO: 3508942 - RNA, 22 nt, Human
agacaccuuggacauccuccuc

SEQ ID NO: 3508943 - RNA, 20 nt, Human
agacacgcacggcagccaca

SEQ ID NO: 3508944 - RNA, 22 nt, Human
agacacgccuuccccucagcca

SEQ ID NO: 3508945 - RNA, 21 nt, Human
agacacggagcccagcccucc

SEQ ID NO: 3508946 - RNA, 21 nt, Human
agacacggaucugagaaucuu

SEQ ID NO: 3508947 - RNA, 14 nt, Human
agacacucugcucu

SEQ ID NO: 3508948 - RNA, 15 nt, Human
agacacucugcucug

SEQ ID NO: 3508949 - RNA, 13 nt, Human
agacacucuggcu

SEQ ID NO: 3508950 - RNA, 18 nt, Human
agacacugaaaaaucuaa

SEQ ID NO: 3508951 - RNA, 13 nt, Human
agacacugaaaua

SEQ ID NO: 3508952 - RNA, 20 nt, Human
agacacugaaauauacacac

SEQ ID NO: 3508953 - RNA, 20 nt, Human
agacacuggcugccagcuau

SEQ ID NO: 3508954 - RNA, 12 nt, Human
agacacugguuu

SEQ ID NO: 3508955 - RNA, 20 nt, Human
agacacugguuuacacuuua

SEQ ID NO: 3508956 - RNA, 20 nt, Human
agacacuucuaaaugaagug

SEQ ID NO: 3508957 - RNA, 23 nt, Human
agacacuuuggaaguuuguguuc

SEQ ID NO: 3508958 - RNA, 15 nt, Human
agacagaaaaaacug

SEQ ID NO: 3508959 - RNA, 17 nt, Human
agacagaaccuuguuau

SEQ ID NO: 3508960 - RNA, 17 nt, Human
agacagaagcaggcugg

SEQ ID NO: 3508961 - RNA, 12 nt, Human
agacagaaucuc

SEQ ID NO: 3508962 - RNA, 20 nt, Human
agacagaaucucagucuguc

SEQ ID NO: 3508963 - RNA, 14 nt, Human
agacagacacacac

SEQ ID NO: 3508964 - RNA, 19 nt, Human
agacagagaauaugucugc

SEQ ID NO: 3508965 - RNA, 16 nt, Human
agacagagaccuccug

SEQ ID NO: 3508966 - RNA, 21 nt, Human
agacagagaccuccugccucc

SEQ ID NO: 3508967 - RNA, 20 nt, Human
agacagagaggacuguaggg

SEQ ID NO: 3508968 - RNA, 16 nt, Human
agacagagccaggaga

SEQ ID NO: 3508969 - RNA, 20 nt, Human
agacagagccaggagaagcu

SEQ ID NO: 3508970 - RNA, 22 nt, Human
agacagagccccacccucagau

SEQ ID NO: 3508971 - RNA, 24 nt, Human
agacagagccccacccucagaugc

SEQ ID NO: 3508972 - RNA, 19 nt, Human
agacagagcccugugaggc

SEQ ID NO: 3508973 - RNA, 13 nt, Human
agacagagcuaca

SEQ ID NO: 3508974 - RNA, 15 nt, Human
agacagagcuacaca

SEQ ID NO: 3508975 - RNA, 15 nt, Human
agacagagcucacaa

SEQ ID NO: 3508976 - RNA, 15 nt, Human
agacagaggcccuca

SEQ ID NO: 3508977 - RNA, 19 nt, Human
agacagagucucacuguug

SEQ ID NO: 3508978 - RNA, 20 nt, Human
agacagagucucacuguugc

SEQ ID NO: 3508979 - RNA, 19 nt, Human
agacagagucuuacucugu

SEQ ID NO: 3508980 - RNA, 21 nt, Human
agacagauaccuccaacccug

SEQ ID NO: 3508981 - RNA, 23 nt, Human
agacagauaccuccaacccugcc

SEQ ID NO: 3508982 - RNA, 19 nt, Human
agacagaugccccagagcu

SEQ ID NO: 3508983 - RNA, 12 nt, Human
agacagcagcuc

SEQ ID NO: 3508984 - RNA, 14 nt, Human
agacagcaggcagc

SEQ ID NO: 3508985 - RNA, 23 nt, Human
agacagcccaggauacuggcaca

SEQ ID NO: 3508986 - RNA, 18 nt, Human
agacagccccagagcagg

SEQ ID NO: 3508987 - RNA, 16 nt, Human
agacagcccgggcucu

SEQ ID NO: 3508988 - RNA, 13 nt, Human
agacagcccucca

SEQ ID NO: 3508989 - RNA, 11 nt, Human
agacagccugu

SEQ ID NO: 3508990 - RNA, 14 nt, Human
agacagcugccugg

SEQ ID NO: 3508991 - RNA, 15 nt, Human
agacagcugccuggg

SEQ ID NO: 3508992 - RNA, 16 nt, Human
agacagcugccuggga

SEQ ID NO: 3508993 - RNA, 19 nt, Human
agacaggaaaauccucugg

SEQ ID NO: 3508994 - RNA, 15 nt, Human
agacaggaccaggga

SEQ ID NO: 3508995 - RNA, 22 nt, Human
agacaggaccccugcaguuccc

SEQ ID NO: 3508996 - RNA, 15 nt, Human
agacaggagacaaaa

SEQ ID NO: 3508997 - RNA, 23 nt, Human
agacaggagaccuggcacuggau

SEQ ID NO: 3508998 - RNA, 14 nt, Human
agacaggagggcaa

SEQ ID NO: 3508999 - RNA, 19 nt, Human
agacaggagggcaagggcc

SEQ ID NO: 3509000 - RNA, 20 nt, Human
agacaggcaagcaccuccug

SEQ ID NO: 3509001 - RNA, 15 nt, Human
agacaggcucuuagc

SEQ ID NO: 3509002 - RNA, 19 nt, Human
agacagggucaaaguguuu

SEQ ID NO: 3509003 - RNA, 21 nt, Human
agacaggguuuggcugugucu

SEQ ID NO: 3509004 - RNA, 21 nt, Human
agacaggguuuugccauguug

SEQ ID NO: 3509005 - RNA, 22 nt, Human
agacaggucccuccccuucucu

SEQ ID NO: 3509006 - RNA, 18 nt, Human
agacaguauauaacuaac

SEQ ID NO: 3509007 - RNA, 13 nt, Human
agacagucccugc

SEQ ID NO: 3509008 - RNA, 15 nt, Human
agacagucccugcca

SEQ ID NO: 3509009 - RNA, 18 nt, Human
agacaguccuaacaauau

SEQ ID NO: 3509010 - RNA, 14 nt, Human
agacagugaaagaa

SEQ ID NO: 3509011 - RNA, 13 nt, Human
agacagugggaaa

SEQ ID NO: 3509012 - RNA, 14 nt, Human
agacagugggaaau

SEQ ID NO: 3509013 - RNA, 16 nt, Human
agacaguguauguaga

SEQ ID NO: 3509014 - RNA, 17 nt, Human
agacaguguauguagaa

SEQ ID NO: 3509015 - RNA, 21 nt, Human
agacaguguauguagaagcau

SEQ ID NO: 3509016 - RNA, 14 nt, Human
agacaguucaagaa

SEQ ID NO: 3509017 - RNA, 20 nt, Human
agacaguugggugagaacaa

SEQ ID NO: 3509018 - RNA, 14 nt, Human
agacaguuggguuu

SEQ ID NO: 3509019 - RNA, 21 nt, Human
agacaguuucuuagcuuuuua

SEQ ID NO: 3509020 - RNA, 16 nt, Human
agacaguuuguaaaug

SEQ ID NO: 3509021 - RNA, 21 nt, Human
agacaguuuguaaauguuauu

SEQ ID NO: 3509022 - RNA, 21 nt, Human
agacaguuuugagaacguaaa

SEQ ID NO: 3509023 - RNA, 14 nt, Human
agacauaaaggaaa

SEQ ID NO: 3509024 - RNA, 21 nt, Human
agacauaaaggaaaagacaca

SEQ ID NO: 3509025 - RNA, 23 nt, Human
agacauaaaggaaaagacacauu

SEQ ID NO: 3509026 - RNA, 18 nt, Human
agacauaaccacugcuuc

SEQ ID NO: 3509027 - RNA, 18 nt, Human
agacauacgaaacacaaa

SEQ ID NO: 3509028 - RNA, 23 nt, Human
agacauacuaaccagcagaaaug

SEQ ID NO: 3509029 - RNA, 13 nt, Human
agacauacuugaa

SEQ ID NO: 3509030 - RNA, 19 nt, Human
agacauacuugaagggcca

SEQ ID NO: 3509031 - RNA, 21 nt, Human
agacauagaauuaacacauga

SEQ ID NO: 3509032 - RNA, 18 nt, Human
agacauaggccaugaaaa

SEQ ID NO: 3509033 - RNA, 19 nt, Human
agacauaggccaugaaaaa

SEQ ID NO: 3509034 - RNA, 20 nt, Human
agacaucaugaauuuuacau

SEQ ID NO: 3509035 - RNA, 22 nt, Human
agacauccauaaagaagcaaua

SEQ ID NO: 3509036 - RNA, 21 nt, Human
agacauccauguuuguaaaac

SEQ ID NO: 3509037 - RNA, 22 nt, Human
agacauccauguuuguaaaacu

SEQ ID NO: 3509038 - RNA, 16 nt, Human
agacaucucugcaccc

SEQ ID NO: 3509039 - RNA, 14 nt, Human
agacaugaagggaa

SEQ ID NO: 3509040 - RNA, 19 nt, Human
agacauggagacuccugcc

SEQ ID NO: 3509041 - RNA, 15 nt, Human
agacauggagguucu

SEQ ID NO: 3509042 - RNA, 17 nt, Human
agacauggagguucuaa

SEQ ID NO: 3509043 - RNA, 20 nt, Human
agacauggagguucuaaggc

SEQ ID NO: 3509044 - RNA, 21 nt, Human
agacauggagguucuaaggcc

SEQ ID NO: 3509045 - RNA, 22 nt, Human
agacauggcuugccacagcucu

SEQ ID NO: 3509046 - RNA, 20 nt, Human
agacauggcuuucagaaaac

SEQ ID NO: 3509047 - RNA, 12 nt, Human
agacauggggag

SEQ ID NO: 3509048 - RNA, 19 nt, Human
agacauguagguguuuguu

SEQ ID NO: 3509049 - RNA, 22 nt, Human
agacauguagguguuuguucau

SEQ ID NO: 3509050 - RNA, 13 nt, Human
agacaugugacau

SEQ ID NO: 3509051 - RNA, 15 nt, Human
agacauguuuuagac

SEQ ID NO: 3509052 - RNA, 12 nt, Human
agacauuaaauc

SEQ ID NO: 3509053 - RNA, 14 nt, Human
agacauuaaaucua

SEQ ID NO: 3509054 - RNA, 15 nt, Human
agacauuaaaucuau

SEQ ID NO: 3509055 - RNA, 22 nt, Human
agacauuaaaucuaugaaguau

SEQ ID NO: 3509056 - RNA, 18 nt, Human
agacauuccaaaacgaag

SEQ ID NO: 3509057 - RNA, 17 nt, Human
agacauuccugggcaca

SEQ ID NO: 3509058 - RNA, 20 nt, Human
agacauucucgcuucccuga

SEQ ID NO: 3509059 - RNA, 19 nt, Human
agacauucugccaggcccc

SEQ ID NO: 3509060 - RNA, 12 nt, Human
agacauucuguc

SEQ ID NO: 3509061 - RNA, 15 nt, Human
agacauuggcaccua

SEQ ID NO: 3509062 - RNA, 18 nt, Human
agacauugggucuauucc

SEQ ID NO: 3509063 - RNA, 19 nt, Human
agacauugggucuauucca

SEQ ID NO: 3509064 - RNA, 23 nt, Human
agacauugggucuauuccagcuc

SEQ ID NO: 3509065 - RNA, 13 nt, Human
agacauugucaau

SEQ ID NO: 3509066 - RNA, 22 nt, Human
agacauuguuuugccaacauug

SEQ ID NO: 3509067 - RNA, 14 nt, Human
agacauuucuuuuc

SEQ ID NO: 3509068 - RNA, 22 nt, Human
agacauuucuuuucuuuuuaca

SEQ ID NO: 3509069 - RNA, 15 nt, Human
aggaauaaugggcuu

SEQ ID NO: 3509070 - RNA, 18 nt, Human
aggaauaauuauuuauuu

SEQ ID NO: 3509071 - RNA, 22 nt, Human
aggaauaauuauuuauuuaaua

SEQ ID NO: 3509072 - RNA, 15 nt, Human
aggaauaccuguccc

SEQ ID NO: 3509073 - RNA, 18 nt, Human
aggaauaccugucccccu

SEQ ID NO: 3509074 - RNA, 19 nt, Human
aggaauauagauuaaauca

SEQ ID NO: 3509075 - RNA, 17 nt, Human
aggaauauauggcagag

SEQ ID NO: 3509076 - RNA, 23 nt, Human
aggaauauauggcagaguuguaa

SEQ ID NO: 3509077 - RNA, 20 nt, Human
aggaauaugacggaagaaca

SEQ ID NO: 3509078 - RNA, 19 nt, Human
aggaauauuauauuuggau

SEQ ID NO: 3509079 - RNA, 20 nt, Human
aggaauauuauauuuggaug

SEQ ID NO: 3509080 - RNA, 20 nt, Human
agacauuuguuauuuuggaa

SEQ ID NO: 3509081 - RNA, 16 nt, Human
agacauuuuaacaaga

SEQ ID NO: 3509082 - RNA, 20 nt, Human
agacauuuuaacaagaagau

SEQ ID NO: 3509083 - RNA, 21 nt, Human
agacauuuuaacaagaagaug

SEQ ID NO: 3509084 - RNA, 22 nt, Human
agacauuuuuccguuugcuuuu

SEQ ID NO: 3509085 - RNA, 13 nt, Human
agaccaaaauaaa

SEQ ID NO: 3509086 - RNA, 17 nt, Human
agaccaaaaugacaaug

SEQ ID NO: 3509087 - RNA, 18 nt, Human
agaccaaaaugacaauga

SEQ ID NO: 3509088 - RNA, 16 nt, Human
agaccaaacagugcug

SEQ ID NO: 3509089 - RNA, 13 nt, Human
agaccaaacuuca

SEQ ID NO: 3509090 - RNA, 21 nt, Human
agaccaacguuacucagggcu

SEQ ID NO: 3509091 - RNA, 22 nt, Human
agaccaacguuacucagggcuc

SEQ ID NO: 3509092 - RNA, 21 nt, Human
agaccaagauggcccauccug

SEQ ID NO: 3509093 - RNA, 14 nt, Human
agaccaaggaacaa

SEQ ID NO: 3509094 - RNA, 17 nt, Human
agaccaaggcgggagca

SEQ ID NO: 3509095 - RNA, 23 nt, Human
agaccaaggcgggagcaucucuu

SEQ ID NO: 3509096 - RNA, 23 nt, Human
agaccaccagggcaucucugggc

SEQ ID NO: 3509097 - RNA, 12 nt, Human
agaccaccucuc

SEQ ID NO: 3509098 - RNA, 19 nt, Human
agaccacgcccguccugcc

SEQ ID NO: 3509099 - RNA, 14 nt, Human
agaccagagcucug

SEQ ID NO: 3509100 - RNA, 17 nt, Human
agaccagagcucuggag

SEQ ID NO: 3509101 - RNA, 18 nt, Human
agaccagagcucuggagc

SEQ ID NO: 3509102 - RNA, 14 nt, Human
agaccagccuggcc

SEQ ID NO: 3509103 - RNA, 15 nt, Human
agaccagccuggcca

SEQ ID NO: 3509104 - RNA, 19 nt, Human
agaccagccuggccaacau

SEQ ID NO: 3509105 - RNA, 22 nt, Human
agaccagccugggcaacaaagu

SEQ ID NO: 3509106 - RNA, 16 nt, Human
agaccaggcugugucc

SEQ ID NO: 3509107 - RNA, 22 nt, Human
agaccaguugaauaaaagugca

SEQ ID NO: 3509108 - RNA, 18 nt, Human
agaccaguugggagcacu

SEQ ID NO: 3509109 - RNA, 21 nt, Human
agaccaucccugaaggccccg

SEQ ID NO: 3509110 - RNA, 12 nt, Human
agaccauggaca

SEQ ID NO: 3509111 - RNA, 22 nt, Human
agaccauggacacuacacccag

SEQ ID NO: 3509112 - RNA, 20 nt, Human
agaccauguggagacuucau

SEQ ID NO: 3509113 - RNA, 19 nt, Human
agaccauuggggcucccag

SEQ ID NO: 3509114 - RNA, 15 nt, Human
agaccauuuaacaug

SEQ ID NO: 3509115 - RNA, 19 nt, Human
agacccaaaaggcagaagc

SEQ ID NO: 3509116 - RNA, 22 nt, Human
agacccaagcugccuccccucu

SEQ ID NO: 3509117 - RNA, 16 nt, Human
agacccaaggaggaaa

SEQ ID NO: 3509118 - RNA, 17 nt, Human
agacccaccccaccugc

SEQ ID NO: 3509119 - RNA, 21 nt, Human
agacccaccccaccugcaggg

SEQ ID NO: 3509120 - RNA, 17 nt, Human
agacccagcccucaucc

SEQ ID NO: 3509121 - RNA, 14 nt, Human
agacccagcggaca

SEQ ID NO: 3509122 - RNA, 15 nt, Human
agacccauuccuauu

SEQ ID NO: 3509123 - RNA, 16 nt, Human
agacccauuccuauuu

SEQ ID NO: 3509124 - RNA, 15 nt, Human
agacccauuccuucc

SEQ ID NO: 3509125 - RNA, 18 nt, Human
agaccccaagaggaaguu

SEQ ID NO: 3509126 - RNA, 16 nt, Human
agaccccacccaagcu

SEQ ID NO: 3509127 - RNA, 15 nt, Human
agacccccacaccuc

SEQ ID NO: 3509128 - RNA, 13 nt, Human
agacccccacccc

SEQ ID NO: 3509129 - RNA, 17 nt, Human
agacccccaccccuucc

SEQ ID NO: 3509130 - RNA, 23 nt, Human
agacccccccccccaacagaaca

SEQ ID NO: 3509131 - RNA, 24 nt, Human
agaccccuaacccuuugugugcuc

SEQ ID NO: 3509132 - RNA, 21 nt, Human
agaccccucuggccaggaugg

SEQ ID NO: 3509133 - RNA, 12 nt, Human
agaccccuggcc

SEQ ID NO: 3509134 - RNA, 12 nt, Human
agaccccuggcu

SEQ ID NO: 3509135 - RNA, 13 nt, Human
agaccccugucuu

SEQ ID NO: 3509136 - RNA, 15 nt, Human
agacccgaggaaacu

SEQ ID NO: 3509137 - RNA, 17 nt, Human
agacccuaaacauccau

SEQ ID NO: 3509138 - RNA, 20 nt, Human
agacccucaugcugccaaua

SEQ ID NO: 3509139 - RNA, 21 nt, Human
agacccucaugcugccaauau

SEQ ID NO: 3509140 - RNA, 17 nt, Human
agacccucugccaccag

SEQ ID NO: 3509141 - RNA, 20 nt, Human
agacccucuugcccauccug

SEQ ID NO: 3509142 - RNA, 19 nt, Human
agacccugcccugugggcc

SEQ ID NO: 3509143 - RNA, 12 nt, Human
agacccuggagg

SEQ ID NO: 3509144 - RNA, 13 nt, Human
agacccuggagga

SEQ ID NO: 3509145 - RNA, 17 nt, Human
agacccugggugggcuc

SEQ ID NO: 3509146 - RNA, 19 nt, Human
agacccugggugggcucug

SEQ ID NO: 3509147 - RNA, 13 nt, Human
agacccugucucu

SEQ ID NO: 3509148 - RNA, 17 nt, Human
agacccuuauuacacgg

SEQ ID NO: 3509149 - RNA, 13 nt, Human
agacccuuguggu

SEQ ID NO: 3509150 - RNA, 21 nt, Human
agaccgagcgcuuucuggaaa

SEQ ID NO: 3509151 - RNA, 15 nt, Human
agaccgaucggcggc

SEQ ID NO: 3509152 - RNA, 22 nt, Human
agaccgcucucuuuucuguacu

SEQ ID NO: 3509153 - RNA, 12 nt, Human
agaccggaagcu

SEQ ID NO: 3509154 - RNA, 18 nt, Human
agaccggaagcuccuggu

SEQ ID NO: 3509155 - RNA, 15 nt, Human
agaccggccugccag

SEQ ID NO: 3509156 - RNA, 18 nt, Human
agaccggccugccaggag

SEQ ID NO: 3509157 - RNA, 15 nt, Human
agaccguccucaccc

SEQ ID NO: 3509158 - RNA, 18 nt, Human
agaccguccucaccccug

SEQ ID NO: 3509159 - RNA, 20 nt, Human
agaccguccucaccccuguc

SEQ ID NO: 3509160 - RNA, 16 nt, Human
agaccgucuuccucca

SEQ ID NO: 3509161 - RNA, 19 nt, Human
agaccuaacgagaaauaga

SEQ ID NO: 3509162 - RNA, 14 nt, Human
agaccuacaggcug

SEQ ID NO: 3509163 - RNA, 21 nt, Human
agaccuacagggggucuggcu

SEQ ID NO: 3509164 - RNA, 18 nt, Human
agaccuacuguucuaaag

SEQ ID NO: 3509165 - RNA, 22 nt, Human
agaccuacuguucuaaagcucu

SEQ ID NO: 3509166 - RNA, 14 nt, Human
agaccuagggagga

SEQ ID NO: 3509167 - RNA, 15 nt, Human
agaccuagggaggac

SEQ ID NO: 3509168 - RNA, 16 nt, Human
agaccuauguaagaau

SEQ ID NO: 3509169 - RNA, 16 nt, Human
agaccuauuugacaua

SEQ ID NO: 3509170 - RNA, 18 nt, Human
agaccucagccaugagga

SEQ ID NO: 3509171 - RNA, 18 nt, Human
agaccucagugccuuccu

SEQ ID NO: 3509172 - RNA, 15 nt, Human
agaccucaucaggau

SEQ ID NO: 3509173 - RNA, 17 nt, Human
agaccuccccagccccu

SEQ ID NO: 3509174 - RNA, 23 nt, Human
agaccuccccagccccuagccca

SEQ ID NO: 3509175 - RNA, 15 nt, Human
agaccugaauucuuu

SEQ ID NO: 3509176 - RNA, 18 nt, Human
agaccugacucaggcauc

SEQ ID NO: 3509177 - RNA, 14 nt, Human
agaccugauccugg

SEQ ID NO: 3509178 - RNA, 22 nt, Human
agaccugauccuggaggcccag

SEQ ID NO: 3509179 - RNA, 16 nt, Human
agaccugccccuccuc

SEQ ID NO: 3509180 - RNA, 20 nt, Human
agaccugcugagggaccagc

SEQ ID NO: 3509181 - RNA, 19 nt, Human
agaccugcuuuuugaaaug

SEQ ID NO: 3509182 - RNA, 20 nt, Human
agaccugcuuuuugaaauga

SEQ ID NO: 3509183 - RNA, 22 nt, Human
agaccugcuuuuugaaaugaaa

SEQ ID NO: 3509184 - RNA, 14 nt, Human
agaccugucuccug

SEQ ID NO: 3509185 - RNA, 15 nt, Human
agaccugucuccugg

SEQ ID NO: 3509186 - RNA, 13 nt, Human
agaccuuccauaa

SEQ ID NO: 3509187 - RNA, 18 nt, Human
agaccuucuaggacgcca

SEQ ID NO: 3509188 - RNA, 18 nt, Human
agaccuucuccaaaugag

SEQ ID NO: 3509189 - RNA, 19 nt, Human
agaccuucuccaaaugaga

SEQ ID NO: 3509190 - RNA, 15 nt, Human
agaccuucuccuuca

SEQ ID NO: 3509191 - RNA, 21 nt, Human
agaccuucuccuucaccuuug

SEQ ID NO: 3509192 - RNA, 23 nt, Human
agaccuucuccuucaccuuuguc

SEQ ID NO: 3509193 - RNA, 15 nt, Human
agaccuuguguguau

SEQ ID NO: 3509194 - RNA, 18 nt, Human
agaccuuguuacuucuga

SEQ ID NO: 3509195 - RNA, 19 nt, Human
agaccuuguuacuucugag

SEQ ID NO: 3509196 - RNA, 21 nt, Human
agaccuuguucacacucucac

SEQ ID NO: 3509197 - RNA, 12 nt, Human
agaccuuuucaa

SEQ ID NO: 3509198 - RNA, 14 nt, Human
agaccuuuuuuagg

SEQ ID NO: 3509199 - RNA, 21 nt, Human
agaccuuuuuuuuuuuuccaa

SEQ ID NO: 3509200 - RNA, 18 nt, Human
agacgaaacauuuguucu

SEQ ID NO: 3509201 - RNA, 21 nt, Human
agacgacaaggaaaggcaaau

SEQ ID NO: 3509202 - RNA, 13 nt, Human
agacgacaggcga

SEQ ID NO: 3509203 - RNA, 23 nt, Human
agacgaggcccucgggcccagcc

SEQ ID NO: 3509204 - RNA, 20 nt, Human
agacgccaccauuccuggaa

SEQ ID NO: 3509205 - RNA, 13 nt, Human
agacgccugagga

SEQ ID NO: 3509206 - RNA, 13 nt, Human
agacgccuggcug

SEQ ID NO: 3509207 - RNA, 14 nt, Human
agacgccuuacugg

SEQ ID NO: 3509208 - RNA, 15 nt, Human
agacgcugcugucac

SEQ ID NO: 3509209 - RNA, 16 nt, Human
agacgcugugcugccc

SEQ ID NO: 3509210 - RNA, 22 nt, Human
agacgcugugcugcccugccca

SEQ ID NO: 3509211 - RNA, 20 nt, Human
agacggaaggguaaacaaua

SEQ ID NO: 3509212 - RNA, 22 nt, Human
agacggagcccuggcaugucaa

SEQ ID NO: 3509213 - RNA, 19 nt, Human
agacggagucccaccuugg

SEQ ID NO: 3509214 - RNA, 15 nt, Human
agacggagucucgcu

SEQ ID NO: 3509215 - RNA, 14 nt, Human
agacggauugcauu

SEQ ID NO: 3509216 - RNA, 13 nt, Human
agacggggcugga

SEQ ID NO: 3509217 - RNA, 19 nt, Human
agacgguucaccagccucu

SEQ ID NO: 3509218 - RNA, 17 nt, Human
agacgugauuuugcugu

SEQ ID NO: 3509219 - RNA, 21 nt, Human
agacgugcacgcacacugucu

SEQ ID NO: 3509220 - RNA, 22 nt, Human
agacgugcacgcacacugucug

SEQ ID NO: 3509221 - RNA, 14 nt, Human
agacguguuugugu

SEQ ID NO: 3509222 - RNA, 16 nt, Human
agacguuuauaaacag

SEQ ID NO: 3509223 - RNA, 12 nt, Human
agacuaaaagau

SEQ ID NO: 3509224 - RNA, 14 nt, Human
aggaagccucagau

SEQ ID NO: 3509225 - RNA, 22 nt, Human
aggaagccucagauuccuuccc

SEQ ID NO: 3509226 - RNA, 18 nt, Human
aggaagccugauuaaaga

SEQ ID NO: 3509227 - RNA, 16 nt, Human
aggaagcucagacugg

SEQ ID NO: 3509228 - RNA, 20 nt, Human
aggaagcucagacugguuga

SEQ ID NO: 3509229 - RNA, 14 nt, Human
aggaagcucagggc

SEQ ID NO: 3509230 - RNA, 22 nt, Human
aggaagcuccaguccugcucuc

SEQ ID NO: 3509231 - RNA, 17 nt, Human
aggaagcugcuccgugc

SEQ ID NO: 3509232 - RNA, 20 nt, Human
aggaagcuuucucugcuuca

SEQ ID NO: 3509233 - RNA, 22 nt, Human
aggaagcuuuggugagaaccug

SEQ ID NO: 3509234 - RNA, 18 nt, Human
aggaaggaaacccagcuc

SEQ ID NO: 3509235 - RNA, 15 nt, Human
aggaaggagagccug

SEQ ID NO: 3509236 - RNA, 12 nt, Human
aggaaggagcug

SEQ ID NO: 3509237 - RNA, 15 nt, Human
aggaaggagcugccu

SEQ ID NO: 3509238 - RNA, 16 nt, Human
aggaaggagcugccug

SEQ ID NO: 3509239 - RNA, 22 nt, Human
aggagccugcuggucacagccu

SEQ ID NO: 3509240 - RNA, 14 nt, Human
aggagccugugaca

SEQ ID NO: 3509241 - RNA, 19 nt, Human
aggagccuuuuuaaaacac

SEQ ID NO: 3509242 - RNA, 14 nt, Human
aggagcgagcaugu

SEQ ID NO: 3509243 - RNA, 13 nt, Human
aggagcgcaagau

SEQ ID NO: 3509244 - RNA, 17 nt, Human
aggagcgcaagauagau

SEQ ID NO: 3509245 - RNA, 21 nt, Human
aggagcuaaggcucuaugagu

SEQ ID NO: 3509246 - RNA, 17 nt, Human
aggagcuaccugugugg

SEQ ID NO: 3509247 - RNA, 23 nt, Human
aggagcucacuguggugucugug

SEQ ID NO: 3509248 - RNA, 14 nt, Human
aggagcuccagugu

SEQ ID NO: 3509249 - RNA, 15 nt, Human
aggagcuccccuccc

SEQ ID NO: 3509250 - RNA, 13 nt, Human
aggagcugagaau

SEQ ID NO: 3509251 - RNA, 15 nt, Human
aggagcugauacuuu

SEQ ID NO: 3509252 - RNA, 14 nt, Human
aggagcugcccaga

SEQ ID NO: 3509253 - RNA, 18 nt, Human
aggagcugccuuggcuca

SEQ ID NO: 3509254 - RNA, 22 nt, Human
aggagcugccuuggcucagaca

SEQ ID NO: 3509255 - RNA, 16 nt, Human
aggagcugcuggcuug

SEQ ID NO: 3509256 - RNA, 17 nt, Human
aggagcugcuggcuugc

SEQ ID NO: 3509257 - RNA, 18 nt, Human
aggagcugggagccgggc

SEQ ID NO: 3509258 - RNA, 18 nt, Human
aggagcugggauccuaag

SEQ ID NO: 3509259 - RNA, 13 nt, Human
aggagcugggccc

SEQ ID NO: 3509260 - RNA, 20 nt, Human
aggagcuggggaucccuccc

SEQ ID NO: 3509261 - RNA, 17 nt, Human
aggagcuuaccucccac

SEQ ID NO: 3509262 - RNA, 14 nt, Human
aggagcuucugggg

SEQ ID NO: 3509263 - RNA, 23 nt, Human
aggagcuuugacucaggagccug

SEQ ID NO: 3509264 - RNA, 21 nt, Human
aggaggaauaagcucccaggg

SEQ ID NO: 3509265 - RNA, 15 nt, Human
aggaggaauacugaa

SEQ ID NO: 3509266 - RNA, 17 nt, Human
aggaggaaugcuggacu

SEQ ID NO: 3509267 - RNA, 13 nt, Human
aggaggacaauuc

SEQ ID NO: 3509268 - RNA, 14 nt, Human
aggaggacaauuca

SEQ ID NO: 3509269 - RNA, 14 nt, Human
aggaggacccagga

SEQ ID NO: 3509270 - RNA, 13 nt, Human
aggaggagccugu

SEQ ID NO: 3509271 - RNA, 16 nt, Human
aggaggagcuucuggg

SEQ ID NO: 3509272 - RNA, 23 nt, Human
aggaggagggucggugccuucaa

SEQ ID NO: 3509273 - RNA, 21 nt, Human
aggaggagguuuaggucaaga

SEQ ID NO: 3509274 - RNA, 20 nt, Human
aggaggaugucccugggcca

SEQ ID NO: 3509275 - RNA, 20 nt, Human
aggaggauugcuugagccca

SEQ ID NO: 3509276 - RNA, 18 nt, Human
aggaggcaccuacacuca

SEQ ID NO: 3509277 - RNA, 20 nt, Human
aggaggcagaaagcagaggc

SEQ ID NO: 3509278 - RNA, 12 nt, Human
aggaggccaccu

SEQ ID NO: 3509279 - RNA, 14 nt, Human
aggaggccaccucc

SEQ ID NO: 3509280 - RNA, 15 nt, Human
aggaggccagccuug

SEQ ID NO: 3509281 - RNA, 12 nt, Human
aggaggccccug

SEQ ID NO: 3509282 - RNA, 18 nt, Human
aggaggccccuggcccag

SEQ ID NO: 3509283 - RNA, 20 nt, Human
aggaggcucaacaauaaaac

SEQ ID NO: 3509284 - RNA, 12 nt, Human
aggaggcuccag

SEQ ID NO: 3509285 - RNA, 13 nt, Human
aggaggcuccaga

SEQ ID NO: 3509286 - RNA, 18 nt, Human
aggaggcuccagagggca

SEQ ID NO: 3509287 - RNA, 18 nt, Human
aggaggcuccaggcagca

SEQ ID NO: 3509288 - RNA, 16 nt, Human
aggaggcuggaggaag

SEQ ID NO: 3509289 - RNA, 21 nt, Human
aggaggcuggaggaagggggg

SEQ ID NO: 3509290 - RNA, 14 nt, Human
aggaggcuggcugg

SEQ ID NO: 3509291 - RNA, 13 nt, Human
aggaggcuggcuu

SEQ ID NO: 3509292 - RNA, 21 nt, Human
aggaggcugggacgcucugcu

SEQ ID NO: 3509293 - RNA, 20 nt, Human
aggaggcuuggaaagcauca

SEQ ID NO: 3509294 - RNA, 14 nt, Human
aggagggacaaagg

SEQ ID NO: 3509295 - RNA, 21 nt, Human
aggagggacaaaggagccugu

SEQ ID NO: 3509296 - RNA, 19 nt, Human
aggagggacagucucacca

SEQ ID NO: 3509297 - RNA, 15 nt, Human
aggagggagagggag

SEQ ID NO: 3509298 - RNA, 22 nt, Human
aggagggaggcaggggaggggu

SEQ ID NO: 3509299 - RNA, 22 nt, Human
aggagggcgugacucacccaag

SEQ ID NO: 3509300 - RNA, 21 nt, Human
aggagggcguucuuaggcugc

SEQ ID NO: 3509301 - RNA, 19 nt, Human
aggaggggaaaaaaauguu

SEQ ID NO: 3509302 - RNA, 16 nt, Human
aggaggggaagcugca

SEQ ID NO: 3509303 - RNA, 21 nt, Human
aggaggggccccccugcccug

SEQ ID NO: 3509304 - RNA, 13 nt, Human
aggaggggccgcu

SEQ ID NO: 3509305 - RNA, 16 nt, Human
aggaggggcuguaaaa

SEQ ID NO: 3509306 - RNA, 19 nt, Human
aggagggggccgggcgcgg

SEQ ID NO: 3509307 - RNA, 14 nt, Human
aggaggggggaggg

SEQ ID NO: 3509308 - RNA, 23 nt, Human
aggaggggggagggaagggagcc

SEQ ID NO: 3509309 - RNA, 15 nt, Human
aggaggguacagcug

SEQ ID NO: 3509310 - RNA, 17 nt, Human
aggaggguacagcuggg

SEQ ID NO: 3509311 - RNA, 18 nt, Human
aggaggguacagcugggc

SEQ ID NO: 3509312 - RNA, 16 nt, Human
aggagggucggugccu

SEQ ID NO: 3509313 - RNA, 17 nt, Human
aggagggucggugccuu

SEQ ID NO: 3509314 - RNA, 21 nt, Human
aggagggucggugccuucaag

SEQ ID NO: 3509315 - RNA, 15 nt, Human
aggagggucuagagg

SEQ ID NO: 3509316 - RNA, 20 nt, Human
aggagggucuagaggccuga

SEQ ID NO: 3509317 - RNA, 13 nt, Human
aggaggguggggg

SEQ ID NO: 3509318 - RNA, 18 nt, Human
aggaggguuagggagggg

SEQ ID NO: 3509319 - RNA, 14 nt, Human
aggaggucucuaag

SEQ ID NO: 3509320 - RNA, 13 nt, Human
aggaggugaggga

SEQ ID NO: 3509321 - RNA, 21 nt, Human
aggagguggcagcccuguagg

SEQ ID NO: 3509322 - RNA, 15 nt, Human
aggaggugucucagg

SEQ ID NO: 3509323 - RNA, 20 nt, Human
aggaggugucucaggcugcc

SEQ ID NO: 3509324 - RNA, 13 nt, Human
aggaggugugagg

SEQ ID NO: 3509325 - RNA, 14 nt, Human
aggagguuuggaug

SEQ ID NO: 3509326 - RNA, 16 nt, Human
aggaguaaaauucagu

SEQ ID NO: 3509327 - RNA, 21 nt, Human
aggaguaaaauucaguuuuuu

SEQ ID NO: 3509328 - RNA, 11 nt, Human
aggaguaacaa

SEQ ID NO: 3509329 - RNA, 14 nt, Human
aggaguagcugagc

SEQ ID NO: 3509330 - RNA, 17 nt, Human
aggagucacugagacca

SEQ ID NO: 3509331 - RNA, 22 nt, Human
aggaguccaggccauggaggca

SEQ ID NO: 3509332 - RNA, 17 nt, Human
aggagucccaaggaaag

SEQ ID NO: 3509333 - RNA, 22 nt, Human
aggagucccacuccaagccagc

SEQ ID NO: 3509334 - RNA, 19 nt, Human
aggagucugagguccugag

SEQ ID NO: 3509335 - RNA, 22 nt, Human
aggagucugagguccugagcac

SEQ ID NO: 3509336 - RNA, 23 nt, Human
aggagucugagguccugagcacu

SEQ ID NO: 3509337 - RNA, 23 nt, Human
aggagugaaaccuuuagggcagc

SEQ ID NO: 3509338 - RNA, 21 nt, Human
aggagugagaucauuuucuua

SEQ ID NO: 3509339 - RNA, 22 nt, Human
aggagugaggaaggcaggaaga

SEQ ID NO: 3509340 - RNA, 18 nt, Human
aggaguggaggaggccug

SEQ ID NO: 3509341 - RNA, 21 nt, Human
aggagugggaaaacacugcca

SEQ ID NO: 3509342 - RNA, 22 nt, Human
aggaguggguggggaguggggg

SEQ ID NO: 3509343 - RNA, 16 nt, Human
aggaguguggccacgu

SEQ ID NO: 3509344 - RNA, 16 nt, Human
aggaguuaagaguagc

SEQ ID NO: 3509345 - RNA, 17 nt, Human
aggaguuagaggccagc

SEQ ID NO: 3509346 - RNA, 20 nt, Human
aggaguuagaggccagccug

SEQ ID NO: 3509347 - RNA, 12 nt, Human
aggaguucaaug

SEQ ID NO: 3509348 - RNA, 18 nt, Human
aggaguucaaugaucuag

SEQ ID NO: 3509349 - RNA, 23 nt, Human
aggaguucagggucauagcaugc

SEQ ID NO: 3509350 - RNA, 15 nt, Human
aggaguuccuaacca

SEQ ID NO: 3509351 - RNA, 17 nt, Human
aggaguucgaggcugca

SEQ ID NO: 3509352 - RNA, 15 nt, Human
aggaguucugcucau

SEQ ID NO: 3509353 - RNA, 19 nt, Human
aggaguuucgagguagagu

SEQ ID NO: 3509354 - RNA, 18 nt, Human
aggaguuucguuuucaaa

SEQ ID NO: 3509355 - RNA, 22 nt, Human
aggaguuucuuuagcugacaga

SEQ ID NO: 3509356 - RNA, 16 nt, Human
aggaguuugagaccag

SEQ ID NO: 3509357 - RNA, 18 nt, Human
aggaguuuggccagaagu

SEQ ID NO: 3509358 - RNA, 15 nt, Human
aggaguuuugcaaag

SEQ ID NO: 3509359 - RNA, 12 nt, Human
aggauaaaauaa

SEQ ID NO: 3509360 - RNA, 18 nt, Human
aggauaauuagcaucuca

SEQ ID NO: 3509361 - RNA, 21 nt, Human
aggauacaugugccgaaugug

SEQ ID NO: 3509362 - RNA, 15 nt, Human
aggauaccauauaca

SEQ ID NO: 3509363 - RNA, 22 nt, Human
aggauaccauauacagcucaga

SEQ ID NO: 3509364 - RNA, 18 nt, Human
aggauacuggcacagagg

SEQ ID NO: 3509365 - RNA, 18 nt, Human
aggauacuguaacacuuu

SEQ ID NO: 3509366 - RNA, 14 nt, Human
aggauagagacugg

SEQ ID NO: 3509367 - RNA, 16 nt, Human
aggauagauaacucuu

SEQ ID NO: 3509368 - RNA, 21 nt, Human
aggauagaugcuggcccaggg

SEQ ID NO: 3509369 - RNA, 17 nt, Human
aggaugucccugggcca

SEQ ID NO: 3509370 - RNA, 21 nt, Human
aggaugucccugggccagggu

SEQ ID NO: 3509371 - RNA, 23 nt, Human
aggaugucccugggccagggucu

SEQ ID NO: 3509372 - RNA, 21 nt, Human
aggaugugauauauaagugua

SEQ ID NO: 3509373 - RNA, 20 nt, Human
aggaugugauuguggaaugg

SEQ ID NO: 3509374 - RNA, 16 nt, Human
aggaugugcugcagug

SEQ ID NO: 3509375 - RNA, 15 nt, Human
aggaugugggcagcu

SEQ ID NO: 3509376 - RNA, 14 nt, Human
aggaugugugcaug

SEQ ID NO: 3509377 - RNA, 16 nt, Human
aggaugugugcaugug

SEQ ID NO: 3509378 - RNA, 13 nt, Human
aggauguguuugc

SEQ ID NO: 3509379 - RNA, 18 nt, Human
aggauguguuugcuuucu

SEQ ID NO: 3509380 - RNA, 15 nt, Human
aggauguucugggac

SEQ ID NO: 3509381 - RNA, 20 nt, Human
aggauguucugggacacagu

SEQ ID NO: 3509382 - RNA, 14 nt, Human
aggauguuuuucau

SEQ ID NO: 3509383 - RNA, 16 nt, Human
aggauuacaugcaugu

SEQ ID NO: 3509384 - RNA, 15 nt, Human
aggauuaguuuagaa

SEQ ID NO: 3509385 - RNA, 16 nt, Human
aggauuaguuuagaac

SEQ ID NO: 3509386 - RNA, 15 nt, Human
aggauuauggaaaaa

SEQ ID NO: 3509387 - RNA, 13 nt, Human
aggauuauugaua

SEQ ID NO: 3509388 - RNA, 17 nt, Human
aggauucacaccccacc

SEQ ID NO: 3509389 - RNA, 16 nt, Human
aggauucagccggagg

SEQ ID NO: 3509390 - RNA, 19 nt, Human
aggauuccucuuuucucug

SEQ ID NO: 3509391 - RNA, 12 nt, Human
aggauucuuccu

SEQ ID NO: 3509392 - RNA, 16 nt, Human
aggauucuuccucccu

SEQ ID NO: 3509393 - RNA, 22 nt, Human
aggauugaagagcauugcaugg

SEQ ID NO: 3509394 - RNA, 21 nt, Human
aggauugcgagagaugugugu

SEQ ID NO: 3509395 - RNA, 18 nt, Human
aggauugcuugagcccag

SEQ ID NO: 3509396 - RNA, 13 nt, Human
aggauuguaaaaa

SEQ ID NO: 3509397 - RNA, 20 nt, Human
aggauuguugaaucuauuuc

SEQ ID NO: 3509398 - RNA, 15 nt, Human
aggauuuaaaaacug

SEQ ID NO: 3509399 - RNA, 19 nt, Human
aggauuuaaaaacuggaac

SEQ ID NO: 3509400 - RNA, 17 nt, Human
aggauuuauuuaaaaua

SEQ ID NO: 3509401 - RNA, 16 nt, Human
aggauuucaagccugc

SEQ ID NO: 3509402 - RNA, 13 nt, Human
aggauuucguggg

SEQ ID NO: 3509403 - RNA, 23 nt, Human
aggauuugcacagaagcacaugc

SEQ ID NO: 3509404 - RNA, 17 nt, Human
aggauuuuaugcuuuaa

SEQ ID NO: 3509405 - RNA, 21 nt, Human
aggauuuuggauguugagagg

SEQ ID NO: 3509406 - RNA, 15 nt, Human
aggcaaaaacaaaga

SEQ ID NO: 3509407 - RNA, 17 nt, Human
aggcaaaauugcaaauc

SEQ ID NO: 3509408 - RNA, 19 nt, Human
aggcaaacauuuucucuua

SEQ ID NO: 3509409 - RNA, 19 nt, Human
aggcaaaggguccagaagg

SEQ ID NO: 3509410 - RNA, 20 nt, Human
aggcaaaggguccagaagga

SEQ ID NO: 3509411 - RNA, 22 nt, Human
aggcaaauuugcauuaaauuac

SEQ ID NO: 3509412 - RNA, 19 nt, Human
aggcaacaguuugacauuu

SEQ ID NO: 3509413 - RNA, 17 nt, Human
aggcaacugaggcagac

SEQ ID NO: 3509414 - RNA, 19 nt, Human
aggcaacuucaguccuggg

SEQ ID NO: 3509415 - RNA, 16 nt, Human
aggcaacuugggaacu

SEQ ID NO: 3509416 - RNA, 17 nt, Human
aggcaagagggggugga

SEQ ID NO: 3509417 - RNA, 18 nt, Human
aggcaagcaccuccugcc

SEQ ID NO: 3509418 - RNA, 19 nt, Human
aggcaagcaccuccugccu

SEQ ID NO: 3509419 - RNA, 21 nt, Human
aggcaagcugaaauuuuagaa

SEQ ID NO: 3509420 - RNA, 15 nt, Human
aggcaaggcaggugc

SEQ ID NO: 3509421 - RNA, 22 nt, Human
aggcaaggcuguggaccaugga

SEQ ID NO: 3509422 - RNA, 19 nt, Human
aggcaaggggugccuggga

SEQ ID NO: 3509423 - RNA, 13 nt, Human
aggcaaggucugg

SEQ ID NO: 3509424 - RNA, 15 nt, Human
aggcaaguuucuagc

SEQ ID NO: 3509425 - RNA, 19 nt, Human
aggcaaugucaggaacaga

SEQ ID NO: 3509426 - RNA, 23 nt, Human
aggcaaugucaggaacagaagga

SEQ ID NO: 3509427 - RNA, 21 nt, Human
aggcaauuagacacuuuggaa

SEQ ID NO: 3509428 - RNA, 19 nt, Human
aggcacacaaggggcccuu

SEQ ID NO: 3509429 - RNA, 21 nt, Human
aggcacacacugugcuuucua

SEQ ID NO: 3509430 - RNA, 11 nt, Human
aggcacacagc

SEQ ID NO: 3509431 - RNA, 15 nt, Human
aggcacacagcuacu

SEQ ID NO: 3509432 - RNA, 15 nt, Human
aggcacacuucuucu

SEQ ID NO: 3509433 - RNA, 14 nt, Human
aggcacagcaaacu

SEQ ID NO: 3509434 - RNA, 12 nt, Human
aggcacagcaca

SEQ ID NO: 3509435 - RNA, 20 nt, Human
aggcacagccggggccugcc

SEQ ID NO: 3509436 - RNA, 13 nt, Human
aggcacagcugag

SEQ ID NO: 3509437 - RNA, 15 nt, Human
aggcacaggaugcug

SEQ ID NO: 3509438 - RNA, 13 nt, Human
aggcacaggcagg

SEQ ID NO: 3509439 - RNA, 15 nt, Human
aggcacagggagaag

SEQ ID NO: 3509440 - RNA, 22 nt, Human
aggcacaggucaggggugacac

SEQ ID NO: 3509441 - RNA, 17 nt, Human
aggcacagugaaggcug

SEQ ID NO: 3509442 - RNA, 18 nt, Human
aggcacauggaauauauu

SEQ ID NO: 3509443 - RNA, 17 nt, Human
aggcacauggaggagcu

SEQ ID NO: 3509444 - RNA, 18 nt, Human
aggcaccaaaagaaguaa

SEQ ID NO: 3509445 - RNA, 22 nt, Human
agagcuuucuucccgaacccca

SEQ ID NO: 3509446 - RNA, 14 nt, Human
agagcuuucuuuca

SEQ ID NO: 3509447 - RNA, 15 nt, Human
agagcuuuucagauu

SEQ ID NO: 3509448 - RNA, 13 nt, Human
agaggaaaaauau

SEQ ID NO: 3509449 - RNA, 14 nt, Human
agaggaaaagaaau

SEQ ID NO: 3509450 - RNA, 18 nt, Human
agaggaaaaguaaggugc

SEQ ID NO: 3509451 - RNA, 22 nt, Human
agaggaaaaguaaggugcaguu

SEQ ID NO: 3509452 - RNA, 16 nt, Human
agaggaaagcaaagga

SEQ ID NO: 3509453 - RNA, 14 nt, Human
agaggaaauaagaa

SEQ ID NO: 3509454 - RNA, 12 nt, Human
agaggaaaucac

SEQ ID NO: 3509455 - RNA, 21 nt, Human
agaggaacagcacuggggagu

SEQ ID NO: 3509456 - RNA, 13 nt, Human
agaggaacugggc

SEQ ID NO: 3509457 - RNA, 17 nt, Human
agaggaacuguccagag

SEQ ID NO: 3509458 - RNA, 18 nt, Human
agaggaacuguccagaga

SEQ ID NO: 3509459 - RNA, 22 nt, Human
agaggaagaauuuguuaucagu

SEQ ID NO: 3509460 - RNA, 16 nt, Human
agaggaaggagaggag

SEQ ID NO: 3509461 - RNA, 20 nt, Human
agaggaaggggccagaggcu

SEQ ID NO: 3509462 - RNA, 16 nt, Human
agaggaaguucagauc

SEQ ID NO: 3509463 - RNA, 18 nt, Human
agaggaaguucagaucuu

SEQ ID NO: 3509464 - RNA, 22 nt, Human
agaggaaucacucuuguggaug

SEQ ID NO: 3509465 - RNA, 19 nt, Human
agaggaauccaugaagaau

SEQ ID NO: 3509466 - RNA, 15 nt, Human
agaggaauccuggca

SEQ ID NO: 3509467 - RNA, 13 nt, Human
agaggaaugaaaa

SEQ ID NO: 3509468 - RNA, 16 nt, Human
agaggacaagggaaau

SEQ ID NO: 3509469 - RNA, 23 nt, Human
agaggacagaucaauggcgcagu

SEQ ID NO: 3509470 - RNA, 20 nt, Human
agaggacaguauuugugggg

SEQ ID NO: 3509471 - RNA, 15 nt, Human
agaggaccagggccu

SEQ ID NO: 3509472 - RNA, 15 nt, Human
agaggaccagugagu

SEQ ID NO: 3509473 - RNA, 13 nt, Human
agaggacccccug

SEQ ID NO: 3509474 - RNA, 15 nt, Human
agaggaccggcggcu

SEQ ID NO: 3509475 - RNA, 22 nt, Human
agaggaccuguauuuaagcaaa

SEQ ID NO: 3509476 - RNA, 14 nt, Human
agaggacgggaggc

SEQ ID NO: 3509477 - RNA, 16 nt, Human
agaggacgugggcggc

SEQ ID NO: 3509478 - RNA, 18 nt, Human
agaggacucgcuuguaaa

SEQ ID NO: 3509479 - RNA, 23 nt, Human
agaggacucgcuuguaaauacca

SEQ ID NO: 3509480 - RNA, 15 nt, Human
agaggagaaacacau

SEQ ID NO: 3509481 - RNA, 12 nt, Human
agaggagagagg

SEQ ID NO: 3509482 - RNA, 16 nt, Human
agaggagagaggaccc

SEQ ID NO: 3509483 - RNA, 12 nt, Human
agaggagagcca

SEQ ID NO: 3509484 - RNA, 13 nt, Human
agaggagagccag

SEQ ID NO: 3509485 - RNA, 23 nt, Human
agaggagagccagagaagugaca

SEQ ID NO: 3509486 - RNA, 12 nt, Human
agaggagaggag

SEQ ID NO: 3509487 - RNA, 15 nt, Human
agaggagaggagaga

SEQ ID NO: 3509488 - RNA, 16 nt, Human
agaggagaggagagag

SEQ ID NO: 3509489 - RNA, 12 nt, Human
agaggagccaga

SEQ ID NO: 3509490 - RNA, 15 nt, Human
agaggagccagacag

SEQ ID NO: 3509491 - RNA, 17 nt, Human
agaggagccagacagac

SEQ ID NO: 3509492 - RNA, 23 nt, Human
agaggagcccccacccuguuccu

SEQ ID NO: 3509493 - RNA, 14 nt, Human
agaggagccuuuuu

SEQ ID NO: 3509494 - RNA, 23 nt, Human
agaggagccuuuuuaaaacacau

SEQ ID NO: 3509495 - RNA, 19 nt, Human
agaggagcgggaccugugg

SEQ ID NO: 3509496 - RNA, 20 nt, Human
agaggagcgggaccuguggc

SEQ ID NO: 3509497 - RNA, 20 nt, Human
agaggagcugggagccgggc

SEQ ID NO: 3509498 - RNA, 14 nt, Human
agaggaggaggagg

SEQ ID NO: 3509499 - RNA, 16 nt, Human
agaggaggcagcagga

SEQ ID NO: 3509500 - RNA, 23 nt, Human
agaggagggagcaucagugcccu

SEQ ID NO: 3509501 - RNA, 19 nt, Human
agaggagggcgugacucac

SEQ ID NO: 3509502 - RNA, 22 nt, Human
agaggaggggccgcugccaccc

SEQ ID NO: 3509503 - RNA, 20 nt, Human
agaggaguacaggugaagca

SEQ ID NO: 3509504 - RNA, 14 nt, Human
agaggagucagaga

SEQ ID NO: 3509505 - RNA, 22 nt, Human
agaggagugcguggcccaccag

SEQ ID NO: 3509506 - RNA, 12 nt, Human
agaggaguucaa

SEQ ID NO: 3509507 - RNA, 14 nt, Human
agaggaguucaaug

SEQ ID NO: 3509508 - RNA, 17 nt, Human
agaggaguucaaugauc

SEQ ID NO: 3509509 - RNA, 23 nt, Human
agaggaguucaaugaucuagguu

SEQ ID NO: 3509510 - RNA, 20 nt, Human
agaggaugaauguaugugca

SEQ ID NO: 3509511 - RNA, 13 nt, Human
agaggaugagagc

SEQ ID NO: 3509512 - RNA, 19 nt, Human
agaggaugucucaaacuuc

SEQ ID NO: 3509513 - RNA, 13 nt, Human
agaggaugugcaa

SEQ ID NO: 3509514 - RNA, 16 nt, Human
aggcagccagcaucug

SEQ ID NO: 3509515 - RNA, 14 nt, Human
aggcagccaggcca

SEQ ID NO: 3509516 - RNA, 14 nt, Human
aggcagccagggcu

SEQ ID NO: 3509517 - RNA, 18 nt, Human
aggcagccagugcccuga

SEQ ID NO: 3509518 - RNA, 22 nt, Human
aggcagccagugcccugagcca

SEQ ID NO: 3509519 - RNA, 19 nt, Human
aggcagccccauucugccu

SEQ ID NO: 3509520 - RNA, 13 nt, Human
aggcagccuccag

SEQ ID NO: 3509521 - RNA, 21 nt, Human
aggcagccuccagccugccca

SEQ ID NO: 3509522 - RNA, 13 nt, Human
aggcagccucugg

SEQ ID NO: 3509523 - RNA, 21 nt, Human
aggcagccucugggggguggc

SEQ ID NO: 3509524 - RNA, 20 nt, Human
aggcagccucugucaggccu

SEQ ID NO: 3509525 - RNA, 21 nt, Human
aggcagccucugucaggccuu

SEQ ID NO: 3509526 - RNA, 14 nt, Human
aggcagcgccaagc

SEQ ID NO: 3509527 - RNA, 20 nt, Human
aggcagcgccaagcaaccug

SEQ ID NO: 3509528 - RNA, 18 nt, Human
aggcagcuggaugagacu

SEQ ID NO: 3509529 - RNA, 19 nt, Human
aggcaggacaugcugaagc

SEQ ID NO: 3509530 - RNA, 21 nt, Human
aggcaggacaugcugaagcca

SEQ ID NO: 3509531 - RNA, 15 nt, Human
aggcaggagacuggc

SEQ ID NO: 3509532 - RNA, 19 nt, Human
aggcaggauuggggaagag

SEQ ID NO: 3509533 - RNA, 23 nt, Human
aggcaggauuggggaagagagcc

SEQ ID NO: 3509534 - RNA, 21 nt, Human
aggcaggcaccuagcaauucc

SEQ ID NO: 3509535 - RNA, 15 nt, Human
aggcaggcagggcuc

SEQ ID NO: 3509536 - RNA, 16 nt, Human
aggcaggcagggcucu

SEQ ID NO: 3509537 - RNA, 19 nt, Human
aggcaggcauggcccuggg

SEQ ID NO: 3509538 - RNA, 13 nt, Human
aggcaggcauuga

SEQ ID NO: 3509539 - RNA, 18 nt, Human
aggcaggcuaaggcgugg

SEQ ID NO: 3509540 - RNA, 13 nt, Human
aggcagggaaguc

SEQ ID NO: 3509541 - RNA, 23 nt, Human
aggcagggagacgguuuccaggg

SEQ ID NO: 3509542 - RNA, 16 nt, Human
aggcagggaggcagcc

SEQ ID NO: 3509543 - RNA, 16 nt, Human
aggcagggcaaaugac

SEQ ID NO: 3509544 - RNA, 20 nt, Human
aggcagggcaggaccagccc

SEQ ID NO: 3509545 - RNA, 21 nt, Human
aggcagggcaggaccagccca

SEQ ID NO: 3509546 - RNA, 22 nt, Human
aggcagggcaggaccagcccac

SEQ ID NO: 3509547 - RNA, 20 nt, Human
aggcagggccuugcccagag

SEQ ID NO: 3509548 - RNA, 22 nt, Human
aggcagggccuugcccagagau

SEQ ID NO: 3509549 - RNA, 23 nt, Human
aggcagggccuugcccagagaug

SEQ ID NO: 3509550 - RNA, 19 nt, Human
aggcagggcucuccuggcu

SEQ ID NO: 3509551 - RNA, 21 nt, Human
aggcagggcucuccuggcuuc

SEQ ID NO: 3509552 - RNA, 14 nt, Human
aggcaggggaaugu

SEQ ID NO: 3509553 - RNA, 22 nt, Human
aggcaggggcccugcagcucuc

SEQ ID NO: 3509554 - RNA, 16 nt, Human
aggcaggggugggggu

SEQ ID NO: 3509555 - RNA, 22 nt, Human
aggcagggguggggguggaggc

SEQ ID NO: 3509556 - RNA, 23 nt, Human
aggcagggguggggguggaggcu

SEQ ID NO: 3509557 - RNA, 18 nt, Human
aggcagggucucacucug

SEQ ID NO: 3509558 - RNA, 19 nt, Human
aggcagggucucacucugu

SEQ ID NO: 3509559 - RNA, 22 nt, Human
aggcaggguuuuaucucugucu

SEQ ID NO: 3509560 - RNA, 14 nt, Human
aggcagguagccag

SEQ ID NO: 3509561 - RNA, 11 nt, Human
aggcagguccc

SEQ ID NO: 3509562 - RNA, 13 nt, Human
aggcaggucccca

SEQ ID NO: 3509563 - RNA, 15 nt, Human
aggcagguccccaga

SEQ ID NO: 3509564 - RNA, 23 nt, Human
aggcaggugaucugcugcagagc

SEQ ID NO: 3509565 - RNA, 21 nt, Human
aggcaggugccccucucucca

SEQ ID NO: 3509566 - RNA, 14 nt, Human
aggcaggugccucc

SEQ ID NO: 3509567 - RNA, 15 nt, Human
aggcaggugccucca

SEQ ID NO: 3509568 - RNA, 23 nt, Human
aggcaguaggacaaggugcaggc

SEQ ID NO: 3509569 - RNA, 20 nt, Human
aggcagucgggggcuggccu

SEQ ID NO: 3509570 - RNA, 23 nt, Human
aggcagucgggggcuggccuagg

SEQ ID NO: 3509571 - RNA, 11 nt, Human
aggcagucucu

SEQ ID NO: 3509572 - RNA, 16 nt, Human
aggcagucucucucuu

SEQ ID NO: 3509573 - RNA, 16 nt, Human
aggcaguggggcuggg

SEQ ID NO: 3509574 - RNA, 21 nt, Human
aggcagugucauuugcucugc

SEQ ID NO: 3509575 - RNA, 18 nt, Human
aggcaguuaccauuaaac

SEQ ID NO: 3509576 - RNA, 24 nt, Human
aggcaguuaccauuaaaccaucuc

SEQ ID NO: 3509577 - RNA, 18 nt, Human
aggcaguuagagaugccu

SEQ ID NO: 3509578 - RNA, 22 nt, Human
aggcaguugagaaaauuugaau

SEQ ID NO: 3509579 - RNA, 20 nt, Human
aggcaguugcccagccucuu

SEQ ID NO: 3509580 - RNA, 19 nt, Human
aggcaguuuagugcaucuu

SEQ ID NO: 3509581 - RNA, 16 nt, Human
aggcauaggccugggu

SEQ ID NO: 3509582 - RNA, 19 nt, Human
aggcauaggccugggugcu

SEQ ID NO: 3509583 - RNA, 17 nt, Human
aggcauaugcuucuuua

SEQ ID NO: 3509584 - RNA, 18 nt, Human
aggcauaugcuucuuuaa

SEQ ID NO: 3509585 - RNA, 19 nt, Human
aggcauaugcuucuuuaaa

SEQ ID NO: 3509586 - RNA, 16 nt, Human
aggcaucaugcagagu

SEQ ID NO: 3509587 - RNA, 16 nt, Human
aggcaucccaggggac

SEQ ID NO: 3509588 - RNA, 17 nt, Human
aggcaucgcaauguaag

SEQ ID NO: 3509589 - RNA, 13 nt, Human
aggcaucuaucug

SEQ ID NO: 3509590 - RNA, 22 nt, Human
aggcaucucuguacuuugcuug

SEQ ID NO: 3509591 - RNA, 21 nt, Human
aggcaugaagagcaaaaauau

SEQ ID NO: 3509592 - RNA, 22 nt, Human
aggcaugagggaucacagggcc

SEQ ID NO: 3509593 - RNA, 13 nt, Human
aggcaugccucug

SEQ ID NO: 3509594 - RNA, 21 nt, Human
aggcaugccucugauauggga

SEQ ID NO: 3509595 - RNA, 15 nt, Human
aggcaugccugugug

SEQ ID NO: 3509596 - RNA, 18 nt, Human
aggcauggacuucuggau

SEQ ID NO: 3509597 - RNA, 12 nt, Human
aggcauggcccu

SEQ ID NO: 3509598 - RNA, 21 nt, Human
aggcaugggugcaaggaaaau

SEQ ID NO: 3509599 - RNA, 12 nt, Human
aggcaugguggc

SEQ ID NO: 3509600 - RNA, 22 nt, Human
aggcaugucccaugugagcugc

SEQ ID NO: 3509601 - RNA, 20 nt, Human
aggcaugugaugagaggaaa

SEQ ID NO: 3509602 - RNA, 21 nt, Human
aggcaugugaugagaggaaau

SEQ ID NO: 3509603 - RNA, 22 nt, Human
agagggcuuccucuagaagcca

SEQ ID NO: 3509604 - RNA, 14 nt, Human
agagggcuugugaa

SEQ ID NO: 3509605 - RNA, 18 nt, Human
agaggggaaaagcugaac

SEQ ID NO: 3509606 - RNA, 22 nt, Human
agaggggaaaccaguguagccu

SEQ ID NO: 3509607 - RNA, 18 nt, Human
agaggggacucugggcua

SEQ ID NO: 3509608 - RNA, 13 nt, Human
agaggggaggcca

SEQ ID NO: 3509609 - RNA, 14 nt, Human
agaggggcagcccu

SEQ ID NO: 3509610 - RNA, 15 nt, Human
agaggggcagcccuu

SEQ ID NO: 3509611 - RNA, 18 nt, Human
agaggggcagcccuugcu

SEQ ID NO: 3509612 - RNA, 14 nt, Human
agaggggccugcca

SEQ ID NO: 3509613 - RNA, 17 nt, Human
agaggggccugccaccu

SEQ ID NO: 3509614 - RNA, 13 nt, Human
agaggggcugucc

SEQ ID NO: 3509615 - RNA, 22 nt, Human
agagggggacugcugcugccug

SEQ ID NO: 3509616 - RNA, 14 nt, Human
agaggggggcugcc

SEQ ID NO: 3509617 - RNA, 17 nt, Human
agaggggguggccuccc

SEQ ID NO: 3509618 - RNA, 20 nt, Human
agagggguacauuucccugu

SEQ ID NO: 3509619 - RNA, 13 nt, Human
agaggggugcaga

SEQ ID NO: 3509620 - RNA, 19 nt, Human
agaggggugcagaggcugu

SEQ ID NO: 3509621 - RNA, 23 nt, Human
agaggggugcagaggcuguggcu

SEQ ID NO: 3509622 - RNA, 16 nt, Human
agaggguauuuuugua

SEQ ID NO: 3509623 - RNA, 22 nt, Human
agagggugacaagauagagagc

SEQ ID NO: 3509624 - RNA, 20 nt, Human
agagggugaguccuccagaa

SEQ ID NO: 3509625 - RNA, 19 nt, Human
agagggugauaauagaaga

SEQ ID NO: 3509626 - RNA, 14 nt, Human
agagggugcugccc

SEQ ID NO: 3509627 - RNA, 20 nt, Human
agaggguggugaccucugcc

SEQ ID NO: 3509628 - RNA, 16 nt, Human
agagguaaaaguguga

SEQ ID NO: 3509629 - RNA, 16 nt, Human
agagguaacagaacag

SEQ ID NO: 3509630 - RNA, 17 nt, Human
agagguacacuugugaa

SEQ ID NO: 3509631 - RNA, 21 nt, Human
agagguaucuuacuuuccucu

SEQ ID NO: 3509632 - RNA, 17 nt, Human
agagguauuaaaacuaa

SEQ ID NO: 3509633 - RNA, 16 nt, Human
agaggucaagcccagg

SEQ ID NO: 3509634 - RNA, 19 nt, Human
agagguccacaacacacag

SEQ ID NO: 3509635 - RNA, 13 nt, Human
agagguccagccc

SEQ ID NO: 3509636 - RNA, 14 nt, Human
agagguccagccca

SEQ ID NO: 3509637 - RNA, 15 nt, Human
agagguccagcccau

SEQ ID NO: 3509638 - RNA, 17 nt, Human
agagguccagcccaucu

SEQ ID NO: 3509639 - RNA, 23 nt, Human
agaggugaccccagggcacagga

SEQ ID NO: 3509640 - RNA, 16 nt, Human
agaggugcacuugggg

SEQ ID NO: 3509641 - RNA, 22 nt, Human
agaggugcacuuggggcacagg

SEQ ID NO: 3509642 - RNA, 18 nt, Human
agaggugccagcaacuga

SEQ ID NO: 3509643 - RNA, 15 nt, Human
agagguggaaaaaca

SEQ ID NO: 3509644 - RNA, 12 nt, Human
agaggugggcag

SEQ ID NO: 3509645 - RNA, 14 nt, Human
agaggugggcaggu

SEQ ID NO: 3509646 - RNA, 13 nt, Human
agaggugggccag

SEQ ID NO: 3509647 - RNA, 22 nt, Human
agaggugugcaagagagggaug

SEQ ID NO: 3509648 - RNA, 20 nt, Human
agagguuaagguggguacgg

SEQ ID NO: 3509649 - RNA, 13 nt, Human
agagguucaaaga

SEQ ID NO: 3509650 - RNA, 13 nt, Human
agagguuucagug

SEQ ID NO: 3509651 - RNA, 20 nt, Human
agagguuuggcuccugccca

SEQ ID NO: 3509652 - RNA, 19 nt, Human
agagguuuuaaagugauua

SEQ ID NO: 3509653 - RNA, 16 nt, Human
agagguuuuguuguuu

SEQ ID NO: 3509654 - RNA, 19 nt, Human
agagguuuuguuguuuuau

SEQ ID NO: 3509655 - RNA, 12 nt, Human
agagguuuuucu

SEQ ID NO: 3509656 - RNA, 20 nt, Human
agaguaauccaagcaaaugu

SEQ ID NO: 3509657 - RNA, 15 nt, Human
agggauggccguugg

SEQ ID NO: 3509658 - RNA, 17 nt, Human
agggauggggccacagc

SEQ ID NO: 3509659 - RNA, 12 nt, Human
agggauguauuu

SEQ ID NO: 3509660 - RNA, 18 nt, Human
agggauuacccaagcaaa

SEQ ID NO: 3509661 - RNA, 16 nt, Human
agggauucaggcugcu

SEQ ID NO: 3509662 - RNA, 17 nt, Human
agggauucucacaauag

SEQ ID NO: 3509663 - RNA, 16 nt, Human
agggauugcugccacu

SEQ ID NO: 3509664 - RNA, 17 nt, Human
agggauuguuucuguuu

SEQ ID NO: 3509665 - RNA, 22 nt, Human
agggauuuggggcucagagugg

SEQ ID NO: 3509666 - RNA, 13 nt, Human
agggcaaagccag

SEQ ID NO: 3509667 - RNA, 15 nt, Human
agggcaaagccaggu

SEQ ID NO: 3509668 - RNA, 21 nt, Human
agggcaaauccagucccaaug

SEQ ID NO: 3509669 - RNA, 22 nt, Human
agggcaaaugacaugcacugac

SEQ ID NO: 3509670 - RNA, 18 nt, Human
agggcaacagaucaguaa

SEQ ID NO: 3509671 - RNA, 14 nt, Human
agggcaagggccau

SEQ ID NO: 3509672 - RNA, 21 nt, Human
agggcaaggguuaaggccuga

SEQ ID NO: 3509673 - RNA, 19 nt, Human
agggcaauuaauuccuuca

SEQ ID NO: 3509674 - RNA, 16 nt, Human
agggcacaaagauggg

SEQ ID NO: 3509675 - RNA, 14 nt, Human
agggcacacacugu

SEQ ID NO: 3509676 - RNA, 20 nt, Human
agggcacaccgggcacucag

SEQ ID NO: 3509677 - RNA, 12 nt, Human
agggcacaggag

SEQ ID NO: 3509678 - RNA, 17 nt, Human
agggcacaggagcuacc

SEQ ID NO: 3509679 - RNA, 20 nt, Human
agggcacaggagcuaccugu

SEQ ID NO: 3509680 - RNA, 19 nt, Human
agggcacagggccuggccc

SEQ ID NO: 3509681 - RNA, 20 nt, Human
agggcaccaagcccacaggu

SEQ ID NO: 3509682 - RNA, 14 nt, Human
agggcaccaggggu

SEQ ID NO: 3509683 - RNA, 21 nt, Human
agggcaccaucacaauacaga

SEQ ID NO: 3509684 - RNA, 21 nt, Human
agggcacccuaguucuaccuc

SEQ ID NO: 3509685 - RNA, 18 nt, Human
agggcacugacggacuca

SEQ ID NO: 3509686 - RNA, 15 nt, Human
agggcacugggcugu

SEQ ID NO: 3509687 - RNA, 16 nt, Human
agggcacugggcuguu

SEQ ID NO: 3509688 - RNA, 18 nt, Human
agggcacugggcuguugu

SEQ ID NO: 3509689 - RNA, 16 nt, Human
agggcacuucacagag

SEQ ID NO: 3509690 - RNA, 23 nt, Human
agggcacuucacagagugugcug

SEQ ID NO: 3509691 - RNA, 19 nt, Human
agggcagaaagguucugcc

SEQ ID NO: 3509692 - RNA, 15 nt, Human
agggcagaaugaauc

SEQ ID NO: 3509693 - RNA, 20 nt, Human
agggcagacuggggcauccu

SEQ ID NO: 3509694 - RNA, 17 nt, Human
agggcagaggcuggagg

SEQ ID NO: 3509695 - RNA, 20 nt, Human
agggcagaggcuggaggcag

SEQ ID NO: 3509696 - RNA, 19 nt, Human
agggcagagugagacccag

SEQ ID NO: 3509697 - RNA, 15 nt, Human
agggcagaguuacuu

SEQ ID NO: 3509698 - RNA, 14 nt, Human
agggcagcagccag

SEQ ID NO: 3509699 - RNA, 14 nt, Human
agggcagcagggcu

SEQ ID NO: 3509700 - RNA, 15 nt, Human
agggcagcagggcua

SEQ ID NO: 3509701 - RNA, 14 nt, Human
agggcagccaggga

SEQ ID NO: 3509702 - RNA, 15 nt, Human
agggcagccagggag

SEQ ID NO: 3509703 - RNA, 23 nt, Human
agggcagccagggagagcccagg

SEQ ID NO: 3509704 - RNA, 12 nt, Human
agggcagcccca

SEQ ID NO: 3509705 - RNA, 20 nt, Human
agggcagccgucaccccugc

SEQ ID NO: 3509706 - RNA, 15 nt, Human
agggcagcugggccc

SEQ ID NO: 3509707 - RNA, 18 nt, Human
agggcagcugggcccaac

SEQ ID NO: 3509708 - RNA, 18 nt, Human
agggcaggaaggagagcc

SEQ ID NO: 3509709 - RNA, 19 nt, Human
agggcaggaaggagagccu

SEQ ID NO: 3509710 - RNA, 23 nt, Human
agggcaggaaggagagccugcug

SEQ ID NO: 3509711 - RNA, 16 nt, Human
agggcaggaccagccc

SEQ ID NO: 3509712 - RNA, 18 nt, Human
agggcaggaccagcccac

SEQ ID NO: 3509713 - RNA, 19 nt, Human
agggcaggaccagcccacg

SEQ ID NO: 3509714 - RNA, 11 nt, Human
agggcaggcau

SEQ ID NO: 3509715 - RNA, 12 nt, Human
agggcagggccc

SEQ ID NO: 3509716 - RNA, 15 nt, Human
agggcaguaccugag

SEQ ID NO: 3509717 - RNA, 22 nt, Human
agggcagugcuagugagcuggg

SEQ ID NO: 3509718 - RNA, 13 nt, Human
agggcaguggagg

SEQ ID NO: 3509719 - RNA, 16 nt, Human
agggcaguguuuccuu

SEQ ID NO: 3509720 - RNA, 23 nt, Human
agggcaguucgcagccacccuga

SEQ ID NO: 3509721 - RNA, 14 nt, Human
agggcauaaaacag

SEQ ID NO: 3509722 - RNA, 14 nt, Human
agggcauaaaguaa

SEQ ID NO: 3509723 - RNA, 15 nt, Human
agggcauaaaguaaa

SEQ ID NO: 3509724 - RNA, 19 nt, Human
agggcauaaaguaaauaca

SEQ ID NO: 3509725 - RNA, 15 nt, Human
agggcauaaugauga

SEQ ID NO: 3509726 - RNA, 19 nt, Human
agggcauaaugaugauggg

SEQ ID NO: 3509727 - RNA, 18 nt, Human
agggcauccuucugccuu

SEQ ID NO: 3509728 - RNA, 13 nt, Human
agggcaucuccag

SEQ ID NO: 3509729 - RNA, 22 nt, Human
agggcaucuccaggaaggcggg

SEQ ID NO: 3509730 - RNA, 14 nt, Human
agggcaucuccugu

SEQ ID NO: 3509731 - RNA, 15 nt, Human
agggcaucucugggc

SEQ ID NO: 3509732 - RNA, 17 nt, Human
agggcaucuuagcuucu

SEQ ID NO: 3509733 - RNA, 18 nt, Human
agggcaucuugcuggcua

SEQ ID NO: 3509734 - RNA, 22 nt, Human
agggcaucuugguccaggaaau

SEQ ID NO: 3509735 - RNA, 13 nt, Human
agggcaugaaaug

SEQ ID NO: 3509736 - RNA, 14 nt, Human
agggcaugaaauga

SEQ ID NO: 3509737 - RNA, 22 nt, Human
agggcaugccacgugggcucau

SEQ ID NO: 3509738 - RNA, 21 nt, Human
agggcaugccccggccaccuc

SEQ ID NO: 3509739 - RNA, 20 nt, Human
agggccaaaauauuuggaau

SEQ ID NO: 3509740 - RNA, 20 nt, Human
agggccaaacgcugagccac

SEQ ID NO: 3509741 - RNA, 22 nt, Human
agggccaaacgcugagccaccu

SEQ ID NO: 3509742 - RNA, 13 nt, Human
agggccaaagaac

SEQ ID NO: 3509743 - RNA, 17 nt, Human
agggccaacccuucucc

SEQ ID NO: 3509744 - RNA, 16 nt, Human
agggccaagacuuggc

SEQ ID NO: 3509745 - RNA, 21 nt, Human
agggccaagcccagcacugcu

SEQ ID NO: 3509746 - RNA, 19 nt, Human
agggccacaucccacugcc

SEQ ID NO: 3509747 - RNA, 22 nt, Human
agggccaccuacaauacaucug

SEQ ID NO: 3509748 - RNA, 15 nt, Human
agggccacgcuccag

SEQ ID NO: 3509749 - RNA, 16 nt, Human
agggccacgcuccagc

SEQ ID NO: 3509750 - RNA, 19 nt, Human
agggccacgugccaggccc

SEQ ID NO: 3509751 - RNA, 14 nt, Human
agggccacugaaga

SEQ ID NO: 3509752 - RNA, 15 nt, Human
agggccagagccagg

SEQ ID NO: 3509753 - RNA, 17 nt, Human
agggccaggacugagcc

SEQ ID NO: 3509754 - RNA, 10 nt, Human
agggccaggc

SEQ ID NO: 3509755 - RNA, 14 nt, Human
agggccaggcaggu

SEQ ID NO: 3509756 - RNA, 21 nt, Human
agggccaggcaggugccugga

SEQ ID NO: 3509757 - RNA, 21 nt, Human
agggccaguggggccugugga

SEQ ID NO: 3509758 - RNA, 15 nt, Human
agggccaugaacuuu

SEQ ID NO: 3509759 - RNA, 18 nt, Human
agggccaugcugaaggga

SEQ ID NO: 3509760 - RNA, 19 nt, Human
agggccaugcugaggccug

SEQ ID NO: 3509761 - RNA, 20 nt, Human
agggccaugcugaggccugg

SEQ ID NO: 3509762 - RNA, 21 nt, Human
agggccaugcugaggccuggg

SEQ ID NO: 3509763 - RNA, 21 nt, Human
agggccauugaacucugagag

SEQ ID NO: 3509764 - RNA, 17 nt, Human
agggcccaagucccugu

SEQ ID NO: 3509765 - RNA, 23 nt, Human
agggcccacuuguauccucuggu

SEQ ID NO: 3509766 - RNA, 14 nt, Human
agggcccagagcag

SEQ ID NO: 3509767 - RNA, 19 nt, Human
agggcccagagcccagcuc

SEQ ID NO: 3509768 - RNA, 14 nt, Human
agggcccaggcagg

SEQ ID NO: 3509769 - RNA, 18 nt, Human
agggcccaugggagggag

SEQ ID NO: 3509770 - RNA, 18 nt, Human
agggccccagcacuaaag

SEQ ID NO: 3509771 - RNA, 13 nt, Human
agggcccccacag

SEQ ID NO: 3509772 - RNA, 18 nt, Human
agggcccccacaguugcu

SEQ ID NO: 3509773 - RNA, 11 nt, Human
agggccccucu

SEQ ID NO: 3509774 - RNA, 12 nt, Human
agggccccucuc

SEQ ID NO: 3509775 - RNA, 21 nt, Human
agggccccucugcccagcuug

SEQ ID NO: 3509776 - RNA, 17 nt, Human
agggcccgcaccgacca

SEQ ID NO: 3509777 - RNA, 13 nt, Human
agggcccuaccug

SEQ ID NO: 3509778 - RNA, 16 nt, Human
agggcccugagcucgg

SEQ ID NO: 3509779 - RNA, 18 nt, Human
agggcccugagcugaggg

SEQ ID NO: 3509780 - RNA, 15 nt, Human
agggcccugugucug

SEQ ID NO: 3509781 - RNA, 22 nt, Human
agggccgaccagaggagccuuu

SEQ ID NO: 3509782 - RNA, 20 nt, Human
agggccgacuaagagaaguu

SEQ ID NO: 3509783 - RNA, 20 nt, Human
agggccgcccgggcccagag

SEQ ID NO: 3509784 - RNA, 18 nt, Human
agggccggggaacuggcc

SEQ ID NO: 3509785 - RNA, 17 nt, Human
agggccguaccccaccc

SEQ ID NO: 3509786 - RNA, 20 nt, Human
agggccuagcugcuacaaag

SEQ ID NO: 3509787 - RNA, 20 nt, Human
agggccucaaaggcccgcuc

SEQ ID NO: 3509788 - RNA, 15 nt, Human
agggccuccagcccu

SEQ ID NO: 3509789 - RNA, 16 nt, Human
agggccugaggucugg

SEQ ID NO: 3509790 - RNA, 22 nt, Human
agggccugaggucuggcugcuu

SEQ ID NO: 3509791 - RNA, 14 nt, Human
agggccugaugggg

SEQ ID NO: 3509792 - RNA, 21 nt, Human
agggccugaugggguggaagg

SEQ ID NO: 3509793 - RNA, 20 nt, Human
agggccugcaggaccugccu

SEQ ID NO: 3509794 - RNA, 22 nt, Human
agggccugcaggaccugccugu

SEQ ID NO: 3509795 - RNA, 13 nt, Human
agggccugcugga

SEQ ID NO: 3509796 - RNA, 21 nt, Human
agggccugcuggaggccucag

SEQ ID NO: 3509797 - RNA, 22 nt, Human
agggccugcuggaggccucagg

SEQ ID NO: 3509798 - RNA, 23 nt, Human
agggccugcuggaggccucaggu

SEQ ID NO: 3509799 - RNA, 12 nt, Human
agggccuggccu

SEQ ID NO: 3509800 - RNA, 13 nt, Human
agggccuggccug

SEQ ID NO: 3509801 - RNA, 14 nt, Human
agggccuggccuga

SEQ ID NO: 3509802 - RNA, 22 nt, Human
agauguuucuuuuguauguaaa

SEQ ID NO: 3509803 - RNA, 19 nt, Human
agauguuugauagauuuuc

SEQ ID NO: 3509804 - RNA, 15 nt, Human
agauguuugucagau

SEQ ID NO: 3509805 - RNA, 24 nt, Human
agauguuugucagauaugauaugu

SEQ ID NO: 3509806 - RNA, 22 nt, Human
agauguuuuaccguaauaauua

SEQ ID NO: 3509807 - RNA, 19 nt, Human
agauguuuugguagauuaa

SEQ ID NO: 3509808 - RNA, 15 nt, Human
agauuaaaaauuaua

SEQ ID NO: 3509809 - RNA, 16 nt, Human
agauuaaacugaguga

SEQ ID NO: 3509810 - RNA, 17 nt, Human
agauuaaauauagauua

SEQ ID NO: 3509811 - RNA, 14 nt, Human
agauuaagaaauag

SEQ ID NO: 3509812 - RNA, 15 nt, Human
agauuaagaaauaga

SEQ ID NO: 3509813 - RNA, 16 nt, Human
agauuaagagccauau

SEQ ID NO: 3509814 - RNA, 18 nt, Human
agauuaaggugaugugau

SEQ ID NO: 3509815 - RNA, 11 nt, Human
agauuaauauu

SEQ ID NO: 3509816 - RNA, 20 nt, Human
agauuacaaaucagaaguca

SEQ ID NO: 3509817 - RNA, 16 nt, Human
agauuacuuagaggaa

SEQ ID NO: 3509818 - RNA, 20 nt, Human
aggggcccaaggcggccccu

SEQ ID NO: 3509819 - RNA, 14 nt, Human
aggggcccacaggg

SEQ ID NO: 3509820 - RNA, 16 nt, Human
aggggccccccugccc

SEQ ID NO: 3509821 - RNA, 18 nt, Human
aggggccccccugcccug

SEQ ID NO: 3509822 - RNA, 13 nt, Human
aggggcccggcca

SEQ ID NO: 3509823 - RNA, 15 nt, Human
aggggcccggccagc

SEQ ID NO: 3509824 - RNA, 19 nt, Human
aggggcccggccagccaug

SEQ ID NO: 3509825 - RNA, 21 nt, Human
aggggcccguugucucccugg

SEQ ID NO: 3509826 - RNA, 17 nt, Human
aggggcccuggagcagc

SEQ ID NO: 3509827 - RNA, 12 nt, Human
aggggccgcccu

SEQ ID NO: 3509828 - RNA, 15 nt, Human
aggggccggcccugu

SEQ ID NO: 3509829 - RNA, 21 nt, Human
aggggccggcccugugugcag

SEQ ID NO: 3509830 - RNA, 23 nt, Human
aggggccuaggccucagccagag

SEQ ID NO: 3509831 - RNA, 22 nt, Human
aggggccuccaugggccccagg

SEQ ID NO: 3509832 - RNA, 13 nt, Human
aggggccugagca

SEQ ID NO: 3509833 - RNA, 14 nt, Human
aggggccugagcag

SEQ ID NO: 3509834 - RNA, 19 nt, Human
aggggccugccaccuggac

SEQ ID NO: 3509835 - RNA, 22 nt, Human
aggggccugccaccuggacccc

SEQ ID NO: 3509836 - RNA, 13 nt, Human
aggggccuggaga

SEQ ID NO: 3509837 - RNA, 13 nt, Human
aggggccuggcag

SEQ ID NO: 3509838 - RNA, 15 nt, Human
aggggccuggcagcc

SEQ ID NO: 3509839 - RNA, 23 nt, Human
aggggccuggcagccgugccuuc

SEQ ID NO: 3509840 - RNA, 22 nt, Human
aggggccuuagggcacugggcu

SEQ ID NO: 3509841 - RNA, 14 nt, Human
aggggcgcccaccu

SEQ ID NO: 3509842 - RNA, 23 nt, Human
aggggcgccgcaaaccacacugg

SEQ ID NO: 3509843 - RNA, 22 nt, Human
aggggcgcuggcccagccggcc

SEQ ID NO: 3509844 - RNA, 19 nt, Human
aggggcgggacccaggcac

SEQ ID NO: 3509845 - RNA, 17 nt, Human
aggggcuacaagaggga

SEQ ID NO: 3509846 - RNA, 18 nt, Human
aggggcuagcuaagccaa

SEQ ID NO: 3509847 - RNA, 16 nt, Human
aggggcuccuuuccau

SEQ ID NO: 3509848 - RNA, 17 nt, Human
aggggcucuggagagaa

SEQ ID NO: 3509849 - RNA, 21 nt, Human
aggggcucuggagagaaacaa

SEQ ID NO: 3509850 - RNA, 15 nt, Human
aggggcugcuuccuc

SEQ ID NO: 3509851 - RNA, 18 nt, Human
aggggcugcuuccuccug

SEQ ID NO: 3509852 - RNA, 19 nt, Human
aggggcuggccuuccugcc

SEQ ID NO: 3509853 - RNA, 18 nt, Human
aggggcuggggacuugug

SEQ ID NO: 3509854 - RNA, 12 nt, Human
aggggcuucagg

SEQ ID NO: 3509855 - RNA, 16 nt, Human
aggggcuucaggucca

SEQ ID NO: 3509856 - RNA, 23 nt, Human
aggggcuugguguuuguaagaaa

SEQ ID NO: 3509857 - RNA, 15 nt, Human
agggggaagaagcag

SEQ ID NO: 3509858 - RNA, 20 nt, Human
agggggagaaaaggaaaaga

SEQ ID NO: 3509859 - RNA, 15 nt, Human
agggggagagggcug

SEQ ID NO: 3509860 - RNA, 22 nt, Human
agggggagcugggccuggucuc

SEQ ID NO: 3509861 - RNA, 16 nt, Human
agggggaggggaaguc

SEQ ID NO: 3509862 - RNA, 20 nt, Human
agggggauccgacugcuuug

SEQ ID NO: 3509863 - RNA, 17 nt, Human
agggggcaucuggccuu

SEQ ID NO: 3509864 - RNA, 15 nt, Human
agggggccaccuccc

SEQ ID NO: 3509865 - RNA, 15 nt, Human
agggggcgccugugg

SEQ ID NO: 3509866 - RNA, 12 nt, Human
agggggcggccu

SEQ ID NO: 3509867 - RNA, 13 nt, Human
agggggcuccugg

SEQ ID NO: 3509868 - RNA, 22 nt, Human
agggggcugcucccaccuggcu

SEQ ID NO: 3509869 - RNA, 14 nt, Human
agggggcugcugcu

SEQ ID NO: 3509870 - RNA, 12 nt, Human
agggggcuggag

SEQ ID NO: 3509871 - RNA, 16 nt, Human
agggggcuggaggagc

SEQ ID NO: 3509872 - RNA, 17 nt, Human
agggggcuggaggagcc

SEQ ID NO: 3509873 - RNA, 18 nt, Human
agggggcuggaggagccc

SEQ ID NO: 3509874 - RNA, 19 nt, Human
agggggcuggaggagccca

SEQ ID NO: 3509875 - RNA, 14 nt, Human
aggggggaagauca

SEQ ID NO: 3509876 - RNA, 14 nt, Human
aggggggagcuggg

SEQ ID NO: 3509877 - RNA, 23 nt, Human
agggggucguggagagcuaggag

SEQ ID NO: 3509878 - RNA, 15 nt, Human
agggggucuggcugg

SEQ ID NO: 3509879 - RNA, 17 nt, Human
aggggguggccucccaa

SEQ ID NO: 3509880 - RNA, 20 nt, Human
aggggguggccucccaacuc

SEQ ID NO: 3509881 - RNA, 16 nt, Human
aggggguuugggggcu

SEQ ID NO: 3509882 - RNA, 22 nt, Human
aggggguuugggggcuugcaag

SEQ ID NO: 3509883 - RNA, 19 nt, Human
agggguaauauauugcugc

SEQ ID NO: 3509884 - RNA, 17 nt, Human
agggguaggcagagccu

SEQ ID NO: 3509885 - RNA, 14 nt, Human
agggguaggggcug

SEQ ID NO: 3509886 - RNA, 15 nt, Human
agggguaugucuuua

SEQ ID NO: 3509887 - RNA, 14 nt, Human
aggggucaaagaaa

SEQ ID NO: 3509888 - RNA, 21 nt, Human
aggggucaaguuauuaauuuc

SEQ ID NO: 3509889 - RNA, 15 nt, Human
aggggucaggcucca

SEQ ID NO: 3509890 - RNA, 14 nt, Human
aggggucagggacc

SEQ ID NO: 3509891 - RNA, 18 nt, Human
aggggucccagccacccc

SEQ ID NO: 3509892 - RNA, 14 nt, Human
aggggucccuagca

SEQ ID NO: 3509893 - RNA, 23 nt, Human
aggggucccuagcagcccacccu

SEQ ID NO: 3509894 - RNA, 15 nt, Human
aggggucggcugacc

SEQ ID NO: 3509895 - RNA, 18 nt, Human
aggggucuccaggaggag

SEQ ID NO: 3509896 - RNA, 14 nt, Human
aggggucucccugg

SEQ ID NO: 3509897 - RNA, 15 nt, Human
aggggucucccuggc

SEQ ID NO: 3509898 - RNA, 17 nt, Human
aggggugauuucagaga

SEQ ID NO: 3509899 - RNA, 20 nt, Human
agggguggcugccucauuua

SEQ ID NO: 3509900 - RNA, 21 nt, Human
agggguggcugccucauuuag

SEQ ID NO: 3509901 - RNA, 18 nt, Human
aggggugggacacccugu

SEQ ID NO: 3509902 - RNA, 14 nt, Human
aggggugggcuggu

SEQ ID NO: 3509903 - RNA, 19 nt, Human
agggguggggguggaggcu

SEQ ID NO: 3509904 - RNA, 21 nt, Human
agggguggguuccucuucccc

SEQ ID NO: 3509905 - RNA, 18 nt, Human
aggggugguccugacuca

SEQ ID NO: 3509906 - RNA, 15 nt, Human
agggguguggcuccu

SEQ ID NO: 3509907 - RNA, 18 nt, Human
agggguucccuugagggc

SEQ ID NO: 3509908 - RNA, 21 nt, Human
agggguucccuugagggcugc

SEQ ID NO: 3509909 - RNA, 24 nt, Human
agggguucccuuuuuuggcugcug

SEQ ID NO: 3509910 - RNA, 23 nt, Human
agggguugagcagggauccuggu

SEQ ID NO: 3509911 - RNA, 16 nt, Human
agggguugccacaggc

SEQ ID NO: 3509912 - RNA, 23 nt, Human
agggguugccacaggccucccug

SEQ ID NO: 3509913 - RNA, 21 nt, Human
agggguugcuccgccuggccu

SEQ ID NO: 3509914 - RNA, 16 nt, Human
agggguuggggaaaca

SEQ ID NO: 3509915 - RNA, 18 nt, Human
agggguuggggugacagu

SEQ ID NO: 3509916 - RNA, 15 nt, Human
agggguuuacaguga

SEQ ID NO: 3509917 - RNA, 23 nt, Human
agggguuucagaauuuugcauug

SEQ ID NO: 3509918 - RNA, 15 nt, Human
agggguuucuaacac

SEQ ID NO: 3509919 - RNA, 21 nt, Human
agggguuugccauuugauacc

SEQ ID NO: 3509920 - RNA, 22 nt, Human
aggguaaauaaaccacugugcg

SEQ ID NO: 3509921 - RNA, 14 nt, Human
aggguaaggugccu

SEQ ID NO: 3509922 - RNA, 21 nt, Human
aggguacaaaaaauucaguga

SEQ ID NO: 3509923 - RNA, 13 nt, Human
aggguacagcugg

SEQ ID NO: 3509924 - RNA, 14 nt, Human
aggguacauggugc

SEQ ID NO: 3509925 - RNA, 17 nt, Human
aggguacauggugcugg

SEQ ID NO: 3509926 - RNA, 13 nt, Human
aggguacauuuau

SEQ ID NO: 3509927 - RNA, 19 nt, Human
aggguaccuugaacacugg

SEQ ID NO: 3509928 - RNA, 13 nt, Human
aggguacuaaauu

SEQ ID NO: 3509929 - RNA, 21 nt, Human
aggguaggagguuuggauggg

SEQ ID NO: 3509930 - RNA, 21 nt, Human
aggguauauuuuccuauauua

SEQ ID NO: 3509931 - RNA, 16 nt, Human
aggguaucaggugcug

SEQ ID NO: 3509932 - RNA, 20 nt, Human
aggguauccaaguuggacug

SEQ ID NO: 3509933 - RNA, 21 nt, Human
aggguauccaaguuggacugg

SEQ ID NO: 3509934 - RNA, 20 nt, Human
agggucaacaucuuuuacau

SEQ ID NO: 3509935 - RNA, 17 nt, Human
agggucagccagggccu

SEQ ID NO: 3509936 - RNA, 13 nt, Human
agggucaggaagg

SEQ ID NO: 3509937 - RNA, 21 nt, Human
agggucaggaaggaugagcau

SEQ ID NO: 3509938 - RNA, 22 nt, Human
agggucaggaaggaugagcauu

SEQ ID NO: 3509939 - RNA, 13 nt, Human
agggucaggccuu

SEQ ID NO: 3509940 - RNA, 22 nt, Human
agggucaggccuuugagcucag

SEQ ID NO: 3509941 - RNA, 17 nt, Human
aggguccaacauagagc

SEQ ID NO: 3509942 - RNA, 18 nt, Human
aggguccaaccagaccug

SEQ ID NO: 3509943 - RNA, 19 nt, Human
aggguccaaccagaccugg

SEQ ID NO: 3509944 - RNA, 23 nt, Human
aggguccacaggaagugaagaau

SEQ ID NO: 3509945 - RNA, 20 nt, Human
agggucccauuucucacuga

SEQ ID NO: 3509946 - RNA, 20 nt, Human
agcagagaccaucccugaag

SEQ ID NO: 3509947 - RNA, 15 nt, Human
agcagagagaugcgg

SEQ ID NO: 3509948 - RNA, 18 nt, Human
agcagagcaagucugcag

SEQ ID NO: 3509949 - RNA, 15 nt, Human
agcagagcucugccg

SEQ ID NO: 3509950 - RNA, 13 nt, Human
agcagaggaccag

SEQ ID NO: 3509951 - RNA, 14 nt, Human
agcagaggaccagg

SEQ ID NO: 3509952 - RNA, 17 nt, Human
agcagaggaccagggcc

SEQ ID NO: 3509953 - RNA, 14 nt, Human
agcagaggcacugg

SEQ ID NO: 3509954 - RNA, 15 nt, Human
agcagaggcacuggg

SEQ ID NO: 3509955 - RNA, 17 nt, Human
agcagaggcacuggggg

SEQ ID NO: 3509956 - RNA, 20 nt, Human
agcagaggggcagaggccca

SEQ ID NO: 3509957 - RNA, 14 nt, Human
agcagaggggcuga

SEQ ID NO: 3509958 - RNA, 18 nt, Human
agcagagugcacagcugu

SEQ ID NO: 3509959 - RNA, 19 nt, Human
agcagagugcacagcuguc

SEQ ID NO: 3509960 - RNA, 14 nt, Human
agcagaguuaaauc

SEQ ID NO: 3509961 - RNA, 18 nt, Human
agcagaguuaaaucucaa

SEQ ID NO: 3509962 - RNA, 16 nt, Human
agcagaucccagcuca

SEQ ID NO: 3509963 - RNA, 21 nt, Human
agcagaugcaaagaggcaaga

SEQ ID NO: 3509964 - RNA, 17 nt, Human
agcagaugcagagagcc

SEQ ID NO: 3509965 - RNA, 14 nt, Human
agcagaugcugguc

SEQ ID NO: 3509966 - RNA, 19 nt, Human
agcagauggagaccccuug

SEQ ID NO: 3509967 - RNA, 16 nt, Human
agcagauuauucacug

SEQ ID NO: 3509968 - RNA, 20 nt, Human
agcagauuauucacugauuu

SEQ ID NO: 3509969 - RNA, 17 nt, Human
agcagauuggaaggaga

SEQ ID NO: 3509970 - RNA, 22 nt, Human
agcagauuggaaggagacacag

SEQ ID NO: 3509971 - RNA, 21 nt, Human
agcagauuuuaauuuugaaua

SEQ ID NO: 3509972 - RNA, 17 nt, Human
agcagauuuuaggaaau

SEQ ID NO: 3509973 - RNA, 17 nt, Human
agcagcaaaaauauaaa

SEQ ID NO: 3509974 - RNA, 16 nt, Human
agcagcaacuuguccu

SEQ ID NO: 3509975 - RNA, 19 nt, Human
agcagcaccguucugugca

SEQ ID NO: 3509976 - RNA, 19 nt, Human
agcagcaccugcccuaccu

SEQ ID NO: 3509977 - RNA, 22 nt, Human
agcagcaccugcccuaccugcc

SEQ ID NO: 3509978 - RNA, 14 nt, Human
agcagcacuuauaa

SEQ ID NO: 3509979 - RNA, 12 nt, Human
agcagcagcagg

SEQ ID NO: 3509980 - RNA, 16 nt, Human
agcagcagcaggugau

SEQ ID NO: 3509981 - RNA, 21 nt, Human
agcagcagcccaagcuucccu

SEQ ID NO: 3509982 - RNA, 13 nt, Human
agcagcagccucg

SEQ ID NO: 3509983 - RNA, 22 nt, Human
agcagcaggaggggggagggaa

SEQ ID NO: 3509984 - RNA, 13 nt, Human
agcagcaggugau

SEQ ID NO: 3509985 - RNA, 18 nt, Human
agcagcagugaaaacaag

SEQ ID NO: 3509986 - RNA, 20 nt, Human
agcagcaucucuaccuucuc

SEQ ID NO: 3509987 - RNA, 20 nt, Human
agcagccaagggaugaaaga

SEQ ID NO: 3509988 - RNA, 21 nt, Human
agcagccacauuccugaugcu

SEQ ID NO: 3509989 - RNA, 15 nt, Human
agcagccagcccugc

SEQ ID NO: 3509990 - RNA, 15 nt, Human
agcagccagcucuca

SEQ ID NO: 3509991 - RNA, 16 nt, Human
agcagccagcucucag

SEQ ID NO: 3509992 - RNA, 17 nt, Human
agcagccagcucucagc

SEQ ID NO: 3509993 - RNA, 18 nt, Human
agcagccagcucucagcc

SEQ ID NO: 3509994 - RNA, 12 nt, Human
agcagcccaaau

SEQ ID NO: 3509995 - RNA, 13 nt, Human
agcagcccaaauu

SEQ ID NO: 3509996 - RNA, 23 nt, Human
agcagccccacaccagggccagc

SEQ ID NO: 3509997 - RNA, 15 nt, Human
agcagccccgggagg

SEQ ID NO: 3509998 - RNA, 18 nt, Human
agcagcccuaaggaucuc

SEQ ID NO: 3509999 - RNA, 12 nt, Human
agcagcccuccu

SEQ ID NO: 3510000 - RNA, 13 nt, Human
agcagcccuccuc

SEQ ID NO: 3510001 - RNA, 16 nt, Human
agcagcccuccucacc

SEQ ID NO: 3510002 - RNA, 18 nt, Human
agcagcccuccucacccc

SEQ ID NO: 3510003 - RNA, 13 nt, Human
agcagcccuuggc

SEQ ID NO: 3510004 - RNA, 20 nt, Human
agcagccucagaacaaagug

SEQ ID NO: 3510005 - RNA, 17 nt, Human
agcagccucgccccugg

SEQ ID NO: 3510006 - RNA, 15 nt, Human
agcagccucucccca

SEQ ID NO: 3510007 - RNA, 20 nt, Human
agcagccucuccccaggucc

SEQ ID NO: 3510008 - RNA, 12 nt, Human
agcagccucuga

SEQ ID NO: 3510009 - RNA, 19 nt, Human
agcagccugagcaacucuu

SEQ ID NO: 3510010 - RNA, 23 nt, Human
agcagccugagcaacucuugauu

SEQ ID NO: 3510011 - RNA, 16 nt, Human
agcagccuggacccug

SEQ ID NO: 3510012 - RNA, 20 nt, Human
agcagccuggacccugugga

SEQ ID NO: 3510013 - RNA, 15 nt, Human
agcagccuggagccc

SEQ ID NO: 3510014 - RNA, 15 nt, Human
agcagcgagccugcu

SEQ ID NO: 3510015 - RNA, 15 nt, Human
agcagcgccuuuccc

SEQ ID NO: 3510016 - RNA, 16 nt, Human
agcagcgguggccucu

SEQ ID NO: 3510017 - RNA, 14 nt, Human
agguucuaacccua

SEQ ID NO: 3510018 - RNA, 12 nt, Human
agguucuaaggc

SEQ ID NO: 3510019 - RNA, 13 nt, Human
agguucuaaggcc

SEQ ID NO: 3510020 - RNA, 19 nt, Human
agguucuaaggccuaggau

SEQ ID NO: 3510021 - RNA, 22 nt, Human
agguucuaaggccuaggauucu

SEQ ID NO: 3510022 - RNA, 19 nt, Human
agguucuagguuucaaaga

SEQ ID NO: 3510023 - RNA, 15 nt, Human
agguucuauuuggaa

SEQ ID NO: 3510024 - RNA, 13 nt, Human
agguucuccaaca

SEQ ID NO: 3510025 - RNA, 22 nt, Human
agguucuccguuagcuccugug

SEQ ID NO: 3510026 - RNA, 18 nt, Human
agguucucucucacugcc

SEQ ID NO: 3510027 - RNA, 14 nt, Human
agguucugccugcu

SEQ ID NO: 3510028 - RNA, 16 nt, Human
agguucuuacugcuug

SEQ ID NO: 3510029 - RNA, 15 nt, Human
agguucuucagaagu

SEQ ID NO: 3510030 - RNA, 20 nt, Human
agguugaagaccuaaccagg

SEQ ID NO: 3510031 - RNA, 23 nt, Human
agguugaagccaaguggggugcu

SEQ ID NO: 3510032 - RNA, 17 nt, Human
agguugaagccaugucu

SEQ ID NO: 3510033 - RNA, 15 nt, Human
agguugacaggaggu

SEQ ID NO: 3510034 - RNA, 20 nt, Human
agguugagcaauuucccccu

SEQ ID NO: 3510035 - RNA, 24 nt, Human
agguugagcucuucuuaaaguauu

SEQ ID NO: 3510036 - RNA, 17 nt, Human
agguugaggggcuccug

SEQ ID NO: 3510037 - RNA, 11 nt, Human
agguugauaac

SEQ ID NO: 3510038 - RNA, 12 nt, Human
agguugauaacu

SEQ ID NO: 3510039 - RNA, 15 nt, Human
agguugauaacuuug

SEQ ID NO: 3510040 - RNA, 16 nt, Human
agguugauaacuuugc

SEQ ID NO: 3510041 - RNA, 17 nt, Human
agguugcacacuuuggu

SEQ ID NO: 3510042 - RNA, 14 nt, Human
agguugcagugagc

SEQ ID NO: 3510043 - RNA, 15 nt, Human
agguuggaagagaau

SEQ ID NO: 3510044 - RNA, 15 nt, Human
agguuggagcccagg

SEQ ID NO: 3510045 - RNA, 15 nt, Human
agguuggcucugcca

SEQ ID NO: 3510046 - RNA, 21 nt, Human
agguuggcucugccaguccug

SEQ ID NO: 3510047 - RNA, 22 nt, Human
agguugggaaugaggcuugcug

SEQ ID NO: 3510048 - RNA, 23 nt, Human
agguugggagaaugucaguaugu

SEQ ID NO: 3510049 - RNA, 14 nt, Human
agguugggauggga

SEQ ID NO: 3510050 - RNA, 22 nt, Human
agguugggugcugcuaauucuu

SEQ ID NO: 3510051 - RNA, 17 nt, Human
agguuguaguaaagaaa

SEQ ID NO: 3510052 - RNA, 22 nt, Human
agguuguggccuuugcgcuccu

SEQ ID NO: 3510053 - RNA, 13 nt, Human
agguuuaaaugaa

SEQ ID NO: 3510054 - RNA, 15 nt, Human
agguuuaaaugaaca

SEQ ID NO: 3510055 - RNA, 19 nt, Human
agguuuaaaugaacaagag

SEQ ID NO: 3510056 - RNA, 22 nt, Human
agguuuaaaugaacaagagaag

SEQ ID NO: 3510057 - RNA, 16 nt, Human
agguuuacaauuuaca

SEQ ID NO: 3510058 - RNA, 22 nt, Human
agguuuacaauuuacaaagugu

SEQ ID NO: 3510059 - RNA, 23 nt, Human
agguuuacaauuuacaaagugug

SEQ ID NO: 3510060 - RNA, 14 nt, Human
agguuuacagaauu

SEQ ID NO: 3510061 - RNA, 20 nt, Human
agguuuaggcugguggccca

SEQ ID NO: 3510062 - RNA, 21 nt, Human
agguuuaggcugguggcccag

SEQ ID NO: 3510063 - RNA, 21 nt, Human
agguuuaugaaaaagaagaau

SEQ ID NO: 3510064 - RNA, 12 nt, Human
agguuuauuguu

SEQ ID NO: 3510065 - RNA, 17 nt, Human
agguuuauuuuucuguu

SEQ ID NO: 3510066 - RNA, 17 nt, Human
agguuucaaagaugcug

SEQ ID NO: 3510067 - RNA, 21 nt, Human
agguuucauacucuagauuuu

SEQ ID NO: 3510068 - RNA, 17 nt, Human
agguuucguuucuguau

SEQ ID NO: 3510069 - RNA, 21 nt, Human
agguuucugaguuccugcaug

SEQ ID NO: 3510070 - RNA, 23 nt, Human
agguuucuggucucuaggcuggg

SEQ ID NO: 3510071 - RNA, 17 nt, Human
agguuugagaagcacug

SEQ ID NO: 3510072 - RNA, 22 nt, Human
agguuuggaaggagcagaaaac

SEQ ID NO: 3510073 - RNA, 14 nt, Human
agguuuggcuccug

SEQ ID NO: 3510074 - RNA, 16 nt, Human
agguuugggaccccug

SEQ ID NO: 3510075 - RNA, 17 nt, Human
agguuugguccagccug

SEQ ID NO: 3510076 - RNA, 19 nt, Human
agguuuggugcaaaguauu

SEQ ID NO: 3510077 - RNA, 16 nt, Human
agguuuggugugugga

SEQ ID NO: 3510078 - RNA, 12 nt, Human
agguuuguauau

SEQ ID NO: 3510079 - RNA, 17 nt, Human
agguuuuaaagugauua

SEQ ID NO: 3510080 - RNA, 22 nt, Human
agguuuuaauuuaguaaaccaa

SEQ ID NO: 3510081 - RNA, 18 nt, Human
agguuuuagguucuaaag

SEQ ID NO: 3510082 - RNA, 19 nt, Human
agguuuuagguucuaaagu

SEQ ID NO: 3510083 - RNA, 19 nt, Human
agguuuucacauaaaugca

SEQ ID NO: 3510084 - RNA, 22 nt, Human
agguuuuccccucuuuuguuaa

SEQ ID NO: 3510085 - RNA, 22 nt, Human
agguuuuccucuucuauuuugu

SEQ ID NO: 3510086 - RNA, 11 nt, Human
agguuuuccug

SEQ ID NO: 3510087 - RNA, 17 nt, Human
agguuuucuuuuaagaa

SEQ ID NO: 3510088 - RNA, 23 nt, Human
agguuuuggaucuugaauguggu

SEQ ID NO: 3510089 - RNA, 17 nt, Human
agguuuuguuguuuuau

SEQ ID NO: 3510090 - RNA, 16 nt, Human
agguuuuguuugcuau

SEQ ID NO: 3510091 - RNA, 19 nt, Human
agcaggggcuacaagaggg

SEQ ID NO: 3510092 - RNA, 20 nt, Human
agcaggggcuacaagaggga

SEQ ID NO: 3510093 - RNA, 18 nt, Human
agcaggguagucugguuu

SEQ ID NO: 3510094 - RNA, 16 nt, Human
agcagggucugggcag

SEQ ID NO: 3510095 - RNA, 19 nt, Human
agcagggucuuuucaucug

SEQ ID NO: 3510096 - RNA, 23 nt, Human
agcagggucuuuucaucugggaa

SEQ ID NO: 3510097 - RNA, 15 nt, Human
agcagggugcugugg

SEQ ID NO: 3510098 - RNA, 21 nt, Human
agcagguccccagcuuuggcu

SEQ ID NO: 3510099 - RNA, 22 nt, Human
agcaggugauuggaccaggcca

SEQ ID NO: 3510100 - RNA, 20 nt, Human
agcaggugcugcuacccucc

SEQ ID NO: 3510101 - RNA, 13 nt, Human
agcagguggggag

SEQ ID NO: 3510102 - RNA, 14 nt, Human
agcagguggggagg

SEQ ID NO: 3510103 - RNA, 16 nt, Human
agcagguucccaagcu

SEQ ID NO: 3510104 - RNA, 15 nt, Human
agcaguaagggaaca

SEQ ID NO: 3510105 - RNA, 14 nt, Human
agcaguacaauaaa

SEQ ID NO: 3510106 - RNA, 21 nt, Human
agcaguagaaauaauaugcau

SEQ ID NO: 3510107 - RNA, 17 nt, Human
agcaguagacauuuuaa

SEQ ID NO: 3510108 - RNA, 15 nt, Human
agcaguauauguuaa

SEQ ID NO: 3510109 - RNA, 12 nt, Human
agcaguauuuuu

SEQ ID NO: 3510110 - RNA, 23 nt, Human
agcagucacuuuuccugugcugu

SEQ ID NO: 3510111 - RNA, 19 nt, Human
agcagucaggaaagagaac

SEQ ID NO: 3510112 - RNA, 12 nt, Human
agcaguccuugg

SEQ ID NO: 3510113 - RNA, 13 nt, Human
agcaguccuuggc

SEQ ID NO: 3510114 - RNA, 18 nt, Human
agcaguccuuggccugcu

SEQ ID NO: 3510115 - RNA, 19 nt, Human
agcagucucugccuugccu

SEQ ID NO: 3510116 - RNA, 20 nt, Human
agcagucuuaugcuuccaga

SEQ ID NO: 3510117 - RNA, 17 nt, Human
agcagugaaaacaagug

SEQ ID NO: 3510118 - RNA, 16 nt, Human
agcagugagaaaaagc

SEQ ID NO: 3510119 - RNA, 22 nt, Human
agcagugagaaaaagcuccugu

SEQ ID NO: 3510120 - RNA, 14 nt, Human
agcagugagccgca

SEQ ID NO: 3510121 - RNA, 16 nt, Human
agcagugagucucuuc

SEQ ID NO: 3510122 - RNA, 15 nt, Human
agcagugauauucuu

SEQ ID NO: 3510123 - RNA, 19 nt, Human
agcagugauauucuuuguu

SEQ ID NO: 3510124 - RNA, 21 nt, Human
agcagugauauucuuuguuaa

SEQ ID NO: 3510125 - RNA, 13 nt, Human
agcagugcaggca

SEQ ID NO: 3510126 - RNA, 20 nt, Human
agcagugcaugcugucccuu

SEQ ID NO: 3510127 - RNA, 23 nt, Human
agcagugccuuccauaauuauga

SEQ ID NO: 3510128 - RNA, 12 nt, Human
agcaguggacac

SEQ ID NO: 3510129 - RNA, 15 nt, Human
agcaguggcaggcag

SEQ ID NO: 3510130 - RNA, 13 nt, Human
agcaguggcuggu

SEQ ID NO: 3510131 - RNA, 16 nt, Human
agcaguggcuggucca

SEQ ID NO: 3510132 - RNA, 17 nt, Human
agcaguggcugguccag

SEQ ID NO: 3510133 - RNA, 17 nt, Human
agcagugggcuccuggc

SEQ ID NO: 3510134 - RNA, 13 nt, Human
agcagugucauca

SEQ ID NO: 3510135 - RNA, 17 nt, Human
agcagugucuuccauaa

SEQ ID NO: 3510136 - RNA, 22 nt, Human
agcagugucuuccauaauguau

SEQ ID NO: 3510137 - RNA, 22 nt, Human
agcaguuaacuuuaagacugag

SEQ ID NO: 3510138 - RNA, 20 nt, Human
agcaguucaccuauuucaaa

SEQ ID NO: 3510139 - RNA, 17 nt, Human
agcaguucagagcugcc

SEQ ID NO: 3510140 - RNA, 19 nt, Human
agcaguucagagcugcccu

SEQ ID NO: 3510141 - RNA, 23 nt, Human
agcaguucagagcugcccucucc

SEQ ID NO: 3510142 - RNA, 23 nt, Human
agcaguucugcaaauagaaaaca

SEQ ID NO: 3510143 - RNA, 16 nt, Human
agcaguucugcagagg

SEQ ID NO: 3510144 - RNA, 12 nt, Human
agcaguucuguu

SEQ ID NO: 3510145 - RNA, 13 nt, Human
agcaguugaaaag

SEQ ID NO: 3510146 - RNA, 21 nt, Human
agcaguugaaaagacuccaaa

SEQ ID NO: 3510147 - RNA, 19 nt, Human
agcaguugagacaagaaaa

SEQ ID NO: 3510148 - RNA, 23 nt, Human
agcaguugagucgucaucacuuu

SEQ ID NO: 3510149 - RNA, 22 nt, Human
agcaguugcugguaaaaugaag

SEQ ID NO: 3510150 - RNA, 13 nt, Human
agcaguuguguca

SEQ ID NO: 3510151 - RNA, 17 nt, Human
agcaguuguuauuacau

SEQ ID NO: 3510152 - RNA, 14 nt, Human
agcaguuucaauaa

SEQ ID NO: 3510153 - RNA, 15 nt, Human
agcaguuucaauaaa

SEQ ID NO: 3510154 - RNA, 17 nt, Human
agcaguuucaauaaagu

SEQ ID NO: 3510155 - RNA, 15 nt, Human
agcaguuugaaauug

SEQ ID NO: 3510156 - RNA, 20 nt, Human
agcaguuugguuucuagcau

SEQ ID NO: 3510157 - RNA, 22 nt, Human
agcaguuugguuucuagcauga

SEQ ID NO: 3510158 - RNA, 17 nt, Human
agcaguuuucaagucaa

SEQ ID NO: 3510159 - RNA, 19 nt, Human
agcauaaaaauuagccaag

SEQ ID NO: 3510160 - RNA, 17 nt, Human
agcauaaaagaugaaag

SEQ ID NO: 3510161 - RNA, 23 nt, Human
agcauaaaagaugaaagagcagu

SEQ ID NO: 3510162 - RNA, 11 nt, Human
agcauaaagaa

SEQ ID NO: 3510163 - RNA, 23 nt, Human
agcauaaagcucaaaugaaaugu

SEQ ID NO: 3510164 - RNA, 14 nt, Human
agcauaaaugcaaa

SEQ ID NO: 3510165 - RNA, 23 nt, Human
agcauaaauguugacaugggaca

SEQ ID NO: 3510166 - RNA, 20 nt, Human
agcauaacaagguccaagau

SEQ ID NO: 3510167 - RNA, 21 nt, Human
agcauaauacuugcuuuggaa

SEQ ID NO: 3510168 - RNA, 16 nt, Human
agcauaauuuaaaaau

SEQ ID NO: 3510169 - RNA, 21 nt, Human
agcauaauuuaaaaauauauu

SEQ ID NO: 3510170 - RNA, 22 nt, Human
agcauaauuuaaaaauauauuu

SEQ ID NO: 3510171 - RNA, 13 nt, Human
agcauacauuuau

SEQ ID NO: 3510172 - RNA, 20 nt, Human
agcauacauuuauaauguuu

SEQ ID NO: 3510173 - RNA, 17 nt, Human
agcauaccuuuauugug

SEQ ID NO: 3510174 - RNA, 15 nt, Human
agcauacguacacau

SEQ ID NO: 3510175 - RNA, 19 nt, Human
agcauacguacacauuuua

SEQ ID NO: 3510176 - RNA, 20 nt, Human
agcauacguacacauuuuau

SEQ ID NO: 3510177 - RNA, 21 nt, Human
agcauacuggcuucaccauca

SEQ ID NO: 3510178 - RNA, 13 nt, Human
agcauacuuugua

SEQ ID NO: 3510179 - RNA, 16 nt, Human
agcauagaaaccacua

SEQ ID NO: 3510180 - RNA, 13 nt, Human
agggucccaagcu

SEQ ID NO: 3510181 - RNA, 19 nt, Human
agggucccaagcugggccc

SEQ ID NO: 3510182 - RNA, 18 nt, Human
aggguccccaccugggac

SEQ ID NO: 3510183 - RNA, 22 nt, Human
agggucccugguggcagcucac

SEQ ID NO: 3510184 - RNA, 15 nt, Human
aggguccuccacaau

SEQ ID NO: 3510185 - RNA, 16 nt, Human
aggguccugcagccug

SEQ ID NO: 3510186 - RNA, 22 nt, Human
aggguccugcuauuucccaagc

SEQ ID NO: 3510187 - RNA, 14 nt, Human
aggguccuggcucc

SEQ ID NO: 3510188 - RNA, 16 nt, Human
aggguccuggcuccug

SEQ ID NO: 3510189 - RNA, 15 nt, Human
aggguccuggggaac

SEQ ID NO: 3510190 - RNA, 21 nt, Human
aggguccuggggaaccugacc

SEQ ID NO: 3510191 - RNA, 23 nt, Human
aggguccuggggaaccugacccc

SEQ ID NO: 3510192 - RNA, 17 nt, Human
aggguccuucccucucc

SEQ ID NO: 3510193 - RNA, 17 nt, Human
aggguccuuuugacacu

SEQ ID NO: 3510194 - RNA, 18 nt, Human
agggucgaaagcucuaga

SEQ ID NO: 3510195 - RNA, 19 nt, Human
agggucuagggagagaccc

SEQ ID NO: 3510196 - RNA, 20 nt, Human
agggucucacuauguugccc

SEQ ID NO: 3510197 - RNA, 21 nt, Human
agggucucacuauguugccca

SEQ ID NO: 3510198 - RNA, 16 nt, Human
agggucucacucuguc

SEQ ID NO: 3510199 - RNA, 22 nt, Human
agggucucacucugucgcccag

SEQ ID NO: 3510200 - RNA, 16 nt, Human
agggucucaggguguc

SEQ ID NO: 3510201 - RNA, 16 nt, Human
agggucucuagugcug

SEQ ID NO: 3510202 - RNA, 18 nt, Human
agggucucuagugcugug

SEQ ID NO: 3510203 - RNA, 16 nt, Human
agggucucugcugccg

SEQ ID NO: 3510204 - RNA, 14 nt, Human
agggucugcucuuu

SEQ ID NO: 3510205 - RNA, 20 nt, Human
agggucugcucuuucucugc

SEQ ID NO: 3510206 - RNA, 19 nt, Human
agggucuggagaagcagug

SEQ ID NO: 3510207 - RNA, 22 nt, Human
agggucugggaaaugagcaggg

SEQ ID NO: 3510208 - RNA, 17 nt, Human
agggucugggcaggacu

SEQ ID NO: 3510209 - RNA, 23 nt, Human
agggucugggggcacaagacuga

SEQ ID NO: 3510210 - RNA, 19 nt, Human
agggucuguagguugcaca

SEQ ID NO: 3510211 - RNA, 17 nt, Human
agggucuguuuggacug

SEQ ID NO: 3510212 - RNA, 15 nt, Human
agggucuugggaaau

SEQ ID NO: 3510213 - RNA, 21 nt, Human
agggucuugguuccagccugc

SEQ ID NO: 3510214 - RNA, 22 nt, Human
agggucuugguuccagccugcc

SEQ ID NO: 3510215 - RNA, 21 nt, Human
agggucuuucucaaagaaaua

SEQ ID NO: 3510216 - RNA, 14 nt, Human
agggugagagcugc

SEQ ID NO: 3510217 - RNA, 20 nt, Human
agggugaguuggcuuaccug

SEQ ID NO: 3510218 - RNA, 22 nt, Human
agggugaugggaaagcauugua

SEQ ID NO: 3510219 - RNA, 20 nt, Human
agggugcaguaucaugcccu

SEQ ID NO: 3510220 - RNA, 14 nt, Human
agggugcccagaac

SEQ ID NO: 3510221 - RNA, 22 nt, Human
agggugcuacguacaugugagg

SEQ ID NO: 3510222 - RNA, 17 nt, Human
agggugcugcuucccuc

SEQ ID NO: 3510223 - RNA, 22 nt, Human
aggguggacuuagaaagcaggg

SEQ ID NO: 3510224 - RNA, 14 nt, Human
aggguggcccuugc

SEQ ID NO: 3510225 - RNA, 19 nt, Human
agggugggagagcccagcc

SEQ ID NO: 3510226 - RNA, 15 nt, Human
agggugggagugggc

SEQ ID NO: 3510227 - RNA, 17 nt, Human
agggugggcuugugggg

SEQ ID NO: 3510228 - RNA, 23 nt, Human
agggugggggccaccugccugcg

SEQ ID NO: 3510229 - RNA, 17 nt, Human
agggugggugcucagaa

SEQ ID NO: 3510230 - RNA, 20 nt, Human
agggugggugcucagaauaa

SEQ ID NO: 3510231 - RNA, 16 nt, Human
aggguggugaccucug

SEQ ID NO: 3510232 - RNA, 18 nt, Human
aggguggugaccucugcc

SEQ ID NO: 3510233 - RNA, 15 nt, Human
agggugguggagcca

SEQ ID NO: 3510234 - RNA, 17 nt, Human
agguccaaugagcuuuc

SEQ ID NO: 3510235 - RNA, 19 nt, Human
agguccaaugagcuuucug

SEQ ID NO: 3510236 - RNA, 17 nt, Human
agguccacaacacacag

SEQ ID NO: 3510237 - RNA, 19 nt, Human
agguccacaacacacagau

SEQ ID NO: 3510238 - RNA, 20 nt, Human
agguccacaggucuagacua

SEQ ID NO: 3510239 - RNA, 11 nt, Human
agguccagccc

SEQ ID NO: 3510240 - RNA, 12 nt, Human
agguccagccca

SEQ ID NO: 3510241 - RNA, 16 nt, Human
aggucccaaggcaagg

SEQ ID NO: 3510242 - RNA, 14 nt, Human
aggucccaccucca

SEQ ID NO: 3510243 - RNA, 15 nt, Human
aggucccaccuccag

SEQ ID NO: 3510244 - RNA, 12 nt, Human
aggucccaggca

SEQ ID NO: 3510245 - RNA, 11 nt, Human
agguccccaga

SEQ ID NO: 3510246 - RNA, 11 nt, Human
aggucccuaau

SEQ ID NO: 3510247 - RNA, 17 nt, Human
aggucccuaauaaagcu

SEQ ID NO: 3510248 - RNA, 23 nt, Human
aggucccuaauaaagcugugugg

SEQ ID NO: 3510249 - RNA, 18 nt, Human
agguccgguguucuaaga

SEQ ID NO: 3510250 - RNA, 21 nt, Human
agguccucaguguccucaggg

SEQ ID NO: 3510251 - RNA, 20 nt, Human
agguccucuggagcccuaac

SEQ ID NO: 3510252 - RNA, 13 nt, Human
agguccucuguca

SEQ ID NO: 3510253 - RNA, 18 nt, Human
agguccugagcacugcca

SEQ ID NO: 3510254 - RNA, 21 nt, Human
agguccugagcacugccagga

SEQ ID NO: 3510255 - RNA, 19 nt, Human
agguccugauuucuagaac

SEQ ID NO: 3510256 - RNA, 20 nt, Human
agguccugcagucuggcuga

SEQ ID NO: 3510257 - RNA, 17 nt, Human
agguccugggggccuga

SEQ ID NO: 3510258 - RNA, 20 nt, Human
agguccugguggggcagcuc

SEQ ID NO: 3510259 - RNA, 22 nt, Human
agguccugguggggcagcuccu

SEQ ID NO: 3510260 - RNA, 12 nt, Human
agguccuugccc

SEQ ID NO: 3510261 - RNA, 19 nt, Human
aggucgggaguuggagacc

SEQ ID NO: 3510262 - RNA, 13 nt, Human
aggucgggcucag

SEQ ID NO: 3510263 - RNA, 19 nt, Human
aggucgggcucagcucugg

SEQ ID NO: 3510264 - RNA, 22 nt, Human
aggucuaggaacauacuucagc

SEQ ID NO: 3510265 - RNA, 20 nt, Human
aggucuauuuaaaaaaaaag

SEQ ID NO: 3510266 - RNA, 22 nt, Human
aggucucaacccuuuugucugc

SEQ ID NO: 3510267 - RNA, 13 nt, Human
aggucucacgggc

SEQ ID NO: 3510268 - RNA, 14 nt, Human
aggucucagccccu

SEQ ID NO: 3510269 - RNA, 13 nt, Human
aggucucccugga

SEQ ID NO: 3510270 - RNA, 12 nt, Human
aggucuccucca

SEQ ID NO: 3510271 - RNA, 18 nt, Human
aggucuccuccaccgcca

SEQ ID NO: 3510272 - RNA, 23 nt, Human
aggucuccuccaccgccauggcu

SEQ ID NO: 3510273 - RNA, 12 nt, Human
aggucuccucuu

SEQ ID NO: 3510274 - RNA, 17 nt, Human
aggucuccucuuaaaaa

SEQ ID NO: 3510275 - RNA, 21 nt, Human
aggucucuguugacuggcugu

SEQ ID NO: 3510276 - RNA, 16 nt, Human
aggucucuuccccucu

SEQ ID NO: 3510277 - RNA, 18 nt, Human
aggucucuucucccagaa

SEQ ID NO: 3510278 - RNA, 16 nt, Human
aggucucuugagggag

SEQ ID NO: 3510279 - RNA, 13 nt, Human
aggucugaguugu

SEQ ID NO: 3510280 - RNA, 22 nt, Human
aggucuggagaagcucccagga

SEQ ID NO: 3510281 - RNA, 16 nt, Human
aggucuggcugcuugc

SEQ ID NO: 3510282 - RNA, 19 nt, Human
aggucugggagaggcagag

SEQ ID NO: 3510283 - RNA, 21 nt, Human
aggucugggcuagguagaaaa

SEQ ID NO: 3510284 - RNA, 15 nt, Human
aggucuguucuuucc

SEQ ID NO: 3510285 - RNA, 16 nt, Human
aggucuguucuuucca

SEQ ID NO: 3510286 - RNA, 23 nt, Human
aggucuguucuuuccaaaguaca

SEQ ID NO: 3510287 - RNA, 20 nt, Human
aggucuguuuaaaguggcaa

SEQ ID NO: 3510288 - RNA, 15 nt, Human
aggucuguuugcugu

SEQ ID NO: 3510289 - RNA, 17 nt, Human
aggucuguuugcuguug

SEQ ID NO: 3510290 - RNA, 16 nt, Human
aggucuugaacuccug

SEQ ID NO: 3510291 - RNA, 20 nt, Human
aggucuugaacuccuggccu

SEQ ID NO: 3510292 - RNA, 21 nt, Human
aggucuugaacuccuggccuc

SEQ ID NO: 3510293 - RNA, 22 nt, Human
aggucuugaacuccuggccuca

SEQ ID NO: 3510294 - RNA, 20 nt, Human
aggucuugauuuguuuuaga

SEQ ID NO: 3510295 - RNA, 23 nt, Human
aggucuugcucuccuagguagcc

SEQ ID NO: 3510296 - RNA, 20 nt, Human
aggucuuuguaagaacuaaa

SEQ ID NO: 3510297 - RNA, 14 nt, Human
aggucuuuugacau

SEQ ID NO: 3510298 - RNA, 18 nt, Human
aggucuuuugacaugugg

SEQ ID NO: 3510299 - RNA, 21 nt, Human
aggucuuuugacauguggaaa

SEQ ID NO: 3510300 - RNA, 14 nt, Human
aggucuuuuuuuaa

SEQ ID NO: 3510301 - RNA, 17 nt, Human
aggugaaacauuuucuc

SEQ ID NO: 3510302 - RNA, 21 nt, Human
aggugaaagggagcuaucagg

SEQ ID NO: 3510303 - RNA, 14 nt, Human
aggugaacauuggu

SEQ ID NO: 3510304 - RNA, 21 nt, Human
aggugaacauugguucuuuca

SEQ ID NO: 3510305 - RNA, 23 nt, Human
aggugaaggaauauauggcagag

SEQ ID NO: 3510306 - RNA, 18 nt, Human
aggugaaggaggcuccag

SEQ ID NO: 3510307 - RNA, 18 nt, Human
aggugacagugagguccu

SEQ ID NO: 3510308 - RNA, 15 nt, Human
aggugacaugugaaa

SEQ ID NO: 3510309 - RNA, 16 nt, Human
aggugacaugugaaac

SEQ ID NO: 3510310 - RNA, 24 nt, Human
aggugaccccagggcacaggagcu

SEQ ID NO: 3510311 - RNA, 16 nt, Human
aggugaccuucuggga

SEQ ID NO: 3510312 - RNA, 20 nt, Human
aggugaccuugcaacuucau

SEQ ID NO: 3510313 - RNA, 22 nt, Human
aggugacugggcccugccucug

SEQ ID NO: 3510314 - RNA, 15 nt, Human
aggugacugucuggg

SEQ ID NO: 3510315 - RNA, 13 nt, Human
aggugagaaacug

SEQ ID NO: 3510316 - RNA, 21 nt, Human
aggugagaagcagaggaagga

SEQ ID NO: 3510317 - RNA, 15 nt, Human
aggugagaccaccuc

SEQ ID NO: 3510318 - RNA, 21 nt, Human
aggugagcaaccaguuggcua

SEQ ID NO: 3510319 - RNA, 13 nt, Human
aggugagggaugu

SEQ ID NO: 3510320 - RNA, 20 nt, Human
aggugaguuugagcugccuu

SEQ ID NO: 3510321 - RNA, 21 nt, Human
aggugaguuugagcugccuuc

SEQ ID NO: 3510322 - RNA, 15 nt, Human
aggugauaaaaucau

SEQ ID NO: 3510323 - RNA, 15 nt, Human
aggugauaagggaaa

SEQ ID NO: 3510324 - RNA, 16 nt, Human
aggugauagcauugcu

SEQ ID NO: 3510325 - RNA, 18 nt, Human
aggugauagcauugcuuu

SEQ ID NO: 3510326 - RNA, 14 nt, Human
aggugauccaccca

SEQ ID NO: 3510327 - RNA, 20 nt, Human
aggugauccacccaccucag

SEQ ID NO: 3510328 - RNA, 21 nt, Human
aggugauccauguaacugccu

SEQ ID NO: 3510329 - RNA, 22 nt, Human
aggugaucugcugcagagcagu

SEQ ID NO: 3510330 - RNA, 16 nt, Human
aggugauuaacuugga

SEQ ID NO: 3510331 - RNA, 19 nt, Human
aggugcaauuucaagguuc

SEQ ID NO: 3510332 - RNA, 16 nt, Human
aggugcacaagcucca

SEQ ID NO: 3510333 - RNA, 17 nt, Human
aggugcacaagcuccaa

SEQ ID NO: 3510334 - RNA, 23 nt, Human
aggugcacagacgucccuccacg

SEQ ID NO: 3510335 - RNA, 22 nt, Human
aggugcacuuggggcacaggga

SEQ ID NO: 3510336 - RNA, 12 nt, Human
aggugcagaggu

SEQ ID NO: 3510337 - RNA, 20 nt, Human
aggugcagagugcccagaac

SEQ ID NO: 3510338 - RNA, 16 nt, Human
agcauagaaggcaggu

SEQ ID NO: 3510339 - RNA, 20 nt, Human
agcauaggugauccauguaa

SEQ ID NO: 3510340 - RNA, 15 nt, Human
agcauauaaaauggc

SEQ ID NO: 3510341 - RNA, 15 nt, Human
agcauauauuuuuau

SEQ ID NO: 3510342 - RNA, 18 nt, Human
agcauauauuuuuauauu

SEQ ID NO: 3510343 - RNA, 20 nt, Human
agcauauauuuuuauauuua

SEQ ID NO: 3510344 - RNA, 13 nt, Human
agcauaucugccu

SEQ ID NO: 3510345 - RNA, 15 nt, Human
agcauaucugccuuu

SEQ ID NO: 3510346 - RNA, 17 nt, Human
agcauaucugccuuuau

SEQ ID NO: 3510347 - RNA, 16 nt, Human
agcauaugaggaugca

SEQ ID NO: 3510348 - RNA, 21 nt, Human
agcauaugaguuucauagcua

SEQ ID NO: 3510349 - RNA, 18 nt, Human
agcauauuuguauaguug

SEQ ID NO: 3510350 - RNA, 13 nt, Human
agcaucaagccac

SEQ ID NO: 3510351 - RNA, 15 nt, Human
agcaucacaguuuug

SEQ ID NO: 3510352 - RNA, 14 nt, Human
agcaucaccucagg

SEQ ID NO: 3510353 - RNA, 19 nt, Human
agcaucaccucaggccagg

SEQ ID NO: 3510354 - RNA, 15 nt, Human
agcaucaccugccug

SEQ ID NO: 3510355 - RNA, 14 nt, Human
agcaucacuuaaaa

SEQ ID NO: 3510356 - RNA, 18 nt, Human
agcaucacuuaaaacacg

SEQ ID NO: 3510357 - RNA, 17 nt, Human
agcaucacuugggauua

SEQ ID NO: 3510358 - RNA, 16 nt, Human
agcaucaggccaggcc

SEQ ID NO: 3510359 - RNA, 18 nt, Human
agcaucaggccaggcccu

SEQ ID NO: 3510360 - RNA, 21 nt, Human
agcaucaggccaggcccucug

SEQ ID NO: 3510361 - RNA, 17 nt, Human
agcaucagggggaagaa

SEQ ID NO: 3510362 - RNA, 13 nt, Human
agcaucaugccuc

SEQ ID NO: 3510363 - RNA, 15 nt, Human
agcaucaugccucug

SEQ ID NO: 3510364 - RNA, 16 nt, Human
agcaucaugccucuga

SEQ ID NO: 3510365 - RNA, 21 nt, Human
agcaucaugccucugaggcca

SEQ ID NO: 3510366 - RNA, 19 nt, Human
agcaucauuuugcauucaa

SEQ ID NO: 3510367 - RNA, 22 nt, Human
agcaucccaggaucgcaagagc

SEQ ID NO: 3510368 - RNA, 12 nt, Human
agcaucccccaa

SEQ ID NO: 3510369 - RNA, 17 nt, Human
agcauccccuugaacuc

SEQ ID NO: 3510370 - RNA, 13 nt, Human
agcaucccggagg

SEQ ID NO: 3510371 - RNA, 15 nt, Human
agcaucccucaccca

SEQ ID NO: 3510372 - RNA, 21 nt, Human
agcaucccuugaccaggccug

SEQ ID NO: 3510373 - RNA, 15 nt, Human
agcauccuaagaaau

SEQ ID NO: 3510374 - RNA, 16 nt, Human
agcauccuaagaaaua

SEQ ID NO: 3510375 - RNA, 16 nt, Human
agcauccucaguuccu

SEQ ID NO: 3510376 - RNA, 13 nt, Human
agcauccuggaau

SEQ ID NO: 3510377 - RNA, 13 nt, Human
agcauccuggcac

SEQ ID NO: 3510378 - RNA, 17 nt, Human
agcauccuggcacccgg

SEQ ID NO: 3510379 - RNA, 19 nt, Human
agccccacccucagaugca

SEQ ID NO: 3510380 - RNA, 14 nt, Human
agccccacucucag

SEQ ID NO: 3510381 - RNA, 22 nt, Human
agccccacucucagaggcccca

SEQ ID NO: 3510382 - RNA, 17 nt, Human
agccccacugccagcag

SEQ ID NO: 3510383 - RNA, 12 nt, Human
agccccagagca

SEQ ID NO: 3510384 - RNA, 15 nt, Human
agccccagcacuaac

SEQ ID NO: 3510385 - RNA, 13 nt, Human
agccccagccagg

SEQ ID NO: 3510386 - RNA, 23 nt, Human
agccccagcccagcccagcugcu

SEQ ID NO: 3510387 - RNA, 14 nt, Human
agccccagcccccu

SEQ ID NO: 3510388 - RNA, 18 nt, Human
agccccagcccccuuugg

SEQ ID NO: 3510389 - RNA, 14 nt, Human
agccccagccugcu

SEQ ID NO: 3510390 - RNA, 12 nt, Human
agccccagcuga

SEQ ID NO: 3510391 - RNA, 20 nt, Human
agccccaggcaggcugugcg

SEQ ID NO: 3510392 - RNA, 15 nt, Human
agccccaggccucug

SEQ ID NO: 3510393 - RNA, 17 nt, Human
agccccagugacagcua

SEQ ID NO: 3510394 - RNA, 16 nt, Human
agccccagugcccaca

SEQ ID NO: 3510395 - RNA, 17 nt, Human
agccccauccucuguac

SEQ ID NO: 3510396 - RNA, 15 nt, Human
agccccauccugccg

SEQ ID NO: 3510397 - RNA, 16 nt, Human
agccccaucuagggga

SEQ ID NO: 3510398 - RNA, 17 nt, Human
agccccaucugugcauu

SEQ ID NO: 3510399 - RNA, 14 nt, Human
agccccaucuucac

SEQ ID NO: 3510400 - RNA, 16 nt, Human
agccccaugcuggagc

SEQ ID NO: 3510401 - RNA, 22 nt, Human
aguauucugccuuugcagaaac

SEQ ID NO: 3510402 - RNA, 14 nt, Human
aguauucuucucuu

SEQ ID NO: 3510403 - RNA, 15 nt, Human
aguauucuugucaaa

SEQ ID NO: 3510404 - RNA, 15 nt, Human
aguauugacaaaaug

SEQ ID NO: 3510405 - RNA, 16 nt, Human
aguauugacaaaaugu

SEQ ID NO: 3510406 - RNA, 16 nt, Human
aguauugauucugcuu

SEQ ID NO: 3510407 - RNA, 17 nt, Human
aguauugcaucuguaua

SEQ ID NO: 3510408 - RNA, 14 nt, Human
aguauugccaaaca

SEQ ID NO: 3510409 - RNA, 15 nt, Human
aguauugccaaacau

SEQ ID NO: 3510410 - RNA, 18 nt, Human
aguauuguaaauuauauu

SEQ ID NO: 3510411 - RNA, 16 nt, Human
aguauuguaaugagug

SEQ ID NO: 3510412 - RNA, 15 nt, Human
aguauuguacaaagu

SEQ ID NO: 3510413 - RNA, 22 nt, Human
aguauuguacaaaguauuaagc

SEQ ID NO: 3510414 - RNA, 23 nt, Human
aguauuguacaaaguauuaagca

SEQ ID NO: 3510415 - RNA, 12 nt, Human
aguauuguuguc

SEQ ID NO: 3510416 - RNA, 13 nt, Human
aguauuguugucc

SEQ ID NO: 3510417 - RNA, 19 nt, Human
aguauuguuguccuuuuca

SEQ ID NO: 3510418 - RNA, 24 nt, Human
aguauuguuguccuuuucauaggu

SEQ ID NO: 3510419 - RNA, 17 nt, Human
aguauuuaacuaauuau

SEQ ID NO: 3510420 - RNA, 18 nt, Human
aguauuuaagccuaaaga

SEQ ID NO: 3510421 - RNA, 21 nt, Human
aguauuuaagccuaaagauuu

SEQ ID NO: 3510422 - RNA, 16 nt, Human
aguauuuaauuagugc

SEQ ID NO: 3510423 - RNA, 17 nt, Human
aguauuuaauuagugcu

SEQ ID NO: 3510424 - RNA, 21 nt, Human
aguauuuaauucauguugccu

SEQ ID NO: 3510425 - RNA, 15 nt, Human
aguauuuagaagcca

SEQ ID NO: 3510426 - RNA, 15 nt, Human
aguauuuauauauuu

SEQ ID NO: 3510427 - RNA, 13 nt, Human
aguauuuaugggu

SEQ ID NO: 3510428 - RNA, 16 nt, Human
aguauuuauuuaugua

SEQ ID NO: 3510429 - RNA, 18 nt, Human
aguauuuauuuuguaauu

SEQ ID NO: 3510430 - RNA, 22 nt, Human
aguauuuauuuuguaauuauga

SEQ ID NO: 3510431 - RNA, 14 nt, Human
aguauuucagugua

SEQ ID NO: 3510432 - RNA, 18 nt, Human
aguauuuccacuuguucu

SEQ ID NO: 3510433 - RNA, 13 nt, Human
aguauuucuauga

SEQ ID NO: 3510434 - RNA, 16 nt, Human
aguauuucuaugaaau

SEQ ID NO: 3510435 - RNA, 17 nt, Human
aguauuucuaugaaaua

SEQ ID NO: 3510436 - RNA, 18 nt, Human
aguauuucuaugaaauau

SEQ ID NO: 3510437 - RNA, 22 nt, Human
aguauuucuaugaaauauuaug

SEQ ID NO: 3510438 - RNA, 17 nt, Human
aguauuugaaaacagaa

SEQ ID NO: 3510439 - RNA, 12 nt, Human
aguauuugaauu

SEQ ID NO: 3510440 - RNA, 21 nt, Human
aguauuugaauuaaaacuucu

SEQ ID NO: 3510441 - RNA, 16 nt, Human
aguauuugagaguucu

SEQ ID NO: 3510442 - RNA, 17 nt, Human
aguauuugauucaaaau

SEQ ID NO: 3510443 - RNA, 19 nt, Human
aguauuugauucaaaauau

SEQ ID NO: 3510444 - RNA, 14 nt, Human
aguauuugugggga

SEQ ID NO: 3510445 - RNA, 13 nt, Human
aguauuuguuaau

SEQ ID NO: 3510446 - RNA, 14 nt, Human
aguauuuucccaau

SEQ ID NO: 3510447 - RNA, 13 nt, Human
aguauuuugaagu

SEQ ID NO: 3510448 - RNA, 14 nt, Human
aguauuuugaaguu

SEQ ID NO: 3510449 - RNA, 15 nt, Human
aguauuuugaaguuu

SEQ ID NO: 3510450 - RNA, 19 nt, Human
aguauuuugaaguuuacau

SEQ ID NO: 3510451 - RNA, 21 nt, Human
aguauuuugaaguuuacauuu

SEQ ID NO: 3510452 - RNA, 23 nt, Human
aguauuuugguucuuaguucuca

SEQ ID NO: 3510453 - RNA, 15 nt, Human
aguauuuuguguccu

SEQ ID NO: 3510454 - RNA, 17 nt, Human
aguauuuuguuucagug

SEQ ID NO: 3510455 - RNA, 13 nt, Human
aguauuuuugaca

SEQ ID NO: 3510456 - RNA, 16 nt, Human
aguauuuuuguauuca

SEQ ID NO: 3510457 - RNA, 20 nt, Human
aguauuuuuuacauuuuaca

SEQ ID NO: 3510458 - RNA, 14 nt, Human
aguauuuuuucaag

SEQ ID NO: 3510459 - RNA, 20 nt, Human
aguauuuuuuuaucuuggga

SEQ ID NO: 3510460 - RNA, 12 nt, Human
agucaaaaagaa

SEQ ID NO: 3510461 - RNA, 14 nt, Human
agucaaaaagaacc

SEQ ID NO: 3510462 - RNA, 17 nt, Human
agucaaaacuacaaauc

SEQ ID NO: 3510463 - RNA, 16 nt, Human
agucaaaacucaaaug

SEQ ID NO: 3510464 - RNA, 21 nt, Human
agucaaaaggugccugugagg

SEQ ID NO: 3510465 - RNA, 14 nt, Human
agucaaaauaauuc

SEQ ID NO: 3510466 - RNA, 22 nt, Human
agucaaaauauuuuuaaaagau

SEQ ID NO: 3510467 - RNA, 17 nt, Human
agucaaaccauaaacuu

SEQ ID NO: 3510468 - RNA, 21 nt, Human
agucaaaguaaaacuugcugc

SEQ ID NO: 3510469 - RNA, 20 nt, Human
agucaaaguugaaaauucau

SEQ ID NO: 3510470 - RNA, 23 nt, Human
agucaaaugguaggcauuuccua

SEQ ID NO: 3510471 - RNA, 18 nt, Human
agucaaauuaauaaucuu

SEQ ID NO: 3510472 - RNA, 15 nt, Human
agucaaauuguguga

SEQ ID NO: 3510473 - RNA, 19 nt, Human
agucaaauugugugaaagg

SEQ ID NO: 3510474 - RNA, 23 nt, Human
agucaaauugugugaaagguacu

SEQ ID NO: 3510475 - RNA, 22 nt, Human
agucaaauuugaaaauaauugu

SEQ ID NO: 3510476 - RNA, 14 nt, Human
agucaacaagccug

SEQ ID NO: 3510477 - RNA, 22 nt, Human
agucaacaguaaaccacugaaa

SEQ ID NO: 3510478 - RNA, 14 nt, Human
agucaacagugaaa

SEQ ID NO: 3510479 - RNA, 14 nt, Human
agucaaccugggca

SEQ ID NO: 3510480 - RNA, 12 nt, Human
agucaagaaaaa

SEQ ID NO: 3510481 - RNA, 15 nt, Human
agucaagaagaaaaa

SEQ ID NO: 3510482 - RNA, 15 nt, Human
agucaagagcauccu

SEQ ID NO: 3510483 - RNA, 20 nt, Human
agucaagcuccuccucccug

SEQ ID NO: 3510484 - RNA, 15 nt, Human
agucaaggccugcuc

SEQ ID NO: 3510485 - RNA, 16 nt, Human
agucaaggcuuagacc

SEQ ID NO: 3510486 - RNA, 12 nt, Human
agucaauacaua

SEQ ID NO: 3510487 - RNA, 12 nt, Human
agucaaucaagu

SEQ ID NO: 3510488 - RNA, 18 nt, Human
agucaaucaagucuguuu

SEQ ID NO: 3510489 - RNA, 14 nt, Human
agucaaucauuucu

SEQ ID NO: 3510490 - RNA, 15 nt, Human
agucaaucauuucuc

SEQ ID NO: 3510491 - RNA, 23 nt, Human
agucaauguuuucaguucucuug

SEQ ID NO: 3510492 - RNA, 13 nt, Human
agucacaaaggaa

SEQ ID NO: 3510493 - RNA, 16 nt, Human
agucacaagagcccag

SEQ ID NO: 3510494 - RNA, 18 nt, Human
agucacaauguucuuuau

SEQ ID NO: 3510495 - RNA, 23 nt, Human
agucacacaguauuacuucugcu

SEQ ID NO: 3510496 - RNA, 18 nt, Human
agucacacauuacaaagu

SEQ ID NO: 3510497 - RNA, 19 nt, Human
agucacacgggggcagcug

SEQ ID NO: 3510498 - RNA, 22 nt, Human
agucacagagauaauucuagcu

SEQ ID NO: 3510499 - RNA, 13 nt, Human
agucacagccacc

SEQ ID NO: 3510500 - RNA, 14 nt, Human
agucacaucacagg

SEQ ID NO: 3510501 - RNA, 19 nt, Human
agucacauuccugaacagg

SEQ ID NO: 3510502 - RNA, 21 nt, Human
agucaccaaauagugugaaau

SEQ ID NO: 3510503 - RNA, 13 nt, Human
agucaccaagccc

SEQ ID NO: 3510504 - RNA, 13 nt, Human
agucaccaggaau

SEQ ID NO: 3510505 - RNA, 17 nt, Human
agucacccaugaagaca

SEQ ID NO: 3510506 - RNA, 20 nt, Human
agucacccaugaagacagga

SEQ ID NO: 3510507 - RNA, 13 nt, Human
agucaccccagga

SEQ ID NO: 3510508 - RNA, 20 nt, Human
agucacccggcccccaugca

SEQ ID NO: 3510509 - RNA, 15 nt, Human
agucacccuagcccu

SEQ ID NO: 3510510 - RNA, 15 nt, Human
agucaccucauggaa

SEQ ID NO: 3510511 - RNA, 13 nt, Human
agucaccuuccag

SEQ ID NO: 3510512 - RNA, 14 nt, Human
agucaccuucccuu

SEQ ID NO: 3510513 - RNA, 16 nt, Human
agucaccuuuuaaauc

SEQ ID NO: 3510514 - RNA, 18 nt, Human
agucacgcaugcaguguu

SEQ ID NO: 3510515 - RNA, 18 nt, Human
agucacguggaggagcag

SEQ ID NO: 3510516 - RNA, 21 nt, Human
agucacuaaaaggaagacagu

SEQ ID NO: 3510517 - RNA, 16 nt, Human
agucacugagacagcc

SEQ ID NO: 3510518 - RNA, 17 nt, Human
agucacugagacagccc

SEQ ID NO: 3510519 - RNA, 13 nt, Human
agucacugagacc

SEQ ID NO: 3510520 - RNA, 23 nt, Human
agucacugagaccaaggcuuucu

SEQ ID NO: 3510521 - RNA, 16 nt, Human
agucacugauguacaa

SEQ ID NO: 3510522 - RNA, 18 nt, Human
agucacugcaaaaccagg

SEQ ID NO: 3510523 - RNA, 20 nt, Human
agucacugccacuuugcaca

SEQ ID NO: 3510524 - RNA, 17 nt, Human
agucacugccucucccu

SEQ ID NO: 3510525 - RNA, 21 nt, Human
agcccuaaccccuuccagauc

SEQ ID NO: 3510526 - RNA, 16 nt, Human
agcccuaaggaucucu

SEQ ID NO: 3510527 - RNA, 17 nt, Human
agcccuaagguccuaag

SEQ ID NO: 3510528 - RNA, 18 nt, Human
agcccuacagagcugugg

SEQ ID NO: 3510529 - RNA, 16 nt, Human
agcccuacucccugca

SEQ ID NO: 3510530 - RNA, 17 nt, Human
agcccuacucccugcag

SEQ ID NO: 3510531 - RNA, 20 nt, Human
agcccuacucccugcagaug

SEQ ID NO: 3510532 - RNA, 17 nt, Human
agcccuagagccugccu

SEQ ID NO: 3510533 - RNA, 16 nt, Human
agcccuauggaugugg

SEQ ID NO: 3510534 - RNA, 13 nt, Human
agcccucaaagug

SEQ ID NO: 3510535 - RNA, 17 nt, Human
agcccucaauugugaaa

SEQ ID NO: 3510536 - RNA, 23 nt, Human
agcccucacacacccugucugcc

SEQ ID NO: 3510537 - RNA, 17 nt, Human
agcccucacccuggggc

SEQ ID NO: 3510538 - RNA, 14 nt, Human
agcccucagaaccc

SEQ ID NO: 3510539 - RNA, 16 nt, Human
agcccucaucccgagc

SEQ ID NO: 3510540 - RNA, 23 nt, Human
agcccucaucuugaagggcccag

SEQ ID NO: 3510541 - RNA, 21 nt, Human
agcccuccaucuaaacugccc

SEQ ID NO: 3510542 - RNA, 11 nt, Human
agcccucccca

SEQ ID NO: 3510543 - RNA, 13 nt, Human
agcccucccugcc

SEQ ID NO: 3510544 - RNA, 15 nt, Human
agcccucccugcccc

SEQ ID NO: 3510545 - RNA, 14 nt, Human
agcccucccugucc

SEQ ID NO: 3510546 - RNA, 19 nt, Human
agcccucccuguccuccuc

SEQ ID NO: 3510547 - RNA, 22 nt, Human
agcccucccuguccuccucgga

SEQ ID NO: 3510548 - RNA, 23 nt, Human
agcccuccgccauucucaagccc

SEQ ID NO: 3510549 - RNA, 11 nt, Human
agcccuccuuc

SEQ ID NO: 3510550 - RNA, 17 nt, Human
agcccuccuuccacgga

SEQ ID NO: 3510551 - RNA, 18 nt, Human
agcccucucacugugucc

SEQ ID NO: 3510552 - RNA, 12 nt, Human
agcccucucccu

SEQ ID NO: 3510553 - RNA, 13 nt, Human
agcccugacccug

SEQ ID NO: 3510554 - RNA, 17 nt, Human
agcccugacccugugga

SEQ ID NO: 3510555 - RNA, 19 nt, Human
agcccugacgcaaugaaaa

SEQ ID NO: 3510556 - RNA, 19 nt, Human
agcccugagaaagcccugu

SEQ ID NO: 3510557 - RNA, 15 nt, Human
agcccugagcuuucu

SEQ ID NO: 3510558 - RNA, 23 nt, Human
agcccugaggacagaugccuccu

SEQ ID NO: 3510559 - RNA, 17 nt, Human
agcccugaggaggccuu

SEQ ID NO: 3510560 - RNA, 22 nt, Human
agcccugaggugaaagggagcu

SEQ ID NO: 3510561 - RNA, 22 nt, Human
agcccugagguuugaaucugac

SEQ ID NO: 3510562 - RNA, 14 nt, Human
agucaggggcagcu

SEQ ID NO: 3510563 - RNA, 14 nt, Human
agucagguccaauu

SEQ ID NO: 3510564 - RNA, 18 nt, Human
agucaguacccaccaccu

SEQ ID NO: 3510565 - RNA, 17 nt, Human
agucaguauuguuuugg

SEQ ID NO: 3510566 - RNA, 22 nt, Human
agucagucgccuuucagcaggc

SEQ ID NO: 3510567 - RNA, 19 nt, Human
agucagucugcacuuaaau

SEQ ID NO: 3510568 - RNA, 13 nt, Human
agucauaaaccuu

SEQ ID NO: 3510569 - RNA, 15 nt, Human
agucauaaaccuuaa

SEQ ID NO: 3510570 - RNA, 14 nt, Human
agucauagaaauag

SEQ ID NO: 3510571 - RNA, 14 nt, Human
agucauagaagaac

SEQ ID NO: 3510572 - RNA, 16 nt, Human
agucauagaagaacua

SEQ ID NO: 3510573 - RNA, 13 nt, Human
agucaucaucagg

SEQ ID NO: 3510574 - RNA, 15 nt, Human
agucaucauucccuu

SEQ ID NO: 3510575 - RNA, 13 nt, Human
agucauccagucu

SEQ ID NO: 3510576 - RNA, 17 nt, Human
agucaucgaguggccca

SEQ ID NO: 3510577 - RNA, 22 nt, Human
agucaucguaggugauuugaag

SEQ ID NO: 3510578 - RNA, 15 nt, Human
agucaucucaaccau

SEQ ID NO: 3510579 - RNA, 17 nt, Human
agucaucuccaucagcu

SEQ ID NO: 3510580 - RNA, 18 nt, Human
agucaucuccaucagcug

SEQ ID NO: 3510581 - RNA, 21 nt, Human
agucaucuugaccaagcagga

SEQ ID NO: 3510582 - RNA, 11 nt, Human
agucaucuugc

SEQ ID NO: 3510583 - RNA, 13 nt, Human
agucaucuugcua

SEQ ID NO: 3510584 - RNA, 23 nt, Human
agucaucuugcuaccaguauuua

SEQ ID NO: 3510585 - RNA, 14 nt, Human
agucaugaacacau

SEQ ID NO: 3510586 - RNA, 19 nt, Human
agucaugaacacaucagcu

SEQ ID NO: 3510587 - RNA, 22 nt, Human
agucaugagcugagcagggaga

SEQ ID NO: 3510588 - RNA, 15 nt, Human
agucaugaucucccu

SEQ ID NO: 3510589 - RNA, 16 nt, Human
agucaugaucucccug

SEQ ID NO: 3510590 - RNA, 20 nt, Human
agucaugaucucccugccgc

SEQ ID NO: 3510591 - RNA, 21 nt, Human
agucaugaucucccugccgcc

SEQ ID NO: 3510592 - RNA, 15 nt, Human
agucaugaugaauca

SEQ ID NO: 3510593 - RNA, 17 nt, Human
agucaugauguuuuuaa

SEQ ID NO: 3510594 - RNA, 20 nt, Human
agucaugauguuuuuaaaau

SEQ ID NO: 3510595 - RNA, 23 nt, Human
agucaugauguuuuuaaaaucuu

SEQ ID NO: 3510596 - RNA, 17 nt, Human
agucaugcaaaggcugg

SEQ ID NO: 3510597 - RNA, 18 nt, Human
agucaugcaaaggcuggg

SEQ ID NO: 3510598 - RNA, 13 nt, Human
agucaugcucccc

SEQ ID NO: 3510599 - RNA, 14 nt, Human
agucaugcuccccu

SEQ ID NO: 3510600 - RNA, 21 nt, Human
agucaugcuccccugugccag

SEQ ID NO: 3510601 - RNA, 19 nt, Human
agucauggagaaccaccua

SEQ ID NO: 3510602 - RNA, 13 nt, Human
agucauguauguu

SEQ ID NO: 3510603 - RNA, 15 nt, Human
agucauguuccuuca

SEQ ID NO: 3510604 - RNA, 18 nt, Human
agucauuaaauuacuaua

SEQ ID NO: 3510605 - RNA, 16 nt, Human
agucauuagacuccuc

SEQ ID NO: 3510606 - RNA, 20 nt, Human
agucauuauagaucccccag

SEQ ID NO: 3510607 - RNA, 15 nt, Human
agucauucagauaug

SEQ ID NO: 3510608 - RNA, 23 nt, Human
agucauucagauaugauucaaau

SEQ ID NO: 3510609 - RNA, 20 nt, Human
agucauuccuucuuuuuaaa

SEQ ID NO: 3510610 - RNA, 17 nt, Human
agucauucguucugugg

SEQ ID NO: 3510611 - RNA, 20 nt, Human
agucauucucauugaauuau

SEQ ID NO: 3510612 - RNA, 21 nt, Human
agucauuggcuuuauccucuu

SEQ ID NO: 3510613 - RNA, 12 nt, Human
agucauuguaau

SEQ ID NO: 3510614 - RNA, 17 nt, Human
agucauuguaauguugu

SEQ ID NO: 3510615 - RNA, 13 nt, Human
agucauuuaauaa

SEQ ID NO: 3510616 - RNA, 14 nt, Human
agucauuucugauu

SEQ ID NO: 3510617 - RNA, 16 nt, Human
agucauuugagucucu

SEQ ID NO: 3510618 - RNA, 14 nt, Human
agucauuugcugag

SEQ ID NO: 3510619 - RNA, 15 nt, Human
agucauuuucaagac

SEQ ID NO: 3510620 - RNA, 22 nt, Human
agucauuuuuacaauguaauua

SEQ ID NO: 3510621 - RNA, 13 nt, Human
aguccaaaauacu

SEQ ID NO: 3510622 - RNA, 20 nt, Human
aguccaacguggggcagcac

SEQ ID NO: 3510623 - RNA, 22 nt, Human
aguccaacguggggcagcacag

SEQ ID NO: 3510624 - RNA, 14 nt, Human
aguccaagaaucca

SEQ ID NO: 3510625 - RNA, 16 nt, Human
aguccaagaccagacu

SEQ ID NO: 3510626 - RNA, 14 nt, Human
aguccaagcuggga

SEQ ID NO: 3510627 - RNA, 22 nt, Human
aguccaagggguccccuccagg

SEQ ID NO: 3510628 - RNA, 23 nt, Human
aguccaagggguccccuccagga

SEQ ID NO: 3510629 - RNA, 13 nt, Human
aguccaauaagac

SEQ ID NO: 3510630 - RNA, 17 nt, Human
aguccaaugucuuuuua

SEQ ID NO: 3510631 - RNA, 15 nt, Human
aguccaauuuuaauu

SEQ ID NO: 3510632 - RNA, 14 nt, Human
aguccacaaaauaa

SEQ ID NO: 3510633 - RNA, 18 nt, Human
aguccacccuugguuccu

SEQ ID NO: 3510634 - RNA, 15 nt, Human
aguccaccugaggaa

SEQ ID NO: 3510635 - RNA, 20 nt, Human
aguccacucccagugcuugc

SEQ ID NO: 3510636 - RNA, 15 nt, Human
aguccagauuuacac

SEQ ID NO: 3510637 - RNA, 16 nt, Human
aguccagauuuacacu

SEQ ID NO: 3510638 - RNA, 18 nt, Human
aguccagauuuacacugg

SEQ ID NO: 3510639 - RNA, 13 nt, Human
aguccagccugga

SEQ ID NO: 3510640 - RNA, 22 nt, Human
aguccaggcuuuuuuaucaugu

SEQ ID NO: 3510641 - RNA, 18 nt, Human
aguccagguccugguggg

SEQ ID NO: 3510642 - RNA, 19 nt, Human
aguccagguccuggugggg

SEQ ID NO: 3510643 - RNA, 17 nt, Human
aguccaguccaguccua

SEQ ID NO: 3510644 - RNA, 15 nt, Human
aguccagucucuucu

SEQ ID NO: 3510645 - RNA, 17 nt, Human
aguccagugaccugcug

SEQ ID NO: 3510646 - RNA, 15 nt, Human
aguccauaccuuaua

SEQ ID NO: 3510647 - RNA, 21 nt, Human
aguccauauuucaauuuccaa

SEQ ID NO: 3510648 - RNA, 16 nt, Human
aguccaucagccucca

SEQ ID NO: 3510649 - RNA, 20 nt, Human
aguccauuuauauaugaaaa

SEQ ID NO: 3510650 - RNA, 20 nt, Human
agucccaagcggugucucuc

SEQ ID NO: 3510651 - RNA, 14 nt, Human
agucccaaggaaag

SEQ ID NO: 3510652 - RNA, 17 nt, Human
agucccaaggaaagccc

SEQ ID NO: 3510653 - RNA, 19 nt, Human
agucccaccuuggcugcag

SEQ ID NO: 3510654 - RNA, 21 nt, Human
agucccaccuuggcugcaggg

SEQ ID NO: 3510655 - RNA, 23 nt, Human
agucccacugccucagguuccua

SEQ ID NO: 3510656 - RNA, 12 nt, Human
agucccagagca

SEQ ID NO: 3510657 - RNA, 12 nt, Human
agucccagcagc

SEQ ID NO: 3510658 - RNA, 15 nt, Human
agucccagcagccag

SEQ ID NO: 3510659 - RNA, 16 nt, Human
agucccagcagccagc

SEQ ID NO: 3510660 - RNA, 18 nt, Human
agucccagcagccagcca

SEQ ID NO: 3510661 - RNA, 19 nt, Human
agucccaggcugagccuca

SEQ ID NO: 3510662 - RNA, 20 nt, Human
agucccaggcugagccucag

SEQ ID NO: 3510663 - RNA, 19 nt, Human
agucccagguuggcucugc

SEQ ID NO: 3510664 - RNA, 23 nt, Human
agucccagguuggcucugccagu

SEQ ID NO: 3510665 - RNA, 18 nt, Human
agucccaucccugcguga

SEQ ID NO: 3510666 - RNA, 22 nt, Human
aguccccacagauaacugaaaa

SEQ ID NO: 3510667 - RNA, 13 nt, Human
aguccccagaacu

SEQ ID NO: 3510668 - RNA, 14 nt, Human
aguccccagaacuc

SEQ ID NO: 3510669 - RNA, 13 nt, Human
aguccccagagaa

SEQ ID NO: 3510670 - RNA, 23 nt, Human
aguugauaaagauuuuuuaauaa

SEQ ID NO: 3510671 - RNA, 16 nt, Human
aguugauacuacaguu

SEQ ID NO: 3510672 - RNA, 15 nt, Human
aguugauagcacaga

SEQ ID NO: 3510673 - RNA, 19 nt, Human
aguugauagcacagacccu

SEQ ID NO: 3510674 - RNA, 20 nt, Human
aguugauagcacagacccug

SEQ ID NO: 3510675 - RNA, 22 nt, Human
aguugauagcacagacccugcc

SEQ ID NO: 3510676 - RNA, 19 nt, Human
aguugauauagaacagugc

SEQ ID NO: 3510677 - RNA, 21 nt, Human
aguugauauguuuuauuucau

SEQ ID NO: 3510678 - RNA, 14 nt, Human
aguugaucucccca

SEQ ID NO: 3510679 - RNA, 13 nt, Human
aguugaucuggaa

SEQ ID NO: 3510680 - RNA, 15 nt, Human
aguugaucuggaacc

SEQ ID NO: 3510681 - RNA, 21 nt, Human
aguugaucuggaacccagacu

SEQ ID NO: 3510682 - RNA, 15 nt, Human
aguugaugaaaugga

SEQ ID NO: 3510683 - RNA, 14 nt, Human
aguugauguaucca

SEQ ID NO: 3510684 - RNA, 16 nt, Human
aguugauguugcauuu

SEQ ID NO: 3510685 - RNA, 16 nt, Human
aguugauuuucuggau

SEQ ID NO: 3510686 - RNA, 17 nt, Human
aguugcaauaauacuuc

SEQ ID NO: 3510687 - RNA, 15 nt, Human
aguugcaauagaaca

SEQ ID NO: 3510688 - RNA, 17 nt, Human
aguugcacacucacugg

SEQ ID NO: 3510689 - RNA, 14 nt, Human
aguugcacagcauc

SEQ ID NO: 3510690 - RNA, 16 nt, Human
aguugcacggcugcug

SEQ ID NO: 3510691 - RNA, 15 nt, Human
aguugcacucaggug

SEQ ID NO: 3510692 - RNA, 15 nt, Human
aguugcacugauauu

SEQ ID NO: 3510693 - RNA, 16 nt, Human
aguugcagacucaguu

SEQ ID NO: 3510694 - RNA, 17 nt, Human
aguugcagacucaguuu

SEQ ID NO: 3510695 - RNA, 10 nt, Human
aguugcagcc

SEQ ID NO: 3510696 - RNA, 17 nt, Human
aguugcagucacucuag

SEQ ID NO: 3510697 - RNA, 21 nt, Human
aguugcauggcaucaccucca

SEQ ID NO: 3510698 - RNA, 15 nt, Human
aguugcauguaguaa

SEQ ID NO: 3510699 - RNA, 23 nt, Human
aguugcauuuuaacccuauuuua

SEQ ID NO: 3510700 - RNA, 18 nt, Human
aguugccaagacaaauca

SEQ ID NO: 3510701 - RNA, 19 nt, Human
aguugccaccaccucugug

SEQ ID NO: 3510702 - RNA, 19 nt, Human
aguugcccagccucuuucc

SEQ ID NO: 3510703 - RNA, 16 nt, Human
aguugcccaucuuguu

SEQ ID NO: 3510704 - RNA, 11 nt, Human
aguugccuaaa

SEQ ID NO: 3510705 - RNA, 15 nt, Human
aguugccuaaaucca

SEQ ID NO: 3510706 - RNA, 19 nt, Human
aguugccuaaauccauuug

SEQ ID NO: 3510707 - RNA, 23 nt, Human
aguugccuaaauccauuuggaaa

SEQ ID NO: 3510708 - RNA, 21 nt, Human
aguugccuaagcauugccugg

SEQ ID NO: 3510709 - RNA, 16 nt, Human
aguugcguggacucug

SEQ ID NO: 3510710 - RNA, 15 nt, Human
aguugcuaaacacug

SEQ ID NO: 3510711 - RNA, 13 nt, Human
aguugcuauuuuu

SEQ ID NO: 3510712 - RNA, 15 nt, Human
aguugcuauuuuugu

SEQ ID NO: 3510713 - RNA, 17 nt, Human
aguugcucuaugcuuuc

SEQ ID NO: 3510714 - RNA, 21 nt, Human
aguugcucuaugcuuuccaaa

SEQ ID NO: 3510715 - RNA, 12 nt, Human
aguugcugagag

SEQ ID NO: 3510716 - RNA, 16 nt, Human
aguugcugcaaaccug

SEQ ID NO: 3510717 - RNA, 18 nt, Human
aguugcugcuucucccag

SEQ ID NO: 3510718 - RNA, 17 nt, Human
aguugcugguaaaauga

SEQ ID NO: 3510719 - RNA, 14 nt, Human
aguugcuuguaaaa

SEQ ID NO: 3510720 - RNA, 13 nt, Human
aguugcuuuucag

SEQ ID NO: 3510721 - RNA, 13 nt, Human
aguuggacuaaau

SEQ ID NO: 3510722 - RNA, 13 nt, Human
aguuggacugggu

SEQ ID NO: 3510723 - RNA, 17 nt, Human
aguuggacuggguugcg

SEQ ID NO: 3510724 - RNA, 17 nt, Human
aguuggaguagaaugua

SEQ ID NO: 3510725 - RNA, 19 nt, Human
aguuggaguucauucauau

SEQ ID NO: 3510726 - RNA, 20 nt, Human
aguuggaguuuuuuguacca

SEQ ID NO: 3510727 - RNA, 16 nt, Human
aguuggcaugcauccc

SEQ ID NO: 3510728 - RNA, 16 nt, Human
aguuggccagagagcc

SEQ ID NO: 3510729 - RNA, 15 nt, Human
aguuggcuuaccugg

SEQ ID NO: 3510730 - RNA, 13 nt, Human
aguuggcuucuaa

SEQ ID NO: 3510731 - RNA, 13 nt, Human
aguugggagcacu

SEQ ID NO: 3510732 - RNA, 17 nt, Human
aguuggggacagaacuc

SEQ ID NO: 3510733 - RNA, 18 nt, Human
aguugggggucagugcug

SEQ ID NO: 3510734 - RNA, 17 nt, Human
aguuggggucuggcagc

SEQ ID NO: 3510735 - RNA, 17 nt, Human
aguuggguguauugugc

SEQ ID NO: 3510736 - RNA, 15 nt, Human
aguugguaacuuuug

SEQ ID NO: 3510737 - RNA, 13 nt, Human
aguuggugacaga

SEQ ID NO: 3510738 - RNA, 22 nt, Human
aguuggugagaaaccuguaucu

SEQ ID NO: 3510739 - RNA, 23 nt, Human
aguuggugagaaaccuguaucuu

SEQ ID NO: 3510740 - RNA, 24 nt, Human
aguuggugagaaaccuguaucuuu

SEQ ID NO: 3510741 - RNA, 14 nt, Human
aguuggugucuuuc

SEQ ID NO: 3510742 - RNA, 13 nt, Human
aguugguguguuu

SEQ ID NO: 3510743 - RNA, 23 nt, Human
aguugguguguuuuugggauguc

SEQ ID NO: 3510744 - RNA, 16 nt, Human
aguugguugugucuuu

SEQ ID NO: 3510745 - RNA, 12 nt, Human
aguuguaaagua

SEQ ID NO: 3510746 - RNA, 18 nt, Human
aguuguaaauaauuuauu

SEQ ID NO: 3510747 - RNA, 22 nt, Human
aguuguaaauauauaaauauau

SEQ ID NO: 3510748 - RNA, 21 nt, Human
aguuguaacauucuauuucaa

SEQ ID NO: 3510749 - RNA, 11 nt, Human
aguuguacaug

SEQ ID NO: 3510750 - RNA, 18 nt, Human
aguuguaccgcaauguga

SEQ ID NO: 3510751 - RNA, 19 nt, Human
aguuguaccgcaaugugac

SEQ ID NO: 3510752 - RNA, 13 nt, Human
aguuguagaaugu

SEQ ID NO: 3510753 - RNA, 20 nt, Human
aguuguagaauguauuguac

SEQ ID NO: 3510754 - RNA, 16 nt, Human
aguuguaucucuuuug

SEQ ID NO: 3510755 - RNA, 15 nt, Human
aguuguaugaucugu

SEQ ID NO: 3510756 - RNA, 20 nt, Human
aguuguauuuaacagaaauu

SEQ ID NO: 3510757 - RNA, 22 nt, Human
aguuguauuuaacagaaauugu

SEQ ID NO: 3510758 - RNA, 19 nt, Human
aguugucaagucucugcug

SEQ ID NO: 3510759 - RNA, 23 nt, Human
aguugucacugcuuuuggccugg

SEQ ID NO: 3510760 - RNA, 13 nt, Human
aguugucagguua

SEQ ID NO: 3510761 - RNA, 20 nt, Human
aguuguccauauuuucacag

SEQ ID NO: 3510762 - RNA, 22 nt, Human
aguugucucugaugcagcuuau

SEQ ID NO: 3510763 - RNA, 18 nt, Human
aguugugacaacuuccug

SEQ ID NO: 3510764 - RNA, 21 nt, Human
agugacacuucagagagcugg

SEQ ID NO: 3510765 - RNA, 22 nt, Human
agugacacuucagagagcuggu

SEQ ID NO: 3510766 - RNA, 17 nt, Human
agugacagacaggcucu

SEQ ID NO: 3510767 - RNA, 19 nt, Human
agugacagggaagcuacag

SEQ ID NO: 3510768 - RNA, 22 nt, Human
agugacagggaagcuacagguu

SEQ ID NO: 3510769 - RNA, 20 nt, Human
agugacaguggauugcauuu

SEQ ID NO: 3510770 - RNA, 19 nt, Human
agugacaguugcagcccuu

SEQ ID NO: 3510771 - RNA, 20 nt, Human
agugacauaauauauucuau

SEQ ID NO: 3510772 - RNA, 22 nt, Human
agugacauaauauauucuauuu

SEQ ID NO: 3510773 - RNA, 14 nt, Human
agugaccaaggagg

SEQ ID NO: 3510774 - RNA, 15 nt, Human
agugacccuggcucc

SEQ ID NO: 3510775 - RNA, 16 nt, Human
agugacccuggcuccu

SEQ ID NO: 3510776 - RNA, 13 nt, Human
agugacccuuccc

SEQ ID NO: 3510777 - RNA, 18 nt, Human
agugaccucagcuuugau

SEQ ID NO: 3510778 - RNA, 16 nt, Human
agugaccugaggaagc

SEQ ID NO: 3510779 - RNA, 19 nt, Human
agugacgaaaacauugucc

SEQ ID NO: 3510780 - RNA, 14 nt, Human
agugacgugcaccu

SEQ ID NO: 3510781 - RNA, 16 nt, Human
agugacuaaaccauug

SEQ ID NO: 3510782 - RNA, 16 nt, Human
agugacuaauggcaug

SEQ ID NO: 3510783 - RNA, 15 nt, Human
agugacucgggcucc

SEQ ID NO: 3510784 - RNA, 17 nt, Human
agugacucgggcuccug

SEQ ID NO: 3510785 - RNA, 21 nt, Human
agugacucgggcuccugugcc

SEQ ID NO: 3510786 - RNA, 14 nt, Human
agugacucuccagg

SEQ ID NO: 3510787 - RNA, 21 nt, Human
agugacugauggcuaauguac

SEQ ID NO: 3510788 - RNA, 15 nt, Human
agugacuguaucugu

SEQ ID NO: 3510789 - RNA, 16 nt, Human
agugacuguaucugug

SEQ ID NO: 3510790 - RNA, 19 nt, Human
agugacuguucaagagcac

SEQ ID NO: 3510791 - RNA, 21 nt, Human
agugacuuagcagaugcuggu

SEQ ID NO: 3510792 - RNA, 13 nt, Human
agugacuucugag

SEQ ID NO: 3510793 - RNA, 14 nt, Human
agugacuucugaga

SEQ ID NO: 3510794 - RNA, 17 nt, Human
agugacuucugagaucu

SEQ ID NO: 3510795 - RNA, 15 nt, Human
agugacuugcccagu

SEQ ID NO: 3510796 - RNA, 18 nt, Human
agugacuugugucccaug

SEQ ID NO: 3510797 - RNA, 12 nt, Human
agugagaagaau

SEQ ID NO: 3510798 - RNA, 14 nt, Human
agugagaagaauau

SEQ ID NO: 3510799 - RNA, 15 nt, Human
agugagacaaaauuu

SEQ ID NO: 3510800 - RNA, 13 nt, Human
agugagacagaag

SEQ ID NO: 3510801 - RNA, 13 nt, Human
agugagacagacu

SEQ ID NO: 3510802 - RNA, 21 nt, Human
agugagacccagcccucaucc

SEQ ID NO: 3510803 - RNA, 21 nt, Human
agugagacccugucucaaaaa

SEQ ID NO: 3510804 - RNA, 16 nt, Human
agugagacucugucuc

SEQ ID NO: 3510805 - RNA, 22 nt, Human
agugagagacauuaacucauua

SEQ ID NO: 3510806 - RNA, 22 nt, Human
agugagagagaugggagcuccu

SEQ ID NO: 3510807 - RNA, 12 nt, Human
agugagagcaga

SEQ ID NO: 3510808 - RNA, 16 nt, Human
agugagauagcauugu

SEQ ID NO: 3510809 - RNA, 16 nt, Human
agugagaugcauucuu

SEQ ID NO: 3510810 - RNA, 14 nt, Human
agugagcacuaagg

SEQ ID NO: 3510811 - RNA, 17 nt, Human
agugagcaguguuagcu

SEQ ID NO: 3510812 - RNA, 21 nt, Human
agugagcaugcuuucugaacu

SEQ ID NO: 3510813 - RNA, 22 nt, Human
agugagccgcaucuucuccauc

SEQ ID NO: 3510814 - RNA, 13 nt, Human
agugagccuggcu

SEQ ID NO: 3510815 - RNA, 18 nt, Human
agugcccucucccacccu

SEQ ID NO: 3510816 - RNA, 22 nt, Human
agugcccucucccacccucuuc

SEQ ID NO: 3510817 - RNA, 13 nt, Human
agugcccugagcc

SEQ ID NO: 3510818 - RNA, 15 nt, Human
agugcccugagccag

SEQ ID NO: 3510819 - RNA, 20 nt, Human
agugcccugagccagggucu

SEQ ID NO: 3510820 - RNA, 22 nt, Human
agugcccuggggcugaucucag

SEQ ID NO: 3510821 - RNA, 21 nt, Human
agugccgagaaggaagccucc

SEQ ID NO: 3510822 - RNA, 17 nt, Human
agugccgccgccucgcc

SEQ ID NO: 3510823 - RNA, 20 nt, Human
agugccgccgccucgcccac

SEQ ID NO: 3510824 - RNA, 22 nt, Human
agugccguguguugcaugcagc

SEQ ID NO: 3510825 - RNA, 14 nt, Human
agugccuaaaauaa

SEQ ID NO: 3510826 - RNA, 14 nt, Human
agugccuauugaua

SEQ ID NO: 3510827 - RNA, 12 nt, Human
agugccucuggu

SEQ ID NO: 3510828 - RNA, 12 nt, Human
agugccugcuga

SEQ ID NO: 3510829 - RNA, 18 nt, Human
agugccugggaauguauu

SEQ ID NO: 3510830 - RNA, 18 nt, Human
agugccuuaccuccugcc

SEQ ID NO: 3510831 - RNA, 15 nt, Human
agugccuuauggaac

SEQ ID NO: 3510832 - RNA, 16 nt, Human
agugccuuauggaaca

SEQ ID NO: 3510833 - RNA, 16 nt, Human
agugccuuccauaauu

SEQ ID NO: 3510834 - RNA, 21 nt, Human
agugccuuggggaauuuccuc

SEQ ID NO: 3510835 - RNA, 22 nt, Human
agugccuuucugcaguuuuuca

SEQ ID NO: 3510836 - RNA, 17 nt, Human
agugccuuugcagcuca

SEQ ID NO: 3510837 - RNA, 18 nt, Human
agugccuuugcagcucag

SEQ ID NO: 3510838 - RNA, 20 nt, Human
agugccuuugcagcucagaa

SEQ ID NO: 3510839 - RNA, 19 nt, Human
agugccuuuugcagaagag

SEQ ID NO: 3510840 - RNA, 14 nt, Human
agugcgaguaugug

SEQ ID NO: 3510841 - RNA, 15 nt, Human
agugcgaguaugugu

SEQ ID NO: 3510842 - RNA, 18 nt, Human
agugcgauguuucaggag

SEQ ID NO: 3510843 - RNA, 16 nt, Human
agugcggguccggcag

SEQ ID NO: 3510844 - RNA, 15 nt, Human
agugcguccacgagc

SEQ ID NO: 3510845 - RNA, 14 nt, Human
agugcgugaaugua

SEQ ID NO: 3510846 - RNA, 16 nt, Human
agugcgugccguguga

SEQ ID NO: 3510847 - RNA, 13 nt, Human
agugcguguguag

SEQ ID NO: 3510848 - RNA, 16 nt, Human
agugcguguguagagu

SEQ ID NO: 3510849 - RNA, 14 nt, Human
agugcuaagguucu

SEQ ID NO: 3510850 - RNA, 14 nt, Human
agugcuacugaaag

SEQ ID NO: 3510851 - RNA, 21 nt, Human
agugcuagugagcugggcaug

SEQ ID NO: 3510852 - RNA, 13 nt, Human
agugcuauauaua

SEQ ID NO: 3510853 - RNA, 14 nt, Human
agugcuauauauau

SEQ ID NO: 3510854 - RNA, 19 nt, Human
agugcuauauauauaaaua

SEQ ID NO: 3510855 - RNA, 18 nt, Human
agugcucacccacaccau

SEQ ID NO: 3510856 - RNA, 17 nt, Human
agugcucauuucaggau

SEQ ID NO: 3510857 - RNA, 12 nt, Human
agugcuccagcc

SEQ ID NO: 3510858 - RNA, 14 nt, Human
agugcuccccucug

SEQ ID NO: 3510859 - RNA, 14 nt, Human
agugcucgcuguug

SEQ ID NO: 3510860 - RNA, 18 nt, Human
agugcucgcuguugcuga

SEQ ID NO: 3510861 - RNA, 20 nt, Human
agugcucgcuguugcugaau

SEQ ID NO: 3510862 - RNA, 20 nt, Human
agugcucgcuuucuauguag

SEQ ID NO: 3510863 - RNA, 12 nt, Human
agugcucugaua

SEQ ID NO: 3510864 - RNA, 16 nt, Human
agugcucugaucccuc

SEQ ID NO: 3510865 - RNA, 17 nt, Human
agugcucuuuucuccuc

SEQ ID NO: 3510866 - RNA, 14 nt, Human
agugcugaacagug

SEQ ID NO: 3510867 - RNA, 13 nt, Human
agugcugaagcuu

SEQ ID NO: 3510868 - RNA, 16 nt, Human
agugcugaagcuuauu

SEQ ID NO: 3510869 - RNA, 21 nt, Human
agugcugagauuacaggcaug

SEQ ID NO: 3510870 - RNA, 15 nt, Human
agugcugcacucaaa

SEQ ID NO: 3510871 - RNA, 18 nt, Human
agugcugcagcucccugg

SEQ ID NO: 3510872 - RNA, 13 nt, Human
agugcugcauuua

SEQ ID NO: 3510873 - RNA, 16 nt, Human
agugcugccugucccc

SEQ ID NO: 3510874 - RNA, 15 nt, Human
agugcugcugaagau

SEQ ID NO: 3510875 - RNA, 18 nt, Human
agugcugcuuugccaaau

SEQ ID NO: 3510876 - RNA, 19 nt, Human
agugcuggagucuccugag

SEQ ID NO: 3510877 - RNA, 22 nt, Human
agugcugggauggaggggagug

SEQ ID NO: 3510878 - RNA, 20 nt, Human
agugcugggauuacaagcgu

SEQ ID NO: 3510879 - RNA, 20 nt, Human
agugcugggauuacaggcau

SEQ ID NO: 3510880 - RNA, 20 nt, Human
agugcugggauuacaggcgu

SEQ ID NO: 3510881 - RNA, 19 nt, Human
agugcugggauuacaggug

SEQ ID NO: 3510882 - RNA, 15 nt, Human
agugcuguauaaaau

SEQ ID NO: 3510883 - RNA, 19 nt, Human
agugcuguauaaaaucagc

SEQ ID NO: 3510884 - RNA, 21 nt, Human
agugcugucugaucugugcuu

SEQ ID NO: 3510885 - RNA, 12 nt, Human
agugcugugaaa

SEQ ID NO: 3510886 - RNA, 20 nt, Human
agugcuguuuuguuauauaa

SEQ ID NO: 3510887 - RNA, 16 nt, Human
agugcuuaaaaaucau

SEQ ID NO: 3510888 - RNA, 17 nt, Human
agugcuucagccugagg

SEQ ID NO: 3510889 - RNA, 14 nt, Human
agugcuucuuacua

SEQ ID NO: 3510890 - RNA, 19 nt, Human
agugcuugaguuuggggaa

SEQ ID NO: 3510891 - RNA, 14 nt, Human
agugcuuggcccag

SEQ ID NO: 3510892 - RNA, 18 nt, Human
agugcuuggcccaggagu

SEQ ID NO: 3510893 - RNA, 19 nt, Human
agugcuuguguaauuuaug

SEQ ID NO: 3510894 - RNA, 13 nt, Human
agugcuuuaaugg

SEQ ID NO: 3510895 - RNA, 22 nt, Human
agugcuuuaccaauugaaguaa

SEQ ID NO: 3510896 - RNA, 12 nt, Human
aguggaaaaaca

SEQ ID NO: 3510897 - RNA, 18 nt, Human
aguggaaaaauagccugc

SEQ ID NO: 3510898 - RNA, 19 nt, Human
aguggaaaaauagccugcc

SEQ ID NO: 3510899 - RNA, 16 nt, Human
aguggaaacauuuaua

SEQ ID NO: 3510900 - RNA, 15 nt, Human
aguggaaauguucua

SEQ ID NO: 3510901 - RNA, 14 nt, Human
aguggaaauucagg

SEQ ID NO: 3510902 - RNA, 12 nt, Human
aguggaaggaaa

SEQ ID NO: 3510903 - RNA, 18 nt, Human
aguggaaguaguggagcc

SEQ ID NO: 3510904 - RNA, 20 nt, Human
aguggaaguauguauauuaa

SEQ ID NO: 3510905 - RNA, 22 nt, Human
aguggaauaguauccuccaggu

SEQ ID NO: 3510906 - RNA, 23 nt, Human
aguggaauaguauccuccagguu

SEQ ID NO: 3510907 - RNA, 16 nt, Human
aguggaccaggacagg

SEQ ID NO: 3510908 - RNA, 19 nt, Human
aguggacccugaaaugugu

SEQ ID NO: 3510909 - RNA, 22 nt, Human
aguggaccgcccuuuuccccua

SEQ ID NO: 3510910 - RNA, 17 nt, Human
aguggaccuuaggccuu

SEQ ID NO: 3510911 - RNA, 20 nt, Human
aguggaccuuaggccuuccu

SEQ ID NO: 3510912 - RNA, 18 nt, Human
aguggacucuuugguggc

SEQ ID NO: 3510913 - RNA, 22 nt, Human
aguggacuggccucaaagcaag

SEQ ID NO: 3510914 - RNA, 21 nt, Human
aguggacuguucccugaggug

SEQ ID NO: 3510915 - RNA, 15 nt, Human
aguggacuuuccacc

SEQ ID NO: 3510916 - RNA, 19 nt, Human
aguggacuuuccacccccu

SEQ ID NO: 3510917 - RNA, 16 nt, Human
aguggagaauuauaua

SEQ ID NO: 3510918 - RNA, 17 nt, Human
aguggaggcacuuuagg

SEQ ID NO: 3510919 - RNA, 23 nt, Human
aguggaggugggcugggcccucu

SEQ ID NO: 3510920 - RNA, 23 nt, Human
aguggagguuaaggcugaggaaa

SEQ ID NO: 3510921 - RNA, 17 nt, Human
aguggagguuuauaguu

SEQ ID NO: 3510922 - RNA, 14 nt, Human
aguggagucugcca

SEQ ID NO: 3510923 - RNA, 19 nt, Human
aguggagucugccacccag

SEQ ID NO: 3510924 - RNA, 22 nt, Human
aguugugaguuuaccuuguaua

SEQ ID NO: 3510925 - RNA, 18 nt, Human
aguugugcacauggcuua

SEQ ID NO: 3510926 - RNA, 18 nt, Human
aguugugccuuuuauagc

SEQ ID NO: 3510927 - RNA, 19 nt, Human
aguugugcuuguuuacagc

SEQ ID NO: 3510928 - RNA, 20 nt, Human
aguuguggaaagccucugcu

SEQ ID NO: 3510929 - RNA, 20 nt, Human
aguuguggagagugcaacag

SEQ ID NO: 3510930 - RNA, 17 nt, Human
aguuguggauuucaguu

SEQ ID NO: 3510931 - RNA, 20 nt, Human
aguuguggugugaguaucag

SEQ ID NO: 3510932 - RNA, 18 nt, Human
aguuguguacucuggccu

SEQ ID NO: 3510933 - RNA, 20 nt, Human
aguuguguuuguugcuggcu

SEQ ID NO: 3510934 - RNA, 17 nt, Human
aguuguguuuuuuaaga

SEQ ID NO: 3510935 - RNA, 21 nt, Human
aguuguguuuuuuaagauggc

SEQ ID NO: 3510936 - RNA, 13 nt, Human
aguuguuacauuu

SEQ ID NO: 3510937 - RNA, 22 nt, Human
aguuguuagugugucuuagugu

SEQ ID NO: 3510938 - RNA, 19 nt, Human
aguuguuauuacauccuug

SEQ ID NO: 3510939 - RNA, 13 nt, Human
aguuguucugaaa

SEQ ID NO: 3510940 - RNA, 17 nt, Human
aguuguucugaaauguc

SEQ ID NO: 3510941 - RNA, 15 nt, Human
aguuguuucauugac

SEQ ID NO: 3510942 - RNA, 11 nt, Human
aguuguuugau

SEQ ID NO: 3510943 - RNA, 13 nt, Human
aguuguuugaugc

SEQ ID NO: 3510944 - RNA, 23 nt, Human
aguuguuugauucagacagcugc

SEQ ID NO: 3510945 - RNA, 16 nt, Human
aguuguuuguuuuugc

SEQ ID NO: 3510946 - RNA, 18 nt, Human
aguuguuuguuuuugcuu

SEQ ID NO: 3510947 - RNA, 15 nt, Human
aguuguuuuuguaua

SEQ ID NO: 3510948 - RNA, 16 nt, Human
aguuguuuuuguauau

SEQ ID NO: 3510949 - RNA, 18 nt, Human
aguuguuuuuguauauug

SEQ ID NO: 3510950 - RNA, 15 nt, Human
aguuuaaaacacauu

SEQ ID NO: 3510951 - RNA, 16 nt, Human
aguuuaaaacaguauu

SEQ ID NO: 3510952 - RNA, 18 nt, Human
aguuuaaaacaguauuua

SEQ ID NO: 3510953 - RNA, 21 nt, Human
aguuuaaaagcacgacagugg

SEQ ID NO: 3510954 - RNA, 13 nt, Human
aguuuaaaaugua

SEQ ID NO: 3510955 - RNA, 18 nt, Human
aguuuaaauauuaagcau

SEQ ID NO: 3510956 - RNA, 14 nt, Human
aguuuaaauuguaa

SEQ ID NO: 3510957 - RNA, 16 nt, Human
aguuuaaucagaggaa

SEQ ID NO: 3510958 - RNA, 22 nt, Human
aguuuaauggugccuucauuug

SEQ ID NO: 3510959 - RNA, 16 nt, Human
aguuuaauugaaagaa

SEQ ID NO: 3510960 - RNA, 11 nt, Human
aguugagcccc

SEQ ID NO: 3510961 - RNA, 13 nt, Human
aguugagcuauga

SEQ ID NO: 3510962 - RNA, 16 nt, Human
aguugaggaacuguac

SEQ ID NO: 3510963 - RNA, 16 nt, Human
aguugaggacuucuug

SEQ ID NO: 3510964 - RNA, 13 nt, Human
aguugaggccacu

SEQ ID NO: 3510965 - RNA, 23 nt, Human
aguugauacuugaauaaccaucu

SEQ ID NO: 3510966 - RNA, 21 nt, Human
aguugauagcacagacccugc

SEQ ID NO: 3510967 - RNA, 15 nt, Human
aguugauauagaaca

SEQ ID NO: 3510968 - RNA, 17 nt, Human
aguugauauagaacagu

SEQ ID NO: 3510969 - RNA, 21 nt, Human
aguugauaugccuuuucccaa

SEQ ID NO: 3510970 - RNA, 18 nt, Human
aguugaucuggaacccag

SEQ ID NO: 3510971 - RNA, 19 nt, Human
aguugaucuggaacccaga

SEQ ID NO: 3510972 - RNA, 13 nt, Human
aguugauucagcu

SEQ ID NO: 3510973 - RNA, 15 nt, Human
aguugauucagcucu

SEQ ID NO: 3510974 - RNA, 17 nt, Human
aguugauucagcucugc

SEQ ID NO: 3510975 - RNA, 14 nt, Human
aguugauugagaag

SEQ ID NO: 3510976 - RNA, 21 nt, Human
aguugauuuuacaauugaaau

SEQ ID NO: 3510977 - RNA, 19 nt, Human
auaacucauuuguuguuug

SEQ ID NO: 3510978 - RNA, 14 nt, Human
auaacuccucccag

SEQ ID NO: 3510979 - RNA, 18 nt, Human
auaacuccucccaggguu

SEQ ID NO: 3510980 - RNA, 12 nt, Human
auaacucuguaa

SEQ ID NO: 3510981 - RNA, 19 nt, Human
auaacucuguaaaaacacu

SEQ ID NO: 3510982 - RNA, 22 nt, Human
auaacucuguggcauuauugca

SEQ ID NO: 3510983 - RNA, 15 nt, Human
auaacugaaaaugug

SEQ ID NO: 3510984 - RNA, 20 nt, Human
auaacugaaaauuauuuaaa

SEQ ID NO: 3510985 - RNA, 18 nt, Human
auaacugaaggagaaggu

SEQ ID NO: 3510986 - RNA, 18 nt, Human
auaacugacaaaucaagu

SEQ ID NO: 3510987 - RNA, 16 nt, Human
auaacugacuuaguuc

SEQ ID NO: 3510988 - RNA, 13 nt, Human
auaacugcccagc

SEQ ID NO: 3510989 - RNA, 17 nt, Human
auaacugccuugaaccu

SEQ ID NO: 3510990 - RNA, 23 nt, Human
auaacugccuugaaccugugagu

SEQ ID NO: 3510991 - RNA, 15 nt, Human
auaacuggaaaacag

SEQ ID NO: 3510992 - RNA, 17 nt, Human
auaacuggaaaacagaa

SEQ ID NO: 3510993 - RNA, 21 nt, Human
auaacuggaaaacagaacacu

SEQ ID NO: 3510994 - RNA, 18 nt, Human
auaacuggaacacucuau

SEQ ID NO: 3510995 - RNA, 23 nt, Human
auaacuggaacacucuauaacaa

SEQ ID NO: 3510996 - RNA, 17 nt, Human
auaacuguaauuauuug

SEQ ID NO: 3510997 - RNA, 18 nt, Human
auaacuguauuugaaaua

SEQ ID NO: 3510998 - RNA, 18 nt, Human
auaacuguuauuuauaau

SEQ ID NO: 3510999 - RNA, 20 nt, Human
auaacuguuauuuauaauca

SEQ ID NO: 3511000 - RNA, 21 nt, Human
auaacuguuuauauguguuga

SEQ ID NO: 3511001 - RNA, 16 nt, Human
auaacuuaaaauauuu

SEQ ID NO: 3511002 - RNA, 13 nt, Human
auaacuucagucc

SEQ ID NO: 3511003 - RNA, 22 nt, Human
auaacuucaguccugcuccaga

SEQ ID NO: 3511004 - RNA, 14 nt, Human
auaacuuccacagg

SEQ ID NO: 3511005 - RNA, 16 nt, Human
auaacuucuuaaaagu

SEQ ID NO: 3511006 - RNA, 16 nt, Human
auaacuugaugcaugu

SEQ ID NO: 3511007 - RNA, 17 nt, Human
auaacuugaugcaugug

SEQ ID NO: 3511008 - RNA, 16 nt, Human
auaacuuuaacuucug

SEQ ID NO: 3511009 - RNA, 17 nt, Human
auaacuuugacuuucuu

SEQ ID NO: 3511010 - RNA, 14 nt, Human
auaacuuugcuugc

SEQ ID NO: 3511011 - RNA, 12 nt, Human
auaacuuuuuau

SEQ ID NO: 3511012 - RNA, 22 nt, Human
auaacuuuuuauauucucagca

SEQ ID NO: 3511013 - RNA, 11 nt, Human
auaagaaaaac

SEQ ID NO: 3511014 - RNA, 16 nt, Human
auaagaaaaaucaugu

SEQ ID NO: 3511015 - RNA, 17 nt, Human
auaagaaaaaucauguu

SEQ ID NO: 3511016 - RNA, 23 nt, Human
auaagaaaaccaccccuuagauu

SEQ ID NO: 3511017 - RNA, 11 nt, Human
auaagaaaaga

SEQ ID NO: 3511018 - RNA, 14 nt, Human
auaagaaagccuga

SEQ ID NO: 3511019 - RNA, 22 nt, Human
auaagaaauaaugcuacaauuu

SEQ ID NO: 3511020 - RNA, 16 nt, Human
auaagaacuuugagcu

SEQ ID NO: 3511021 - RNA, 21 nt, Human
auaagaagggauggauuccaa

SEQ ID NO: 3511022 - RNA, 21 nt, Human
auaagaauaaaauguugaaaa

SEQ ID NO: 3511023 - RNA, 18 nt, Human
auaagaauggagcaguac

SEQ ID NO: 3511024 - RNA, 18 nt, Human
auaagaaugguugccuua

SEQ ID NO: 3511025 - RNA, 16 nt, Human
auaagaauucagacau

SEQ ID NO: 3511026 - RNA, 17 nt, Human
auaagacauaacguuuu

SEQ ID NO: 3511027 - RNA, 22 nt, Human
auaagaccaccaccucagagua

SEQ ID NO: 3511028 - RNA, 17 nt, Human
auaagacggauuuauuu

SEQ ID NO: 3511029 - RNA, 15 nt, Human
auaagagaaucaaca

SEQ ID NO: 3511030 - RNA, 16 nt, Human
auaagagagucauaaa

SEQ ID NO: 3511031 - RNA, 15 nt, Human
auaagagcucaggau

SEQ ID NO: 3511032 - RNA, 19 nt, Human
auaagagggcacacacugu

SEQ ID NO: 3511033 - RNA, 16 nt, Human
auaagaguagaaacug

SEQ ID NO: 3511034 - RNA, 20 nt, Human
auaagauauuuuauuuugaa

SEQ ID NO: 3511035 - RNA, 15 nt, Human
auaagauauuuuuca

SEQ ID NO: 3511036 - RNA, 18 nt, Human
auaagauauuuuucauga

SEQ ID NO: 3511037 - RNA, 19 nt, Human
auaagauccuagauccuaa

SEQ ID NO: 3511038 - RNA, 17 nt, Human
auaagaucuuuuauuuu

SEQ ID NO: 3511039 - RNA, 17 nt, Human
auaagauuagaaugaaa

SEQ ID NO: 3511040 - RNA, 12 nt, Human
auaagauuccaa

SEQ ID NO: 3511041 - RNA, 20 nt, Human
auaagcaaaaacaaaaagaa

SEQ ID NO: 3511042 - RNA, 14 nt, Human
auaagcaaauuuca

SEQ ID NO: 3511043 - RNA, 19 nt, Human
auaagcaaauuucaaaaga

SEQ ID NO: 3511044 - RNA, 17 nt, Human
auaagcaagagagaugu

SEQ ID NO: 3511045 - RNA, 14 nt, Human
auaagcacugugcu

SEQ ID NO: 3511046 - RNA, 16 nt, Human
auaagcaucaaacucu

SEQ ID NO: 3511047 - RNA, 23 nt, Human
auaagcauggagaacagugauuu

SEQ ID NO: 3511048 - RNA, 16 nt, Human
auaagcauugaaauua

SEQ ID NO: 3511049 - RNA, 18 nt, Human
auaagccaauuuuucugc

SEQ ID NO: 3511050 - RNA, 14 nt, Human
auaagccagacauc

SEQ ID NO: 3511051 - RNA, 18 nt, Human
auaagccaguguugccua

SEQ ID NO: 3511052 - RNA, 16 nt, Human
auaagcuacuagcaaa

SEQ ID NO: 3511053 - RNA, 14 nt, Human
auaagcuacugcca

SEQ ID NO: 3511054 - RNA, 16 nt, Human
auaagcuacugccauc

SEQ ID NO: 3511055 - RNA, 15 nt, Human
auaagcuaguugaau

SEQ ID NO: 3511056 - RNA, 23 nt, Human
auaagcuaguugaauacuugaac

SEQ ID NO: 3511057 - RNA, 18 nt, Human
auaagcuauuugauguaa

SEQ ID NO: 3511058 - RNA, 14 nt, Human
auaagcucuaguuc

SEQ ID NO: 3511059 - RNA, 13 nt, Human
auaaggaaaagcu

SEQ ID NO: 3511060 - RNA, 19 nt, Human
auaaggacaugaugcuuuu

SEQ ID NO: 3511061 - RNA, 12 nt, Human
auaaggacugca

SEQ ID NO: 3511062 - RNA, 22 nt, Human
auaaggaucagaacagcagagg

SEQ ID NO: 3511063 - RNA, 16 nt, Human
auaaggccucauccuc

SEQ ID NO: 3511064 - RNA, 17 nt, Human
auaaggccuuaauaugu

SEQ ID NO: 3511065 - RNA, 15 nt, Human
auaagggaaaaauca

SEQ ID NO: 3511066 - RNA, 16 nt, Human
auaagggaaaaaucaa

SEQ ID NO: 3511067 - RNA, 13 nt, Human
auaagggaaaaga

SEQ ID NO: 3511068 - RNA, 18 nt, Human
auaagggguuugccauuu

SEQ ID NO: 3511069 - RNA, 21 nt, Human
auaagggguuugccauuugau

SEQ ID NO: 3511070 - RNA, 16 nt, Human
auaagguaaaaugcca

SEQ ID NO: 3511071 - RNA, 17 nt, Human
auaaggugcucucuuuc

SEQ ID NO: 3511072 - RNA, 19 nt, Human
auaagguguuuucugugua

SEQ ID NO: 3511073 - RNA, 12 nt, Human
auaaguaagaaa

SEQ ID NO: 3511074 - RNA, 19 nt, Human
auaaguaagaaaauauuuu

SEQ ID NO: 3511075 - RNA, 19 nt, Human
auaaguacuguguacagaa

SEQ ID NO: 3511076 - RNA, 19 nt, Human
auaaguauuuaauucaugu

SEQ ID NO: 3511077 - RNA, 15 nt, Human
auaaguauuuauaau

SEQ ID NO: 3511078 - RNA, 18 nt, Human
auaaguauuucaaauugg

SEQ ID NO: 3511079 - RNA, 14 nt, Human
auaagucaacagua

SEQ ID NO: 3511080 - RNA, 15 nt, Human
auaagucaacaguaa

SEQ ID NO: 3511081 - RNA, 14 nt, Human
auaagucauguucc

SEQ ID NO: 3511082 - RNA, 14 nt, Human
auaagucuaaauaa

SEQ ID NO: 3511083 - RNA, 14 nt, Human
auaagucugauuua

SEQ ID NO: 3511084 - RNA, 14 nt, Human
auaagugaaaaucu

SEQ ID NO: 3511085 - RNA, 21 nt, Human
auaagugaaauggauacuaca

SEQ ID NO: 3511086 - RNA, 15 nt, Human
auaagugaauaauaa

SEQ ID NO: 3511087 - RNA, 20 nt, Human
auaagugcacacagaaauau

SEQ ID NO: 3511088 - RNA, 23 nt, Human
auaagugcacacagaaauauaua

SEQ ID NO: 3511089 - RNA, 13 nt, Human
auaagugcuguau

SEQ ID NO: 3511090 - RNA, 20 nt, Human
auaagugcuguauaaaauca

SEQ ID NO: 3511091 - RNA, 19 nt, Human
auaaguggccuugacacau

SEQ ID NO: 3511092 - RNA, 21 nt, Human
auaaguggccuugacacauua

SEQ ID NO: 3511093 - RNA, 15 nt, Human
auaaguggugugugu

SEQ ID NO: 3511094 - RNA, 19 nt, Human
auaaguguacauaugugcu

SEQ ID NO: 3511095 - RNA, 21 nt, Human
auaaguguguggucccaaguu

SEQ ID NO: 3511096 - RNA, 16 nt, Human
auaaguuauugcaguu

SEQ ID NO: 3511097 - RNA, 20 nt, Human
auaaguuauuuuuguacaug

SEQ ID NO: 3511098 - RNA, 13 nt, Human
auaaguuggaaac

SEQ ID NO: 3511099 - RNA, 17 nt, Human
auaaguuggaaacacua

SEQ ID NO: 3511100 - RNA, 19 nt, Human
auaaguuggaaacacuaaa

SEQ ID NO: 3511101 - RNA, 22 nt, Human
auaaguuuauuucuuaaaucua

SEQ ID NO: 3511102 - RNA, 21 nt, Human
auaaguuucugggaccucagu

SEQ ID NO: 3511103 - RNA, 15 nt, Human
auaaguuugaaggaa

SEQ ID NO: 3511104 - RNA, 13 nt, Human
auaaguuuuaugu

SEQ ID NO: 3511105 - RNA, 16 nt, Human
agcugcccuaaauaac

SEQ ID NO: 3511106 - RNA, 22 nt, Human
agcugcccuaaauaacccuuca

SEQ ID NO: 3511107 - RNA, 17 nt, Human
agcugcccuaugggccu

SEQ ID NO: 3511108 - RNA, 17 nt, Human
agcugcccucuccuggg

SEQ ID NO: 3511109 - RNA, 18 nt, Human
agcugccgaccagagccc

SEQ ID NO: 3511110 - RNA, 19 nt, Human
agcugccggucgcccuuug

SEQ ID NO: 3511111 - RNA, 13 nt, Human
agcugccuaagag

SEQ ID NO: 3511112 - RNA, 21 nt, Human
agcugccuagauucagggaaa

SEQ ID NO: 3511113 - RNA, 15 nt, Human
agcugccuagcaagc

SEQ ID NO: 3511114 - RNA, 19 nt, Human
agcugccuagcaagcuggc

SEQ ID NO: 3511115 - RNA, 20 nt, Human
agcugccuagcaagcuggcc

SEQ ID NO: 3511116 - RNA, 16 nt, Human
agcugccuccccuccu

SEQ ID NO: 3511117 - RNA, 17 nt, Human
agcugccuccccuccuc

SEQ ID NO: 3511118 - RNA, 20 nt, Human
agcugccuccccuccucugc

SEQ ID NO: 3511119 - RNA, 18 nt, Human
agcugccucccuguccac

SEQ ID NO: 3511120 - RNA, 19 nt, Human
agcugccucugccacugac

SEQ ID NO: 3511121 - RNA, 19 nt, Human
agcugccucuucccucuuc

SEQ ID NO: 3511122 - RNA, 12 nt, Human
agcugccugcuu

SEQ ID NO: 3511123 - RNA, 20 nt, Human
agcugccuggaagagcagcc

SEQ ID NO: 3511124 - RNA, 10 nt, Human
agcugccugu

SEQ ID NO: 3511125 - RNA, 22 nt, Human
agcugccuguaguuaggaaaua

SEQ ID NO: 3511126 - RNA, 14 nt, Human
agcugccugugccu

SEQ ID NO: 3511127 - RNA, 18 nt, Human
agcugccuguucagcucc

SEQ ID NO: 3511128 - RNA, 13 nt, Human
agcugccuuagcu

SEQ ID NO: 3511129 - RNA, 17 nt, Human
agcugccuuagcuucag

SEQ ID NO: 3511130 - RNA, 23 nt, Human
agcugccuuagcuucaggaaccu

SEQ ID NO: 3511131 - RNA, 22 nt, Human
agcugccuugagccuuaaaacc

SEQ ID NO: 3511132 - RNA, 18 nt, Human
agcugcgcuugcuuuucu

SEQ ID NO: 3511133 - RNA, 19 nt, Human
aguugcaaggcaaauguuu

SEQ ID NO: 3511134 - RNA, 17 nt, Human
aguugcaauagaacaga

SEQ ID NO: 3511135 - RNA, 19 nt, Human
aguugcaauugaauuaaau

SEQ ID NO: 3511136 - RNA, 12 nt, Human
aguugcacagca

SEQ ID NO: 3511137 - RNA, 13 nt, Human
aguugcacagcau

SEQ ID NO: 3511138 - RNA, 15 nt, Human
aguugcacagcaucu

SEQ ID NO: 3511139 - RNA, 17 nt, Human
aguugcacagcaucuca

SEQ ID NO: 3511140 - RNA, 22 nt, Human
aguugcagacucaguuugucag

SEQ ID NO: 3511141 - RNA, 23 nt, Human
aguugcagacucaguuugucaga

SEQ ID NO: 3511142 - RNA, 15 nt, Human
aguugcagcuguuuu

SEQ ID NO: 3511143 - RNA, 14 nt, Human
aguugcaucagaaa

SEQ ID NO: 3511144 - RNA, 20 nt, Human
aguugcauggcaucaccucc

SEQ ID NO: 3511145 - RNA, 17 nt, Human
aguugcauguaguaaca

SEQ ID NO: 3511146 - RNA, 22 nt, Human
aguugcauguaguaacacuaau

SEQ ID NO: 3511147 - RNA, 14 nt, Human
aguugccaagacaa

SEQ ID NO: 3511148 - RNA, 17 nt, Human
aguugccaagacaaauc

SEQ ID NO: 3511149 - RNA, 19 nt, Human
aguugccccgucucuguuc

SEQ ID NO: 3511150 - RNA, 20 nt, Human
aguugccccgucucuguucc

SEQ ID NO: 3511151 - RNA, 16 nt, Human
aguugccuaaauccau

SEQ ID NO: 3511152 - RNA, 20 nt, Human
aguugcgacggagagaaaaa

SEQ ID NO: 3511153 - RNA, 15 nt, Human
aguugcuauuugaac

SEQ ID NO: 3511154 - RNA, 16 nt, Human
aguugcucaaaaagaa

SEQ ID NO: 3511155 - RNA, 17 nt, Human
aguugcugggagcugaa

SEQ ID NO: 3511156 - RNA, 15 nt, Human
aguugcugguaaaau

SEQ ID NO: 3511157 - RNA, 18 nt, Human
aguugcugguaaaaugaa

SEQ ID NO: 3511158 - RNA, 21 nt, Human
aguugcugguaaaaugaagaa

SEQ ID NO: 3511159 - RNA, 23 nt, Human
aguugcugucagucuugaccucu

SEQ ID NO: 3511160 - RNA, 20 nt, Human
aguuggaaacacuaaauguu

SEQ ID NO: 3511161 - RNA, 21 nt, Human
aguuggaaacacuaaauguua

SEQ ID NO: 3511162 - RNA, 22 nt, Human
aguuggaaacacuaaauguuaa

SEQ ID NO: 3511163 - RNA, 23 nt, Human
aguuggaaacacuaaauguuaaa

SEQ ID NO: 3511164 - RNA, 14 nt, Human
aguuggaaauauuc

SEQ ID NO: 3511165 - RNA, 20 nt, Human
aguuggacuaaaugccuagu

SEQ ID NO: 3511166 - RNA, 16 nt, Human
aguuggaguagaaugu

SEQ ID NO: 3511167 - RNA, 21 nt, Human
aguuggcagaaauacagucuu

SEQ ID NO: 3511168 - RNA, 18 nt, Human
aguuggcuggaugaaauu

SEQ ID NO: 3511169 - RNA, 17 nt, Human
aguuggcuuaccuggcc

SEQ ID NO: 3511170 - RNA, 18 nt, Human
aguuggcuuaccuggccc

SEQ ID NO: 3511171 - RNA, 22 nt, Human
aguuggcuucuguuucuaguug

SEQ ID NO: 3511172 - RNA, 23 nt, Human
aguugggaacuucagauggaccu

SEQ ID NO: 3511173 - RNA, 18 nt, Human
aguugggacuacaggcgu

SEQ ID NO: 3511174 - RNA, 13 nt, Human
aguugggcuuccu

SEQ ID NO: 3511175 - RNA, 15 nt, Human
aguugggcuugcuau

SEQ ID NO: 3511176 - RNA, 16 nt, Human
aguuggggacacaugu

SEQ ID NO: 3511177 - RNA, 21 nt, Human
aguuggguggaugccuggugg

SEQ ID NO: 3511178 - RNA, 15 nt, Human
aguugggugucuccu

SEQ ID NO: 3511179 - RNA, 16 nt, Human
aguugggugucuccuu

SEQ ID NO: 3511180 - RNA, 17 nt, Human
aguugguaagcuuccag

SEQ ID NO: 3511181 - RNA, 22 nt, Human
aguugguaagcuuccaggaaaa

SEQ ID NO: 3511182 - RNA, 17 nt, Human
aguugguacacaacuag

SEQ ID NO: 3511183 - RNA, 19 nt, Human
aguugguauuaauaaaaag

SEQ ID NO: 3511184 - RNA, 13 nt, Human
aguuggucccccu

SEQ ID NO: 3511185 - RNA, 17 nt, Human
aguuggucccccuucca

SEQ ID NO: 3511186 - RNA, 18 nt, Human
aguuggucccccuuccau

SEQ ID NO: 3511187 - RNA, 13 nt, Human
aguuguaaaguau

SEQ ID NO: 3511188 - RNA, 18 nt, Human
aguuguaaaguauguauu

SEQ ID NO: 3511189 - RNA, 22 nt, Human
aguuguaaauaauuuauuuaau

SEQ ID NO: 3511190 - RNA, 14 nt, Human
aguuguaaauauau

SEQ ID NO: 3511191 - RNA, 15 nt, Human
aguuguaaauauaua

SEQ ID NO: 3511192 - RNA, 17 nt, Human
aguuguaaauauauaaa

SEQ ID NO: 3511193 - RNA, 18 nt, Human
aguuguaaauauauaaau

SEQ ID NO: 3511194 - RNA, 16 nt, Human
aguuguaacuuauauu

SEQ ID NO: 3511195 - RNA, 13 nt, Human
aguuguacuuuaa

SEQ ID NO: 3511196 - RNA, 20 nt, Human
aguuguacuuuaaaaauuua

SEQ ID NO: 3511197 - RNA, 17 nt, Human
aguuguagaauguauug

SEQ ID NO: 3511198 - RNA, 16 nt, Human
aguuguagcagauugu

SEQ ID NO: 3511199 - RNA, 18 nt, Human
aguuguagcagauuguuu

SEQ ID NO: 3511200 - RNA, 21 nt, Human
aguuguaggcgaaucauuugu

SEQ ID NO: 3511201 - RNA, 20 nt, Human
aguuguaucagcacgugugg

SEQ ID NO: 3511202 - RNA, 14 nt, Human
aguuguaucucuuu

SEQ ID NO: 3511203 - RNA, 18 nt, Human
aguuguaugaucugugcc

SEQ ID NO: 3511204 - RNA, 19 nt, Human
aguuguauuuaacagaaau

SEQ ID NO: 3511205 - RNA, 15 nt, Human
aguugucacugcuuu

SEQ ID NO: 3511206 - RNA, 21 nt, Human
aguugucacugcuuuuggccu

SEQ ID NO: 3511207 - RNA, 19 nt, Human
aguugucccgauuguaacu

SEQ ID NO: 3511208 - RNA, 14 nt, Human
aguugucucucuuc

SEQ ID NO: 3511209 - RNA, 12 nt, Human
aguugucucuga

SEQ ID NO: 3511210 - RNA, 17 nt, Human
aguugucucugaugcag

SEQ ID NO: 3511211 - RNA, 20 nt, Human
aguugugaaaguuuugagua

SEQ ID NO: 3511212 - RNA, 15 nt, Human
aguugugcacgcaga

SEQ ID NO: 3511213 - RNA, 14 nt, Human
aguugugcagcuuu

SEQ ID NO: 3511214 - RNA, 20 nt, Human
aguugugcagcuuuugguca

SEQ ID NO: 3511215 - RNA, 15 nt, Human
aguugugccuuuuau

SEQ ID NO: 3511216 - RNA, 19 nt, Human
aguugugccuuuuauagcu

SEQ ID NO: 3511217 - RNA, 21 nt, Human
aguugugccuuuuauagcuau

SEQ ID NO: 3511218 - RNA, 23 nt, Human
aguugugccuuuuauagcuauua

SEQ ID NO: 3511219 - RNA, 14 nt, Human
aguugugcuugagc

SEQ ID NO: 3511220 - RNA, 19 nt, Human
aguuguggugcugacaaag

SEQ ID NO: 3511221 - RNA, 15 nt, Human
aguuguggugugagu

SEQ ID NO: 3511222 - RNA, 16 nt, Human
aguuguguacucuggc

SEQ ID NO: 3511223 - RNA, 21 nt, Human
aguugugugaauaccccaaga

SEQ ID NO: 3511224 - RNA, 14 nt, Human
aguugugugacccu

SEQ ID NO: 3511225 - RNA, 14 nt, Human
aguuguguuguucu

SEQ ID NO: 3511226 - RNA, 14 nt, Human
aguuguguuucaac

SEQ ID NO: 3511227 - RNA, 23 nt, Human
aguuguguuucaacggaaagugc

SEQ ID NO: 3511228 - RNA, 16 nt, Human
aguuguguuugaagca

SEQ ID NO: 3511229 - RNA, 16 nt, Human
aguuguuaauaaaagu

SEQ ID NO: 3511230 - RNA, 15 nt, Human
aguuguuacauuuuu

SEQ ID NO: 3511231 - RNA, 22 nt, Human
aguuguuacauuuuuaagugcu

SEQ ID NO: 3511232 - RNA, 19 nt, Human
aguuguuacuaacuaaacu

SEQ ID NO: 3511233 - RNA, 22 nt, Human
aguuguuacuaacuaaacucuc

SEQ ID NO: 3511234 - RNA, 15 nt, Human
aguuguuagauuaag

SEQ ID NO: 3511235 - RNA, 17 nt, Human
aguuguuagugugucuu

SEQ ID NO: 3511236 - RNA, 23 nt, Human
aguuguucgggccaaggaccuga

SEQ ID NO: 3511237 - RNA, 19 nt, Human
aguuguuggccuccggccu

SEQ ID NO: 3511238 - RNA, 12 nt, Human
aguuguuguaac

SEQ ID NO: 3511239 - RNA, 14 nt, Human
aguuguuguagaga

SEQ ID NO: 3511240 - RNA, 23 nt, Human
aguuguuucuagacuauaaaugu

SEQ ID NO: 3511241 - RNA, 13 nt, Human
aguuguuugcaug

SEQ ID NO: 3511242 - RNA, 20 nt, Human
aguuguuuuuguauauuggu

SEQ ID NO: 3511243 - RNA, 21 nt, Human
aguuuaaaaucaucagaaagg

SEQ ID NO: 3511244 - RNA, 14 nt, Human
aguuuaaaauguau

SEQ ID NO: 3511245 - RNA, 15 nt, Human
aguuuaaaauguaua

SEQ ID NO: 3511246 - RNA, 21 nt, Human
aguuuaaagcucgaaaacaau

SEQ ID NO: 3511247 - RNA, 17 nt, Human
aguuuaaauuguaauag

SEQ ID NO: 3511248 - RNA, 12 nt, Human
aguuuaacacaa

SEQ ID NO: 3511249 - RNA, 23 nt, Human
agcuguacaaauauaagaauaaa

SEQ ID NO: 3511250 - RNA, 19 nt, Human
agcuguacuucuugaauau

SEQ ID NO: 3511251 - RNA, 20 nt, Human
agcuguacuucuugaauaua

SEQ ID NO: 3511252 - RNA, 20 nt, Human
agcuguaggugugcgggacc

SEQ ID NO: 3511253 - RNA, 23 nt, Human
agcuguaguagcccuuucugugu

SEQ ID NO: 3511254 - RNA, 11 nt, Human
agcuguagugg

SEQ ID NO: 3511255 - RNA, 18 nt, Human
agcuguaugauucccagc

SEQ ID NO: 3511256 - RNA, 15 nt, Human
agcuguauugaauca

SEQ ID NO: 3511257 - RNA, 16 nt, Human
agcuguauugucugaa

SEQ ID NO: 3511258 - RNA, 18 nt, Human
agcugucacaacuugugu

SEQ ID NO: 3511259 - RNA, 18 nt, Human
agcugucaccaaggaaac

SEQ ID NO: 3511260 - RNA, 23 nt, Human
agcugucccaucuggucauuugg

SEQ ID NO: 3511261 - RNA, 22 nt, Human
agcuguccccccacucccucac

SEQ ID NO: 3511262 - RNA, 23 nt, Human
agcuguccccccacucccucaca

SEQ ID NO: 3511263 - RNA, 15 nt, Human
agcugucccugcccu

SEQ ID NO: 3511264 - RNA, 20 nt, Human
agcugucccugucaccaagc

SEQ ID NO: 3511265 - RNA, 16 nt, Human
agcuguccugcagcaa

SEQ ID NO: 3511266 - RNA, 21 nt, Human
agcuguccuuuuuccucucca

SEQ ID NO: 3511267 - RNA, 16 nt, Human
agcugugaccugcuga

SEQ ID NO: 3511268 - RNA, 19 nt, Human
agcugugaccugcugagcu

SEQ ID NO: 3511269 - RNA, 20 nt, Human
agcugugaccugcugagcuc

SEQ ID NO: 3511270 - RNA, 18 nt, Human
agcugugagacaguggga

SEQ ID NO: 3511271 - RNA, 19 nt, Human
agcugugagacagugggaa

SEQ ID NO: 3511272 - RNA, 18 nt, Human
agcugugcagguggggag

SEQ ID NO: 3511273 - RNA, 13 nt, Human
agcugugccaccc

SEQ ID NO: 3511274 - RNA, 19 nt, Human
agcugugccacccugggcu

SEQ ID NO: 3511275 - RNA, 21 nt, Human
agcugugccacccugggcucu

SEQ ID NO: 3511276 - RNA, 15 nt, Human
agcugugcucagaag

SEQ ID NO: 3511277 - RNA, 23 nt, Human
agcugugcucuggacaggcaugu

SEQ ID NO: 3511278 - RNA, 19 nt, Human
agcugugcuuaugguacca

SEQ ID NO: 3511279 - RNA, 22 nt, Human
agcugugcuuaugguaccagau

SEQ ID NO: 3511280 - RNA, 19 nt, Human
agcuguggacuuuguucac

SEQ ID NO: 3511281 - RNA, 23 nt, Human
agcugugggcaaaagaguguaaa

SEQ ID NO: 3511282 - RNA, 22 nt, Human
agcugugguuuucuuuugccau

SEQ ID NO: 3511283 - RNA, 21 nt, Human
agcuguguccaaaaccgccag

SEQ ID NO: 3511284 - RNA, 23 nt, Human
agcuguguccuaguucuugaaca

SEQ ID NO: 3511285 - RNA, 14 nt, Human
agcugugugaaaua

SEQ ID NO: 3511286 - RNA, 21 nt, Human
agcugugugaauaccugcuca

SEQ ID NO: 3511287 - RNA, 23 nt, Human
agcugugugacauuuggagaggg

SEQ ID NO: 3511288 - RNA, 20 nt, Human
agcugugugcucuccaagcc

SEQ ID NO: 3511289 - RNA, 22 nt, Human
agcuguguguuuggaagacuau

SEQ ID NO: 3511290 - RNA, 15 nt, Human
agcuguguuguugcu

SEQ ID NO: 3511291 - RNA, 20 nt, Human
aguuuauuuguugagagugu

SEQ ID NO: 3511292 - RNA, 15 nt, Human
aguuuauuuuaagac

SEQ ID NO: 3511293 - RNA, 16 nt, Human
aguuuauuuuuaaaga

SEQ ID NO: 3511294 - RNA, 14 nt, Human
aguuucaaaaaucu

SEQ ID NO: 3511295 - RNA, 22 nt, Human
aguuucaaaaaucugaagauug

SEQ ID NO: 3511296 - RNA, 22 nt, Human
aguuucaaguauccuuguugac

SEQ ID NO: 3511297 - RNA, 22 nt, Human
aguuucaaguuuuaaaguucau

SEQ ID NO: 3511298 - RNA, 16 nt, Human
aguuucaaugugauuc

SEQ ID NO: 3511299 - RNA, 12 nt, Human
aguuucagagaa

SEQ ID NO: 3511300 - RNA, 17 nt, Human
aguuucagaguauauug

SEQ ID NO: 3511301 - RNA, 14 nt, Human
aguuucagauauau

SEQ ID NO: 3511302 - RNA, 17 nt, Human
aguuucagcuuaaaaua

SEQ ID NO: 3511303 - RNA, 11 nt, Human
aguuucaggug

SEQ ID NO: 3511304 - RNA, 15 nt, Human
aguuucaggugacau

SEQ ID NO: 3511305 - RNA, 16 nt, Human
aguuucauauaaagua

SEQ ID NO: 3511306 - RNA, 17 nt, Human
aguuuccauagcaacag

SEQ ID NO: 3511307 - RNA, 17 nt, Human
aguuuccccaccaguga

SEQ ID NO: 3511308 - RNA, 23 nt, Human
aguuuccccaccagugaaugaaa

SEQ ID NO: 3511309 - RNA, 20 nt, Human
aguuuccgugcguggcacuc

SEQ ID NO: 3511310 - RNA, 17 nt, Human
aguuuccucaggcugcu

SEQ ID NO: 3511311 - RNA, 18 nt, Human
aguuuccucaggcugcug

SEQ ID NO: 3511312 - RNA, 20 nt, Human
aguuuccucaggcugcugga

SEQ ID NO: 3511313 - RNA, 15 nt, Human
aguuuccuuggcugg

SEQ ID NO: 3511314 - RNA, 20 nt, Human
aguuucguuucuguuuuuua

SEQ ID NO: 3511315 - RNA, 16 nt, Human
aguuucguuuucaaaa

SEQ ID NO: 3511316 - RNA, 13 nt, Human
aguuucuaaaauu

SEQ ID NO: 3511317 - RNA, 16 nt, Human
aguuucuaaacuggag

SEQ ID NO: 3511318 - RNA, 18 nt, Human
aguuucuaaacuggagac

SEQ ID NO: 3511319 - RNA, 20 nt, Human
aguuucuaaacuggagacug

SEQ ID NO: 3511320 - RNA, 14 nt, Human
aguuucuaagauuc

SEQ ID NO: 3511321 - RNA, 17 nt, Human
aguuucuaagauucuaa

SEQ ID NO: 3511322 - RNA, 19 nt, Human
aguuucuaagauucuaaag

SEQ ID NO: 3511323 - RNA, 12 nt, Human
aguuucucagcu

SEQ ID NO: 3511324 - RNA, 14 nt, Human
aguuucucagcucc

SEQ ID NO: 3511325 - RNA, 15 nt, Human
aguuucucagcuccc

SEQ ID NO: 3511326 - RNA, 13 nt, Human
aguuucuccaagc

SEQ ID NO: 3511327 - RNA, 15 nt, Human
aguuucuccaagcag

SEQ ID NO: 3511328 - RNA, 14 nt, Human
aguuucucuuuuca

SEQ ID NO: 3511329 - RNA, 19 nt, Human
aguuucugaguuuuaccaa

SEQ ID NO: 3511330 - RNA, 16 nt, Human
aguuucuggcccuggc

SEQ ID NO: 3511331 - RNA, 17 nt, Human
aguuucugggaccucag

SEQ ID NO: 3511332 - RNA, 13 nt, Human
aguuucugugguu

SEQ ID NO: 3511333 - RNA, 21 nt, Human
aguuucugugguuggcuggga

SEQ ID NO: 3511334 - RNA, 22 nt, Human
aguuucuguucuguggaaagug

SEQ ID NO: 3511335 - RNA, 23 nt, Human
aguuucuguucuguggaaagugu

SEQ ID NO: 3511336 - RNA, 17 nt, Human
aguuucuguuugauucu

SEQ ID NO: 3511337 - RNA, 19 nt, Human
aguuucuguuugauucuuu

SEQ ID NO: 3511338 - RNA, 14 nt, Human
aguuucuuagcuuu

SEQ ID NO: 3511339 - RNA, 16 nt, Human
aguuucuuuauuuugu

SEQ ID NO: 3511340 - RNA, 21 nt, Human
aguuucuuuccugccuucuuc

SEQ ID NO: 3511341 - RNA, 13 nt, Human
aguuucuuuggga

SEQ ID NO: 3511342 - RNA, 17 nt, Human
aguuugaaaagcaauau

SEQ ID NO: 3511343 - RNA, 21 nt, Human
aguuugaaaagcaauauugua

SEQ ID NO: 3511344 - RNA, 12 nt, Human
aguuugaaauuc

SEQ ID NO: 3511345 - RNA, 13 nt, Human
aguuugaaauucu

SEQ ID NO: 3511346 - RNA, 17 nt, Human
aguuugaaauucugaau

SEQ ID NO: 3511347 - RNA, 18 nt, Human
aguuugaaauucugaauu

SEQ ID NO: 3511348 - RNA, 19 nt, Human
aguuugaaauucugaauuu

SEQ ID NO: 3511349 - RNA, 15 nt, Human
aguuugaacuucaua

SEQ ID NO: 3511350 - RNA, 18 nt, Human
aguuugaaggaaacaguu

SEQ ID NO: 3511351 - RNA, 19 nt, Human
aguuugaaugcugcaaguu

SEQ ID NO: 3511352 - RNA, 15 nt, Human
aguuugaauguuaaa

SEQ ID NO: 3511353 - RNA, 16 nt, Human
aguuugaauguuaaau

SEQ ID NO: 3511354 - RNA, 21 nt, Human
aguuugaauguuaaauaaauu

SEQ ID NO: 3511355 - RNA, 14 nt, Human
aguuugagcugccu

SEQ ID NO: 3511356 - RNA, 18 nt, Human
aguuugaggaaauuugca

SEQ ID NO: 3511357 - RNA, 17 nt, Human
aguuugaggauuaguuu

SEQ ID NO: 3511358 - RNA, 17 nt, Human
aguuugaggcugcagcg

SEQ ID NO: 3511359 - RNA, 14 nt, Human
aguuugaucuuccu

SEQ ID NO: 3511360 - RNA, 21 nt, Human
aguuugaucuuccucugcuaa

SEQ ID NO: 3511361 - RNA, 23 nt, Human
aguuugaucuuccucugcuaaau

SEQ ID NO: 3511362 - RNA, 16 nt, Human
aguuugaugaggcccu

SEQ ID NO: 3511363 - RNA, 17 nt, Human
aguuugauuaaauucuu

SEQ ID NO: 3511364 - RNA, 17 nt, Human
aguuugauuauucagug

SEQ ID NO: 3511365 - RNA, 18 nt, Human
aguuugauuauucagugu

SEQ ID NO: 3511366 - RNA, 16 nt, Human
aguuugcaccuguccc

SEQ ID NO: 3511367 - RNA, 18 nt, Human
aguuugcacucaaaucuu

SEQ ID NO: 3511368 - RNA, 22 nt, Human
aguuugcagaaaagcaccugcc

SEQ ID NO: 3511369 - RNA, 15 nt, Human
aguuugcauuccuga

SEQ ID NO: 3511370 - RNA, 20 nt, Human
aguuugccccguucuguuug

SEQ ID NO: 3511371 - RNA, 21 nt, Human
aguuugcccugguuucacugg

SEQ ID NO: 3511372 - RNA, 16 nt, Human
aguuugcuaauguuuc

SEQ ID NO: 3511373 - RNA, 13 nt, Human
aguuugcuuagaa

SEQ ID NO: 3511374 - RNA, 15 nt, Human
aguuugcuuugcccu

SEQ ID NO: 3511375 - RNA, 22 nt, Human
aguuuggagagagcagacuggc

SEQ ID NO: 3511376 - RNA, 21 nt, Human
aguuuggagagucagaucuuu

SEQ ID NO: 3511377 - RNA, 12 nt, Human
aguuuggaggaa

SEQ ID NO: 3511378 - RNA, 22 nt, Human
aguuuggauauguaaaacauuu

SEQ ID NO: 3511379 - RNA, 16 nt, Human
aguuuggcaaacucuc

SEQ ID NO: 3511380 - RNA, 16 nt, Human
aguuuggcaauaguuu

SEQ ID NO: 3511381 - RNA, 17 nt, Human
aguuuggcaauaguuug

SEQ ID NO: 3511382 - RNA, 14 nt, Human
aguuuggccagaag

SEQ ID NO: 3511383 - RNA, 23 nt, Human
aguuugggaucccugucuuuccu

SEQ ID NO: 3511384 - RNA, 12 nt, Human
aguuugggcuuc

SEQ ID NO: 3511385 - RNA, 17 nt, Human
aguuugggcuucagccu

SEQ ID NO: 3511386 - RNA, 21 nt, Human
aguuuggggcaagucauguaa

SEQ ID NO: 3511387 - RNA, 16 nt, Human
aguuugguguguccuc

SEQ ID NO: 3511388 - RNA, 14 nt, Human
aguuuguaaauguu

SEQ ID NO: 3511389 - RNA, 20 nt, Human
aguuuguaaauguuauuucu

SEQ ID NO: 3511390 - RNA, 23 nt, Human
aguuuguaaauguuauuucugca

SEQ ID NO: 3511391 - RNA, 22 nt, Human
aguuuguacagacguaugcuua

SEQ ID NO: 3511392 - RNA, 16 nt, Human
auaagcucagaaucca

SEQ ID NO: 3511393 - RNA, 15 nt, Human
auaaggaaaaguuua

SEQ ID NO: 3511394 - RNA, 18 nt, Human
auaaggaaagcaauaaau

SEQ ID NO: 3511395 - RNA, 24 nt, Human
auaaggaaaucaacuugcuuauca

SEQ ID NO: 3511396 - RNA, 12 nt, Human
auaaggaagaaa

SEQ ID NO: 3511397 - RNA, 14 nt, Human
auaaggaagaaaca

SEQ ID NO: 3511398 - RNA, 20 nt, Human
auaaggaucagaacagcaga

SEQ ID NO: 3511399 - RNA, 13 nt, Human
auaaggcaggcau

SEQ ID NO: 3511400 - RNA, 12 nt, Human
auaagggaagua

SEQ ID NO: 3511401 - RNA, 23 nt, Human
auaagggacugauguuugugcag

SEQ ID NO: 3511402 - RNA, 20 nt, Human
auaagggagcguagaaucug

SEQ ID NO: 3511403 - RNA, 19 nt, Human
auaagggcaaauuggagaa

SEQ ID NO: 3511404 - RNA, 18 nt, Human
auaaggguaucuggugac

SEQ ID NO: 3511405 - RNA, 18 nt, Human
auaagguaaaaugccaug

SEQ ID NO: 3511406 - RNA, 20 nt, Human
auaagguuucguuucuguau

SEQ ID NO: 3511407 - RNA, 22 nt, Human
auaaguaacuuuauucuugaaa

SEQ ID NO: 3511408 - RNA, 15 nt, Human
auaaguaagaaaaua

SEQ ID NO: 3511409 - RNA, 18 nt, Human
auaaguaagaaaauauuu

SEQ ID NO: 3511410 - RNA, 17 nt, Human
auaaguaauucaagaaa

SEQ ID NO: 3511411 - RNA, 13 nt, Human
auaaguacugugu

SEQ ID NO: 3511412 - RNA, 15 nt, Human
auaaguauacaguuc

SEQ ID NO: 3511413 - RNA, 14 nt, Human
auaaguauuuggaa

SEQ ID NO: 3511414 - RNA, 16 nt, Human
auaaguauuuggaauu

SEQ ID NO: 3511415 - RNA, 16 nt, Human
auaagucaacaguaaa

SEQ ID NO: 3511416 - RNA, 17 nt, Human
auaagucaacaguaaac

SEQ ID NO: 3511417 - RNA, 16 nt, Human
auaagucauguuccuu

SEQ ID NO: 3511418 - RNA, 11 nt, Human
auaagucugau

SEQ ID NO: 3511419 - RNA, 13 nt, Human
auaagucugauuu

SEQ ID NO: 3511420 - RNA, 15 nt, Human
auaagugaagugaua

SEQ ID NO: 3511421 - RNA, 19 nt, Human
auaagugcacacagaaaua

SEQ ID NO: 3511422 - RNA, 21 nt, Human
auaagugcuauugcagagccg

SEQ ID NO: 3511423 - RNA, 17 nt, Human
auaagugcuguauaaaa

SEQ ID NO: 3511424 - RNA, 18 nt, Human
auaagugcuguauaaaau

SEQ ID NO: 3511425 - RNA, 19 nt, Human
auaagugcuguauaaaauc

SEQ ID NO: 3511426 - RNA, 20 nt, Human
auaaguggaggcacuuuagg

SEQ ID NO: 3511427 - RNA, 13 nt, Human
auaaguguacaua

SEQ ID NO: 3511428 - RNA, 14 nt, Human
auaaguguacauau

SEQ ID NO: 3511429 - RNA, 20 nt, Human
auaaguguacauaugugcug

SEQ ID NO: 3511430 - RNA, 16 nt, Human
auaaguguauuuuuca

SEQ ID NO: 3511431 - RNA, 22 nt, Human
auaaguguguguuuuucauaaa

SEQ ID NO: 3511432 - RNA, 17 nt, Human
auaaguguucugucuga

SEQ ID NO: 3511433 - RNA, 22 nt, Human
auaaguuaacuuccaauuuaca

SEQ ID NO: 3511434 - RNA, 21 nt, Human
auaaguuauugcaguuuauca

SEQ ID NO: 3511435 - RNA, 24 nt, Human
auaaguuauugcaguuuaucauuc

SEQ ID NO: 3511436 - RNA, 12 nt, Human
auaaguuauuuu

SEQ ID NO: 3511437 - RNA, 22 nt, Human
auaaguuauuuuuguacauguu

SEQ ID NO: 3511438 - RNA, 18 nt, Human
auaaguucaaauucuucu

SEQ ID NO: 3511439 - RNA, 16 nt, Human
auaaguucacaaaaug

SEQ ID NO: 3511440 - RNA, 13 nt, Human
auaaguucauaca

SEQ ID NO: 3511441 - RNA, 15 nt, Human
auaaguucauacauu

SEQ ID NO: 3511442 - RNA, 21 nt, Human
auaaguucauacauuguacga

SEQ ID NO: 3511443 - RNA, 20 nt, Human
auaaguucuuaugccauguu

SEQ ID NO: 3511444 - RNA, 12 nt, Human
auaaguuuauuu

SEQ ID NO: 3511445 - RNA, 17 nt, Human
auaaguuugcaauuugg

SEQ ID NO: 3511446 - RNA, 19 nt, Human
auaauaaaaaauuaugaca

SEQ ID NO: 3511447 - RNA, 15 nt, Human
auaauaaaaauauau

SEQ ID NO: 3511448 - RNA, 23 nt, Human
auaauaaagaauagcuuuaauga

SEQ ID NO: 3511449 - RNA, 11 nt, Human
auaauaaagga

SEQ ID NO: 3511450 - RNA, 12 nt, Human
auaauaaaguau

SEQ ID NO: 3511451 - RNA, 15 nt, Human
auaauaaauguacau

SEQ ID NO: 3511452 - RNA, 13 nt, Human
auaauaaauuaaa

SEQ ID NO: 3511453 - RNA, 15 nt, Human
auaauaaauugcaug

SEQ ID NO: 3511454 - RNA, 17 nt, Human
auaauaagcaggauguu

SEQ ID NO: 3511455 - RNA, 15 nt, Human
auaauaagcuaaaga

SEQ ID NO: 3511456 - RNA, 17 nt, Human
auaauaaggaaaaguuu

SEQ ID NO: 3511457 - RNA, 13 nt, Human
auaauaauacaag

SEQ ID NO: 3511458 - RNA, 12 nt, Human
auaauaauauau

SEQ ID NO: 3511459 - RNA, 15 nt, Human
auaauaauauuguuu

SEQ ID NO: 3511460 - RNA, 18 nt, Human
auaauaauauuguuuuuc

SEQ ID NO: 3511461 - RNA, 22 nt, Human
auaauacacaaaaucaaauaau

SEQ ID NO: 3511462 - RNA, 18 nt, Human
auaauacaccacuacauu

SEQ ID NO: 3511463 - RNA, 22 nt, Human
auaauacacuaauuccuuucua

SEQ ID NO: 3511464 - RNA, 13 nt, Human
auaauacacuugc

SEQ ID NO: 3511465 - RNA, 17 nt, Human
auaauacagccaaagau

SEQ ID NO: 3511466 - RNA, 19 nt, Human
auaauacaguaucucaggg

SEQ ID NO: 3511467 - RNA, 18 nt, Human
auaauaccucaauguuug

SEQ ID NO: 3511468 - RNA, 20 nt, Human
auaauacugaaccacuugua

SEQ ID NO: 3511469 - RNA, 21 nt, Human
auaauacugcugagauacaua

SEQ ID NO: 3511470 - RNA, 14 nt, Human
auaauacuuuguau

SEQ ID NO: 3511471 - RNA, 18 nt, Human
auaauacuuuguauacaa

SEQ ID NO: 3511472 - RNA, 21 nt, Human
auaauacuuuguauacaagua

SEQ ID NO: 3511473 - RNA, 14 nt, Human
auaauaguuuacau

SEQ ID NO: 3511474 - RNA, 11 nt, Human
auaauauaaaa

SEQ ID NO: 3511475 - RNA, 12 nt, Human
auaauauaaaaa

SEQ ID NO: 3511476 - RNA, 13 nt, Human
auaauauaaaaaa

SEQ ID NO: 3511477 - RNA, 13 nt, Human
auaauauacuugu

SEQ ID NO: 3511478 - RNA, 20 nt, Human
auaauauacuuguggacuaa

SEQ ID NO: 3511479 - RNA, 18 nt, Human
auaauaucuuugugauaa

SEQ ID NO: 3511480 - RNA, 12 nt, Human
auaauaugagaa

SEQ ID NO: 3511481 - RNA, 12 nt, Human
auaauaugcaca

SEQ ID NO: 3511482 - RNA, 21 nt, Human
auaauaugcugccaaauuuug

SEQ ID NO: 3511483 - RNA, 13 nt, Human
auaauauggcuau

SEQ ID NO: 3511484 - RNA, 13 nt, Human
auaauauuacugu

SEQ ID NO: 3511485 - RNA, 14 nt, Human
auaauauugaaaau

SEQ ID NO: 3511486 - RNA, 21 nt, Human
auaauauugaaaauugaaaag

SEQ ID NO: 3511487 - RNA, 22 nt, Human
auaauauuguuugguaaauguu

SEQ ID NO: 3511488 - RNA, 19 nt, Human
auaauauuuuacauacacu

SEQ ID NO: 3511489 - RNA, 14 nt, Human
auaauauuuuuaau

SEQ ID NO: 3511490 - RNA, 21 nt, Human
auaaucaagagccuuaaaaca

SEQ ID NO: 3511491 - RNA, 21 nt, Human
auaaucagcaagaauuugauc

SEQ ID NO: 3511492 - RNA, 21 nt, Human
auagguccagaaguccuuaug

SEQ ID NO: 3511493 - RNA, 13 nt, Human
auaggucucuucu

SEQ ID NO: 3511494 - RNA, 18 nt, Human
auaggucucuucucccag

SEQ ID NO: 3511495 - RNA, 19 nt, Human
auaggucucuucucccaga

SEQ ID NO: 3511496 - RNA, 18 nt, Human
auaggugagaaaaaaaca

SEQ ID NO: 3511497 - RNA, 20 nt, Human
auaggugauccauguaacug

SEQ ID NO: 3511498 - RNA, 23 nt, Human
auaggugauccauguaacugccu

SEQ ID NO: 3511499 - RNA, 19 nt, Human
auaggugauguuugcucuu

SEQ ID NO: 3511500 - RNA, 21 nt, Human
auaggugcuacaaaaacacag

SEQ ID NO: 3511501 - RNA, 23 nt, Human
auaggugcuacaaaaacacagca

SEQ ID NO: 3511502 - RNA, 22 nt, Human
auaggugcuuauucucaaagca

SEQ ID NO: 3511503 - RNA, 20 nt, Human
auagguugccaauaauacac

SEQ ID NO: 3511504 - RNA, 15 nt, Human
auagguuuaauaauu

SEQ ID NO: 3511505 - RNA, 18 nt, Human
auagguuuggacaaaaug

SEQ ID NO: 3511506 - RNA, 23 nt, Human
auagguuuuccccucuuuuguua

SEQ ID NO: 3511507 - RNA, 16 nt, Human
auagguuuuguuugcu

SEQ ID NO: 3511508 - RNA, 21 nt, Human
auagguuuuguuugcuaucuu

SEQ ID NO: 3511509 - RNA, 22 nt, Human
auagguuuuguuugcuaucuua

SEQ ID NO: 3511510 - RNA, 18 nt, Human
auaguaacaucaaagauu

SEQ ID NO: 3511511 - RNA, 13 nt, Human
auaguaacuccca

SEQ ID NO: 3511512 - RNA, 23 nt, Human
auaguaauauaauacacaaaauc

SEQ ID NO: 3511513 - RNA, 17 nt, Human
auaguaaugaguuuaaa

SEQ ID NO: 3511514 - RNA, 17 nt, Human
auaguaauuuguaaagu

SEQ ID NO: 3511515 - RNA, 19 nt, Human
auaguaauuuguaaaguug

SEQ ID NO: 3511516 - RNA, 23 nt, Human
auaguacuagagauauuuuguaa

SEQ ID NO: 3511517 - RNA, 17 nt, Human
auaguagcauacauuua

SEQ ID NO: 3511518 - RNA, 16 nt, Human
auaguauaucuggaca

SEQ ID NO: 3511519 - RNA, 16 nt, Human
auaguauauuaaaaau

SEQ ID NO: 3511520 - RNA, 18 nt, Human
auaguauccuccagguuu

SEQ ID NO: 3511521 - RNA, 22 nt, Human
auaguauccuccagguuuuuca

SEQ ID NO: 3511522 - RNA, 19 nt, Human
auaguaugaguaaugcuua

SEQ ID NO: 3511523 - RNA, 20 nt, Human
auaguaugcacuauauacau

SEQ ID NO: 3511524 - RNA, 20 nt, Human
auaguauuugaaaacagaaa

SEQ ID NO: 3511525 - RNA, 12 nt, Human
auaguauuugau

SEQ ID NO: 3511526 - RNA, 18 nt, Human
auaguauuuuuauauuua

SEQ ID NO: 3511527 - RNA, 20 nt, Human
auagucaaaccauaaacuuc

SEQ ID NO: 3511528 - RNA, 18 nt, Human
auagucaaauugugugaa

SEQ ID NO: 3511529 - RNA, 14 nt, Human
auagucaagacgaa

SEQ ID NO: 3511530 - RNA, 21 nt, Human
auagucaagacgaacauguag

SEQ ID NO: 3511531 - RNA, 19 nt, Human
auagucuagacuaaaagau

SEQ ID NO: 3511532 - RNA, 15 nt, Human
auagucuaguguagu

SEQ ID NO: 3511533 - RNA, 21 nt, Human
auagucucuuuaaaaggaaag

SEQ ID NO: 3511534 - RNA, 13 nt, Human
auagucuggcugu

SEQ ID NO: 3511535 - RNA, 13 nt, Human
auagucuuucagu

SEQ ID NO: 3511536 - RNA, 16 nt, Human
auagucuuuggagaaa

SEQ ID NO: 3511537 - RNA, 22 nt, Human
auauacauacuuacaugugugu

SEQ ID NO: 3511538 - RNA, 14 nt, Human
auauacauauauau

SEQ ID NO: 3511539 - RNA, 21 nt, Human
auauacauguguguauauaug

SEQ ID NO: 3511540 - RNA, 18 nt, Human
auauacauguuuauguaa

SEQ ID NO: 3511541 - RNA, 20 nt, Human
auauaccacucuuuaccuuu

SEQ ID NO: 3511542 - RNA, 18 nt, Human
auauaccuauaaugugug

SEQ ID NO: 3511543 - RNA, 21 nt, Human
auauaccuauaauguguguau

SEQ ID NO: 3511544 - RNA, 19 nt, Human
auauacucaagagugguau

SEQ ID NO: 3511545 - RNA, 13 nt, Human
auauacucauuag

SEQ ID NO: 3511546 - RNA, 19 nt, Human
auauacucauuagaauuac

SEQ ID NO: 3511547 - RNA, 14 nt, Human
auauacuguaaaga

SEQ ID NO: 3511548 - RNA, 19 nt, Human
auauacuguaaagaaagag

SEQ ID NO: 3511549 - RNA, 21 nt, Human
auauacuguaaagaaagagag

SEQ ID NO: 3511550 - RNA, 18 nt, Human
auauacuguucuucauuu

SEQ ID NO: 3511551 - RNA, 15 nt, Human
auauacuuaaaugga

SEQ ID NO: 3511552 - RNA, 14 nt, Human
auauacuuguggac

SEQ ID NO: 3511553 - RNA, 14 nt, Human
auauacuuguuuuu

SEQ ID NO: 3511554 - RNA, 20 nt, Human
auauagaaguauaaagaauu

SEQ ID NO: 3511555 - RNA, 17 nt, Human
auauagaauuagcuuuu

SEQ ID NO: 3511556 - RNA, 18 nt, Human
auauagagucauuguaau

SEQ ID NO: 3511557 - RNA, 20 nt, Human
auauagaucacauaacagaa

SEQ ID NO: 3511558 - RNA, 15 nt, Human
auauagauuaaauca

SEQ ID NO: 3511559 - RNA, 14 nt, Human
auauagauuagaaa

SEQ ID NO: 3511560 - RNA, 23 nt, Human
auauagauuauaacuugucuaaa

SEQ ID NO: 3511561 - RNA, 20 nt, Human
auauagcaaaacuuuuaaac

SEQ ID NO: 3511562 - RNA, 22 nt, Human
auauagcaaaacuuuuaaacua

SEQ ID NO: 3511563 - RNA, 17 nt, Human
auauagcaagacauuau

SEQ ID NO: 3511564 - RNA, 16 nt, Human
auauagcccagccagg

SEQ ID NO: 3511565 - RNA, 12 nt, Human
auauagccuuua

SEQ ID NO: 3511566 - RNA, 17 nt, Human
auauagcugaucaguuu

SEQ ID NO: 3511567 - RNA, 18 nt, Human
auauagcugaucaguuuu

SEQ ID NO: 3511568 - RNA, 14 nt, Human
auauagcuguacaa

SEQ ID NO: 3511569 - RNA, 17 nt, Human
auauagcuguacaaaua

SEQ ID NO: 3511570 - RNA, 16 nt, Human
auauaggaacuuaaau

SEQ ID NO: 3511571 - RNA, 22 nt, Human
auauaggcuauuuucuaaagac

SEQ ID NO: 3511572 - RNA, 15 nt, Human
auauagguugugcaa

SEQ ID NO: 3511573 - RNA, 22 nt, Human
auauagguugugcaaauuaaca

SEQ ID NO: 3511574 - RNA, 18 nt, Human
auauagguuuuguuugcu

SEQ ID NO: 3511575 - RNA, 21 nt, Human
auauagguuuuguuugcuauc

SEQ ID NO: 3511576 - RNA, 16 nt, Human
auauaguuccuaagaa

SEQ ID NO: 3511577 - RNA, 23 nt, Human
auauaguuuuacuuuuaaacugu

SEQ ID NO: 3511578 - RNA, 18 nt, Human
auauauaaaauaaauaua

SEQ ID NO: 3511579 - RNA, 20 nt, Human
auauauaaaauaaauauaua

SEQ ID NO: 3511580 - RNA, 17 nt, Human
auauauaaagaauauau

SEQ ID NO: 3511581 - RNA, 11 nt, Human
auauauaaaua

SEQ ID NO: 3511582 - RNA, 16 nt, Human
auauauaaauaaauau

SEQ ID NO: 3511583 - RNA, 14 nt, Human
auauauaaauauau

SEQ ID NO: 3511584 - RNA, 18 nt, Human
auauauaaauauauauaa

SEQ ID NO: 3511585 - RNA, 15 nt, Human
auauauaaauguaua

SEQ ID NO: 3511586 - RNA, 17 nt, Human
auauauaacaaugcugu

SEQ ID NO: 3511587 - RNA, 18 nt, Human
auauauaacauauaugga

SEQ ID NO: 3511588 - RNA, 14 nt, Human
auauauaagaaaga

SEQ ID NO: 3511589 - RNA, 17 nt, Human
auauauaagaaagacau

SEQ ID NO: 3511590 - RNA, 20 nt, Human
auauauaaguguacauaugu

SEQ ID NO: 3511591 - RNA, 13 nt, Human
auauauaauauau

SEQ ID NO: 3511592 - RNA, 19 nt, Human
auauauaauucuguacaua

SEQ ID NO: 3511593 - RNA, 17 nt, Human
auauauacaaaaagaaa

SEQ ID NO: 3511594 - RNA, 16 nt, Human
auauauacaguaacuu

SEQ ID NO: 3511595 - RNA, 10 nt, Human
auauauacau

SEQ ID NO: 3511596 - RNA, 14 nt, Human
auauauacauacac

SEQ ID NO: 3511597 - RNA, 14 nt, Human
auauauacuauuaa

SEQ ID NO: 3511598 - RNA, 19 nt, Human
auauauacucaagaguggu

SEQ ID NO: 3511599 - RNA, 14 nt, Human
auauauagcauuua

SEQ ID NO: 3511600 - RNA, 20 nt, Human
auauauagcuggcaagaaug

SEQ ID NO: 3511601 - RNA, 20 nt, Human
auauauaggcuauuuucuaa

SEQ ID NO: 3511602 - RNA, 15 nt, Human
auauauagugcuaua

SEQ ID NO: 3511603 - RNA, 12 nt, Human
auauauauaaag

SEQ ID NO: 3511604 - RNA, 13 nt, Human
auauauauaaagu

SEQ ID NO: 3511605 - RNA, 14 nt, Human
auauauauaaauaa

SEQ ID NO: 3511606 - RNA, 14 nt, Human
auauauauaaauau

SEQ ID NO: 3511607 - RNA, 15 nt, Human
auauauauauaaaga

SEQ ID NO: 3511608 - RNA, 15 nt, Human
auauauauauauaaa

SEQ ID NO: 3511609 - RNA, 14 nt, Human
auauauauauauac

SEQ ID NO: 3511610 - RNA, 15 nt, Human
auauauauauauauu

SEQ ID NO: 3511611 - RNA, 13 nt, Human
auauauauauauc

SEQ ID NO: 3511612 - RNA, 14 nt, Human
auauauauccucug

SEQ ID NO: 3511613 - RNA, 15 nt, Human
auauauaucuauaua

SEQ ID NO: 3511614 - RNA, 15 nt, Human
auauauaugaauaaa

SEQ ID NO: 3511615 - RNA, 16 nt, Human
auauauaugugugugu

SEQ ID NO: 3511616 - RNA, 18 nt, Human
auauauauguugauuucu

SEQ ID NO: 3511617 - RNA, 19 nt, Human
auauauauuauaaauauau

SEQ ID NO: 3511618 - RNA, 14 nt, Human
auauauauuauacu

SEQ ID NO: 3511619 - RNA, 23 nt, Human
auauauauucuauuacauuuuca

SEQ ID NO: 3511620 - RNA, 23 nt, Human
auauauauucuggcugauaaaag

SEQ ID NO: 3511621 - RNA, 10 nt, Human
auauauauuu

SEQ ID NO: 3511622 - RNA, 14 nt, Human
auauaucaguuuga

SEQ ID NO: 3511623 - RNA, 15 nt, Human
auauaucaguuugau

SEQ ID NO: 3511624 - RNA, 15 nt, Human
auauaucaugaguga

SEQ ID NO: 3511625 - RNA, 16 nt, Human
auauaucccagaaauu

SEQ ID NO: 3511626 - RNA, 23 nt, Human
auauauccuuuucuucuauguag

SEQ ID NO: 3511627 - RNA, 16 nt, Human
auauaucuaucuauuu

SEQ ID NO: 3511628 - RNA, 18 nt, Human
auauaucuaucuauuuga

SEQ ID NO: 3511629 - RNA, 14 nt, Human
auauaucuaucuua

SEQ ID NO: 3511630 - RNA, 14 nt, Human
auauaucucaaauu

SEQ ID NO: 3511631 - RNA, 19 nt, Human
auauaucucaaauuguaau

SEQ ID NO: 3511632 - RNA, 16 nt, Human
auauaucucuauuuga

SEQ ID NO: 3511633 - RNA, 17 nt, Human
auauaucugcuucagug

SEQ ID NO: 3511634 - RNA, 18 nt, Human
auauaucugcuucagugg

SEQ ID NO: 3511635 - RNA, 16 nt, Human
auauaugaaaacuaua

SEQ ID NO: 3511636 - RNA, 19 nt, Human
auauaugcacuauguauau

SEQ ID NO: 3511637 - RNA, 20 nt, Human
auauaugcacuuaauuuguu

SEQ ID NO: 3511638 - RNA, 13 nt, Human
auauaugcauaua

SEQ ID NO: 3511639 - RNA, 16 nt, Human
auauaugccuuuuucc

SEQ ID NO: 3511640 - RNA, 13 nt, Human
auauaugcuaagu

SEQ ID NO: 3511641 - RNA, 17 nt, Human
auauauggcagaguugu

SEQ ID NO: 3511642 - RNA, 16 nt, Human
auauauggcauuugca

SEQ ID NO: 3511643 - RNA, 21 nt, Human
auauauggggaugguaguuuu

SEQ ID NO: 3511644 - RNA, 22 nt, Human
auauauggggaugguaguuuuu

SEQ ID NO: 3511645 - RNA, 16 nt, Human
auauauggucuaaugu

SEQ ID NO: 3511646 - RNA, 10 nt, Human
auauauguau

SEQ ID NO: 3511647 - RNA, 19 nt, Human
auauauguauauauaugca

SEQ ID NO: 3511648 - RNA, 20 nt, Human
auauauguauuauuuauaau

SEQ ID NO: 3511649 - RNA, 13 nt, Human
auauauguauuuu

SEQ ID NO: 3511650 - RNA, 19 nt, Human
auauauguguauauauaca

SEQ ID NO: 3511651 - RNA, 20 nt, Human
auauauguguauauauacau

SEQ ID NO: 3511652 - RNA, 23 nt, Human
auauauguguauauauacauaca

SEQ ID NO: 3511653 - RNA, 13 nt, Human
auauaugugugcc

SEQ ID NO: 3511654 - RNA, 16 nt, Human
auauauguguguguau

SEQ ID NO: 3511655 - RNA, 16 nt, Human
auauauguguguuuaa

SEQ ID NO: 3511656 - RNA, 18 nt, Human
auauauguguguuuaaau

SEQ ID NO: 3511657 - RNA, 16 nt, Human
auacaacacaaagaga

SEQ ID NO: 3511658 - RNA, 17 nt, Human
auacaacaccaaaaaau

SEQ ID NO: 3511659 - RNA, 15 nt, Human
auacaacagugcuaa

SEQ ID NO: 3511660 - RNA, 20 nt, Human
auacaacauguagcugaguu

SEQ ID NO: 3511661 - RNA, 22 nt, Human
auacaacccuggcauuaugucc

SEQ ID NO: 3511662 - RNA, 17 nt, Human
auacaaccucccucuug

SEQ ID NO: 3511663 - RNA, 23 nt, Human
auacaaccucccucuuguuuugu

SEQ ID NO: 3511664 - RNA, 18 nt, Human
auacaaccugcuugggug

SEQ ID NO: 3511665 - RNA, 16 nt, Human
auacaaccuucauuua

SEQ ID NO: 3511666 - RNA, 19 nt, Human
auacaaccuucauuuaaaa

SEQ ID NO: 3511667 - RNA, 18 nt, Human
auacaagauaagcuucca

SEQ ID NO: 3511668 - RNA, 20 nt, Human
auacaagguauaauaaaauu

SEQ ID NO: 3511669 - RNA, 13 nt, Human
auacaaguuucau

SEQ ID NO: 3511670 - RNA, 14 nt, Human
auacaaguuucauc

SEQ ID NO: 3511671 - RNA, 14 nt, Human
auacaauaaauugc

SEQ ID NO: 3511672 - RNA, 21 nt, Human
auacaauauauaaaaauauau

SEQ ID NO: 3511673 - RNA, 15 nt, Human
auacaauaucaucca

SEQ ID NO: 3511674 - RNA, 21 nt, Human
auacaaucagcugcuuuguua

SEQ ID NO: 3511675 - RNA, 18 nt, Human
auacaaucauagcauugu

SEQ ID NO: 3511676 - RNA, 16 nt, Human
auacaaugaugcuauu

SEQ ID NO: 3511677 - RNA, 14 nt, Human
auacaaugcugugc

SEQ ID NO: 3511678 - RNA, 19 nt, Human
auacaauuuuguuucugua

SEQ ID NO: 3511679 - RNA, 20 nt, Human
auacaauuuuuuuuauuagu

SEQ ID NO: 3511680 - RNA, 15 nt, Human
auacacaacacacac

SEQ ID NO: 3511681 - RNA, 10 nt, Human
auacacacac

SEQ ID NO: 3511682 - RNA, 19 nt, Human
auacacacacacacacagc

SEQ ID NO: 3511683 - RNA, 15 nt, Human
auauaacacauuuuu

SEQ ID NO: 3511684 - RNA, 15 nt, Human
auauaacaugaaaug

SEQ ID NO: 3511685 - RNA, 16 nt, Human
auauaaccaauguuua

SEQ ID NO: 3511686 - RNA, 17 nt, Human
auauaaccaauguuuaa

SEQ ID NO: 3511687 - RNA, 20 nt, Human
auauaaccaauguuuaaaaa

SEQ ID NO: 3511688 - RNA, 13 nt, Human
auauaacuaacaa

SEQ ID NO: 3511689 - RNA, 18 nt, Human
auauaacuauugcccagg

SEQ ID NO: 3511690 - RNA, 13 nt, Human
auauaacugccuu

SEQ ID NO: 3511691 - RNA, 20 nt, Human
auauaacuuauauuguaaga

SEQ ID NO: 3511692 - RNA, 15 nt, Human
auauaacuuuagaaa

SEQ ID NO: 3511693 - RNA, 16 nt, Human
auauaagccuuuuaua

SEQ ID NO: 3511694 - RNA, 22 nt, Human
auauaagggaaguaguuaucau

SEQ ID NO: 3511695 - RNA, 14 nt, Human
auauaaguaaagug

SEQ ID NO: 3511696 - RNA, 18 nt, Human
auauaagugcuguauaaa

SEQ ID NO: 3511697 - RNA, 18 nt, Human
auauaaguguacauaugu

SEQ ID NO: 3511698 - RNA, 15 nt, Human
auauaauaaaguauu

SEQ ID NO: 3511699 - RNA, 17 nt, Human
auauaauaaaguauucc

SEQ ID NO: 3511700 - RNA, 20 nt, Human
auauaauaaaguauuccacc

SEQ ID NO: 3511701 - RNA, 21 nt, Human
auauaauaaauguacauuaau

SEQ ID NO: 3511702 - RNA, 16 nt, Human
auauaauacacaaaau

SEQ ID NO: 3511703 - RNA, 17 nt, Human
auauaauacacaaaauc

SEQ ID NO: 3511704 - RNA, 20 nt, Human
auauaauauauuuguguauu

SEQ ID NO: 3511705 - RNA, 20 nt, Human
auauaauaucuaaaguuaua

SEQ ID NO: 3511706 - RNA, 14 nt, Human
auauaaucauuauu

SEQ ID NO: 3511707 - RNA, 11 nt, Human
auauaaugaac

SEQ ID NO: 3511708 - RNA, 19 nt, Human
auauaaugaauaaaucauu

SEQ ID NO: 3511709 - RNA, 19 nt, Human
auauaauggaagagaaauc

SEQ ID NO: 3511710 - RNA, 21 nt, Human
auauaauguuguuauuuaaag

SEQ ID NO: 3511711 - RNA, 22 nt, Human
auauaauguuguuauuuaaaga

SEQ ID NO: 3511712 - RNA, 11 nt, Human
auauaauuaug

SEQ ID NO: 3511713 - RNA, 18 nt, Human
auauaauucacucaagca

SEQ ID NO: 3511714 - RNA, 13 nt, Human
auauaauucugua

SEQ ID NO: 3511715 - RNA, 17 nt, Human
auauaauucuguacaua

SEQ ID NO: 3511716 - RNA, 19 nt, Human
auauaauucuguacauagc

SEQ ID NO: 3511717 - RNA, 21 nt, Human
auauaauuguuuuuuaucuuu

SEQ ID NO: 3511718 - RNA, 15 nt, Human
auauacaaaacuuua

SEQ ID NO: 3511719 - RNA, 16 nt, Human
auauacaaaacuuuau

SEQ ID NO: 3511720 - RNA, 12 nt, Human
auauacacacac

SEQ ID NO: 3511721 - RNA, 13 nt, Human
auauacacacaca

SEQ ID NO: 3511722 - RNA, 18 nt, Human
auauacacacacaaagag

SEQ ID NO: 3511723 - RNA, 19 nt, Human
auauacacaggauccuauu

SEQ ID NO: 3511724 - RNA, 14 nt, Human
auauacagaggaaa

SEQ ID NO: 3511725 - RNA, 17 nt, Human
auauacagaugaaaauu

SEQ ID NO: 3511726 - RNA, 18 nt, Human
auauacagaugaaaauuu

SEQ ID NO: 3511727 - RNA, 15 nt, Human
auauacauacuuaca

SEQ ID NO: 3511728 - RNA, 16 nt, Human
auauacaugaagaaua

SEQ ID NO: 3511729 - RNA, 19 nt, Human
auauacaugaagaauagaa

SEQ ID NO: 3511730 - RNA, 13 nt, Human
auauacaugugug

SEQ ID NO: 3511731 - RNA, 18 nt, Human
auauacauguguguauau

SEQ ID NO: 3511732 - RNA, 21 nt, Human
auauacauguuuauguaaaca

SEQ ID NO: 3511733 - RNA, 18 nt, Human
auauacauucuuuaucuu

SEQ ID NO: 3511734 - RNA, 17 nt, Human
auauaccaaagcacauu

SEQ ID NO: 3511735 - RNA, 14 nt, Human
auauaccaaauuaa

SEQ ID NO: 3511736 - RNA, 16 nt, Human
auauaccaaauuaaaa

SEQ ID NO: 3511737 - RNA, 17 nt, Human
auauacccccccaugca

SEQ ID NO: 3511738 - RNA, 17 nt, Human
auauaccuauaaugugu

SEQ ID NO: 3511739 - RNA, 19 nt, Human
auauaccuauaaugugugu

SEQ ID NO: 3511740 - RNA, 16 nt, Human
auauacgaacaaaaca

SEQ ID NO: 3511741 - RNA, 20 nt, Human
auauacgugaaaauuauuug

SEQ ID NO: 3511742 - RNA, 22 nt, Human
auauacuaagauguucacugug

SEQ ID NO: 3511743 - RNA, 12 nt, Human
auauacuguaaa

SEQ ID NO: 3511744 - RNA, 23 nt, Human
auauacuguaaagaaagagagaa

SEQ ID NO: 3511745 - RNA, 21 nt, Human
auauacuuguggacuaaaaga

SEQ ID NO: 3511746 - RNA, 22 nt, Human
auauacuugugguuuucaaauu

SEQ ID NO: 3511747 - RNA, 20 nt, Human
auauacuuguuguuuaaugu

SEQ ID NO: 3511748 - RNA, 14 nt, Human
auauacuuugugga

SEQ ID NO: 3511749 - RNA, 17 nt, Human
auauagaaguauaaaga

SEQ ID NO: 3511750 - RNA, 12 nt, Human
auauagaauugc

SEQ ID NO: 3511751 - RNA, 21 nt, Human
auauagaauugcaauuuuaac

SEQ ID NO: 3511752 - RNA, 13 nt, Human
auauagagauguu

SEQ ID NO: 3511753 - RNA, 14 nt, Human
auauagagauguuu

SEQ ID NO: 3511754 - RNA, 15 nt, Human
auauagagauguuuu

SEQ ID NO: 3511755 - RNA, 16 nt, Human
auauagagauguuuuu

SEQ ID NO: 3511756 - RNA, 19 nt, Human
auauagagucauuguaaug

SEQ ID NO: 3511757 - RNA, 22 nt, Human
auauagagucauuguaauguug

SEQ ID NO: 3511758 - RNA, 13 nt, Human
auauagauuagaa

SEQ ID NO: 3511759 - RNA, 16 nt, Human
auauagauuagaaaaa

SEQ ID NO: 3511760 - RNA, 17 nt, Human
auauagauuagaaaaau

SEQ ID NO: 3511761 - RNA, 15 nt, Human
auauagauuauaacu

SEQ ID NO: 3511762 - RNA, 19 nt, Human
auauagcaaaacuuuuaaa

SEQ ID NO: 3511763 - RNA, 19 nt, Human
auauagcagcaaaaauaua

SEQ ID NO: 3511764 - RNA, 20 nt, Human
auauagcagcaaaaauauaa

SEQ ID NO: 3511765 - RNA, 23 nt, Human
auauagccauugaucauaaacug

SEQ ID NO: 3511766 - RNA, 23 nt, Human
auauagcuaggugacauauacau

SEQ ID NO: 3511767 - RNA, 21 nt, Human
auauagcuauuuuuauggaau

SEQ ID NO: 3511768 - RNA, 13 nt, Human
auauagcuggcaa

SEQ ID NO: 3511769 - RNA, 20 nt, Human
auauagcuguacaaauauaa

SEQ ID NO: 3511770 - RNA, 18 nt, Human
auauagcuugaaacauag

SEQ ID NO: 3511771 - RNA, 19 nt, Human
auauaggucucuucuccca

SEQ ID NO: 3511772 - RNA, 21 nt, Human
auauaggucucuucucccaga

SEQ ID NO: 3511773 - RNA, 22 nt, Human
auauaggucucuucucccagaa

SEQ ID NO: 3511774 - RNA, 19 nt, Human
auauagguuuuguuugcua

SEQ ID NO: 3511775 - RNA, 13 nt, Human
auauaguguacag

SEQ ID NO: 3511776 - RNA, 17 nt, Human
auauaguuagcuaauaa

SEQ ID NO: 3511777 - RNA, 21 nt, Human
auauaguuccuaagaagcuuc

SEQ ID NO: 3511778 - RNA, 16 nt, Human
auauaguuuacuauuu

SEQ ID NO: 3511779 - RNA, 17 nt, Human
auauaguuuuuaccuuu

SEQ ID NO: 3511780 - RNA, 21 nt, Human
auauauaaaacggugcuguga

SEQ ID NO: 3511781 - RNA, 14 nt, Human
auauauaaaauaaa

SEQ ID NO: 3511782 - RNA, 21 nt, Human
auauauaaaccuaaaaaagau

SEQ ID NO: 3511783 - RNA, 15 nt, Human
auauauaaagaauau

SEQ ID NO: 3511784 - RNA, 15 nt, Human
auauauaaaguauag

SEQ ID NO: 3511785 - RNA, 13 nt, Human
auauauaaauaaa

SEQ ID NO: 3511786 - RNA, 17 nt, Human
auauauaaauaaauaua

SEQ ID NO: 3511787 - RNA, 18 nt, Human
auauauaaauauauuauu

SEQ ID NO: 3511788 - RNA, 14 nt, Human
auauauaaauguau

SEQ ID NO: 3511789 - RNA, 16 nt, Human
auauauaaauguauaa

SEQ ID NO: 3511790 - RNA, 14 nt, Human
auauauaacaaugc

SEQ ID NO: 3511791 - RNA, 19 nt, Human
auauauaacaaugcuguau

SEQ ID NO: 3511792 - RNA, 21 nt, Human
auauauacaguaacuuuaugu

SEQ ID NO: 3511793 - RNA, 14 nt, Human
auauauacauaaca

SEQ ID NO: 3511794 - RNA, 13 nt, Human
auauauacauaug

SEQ ID NO: 3511795 - RNA, 15 nt, Human
auauauaccccccca

SEQ ID NO: 3511796 - RNA, 19 nt, Human
auauauacccccccaugca

SEQ ID NO: 3511797 - RNA, 22 nt, Human
auauauacgaacaaaacacacg

SEQ ID NO: 3511798 - RNA, 15 nt, Human
auauauacuuguggu

SEQ ID NO: 3511799 - RNA, 19 nt, Human
auauauagacagcuuugac

SEQ ID NO: 3511800 - RNA, 14 nt, Human
auauauagugcuau

SEQ ID NO: 3511801 - RNA, 13 nt, Human
auauauauaaaua

SEQ ID NO: 3511802 - RNA, 15 nt, Human
auauauauaaauaua

SEQ ID NO: 3511803 - RNA, 16 nt, Human
auauauauaacauaua

SEQ ID NO: 3511804 - RNA, 15 nt, Human
auauauauaauauau

SEQ ID NO: 3511805 - RNA, 15 nt, Human
auauauauacacaca

SEQ ID NO: 3511806 - RNA, 13 nt, Human
auauauauacaua

SEQ ID NO: 3511807 - RNA, 15 nt, Human
auauauauauauaac

SEQ ID NO: 3511808 - RNA, 21 nt, Human
auauauaucugcuguccagac

SEQ ID NO: 3511809 - RNA, 14 nt, Human
auauauaugaauaa

SEQ ID NO: 3511810 - RNA, 19 nt, Human
auauauaugccuuuuuccu

SEQ ID NO: 3511811 - RNA, 16 nt, Human
auauauauguacaguu

SEQ ID NO: 3511812 - RNA, 20 nt, Human
auauauauguacaguuaucu

SEQ ID NO: 3511813 - RNA, 20 nt, Human
auauauauguguguguaugu

SEQ ID NO: 3511814 - RNA, 13 nt, Human
auauaucauauug

SEQ ID NO: 3511815 - RNA, 20 nt, Human
auauaucauauugguauuca

SEQ ID NO: 3511816 - RNA, 17 nt, Human
auauaucccugauaaau

SEQ ID NO: 3511817 - RNA, 12 nt, Human
auauauccucug

SEQ ID NO: 3511818 - RNA, 18 nt, Human
auauaucuaaauugaaua

SEQ ID NO: 3511819 - RNA, 24 nt, Human
auauaucuaccccagacuagaugu

SEQ ID NO: 3511820 - RNA, 19 nt, Human
auauaucuaucuauuugag

SEQ ID NO: 3511821 - RNA, 15 nt, Human
auauaucuaucuuau

SEQ ID NO: 3511822 - RNA, 15 nt, Human
auauaucugcuucag

SEQ ID NO: 3511823 - RNA, 19 nt, Human
auauaucuuauaaagugga

SEQ ID NO: 3511824 - RNA, 13 nt, Human
auauaugaaaacu

SEQ ID NO: 3511825 - RNA, 13 nt, Human
auauaugaggacu

SEQ ID NO: 3511826 - RNA, 15 nt, Human
auauaugcacuaugu

SEQ ID NO: 3511827 - RNA, 20 nt, Human
auauaugcauauauauaugu

SEQ ID NO: 3511828 - RNA, 17 nt, Human
aggagguggcagcccug

SEQ ID NO: 3511829 - RNA, 23 nt, Human
aggagguggcagcccuguaggga

SEQ ID NO: 3511830 - RNA, 19 nt, Human
aggaggugucucaggcugc

SEQ ID NO: 3511831 - RNA, 22 nt, Human
aggaggugucucaggcugccug

SEQ ID NO: 3511832 - RNA, 20 nt, Human
aggaggugugaggaggaggc

SEQ ID NO: 3511833 - RNA, 18 nt, Human
aggagguuuaggucaaga

SEQ ID NO: 3511834 - RNA, 13 nt, Human
aggaguaaaagag

SEQ ID NO: 3511835 - RNA, 20 nt, Human
aggaguaaucuguguacaaa

SEQ ID NO: 3511836 - RNA, 16 nt, Human
aggagucacugagacc

SEQ ID NO: 3511837 - RNA, 14 nt, Human
aggagucccaagga

SEQ ID NO: 3511838 - RNA, 16 nt, Human
aggagucccaaggaaa

SEQ ID NO: 3511839 - RNA, 21 nt, Human
aggagucccacuccaagccag

SEQ ID NO: 3511840 - RNA, 23 nt, Human
aggagucccacuccaagccagca

SEQ ID NO: 3511841 - RNA, 12 nt, Human
aggagucccugg

SEQ ID NO: 3511842 - RNA, 13 nt, Human
aggagucugaggu

SEQ ID NO: 3511843 - RNA, 17 nt, Human
aggagucugagguccug

SEQ ID NO: 3511844 - RNA, 21 nt, Human
aggagucugagguccugagca

SEQ ID NO: 3511845 - RNA, 12 nt, Human
aggagugagcac

SEQ ID NO: 3511846 - RNA, 14 nt, Human
aggagugagcacua

SEQ ID NO: 3511847 - RNA, 12 nt, Human
aggagugaggaa

SEQ ID NO: 3511848 - RNA, 17 nt, Human
aggaguggugauuugaa

SEQ ID NO: 3511849 - RNA, 19 nt, Human
aggagugguuuuucuuuuc

SEQ ID NO: 3511850 - RNA, 18 nt, Human
aggagugugugauuuuuu

SEQ ID NO: 3511851 - RNA, 17 nt, Human
aggaguuaagaguagca

SEQ ID NO: 3511852 - RNA, 17 nt, Human
aggaguucaaugaucua

SEQ ID NO: 3511853 - RNA, 19 nt, Human
aggaguuccacagauuguu

SEQ ID NO: 3511854 - RNA, 21 nt, Human
aggaguucgagaccagccugg

SEQ ID NO: 3511855 - RNA, 22 nt, Human
aggaguucgagaccagccuggc

SEQ ID NO: 3511856 - RNA, 16 nt, Human
aggaguucgaggcugc

SEQ ID NO: 3511857 - RNA, 19 nt, Human
aggaguuuaagaccagccu

SEQ ID NO: 3511858 - RNA, 20 nt, Human
aggaguuugaggcugcagcg

SEQ ID NO: 3511859 - RNA, 12 nt, Human
aggaguuuggcc

SEQ ID NO: 3511860 - RNA, 13 nt, Human
aggaguuuggcca

SEQ ID NO: 3511861 - RNA, 14 nt, Human
aggaguuuggccag

SEQ ID NO: 3511862 - RNA, 15 nt, Human
aggaguuuggccaga

SEQ ID NO: 3511863 - RNA, 17 nt, Human
aggaguuuggccagaag

SEQ ID NO: 3511864 - RNA, 19 nt, Human
aggauaaaaagccagggcu

SEQ ID NO: 3511865 - RNA, 20 nt, Human
aggauaaaaagccagggcug

SEQ ID NO: 3511866 - RNA, 22 nt, Human
aggauaaaaagccagggcugga

SEQ ID NO: 3511867 - RNA, 18 nt, Human
aggauaaacuuuuagaaa

SEQ ID NO: 3511868 - RNA, 18 nt, Human
aggauaacacaaguaaaa

SEQ ID NO: 3511869 - RNA, 13 nt, Human
aggauaagugaaa

SEQ ID NO: 3511870 - RNA, 16 nt, Human
aggauaccuucuuauu

SEQ ID NO: 3511871 - RNA, 18 nt, Human
aggauacuauauuuuagg

SEQ ID NO: 3511872 - RNA, 13 nt, Human
aggauacuuauuu

SEQ ID NO: 3511873 - RNA, 20 nt, Human
aggauagauaacucuuugga

SEQ ID NO: 3511874 - RNA, 18 nt, Human
aggauagaugcuggccca

SEQ ID NO: 3511875 - RNA, 22 nt, Human
aggauagaugcuggcccagggc

SEQ ID NO: 3511876 - RNA, 14 nt, Human
aggauagcauuuuu

SEQ ID NO: 3511877 - RNA, 23 nt, Human
aggauagcuaacuguaaaucaug

SEQ ID NO: 3511878 - RNA, 16 nt, Human
aggauaguauuuuuau

SEQ ID NO: 3511879 - RNA, 13 nt, Human
aggauauauuuua

SEQ ID NO: 3511880 - RNA, 20 nt, Human
aucaccgugggcucccugac

SEQ ID NO: 3511881 - RNA, 22 nt, Human
aucaccgugggcucccugacug

SEQ ID NO: 3511882 - RNA, 21 nt, Human
aucaccuagcugaauguuuuu

SEQ ID NO: 3511883 - RNA, 14 nt, Human
aucaccuauuucca

SEQ ID NO: 3511884 - RNA, 22 nt, Human
aucaccuauuuccauucaacaa

SEQ ID NO: 3511885 - RNA, 12 nt, Human
aucaccuccccu

SEQ ID NO: 3511886 - RNA, 23 nt, Human
aucaccugucuugccuuuuucau

SEQ ID NO: 3511887 - RNA, 20 nt, Human
aucacgaggucaggaguuca

SEQ ID NO: 3511888 - RNA, 15 nt, Human
aucacgauguaaauu

SEQ ID NO: 3511889 - RNA, 19 nt, Human
aucacgauguaaauuauua

SEQ ID NO: 3511890 - RNA, 12 nt, Human
aucacgcucccc

SEQ ID NO: 3511891 - RNA, 13 nt, Human
aucacgcuccccg

SEQ ID NO: 3511892 - RNA, 15 nt, Human
aucacgcuccccgcc

SEQ ID NO: 3511893 - RNA, 15 nt, Human
aucacggcucacugc

SEQ ID NO: 3511894 - RNA, 18 nt, Human
aucacggcucacugcagc

SEQ ID NO: 3511895 - RNA, 22 nt, Human
aucacuagcccuccuuuuucca

SEQ ID NO: 3511896 - RNA, 13 nt, Human
aucacucauuaau

SEQ ID NO: 3511897 - RNA, 21 nt, Human
aucacucucagugcuucuuac

SEQ ID NO: 3511898 - RNA, 13 nt, Human
aucacucuguccu

SEQ ID NO: 3511899 - RNA, 20 nt, Human
aucacucugugucugagugg

SEQ ID NO: 3511900 - RNA, 21 nt, Human
aucacucugugucugaguggc

SEQ ID NO: 3511901 - RNA, 19 nt, Human
aucacucuguucauuccuc

SEQ ID NO: 3511902 - RNA, 22 nt, Human
aucacucuguucauuccuccag

SEQ ID NO: 3511903 - RNA, 23 nt, Human
aucacucuguucauuccuccagg

SEQ ID NO: 3511904 - RNA, 17 nt, Human
aucacucuuguggaugu

SEQ ID NO: 3511905 - RNA, 14 nt, Human
aucacugaacuuug

SEQ ID NO: 3511906 - RNA, 15 nt, Human
aucacugaauuuaua

SEQ ID NO: 3511907 - RNA, 23 nt, Human
aucacugccagagauaaacuaau

SEQ ID NO: 3511908 - RNA, 16 nt, Human
aucacugcucacacug

SEQ ID NO: 3511909 - RNA, 13 nt, Human
aucacuggagccc

SEQ ID NO: 3511910 - RNA, 16 nt, Human
aucacuggagcccagg

SEQ ID NO: 3511911 - RNA, 15 nt, Human
aucacuguccuccac

SEQ ID NO: 3511912 - RNA, 14 nt, Human
aucacugucuuucc

SEQ ID NO: 3511913 - RNA, 18 nt, Human
aucacugucuuuccuaga

SEQ ID NO: 3511914 - RNA, 21 nt, Human
aucacugucuuuccuagaugg

SEQ ID NO: 3511915 - RNA, 15 nt, Human
aucacuguggcuguc

SEQ ID NO: 3511916 - RNA, 17 nt, Human
aucacuguggcugucug

SEQ ID NO: 3511917 - RNA, 20 nt, Human
aucacuguguauauuugauu

SEQ ID NO: 3511918 - RNA, 18 nt, Human
aucacuguuuagaacaca

SEQ ID NO: 3511919 - RNA, 14 nt, Human
aucacuguuuagau

SEQ ID NO: 3511920 - RNA, 22 nt, Human
aucacuguuuagauuugccaua

SEQ ID NO: 3511921 - RNA, 15 nt, Human
aucacuguuuuuaga

SEQ ID NO: 3511922 - RNA, 13 nt, Human
aucacuuaaaaca

SEQ ID NO: 3511923 - RNA, 15 nt, Human
aucacuuaaaacacg

SEQ ID NO: 3511924 - RNA, 14 nt, Human
aucacuuaaacuug

SEQ ID NO: 3511925 - RNA, 15 nt, Human
aucacuuaacauucc

SEQ ID NO: 3511926 - RNA, 23 nt, Human
aucacuuaacauuccuaaaaugc

SEQ ID NO: 3511927 - RNA, 23 nt, Human
aucacuuaacggaccaaagcaag

SEQ ID NO: 3511928 - RNA, 23 nt, Human
aucacuugaacccgggaggcaga

SEQ ID NO: 3511929 - RNA, 14 nt, Human
aucacuuguacaaa

SEQ ID NO: 3511930 - RNA, 16 nt, Human
aucacuuguacaaaau

SEQ ID NO: 3511931 - RNA, 13 nt, Human
aucacuuguuguu

SEQ ID NO: 3511932 - RNA, 12 nt, Human
aucacuuucaua

SEQ ID NO: 3511933 - RNA, 21 nt, Human
aucacuuugucuaacucagaa

SEQ ID NO: 3511934 - RNA, 13 nt, Human
aucacuuuucagu

SEQ ID NO: 3511935 - RNA, 14 nt, Human
aucacuuuucagug

SEQ ID NO: 3511936 - RNA, 18 nt, Human
aucacuuuuugaacuaag

SEQ ID NO: 3511937 - RNA, 13 nt, Human
aucagaaaaggga

SEQ ID NO: 3511938 - RNA, 15 nt, Human
aucagaaagggaggg

SEQ ID NO: 3511939 - RNA, 20 nt, Human
aucagaaagggagggcucug

SEQ ID NO: 3511940 - RNA, 16 nt, Human
aucagaaauaauaaaa

SEQ ID NO: 3511941 - RNA, 15 nt, Human
aucagaaauacagau

SEQ ID NO: 3511942 - RNA, 19 nt, Human
aucagaaauacagauuuug

SEQ ID NO: 3511943 - RNA, 23 nt, Human
aucagaaaugucuggagaauaau

SEQ ID NO: 3511944 - RNA, 13 nt, Human
aucagaacagcag

SEQ ID NO: 3511945 - RNA, 12 nt, Human
aucagaacagga

SEQ ID NO: 3511946 - RNA, 22 nt, Human
aucagaacucaaauggggccag

SEQ ID NO: 3511947 - RNA, 14 nt, Human
aucagaagauaacu

SEQ ID NO: 3511948 - RNA, 18 nt, Human
aucagaagccuauuguaa

SEQ ID NO: 3511949 - RNA, 19 nt, Human
aucagaagucaucuugcua

SEQ ID NO: 3511950 - RNA, 19 nt, Human
aucagaauaucacagaaaa

SEQ ID NO: 3511951 - RNA, 18 nt, Human
aucagaauggaagagaga

SEQ ID NO: 3511952 - RNA, 18 nt, Human
aucagaauugaaacacuu

SEQ ID NO: 3511953 - RNA, 19 nt, Human
aucagacacucuggcuggu

SEQ ID NO: 3511954 - RNA, 16 nt, Human
aucagaccauaauguu

SEQ ID NO: 3511955 - RNA, 20 nt, Human
aucagacuaagccagcaccg

SEQ ID NO: 3511956 - RNA, 22 nt, Human
aucagagacaaaauauuuccca

SEQ ID NO: 3511957 - RNA, 13 nt, Human
aucagagaccagg

SEQ ID NO: 3511958 - RNA, 19 nt, Human
aucagagaccaggcccugg

SEQ ID NO: 3511959 - RNA, 14 nt, Human
aucagagcaggacc

SEQ ID NO: 3511960 - RNA, 23 nt, Human
aucagagccuuuccucaaaacug

SEQ ID NO: 3511961 - RNA, 20 nt, Human
aucagagcuccucuguccug

SEQ ID NO: 3511962 - RNA, 14 nt, Human
aucagaggacaccu

SEQ ID NO: 3511963 - RNA, 17 nt, Human
aucagaggccuauaaug

SEQ ID NO: 3511964 - RNA, 20 nt, Human
aucagaguagaaauaaaagu

SEQ ID NO: 3511965 - RNA, 21 nt, Human
aucagaguagaaauaaaagug

SEQ ID NO: 3511966 - RNA, 19 nt, Human
aucagauaagacauaucuc

SEQ ID NO: 3511967 - RNA, 12 nt, Human
aucagauacauc

SEQ ID NO: 3511968 - RNA, 16 nt, Human
aucagauacaucacug

SEQ ID NO: 3511969 - RNA, 17 nt, Human
aucagauacaucacugc

SEQ ID NO: 3511970 - RNA, 15 nt, Human
aucagauagcaucuu

SEQ ID NO: 3511971 - RNA, 22 nt, Human
aucagaucauuucaaaacucau

SEQ ID NO: 3511972 - RNA, 12 nt, Human
aucagaugacaa

SEQ ID NO: 3511973 - RNA, 15 nt, Human
aucuaucuauuugag

SEQ ID NO: 3511974 - RNA, 19 nt, Human
aucuaucugcuuaugcagu

SEQ ID NO: 3511975 - RNA, 16 nt, Human
aucuaucuggugauuu

SEQ ID NO: 3511976 - RNA, 20 nt, Human
aucuaucuggugauuucuag

SEQ ID NO: 3511977 - RNA, 13 nt, Human
aucuaucuuccaa

SEQ ID NO: 3511978 - RNA, 18 nt, Human
aucuaugaaguauauaau

SEQ ID NO: 3511979 - RNA, 13 nt, Human
aucuaugaggaaa

SEQ ID NO: 3511980 - RNA, 15 nt, Human
aucuaugauauaacc

SEQ ID NO: 3511981 - RNA, 12 nt, Human
aucuauuaauau

SEQ ID NO: 3511982 - RNA, 21 nt, Human
aucuauucagacaagcaacag

SEQ ID NO: 3511983 - RNA, 23 nt, Human
aucuauugcuggcaaagacagaa

SEQ ID NO: 3511984 - RNA, 14 nt, Human
aucuauuguaagau

SEQ ID NO: 3511985 - RNA, 20 nt, Human
aucuauuguaagauaaaaaa

SEQ ID NO: 3511986 - RNA, 16 nt, Human
aucuauuuaucuucau

SEQ ID NO: 3511987 - RNA, 13 nt, Human
aucuauuuauuaa

SEQ ID NO: 3511988 - RNA, 16 nt, Human
aucuauuuauuaaguu

SEQ ID NO: 3511989 - RNA, 17 nt, Human
aucuauuucacuuauuu

SEQ ID NO: 3511990 - RNA, 16 nt, Human
aucuauuugugugugu

SEQ ID NO: 3511991 - RNA, 13 nt, Human
aucuauuuucuau

SEQ ID NO: 3511992 - RNA, 22 nt, Human
aucuauuuucuauguacuagua

SEQ ID NO: 3511993 - RNA, 12 nt, Human
aucuauuuugau

SEQ ID NO: 3511994 - RNA, 20 nt, Human
aucuauuuugaugcagcauu

SEQ ID NO: 3511995 - RNA, 22 nt, Human
aucuauuuuggauuguauauug

SEQ ID NO: 3511996 - RNA, 12 nt, Human
aucucaaaauua

SEQ ID NO: 3511997 - RNA, 21 nt, Human
aucucaaauaacuaaaaggua

SEQ ID NO: 3511998 - RNA, 23 nt, Human
aucucaaauaggcuauuaaaaaa

SEQ ID NO: 3511999 - RNA, 14 nt, Human
aucucaaauuucua

SEQ ID NO: 3512000 - RNA, 19 nt, Human
aucucaacaggccucaggg

SEQ ID NO: 3512001 - RNA, 14 nt, Human
aucucaacaugucu

SEQ ID NO: 3512002 - RNA, 23 nt, Human
aucucaagaugggggcagggcug

SEQ ID NO: 3512003 - RNA, 16 nt, Human
aucucacacaugagca

SEQ ID NO: 3512004 - RNA, 20 nt, Human
aucucacacucaugcauugu

SEQ ID NO: 3512005 - RNA, 22 nt, Human
aucucacacucaugcauugucc

SEQ ID NO: 3512006 - RNA, 20 nt, Human
aucucacagcacacucagca

SEQ ID NO: 3512007 - RNA, 15 nt, Human
aucucacagcuaugc

SEQ ID NO: 3512008 - RNA, 18 nt, Human
aucucaccaggcagccuc

SEQ ID NO: 3512009 - RNA, 23 nt, Human
aucucaccccaucccacacccug

SEQ ID NO: 3512010 - RNA, 14 nt, Human
aucucacucugccc

SEQ ID NO: 3512011 - RNA, 16 nt, Human
aucucacucugccccc

SEQ ID NO: 3512012 - RNA, 22 nt, Human
aucucacuugugccaacacuca

SEQ ID NO: 3512013 - RNA, 17 nt, Human
aucucagaaagugccug

SEQ ID NO: 3512014 - RNA, 15 nt, Human
aucucagauauuugc

SEQ ID NO: 3512015 - RNA, 16 nt, Human
aucucagauauuugca

SEQ ID NO: 3512016 - RNA, 23 nt, Human
aucucagauguuaaaauaaaugg

SEQ ID NO: 3512017 - RNA, 15 nt, Human
aucucagcucacuac

SEQ ID NO: 3512018 - RNA, 14 nt, Human
aucucagcucacug

SEQ ID NO: 3512019 - RNA, 12 nt, Human
aucucagcucau

SEQ ID NO: 3512020 - RNA, 22 nt, Human
aucucagcuuugagaagccuuc

SEQ ID NO: 3512021 - RNA, 14 nt, Human
aucucagggccugg

SEQ ID NO: 3512022 - RNA, 15 nt, Human
aucucaggggccaga

SEQ ID NO: 3512023 - RNA, 16 nt, Human
aucucaggggccagag

SEQ ID NO: 3512024 - RNA, 23 nt, Human
aucucaggggccagaggaacugu

SEQ ID NO: 3512025 - RNA, 21 nt, Human
aucucagguuaagugugagua

SEQ ID NO: 3512026 - RNA, 18 nt, Human
aucucaguaugaauuauu

SEQ ID NO: 3512027 - RNA, 15 nt, Human
aucucagucaugcau

SEQ ID NO: 3512028 - RNA, 20 nt, Human
aucucagucaugcauaaaua

SEQ ID NO: 3512029 - RNA, 21 nt, Human
aucucagucaugcauaaauau

SEQ ID NO: 3512030 - RNA, 17 nt, Human
aucucauaauuuauaca

SEQ ID NO: 3512031 - RNA, 18 nt, Human
aucucauaauuuauacag

SEQ ID NO: 3512032 - RNA, 21 nt, Human
aucucaugccccuggcuggga

SEQ ID NO: 3512033 - RNA, 17 nt, Human
aucucauuuaagggaaa

SEQ ID NO: 3512034 - RNA, 14 nt, Human
aucucauuuccaag

SEQ ID NO: 3512035 - RNA, 13 nt, Human
aucucauuugguu

SEQ ID NO: 3512036 - RNA, 23 nt, Human
aucucauuuuuccguaaaaauga

SEQ ID NO: 3512037 - RNA, 14 nt, Human
aucuccaaaauaaa

SEQ ID NO: 3512038 - RNA, 17 nt, Human
aucuccaaaauaaaacu

SEQ ID NO: 3512039 - RNA, 13 nt, Human
aucuccaaagcuu

SEQ ID NO: 3512040 - RNA, 22 nt, Human
aucuccaaagcuuuccuggaga

SEQ ID NO: 3512041 - RNA, 13 nt, Human
aucuccaagaaug

SEQ ID NO: 3512042 - RNA, 15 nt, Human
aucuccaagaaugcu

SEQ ID NO: 3512043 - RNA, 18 nt, Human
aucuccaagaccagagau

SEQ ID NO: 3512044 - RNA, 12 nt, Human
aucuccaaggac

SEQ ID NO: 3512045 - RNA, 19 nt, Human
aucuccacaaccucuuccc

SEQ ID NO: 3512046 - RNA, 19 nt, Human
aucuccacagucaaagaag

SEQ ID NO: 3512047 - RNA, 22 nt, Human
aucuccaccagucauuuuucag

SEQ ID NO: 3512048 - RNA, 19 nt, Human
aucuccacccccagcugcu

SEQ ID NO: 3512049 - RNA, 13 nt, Human
aucuccaccugcu

SEQ ID NO: 3512050 - RNA, 19 nt, Human
aucuccaccugcucccagg

SEQ ID NO: 3512051 - RNA, 21 nt, Human
aucuccagggaguccccuccc

SEQ ID NO: 3512052 - RNA, 15 nt, Human
aucuccaguauucuu

SEQ ID NO: 3512053 - RNA, 18 nt, Human
aucuccaguauucuuguc

SEQ ID NO: 3512054 - RNA, 13 nt, Human
aucucccacaugc

SEQ ID NO: 3512055 - RNA, 18 nt, Human
aucucccauuuuggaauu

SEQ ID NO: 3512056 - RNA, 13 nt, Human
aucuccccacucu

SEQ ID NO: 3512057 - RNA, 14 nt, Human
aucucccccagccc

SEQ ID NO: 3512058 - RNA, 16 nt, Human
aucucccccagcccca

SEQ ID NO: 3512059 - RNA, 17 nt, Human
aucucccccagccccau

SEQ ID NO: 3512060 - RNA, 20 nt, Human
aucuccccucagcucggcuc

SEQ ID NO: 3512061 - RNA, 21 nt, Human
aucucccucacugaaaccagg

SEQ ID NO: 3512062 - RNA, 23 nt, Human
aucucccucgaacccacacugca

SEQ ID NO: 3512063 - RNA, 15 nt, Human
aucucccugccgccu

SEQ ID NO: 3512064 - RNA, 13 nt, Human
aucucccugccuc

SEQ ID NO: 3512065 - RNA, 14 nt, Human
aucucccugccugg

SEQ ID NO: 3512066 - RNA, 14 nt, Human
aucucccugcuuug

SEQ ID NO: 3512067 - RNA, 15 nt, Human
aucucccuggugcuu

SEQ ID NO: 3512068 - RNA, 21 nt, Human
aucucccuuuuccaugacugu

SEQ ID NO: 3512069 - RNA, 16 nt, Human
aucuccggcucccagc

SEQ ID NO: 3512070 - RNA, 18 nt, Human
aucuccggcucccagccu

SEQ ID NO: 3512071 - RNA, 19 nt, Human
aucuccggcucccagccuc

SEQ ID NO: 3512072 - RNA, 21 nt, Human
aucuccggcucccagccucag

SEQ ID NO: 3512073 - RNA, 15 nt, Human
aucuccguggcuuug

SEQ ID NO: 3512074 - RNA, 21 nt, Human
aucuccuauaaucugucaaaa

SEQ ID NO: 3512075 - RNA, 14 nt, Human
aucuccuauuuuuu

SEQ ID NO: 3512076 - RNA, 15 nt, Human
aucuccugacagaag

SEQ ID NO: 3512077 - RNA, 21 nt, Human
aucuccuguccaucagccagg

SEQ ID NO: 3512078 - RNA, 19 nt, Human
aucuccugugcauggguga

SEQ ID NO: 3512079 - RNA, 15 nt, Human
aucucggcucacugc

SEQ ID NO: 3512080 - RNA, 15 nt, Human
aucucguuucaaaaa

SEQ ID NO: 3512081 - RNA, 23 nt, Human
aucucguuuuucuucuuaagacu

SEQ ID NO: 3512082 - RNA, 15 nt, Human
aucucuaaagagcau

SEQ ID NO: 3512083 - RNA, 20 nt, Human
aucucuaccuucuccccagc

SEQ ID NO: 3512084 - RNA, 22 nt, Human
aucucuaccuucuccccagcuc

SEQ ID NO: 3512085 - RNA, 21 nt, Human
aucucuagaauuuuaagugcu

SEQ ID NO: 3512086 - RNA, 18 nt, Human
aucucuauuuaauauuua

SEQ ID NO: 3512087 - RNA, 17 nt, Human
aucucucaaaucuguua

SEQ ID NO: 3512088 - RNA, 19 nt, Human
aucucucaaaucuguuauc

SEQ ID NO: 3512089 - RNA, 20 nt, Human
aggcaugagggaucacaggg

SEQ ID NO: 3512090 - RNA, 20 nt, Human
aggcaugaguuacugugcau

SEQ ID NO: 3512091 - RNA, 14 nt, Human
aggcaugccucuga

SEQ ID NO: 3512092 - RNA, 17 nt, Human
aggcaugccucugauau

SEQ ID NO: 3512093 - RNA, 18 nt, Human
aggcaugccucugauaug

SEQ ID NO: 3512094 - RNA, 14 nt, Human
aggcaugccugugu

SEQ ID NO: 3512095 - RNA, 16 nt, Human
aggcaugccuguguga

SEQ ID NO: 3512096 - RNA, 16 nt, Human
aggcauggcccugggg

SEQ ID NO: 3512097 - RNA, 15 nt, Human
aggcaugggccacca

SEQ ID NO: 3512098 - RNA, 19 nt, Human
aggcauguaggacccugca

SEQ ID NO: 3512099 - RNA, 14 nt, Human
aggcauguccugga

SEQ ID NO: 3512100 - RNA, 17 nt, Human
aggcaugugaugagagg

SEQ ID NO: 3512101 - RNA, 23 nt, Human
aggcaugugaugagaggaaauca

SEQ ID NO: 3512102 - RNA, 18 nt, Human
aggcaugugccacccacc

SEQ ID NO: 3512103 - RNA, 17 nt, Human
aggcaugugugaaacau

SEQ ID NO: 3512104 - RNA, 14 nt, Human
aggcauuaaauuuu

SEQ ID NO: 3512105 - RNA, 19 nt, Human
aggcauuaacacaaaggag

SEQ ID NO: 3512106 - RNA, 21 nt, Human
aggcauuaauguuucuaucug

SEQ ID NO: 3512107 - RNA, 19 nt, Human
aggcauuccccaggaggcc

SEQ ID NO: 3512108 - RNA, 20 nt, Human
aggcauuccccaggaggcca

SEQ ID NO: 3512109 - RNA, 23 nt, Human
aggcauuccccaggaggccagcc

SEQ ID NO: 3512110 - RNA, 13 nt, Human
aggcauucucuga

SEQ ID NO: 3512111 - RNA, 16 nt, Human
aggcauucuggaccuc

SEQ ID NO: 3512112 - RNA, 20 nt, Human
aggcauucuggaccucuggg

SEQ ID NO: 3512113 - RNA, 18 nt, Human
aggcauugcacagggaga

SEQ ID NO: 3512114 - RNA, 18 nt, Human
aggcauugccaagggcuu

SEQ ID NO: 3512115 - RNA, 13 nt, Human
aggcauuggauau

SEQ ID NO: 3512116 - RNA, 14 nt, Human
aggcauuggauauu

SEQ ID NO: 3512117 - RNA, 18 nt, Human
aggcauuucccacccuga

SEQ ID NO: 3512118 - RNA, 19 nt, Human
aucaucuaauucucugugg

SEQ ID NO: 3512119 - RNA, 18 nt, Human
aucaucuauaaagaagaa

SEQ ID NO: 3512120 - RNA, 15 nt, Human
aucaucuauuuugau

SEQ ID NO: 3512121 - RNA, 16 nt, Human
aucaucuauuuugaug

SEQ ID NO: 3512122 - RNA, 14 nt, Human
aucaucucagcuca

SEQ ID NO: 3512123 - RNA, 18 nt, Human
aucaucugugugaaaaug

SEQ ID NO: 3512124 - RNA, 14 nt, Human
aucaucuuauucag

SEQ ID NO: 3512125 - RNA, 15 nt, Human
aucaucuugaacauu

SEQ ID NO: 3512126 - RNA, 18 nt, Human
aucaucuuggaacugcau

SEQ ID NO: 3512127 - RNA, 15 nt, Human
aucaugaaauaugca

SEQ ID NO: 3512128 - RNA, 16 nt, Human
aucaugaaauaugcau

SEQ ID NO: 3512129 - RNA, 18 nt, Human
aucaugaaauaugcaucu

SEQ ID NO: 3512130 - RNA, 16 nt, Human
aucaugaaauuacuua

SEQ ID NO: 3512131 - RNA, 13 nt, Human
aucaugaagccug

SEQ ID NO: 3512132 - RNA, 15 nt, Human
aucaugaauaacuga

SEQ ID NO: 3512133 - RNA, 18 nt, Human
aucaugaaugcuuuuagu

SEQ ID NO: 3512134 - RNA, 21 nt, Human
aucaugaauuaguuuuauaug

SEQ ID NO: 3512135 - RNA, 13 nt, Human
aucaugaauuuua

SEQ ID NO: 3512136 - RNA, 14 nt, Human
aucaugaauuuuaa

SEQ ID NO: 3512137 - RNA, 17 nt, Human
aucaugaauuuuaaagu

SEQ ID NO: 3512138 - RNA, 18 nt, Human
aucaugaauuuuaaagua

SEQ ID NO: 3512139 - RNA, 20 nt, Human
aucaugacaaagacugagua

SEQ ID NO: 3512140 - RNA, 20 nt, Human
aucaugacacucguauaagc

SEQ ID NO: 3512141 - RNA, 15 nt, Human
aucaugagauugaug

SEQ ID NO: 3512142 - RNA, 17 nt, Human
aucaugagauugaugca

SEQ ID NO: 3512143 - RNA, 16 nt, Human
aucaugagccugcugg

SEQ ID NO: 3512144 - RNA, 17 nt, Human
aucaugagccugcugga

SEQ ID NO: 3512145 - RNA, 21 nt, Human
aucaugcauguccuguaaagg

SEQ ID NO: 3512146 - RNA, 12 nt, Human
aucaugcauugu

SEQ ID NO: 3512147 - RNA, 13 nt, Human
aucaugcauuguu

SEQ ID NO: 3512148 - RNA, 21 nt, Human
aucaugcauuguugagguggu

SEQ ID NO: 3512149 - RNA, 19 nt, Human
aucaugcccggucccaccc

SEQ ID NO: 3512150 - RNA, 23 nt, Human
aucaugcccggucccaccccucc

SEQ ID NO: 3512151 - RNA, 14 nt, Human
aucaugccucugag

SEQ ID NO: 3512152 - RNA, 14 nt, Human
aucaugcuuuaaag

SEQ ID NO: 3512153 - RNA, 22 nt, Human
aucaugcuuuaaaguguaauaa

SEQ ID NO: 3512154 - RNA, 17 nt, Human
aucauggccagcuggag

SEQ ID NO: 3512155 - RNA, 19 nt, Human
aucauggcuaagcuuaaaa

SEQ ID NO: 3512156 - RNA, 15 nt, Human
aucauggcuaucugu

SEQ ID NO: 3512157 - RNA, 24 nt, Human
aucauggggggagcacccugaggg

SEQ ID NO: 3512158 - RNA, 14 nt, Human
aucaugguguaaua

SEQ ID NO: 3512159 - RNA, 19 nt, Human
aucaugguguaauaagaca

SEQ ID NO: 3512160 - RNA, 20 nt, Human
aucaugguguaauaagacau

SEQ ID NO: 3512161 - RNA, 21 nt, Human
aucaugguguaauaagacaua

SEQ ID NO: 3512162 - RNA, 11 nt, Human
aucauguaaag

SEQ ID NO: 3512163 - RNA, 17 nt, Human
aucauguaaagaaaugu

SEQ ID NO: 3512164 - RNA, 14 nt, Human
aucauguacauuuc

SEQ ID NO: 3512165 - RNA, 18 nt, Human
aucauguaguaucaaaua

SEQ ID NO: 3512166 - RNA, 19 nt, Human
aucauguaguaucaaauau

SEQ ID NO: 3512167 - RNA, 12 nt, Human
aucaugucccca

SEQ ID NO: 3512168 - RNA, 21 nt, Human
aucauguguaaucaauaaacg

SEQ ID NO: 3512169 - RNA, 18 nt, Human
aucauguuaauccuagcu

SEQ ID NO: 3512170 - RNA, 19 nt, Human
aucauguuaguaauaccuc

SEQ ID NO: 3512171 - RNA, 15 nt, Human
aucauguuaugauaa

SEQ ID NO: 3512172 - RNA, 18 nt, Human
aucauguuaugauaaaaa

SEQ ID NO: 3512173 - RNA, 22 nt, Human
aucauguuaugauaaaaaauuu

SEQ ID NO: 3512174 - RNA, 14 nt, Human
aucauguuugcucu

SEQ ID NO: 3512175 - RNA, 15 nt, Human
aucauguuugcucuc

SEQ ID NO: 3512176 - RNA, 15 nt, Human
aucauuaaaguucua

SEQ ID NO: 3512177 - RNA, 17 nt, Human
aucauuaaauuuuuccu

SEQ ID NO: 3512178 - RNA, 23 nt, Human
aucauuaaauuuuuccuuagcau

SEQ ID NO: 3512179 - RNA, 17 nt, Human
aucauuacccuucccug

SEQ ID NO: 3512180 - RNA, 20 nt, Human
aucauuacccuucccugcac

SEQ ID NO: 3512181 - RNA, 19 nt, Human
aucauuagggggaacucua

SEQ ID NO: 3512182 - RNA, 23 nt, Human
aucauuauaaacgugaugaucag

SEQ ID NO: 3512183 - RNA, 20 nt, Human
aucauuauaacugaaggaga

SEQ ID NO: 3512184 - RNA, 22 nt, Human
aucauuauaacugaaggagaag

SEQ ID NO: 3512185 - RNA, 20 nt, Human
aucauuaucagccugugcca

SEQ ID NO: 3512186 - RNA, 14 nt, Human
aucauuauuuaugu

SEQ ID NO: 3512187 - RNA, 13 nt, Human
aucauucagaaau

SEQ ID NO: 3512188 - RNA, 16 nt, Human
aucauucagaaauguu

SEQ ID NO: 3512189 - RNA, 14 nt, Human
aucauucauuuucu

SEQ ID NO: 3512190 - RNA, 13 nt, Human
aucauucuaaaga

SEQ ID NO: 3512191 - RNA, 15 nt, Human
aucauucuaaagaua

SEQ ID NO: 3512192 - RNA, 17 nt, Human
aucauucuaaagauaga

SEQ ID NO: 3512193 - RNA, 24 nt, Human
aucauucucugucucauccaucau

SEQ ID NO: 3512194 - RNA, 14 nt, Human
aucauucuuacuaa

SEQ ID NO: 3512195 - RNA, 19 nt, Human
aucauucuuauuucaugaa

SEQ ID NO: 3512196 - RNA, 15 nt, Human
aucauugaaaucuuu

SEQ ID NO: 3512197 - RNA, 20 nt, Human
aucauugaaaucuuuuugcu

SEQ ID NO: 3512198 - RNA, 22 nt, Human
aucauugcacucuagccugggc

SEQ ID NO: 3512199 - RNA, 13 nt, Human
aucauugccuggu

SEQ ID NO: 3512200 - RNA, 16 nt, Human
aucauugcugucugca

SEQ ID NO: 3512201 - RNA, 19 nt, Human
aucauuggaacaacugaua

SEQ ID NO: 3512202 - RNA, 13 nt, Human
aucauuguaugug

SEQ ID NO: 3512203 - RNA, 19 nt, Human
aucauugugaaauuauuca

SEQ ID NO: 3512204 - RNA, 14 nt, Human
aucauuguugccuc

SEQ ID NO: 3512205 - RNA, 17 nt, Human
aucauuuaauaauauac

SEQ ID NO: 3512206 - RNA, 18 nt, Human
aucauuuaauaauauacu

SEQ ID NO: 3512207 - RNA, 21 nt, Human
aucauuuaauaauauacuugu

SEQ ID NO: 3512208 - RNA, 19 nt, Human
aucauuuacaagacaacau

SEQ ID NO: 3512209 - RNA, 13 nt, Human
aucauuucaagaa

SEQ ID NO: 3512210 - RNA, 16 nt, Human
aucauuucaggaguua

SEQ ID NO: 3512211 - RNA, 15 nt, Human
aucauuucuauuucu

SEQ ID NO: 3512212 - RNA, 15 nt, Human
aucauuucucacugu

SEQ ID NO: 3512213 - RNA, 20 nt, Human
aucauuucugcaucagcugc

SEQ ID NO: 3512214 - RNA, 14 nt, Human
aucauuugaguuca

SEQ ID NO: 3512215 - RNA, 12 nt, Human
aucauuuguuca

SEQ ID NO: 3512216 - RNA, 19 nt, Human
aucauuuguucaaagcugu

SEQ ID NO: 3512217 - RNA, 19 nt, Human
aucauuuguucugggagua

SEQ ID NO: 3512218 - RNA, 20 nt, Human
aucauuuuaccuuugacaaa

SEQ ID NO: 3512219 - RNA, 23 nt, Human
aucauuuuagaagacucuaccag

SEQ ID NO: 3512220 - RNA, 17 nt, Human
aucauuuuauaugucaa

SEQ ID NO: 3512221 - RNA, 14 nt, Human
aucauuuuauguca

SEQ ID NO: 3512222 - RNA, 11 nt, Human
aucauuuucau

SEQ ID NO: 3512223 - RNA, 15 nt, Human
aucauuuugaaauug

SEQ ID NO: 3512224 - RNA, 15 nt, Human
aucauuuugcauuca

SEQ ID NO: 3512225 - RNA, 14 nt, Human
aucauuuuguuuuc

SEQ ID NO: 3512226 - RNA, 23 nt, Human
aucauuuuuccuucccuucucca

SEQ ID NO: 3512227 - RNA, 15 nt, Human
aucauuuuuguacag

SEQ ID NO: 3512228 - RNA, 20 nt, Human
aucauuuuuguacaguuugc

SEQ ID NO: 3512229 - RNA, 16 nt, Human
aucauuuuuuauauau

SEQ ID NO: 3512230 - RNA, 18 nt, Human
aucauuuuuuauauauau

SEQ ID NO: 3512231 - RNA, 15 nt, Human
aucauuuuuuccugu

SEQ ID NO: 3512232 - RNA, 21 nt, Human
aucauuuuuuccuguuuggga

SEQ ID NO: 3512233 - RNA, 18 nt, Human
auccaaaagaagccccca

SEQ ID NO: 3512234 - RNA, 13 nt, Human
auccaaacaauuu

SEQ ID NO: 3512235 - RNA, 20 nt, Human
auccaaacuuggauuuuuga

SEQ ID NO: 3512236 - RNA, 15 nt, Human
auccaaccauuuuca

SEQ ID NO: 3512237 - RNA, 18 nt, Human
auccaacuaaugccuuac

SEQ ID NO: 3512238 - RNA, 20 nt, Human
auccaacuaaugccuuacuc

SEQ ID NO: 3512239 - RNA, 22 nt, Human
auccaagacagaauaaugaaug

SEQ ID NO: 3512240 - RNA, 14 nt, Human
auccaagccuccac

SEQ ID NO: 3512241 - RNA, 16 nt, Human
auccaagccuccacag

SEQ ID NO: 3512242 - RNA, 17 nt, Human
auccaagccuccacagc

SEQ ID NO: 3512243 - RNA, 21 nt, Human
auccaagccuccacagcgagg

SEQ ID NO: 3512244 - RNA, 15 nt, Human
auccaagcucccugc

SEQ ID NO: 3512245 - RNA, 19 nt, Human
auccaagcucccugcccca

SEQ ID NO: 3512246 - RNA, 21 nt, Human
auccaagcuggucccacucag

SEQ ID NO: 3512247 - RNA, 19 nt, Human
auccaaggagaaacagaga

SEQ ID NO: 3512248 - RNA, 22 nt, Human
auccaaggagaaacagagacag

SEQ ID NO: 3512249 - RNA, 21 nt, Human
auccaaggugggguggaagcu

SEQ ID NO: 3512250 - RNA, 15 nt, Human
auccaaguuaaaugu

SEQ ID NO: 3512251 - RNA, 16 nt, Human
auccaauaggaaugcu

SEQ ID NO: 3512252 - RNA, 22 nt, Human
auccaauauuuucuuuaaugcu

SEQ ID NO: 3512253 - RNA, 16 nt, Human
auccaaucagagacca

SEQ ID NO: 3512254 - RNA, 21 nt, Human
auccaauguuagagacuuuuu

SEQ ID NO: 3512255 - RNA, 20 nt, Human
auccaauuagcuuauguuaa

SEQ ID NO: 3512256 - RNA, 23 nt, Human
auccacacacagaggaagagcag

SEQ ID NO: 3512257 - RNA, 18 nt, Human
auccacaccaaagggaga

SEQ ID NO: 3512258 - RNA, 21 nt, Human
auccacagagagucccacugc

SEQ ID NO: 3512259 - RNA, 19 nt, Human
aucuggccuggccagugcc

SEQ ID NO: 3512260 - RNA, 21 nt, Human
aucuggccuggccagugcccu

SEQ ID NO: 3512261 - RNA, 17 nt, Human
aucuggccuggccuggc

SEQ ID NO: 3512262 - RNA, 11 nt, Human
aucuggccuua

SEQ ID NO: 3512263 - RNA, 18 nt, Human
aucucacauauacaagua

SEQ ID NO: 3512264 - RNA, 15 nt, Human
aucucaccaggcagc

SEQ ID NO: 3512265 - RNA, 22 nt, Human
aucucaccaggcagccucuggg

SEQ ID NO: 3512266 - RNA, 14 nt, Human
aucucaccccaucc

SEQ ID NO: 3512267 - RNA, 16 nt, Human
aucucaccuccugcug

SEQ ID NO: 3512268 - RNA, 21 nt, Human
aucucaccuccugcugggcag

SEQ ID NO: 3512269 - RNA, 13 nt, Human
aucucacuugugc

SEQ ID NO: 3512270 - RNA, 15 nt, Human
aucucacuuuucucc

SEQ ID NO: 3512271 - RNA, 19 nt, Human
aucucacuuuucuccauga

SEQ ID NO: 3512272 - RNA, 12 nt, Human
aucucagaaagu

SEQ ID NO: 3512273 - RNA, 14 nt, Human
aucucagauauuug

SEQ ID NO: 3512274 - RNA, 20 nt, Human
aucucagaucaguguaccau

SEQ ID NO: 3512275 - RNA, 19 nt, Human
aucucagauguuaaaauaa

SEQ ID NO: 3512276 - RNA, 21 nt, Human
aucucagauguuaaaauaaau

SEQ ID NO: 3512277 - RNA, 11 nt, Human
aucucagcuca

SEQ ID NO: 3512278 - RNA, 13 nt, Human
aucucagcuuuga

SEQ ID NO: 3512279 - RNA, 23 nt, Human
aucucagcuuugagaagccuuca

SEQ ID NO: 3512280 - RNA, 18 nt, Human
aucucaggagauuucaug

SEQ ID NO: 3512281 - RNA, 19 nt, Human
aucucaggccaccugcccc

SEQ ID NO: 3512282 - RNA, 19 nt, Human
aucucagggaagcccagcu

SEQ ID NO: 3512283 - RNA, 22 nt, Human
aucucagggaagcccagcucca

SEQ ID NO: 3512284 - RNA, 17 nt, Human
aucucaggggccagagg

SEQ ID NO: 3512285 - RNA, 16 nt, Human
aucucagguucuccuu

SEQ ID NO: 3512286 - RNA, 22 nt, Human
aucucaguaugaauuauucaau

SEQ ID NO: 3512287 - RNA, 18 nt, Human
aucucagucaugcauaaa

SEQ ID NO: 3512288 - RNA, 15 nt, Human
aucucagugaagaau

SEQ ID NO: 3512289 - RNA, 17 nt, Human
aucucagugcuguaaaa

SEQ ID NO: 3512290 - RNA, 23 nt, Human
aucucagugguuaagauuccuaa

SEQ ID NO: 3512291 - RNA, 21 nt, Human
aucucaguugauuuucuggau

SEQ ID NO: 3512292 - RNA, 19 nt, Human
aucucauagguugccaaua

SEQ ID NO: 3512293 - RNA, 13 nt, Human
aucucaucauguc

SEQ ID NO: 3512294 - RNA, 16 nt, Human
aucucaucaugucuau

SEQ ID NO: 3512295 - RNA, 18 nt, Human
aucucaugaggggagagg

SEQ ID NO: 3512296 - RNA, 19 nt, Human
aucucauguaucaucugga

SEQ ID NO: 3512297 - RNA, 20 nt, Human
aucucauuggacccuuccau

SEQ ID NO: 3512298 - RNA, 16 nt, Human
aucucauuuaagggaa

SEQ ID NO: 3512299 - RNA, 19 nt, Human
aucucauuuaagggaaaaa

SEQ ID NO: 3512300 - RNA, 20 nt, Human
aucucauuuaagggaaaaau

SEQ ID NO: 3512301 - RNA, 21 nt, Human
aucucauuuccaagcaaguau

SEQ ID NO: 3512302 - RNA, 21 nt, Human
aucucauuuuuccguaaaaau

SEQ ID NO: 3512303 - RNA, 13 nt, Human
aucuccaaaauaa

SEQ ID NO: 3512304 - RNA, 16 nt, Human
aucuccaagaaugcug

SEQ ID NO: 3512305 - RNA, 22 nt, Human
aucuccaagaaugcugaaacca

SEQ ID NO: 3512306 - RNA, 23 nt, Human
aucuccaagcagcuuagaguugg

SEQ ID NO: 3512307 - RNA, 16 nt, Human
aucuccagcggcccug

SEQ ID NO: 3512308 - RNA, 19 nt, Human
aucuccagggaguccccuc

SEQ ID NO: 3512309 - RNA, 15 nt, Human
aucuccaucugucaa

SEQ ID NO: 3512310 - RNA, 15 nt, Human
aucuccauggcuucc

SEQ ID NO: 3512311 - RNA, 19 nt, Human
aucuccauggcuuccuccu

SEQ ID NO: 3512312 - RNA, 21 nt, Human
aucucccacaugccaggggcc

SEQ ID NO: 3512313 - RNA, 20 nt, Human
aucucccaccuagcagcacc

SEQ ID NO: 3512314 - RNA, 11 nt, Human
augagaaaugu

SEQ ID NO: 3512315 - RNA, 13 nt, Human
augagaacaaaca

SEQ ID NO: 3512316 - RNA, 17 nt, Human
augagaacaaagcuguu

SEQ ID NO: 3512317 - RNA, 19 nt, Human
augagaacagacuggccug

SEQ ID NO: 3512318 - RNA, 18 nt, Human
augagaacagauaaagau

SEQ ID NO: 3512319 - RNA, 19 nt, Human
augagaacagauaaagauu

SEQ ID NO: 3512320 - RNA, 17 nt, Human
augagaacauguuggua

SEQ ID NO: 3512321 - RNA, 11 nt, Human
augagaaucua

SEQ ID NO: 3512322 - RNA, 11 nt, Human
augagaauguu

SEQ ID NO: 3512323 - RNA, 18 nt, Human
augagaauucagcugccc

SEQ ID NO: 3512324 - RNA, 22 nt, Human
augagaauuucuaaaaagauua

SEQ ID NO: 3512325 - RNA, 22 nt, Human
augagacauaggccaugaaaaa

SEQ ID NO: 3512326 - RNA, 22 nt, Human
augagacuauguaaaaauaacc

SEQ ID NO: 3512327 - RNA, 16 nt, Human
augagacuugccuucc

SEQ ID NO: 3512328 - RNA, 15 nt, Human
augagacuugcucuc

SEQ ID NO: 3512329 - RNA, 13 nt, Human
augagagacacac

SEQ ID NO: 3512330 - RNA, 21 nt, Human
augagagacacacugaagaag

SEQ ID NO: 3512331 - RNA, 13 nt, Human
augagagcauaau

SEQ ID NO: 3512332 - RNA, 20 nt, Human
augagagcauaauuuaaaaa

SEQ ID NO: 3512333 - RNA, 20 nt, Human
augagagcccagagguaaca

SEQ ID NO: 3512334 - RNA, 16 nt, Human
augagaggaaaucacc

SEQ ID NO: 3512335 - RNA, 15 nt, Human
augagauacuuugca

SEQ ID NO: 3512336 - RNA, 22 nt, Human
augagauacuuugcauugucug

SEQ ID NO: 3512337 - RNA, 15 nt, Human
augagaucaggcucu

SEQ ID NO: 3512338 - RNA, 16 nt, Human
augagaucaggcucug

SEQ ID NO: 3512339 - RNA, 17 nt, Human
augagaucaggcucugc

SEQ ID NO: 3512340 - RNA, 13 nt, Human
augagauccuuua

SEQ ID NO: 3512341 - RNA, 22 nt, Human
augagaucuaagccuuuccaua

SEQ ID NO: 3512342 - RNA, 24 nt, Human
augagaugauacauccaaagcaga

SEQ ID NO: 3512343 - RNA, 18 nt, Human
augagaugccugaagcca

SEQ ID NO: 3512344 - RNA, 19 nt, Human
augagaugcguuguuacag

SEQ ID NO: 3512345 - RNA, 12 nt, Human
augagaugcugg

SEQ ID NO: 3512346 - RNA, 19 nt, Human
augagaugcuggcuugggc

SEQ ID NO: 3512347 - RNA, 22 nt, Human
augagauguguggacuguggca

SEQ ID NO: 3512348 - RNA, 20 nt, Human
augagauugguuuuccugug

SEQ ID NO: 3512349 - RNA, 18 nt, Human
augagauuguuuuaucau

SEQ ID NO: 3512350 - RNA, 17 nt, Human
augagcaauaucugcua

SEQ ID NO: 3512351 - RNA, 15 nt, Human
augagcaucaggcca

SEQ ID NO: 3512352 - RNA, 19 nt, Human
augagcaucaggccaggcc

SEQ ID NO: 3512353 - RNA, 17 nt, Human
augagcauggagcuggc

SEQ ID NO: 3512354 - RNA, 18 nt, Human
augagcccagagaacagc

SEQ ID NO: 3512355 - RNA, 18 nt, Human
augagccgcccaaggccu

SEQ ID NO: 3512356 - RNA, 19 nt, Human
augagccuacgcugaagau

SEQ ID NO: 3512357 - RNA, 23 nt, Human
augagccuacgcugaagauggca

SEQ ID NO: 3512358 - RNA, 19 nt, Human
augagccucagcauccugg

SEQ ID NO: 3512359 - RNA, 13 nt, Human
augagccuggcaa

SEQ ID NO: 3512360 - RNA, 18 nt, Human
augagcgugacacucauu

SEQ ID NO: 3512361 - RNA, 16 nt, Human
augagcuauuaaaacu

SEQ ID NO: 3512362 - RNA, 21 nt, Human
augagcuauuuccauuccaga

SEQ ID NO: 3512363 - RNA, 22 nt, Human
augagcuauuuccauuccagaa

SEQ ID NO: 3512364 - RNA, 16 nt, Human
augagcucauguagca

SEQ ID NO: 3512365 - RNA, 16 nt, Human
augagcuccagacccc

SEQ ID NO: 3512366 - RNA, 20 nt, Human
augagcuccagacccccagc

SEQ ID NO: 3512367 - RNA, 21 nt, Human
augagcuccagacccccagca

SEQ ID NO: 3512368 - RNA, 16 nt, Human
augagcucuacccagg

SEQ ID NO: 3512369 - RNA, 17 nt, Human
augagcucugaaaucuu

SEQ ID NO: 3512370 - RNA, 22 nt, Human
augagcucugaaaucuucccau

SEQ ID NO: 3512371 - RNA, 21 nt, Human
augagcuggaaggagugagag

SEQ ID NO: 3512372 - RNA, 15 nt, Human
augagcugugagaag

SEQ ID NO: 3512373 - RNA, 23 nt, Human
augagcuuaagaaauuuguggaa

SEQ ID NO: 3512374 - RNA, 12 nt, Human
augagcuuucug

SEQ ID NO: 3512375 - RNA, 15 nt, Human
augagcuuucugaac

SEQ ID NO: 3512376 - RNA, 17 nt, Human
augagcuuucugaacag

SEQ ID NO: 3512377 - RNA, 20 nt, Human
augagcuuucugaacagcug

SEQ ID NO: 3512378 - RNA, 22 nt, Human
augagcuuucugaacagcuggu

SEQ ID NO: 3512379 - RNA, 15 nt, Human
augaggaaaauucuu

SEQ ID NO: 3512380 - RNA, 21 nt, Human
augaggaacuguagaugaugu

SEQ ID NO: 3512381 - RNA, 12 nt, Human
augaggaaugua

SEQ ID NO: 3512382 - RNA, 17 nt, Human
augaggaauguauaugu

SEQ ID NO: 3512383 - RNA, 13 nt, Human
augaggacauguu

SEQ ID NO: 3512384 - RNA, 19 nt, Human
augaggacucuauucuuua

SEQ ID NO: 3512385 - RNA, 21 nt, Human
augaggagaaaaaaagcaugu

SEQ ID NO: 3512386 - RNA, 12 nt, Human
augaggagggga

SEQ ID NO: 3512387 - RNA, 19 nt, Human
augaggaguaaaauucagu

SEQ ID NO: 3512388 - RNA, 14 nt, Human
augaggaguugcug

SEQ ID NO: 3512389 - RNA, 21 nt, Human
augaggcaaugucaggaacag

SEQ ID NO: 3512390 - RNA, 20 nt, Human
augaggcagcacgugcacaa

SEQ ID NO: 3512391 - RNA, 14 nt, Human
augaggcauuuguu

SEQ ID NO: 3512392 - RNA, 13 nt, Human
augaggccagacc

SEQ ID NO: 3512393 - RNA, 14 nt, Human
augaggccagacca

SEQ ID NO: 3512394 - RNA, 19 nt, Human
augaggcccuccacaccug

SEQ ID NO: 3512395 - RNA, 20 nt, Human
augaggcccuccacaccugc

SEQ ID NO: 3512396 - RNA, 13 nt, Human
augaggcuugcug

SEQ ID NO: 3512397 - RNA, 13 nt, Human
augaggcuuucca

SEQ ID NO: 3512398 - RNA, 13 nt, Human
augagggaaaaga

SEQ ID NO: 3512399 - RNA, 13 nt, Human
augagggacugga

SEQ ID NO: 3512400 - RNA, 13 nt, Human
augagggcagcag

SEQ ID NO: 3512401 - RNA, 16 nt, Human
augagggcagcagcca

SEQ ID NO: 3512402 - RNA, 14 nt, Human
augaggggaggggg

SEQ ID NO: 3512403 - RNA, 15 nt, Human
augagggggcucagu

SEQ ID NO: 3512404 - RNA, 17 nt, Human
augagggguuccucccc

SEQ ID NO: 3512405 - RNA, 19 nt, Human
augaggguuugagagagca

SEQ ID NO: 3512406 - RNA, 21 nt, Human
augagguacaaccuguucugc

SEQ ID NO: 3512407 - RNA, 20 nt, Human
augauuuccuugaauguggc

SEQ ID NO: 3512408 - RNA, 12 nt, Human
augauuucuaug

SEQ ID NO: 3512409 - RNA, 16 nt, Human
augauuucuaugcuga

SEQ ID NO: 3512410 - RNA, 14 nt, Human
augauuuuacuuag

SEQ ID NO: 3512411 - RNA, 20 nt, Human
augauuuucauaacuuauug

SEQ ID NO: 3512412 - RNA, 11 nt, Human
augauuuuuag

SEQ ID NO: 3512413 - RNA, 22 nt, Human
augauuuuuuaaaagaaauuua

SEQ ID NO: 3512414 - RNA, 16 nt, Human
augcaaaaaaaauuag

SEQ ID NO: 3512415 - RNA, 14 nt, Human
augcaaaaaaucuu

SEQ ID NO: 3512416 - RNA, 15 nt, Human
augcaaaaaaucuua

SEQ ID NO: 3512417 - RNA, 23 nt, Human
augcaaaaagaaaugacuaauua

SEQ ID NO: 3512418 - RNA, 23 nt, Human
augcaaaaagcuagucaacagua

SEQ ID NO: 3512419 - RNA, 20 nt, Human
augcaaaaguucugacuuga

SEQ ID NO: 3512420 - RNA, 20 nt, Human
augcaaaccaucauugaaau

SEQ ID NO: 3512421 - RNA, 13 nt, Human
augcaaacucuuu

SEQ ID NO: 3512422 - RNA, 16 nt, Human
augcaaacucuuuggu

SEQ ID NO: 3512423 - RNA, 22 nt, Human
augcaaacucuuuggucguuuu

SEQ ID NO: 3512424 - RNA, 14 nt, Human
augcaaagaggcaa

SEQ ID NO: 3512425 - RNA, 14 nt, Human
augcaaaggcuggg

SEQ ID NO: 3512426 - RNA, 17 nt, Human
augcaaaguacaaugug

SEQ ID NO: 3512427 - RNA, 19 nt, Human
augcaaaguacaauguguu

SEQ ID NO: 3512428 - RNA, 16 nt, Human
augcaaauagcaaaac

SEQ ID NO: 3512429 - RNA, 18 nt, Human
augcaaaucaauuacugg

SEQ ID NO: 3512430 - RNA, 14 nt, Human
augcaaaugagcuc

SEQ ID NO: 3512431 - RNA, 14 nt, Human
augcaaauucucaa

SEQ ID NO: 3512432 - RNA, 14 nt, Human
augcaacaacaugu

SEQ ID NO: 3512433 - RNA, 18 nt, Human
augcaaccaagucacacg

SEQ ID NO: 3512434 - RNA, 14 nt, Human
augcaagaaggagg

SEQ ID NO: 3512435 - RNA, 20 nt, Human
augcaagagugauugcagcu

SEQ ID NO: 3512436 - RNA, 23 nt, Human
augcaagauaguuuaucuaacuu

SEQ ID NO: 3512437 - RNA, 21 nt, Human
augcaagcagaggaccagggc

SEQ ID NO: 3512438 - RNA, 15 nt, Human
augcaagcaguuuca

SEQ ID NO: 3512439 - RNA, 16 nt, Human
augcaaggaaggaaag

SEQ ID NO: 3512440 - RNA, 16 nt, Human
augcaaguuuuuuuuc

SEQ ID NO: 3512441 - RNA, 22 nt, Human
augcaauaaaauuauuugcagg

SEQ ID NO: 3512442 - RNA, 14 nt, Human
augcaauaaaauuu

SEQ ID NO: 3512443 - RNA, 23 nt, Human
augcaauagaagugcuccccucu

SEQ ID NO: 3512444 - RNA, 13 nt, Human
augcaauauguau

SEQ ID NO: 3512445 - RNA, 14 nt, Human
augcaauauguauu

SEQ ID NO: 3512446 - RNA, 22 nt, Human
augcaauauguuuaucaacuca

SEQ ID NO: 3512447 - RNA, 13 nt, Human
augcaauauuugu

SEQ ID NO: 3512448 - RNA, 15 nt, Human
augcaauauuuguaa

SEQ ID NO: 3512449 - RNA, 16 nt, Human
augcaauccuuacaaa

SEQ ID NO: 3512450 - RNA, 18 nt, Human
augcaauccuuacaaaug

SEQ ID NO: 3512451 - RNA, 21 nt, Human
augcaauccuuacaaaugauu

SEQ ID NO: 3512452 - RNA, 14 nt, Human
augcaaugugaagc

SEQ ID NO: 3512453 - RNA, 13 nt, Human
augcaaugugcua

SEQ ID NO: 3512454 - RNA, 17 nt, Human
augcaaugugcuacuga

SEQ ID NO: 3512455 - RNA, 19 nt, Human
augcaauuagccucauagu

SEQ ID NO: 3512456 - RNA, 17 nt, Human
augcaauuugauugacu

SEQ ID NO: 3512457 - RNA, 17 nt, Human
augcaauuuuucuuucu

SEQ ID NO: 3512458 - RNA, 16 nt, Human
augcacaaaaagaugc

SEQ ID NO: 3512459 - RNA, 15 nt, Human
augcacaaacagagg

SEQ ID NO: 3512460 - RNA, 17 nt, Human
augcacaaacagaggcc

SEQ ID NO: 3512461 - RNA, 15 nt, Human
augcacaaaguguau

SEQ ID NO: 3512462 - RNA, 15 nt, Human
augcacaaauucugu

SEQ ID NO: 3512463 - RNA, 23 nt, Human
augcacaaauucugucucuggau

SEQ ID NO: 3512464 - RNA, 21 nt, Human
augcacaauguagauaagugu

SEQ ID NO: 3512465 - RNA, 15 nt, Human
augcacaaugucuug

SEQ ID NO: 3512466 - RNA, 22 nt, Human
augcacacaaaacaacccuaga

SEQ ID NO: 3512467 - RNA, 12 nt, Human
augcacacacac

SEQ ID NO: 3512468 - RNA, 15 nt, Human
augcacacauuuuuu

SEQ ID NO: 3512469 - RNA, 17 nt, Human
augcacacauuuuuuaa

SEQ ID NO: 3512470 - RNA, 15 nt, Human
augcacagauauacu

SEQ ID NO: 3512471 - RNA, 21 nt, Human
augcacagcuaacauggaagu

SEQ ID NO: 3512472 - RNA, 17 nt, Human
augcacaguaaaaaugg

SEQ ID NO: 3512473 - RNA, 14 nt, Human
augcacaguauuug

SEQ ID NO: 3512474 - RNA, 21 nt, Human
augcacauccauucccaagaa

SEQ ID NO: 3512475 - RNA, 14 nt, Human
augcacaucccugg

SEQ ID NO: 3512476 - RNA, 16 nt, Human
augcaccuaaagaaaa

SEQ ID NO: 3512477 - RNA, 18 nt, Human
augcaccuaaagaaaaac

SEQ ID NO: 3512478 - RNA, 15 nt, Human
augcaccuugugucu

SEQ ID NO: 3512479 - RNA, 19 nt, Human
augcaccuugugucuguac

SEQ ID NO: 3512480 - RNA, 21 nt, Human
augcaccuugugucuguacac

SEQ ID NO: 3512481 - RNA, 14 nt, Human
augcacgaccuugg

SEQ ID NO: 3512482 - RNA, 16 nt, Human
augcacgaccuuggga

SEQ ID NO: 3512483 - RNA, 22 nt, Human
augcacugacccuuccagacau

SEQ ID NO: 3512484 - RNA, 16 nt, Human
augcacugauguugug

SEQ ID NO: 3512485 - RNA, 17 nt, Human
agggcggggguggcggc

SEQ ID NO: 3512486 - RNA, 22 nt, Human
agggcggggugucugucuuccu

SEQ ID NO: 3512487 - RNA, 19 nt, Human
agggcguggaaaggggcag

SEQ ID NO: 3512488 - RNA, 21 nt, Human
agggcuagaaccuagaagggc

SEQ ID NO: 3512489 - RNA, 22 nt, Human
agggcuagaaccuagaagggcu

SEQ ID NO: 3512490 - RNA, 16 nt, Human
agggcuagaaccugga

SEQ ID NO: 3512491 - RNA, 17 nt, Human
agggcuagaaccuggag

SEQ ID NO: 3512492 - RNA, 18 nt, Human
agggcuagaaccuggaga

SEQ ID NO: 3512493 - RNA, 22 nt, Human
agggcuagaaccuggagggcua

SEQ ID NO: 3512494 - RNA, 23 nt, Human
agggcuagaaccuggaggggcua

SEQ ID NO: 3512495 - RNA, 18 nt, Human
agggcuagaaccuggcag

SEQ ID NO: 3512496 - RNA, 22 nt, Human
agggcuagaaccuguagagcua

SEQ ID NO: 3512497 - RNA, 16 nt, Human
agggcuagcaucccug

SEQ ID NO: 3512498 - RNA, 15 nt, Human
agggcuaggaauaua

SEQ ID NO: 3512499 - RNA, 22 nt, Human
agggcuagugacuuguguccca

SEQ ID NO: 3512500 - RNA, 12 nt, Human
agggcucagccu

SEQ ID NO: 3512501 - RNA, 15 nt, Human
agggcucagccuggu

SEQ ID NO: 3512502 - RNA, 19 nt, Human
agggcucagcggggacagc

SEQ ID NO: 3512503 - RNA, 20 nt, Human
agggcucagcggggacagcu

SEQ ID NO: 3512504 - RNA, 13 nt, Human
agggcucaggauu

SEQ ID NO: 3512505 - RNA, 12 nt, Human
agggcuccagac

SEQ ID NO: 3512506 - RNA, 13 nt, Human
agggcucccaggg

SEQ ID NO: 3512507 - RNA, 11 nt, Human
agggcucccca

SEQ ID NO: 3512508 - RNA, 15 nt, Human
agggcucccugcccu

SEQ ID NO: 3512509 - RNA, 15 nt, Human
agggcuccuauucaa

SEQ ID NO: 3512510 - RNA, 11 nt, Human
agggcuccucc

SEQ ID NO: 3512511 - RNA, 18 nt, Human
agggcuccucccagcuug

SEQ ID NO: 3512512 - RNA, 11 nt, Human
agggcuccugc

SEQ ID NO: 3512513 - RNA, 22 nt, Human
agggcuccugccuucuguccug

SEQ ID NO: 3512514 - RNA, 18 nt, Human
agggcuccuugugggccu

SEQ ID NO: 3512515 - RNA, 23 nt, Human
agggcuccuugugggccugggcu

SEQ ID NO: 3512516 - RNA, 15 nt, Human
agggcucuaaaaaaa

SEQ ID NO: 3512517 - RNA, 17 nt, Human
agggcucuccuggcuuc

SEQ ID NO: 3512518 - RNA, 19 nt, Human
agggcucucuuuccuucuu

SEQ ID NO: 3512519 - RNA, 15 nt, Human
agggcucugaccagu

SEQ ID NO: 3512520 - RNA, 11 nt, Human
agggcucugag

SEQ ID NO: 3512521 - RNA, 12 nt, Human
agggcucugagg

SEQ ID NO: 3512522 - RNA, 21 nt, Human
agggcucugauauuccaugaa

SEQ ID NO: 3512523 - RNA, 22 nt, Human
agggcucugauauuccaugaau

SEQ ID NO: 3512524 - RNA, 12 nt, Human
agggcucugccc

SEQ ID NO: 3512525 - RNA, 20 nt, Human
agggcugacacguccacccc

SEQ ID NO: 3512526 - RNA, 21 nt, Human
agggcugacacguccacccca

SEQ ID NO: 3512527 - RNA, 17 nt, Human
agggcugaccugccucu

SEQ ID NO: 3512528 - RNA, 19 nt, Human
agggcugaccugccucuca

SEQ ID NO: 3512529 - RNA, 12 nt, Human
agggcugcauga

SEQ ID NO: 3512530 - RNA, 16 nt, Human
agggcugcaugauguu

SEQ ID NO: 3512531 - RNA, 15 nt, Human
agggcugcccugaga

SEQ ID NO: 3512532 - RNA, 20 nt, Human
agggcugccuucuggccuug

SEQ ID NO: 3512533 - RNA, 20 nt, Human
agggcuggacugaggccuga

SEQ ID NO: 3512534 - RNA, 16 nt, Human
agggcuggaggcccag

SEQ ID NO: 3512535 - RNA, 17 nt, Human
agggcuggcccagcccu

SEQ ID NO: 3512536 - RNA, 22 nt, Human
agggcuggcccagcccugcugg

SEQ ID NO: 3512537 - RNA, 17 nt, Human
agggcuggcucaauuga

SEQ ID NO: 3512538 - RNA, 16 nt, Human
agggcuggcuccugau

SEQ ID NO: 3512539 - RNA, 17 nt, Human
agggcuggcuccugauc

SEQ ID NO: 3512540 - RNA, 17 nt, Human
agggcuggcuggccuca

SEQ ID NO: 3512541 - RNA, 23 nt, Human
agggcugggaaacacuccuugca

SEQ ID NO: 3512542 - RNA, 19 nt, Human
agggcuguaacugccaggc

SEQ ID NO: 3512543 - RNA, 15 nt, Human
agggcugucaucuga

SEQ ID NO: 3512544 - RNA, 19 nt, Human
agggcuguggccucccugc

SEQ ID NO: 3512545 - RNA, 22 nt, Human
agggcuguuauaaucuuucaca

SEQ ID NO: 3512546 - RNA, 19 nt, Human
agggcuuacggcccuggcc

SEQ ID NO: 3512547 - RNA, 12 nt, Human
agggcuuccucu

SEQ ID NO: 3512548 - RNA, 14 nt, Human
agggcuuguaguuc

SEQ ID NO: 3512549 - RNA, 15 nt, Human
agggcuuuaaaauuc

SEQ ID NO: 3512550 - RNA, 23 nt, Human
agggcuuuaaaauucucuuccaa

SEQ ID NO: 3512551 - RNA, 18 nt, Human
agggcuuuccugugccag

SEQ ID NO: 3512552 - RNA, 12 nt, Human
augaguuuaaaa

SEQ ID NO: 3512553 - RNA, 15 nt, Human
augaguuucacagug

SEQ ID NO: 3512554 - RNA, 22 nt, Human
augaguuucacagugugauuuu

SEQ ID NO: 3512555 - RNA, 20 nt, Human
augaguuucauagcuaagaa

SEQ ID NO: 3512556 - RNA, 22 nt, Human
augaguuugcccugguuucacu

SEQ ID NO: 3512557 - RNA, 19 nt, Human
augaguuuugggaaguuaa

SEQ ID NO: 3512558 - RNA, 21 nt, Human
augauaaaaaauuuuguaauu

SEQ ID NO: 3512559 - RNA, 22 nt, Human
augauaaaaaauuuuguaauuu

SEQ ID NO: 3512560 - RNA, 20 nt, Human
augauaaguuccuuuccuuu

SEQ ID NO: 3512561 - RNA, 19 nt, Human
augauaauagauucucuug

SEQ ID NO: 3512562 - RNA, 17 nt, Human
augauacuugaaaauua

SEQ ID NO: 3512563 - RNA, 14 nt, Human
augauagauuugac

SEQ ID NO: 3512564 - RNA, 18 nt, Human
augauagauuugaccucc

SEQ ID NO: 3512565 - RNA, 15 nt, Human
augauaguugaaugu

SEQ ID NO: 3512566 - RNA, 16 nt, Human
augauauaagguuuuu

SEQ ID NO: 3512567 - RNA, 23 nt, Human
augauaugcuuguaacuaaaaua

SEQ ID NO: 3512568 - RNA, 13 nt, Human
augauauguaaac

SEQ ID NO: 3512569 - RNA, 14 nt, Human
augauauuccauag

SEQ ID NO: 3512570 - RNA, 16 nt, Human
augauauuccauagua

SEQ ID NO: 3512571 - RNA, 18 nt, Human
augauauugcauaugcau

SEQ ID NO: 3512572 - RNA, 17 nt, Human
augauauuuuaaaaucu

SEQ ID NO: 3512573 - RNA, 20 nt, Human
augauauuuuuuuaagucuu

SEQ ID NO: 3512574 - RNA, 17 nt, Human
augaucaauccuuuauu

SEQ ID NO: 3512575 - RNA, 18 nt, Human
augaucaccgacugaaaa

SEQ ID NO: 3512576 - RNA, 15 nt, Human
augaucacggcucac

SEQ ID NO: 3512577 - RNA, 18 nt, Human
augaucacggcucacugc

SEQ ID NO: 3512578 - RNA, 22 nt, Human
augaucacuaauacuaauucau

SEQ ID NO: 3512579 - RNA, 21 nt, Human
augaucagcaucugugauggg

SEQ ID NO: 3512580 - RNA, 18 nt, Human
augaucagcuguuuguca

SEQ ID NO: 3512581 - RNA, 20 nt, Human
augaucagcuguuugucaua

SEQ ID NO: 3512582 - RNA, 13 nt, Human
augaucaguguug

SEQ ID NO: 3512583 - RNA, 19 nt, Human
augauccagcagauuauuc

SEQ ID NO: 3512584 - RNA, 20 nt, Human
augauccagcagauuauuca

SEQ ID NO: 3512585 - RNA, 18 nt, Human
augaucccuguguugucu

SEQ ID NO: 3512586 - RNA, 15 nt, Human
augaucuagguuuaa

SEQ ID NO: 3512587 - RNA, 19 nt, Human
augaucuagguuuaacuca

SEQ ID NO: 3512588 - RNA, 14 nt, Human
augaucucugauga

SEQ ID NO: 3512589 - RNA, 19 nt, Human
augaucugccucuaaaagc

SEQ ID NO: 3512590 - RNA, 15 nt, Human
augaucugucugugg

SEQ ID NO: 3512591 - RNA, 19 nt, Human
augaucugugccuuuuuua

SEQ ID NO: 3512592 - RNA, 15 nt, Human
augaucuucuuuaua

SEQ ID NO: 3512593 - RNA, 21 nt, Human
augaucuugaguauaagaaau

SEQ ID NO: 3512594 - RNA, 19 nt, Human
augaucuuugcagacaggc

SEQ ID NO: 3512595 - RNA, 15 nt, Human
augaugaaaauauuu

SEQ ID NO: 3512596 - RNA, 18 nt, Human
augaugaucuuuaaaaua

SEQ ID NO: 3512597 - RNA, 15 nt, Human
augaugcagucuccu

SEQ ID NO: 3512598 - RNA, 21 nt, Human
augaugcagucuccucuuuaa

SEQ ID NO: 3512599 - RNA, 18 nt, Human
augaugccaaccucugga

SEQ ID NO: 3512600 - RNA, 19 nt, Human
augaugcccugcuccaggg

SEQ ID NO: 3512601 - RNA, 16 nt, Human
augaugcuauuugcaa

SEQ ID NO: 3512602 - RNA, 22 nt, Human
augaugcucaaaaucuuuccaa

SEQ ID NO: 3512603 - RNA, 19 nt, Human
augauggcaauuuuguaac

SEQ ID NO: 3512604 - RNA, 16 nt, Human
augauggguguuuuua

SEQ ID NO: 3512605 - RNA, 13 nt, Human
augauguaauuga

SEQ ID NO: 3512606 - RNA, 13 nt, Human
augauguauauuu

SEQ ID NO: 3512607 - RNA, 15 nt, Human
augauguauuuuugu

SEQ ID NO: 3512608 - RNA, 15 nt, Human
augauguccagaaga

SEQ ID NO: 3512609 - RNA, 22 nt, Human
augaugugcaaaaccuuuuacu

SEQ ID NO: 3512610 - RNA, 14 nt, Human
augaugugccugcu

SEQ ID NO: 3512611 - RNA, 18 nt, Human
augaugugccugcuucag

SEQ ID NO: 3512612 - RNA, 16 nt, Human
augaugugccugggug

SEQ ID NO: 3512613 - RNA, 11 nt, Human
augaugugcuu

SEQ ID NO: 3512614 - RNA, 19 nt, Human
augauguggaguggggcag

SEQ ID NO: 3512615 - RNA, 19 nt, Human
augauguguacccaaacgu

SEQ ID NO: 3512616 - RNA, 14 nt, Human
augauguuaaaaaa

SEQ ID NO: 3512617 - RNA, 22 nt, Human
augauguuaaaaaaauaagaag

SEQ ID NO: 3512618 - RNA, 13 nt, Human
augauguuuuuaa

SEQ ID NO: 3512619 - RNA, 19 nt, Human
augauguuuuuaaaaucuu

SEQ ID NO: 3512620 - RNA, 20 nt, Human
augauguuuuuaaaaucuua

SEQ ID NO: 3512621 - RNA, 20 nt, Human
augauuaaccacuucagcug

SEQ ID NO: 3512622 - RNA, 21 nt, Human
augauuaaccacuucagcuga

SEQ ID NO: 3512623 - RNA, 19 nt, Human
augauuaauuaaauagcuu

SEQ ID NO: 3512624 - RNA, 16 nt, Human
augauuaauucaccuu

SEQ ID NO: 3512625 - RNA, 14 nt, Human
augauuacuggccu

SEQ ID NO: 3512626 - RNA, 15 nt, Human
augauuacuggccuu

SEQ ID NO: 3512627 - RNA, 19 nt, Human
augauuacuggccuuuuuc

SEQ ID NO: 3512628 - RNA, 23 nt, Human
augauuagaaauuaccuguggau

SEQ ID NO: 3512629 - RNA, 23 nt, Human
augauuagcagaagaaaggaaca

SEQ ID NO: 3512630 - RNA, 18 nt, Human
augauuauuuucauuaca

SEQ ID NO: 3512631 - RNA, 12 nt, Human
augauucaagcc

SEQ ID NO: 3512632 - RNA, 14 nt, Human
augauucaagccau

SEQ ID NO: 3512633 - RNA, 15 nt, Human
augauucaagccauu

SEQ ID NO: 3512634 - RNA, 16 nt, Human
augauucaagccauuc

SEQ ID NO: 3512635 - RNA, 16 nt, Human
augauucaguguuaaa

SEQ ID NO: 3512636 - RNA, 22 nt, Human
augauuccuugauggagauauu

SEQ ID NO: 3512637 - RNA, 23 nt, Human
augauucgcccaaagccagacag

SEQ ID NO: 3512638 - RNA, 22 nt, Human
augauucugauguacucuaaau

SEQ ID NO: 3512639 - RNA, 20 nt, Human
augauucuuuguuacaggca

SEQ ID NO: 3512640 - RNA, 19 nt, Human
augauugccuuuuuauaac

SEQ ID NO: 3512641 - RNA, 17 nt, Human
augauugcuuuuaaaau

SEQ ID NO: 3512642 - RNA, 21 nt, Human
augauuggauuauucauuuaa

SEQ ID NO: 3512643 - RNA, 13 nt, Human
augauuguacaga

SEQ ID NO: 3512644 - RNA, 22 nt, Human
augauugugcacauacuugaga

SEQ ID NO: 3512645 - RNA, 20 nt, Human
augauuguuucucaaaucuu

SEQ ID NO: 3512646 - RNA, 16 nt, Human
augauuuaaaagggaa

SEQ ID NO: 3512647 - RNA, 13 nt, Human
augauuuaauaaa

SEQ ID NO: 3512648 - RNA, 16 nt, Human
augauuuacagagaag

SEQ ID NO: 3512649 - RNA, 13 nt, Human
augauuuacauuu

SEQ ID NO: 3512650 - RNA, 18 nt, Human
augauuuagagugcuguc

SEQ ID NO: 3512651 - RNA, 15 nt, Human
augauuuauaguuug

SEQ ID NO: 3512652 - RNA, 14 nt, Human
augauuucacaaau

SEQ ID NO: 3512653 - RNA, 16 nt, Human
augauuucacaaauau

SEQ ID NO: 3512654 - RNA, 13 nt, Human
augauuucacagu

SEQ ID NO: 3512655 - RNA, 21 nt, Human
augauuucacuagaaaagcug

SEQ ID NO: 3512656 - RNA, 20 nt, Human
augauuucaguucuaggaaa

SEQ ID NO: 3512657 - RNA, 21 nt, Human
augauuucaguucuaggaaaa

SEQ ID NO: 3512658 - RNA, 14 nt, Human
augauuucauuuca

SEQ ID NO: 3512659 - RNA, 20 nt, Human
augauuuccaaagagaaaaa

SEQ ID NO: 3512660 - RNA, 14 nt, Human
augauuuccccccu

SEQ ID NO: 3512661 - RNA, 13 nt, Human
augauuuccuuga

SEQ ID NO: 3512662 - RNA, 15 nt, Human
augauuuccuugaau

SEQ ID NO: 3512663 - RNA, 17 nt, Human
augauuuccuugaaugu

SEQ ID NO: 3512664 - RNA, 21 nt, Human
augauuuccuugaauguggcu

SEQ ID NO: 3512665 - RNA, 13 nt, Human
augauuucuaugc

SEQ ID NO: 3512666 - RNA, 14 nt, Human
augauuucuucuua

SEQ ID NO: 3512667 - RNA, 20 nt, Human
augauuuggggauucagauu

SEQ ID NO: 3512668 - RNA, 16 nt, Human
augauuuuuaaagaaa

SEQ ID NO: 3512669 - RNA, 22 nt, Human
augauuuuuagaugagauuguu

SEQ ID NO: 3512670 - RNA, 20 nt, Human
augauuuuuuaaaagaaauu

SEQ ID NO: 3512671 - RNA, 15 nt, Human
augauuuuuugaaag

SEQ ID NO: 3512672 - RNA, 17 nt, Human
augcaaaaaaucuuaau

SEQ ID NO: 3512673 - RNA, 23 nt, Human
augcaaaaaaucuuaauacuguu

SEQ ID NO: 3512674 - RNA, 21 nt, Human
augcaaaauaauaccugucca

SEQ ID NO: 3512675 - RNA, 13 nt, Human
augcaaaauggaa

SEQ ID NO: 3512676 - RNA, 14 nt, Human
augcaaaccauagc

SEQ ID NO: 3512677 - RNA, 18 nt, Human
augcaaaccaucauugaa

SEQ ID NO: 3512678 - RNA, 21 nt, Human
augcaaaccaucauugaaauc

SEQ ID NO: 3512679 - RNA, 12 nt, Human
augcaaacucuu

SEQ ID NO: 3512680 - RNA, 22 nt, Human
augcaaacuuuauuuuguguuu

SEQ ID NO: 3512681 - RNA, 15 nt, Human
augcaaagaaaauca

SEQ ID NO: 3512682 - RNA, 15 nt, Human
augcaaagaggcaag

SEQ ID NO: 3512683 - RNA, 16 nt, Human
augcaaagaggcaaga

SEQ ID NO: 3512684 - RNA, 20 nt, Human
augcaaagaugaaggucugu

SEQ ID NO: 3512685 - RNA, 12 nt, Human
augcaaagcacu

SEQ ID NO: 3512686 - RNA, 15 nt, Human
augcaaagcacugac

SEQ ID NO: 3512687 - RNA, 13 nt, Human
augcaaaggcugg

SEQ ID NO: 3512688 - RNA, 14 nt, Human
augcaaaguacaau

SEQ ID NO: 3512689 - RNA, 18 nt, Human
augcaaaguacaaugugu

SEQ ID NO: 3512690 - RNA, 11 nt, Human
augcaaauccu

SEQ ID NO: 3512691 - RNA, 15 nt, Human
auggaaaaacuugug

SEQ ID NO: 3512692 - RNA, 13 nt, Human
auggaaaaauaaa

SEQ ID NO: 3512693 - RNA, 21 nt, Human
auggaaaacuuaguuugugaa

SEQ ID NO: 3512694 - RNA, 21 nt, Human
auggaaaagucuucaagggcu

SEQ ID NO: 3512695 - RNA, 18 nt, Human
auggaaaaguguccuucu

SEQ ID NO: 3512696 - RNA, 15 nt, Human
auggaaacaaagugg

SEQ ID NO: 3512697 - RNA, 23 nt, Human
augcaugaaguaauaugcacaca

SEQ ID NO: 3512698 - RNA, 20 nt, Human
augcaugauugcagaauugu

SEQ ID NO: 3512699 - RNA, 16 nt, Human
augcaugcaaaugagc

SEQ ID NO: 3512700 - RNA, 20 nt, Human
augcaugcagccacugugcu

SEQ ID NO: 3512701 - RNA, 16 nt, Human
augcaugcuuuccaua

SEQ ID NO: 3512702 - RNA, 16 nt, Human
augcauggugccccag

SEQ ID NO: 3512703 - RNA, 17 nt, Human
augcauggugccccagg

SEQ ID NO: 3512704 - RNA, 18 nt, Human
augcauggugccccagga

SEQ ID NO: 3512705 - RNA, 20 nt, Human
augcauggugccccaggacc

SEQ ID NO: 3512706 - RNA, 20 nt, Human
auggauuucugucuucucua

SEQ ID NO: 3512707 - RNA, 17 nt, Human
auggauuucuuugaaaa

SEQ ID NO: 3512708 - RNA, 15 nt, Human
auggauuugaagcaa

SEQ ID NO: 3512709 - RNA, 17 nt, Human
auggauuugaugcuguu

SEQ ID NO: 3512710 - RNA, 19 nt, Human
auggauuugaugcuguuug

SEQ ID NO: 3512711 - RNA, 14 nt, Human
auggauuugccugu

SEQ ID NO: 3512712 - RNA, 15 nt, Human
auggauuuugggagu

SEQ ID NO: 3512713 - RNA, 15 nt, Human
auggauuuuucuuua

SEQ ID NO: 3512714 - RNA, 18 nt, Human
auggcaaaggaaggugga

SEQ ID NO: 3512715 - RNA, 17 nt, Human
auggcaacaaacugcac

SEQ ID NO: 3512716 - RNA, 20 nt, Human
auggcaacaaacugcacaug

SEQ ID NO: 3512717 - RNA, 14 nt, Human
auggcaacagaucu

SEQ ID NO: 3512718 - RNA, 15 nt, Human
auggcaaccauuaua

SEQ ID NO: 3512719 - RNA, 23 nt, Human
auggcaagaaagcugguaaacua

SEQ ID NO: 3512720 - RNA, 18 nt, Human
auggcaaggcagcccugu

SEQ ID NO: 3512721 - RNA, 15 nt, Human
auggcaauuuuguaa

SEQ ID NO: 3512722 - RNA, 23 nt, Human
auggcacaucagcacgauuucug

SEQ ID NO: 3512723 - RNA, 14 nt, Human
auggcaccagaggc

SEQ ID NO: 3512724 - RNA, 13 nt, Human
auggcacccagug

SEQ ID NO: 3512725 - RNA, 21 nt, Human
auggcaccuucagacuuugcu

SEQ ID NO: 3512726 - RNA, 14 nt, Human
auggcacuaguauu

SEQ ID NO: 3512727 - RNA, 23 nt, Human
auggcacucccuccagcacaaac

SEQ ID NO: 3512728 - RNA, 13 nt, Human
auggcagaaaagu

SEQ ID NO: 3512729 - RNA, 16 nt, Human
auggcagaagacacca

SEQ ID NO: 3512730 - RNA, 22 nt, Human
auggcagaagacaccagagcag

SEQ ID NO: 3512731 - RNA, 20 nt, Human
auggcagaguuguaaauaua

SEQ ID NO: 3512732 - RNA, 19 nt, Human
auggcagauguaggaggga

SEQ ID NO: 3512733 - RNA, 21 nt, Human
auggcagauguaggagggacu

SEQ ID NO: 3512734 - RNA, 17 nt, Human
auggcagcagaaaacuu

SEQ ID NO: 3512735 - RNA, 21 nt, Human
auggcaggacgugggcugggc

SEQ ID NO: 3512736 - RNA, 17 nt, Human
auggcaggauggccugg

SEQ ID NO: 3512737 - RNA, 22 nt, Human
auggcaggauggccuggccagg

SEQ ID NO: 3512738 - RNA, 20 nt, Human
auggcagggggcugcugcug

SEQ ID NO: 3512739 - RNA, 16 nt, Human
auggcauaaccugucu

SEQ ID NO: 3512740 - RNA, 21 nt, Human
auggcauauuuuucacauauc

SEQ ID NO: 3512741 - RNA, 15 nt, Human
auggcaucaccucca

SEQ ID NO: 3512742 - RNA, 17 nt, Human
auggcaucccuuuuuca

SEQ ID NO: 3512743 - RNA, 16 nt, Human
auggcauccuccagcc

SEQ ID NO: 3512744 - RNA, 15 nt, Human
auggcauccugugaa

SEQ ID NO: 3512745 - RNA, 16 nt, Human
auggcauccugugaag

SEQ ID NO: 3512746 - RNA, 12 nt, Human
auggccacacug

SEQ ID NO: 3512747 - RNA, 21 nt, Human
auggccacacugugacacacu

SEQ ID NO: 3512748 - RNA, 22 nt, Human
auggccacaguagucuugauga

SEQ ID NO: 3512749 - RNA, 15 nt, Human
auggccacauuuaau

SEQ ID NO: 3512750 - RNA, 20 nt, Human
auggccagcuggaggcaggg

SEQ ID NO: 3512751 - RNA, 16 nt, Human
auggccagguggccac

SEQ ID NO: 3512752 - RNA, 16 nt, Human
auggccagugucuguc

SEQ ID NO: 3512753 - RNA, 17 nt, Human
auggcccauucuacuug

SEQ ID NO: 3512754 - RNA, 17 nt, Human
auggccccagcacagcu

SEQ ID NO: 3512755 - RNA, 18 nt, Human
auggccccagcacagcuu

SEQ ID NO: 3512756 - RNA, 18 nt, Human
auggccccucugaccugc

SEQ ID NO: 3512757 - RNA, 20 nt, Human
auggccgcagggcugugcac

SEQ ID NO: 3512758 - RNA, 13 nt, Human
auggccggccggg

SEQ ID NO: 3512759 - RNA, 22 nt, Human
auggccgugaaugggugcccac

SEQ ID NO: 3512760 - RNA, 18 nt, Human
auggccguguagaagcau

SEQ ID NO: 3512761 - RNA, 15 nt, Human
auggccguuggccac

SEQ ID NO: 3512762 - RNA, 18 nt, Human
auggccuaugcacauaug

SEQ ID NO: 3512763 - RNA, 20 nt, Human
auggccuauuauauuaaaau

SEQ ID NO: 3512764 - RNA, 19 nt, Human
auggccucagcugccucac

SEQ ID NO: 3512765 - RNA, 19 nt, Human
auggccucauguggcugga

SEQ ID NO: 3512766 - RNA, 21 nt, Human
auggccucuuacuaauguaaa

SEQ ID NO: 3512767 - RNA, 16 nt, Human
auggccugggggaugu

SEQ ID NO: 3512768 - RNA, 19 nt, Human
auggccuuaauuuccuuuu

SEQ ID NO: 3512769 - RNA, 19 nt, Human
auggccuugcagcacucac

SEQ ID NO: 3512770 - RNA, 18 nt, Human
auggccuuugauaaaugu

SEQ ID NO: 3512771 - RNA, 18 nt, Human
auggcgcagugccucugg

SEQ ID NO: 3512772 - RNA, 20 nt, Human
auggcggguggggguggaau

SEQ ID NO: 3512773 - RNA, 20 nt, Human
auggcguaaguacagagaag

SEQ ID NO: 3512774 - RNA, 22 nt, Human
auggcguaaguacagagaagcc

SEQ ID NO: 3512775 - RNA, 18 nt, Human
auggcguggucaagcacu

SEQ ID NO: 3512776 - RNA, 15 nt, Human
auggcuaaggcacca

SEQ ID NO: 3512777 - RNA, 17 nt, Human
auggcuaaggcaccagc

SEQ ID NO: 3512778 - RNA, 18 nt, Human
auggcuaaggcaccagcc

SEQ ID NO: 3512779 - RNA, 16 nt, Human
auggcuaauucccaga

SEQ ID NO: 3512780 - RNA, 18 nt, Human
auggcuaccuaaaaagau

SEQ ID NO: 3512781 - RNA, 22 nt, Human
auggcuacuuugguuucugucu

SEQ ID NO: 3512782 - RNA, 21 nt, Human
auggcuauaaacaauuacaug

SEQ ID NO: 3512783 - RNA, 15 nt, Human
auggcuauaaauaua

SEQ ID NO: 3512784 - RNA, 23 nt, Human
auggcuauaggugcuacaaaaac

SEQ ID NO: 3512785 - RNA, 20 nt, Human
auggcucacuaugaaucuau

SEQ ID NO: 3512786 - RNA, 16 nt, Human
auggcucacugcagcc

SEQ ID NO: 3512787 - RNA, 20 nt, Human
auggcucacugcagccucga

SEQ ID NO: 3512788 - RNA, 13 nt, Human
auggcucagggug

SEQ ID NO: 3512789 - RNA, 15 nt, Human
auggcuccagaaaug

SEQ ID NO: 3512790 - RNA, 16 nt, Human
auggcuccagaaaugu

SEQ ID NO: 3512791 - RNA, 20 nt, Human
auggcuccagucugcugccc

SEQ ID NO: 3512792 - RNA, 17 nt, Human
auggcucccacaggagu

SEQ ID NO: 3512793 - RNA, 23 nt, Human
auggcuccgaacacccucgaagc

SEQ ID NO: 3512794 - RNA, 12 nt, Human
auggcuccucuc

SEQ ID NO: 3512795 - RNA, 13 nt, Human
auggcuccucuca

SEQ ID NO: 3512796 - RNA, 18 nt, Human
auggcucuaaaaaguuuu

SEQ ID NO: 3512797 - RNA, 14 nt, Human
auggcucugcaccc

SEQ ID NO: 3512798 - RNA, 21 nt, Human
auggcugaaggaaaccagugc

SEQ ID NO: 3512799 - RNA, 22 nt, Human
auggcugaaggaaaccagugca

SEQ ID NO: 3512800 - RNA, 14 nt, Human
auggcugcaguccu

SEQ ID NO: 3512801 - RNA, 17 nt, Human
auggcugcauaguauuc

SEQ ID NO: 3512802 - RNA, 14 nt, Human
auggcugcugaagc

SEQ ID NO: 3512803 - RNA, 19 nt, Human
auggcugcugaagcugccu

SEQ ID NO: 3512804 - RNA, 21 nt, Human
auggcuggccacugcacagag

SEQ ID NO: 3512805 - RNA, 15 nt, Human
auggcugugccucug

SEQ ID NO: 3512806 - RNA, 17 nt, Human
auggcugugccucugcc

SEQ ID NO: 3512807 - RNA, 22 nt, Human
auggcuguguugguguggccca

SEQ ID NO: 3512808 - RNA, 21 nt, Human
auggcuuaauguuuauuccug

SEQ ID NO: 3512809 - RNA, 17 nt, Human
auggcuuauccagcugg

SEQ ID NO: 3512810 - RNA, 18 nt, Human
auggcuuauccagcuggu

SEQ ID NO: 3512811 - RNA, 21 nt, Human
auggcuuccaagguggucugc

SEQ ID NO: 3512812 - RNA, 12 nt, Human
auggcuuccucc

SEQ ID NO: 3512813 - RNA, 15 nt, Human
auggcuuccuccucc

SEQ ID NO: 3512814 - RNA, 16 nt, Human
auggcuuccuccuccc

SEQ ID NO: 3512815 - RNA, 19 nt, Human
auggcuuccuccucccucc

SEQ ID NO: 3512816 - RNA, 23 nt, Human
auggcuuuauuuuuuugaacucu

SEQ ID NO: 3512817 - RNA, 17 nt, Human
auggcuuugugauucaa

SEQ ID NO: 3512818 - RNA, 17 nt, Human
auggcuuuugugcauua

SEQ ID NO: 3512819 - RNA, 18 nt, Human
auggcuuuugugcauuau

SEQ ID NO: 3512820 - RNA, 13 nt, Human
augggaaaguauu

SEQ ID NO: 3512821 - RNA, 15 nt, Human
augggaacauuuauu

SEQ ID NO: 3512822 - RNA, 21 nt, Human
augggaacauuuauuuuauga

SEQ ID NO: 3512823 - RNA, 23 nt, Human
augggaacauuuauuuuaugaga

SEQ ID NO: 3512824 - RNA, 14 nt, Human
augggaaggaggga

SEQ ID NO: 3512825 - RNA, 17 nt, Human
augggaaggagggaggu

SEQ ID NO: 3512826 - RNA, 19 nt, Human
augggaaggagggagguau

SEQ ID NO: 3512827 - RNA, 17 nt, Human
augggaauaauugcuuu

SEQ ID NO: 3512828 - RNA, 14 nt, Human
augggaaugaagcu

SEQ ID NO: 3512829 - RNA, 19 nt, Human
augggaccuguggcugucg

SEQ ID NO: 3512830 - RNA, 21 nt, Human
augggacuggagucccuguga

SEQ ID NO: 3512831 - RNA, 15 nt, Human
augggacuggccucu

SEQ ID NO: 3512832 - RNA, 15 nt, Human
augggacugggaggg

SEQ ID NO: 3512833 - RNA, 22 nt, Human
augggagaaauaguguggaaau

SEQ ID NO: 3512834 - RNA, 22 nt, Human
augggagcaguccaugcaugac

SEQ ID NO: 3512835 - RNA, 12 nt, Human
augggagccggg

SEQ ID NO: 3512836 - RNA, 20 nt, Human
augggagccgggucugccuc

SEQ ID NO: 3512837 - RNA, 19 nt, Human
augggagcuccucuccugg

SEQ ID NO: 3512838 - RNA, 20 nt, Human
augggagcuccucuccugga

SEQ ID NO: 3512839 - RNA, 22 nt, Human
augggagcuccucuccuggagg

SEQ ID NO: 3512840 - RNA, 13 nt, Human
augucacagggcc

SEQ ID NO: 3512841 - RNA, 14 nt, Human
augucacagggcca

SEQ ID NO: 3512842 - RNA, 19 nt, Human
augucaccggauccugggu

SEQ ID NO: 3512843 - RNA, 20 nt, Human
augucaccggauccugggug

SEQ ID NO: 3512844 - RNA, 20 nt, Human
augucaccguggaccuuccu

SEQ ID NO: 3512845 - RNA, 20 nt, Human
augucacguacugucugauu

SEQ ID NO: 3512846 - RNA, 16 nt, Human
augucacuaaagcagg

SEQ ID NO: 3512847 - RNA, 21 nt, Human
augucacuuuuugaggcaaaa

SEQ ID NO: 3512848 - RNA, 19 nt, Human
augucagaaaaacaauaag

SEQ ID NO: 3512849 - RNA, 16 nt, Human
augucagacuggcugg

SEQ ID NO: 3512850 - RNA, 23 nt, Human
augucagcaaaaagcaaaaucau

SEQ ID NO: 3512851 - RNA, 20 nt, Human
augucaggaacagaaggaug

SEQ ID NO: 3512852 - RNA, 17 nt, Human
augucaguaccuucaaa

SEQ ID NO: 3512853 - RNA, 12 nt, Human
augucaguguga

SEQ ID NO: 3512854 - RNA, 16 nt, Human
augucagugugacuga

SEQ ID NO: 3512855 - RNA, 15 nt, Human
augucaguuguuauu

SEQ ID NO: 3512856 - RNA, 23 nt, Human
augucauaaagugagaaaacugu

SEQ ID NO: 3512857 - RNA, 15 nt, Human
augucauacagagaa

SEQ ID NO: 3512858 - RNA, 20 nt, Human
augucauacagagaagucac

SEQ ID NO: 3512859 - RNA, 21 nt, Human
augucaucagagcuccucugu

SEQ ID NO: 3512860 - RNA, 14 nt, Human
augucaucauacau

SEQ ID NO: 3512861 - RNA, 13 nt, Human
augucauuaaaug

SEQ ID NO: 3512862 - RNA, 16 nt, Human
augucauuaauguguu

SEQ ID NO: 3512863 - RNA, 18 nt, Human
augucauugaguaauaua

SEQ ID NO: 3512864 - RNA, 13 nt, Human
augucauuucaug

SEQ ID NO: 3512865 - RNA, 12 nt, Human
auguccaaagag

SEQ ID NO: 3512866 - RNA, 18 nt, Human
auguccaaagaggcugcc

SEQ ID NO: 3512867 - RNA, 19 nt, Human
auguccaaagaggcugccc

SEQ ID NO: 3512868 - RNA, 16 nt, Human
auguccacagaugccu

SEQ ID NO: 3512869 - RNA, 20 nt, Human
auguccacagaugccuccac

SEQ ID NO: 3512870 - RNA, 12 nt, Human
auguccaggaaa

SEQ ID NO: 3512871 - RNA, 18 nt, Human
auguccaguaagaucacu

SEQ ID NO: 3512872 - RNA, 19 nt, Human
auguccaguaagaucacug

SEQ ID NO: 3512873 - RNA, 21 nt, Human
auguccaguaagaucacuguu

SEQ ID NO: 3512874 - RNA, 13 nt, Human
auguccauacacu

SEQ ID NO: 3512875 - RNA, 21 nt, Human
auguccauacacuuuguugca

SEQ ID NO: 3512876 - RNA, 19 nt, Human
auguccauaucuaaccagu

SEQ ID NO: 3512877 - RNA, 18 nt, Human
augucccaccucucugag

SEQ ID NO: 3512878 - RNA, 14 nt, Human
augucccagaaaug

SEQ ID NO: 3512879 - RNA, 17 nt, Human
auguccccagccccucu

SEQ ID NO: 3512880 - RNA, 20 nt, Human
augucccugggccagggucu

SEQ ID NO: 3512881 - RNA, 21 nt, Human
augucccugggccagggucug

SEQ ID NO: 3512882 - RNA, 18 nt, Human
augucccuugaugcacag

SEQ ID NO: 3512883 - RNA, 14 nt, Human
augucccuugcugu

SEQ ID NO: 3512884 - RNA, 20 nt, Human
augucccuuucuuggccagu

SEQ ID NO: 3512885 - RNA, 16 nt, Human
auguccuaaggacaca

SEQ ID NO: 3512886 - RNA, 17 nt, Human
auguccuaaggacacac

SEQ ID NO: 3512887 - RNA, 18 nt, Human
auguccuaaggacacacu

SEQ ID NO: 3512888 - RNA, 20 nt, Human
auguccuaaggacacacuaa

SEQ ID NO: 3512889 - RNA, 21 nt, Human
auguccuaaggacacacuaau

SEQ ID NO: 3512890 - RNA, 19 nt, Human
auguccuaauucuucuguc

SEQ ID NO: 3512891 - RNA, 21 nt, Human
auguccucagcauuucuuuuc

SEQ ID NO: 3512892 - RNA, 19 nt, Human
auguccuccagaagccucu

SEQ ID NO: 3512893 - RNA, 16 nt, Human
auguccugccuauuau

SEQ ID NO: 3512894 - RNA, 21 nt, Human
auguccugccuauuaucuguc

SEQ ID NO: 3512895 - RNA, 15 nt, Human
auguccugccuuuua

SEQ ID NO: 3512896 - RNA, 14 nt, Human
auguccuguaaagg

SEQ ID NO: 3512897 - RNA, 18 nt, Human
auguccugugucaguuua

SEQ ID NO: 3512898 - RNA, 13 nt, Human
aguauuguaaauu

SEQ ID NO: 3512899 - RNA, 17 nt, Human
aguauuguaaauuauau

SEQ ID NO: 3512900 - RNA, 22 nt, Human
aguauuguaaauuauauuugug

SEQ ID NO: 3512901 - RNA, 22 nt, Human
aguauuguuguccuuuucauag

SEQ ID NO: 3512902 - RNA, 13 nt, Human
aguauuguuuaaa

SEQ ID NO: 3512903 - RNA, 19 nt, Human
aguauuguuuaaaauguaa

SEQ ID NO: 3512904 - RNA, 11 nt, Human
aguauuuaauu

SEQ ID NO: 3512905 - RNA, 13 nt, Human
aguauuuaauuag

SEQ ID NO: 3512906 - RNA, 14 nt, Human
aguauuuaauuagu

SEQ ID NO: 3512907 - RNA, 19 nt, Human
aguauuuagaagccaacua

SEQ ID NO: 3512908 - RNA, 12 nt, Human
aguauuuauaua

SEQ ID NO: 3512909 - RNA, 13 nt, Human
aguauuuauuuau

SEQ ID NO: 3512910 - RNA, 18 nt, Human
aguauuuauuuauguacu

SEQ ID NO: 3512911 - RNA, 17 nt, Human
aguauuuauuuuguaau

SEQ ID NO: 3512912 - RNA, 16 nt, Human
aguauuucaaauugga

SEQ ID NO: 3512913 - RNA, 20 nt, Human
aguauuucaaauuggagcuu

SEQ ID NO: 3512914 - RNA, 17 nt, Human
aguauuucagaugcuuu

SEQ ID NO: 3512915 - RNA, 23 nt, Human
aguauuucaguguaguuaauuua

SEQ ID NO: 3512916 - RNA, 19 nt, Human
aguauuucuaaaguaauug

SEQ ID NO: 3512917 - RNA, 15 nt, Human
aguauuucuaugaaa

SEQ ID NO: 3512918 - RNA, 22 nt, Human
aguauuugaaaacagaaauugg

SEQ ID NO: 3512919 - RNA, 13 nt, Human
aguauuugaauua

SEQ ID NO: 3512920 - RNA, 22 nt, Human
aguauuugaauuaaaacuucuu

SEQ ID NO: 3512921 - RNA, 20 nt, Human
aguauuugauucaaaauauu

SEQ ID NO: 3512922 - RNA, 16 nt, Human
aguauuugcauauucu

SEQ ID NO: 3512923 - RNA, 16 nt, Human
aguauuuggaauuaga

SEQ ID NO: 3512924 - RNA, 15 nt, Human
aguauuuguuaauuu

SEQ ID NO: 3512925 - RNA, 12 nt, Human
aguauuuuccug

SEQ ID NO: 3512926 - RNA, 16 nt, Human
aguauuuuccuguaaa

SEQ ID NO: 3512927 - RNA, 21 nt, Human
aguauuuuccuguugucaaga

SEQ ID NO: 3512928 - RNA, 13 nt, Human
aguauuuucuaaa

SEQ ID NO: 3512929 - RNA, 23 nt, Human
aguauuuucuucucugugagaag

SEQ ID NO: 3512930 - RNA, 17 nt, Human
aguauuuugguucuuag

SEQ ID NO: 3512931 - RNA, 18 nt, Human
aguauuuugguucuuagu

SEQ ID NO: 3512932 - RNA, 19 nt, Human
aguauuuuuauacaaaccu

SEQ ID NO: 3512933 - RNA, 19 nt, Human
aguauuuuuauauuuaaau

SEQ ID NO: 3512934 - RNA, 21 nt, Human
aguauuuuuauauuuaaaugu

SEQ ID NO: 3512935 - RNA, 14 nt, Human
aguauuuuuaucca

SEQ ID NO: 3512936 - RNA, 18 nt, Human
aguauuuuuccuuuuuaa

SEQ ID NO: 3512937 - RNA, 16 nt, Human
aguauuuuugacagaa

SEQ ID NO: 3512938 - RNA, 17 nt, Human
aguauuuuugacagaau

SEQ ID NO: 3512939 - RNA, 16 nt, Human
aguauuuuugcugcuu

SEQ ID NO: 3512940 - RNA, 15 nt, Human
aguauuuuuuacauu

SEQ ID NO: 3512941 - RNA, 24 nt, Human
aguauuuuuuacauuuuacacacu

SEQ ID NO: 3512942 - RNA, 21 nt, Human
aguauuuuuucaguauuauau

SEQ ID NO: 3512943 - RNA, 13 nt, Human
aguauuuuuugua

SEQ ID NO: 3512944 - RNA, 19 nt, Human
aguauuuuuuguauaauug

SEQ ID NO: 3512945 - RNA, 22 nt, Human
aguauuuuuuguauaauuggau

SEQ ID NO: 3512946 - RNA, 17 nt, Human
agucaaaaggugccugu

SEQ ID NO: 3512947 - RNA, 13 nt, Human
agucaaaccauaa

SEQ ID NO: 3512948 - RNA, 18 nt, Human
agucaaaccauaaacuuc

SEQ ID NO: 3512949 - RNA, 20 nt, Human
agucaaaccauaaacuucau

SEQ ID NO: 3512950 - RNA, 22 nt, Human
agucaaagagaguuuuuaauag

SEQ ID NO: 3512951 - RNA, 17 nt, Human
agucaaaguugaaaauu

SEQ ID NO: 3512952 - RNA, 14 nt, Human
agucaaauaacucc

SEQ ID NO: 3512953 - RNA, 20 nt, Human
agucaaauuaauaaucuuau

SEQ ID NO: 3512954 - RNA, 22 nt, Human
agucaaauuaauaaucuuauua

SEQ ID NO: 3512955 - RNA, 13 nt, Human
agucaacaguaaa

SEQ ID NO: 3512956 - RNA, 21 nt, Human
agucaacaguaaaccacugaa

SEQ ID NO: 3512957 - RNA, 19 nt, Human
agucaacaguacccugguu

SEQ ID NO: 3512958 - RNA, 15 nt, Human
agucaaccugggcaa

SEQ ID NO: 3512959 - RNA, 17 nt, Human
agucaagauagaaaggg

SEQ ID NO: 3512960 - RNA, 16 nt, Human
agucaagcuccuccuc

SEQ ID NO: 3512961 - RNA, 17 nt, Human
agucaagcuccuccucc

SEQ ID NO: 3512962 - RNA, 18 nt, Human
agucaagcuccuccuccc

SEQ ID NO: 3512963 - RNA, 14 nt, Human
agucaaggcuuaga

SEQ ID NO: 3512964 - RNA, 18 nt, Human
agucaaggguaggguggg

SEQ ID NO: 3512965 - RNA, 16 nt, Human
agucaagugaaaaagg

SEQ ID NO: 3512966 - RNA, 20 nt, Human
agucaagugaaaaaggagga

SEQ ID NO: 3512967 - RNA, 10 nt, Human
agucaauaca

SEQ ID NO: 3512968 - RNA, 21 nt, Human
agucaauacauagugcugcug

SEQ ID NO: 3512969 - RNA, 16 nt, Human
agucaauauguggaag

SEQ ID NO: 3512970 - RNA, 17 nt, Human
agucaauauuuuuagau

SEQ ID NO: 3512971 - RNA, 18 nt, Human
agucaaugacaugaauuu

SEQ ID NO: 3512972 - RNA, 14 nt, Human
agucaaugugcagu

SEQ ID NO: 3512973 - RNA, 15 nt, Human
agucaaugugcagug

SEQ ID NO: 3512974 - RNA, 14 nt, Human
agucaauuaacaau

SEQ ID NO: 3512975 - RNA, 15 nt, Human
agucaauuacauguu

SEQ ID NO: 3512976 - RNA, 21 nt, Human
agucaauuacucuauaauaca

SEQ ID NO: 3512977 - RNA, 14 nt, Human
agucacaaaggaau

SEQ ID NO: 3512978 - RNA, 15 nt, Human
agucacaaaggaaug

SEQ ID NO: 3512979 - RNA, 16 nt, Human
agucacaauguucuuu

SEQ ID NO: 3512980 - RNA, 19 nt, Human
agucacacugcuagcaaau

SEQ ID NO: 3512981 - RNA, 16 nt, Human
agucacaucucuuccu

SEQ ID NO: 3512982 - RNA, 21 nt, Human
agucacauucuuguuuuaagu

SEQ ID NO: 3512983 - RNA, 19 nt, Human
agucaccaggaauguuaaa

SEQ ID NO: 3512984 - RNA, 16 nt, Human
agucacccaugaagac

SEQ ID NO: 3512985 - RNA, 15 nt, Human
agucccaccuuggcu

SEQ ID NO: 3512986 - RNA, 18 nt, Human
agucccaccuuggcugca

SEQ ID NO: 3512987 - RNA, 18 nt, Human
agucccacugccucaggu

SEQ ID NO: 3512988 - RNA, 17 nt, Human
agucccagcagccagcc

SEQ ID NO: 3512989 - RNA, 19 nt, Human
agucccagcagccagccaa

SEQ ID NO: 3512990 - RNA, 11 nt, Human
agucccagcua

SEQ ID NO: 3512991 - RNA, 18 nt, Human
agucccagcuacucagga

SEQ ID NO: 3512992 - RNA, 17 nt, Human
agucccaggcugagccu

SEQ ID NO: 3512993 - RNA, 18 nt, Human
agucccagguuggcucug

SEQ ID NO: 3512994 - RNA, 20 nt, Human
agucccagguuggcucugcc

SEQ ID NO: 3512995 - RNA, 15 nt, Human
agucccagugggagg

SEQ ID NO: 3512996 - RNA, 11 nt, Human
aguccccaccc

SEQ ID NO: 3512997 - RNA, 12 nt, Human
aguccccacccc

SEQ ID NO: 3512998 - RNA, 13 nt, Human
aguccccaccccu

SEQ ID NO: 3512999 - RNA, 16 nt, Human
aguccccaccccugcc

SEQ ID NO: 3513000 - RNA, 18 nt, Human
aguccccaccccugcccc

SEQ ID NO: 3513001 - RNA, 13 nt, Human
aguccccaggccc

SEQ ID NO: 3513002 - RNA, 17 nt, Human
aguccccaggccccagg

SEQ ID NO: 3513003 - RNA, 23 nt, Human
agucccccaacucugagcccaug

SEQ ID NO: 3513004 - RNA, 20 nt, Human
aguccccccucccaccucca

SEQ ID NO: 3513005 - RNA, 21 nt, Human
aguccccccucccaccuccag

SEQ ID NO: 3513006 - RNA, 18 nt, Human
aguccccgggcaucuuug

SEQ ID NO: 3513007 - RNA, 22 nt, Human
aguccccgggcaucuuugggga

SEQ ID NO: 3513008 - RNA, 17 nt, Human
aguccccgucugccugg

SEQ ID NO: 3513009 - RNA, 20 nt, Human
aguccccgugccccgccucc

SEQ ID NO: 3513010 - RNA, 21 nt, Human
aguccccucuccuccacauuu

SEQ ID NO: 3513011 - RNA, 22 nt, Human
aguccccucuccuccacauuug

SEQ ID NO: 3513012 - RNA, 19 nt, Human
agucccugaggcagguccc

SEQ ID NO: 3513013 - RNA, 21 nt, Human
agucccugcacagugacuucu

SEQ ID NO: 3513014 - RNA, 14 nt, Human
agucccugccugga

SEQ ID NO: 3513015 - RNA, 22 nt, Human
agucccugccuggaccagccuc

SEQ ID NO: 3513016 - RNA, 14 nt, Human
agucccugggggaa

SEQ ID NO: 3513017 - RNA, 17 nt, Human
agucccugggggaagcc

SEQ ID NO: 3513018 - RNA, 18 nt, Human
agucccuguaauuguugu

SEQ ID NO: 3513019 - RNA, 23 nt, Human
agucccuguaauuguuguuugua

SEQ ID NO: 3513020 - RNA, 17 nt, Human
agucccugucaccucuu

SEQ ID NO: 3513021 - RNA, 18 nt, Human
agucccuguuuucugagc

SEQ ID NO: 3513022 - RNA, 15 nt, Human
agucccuuccacacc

SEQ ID NO: 3513023 - RNA, 13 nt, Human
agucccuuccccu

SEQ ID NO: 3513024 - RNA, 14 nt, Human
agucccuuccccuc

SEQ ID NO: 3513025 - RNA, 19 nt, Human
agucccuuccccucccugg

SEQ ID NO: 3513026 - RNA, 20 nt, Human
agucccuuccccucccuggc

SEQ ID NO: 3513027 - RNA, 17 nt, Human
aguccgaggggcgggac

SEQ ID NO: 3513028 - RNA, 18 nt, Human
aguccgcagaagcccuga

SEQ ID NO: 3513029 - RNA, 17 nt, Human
aguccggacccaccuca

SEQ ID NO: 3513030 - RNA, 14 nt, Human
aguccgucaaaaca

SEQ ID NO: 3513031 - RNA, 22 nt, Human
aguccgugcugacagcugcucc

SEQ ID NO: 3513032 - RNA, 18 nt, Human
aguccguguggauccaau

SEQ ID NO: 3513033 - RNA, 13 nt, Human
aguccuagcugca

SEQ ID NO: 3513034 - RNA, 14 nt, Human
aguccuagcugcac

SEQ ID NO: 3513035 - RNA, 23 nt, Human
aguccuaguuuuccuacuuauaa

SEQ ID NO: 3513036 - RNA, 23 nt, Human
aguccuaucugggcuuccuggag

SEQ ID NO: 3513037 - RNA, 14 nt, Human
aguccuauggaaac

SEQ ID NO: 3513038 - RNA, 16 nt, Human
aguccuauucuauugc

SEQ ID NO: 3513039 - RNA, 15 nt, Human
aguccucaaagcuuu

SEQ ID NO: 3513040 - RNA, 22 nt, Human
aguccuccagaacucuuccucc

SEQ ID NO: 3513041 - RNA, 12 nt, Human
aguccuccccuc

SEQ ID NO: 3513042 - RNA, 19 nt, Human
aguccuccccucacagccu

SEQ ID NO: 3513043 - RNA, 23 nt, Human
aguccuccccucacagccucuga

SEQ ID NO: 3513044 - RNA, 22 nt, Human
aguccucccugacuuuucugug

SEQ ID NO: 3513045 - RNA, 19 nt, Human
aguccuccgguugcauacu

SEQ ID NO: 3513046 - RNA, 20 nt, Human
aguccucucccaaguccaca

SEQ ID NO: 3513047 - RNA, 14 nt, Human
aguccucuuuucug

SEQ ID NO: 3513048 - RNA, 13 nt, Human
aguccugaagagg

SEQ ID NO: 3513049 - RNA, 23 nt, Human
aguccugaagaggcgggccagcc

SEQ ID NO: 3513050 - RNA, 17 nt, Human
aguccugcaaccaaacu

SEQ ID NO: 3513051 - RNA, 13 nt, Human
aguccugcccgcc

SEQ ID NO: 3513052 - RNA, 14 nt, Human
aguccugccuggcc

SEQ ID NO: 3513053 - RNA, 17 nt, Human
aguccugccuggccagg

SEQ ID NO: 3513054 - RNA, 15 nt, Human
aguccugcuaccucc

SEQ ID NO: 3513055 - RNA, 22 nt, Human
aguccugcuaccucccuugccu

SEQ ID NO: 3513056 - RNA, 14 nt, Human
aguccugcucucua

SEQ ID NO: 3513057 - RNA, 20 nt, Human
aguccuggcaugggaaugaa

SEQ ID NO: 3513058 - RNA, 18 nt, Human
aguccuggccuggcuucu

SEQ ID NO: 3513059 - RNA, 21 nt, Human
aguccuguaguuuuauuuuau

SEQ ID NO: 3513060 - RNA, 23 nt, Human
aguccuguaguuuuauuuuaugu

SEQ ID NO: 3513061 - RNA, 17 nt, Human
aguccuguaugucuguc

SEQ ID NO: 3513062 - RNA, 20 nt, Human
aguccuguaugucugucauu

SEQ ID NO: 3513063 - RNA, 20 nt, Human
augggaaagcauuguaaaug

SEQ ID NO: 3513064 - RNA, 22 nt, Human
augggaaaguauucucuuuuca

SEQ ID NO: 3513065 - RNA, 21 nt, Human
augggaaaguauucuguacuc

SEQ ID NO: 3513066 - RNA, 20 nt, Human
augggaaaugccuaagaaga

SEQ ID NO: 3513067 - RNA, 21 nt, Human
augggaacacuggcagacugu

SEQ ID NO: 3513068 - RNA, 13 nt, Human
augggaacauuua

SEQ ID NO: 3513069 - RNA, 14 nt, Human
augggaagacauga

SEQ ID NO: 3513070 - RNA, 21 nt, Human
augggaaggugggcgggcagg

SEQ ID NO: 3513071 - RNA, 15 nt, Human
augggaaugaauguc

SEQ ID NO: 3513072 - RNA, 21 nt, Human
augggaaugaaugucagugug

SEQ ID NO: 3513073 - RNA, 17 nt, Human
augggaaugagguggga

SEQ ID NO: 3513074 - RNA, 19 nt, Human
augggacaaauugcacaga

SEQ ID NO: 3513075 - RNA, 22 nt, Human
augggacauuugcucauggaau

SEQ ID NO: 3513076 - RNA, 22 nt, Human
augggaccuauaacugcccagc

SEQ ID NO: 3513077 - RNA, 14 nt, Human
augggacugggagg

SEQ ID NO: 3513078 - RNA, 17 nt, Human
augggacugggagggcc

SEQ ID NO: 3513079 - RNA, 18 nt, Human
augggagacccuugacac

SEQ ID NO: 3513080 - RNA, 22 nt, Human
augggagccccagggucuuccc

SEQ ID NO: 3513081 - RNA, 15 nt, Human
augggagccgggcaa

SEQ ID NO: 3513082 - RNA, 17 nt, Human
augggagccgggucugc

SEQ ID NO: 3513083 - RNA, 21 nt, Human
augggagcuccucuccuggag

SEQ ID NO: 3513084 - RNA, 23 nt, Human
augggagcuccucuccuggagga

SEQ ID NO: 3513085 - RNA, 20 nt, Human
augggagcugguuagaaaug

SEQ ID NO: 3513086 - RNA, 23 nt, Human
augggaggcucacccccuucucc

SEQ ID NO: 3513087 - RNA, 18 nt, Human
augggagggaggcucagg

SEQ ID NO: 3513088 - RNA, 21 nt, Human
augggauacaaccucccucuu

SEQ ID NO: 3513089 - RNA, 15 nt, Human
augggaucaugaaag

SEQ ID NO: 3513090 - RNA, 15 nt, Human
augggauccuggagu

SEQ ID NO: 3513091 - RNA, 13 nt, Human
augggaucuuucu

SEQ ID NO: 3513092 - RNA, 16 nt, Human
augggaugauugaaga

SEQ ID NO: 3513093 - RNA, 23 nt, Human
augggauguaugaauacagcagc

SEQ ID NO: 3513094 - RNA, 17 nt, Human
augggauucuggacagg

SEQ ID NO: 3513095 - RNA, 14 nt, Human
augggcaaaacuga

SEQ ID NO: 3513096 - RNA, 18 nt, Human
augggcacugcugggugg

SEQ ID NO: 3513097 - RNA, 22 nt, Human
augggcacugcuggguggccca

SEQ ID NO: 3513098 - RNA, 14 nt, Human
augggcagagcaga

SEQ ID NO: 3513099 - RNA, 14 nt, Human
augggcaguuacau

SEQ ID NO: 3513100 - RNA, 19 nt, Human
augggcaguuacaugcaua

SEQ ID NO: 3513101 - RNA, 17 nt, Human
augggcaucuaugggag

SEQ ID NO: 3513102 - RNA, 21 nt, Human
augggcaucuuuuguauuaag

SEQ ID NO: 3513103 - RNA, 22 nt, Human
augggcauggggugggccucug

SEQ ID NO: 3513104 - RNA, 17 nt, Human
augggccaccgccuugc

SEQ ID NO: 3513105 - RNA, 14 nt, Human
augggcccaggccu

SEQ ID NO: 3513106 - RNA, 12 nt, Human
augggccccugg

SEQ ID NO: 3513107 - RNA, 14 nt, Human
augggccccuggca

SEQ ID NO: 3513108 - RNA, 17 nt, Human
augggccuccugugugu

SEQ ID NO: 3513109 - RNA, 14 nt, Human
augggcucuucacu

SEQ ID NO: 3513110 - RNA, 15 nt, Human
augggcucuuccaac

SEQ ID NO: 3513111 - RNA, 16 nt, Human
augggcuuagagcagu

SEQ ID NO: 3513112 - RNA, 23 nt, Human
augggcuuguuuucuugccaaug

SEQ ID NO: 3513113 - RNA, 15 nt, Human
auggggaaaaaaauc

SEQ ID NO: 3513114 - RNA, 16 nt, Human
auggggaaggaggcug

SEQ ID NO: 3513115 - RNA, 22 nt, Human
auggggaaucuaagagagcugc

SEQ ID NO: 3513116 - RNA, 14 nt, Human
auggggaccagcag

SEQ ID NO: 3513117 - RNA, 16 nt, Human
auggggagaggaacuc

SEQ ID NO: 3513118 - RNA, 14 nt, Human
auggggaggacaaa

SEQ ID NO: 3513119 - RNA, 12 nt, Human
auggggaggggc

SEQ ID NO: 3513120 - RNA, 20 nt, Human
auggggauagauguguggac

SEQ ID NO: 3513121 - RNA, 15 nt, Human
auggggcaggccacc

SEQ ID NO: 3513122 - RNA, 17 nt, Human
auggggcaggccaccug

SEQ ID NO: 3513123 - RNA, 21 nt, Human
auggggcauccucuuuuucca

SEQ ID NO: 3513124 - RNA, 17 nt, Human
auggggccacagccaga

SEQ ID NO: 3513125 - RNA, 14 nt, Human
auggggccagaucc

SEQ ID NO: 3513126 - RNA, 20 nt, Human
auggggcccuaauucagcca

SEQ ID NO: 3513127 - RNA, 13 nt, Human
auggggcccugcc

SEQ ID NO: 3513128 - RNA, 14 nt, Human
auggggccucuguu

SEQ ID NO: 3513129 - RNA, 18 nt, Human
augugauuuuaacucugu

SEQ ID NO: 3513130 - RNA, 19 nt, Human
augugauuuuaacucuguc

SEQ ID NO: 3513131 - RNA, 23 nt, Human
augugcaaaaauuuuuggauuga

SEQ ID NO: 3513132 - RNA, 23 nt, Human
augugcacaugcacgugugugca

SEQ ID NO: 3513133 - RNA, 22 nt, Human
augugcagcagauuggaaggag

SEQ ID NO: 3513134 - RNA, 13 nt, Human
augugcagcauuu

SEQ ID NO: 3513135 - RNA, 19 nt, Human
augugcagguuuguuacau

SEQ ID NO: 3513136 - RNA, 17 nt, Human
augugcauaguuucuuu

SEQ ID NO: 3513137 - RNA, 15 nt, Human
augugccaagguggg

SEQ ID NO: 3513138 - RNA, 23 nt, Human
augugccaggaaacucuugcuau

SEQ ID NO: 3513139 - RNA, 18 nt, Human
augugccauuuuaaaaaa

SEQ ID NO: 3513140 - RNA, 12 nt, Human
augugcccccag

SEQ ID NO: 3513141 - RNA, 14 nt, Human
augugcccccagac

SEQ ID NO: 3513142 - RNA, 22 nt, Human
augugcccuccugagggaggac

SEQ ID NO: 3513143 - RNA, 14 nt, Human
augugccuaaauaa

SEQ ID NO: 3513144 - RNA, 20 nt, Human
augugccugauccagccucu

SEQ ID NO: 3513145 - RNA, 15 nt, Human
augugccugcaccag

SEQ ID NO: 3513146 - RNA, 14 nt, Human
augugccugggugg

SEQ ID NO: 3513147 - RNA, 21 nt, Human
augugccuuauguugaaaaaa

SEQ ID NO: 3513148 - RNA, 13 nt, Human
augugcuacaggg

SEQ ID NO: 3513149 - RNA, 22 nt, Human
augugcuauaaucuguuuuuac

SEQ ID NO: 3513150 - RNA, 13 nt, Human
augugcuauuaau

SEQ ID NO: 3513151 - RNA, 18 nt, Human
augugcuauuaauauuug

SEQ ID NO: 3513152 - RNA, 16 nt, Human
augugcucaucagaaa

SEQ ID NO: 3513153 - RNA, 13 nt, Human
augugcuguguaa

SEQ ID NO: 3513154 - RNA, 19 nt, Human
augugcuguguaaaguuag

SEQ ID NO: 3513155 - RNA, 20 nt, Human
augugcuguguaaaguuagu

SEQ ID NO: 3513156 - RNA, 23 nt, Human
auguggaaaagccaagaggcugc

SEQ ID NO: 3513157 - RNA, 17 nt, Human
auguggaaagugaauuu

SEQ ID NO: 3513158 - RNA, 15 nt, Human
auguggaagaaaaug

SEQ ID NO: 3513159 - RNA, 22 nt, Human
auguggaagugugggucugugu

SEQ ID NO: 3513160 - RNA, 19 nt, Human
auguggagaaacuguaguc

SEQ ID NO: 3513161 - RNA, 16 nt, Human
auguggaguggggcag

SEQ ID NO: 3513162 - RNA, 14 nt, Human
auguggcccuggcc

SEQ ID NO: 3513163 - RNA, 20 nt, Human
auguggcccuggccugcugg

SEQ ID NO: 3513164 - RNA, 15 nt, Human
auguggcugcagcag

SEQ ID NO: 3513165 - RNA, 10 nt, Human
augugggagg

SEQ ID NO: 3513166 - RNA, 18 nt, Human
augugggcagugauguca

SEQ ID NO: 3513167 - RNA, 18 nt, Human
augugggggucugugugu

SEQ ID NO: 3513168 - RNA, 16 nt, Human
augugggucaaggaau

SEQ ID NO: 3513169 - RNA, 14 nt, Human
auguggucucagga

SEQ ID NO: 3513170 - RNA, 16 nt, Human
auguggugaaaagcag

SEQ ID NO: 3513171 - RNA, 20 nt, Human
auguggugaaaagcagguug

SEQ ID NO: 3513172 - RNA, 13 nt, Human
auguggugccuga

SEQ ID NO: 3513173 - RNA, 21 nt, Human
augugguuaauuuugcauauc

SEQ ID NO: 3513174 - RNA, 16 nt, Human
augugguugaagagca

SEQ ID NO: 3513175 - RNA, 20 nt, Human
augugguugcaaggccgcug

SEQ ID NO: 3513176 - RNA, 19 nt, Human
augugguuuauagagggcc

SEQ ID NO: 3513177 - RNA, 23 nt, Human
augugguuugguuccucucuggu

SEQ ID NO: 3513178 - RNA, 15 nt, Human
auguguaaaauguga

SEQ ID NO: 3513179 - RNA, 19 nt, Human
auguguaaagaucuacaug

SEQ ID NO: 3513180 - RNA, 21 nt, Human
auguguaaagaucuacaugaa

SEQ ID NO: 3513181 - RNA, 22 nt, Human
auguguaaagaucuacaugaau

SEQ ID NO: 3513182 - RNA, 19 nt, Human
auguguaagacaaaaagcu

SEQ ID NO: 3513183 - RNA, 16 nt, Human
auguguaaucaauaaa

SEQ ID NO: 3513184 - RNA, 20 nt, Human
auguguaaucaauaaacgau

SEQ ID NO: 3513185 - RNA, 18 nt, Human
auguguaauuuuucugua

SEQ ID NO: 3513186 - RNA, 20 nt, Human
auguguaauuuuucuguaua

SEQ ID NO: 3513187 - RNA, 22 nt, Human
auguguaauuuuucuguauaga

SEQ ID NO: 3513188 - RNA, 22 nt, Human
auguguacaaaaguuucauccu

SEQ ID NO: 3513189 - RNA, 15 nt, Human
auguguacucuaacu

SEQ ID NO: 3513190 - RNA, 14 nt, Human
auguguagccuaug

SEQ ID NO: 3513191 - RNA, 14 nt, Human
auguguagccugug

SEQ ID NO: 3513192 - RNA, 16 nt, Human
auguguagccugugca

SEQ ID NO: 3513193 - RNA, 23 nt, Human
auguguagccugugcauguaugu

SEQ ID NO: 3513194 - RNA, 18 nt, Human
auguguaguucauguaaa

SEQ ID NO: 3513195 - RNA, 23 nt, Human
auguguaguugucucucuucaga

SEQ ID NO: 3513196 - RNA, 13 nt, Human
auguguauaaaaa

SEQ ID NO: 3513197 - RNA, 12 nt, Human
auguguauaaac

SEQ ID NO: 3513198 - RNA, 14 nt, Human
auguguauaaacaa

SEQ ID NO: 3513199 - RNA, 17 nt, Human
auguguauauauacaua

SEQ ID NO: 3513200 - RNA, 16 nt, Human
auguguaucaguguuu

SEQ ID NO: 3513201 - RNA, 19 nt, Human
auguguaugcacaguaaaa

SEQ ID NO: 3513202 - RNA, 20 nt, Human
auguguaugggcaaaaaacu

SEQ ID NO: 3513203 - RNA, 18 nt, Human
auguguauuacaaauauu

SEQ ID NO: 3513204 - RNA, 17 nt, Human
auguguauuuuauuaca

SEQ ID NO: 3513205 - RNA, 21 nt, Human
augugucaacuucaacauuua

SEQ ID NO: 3513206 - RNA, 14 nt, Human
augugucacuugug

SEQ ID NO: 3513207 - RNA, 21 nt, Human
augugucaguggggcucucug

SEQ ID NO: 3513208 - RNA, 22 nt, Human
augugucaguggggcucucuga

SEQ ID NO: 3513209 - RNA, 16 nt, Human
augugucccagaagau

SEQ ID NO: 3513210 - RNA, 17 nt, Human
auguguccugacacugc

SEQ ID NO: 3513211 - RNA, 12 nt, Human
augugucuuuau

SEQ ID NO: 3513212 - RNA, 22 nt, Human
augugugaggagcugcuggcuu

SEQ ID NO: 3513213 - RNA, 22 nt, Human
augugugcaacaggguauggac

SEQ ID NO: 3513214 - RNA, 12 nt, Human
augugugcaugu

SEQ ID NO: 3513215 - RNA, 15 nt, Human
augugugcaugugug

SEQ ID NO: 3513216 - RNA, 15 nt, Human
augugugccaaggcu

SEQ ID NO: 3513217 - RNA, 18 nt, Human
augugugccauagaguuu

SEQ ID NO: 3513218 - RNA, 22 nt, Human
augugugccauagaguuuaaca

SEQ ID NO: 3513219 - RNA, 14 nt, Human
augugugcccagcu

SEQ ID NO: 3513220 - RNA, 18 nt, Human
augugugcgagugugugc

SEQ ID NO: 3513221 - RNA, 17 nt, Human
augugugguggccucag

SEQ ID NO: 3513222 - RNA, 10 nt, Human
auguguguau

SEQ ID NO: 3513223 - RNA, 12 nt, Human
auguguguauau

SEQ ID NO: 3513224 - RNA, 20 nt, Human
auguguguauauauguguau

SEQ ID NO: 3513225 - RNA, 16 nt, Human
auguguguauauguau

SEQ ID NO: 3513226 - RNA, 18 nt, Human
auguguguauauguaugu

SEQ ID NO: 3513227 - RNA, 21 nt, Human
auguguguccacgacugucuc

SEQ ID NO: 3513228 - RNA, 22 nt, Human
augugugugguuuuuuuucuaa

SEQ ID NO: 3513229 - RNA, 15 nt, Human
auguguguguaugcu

SEQ ID NO: 3513230 - RNA, 16 nt, Human
auguguguguaugcua

SEQ ID NO: 3513231 - RNA, 19 nt, Human
auguguguguaugcuacua

SEQ ID NO: 3513232 - RNA, 23 nt, Human
auguguguguguuguguguggga

SEQ ID NO: 3513233 - RNA, 16 nt, Human
auguguguugauacug

SEQ ID NO: 3513234 - RNA, 19 nt, Human
auguguguugauacuguug

SEQ ID NO: 3513235 - RNA, 21 nt, Human
auguguguugauacuguugca

SEQ ID NO: 3513236 - RNA, 23 nt, Human
auguguguugauacuguugcacg

SEQ ID NO: 3513237 - RNA, 14 nt, Human
auguguguuucugu

SEQ ID NO: 3513238 - RNA, 15 nt, Human
auguguguuuuaaaa

SEQ ID NO: 3513239 - RNA, 14 nt, Human
auguguucuauuca

SEQ ID NO: 3513240 - RNA, 18 nt, Human
auguguugaaaaccaaaa

SEQ ID NO: 3513241 - RNA, 20 nt, Human
auguguuggacaaaugugaa

SEQ ID NO: 3513242 - RNA, 17 nt, Human
auguguuuacuuuaugu

SEQ ID NO: 3513243 - RNA, 14 nt, Human
auguguuuagaauu

SEQ ID NO: 3513244 - RNA, 17 nt, Human
auguguuugcuuucuga

SEQ ID NO: 3513245 - RNA, 20 nt, Human
auguguuuuguuuauuaaau

SEQ ID NO: 3513246 - RNA, 13 nt, Human
auguguuuuucuc

SEQ ID NO: 3513247 - RNA, 15 nt, Human
auguuaaaaaaauaa

SEQ ID NO: 3513248 - RNA, 14 nt, Human
auguuaaaauguau

SEQ ID NO: 3513249 - RNA, 16 nt, Human
auguuaaaauguguug

SEQ ID NO: 3513250 - RNA, 22 nt, Human
auguuaaagagaaugaguccuu

SEQ ID NO: 3513251 - RNA, 17 nt, Human
auguuaaagauguagca

SEQ ID NO: 3513252 - RNA, 17 nt, Human
auguuaaauaaauugua

SEQ ID NO: 3513253 - RNA, 20 nt, Human
auguuaaauaaauuguauau

SEQ ID NO: 3513254 - RNA, 16 nt, Human
auguuaaauuuguaag

SEQ ID NO: 3513255 - RNA, 21 nt, Human
auguuaacaaugccuauugua

SEQ ID NO: 3513256 - RNA, 22 nt, Human
auguuaacaaugccuauuguaa

SEQ ID NO: 3513257 - RNA, 15 nt, Human
auguuaacacauuuu

SEQ ID NO: 3513258 - RNA, 23 nt, Human
auguuaacacauuuuguauaauu

SEQ ID NO: 3513259 - RNA, 23 nt, Human
auguuaagcagcuaaauuuucug

SEQ ID NO: 3513260 - RNA, 15 nt, Human
auguuaagcucuuua

SEQ ID NO: 3513261 - RNA, 18 nt, Human
auguuaauccuagcugug

SEQ ID NO: 3513262 - RNA, 20 nt, Human
auguuaauggauuucagaag

SEQ ID NO: 3513263 - RNA, 13 nt, Human
auguuaauuucau

SEQ ID NO: 3513264 - RNA, 19 nt, Human
auguuaauuuuuugguaca

SEQ ID NO: 3513265 - RNA, 22 nt, Human
auguuaauuuuuugguacaaaa

SEQ ID NO: 3513266 - RNA, 23 nt, Human
auguuaauuuuuugguacaaaaa

SEQ ID NO: 3513267 - RNA, 17 nt, Human
auguuacaucacagugu

SEQ ID NO: 3513268 - RNA, 20 nt, Human
auuaauauggggaugcagca

SEQ ID NO: 3513269 - RNA, 17 nt, Human
auuaauauucauuguau

SEQ ID NO: 3513270 - RNA, 12 nt, Human
auuaauauuuaa

SEQ ID NO: 3513271 - RNA, 12 nt, Human
auuaaucacugu

SEQ ID NO: 3513272 - RNA, 13 nt, Human
auuaaucacugug

SEQ ID NO: 3513273 - RNA, 18 nt, Human
aguggcuaaagagaugag

SEQ ID NO: 3513274 - RNA, 22 nt, Human
aguggcuauuucuuuauauuua

SEQ ID NO: 3513275 - RNA, 14 nt, Human
aguggcucacgccu

SEQ ID NO: 3513276 - RNA, 14 nt, Human
aguggcugcugccc

SEQ ID NO: 3513277 - RNA, 17 nt, Human
aguggcugcugcccagg

SEQ ID NO: 3513278 - RNA, 16 nt, Human
aguggcugucaucagc

SEQ ID NO: 3513279 - RNA, 13 nt, Human
aguggcuguccag

SEQ ID NO: 3513280 - RNA, 19 nt, Human
aguggcuguccagugccca

SEQ ID NO: 3513281 - RNA, 23 nt, Human
aguggcuguccagugcccauucc

SEQ ID NO: 3513282 - RNA, 19 nt, Human
aguggcuuacuacaugugg

SEQ ID NO: 3513283 - RNA, 16 nt, Human
aaaaaugggacuucuu

SEQ ID NO: 3513284 - RNA, 11 nt, Human
aaaaaugguaa

SEQ ID NO: 3513285 - RNA, 15 nt, Human
aaaaaugguaaaauu

SEQ ID NO: 3513286 - RNA, 19 nt, Human
aaaaaugguagcauuuuaa

SEQ ID NO: 3513287 - RNA, 19 nt, Human
aaaaaugguaucaaaauua

SEQ ID NO: 3513288 - RNA, 15 nt, Human
aaaaauggugccuga

SEQ ID NO: 3513289 - RNA, 19 nt, Human
aaaaaugguggcuucagcu

SEQ ID NO: 3513290 - RNA, 17 nt, Human
aaaaaugguuuaaaugg

SEQ ID NO: 3513291 - RNA, 13 nt, Human
aaaaauguaaaua

SEQ ID NO: 3513292 - RNA, 16 nt, Human
aaaaauguauuuuaug

SEQ ID NO: 3513293 - RNA, 17 nt, Human
aaaaauguauuuuaugu

SEQ ID NO: 3513294 - RNA, 23 nt, Human
aaaaaugucaaaaguagaacuuu

SEQ ID NO: 3513295 - RNA, 22 nt, Human
aaaaauguguguauucuuaaaa

SEQ ID NO: 3513296 - RNA, 20 nt, Human
aaaaauguuaaaauguauuc

SEQ ID NO: 3513297 - RNA, 12 nt, Human
aaaaauguugaa

SEQ ID NO: 3513298 - RNA, 12 nt, Human
aaaaauguuugu

SEQ ID NO: 3513299 - RNA, 23 nt, Human
aaaaauguuuuuggucuuuuaua

SEQ ID NO: 3513300 - RNA, 14 nt, Human
aaaaauuacuaauu

SEQ ID NO: 3513301 - RNA, 22 nt, Human
aaaaauucagcaaaccauuuuu

SEQ ID NO: 3513302 - RNA, 13 nt, Human
aaaaauugaaaug

SEQ ID NO: 3513303 - RNA, 19 nt, Human
aaaaauugaagagagauau

SEQ ID NO: 3513304 - RNA, 12 nt, Human
aaaaauugugau

SEQ ID NO: 3513305 - RNA, 11 nt, Human
aaaaauuuaaa

SEQ ID NO: 3513306 - RNA, 21 nt, Human
aaaaauuuaagcauuguuugc

SEQ ID NO: 3513307 - RNA, 11 nt, Human
aaaaauuucac

SEQ ID NO: 3513308 - RNA, 13 nt, Human
aaaaauuucacga

SEQ ID NO: 3513309 - RNA, 22 nt, Human
aaaaauuuuauaaaauuaagca

SEQ ID NO: 3513310 - RNA, 14 nt, Human
aaaaauuuuguaau

SEQ ID NO: 3513311 - RNA, 21 nt, Human
aaaaauuuuuggauugacagu

SEQ ID NO: 3513312 - RNA, 15 nt, Human
aaaacaaaaagaaca

SEQ ID NO: 3513313 - RNA, 15 nt, Human
aaaacaaaaagaugu

SEQ ID NO: 3513314 - RNA, 14 nt, Human
aaaacaaaacaaaa

SEQ ID NO: 3513315 - RNA, 22 nt, Human
aaaacaaaauuugacuaauuuu

SEQ ID NO: 3513316 - RNA, 13 nt, Human
aaaacaacaaaaa

SEQ ID NO: 3513317 - RNA, 18 nt, Human
aaaacaacuucuuuguaa

SEQ ID NO: 3513318 - RNA, 17 nt, Human
aaaacaaggaugaauua

SEQ ID NO: 3513319 - RNA, 17 nt, Human
aaaacaauaggaugggc

SEQ ID NO: 3513320 - RNA, 17 nt, Human
aaaacaauauuuauugu

SEQ ID NO: 3513321 - RNA, 19 nt, Human
aaaacaaucuggaagaaaa

SEQ ID NO: 3513322 - RNA, 12 nt, Human
aaaacacagagg

SEQ ID NO: 3513323 - RNA, 18 nt, Human
aaaacacagcaaggguga

SEQ ID NO: 3513324 - RNA, 21 nt, Human
aaaacacaguguuuuuguaaa

SEQ ID NO: 3513325 - RNA, 15 nt, Human
aaaacacauuuuucu

SEQ ID NO: 3513326 - RNA, 22 nt, Human
aaaacaccgcuucugccuuuuc

SEQ ID NO: 3513327 - RNA, 22 nt, Human
aaaacaccuagcuuuauucuuc

SEQ ID NO: 3513328 - RNA, 13 nt, Human
aaaacacugugga

SEQ ID NO: 3513329 - RNA, 17 nt, Human
aaaacacuucuguccug

SEQ ID NO: 3513330 - RNA, 21 nt, Human
aaaacagaaaaaaaacacaca

SEQ ID NO: 3513331 - RNA, 22 nt, Human
aaaacagaguaaucuuguuggu

SEQ ID NO: 3513332 - RNA, 20 nt, Human
aaaacagcauugcuuucuga

SEQ ID NO: 3513333 - RNA, 18 nt, Human
aaaacagccucacagaag

SEQ ID NO: 3513334 - RNA, 18 nt, Human
aaaacagcucugcaggcu

SEQ ID NO: 3513335 - RNA, 19 nt, Human
aaaacagcugcauuagaaa

SEQ ID NO: 3513336 - RNA, 18 nt, Human
aaaacagguggagaaauu

SEQ ID NO: 3513337 - RNA, 16 nt, Human
aaaacaguauuuauuu

SEQ ID NO: 3513338 - RNA, 18 nt, Human
aaaacaguauuuauuuug

SEQ ID NO: 3513339 - RNA, 19 nt, Human
aaaacaguauuuauuuugu

SEQ ID NO: 3513340 - RNA, 20 nt, Human
aaaacaguguguaaacaaaa

SEQ ID NO: 3513341 - RNA, 21 nt, Human
aaaacaguuggcaugcauccc

SEQ ID NO: 3513342 - RNA, 23 nt, Human
aaaacauagaaauggaaauuuug

SEQ ID NO: 3513343 - RNA, 14 nt, Human
aaaacaucauuccu

SEQ ID NO: 3513344 - RNA, 21 nt, Human
aaaacaucauuccuuuuuauu

SEQ ID NO: 3513345 - RNA, 16 nt, Human
aaaacauccagauaca

SEQ ID NO: 3513346 - RNA, 16 nt, Human
aaaacaucuauucucu

SEQ ID NO: 3513347 - RNA, 11 nt, Human
aaaacaucugg

SEQ ID NO: 3513348 - RNA, 13 nt, Human
aaaacaugcuaca

SEQ ID NO: 3513349 - RNA, 14 nt, Human
aaaacaugcuacac

SEQ ID NO: 3513350 - RNA, 18 nt, Human
aaaacauuaagaaaauca

SEQ ID NO: 3513351 - RNA, 16 nt, Human
aaaacauuccauccuu

SEQ ID NO: 3513352 - RNA, 22 nt, Human
aaaacauuccguuuacauuuua

SEQ ID NO: 3513353 - RNA, 20 nt, Human
aaaacauugaagagagagcu

SEQ ID NO: 3513354 - RNA, 14 nt, Human
aaaacauuggauua

SEQ ID NO: 3513355 - RNA, 12 nt, Human
aaaacauuuauu

SEQ ID NO: 3513356 - RNA, 12 nt, Human
aaaacauuugcu

SEQ ID NO: 3513357 - RNA, 20 nt, Human
aaaaccaaaaguuauuaaaa

SEQ ID NO: 3513358 - RNA, 13 nt, Human
aaaaccaaaauga

SEQ ID NO: 3513359 - RNA, 22 nt, Human
aaaaccaaagagggcuuccucu

SEQ ID NO: 3513360 - RNA, 18 nt, Human
aaaaccaaauguuuauuu

SEQ ID NO: 3513361 - RNA, 21 nt, Human
aaaaccaauguucucucuucu

SEQ ID NO: 3513362 - RNA, 19 nt, Human
aaaaccaauguuuugcagu

SEQ ID NO: 3513363 - RNA, 14 nt, Human
aaaaccacaaaggc

SEQ ID NO: 3513364 - RNA, 15 nt, Human
aaaaccacacaaaga

SEQ ID NO: 3513365 - RNA, 20 nt, Human
aaaaccacagcccugucagu

SEQ ID NO: 3513366 - RNA, 20 nt, Human
aaaaccacauggcacagaga

SEQ ID NO: 3513367 - RNA, 11 nt, Human
aaaaccaggcc

SEQ ID NO: 3513368 - RNA, 16 nt, Human
aaaaccaggcuuucua

SEQ ID NO: 3513369 - RNA, 20 nt, Human
aaaaccaucaaaaauauucc

SEQ ID NO: 3513370 - RNA, 17 nt, Human
aaaaccaucaaguugug

SEQ ID NO: 3513371 - RNA, 12 nt, Human
aaaacccaagug

SEQ ID NO: 3513372 - RNA, 21 nt, Human
aaaacccacaaaaauguugaa

SEQ ID NO: 3513373 - RNA, 12 nt, Human
aaaacccagaga

SEQ ID NO: 3513374 - RNA, 21 nt, Human
aaaacccagcaacagaaaaau

SEQ ID NO: 3513375 - RNA, 12 nt, Human
aaaacccagcug

SEQ ID NO: 3513376 - RNA, 14 nt, Human
aaaacccagcugca

SEQ ID NO: 3513377 - RNA, 22 nt, Human
aaaaccccacuacacagucugc

SEQ ID NO: 3513378 - RNA, 18 nt, Human
aaaaccccccagauauca

SEQ ID NO: 3513379 - RNA, 19 nt, Human
aaaaccguguuugucucuu

SEQ ID NO: 3513380 - RNA, 21 nt, Human
aaaaccguguuugucucuucu

SEQ ID NO: 3513381 - RNA, 21 nt, Human
aaaaccuaaguccuuuaugug

SEQ ID NO: 3513382 - RNA, 15 nt, Human
aaaaccugagauuua

SEQ ID NO: 3513383 - RNA, 13 nt, Human
aaaaccuuucaaa

SEQ ID NO: 3513384 - RNA, 20 nt, Human
aaaaccuuucaaauuucaca

SEQ ID NO: 3513385 - RNA, 14 nt, Human
aaaaccuuuugaaa

SEQ ID NO: 3513386 - RNA, 21 nt, Human
aaaacgcgcagaugugcagca

SEQ ID NO: 3513387 - RNA, 19 nt, Human
aaaacgcugucaaaaguug

SEQ ID NO: 3513388 - RNA, 16 nt, Human
aaaacguggcugcuuc

SEQ ID NO: 3513389 - RNA, 16 nt, Human
aaaacguuuuauugug

SEQ ID NO: 3513390 - RNA, 23 nt, Human
aaaacguuuuguuugaaaaagca

SEQ ID NO: 3513391 - RNA, 22 nt, Human
aaaacuaaauagcauguauugu

SEQ ID NO: 3513392 - RNA, 15 nt, Human
aaaacuacauuuuaa

SEQ ID NO: 3513393 - RNA, 14 nt, Human
aaaacuacuuagca

SEQ ID NO: 3513394 - RNA, 21 nt, Human
aaaacuaggcauuuguaaaua

SEQ ID NO: 3513395 - RNA, 20 nt, Human
aaaacuauacuugaacaaaa

SEQ ID NO: 3513396 - RNA, 19 nt, Human
aaaacuauauguaugguuu

SEQ ID NO: 3513397 - RNA, 14 nt, Human
aaaacucacuguga

SEQ ID NO: 3513398 - RNA, 15 nt, Human
aaaacucacugugau

SEQ ID NO: 3513399 - RNA, 19 nt, Human
aaaacucagccugggacag

SEQ ID NO: 3513400 - RNA, 20 nt, Human
aaaacuccgcccccagccua

SEQ ID NO: 3513401 - RNA, 13 nt, Human
aaaacucugguaa

SEQ ID NO: 3513402 - RNA, 18 nt, Human
aaaacugaaaaucuaaua

SEQ ID NO: 3513403 - RNA, 17 nt, Human
aaaacugaagucugaaa

SEQ ID NO: 3513404 - RNA, 15 nt, Human
aaaacugacagagga

SEQ ID NO: 3513405 - RNA, 16 nt, Human
aaaacugacuccuuag

SEQ ID NO: 3513406 - RNA, 18 nt, Human
aaaacugauuuuuuuuuc

SEQ ID NO: 3513407 - RNA, 19 nt, Human
aaaacugcucauaugaugu

SEQ ID NO: 3513408 - RNA, 22 nt, Human
aaaacugcugacuguuuucucu

SEQ ID NO: 3513409 - RNA, 16 nt, Human
aaaacuggaccuguau

SEQ ID NO: 3513410 - RNA, 19 nt, Human
aaaacuggaccuguauauu

SEQ ID NO: 3513411 - RNA, 20 nt, Human
aaaacuguacauuuaaaauu

SEQ ID NO: 3513412 - RNA, 20 nt, Human
aaaacuguacuuugauucac

SEQ ID NO: 3513413 - RNA, 21 nt, Human
aaaacuguacuuugauucaca

SEQ ID NO: 3513414 - RNA, 21 nt, Human
aaaacugugaccaaguauaaa

SEQ ID NO: 3513415 - RNA, 17 nt, Human
aaaacuguguugccaca

SEQ ID NO: 3513416 - RNA, 20 nt, Human
aaaacuucguuuaaugaaug

SEQ ID NO: 3513417 - RNA, 22 nt, Human
aaaacuucuugucagacauaaa

SEQ ID NO: 3513418 - RNA, 20 nt, Human
auucacuuugacacuuuuca

SEQ ID NO: 3513419 - RNA, 18 nt, Human
auucagaaaauguucugu

SEQ ID NO: 3513420 - RNA, 19 nt, Human
auucagaaaauguucuguu

SEQ ID NO: 3513421 - RNA, 23 nt, Human
auucagaaccccaacuacugugu

SEQ ID NO: 3513422 - RNA, 16 nt, Human
auucagaagaaaaaga

SEQ ID NO: 3513423 - RNA, 18 nt, Human
auucagaagaaaaagaag

SEQ ID NO: 3513424 - RNA, 17 nt, Human
auucagacaaaauggau

SEQ ID NO: 3513425 - RNA, 14 nt, Human
auucagacagauga

SEQ ID NO: 3513426 - RNA, 20 nt, Human
auucagacagaugaggcuuu

SEQ ID NO: 3513427 - RNA, 16 nt, Human
auucagagaauaucaa

SEQ ID NO: 3513428 - RNA, 16 nt, Human
auucagaucacugaau

SEQ ID NO: 3513429 - RNA, 19 nt, Human
auucagaucacugaauuua

SEQ ID NO: 3513430 - RNA, 21 nt, Human
auucagcaaggcgcuaacuug

SEQ ID NO: 3513431 - RNA, 12 nt, Human
auucagcaucug

SEQ ID NO: 3513432 - RNA, 19 nt, Human
auucagcauuagugggaaa

SEQ ID NO: 3513433 - RNA, 15 nt, Human
auucagccuggcuuc

SEQ ID NO: 3513434 - RNA, 14 nt, Human
auucagccuucuuu

SEQ ID NO: 3513435 - RNA, 17 nt, Human
auucagccuucuuuuuc

SEQ ID NO: 3513436 - RNA, 20 nt, Human
auucagccuucuuuuucugg

SEQ ID NO: 3513437 - RNA, 18 nt, Human
auucagcucugcaagaau

SEQ ID NO: 3513438 - RNA, 21 nt, Human
auucagcugagguucauuaca

SEQ ID NO: 3513439 - RNA, 11 nt, Human
auucagcugcc

SEQ ID NO: 3513440 - RNA, 20 nt, Human
auucagcuucauuuguguca

SEQ ID NO: 3513441 - RNA, 19 nt, Human
auucaggaaaagccucugu

SEQ ID NO: 3513442 - RNA, 18 nt, Human
auucaggaaaaggccugg

SEQ ID NO: 3513443 - RNA, 19 nt, Human
auucaggaaaaggccuggg

SEQ ID NO: 3513444 - RNA, 12 nt, Human
auucaggaagcu

SEQ ID NO: 3513445 - RNA, 17 nt, Human
auucaggaagcucaggg

SEQ ID NO: 3513446 - RNA, 19 nt, Human
auucaggacuugaaagaaa

SEQ ID NO: 3513447 - RNA, 20 nt, Human
auucagggaaagugggacag

SEQ ID NO: 3513448 - RNA, 18 nt, Human
auucaggggaaacuugau

SEQ ID NO: 3513449 - RNA, 14 nt, Human
auucagguaacacu

SEQ ID NO: 3513450 - RNA, 15 nt, Human
auucagguaauacaa

SEQ ID NO: 3513451 - RNA, 17 nt, Human
auucagguauguugccu

SEQ ID NO: 3513452 - RNA, 15 nt, Human
auucaguaauaacuc

SEQ ID NO: 3513453 - RNA, 16 nt, Human
auucaguauguuuuac

SEQ ID NO: 3513454 - RNA, 22 nt, Human
auucaguauguuuuacacugua

SEQ ID NO: 3513455 - RNA, 19 nt, Human
auucaguauuaaagggggg

SEQ ID NO: 3513456 - RNA, 12 nt, Human
auucagucacau

SEQ ID NO: 3513457 - RNA, 15 nt, Human
auucagugagggucu

SEQ ID NO: 3513458 - RNA, 16 nt, Human
auucagugagggucuu

SEQ ID NO: 3513459 - RNA, 15 nt, Human
auucagugauuacug

SEQ ID NO: 3513460 - RNA, 19 nt, Human
auucagugauuacugucaa

SEQ ID NO: 3513461 - RNA, 20 nt, Human
auucagugcuguggccuggg

SEQ ID NO: 3513462 - RNA, 14 nt, Human
auucagugcuucuu

SEQ ID NO: 3513463 - RNA, 18 nt, Human
auucaguguauuucaguu

SEQ ID NO: 3513464 - RNA, 14 nt, Human
auucaguuaagaaa

SEQ ID NO: 3513465 - RNA, 16 nt, Human
auucaguuaagaaaaa

SEQ ID NO: 3513466 - RNA, 14 nt, Human
auucaguuuucauu

SEQ ID NO: 3513467 - RNA, 14 nt, Human
auucauaaugacuu

SEQ ID NO: 3513468 - RNA, 19 nt, Human
auucauaaugacuuaagca

SEQ ID NO: 3513469 - RNA, 21 nt, Human
auucauaauuauuauuuggcc

SEQ ID NO: 3513470 - RNA, 18 nt, Human
auucauaguaacuucuua

SEQ ID NO: 3513471 - RNA, 17 nt, Human
auucauaguaagauuga

SEQ ID NO: 3513472 - RNA, 16 nt, Human
auucauaguagaacuu

SEQ ID NO: 3513473 - RNA, 23 nt, Human
auucauauauuuuaugaaucaga

SEQ ID NO: 3513474 - RNA, 15 nt, Human
auucauaugcauauu

SEQ ID NO: 3513475 - RNA, 16 nt, Human
auucauaugcauauuu

SEQ ID NO: 3513476 - RNA, 13 nt, Human
auucauauuacaa

SEQ ID NO: 3513477 - RNA, 14 nt, Human
auucauauuacaau

SEQ ID NO: 3513478 - RNA, 19 nt, Human
auucauauucuguuggaag

SEQ ID NO: 3513479 - RNA, 16 nt, Human
auucauauucuucaua

SEQ ID NO: 3513480 - RNA, 19 nt, Human
auucauauuuacuucuuau

SEQ ID NO: 3513481 - RNA, 17 nt, Human
auucauauuuguacuuu

SEQ ID NO: 3513482 - RNA, 21 nt, Human
auucauauuuguacuuucugu

SEQ ID NO: 3513483 - RNA, 23 nt, Human
auucauauuuguacuuucuguua

SEQ ID NO: 3513484 - RNA, 17 nt, Human
auucauccaaguuaaau

SEQ ID NO: 3513485 - RNA, 20 nt, Human
auucaucuguuuuucuuuuu

SEQ ID NO: 3513486 - RNA, 15 nt, Human
auucaucuuuuguau

SEQ ID NO: 3513487 - RNA, 13 nt, Human
auucaugaacuuc

SEQ ID NO: 3513488 - RNA, 16 nt, Human
auucaugaggagggug

SEQ ID NO: 3513489 - RNA, 20 nt, Human
aguuggacagcaaaaccauu

SEQ ID NO: 3513490 - RNA, 14 nt, Human
aguuggacuaaaug

SEQ ID NO: 3513491 - RNA, 19 nt, Human
aguuggagcuccagccuga

SEQ ID NO: 3513492 - RNA, 20 nt, Human
aguuggaguucauucauauu

SEQ ID NO: 3513493 - RNA, 19 nt, Human
aguuggaguuuuuuguacc

SEQ ID NO: 3513494 - RNA, 23 nt, Human
aguuggccauauuuaccucagcc

SEQ ID NO: 3513495 - RNA, 19 nt, Human
aguugggcuuccucauagu

SEQ ID NO: 3513496 - RNA, 19 nt, Human
aguugggcuugcuauucug

SEQ ID NO: 3513497 - RNA, 15 nt, Human
aguugggugagaaca

SEQ ID NO: 3513498 - RNA, 20 nt, Human
aguuggguguauugugcgcu

SEQ ID NO: 3513499 - RNA, 13 nt, Human
aguugguaacuuu

SEQ ID NO: 3513500 - RNA, 14 nt, Human
aguuggugagaaac

SEQ ID NO: 3513501 - RNA, 13 nt, Human
aguuggugucuuu

SEQ ID NO: 3513502 - RNA, 15 nt, Human
aguugguuggauaag

SEQ ID NO: 3513503 - RNA, 16 nt, Human
aguuguaaauauauaa

SEQ ID NO: 3513504 - RNA, 20 nt, Human
aguuguaaauauauaaauau

SEQ ID NO: 3513505 - RNA, 17 nt, Human
aguuguaacuuauauug

SEQ ID NO: 3513506 - RNA, 18 nt, Human
aguuguaacuuauauuga

SEQ ID NO: 3513507 - RNA, 22 nt, Human
aguuguacaugaaauuuuugua

SEQ ID NO: 3513508 - RNA, 16 nt, Human
aguuguaccaagugaa

SEQ ID NO: 3513509 - RNA, 23 nt, Human
aguuguacuuuaaaaauuuacua

SEQ ID NO: 3513510 - RNA, 16 nt, Human
aguuguagaauguauu

SEQ ID NO: 3513511 - RNA, 18 nt, Human
aguuguagacaaaguaca

SEQ ID NO: 3513512 - RNA, 23 nt, Human
aguuguagacaaaguacauucug

SEQ ID NO: 3513513 - RNA, 22 nt, Human
aguuguaggcgaaucauuuguu

SEQ ID NO: 3513514 - RNA, 23 nt, Human
aguuguaucagcacguguggccu

SEQ ID NO: 3513515 - RNA, 15 nt, Human
aguuguaucucuuuu

SEQ ID NO: 3513516 - RNA, 17 nt, Human
aguuguaugaucugugc

SEQ ID NO: 3513517 - RNA, 23 nt, Human
aguuguauuuaacagaaauugua

SEQ ID NO: 3513518 - RNA, 20 nt, Human
aguugucccgauuguaacuc

SEQ ID NO: 3513519 - RNA, 13 nt, Human
aguugucuaaaca

SEQ ID NO: 3513520 - RNA, 15 nt, Human
aguugucucucuuca

SEQ ID NO: 3513521 - RNA, 21 nt, Human
aguugucucucuucagacucu

SEQ ID NO: 3513522 - RNA, 13 nt, Human
aguugucucugau

SEQ ID NO: 3513523 - RNA, 16 nt, Human
aguugucucugaugca

SEQ ID NO: 3513524 - RNA, 14 nt, Human
aguugugaaaguuu

SEQ ID NO: 3513525 - RNA, 20 nt, Human
aguugugacaacuuccugag

SEQ ID NO: 3513526 - RNA, 18 nt, Human
aguugugaccuuaguguu

SEQ ID NO: 3513527 - RNA, 13 nt, Human
aguugugaucauc

SEQ ID NO: 3513528 - RNA, 22 nt, Human
aguugugccuuuuauagcuauu

SEQ ID NO: 3513529 - RNA, 18 nt, Human
aguuguggaaagccucug

SEQ ID NO: 3513530 - RNA, 19 nt, Human
aguuguggaaagccucugc

SEQ ID NO: 3513531 - RNA, 21 nt, Human
aguuguggaaagccucugcug

SEQ ID NO: 3513532 - RNA, 16 nt, Human
aguuguggauuucagu

SEQ ID NO: 3513533 - RNA, 20 nt, Human
aguuguggugcugacaaagc

SEQ ID NO: 3513534 - RNA, 20 nt, Human
aguuguguacucuggccucu

SEQ ID NO: 3513535 - RNA, 21 nt, Human
aguugugucuggcaguuuaua

SEQ ID NO: 3513536 - RNA, 16 nt, Human
aguuguguguaugugu

SEQ ID NO: 3513537 - RNA, 18 nt, Human
aguuguguguaugugugu

SEQ ID NO: 3513538 - RNA, 15 nt, Human
aguuguguuguucuu

SEQ ID NO: 3513539 - RNA, 22 nt, Human
aguuguguuuguugcuggcuug

SEQ ID NO: 3513540 - RNA, 19 nt, Human
aguuguguuuuuuaagaug

SEQ ID NO: 3513541 - RNA, 16 nt, Human
aguuguuacauuuuua

SEQ ID NO: 3513542 - RNA, 19 nt, Human
aguuguuacauuuuuaagu

SEQ ID NO: 3513543 - RNA, 20 nt, Human
aguuguuacauuuuuaagug

SEQ ID NO: 3513544 - RNA, 24 nt, Human
aguuguuaccccaagcgcccuggc

SEQ ID NO: 3513545 - RNA, 20 nt, Human
aguuguuacuaacuaaacuc

SEQ ID NO: 3513546 - RNA, 23 nt, Human
aguuguuacuaacuaaacucucu

SEQ ID NO: 3513547 - RNA, 20 nt, Human
aguuguuagauuaagaaaua

SEQ ID NO: 3513548 - RNA, 15 nt, Human
aguuguucaacuauu

SEQ ID NO: 3513549 - RNA, 17 nt, Human
aguuguucaacuauuuu

SEQ ID NO: 3513550 - RNA, 20 nt, Human
aguuguucaauaauaaauau

SEQ ID NO: 3513551 - RNA, 19 nt, Human
aguuguuccuuaagucaga

SEQ ID NO: 3513552 - RNA, 13 nt, Human
aguuguuggccuc

SEQ ID NO: 3513553 - RNA, 14 nt, Human
aguuguuggccucc

SEQ ID NO: 3513554 - RNA, 16 nt, Human
aguuguuguaaccugc

SEQ ID NO: 3513555 - RNA, 18 nt, Human
aguuguuguggguucuau

SEQ ID NO: 3513556 - RNA, 19 nt, Human
aguuguuguggguucuaug

SEQ ID NO: 3513557 - RNA, 13 nt, Human
aguuguuucauug

SEQ ID NO: 3513558 - RNA, 15 nt, Human
aguuguuugugccuu

SEQ ID NO: 3513559 - RNA, 17 nt, Human
aguuguuuguuuuugcu

SEQ ID NO: 3513560 - RNA, 19 nt, Human
aguuguuuucagacucaga

SEQ ID NO: 3513561 - RNA, 17 nt, Human
aguuguuuuuguauauu

SEQ ID NO: 3513562 - RNA, 16 nt, Human
auuauucuuucuccuu

SEQ ID NO: 3513563 - RNA, 20 nt, Human
auuauucuuucuccuuuuuu

SEQ ID NO: 3513564 - RNA, 21 nt, Human
auuauugaaggaagccaaauu

SEQ ID NO: 3513565 - RNA, 14 nt, Human
auuauugaugaaaa

SEQ ID NO: 3513566 - RNA, 19 nt, Human
auuauugcuuauugcuuag

SEQ ID NO: 3513567 - RNA, 23 nt, Human
auuauuguguguuauuuaaauga

SEQ ID NO: 3513568 - RNA, 18 nt, Human
auuauuguugcauuaaaa

SEQ ID NO: 3513569 - RNA, 11 nt, Human
auuauuuaaac

SEQ ID NO: 3513570 - RNA, 22 nt, Human
auuauuuaaaccgcuaaaagaa

SEQ ID NO: 3513571 - RNA, 19 nt, Human
auuauuuaagacuaaaagu

SEQ ID NO: 3513572 - RNA, 15 nt, Human
auuauuuaauaacau

SEQ ID NO: 3513573 - RNA, 15 nt, Human
auuauuuaauugucc

SEQ ID NO: 3513574 - RNA, 14 nt, Human
auuauuuacaagaa

SEQ ID NO: 3513575 - RNA, 14 nt, Human
auuauuuauguauu

SEQ ID NO: 3513576 - RNA, 13 nt, Human
auuauuuauuaca

SEQ ID NO: 3513577 - RNA, 17 nt, Human
auuauuuauuuaauaac

SEQ ID NO: 3513578 - RNA, 15 nt, Human
auuauuuauuuauuu

SEQ ID NO: 3513579 - RNA, 21 nt, Human
auuauuucacuuuagaugcug

SEQ ID NO: 3513580 - RNA, 22 nt, Human
auuauuucuaggaagaauuuua

SEQ ID NO: 3513581 - RNA, 23 nt, Human
auuauuugaaaacauauaaagca

SEQ ID NO: 3513582 - RNA, 21 nt, Human
auuauuugauuauuuaagacu

SEQ ID NO: 3513583 - RNA, 20 nt, Human
auuauuugcauguuauguuu

SEQ ID NO: 3513584 - RNA, 21 nt, Human
auuauuugcauguuauguuua

SEQ ID NO: 3513585 - RNA, 15 nt, Human
auuauuuguaagaua

SEQ ID NO: 3513586 - RNA, 12 nt, Human
auuauuuguguu

SEQ ID NO: 3513587 - RNA, 15 nt, Human
auuauuuguguuuua

SEQ ID NO: 3513588 - RNA, 15 nt, Human
auuauuuuaaacaaa

SEQ ID NO: 3513589 - RNA, 16 nt, Human
auuauuuuaaauuaua

SEQ ID NO: 3513590 - RNA, 16 nt, Human
auuauuuucaccuguu

SEQ ID NO: 3513591 - RNA, 23 nt, Human
auuauuuucauccuugucuuauu

SEQ ID NO: 3513592 - RNA, 16 nt, Human
auuauuuucugucaga

SEQ ID NO: 3513593 - RNA, 14 nt, Human
auuauuuucuucau

SEQ ID NO: 3513594 - RNA, 19 nt, Human
auuauuuuggggucucuuu

SEQ ID NO: 3513595 - RNA, 15 nt, Human
auuauuuuguucaua

SEQ ID NO: 3513596 - RNA, 17 nt, Human
auuauuuuguucauaca

SEQ ID NO: 3513597 - RNA, 18 nt, Human
auuauuuuguucauacau

SEQ ID NO: 3513598 - RNA, 18 nt, Human
auuauuuuuauaauugua

SEQ ID NO: 3513599 - RNA, 17 nt, Human
auuauuuuucacucuaa

SEQ ID NO: 3513600 - RNA, 13 nt, Human
auuauuuuuucag

SEQ ID NO: 3513601 - RNA, 14 nt, Human
auuauuuuuucaga

SEQ ID NO: 3513602 - RNA, 21 nt, Human
auuauuuuuucagaccgaaaa

SEQ ID NO: 3513603 - RNA, 17 nt, Human
auuauuuuuuuaaaauu

SEQ ID NO: 3513604 - RNA, 21 nt, Human
auuauuuuuuuuuuuugaaaa

SEQ ID NO: 3513605 - RNA, 19 nt, Human
auucaaaaagucacaguua

SEQ ID NO: 3513606 - RNA, 17 nt, Human
auucaaaaaguguuuau

SEQ ID NO: 3513607 - RNA, 16 nt, Human
auucaaaaauuaucua

SEQ ID NO: 3513608 - RNA, 20 nt, Human
auucaaaauaggguauauuu

SEQ ID NO: 3513609 - RNA, 15 nt, Human
auucaaaauauuuaa

SEQ ID NO: 3513610 - RNA, 19 nt, Human
auucaaaauugacauugcu

SEQ ID NO: 3513611 - RNA, 17 nt, Human
auucaaacuggggccuc

SEQ ID NO: 3513612 - RNA, 14 nt, Human
auucaaagaaauau

SEQ ID NO: 3513613 - RNA, 21 nt, Human
auucaaagaaucaccuaauua

SEQ ID NO: 3513614 - RNA, 15 nt, Human
auucaaagguucuag

SEQ ID NO: 3513615 - RNA, 18 nt, Human
auucaaagguucuagguu

SEQ ID NO: 3513616 - RNA, 14 nt, Human
auucaaaguguuau

SEQ ID NO: 3513617 - RNA, 18 nt, Human
auucaaaguugccuaaau

SEQ ID NO: 3513618 - RNA, 14 nt, Human
auucaaauaccaau

SEQ ID NO: 3513619 - RNA, 18 nt, Human
auucaaauguauuacagu

SEQ ID NO: 3513620 - RNA, 12 nt, Human
auucaaauuuau

SEQ ID NO: 3513621 - RNA, 13 nt, Human
auucaaauuuauu

SEQ ID NO: 3513622 - RNA, 21 nt, Human
auucaaauuuauuuccaaugu

SEQ ID NO: 3513623 - RNA, 16 nt, Human
auucaaccacuguaaa

SEQ ID NO: 3513624 - RNA, 21 nt, Human
auucaaccauggacuuuauaa

SEQ ID NO: 3513625 - RNA, 16 nt, Human
auucaacccuggagag

SEQ ID NO: 3513626 - RNA, 23 nt, Human
auucaacuaaaaaaaaaaaagua

SEQ ID NO: 3513627 - RNA, 14 nt, Human
auucaacucagacu

SEQ ID NO: 3513628 - RNA, 14 nt, Human
auucaacuuuguaa

SEQ ID NO: 3513629 - RNA, 18 nt, Human
auucaacuuuguaaaaau

SEQ ID NO: 3513630 - RNA, 23 nt, Human
auucaagaaagccagucuuaaca

SEQ ID NO: 3513631 - RNA, 16 nt, Human
auucaaggaauuucuu

SEQ ID NO: 3513632 - RNA, 16 nt, Human
auucaagguaaaauuc

SEQ ID NO: 3513633 - RNA, 18 nt, Human
auucaagguaaaauucua

SEQ ID NO: 3513634 - RNA, 21 nt, Human
auucaagguaaaauucuaaau

SEQ ID NO: 3513635 - RNA, 16 nt, Human
auucaaguuauuguac

SEQ ID NO: 3513636 - RNA, 12 nt, Human
auucaauaaagc

SEQ ID NO: 3513637 - RNA, 13 nt, Human
auucaauaaagcu

SEQ ID NO: 3513638 - RNA, 13 nt, Human
auucaauaaagua

SEQ ID NO: 3513639 - RNA, 21 nt, Human
auucaauaaaguauuuaauua

SEQ ID NO: 3513640 - RNA, 15 nt, Human
auucaauacaaacaa

SEQ ID NO: 3513641 - RNA, 21 nt, Human
auucaauacaaacaaucucuu

SEQ ID NO: 3513642 - RNA, 16 nt, Human
auucaauauccuuugc

SEQ ID NO: 3513643 - RNA, 19 nt, Human
auucaauauccuuugccuc

SEQ ID NO: 3513644 - RNA, 13 nt, Human
auucaauauugac

SEQ ID NO: 3513645 - RNA, 16 nt, Human
auucaaucuguaaacu

SEQ ID NO: 3513646 - RNA, 19 nt, Human
auucaauuaaagaaauaau

SEQ ID NO: 3513647 - RNA, 16 nt, Human
auucaauuccucuggg

SEQ ID NO: 3513648 - RNA, 17 nt, Human
auucaauuccucuggga

SEQ ID NO: 3513649 - RNA, 18 nt, Human
auucaauuccucugggaa

SEQ ID NO: 3513650 - RNA, 14 nt, Human
auucaauuguaaau

SEQ ID NO: 3513651 - RNA, 13 nt, Human
auucacaaacuuu

SEQ ID NO: 3513652 - RNA, 16 nt, Human
auucacaaaguaauuu

SEQ ID NO: 3513653 - RNA, 17 nt, Human
auucacaaaguaauuug

SEQ ID NO: 3513654 - RNA, 16 nt, Human
auuccuuaaauaaacu

SEQ ID NO: 3513655 - RNA, 19 nt, Human
auuccuuagacucuuuucc

SEQ ID NO: 3513656 - RNA, 22 nt, Human
auuccuucagggugaugccagg

SEQ ID NO: 3513657 - RNA, 12 nt, Human
auuccuucccau

SEQ ID NO: 3513658 - RNA, 16 nt, Human
auuccuuccuguucug

SEQ ID NO: 3513659 - RNA, 17 nt, Human
auuccuuccuguucuga

SEQ ID NO: 3513660 - RNA, 15 nt, Human
auuccuucucugaac

SEQ ID NO: 3513661 - RNA, 22 nt, Human
auuccuucuggccuuuccucuc

SEQ ID NO: 3513662 - RNA, 14 nt, Human
auuccuucuuugau

SEQ ID NO: 3513663 - RNA, 20 nt, Human
auuccuucuuugauaauguu

SEQ ID NO: 3513664 - RNA, 19 nt, Human
auuccuugaucauuuuggg

SEQ ID NO: 3513665 - RNA, 12 nt, Human
auuccuugugaa

SEQ ID NO: 3513666 - RNA, 20 nt, Human
auuccuuuaacaacauguuu

SEQ ID NO: 3513667 - RNA, 18 nt, Human
auuccuuucccuuccucu

SEQ ID NO: 3513668 - RNA, 17 nt, Human
auuccuuucccuuuagc

SEQ ID NO: 3513669 - RNA, 20 nt, Human
auuccuuugaagaggaaaau

SEQ ID NO: 3513670 - RNA, 14 nt, Human
auuccuuugcauau

SEQ ID NO: 3513671 - RNA, 16 nt, Human
auuccuuugucuucaa

SEQ ID NO: 3513672 - RNA, 15 nt, Human
auuccuuuucuuguu

SEQ ID NO: 3513673 - RNA, 16 nt, Human
auuccuuuuuauuuau

SEQ ID NO: 3513674 - RNA, 16 nt, Human
auucgaaugaaaagac

SEQ ID NO: 3513675 - RNA, 16 nt, Human
auucgaccugauuuac

SEQ ID NO: 3513676 - RNA, 21 nt, Human
auucgaccugauuuacaguuu

SEQ ID NO: 3513677 - RNA, 18 nt, Human
auucgccacacaguauuu

SEQ ID NO: 3513678 - RNA, 19 nt, Human
auucgcccaaagccagaca

SEQ ID NO: 3513679 - RNA, 21 nt, Human
auucgcuacuaugauuuaauu

SEQ ID NO: 3513680 - RNA, 16 nt, Human
auucguacauaauacu

SEQ ID NO: 3513681 - RNA, 23 nt, Human
auucguacauaauacugaaccac

SEQ ID NO: 3513682 - RNA, 16 nt, Human
auucguguguuuuuuu

SEQ ID NO: 3513683 - RNA, 17 nt, Human
auucguuaucuaauagg

SEQ ID NO: 3513684 - RNA, 19 nt, Human
auucguuguguuuuuuaag

SEQ ID NO: 3513685 - RNA, 14 nt, Human
auucuaaaaugauu

SEQ ID NO: 3513686 - RNA, 16 nt, Human
auucuaaaaugauugu

SEQ ID NO: 3513687 - RNA, 19 nt, Human
auucuaaagagcacuuacu

SEQ ID NO: 3513688 - RNA, 23 nt, Human
auucuaaagagcacuuacuguaa

SEQ ID NO: 3513689 - RNA, 14 nt, Human
auucuaaaggucca

SEQ ID NO: 3513690 - RNA, 18 nt, Human
auucuaaaugaauguuua

SEQ ID NO: 3513691 - RNA, 14 nt, Human
auucuaaauuuuau

SEQ ID NO: 3513692 - RNA, 19 nt, Human
auucuaacuuuuuugcuau

SEQ ID NO: 3513693 - RNA, 18 nt, Human
auucuaagaaauaucugu

SEQ ID NO: 3513694 - RNA, 18 nt, Human
auucuaagacuaaugcuc

SEQ ID NO: 3513695 - RNA, 20 nt, Human
auucuaagacuuacucuaag

SEQ ID NO: 3513696 - RNA, 23 nt, Human
auucuaagacuuacucuaagauc

SEQ ID NO: 3513697 - RNA, 19 nt, Human
auucuaauaagcuaguuga

SEQ ID NO: 3513698 - RNA, 17 nt, Human
auucuaaugauggccca

SEQ ID NO: 3513699 - RNA, 18 nt, Human
auucuaaugauggcccau

SEQ ID NO: 3513700 - RNA, 14 nt, Human
auucuaaugucuuc

SEQ ID NO: 3513701 - RNA, 13 nt, Human
auucuacacagag

SEQ ID NO: 3513702 - RNA, 16 nt, Human
auucuacuugcucugg

SEQ ID NO: 3513703 - RNA, 23 nt, Human
auucuacuugcucuggaccugcc

SEQ ID NO: 3513704 - RNA, 17 nt, Human
auucuacuuuaagcacu

SEQ ID NO: 3513705 - RNA, 16 nt, Human
auucuagauuaccaug

SEQ ID NO: 3513706 - RNA, 16 nt, Human
auucuaggaccugugu

SEQ ID NO: 3513707 - RNA, 17 nt, Human
auucagauuguuaucua

SEQ ID NO: 3513708 - RNA, 19 nt, Human
auucagauuucucuuugaa

SEQ ID NO: 3513709 - RNA, 14 nt, Human
auucagauuuuaaa

SEQ ID NO: 3513710 - RNA, 19 nt, Human
auucagauuuuaaaaaguc

SEQ ID NO: 3513711 - RNA, 15 nt, Human
auucagcaaaccauu

SEQ ID NO: 3513712 - RNA, 23 nt, Human
auucagcaaggcgcuaacuugcu

SEQ ID NO: 3513713 - RNA, 18 nt, Human
auucagcagcaaauuuuc

SEQ ID NO: 3513714 - RNA, 14 nt, Human
auucagccuguuug

SEQ ID NO: 3513715 - RNA, 12 nt, Human
auucagccuucu

SEQ ID NO: 3513716 - RNA, 16 nt, Human
auucagccuucuuuuu

SEQ ID NO: 3513717 - RNA, 22 nt, Human
auucagccuucuuuuucuggac

SEQ ID NO: 3513718 - RNA, 13 nt, Human
auucagcugcccc

SEQ ID NO: 3513719 - RNA, 12 nt, Human
auucagcuucau

SEQ ID NO: 3513720 - RNA, 22 nt, Human
auucaggaaaacugacagagga

SEQ ID NO: 3513721 - RNA, 20 nt, Human
auucaggaaaaggccugggg

SEQ ID NO: 3513722 - RNA, 13 nt, Human
auucaggaagcuc

SEQ ID NO: 3513723 - RNA, 14 nt, Human
auucaggaagcuca

SEQ ID NO: 3513724 - RNA, 20 nt, Human
auucaggaagcucagggccu

SEQ ID NO: 3513725 - RNA, 22 nt, Human
auucaggagaguagaacagaua

SEQ ID NO: 3513726 - RNA, 13 nt, Human
auucaggcugcuu

SEQ ID NO: 3513727 - RNA, 14 nt, Human
auucagggaaggag

SEQ ID NO: 3513728 - RNA, 20 nt, Human
auucaggggcugacacuuca

SEQ ID NO: 3513729 - RNA, 18 nt, Human
auucaggguaaauaggaa

SEQ ID NO: 3513730 - RNA, 16 nt, Human
auucagguaauacaaa

SEQ ID NO: 3513731 - RNA, 19 nt, Human
auucaggugaaaauguuca

SEQ ID NO: 3513732 - RNA, 17 nt, Human
auucaggugcagaggaa

SEQ ID NO: 3513733 - RNA, 12 nt, Human
auucagguuuuu

SEQ ID NO: 3513734 - RNA, 16 nt, Human
auucagguuuuuccuu

SEQ ID NO: 3513735 - RNA, 18 nt, Human
auucaguaacugucaggc

SEQ ID NO: 3513736 - RNA, 14 nt, Human
auucaguauguuuu

SEQ ID NO: 3513737 - RNA, 18 nt, Human
auucaguccuaagaaaga

SEQ ID NO: 3513738 - RNA, 12 nt, Human
auucagucuugc

SEQ ID NO: 3513739 - RNA, 15 nt, Human
auucagucuugccuu

SEQ ID NO: 3513740 - RNA, 17 nt, Human
auucagucuugccuuac

SEQ ID NO: 3513741 - RNA, 21 nt, Human
auucagugagggucuucuuac

SEQ ID NO: 3513742 - RNA, 16 nt, Human
auucagugaugugccu

SEQ ID NO: 3513743 - RNA, 17 nt, Human
auucagugauuacuguc

SEQ ID NO: 3513744 - RNA, 19 nt, Human
auucagugcuucuuaaaga

SEQ ID NO: 3513745 - RNA, 14 nt, Human
auucagugucacug

SEQ ID NO: 3513746 - RNA, 17 nt, Human
auucaguuaagaaaaaa

SEQ ID NO: 3513747 - RNA, 18 nt, Human
auucaguuaagaaaaaaa

SEQ ID NO: 3513748 - RNA, 20 nt, Human
auucaguuaagaaaaaaaua

SEQ ID NO: 3513749 - RNA, 17 nt, Human
auucaguucccagaauc

SEQ ID NO: 3513750 - RNA, 16 nt, Human
auucaguuguuagugu

SEQ ID NO: 3513751 - RNA, 13 nt, Human
auucaguuucaua

SEQ ID NO: 3513752 - RNA, 17 nt, Human
auucaguuucauaaaag

SEQ ID NO: 3513753 - RNA, 18 nt, Human
auucaguuucuaaaauug

SEQ ID NO: 3513754 - RNA, 13 nt, Human
auucaguuuucau

SEQ ID NO: 3513755 - RNA, 21 nt, Human
auucauacuuaaaaauuuauu

SEQ ID NO: 3513756 - RNA, 19 nt, Human
auucauagcagcuuauuca

SEQ ID NO: 3513757 - RNA, 22 nt, Human
auucauagcagcuuauucacaa

SEQ ID NO: 3513758 - RNA, 20 nt, Human
auucauagucuuuggagaaa

SEQ ID NO: 3513759 - RNA, 18 nt, Human
auucauaugcauauuuuu

SEQ ID NO: 3513760 - RNA, 15 nt, Human
auucauauuacaaua

SEQ ID NO: 3513761 - RNA, 17 nt, Human
auucauauuacaauauu

SEQ ID NO: 3513762 - RNA, 19 nt, Human
auucauauuacaauauuug

SEQ ID NO: 3513763 - RNA, 13 nt, Human
auucauauugaau

SEQ ID NO: 3513764 - RNA, 14 nt, Human
auucauauugaaua

SEQ ID NO: 3513765 - RNA, 15 nt, Human
auucauauuggaaaa

SEQ ID NO: 3513766 - RNA, 20 nt, Human
auucauauuuacuucuuaua

SEQ ID NO: 3513767 - RNA, 12 nt, Human
auucauauuugu

SEQ ID NO: 3513768 - RNA, 13 nt, Human
auucauauuugua

SEQ ID NO: 3513769 - RNA, 19 nt, Human
auucauauuuguacuuucu

SEQ ID NO: 3513770 - RNA, 20 nt, Human
auucauauuuucuuucaaaa

SEQ ID NO: 3513771 - RNA, 19 nt, Human
auucaucaaauggaagaca

SEQ ID NO: 3513772 - RNA, 14 nt, Human
auucaucagcauuu

SEQ ID NO: 3513773 - RNA, 18 nt, Human
auucauccaaguuaaaug

SEQ ID NO: 3513774 - RNA, 17 nt, Human
auucaucugucuauauu

SEQ ID NO: 3513775 - RNA, 13 nt, Human
auucaugccuggc

SEQ ID NO: 3513776 - RNA, 21 nt, Human
auucaugcuacugccaaccug

SEQ ID NO: 3513777 - RNA, 22 nt, Human
auucauguuauauuuaaugcau

SEQ ID NO: 3513778 - RNA, 15 nt, Human
auucauuaaauguuu

SEQ ID NO: 3513779 - RNA, 16 nt, Human
auucauuaaauguuug

SEQ ID NO: 3513780 - RNA, 12 nt, Human
auucauuauuug

SEQ ID NO: 3513781 - RNA, 15 nt, Human
auucauuauuuguca

SEQ ID NO: 3513782 - RNA, 16 nt, Human
auucauucauacuuaa

SEQ ID NO: 3513783 - RNA, 17 nt, Human
auucauuccauucugga

SEQ ID NO: 3513784 - RNA, 18 nt, Human
auucauuccauucuggaa

SEQ ID NO: 3513785 - RNA, 12 nt, Human
auucauucucau

SEQ ID NO: 3513786 - RNA, 18 nt, Human
auucauucugcauugcua

SEQ ID NO: 3513787 - RNA, 16 nt, Human
auucauuguauaaaaa

SEQ ID NO: 3513788 - RNA, 21 nt, Human
auucauugugguuauuuuuau

SEQ ID NO: 3513789 - RNA, 14 nt, Human
auucauuguguuac

SEQ ID NO: 3513790 - RNA, 14 nt, Human
auucauuuaaaaug

SEQ ID NO: 3513791 - RNA, 15 nt, Human
auucauuuaaaauga

SEQ ID NO: 3513792 - RNA, 13 nt, Human
auucauuucacau

SEQ ID NO: 3513793 - RNA, 11 nt, Human
auucauuucua

SEQ ID NO: 3513794 - RNA, 18 nt, Human
auucauuuuauauugaaa

SEQ ID NO: 3513795 - RNA, 20 nt, Human
auucauuuuauauugaaaaa

SEQ ID NO: 3513796 - RNA, 22 nt, Human
auucauuuuauauugaaaaaaa

SEQ ID NO: 3513797 - RNA, 21 nt, Human
auucauuuucuagauacaaua

SEQ ID NO: 3513798 - RNA, 14 nt, Human
auucauuuucucua

SEQ ID NO: 3513799 - RNA, 16 nt, Human
auucauuuucucuaau

SEQ ID NO: 3513800 - RNA, 15 nt, Human
auucauuuucucuuu

SEQ ID NO: 3513801 - RNA, 22 nt, Human
auucauuuuugaaacugcauuu

SEQ ID NO: 3513802 - RNA, 17 nt, Human
auucauuuuuuaaauuc

SEQ ID NO: 3513803 - RNA, 15 nt, Human
auuccaaaauauuau

SEQ ID NO: 3513804 - RNA, 17 nt, Human
auuccaaagaacagccu

SEQ ID NO: 3513805 - RNA, 20 nt, Human
auuccaaagaguagaauugc

SEQ ID NO: 3513806 - RNA, 13 nt, Human
auuccaaagcaaa

SEQ ID NO: 3513807 - RNA, 14 nt, Human
auuccaaaggggac

SEQ ID NO: 3513808 - RNA, 16 nt, Human
auuccaaagucucuaa

SEQ ID NO: 3513809 - RNA, 18 nt, Human
auuccaaagucucuaauu

SEQ ID NO: 3513810 - RNA, 14 nt, Human
auaaaaaagaaauc

SEQ ID NO: 3513811 - RNA, 14 nt, Human
auaaaaaagucucu

SEQ ID NO: 3513812 - RNA, 15 nt, Human
auaaaaaagucucua

SEQ ID NO: 3513813 - RNA, 21 nt, Human
auaaaaaauaaucuauuucua

SEQ ID NO: 3513814 - RNA, 15 nt, Human
auaaaaaauuaugac

SEQ ID NO: 3513815 - RNA, 15 nt, Human
auaaaaaauuuugua

SEQ ID NO: 3513816 - RNA, 21 nt, Human
auaaaaaauuuuguaauuuuc

SEQ ID NO: 3513817 - RNA, 12 nt, Human
auaaaaacaaau

SEQ ID NO: 3513818 - RNA, 23 nt, Human
auaaaaacauugccuuugaaugu

SEQ ID NO: 3513819 - RNA, 16 nt, Human
auaaaaacccacaaaa

SEQ ID NO: 3513820 - RNA, 13 nt, Human
auaaaaacuugaa

SEQ ID NO: 3513821 - RNA, 19 nt, Human
auaaaaagauaaucucagu

SEQ ID NO: 3513822 - RNA, 20 nt, Human
auaaaaagccugcaauuuca

SEQ ID NO: 3513823 - RNA, 22 nt, Human
auaaaaagccugcaauuucaua

SEQ ID NO: 3513824 - RNA, 21 nt, Human
auaaaaaggcaccuauaaaac

SEQ ID NO: 3513825 - RNA, 19 nt, Human
auaaaaagugacacagcag

SEQ ID NO: 3513826 - RNA, 20 nt, Human
auaaaaagugacacagcagc

SEQ ID NO: 3513827 - RNA, 11 nt, Human
auaaaaaguua

SEQ ID NO: 3513828 - RNA, 12 nt, Human
auaaaaaguuaa

SEQ ID NO: 3513829 - RNA, 13 nt, Human
auaaaaauaaauu

SEQ ID NO: 3513830 - RNA, 12 nt, Human
auaaaaauauau

SEQ ID NO: 3513831 - RNA, 16 nt, Human
auaaaaauucuagauu

SEQ ID NO: 3513832 - RNA, 16 nt, Human
auaaaacagaguaauc

SEQ ID NO: 3513833 - RNA, 14 nt, Human
auaaaacagcuuug

SEQ ID NO: 3513834 - RNA, 17 nt, Human
auaaaacauuaagaaaa

SEQ ID NO: 3513835 - RNA, 13 nt, Human
auaaaacauuaau

SEQ ID NO: 3513836 - RNA, 13 nt, Human
auaaaacauuaug

SEQ ID NO: 3513837 - RNA, 13 nt, Human
auaaaacugaugu

SEQ ID NO: 3513838 - RNA, 15 nt, Human
auaaaacugauguga

SEQ ID NO: 3513839 - RNA, 18 nt, Human
auaaaacugaugugaaac

SEQ ID NO: 3513840 - RNA, 15 nt, Human
auaaaacuggcuuug

SEQ ID NO: 3513841 - RNA, 11 nt, Human
auaaaacuuuu

SEQ ID NO: 3513842 - RNA, 15 nt, Human
auaaaacuuuuuaaa

SEQ ID NO: 3513843 - RNA, 13 nt, Human
auaaaagaaaauu

SEQ ID NO: 3513844 - RNA, 16 nt, Human
auaaaagaaaauuaca

SEQ ID NO: 3513845 - RNA, 13 nt, Human
auaaaagaaacac

SEQ ID NO: 3513846 - RNA, 17 nt, Human
auaaaagaaaugcacaa

SEQ ID NO: 3513847 - RNA, 21 nt, Human
auaaaagaaaugcacaauguc

SEQ ID NO: 3513848 - RNA, 12 nt, Human
auaaaagacaca

SEQ ID NO: 3513849 - RNA, 14 nt, Human
auaaaagauacauu

SEQ ID NO: 3513850 - RNA, 10 nt, Human
auaaaagaug

SEQ ID NO: 3513851 - RNA, 22 nt, Human
auaaaagauggggucuguaaaa

SEQ ID NO: 3513852 - RNA, 15 nt, Human
auaaaagcauaaaug

SEQ ID NO: 3513853 - RNA, 18 nt, Human
auaaaagcauaaaugcaa

SEQ ID NO: 3513854 - RNA, 16 nt, Human
auugacaaaucugugu

SEQ ID NO: 3513855 - RNA, 17 nt, Human
auugacaaaucugugua

SEQ ID NO: 3513856 - RNA, 20 nt, Human
auugacaaaucuguguauau

SEQ ID NO: 3513857 - RNA, 22 nt, Human
auugacaaaucuguguauauua

SEQ ID NO: 3513858 - RNA, 17 nt, Human
auugacaacacccauuu

SEQ ID NO: 3513859 - RNA, 12 nt, Human
auugacaaguuu

SEQ ID NO: 3513860 - RNA, 15 nt, Human
auugacaauaaaaua

SEQ ID NO: 3513861 - RNA, 20 nt, Human
auugacaauaaaauauuauu

SEQ ID NO: 3513862 - RNA, 14 nt, Human
auugacacagaaaa

SEQ ID NO: 3513863 - RNA, 18 nt, Human
auugacacaguaccauuu

SEQ ID NO: 3513864 - RNA, 13 nt, Human
auugacagcuuug

SEQ ID NO: 3513865 - RNA, 16 nt, Human
auugacagcuuugcug

SEQ ID NO: 3513866 - RNA, 18 nt, Human
auugacagcuuugcugcu

SEQ ID NO: 3513867 - RNA, 19 nt, Human
auugacagcuuugcugcug

SEQ ID NO: 3513868 - RNA, 15 nt, Human
auugacaguaacuug

SEQ ID NO: 3513869 - RNA, 22 nt, Human
auugacaucagcaucaccuaga

SEQ ID NO: 3513870 - RNA, 17 nt, Human
auuguggcugucagcag

SEQ ID NO: 3513871 - RNA, 19 nt, Human
auuguggcugucagcagga

SEQ ID NO: 3513872 - RNA, 21 nt, Human
auugugggacuuauuacaauu

SEQ ID NO: 3513873 - RNA, 18 nt, Human
auugugggggaaaaauaa

SEQ ID NO: 3513874 - RNA, 18 nt, Human
auugugguacaaucucaa

SEQ ID NO: 3513875 - RNA, 19 nt, Human
auugugguacaaucucaaa

SEQ ID NO: 3513876 - RNA, 18 nt, Human
auugugguaggccuuuua

SEQ ID NO: 3513877 - RNA, 23 nt, Human
auugugguaggccuuuuaacauu

SEQ ID NO: 3513878 - RNA, 20 nt, Human
auuguggucacaacuugaug

SEQ ID NO: 3513879 - RNA, 21 nt, Human
auugugguuuauauauuuaaa

SEQ ID NO: 3513880 - RNA, 15 nt, Human
auuguguauauucau

SEQ ID NO: 3513881 - RNA, 16 nt, Human
auugugucuuuugcau

SEQ ID NO: 3513882 - RNA, 12 nt, Human
auugugugaugu

SEQ ID NO: 3513883 - RNA, 20 nt, Human
auuguguggucaguggcucu

SEQ ID NO: 3513884 - RNA, 23 nt, Human
auuguguuuacauuuuauggugc

SEQ ID NO: 3513885 - RNA, 12 nt, Human
auuguguuucua

SEQ ID NO: 3513886 - RNA, 13 nt, Human
auuguuaaaauaa

SEQ ID NO: 3513887 - RNA, 15 nt, Human
auuguuaaaauaacu

SEQ ID NO: 3513888 - RNA, 14 nt, Human
auuguuaaaggcua

SEQ ID NO: 3513889 - RNA, 17 nt, Human
auuguuaacucuugucu

SEQ ID NO: 3513890 - RNA, 19 nt, Human
auuguuaauacaagguaua

SEQ ID NO: 3513891 - RNA, 23 nt, Human
auuguuaauacaagguauaauaa

SEQ ID NO: 3513892 - RNA, 18 nt, Human
auuguuaaucucuguuau

SEQ ID NO: 3513893 - RNA, 15 nt, Human
auuguuaauuucagu

SEQ ID NO: 3513894 - RNA, 15 nt, Human
auuguuacagaagcu

SEQ ID NO: 3513895 - RNA, 21 nt, Human
auuguuacauuauguggaaaa

SEQ ID NO: 3513896 - RNA, 19 nt, Human
auuguuacguagccuaagg

SEQ ID NO: 3513897 - RNA, 18 nt, Human
auuguuagcuuccuuaag

SEQ ID NO: 3513898 - RNA, 22 nt, Human
auuguuauauacauacuaugaa

SEQ ID NO: 3513899 - RNA, 13 nt, Human
auuguuauuaaau

SEQ ID NO: 3513900 - RNA, 18 nt, Human
auuguuccaaaugaaugu

SEQ ID NO: 3513901 - RNA, 14 nt, Human
auuguuccaagaca

SEQ ID NO: 3513902 - RNA, 18 nt, Human
auuguuccaagacauugu

SEQ ID NO: 3513903 - RNA, 21 nt, Human
auuguucccagugacacuuca

SEQ ID NO: 3513904 - RNA, 19 nt, Human
auuguuccuaaguucuuag

SEQ ID NO: 3513905 - RNA, 13 nt, Human
auuguuccuguca

SEQ ID NO: 3513906 - RNA, 19 nt, Human
auuguucuuaguuugcagu

SEQ ID NO: 3513907 - RNA, 18 nt, Human
auuguucuuauucuggca

SEQ ID NO: 3513908 - RNA, 17 nt, Human
auuguugaaaaaguuug

SEQ ID NO: 3513909 - RNA, 18 nt, Human
auuguugaaaaaguuugu

SEQ ID NO: 3513910 - RNA, 20 nt, Human
auuguugaaaaaguuuguuu

SEQ ID NO: 3513911 - RNA, 19 nt, Human
auuguugacaacugugacu

SEQ ID NO: 3513912 - RNA, 18 nt, Human
auuguugacaguucugaa

SEQ ID NO: 3513913 - RNA, 21 nt, Human
auuguugagguggucugaaug

SEQ ID NO: 3513914 - RNA, 22 nt, Human
auuguugagguggucugaaugu

SEQ ID NO: 3513915 - RNA, 12 nt, Human
auuguugcauua

SEQ ID NO: 3513916 - RNA, 16 nt, Human
auuguugcugaaacuu

SEQ ID NO: 3513917 - RNA, 16 nt, Human
auuguugucugcaacu

SEQ ID NO: 3513918 - RNA, 13 nt, Human
auuguuguucugu

SEQ ID NO: 3513919 - RNA, 18 nt, Human
auuguuguucuguuaacu

SEQ ID NO: 3513920 - RNA, 21 nt, Human
auuguuguucuguuaacugaa

SEQ ID NO: 3513921 - RNA, 12 nt, Human
auuguuguuucu

SEQ ID NO: 3513922 - RNA, 14 nt, Human
auuguuguuucuuu

SEQ ID NO: 3513923 - RNA, 16 nt, Human
auuguuguuucuuucu

SEQ ID NO: 3513924 - RNA, 14 nt, Human
auuguuuaaaaacc

SEQ ID NO: 3513925 - RNA, 15 nt, Human
auuguuuaaaaugua

SEQ ID NO: 3513926 - RNA, 16 nt, Human
auuguuuaaagcaacu

SEQ ID NO: 3513927 - RNA, 22 nt, Human
auuguuuaaagcaacugucuau

SEQ ID NO: 3513928 - RNA, 16 nt, Human
auuguuuaucuagaug

SEQ ID NO: 3513929 - RNA, 12 nt, Human
auuguuuaugua

SEQ ID NO: 3513930 - RNA, 21 nt, Human
auuguuuauuuaucagugaca

SEQ ID NO: 3513931 - RNA, 19 nt, Human
auuguuucaaaauaaaaac

SEQ ID NO: 3513932 - RNA, 13 nt, Human
auuguuucaauug

SEQ ID NO: 3513933 - RNA, 22 nt, Human
auuguuucaauugcaucuccca

SEQ ID NO: 3513934 - RNA, 13 nt, Human
auuguuucagaau

SEQ ID NO: 3513935 - RNA, 17 nt, Human
auuguuuccucuuccaa

SEQ ID NO: 3513936 - RNA, 12 nt, Human
auuguuucugca

SEQ ID NO: 3513937 - RNA, 13 nt, Human
auuguuugaaaca

SEQ ID NO: 3513938 - RNA, 16 nt, Human
auuguuugcuuauugu

SEQ ID NO: 3513939 - RNA, 18 nt, Human
auuguuugcuuauuguuc

SEQ ID NO: 3513940 - RNA, 23 nt, Human
auuguuugcuuauuguuccaaga

SEQ ID NO: 3513941 - RNA, 20 nt, Human
auuguuuggcuuccuccuga

SEQ ID NO: 3513942 - RNA, 21 nt, Human
auuguuugggauccuauugaa

SEQ ID NO: 3513943 - RNA, 20 nt, Human
auuguuuuaaucugaaauuc

SEQ ID NO: 3513944 - RNA, 15 nt, Human
auuguuuuacaauag

SEQ ID NO: 3513945 - RNA, 10 nt, Human
auuguuuuca

SEQ ID NO: 3513946 - RNA, 17 nt, Human
auuguuuucaguguaca

SEQ ID NO: 3513947 - RNA, 15 nt, Human
auuguuuucuauuua

SEQ ID NO: 3513948 - RNA, 21 nt, Human
auuguuuucuauuuaugccuu

SEQ ID NO: 3513949 - RNA, 22 nt, Human
auuguuuucuauuuaugccuug

SEQ ID NO: 3513950 - RNA, 19 nt, Human
auuguuuucuuuaaagaug

SEQ ID NO: 3513951 - RNA, 19 nt, Human
auuguuuucuuuuucuacc

SEQ ID NO: 3513952 - RNA, 22 nt, Human
auuguuuugaauauuacuccua

SEQ ID NO: 3513953 - RNA, 18 nt, Human
auuguuuugccaacauug

SEQ ID NO: 3513954 - RNA, 11 nt, Human
auuguuuuucu

SEQ ID NO: 3513955 - RNA, 16 nt, Human
auuguuuuuuaucuuu

SEQ ID NO: 3513956 - RNA, 14 nt, Human
auuuaaaaaaauca

SEQ ID NO: 3513957 - RNA, 16 nt, Human
auuuaaaaaaaucaca

SEQ ID NO: 3513958 - RNA, 17 nt, Human
auuuaaaaaacuaaaaa

SEQ ID NO: 3513959 - RNA, 22 nt, Human
auuuaaaaaacuaaaaacuaga

SEQ ID NO: 3513960 - RNA, 12 nt, Human
auuuaaaaauaa

SEQ ID NO: 3513961 - RNA, 12 nt, Human
auuuaaaaaugu

SEQ ID NO: 3513962 - RNA, 14 nt, Human
auuuaaaaaugucu

SEQ ID NO: 3513963 - RNA, 12 nt, Human
auuuaaaacaaa

SEQ ID NO: 3513964 - RNA, 18 nt, Human
auuuaaaacagacacugg

SEQ ID NO: 3513965 - RNA, 13 nt, Human
auuuaaaacauua

SEQ ID NO: 3513966 - RNA, 19 nt, Human
auuuaaaacauuaaaauau

SEQ ID NO: 3513967 - RNA, 14 nt, Human
auuuaaaagacagc

SEQ ID NO: 3513968 - RNA, 17 nt, Human
auuuaaaagacagcuuu

SEQ ID NO: 3513969 - RNA, 19 nt, Human
auuuaaaagauucauuuuu

SEQ ID NO: 3513970 - RNA, 14 nt, Human
auuuaaaagccugc

SEQ ID NO: 3513971 - RNA, 15 nt, Human
auuuaaaagggaagu

SEQ ID NO: 3513972 - RNA, 22 nt, Human
auuuaaaauagcaaaagaagaa

SEQ ID NO: 3513973 - RNA, 14 nt, Human
auuuaaaaugauua

SEQ ID NO: 3513974 - RNA, 21 nt, Human
auuuaaaauguguuucuuaca

SEQ ID NO: 3513975 - RNA, 17 nt, Human
auuuaaaauugcuaugu

SEQ ID NO: 3513976 - RNA, 21 nt, Human
auuuaaaauugcuauguuacu

SEQ ID NO: 3513977 - RNA, 14 nt, Human
auuuaaacacacag

SEQ ID NO: 3513978 - RNA, 11 nt, Human
auuuaaacaga

SEQ ID NO: 3513979 - RNA, 12 nt, Human
auuuaaacagau

SEQ ID NO: 3513980 - RNA, 15 nt, Human
auuuaaacagcagug

SEQ ID NO: 3513981 - RNA, 15 nt, Human
auuuaaacaggccca

SEQ ID NO: 3513982 - RNA, 18 nt, Human
auuuaaacaggcccagca

SEQ ID NO: 3513983 - RNA, 20 nt, Human
auuuaaaccgcuaaaagaaa

SEQ ID NO: 3513984 - RNA, 14 nt, Human
auuuaaaccuuuua

SEQ ID NO: 3513985 - RNA, 15 nt, Human
auuuaaacucugaau

SEQ ID NO: 3513986 - RNA, 18 nt, Human
auuuaaacucugaauuua

SEQ ID NO: 3513987 - RNA, 21 nt, Human
auuuaaacucugaauuuaucu

SEQ ID NO: 3513988 - RNA, 19 nt, Human
auuuaaagaacacccuaua

SEQ ID NO: 3513989 - RNA, 21 nt, Human
auuuaaagacagggaagagca

SEQ ID NO: 3513990 - RNA, 19 nt, Human
auuuaaagauauuguucaa

SEQ ID NO: 3513991 - RNA, 15 nt, Human
auuuaaagccuccuc

SEQ ID NO: 3513992 - RNA, 18 nt, Human
auuuaaaggcccuaucug

SEQ ID NO: 3513993 - RNA, 21 nt, Human
auuuaaaggcuaccuuauugu

SEQ ID NO: 3513994 - RNA, 14 nt, Human
auuuaaaguuguuu

SEQ ID NO: 3513995 - RNA, 20 nt, Human
auuuaaauaucugaacauuu

SEQ ID NO: 3513996 - RNA, 23 nt, Human
auuuaaauaucugaacauuuacu

SEQ ID NO: 3513997 - RNA, 16 nt, Human
auuuaaauauuaaaua

SEQ ID NO: 3513998 - RNA, 13 nt, Human
auuuaaaugaaag

SEQ ID NO: 3513999 - RNA, 24 nt, Human
auuuagggaguauucuaauaagcu

SEQ ID NO: 3514000 - RNA, 22 nt, Human
auuuaggguacuaaauuuaaau

SEQ ID NO: 3514001 - RNA, 14 nt, Human
auuuagguuucuga

SEQ ID NO: 3514002 - RNA, 17 nt, Human
auuuagguuuuuauuag

SEQ ID NO: 3514003 - RNA, 15 nt, Human
auuuaguaaauguua

SEQ ID NO: 3514004 - RNA, 14 nt, Human
auuuaguaagaaua

SEQ ID NO: 3514005 - RNA, 21 nt, Human
auuuaguaggugaguuuucac

SEQ ID NO: 3514006 - RNA, 20 nt, Human
auuuaguaucuuuuuauuca

SEQ ID NO: 3514007 - RNA, 13 nt, Human
auuuagucucuuu

SEQ ID NO: 3514008 - RNA, 16 nt, Human
auuuagucucuuuauu

SEQ ID NO: 3514009 - RNA, 20 nt, Human
auuuagugaaagcuagagau

SEQ ID NO: 3514010 - RNA, 21 nt, Human
auuuagugaguuauuccuuga

SEQ ID NO: 3514011 - RNA, 16 nt, Human
auuuaguguucauaaa

SEQ ID NO: 3514012 - RNA, 17 nt, Human
auuuaguguucauaaau

SEQ ID NO: 3514013 - RNA, 21 nt, Human
auuuaguguuuuuaccucugu

SEQ ID NO: 3514014 - RNA, 13 nt, Human
auuuaguuauagu

SEQ ID NO: 3514015 - RNA, 14 nt, Human
auuuaguuauaguu

SEQ ID NO: 3514016 - RNA, 16 nt, Human
auuuaguucuuuguua

SEQ ID NO: 3514017 - RNA, 15 nt, Human
auuuaguuguuguag

SEQ ID NO: 3514018 - RNA, 19 nt, Human
auuuaguuguuguagagaa

SEQ ID NO: 3514019 - RNA, 20 nt, Human
auuuaguuguuguagagaaa

SEQ ID NO: 3514020 - RNA, 12 nt, Human
auuuaguuucag

SEQ ID NO: 3514021 - RNA, 14 nt, Human
auuuaguuucagua

SEQ ID NO: 3514022 - RNA, 20 nt, Human
auuuaguuucaguagauugc

SEQ ID NO: 3514023 - RNA, 22 nt, Human
auuuauaaaaauaaaaaacacu

SEQ ID NO: 3514024 - RNA, 19 nt, Human
auuuauaaaauuagaaagc

SEQ ID NO: 3514025 - RNA, 22 nt, Human
auaauuaucggaagcagugccu

SEQ ID NO: 3514026 - RNA, 21 nt, Human
auaauuaugaguuugcuuaug

SEQ ID NO: 3514027 - RNA, 22 nt, Human
auaauuauguuauugaaaaaaa

SEQ ID NO: 3514028 - RNA, 23 nt, Human
auaauuauguuauugaaaaaaau

SEQ ID NO: 3514029 - RNA, 22 nt, Human
auaauuauuuauuacauaauuu

SEQ ID NO: 3514030 - RNA, 18 nt, Human
auaauuauuuauuuaaua

SEQ ID NO: 3514031 - RNA, 19 nt, Human
auaauuauuugucucagau

SEQ ID NO: 3514032 - RNA, 18 nt, Human
auaauucacucaagcacu

SEQ ID NO: 3514033 - RNA, 22 nt, Human
auaauucacuguacuaucaggu

SEQ ID NO: 3514034 - RNA, 20 nt, Human
auaauucaguauguuuuaca

SEQ ID NO: 3514035 - RNA, 16 nt, Human
auaauucuaaaucccu

SEQ ID NO: 3514036 - RNA, 22 nt, Human
auaauucugaaguuauauuucc

SEQ ID NO: 3514037 - RNA, 15 nt, Human
auaauucuggagaua

SEQ ID NO: 3514038 - RNA, 19 nt, Human
auaauucugggaagcaaaa

SEQ ID NO: 3514039 - RNA, 11 nt, Human
auaauucugua

SEQ ID NO: 3514040 - RNA, 12 nt, Human
auaauucuguaa

SEQ ID NO: 3514041 - RNA, 13 nt, Human
auaauucuguaaa

SEQ ID NO: 3514042 - RNA, 14 nt, Human
auaauucuguaaau

SEQ ID NO: 3514043 - RNA, 13 nt, Human
auaauucuguaca

SEQ ID NO: 3514044 - RNA, 16 nt, Human
auaauucuuauuuugu

SEQ ID NO: 3514045 - RNA, 15 nt, Human
auaauucuuucaaua

SEQ ID NO: 3514046 - RNA, 14 nt, Human
auaauucuuuuuua

SEQ ID NO: 3514047 - RNA, 17 nt, Human
auaauucuuuuuuauua

SEQ ID NO: 3514048 - RNA, 14 nt, Human
auaauugaucaaau

SEQ ID NO: 3514049 - RNA, 14 nt, Human
auaauugcauugac

SEQ ID NO: 3514050 - RNA, 19 nt, Human
auaauugcucauaagcaau

SEQ ID NO: 3514051 - RNA, 17 nt, Human
auaauuggauuuccuaa

SEQ ID NO: 3514052 - RNA, 15 nt, Human
auaauuguacaaaau

SEQ ID NO: 3514053 - RNA, 21 nt, Human
auaauuguacaaaauuaagca

SEQ ID NO: 3514054 - RNA, 13 nt, Human
auaauuguaucgu

SEQ ID NO: 3514055 - RNA, 18 nt, Human
auaauuguugaaauuuug

SEQ ID NO: 3514056 - RNA, 22 nt, Human
auaauuguugaaauuuugcaaa

SEQ ID NO: 3514057 - RNA, 17 nt, Human
auaauuguuguucuguu

SEQ ID NO: 3514058 - RNA, 21 nt, Human
auaauuuaaaaauauauuuau

SEQ ID NO: 3514059 - RNA, 23 nt, Human
auaauuuaacuacccuuaauuac

SEQ ID NO: 3514060 - RNA, 12 nt, Human
auaauuuaagag

SEQ ID NO: 3514061 - RNA, 15 nt, Human
auaauuuaaugcaug

SEQ ID NO: 3514062 - RNA, 22 nt, Human
auaauuucccaauuaggaagug

SEQ ID NO: 3514063 - RNA, 14 nt, Human
auaauuucuaaugu

SEQ ID NO: 3514064 - RNA, 14 nt, Human
auaauuuguuucca

SEQ ID NO: 3514065 - RNA, 15 nt, Human
auaauuuuaaaaaug

SEQ ID NO: 3514066 - RNA, 16 nt, Human
auaauuuuaaaaaugg

SEQ ID NO: 3514067 - RNA, 14 nt, Human
auaauuuuaaaugu

SEQ ID NO: 3514068 - RNA, 13 nt, Human
auaauuuuaagau

SEQ ID NO: 3514069 - RNA, 15 nt, Human
auaauuuuaugaaug

SEQ ID NO: 3514070 - RNA, 22 nt, Human
auaauuuuccuuuaauaugaaa

SEQ ID NO: 3514071 - RNA, 13 nt, Human
auaauuuugauag

SEQ ID NO: 3514072 - RNA, 16 nt, Human
auaauuuugcauaaaa

SEQ ID NO: 3514073 - RNA, 13 nt, Human
auaauuuugcugg

SEQ ID NO: 3514074 - RNA, 14 nt, Human
auaauuuuuauauu

SEQ ID NO: 3514075 - RNA, 21 nt, Human
auaauuuuuauauuugaaaua

SEQ ID NO: 3514076 - RNA, 13 nt, Human
auaauuuuuugua

SEQ ID NO: 3514077 - RNA, 20 nt, Human
auaauuuuuuucaauauuua

SEQ ID NO: 3514078 - RNA, 14 nt, Human
auacaaaaagaaaa

SEQ ID NO: 3514079 - RNA, 12 nt, Human
auacaaaagcau

SEQ ID NO: 3514080 - RNA, 16 nt, Human
auacaaacaauggaaa

SEQ ID NO: 3514081 - RNA, 18 nt, Human
auacaaacaauggaaacu

SEQ ID NO: 3514082 - RNA, 16 nt, Human
auacaaauauauuguu

SEQ ID NO: 3514083 - RNA, 20 nt, Human
auacaaaugcaucuuugaug

SEQ ID NO: 3514084 - RNA, 21 nt, Human
auacaaaugcaucuuugaugu

SEQ ID NO: 3514085 - RNA, 17 nt, Human
auacaaauggauuuugg

SEQ ID NO: 3514086 - RNA, 18 nt, Human
auacaaauuagaaaaugu

SEQ ID NO: 3514087 - RNA, 12 nt, Human
auacaacaaagg

SEQ ID NO: 3514088 - RNA, 15 nt, Human
auacaacacaaagag

SEQ ID NO: 3514089 - RNA, 20 nt, Human
auacaacagugcuaaaaaug

SEQ ID NO: 3514090 - RNA, 18 nt, Human
auacaaccuucauuuaaa

SEQ ID NO: 3514091 - RNA, 19 nt, Human
auacaaguucuuggucccu

SEQ ID NO: 3514092 - RNA, 10 nt, Human
auacaauaaa

SEQ ID NO: 3514093 - RNA, 21 nt, Human
auacaauaaacuauuggaaag

SEQ ID NO: 3514094 - RNA, 15 nt, Human
auacaauacauagga

SEQ ID NO: 3514095 - RNA, 15 nt, Human
auacaauauauaaaa

SEQ ID NO: 3514096 - RNA, 13 nt, Human
auacaaucagcug

SEQ ID NO: 3514097 - RNA, 18 nt, Human
auacaaugaacacuuaua

SEQ ID NO: 3514098 - RNA, 22 nt, Human
auacaaugaugcuauuugcaau

SEQ ID NO: 3514099 - RNA, 18 nt, Human
auacaauguauuuauuua

SEQ ID NO: 3514100 - RNA, 21 nt, Human
auacaauguauuuauuuaaaa

SEQ ID NO: 3514101 - RNA, 15 nt, Human
auacaauucuacauu

SEQ ID NO: 3514102 - RNA, 14 nt, Human
auacaauuuuguuu

SEQ ID NO: 3514103 - RNA, 18 nt, Human
auacaauuuuguuucugu

SEQ ID NO: 3514104 - RNA, 20 nt, Human
auacaauuuuguuucuguac

SEQ ID NO: 3514105 - RNA, 18 nt, Human
auacaauuuuuauuucuu

SEQ ID NO: 3514106 - RNA, 14 nt, Human
auacacaaaaucaa

SEQ ID NO: 3514107 - RNA, 16 nt, Human
auacacaaaaucaaau

SEQ ID NO: 3514108 - RNA, 11 nt, Human
auacacacaca

SEQ ID NO: 3514109 - RNA, 14 nt, Human
auacacacacacac

SEQ ID NO: 3514110 - RNA, 18 nt, Human
auacacacacacacacag

SEQ ID NO: 3514111 - RNA, 20 nt, Human
auacacacacacacacagcc

SEQ ID NO: 3514112 - RNA, 14 nt, Human
auacacacgcugcc

SEQ ID NO: 3514113 - RNA, 18 nt, Human
auacacacucaaaucaag

SEQ ID NO: 3514114 - RNA, 20 nt, Human
auacacacucaaaucaagaa

SEQ ID NO: 3514115 - RNA, 14 nt, Human
auacacaggauccu

SEQ ID NO: 3514116 - RNA, 21 nt, Human
auacacauauaccuauaaugu

SEQ ID NO: 3514117 - RNA, 15 nt, Human
auacacauauagugu

SEQ ID NO: 3514118 - RNA, 14 nt, Human
auacacauuugcua

SEQ ID NO: 3514119 - RNA, 20 nt, Human
auacaccaccucacuccugu

SEQ ID NO: 3514120 - RNA, 19 nt, Human
auacaccacuacauucugu

SEQ ID NO: 3514121 - RNA, 21 nt, Human
auacaccacuacauucuguua

SEQ ID NO: 3514122 - RNA, 22 nt, Human
auacacccccucuucugagcac

SEQ ID NO: 3514123 - RNA, 21 nt, Human
auacacuaugaagauguuuca

SEQ ID NO: 3514124 - RNA, 20 nt, Human
auacacuguauguuauagaa

SEQ ID NO: 3514125 - RNA, 11 nt, Human
auacacugugu

SEQ ID NO: 3514126 - RNA, 19 nt, Human
auacacuuggaguuugcau

SEQ ID NO: 3514127 - RNA, 17 nt, Human
auacacuuguauaaaug

SEQ ID NO: 3514128 - RNA, 18 nt, Human
auacacuuguauaaaugu

SEQ ID NO: 3514129 - RNA, 20 nt, Human
auacacuugugauuauaaaa

SEQ ID NO: 3514130 - RNA, 17 nt, Human
auacacuuuguugcaag

SEQ ID NO: 3514131 - RNA, 13 nt, Human
auacagaaaaguu

SEQ ID NO: 3514132 - RNA, 15 nt, Human
auacagaacucuuuc

SEQ ID NO: 3514133 - RNA, 20 nt, Human
auacagaacucuuucaaaac

SEQ ID NO: 3514134 - RNA, 23 nt, Human
auacagaacucuuucaaaaccuu

SEQ ID NO: 3514135 - RNA, 22 nt, Human
auacagaauugugucugcagga

SEQ ID NO: 3514136 - RNA, 14 nt, Human
auacagacacuaag

SEQ ID NO: 3514137 - RNA, 19 nt, Human
auacagacacuaaguuaua

SEQ ID NO: 3514138 - RNA, 23 nt, Human
auacagacacuaaguuauaguau

SEQ ID NO: 3514139 - RNA, 12 nt, Human
auacagaggaaa

SEQ ID NO: 3514140 - RNA, 21 nt, Human
auacagaggaaaucuguaaca

SEQ ID NO: 3514141 - RNA, 17 nt, Human
auacagaggcaacugca

SEQ ID NO: 3514142 - RNA, 16 nt, Human
auacagaugaaaauuu

SEQ ID NO: 3514143 - RNA, 17 nt, Human
auacagauuuugauagc

SEQ ID NO: 3514144 - RNA, 16 nt, Human
auuuaaacagcagugu

SEQ ID NO: 3514145 - RNA, 19 nt, Human
auuuaaacaggcccagcau

SEQ ID NO: 3514146 - RNA, 13 nt, Human
auuuaaacccauu

SEQ ID NO: 3514147 - RNA, 20 nt, Human
auuuaaacccauuuuaguca

SEQ ID NO: 3514148 - RNA, 22 nt, Human
auuuaaaccgcuaaaagaaacu

SEQ ID NO: 3514149 - RNA, 19 nt, Human
auuuaaacuauaagcaaga

SEQ ID NO: 3514150 - RNA, 20 nt, Human
auuuaaacuauaagcaagaa

SEQ ID NO: 3514151 - RNA, 16 nt, Human
auuuaaacuaucuugu

SEQ ID NO: 3514152 - RNA, 18 nt, Human
auuuaaacucaagacaau

SEQ ID NO: 3514153 - RNA, 19 nt, Human
auuuaaagaaaaaaauguc

SEQ ID NO: 3514154 - RNA, 19 nt, Human
auuuaaagcagguucuugu

SEQ ID NO: 3514155 - RNA, 21 nt, Human
auuuaaagcauugcuguuaug

SEQ ID NO: 3514156 - RNA, 16 nt, Human
auuuaaagcauugcuu

SEQ ID NO: 3514157 - RNA, 20 nt, Human
auuuaaaggcccuaucuguu

SEQ ID NO: 3514158 - RNA, 17 nt, Human
auuuaaagggaaauuga

SEQ ID NO: 3514159 - RNA, 18 nt, Human
auuuaaauauaauucugu

SEQ ID NO: 3514160 - RNA, 20 nt, Human
auuuaaauauaauucuguaa

SEQ ID NO: 3514161 - RNA, 23 nt, Human
auuuaaauauaauucuguaaaug

SEQ ID NO: 3514162 - RNA, 13 nt, Human
auuuaaaucuguu

SEQ ID NO: 3514163 - RNA, 16 nt, Human
auuuaaauucuuuuuu

SEQ ID NO: 3514164 - RNA, 16 nt, Human
auuuaaauuuaaguaa

SEQ ID NO: 3514165 - RNA, 20 nt, Human
auuuaacaaugcgaauggua

SEQ ID NO: 3514166 - RNA, 13 nt, Human
auuuaacagaaau

SEQ ID NO: 3514167 - RNA, 14 nt, Human
auuuaacagaaaug

SEQ ID NO: 3514168 - RNA, 20 nt, Human
auuuaacagaaauguacagc

SEQ ID NO: 3514169 - RNA, 16 nt, Human
auuuaacagaaauugu

SEQ ID NO: 3514170 - RNA, 15 nt, Human
auuuaacagcugaau

SEQ ID NO: 3514171 - RNA, 21 nt, Human
auuuaacagcugaauuaucua

SEQ ID NO: 3514172 - RNA, 15 nt, Human
auuuaacauuauuua

SEQ ID NO: 3514173 - RNA, 14 nt, Human
auuuaacccagcuc

SEQ ID NO: 3514174 - RNA, 16 nt, Human
auuuaaccccccugua

SEQ ID NO: 3514175 - RNA, 23 nt, Human
auuuaaccccccuguacacaacu

SEQ ID NO: 3514176 - RNA, 18 nt, Human
auuuaacuacccuuaauu

SEQ ID NO: 3514177 - RNA, 19 nt, Human
auuuaacuacccuuaauua

SEQ ID NO: 3514178 - RNA, 13 nt, Human
auuuaacugaaga

SEQ ID NO: 3514179 - RNA, 22 nt, Human
auuuaacuggugcacuuuguaa

SEQ ID NO: 3514180 - RNA, 23 nt, Human
auuuaacuggugcacuuuguaaa

SEQ ID NO: 3514181 - RNA, 17 nt, Human
auuuaacuugagcuuua

SEQ ID NO: 3514182 - RNA, 21 nt, Human
auuuaacuugaggguaauaaa

SEQ ID NO: 3514183 - RNA, 22 nt, Human
auuuaacuugaggguaauaaac

SEQ ID NO: 3514184 - RNA, 21 nt, Human
auuuaagaaaauacaauaaac

SEQ ID NO: 3514185 - RNA, 15 nt, Human
auuuaagauaauuau

SEQ ID NO: 3514186 - RNA, 13 nt, Human
auuuaagauguga

SEQ ID NO: 3514187 - RNA, 15 nt, Human
auuuaagaugugaaa

SEQ ID NO: 3514188 - RNA, 16 nt, Human
auuuaagcaacaucuu

SEQ ID NO: 3514189 - RNA, 15 nt, Human
auuuaagcauuguuu

SEQ ID NO: 3514190 - RNA, 22 nt, Human
auuuaagccuaaagauuuugau

SEQ ID NO: 3514191 - RNA, 16 nt, Human
auuuaagcuuuccugu

SEQ ID NO: 3514192 - RNA, 14 nt, Human
auuuaagggaaaaa

SEQ ID NO: 3514193 - RNA, 18 nt, Human
auuuaagggaaaaauaua

SEQ ID NO: 3514194 - RNA, 17 nt, Human
auuuaagggaaagaaaa

SEQ ID NO: 3514195 - RNA, 19 nt, Human
auuuaagggaaagaaaaug

SEQ ID NO: 3514196 - RNA, 23 nt, Human
auuuaagggggaaaaagugucaa

SEQ ID NO: 3514197 - RNA, 20 nt, Human
auuuaaguuuugacaagcug

SEQ ID NO: 3514198 - RNA, 16 nt, Human
auuuaauaaaaaaaca

SEQ ID NO: 3514199 - RNA, 19 nt, Human
auuuaauaaaauaauucua

SEQ ID NO: 3514200 - RNA, 16 nt, Human
auuuaauaaaugugcc

SEQ ID NO: 3514201 - RNA, 13 nt, Human
auuuaauacagca

SEQ ID NO: 3514202 - RNA, 17 nt, Human
auuuaauagcaaagaau

SEQ ID NO: 3514203 - RNA, 14 nt, Human
auuuaauaguguua

SEQ ID NO: 3514204 - RNA, 23 nt, Human
auuuaauauaaaguuuuauauau

SEQ ID NO: 3514205 - RNA, 14 nt, Human
auuuaauauagcua

SEQ ID NO: 3514206 - RNA, 19 nt, Human
auuuaauauagcuauuuuu

SEQ ID NO: 3514207 - RNA, 14 nt, Human
auuuaauaugcaaa

SEQ ID NO: 3514208 - RNA, 15 nt, Human
auuuaauaugcaaag

SEQ ID NO: 3514209 - RNA, 14 nt, Human
auuuaauauuacag

SEQ ID NO: 3514210 - RNA, 16 nt, Human
auuuaauauuuacucu

SEQ ID NO: 3514211 - RNA, 15 nt, Human
auuuaauauuuugca

SEQ ID NO: 3514212 - RNA, 21 nt, Human
auuuaaugaaagacuguacaa

SEQ ID NO: 3514213 - RNA, 17 nt, Human
auuuaauggggaggaca

SEQ ID NO: 3514214 - RNA, 15 nt, Human
auuuaaugugaguuu

SEQ ID NO: 3514215 - RNA, 19 nt, Human
auuuaauguugaacaaaau

SEQ ID NO: 3514216 - RNA, 18 nt, Human
auuuaauguuuuaaaugu

SEQ ID NO: 3514217 - RNA, 20 nt, Human
auuuaauguuuuaaauguac

SEQ ID NO: 3514218 - RNA, 23 nt, Human
auuuaauguuuuaaauguacaga

SEQ ID NO: 3514219 - RNA, 19 nt, Human
auuuaauuaaucaugaaug

SEQ ID NO: 3514220 - RNA, 15 nt, Human
auuuaauuagugcua

SEQ ID NO: 3514221 - RNA, 20 nt, Human
auuuaauuagugcuaagugu

SEQ ID NO: 3514222 - RNA, 23 nt, Human
auuuaauuagugcuaagugugaa

SEQ ID NO: 3514223 - RNA, 15 nt, Human
auuuaauucauguuu

SEQ ID NO: 3514224 - RNA, 17 nt, Human
auuuaauucauguuucu

SEQ ID NO: 3514225 - RNA, 16 nt, Human
auuuaauucucuugaa

SEQ ID NO: 3514226 - RNA, 16 nt, Human
auuuaauuguaaacug

SEQ ID NO: 3514227 - RNA, 17 nt, Human
auuuaauuguaaacugu

SEQ ID NO: 3514228 - RNA, 12 nt, Human
auuuaauuucca

SEQ ID NO: 3514229 - RNA, 15 nt, Human
auuuaauuugaaggu

SEQ ID NO: 3514230 - RNA, 17 nt, Human
auuuaauuugccaaaau

SEQ ID NO: 3514231 - RNA, 17 nt, Human
auagguccuuuagaaac

SEQ ID NO: 3514232 - RNA, 15 nt, Human
auaggucucuucucc

SEQ ID NO: 3514233 - RNA, 17 nt, Human
auaggucucuucuccca

SEQ ID NO: 3514234 - RNA, 15 nt, Human
auaggucugaaauuu

SEQ ID NO: 3514235 - RNA, 15 nt, Human
auaggugcuacaaaa

SEQ ID NO: 3514236 - RNA, 13 nt, Human
auagguggccucu

SEQ ID NO: 3514237 - RNA, 21 nt, Human
auagguuaaaaaaaaaaguca

SEQ ID NO: 3514238 - RNA, 12 nt, Human
auagguuauuuu

SEQ ID NO: 3514239 - RNA, 18 nt, Human
auagguuguaaauguguu

SEQ ID NO: 3514240 - RNA, 12 nt, Human
auagguuuagag

SEQ ID NO: 3514241 - RNA, 12 nt, Human
auagguuucuaa

SEQ ID NO: 3514242 - RNA, 14 nt, Human
auagguuuggacaa

SEQ ID NO: 3514243 - RNA, 17 nt, Human
auagguuuuguuugcua

SEQ ID NO: 3514244 - RNA, 13 nt, Human
auaguaaaaauaa

SEQ ID NO: 3514245 - RNA, 14 nt, Human
auaguaaaaauaaa

SEQ ID NO: 3514246 - RNA, 18 nt, Human
auaguaaaagauaacaag

SEQ ID NO: 3514247 - RNA, 19 nt, Human
auaguaaaucacgcuuuuu

SEQ ID NO: 3514248 - RNA, 14 nt, Human
auaguaaauguagu

SEQ ID NO: 3514249 - RNA, 16 nt, Human
auaguaaauguaguuc

SEQ ID NO: 3514250 - RNA, 19 nt, Human
auaguaacugacaugauua

SEQ ID NO: 3514251 - RNA, 13 nt, Human
auaguaagauuga

SEQ ID NO: 3514252 - RNA, 13 nt, Human
auaguaagcauag

SEQ ID NO: 3514253 - RNA, 23 nt, Human
auaguaaugaguuuaaaaaucaa

SEQ ID NO: 3514254 - RNA, 14 nt, Human
auaguaauuuguaa

SEQ ID NO: 3514255 - RNA, 16 nt, Human
auaguaauuuguaaag

SEQ ID NO: 3514256 - RNA, 19 nt, Human
auaguaccauuuauacaaa

SEQ ID NO: 3514257 - RNA, 14 nt, Human
auaguaccuuugcu

SEQ ID NO: 3514258 - RNA, 22 nt, Human
auaguacuagagauauuuugua

SEQ ID NO: 3514259 - RNA, 22 nt, Human
auaguagagugauauggagcaa

SEQ ID NO: 3514260 - RNA, 22 nt, Human
auaguagauguggccuuugaau

SEQ ID NO: 3514261 - RNA, 15 nt, Human
auaguagcauacauu

SEQ ID NO: 3514262 - RNA, 17 nt, Human
auaguauaucuggacaa

SEQ ID NO: 3514263 - RNA, 17 nt, Human
auaguauauuaaaaaug

SEQ ID NO: 3514264 - RNA, 16 nt, Human
auaguaugguggcugg

SEQ ID NO: 3514265 - RNA, 22 nt, Human
auaguauuccauugugugagug

SEQ ID NO: 3514266 - RNA, 14 nt, Human
auaguauuugaaaa

SEQ ID NO: 3514267 - RNA, 18 nt, Human
auaguauuugaaaacaga

SEQ ID NO: 3514268 - RNA, 19 nt, Human
auaguauuugaaaacagaa

SEQ ID NO: 3514269 - RNA, 20 nt, Human
auaguauuugagaguucuaa

SEQ ID NO: 3514270 - RNA, 23 nt, Human
auaguauuugagaguucuaaauu

SEQ ID NO: 3514271 - RNA, 21 nt, Human
auaguauuugauucaaaauau

SEQ ID NO: 3514272 - RNA, 21 nt, Human
auagucaagaaaaauuauugu

SEQ ID NO: 3514273 - RNA, 16 nt, Human
auagucaccuuuuaaa

SEQ ID NO: 3514274 - RNA, 23 nt, Human
auagucaccuuuuaaauccuguu

SEQ ID NO: 3514275 - RNA, 16 nt, Human
auagucauuccaaaua

SEQ ID NO: 3514276 - RNA, 17 nt, Human
auaguccagcuuuguuc

SEQ ID NO: 3514277 - RNA, 17 nt, Human
auagucuaguguaguau

SEQ ID NO: 3514278 - RNA, 14 nt, Human
auagucucuuuaaa

SEQ ID NO: 3514279 - RNA, 16 nt, Human
auagucuuuugcuuuu

SEQ ID NO: 3514280 - RNA, 14 nt, Human
auagugacgauacu

SEQ ID NO: 3514281 - RNA, 15 nt, Human
auagugaucaagaag

SEQ ID NO: 3514282 - RNA, 20 nt, Human
auagugcaacuaugaaugua

SEQ ID NO: 3514283 - RNA, 18 nt, Human
auagugcaauauauuuug

SEQ ID NO: 3514284 - RNA, 15 nt, Human
auagugcacaaaaug

SEQ ID NO: 3514285 - RNA, 14 nt, Human
auagugcuaacaug

SEQ ID NO: 3514286 - RNA, 19 nt, Human
auagugcuaacaugaagac

SEQ ID NO: 3514287 - RNA, 15 nt, Human
auagugcuauauaua

SEQ ID NO: 3514288 - RNA, 20 nt, Human
auagugcucgcuuucuaugu

SEQ ID NO: 3514289 - RNA, 22 nt, Human
auuuuaugguuauguuuuucug

SEQ ID NO: 3514290 - RNA, 18 nt, Human
auuuuauguaaaauuuug

SEQ ID NO: 3514291 - RNA, 14 nt, Human
auuuuauguauguu

SEQ ID NO: 3514292 - RNA, 22 nt, Human
auuuuauguauguuuacacugu

SEQ ID NO: 3514293 - RNA, 23 nt, Human
auuuuauguauguuuacacuguc

SEQ ID NO: 3514294 - RNA, 13 nt, Human
auuuuaugucuuu

SEQ ID NO: 3514295 - RNA, 18 nt, Human
auuuuauguuauauauaa

SEQ ID NO: 3514296 - RNA, 18 nt, Human
auuuuauguugacauuug

SEQ ID NO: 3514297 - RNA, 14 nt, Human
auuuuauguugcau

SEQ ID NO: 3514298 - RNA, 15 nt, Human
auuuuauuacuguuu

SEQ ID NO: 3514299 - RNA, 18 nt, Human
auuuuauuacuguuuauu

SEQ ID NO: 3514300 - RNA, 11 nt, Human
auuuuauuaug

SEQ ID NO: 3514301 - RNA, 14 nt, Human
auuuuauuaugaaa

SEQ ID NO: 3514302 - RNA, 18 nt, Human
auuuuauuaugaaacuug

SEQ ID NO: 3514303 - RNA, 12 nt, Human
auuuuauuaugc

SEQ ID NO: 3514304 - RNA, 16 nt, Human
auuuuauuauguaaau

SEQ ID NO: 3514305 - RNA, 17 nt, Human
auuuuauuauguaaauc

SEQ ID NO: 3514306 - RNA, 20 nt, Human
auuuuauuauguaaauccca

SEQ ID NO: 3514307 - RNA, 16 nt, Human
auuuuauucaagguaa

SEQ ID NO: 3514308 - RNA, 23 nt, Human
auuuuauucaagguaaaauucua

SEQ ID NO: 3514309 - RNA, 11 nt, Human
auuuuauucuu

SEQ ID NO: 3514310 - RNA, 15 nt, Human
auuuuauucuugauc

SEQ ID NO: 3514311 - RNA, 14 nt, Human
auuuuauugcuuga

SEQ ID NO: 3514312 - RNA, 22 nt, Human
auuuuauuuaccccuccccuau

SEQ ID NO: 3514313 - RNA, 19 nt, Human
auuuuauuuagacaagaga

SEQ ID NO: 3514314 - RNA, 21 nt, Human
auuuuauuuugugcucauuua

SEQ ID NO: 3514315 - RNA, 17 nt, Human
auuuucaaaaccagguc

SEQ ID NO: 3514316 - RNA, 19 nt, Human
auuuucaaaagauaauauu

SEQ ID NO: 3514317 - RNA, 15 nt, Human
auuuucaaagacuua

SEQ ID NO: 3514318 - RNA, 16 nt, Human
auuuucaagaaacuga

SEQ ID NO: 3514319 - RNA, 21 nt, Human
auuuucaagcagcaucuucug

SEQ ID NO: 3514320 - RNA, 17 nt, Human
auuuucaaggcccucag

SEQ ID NO: 3514321 - RNA, 12 nt, Human
auuuucaaguaa

SEQ ID NO: 3514322 - RNA, 19 nt, Human
auuuucaaguaauugugaa

SEQ ID NO: 3514323 - RNA, 22 nt, Human
auuuucaauucaaaaauguaca

SEQ ID NO: 3514324 - RNA, 20 nt, Human
auuuucacacaauacaauaa

SEQ ID NO: 3514325 - RNA, 15 nt, Human
auuuucacauucuug

SEQ ID NO: 3514326 - RNA, 21 nt, Human
auuuucaccuguuuuuaagcu

SEQ ID NO: 3514327 - RNA, 13 nt, Human
auuuucacuguag

SEQ ID NO: 3514328 - RNA, 14 nt, Human
auuuucagaaaaua

SEQ ID NO: 3514329 - RNA, 21 nt, Human
auuuucagaaucugaauguaa

SEQ ID NO: 3514330 - RNA, 12 nt, Human
auuuucagaccc

SEQ ID NO: 3514331 - RNA, 13 nt, Human
auuuucagagccg

SEQ ID NO: 3514332 - RNA, 12 nt, Human
auuuucagauuu

SEQ ID NO: 3514333 - RNA, 16 nt, Human
auuuucagauuugcac

SEQ ID NO: 3514334 - RNA, 23 nt, Human
auuuucagcaugaaaaugugugu

SEQ ID NO: 3514335 - RNA, 20 nt, Human
auuuucagcauuaagcuguu

SEQ ID NO: 3514336 - RNA, 18 nt, Human
auuuucaguaauguuauu

SEQ ID NO: 3514337 - RNA, 14 nt, Human
auuuucaguauuuu

SEQ ID NO: 3514338 - RNA, 21 nt, Human
auuuucauaacuuauugcuga

SEQ ID NO: 3514339 - RNA, 23 nt, Human
auuuucauaacuuauugcugauu

SEQ ID NO: 3514340 - RNA, 17 nt, Human
auuuucauccuugucuu

SEQ ID NO: 3514341 - RNA, 20 nt, Human
auuuucaugaaaauaccauu

SEQ ID NO: 3514342 - RNA, 19 nt, Human
auuuucaugacuuuuccau

SEQ ID NO: 3514343 - RNA, 13 nt, Human
auuuucauuagca

SEQ ID NO: 3514344 - RNA, 14 nt, Human
auuuucauuuuaca

SEQ ID NO: 3514345 - RNA, 22 nt, Human
auuuuccaaaaguggccucuuu

SEQ ID NO: 3514346 - RNA, 15 nt, Human
auuuuccaagugugc

SEQ ID NO: 3514347 - RNA, 17 nt, Human
auuuuccaagugugcau

SEQ ID NO: 3514348 - RNA, 20 nt, Human
auuuuccacaagauucccag

SEQ ID NO: 3514349 - RNA, 23 nt, Human
auuuuccacaagauucccagaga

SEQ ID NO: 3514350 - RNA, 17 nt, Human
auuuuccagggcaauca

SEQ ID NO: 3514351 - RNA, 22 nt, Human
auuuuccagggcaaucaauguu

SEQ ID NO: 3514352 - RNA, 18 nt, Human
auuuuccaucuaaaaaua

SEQ ID NO: 3514353 - RNA, 20 nt, Human
auuuucccacucauucugaa

SEQ ID NO: 3514354 - RNA, 14 nt, Human
auuuucccacugca

SEQ ID NO: 3514355 - RNA, 15 nt, Human
auuuuccccccacuc

SEQ ID NO: 3514356 - RNA, 20 nt, Human
auuuucccccuuuucugcau

SEQ ID NO: 3514357 - RNA, 17 nt, Human
auuuuccccuaucauuu

SEQ ID NO: 3514358 - RNA, 16 nt, Human
auuuuccuccccagca

SEQ ID NO: 3514359 - RNA, 17 nt, Human
auuuuccuccuuucucu

SEQ ID NO: 3514360 - RNA, 12 nt, Human
auuuuccugaua

SEQ ID NO: 3514361 - RNA, 13 nt, Human
auuuuccugcuuc

SEQ ID NO: 3514362 - RNA, 23 nt, Human
auuuuccuggugccaauuucaag

SEQ ID NO: 3514363 - RNA, 16 nt, Human
auuuuccuguccucuu

SEQ ID NO: 3514364 - RNA, 21 nt, Human
auuuuccuguccucuuucagc

SEQ ID NO: 3514365 - RNA, 15 nt, Human
auuuuccuugaagcc

SEQ ID NO: 3514366 - RNA, 16 nt, Human
auuuucguaugaaaau

SEQ ID NO: 3514367 - RNA, 21 nt, Human
auuuucuaaaagcuuucaugu

SEQ ID NO: 3514368 - RNA, 14 nt, Human
auuuucuaaagacu

SEQ ID NO: 3514369 - RNA, 20 nt, Human
auuuucuaaaguacugagca

SEQ ID NO: 3514370 - RNA, 22 nt, Human
auuuucuaagaaacauuuauau

SEQ ID NO: 3514371 - RNA, 22 nt, Human
auuuucuaagcaauuucuugcu

SEQ ID NO: 3514372 - RNA, 15 nt, Human
auuuucuacaauuaa

SEQ ID NO: 3514373 - RNA, 14 nt, Human
auuuucuacagugg

SEQ ID NO: 3514374 - RNA, 17 nt, Human
auuuucuacguuucuuu

SEQ ID NO: 3514375 - RNA, 19 nt, Human
auuuucuauaauuuaaaua

SEQ ID NO: 3514376 - RNA, 14 nt, Human
auuuucuauguacu

SEQ ID NO: 3514377 - RNA, 19 nt, Human
auuuucuauguacuaguac

SEQ ID NO: 3514378 - RNA, 17 nt, Human
auuuucuccaaauguuc

SEQ ID NO: 3514379 - RNA, 14 nt, Human
auuuucuccagcuc

SEQ ID NO: 3514380 - RNA, 14 nt, Human
auuuucucccugga

SEQ ID NO: 3514381 - RNA, 18 nt, Human
auuuucucccuggauuuu

SEQ ID NO: 3514382 - RNA, 22 nt, Human
auuuucucccuggauuuuuacc

SEQ ID NO: 3514383 - RNA, 22 nt, Human
auuuucucuguguuuguuccua

SEQ ID NO: 3514384 - RNA, 16 nt, Human
auuuucucuuagaaaa

SEQ ID NO: 3514385 - RNA, 16 nt, Human
auuuucugaaacuaau

SEQ ID NO: 3514386 - RNA, 19 nt, Human
auuuucugaaacuaaugaa

SEQ ID NO: 3514387 - RNA, 22 nt, Human
auuuucugaaaguuacccacug

SEQ ID NO: 3514388 - RNA, 16 nt, Human
auuuucugcaagccug

SEQ ID NO: 3514389 - RNA, 19 nt, Human
auuuucugcaucuccacuu

SEQ ID NO: 3514390 - RNA, 19 nt, Human
auuuucuggaauacaugaa

SEQ ID NO: 3514391 - RNA, 18 nt, Human
auuuucuggccaguguuu

SEQ ID NO: 3514392 - RNA, 22 nt, Human
auuuucuggggcuccucacaua

SEQ ID NO: 3514393 - RNA, 17 nt, Human
auuuucugguaaaaaga

SEQ ID NO: 3514394 - RNA, 17 nt, Human
auuuucugguagauaga

SEQ ID NO: 3514395 - RNA, 14 nt, Human
auauaaauucugug

SEQ ID NO: 3514396 - RNA, 16 nt, Human
auauaaauugucuuaa

SEQ ID NO: 3514397 - RNA, 20 nt, Human
auauaaauuuuuaagagaaa

SEQ ID NO: 3514398 - RNA, 12 nt, Human
auauaacaaugc

SEQ ID NO: 3514399 - RNA, 15 nt, Human
auauaacagauacau

SEQ ID NO: 3514400 - RNA, 16 nt, Human
auauaacauauaugga

SEQ ID NO: 3514401 - RNA, 13 nt, Human
auauaacaugaaa

SEQ ID NO: 3514402 - RNA, 16 nt, Human
auauaacaugaaauga

SEQ ID NO: 3514403 - RNA, 23 nt, Human
auauaacccuaacacacacagaa

SEQ ID NO: 3514404 - RNA, 20 nt, Human
auauaacugccuuaaaacuu

SEQ ID NO: 3514405 - RNA, 17 nt, Human
auauaacuguauuugaa

SEQ ID NO: 3514406 - RNA, 20 nt, Human
auauaacuguauuugaaaua

SEQ ID NO: 3514407 - RNA, 21 nt, Human
auauaacuuaaaaauguaaau

SEQ ID NO: 3514408 - RNA, 15 nt, Human
auauaagaaagacau

SEQ ID NO: 3514409 - RNA, 13 nt, Human
auauaagacaaau

SEQ ID NO: 3514410 - RNA, 12 nt, Human
auauaagauuuu

SEQ ID NO: 3514411 - RNA, 22 nt, Human
auauaagcccuugauuggaagg

SEQ ID NO: 3514412 - RNA, 19 nt, Human
auauaagcuuguauuccuu

SEQ ID NO: 3514413 - RNA, 23 nt, Human
auauaaggaaagcaauaaaugaa

SEQ ID NO: 3514414 - RNA, 17 nt, Human
auauaagugcuguauaa

SEQ ID NO: 3514415 - RNA, 15 nt, Human
auauaaguguguguu

SEQ ID NO: 3514416 - RNA, 14 nt, Human
auauaaguuugaag

SEQ ID NO: 3514417 - RNA, 22 nt, Human
auauaauaaaauguguugaaac

SEQ ID NO: 3514418 - RNA, 18 nt, Human
auauaauaaagcuacuga

SEQ ID NO: 3514419 - RNA, 18 nt, Human
auauaauacacaaaauca

SEQ ID NO: 3514420 - RNA, 15 nt, Human
auauaauauauguuu

SEQ ID NO: 3514421 - RNA, 18 nt, Human
auauaauauugucucuuu

SEQ ID NO: 3514422 - RNA, 17 nt, Human
auauaaucaucaaguaa

SEQ ID NO: 3514423 - RNA, 16 nt, Human
auauaauggaagagaa

SEQ ID NO: 3514424 - RNA, 22 nt, Human
auauaauggaagagaaaucuca

SEQ ID NO: 3514425 - RNA, 15 nt, Human
auauaaugguuucaa

SEQ ID NO: 3514426 - RNA, 21 nt, Human
auauaauuaucggaagcagug

SEQ ID NO: 3514427 - RNA, 22 nt, Human
auauaauuccuguuuuuauuau

SEQ ID NO: 3514428 - RNA, 16 nt, Human
auauaauucuguaaau

SEQ ID NO: 3514429 - RNA, 22 nt, Human
auauaauucuguacauagccua

SEQ ID NO: 3514430 - RNA, 12 nt, Human
auauaauucuua

SEQ ID NO: 3514431 - RNA, 15 nt, Human
auauaauugccaaaa

SEQ ID NO: 3514432 - RNA, 18 nt, Human
auauaauuguuuuaucug

SEQ ID NO: 3514433 - RNA, 15 nt, Human
caaaccaccagaagc

SEQ ID NO: 3514434 - RNA, 17 nt, Human
caaaccacgccucuuga

SEQ ID NO: 3514435 - RNA, 19 nt, Human
caaaccacgccucuugacc

SEQ ID NO: 3514436 - RNA, 22 nt, Human
caaaccacgccucuugaccagg

SEQ ID NO: 3514437 - RNA, 17 nt, Human
caaaccacuuuuugcag

SEQ ID NO: 3514438 - RNA, 14 nt, Human
caaaccagcuucau

SEQ ID NO: 3514439 - RNA, 21 nt, Human
caaaccaucauugaaaucuuu

SEQ ID NO: 3514440 - RNA, 17 nt, Human
caaacccacccuuucua

SEQ ID NO: 3514441 - RNA, 21 nt, Human
caaacccaccugcuaguguga

SEQ ID NO: 3514442 - RNA, 21 nt, Human
caaacccacgauuuucuccag

SEQ ID NO: 3514443 - RNA, 23 nt, Human
caaacccacgauuuucuccagcu

SEQ ID NO: 3514444 - RNA, 13 nt, Human
caaacccaguguu

SEQ ID NO: 3514445 - RNA, 19 nt, Human
auauuaaaaagucuuuuaa

SEQ ID NO: 3514446 - RNA, 20 nt, Human
auauuaaaaagucuuuuaaa

SEQ ID NO: 3514447 - RNA, 14 nt, Human
auauuaaaaauaua

SEQ ID NO: 3514448 - RNA, 15 nt, Human
auauuaaaaauauaa

SEQ ID NO: 3514449 - RNA, 23 nt, Human
auauuaaaaauauggaacuucua

SEQ ID NO: 3514450 - RNA, 14 nt, Human
auauuaaaaauggu

SEQ ID NO: 3514451 - RNA, 23 nt, Human
auauuaaaaaugguaaaauugca

SEQ ID NO: 3514452 - RNA, 14 nt, Human
auauuaaaagaaag

SEQ ID NO: 3514453 - RNA, 23 nt, Human
auauuaaaagucacaauguucuu

SEQ ID NO: 3514454 - RNA, 14 nt, Human
auauuaaaauaagc

SEQ ID NO: 3514455 - RNA, 20 nt, Human
auauuaaacaaaguuucaga

SEQ ID NO: 3514456 - RNA, 19 nt, Human
auauuaaaccauaagaugg

SEQ ID NO: 3514457 - RNA, 12 nt, Human
auauuaaauaca

SEQ ID NO: 3514458 - RNA, 13 nt, Human
auauuaaauacag

SEQ ID NO: 3514459 - RNA, 17 nt, Human
auauuaaauacagacac

SEQ ID NO: 3514460 - RNA, 12 nt, Human
auauuaaaucug

SEQ ID NO: 3514461 - RNA, 14 nt, Human
auauuaacaugcuu

SEQ ID NO: 3514462 - RNA, 19 nt, Human
auauuaaccagauauauau

SEQ ID NO: 3514463 - RNA, 17 nt, Human
auauuaagaaagacuau

SEQ ID NO: 3514464 - RNA, 17 nt, Human
auauuaagguaguuauu

SEQ ID NO: 3514465 - RNA, 19 nt, Human
auauuaauaguaauuugua

SEQ ID NO: 3514466 - RNA, 19 nt, Human
auauuaauauauaucugcu

SEQ ID NO: 3514467 - RNA, 14 nt, Human
auauuaauauuccu

SEQ ID NO: 3514468 - RNA, 16 nt, Human
auauuaaugcccagac

SEQ ID NO: 3514469 - RNA, 18 nt, Human
auauuaauguacuuguuu

SEQ ID NO: 3514470 - RNA, 20 nt, Human
auauuaauuuaucagauugc

SEQ ID NO: 3514471 - RNA, 15 nt, Human
auauuaauuuucuac

SEQ ID NO: 3514472 - RNA, 16 nt, Human
auauuacaaaaacaaa

SEQ ID NO: 3514473 - RNA, 17 nt, Human
auauuacaauauuugug

SEQ ID NO: 3514474 - RNA, 12 nt, Human
auauuacaauga

SEQ ID NO: 3514475 - RNA, 23 nt, Human
auauuacacaaauacuuauucau

SEQ ID NO: 3514476 - RNA, 16 nt, Human
auauuacacauuugua

SEQ ID NO: 3514477 - RNA, 15 nt, Human
auauuacacuacaca

SEQ ID NO: 3514478 - RNA, 23 nt, Human
auauuacagauaaaauguaaacu

SEQ ID NO: 3514479 - RNA, 17 nt, Human
auauuaccacagacaua

SEQ ID NO: 3514480 - RNA, 21 nt, Human
auauuacuacuuaccauuugc

SEQ ID NO: 3514481 - RNA, 22 nt, Human
auauuacuccuauuuuuguaaa

SEQ ID NO: 3514482 - RNA, 14 nt, Human
auauuacugacauu

SEQ ID NO: 3514483 - RNA, 16 nt, Human
auauuacugacauuuc

SEQ ID NO: 3514484 - RNA, 17 nt, Human
auauuacugacauuucu

SEQ ID NO: 3514485 - RNA, 17 nt, Human
auauuacuguacauggg

SEQ ID NO: 3514486 - RNA, 11 nt, Human
auauuacuuua

SEQ ID NO: 3514487 - RNA, 19 nt, Human
auauuacuuuaucacuuuu

SEQ ID NO: 3514488 - RNA, 15 nt, Human
auauuagaaaacuuu

SEQ ID NO: 3514489 - RNA, 20 nt, Human
auauuagaaaacuuuguuag

SEQ ID NO: 3514490 - RNA, 18 nt, Human
auauuagaaguguuaacu

SEQ ID NO: 3514491 - RNA, 16 nt, Human
auauuagaugugauuu

SEQ ID NO: 3514492 - RNA, 15 nt, Human
auauuagcauuuagu

SEQ ID NO: 3514493 - RNA, 15 nt, Human
auauuaggaaaauau

SEQ ID NO: 3514494 - RNA, 18 nt, Human
auauuaguugcuuuguua

SEQ ID NO: 3514495 - RNA, 20 nt, Human
auauuauaaaggauaaagaa

SEQ ID NO: 3514496 - RNA, 15 nt, Human
auauuauaaauauau

SEQ ID NO: 3514497 - RNA, 18 nt, Human
auauuauauggaaauaua

SEQ ID NO: 3514498 - RNA, 22 nt, Human
auauuauauuuggaugcagagu

SEQ ID NO: 3514499 - RNA, 21 nt, Human
auauuaucaugcaaaugcugu

SEQ ID NO: 3514500 - RNA, 14 nt, Human
auauuaugagaugc

SEQ ID NO: 3514501 - RNA, 15 nt, Human
auauuaugagaugcu

SEQ ID NO: 3514502 - RNA, 17 nt, Human
auauuaugcaaauuccc

SEQ ID NO: 3514503 - RNA, 16 nt, Human
auauuauggaagauuu

SEQ ID NO: 3514504 - RNA, 13 nt, Human
auauuauguguuu

SEQ ID NO: 3514505 - RNA, 13 nt, Human
auauuauguuaaa

SEQ ID NO: 3514506 - RNA, 12 nt, Human
auauuauuacuu

SEQ ID NO: 3514507 - RNA, 15 nt, Human
auauuauuacuugua

SEQ ID NO: 3514508 - RNA, 21 nt, Human
auauuauuauaaucuuauaau

SEQ ID NO: 3514509 - RNA, 23 nt, Human
auauuauucaccauguaaaacaa

SEQ ID NO: 3514510 - RNA, 22 nt, Human
auauuauuugcagugcaguaua

SEQ ID NO: 3514511 - RNA, 23 nt, Human
auauuauuugcuaauuaaaaagu

SEQ ID NO: 3514512 - RNA, 15 nt, Human
auauuauuuuauguu

SEQ ID NO: 3514513 - RNA, 22 nt, Human
auauuauuuuauguugcauaga

SEQ ID NO: 3514514 - RNA, 13 nt, Human
auauucaauaaag

SEQ ID NO: 3514515 - RNA, 16 nt, Human
auauucacugggccaa

SEQ ID NO: 3514516 - RNA, 20 nt, Human
auauucagaaucuuuguuaa

SEQ ID NO: 3514517 - RNA, 19 nt, Human
auauucagacaaaauggau

SEQ ID NO: 3514518 - RNA, 16 nt, Human
auauucaggaagcuca

SEQ ID NO: 3514519 - RNA, 20 nt, Human
auauucaggguaaauaggaa

SEQ ID NO: 3514520 - RNA, 14 nt, Human
auauucauguaaac

SEQ ID NO: 3514521 - RNA, 15 nt, Human
auauucauuuggaaa

SEQ ID NO: 3514522 - RNA, 17 nt, Human
auauuccagaucuuuca

SEQ ID NO: 3514523 - RNA, 20 nt, Human
auauuccauaguauauuaaa

SEQ ID NO: 3514524 - RNA, 15 nt, Human
auauuccaugaaugu

SEQ ID NO: 3514525 - RNA, 16 nt, Human
auauuccuuucuauca

SEQ ID NO: 3514526 - RNA, 19 nt, Human
auauuccuuucuaucauuu

SEQ ID NO: 3514527 - RNA, 16 nt, Human
auauuccuuugaagau

SEQ ID NO: 3514528 - RNA, 12 nt, Human
auauuccuuugc

SEQ ID NO: 3514529 - RNA, 18 nt, Human
auauucuaagaaauaucu

SEQ ID NO: 3514530 - RNA, 22 nt, Human
auauucuaagaaauaucuguga

SEQ ID NO: 3514531 - RNA, 18 nt, Human
auauucuauaugaauuua

SEQ ID NO: 3514532 - RNA, 13 nt, Human
auauucuauuuua

SEQ ID NO: 3514533 - RNA, 16 nt, Human
auauucuauuuuacaa

SEQ ID NO: 3514534 - RNA, 18 nt, Human
auauucucacagcuccaa

SEQ ID NO: 3514535 - RNA, 22 nt, Human
auauucucacagcuccaagaau

SEQ ID NO: 3514536 - RNA, 22 nt, Human
auauucucacgggcaguagcug

SEQ ID NO: 3514537 - RNA, 15 nt, Human
auauucucuguacau

SEQ ID NO: 3514538 - RNA, 19 nt, Human
auauucucuguacauauua

SEQ ID NO: 3514539 - RNA, 22 nt, Human
auauucucuuugguguacaaaa

SEQ ID NO: 3514540 - RNA, 16 nt, Human
auauucugcucuauua

SEQ ID NO: 3514541 - RNA, 16 nt, Human
auauucuguuggccag

SEQ ID NO: 3514542 - RNA, 12 nt, Human
auauucuuguca

SEQ ID NO: 3514543 - RNA, 15 nt, Human
auauucuuucaauaa

SEQ ID NO: 3514544 - RNA, 21 nt, Human
auauucuuuucugcaaaauag

SEQ ID NO: 3514545 - RNA, 21 nt, Human
auauugaagacaauuugauac

SEQ ID NO: 3514546 - RNA, 13 nt, Human
auauugaauguua

SEQ ID NO: 3514547 - RNA, 13 nt, Human
auauugaauuuuu

SEQ ID NO: 3514548 - RNA, 13 nt, Human
auauugacauuug

SEQ ID NO: 3514549 - RNA, 14 nt, Human
auauugacauuugu

SEQ ID NO: 3514550 - RNA, 16 nt, Human
auauugacuuguauau

SEQ ID NO: 3514551 - RNA, 18 nt, Human
auauugagcaauauguca

SEQ ID NO: 3514552 - RNA, 18 nt, Human
auauugaggccaagaaua

SEQ ID NO: 3514553 - RNA, 16 nt, Human
auauugaggcuuugug

SEQ ID NO: 3514554 - RNA, 18 nt, Human
auauugaggcuuuguguu

SEQ ID NO: 3514555 - RNA, 16 nt, Human
auauugauuguccuuu

SEQ ID NO: 3514556 - RNA, 22 nt, Human
auauugauuucugccuuccuug

SEQ ID NO: 3514557 - RNA, 15 nt, Human
auauugcaaaauaca

SEQ ID NO: 3514558 - RNA, 12 nt, Human
auauugcaauga

SEQ ID NO: 3514559 - RNA, 13 nt, Human
auauugcacaugu

SEQ ID NO: 3514560 - RNA, 16 nt, Human
auauugcccaggcugg

SEQ ID NO: 3514561 - RNA, 22 nt, Human
auauugcugagagaaauaugga

SEQ ID NO: 3514562 - RNA, 21 nt, Human
auauugcugcugguaauuugu

SEQ ID NO: 3514563 - RNA, 15 nt, Human
auauugcuuuuucua

SEQ ID NO: 3514564 - RNA, 21 nt, Human
auauuggccaaggaaaggcac

SEQ ID NO: 3514565 - RNA, 17 nt, Human
auauuguaaaacaggua

SEQ ID NO: 3514566 - RNA, 12 nt, Human
auauuguaaaua

SEQ ID NO: 3514567 - RNA, 14 nt, Human
auauuguaagaaau

SEQ ID NO: 3514568 - RNA, 13 nt, Human
auauuguacacuu

SEQ ID NO: 3514569 - RNA, 14 nt, Human
auauuguacacuuu

SEQ ID NO: 3514570 - RNA, 22 nt, Human
auauuguauuguuagauguuug

SEQ ID NO: 3514571 - RNA, 22 nt, Human
auauugucagaguucugcucua

SEQ ID NO: 3514572 - RNA, 16 nt, Human
auauugucauaucagc

SEQ ID NO: 3514573 - RNA, 15 nt, Human
auauugucauuccug

SEQ ID NO: 3514574 - RNA, 13 nt, Human
auauugugaagua

SEQ ID NO: 3514575 - RNA, 17 nt, Human
auauugugauucugccu

SEQ ID NO: 3514576 - RNA, 20 nt, Human
auauugugccaauauguauu

SEQ ID NO: 3514577 - RNA, 20 nt, Human
auauuguguugacuuuauaa

SEQ ID NO: 3514578 - RNA, 13 nt, Human
caaagauuuaauc

SEQ ID NO: 3514579 - RNA, 16 nt, Human
caaagauuuaaucugc

SEQ ID NO: 3514580 - RNA, 23 nt, Human
caaagcaagcauucagaagaaaa

SEQ ID NO: 3514581 - RNA, 16 nt, Human
caaagcaauaauagua

SEQ ID NO: 3514582 - RNA, 18 nt, Human
caaagcaaugcauuuugg

SEQ ID NO: 3514583 - RNA, 18 nt, Human
caaagcaauucuuucaag

SEQ ID NO: 3514584 - RNA, 11 nt, Human
caaagcacaga

SEQ ID NO: 3514585 - RNA, 14 nt, Human
caaagcacagagag

SEQ ID NO: 3514586 - RNA, 19 nt, Human
caaagcacagagagucugg

SEQ ID NO: 3514587 - RNA, 14 nt, Human
caaagcacaguguu

SEQ ID NO: 3514588 - RNA, 17 nt, Human
caaagcacaguuugaac

SEQ ID NO: 3514589 - RNA, 18 nt, Human
caaagcacauugaaagag

SEQ ID NO: 3514590 - RNA, 21 nt, Human
caaagcaccaaaauaagaaaa

SEQ ID NO: 3514591 - RNA, 24 nt, Human
caaagcaccaaaauaagaaaagau

SEQ ID NO: 3514592 - RNA, 21 nt, Human
caaagcacccauuucaaugug

SEQ ID NO: 3514593 - RNA, 21 nt, Human
caaagcacuguugagaaggag

SEQ ID NO: 3514594 - RNA, 13 nt, Human
caaagcagacagc

SEQ ID NO: 3514595 - RNA, 16 nt, Human
caaagcagacagcucc

SEQ ID NO: 3514596 - RNA, 18 nt, Human
caaagcagcaacacacau

SEQ ID NO: 3514597 - RNA, 18 nt, Human
caaagcaggggaguaugc

SEQ ID NO: 3514598 - RNA, 15 nt, Human
caaagcagggucugg

SEQ ID NO: 3514599 - RNA, 23 nt, Human
caaagcaucuugcauuaugcaau

SEQ ID NO: 3514600 - RNA, 14 nt, Human
caaagcauggacua

SEQ ID NO: 3514601 - RNA, 19 nt, Human
caaagcaugggauuauuag

SEQ ID NO: 3514602 - RNA, 22 nt, Human
caaagccaaacucugccagcca

SEQ ID NO: 3514603 - RNA, 23 nt, Human
caaagccaccucugucauuuguu

SEQ ID NO: 3514604 - RNA, 12 nt, Human
auuuuaaaugug

SEQ ID NO: 3514605 - RNA, 19 nt, Human
auuuuaaauuauaaggacu

SEQ ID NO: 3514606 - RNA, 20 nt, Human
auuuuaaauuauaaggacug

SEQ ID NO: 3514607 - RNA, 23 nt, Human
auuuuaaauuauaaggacugcau

SEQ ID NO: 3514608 - RNA, 16 nt, Human
auuuuaaauucacaau

SEQ ID NO: 3514609 - RNA, 19 nt, Human
auuuuaacaagaagaugaa

SEQ ID NO: 3514610 - RNA, 20 nt, Human
auuuuaacaagaagaugaau

SEQ ID NO: 3514611 - RNA, 21 nt, Human
auuuuaacauggaacucuagg

SEQ ID NO: 3514612 - RNA, 16 nt, Human
auuuuaaccaaaacau

SEQ ID NO: 3514613 - RNA, 21 nt, Human
auuuuaacuaaauuuuaaagc

SEQ ID NO: 3514614 - RNA, 14 nt, Human
auuuuaacucuguc

SEQ ID NO: 3514615 - RNA, 18 nt, Human
auuuuaacuuaacugaaa

SEQ ID NO: 3514616 - RNA, 20 nt, Human
auuuuaacuuaacugaaaug

SEQ ID NO: 3514617 - RNA, 21 nt, Human
auuuuaagacguguuuguguu

SEQ ID NO: 3514618 - RNA, 14 nt, Human
auuuuaagauuccu

SEQ ID NO: 3514619 - RNA, 15 nt, Human
auuuuaagauuccuu

SEQ ID NO: 3514620 - RNA, 21 nt, Human
auuuuaagcacucuuaaagca

SEQ ID NO: 3514621 - RNA, 23 nt, Human
auuuuaagcauuacucuuguaag

SEQ ID NO: 3514622 - RNA, 17 nt, Human
auuuuaagcauugugag

SEQ ID NO: 3514623 - RNA, 18 nt, Human
auuuuaagccuuuguuga

SEQ ID NO: 3514624 - RNA, 17 nt, Human
auuuuaagcuaggaaaa

SEQ ID NO: 3514625 - RNA, 22 nt, Human
auuuuaagcuaggaaaagaaau

SEQ ID NO: 3514626 - RNA, 19 nt, Human
auuuuaagucccugucacc

SEQ ID NO: 3514627 - RNA, 18 nt, Human
auuuuaagugcuuuguaa

SEQ ID NO: 3514628 - RNA, 15 nt, Human
auuuuaauaaaaaua

SEQ ID NO: 3514629 - RNA, 18 nt, Human
auuuuaauaaaaauaauu

SEQ ID NO: 3514630 - RNA, 12 nt, Human
auuuuaauaaug

SEQ ID NO: 3514631 - RNA, 16 nt, Human
auuuuaauaauguuuc

SEQ ID NO: 3514632 - RNA, 19 nt, Human
auuuuaauaauguuucaaa

SEQ ID NO: 3514633 - RNA, 14 nt, Human
auuuuaaucaaguu

SEQ ID NO: 3514634 - RNA, 23 nt, Human
auuuuaauggauuguuaauuuca

SEQ ID NO: 3514635 - RNA, 14 nt, Human
auuuuaaugugaug

SEQ ID NO: 3514636 - RNA, 18 nt, Human
auuuuaaugugaugaugu

SEQ ID NO: 3514637 - RNA, 18 nt, Human
auuuuaauuaucuuuucu

SEQ ID NO: 3514638 - RNA, 23 nt, Human
auuuuaauuauuauucuucauaa

SEQ ID NO: 3514639 - RNA, 24 nt, Human
auuuuaauucaucccaacugucuu

SEQ ID NO: 3514640 - RNA, 21 nt, Human
auuuuaauuuaguaaauguua

SEQ ID NO: 3514641 - RNA, 12 nt, Human
auuuuaauuuau

SEQ ID NO: 3514642 - RNA, 11 nt, Human
auuuuacaaaa

SEQ ID NO: 3514643 - RNA, 16 nt, Human
auuuuacaaaagaugu

SEQ ID NO: 3514644 - RNA, 22 nt, Human
auuuuacaagggcauaaaguaa

SEQ ID NO: 3514645 - RNA, 17 nt, Human
auuuuacacagaaacac

SEQ ID NO: 3514646 - RNA, 13 nt, Human
auuuuacauaaau

SEQ ID NO: 3514647 - RNA, 14 nt, Human
auuuuacaugaagu

SEQ ID NO: 3514648 - RNA, 21 nt, Human
auuuuaccaucacacauguuc

SEQ ID NO: 3514649 - RNA, 17 nt, Human
auuuuaccuagcuaauu

SEQ ID NO: 3514650 - RNA, 17 nt, Human
auuuuaccuuugacaaa

SEQ ID NO: 3514651 - RNA, 22 nt, Human
auuuuacuguacagacagaaaa

SEQ ID NO: 3514652 - RNA, 20 nt, Human
auuuuacugucuuaauuaag

SEQ ID NO: 3514653 - RNA, 23 nt, Human
auuuuacuuggaaauauuaaaag

SEQ ID NO: 3514654 - RNA, 16 nt, Human
auuuuacuuuuauaau

SEQ ID NO: 3514655 - RNA, 16 nt, Human
auuuuacuuuuuccug

SEQ ID NO: 3514656 - RNA, 14 nt, Human
auuuuacuuuuugg

SEQ ID NO: 3514657 - RNA, 17 nt, Human
auuuuagaaauauucac

SEQ ID NO: 3514658 - RNA, 19 nt, Human
auuuuagaacaauuuucuu

SEQ ID NO: 3514659 - RNA, 16 nt, Human
auuuuagacaaaucua

SEQ ID NO: 3514660 - RNA, 20 nt, Human
auuuuagacaaaucuaaggg

SEQ ID NO: 3514661 - RNA, 23 nt, Human
auuuuagcaaagcggguuauaau

SEQ ID NO: 3514662 - RNA, 14 nt, Human
auuuuagcaguucu

SEQ ID NO: 3514663 - RNA, 19 nt, Human
auuuuagcaguucugcaaa

SEQ ID NO: 3514664 - RNA, 17 nt, Human
auuuuagccuucucugu

SEQ ID NO: 3514665 - RNA, 15 nt, Human
auuuuagcuaauuua

SEQ ID NO: 3514666 - RNA, 16 nt, Human
auuuuagcuaauuuag

SEQ ID NO: 3514667 - RNA, 18 nt, Human
auuuuagcuacuauauau

SEQ ID NO: 3514668 - RNA, 15 nt, Human
auuuuagcugcagaa

SEQ ID NO: 3514669 - RNA, 19 nt, Human
auuuuaggagcuaaggcuc

SEQ ID NO: 3514670 - RNA, 22 nt, Human
auuuuaggagcuaaggcucuau

SEQ ID NO: 3514671 - RNA, 19 nt, Human
auuuuagggguagcauuug

SEQ ID NO: 3514672 - RNA, 16 nt, Human
auuuuagguguugauu

SEQ ID NO: 3514673 - RNA, 23 nt, Human
auuuuagucacacguggucuuuc

SEQ ID NO: 3514674 - RNA, 16 nt, Human
auuuuaguccaaauaa

SEQ ID NO: 3514675 - RNA, 23 nt, Human
auuuuagugacagcucugccugu

SEQ ID NO: 3514676 - RNA, 18 nt, Human
auuuuaguuacagcugug

SEQ ID NO: 3514677 - RNA, 18 nt, Human
auuuuaguuucuguucug

SEQ ID NO: 3514678 - RNA, 19 nt, Human
auuuuaguuucuguucugu

SEQ ID NO: 3514679 - RNA, 18 nt, Human
auuuuauaaaauuaaaga

SEQ ID NO: 3514680 - RNA, 13 nt, Human
auuuuauaaacaa

SEQ ID NO: 3514681 - RNA, 15 nt, Human
auuuuauaaagugcu

SEQ ID NO: 3514682 - RNA, 21 nt, Human
auuuuauaaagugcuugugua

SEQ ID NO: 3514683 - RNA, 15 nt, Human
auuuuauaaaucgcu

SEQ ID NO: 3514684 - RNA, 20 nt, Human
auuuuauaaaucgcuuuuga

SEQ ID NO: 3514685 - RNA, 19 nt, Human
auuuuauaagcaaauuuca

SEQ ID NO: 3514686 - RNA, 18 nt, Human
auuuuauaaggacuuccu

SEQ ID NO: 3514687 - RNA, 15 nt, Human
auuuuauacauuaac

SEQ ID NO: 3514688 - RNA, 19 nt, Human
auuuuauagacacccuggc

SEQ ID NO: 3514689 - RNA, 17 nt, Human
auuuuauaggaaaaaau

SEQ ID NO: 3514690 - RNA, 22 nt, Human
auuuuauaggcauaccuccuau

SEQ ID NO: 3514691 - RNA, 18 nt, Human
auuuuauaguguguugug

SEQ ID NO: 3514692 - RNA, 15 nt, Human
auuuuauaugcuuac

SEQ ID NO: 3514693 - RNA, 18 nt, Human
auuuuauauuaaaauaag

SEQ ID NO: 3514694 - RNA, 22 nt, Human
auuuuauauuacugacauuucu

SEQ ID NO: 3514695 - RNA, 13 nt, Human
auuuuauauugaa

SEQ ID NO: 3514696 - RNA, 14 nt, Human
auuuuaucugugaa

SEQ ID NO: 3514697 - RNA, 13 nt, Human
auuuuaucuuuga

SEQ ID NO: 3514698 - RNA, 20 nt, Human
auuuuaucuuugauucuccu

SEQ ID NO: 3514699 - RNA, 17 nt, Human
auuuuaugaucaguguu

SEQ ID NO: 3514700 - RNA, 15 nt, Human
auuuuaugauccagc

SEQ ID NO: 3514701 - RNA, 21 nt, Human
auuuuaugccuuuuauuucuu

SEQ ID NO: 3514702 - RNA, 17 nt, Human
auuuuaugcuuuaaaca

SEQ ID NO: 3514703 - RNA, 16 nt, Human
auuuuauggugcauua

SEQ ID NO: 3514704 - RNA, 16 nt, Human
auuuuaugguuauguu

SEQ ID NO: 3514705 - RNA, 18 nt, Human
auuuuaugguuauguuuu

SEQ ID NO: 3514706 - RNA, 22 nt, Human
auuuuauguuaagggaagaauu

SEQ ID NO: 3514707 - RNA, 13 nt, Human
auuuuauguuaua

SEQ ID NO: 3514708 - RNA, 15 nt, Human
auuuuauguugacau

SEQ ID NO: 3514709 - RNA, 17 nt, Human
auuuuauguugacauuu

SEQ ID NO: 3514710 - RNA, 22 nt, Human
auuuuauguugacauuuguuug

SEQ ID NO: 3514711 - RNA, 21 nt, Human
auuuuauguugcauagaauaa

SEQ ID NO: 3514712 - RNA, 15 nt, Human
auuuuauguuuagau

SEQ ID NO: 3514713 - RNA, 22 nt, Human
auuuuauuaagcuuuuuggaau

SEQ ID NO: 3514714 - RNA, 14 nt, Human
auuuuauuacuggc

SEQ ID NO: 3514715 - RNA, 12 nt, Human
auuuuauuauga

SEQ ID NO: 3514716 - RNA, 21 nt, Human
auuuuauuaugaaacuugugu

SEQ ID NO: 3514717 - RNA, 16 nt, Human
auuuuauuaugaagaa

SEQ ID NO: 3514718 - RNA, 18 nt, Human
auuuuauuauguaaaucc

SEQ ID NO: 3514719 - RNA, 21 nt, Human
auuuuauuauguaaaucccau

SEQ ID NO: 3514720 - RNA, 18 nt, Human
auuuuauucaagaaugcc

SEQ ID NO: 3514721 - RNA, 13 nt, Human
auuuugaagcuaa

SEQ ID NO: 3514722 - RNA, 14 nt, Human
auuuugaagcuaau

SEQ ID NO: 3514723 - RNA, 12 nt, Human
auuuugaaguuu

SEQ ID NO: 3514724 - RNA, 16 nt, Human
auuuugaaguuuacau

SEQ ID NO: 3514725 - RNA, 11 nt, Human
auuuugaauac

SEQ ID NO: 3514726 - RNA, 12 nt, Human
auuuugaauacc

SEQ ID NO: 3514727 - RNA, 14 nt, Human
auuuugaauaccau

SEQ ID NO: 3514728 - RNA, 15 nt, Human
auuuugaauaccauu

SEQ ID NO: 3514729 - RNA, 22 nt, Human
auuuugaauaccauuaaaacug

SEQ ID NO: 3514730 - RNA, 11 nt, Human
auuuugaauca

SEQ ID NO: 3514731 - RNA, 14 nt, Human
auuuugaaucaaua

SEQ ID NO: 3514732 - RNA, 18 nt, Human
auuuugacacuauaucug

SEQ ID NO: 3514733 - RNA, 17 nt, Human
auuuugacauaaaguug

SEQ ID NO: 3514734 - RNA, 24 nt, Human
auuuugacauaaaguugauaaaga

SEQ ID NO: 3514735 - RNA, 19 nt, Human
auuuugacuuaaugugauu

SEQ ID NO: 3514736 - RNA, 22 nt, Human
auuuugagaaagucuuauuuau

SEQ ID NO: 3514737 - RNA, 18 nt, Human
auuuugagguaaagauau

SEQ ID NO: 3514738 - RNA, 13 nt, Human
auuuugauaauaa

SEQ ID NO: 3514739 - RNA, 18 nt, Human
auuuugauaauaaauuga

SEQ ID NO: 3514740 - RNA, 16 nt, Human
auuuugauaauaauau

SEQ ID NO: 3514741 - RNA, 21 nt, Human
auuuugauaauaauauuguuu

SEQ ID NO: 3514742 - RNA, 17 nt, Human
auuuugauaccagaagg

SEQ ID NO: 3514743 - RNA, 19 nt, Human
auuuugauaccagaaggga

SEQ ID NO: 3514744 - RNA, 19 nt, Human
auuuugauccaagcugguc

SEQ ID NO: 3514745 - RNA, 19 nt, Human
auuuugaucuucaacaaau

SEQ ID NO: 3514746 - RNA, 20 nt, Human
auuuugaucuucaacaaauu

SEQ ID NO: 3514747 - RNA, 22 nt, Human
auuuugaugcagcauuugauaa

SEQ ID NO: 3514748 - RNA, 14 nt, Human
auuuugauuauugu

SEQ ID NO: 3514749 - RNA, 20 nt, Human
auuuugauuuuuuuuuuaaa

SEQ ID NO: 3514750 - RNA, 15 nt, Human
auuuugcaaaauuuc

SEQ ID NO: 3514751 - RNA, 16 nt, Human
auuuugcaaagauuua

SEQ ID NO: 3514752 - RNA, 14 nt, Human
auuuugcagcagug

SEQ ID NO: 3514753 - RNA, 15 nt, Human
auuuugcagcaguga

SEQ ID NO: 3514754 - RNA, 16 nt, Human
auuuugcagcagugag

SEQ ID NO: 3514755 - RNA, 16 nt, Human
auuuugcauuugaaua

SEQ ID NO: 3514756 - RNA, 18 nt, Human
auuuugccagugggaacu

SEQ ID NO: 3514757 - RNA, 22 nt, Human
auuuugcccuuccauagccuaa

SEQ ID NO: 3514758 - RNA, 23 nt, Human
auuuugccuaauacauuaaagca

SEQ ID NO: 3514759 - RNA, 20 nt, Human
auuuugcuaaaugugaauga

SEQ ID NO: 3514760 - RNA, 21 nt, Human
auuuugcuauuguaaauaugu

SEQ ID NO: 3514761 - RNA, 22 nt, Human
auuuugcuauuguaaauauguu

SEQ ID NO: 3514762 - RNA, 19 nt, Human
auuuugcuggaauuccuaa

SEQ ID NO: 3514763 - RNA, 14 nt, Human
auuuugcuguauau

SEQ ID NO: 3514764 - RNA, 11 nt, Human
auuuugcuuua

SEQ ID NO: 3514765 - RNA, 12 nt, Human
auuuugcuuuaa

SEQ ID NO: 3514766 - RNA, 18 nt, Human
auauuuuucuuaaaaagu

SEQ ID NO: 3514767 - RNA, 21 nt, Human
auauuuuugguugucaauauu

SEQ ID NO: 3514768 - RNA, 15 nt, Human
auauuuuuguagcac

SEQ ID NO: 3514769 - RNA, 19 nt, Human
auauuuuuguuuguuuugu

SEQ ID NO: 3514770 - RNA, 20 nt, Human
auauuuuuguuuguuuugug

SEQ ID NO: 3514771 - RNA, 17 nt, Human
auauuuuuuaauuuaaa

SEQ ID NO: 3514772 - RNA, 20 nt, Human
auauuuuuuaauuugaugaa

SEQ ID NO: 3514773 - RNA, 20 nt, Human
auauuuuuuauauauacagu

SEQ ID NO: 3514774 - RNA, 22 nt, Human
auauuuuuuauaucuggaauga

SEQ ID NO: 3514775 - RNA, 16 nt, Human
auauuuuuuaucauaa

SEQ ID NO: 3514776 - RNA, 18 nt, Human
auauuuuuuguuaaauga

SEQ ID NO: 3514777 - RNA, 15 nt, Human
auauuuuuuuccuua

SEQ ID NO: 3514778 - RNA, 17 nt, Human
auauuuuuuuccuuaca

SEQ ID NO: 3514779 - RNA, 22 nt, Human
auauuuuuuuccuuacauaaac

SEQ ID NO: 3514780 - RNA, 18 nt, Human
auauuuuuuucuuuucuu

SEQ ID NO: 3514781 - RNA, 23 nt, Human
auauuuuuuuuuaagcucugagc

SEQ ID NO: 3514782 - RNA, 19 nt, Human
aucaaaaauugaagagaga

SEQ ID NO: 3514783 - RNA, 17 nt, Human
aucaaaagacaauucuu

SEQ ID NO: 3514784 - RNA, 19 nt, Human
aucaaaagacaauucuuua

SEQ ID NO: 3514785 - RNA, 20 nt, Human
aucaaaagguuaauaaagua

SEQ ID NO: 3514786 - RNA, 14 nt, Human
aucaaaauaaaaag

SEQ ID NO: 3514787 - RNA, 15 nt, Human
aucaaaauaaaaagu

SEQ ID NO: 3514788 - RNA, 19 nt, Human
aucaaaauaaauugaaaua

SEQ ID NO: 3514789 - RNA, 16 nt, Human
aucaaaaucucuccac

SEQ ID NO: 3514790 - RNA, 20 nt, Human
aucaaaaugcucuuauuuca

SEQ ID NO: 3514791 - RNA, 12 nt, Human
aucaaaaugcuu

SEQ ID NO: 3514792 - RNA, 13 nt, Human
aucaaaaugcuuu

SEQ ID NO: 3514793 - RNA, 14 nt, Human
aucaaacagcucag

SEQ ID NO: 3514794 - RNA, 16 nt, Human
aucaaacauuuugaaa

SEQ ID NO: 3514795 - RNA, 15 nt, Human
aucaaaccuuugagu

SEQ ID NO: 3514796 - RNA, 16 nt, Human
aucaaacucaaugcuu

SEQ ID NO: 3514797 - RNA, 16 nt, Human
aucaaacugaagccag

SEQ ID NO: 3514798 - RNA, 21 nt, Human
aucaaaggaaaauaguaaugu

SEQ ID NO: 3514799 - RNA, 13 nt, Human
aucaaaguauuug

SEQ ID NO: 3514800 - RNA, 20 nt, Human
aucaaagucaaaaauagcaa

SEQ ID NO: 3514801 - RNA, 17 nt, Human
aucaaauaaagagagaa

SEQ ID NO: 3514802 - RNA, 11 nt, Human
aucaaauacuu

SEQ ID NO: 3514803 - RNA, 13 nt, Human
aucaaauacuuua

SEQ ID NO: 3514804 - RNA, 14 nt, Human
aucaaauacuuuaa

SEQ ID NO: 3514805 - RNA, 22 nt, Human
aucaaauggaaaggagaggaaa

SEQ ID NO: 3514806 - RNA, 21 nt, Human
aucaaauggaagacacauuga

SEQ ID NO: 3514807 - RNA, 17 nt, Human
aucaaaugguaucuuuu

SEQ ID NO: 3514808 - RNA, 14 nt, Human
aucaaauguuuaau

SEQ ID NO: 3514809 - RNA, 15 nt, Human
aucaaauguuuaauc

SEQ ID NO: 3514810 - RNA, 16 nt, Human
aucaaauguuuaauca

SEQ ID NO: 3514811 - RNA, 18 nt, Human
aucaaauguuuaaucaua

SEQ ID NO: 3514812 - RNA, 22 nt, Human
aucaaauguuuaaucauauaaa

SEQ ID NO: 3514813 - RNA, 16 nt, Human
aucaacaaaaauuguc

SEQ ID NO: 3514814 - RNA, 18 nt, Human
aucaacaagaguugucuu

SEQ ID NO: 3514815 - RNA, 15 nt, Human
aucaacaagauuucc

SEQ ID NO: 3514816 - RNA, 20 nt, Human
aucaaccccuucgcuccugu

SEQ ID NO: 3514817 - RNA, 11 nt, Human
aucaacccuuc

SEQ ID NO: 3514818 - RNA, 18 nt, Human
aucaacuaaaguuguacu

SEQ ID NO: 3514819 - RNA, 20 nt, Human
aucaacuaaaguuguacuuu

SEQ ID NO: 3514820 - RNA, 22 nt, Human
aucaacuaaaguuguacuuuaa

SEQ ID NO: 3514821 - RNA, 17 nt, Human
aucaacuacuauucaaa

SEQ ID NO: 3514822 - RNA, 13 nt, Human
aucaacucauguu

SEQ ID NO: 3514823 - RNA, 23 nt, Human
aucaacugaaaguguuuccuuca

SEQ ID NO: 3514824 - RNA, 11 nt, Human
aucaacugaau

SEQ ID NO: 3514825 - RNA, 14 nt, Human
aucaacugaaugag

SEQ ID NO: 3514826 - RNA, 21 nt, Human
aucaacugcaucaagauguga

SEQ ID NO: 3514827 - RNA, 21 nt, Human
aucaacuuaccaggcaccaaa

SEQ ID NO: 3514828 - RNA, 21 nt, Human
aucaacuuuaaucaaguugua

SEQ ID NO: 3514829 - RNA, 13 nt, Human
aucaacuuuuuau

SEQ ID NO: 3514830 - RNA, 22 nt, Human
aucaacuuuuuauugccuucuc

SEQ ID NO: 3514831 - RNA, 19 nt, Human
aucaagaagggcugcauga

SEQ ID NO: 3514832 - RNA, 13 nt, Human
aucaagacauagc

SEQ ID NO: 3514833 - RNA, 15 nt, Human
aucaagacuggaagg

SEQ ID NO: 3514834 - RNA, 14 nt, Human
aucaagagccuuaa

SEQ ID NO: 3514835 - RNA, 15 nt, Human
aucaagagccuuaaa

SEQ ID NO: 3514836 - RNA, 21 nt, Human
aucaagagccuuaaaacauca

SEQ ID NO: 3514837 - RNA, 17 nt, Human
aucaagagcugcccucc

SEQ ID NO: 3514838 - RNA, 16 nt, Human
aucaagauaaaggaca

SEQ ID NO: 3514839 - RNA, 13 nt, Human
aucaagcuaauaa

SEQ ID NO: 3514840 - RNA, 15 nt, Human
aucaagcuaauaaaa

SEQ ID NO: 3514841 - RNA, 11 nt, Human
aucaagcugug

SEQ ID NO: 3514842 - RNA, 21 nt, Human
aucaagcuucaguuuccuggu

SEQ ID NO: 3514843 - RNA, 13 nt, Human
aucaaggcacugc

SEQ ID NO: 3514844 - RNA, 19 nt, Human
aucaaggggucacuuacag

SEQ ID NO: 3514845 - RNA, 15 nt, Human
aucaaggucguuuuu

SEQ ID NO: 3514846 - RNA, 15 nt, Human
aucaaguaauacaaa

SEQ ID NO: 3514847 - RNA, 19 nt, Human
aucaaguagacuacuguuc

SEQ ID NO: 3514848 - RNA, 19 nt, Human
aucaaguauagaaaaucuu

SEQ ID NO: 3514849 - RNA, 16 nt, Human
aucaaguauuugggaa

SEQ ID NO: 3514850 - RNA, 15 nt, Human
aucaagucaaucauu

SEQ ID NO: 3514851 - RNA, 15 nt, Human
aucaagucuguuuac

SEQ ID NO: 3514852 - RNA, 23 nt, Human
aucaagucuguuuacugcaaggu

SEQ ID NO: 3514853 - RNA, 16 nt, Human
aucaagugucuuccau

SEQ ID NO: 3514854 - RNA, 15 nt, Human
aucaagugugcuuua

SEQ ID NO: 3514855 - RNA, 16 nt, Human
aucaagugugcuuuag

SEQ ID NO: 3514856 - RNA, 22 nt, Human
aucaaguuauugacaaacucuc

SEQ ID NO: 3514857 - RNA, 15 nt, Human
aucaaguugaauuga

SEQ ID NO: 3514858 - RNA, 11 nt, Human
aucaaguuuua

SEQ ID NO: 3514859 - RNA, 13 nt, Human
aucaaguuuuaag

SEQ ID NO: 3514860 - RNA, 15 nt, Human
aucaauaaaaaauua

SEQ ID NO: 3514861 - RNA, 14 nt, Human
aucaauaaacgauu

SEQ ID NO: 3514862 - RNA, 15 nt, Human
aucaauaaacgauuu

SEQ ID NO: 3514863 - RNA, 19 nt, Human
aucaauaaacgauuuaauu

SEQ ID NO: 3514864 - RNA, 23 nt, Human
aucaauaguguccuaugcaauaa

SEQ ID NO: 3514865 - RNA, 14 nt, Human
aucaauaguugaau

SEQ ID NO: 3514866 - RNA, 18 nt, Human
aucaauaucuaauauaua

SEQ ID NO: 3514867 - RNA, 20 nt, Human
auccagauggugggaugugg

SEQ ID NO: 3514868 - RNA, 14 nt, Human
auccagauguggcu

SEQ ID NO: 3514869 - RNA, 23 nt, Human
auccagauguggcuacugacaua

SEQ ID NO: 3514870 - RNA, 23 nt, Human
auccagccuaacuuacauucuua

SEQ ID NO: 3514871 - RNA, 21 nt, Human
auccagccucuccccugauua

SEQ ID NO: 3514872 - RNA, 21 nt, Human
auccagccuggggcugaggcu

SEQ ID NO: 3514873 - RNA, 17 nt, Human
auccagcugccuauuga

SEQ ID NO: 3514874 - RNA, 13 nt, Human
auccaggacccug

SEQ ID NO: 3514875 - RNA, 19 nt, Human
auccaggacccugccaggc

SEQ ID NO: 3514876 - RNA, 20 nt, Human
auccaggacccugccaggca

SEQ ID NO: 3514877 - RNA, 23 nt, Human
auccaggacuauauuugggccug

SEQ ID NO: 3514878 - RNA, 15 nt, Human
auccaggacucuguc

SEQ ID NO: 3514879 - RNA, 16 nt, Human
auccaggcaccaggac

SEQ ID NO: 3514880 - RNA, 21 nt, Human
auccaggcacccaaaccccgg

SEQ ID NO: 3514881 - RNA, 16 nt, Human
auccaggcagauccag

SEQ ID NO: 3514882 - RNA, 19 nt, Human
auccaggccacucuuagcc

SEQ ID NO: 3514883 - RNA, 14 nt, Human
auccaggccccucc

SEQ ID NO: 3514884 - RNA, 14 nt, Human
auccagggacagag

SEQ ID NO: 3514885 - RNA, 16 nt, Human
auccagggacagaggc

SEQ ID NO: 3514886 - RNA, 18 nt, Human
auccagggaugccaucug

SEQ ID NO: 3514887 - RNA, 19 nt, Human
auccagguacgcacagaca

SEQ ID NO: 3514888 - RNA, 20 nt, Human
auccagguacgcacagacag

SEQ ID NO: 3514889 - RNA, 15 nt, Human
auccaggucaacaga

SEQ ID NO: 3514890 - RNA, 23 nt, Human
auccaggucaacagaaugaaaaa

SEQ ID NO: 3514891 - RNA, 15 nt, Human
auccagguucagcuu

SEQ ID NO: 3514892 - RNA, 16 nt, Human
auccagguucagcuug

SEQ ID NO: 3514893 - RNA, 15 nt, Human
auccagguucccucc

SEQ ID NO: 3514894 - RNA, 19 nt, Human
auccagguucccucccaga

SEQ ID NO: 3514895 - RNA, 15 nt, Human
auccaguaaaauaau

SEQ ID NO: 3514896 - RNA, 16 nt, Human
auccaguacauuuaau

SEQ ID NO: 3514897 - RNA, 19 nt, Human
auccaguacauuuaauuga

SEQ ID NO: 3514898 - RNA, 17 nt, Human
auccagugaccucucuc

SEQ ID NO: 3514899 - RNA, 21 nt, Human
auccagugauccuuacaaguu

SEQ ID NO: 3514900 - RNA, 18 nt, Human
auccaguuuugucaaugc

SEQ ID NO: 3514901 - RNA, 18 nt, Human
auccaguuuuguuuggac

SEQ ID NO: 3514902 - RNA, 21 nt, Human
auccaguuuuguuuggaccaa

SEQ ID NO: 3514903 - RNA, 16 nt, Human
auccauaaagaagcaa

SEQ ID NO: 3514904 - RNA, 15 nt, Human
auccauaacugaaca

SEQ ID NO: 3514905 - RNA, 16 nt, Human
auccauaguaguauga

SEQ ID NO: 3514906 - RNA, 21 nt, Human
auccauauuaaguaagucuca

SEQ ID NO: 3514907 - RNA, 19 nt, Human
auccauauuuuauuacugu

SEQ ID NO: 3514908 - RNA, 18 nt, Human
auccaucaucaugugugu

SEQ ID NO: 3514909 - RNA, 21 nt, Human
auccaucuaaauaccugcccu

SEQ ID NO: 3514910 - RNA, 18 nt, Human
auccaugaccuaguuuuc

SEQ ID NO: 3514911 - RNA, 21 nt, Human
auccaugaccuaguuuuccau

SEQ ID NO: 3514912 - RNA, 15 nt, Human
auccaugcaccaaac

SEQ ID NO: 3514913 - RNA, 20 nt, Human
auccauggggcugauuguau

SEQ ID NO: 3514914 - RNA, 19 nt, Human
auccauggggucucucaca

SEQ ID NO: 3514915 - RNA, 23 nt, Human
auccauggggucucucacagaca

SEQ ID NO: 3514916 - RNA, 16 nt, Human
auccauguaacugccu

SEQ ID NO: 3514917 - RNA, 19 nt, Human
auccauguaagguaucagu

SEQ ID NO: 3514918 - RNA, 12 nt, Human
auccauguacug

SEQ ID NO: 3514919 - RNA, 20 nt, Human
auccauguacuguaguuuuu

SEQ ID NO: 3514920 - RNA, 20 nt, Human
auccauguuaguuuuuacuu

SEQ ID NO: 3514921 - RNA, 19 nt, Human
auccauuaggccagcaacg

SEQ ID NO: 3514922 - RNA, 14 nt, Human
auccauuaucaugu

SEQ ID NO: 3514923 - RNA, 15 nt, Human
auccauuaucaugug

SEQ ID NO: 3514924 - RNA, 17 nt, Human
auccauuaucaugugua

SEQ ID NO: 3514925 - RNA, 15 nt, Human
auccauucuuucuga

SEQ ID NO: 3514926 - RNA, 16 nt, Human
auccauuuccauugcu

SEQ ID NO: 3514927 - RNA, 23 nt, Human
auccauuucuaauuauguagcuc

SEQ ID NO: 3514928 - RNA, 13 nt, Human
auccauuuggaaa

SEQ ID NO: 3514929 - RNA, 17 nt, Human
auccauuuggaaaucuu

SEQ ID NO: 3514930 - RNA, 13 nt, Human
aucccaaaaguca

SEQ ID NO: 3514931 - RNA, 24 nt, Human
aucccaaacugugaugaagccgac

SEQ ID NO: 3514932 - RNA, 16 nt, Human
aucccaaaggacagcc

SEQ ID NO: 3514933 - RNA, 20 nt, Human
aucccaaaguuguuguaacc

SEQ ID NO: 3514934 - RNA, 15 nt, Human
aucccaacacugcca

SEQ ID NO: 3514935 - RNA, 15 nt, Human
aucccaacagccaug

SEQ ID NO: 3514936 - RNA, 22 nt, Human
aucccaaccaggcaccucuucc

SEQ ID NO: 3514937 - RNA, 15 nt, Human
aucccaaccagugcc

SEQ ID NO: 3514938 - RNA, 17 nt, Human
aucccaacugucuuuuu

SEQ ID NO: 3514939 - RNA, 19 nt, Human
aucccaagaucugugcagc

SEQ ID NO: 3514940 - RNA, 20 nt, Human
aucccaaguagaaucucagu

SEQ ID NO: 3514941 - RNA, 15 nt, Human
aucccaagugccagu

SEQ ID NO: 3514942 - RNA, 14 nt, Human
aucccacacccugg

SEQ ID NO: 3514943 - RNA, 22 nt, Human
aucccacauccaacuccagcaa

SEQ ID NO: 3514944 - RNA, 15 nt, Human
aucccaccaacccuc

SEQ ID NO: 3514945 - RNA, 18 nt, Human
aucccaccccauccucca

SEQ ID NO: 3514946 - RNA, 20 nt, Human
aucccaccccauccuccagg

SEQ ID NO: 3514947 - RNA, 20 nt, Human
aucccacggaaaaugccaau

SEQ ID NO: 3514948 - RNA, 20 nt, Human
aucccacuaaugcaaacugg

SEQ ID NO: 3514949 - RNA, 18 nt, Human
aucccagaaaaaguaacu

SEQ ID NO: 3514950 - RNA, 17 nt, Human
aucccagaaauuagaaa

SEQ ID NO: 3514951 - RNA, 18 nt, Human
aucccagagagcccgagg

SEQ ID NO: 3514952 - RNA, 12 nt, Human
aucccagcccaa

SEQ ID NO: 3514953 - RNA, 11 nt, Human
aucccagcccc

SEQ ID NO: 3514954 - RNA, 23 nt, Human
aucccagcccuuugggaggcuga

SEQ ID NO: 3514955 - RNA, 14 nt, Human
aucccagccggcca

SEQ ID NO: 3514956 - RNA, 24 nt, Human
aucccagccggccaauggaaaccu

SEQ ID NO: 3514957 - RNA, 13 nt, Human
aucccagccuugg

SEQ ID NO: 3514958 - RNA, 23 nt, Human
aucccagcuacucaagaggcuga

SEQ ID NO: 3514959 - RNA, 18 nt, Human
aucccagcuacucaggag

SEQ ID NO: 3514960 - RNA, 20 nt, Human
aucccagcuacucaggaggc

SEQ ID NO: 3514961 - RNA, 22 nt, Human
aucccagcuacuugggaggcug

SEQ ID NO: 3514962 - RNA, 20 nt, Human
aucccagcuucggcauuuga

SEQ ID NO: 3514963 - RNA, 24 nt, Human
aucccauaugccugggcagaagga

SEQ ID NO: 3514964 - RNA, 17 nt, Human
aucccaucauuuuccau

SEQ ID NO: 3514965 - RNA, 16 nt, Human
aucccaucccauccca

SEQ ID NO: 3514966 - RNA, 20 nt, Human
aucccaucuaagcugcagcu

SEQ ID NO: 3514967 - RNA, 18 nt, Human
aucccaugaacacacugu

SEQ ID NO: 3514968 - RNA, 15 nt, Human
caagaaaacaacuuc

SEQ ID NO: 3514969 - RNA, 15 nt, Human
caagaaaacaggcac

SEQ ID NO: 3514970 - RNA, 16 nt, Human
caagaaaacaggcacu

SEQ ID NO: 3514971 - RNA, 17 nt, Human
caagaaaacaggcacug

SEQ ID NO: 3514972 - RNA, 23 nt, Human
caagaaaacaggcacugcccugg

SEQ ID NO: 3514973 - RNA, 15 nt, Human
caagaaacagccagc

SEQ ID NO: 3514974 - RNA, 20 nt, Human
caagaaaggcugcuguacug

SEQ ID NO: 3514975 - RNA, 21 nt, Human
caagaaauaaaaggaagccaa

SEQ ID NO: 3514976 - RNA, 18 nt, Human
caagaaauaaguuuuugu

SEQ ID NO: 3514977 - RNA, 13 nt, Human
caagaaaugaaag

SEQ ID NO: 3514978 - RNA, 16 nt, Human
caagaaaugaaagcag

SEQ ID NO: 3514979 - RNA, 21 nt, Human
caagaacagcaggcccaccua

SEQ ID NO: 3514980 - RNA, 15 nt, Human
caagaaccuggaaaa

SEQ ID NO: 3514981 - RNA, 20 nt, Human
caagaacucaucacuguggc

SEQ ID NO: 3514982 - RNA, 14 nt, Human
caagaacucugggc

SEQ ID NO: 3514983 - RNA, 15 nt, Human
caagaacugaaaaca

SEQ ID NO: 3514984 - RNA, 19 nt, Human
caagaacugcauggaccua

SEQ ID NO: 3514985 - RNA, 13 nt, Human
caagaacuuguuu

SEQ ID NO: 3514986 - RNA, 17 nt, Human
caagaacuuguuuaaua

SEQ ID NO: 3514987 - RNA, 13 nt, Human
caagaagaaaaag

SEQ ID NO: 3514988 - RNA, 22 nt, Human
caagaagaaaugcuuuccaaaa

SEQ ID NO: 3514989 - RNA, 18 nt, Human
caagaagaucacgcuccc

SEQ ID NO: 3514990 - RNA, 23 nt, Human
caagaagaucacgcuccccgccu

SEQ ID NO: 3514991 - RNA, 13 nt, Human
caagaagcagugg

SEQ ID NO: 3514992 - RNA, 23 nt, Human
caagaagcauuuuguaaguugaa

SEQ ID NO: 3514993 - RNA, 13 nt, Human
caagaagcccagg

SEQ ID NO: 3514994 - RNA, 14 nt, Human
caagaagcccagga

SEQ ID NO: 3514995 - RNA, 18 nt, Human
caagaagcccaggaaagg

SEQ ID NO: 3514996 - RNA, 17 nt, Human
caagaaggaugauucaa

SEQ ID NO: 3514997 - RNA, 16 nt, Human
caagaaggcaaaaaua

SEQ ID NO: 3514998 - RNA, 13 nt, Human
caagaagggcugc

SEQ ID NO: 3514999 - RNA, 14 nt, Human
caagaagggcugca

SEQ ID NO: 3515000 - RNA, 15 nt, Human
caagaagggcugcau

SEQ ID NO: 3515001 - RNA, 19 nt, Human
caagaagggcugcaugaug

SEQ ID NO: 3515002 - RNA, 16 nt, Human
caagaaguagcagugu

SEQ ID NO: 3515003 - RNA, 20 nt, Human
caagaaguccccucuccucc

SEQ ID NO: 3515004 - RNA, 14 nt, Human
caagaagugaagaa

SEQ ID NO: 3515005 - RNA, 14 nt, Human
caagaagugauuag

SEQ ID NO: 3515006 - RNA, 12 nt, Human
caagaauaaaaa

SEQ ID NO: 3515007 - RNA, 22 nt, Human
caagaauaaaggcagcuguugu

SEQ ID NO: 3515008 - RNA, 18 nt, Human
caagaauaaucacgcuuu

SEQ ID NO: 3515009 - RNA, 21 nt, Human
caagaauaaucacgcuuuccu

SEQ ID NO: 3515010 - RNA, 22 nt, Human
caagaauaaucacgcuuuccug

SEQ ID NO: 3515011 - RNA, 13 nt, Human
caagcacaguggu

SEQ ID NO: 3515012 - RNA, 16 nt, Human
caagcaccagggaaga

SEQ ID NO: 3515013 - RNA, 16 nt, Human
caagcaccuccugccu

SEQ ID NO: 3515014 - RNA, 17 nt, Human
caagcaccuccugccuc

SEQ ID NO: 3515015 - RNA, 15 nt, Human
caagcacugauaucu

SEQ ID NO: 3515016 - RNA, 13 nt, Human
caagcacugugcu

SEQ ID NO: 3515017 - RNA, 14 nt, Human
caagcacuucuuuu

SEQ ID NO: 3515018 - RNA, 17 nt, Human
caagcagagguggccag

SEQ ID NO: 3515019 - RNA, 18 nt, Human
caagcagagugcacagcu

SEQ ID NO: 3515020 - RNA, 19 nt, Human
caagcagagugcacagcug

SEQ ID NO: 3515021 - RNA, 16 nt, Human
caagcagauacugcug

SEQ ID NO: 3515022 - RNA, 23 nt, Human
caagcagauacugcuguguaaug

SEQ ID NO: 3515023 - RNA, 21 nt, Human
caagcagauuggagaaacccu

SEQ ID NO: 3515024 - RNA, 17 nt, Human
caagcagcaucuucugg

SEQ ID NO: 3515025 - RNA, 14 nt, Human
caagcaggaagcuc

SEQ ID NO: 3515026 - RNA, 16 nt, Human
caagcaggaaguucaa

SEQ ID NO: 3515027 - RNA, 14 nt, Human
caagcaggacaugg

SEQ ID NO: 3515028 - RNA, 14 nt, Human
caagcaggagacga

SEQ ID NO: 3515029 - RNA, 13 nt, Human
caagcagggagga

SEQ ID NO: 3515030 - RNA, 16 nt, Human
caagcagguuagagaa

SEQ ID NO: 3515031 - RNA, 19 nt, Human
caagcagucgugccugugu

SEQ ID NO: 3515032 - RNA, 18 nt, Human
caagcagucuacccaccu

SEQ ID NO: 3515033 - RNA, 15 nt, Human
caagcaucacuuuuu

SEQ ID NO: 3515034 - RNA, 15 nt, Human
caagcaucuccugag

SEQ ID NO: 3515035 - RNA, 17 nt, Human
caagcaugcagcuuugc

SEQ ID NO: 3515036 - RNA, 23 nt, Human
caagcauggucccacaucccugg

SEQ ID NO: 3515037 - RNA, 16 nt, Human
caagcauucagaagaa

SEQ ID NO: 3515038 - RNA, 21 nt, Human
caagcauuuaauguagccaug

SEQ ID NO: 3515039 - RNA, 22 nt, Human
caagcauuuaauguagccaugg

SEQ ID NO: 3515040 - RNA, 16 nt, Human
caagcauuuagaugua

SEQ ID NO: 3515041 - RNA, 18 nt, Human
caagccaacgacaaagcc

SEQ ID NO: 3515042 - RNA, 15 nt, Human
caagccaacuuguaa

SEQ ID NO: 3515043 - RNA, 20 nt, Human
caagccaacuuguaaauaca

SEQ ID NO: 3515044 - RNA, 21 nt, Human
caagccaacuuguaaauacac

SEQ ID NO: 3515045 - RNA, 22 nt, Human
caagccaagggaaccugugucc

SEQ ID NO: 3515046 - RNA, 14 nt, Human
caagccaauccccu

SEQ ID NO: 3515047 - RNA, 17 nt, Human
caagccaauccccuccu

SEQ ID NO: 3515048 - RNA, 13 nt, Human
caagccacagaag

SEQ ID NO: 3515049 - RNA, 22 nt, Human
caagccacagaagccaggagca

SEQ ID NO: 3515050 - RNA, 22 nt, Human
caagccaccaacauacucccau

SEQ ID NO: 3515051 - RNA, 21 nt, Human
caagccaccagaugugacagu

SEQ ID NO: 3515052 - RNA, 13 nt, Human
caagccagaacuu

SEQ ID NO: 3515053 - RNA, 20 nt, Human
caagccaggcucacucacag

SEQ ID NO: 3515054 - RNA, 18 nt, Human
caagccagggugugucuc

SEQ ID NO: 3515055 - RNA, 22 nt, Human
caagcccacagcacagcucccu

SEQ ID NO: 3515056 - RNA, 23 nt, Human
caagcccacagguguccccagcc

SEQ ID NO: 3515057 - RNA, 18 nt, Human
caagcccccccuuccacu

SEQ ID NO: 3515058 - RNA, 21 nt, Human
caagcccuccccaucccaugu

SEQ ID NO: 3515059 - RNA, 14 nt, Human
caagccguggcuuc

SEQ ID NO: 3515060 - RNA, 15 nt, Human
caagccguggcuucc

SEQ ID NO: 3515061 - RNA, 16 nt, Human
caagccguggcuuccc

SEQ ID NO: 3515062 - RNA, 18 nt, Human
caagccuaagggauccug

SEQ ID NO: 3515063 - RNA, 15 nt, Human
caagccuccacagcg

SEQ ID NO: 3515064 - RNA, 17 nt, Human
caagccuccacagcgag

SEQ ID NO: 3515065 - RNA, 18 nt, Human
caagccucugcccaggca

SEQ ID NO: 3515066 - RNA, 11 nt, Human
caagccugagg

SEQ ID NO: 3515067 - RNA, 15 nt, Human
caagccuggaaaaaa

SEQ ID NO: 3515068 - RNA, 14 nt, Human
caagccuggcaagg

SEQ ID NO: 3515069 - RNA, 15 nt, Human
caagccugugcaaaa

SEQ ID NO: 3515070 - RNA, 19 nt, Human
caagccugugcaaaaaaau

SEQ ID NO: 3515071 - RNA, 17 nt, Human
caagccuuggcucuacc

SEQ ID NO: 3515072 - RNA, 20 nt, Human
caagcgaggucaacagagaa

SEQ ID NO: 3515073 - RNA, 17 nt, Human
caagcgauucuccugcc

SEQ ID NO: 3515074 - RNA, 19 nt, Human
caagcgauucuucugcuuc

SEQ ID NO: 3515075 - RNA, 23 nt, Human
caagcgcauccaaucucaaggaa

SEQ ID NO: 3515076 - RNA, 13 nt, Human
caagcggugucuc

SEQ ID NO: 3515077 - RNA, 17 nt, Human
caagcuaauaaaauauc

SEQ ID NO: 3515078 - RNA, 19 nt, Human
caagcuaauaaaauaucau

SEQ ID NO: 3515079 - RNA, 17 nt, Human
caagcuagaaggccaca

SEQ ID NO: 3515080 - RNA, 17 nt, Human
caagcuaucuaaaguuu

SEQ ID NO: 3515081 - RNA, 16 nt, Human
caagcuauuccuuucc

SEQ ID NO: 3515082 - RNA, 23 nt, Human
caagcuauuccuuucccuuccuc

SEQ ID NO: 3515083 - RNA, 21 nt, Human
caagcucacaguuccucgccc

SEQ ID NO: 3515084 - RNA, 21 nt, Human
caagcucacuccccaaccccc

SEQ ID NO: 3515085 - RNA, 17 nt, Human
caagcucagaaggcucu

SEQ ID NO: 3515086 - RNA, 16 nt, Human
caagcucaggaccagg

SEQ ID NO: 3515087 - RNA, 17 nt, Human
caagcuccaagcuccca

SEQ ID NO: 3515088 - RNA, 21 nt, Human
caagcuccaagcucccaggca

SEQ ID NO: 3515089 - RNA, 21 nt, Human
caagcuccaucuccacuccag

SEQ ID NO: 3515090 - RNA, 18 nt, Human
caagcucccaagggaugg

SEQ ID NO: 3515091 - RNA, 22 nt, Human
caagcucccaagggauggugcc

SEQ ID NO: 3515092 - RNA, 13 nt, Human
caagcucccugcc

SEQ ID NO: 3515093 - RNA, 15 nt, Human
caagcuccgcaggac

SEQ ID NO: 3515094 - RNA, 15 nt, Human
caagcuccuccuccc

SEQ ID NO: 3515095 - RNA, 22 nt, Human
caagcuccuccucccugcaucu

SEQ ID NO: 3515096 - RNA, 14 nt, Human
caagcuccuccucg

SEQ ID NO: 3515097 - RNA, 17 nt, Human
caagcuccuugggaggc

SEQ ID NO: 3515098 - RNA, 13 nt, Human
caagcucucugca

SEQ ID NO: 3515099 - RNA, 12 nt, Human
caagcucucuug

SEQ ID NO: 3515100 - RNA, 13 nt, Human
caagcugaaauuu

SEQ ID NO: 3515101 - RNA, 18 nt, Human
caagcugaggugcccagg

SEQ ID NO: 3515102 - RNA, 20 nt, Human
caagcugaggugcccaggag

SEQ ID NO: 3515103 - RNA, 20 nt, Human
caagcugaguauuaaaaugu

SEQ ID NO: 3515104 - RNA, 15 nt, Human
caagcugaguuuccu

SEQ ID NO: 3515105 - RNA, 22 nt, Human
caagcugaguuuccuaugggaa

SEQ ID NO: 3515106 - RNA, 20 nt, Human
caagcugcacccucaggcag

SEQ ID NO: 3515107 - RNA, 21 nt, Human
caagcugcacccucaggcagg

SEQ ID NO: 3515108 - RNA, 12 nt, Human
caagcugccucc

SEQ ID NO: 3515109 - RNA, 14 nt, Human
caagcugccucccu

SEQ ID NO: 3515110 - RNA, 14 nt, Human
caagcugcuguggc

SEQ ID NO: 3515111 - RNA, 14 nt, Human
caagcuggaagcac

SEQ ID NO: 3515112 - RNA, 12 nt, Human
caagcuggccuc

SEQ ID NO: 3515113 - RNA, 13 nt, Human
caagcuggccucu

SEQ ID NO: 3515114 - RNA, 12 nt, Human
caagcuggcugg

SEQ ID NO: 3515115 - RNA, 23 nt, Human
caagcuggcugggguggccugug

SEQ ID NO: 3515116 - RNA, 12 nt, Human
caagcugggccc

SEQ ID NO: 3515117 - RNA, 17 nt, Human
caagcugggccccagcc

SEQ ID NO: 3515118 - RNA, 18 nt, Human
caagcugggccccagccc

SEQ ID NO: 3515119 - RNA, 22 nt, Human
caagcugggccccagcccaccc

SEQ ID NO: 3515120 - RNA, 23 nt, Human
caagcuggucccacucaguccau

SEQ ID NO: 3515121 - RNA, 23 nt, Human
caagcugugagacagugggaaau

SEQ ID NO: 3515122 - RNA, 16 nt, Human
caagcugugccacccu

SEQ ID NO: 3515123 - RNA, 17 nt, Human
caagcugugccacccug

SEQ ID NO: 3515124 - RNA, 19 nt, Human
caagcugugccacccuggg

SEQ ID NO: 3515125 - RNA, 14 nt, Human
caagcuuauuuugg

SEQ ID NO: 3515126 - RNA, 12 nt, Human
caagcuucaguu

SEQ ID NO: 3515127 - RNA, 19 nt, Human
caagcuucaguuuccuggu

SEQ ID NO: 3515128 - RNA, 22 nt, Human
caagcuucaguuuccuggucug

SEQ ID NO: 3515129 - RNA, 15 nt, Human
caagcuucugagacg

SEQ ID NO: 3515130 - RNA, 14 nt, Human
caagcuuuuuuauu

SEQ ID NO: 3515131 - RNA, 15 nt, Human
caagcuuuuuuauuu

SEQ ID NO: 3515132 - RNA, 19 nt, Human
caaaggggacaggccucac

SEQ ID NO: 3515133 - RNA, 20 nt, Human
caaaggggaucauaaaguua

SEQ ID NO: 3515134 - RNA, 16 nt, Human
caaaggguaucaggug

SEQ ID NO: 3515135 - RNA, 18 nt, Human
caaaggguaucaggugcu

SEQ ID NO: 3515136 - RNA, 19 nt, Human
caaaggguaucaggugcug

SEQ ID NO: 3515137 - RNA, 20 nt, Human
caaaggguaucaggugcugc

SEQ ID NO: 3515138 - RNA, 21 nt, Human
caaaggguaucaggugcugcc

SEQ ID NO: 3515139 - RNA, 23 nt, Human
caaagggugaagcuauuuaucug

SEQ ID NO: 3515140 - RNA, 13 nt, Human
caaaggguggaau

SEQ ID NO: 3515141 - RNA, 11 nt, Human
caaagggugug

SEQ ID NO: 3515142 - RNA, 23 nt, Human
caaaggguugggagcugaugaaa

SEQ ID NO: 3515143 - RNA, 16 nt, Human
caaaggguuuuaaugu

SEQ ID NO: 3515144 - RNA, 19 nt, Human
caaaggguuuuaauguaga

SEQ ID NO: 3515145 - RNA, 14 nt, Human
caaagguaaaucag

SEQ ID NO: 3515146 - RNA, 22 nt, Human
caaagguaaaucagacuaugaa

SEQ ID NO: 3515147 - RNA, 13 nt, Human
caaagguggcucu

SEQ ID NO: 3515148 - RNA, 14 nt, Human
caaagguucuaggu

SEQ ID NO: 3515149 - RNA, 15 nt, Human
caaagguugagaugu

SEQ ID NO: 3515150 - RNA, 20 nt, Human
caaagguuuaaaugaacaag

SEQ ID NO: 3515151 - RNA, 18 nt, Human
caaagguuuggaaggagc

SEQ ID NO: 3515152 - RNA, 11 nt, Human
caaagguuuuc

SEQ ID NO: 3515153 - RNA, 18 nt, Human
caaaguaaaacuugcugc

SEQ ID NO: 3515154 - RNA, 15 nt, Human
caaaguaaaagaaac

SEQ ID NO: 3515155 - RNA, 23 nt, Human
caaaguaaaagaaaccacuucug

SEQ ID NO: 3515156 - RNA, 22 nt, Human
caauauuauacuaagaaaagau

SEQ ID NO: 3515157 - RNA, 16 nt, Human
caauauucucuguaca

SEQ ID NO: 3515158 - RNA, 22 nt, Human
caauauucucuguacauauuag

SEQ ID NO: 3515159 - RNA, 15 nt, Human
caauauugaacuuuu

SEQ ID NO: 3515160 - RNA, 17 nt, Human
caauauugauugggaaa

SEQ ID NO: 3515161 - RNA, 20 nt, Human
caauauugauugggaaaaca

SEQ ID NO: 3515162 - RNA, 22 nt, Human
caauauuuaaggagauguaaga

SEQ ID NO: 3515163 - RNA, 18 nt, Human
caauauuuaaucuuuuau

SEQ ID NO: 3515164 - RNA, 14 nt, Human
caauauuuauuauu

SEQ ID NO: 3515165 - RNA, 13 nt, Human
caauauuuauugu

SEQ ID NO: 3515166 - RNA, 21 nt, Human
caauauuucagauaaucacaa

SEQ ID NO: 3515167 - RNA, 13 nt, Human
caauauuuguaga

SEQ ID NO: 3515168 - RNA, 16 nt, Human
caauauuuuaagcauu

SEQ ID NO: 3515169 - RNA, 23 nt, Human
caauauuuuaagcauuacucuug

SEQ ID NO: 3515170 - RNA, 15 nt, Human
caauauuuuccauga

SEQ ID NO: 3515171 - RNA, 20 nt, Human
caauauuuuccaugaaaaug

SEQ ID NO: 3515172 - RNA, 17 nt, Human
caauauuuucuuuuccc

SEQ ID NO: 3515173 - RNA, 14 nt, Human
caauauuuuuagau

SEQ ID NO: 3515174 - RNA, 16 nt, Human
caauauuuuuauauca

SEQ ID NO: 3515175 - RNA, 20 nt, Human
caauauuuuuauaucaugca

SEQ ID NO: 3515176 - RNA, 22 nt, Human
caauauuuuuauaucaugcaaa

SEQ ID NO: 3515177 - RNA, 17 nt, Human
caaucaaagcacuugga

SEQ ID NO: 3515178 - RNA, 14 nt, Human
caaucaaaucugcu

SEQ ID NO: 3515179 - RNA, 12 nt, Human
caaucaagauaa

SEQ ID NO: 3515180 - RNA, 19 nt, Human
caaucaagguuauaauuuu

SEQ ID NO: 3515181 - RNA, 20 nt, Human
caaucaagguuauaauuuuu

SEQ ID NO: 3515182 - RNA, 17 nt, Human
caacuucaguccuggga

SEQ ID NO: 3515183 - RNA, 16 nt, Human
caacuucaucuggaag

SEQ ID NO: 3515184 - RNA, 17 nt, Human
caacuucaucuggaagu

SEQ ID NO: 3515185 - RNA, 19 nt, Human
caacuucaugucaacuucu

SEQ ID NO: 3515186 - RNA, 23 nt, Human
caacuucccaguucaggaguccc

SEQ ID NO: 3515187 - RNA, 14 nt, Human
caacuucguuuccu

SEQ ID NO: 3515188 - RNA, 14 nt, Human
caacuucuaauugc

SEQ ID NO: 3515189 - RNA, 16 nt, Human
caacuucuaauugcca

SEQ ID NO: 3515190 - RNA, 19 nt, Human
caacuucuacuucugcccu

SEQ ID NO: 3515191 - RNA, 20 nt, Human
caacuugaacuucaccugca

SEQ ID NO: 3515192 - RNA, 9 nt, Human
caacuugag

SEQ ID NO: 3515193 - RNA, 22 nt, Human
caacuugagauguaugaaggcu

SEQ ID NO: 3515194 - RNA, 20 nt, Human
caacuugagcauguuacuga

SEQ ID NO: 3515195 - RNA, 13 nt, Human
caacuugagggcc

SEQ ID NO: 3515196 - RNA, 19 nt, Human
caacuugagggcccagagc

SEQ ID NO: 3515197 - RNA, 20 nt, Human
caacuugagggcccagagca

SEQ ID NO: 3515198 - RNA, 21 nt, Human
caacuugagggcccagagcag

SEQ ID NO: 3515199 - RNA, 22 nt, Human
caacuugagggcccagagcagg

SEQ ID NO: 3515200 - RNA, 22 nt, Human
caacuugcauccaacuccagga

SEQ ID NO: 3515201 - RNA, 17 nt, Human
caacuugccuuugaaga

SEQ ID NO: 3515202 - RNA, 19 nt, Human
caacuuggcuuccuuucuu

SEQ ID NO: 3515203 - RNA, 12 nt, Human
caacuuggcuuu

SEQ ID NO: 3515204 - RNA, 12 nt, Human
caacuugggaac

SEQ ID NO: 3515205 - RNA, 18 nt, Human
caacuugguucugcuuca

SEQ ID NO: 3515206 - RNA, 13 nt, Human
caacuuguaaaua

SEQ ID NO: 3515207 - RNA, 16 nt, Human
caacuuguaaauacac

SEQ ID NO: 3515208 - RNA, 19 nt, Human
caacuuguccuagcacaga

SEQ ID NO: 3515209 - RNA, 20 nt, Human
caacuuguccuagcacagau

SEQ ID NO: 3515210 - RNA, 16 nt, Human
caacuuuaagaggaca

SEQ ID NO: 3515211 - RNA, 22 nt, Human
caacuuuaagcagcucuugcua

SEQ ID NO: 3515212 - RNA, 17 nt, Human
caacuuucaagaacuug

SEQ ID NO: 3515213 - RNA, 11 nt, Human
caacuuucugu

SEQ ID NO: 3515214 - RNA, 14 nt, Human
caacuuugaauaaa

SEQ ID NO: 3515215 - RNA, 22 nt, Human
caacuuuguaaaaaucuuuuga

SEQ ID NO: 3515216 - RNA, 12 nt, Human
caacuuuguaua

SEQ ID NO: 3515217 - RNA, 22 nt, Human
caacuuuguggaugucuuccuu

SEQ ID NO: 3515218 - RNA, 21 nt, Human
caacuuuuaaccaaacaauua

SEQ ID NO: 3515219 - RNA, 13 nt, Human
caacuuuucuauu

SEQ ID NO: 3515220 - RNA, 20 nt, Human
caacuuuuguguaaugaaaa

SEQ ID NO: 3515221 - RNA, 14 nt, Human
caacuuuuuauugc

SEQ ID NO: 3515222 - RNA, 18 nt, Human
caacuuuuuauugccuuc

SEQ ID NO: 3515223 - RNA, 20 nt, Human
caacuuuuuauugccuucuc

SEQ ID NO: 3515224 - RNA, 15 nt, Human
caacuuuuuuuucuu

SEQ ID NO: 3515225 - RNA, 14 nt, Human
caagaaaaauaaag

SEQ ID NO: 3515226 - RNA, 17 nt, Human
caagaaaaauaaagaaa

SEQ ID NO: 3515227 - RNA, 23 nt, Human
caagaaaaauaaagaaaagaugc

SEQ ID NO: 3515228 - RNA, 19 nt, Human
caagaaaacaggcacugcc

SEQ ID NO: 3515229 - RNA, 12 nt, Human
caagaaaagagu

SEQ ID NO: 3515230 - RNA, 18 nt, Human
caagaaaaucagguauua

SEQ ID NO: 3515231 - RNA, 16 nt, Human
caagaaacagccagca

SEQ ID NO: 3515232 - RNA, 19 nt, Human
caagaaacagccagcaaga

SEQ ID NO: 3515233 - RNA, 19 nt, Human
caagaaacugaggaauuuu

SEQ ID NO: 3515234 - RNA, 14 nt, Human
caagaaagauguau

SEQ ID NO: 3515235 - RNA, 17 nt, Human
caagaaaggaaaccuuu

SEQ ID NO: 3515236 - RNA, 13 nt, Human
caagaaaggagag

SEQ ID NO: 3515237 - RNA, 13 nt, Human
caagaaauaaaag

SEQ ID NO: 3515238 - RNA, 14 nt, Human
caagaaaucccugu

SEQ ID NO: 3515239 - RNA, 12 nt, Human
caagaaaugaag

SEQ ID NO: 3515240 - RNA, 17 nt, Human
caagaaaugaagagcug

SEQ ID NO: 3515241 - RNA, 20 nt, Human
caagaacacagcccugcuuc

SEQ ID NO: 3515242 - RNA, 17 nt, Human
caagaacagcaggccca

SEQ ID NO: 3515243 - RNA, 19 nt, Human
caagaacucaucacugugg

SEQ ID NO: 3515244 - RNA, 16 nt, Human
caagaacugaaaacau

SEQ ID NO: 3515245 - RNA, 17 nt, Human
caagaacugaaaacaua

SEQ ID NO: 3515246 - RNA, 13 nt, Human
caagaacugcaug

SEQ ID NO: 3515247 - RNA, 18 nt, Human
caagaacugcauggaccu

SEQ ID NO: 3515248 - RNA, 15 nt, Human
caagaacuuguuuaa

SEQ ID NO: 3515249 - RNA, 20 nt, Human
caagaacuuuccaggaaggc

SEQ ID NO: 3515250 - RNA, 13 nt, Human
caagaagaccaga

SEQ ID NO: 3515251 - RNA, 21 nt, Human
caagaagaccagacuguggag

SEQ ID NO: 3515252 - RNA, 19 nt, Human
caagaagaucacgcucccc

SEQ ID NO: 3515253 - RNA, 11 nt, Human
caagaagauga

SEQ ID NO: 3515254 - RNA, 14 nt, Human
caagaagcaggcua

SEQ ID NO: 3515255 - RNA, 15 nt, Human
caagaagccuuuccu

SEQ ID NO: 3515256 - RNA, 18 nt, Human
caagaaggaaagauuuug

SEQ ID NO: 3515257 - RNA, 13 nt, Human
caagaaggcuggg

SEQ ID NO: 3515258 - RNA, 13 nt, Human
caagaagggacug

SEQ ID NO: 3515259 - RNA, 20 nt, Human
caagaagggcugcaugaugu

SEQ ID NO: 3515260 - RNA, 21 nt, Human
caagaaguucuuugauucugu

SEQ ID NO: 3515261 - RNA, 15 nt, Human
caagaaguuuaagga

SEQ ID NO: 3515262 - RNA, 15 nt, Human
caagaauaaaggcag

SEQ ID NO: 3515263 - RNA, 17 nt, Human
caagaauaaaggcagcu

SEQ ID NO: 3515264 - RNA, 18 nt, Human
caagaauaaaggcagcug

SEQ ID NO: 3515265 - RNA, 21 nt, Human
caagaauaaaggcagcuguug

SEQ ID NO: 3515266 - RNA, 22 nt, Human
caagaauagcaucuguacaaag

SEQ ID NO: 3515267 - RNA, 23 nt, Human
caagaauagcaucuguacaaagg

SEQ ID NO: 3515268 - RNA, 18 nt, Human
caagaaucagugcaaaga

SEQ ID NO: 3515269 - RNA, 18 nt, Human
caagaauccacauuucua

SEQ ID NO: 3515270 - RNA, 19 nt, Human
caagaauccacauuucuaa

SEQ ID NO: 3515271 - RNA, 23 nt, Human
caagaaugacggaauaagagacc

SEQ ID NO: 3515272 - RNA, 17 nt, Human
caagaaugcauugauau

SEQ ID NO: 3515273 - RNA, 13 nt, Human
caagaauggauca

SEQ ID NO: 3515274 - RNA, 15 nt, Human
caagaaugguggcuu

SEQ ID NO: 3515275 - RNA, 20 nt, Human
caagaauguacguccagccu

SEQ ID NO: 3515276 - RNA, 16 nt, Human
caagacagaugcccca

SEQ ID NO: 3515277 - RNA, 22 nt, Human
caagacagaugccccagagcug

SEQ ID NO: 3515278 - RNA, 11 nt, Human
caagacauugu

SEQ ID NO: 3515279 - RNA, 14 nt, Human
caagacauugucaa

SEQ ID NO: 3515280 - RNA, 17 nt, Human
caagacauugucaauaa

SEQ ID NO: 3515281 - RNA, 18 nt, Human
caagacauugucaauaaa

SEQ ID NO: 3515282 - RNA, 17 nt, Human
caagaccacguuucuaa

SEQ ID NO: 3515283 - RNA, 13 nt, Human
caagacccccagc

SEQ ID NO: 3515284 - RNA, 15 nt, Human
caagaccuaggcuca

SEQ ID NO: 3515285 - RNA, 24 nt, Human
caagaccucagggcacaaagaugg

SEQ ID NO: 3515286 - RNA, 20 nt, Human
caagaccuucaccaaacaua

SEQ ID NO: 3515287 - RNA, 23 nt, Human
caagaccuucuccuucaccuuug

SEQ ID NO: 3515288 - RNA, 13 nt, Human
caagacgcugugc

SEQ ID NO: 3515289 - RNA, 15 nt, Human
caagacgcugugcug

SEQ ID NO: 3515290 - RNA, 22 nt, Human
caagacucccucgucgagcugg

SEQ ID NO: 3515291 - RNA, 14 nt, Human
caagacucuagagu

SEQ ID NO: 3515292 - RNA, 17 nt, Human
caagacucuagagucca

SEQ ID NO: 3515293 - RNA, 21 nt, Human
caagacucuagaguccaaggu

SEQ ID NO: 3515294 - RNA, 23 nt, Human
caagacugcuguggccaggaggu

SEQ ID NO: 3515295 - RNA, 17 nt, Human
caagacuguugcucaaa

SEQ ID NO: 3515296 - RNA, 18 nt, Human
caagacuguugcucaaau

SEQ ID NO: 3515297 - RNA, 19 nt, Human
caagacuucgggaaggugu

SEQ ID NO: 3515298 - RNA, 21 nt, Human
caagacuucgggaaggugucu

SEQ ID NO: 3515299 - RNA, 18 nt, Human
caagagaaaggccugcac

SEQ ID NO: 3515300 - RNA, 23 nt, Human
caagagaacucgcgcucaguaaa

SEQ ID NO: 3515301 - RNA, 14 nt, Human
caauugagaaaaau

SEQ ID NO: 3515302 - RNA, 14 nt, Human
caauugcaucuccc

SEQ ID NO: 3515303 - RNA, 17 nt, Human
caauugcugcuacuuau

SEQ ID NO: 3515304 - RNA, 15 nt, Human
caauuggcaccgaag

SEQ ID NO: 3515305 - RNA, 21 nt, Human
caauuggcaccgaagcccaga

SEQ ID NO: 3515306 - RNA, 20 nt, Human
caauugggagcugccaagag

SEQ ID NO: 3515307 - RNA, 21 nt, Human
caauugguaaaacucacugug

SEQ ID NO: 3515308 - RNA, 15 nt, Human
caauugucacuuuuu

SEQ ID NO: 3515309 - RNA, 17 nt, Human
caauugucacuuuuuau

SEQ ID NO: 3515310 - RNA, 14 nt, Human
caauugucauuuau

SEQ ID NO: 3515311 - RNA, 16 nt, Human
caauugucauuuauaa

SEQ ID NO: 3515312 - RNA, 23 nt, Human
caauugugaaaaaauuuacuuua

SEQ ID NO: 3515313 - RNA, 18 nt, Human
caauugugagccaccacg

SEQ ID NO: 3515314 - RNA, 13 nt, Human
caauugugcugcc

SEQ ID NO: 3515315 - RNA, 18 nt, Human
caauuguguagccuuuuu

SEQ ID NO: 3515316 - RNA, 21 nt, Human
caauuguugacaguucugaag

SEQ ID NO: 3515317 - RNA, 22 nt, Human
caauuguuugggguugaaaauu

SEQ ID NO: 3515318 - RNA, 22 nt, Human
caauuguuugggugauuccuaa

SEQ ID NO: 3515319 - RNA, 12 nt, Human
caauuuaaaaaa

SEQ ID NO: 3515320 - RNA, 15 nt, Human
caauuuaaacccauu

SEQ ID NO: 3515321 - RNA, 22 nt, Human
caauuuaaacccauuuuaguca

SEQ ID NO: 3515322 - RNA, 17 nt, Human
caauuuacaaagugugu

SEQ ID NO: 3515323 - RNA, 21 nt, Human
caauuuacaaaguguguauua

SEQ ID NO: 3515324 - RNA, 17 nt, Human
caauuuaguuguuguag

SEQ ID NO: 3515325 - RNA, 20 nt, Human
caauuuaguuguuguagaga

SEQ ID NO: 3515326 - RNA, 14 nt, Human
caauuuauaccuca

SEQ ID NO: 3515327 - RNA, 22 nt, Human
caauuuauaccucaauuuucac

SEQ ID NO: 3515328 - RNA, 22 nt, Human
caauuuauuaaaaugauuguaa

SEQ ID NO: 3515329 - RNA, 14 nt, Human
caauuuauucaaga

SEQ ID NO: 3515330 - RNA, 20 nt, Human
caauuucaaaaaaauaaaau

SEQ ID NO: 3515331 - RNA, 21 nt, Human
caauuucaaaaaaauaaaaua

SEQ ID NO: 3515332 - RNA, 17 nt, Human
caauuucaaauuacucu

SEQ ID NO: 3515333 - RNA, 16 nt, Human
caauuucaagguucua

SEQ ID NO: 3515334 - RNA, 17 nt, Human
caauuuccaagagcuga

SEQ ID NO: 3515335 - RNA, 16 nt, Human
caauuuccuuuauauu

SEQ ID NO: 3515336 - RNA, 21 nt, Human
caauuuccuuuauauuuagug

SEQ ID NO: 3515337 - RNA, 17 nt, Human
caauuucggauuuuuuc

SEQ ID NO: 3515338 - RNA, 21 nt, Human
caauuucggauuuuuuccaaa

SEQ ID NO: 3515339 - RNA, 22 nt, Human
caauuucggauuuuuuccaaaa

SEQ ID NO: 3515340 - RNA, 20 nt, Human
caauuucuacaaaauccuga

SEQ ID NO: 3515341 - RNA, 20 nt, Human
caauuucuacuuugaaguca

SEQ ID NO: 3515342 - RNA, 21 nt, Human
caauuucuacuuugaagucau

SEQ ID NO: 3515343 - RNA, 14 nt, Human
caauuugauacaua

SEQ ID NO: 3515344 - RNA, 15 nt, Human
caauuugauacauaa

SEQ ID NO: 3515345 - RNA, 23 nt, Human
caauuugcacaucuuggcuaugu

SEQ ID NO: 3515346 - RNA, 20 nt, Human
caauuugcacuaaaucagag

SEQ ID NO: 3515347 - RNA, 21 nt, Human
caauuugcacuaaaucagaga

SEQ ID NO: 3515348 - RNA, 21 nt, Human
caauuuggauuuaaaagccug

SEQ ID NO: 3515349 - RNA, 23 nt, Human
caauuuggauuuaaaagccugcu

SEQ ID NO: 3515350 - RNA, 19 nt, Human
aucugugcuuuccagcuca

SEQ ID NO: 3515351 - RNA, 23 nt, Human
aucugugggucugggagucacac

SEQ ID NO: 3515352 - RNA, 20 nt, Human
aucuguguauauuauuuggc

SEQ ID NO: 3515353 - RNA, 14 nt, Human
aucugugucuuguu

SEQ ID NO: 3515354 - RNA, 17 nt, Human
aucugugugaaaauggg

SEQ ID NO: 3515355 - RNA, 15 nt, Human
aucugugugaaacuu

SEQ ID NO: 3515356 - RNA, 18 nt, Human
aucuguguuuuugaaaua

SEQ ID NO: 3515357 - RNA, 12 nt, Human
aucuguuacaca

SEQ ID NO: 3515358 - RNA, 18 nt, Human
aucuguuagaugcuacua

SEQ ID NO: 3515359 - RNA, 16 nt, Human
aucuguuccuuggcag

SEQ ID NO: 3515360 - RNA, 19 nt, Human
aucuguucuuuaauuuauu

SEQ ID NO: 3515361 - RNA, 17 nt, Human
aucuguugauaaaucca

SEQ ID NO: 3515362 - RNA, 13 nt, Human
aucuguugcaaac

SEQ ID NO: 3515363 - RNA, 21 nt, Human
aucuguuguguacguggagag

SEQ ID NO: 3515364 - RNA, 23 nt, Human
aucuguuguguacguggagaggg

SEQ ID NO: 3515365 - RNA, 17 nt, Human
aucuguuuaaagcauau

SEQ ID NO: 3515366 - RNA, 21 nt, Human
aucuguuuaaaguagauuaga

SEQ ID NO: 3515367 - RNA, 13 nt, Human
aucuguuugagaa

SEQ ID NO: 3515368 - RNA, 19 nt, Human
aucuguuugagaaagucag

SEQ ID NO: 3515369 - RNA, 21 nt, Human
aucuguuuugugguuuggaau

SEQ ID NO: 3515370 - RNA, 19 nt, Human
aucuguuuuuaaaaaucau

SEQ ID NO: 3515371 - RNA, 15 nt, Human
aucuguuuuuacgua

SEQ ID NO: 3515372 - RNA, 18 nt, Human
aucuuaaagaaacagcuu

SEQ ID NO: 3515373 - RNA, 22 nt, Human
aucuuaaagaaacagcuuucaa

SEQ ID NO: 3515374 - RNA, 23 nt, Human
aucuuaaagaaacagcuuucaag

SEQ ID NO: 3515375 - RNA, 19 nt, Human
aucuuaaaguguguuucua

SEQ ID NO: 3515376 - RNA, 23 nt, Human
aucuuaacucuuugccuuugcca

SEQ ID NO: 3515377 - RNA, 17 nt, Human
aucuuaauacuguuauu

SEQ ID NO: 3515378 - RNA, 20 nt, Human
aucuuaauacuguuauucuu

SEQ ID NO: 3515379 - RNA, 21 nt, Human
aucuuaauacuguuauucuuu

SEQ ID NO: 3515380 - RNA, 14 nt, Human
aucuuaauauaaau

SEQ ID NO: 3515381 - RNA, 23 nt, Human
aucuuaauauauuucuaaauguu

SEQ ID NO: 3515382 - RNA, 19 nt, Human
aucuuaaucuguuuauuua

SEQ ID NO: 3515383 - RNA, 21 nt, Human
aucuuaaugaaugagucuguu

SEQ ID NO: 3515384 - RNA, 15 nt, Human
aucuuaauguaucaa

SEQ ID NO: 3515385 - RNA, 12 nt, Human
aucuuaauguuc

SEQ ID NO: 3515386 - RNA, 18 nt, Human
aucuuaauuuugguugua

SEQ ID NO: 3515387 - RNA, 19 nt, Human
aucuuaauuuugguuguau

SEQ ID NO: 3515388 - RNA, 23 nt, Human
aucuuaauuuugguuguauucuu

SEQ ID NO: 3515389 - RNA, 22 nt, Human
aucuuacaacaggcuuaugaau

SEQ ID NO: 3515390 - RNA, 15 nt, Human
aucuuacaauauuga

SEQ ID NO: 3515391 - RNA, 19 nt, Human
aucuuacuuuguaaauucu

SEQ ID NO: 3515392 - RNA, 20 nt, Human
aucuuacuuuguaaauucug

SEQ ID NO: 3515393 - RNA, 21 nt, Human
aucuuacuuuguaaauucuga

SEQ ID NO: 3515394 - RNA, 15 nt, Human
aucuuagauucucug

SEQ ID NO: 3515395 - RNA, 22 nt, Human
aucuuagauucucugugucuaa

SEQ ID NO: 3515396 - RNA, 13 nt, Human
aucuuaguguaug

SEQ ID NO: 3515397 - RNA, 16 nt, Human
aucuuaguguaugauu

SEQ ID NO: 3515398 - RNA, 19 nt, Human
aucuuaguguaugauuacu

SEQ ID NO: 3515399 - RNA, 24 nt, Human
aucuuauaaaguggaaguauguau

SEQ ID NO: 3515400 - RNA, 14 nt, Human
aucuuauaauuguu

SEQ ID NO: 3515401 - RNA, 14 nt, Human
aucuuauaauuuaa

SEQ ID NO: 3515402 - RNA, 17 nt, Human
aucuuauagcacuuuga

SEQ ID NO: 3515403 - RNA, 14 nt, Human
aucuuaucucagau

SEQ ID NO: 3515404 - RNA, 20 nt, Human
aucuuaucucagauauuugc

SEQ ID NO: 3515405 - RNA, 13 nt, Human
aucuuauuaaagu

SEQ ID NO: 3515406 - RNA, 19 nt, Human
aucuuauuaaaguuucaaa

SEQ ID NO: 3515407 - RNA, 20 nt, Human
aucuuauuaaaguuucaaaa

SEQ ID NO: 3515408 - RNA, 18 nt, Human
aucuuauucauuuucucu

SEQ ID NO: 3515409 - RNA, 23 nt, Human
aucuuauuuucauguauaugugu

SEQ ID NO: 3515410 - RNA, 19 nt, Human
aucuuauuuuucuaaacgu

SEQ ID NO: 3515411 - RNA, 17 nt, Human
aucuucaaaaguaaugc

SEQ ID NO: 3515412 - RNA, 13 nt, Human
aucuucaacaaau

SEQ ID NO: 3515413 - RNA, 22 nt, Human
aucuucaccagaggaaucacuc

SEQ ID NO: 3515414 - RNA, 23 nt, Human
aucuucacuucuaaaugcauauc

SEQ ID NO: 3515415 - RNA, 17 nt, Human
aucuucaguugucucug

SEQ ID NO: 3515416 - RNA, 18 nt, Human
aucuucaguugucucuga

SEQ ID NO: 3515417 - RNA, 22 nt, Human
aucuucaguuuuaucuuuaauc

SEQ ID NO: 3515418 - RNA, 17 nt, Human
aucuuccagaaguguga

SEQ ID NO: 3515419 - RNA, 18 nt, Human
aucuuccauauuuggaag

SEQ ID NO: 3515420 - RNA, 23 nt, Human
aucuucccagcagggccacuccc

SEQ ID NO: 3515421 - RNA, 15 nt, Human
aucuuccucugcuaa

SEQ ID NO: 3515422 - RNA, 18 nt, Human
aucuuccuggucgaaagu

SEQ ID NO: 3515423 - RNA, 12 nt, Human
aucuuccugugu

SEQ ID NO: 3515424 - RNA, 15 nt, Human
aucuuccuguguccu

SEQ ID NO: 3515425 - RNA, 15 nt, Human
aucuucguuaguaau

SEQ ID NO: 3515426 - RNA, 19 nt, Human
aucuucguuaguaaucugu

SEQ ID NO: 3515427 - RNA, 21 nt, Human
aucuucguuaguaaucuguau

SEQ ID NO: 3515428 - RNA, 22 nt, Human
aucuucguuaguaaucuguaua

SEQ ID NO: 3515429 - RNA, 15 nt, Human
aucuucguucuuguu

SEQ ID NO: 3515430 - RNA, 19 nt, Human
aucuucucaaguucuaaga

SEQ ID NO: 3515431 - RNA, 23 nt, Human
aucuucucaaguucuaagauucu

SEQ ID NO: 3515432 - RNA, 12 nt, Human
aucuucucagcu

SEQ ID NO: 3515433 - RNA, 16 nt, Human
aucuucucagcuccca

SEQ ID NO: 3515434 - RNA, 17 nt, Human
aucuucucuuugacaau

SEQ ID NO: 3515435 - RNA, 19 nt, Human
aucuucugaaaugaaacaa

SEQ ID NO: 3515436 - RNA, 18 nt, Human
aucuucugccuucucaug

SEQ ID NO: 3515437 - RNA, 19 nt, Human
aucuucuggacuauagcug

SEQ ID NO: 3515438 - RNA, 18 nt, Human
aucuucuggagucuccag

SEQ ID NO: 3515439 - RNA, 17 nt, Human
aucuugaaggaaaaauu

SEQ ID NO: 3515440 - RNA, 20 nt, Human
aucuugaauccuuccauucc

SEQ ID NO: 3515441 - RNA, 14 nt, Human
aucuugaauguggu

SEQ ID NO: 3515442 - RNA, 16 nt, Human
aucuugaauuguaacu

SEQ ID NO: 3515443 - RNA, 22 nt, Human
caauggaccggagagugggggu

SEQ ID NO: 3515444 - RNA, 23 nt, Human
caauggaguagaccccuggcugg

SEQ ID NO: 3515445 - RNA, 13 nt, Human
caauggauuugau

SEQ ID NO: 3515446 - RNA, 11 nt, Human
caauggcagcc

SEQ ID NO: 3515447 - RNA, 14 nt, Human
caauggcagccuug

SEQ ID NO: 3515448 - RNA, 21 nt, Human
caauggccuaaaacuggccug

SEQ ID NO: 3515449 - RNA, 16 nt, Human
caauggcgcagugccu

SEQ ID NO: 3515450 - RNA, 18 nt, Human
caauggcgcagugccucu

SEQ ID NO: 3515451 - RNA, 16 nt, Human
caauggcuaauuccca

SEQ ID NO: 3515452 - RNA, 18 nt, Human
caauggcuaauucccaga

SEQ ID NO: 3515453 - RNA, 19 nt, Human
caauggcuaauucccagag

SEQ ID NO: 3515454 - RNA, 22 nt, Human
caauggcuauauggcaagaaag

SEQ ID NO: 3515455 - RNA, 17 nt, Human
caauggcuauuaacaau

SEQ ID NO: 3515456 - RNA, 20 nt, Human
caauggcuauuaacaauuaa

SEQ ID NO: 3515457 - RNA, 17 nt, Human
caaugggaccuguggcu

SEQ ID NO: 3515458 - RNA, 19 nt, Human
caaugggagcugaggccac

SEQ ID NO: 3515459 - RNA, 15 nt, Human
caaugggcacuggga

SEQ ID NO: 3515460 - RNA, 19 nt, Human
caaugggcacugggaugag

SEQ ID NO: 3515461 - RNA, 23 nt, Human
caauggugaacugucauuacaga

SEQ ID NO: 3515462 - RNA, 17 nt, Human
caaugguguugcccuga

SEQ ID NO: 3515463 - RNA, 22 nt, Human
caaugguguugcccugagugga

SEQ ID NO: 3515464 - RNA, 17 nt, Human
caaugguuugcaaggaa

SEQ ID NO: 3515465 - RNA, 20 nt, Human
caaugguuugcaaggaagcc

SEQ ID NO: 3515466 - RNA, 21 nt, Human
caaugguuuuuaaauuuugua

SEQ ID NO: 3515467 - RNA, 20 nt, Human
caauguaaacacuuaacaga

SEQ ID NO: 3515468 - RNA, 13 nt, Human
caauguaauuauu

SEQ ID NO: 3515469 - RNA, 22 nt, Human
caauguaauuauuuauguaugg

SEQ ID NO: 3515470 - RNA, 22 nt, Human
caauguacuaggauacugcugc

SEQ ID NO: 3515471 - RNA, 17 nt, Human
caauguagaaagcuuug

SEQ ID NO: 3515472 - RNA, 23 nt, Human
caauguagucagaauuagcugcu

SEQ ID NO: 3515473 - RNA, 20 nt, Human
caauguauuuauuuaaaaga

SEQ ID NO: 3515474 - RNA, 23 nt, Human
caauguauuuauuuaaaagauuc

SEQ ID NO: 3515475 - RNA, 14 nt, Human
caaugucaguauuu

SEQ ID NO: 3515476 - RNA, 15 nt, Human
caaugucugagugaa

SEQ ID NO: 3515477 - RNA, 15 nt, Human
caaugucugcagccc

SEQ ID NO: 3515478 - RNA, 20 nt, Human
caaugucuggagaccaccag

SEQ ID NO: 3515479 - RNA, 21 nt, Human
caaugucuggagaccaccagg

SEQ ID NO: 3515480 - RNA, 20 nt, Human
caaugucugugcuagggaaa

SEQ ID NO: 3515481 - RNA, 11 nt, Human
caaugucuuga

SEQ ID NO: 3515482 - RNA, 21 nt, Human
caaugucuugaugcaugcacu

SEQ ID NO: 3515483 - RNA, 19 nt, Human
caaugucuugguacuugcu

SEQ ID NO: 3515484 - RNA, 18 nt, Human
caaugugaaaaauguguc

SEQ ID NO: 3515485 - RNA, 22 nt, Human
caaugugaaaagaaaaaugagc

SEQ ID NO: 3515486 - RNA, 14 nt, Human
caaugugaacuuua

SEQ ID NO: 3515487 - RNA, 22 nt, Human
caaugugacuuaaugccacuaa

SEQ ID NO: 3515488 - RNA, 20 nt, Human
caaugugaggggucccuagc

SEQ ID NO: 3515489 - RNA, 18 nt, Human
caaugugauauaaacagc

SEQ ID NO: 3515490 - RNA, 15 nt, Human
caaugugaucuaugu

SEQ ID NO: 3515491 - RNA, 22 nt, Human
caaugugaucuauguuucaucu

SEQ ID NO: 3515492 - RNA, 16 nt, Human
caaugugcuacugauu

SEQ ID NO: 3515493 - RNA, 23 nt, Human
caauguggcaaggaaaaacaggu

SEQ ID NO: 3515494 - RNA, 15 nt, Human
caauguguauaaaca

SEQ ID NO: 3515495 - RNA, 23 nt, Human
caauguguauaaacaagaaaaau

SEQ ID NO: 3515496 - RNA, 12 nt, Human
caauguguguau

SEQ ID NO: 3515497 - RNA, 14 nt, Human
caauguguguauau

SEQ ID NO: 3515498 - RNA, 15 nt, Human
caauguuaaauuaau

SEQ ID NO: 3515499 - RNA, 16 nt, Human
caauguuaaggaaacu

SEQ ID NO: 3515500 - RNA, 20 nt, Human
caauguuaaggaaacucuua

SEQ ID NO: 3515501 - RNA, 19 nt, Human
caauguuacuaucugcuuu

SEQ ID NO: 3515502 - RNA, 13 nt, Human
caauguucaucau

SEQ ID NO: 3515503 - RNA, 14 nt, Human
caauguucauccca

SEQ ID NO: 3515504 - RNA, 15 nt, Human
caauguucaucccau

SEQ ID NO: 3515505 - RNA, 20 nt, Human
caauguuuaugcaaggaagg

SEQ ID NO: 3515506 - RNA, 22 nt, Human
caauguuucaagaggagccccc

SEQ ID NO: 3515507 - RNA, 20 nt, Human
caauguuuuccuuugucauc

SEQ ID NO: 3515508 - RNA, 15 nt, Human
caauuaaacggauua
